United States Patent Application Publication US 2015/0141320 A1 - sequence listing, part 47

SEQ ID NO: 1848395 - DNA, 15 bp, Homo sapiens
aagatgcaacttcag

SEQ ID NO: 1848396 - DNA, 15 bp, Homo sapiens
agatgcaacttcagg

SEQ ID NO: 1848397 - DNA, 15 bp, Homo sapiens
gatgcaacttcagga

SEQ ID NO: 1848398 - DNA, 15 bp, Homo sapiens
atgcaacttcaggat

SEQ ID NO: 1848399 - DNA, 15 bp, Homo sapiens
tgcaacttcaggatc

SEQ ID NO: 1848400 - DNA, 15 bp, Homo sapiens
gcaacttcaggatct

SEQ ID NO: 1848401 - DNA, 15 bp, Homo sapiens
caacttcaggatctt

SEQ ID NO: 1848402 - DNA, 15 bp, Homo sapiens
aacttcaggatcttt

SEQ ID NO: 1848403 - DNA, 15 bp, Homo sapiens
acttcaggatctttt

SEQ ID NO: 1848404 - DNA, 15 bp, Homo sapiens
cttcaggatcttttt

SEQ ID NO: 1848405 - DNA, 15 bp, Homo sapiens
ttcaggatctttttt

SEQ ID NO: 1848406 - DNA, 15 bp, Homo sapiens
tcaggatctttttta

SEQ ID NO: 1848407 - DNA, 15 bp, Homo sapiens
caggatcttttttaa

SEQ ID NO: 1848408 - DNA, 15 bp, Homo sapiens
aggatcttttttaac

SEQ ID NO: 1848409 - DNA, 15 bp, Homo sapiens
ggatcttttttaaca

SEQ ID NO: 1848410 - DNA, 15 bp, Homo sapiens
gatcttttttaacac

SEQ ID NO: 1848411 - DNA, 15 bp, Homo sapiens
atcttttttaacaca

SEQ ID NO: 1848412 - DNA, 15 bp, Homo sapiens
tcttttttaacacag

SEQ ID NO: 1848413 - DNA, 15 bp, Homo sapiens
cttttttaacacagt

SEQ ID NO: 1848414 - DNA, 15 bp, Homo sapiens
ttttttaacacagtg

SEQ ID NO: 1848415 - DNA, 15 bp, Homo sapiens
tttttaacacagtgc

SEQ ID NO: 1848416 - DNA, 15 bp, Homo sapiens
ttttaacacagtgct

SEQ ID NO: 1848417 - DNA, 15 bp, Homo sapiens
tttaacacagtgctc

SEQ ID NO: 1848418 - DNA, 15 bp, Homo sapiens
ttaacacagtgctcc

SEQ ID NO: 1848419 - DNA, 15 bp, Homo sapiens
taacacagtgctcca

SEQ ID NO: 1848420 - DNA, 15 bp, Homo sapiens
aacacagtgctccag

SEQ ID NO: 1848421 - DNA, 15 bp, Homo sapiens
acacagtgctccagg

SEQ ID NO: 1848422 - DNA, 15 bp, Homo sapiens
cacagtgctccaggc

SEQ ID NO: 1848423 - DNA, 15 bp, Homo sapiens
acagtgctccaggca

SEQ ID NO: 1848424 - DNA, 15 bp, Homo sapiens
cagtgctccaggcag

SEQ ID NO: 1848425 - DNA, 15 bp, Homo sapiens
agtgctccaggcagc

SEQ ID NO: 1848426 - DNA, 15 bp, Homo sapiens
gtgctccaggcagcc

SEQ ID NO: 1848427 - DNA, 15 bp, Homo sapiens
tgctccaggcagcca

SEQ ID NO: 1848428 - DNA, 15 bp, Homo sapiens
gctccaggcagccac

SEQ ID NO: 1848429 - DNA, 15 bp, Homo sapiens
ctccaggcagccact

SEQ ID NO: 1848430 - DNA, 15 bp, Homo sapiens
tccaggcagccacta

SEQ ID NO: 1848431 - DNA, 15 bp, Homo sapiens
ccaggcagccactac

SEQ ID NO: 1848432 - DNA, 15 bp, Homo sapiens
caggcagccactacc

SEQ ID NO: 1848433 - DNA, 15 bp, Homo sapiens
aggcagccactacca

SEQ ID NO: 1848434 - DNA, 15 bp, Homo sapiens
ggcagccactaccac

SEQ ID NO: 1848435 - DNA, 15 bp, Homo sapiens
gcagccactaccaca

SEQ ID NO: 1848436 - DNA, 15 bp, Homo sapiens
cagccactaccacac

SEQ ID NO: 1848437 - DNA, 15 bp, Homo sapiens
agccactaccacaca

SEQ ID NO: 1848438 - DNA, 15 bp, Homo sapiens
gccactaccacacag

SEQ ID NO: 1848439 - DNA, 15 bp, Homo sapiens
ccactaccacacaga

SEQ ID NO: 1848440 - DNA, 15 bp, Homo sapiens
cactaccacacagat

SEQ ID NO: 1848441 - DNA, 15 bp, Homo sapiens
actaccacacagatg

SEQ ID NO: 1848442 - DNA, 15 bp, Homo sapiens
ctaccacacagatgg

SEQ ID NO: 1848443 - DNA, 15 bp, Homo sapiens
taccacacagatggg

SEQ ID NO: 1848444 - DNA, 15 bp, Homo sapiens
accacacagatgggg

SEQ ID NO: 1848445 - DNA, 15 bp, Homo sapiens
ccacacagatggggt

SEQ ID NO: 1848446 - DNA, 15 bp, Homo sapiens
cacacagatggggtt

SEQ ID NO: 1848447 - DNA, 15 bp, Homo sapiens
acacagatggggttc

SEQ ID NO: 1848448 - DNA, 15 bp, Homo sapiens
cacagatggggttca

SEQ ID NO: 1848449 - DNA, 15 bp, Homo sapiens
acagatggggttcat

SEQ ID NO: 1848450 - DNA, 15 bp, Homo sapiens
cagatggggttcatt

SEQ ID NO: 1848451 - DNA, 15 bp, Homo sapiens
agatggggttcattt

SEQ ID NO: 1848452 - DNA, 15 bp, Homo sapiens
gatggggttcatttg

SEQ ID NO: 1848453 - DNA, 15 bp, Homo sapiens
atggggttcatttgc

SEQ ID NO: 1848454 - DNA, 15 bp, Homo sapiens
tggggttcatttgct

SEQ ID NO: 1848455 - DNA, 15 bp, Homo sapiens
ggggttcatttgctc

SEQ ID NO: 1848456 - DNA, 15 bp, Homo sapiens
gggttcatttgctcc

SEQ ID NO: 1848457 - DNA, 15 bp, Homo sapiens
ggttcatttgctcct

SEQ ID NO: 1848458 - DNA, 15 bp, Homo sapiens
gttcatttgctcctg

SEQ ID NO: 1848459 - DNA, 15 bp, Homo sapiens
ttcatttgctcctgg

SEQ ID NO: 1848460 - DNA, 15 bp, Homo sapiens
tcatttgctcctgga

SEQ ID NO: 1848461 - DNA, 15 bp, Homo sapiens
catttgctcctggaa

SEQ ID NO: 1848462 - DNA, 15 bp, Homo sapiens
atttgctcctggaat

SEQ ID NO: 1848463 - DNA, 15 bp, Homo sapiens
tttgctcctggaata

SEQ ID NO: 1848464 - DNA, 15 bp, Homo sapiens
ttgctcctggaataa

SEQ ID NO: 1848465 - DNA, 15 bp, Homo sapiens
tgctcctggaataaa

SEQ ID NO: 1848466 - DNA, 15 bp, Homo sapiens
gctcctggaataaaa

SEQ ID NO: 1848467 - DNA, 15 bp, Homo sapiens
ctcctggaataaaac

SEQ ID NO: 1848468 - DNA, 15 bp, Homo sapiens
tcctggaataaaacc

SEQ ID NO: 1848469 - DNA, 15 bp, Homo sapiens
cctggaataaaacct

SEQ ID NO: 1848470 - DNA, 15 bp, Homo sapiens
ctggaataaaacctt

SEQ ID NO: 1848471 - DNA, 15 bp, Homo sapiens
tggaataaaaccttg

SEQ ID NO: 1848472 - DNA, 15 bp, Homo sapiens
ggaataaaaccttgt

SEQ ID NO: 1848473 - DNA, 15 bp, Homo sapiens
gaataaaaccttgtc

SEQ ID NO: 1848474 - DNA, 15 bp, Homo sapiens
aataaaaccttgtca

SEQ ID NO: 1848475 - DNA, 15 bp, Homo sapiens
ataaaaccttgtcat

SEQ ID NO: 1848476 - DNA, 15 bp, Homo sapiens
taaaaccttgtcatc

SEQ ID NO: 1848477 - DNA, 15 bp, Homo sapiens
aaaaccttgtcatcc

SEQ ID NO: 1848478 - DNA, 15 bp, Homo sapiens
aaaccttgtcatccc

SEQ ID NO: 1848479 - DNA, 15 bp, Homo sapiens
aaccttgtcatccct

SEQ ID NO: 1848480 - DNA, 15 bp, Homo sapiens
accttgtcatcccta

SEQ ID NO: 1848481 - DNA, 15 bp, Homo sapiens
ccttgtcatccctag

SEQ ID NO: 1848482 - DNA, 15 bp, Homo sapiens
cttgtcatccctaga

SEQ ID NO: 1848483 - DNA, 15 bp, Homo sapiens
ttgtcatccctagac

SEQ ID NO: 1848484 - DNA, 15 bp, Homo sapiens
tgtcatccctagaca

SEQ ID NO: 1848485 - DNA, 15 bp, Homo sapiens
gtcatccctagacat

SEQ ID NO: 1848486 - DNA, 15 bp, Homo sapiens
tcatccctagacata

SEQ ID NO: 1848487 - DNA, 15 bp, Homo sapiens
catccctagacatag

SEQ ID NO: 1848488 - DNA, 15 bp, Homo sapiens
atccctagacataga

SEQ ID NO: 1848489 - DNA, 15 bp, Homo sapiens
tccctagacatagag

SEQ ID NO: 1848490 - DNA, 15 bp, Homo sapiens
ccctagacatagagg

SEQ ID NO: 1848491 - DNA, 15 bp, Homo sapiens
cctagacatagaggc

SEQ ID NO: 1848492 - DNA, 15 bp, Homo sapiens
ctagacatagaggca

SEQ ID NO: 1848493 - DNA, 15 bp, Homo sapiens
tagacatagaggcag

SEQ ID NO: 1848494 - DNA, 15 bp, Homo sapiens
agacatagaggcagt

SEQ ID NO: 1848495 - DNA, 15 bp, Homo sapiens
gacatagaggcagtc

SEQ ID NO: 1848496 - DNA, 15 bp, Homo sapiens
acatagaggcagtct

SEQ ID NO: 1848497 - DNA, 15 bp, Homo sapiens
catagaggcagtctt

SEQ ID NO: 1848498 - DNA, 15 bp, Homo sapiens
atagaggcagtcttt

SEQ ID NO: 1848499 - DNA, 15 bp, Homo sapiens
tagaggcagtctttc

SEQ ID NO: 1848500 - DNA, 15 bp, Homo sapiens
agaggcagtctttcc

SEQ ID NO: 1848501 - DNA, 15 bp, Homo sapiens
gaggcagtctttccc

SEQ ID NO: 1848502 - DNA, 15 bp, Homo sapiens
aggcagtctttcccc

SEQ ID NO: 1848503 - DNA, 15 bp, Homo sapiens
ggcagtctttcccct

SEQ ID NO: 1848504 - DNA, 15 bp, Homo sapiens
gcagtctttcccctg

SEQ ID NO: 1848505 - DNA, 15 bp, Homo sapiens
cagtctttcccctgt

SEQ ID NO: 1848506 - DNA, 15 bp, Homo sapiens
agtctttcccctgtg

SEQ ID NO: 1848507 - DNA, 15 bp, Homo sapiens
gtctttcccctgtga

SEQ ID NO: 1848508 - DNA, 15 bp, Homo sapiens
tctttcccctgtgag

SEQ ID NO: 1848509 - DNA, 15 bp, Homo sapiens
ctttcccctgtgagc

SEQ ID NO: 1848510 - DNA, 15 bp, Homo sapiens
tttcccctgtgagcc

SEQ ID NO: 1848511 - DNA, 15 bp, Homo sapiens
ttcccctgtgagcca

SEQ ID NO: 1848512 - DNA, 15 bp, Homo sapiens
tcccctgtgagccac

SEQ ID NO: 1848513 - DNA, 15 bp, Homo sapiens
cccctgtgagccaca

SEQ ID NO: 1848514 - DNA, 15 bp, Homo sapiens
ccctgtgagccacag

SEQ ID NO: 1848515 - DNA, 15 bp, Homo sapiens
cctgtgagccacagc

SEQ ID NO: 1848516 - DNA, 15 bp, Homo sapiens
ctgtgagccacagca

SEQ ID NO: 1848517 - DNA, 15 bp, Homo sapiens
tgtgagccacagcat

SEQ ID NO: 1848518 - DNA, 15 bp, Homo sapiens
gtgagccacagcata

SEQ ID NO: 1848519 - DNA, 15 bp, Homo sapiens
tgagccacagcatat

SEQ ID NO: 1848520 - DNA, 15 bp, Homo sapiens
gagccacagcatatg

SEQ ID NO: 1848521 - DNA, 15 bp, Homo sapiens
agccacagcatatga

SEQ ID NO: 1848522 - DNA, 15 bp, Homo sapiens
gccacagcatatgag

SEQ ID NO: 1848523 - DNA, 15 bp, Homo sapiens
ccacagcatatgaga

SEQ ID NO: 1848524 - DNA, 15 bp, Homo sapiens
cacagcatatgagaa

SEQ ID NO: 1848525 - DNA, 15 bp, Homo sapiens
acagcatatgagaaa

SEQ ID NO: 1848526 - DNA, 15 bp, Homo sapiens
cagcatatgagaaaa

SEQ ID NO: 1848527 - DNA, 15 bp, Homo sapiens
agcatatgagaaaat

SEQ ID NO: 1848528 - DNA, 15 bp, Homo sapiens
gcatatgagaaaatg

SEQ ID NO: 1848529 - DNA, 15 bp, Homo sapiens
catatgagaaaatgt

SEQ ID NO: 1848530 - DNA, 15 bp, Homo sapiens
atatgagaaaatgtc

SEQ ID NO: 1848531 - DNA, 15 bp, Homo sapiens
tatgagaaaatgtca

SEQ ID NO: 1848532 - DNA, 15 bp, Homo sapiens
atgagaaaatgtcac

SEQ ID NO: 1848533 - DNA, 15 bp, Homo sapiens
tgagaaaatgtcacc

SEQ ID NO: 1848534 - DNA, 15 bp, Homo sapiens
gagaaaatgtcacca

SEQ ID NO: 1848535 - DNA, 15 bp, Homo sapiens
agaaaatgtcaccat

SEQ ID NO: 1848536 - DNA, 15 bp, Homo sapiens
gaaaatgtcaccatc

SEQ ID NO: 1848537 - DNA, 15 bp, Homo sapiens
aaaatgtcaccatct

SEQ ID NO: 1848538 - DNA, 15 bp, Homo sapiens
aaatgtcaccatcta

SEQ ID NO: 1848539 - DNA, 15 bp, Homo sapiens
aatgtcaccatctag

SEQ ID NO: 1848540 - DNA, 15 bp, Homo sapiens
atgtcaccatctaga

SEQ ID NO: 1848541 - DNA, 15 bp, Homo sapiens
tgtcaccatctagaa

SEQ ID NO: 1848542 - DNA, 15 bp, Homo sapiens
gtcaccatctagaag

SEQ ID NO: 1848543 - DNA, 15 bp, Homo sapiens
tcaccatctagaagg

SEQ ID NO: 1848544 - DNA, 15 bp, Homo sapiens
caccatctagaaggt

SEQ ID NO: 1848545 - DNA, 15 bp, Homo sapiens
accatctagaaggtt

SEQ ID NO: 1848546 - DNA, 15 bp, Homo sapiens
ccatctagaaggttc

SEQ ID NO: 1848547 - DNA, 15 bp, Homo sapiens
catctagaaggttcc

SEQ ID NO: 1848548 - DNA, 15 bp, Homo sapiens
atctagaaggttcct

SEQ ID NO: 1848549 - DNA, 15 bp, Homo sapiens
tctagaaggttcctt

SEQ ID NO: 1848550 - DNA, 15 bp, Homo sapiens
ctagaaggttccttg

SEQ ID NO: 1848551 - DNA, 15 bp, Homo sapiens
tagaaggttccttgg

SEQ ID NO: 1848552 - DNA, 15 bp, Homo sapiens
agaaggttccttggt

SEQ ID NO: 1848553 - DNA, 15 bp, Homo sapiens
gaaggttccttggta

SEQ ID NO: 1848554 - DNA, 15 bp, Homo sapiens
aaggttccttggtaa

SEQ ID NO: 1848555 - DNA, 15 bp, Homo sapiens
aggttccttggtaag

SEQ ID NO: 1848556 - DNA, 15 bp, Homo sapiens
ggttccttggtaagc

SEQ ID NO: 1848557 - DNA, 15 bp, Homo sapiens
gttccttggtaagca

SEQ ID NO: 1848558 - DNA, 15 bp, Homo sapiens
ttccttggtaagcac

SEQ ID NO: 1848559 - DNA, 15 bp, Homo sapiens
tccttggtaagcaca

SEQ ID NO: 1848560 - DNA, 15 bp, Homo sapiens
ccttggtaagcacag

SEQ ID NO: 1848561 - DNA, 15 bp, Homo sapiens
cttggtaagcacaga

SEQ ID NO: 1848562 - DNA, 15 bp, Homo sapiens
ttggtaagcacagac

SEQ ID NO: 1848563 - DNA, 15 bp, Homo sapiens
tggtaagcacagaca

SEQ ID NO: 1848564 - DNA, 15 bp, Homo sapiens
ggtaagcacagacat

SEQ ID NO: 1848565 - DNA, 15 bp, Homo sapiens
gtaagcacagacata

SEQ ID NO: 1848566 - DNA, 15 bp, Homo sapiens
taagcacagacatat

SEQ ID NO: 1848567 - DNA, 15 bp, Homo sapiens
aagcacagacatatg

SEQ ID NO: 1848568 - DNA, 15 bp, Homo sapiens
agcacagacatatgg

SEQ ID NO: 1848569 - DNA, 15 bp, Homo sapiens
gcacagacatatggt

SEQ ID NO: 1848570 - DNA, 15 bp, Homo sapiens
cacagacatatggtg

SEQ ID NO: 1848571 - DNA, 15 bp, Homo sapiens
acagacatatggtgg

SEQ ID NO: 1848572 - DNA, 15 bp, Homo sapiens
cagacatatggtggc

SEQ ID NO: 1848573 - DNA, 15 bp, Homo sapiens
agacatatggtggcc

SEQ ID NO: 1848574 - DNA, 15 bp, Homo sapiens
gacatatggtggcct

SEQ ID NO: 1848575 - DNA, 15 bp, Homo sapiens
acatatggtggcctg

SEQ ID NO: 1848576 - DNA, 15 bp, Homo sapiens
catatggtggcctga

SEQ ID NO: 1848577 - DNA, 15 bp, Homo sapiens
atatggtggcctgat

SEQ ID NO: 1848578 - DNA, 15 bp, Homo sapiens
tatggtggcctgata

SEQ ID NO: 1848579 - DNA, 15 bp, Homo sapiens
atggtggcctgataa

SEQ ID NO: 1848580 - DNA, 15 bp, Homo sapiens
tggtggcctgataaa

SEQ ID NO: 1848581 - DNA, 15 bp, Homo sapiens
ggtggcctgataaat

SEQ ID NO: 1848582 - DNA, 15 bp, Homo sapiens
gtggcctgataaatt

SEQ ID NO: 1848583 - DNA, 15 bp, Homo sapiens
tggcctgataaattg

SEQ ID NO: 1848584 - DNA, 15 bp, Homo sapiens
ggcctgataaattgc

SEQ ID NO: 1848585 - DNA, 15 bp, Homo sapiens
gcctgataaattgcc

SEQ ID NO: 1848586 - DNA, 15 bp, Homo sapiens
cctgataaattgcct

SEQ ID NO: 1848587 - DNA, 15 bp, Homo sapiens
ctgataaattgcctt

SEQ ID NO: 1848588 - DNA, 15 bp, Homo sapiens
tgataaattgccttt

SEQ ID NO: 1848589 - DNA, 15 bp, Homo sapiens
gataaattgcctttc

SEQ ID NO: 1848590 - DNA, 15 bp, Homo sapiens
ataaattgcctttct

SEQ ID NO: 1848591 - DNA, 15 bp, Homo sapiens
taaattgcctttctc

SEQ ID NO: 1848592 - DNA, 15 bp, Homo sapiens
aaattgcctttctct

SEQ ID NO: 1848593 - DNA, 15 bp, Homo sapiens
aattgcctttctcta

SEQ ID NO: 1848594 - DNA, 15 bp, Homo sapiens
attgcctttctctac

SEQ ID NO: 1848595 - DNA, 15 bp, Homo sapiens
ttgcctttctctacc

SEQ ID NO: 1848596 - DNA, 15 bp, Homo sapiens
tgcctttctctaccc

SEQ ID NO: 1848597 - DNA, 15 bp, Homo sapiens
gcctttctctaccct

SEQ ID NO: 1848598 - DNA, 15 bp, Homo sapiens
cctttctctaccctt

SEQ ID NO: 1848599 - DNA, 15 bp, Homo sapiens
ctttctctacccttg

SEQ ID NO: 1848600 - DNA, 15 bp, Homo sapiens
tttctctacccttgg

SEQ ID NO: 1848601 - DNA, 15 bp, Homo sapiens
ttctctacccttggg

SEQ ID NO: 1848602 - DNA, 15 bp, Homo sapiens
tctctacccttggga

SEQ ID NO: 1848603 - DNA, 15 bp, Homo sapiens
ctctacccttgggat

SEQ ID NO: 1848604 - DNA, 15 bp, Homo sapiens
tctacccttgggatc

SEQ ID NO: 1848605 - DNA, 15 bp, Homo sapiens
ctacccttgggatct

SEQ ID NO: 1848606 - DNA, 15 bp, Homo sapiens
tacccttgggatctt

SEQ ID NO: 1848607 - DNA, 15 bp, Homo sapiens
acccttgggatcttt

SEQ ID NO: 1848608 - DNA, 15 bp, Homo sapiens
cccttgggatctttg

SEQ ID NO: 1848609 - DNA, 15 bp, Homo sapiens
ccttgggatctttgt

SEQ ID NO: 1848610 - DNA, 15 bp, Homo sapiens
cttgggatctttgtc

SEQ ID NO: 1848611 - DNA, 15 bp, Homo sapiens
ttgggatctttgtcc

SEQ ID NO: 1848612 - DNA, 15 bp, Homo sapiens
tgggatctttgtcca

SEQ ID NO: 1848613 - DNA, 15 bp, Homo sapiens
gggatctttgtccaa

SEQ ID NO: 1848614 - DNA, 15 bp, Homo sapiens
ggatctttgtccaag

SEQ ID NO: 1848615 - DNA, 15 bp, Homo sapiens
gatctttgtccaagg

SEQ ID NO: 1848616 - DNA, 15 bp, Homo sapiens
atctttgtccaagga

SEQ ID NO: 1848617 - DNA, 15 bp, Homo sapiens
tctttgtccaaggaa

SEQ ID NO: 1848618 - DNA, 15 bp, Homo sapiens
ctttgtccaaggaac

SEQ ID NO: 1848619 - DNA, 15 bp, Homo sapiens
tttgtccaaggaact

SEQ ID NO: 1848620 - DNA, 15 bp, Homo sapiens
ttgtccaaggaacta

SEQ ID NO: 1848621 - DNA, 15 bp, Homo sapiens
tgtccaaggaactag

SEQ ID NO: 1848622 - DNA, 15 bp, Homo sapiens
gtccaaggaactagg

SEQ ID NO: 1848623 - DNA, 15 bp, Homo sapiens
tccaaggaactaggt

SEQ ID NO: 1848624 - DNA, 15 bp, Homo sapiens
ccaaggaactaggtg

SEQ ID NO: 1848625 - DNA, 15 bp, Homo sapiens
caaggaactaggtgc

SEQ ID NO: 1848626 - DNA, 15 bp, Homo sapiens
aaggaactaggtgcc

SEQ ID NO: 1848627 - DNA, 15 bp, Homo sapiens
aggaactaggtgcca

SEQ ID NO: 1848628 - DNA, 15 bp, Homo sapiens
ggaactaggtgccat

SEQ ID NO: 1848629 - DNA, 15 bp, Homo sapiens
gaactaggtgccatc

SEQ ID NO: 1848630 - DNA, 15 bp, Homo sapiens
aactaggtgccatct

SEQ ID NO: 1848631 - DNA, 15 bp, Homo sapiens
actaggtgccatctt

SEQ ID NO: 1848632 - DNA, 15 bp, Homo sapiens
ctaggtgccatcttg

SEQ ID NO: 1848633 - DNA, 15 bp, Homo sapiens
taggtgccatcttga

SEQ ID NO: 1848634 - DNA, 15 bp, Homo sapiens
aggtgccatcttgag

SEQ ID NO: 1848635 - DNA, 15 bp, Homo sapiens
ggtgccatcttgagt

SEQ ID NO: 1848636 - DNA, 15 bp, Homo sapiens
gtgccatcttgagtc

SEQ ID NO: 1848637 - DNA, 15 bp, Homo sapiens
tgccatcttgagtca

SEQ ID NO: 1848638 - DNA, 15 bp, Homo sapiens
gccatcttgagtcag

SEQ ID NO: 1848639 - DNA, 15 bp, Homo sapiens
ccatcttgagtcaga

SEQ ID NO: 1848640 - DNA, 15 bp, Homo sapiens
catcttgagtcagac

SEQ ID NO: 1848641 - DNA, 15 bp, Homo sapiens
atcttgagtcagact

SEQ ID NO: 1848642 - DNA, 15 bp, Homo sapiens
tcttgagtcagactg

SEQ ID NO: 1848643 - DNA, 15 bp, Homo sapiens
cttgagtcagactgg

SEQ ID NO: 1848644 - DNA, 15 bp, Homo sapiens
ttgagtcagactggc

SEQ ID NO: 1848645 - DNA, 15 bp, Homo sapiens
tgagtcagactggca

SEQ ID NO: 1848646 - DNA, 15 bp, Homo sapiens
gagtcagactggcaa

SEQ ID NO: 1848647 - DNA, 15 bp, Homo sapiens
agtcagactggcaag

SEQ ID NO: 1848648 - DNA, 15 bp, Homo sapiens
gtcagactggcaagt

SEQ ID NO: 1848649 - DNA, 15 bp, Homo sapiens
tcagactggcaagtg

SEQ ID NO: 1848650 - DNA, 15 bp, Homo sapiens
cagactggcaagtgt

SEQ ID NO: 1848651 - DNA, 15 bp, Homo sapiens
agactggcaagtgtg

SEQ ID NO: 1848652 - DNA, 15 bp, Homo sapiens
gactggcaagtgtgg

SEQ ID NO: 1848653 - DNA, 15 bp, Homo sapiens
actggcaagtgtggg

SEQ ID NO: 1848654 - DNA, 15 bp, Homo sapiens
ctggcaagtgtggga

SEQ ID NO: 1848655 - DNA, 15 bp, Homo sapiens
tggcaagtgtgggaa

SEQ ID NO: 1848656 - DNA, 15 bp, Homo sapiens
ggcaagtgtgggaaa

SEQ ID NO: 1848657 - DNA, 15 bp, Homo sapiens
gcaagtgtgggaaaa

SEQ ID NO: 1848658 - DNA, 15 bp, Homo sapiens
caagtgtgggaaaat

SEQ ID NO: 1848659 - DNA, 15 bp, Homo sapiens
aagtgtgggaaaata

SEQ ID NO: 1848660 - DNA, 15 bp, Homo sapiens
agtgtgggaaaatag

SEQ ID NO: 1848661 - DNA, 15 bp, Homo sapiens
gtgtgggaaaataga

SEQ ID NO: 1848662 - DNA, 15 bp, Homo sapiens
tgtgggaaaatagaa

SEQ ID NO: 1848663 - DNA, 15 bp, Homo sapiens
gtgggaaaatagaat

SEQ ID NO: 1848664 - DNA, 15 bp, Homo sapiens
tgggaaaatagaatt

SEQ ID NO: 1848665 - DNA, 15 bp, Homo sapiens
gggaaaatagaattc

SEQ ID NO: 1848666 - DNA, 15 bp, Homo sapiens
ggaaaatagaattct

SEQ ID NO: 1848667 - DNA, 15 bp, Homo sapiens
gaaaatagaattctt

SEQ ID NO: 1848668 - DNA, 15 bp, Homo sapiens
aaaatagaattctta

SEQ ID NO: 1848669 - DNA, 15 bp, Homo sapiens
aaatagaattcttat

SEQ ID NO: 1848670 - DNA, 15 bp, Homo sapiens
aatagaattcttatt

SEQ ID NO: 1848671 - DNA, 15 bp, Homo sapiens
atagaattcttattc

SEQ ID NO: 1848672 - DNA, 15 bp, Homo sapiens
tagaattcttattcc

SEQ ID NO: 1848673 - DNA, 15 bp, Homo sapiens
agaattcttattcct

SEQ ID NO: 1848674 - DNA, 15 bp, Homo sapiens
gaattcttattccta

SEQ ID NO: 1848675 - DNA, 15 bp, Homo sapiens
aattcttattcctat

SEQ ID NO: 1848676 - DNA, 15 bp, Homo sapiens
attcttattcctatc

SEQ ID NO: 1848677 - DNA, 15 bp, Homo sapiens
ttcttattcctatca

SEQ ID NO: 1848678 - DNA, 15 bp, Homo sapiens
tcttattcctatcag

SEQ ID NO: 1848679 - DNA, 15 bp, Homo sapiens
cttattcctatcagc

SEQ ID NO: 1848680 - DNA, 15 bp, Homo sapiens
ttattcctatcagcc

SEQ ID NO: 1848681 - DNA, 15 bp, Homo sapiens
tattcctatcagcca

SEQ ID NO: 1848682 - DNA, 15 bp, Homo sapiens
attcctatcagccaa

SEQ ID NO: 1848683 - DNA, 15 bp, Homo sapiens
ttcctatcagccaac

SEQ ID NO: 1848684 - DNA, 15 bp, Homo sapiens
tcctatcagccaaca

SEQ ID NO: 1848685 - DNA, 15 bp, Homo sapiens
cctatcagccaacag

SEQ ID NO: 1848686 - DNA, 15 bp, Homo sapiens
ctatcagccaacaga

SEQ ID NO: 1848687 - DNA, 15 bp, Homo sapiens
tatcagccaacagaa

SEQ ID NO: 1848688 - DNA, 15 bp, Homo sapiens
atcagccaacagaat

SEQ ID NO: 1848689 - DNA, 15 bp, Homo sapiens
tcagccaacagaatc

SEQ ID NO: 1848690 - DNA, 15 bp, Homo sapiens
cagccaacagaatct

SEQ ID NO: 1848691 - DNA, 15 bp, Homo sapiens
agccaacagaatctt

SEQ ID NO: 1848692 - DNA, 15 bp, Homo sapiens
gccaacagaatcttc

SEQ ID NO: 1848693 - DNA, 15 bp, Homo sapiens
ccaacagaatcttca

SEQ ID NO: 1848694 - DNA, 15 bp, Homo sapiens
caacagaatcttcag

SEQ ID NO: 1848695 - DNA, 15 bp, Homo sapiens
aacagaatcttcagt

SEQ ID NO: 1848696 - DNA, 15 bp, Homo sapiens
acagaatcttcagtg

SEQ ID NO: 1848697 - DNA, 15 bp, Homo sapiens
cagaatcttcagtgt

SEQ ID NO: 1848698 - DNA, 15 bp, Homo sapiens
agaatcttcagtgtt

SEQ ID NO: 1848699 - DNA, 15 bp, Homo sapiens
gaatcttcagtgttt

SEQ ID NO: 1848700 - DNA, 15 bp, Homo sapiens
aatcttcagtgtttc

SEQ ID NO: 1848701 - DNA, 15 bp, Homo sapiens
atcttcagtgtttcg

SEQ ID NO: 1848702 - DNA, 15 bp, Homo sapiens
tcttcagtgtttcgt

SEQ ID NO: 1848703 - DNA, 15 bp, Homo sapiens
cttcagtgtttcgtg

SEQ ID NO: 1848704 - DNA, 15 bp, Homo sapiens
ttcagtgtttcgtgt

SEQ ID NO: 1848705 - DNA, 15 bp, Homo sapiens
tcagtgtttcgtgtt

SEQ ID NO: 1848706 - DNA, 15 bp, Homo sapiens
cagtgtttcgtgtta

SEQ ID NO: 1848707 - DNA, 15 bp, Homo sapiens
agtgtttcgtgttat

SEQ ID NO: 1848708 - DNA, 15 bp, Homo sapiens
gtgtttcgtgttatg

SEQ ID NO: 1848709 - DNA, 15 bp, Homo sapiens
tgtttcgtgttatga

SEQ ID NO: 1848710 - DNA, 15 bp, Homo sapiens
gtttcgtgttatgat

SEQ ID NO: 1848711 - DNA, 15 bp, Homo sapiens
tttcgtgttatgata

SEQ ID NO: 1848712 - DNA, 15 bp, Homo sapiens
ttcgtgttatgataa

SEQ ID NO: 1848713 - DNA, 15 bp, Homo sapiens
tcgtgttatgataag

SEQ ID NO: 1848714 - DNA, 15 bp, Homo sapiens
cgtgttatgataagg

SEQ ID NO: 1848715 - DNA, 15 bp, Homo sapiens
gtgttatgataagga

SEQ ID NO: 1848716 - DNA, 15 bp, Homo sapiens
tgttatgataaggag

SEQ ID NO: 1848717 - DNA, 15 bp, Homo sapiens
gttatgataaggagt

SEQ ID NO: 1848718 - DNA, 15 bp, Homo sapiens
ttatgataaggagtt

SEQ ID NO: 1848719 - DNA, 15 bp, Homo sapiens
tatgataaggagtta

SEQ ID NO: 1848720 - DNA, 15 bp, Homo sapiens
atgataaggagttac

SEQ ID NO: 1848721 - DNA, 15 bp, Homo sapiens
tgataaggagttaca

SEQ ID NO: 1848722 - DNA, 15 bp, Homo sapiens
gataaggagttacac

SEQ ID NO: 1848723 - DNA, 15 bp, Homo sapiens
ataaggagttacact

SEQ ID NO: 1848724 - DNA, 15 bp, Homo sapiens
taaggagttacactg

SEQ ID NO: 1848725 - DNA, 15 bp, Homo sapiens
aaggagttacactgc

SEQ ID NO: 1848726 - DNA, 15 bp, Homo sapiens
aggagttacactgca

SEQ ID NO: 1848727 - DNA, 15 bp, Homo sapiens
ggagttacactgcag

SEQ ID NO: 1848728 - DNA, 15 bp, Homo sapiens
gagttacactgcaga

SEQ ID NO: 1848729 - DNA, 15 bp, Homo sapiens
agttacactgcagac

SEQ ID NO: 1848730 - DNA, 15 bp, Homo sapiens
gttacactgcagaca

SEQ ID NO: 1848731 - DNA, 15 bp, Homo sapiens
ttacactgcagacat

SEQ ID NO: 1848732 - DNA, 15 bp, Homo sapiens
tacactgcagacatt

SEQ ID NO: 1848733 - DNA, 15 bp, Homo sapiens
acactgcagacattt

SEQ ID NO: 1848734 - DNA, 15 bp, Homo sapiens
cactgcagacatttc

SEQ ID NO: 1848735 - DNA, 15 bp, Homo sapiens
actgcagacatttct

SEQ ID NO: 1848736 - DNA, 15 bp, Homo sapiens
ctgcagacatttctc

SEQ ID NO: 1848737 - DNA, 15 bp, Homo sapiens
tgcagacatttctca

SEQ ID NO: 1848738 - DNA, 15 bp, Homo sapiens
gcagacatttctcag

SEQ ID NO: 1848739 - DNA, 15 bp, Homo sapiens
cagacatttctcaga

SEQ ID NO: 1848740 - DNA, 15 bp, Homo sapiens
agacatttctcagag

SEQ ID NO: 1848741 - DNA, 15 bp, Homo sapiens
gacatttctcagagg

SEQ ID NO: 1848742 - DNA, 15 bp, Homo sapiens
acatttctcagaggg

SEQ ID NO: 1848743 - DNA, 15 bp, Homo sapiens
catttctcagagggt

SEQ ID NO: 1848744 - DNA, 15 bp, Homo sapiens
atttctcagagggtc

SEQ ID NO: 1848745 - DNA, 15 bp, Homo sapiens
tttctcagagggtct

SEQ ID NO: 1848746 - DNA, 15 bp, Homo sapiens
ttctcagagggtctg

SEQ ID NO: 1848747 - DNA, 15 bp, Homo sapiens
tctcagagggtctgt

SEQ ID NO: 1848748 - DNA, 15 bp, Homo sapiens
ctcagagggtctgtt

SEQ ID NO: 1848749 - DNA, 15 bp, Homo sapiens
tcagagggtctgttc

SEQ ID NO: 1848750 - DNA, 15 bp, Homo sapiens
cagagggtctgttcc

SEQ ID NO: 1848751 - DNA, 15 bp, Homo sapiens
agagggtctgttcct

SEQ ID NO: 1848752 - DNA, 15 bp, Homo sapiens
gagggtctgttcctg

SEQ ID NO: 1848753 - DNA, 15 bp, Homo sapiens
agggtctgttcctgt

SEQ ID NO: 1848754 - DNA, 15 bp, Homo sapiens
gggtctgttcctgtg

SEQ ID NO: 1848755 - DNA, 15 bp, Homo sapiens
ggtctgttcctgtgt

SEQ ID NO: 1848756 - DNA, 15 bp, Homo sapiens
gtctgttcctgtgtt

SEQ ID NO: 1848757 - DNA, 15 bp, Homo sapiens
tctgttcctgtgttt

SEQ ID NO: 1848758 - DNA, 15 bp, Homo sapiens
ctgttcctgtgtttt

SEQ ID NO: 1848759 - DNA, 15 bp, Homo sapiens
tgttcctgtgtttta

SEQ ID NO: 1848760 - DNA, 15 bp, Homo sapiens
gttcctgtgttttat

SEQ ID NO: 1848761 - DNA, 15 bp, Homo sapiens
ttcctgtgttttatc

SEQ ID NO: 1848762 - DNA, 15 bp, Homo sapiens
tcctgtgttttatca

SEQ ID NO: 1848763 - DNA, 15 bp, Homo sapiens
cctgtgttttatcat

SEQ ID NO: 1848764 - DNA, 15 bp, Homo sapiens
ctgtgttttatcatg

SEQ ID NO: 1848765 - DNA, 15 bp, Homo sapiens
tgtgttttatcatgt

SEQ ID NO: 1848766 - DNA, 15 bp, Homo sapiens
gtgttttatcatgtt

SEQ ID NO: 1848767 - DNA, 15 bp, Homo sapiens
tgttttatcatgttt

SEQ ID NO: 1848768 - DNA, 15 bp, Homo sapiens
gttttatcatgtttt

SEQ ID NO: 1848769 - DNA, 15 bp, Homo sapiens
ttttatcatgttttc

SEQ ID NO: 1848770 - DNA, 15 bp, Homo sapiens
tttatcatgttttcc

SEQ ID NO: 1848771 - DNA, 15 bp, Homo sapiens
ttatcatgttttcca

SEQ ID NO: 1848772 - DNA, 15 bp, Homo sapiens
tatcatgttttccat

SEQ ID NO: 1848773 - DNA, 15 bp, Homo sapiens
atcatgttttccatg

SEQ ID NO: 1848774 - DNA, 15 bp, Homo sapiens
tcatgttttccatgg

SEQ ID NO: 1848775 - DNA, 15 bp, Homo sapiens
catgttttccatggc

SEQ ID NO: 1848776 - DNA, 15 bp, Homo sapiens
atgttttccatggca

SEQ ID NO: 1848777 - DNA, 15 bp, Homo sapiens
tgttttccatggcaa

SEQ ID NO: 1848778 - DNA, 15 bp, Homo sapiens
gttttccatggcaac

SEQ ID NO: 1848779 - DNA, 15 bp, Homo sapiens
ttttccatggcaacc

SEQ ID NO: 1848780 - DNA, 15 bp, Homo sapiens
tttccatggcaaccc

SEQ ID NO: 1848781 - DNA, 15 bp, Homo sapiens
ttccatggcaacccc

SEQ ID NO: 1848782 - DNA, 15 bp, Homo sapiens
tccatggcaacccct

SEQ ID NO: 1848783 - DNA, 15 bp, Homo sapiens
ccatggcaacccctg

SEQ ID NO: 1848784 - DNA, 15 bp, Homo sapiens
catggcaacccctgt

SEQ ID NO: 1848785 - DNA, 15 bp, Homo sapiens
atggcaacccctgtg

SEQ ID NO: 1848786 - DNA, 15 bp, Homo sapiens
tggcaacccctgtgg

SEQ ID NO: 1848787 - DNA, 15 bp, Homo sapiens
ggcaacccctgtggg

SEQ ID NO: 1848788 - DNA, 15 bp, Homo sapiens
gcaacccctgtggga

SEQ ID NO: 1848789 - DNA, 15 bp, Homo sapiens
caacccctgtgggat

SEQ ID NO: 1848790 - DNA, 15 bp, Homo sapiens
aacccctgtgggatc

SEQ ID NO: 1848791 - DNA, 15 bp, Homo sapiens
acccctgtgggatcc

SEQ ID NO: 1848792 - DNA, 15 bp, Homo sapiens
cccctgtgggatcca

SEQ ID NO: 1848793 - DNA, 15 bp, Homo sapiens
ccctgtgggatccac

SEQ ID NO: 1848794 - DNA, 15 bp, Homo sapiens
cctgtgggatccacg

SEQ ID NO: 1848795 - DNA, 15 bp, Homo sapiens
ctgtgggatccacga

SEQ ID NO: 1848796 - DNA, 15 bp, Homo sapiens
tgtgggatccacgaa

SEQ ID NO: 1848797 - DNA, 15 bp, Homo sapiens
gtgggatccacgaag

SEQ ID NO: 1848798 - DNA, 15 bp, Homo sapiens
tgggatccacgaagt

SEQ ID NO: 1848799 - DNA, 15 bp, Homo sapiens
gggatccacgaagtt

SEQ ID NO: 1848800 - DNA, 15 bp, Homo sapiens
ggatccacgaagttg

SEQ ID NO: 1848801 - DNA, 15 bp, Homo sapiens
gatccacgaagttgg

SEQ ID NO: 1848802 - DNA, 15 bp, Homo sapiens
atccacgaagttggt

SEQ ID NO: 1848803 - DNA, 15 bp, Homo sapiens
tccacgaagttggta

SEQ ID NO: 1848804 - DNA, 15 bp, Homo sapiens
ccacgaagttggtat

SEQ ID NO: 1848805 - DNA, 15 bp, Homo sapiens
cacgaagttggtatt

SEQ ID NO: 1848806 - DNA, 15 bp, Homo sapiens
acgaagttggtatta

SEQ ID NO: 1848807 - DNA, 15 bp, Homo sapiens
cgaagttggtattat

SEQ ID NO: 1848808 - DNA, 15 bp, Homo sapiens
gaagttggtattatc

SEQ ID NO: 1848809 - DNA, 15 bp, Homo sapiens
aagttggtattatct

SEQ ID NO: 1848810 - DNA, 15 bp, Homo sapiens
agttggtattatctc

SEQ ID NO: 1848811 - DNA, 15 bp, Homo sapiens
gttggtattatctcc

SEQ ID NO: 1848812 - DNA, 15 bp, Homo sapiens
ttggtattatctcca

SEQ ID NO: 1848813 - DNA, 15 bp, Homo sapiens
tggtattatctccat

SEQ ID NO: 1848814 - DNA, 15 bp, Homo sapiens
ggtattatctccatg

SEQ ID NO: 1848815 - DNA, 15 bp, Homo sapiens
gtattatctccatgg

SEQ ID NO: 1848816 - DNA, 15 bp, Homo sapiens
tattatctccatggc

SEQ ID NO: 1848817 - DNA, 15 bp, Homo sapiens
attatctccatggca

SEQ ID NO: 1848818 - DNA, 15 bp, Homo sapiens
ttatctccatggcac

SEQ ID NO: 1848819 - DNA, 15 bp, Homo sapiens
tatctccatggcaca

SEQ ID NO: 1848820 - DNA, 15 bp, Homo sapiens
atctccatggcacag

SEQ ID NO: 1848821 - DNA, 15 bp, Homo sapiens
tctccatggcacaga

SEQ ID NO: 1848822 - DNA, 15 bp, Homo sapiens
ctccatggcacagat

SEQ ID NO: 1848823 - DNA, 15 bp, Homo sapiens
tccatggcacagatg

SEQ ID NO: 1848824 - DNA, 15 bp, Homo sapiens
ccatggcacagatga

SEQ ID NO: 1848825 - DNA, 15 bp, Homo sapiens
catggcacagatgat

SEQ ID NO: 1848826 - DNA, 15 bp, Homo sapiens
atggcacagatgatg

SEQ ID NO: 1848827 - DNA, 15 bp, Homo sapiens
tggcacagatgatgg

SEQ ID NO: 1848828 - DNA, 15 bp, Homo sapiens
ggcacagatgatgga

SEQ ID NO: 1848829 - DNA, 15 bp, Homo sapiens
gcacagatgatggag

SEQ ID NO: 1848830 - DNA, 15 bp, Homo sapiens
cacagatgatggagg

SEQ ID NO: 1848831 - DNA, 15 bp, Homo sapiens
acagatgatggaggc

SEQ ID NO: 1848832 - DNA, 15 bp, Homo sapiens
cagatgatggaggcc

SEQ ID NO: 1848833 - DNA, 15 bp, Homo sapiens
agatgatggaggccc

SEQ ID NO: 1848834 - DNA, 15 bp, Homo sapiens
gatgatggaggccca

SEQ ID NO: 1848835 - DNA, 15 bp, Homo sapiens
atgatggaggcccaa

SEQ ID NO: 1848836 - DNA, 15 bp, Homo sapiens
tgatggaggcccaag

SEQ ID NO: 1848837 - DNA, 15 bp, Homo sapiens
gatggaggcccaagg

SEQ ID NO: 1848838 - DNA, 15 bp, Homo sapiens
atggaggcccaagga

SEQ ID NO: 1848839 - DNA, 15 bp, Homo sapiens
tggaggcccaaggaa

SEQ ID NO: 1848840 - DNA, 15 bp, Homo sapiens
ggaggcccaaggaag

SEQ ID NO: 1848841 - DNA, 15 bp, Homo sapiens
gaggcccaaggaaga

SEQ ID NO: 1848842 - DNA, 15 bp, Homo sapiens
aggcccaaggaagac

SEQ ID NO: 1848843 - DNA, 15 bp, Homo sapiens
ggcccaaggaagaca

SEQ ID NO: 1848844 - DNA, 15 bp, Homo sapiens
gcccaaggaagacaa

SEQ ID NO: 1848845 - DNA, 15 bp, Homo sapiens
cccaaggaagacaaa

SEQ ID NO: 1848846 - DNA, 15 bp, Homo sapiens
ccaaggaagacaaat

SEQ ID NO: 1848847 - DNA, 15 bp, Homo sapiens
caaggaagacaaatg

SEQ ID NO: 1848848 - DNA, 15 bp, Homo sapiens
aaggaagacaaatga

SEQ ID NO: 1848849 - DNA, 15 bp, Homo sapiens
aggaagacaaatgac

SEQ ID NO: 1848850 - DNA, 15 bp, Homo sapiens
ggaagacaaatgacc

SEQ ID NO: 1848851 - DNA, 15 bp, Homo sapiens
gaagacaaatgaccg

SEQ ID NO: 1848852 - DNA, 15 bp, Homo sapiens
aagacaaatgaccgg

SEQ ID NO: 1848853 - DNA, 15 bp, Homo sapiens
agacaaatgaccggc

SEQ ID NO: 1848854 - DNA, 15 bp, Homo sapiens
gacaaatgaccggca

SEQ ID NO: 1848855 - DNA, 15 bp, Homo sapiens
acaaatgaccggcag

SEQ ID NO: 1848856 - DNA, 15 bp, Homo sapiens
caaatgaccggcagg

SEQ ID NO: 1848857 - DNA, 15 bp, Homo sapiens
aaatgaccggcagga

SEQ ID NO: 1848858 - DNA, 15 bp, Homo sapiens
aatgaccggcaggag

SEQ ID NO: 1848859 - DNA, 15 bp, Homo sapiens
atgaccggcaggagg

SEQ ID NO: 1848860 - DNA, 15 bp, Homo sapiens
tgaccggcaggaggc

SEQ ID NO: 1848861 - DNA, 15 bp, Homo sapiens
gaccggcaggaggca

SEQ ID NO: 1848862 - DNA, 15 bp, Homo sapiens
accggcaggaggcaa

SEQ ID NO: 1848863 - DNA, 15 bp, Homo sapiens
ccggcaggaggcaag

SEQ ID NO: 1848864 - DNA, 15 bp, Homo sapiens
cggcaggaggcaagt

SEQ ID NO: 1848865 - DNA, 15 bp, Homo sapiens
ggcaggaggcaagtc

SEQ ID NO: 1848866 - DNA, 15 bp, Homo sapiens
gcaggaggcaagtca

SEQ ID NO: 1848867 - DNA, 15 bp, Homo sapiens
caggaggcaagtcat

SEQ ID NO: 1848868 - DNA, 15 bp, Homo sapiens
aggaggcaagtcatg

SEQ ID NO: 1848869 - DNA, 15 bp, Homo sapiens
ggaggcaagtcatgc

SEQ ID NO: 1848870 - DNA, 15 bp, Homo sapiens
gaggcaagtcatgca

SEQ ID NO: 1848871 - DNA, 15 bp, Homo sapiens
aggcaagtcatgcag

SEQ ID NO: 1848872 - DNA, 15 bp, Homo sapiens
ggcaagtcatgcagc

SEQ ID NO: 1848873 - DNA, 15 bp, Homo sapiens
gcaagtcatgcagct

SEQ ID NO: 1848874 - DNA, 15 bp, Homo sapiens
caagtcatgcagcta

SEQ ID NO: 1848875 - DNA, 15 bp, Homo sapiens
aagtcatgcagctaa

SEQ ID NO: 1848876 - DNA, 15 bp, Homo sapiens
agtcatgcagctaag

SEQ ID NO: 1848877 - DNA, 15 bp, Homo sapiens
gtcatgcagctaaga

SEQ ID NO: 1848878 - DNA, 15 bp, Homo sapiens
tcatgcagctaagag

SEQ ID NO: 1848879 - DNA, 15 bp, Homo sapiens
catgcagctaagagc

SEQ ID NO: 1848880 - DNA, 15 bp, Homo sapiens
atgcagctaagagct

SEQ ID NO: 1848881 - DNA, 15 bp, Homo sapiens
tgcagctaagagctt

SEQ ID NO: 1848882 - DNA, 15 bp, Homo sapiens
gcagctaagagcttt

SEQ ID NO: 1848883 - DNA, 15 bp, Homo sapiens
cagctaagagctttt

SEQ ID NO: 1848884 - DNA, 15 bp, Homo sapiens
agctaagagcttttc

SEQ ID NO: 1848885 - DNA, 15 bp, Homo sapiens
gctaagagcttttcc

SEQ ID NO: 1848886 - DNA, 15 bp, Homo sapiens
ctaagagcttttcct

SEQ ID NO: 1848887 - DNA, 15 bp, Homo sapiens
taagagcttttcctg

SEQ ID NO: 1848888 - DNA, 15 bp, Homo sapiens
aagagcttttcctgg

SEQ ID NO: 1848889 - DNA, 15 bp, Homo sapiens
agagcttttcctgga

SEQ ID NO: 1848890 - DNA, 15 bp, Homo sapiens
gagcttttcctggaa

SEQ ID NO: 1848891 - DNA, 15 bp, Homo sapiens
agcttttcctggaat

SEQ ID NO: 1848892 - DNA, 15 bp, Homo sapiens
gcttttcctggaatc

SEQ ID NO: 1848893 - DNA, 15 bp, Homo sapiens
cttttcctggaatcc

SEQ ID NO: 1848894 - DNA, 15 bp, Homo sapiens
ttttcctggaatcca

SEQ ID NO: 1848895 - DNA, 15 bp, Homo sapiens
tttcctggaatccag

SEQ ID NO: 1848896 - DNA, 15 bp, Homo sapiens
ttcctggaatccagg

SEQ ID NO: 1848897 - DNA, 15 bp, Homo sapiens
tcctggaatccaggt

SEQ ID NO: 1848898 - DNA, 15 bp, Homo sapiens
cctggaatccaggtg

SEQ ID NO: 1848899 - DNA, 15 bp, Homo sapiens
ctggaatccaggtgt

SEQ ID NO: 1848900 - DNA, 15 bp, Homo sapiens
tggaatccaggtgtc

SEQ ID NO: 1848901 - DNA, 15 bp, Homo sapiens
ggaatccaggtgtcc

SEQ ID NO: 1848902 - DNA, 15 bp, Homo sapiens
gaatccaggtgtcct

SEQ ID NO: 1848903 - DNA, 15 bp, Homo sapiens
aatccaggtgtcctg

SEQ ID NO: 1848904 - DNA, 15 bp, Homo sapiens
atccaggtgtcctgc

SEQ ID NO: 1848905 - DNA, 15 bp, Homo sapiens
tccaggtgtcctgcc

SEQ ID NO: 1848906 - DNA, 15 bp, Homo sapiens
ccaggtgtcctgcct

SEQ ID NO: 1848907 - DNA, 15 bp, Homo sapiens
caggtgtcctgcctt

SEQ ID NO: 1848908 - DNA, 15 bp, Homo sapiens
aggtgtcctgccttc

SEQ ID NO: 1848909 - DNA, 15 bp, Homo sapiens
ggtgtcctgccttca

SEQ ID NO: 1848910 - DNA, 15 bp, Homo sapiens
gtgtcctgccttcag

SEQ ID NO: 1848911 - DNA, 15 bp, Homo sapiens
tgtcctgccttcaga

SEQ ID NO: 1848912 - DNA, 15 bp, Homo sapiens
gtcctgccttcagat

SEQ ID NO: 1848913 - DNA, 15 bp, Homo sapiens
tcctgccttcagatg

SEQ ID NO: 1848914 - DNA, 15 bp, Homo sapiens
cctgccttcagatgc

SEQ ID NO: 1848915 - DNA, 15 bp, Homo sapiens
ctgccttcagatgcc

SEQ ID NO: 1848916 - DNA, 15 bp, Homo sapiens
tgccttcagatgcca

SEQ ID NO: 1848917 - DNA, 15 bp, Homo sapiens
gccttcagatgccag

SEQ ID NO: 1848918 - DNA, 15 bp, Homo sapiens
ccttcagatgccagt

SEQ ID NO: 1848919 - DNA, 15 bp, Homo sapiens
cttcagatgccagtt

SEQ ID NO: 1848920 - DNA, 15 bp, Homo sapiens
ttcagatgccagttc

SEQ ID NO: 1848921 - DNA, 15 bp, Homo sapiens
tcagatgccagttct

SEQ ID NO: 1848922 - DNA, 15 bp, Homo sapiens
cagatgccagttctc

SEQ ID NO: 1848923 - DNA, 15 bp, Homo sapiens
agatgccagttctct

SEQ ID NO: 1848924 - DNA, 15 bp, Homo sapiens
gatgccagttctctt

SEQ ID NO: 1848925 - DNA, 15 bp, Homo sapiens
atgccagttctcttg

SEQ ID NO: 1848926 - DNA, 15 bp, Homo sapiens
tgccagttctcttgc

SEQ ID NO: 1848927 - DNA, 15 bp, Homo sapiens
gccagttctcttgct

SEQ ID NO: 1848928 - DNA, 15 bp, Homo sapiens
ccagttctcttgctg

SEQ ID NO: 1848929 - DNA, 15 bp, Homo sapiens
cagttctcttgctgg

SEQ ID NO: 1848930 - DNA, 15 bp, Homo sapiens
agttctcttgctggt

SEQ ID NO: 1848931 - DNA, 15 bp, Homo sapiens
gttctcttgctggtt

SEQ ID NO: 1848932 - DNA, 15 bp, Homo sapiens
ttctcttgctggttt

SEQ ID NO: 1848933 - DNA, 15 bp, Homo sapiens
tctcttgctggtttt

SEQ ID NO: 1848934 - DNA, 15 bp, Homo sapiens
ctcttgctggttttc

SEQ ID NO: 1848935 - DNA, 15 bp, Homo sapiens
tcttgctggttttcg

SEQ ID NO: 1848936 - DNA, 15 bp, Homo sapiens
cttgctggttttcgt

SEQ ID NO: 1848937 - DNA, 15 bp, Homo sapiens
ttgctggttttcgtt

SEQ ID NO: 1848938 - DNA, 15 bp, Homo sapiens
tgctggttttcgttt

SEQ ID NO: 1848939 - DNA, 15 bp, Homo sapiens
gctggttttcgtttt

SEQ ID NO: 1848940 - DNA, 15 bp, Homo sapiens
ctggttttcgttttt

SEQ ID NO: 1848941 - DNA, 15 bp, Homo sapiens
tggttttcgtttttg

SEQ ID NO: 1848942 - DNA, 15 bp, Homo sapiens
ggttttcgtttttgt

SEQ ID NO: 1848943 - DNA, 15 bp, Homo sapiens
gttttcgtttttgtt

SEQ ID NO: 1848944 - DNA, 15 bp, Homo sapiens
ttttcgtttttgttt

SEQ ID NO: 1848945 - DNA, 15 bp, Homo sapiens
tttcgtttttgtttt

SEQ ID NO: 1848946 - DNA, 15 bp, Homo sapiens
ttcgtttttgttttt

SEQ ID NO: 1848947 - DNA, 15 bp, Homo sapiens
tcgtttttgtttttc

SEQ ID NO: 1848948 - DNA, 15 bp, Homo sapiens
cgtttttgtttttct

SEQ ID NO: 1848949 - DNA, 15 bp, Homo sapiens
gtttttgtttttcta

SEQ ID NO: 1848950 - DNA, 15 bp, Homo sapiens
ttttgtttttctaaa

SEQ ID NO: 1848951 - DNA, 15 bp, Homo sapiens
tttgtttttctaaaa

SEQ ID NO: 1848952 - DNA, 15 bp, Homo sapiens
ttgtttttctaaaaa

SEQ ID NO: 1848953 - DNA, 15 bp, Homo sapiens
tgtttttctaaaaat

SEQ ID NO: 1848954 - DNA, 15 bp, Homo sapiens
gtttttctaaaaatg

SEQ ID NO: 1848955 - DNA, 15 bp, Homo sapiens
tttttctaaaaatgt

SEQ ID NO: 1848956 - DNA, 15 bp, Homo sapiens
ttttctaaaaatgtt

SEQ ID NO: 1848957 - DNA, 15 bp, Homo sapiens
tttctaaaaatgttt

SEQ ID NO: 1848958 - DNA, 15 bp, Homo sapiens
ttctaaaaatgtttt

SEQ ID NO: 1848959 - DNA, 15 bp, Homo sapiens
tctaaaaatgttttc

SEQ ID NO: 1848960 - DNA, 15 bp, Homo sapiens
ctaaaaatgttttca

SEQ ID NO: 1848961 - DNA, 15 bp, Homo sapiens
taaaaatgttttcac

SEQ ID NO: 1848962 - DNA, 15 bp, Homo sapiens
aaaaatgttttcacc

SEQ ID NO: 1848963 - DNA, 15 bp, Homo sapiens
aaaatgttttcacct

SEQ ID NO: 1848964 - DNA, 15 bp, Homo sapiens
aaatgttttcacctg

SEQ ID NO: 1848965 - DNA, 15 bp, Homo sapiens
aatgttttcacctgt

SEQ ID NO: 1848966 - DNA, 15 bp, Homo sapiens
atgttttcacctgtc

SEQ ID NO: 1848967 - DNA, 15 bp, Homo sapiens
tgttttcacctgtca

SEQ ID NO: 1848968 - DNA, 15 bp, Homo sapiens
gttttcacctgtcaa

SEQ ID NO: 1848969 - DNA, 15 bp, Homo sapiens
ttttcacctgtcaag

SEQ ID NO: 1848970 - DNA, 15 bp, Homo sapiens
tttcacctgtcaagt

SEQ ID NO: 1848971 - DNA, 15 bp, Homo sapiens
ttcacctgtcaagta

SEQ ID NO: 1848972 - DNA, 15 bp, Homo sapiens
tcacctgtcaagtat

SEQ ID NO: 1848973 - DNA, 15 bp, Homo sapiens
cacctgtcaagtatg

SEQ ID NO: 1848974 - DNA, 15 bp, Homo sapiens
acctgtcaagtatgt

SEQ ID NO: 1848975 - DNA, 15 bp, Homo sapiens
cctgtcaagtatgtg

SEQ ID NO: 1848976 - DNA, 15 bp, Homo sapiens
ctgtcaagtatgtgc

SEQ ID NO: 1848977 - DNA, 15 bp, Homo sapiens
tgtcaagtatgtgct

SEQ ID NO: 1848978 - DNA, 15 bp, Homo sapiens
gtcaagtatgtgcta

SEQ ID NO: 1848979 - DNA, 15 bp, Homo sapiens
tcaagtatgtgctac

SEQ ID NO: 1848980 - DNA, 15 bp, Homo sapiens
caagtatgtgctact

SEQ ID NO: 1848981 - DNA, 15 bp, Homo sapiens
aagtatgtgctacta

SEQ ID NO: 1848982 - DNA, 15 bp, Homo sapiens
agtatgtgctactat

SEQ ID NO: 1848983 - DNA, 15 bp, Homo sapiens
gtatgtgctactatg

SEQ ID NO: 1848984 - DNA, 15 bp, Homo sapiens
tatgtgctactatga

SEQ ID NO: 1848985 - DNA, 15 bp, Homo sapiens
atgtgctactatgaa

SEQ ID NO: 1848986 - DNA, 15 bp, Homo sapiens
tgtgctactatgaat

SEQ ID NO: 1848987 - DNA, 15 bp, Homo sapiens
gtgctactatgaatt

SEQ ID NO: 1848988 - DNA, 15 bp, Homo sapiens
tgctactatgaattc

SEQ ID NO: 1848989 - DNA, 15 bp, Homo sapiens
gctactatgaattct

SEQ ID NO: 1848990 - DNA, 15 bp, Homo sapiens
ctactatgaattctg

SEQ ID NO: 1848991 - DNA, 15 bp, Homo sapiens
tactatgaattctgg

SEQ ID NO: 1848992 - DNA, 15 bp, Homo sapiens
actatgaattctggg

SEQ ID NO: 1848993 - DNA, 15 bp, Homo sapiens
ctatgaattctggga

SEQ ID NO: 1848994 - DNA, 15 bp, Homo sapiens
tatgaattctgggag

SEQ ID NO: 1848995 - DNA, 15 bp, Homo sapiens
atgaattctgggagg

SEQ ID NO: 1848996 - DNA, 15 bp, Homo sapiens
tgaattctgggaggg

SEQ ID NO: 1848997 - DNA, 15 bp, Homo sapiens
gaattctgggagggt

SEQ ID NO: 1848998 - DNA, 15 bp, Homo sapiens
aattctgggagggta

SEQ ID NO: 1848999 - DNA, 15 bp, Homo sapiens
attctgggagggtag

SEQ ID NO: 1849000 - DNA, 15 bp, Homo sapiens
ttctgggagggtagg

SEQ ID NO: 1849001 - DNA, 15 bp, Homo sapiens
tctgggagggtaggg

SEQ ID NO: 1849002 - DNA, 15 bp, Homo sapiens
ctgggagggtagggt

SEQ ID NO: 1849003 - DNA, 15 bp, Homo sapiens
tgggagggtagggtc

SEQ ID NO: 1849004 - DNA, 15 bp, Homo sapiens
gggagggtagggtcg

SEQ ID NO: 1849005 - DNA, 15 bp, Homo sapiens
ggagggtagggtcgt

SEQ ID NO: 1849006 - DNA, 15 bp, Homo sapiens
gagggtagggtcgtg

SEQ ID NO: 1849007 - DNA, 15 bp, Homo sapiens
agggtagggtcgtgt

SEQ ID NO: 1849008 - DNA, 15 bp, Homo sapiens
gggtagggtcgtgtc

SEQ ID NO: 1849009 - DNA, 15 bp, Homo sapiens
ggtagggtcgtgtct

SEQ ID NO: 1849010 - DNA, 15 bp, Homo sapiens
gtagggtcgtgtctt

SEQ ID NO: 1849011 - DNA, 15 bp, Homo sapiens
tagggtcgtgtctta

SEQ ID NO: 1849012 - DNA, 15 bp, Homo sapiens
agggtcgtgtcttat

SEQ ID NO: 1849013 - DNA, 15 bp, Homo sapiens
gggtcgtgtcttatt

SEQ ID NO: 1849014 - DNA, 15 bp, Homo sapiens
ggtcgtgtcttattt

SEQ ID NO: 1849015 - DNA, 15 bp, Homo sapiens
gtcgtgtcttattta

SEQ ID NO: 1849016 - DNA, 15 bp, Homo sapiens
tcgtgtcttatttat

SEQ ID NO: 1849017 - DNA, 15 bp, Homo sapiens
cgtgtcttatttatt

SEQ ID NO: 1849018 - DNA, 15 bp, Homo sapiens
gtgtcttatttattt

SEQ ID NO: 1849019 - DNA, 15 bp, Homo sapiens
tgtcttatttatttc

SEQ ID NO: 1849020 - DNA, 15 bp, Homo sapiens
gtcttatttatttct

SEQ ID NO: 1849021 - DNA, 15 bp, Homo sapiens
tcttatttatttctg

SEQ ID NO: 1849022 - DNA, 15 bp, Homo sapiens
cttatttatttctgt

SEQ ID NO: 1849023 - DNA, 15 bp, Homo sapiens
ttatttatttctgtg

SEQ ID NO: 1849024 - DNA, 15 bp, Homo sapiens
tatttatttctgtgt

SEQ ID NO: 1849025 - DNA, 15 bp, Homo sapiens
atttatttctgtgtt

SEQ ID NO: 1849026 - DNA, 15 bp, Homo sapiens
tttatttctgtgttt

SEQ ID NO: 1849027 - DNA, 15 bp, Homo sapiens
ttatttctgtgtttt

SEQ ID NO: 1849028 - DNA, 15 bp, Homo sapiens
tatttctgtgttttt

SEQ ID NO: 1849029 - DNA, 15 bp, Homo sapiens
atttctgtgtttttg

SEQ ID NO: 1849030 - DNA, 15 bp, Homo sapiens
tttctgtgtttttga

SEQ ID NO: 1849031 - DNA, 15 bp, Homo sapiens
ttctgtgtttttgac

SEQ ID NO: 1849032 - DNA, 15 bp, Homo sapiens
tctgtgtttttgact

SEQ ID NO: 1849033 - DNA, 15 bp, Homo sapiens
ctgtgtttttgactg

SEQ ID NO: 1849034 - DNA, 15 bp, Homo sapiens
tgtgtttttgactgc

SEQ ID NO: 1849035 - DNA, 15 bp, Homo sapiens
gtgtttttgactgct

SEQ ID NO: 1849036 - DNA, 15 bp, Homo sapiens
tgtttttgactgctt

SEQ ID NO: 1849037 - DNA, 15 bp, Homo sapiens
gtttttgactgcttt

SEQ ID NO: 1849038 - DNA, 15 bp, Homo sapiens
tttttgactgctttt

SEQ ID NO: 1849039 - DNA, 15 bp, Homo sapiens
ttttgactgcttttc

SEQ ID NO: 1849040 - DNA, 15 bp, Homo sapiens
tttgactgcttttcc

SEQ ID NO: 1849041 - DNA, 15 bp, Homo sapiens
ttgactgcttttcct

SEQ ID NO: 1849042 - DNA, 15 bp, Homo sapiens
tgactgcttttcctc

SEQ ID NO: 1849043 - DNA, 15 bp, Homo sapiens
gactgcttttcctct

SEQ ID NO: 1849044 - DNA, 15 bp, Homo sapiens
actgcttttcctctc

SEQ ID NO: 1849045 - DNA, 15 bp, Homo sapiens
ctgcttttcctctcc

SEQ ID NO: 1849046 - DNA, 15 bp, Homo sapiens
tgcttttcctctcca

SEQ ID NO: 1849047 - DNA, 15 bp, Homo sapiens
gcttttcctctccaa

SEQ ID NO: 1849048 - DNA, 15 bp, Homo sapiens
cttttcctctccaat

SEQ ID NO: 1849049 - DNA, 15 bp, Homo sapiens
ttttcctctccaatc

SEQ ID NO: 1849050 - DNA, 15 bp, Homo sapiens
tttcctctccaatct

SEQ ID NO: 1849051 - DNA, 15 bp, Homo sapiens
ttcctctccaatctc

SEQ ID NO: 1849052 - DNA, 15 bp, Homo sapiens
tcctctccaatctca

SEQ ID NO: 1849053 - DNA, 15 bp, Homo sapiens
cctctccaatctcaa

SEQ ID NO: 1849054 - DNA, 15 bp, Homo sapiens
ctctccaatctcaag

SEQ ID NO: 1849055 - DNA, 15 bp, Homo sapiens
tctccaatctcaagt

SEQ ID NO: 1849056 - DNA, 15 bp, Homo sapiens
ctccaatctcaagtg

SEQ ID NO: 1849057 - DNA, 15 bp, Homo sapiens
tccaatctcaagtgc

SEQ ID NO: 1849058 - DNA, 15 bp, Homo sapiens
ccaatctcaagtgct

SEQ ID NO: 1849059 - DNA, 15 bp, Homo sapiens
caatctcaagtgctg

SEQ ID NO: 1849060 - DNA, 15 bp, Homo sapiens
aatctcaagtgctgt

SEQ ID NO: 1849061 - DNA, 15 bp, Homo sapiens
atctcaagtgctgtg

SEQ ID NO: 1849062 - DNA, 15 bp, Homo sapiens
tctcaagtgctgtga

SEQ ID NO: 1849063 - DNA, 15 bp, Homo sapiens
ctcaagtgctgtgac

SEQ ID NO: 1849064 - DNA, 15 bp, Homo sapiens
tcaagtgctgtgact

SEQ ID NO: 1849065 - DNA, 15 bp, Homo sapiens
caagtgctgtgacta

SEQ ID NO: 1849066 - DNA, 15 bp, Homo sapiens
aagtgctgtgactaa

SEQ ID NO: 1849067 - DNA, 15 bp, Homo sapiens
agtgctgtgactaac

SEQ ID NO: 1849068 - DNA, 15 bp, Homo sapiens
gtgctgtgactaaca

SEQ ID NO: 1849069 - DNA, 15 bp, Homo sapiens
tgctgtgactaacac

SEQ ID NO: 1849070 - DNA, 15 bp, Homo sapiens
gctgtgactaacaca

SEQ ID NO: 1849071 - DNA, 15 bp, Homo sapiens
ctgtgactaacacat

SEQ ID NO: 1849072 - DNA, 15 bp, Homo sapiens
tgtgactaacacata

SEQ ID NO: 1849073 - DNA, 15 bp, Homo sapiens
gtgactaacacatag

SEQ ID NO: 1849074 - DNA, 15 bp, Homo sapiens
tgactaacacatagg

SEQ ID NO: 1849075 - DNA, 15 bp, Homo sapiens
gactaacacatagga

SEQ ID NO: 1849076 - DNA, 15 bp, Homo sapiens
actaacacataggaa

SEQ ID NO: 1849077 - DNA, 15 bp, Homo sapiens
ctaacacataggaag

SEQ ID NO: 1849078 - DNA, 15 bp, Homo sapiens
taacacataggaagt

SEQ ID NO: 1849079 - DNA, 15 bp, Homo sapiens
aacacataggaagta

SEQ ID NO: 1849080 - DNA, 15 bp, Homo sapiens
acacataggaagtac

SEQ ID NO: 1849081 - DNA, 15 bp, Homo sapiens
cacataggaagtact

SEQ ID NO: 1849082 - DNA, 15 bp, Homo sapiens
acataggaagtactc

SEQ ID NO: 1849083 - DNA, 15 bp, Homo sapiens
cataggaagtactca

SEQ ID NO: 1849084 - DNA, 15 bp, Homo sapiens
ataggaagtactcaa

SEQ ID NO: 1849085 - DNA, 15 bp, Homo sapiens
taggaagtactcaag

SEQ ID NO: 1849086 - DNA, 15 bp, Homo sapiens
aggaagtactcaaga

SEQ ID NO: 1849087 - DNA, 15 bp, Homo sapiens
ggaagtactcaagaa

SEQ ID NO: 1849088 - DNA, 15 bp, Homo sapiens
gaagtactcaagaaa

SEQ ID NO: 1849089 - DNA, 15 bp, Homo sapiens
aagtactcaagaaaa

SEQ ID NO: 1849090 - DNA, 15 bp, Homo sapiens
agtactcaagaaaat

SEQ ID NO: 1849091 - DNA, 15 bp, Homo sapiens
gtactcaagaaaata

SEQ ID NO: 1849092 - DNA, 15 bp, Homo sapiens
tactcaagaaaatat

SEQ ID NO: 1849093 - DNA, 15 bp, Homo sapiens
actcaagaaaatatt

SEQ ID NO: 1849094 - DNA, 15 bp, Homo sapiens
ctcaagaaaatattt

SEQ ID NO: 1849095 - DNA, 15 bp, Homo sapiens
tcaagaaaatattta

SEQ ID NO: 1849096 - DNA, 15 bp, Homo sapiens
caagaaaatatttat

SEQ ID NO: 1849097 - DNA, 15 bp, Homo sapiens
aagaaaatatttatg

SEQ ID NO: 1849098 - DNA, 15 bp, Homo sapiens
agaaaatatttatgg

SEQ ID NO: 1849099 - DNA, 15 bp, Homo sapiens
gaaaatatttatggc

SEQ ID NO: 1849100 - DNA, 15 bp, Homo sapiens
aaaatatttatggca

SEQ ID NO: 1849101 - DNA, 15 bp, Homo sapiens
aaatatttatggcat

SEQ ID NO: 1849102 - DNA, 15 bp, Homo sapiens
aatatttatggcata

SEQ ID NO: 1849103 - DNA, 15 bp, Homo sapiens
atatttatggcatat

SEQ ID NO: 1849104 - DNA, 15 bp, Homo sapiens
tatttatggcatata

SEQ ID NO: 1849105 - DNA, 15 bp, Homo sapiens
atttatggcatataa

SEQ ID NO: 1849106 - DNA, 15 bp, Homo sapiens
tttatggcatataag

SEQ ID NO: 1849107 - DNA, 15 bp, Homo sapiens
ttatggcatataagt

SEQ ID NO: 1849108 - DNA, 15 bp, Homo sapiens
tatggcatataagtc

SEQ ID NO: 1849109 - DNA, 15 bp, Homo sapiens
atggcatataagtca

SEQ ID NO: 1849110 - DNA, 15 bp, Homo sapiens
tggcatataagtcag

SEQ ID NO: 1849111 - DNA, 15 bp, Homo sapiens
ggcatataagtcagt

SEQ ID NO: 1849112 - DNA, 15 bp, Homo sapiens
gcatataagtcagta

SEQ ID NO: 1849113 - DNA, 15 bp, Homo sapiens
catataagtcagtag

SEQ ID NO: 1849114 - DNA, 15 bp, Homo sapiens
atataagtcagtaga

SEQ ID NO: 1849115 - DNA, 15 bp, Homo sapiens
tataagtcagtagaa

SEQ ID NO: 1849116 - DNA, 15 bp, Homo sapiens
ataagtcagtagaaa

SEQ ID NO: 1849117 - DNA, 15 bp, Homo sapiens
taagtcagtagaaaa

SEQ ID NO: 1849118 - DNA, 15 bp, Homo sapiens
aagtcagtagaaaat

SEQ ID NO: 1849119 - DNA, 15 bp, Homo sapiens
agtcagtagaaaatc

SEQ ID NO: 1849120 - DNA, 15 bp, Homo sapiens
gtcagtagaaaatcc

SEQ ID NO: 1849121 - DNA, 15 bp, Homo sapiens
tcagtagaaaatcca

SEQ ID NO: 1849122 - DNA, 15 bp, Homo sapiens
cagtagaaaatccat

SEQ ID NO: 1849123 - DNA, 15 bp, Homo sapiens
agtagaaaatccatt

SEQ ID NO: 1849124 - DNA, 15 bp, Homo sapiens
gtagaaaatccattc

SEQ ID NO: 1849125 - DNA, 15 bp, Homo sapiens
tagaaaatccattca

SEQ ID NO: 1849126 - DNA, 15 bp, Homo sapiens
agaaaatccattcat

SEQ ID NO: 1849127 - DNA, 15 bp, Homo sapiens
gaaaatccattcatt

SEQ ID NO: 1849128 - DNA, 15 bp, Homo sapiens
aaaatccattcattc

SEQ ID NO: 1849129 - DNA, 15 bp, Homo sapiens
aaatccattcattca

SEQ ID NO: 1849130 - DNA, 15 bp, Homo sapiens
tccattcattcattc

SEQ ID NO: 1849131 - DNA, 15 bp, Homo sapiens
ccattcattcattca

SEQ ID NO: 1849132 - DNA, 15 bp, Homo sapiens
attcattcattcatg

SEQ ID NO: 1849133 - DNA, 15 bp, Homo sapiens
ttcattcattcatgg

SEQ ID NO: 1849134 - DNA, 15 bp, Homo sapiens
tcattcattcatgga

SEQ ID NO: 1849135 - DNA, 15 bp, Homo sapiens
cattcattcatggaa

SEQ ID NO: 1849136 - DNA, 15 bp, Homo sapiens
attcattcatggaag

SEQ ID NO: 1849137 - DNA, 15 bp, Homo sapiens
ttcattcatggaaga

SEQ ID NO: 1849138 - DNA, 15 bp, Homo sapiens
tcattcatggaagaa

SEQ ID NO: 1849139 - DNA, 15 bp, Homo sapiens
cattcatggaagaaa

SEQ ID NO: 1849140 - DNA, 15 bp, Homo sapiens
attcatggaagaaac

SEQ ID NO: 1849141 - DNA, 15 bp, Homo sapiens
tcatggaagaaacaa

SEQ ID NO: 1849142 - DNA, 15 bp, Homo sapiens
catggaagaaacaag

SEQ ID NO: 1849143 - DNA, 15 bp, Homo sapiens
atggaagaaacaagg

SEQ ID NO: 1849144 - DNA, 15 bp, Homo sapiens
tggaagaaacaagga

SEQ ID NO: 1849145 - DNA, 15 bp, Homo sapiens
ggaagaaacaaggag

SEQ ID NO: 1849146 - DNA, 15 bp, Homo sapiens
gaagaaacaaggagg

SEQ ID NO: 1849147 - DNA, 15 bp, Homo sapiens
aagaaacaaggaggt

SEQ ID NO: 1849148 - DNA, 15 bp, Homo sapiens
agaaacaaggaggtg

SEQ ID NO: 1849149 - DNA, 15 bp, Homo sapiens
gaaacaaggaggtgc

SEQ ID NO: 1849150 - DNA, 15 bp, Homo sapiens
aaacaaggaggtgcc

SEQ ID NO: 1849151 - DNA, 15 bp, Homo sapiens
aacaaggaggtgccc

SEQ ID NO: 1849152 - DNA, 15 bp, Homo sapiens
acaaggaggtgcccc

SEQ ID NO: 1849153 - DNA, 15 bp, Homo sapiens
caaggaggtgccccg

SEQ ID NO: 1849154 - DNA, 15 bp, Homo sapiens
aaggaggtgccccga

SEQ ID NO: 1849155 - DNA, 15 bp, Homo sapiens
aggaggtgccccgac

SEQ ID NO: 1849156 - DNA, 15 bp, Homo sapiens
ggaggtgccccgacc

SEQ ID NO: 1849157 - DNA, 15 bp, Homo sapiens
gaggtgccccgacct

SEQ ID NO: 1849158 - DNA, 15 bp, Homo sapiens
aggtgccccgacctc

SEQ ID NO: 1849159 - DNA, 15 bp, Homo sapiens
ggtgccccgacctct

SEQ ID NO: 1849160 - DNA, 15 bp, Homo sapiens
gtgccccgacctctt

SEQ ID NO: 1849161 - DNA, 15 bp, Homo sapiens
tgccccgacctcttt

SEQ ID NO: 1849162 - DNA, 15 bp, Homo sapiens
gccccgacctctttt

SEQ ID NO: 1849163 - DNA, 15 bp, Homo sapiens
ccccgacctcttttg

SEQ ID NO: 1849164 - DNA, 15 bp, Homo sapiens
cccgacctcttttgc

SEQ ID NO: 1849165 - DNA, 15 bp, Homo sapiens
ccgacctcttttgca

SEQ ID NO: 1849166 - DNA, 15 bp, Homo sapiens
cgacctcttttgcat

SEQ ID NO: 1849167 - DNA, 15 bp, Homo sapiens
gacctcttttgcatg

SEQ ID NO: 1849168 - DNA, 15 bp, Homo sapiens
acctcttttgcatgc

SEQ ID NO: 1849169 - DNA, 15 bp, Homo sapiens
cctcttttgcatgct

SEQ ID NO: 1849170 - DNA, 15 bp, Homo sapiens
ctcttttgcatgctg

SEQ ID NO: 1849171 - DNA, 15 bp, Homo sapiens
tcttttgcatgctgg

SEQ ID NO: 1849172 - DNA, 15 bp, Homo sapiens
cttttgcatgctggc

SEQ ID NO: 1849173 - DNA, 15 bp, Homo sapiens
ttttgcatgctggcc

SEQ ID NO: 1849174 - DNA, 15 bp, Homo sapiens
tttgcatgctggcct

SEQ ID NO: 1849175 - DNA, 15 bp, Homo sapiens
ttgcatgctggcctt

SEQ ID NO: 1849176 - DNA, 15 bp, Homo sapiens
tgcatgctggccttt

SEQ ID NO: 1849177 - DNA, 15 bp, Homo sapiens
gcatgctggcctttc

SEQ ID NO: 1849178 - DNA, 15 bp, Homo sapiens
catgctggcctttcc

SEQ ID NO: 1849179 - DNA, 15 bp, Homo sapiens
atgctggcctttcca

SEQ ID NO: 1849180 - DNA, 15 bp, Homo sapiens
tgctggcctttccaa

SEQ ID NO: 1849181 - DNA, 15 bp, Homo sapiens
gctggcctttccaag

SEQ ID NO: 1849182 - DNA, 15 bp, Homo sapiens
ctggcctttccaagt

SEQ ID NO: 1849183 - DNA, 15 bp, Homo sapiens
tggcctttccaagtc

SEQ ID NO: 1849184 - DNA, 15 bp, Homo sapiens
ggcctttccaagtct

SEQ ID NO: 1849185 - DNA, 15 bp, Homo sapiens
gcctttccaagtctg

SEQ ID NO: 1849186 - DNA, 15 bp, Homo sapiens
cctttccaagtctgc

SEQ ID NO: 1849187 - DNA, 15 bp, Homo sapiens
ctttccaagtctgca

SEQ ID NO: 1849188 - DNA, 15 bp, Homo sapiens
tttccaagtctgcac

SEQ ID NO: 1849189 - DNA, 15 bp, Homo sapiens
ttccaagtctgcact

SEQ ID NO: 1849190 - DNA, 15 bp, Homo sapiens
tccaagtctgcactg

SEQ ID NO: 1849191 - DNA, 15 bp, Homo sapiens
ccaagtctgcactgg

SEQ ID NO: 1849192 - DNA, 15 bp, Homo sapiens
caagtctgcactggg

SEQ ID NO: 1849193 - DNA, 15 bp, Homo sapiens
aagtctgcactggga

SEQ ID NO: 1849194 - DNA, 15 bp, Homo sapiens
agtctgcactgggat

SEQ ID NO: 1849195 - DNA, 15 bp, Homo sapiens
gtctgcactgggatt

SEQ ID NO: 1849196 - DNA, 15 bp, Homo sapiens
tctgcactgggattg

SEQ ID NO: 1849197 - DNA, 15 bp, Homo sapiens
ctgcactgggattgt

SEQ ID NO: 1849198 - DNA, 15 bp, Homo sapiens
tgcactgggattgtg

SEQ ID NO: 1849199 - DNA, 15 bp, Homo sapiens
gcactgggattgtgc

SEQ ID NO: 1849200 - DNA, 15 bp, Homo sapiens
cactgggattgtgcc

SEQ ID NO: 1849201 - DNA, 15 bp, Homo sapiens
actgggattgtgccc

SEQ ID NO: 1849202 - DNA, 15 bp, Homo sapiens
ctgggattgtgccct

SEQ ID NO: 1849203 - DNA, 15 bp, Homo sapiens
tgggattgtgccctg

SEQ ID NO: 1849204 - DNA, 15 bp, Homo sapiens
gggattgtgccctga

SEQ ID NO: 1849205 - DNA, 15 bp, Homo sapiens
ggattgtgccctgag

SEQ ID NO: 1849206 - DNA, 15 bp, Homo sapiens
gattgtgccctgagc

SEQ ID NO: 1849207 - DNA, 15 bp, Homo sapiens
attgtgccctgagct

SEQ ID NO: 1849208 - DNA, 15 bp, Homo sapiens
ttgtgccctgagctt

SEQ ID NO: 1849209 - DNA, 15 bp, Homo sapiens
tgtgccctgagcttt

SEQ ID NO: 1849210 - DNA, 15 bp, Homo sapiens
gtgccctgagctttc

SEQ ID NO: 1849211 - DNA, 15 bp, Homo sapiens
tgccctgagctttca

SEQ ID NO: 1849212 - DNA, 15 bp, Homo sapiens
gccctgagctttcat

SEQ ID NO: 1849213 - DNA, 15 bp, Homo sapiens
ccctgagctttcatc

SEQ ID NO: 1849214 - DNA, 15 bp, Homo sapiens
cctgagctttcatca

SEQ ID NO: 1849215 - DNA, 15 bp, Homo sapiens
ctgagctttcatcat

SEQ ID NO: 1849216 - DNA, 15 bp, Homo sapiens
tgagctttcatcata

SEQ ID NO: 1849217 - DNA, 15 bp, Homo sapiens
gagctttcatcataa

SEQ ID NO: 1849218 - DNA, 15 bp, Homo sapiens
agctttcatcataag

SEQ ID NO: 1849219 - DNA, 15 bp, Homo sapiens
gctttcatcataaga

SEQ ID NO: 1849220 - DNA, 15 bp, Homo sapiens
ctttcatcataagag

SEQ ID NO: 1849221 - DNA, 15 bp, Homo sapiens
tttcatcataagagc

SEQ ID NO: 1849222 - DNA, 15 bp, Homo sapiens
ttcatcataagagca

SEQ ID NO: 1849223 - DNA, 15 bp, Homo sapiens
tcatcataagagcag

SEQ ID NO: 1849224 - DNA, 15 bp, Homo sapiens
catcataagagcagg

SEQ ID NO: 1849225 - DNA, 15 bp, Homo sapiens
atcataagagcaggg

SEQ ID NO: 1849226 - DNA, 15 bp, Homo sapiens
tcataagagcagggt

SEQ ID NO: 1849227 - DNA, 15 bp, Homo sapiens
cataagagcagggtt

SEQ ID NO: 1849228 - DNA, 15 bp, Homo sapiens
ataagagcagggttc

SEQ ID NO: 1849229 - DNA, 15 bp, Homo sapiens
taagagcagggttct

SEQ ID NO: 1849230 - DNA, 15 bp, Homo sapiens
aagagcagggttctg

SEQ ID NO: 1849231 - DNA, 15 bp, Homo sapiens
agagcagggttctgg

SEQ ID NO: 1849232 - DNA, 15 bp, Homo sapiens
gagcagggttctggc

SEQ ID NO: 1849233 - DNA, 15 bp, Homo sapiens
agcagggttctggct

SEQ ID NO: 1849234 - DNA, 15 bp, Homo sapiens
gcagggttctggctg

SEQ ID NO: 1849235 - DNA, 15 bp, Homo sapiens
cagggttctggctgt

SEQ ID NO: 1849236 - DNA, 15 bp, Homo sapiens
agggttctggctgtg

SEQ ID NO: 1849237 - DNA, 15 bp, Homo sapiens
gggttctggctgtga

SEQ ID NO: 1849238 - DNA, 15 bp, Homo sapiens
ggttctggctgtgag

SEQ ID NO: 1849239 - DNA, 15 bp, Homo sapiens
gttctggctgtgagg

SEQ ID NO: 1849240 - DNA, 15 bp, Homo sapiens
ttctggctgtgaggc

SEQ ID NO: 1849241 - DNA, 15 bp, Homo sapiens
tctggctgtgaggct

SEQ ID NO: 1849242 - DNA, 15 bp, Homo sapiens
ctggctgtgaggctt

SEQ ID NO: 1849243 - DNA, 15 bp, Homo sapiens
tggctgtgaggctta

SEQ ID NO: 1849244 - DNA, 15 bp, Homo sapiens
ggctgtgaggcttac

SEQ ID NO: 1849245 - DNA, 15 bp, Homo sapiens
gctgtgaggcttacc

SEQ ID NO: 1849246 - DNA, 15 bp, Homo sapiens
ctgtgaggcttacct

SEQ ID NO: 1849247 - DNA, 15 bp, Homo sapiens
tgtgaggcttacctg

SEQ ID NO: 1849248 - DNA, 15 bp, Homo sapiens
gtgaggcttacctgg

SEQ ID NO: 1849249 - DNA, 15 bp, Homo sapiens
tgaggcttacctggg

SEQ ID NO: 1849250 - DNA, 15 bp, Homo sapiens
gaggcttacctgggc

SEQ ID NO: 1849251 - DNA, 15 bp, Homo sapiens
aggcttacctgggca

SEQ ID NO: 1849252 - DNA, 15 bp, Homo sapiens
ggcttacctgggcac

SEQ ID NO: 1849253 - DNA, 15 bp, Homo sapiens
gcttacctgggcaca

SEQ ID NO: 1849254 - DNA, 15 bp, Homo sapiens
cttacctgggcacat

SEQ ID NO: 1849255 - DNA, 15 bp, Homo sapiens
ttacctgggcacatg

SEQ ID NO: 1849256 - DNA, 15 bp, Homo sapiens
tacctgggcacatgc

SEQ ID NO: 1849257 - DNA, 15 bp, Homo sapiens
acctgggcacatgca

SEQ ID NO: 1849258 - DNA, 15 bp, Homo sapiens
cctgggcacatgcac

SEQ ID NO: 1849259 - DNA, 15 bp, Homo sapiens
ctgggcacatgcacc

SEQ ID NO: 1849260 - DNA, 15 bp, Homo sapiens
tgggcacatgcacct

SEQ ID NO: 1849261 - DNA, 15 bp, Homo sapiens
gggcacatgcacctg

SEQ ID NO: 1849262 - DNA, 15 bp, Homo sapiens
ggcacatgcacctga

SEQ ID NO: 1849263 - DNA, 15 bp, Homo sapiens
gcacatgcacctgag

SEQ ID NO: 1849264 - DNA, 15 bp, Homo sapiens
cacatgcacctgagc

SEQ ID NO: 1849265 - DNA, 15 bp, Homo sapiens
acatgcacctgagca

SEQ ID NO: 1849266 - DNA, 15 bp, Homo sapiens
catgcacctgagcag

SEQ ID NO: 1849267 - DNA, 15 bp, Homo sapiens
atgcacctgagcagc

SEQ ID NO: 1849268 - DNA, 15 bp, Homo sapiens
tgcacctgagcagca

SEQ ID NO: 1849269 - DNA, 15 bp, Homo sapiens
gcacctgagcagcag

SEQ ID NO: 1849270 - DNA, 15 bp, Homo sapiens
cacctgagcagcaga

SEQ ID NO: 1849271 - DNA, 15 bp, Homo sapiens
acctgagcagcagac

SEQ ID NO: 1849272 - DNA, 15 bp, Homo sapiens
cctgagcagcagacg

SEQ ID NO: 1849273 - DNA, 15 bp, Homo sapiens
ctgagcagcagacga

SEQ ID NO: 1849274 - DNA, 15 bp, Homo sapiens
tgagcagcagacgat

SEQ ID NO: 1849275 - DNA, 15 bp, Homo sapiens
gagcagcagacgatg

SEQ ID NO: 1849276 - DNA, 15 bp, Homo sapiens
agcagcagacgatga

SEQ ID NO: 1849277 - DNA, 15 bp, Homo sapiens
gcagcagacgatgac

SEQ ID NO: 1849278 - DNA, 15 bp, Homo sapiens
cagcagacgatgaca

SEQ ID NO: 1849279 - DNA, 15 bp, Homo sapiens
agcagacgatgacat

SEQ ID NO: 1849280 - DNA, 15 bp, Homo sapiens
gcagacgatgacatt

SEQ ID NO: 1849281 - DNA, 15 bp, Homo sapiens
cagacgatgacatta

SEQ ID NO: 1849282 - DNA, 15 bp, Homo sapiens
agacgatgacattat

SEQ ID NO: 1849283 - DNA, 15 bp, Homo sapiens
gacgatgacattatc

SEQ ID NO: 1849284 - DNA, 15 bp, Homo sapiens
acgatgacattatca

SEQ ID NO: 1849285 - DNA, 15 bp, Homo sapiens
cgatgacattatcag

SEQ ID NO: 1849286 - DNA, 15 bp, Homo sapiens
gatgacattatcagt

SEQ ID NO: 1849287 - DNA, 15 bp, Homo sapiens
atgacattatcagtc

SEQ ID NO: 1849288 - DNA, 15 bp, Homo sapiens
tgacattatcagtcc

SEQ ID NO: 1849289 - DNA, 15 bp, Homo sapiens
gacattatcagtcca

SEQ ID NO: 1849290 - DNA, 15 bp, Homo sapiens
acattatcagtccac

SEQ ID NO: 1849291 - DNA, 15 bp, Homo sapiens
cattatcagtccact

SEQ ID NO: 1849292 - DNA, 15 bp, Homo sapiens
attatcagtccactg

SEQ ID NO: 1849293 - DNA, 15 bp, Homo sapiens
ttatcagtccactgg

SEQ ID NO: 1849294 - DNA, 15 bp, Homo sapiens
tatcagtccactgga

SEQ ID NO: 1849295 - DNA, 15 bp, Homo sapiens
atcagtccactggag

SEQ ID NO: 1849296 - DNA, 15 bp, Homo sapiens
tcagtccactggaga

SEQ ID NO: 1849297 - DNA, 15 bp, Homo sapiens
cagtccactggagac

SEQ ID NO: 1849298 - DNA, 15 bp, Homo sapiens
agtccactggagaca

SEQ ID NO: 1849299 - DNA, 15 bp, Homo sapiens
gtccactggagacat

SEQ ID NO: 1849300 - DNA, 15 bp, Homo sapiens
tccactggagacatt

SEQ ID NO: 1849301 - DNA, 15 bp, Homo sapiens
ccactggagacattt

SEQ ID NO: 1849302 - DNA, 15 bp, Homo sapiens
cactggagacatttt

SEQ ID NO: 1849303 - DNA, 15 bp, Homo sapiens
actggagacattttc

SEQ ID NO: 1849304 - DNA, 15 bp, Homo sapiens
ctggagacattttct

SEQ ID NO: 1849305 - DNA, 15 bp, Homo sapiens
tggagacattttctt

SEQ ID NO: 1849306 - DNA, 15 bp, Homo sapiens
ggagacattttcttc

SEQ ID NO: 1849307 - DNA, 15 bp, Homo sapiens
gagacattttcttcc

SEQ ID NO: 1849308 - DNA, 15 bp, Homo sapiens
agacattttcttcct

SEQ ID NO: 1849309 - DNA, 15 bp, Homo sapiens
gacattttcttcctc

SEQ ID NO: 1849310 - DNA, 15 bp, Homo sapiens
acattttcttcctca

SEQ ID NO: 1849311 - DNA, 15 bp, Homo sapiens
cattttcttcctcat

SEQ ID NO: 1849312 - DNA, 15 bp, Homo sapiens
attttcttcctcata

SEQ ID NO: 1849313 - DNA, 15 bp, Homo sapiens
ttttcttcctcataa

SEQ ID NO: 1849314 - DNA, 15 bp, Homo sapiens
tttcttcctcataaa

SEQ ID NO: 1849315 - DNA, 15 bp, Homo sapiens
ttcttcctcataaaa

SEQ ID NO: 1849316 - DNA, 15 bp, Homo sapiens
tcttcctcataaaaa

SEQ ID NO: 1849317 - DNA, 15 bp, Homo sapiens
cttcctcataaaaag

SEQ ID NO: 1849318 - DNA, 15 bp, Homo sapiens
ttcctcataaaaagg

SEQ ID NO: 1849319 - DNA, 15 bp, Homo sapiens
tcctcataaaaaggc

SEQ ID NO: 1849320 - DNA, 15 bp, Homo sapiens
cctcataaaaaggct

SEQ ID NO: 1849321 - DNA, 15 bp, Homo sapiens
ctcataaaaaggcta

SEQ ID NO: 1849322 - DNA, 15 bp, Homo sapiens
tcataaaaaggctag

SEQ ID NO: 1849323 - DNA, 15 bp, Homo sapiens
cataaaaaggctagt

SEQ ID NO: 1849324 - DNA, 15 bp, Homo sapiens
ataaaaaggctagtc

SEQ ID NO: 1849325 - DNA, 15 bp, Homo sapiens
taaaaaggctagtca

SEQ ID NO: 1849326 - DNA, 15 bp, Homo sapiens
aaaaaggctagtcat

SEQ ID NO: 1849327 - DNA, 15 bp, Homo sapiens
aaaaggctagtcatt

SEQ ID NO: 1849328 - DNA, 15 bp, Homo sapiens
aaaggctagtcatta

SEQ ID NO: 1849329 - DNA, 15 bp, Homo sapiens
aaggctagtcattaa

SEQ ID NO: 1849330 - DNA, 15 bp, Homo sapiens
aggctagtcattaaa

SEQ ID NO: 1849331 - DNA, 15 bp, Homo sapiens
ggctagtcattaaat

SEQ ID NO: 1849332 - DNA, 15 bp, Homo sapiens
gctagtcattaaatc

SEQ ID NO: 1849333 - DNA, 15 bp, Homo sapiens
ctagtcattaaatcc

SEQ ID NO: 1849334 - DNA, 15 bp, Homo sapiens
tagtcattaaatcct

SEQ ID NO: 1849335 - DNA, 15 bp, Homo sapiens
agtcattaaatcctt

SEQ ID NO: 1849336 - DNA, 15 bp, Homo sapiens
gtcattaaatcctta

SEQ ID NO: 1849337 - DNA, 15 bp, Homo sapiens
tcattaaatccttat

SEQ ID NO: 1849338 - DNA, 15 bp, Homo sapiens
cattaaatccttatt

SEQ ID NO: 1849339 - DNA, 15 bp, Homo sapiens
attaaatccttattt

SEQ ID NO: 1849340 - DNA, 15 bp, Homo sapiens
ttaaatccttatttg

SEQ ID NO: 1849341 - DNA, 15 bp, Homo sapiens
taaatccttatttgc

SEQ ID NO: 1849342 - DNA, 15 bp, Homo sapiens
aaatccttatttgca

SEQ ID NO: 1849343 - DNA, 15 bp, Homo sapiens
aatccttatttgcag

SEQ ID NO: 1849344 - DNA, 15 bp, Homo sapiens
atccttatttgcagc

SEQ ID NO: 1849345 - DNA, 15 bp, Homo sapiens
tccttatttgcagcc

SEQ ID NO: 1849346 - DNA, 15 bp, Homo sapiens
ccttatttgcagcct

SEQ ID NO: 1849347 - DNA, 15 bp, Homo sapiens
cttatttgcagcctg

SEQ ID NO: 1849348 - DNA, 15 bp, Homo sapiens
ttatttgcagcctgt

SEQ ID NO: 1849349 - DNA, 15 bp, Homo sapiens
tatttgcagcctgtg

SEQ ID NO: 1849350 - DNA, 15 bp, Homo sapiens
atttgcagcctgtga

SEQ ID NO: 1849351 - DNA, 15 bp, Homo sapiens
tttgcagcctgtgac

SEQ ID NO: 1849352 - DNA, 15 bp, Homo sapiens
ttgcagcctgtgaca

SEQ ID NO: 1849353 - DNA, 15 bp, Homo sapiens
tgcagcctgtgacag

SEQ ID NO: 1849354 - DNA, 15 bp, Homo sapiens
gcagcctgtgacagc

SEQ ID NO: 1849355 - DNA, 15 bp, Homo sapiens
cagcctgtgacagca

SEQ ID NO: 1849356 - DNA, 15 bp, Homo sapiens
agcctgtgacagcag

SEQ ID NO: 1849357 - DNA, 15 bp, Homo sapiens
gcctgtgacagcagg

SEQ ID NO: 1849358 - DNA, 15 bp, Homo sapiens
cctgtgacagcagga

SEQ ID NO: 1849359 - DNA, 15 bp, Homo sapiens
ctgtgacagcaggag

SEQ ID NO: 1849360 - DNA, 15 bp, Homo sapiens
tgtgacagcaggagc

SEQ ID NO: 1849361 - DNA, 15 bp, Homo sapiens
gacagcaggagccaa

SEQ ID NO: 1849362 - DNA, 15 bp, Homo sapiens
acagcaggagccaaa

SEQ ID NO: 1849363 - DNA, 15 bp, Homo sapiens
cagcaggagccaaaa

SEQ ID NO: 1849364 - DNA, 15 bp, Homo sapiens
agcaggagccaaaag

SEQ ID NO: 1849365 - DNA, 15 bp, Homo sapiens
gcaggagccaaaagc

SEQ ID NO: 1849366 - DNA, 15 bp, Homo sapiens
caggagccaaaagcc

SEQ ID NO: 1849367 - DNA, 15 bp, Homo sapiens
aggagccaaaagcct

SEQ ID NO: 1849368 - DNA, 15 bp, Homo sapiens
ggagccaaaagcctc

SEQ ID NO: 1849369 - DNA, 15 bp, Homo sapiens
gagccaaaagcctct

SEQ ID NO: 1849370 - DNA, 15 bp, Homo sapiens
agccaaaagcctctg

SEQ ID NO: 1849371 - DNA, 15 bp, Homo sapiens
gccaaaagcctctga

SEQ ID NO: 1849372 - DNA, 15 bp, Homo sapiens
ccaaaagcctctgac

SEQ ID NO: 1849373 - DNA, 15 bp, Homo sapiens
caaaagcctctgacc

SEQ ID NO: 1849374 - DNA, 15 bp, Homo sapiens
aaaagcctctgaccc

SEQ ID NO: 1849375 - DNA, 15 bp, Homo sapiens
aaagcctctgacccg

SEQ ID NO: 1849376 - DNA, 15 bp, Homo sapiens
aagcctctgacccgc

SEQ ID NO: 1849377 - DNA, 15 bp, Homo sapiens
agcctctgacccgct

SEQ ID NO: 1849378 - DNA, 15 bp, Homo sapiens
gcctctgacccgctc

SEQ ID NO: 1849379 - DNA, 15 bp, Homo sapiens
cctctgacccgctca

SEQ ID NO: 1849380 - DNA, 15 bp, Homo sapiens
ctctgacccgctcag

SEQ ID NO: 1849381 - DNA, 15 bp, Homo sapiens
tctgacccgctcagg

SEQ ID NO: 1849382 - DNA, 15 bp, Homo sapiens
ctgacccgctcagga

SEQ ID NO: 1849383 - DNA, 15 bp, Homo sapiens
tgacccgctcaggac

SEQ ID NO: 1849384 - DNA, 15 bp, Homo sapiens
gacccgctcaggacc

SEQ ID NO: 1849385 - DNA, 15 bp, Homo sapiens
acccgctcaggacct

SEQ ID NO: 1849386 - DNA, 15 bp, Homo sapiens
cccgctcaggacctg

SEQ ID NO: 1849387 - DNA, 15 bp, Homo sapiens
ccgctcaggacctgg

SEQ ID NO: 1849388 - DNA, 15 bp, Homo sapiens
cgctcaggacctggg

SEQ ID NO: 1849389 - DNA, 15 bp, Homo sapiens
gctcaggacctgggg

SEQ ID NO: 1849390 - DNA, 15 bp, Homo sapiens
ctcaggacctggggt

SEQ ID NO: 1849391 - DNA, 15 bp, Homo sapiens
tcaggacctggggtt

SEQ ID NO: 1849392 - DNA, 15 bp, Homo sapiens
caggacctggggtta

SEQ ID NO: 1849393 - DNA, 15 bp, Homo sapiens
aggacctggggttag

SEQ ID NO: 1849394 - DNA, 15 bp, Homo sapiens
ggacctggggttaga

SEQ ID NO: 1849395 - DNA, 15 bp, Homo sapiens
gacctggggttagag

SEQ ID NO: 1849396 - DNA, 15 bp, Homo sapiens
acctggggttagagc

SEQ ID NO: 1849397 - DNA, 15 bp, Homo sapiens
cctggggttagagct

SEQ ID NO: 1849398 - DNA, 15 bp, Homo sapiens
ctggggttagagctg

SEQ ID NO: 1849399 - DNA, 15 bp, Homo sapiens
tggggttagagctgc

SEQ ID NO: 1849400 - DNA, 15 bp, Homo sapiens
ggggttagagctgca

SEQ ID NO: 1849401 - DNA, 15 bp, Homo sapiens
gggttagagctgcat

SEQ ID NO: 1849402 - DNA, 15 bp, Homo sapiens
ggttagagctgcatg

SEQ ID NO: 1849403 - DNA, 15 bp, Homo sapiens
gttagagctgcatgg

SEQ ID NO: 1849404 - DNA, 15 bp, Homo sapiens
ttagagctgcatgga

SEQ ID NO: 1849405 - DNA, 15 bp, Homo sapiens
tagagctgcatggac

SEQ ID NO: 1849406 - DNA, 15 bp, Homo sapiens
agagctgcatggacc

SEQ ID NO: 1849407 - DNA, 15 bp, Homo sapiens
gagctgcatggaccc

SEQ ID NO: 1849408 - DNA, 15 bp, Homo sapiens
agctgcatggaccct

SEQ ID NO: 1849409 - DNA, 15 bp, Homo sapiens
gctgcatggaccctg

SEQ ID NO: 1849410 - DNA, 15 bp, Homo sapiens
ctgcatggaccctga

SEQ ID NO: 1849411 - DNA, 15 bp, Homo sapiens
tgcatggaccctgaa

SEQ ID NO: 1849412 - DNA, 15 bp, Homo sapiens
gcatggaccctgaag

SEQ ID NO: 1849413 - DNA, 15 bp, Homo sapiens
catggaccctgaaga

SEQ ID NO: 1849414 - DNA, 15 bp, Homo sapiens
atggaccctgaagag

SEQ ID NO: 1849415 - DNA, 15 bp, Homo sapiens
tggaccctgaagaga

SEQ ID NO: 1849416 - DNA, 15 bp, Homo sapiens
ggaccctgaagagag

SEQ ID NO: 1849417 - DNA, 15 bp, Homo sapiens
gaccctgaagagagg

SEQ ID NO: 1849418 - DNA, 15 bp, Homo sapiens
accctgaagagaggg

SEQ ID NO: 1849419 - DNA, 15 bp, Homo sapiens
ccctgaagagaggga

SEQ ID NO: 1849420 - DNA, 15 bp, Homo sapiens
cctgaagagagggat

SEQ ID NO: 1849421 - DNA, 15 bp, Homo sapiens
ctgaagagagggatc

SEQ ID NO: 1849422 - DNA, 15 bp, Homo sapiens
tgaagagagggatcc

SEQ ID NO: 1849423 - DNA, 15 bp, Homo sapiens
gaagagagggatccc

SEQ ID NO: 1849424 - DNA, 15 bp, Homo sapiens
aagagagggatccct

SEQ ID NO: 1849425 - DNA, 15 bp, Homo sapiens
agagagggatccctg

SEQ ID NO: 1849426 - DNA, 15 bp, Homo sapiens
gagagggatccctgt

SEQ ID NO: 1849427 - DNA, 15 bp, Homo sapiens
agagggatccctgtg

SEQ ID NO: 1849428 - DNA, 15 bp, Homo sapiens
gagggatccctgtgc

SEQ ID NO: 1849429 - DNA, 15 bp, Homo sapiens
agggatccctgtgct

SEQ ID NO: 1849430 - DNA, 15 bp, Homo sapiens
gggatccctgtgcta

SEQ ID NO: 1849431 - DNA, 15 bp, Homo sapiens
ggatccctgtgctaa

SEQ ID NO: 1849432 - DNA, 15 bp, Homo sapiens
gatccctgtgctaag

SEQ ID NO: 1849433 - DNA, 15 bp, Homo sapiens
atccctgtgctaagg

SEQ ID NO: 1849434 - DNA, 15 bp, Homo sapiens
tccctgtgctaaggc

SEQ ID NO: 1849435 - DNA, 15 bp, Homo sapiens
ccctgtgctaaggcc

SEQ ID NO: 1849436 - DNA, 15 bp, Homo sapiens
cctgtgctaaggcct

SEQ ID NO: 1849437 - DNA, 15 bp, Homo sapiens
ctgtgctaaggcctt

SEQ ID NO: 1849438 - DNA, 15 bp, Homo sapiens
tgtgctaaggccttc

SEQ ID NO: 1849439 - DNA, 15 bp, Homo sapiens
gtgctaaggccttcg

SEQ ID NO: 1849440 - DNA, 15 bp, Homo sapiens
tgctaaggccttcgg

SEQ ID NO: 1849441 - DNA, 15 bp, Homo sapiens
gctaaggccttcgga

SEQ ID NO: 1849442 - DNA, 15 bp, Homo sapiens
ctaaggccttcggac

SEQ ID NO: 1849443 - DNA, 15 bp, Homo sapiens
taaggccttcggaca

SEQ ID NO: 1849444 - DNA, 15 bp, Homo sapiens
aaggccttcggacag

SEQ ID NO: 1849445 - DNA, 15 bp, Homo sapiens
aggccttcggacagt

SEQ ID NO: 1849446 - DNA, 15 bp, Homo sapiens
ggccttcggacagtg

SEQ ID NO: 1849447 - DNA, 15 bp, Homo sapiens
gccttcggacagtgg

SEQ ID NO: 1849448 - DNA, 15 bp, Homo sapiens
ccttcggacagtggc

SEQ ID NO: 1849449 - DNA, 15 bp, Homo sapiens
cttcggacagtggcc

SEQ ID NO: 1849450 - DNA, 15 bp, Homo sapiens
ttcggacagtggccc

SEQ ID NO: 1849451 - DNA, 15 bp, Homo sapiens
tcggacagtggccct

SEQ ID NO: 1849452 - DNA, 15 bp, Homo sapiens
cggacagtggccctg

SEQ ID NO: 1849453 - DNA, 15 bp, Homo sapiens
ggacagtggccctga

SEQ ID NO: 1849454 - DNA, 15 bp, Homo sapiens
gacagtggccctgac

SEQ ID NO: 1849455 - DNA, 15 bp, Homo sapiens
acagtggccctgacc

SEQ ID NO: 1849456 - DNA, 15 bp, Homo sapiens
cagtggccctgaccg

SEQ ID NO: 1849457 - DNA, 15 bp, Homo sapiens
agtggccctgaccga

SEQ ID NO: 1849458 - DNA, 15 bp, Homo sapiens
gtggccctgaccgag

SEQ ID NO: 1849459 - DNA, 15 bp, Homo sapiens
tggccctgaccgagc

SEQ ID NO: 1849460 - DNA, 15 bp, Homo sapiens
ggccctgaccgagca

SEQ ID NO: 1849461 - DNA, 15 bp, Homo sapiens
gccctgaccgagcag

SEQ ID NO: 1849462 - DNA, 15 bp, Homo sapiens
ccctgaccgagcagc

SEQ ID NO: 1849463 - DNA, 15 bp, Homo sapiens
cctgaccgagcagca

SEQ ID NO: 1849464 - DNA, 15 bp, Homo sapiens
ctgaccgagcagcag

SEQ ID NO: 1849465 - DNA, 15 bp, Homo sapiens
tgaccgagcagcaga

SEQ ID NO: 1849466 - DNA, 15 bp, Homo sapiens
gaccgagcagcagag

SEQ ID NO: 1849467 - DNA, 15 bp, Homo sapiens
accgagcagcagagg

SEQ ID NO: 1849468 - DNA, 15 bp, Homo sapiens
ccgagcagcagaggg

SEQ ID NO: 1849469 - DNA, 15 bp, Homo sapiens
cgagcagcagaggga

SEQ ID NO: 1849470 - DNA, 15 bp, Homo sapiens
gagcagcagagggaa

SEQ ID NO: 1849471 - DNA, 15 bp, Homo sapiens
agcagcagagggaag

SEQ ID NO: 1849472 - DNA, 15 bp, Homo sapiens
gcagcagagggaaga

SEQ ID NO: 1849473 - DNA, 15 bp, Homo sapiens
cagcagagggaagag

SEQ ID NO: 1849474 - DNA, 15 bp, Homo sapiens
agcagagggaagagg

SEQ ID NO: 1849475 - DNA, 15 bp, Homo sapiens
cagagggaagagggc

SEQ ID NO: 1849476 - DNA, 15 bp, Homo sapiens
agagggaagagggct

SEQ ID NO: 1849477 - DNA, 15 bp, Homo sapiens
gagggaagagggctt

SEQ ID NO: 1849478 - DNA, 15 bp, Homo sapiens
agggaagagggctta

SEQ ID NO: 1849479 - DNA, 15 bp, Homo sapiens
gggaagagggcttag

SEQ ID NO: 1849480 - DNA, 15 bp, Homo sapiens
ggaagagggcttagg

SEQ ID NO: 1849481 - DNA, 15 bp, Homo sapiens
gaagagggcttaggg

SEQ ID NO: 1849482 - DNA, 15 bp, Homo sapiens
aagagggcttaggga

SEQ ID NO: 1849483 - DNA, 15 bp, Homo sapiens
agagggcttagggag

SEQ ID NO: 1849484 - DNA, 15 bp, Homo sapiens
gagggcttagggagc

SEQ ID NO: 1849485 - DNA, 15 bp, Homo sapiens
agggcttagggagcg

SEQ ID NO: 1849486 - DNA, 15 bp, Homo sapiens
gggcttagggagcgg

SEQ ID NO: 1849487 - DNA, 15 bp, Homo sapiens
ggcttagggagcggg

SEQ ID NO: 1849488 - DNA, 15 bp, Homo sapiens
gcttagggagcggga

SEQ ID NO: 1849489 - DNA, 15 bp, Homo sapiens
cttagggagcgggaa

SEQ ID NO: 1849490 - DNA, 15 bp, Homo sapiens
ttagggagcgggaag

SEQ ID NO: 1849491 - DNA, 15 bp, Homo sapiens
tagggagcgggaagc

SEQ ID NO: 1849492 - DNA, 15 bp, Homo sapiens
agggagcgggaagca

SEQ ID NO: 1849493 - DNA, 15 bp, Homo sapiens
gggagcgggaagcac

SEQ ID NO: 1849494 - DNA, 15 bp, Homo sapiens
ggagcgggaagcacc

SEQ ID NO: 1849495 - DNA, 15 bp, Homo sapiens
gagcgggaagcacca

SEQ ID NO: 1849496 - DNA, 15 bp, Homo sapiens
agcgggaagcaccaa

SEQ ID NO: 1849497 - DNA, 15 bp, Homo sapiens
gcgggaagcaccaat

SEQ ID NO: 1849498 - DNA, 15 bp, Homo sapiens
cgggaagcaccaatg

SEQ ID NO: 1849499 - DNA, 15 bp, Homo sapiens
gggaagcaccaatgc

SEQ ID NO: 1849500 - DNA, 15 bp, Homo sapiens
ggaagcaccaatgct

SEQ ID NO: 1849501 - DNA, 15 bp, Homo sapiens
gaagcaccaatgctg

SEQ ID NO: 1849502 - DNA, 15 bp, Homo sapiens
aagcaccaatgctgg

SEQ ID NO: 1849503 - DNA, 15 bp, Homo sapiens
agcaccaatgctggg

SEQ ID NO: 1849504 - DNA, 15 bp, Homo sapiens
gcaccaatgctgggc

SEQ ID NO: 1849505 - DNA, 15 bp, Homo sapiens
caccaatgctgggct

SEQ ID NO: 1849506 - DNA, 15 bp, Homo sapiens
accaatgctgggctt

SEQ ID NO: 1849507 - DNA, 15 bp, Homo sapiens
ccaatgctgggcttg

SEQ ID NO: 1849508 - DNA, 15 bp, Homo sapiens
caatgctgggcttgc

SEQ ID NO: 1849509 - DNA, 15 bp, Homo sapiens
aatgctgggcttgca

SEQ ID NO: 1849510 - DNA, 15 bp, Homo sapiens
atgctgggcttgcaa

SEQ ID NO: 1849511 - DNA, 15 bp, Homo sapiens
tgctgggcttgcaaa

SEQ ID NO: 1849512 - DNA, 15 bp, Homo sapiens
gctgggcttgcaaag

SEQ ID NO: 1849513 - DNA, 15 bp, Homo sapiens
ctgggcttgcaaagg

SEQ ID NO: 1849514 - DNA, 15 bp, Homo sapiens
tgggcttgcaaaggg

SEQ ID NO: 1849515 - DNA, 15 bp, Homo sapiens
gggcttgcaaagggc

SEQ ID NO: 1849516 - DNA, 15 bp, Homo sapiens
ggcttgcaaagggca

SEQ ID NO: 1849517 - DNA, 15 bp, Homo sapiens
gcttgcaaagggcag

SEQ ID NO: 1849518 - DNA, 15 bp, Homo sapiens
cttgcaaagggcaga

SEQ ID NO: 1849519 - DNA, 15 bp, Homo sapiens
ttgcaaagggcagag

SEQ ID NO: 1849520 - DNA, 15 bp, Homo sapiens
tgcaaagggcagagc

SEQ ID NO: 1849521 - DNA, 15 bp, Homo sapiens
gcaaagggcagagca

SEQ ID NO: 1849522 - DNA, 15 bp, Homo sapiens
caaagggcagagcag

SEQ ID NO: 1849523 - DNA, 15 bp, Homo sapiens
aaagggcagagcagc

SEQ ID NO: 1849524 - DNA, 15 bp, Homo sapiens
aagggcagagcagca

SEQ ID NO: 1849525 - DNA, 15 bp, Homo sapiens
agggcagagcagcag

SEQ ID NO: 1849526 - DNA, 15 bp, Homo sapiens
gggcagagcagcagg

SEQ ID NO: 1849527 - DNA, 15 bp, Homo sapiens
ggcagagcagcagga

SEQ ID NO: 1849528 - DNA, 15 bp, Homo sapiens
gcagagcagcaggag

SEQ ID NO: 1849529 - DNA, 15 bp, Homo sapiens
cagagcagcaggaga

SEQ ID NO: 1849530 - DNA, 15 bp, Homo sapiens
agagcagcaggagag

SEQ ID NO: 1849531 - DNA, 15 bp, Homo sapiens
gagcagcaggagaga

SEQ ID NO: 1849532 - DNA, 15 bp, Homo sapiens
agcagcaggagagag

SEQ ID NO: 1849533 - DNA, 15 bp, Homo sapiens
gcagcaggagagagg

SEQ ID NO: 1849534 - DNA, 15 bp, Homo sapiens
cagcaggagagaggc

SEQ ID NO: 1849535 - DNA, 15 bp, Homo sapiens
agcaggagagaggct

SEQ ID NO: 1849536 - DNA, 15 bp, Homo sapiens
gcaggagagaggctg

SEQ ID NO: 1849537 - DNA, 15 bp, Homo sapiens
caggagagaggctgg

SEQ ID NO: 1849538 - DNA, 15 bp, Homo sapiens
aggagagaggctggc

SEQ ID NO: 1849539 - DNA, 15 bp, Homo sapiens
ggagagaggctggca

SEQ ID NO: 1849540 - DNA, 15 bp, Homo sapiens
gagagaggctggcat

SEQ ID NO: 1849541 - DNA, 15 bp, Homo sapiens
agagaggctggcata

SEQ ID NO: 1849542 - DNA, 15 bp, Homo sapiens
gagaggctggcatag

SEQ ID NO: 1849543 - DNA, 15 bp, Homo sapiens
agaggctggcatagg

SEQ ID NO: 1849544 - DNA, 15 bp, Homo sapiens
gaggctggcatagga

SEQ ID NO: 1849545 - DNA, 15 bp, Homo sapiens
aggctggcataggag

SEQ ID NO: 1849546 - DNA, 15 bp, Homo sapiens
ggctggcataggagg

SEQ ID NO: 1849547 - DNA, 15 bp, Homo sapiens
gctggcataggaggg

SEQ ID NO: 1849548 - DNA, 15 bp, Homo sapiens
ctggcataggaggga

SEQ ID NO: 1849549 - DNA, 15 bp, Homo sapiens
tggcataggagggag

SEQ ID NO: 1849550 - DNA, 15 bp, Homo sapiens
ggcataggagggagg

SEQ ID NO: 1849551 - DNA, 15 bp, Homo sapiens
gcataggagggagga

SEQ ID NO: 1849552 - DNA, 15 bp, Homo sapiens
cataggagggaggag

SEQ ID NO: 1849553 - DNA, 15 bp, Homo sapiens
ataggagggaggagg

SEQ ID NO: 1849554 - DNA, 15 bp, Homo sapiens
taggagggaggaggg

SEQ ID NO: 1849555 - DNA, 15 bp, Homo sapiens
aggagggaggagggc

SEQ ID NO: 1849556 - DNA, 15 bp, Homo sapiens
ggagggaggagggct

SEQ ID NO: 1849557 - DNA, 15 bp, Homo sapiens
gagggaggagggctc

SEQ ID NO: 1849558 - DNA, 15 bp, Homo sapiens
agggaggagggctca

SEQ ID NO: 1849559 - DNA, 15 bp, Homo sapiens
gggaggagggctcac

SEQ ID NO: 1849560 - DNA, 15 bp, Homo sapiens
ggaggagggctcaca

SEQ ID NO: 1849561 - DNA, 15 bp, Homo sapiens
gaggagggctcacag

SEQ ID NO: 1849562 - DNA, 15 bp, Homo sapiens
aggagggctcacagg

SEQ ID NO: 1849563 - DNA, 15 bp, Homo sapiens
ggagggctcacagga

SEQ ID NO: 1849564 - DNA, 15 bp, Homo sapiens
gagggctcacaggag

SEQ ID NO: 1849565 - DNA, 15 bp, Homo sapiens
agggctcacaggagt

SEQ ID NO: 1849566 - DNA, 15 bp, Homo sapiens
gggctcacaggagtg

SEQ ID NO: 1849567 - DNA, 15 bp, Homo sapiens
ggctcacaggagtgg

SEQ ID NO: 1849568 - DNA, 15 bp, Homo sapiens
gctcacaggagtggg

SEQ ID NO: 1849569 - DNA, 15 bp, Homo sapiens
ctcacaggagtggga

SEQ ID NO: 1849570 - DNA, 15 bp, Homo sapiens
tcacaggagtgggag

SEQ ID NO: 1849571 - DNA, 15 bp, Homo sapiens
cacaggagtgggagg

SEQ ID NO: 1849572 - DNA, 15 bp, Homo sapiens
acaggagtgggaggt

SEQ ID NO: 1849573 - DNA, 15 bp, Homo sapiens
caggagtgggaggtg

SEQ ID NO: 1849574 - DNA, 15 bp, Homo sapiens
aggagtgggaggtgg

SEQ ID NO: 1849575 - DNA, 15 bp, Homo sapiens
ggagtgggaggtgga

SEQ ID NO: 1849576 - DNA, 15 bp, Homo sapiens
gagtgggaggtggat

SEQ ID NO: 1849577 - DNA, 15 bp, Homo sapiens
agtgggaggtggatt

SEQ ID NO: 1849578 - DNA, 15 bp, Homo sapiens
gtgggaggtggattg

SEQ ID NO: 1849579 - DNA, 15 bp, Homo sapiens
tgggaggtggattgg

SEQ ID NO: 1849580 - DNA, 15 bp, Homo sapiens
gggaggtggattgga

SEQ ID NO: 1849581 - DNA, 15 bp, Homo sapiens
ggaggtggattggat

SEQ ID NO: 1849582 - DNA, 15 bp, Homo sapiens
gaggtggattggatt

SEQ ID NO: 1849583 - DNA, 15 bp, Homo sapiens
aggtggattggattt

SEQ ID NO: 1849584 - DNA, 15 bp, Homo sapiens
ggtggattggattta

SEQ ID NO: 1849585 - DNA, 15 bp, Homo sapiens
gtggattggatttag

SEQ ID NO: 1849586 - DNA, 15 bp, Homo sapiens
tggattggatttagg

SEQ ID NO: 1849587 - DNA, 15 bp, Homo sapiens
ggattggatttaggg

SEQ ID NO: 1849588 - DNA, 15 bp, Homo sapiens
gattggatttagggc

SEQ ID NO: 1849589 - DNA, 15 bp, Homo sapiens
attggatttagggcc

SEQ ID NO: 1849590 - DNA, 15 bp, Homo sapiens
ttggatttagggcca

SEQ ID NO: 1849591 - DNA, 15 bp, Homo sapiens
tggatttagggccat

SEQ ID NO: 1849592 - DNA, 15 bp, Homo sapiens
ggatttagggccatc

SEQ ID NO: 1849593 - DNA, 15 bp, Homo sapiens
gatttagggccatca

SEQ ID NO: 1849594 - DNA, 15 bp, Homo sapiens
atttagggccatcag

SEQ ID NO: 1849595 - DNA, 15 bp, Homo sapiens
tttagggccatcagg

SEQ ID NO: 1849596 - DNA, 15 bp, Homo sapiens
ttagggccatcagga

SEQ ID NO: 1849597 - DNA, 15 bp, Homo sapiens
tagggccatcaggag

SEQ ID NO: 1849598 - DNA, 15 bp, Homo sapiens
agggccatcaggagg

SEQ ID NO: 1849599 - DNA, 15 bp, Homo sapiens
gggccatcaggaggg

SEQ ID NO: 1849600 - DNA, 15 bp, Homo sapiens
ggccatcaggagggg

SEQ ID NO: 1849601 - DNA, 15 bp, Homo sapiens
gccatcaggaggggt

SEQ ID NO: 1849602 - DNA, 15 bp, Homo sapiens
ccatcaggaggggtg

SEQ ID NO: 1849603 - DNA, 15 bp, Homo sapiens
catcaggaggggtgg

SEQ ID NO: 1849604 - DNA, 15 bp, Homo sapiens
atcaggaggggtggg

SEQ ID NO: 1849605 - DNA, 15 bp, Homo sapiens
tcaggaggggtggga

SEQ ID NO: 1849606 - DNA, 15 bp, Homo sapiens
caggaggggtgggag

SEQ ID NO: 1849607 - DNA, 15 bp, Homo sapiens
aggaggggtgggagg

SEQ ID NO: 1849608 - DNA, 15 bp, Homo sapiens
ggaggggtgggaggc

SEQ ID NO: 1849609 - DNA, 15 bp, Homo sapiens
gaggggtgggaggcc

SEQ ID NO: 1849610 - DNA, 15 bp, Homo sapiens
aggggtgggaggcca

SEQ ID NO: 1849611 - DNA, 15 bp, Homo sapiens
ggggtgggaggccaa

SEQ ID NO: 1849612 - DNA, 15 bp, Homo sapiens
gggtgggaggccaaa

SEQ ID NO: 1849613 - DNA, 15 bp, Homo sapiens
ggtgggaggccaaac

SEQ ID NO: 1849614 - DNA, 15 bp, Homo sapiens
gtgggaggccaaaca

SEQ ID NO: 1849615 - DNA, 15 bp, Homo sapiens
tgggaggccaaacag

SEQ ID NO: 1849616 - DNA, 15 bp, Homo sapiens
gggaggccaaacagc

SEQ ID NO: 1849617 - DNA, 15 bp, Homo sapiens
ggaggccaaacagct

SEQ ID NO: 1849618 - DNA, 15 bp, Homo sapiens
gaggccaaacagctc

SEQ ID NO: 1849619 - DNA, 15 bp, Homo sapiens
aggccaaacagctca

SEQ ID NO: 1849620 - DNA, 15 bp, Homo sapiens
ggccaaacagctcag

SEQ ID NO: 1849621 - DNA, 15 bp, Homo sapiens
gccaaacagctcagc

SEQ ID NO: 1849622 - DNA, 15 bp, Homo sapiens
ccaaacagctcagct

SEQ ID NO: 1849623 - DNA, 15 bp, Homo sapiens
caaacagctcagctc

SEQ ID NO: 1849624 - DNA, 15 bp, Homo sapiens
aaacagctcagctcc

SEQ ID NO: 1849625 - DNA, 15 bp, Homo sapiens
aacagctcagctccc

SEQ ID NO: 1849626 - DNA, 15 bp, Homo sapiens
acagctcagctcccc

SEQ ID NO: 1849627 - DNA, 15 bp, Homo sapiens
cagctcagctcccca

SEQ ID NO: 1849628 - DNA, 15 bp, Homo sapiens
agctcagctccccag

SEQ ID NO: 1849629 - DNA, 15 bp, Homo sapiens
gctcagctccccagt

SEQ ID NO: 1849630 - DNA, 15 bp, Homo sapiens
ctcagctccccagtc

SEQ ID NO: 1849631 - DNA, 15 bp, Homo sapiens
tcagctccccagtcc

SEQ ID NO: 1849632 - DNA, 15 bp, Homo sapiens
cagctccccagtccc

SEQ ID NO: 1849633 - DNA, 15 bp, Homo sapiens
agctccccagtccct

SEQ ID NO: 1849634 - DNA, 15 bp, Homo sapiens
gctccccagtccctt

SEQ ID NO: 1849635 - DNA, 15 bp, Homo sapiens
ctccccagtcccttt

SEQ ID NO: 1849636 - DNA, 15 bp, Homo sapiens
tccccagtccctttc

SEQ ID NO: 1849637 - DNA, 15 bp, Homo sapiens
ccccagtccctttct

SEQ ID NO: 1849638 - DNA, 15 bp, Homo sapiens
cccagtccctttctg

SEQ ID NO: 1849639 - DNA, 15 bp, Homo sapiens
ccagtccctttctgg

SEQ ID NO: 1849640 - DNA, 15 bp, Homo sapiens
cagtccctttctggg

SEQ ID NO: 1849641 - DNA, 15 bp, Homo sapiens
agtccctttctgggg

SEQ ID NO: 1849642 - DNA, 15 bp, Homo sapiens
gtccctttctggggc

SEQ ID NO: 1849643 - DNA, 15 bp, Homo sapiens
tccctttctggggcc

SEQ ID NO: 1849644 - DNA, 15 bp, Homo sapiens
ccctttctggggcca

SEQ ID NO: 1849645 - DNA, 15 bp, Homo sapiens
cctttctggggccat

SEQ ID NO: 1849646 - DNA, 15 bp, Homo sapiens
ctttctggggccatc

SEQ ID NO: 1849647 - DNA, 15 bp, Homo sapiens
tttctggggccatct

SEQ ID NO: 1849648 - DNA, 15 bp, Homo sapiens
ttctggggccatctt

SEQ ID NO: 1849649 - DNA, 15 bp, Homo sapiens
tctggggccatcttt

SEQ ID NO: 1849650 - DNA, 15 bp, Homo sapiens
ctggggccatctttg

SEQ ID NO: 1849651 - DNA, 15 bp, Homo sapiens
tggggccatctttgt

SEQ ID NO: 1849652 - DNA, 15 bp, Homo sapiens
ggggccatctttgtt

SEQ ID NO: 1849653 - DNA, 15 bp, Homo sapiens
gggccatctttgttt

SEQ ID NO: 1849654 - DNA, 15 bp, Homo sapiens
gccatctttgttttc

SEQ ID NO: 1849655 - DNA, 15 bp, Homo sapiens
ccatctttgttttct

SEQ ID NO: 1849656 - DNA, 15 bp, Homo sapiens
catctttgttttctg

SEQ ID NO: 1849657 - DNA, 15 bp, Homo sapiens
atctttgttttctga

SEQ ID NO: 1849658 - DNA, 15 bp, Homo sapiens
tctttgttttctgat

SEQ ID NO: 1849659 - DNA, 15 bp, Homo sapiens
ctttgttttctgatt

SEQ ID NO: 1849660 - DNA, 15 bp, Homo sapiens
tttgttttctgattt

SEQ ID NO: 1849661 - DNA, 15 bp, Homo sapiens
ttgttttctgattta

SEQ ID NO: 1849662 - DNA, 15 bp, Homo sapiens
tgttttctgatttat

SEQ ID NO: 1849663 - DNA, 15 bp, Homo sapiens
gttttctgatttata

SEQ ID NO: 1849664 - DNA, 15 bp, Homo sapiens
ttttctgatttataa

SEQ ID NO: 1849665 - DNA, 15 bp, Homo sapiens
tttctgatttataat

SEQ ID NO: 1849666 - DNA, 15 bp, Homo sapiens
ttctgatttataatg

SEQ ID NO: 1849667 - DNA, 15 bp, Homo sapiens
tctgatttataatgt

SEQ ID NO: 1849668 - DNA, 15 bp, Homo sapiens
ctgatttataatgtg

SEQ ID NO: 1849669 - DNA, 15 bp, Homo sapiens
tgatttataatgtgt

SEQ ID NO: 1849670 - DNA, 15 bp, Homo sapiens
gatttataatgtgtc

SEQ ID NO: 1849671 - DNA, 15 bp, Homo sapiens
atttataatgtgtcc

SEQ ID NO: 1849672 - DNA, 15 bp, Homo sapiens
tttataatgtgtccc

SEQ ID NO: 1849673 - DNA, 15 bp, Homo sapiens
ttataatgtgtcccc

SEQ ID NO: 1849674 - DNA, 15 bp, Homo sapiens
tataatgtgtcccct

SEQ ID NO: 1849675 - DNA, 15 bp, Homo sapiens
ataatgtgtcccctt

SEQ ID NO: 1849676 - DNA, 15 bp, Homo sapiens
taatgtgtccccttt

SEQ ID NO: 1849677 - DNA, 15 bp, Homo sapiens
aatgtgtcccctttg

SEQ ID NO: 1849678 - DNA, 15 bp, Homo sapiens
atgtgtcccctttgc

SEQ ID NO: 1849679 - DNA, 15 bp, Homo sapiens
tgtgtcccctttgcg

SEQ ID NO: 1849680 - DNA, 15 bp, Homo sapiens
gtgtcccctttgcgg

SEQ ID NO: 1849681 - DNA, 15 bp, Homo sapiens
tgtcccctttgcgga

SEQ ID NO: 1849682 - DNA, 15 bp, Homo sapiens
gtcccctttgcggat

SEQ ID NO: 1849683 - DNA, 15 bp, Homo sapiens
tcccctttgcggatg

SEQ ID NO: 1849684 - DNA, 15 bp, Homo sapiens
cccctttgcggatgg

SEQ ID NO: 1849685 - DNA, 15 bp, Homo sapiens
ccctttgcggatggc

SEQ ID NO: 1849686 - DNA, 15 bp, Homo sapiens
cctttgcggatggcc

SEQ ID NO: 1849687 - DNA, 15 bp, Homo sapiens
ctttgcggatggcct

SEQ ID NO: 1849688 - DNA, 15 bp, Homo sapiens
tttgcggatggcctt

SEQ ID NO: 1849689 - DNA, 15 bp, Homo sapiens
ttgcggatggccttt

SEQ ID NO: 1849690 - DNA, 15 bp, Homo sapiens
tgcggatggcctttt

SEQ ID NO: 1849691 - DNA, 15 bp, Homo sapiens
atgtgggcagtgaat

SEQ ID NO: 1849692 - DNA, 15 bp, Homo sapiens
tgtgggcagtgaata

SEQ ID NO: 1849693 - DNA, 15 bp, Homo sapiens
gtgggcagtgaatat

SEQ ID NO: 1849694 - DNA, 15 bp, Homo sapiens
tgggcagtgaatata

SEQ ID NO: 1849695 - DNA, 15 bp, Homo sapiens
gggcagtgaatatat

SEQ ID NO: 1849696 - DNA, 15 bp, Homo sapiens
ggcagtgaatatata

SEQ ID NO: 1849697 - DNA, 15 bp, Homo sapiens
gcagtgaatatataa

SEQ ID NO: 1849698 - DNA, 15 bp, Homo sapiens
cagtgaatatataat

SEQ ID NO: 1849699 - DNA, 15 bp, Homo sapiens
agtgaatatataata

SEQ ID NO: 1849700 - DNA, 15 bp, Homo sapiens
gtgaatatataatat

SEQ ID NO: 1849701 - DNA, 15 bp, Homo sapiens
tgaatatataatata

SEQ ID NO: 1849702 - DNA, 15 bp, Homo sapiens
gaatatataatatat

SEQ ID NO: 1849703 - DNA, 15 bp, Homo sapiens
aatatataatatatg

SEQ ID NO: 1849704 - DNA, 15 bp, Homo sapiens
atatataatatatgt

SEQ ID NO: 1849705 - DNA, 15 bp, Homo sapiens
tatataatatatgtg

SEQ ID NO: 1849706 - DNA, 15 bp, Homo sapiens
atataatatatgtgt

SEQ ID NO: 1849707 - DNA, 15 bp, Homo sapiens
ataatatatgtgtga

SEQ ID NO: 1849708 - DNA, 15 bp, Homo sapiens
taatatatgtgtgat

SEQ ID NO: 1849709 - DNA, 15 bp, Homo sapiens
aatatatgtgtgata

SEQ ID NO: 1849710 - DNA, 15 bp, Homo sapiens
atatatgtgtgatat

SEQ ID NO: 1849711 - DNA, 15 bp, Homo sapiens
tatatgtgtgatatg

SEQ ID NO: 1849712 - DNA, 15 bp, Homo sapiens
atatgtgtgatatgt

SEQ ID NO: 1849713 - DNA, 15 bp, Homo sapiens
tatgtgtgatatgtg

SEQ ID NO: 1849714 - DNA, 15 bp, Homo sapiens
atgtgtgatatgtgt

SEQ ID NO: 1849715 - DNA, 15 bp, Homo sapiens
tgtgtgatatgtgtg

SEQ ID NO: 1849716 - DNA, 15 bp, Homo sapiens
gtgtgatatgtgtgg

SEQ ID NO: 1849717 - DNA, 15 bp, Homo sapiens
tgtgatatgtgtggt

SEQ ID NO: 1849718 - DNA, 15 bp, Homo sapiens
gtgatatgtgtggta

SEQ ID NO: 1849719 - DNA, 15 bp, Homo sapiens
tgatatgtgtggtat

SEQ ID NO: 1849720 - DNA, 15 bp, Homo sapiens
gatatgtgtggtatg

SEQ ID NO: 1849721 - DNA, 15 bp, Homo sapiens
atatgtgtggtatgt

SEQ ID NO: 1849722 - DNA, 15 bp, Homo sapiens
tatgtgtggtatgta

SEQ ID NO: 1849723 - DNA, 15 bp, Homo sapiens
atgtgtggtatgtag

SEQ ID NO: 1849724 - DNA, 15 bp, Homo sapiens
tgtgtggtatgtagt

SEQ ID NO: 1849725 - DNA, 15 bp, Homo sapiens
gtgtggtatgtagtg

SEQ ID NO: 1849726 - DNA, 15 bp, Homo sapiens
tgtggtatgtagtgt

SEQ ID NO: 1849727 - DNA, 15 bp, Homo sapiens
gtggtatgtagtgtg

SEQ ID NO: 1849728 - DNA, 15 bp, Homo sapiens
tggtatgtagtgtgt

SEQ ID NO: 1849729 - DNA, 15 bp, Homo sapiens
ggtatgtagtgtgtg

SEQ ID NO: 1849730 - DNA, 15 bp, Homo sapiens
gtatgtagtgtgtgc

SEQ ID NO: 1849731 - DNA, 15 bp, Homo sapiens
tatgtagtgtgtgca

SEQ ID NO: 1849732 - DNA, 15 bp, Homo sapiens
atgtagtgtgtgcag

SEQ ID NO: 1849733 - DNA, 15 bp, Homo sapiens
tgtagtgtgtgcaga

SEQ ID NO: 1849734 - DNA, 15 bp, Homo sapiens
gtagtgtgtgcagaa

SEQ ID NO: 1849735 - DNA, 15 bp, Homo sapiens
tagtgtgtgcagaat

SEQ ID NO: 1849736 - DNA, 15 bp, Homo sapiens
agtgtgtgcagaatg

SEQ ID NO: 1849737 - DNA, 15 bp, Homo sapiens
gtgtgtgcagaatgc

SEQ ID NO: 1849738 - DNA, 15 bp, Homo sapiens
tgtgtgcagaatgcg

SEQ ID NO: 1849739 - DNA, 15 bp, Homo sapiens
gtgtgcagaatgcgt

SEQ ID NO: 1849740 - DNA, 15 bp, Homo sapiens
tgtgcagaatgcgtg

SEQ ID NO: 1849741 - DNA, 15 bp, Homo sapiens
gtgcagaatgcgtgg

SEQ ID NO: 1849742 - DNA, 15 bp, Homo sapiens
tgcagaatgcgtggt

SEQ ID NO: 1849743 - DNA, 15 bp, Homo sapiens
gcagaatgcgtggtg

SEQ ID NO: 1849744 - DNA, 15 bp, Homo sapiens
cagaatgcgtggtgt

SEQ ID NO: 1849745 - DNA, 15 bp, Homo sapiens
agaatgcgtggtgtg

SEQ ID NO: 1849746 - DNA, 15 bp, Homo sapiens
gaatgcgtggtgtgt

SEQ ID NO: 1849747 - DNA, 15 bp, Homo sapiens
aatgcgtggtgtgtg

SEQ ID NO: 1849748 - DNA, 15 bp, Homo sapiens
atgcgtggtgtgtgg

SEQ ID NO: 1849749 - DNA, 15 bp, Homo sapiens
tgcgtggtgtgtggg

SEQ ID NO: 1849750 - DNA, 15 bp, Homo sapiens
gcgtggtgtgtgggt

SEQ ID NO: 1849751 - DNA, 15 bp, Homo sapiens
cgtggtgtgtgggta

SEQ ID NO: 1849752 - DNA, 15 bp, Homo sapiens
gtggtgtgtgggtat

SEQ ID NO: 1849753 - DNA, 15 bp, Homo sapiens
tggtgtgtgggtatt

SEQ ID NO: 1849754 - DNA, 15 bp, Homo sapiens
ggtgtgtgggtattt

SEQ ID NO: 1849755 - DNA, 15 bp, Homo sapiens
gtgtgtgggtattta

SEQ ID NO: 1849756 - DNA, 15 bp, Homo sapiens
tgtgtgggtatttat

SEQ ID NO: 1849757 - DNA, 15 bp, Homo sapiens
gtgtgggtatttatg

SEQ ID NO: 1849758 - DNA, 15 bp, Homo sapiens
tgtgggtatttatgt

SEQ ID NO: 1849759 - DNA, 15 bp, Homo sapiens
gtgggtatttatgtg

SEQ ID NO: 1849760 - DNA, 15 bp, Homo sapiens
tgggtatttatgtgg

SEQ ID NO: 1849761 - DNA, 15 bp, Homo sapiens
gggtatttatgtggt

SEQ ID NO: 1849762 - DNA, 15 bp, Homo sapiens
ggtatttatgtggtg

SEQ ID NO: 1849763 - DNA, 15 bp, Homo sapiens
gtatttatgtggtgt

SEQ ID NO: 1849764 - DNA, 15 bp, Homo sapiens
tatttatgtggtgtg

SEQ ID NO: 1849765 - DNA, 15 bp, Homo sapiens
atttatgtggtgtgt

SEQ ID NO: 1849766 - DNA, 15 bp, Homo sapiens
tttatgtggtgtgtg

SEQ ID NO: 1849767 - DNA, 15 bp, Homo sapiens
ttatgtggtgtgtgt

SEQ ID NO: 1849768 - DNA, 15 bp, Homo sapiens
tatgtggtgtgtgtg

SEQ ID NO: 1849769 - DNA, 15 bp, Homo sapiens
atgtggtgtgtgtgt

SEQ ID NO: 1849770 - DNA, 15 bp, Homo sapiens
tgtggtgtgtgtgtg

SEQ ID NO: 1849771 - DNA, 15 bp, Homo sapiens
gtggtgtgtgtgtgt

SEQ ID NO: 1849772 - DNA, 15 bp, Homo sapiens
tggtgtgtgtgtgtg

SEQ ID NO: 1849773 - DNA, 15 bp, Homo sapiens
ggtgtgtgtgtgtgg

SEQ ID NO: 1849774 - DNA, 15 bp, Homo sapiens
tgtgtgtgtgtggta

SEQ ID NO: 1849775 - DNA, 15 bp, Homo sapiens
gtgtgtgtgtggtat

SEQ ID NO: 1849776 - DNA, 15 bp, Homo sapiens
tgtgtgtgtggtatg

SEQ ID NO: 1849777 - DNA, 15 bp, Homo sapiens
gtgtgtgtggtatgt

SEQ ID NO: 1849778 - DNA, 15 bp, Homo sapiens
tgtgtgtggtatgtg

SEQ ID NO: 1849779 - DNA, 15 bp, Homo sapiens
gtgtgtggtatgtgt

SEQ ID NO: 1849780 - DNA, 15 bp, Homo sapiens
tgtgtggtatgtgta

SEQ ID NO: 1849781 - DNA, 15 bp, Homo sapiens
gtgtggtatgtgtat

SEQ ID NO: 1849782 - DNA, 15 bp, Homo sapiens
tgtggtatgtgtatg

SEQ ID NO: 1849783 - DNA, 15 bp, Homo sapiens
gtggtatgtgtatgg

SEQ ID NO: 1849784 - DNA, 15 bp, Homo sapiens
tggtatgtgtatggt

SEQ ID NO: 1849785 - DNA, 15 bp, Homo sapiens
ggtatgtgtatggtg

SEQ ID NO: 1849786 - DNA, 15 bp, Homo sapiens
gtatgtgtatggtgc

SEQ ID NO: 1849787 - DNA, 15 bp, Homo sapiens
tatgtgtatggtgca

SEQ ID NO: 1849788 - DNA, 15 bp, Homo sapiens
atgtgtatggtgcat

SEQ ID NO: 1849789 - DNA, 15 bp, Homo sapiens
tgtgtatggtgcatg

SEQ ID NO: 1849790 - DNA, 15 bp, Homo sapiens
gtgtatggtgcatgt

SEQ ID NO: 1849791 - DNA, 15 bp, Homo sapiens
tgtatggtgcatgtg

SEQ ID NO: 1849792 - DNA, 15 bp, Homo sapiens
gtatggtgcatgtgt

SEQ ID NO: 1849793 - DNA, 15 bp, Homo sapiens
tatggtgcatgtgtg

SEQ ID NO: 1849794 - DNA, 15 bp, Homo sapiens
atggtgcatgtgtgt

SEQ ID NO: 1849795 - DNA, 15 bp, Homo sapiens
tggtgcatgtgtgta

SEQ ID NO: 1849796 - DNA, 15 bp, Homo sapiens
ggtgcatgtgtgtat

SEQ ID NO: 1849797 - DNA, 15 bp, Homo sapiens
gtgcatgtgtgtatg

SEQ ID NO: 1849798 - DNA, 15 bp, Homo sapiens
tgcatgtgtgtatgt

SEQ ID NO: 1849799 - DNA, 15 bp, Homo sapiens
gcatgtgtgtatgtg

SEQ ID NO: 1849800 - DNA, 15 bp, Homo sapiens
catgtgtgtatgtgg

SEQ ID NO: 1849801 - DNA, 15 bp, Homo sapiens
atgtgtgtatgtggt

SEQ ID NO: 1849802 - DNA, 15 bp, Homo sapiens
gtgtgtatgtggtac

SEQ ID NO: 1849803 - DNA, 15 bp, Homo sapiens
tgtgtatgtggtaca

SEQ ID NO: 1849804 - DNA, 15 bp, Homo sapiens
gtgtatgtggtacat

SEQ ID NO: 1849805 - DNA, 15 bp, Homo sapiens
tgtatgtggtacatg

SEQ ID NO: 1849806 - DNA, 15 bp, Homo sapiens
gtatgtggtacatgt

SEQ ID NO: 1849807 - DNA, 15 bp, Homo sapiens
tatgtggtacatgta

SEQ ID NO: 1849808 - DNA, 15 bp, Homo sapiens
atgtggtacatgtat

SEQ ID NO: 1849809 - DNA, 15 bp, Homo sapiens
tgtggtacatgtatg

SEQ ID NO: 1849810 - DNA, 15 bp, Homo sapiens
gtggtacatgtatgt

SEQ ID NO: 1849811 - DNA, 15 bp, Homo sapiens
tggtacatgtatgtg

SEQ ID NO: 1849812 - DNA, 15 bp, Homo sapiens
ggtacatgtatgtga

SEQ ID NO: 1849813 - DNA, 15 bp, Homo sapiens
gtacatgtatgtgaa

SEQ ID NO: 1849814 - DNA, 15 bp, Homo sapiens
tacatgtatgtgaat

SEQ ID NO: 1849815 - DNA, 15 bp, Homo sapiens
acatgtatgtgaata

SEQ ID NO: 1849816 - DNA, 15 bp, Homo sapiens
catgtatgtgaatat

SEQ ID NO: 1849817 - DNA, 15 bp, Homo sapiens
atgtatgtgaatatg

SEQ ID NO: 1849818 - DNA, 15 bp, Homo sapiens
tgtatgtgaatatgt

SEQ ID NO: 1849819 - DNA, 15 bp, Homo sapiens
gtatgtgaatatgtg

SEQ ID NO: 1849820 - DNA, 15 bp, Homo sapiens
tatgtgaatatgtgt

SEQ ID NO: 1849821 - DNA, 15 bp, Homo sapiens
atgtgaatatgtgtc

SEQ ID NO: 1849822 - DNA, 15 bp, Homo sapiens
tgtgaatatgtgtca

SEQ ID NO: 1849823 - DNA, 15 bp, Homo sapiens
gtgaatatgtgtcat

SEQ ID NO: 1849824 - DNA, 15 bp, Homo sapiens
tgaatatgtgtcatg

SEQ ID NO: 1849825 - DNA, 15 bp, Homo sapiens
gaatatgtgtcatgt

SEQ ID NO: 1849826 - DNA, 15 bp, Homo sapiens
aatatgtgtcatgtg

SEQ ID NO: 1849827 - DNA, 15 bp, Homo sapiens
atatgtgtcatgtgt

SEQ ID NO: 1849828 - DNA, 15 bp, Homo sapiens
tatgtgtcatgtgtg

SEQ ID NO: 1849829 - DNA, 15 bp, Homo sapiens
atgtgtcatgtgtgt

SEQ ID NO: 1849830 - DNA, 15 bp, Homo sapiens
tgtgtcatgtgtgtg

SEQ ID NO: 1849831 - DNA, 15 bp, Homo sapiens
gtgtcatgtgtgtgg

SEQ ID NO: 1849832 - DNA, 15 bp, Homo sapiens
tgtcatgtgtgtggt

SEQ ID NO: 1849833 - DNA, 15 bp, Homo sapiens
gtcatgtgtgtggtg

SEQ ID NO: 1849834 - DNA, 15 bp, Homo sapiens
tcatgtgtgtggtgt

SEQ ID NO: 1849835 - DNA, 15 bp, Homo sapiens
catgtgtgtggtgtg

SEQ ID NO: 1849836 - DNA, 15 bp, Homo sapiens
atgtgtgtggtgtgt

SEQ ID NO: 1849837 - DNA, 15 bp, Homo sapiens
gtgtgtggtgtgtgg

SEQ ID NO: 1849838 - DNA, 15 bp, Homo sapiens
tgtgtggtgtgtggt

SEQ ID NO: 1849839 - DNA, 15 bp, Homo sapiens
gtgtggtgtgtggtg

SEQ ID NO: 1849840 - DNA, 15 bp, Homo sapiens
tgtggtgtgtggtgt

SEQ ID NO: 1849841 - DNA, 15 bp, Homo sapiens
gtggtgtgtggtgta

SEQ ID NO: 1849842 - DNA, 15 bp, Homo sapiens
tggtgtgtggtgtat

SEQ ID NO: 1849843 - DNA, 15 bp, Homo sapiens
ggtgtgtggtgtatg

SEQ ID NO: 1849844 - DNA, 15 bp, Homo sapiens
gtgtgtggtgtatgt

SEQ ID NO: 1849845 - DNA, 15 bp, Homo sapiens
tgtgtggtgtatgtg

SEQ ID NO: 1849846 - DNA, 15 bp, Homo sapiens
gtgtggtgtatgtgt

SEQ ID NO: 1849847 - DNA, 15 bp, Homo sapiens
tgtggtgtatgtgtg

SEQ ID NO: 1849848 - DNA, 15 bp, Homo sapiens
gtggtgtatgtgtgt

SEQ ID NO: 1849849 - DNA, 15 bp, Homo sapiens
tggtgtatgtgtgtg

SEQ ID NO: 1849850 - DNA, 15 bp, Homo sapiens
ggtgtatgtgtgtgt

SEQ ID NO: 1849851 - DNA, 15 bp, Homo sapiens
tgtatgtgtgtgtgg

SEQ ID NO: 1849852 - DNA, 15 bp, Homo sapiens
ggtgtgtgtatgtgg

SEQ ID NO: 1849853 - DNA, 15 bp, Homo sapiens
gtgtgtgtatgtggc

SEQ ID NO: 1849854 - DNA, 15 bp, Homo sapiens
tgtgtgtatgtggca

SEQ ID NO: 1849855 - DNA, 15 bp, Homo sapiens
gtgtgtatgtggcat

SEQ ID NO: 1849856 - DNA, 15 bp, Homo sapiens
tgtgtatgtggcatt

SEQ ID NO: 1849857 - DNA, 15 bp, Homo sapiens
gtgtatgtggcatta

SEQ ID NO: 1849858 - DNA, 15 bp, Homo sapiens
tgtatgtggcattat

SEQ ID NO: 1849859 - DNA, 15 bp, Homo sapiens
gtatgtggcattatg

SEQ ID NO: 1849860 - DNA, 15 bp, Homo sapiens
tatgtggcattatgt

SEQ ID NO: 1849861 - DNA, 15 bp, Homo sapiens
atgtggcattatgtg

SEQ ID NO: 1849862 - DNA, 15 bp, Homo sapiens
tgtggcattatgtgt

SEQ ID NO: 1849863 - DNA, 15 bp, Homo sapiens
gtggcattatgtgtg

SEQ ID NO: 1849864 - DNA, 15 bp, Homo sapiens
tggcattatgtgtgt

SEQ ID NO: 1849865 - DNA, 15 bp, Homo sapiens
ggcattatgtgtgtg

SEQ ID NO: 1849866 - DNA, 15 bp, Homo sapiens
gcattatgtgtgtgt

SEQ ID NO: 1849867 - DNA, 15 bp, Homo sapiens
cattatgtgtgtgtg

SEQ ID NO: 1849868 - DNA, 15 bp, Homo sapiens
attatgtgtgtgtga

SEQ ID NO: 1849869 - DNA, 15 bp, Homo sapiens
ttatgtgtgtgtgat

SEQ ID NO: 1849870 - DNA, 15 bp, Homo sapiens
tatgtgtgtgtgatg

SEQ ID NO: 1849871 - DNA, 15 bp, Homo sapiens
atgtgtgtgtgatgt

SEQ ID NO: 1849872 - DNA, 15 bp, Homo sapiens
tgtgtgtgatgtgta

SEQ ID NO: 1849873 - DNA, 15 bp, Homo sapiens
gtgtgtgatgtgtag

SEQ ID NO: 1849874 - DNA, 15 bp, Homo sapiens
tgtgtgatgtgtagt

SEQ ID NO: 1849875 - DNA, 15 bp, Homo sapiens
gtgtgatgtgtagtg

SEQ ID NO: 1849876 - DNA, 15 bp, Homo sapiens
tgtgatgtgtagtgt

SEQ ID NO: 1849877 - DNA, 15 bp, Homo sapiens
gtgatgtgtagtgtg

SEQ ID NO: 1849878 - DNA, 15 bp, Homo sapiens
tgatgtgtagtgtgt

SEQ ID NO: 1849879 - DNA, 15 bp, Homo sapiens
gatgtgtagtgtgtg

SEQ ID NO: 1849880 - DNA, 15 bp, Homo sapiens
atgtgtagtgtgtgg

SEQ ID NO: 1849881 - DNA, 15 bp, Homo sapiens
tgtgtagtgtgtggt

SEQ ID NO: 1849882 - DNA, 15 bp, Homo sapiens
gtgtagtgtgtggtg

SEQ ID NO: 1849883 - DNA, 15 bp, Homo sapiens
tgtagtgtgtggtgt

SEQ ID NO: 1849884 - DNA, 15 bp, Homo sapiens
gtagtgtgtggtgta

SEQ ID NO: 1849885 - DNA, 15 bp, Homo sapiens
tagtgtgtggtgtat

SEQ ID NO: 1849886 - DNA, 15 bp, Homo sapiens
agtgtgtggtgtatg

SEQ ID NO: 1849887 - DNA, 15 bp, Homo sapiens
tgtgtggtgtatgta

SEQ ID NO: 1849888 - DNA, 15 bp, Homo sapiens
gtgtggtgtatgtat

SEQ ID NO: 1849889 - DNA, 15 bp, Homo sapiens
tgtggtgtatgtatg

SEQ ID NO: 1849890 - DNA, 15 bp, Homo sapiens
gtggtgtatgtatgg

SEQ ID NO: 1849891 - DNA, 15 bp, Homo sapiens
tggtgtatgtatggt

SEQ ID NO: 1849892 - DNA, 15 bp, Homo sapiens
ggtgtatgtatggtg

SEQ ID NO: 1849893 - DNA, 15 bp, Homo sapiens
gtgtatgtatggtgt

SEQ ID NO: 1849894 - DNA, 15 bp, Homo sapiens
tgtatgtatggtgta

SEQ ID NO: 1849895 - DNA, 15 bp, Homo sapiens
gtatgtatggtgtat

SEQ ID NO: 1849896 - DNA, 15 bp, Homo sapiens
tatgtatggtgtatg

SEQ ID NO: 1849897 - DNA, 15 bp, Homo sapiens
atgtatggtgtatgt

SEQ ID NO: 1849898 - DNA, 15 bp, Homo sapiens
tgtatggtgtatgtg

SEQ ID NO: 1849899 - DNA, 15 bp, Homo sapiens
gtatggtgtatgtgg

SEQ ID NO: 1849900 - DNA, 15 bp, Homo sapiens
tatggtgtatgtggt

SEQ ID NO: 1849901 - DNA, 15 bp, Homo sapiens
atggtgtatgtggtg

SEQ ID NO: 1849902 - DNA, 15 bp, Homo sapiens
tggtgtatgtggtgt

SEQ ID NO: 1849903 - DNA, 15 bp, Homo sapiens
ggtgtatgtggtgtg

SEQ ID NO: 1849904 - DNA, 15 bp, Homo sapiens
gtgtatgtggtgtgt

SEQ ID NO: 1849905 - DNA, 15 bp, Homo sapiens
tgtatgtggtgtgta

SEQ ID NO: 1849906 - DNA, 15 bp, Homo sapiens
gtatgtggtgtgtat

SEQ ID NO: 1849907 - DNA, 15 bp, Homo sapiens
tatgtggtgtgtata

SEQ ID NO: 1849908 - DNA, 15 bp, Homo sapiens
atgtggtgtgtatat

SEQ ID NO: 1849909 - DNA, 15 bp, Homo sapiens
tgtggtgtgtatata

SEQ ID NO: 1849910 - DNA, 15 bp, Homo sapiens
gtggtgtgtatatat

SEQ ID NO: 1849911 - DNA, 15 bp, Homo sapiens
tggtgtgtatatata

SEQ ID NO: 1849912 - DNA, 15 bp, Homo sapiens
ggtgtgtatatatat

SEQ ID NO: 1849913 - DNA, 15 bp, Homo sapiens
tgtatatatatatgg

SEQ ID NO: 1849914 - DNA, 15 bp, Homo sapiens
gtatatatatatggt

SEQ ID NO: 1849915 - DNA, 15 bp, Homo sapiens
tatatatatatggtg

SEQ ID NO: 1849916 - DNA, 15 bp, Homo sapiens
atatatatatggtgt

SEQ ID NO: 1849917 - DNA, 15 bp, Homo sapiens
tatatatatggtgtg

SEQ ID NO: 1849918 - DNA, 15 bp, Homo sapiens
atatatatggtgtgt

SEQ ID NO: 1849919 - DNA, 15 bp, Homo sapiens
tatatatggtgtgtg

SEQ ID NO: 1849920 - DNA, 15 bp, Homo sapiens
atatatggtgtgtgt

SEQ ID NO: 1849921 - DNA, 15 bp, Homo sapiens
tatatggtgtgtgta

SEQ ID NO: 1849922 - DNA, 15 bp, Homo sapiens
atatggtgtgtgtat

SEQ ID NO: 1849923 - DNA, 15 bp, Homo sapiens
tatggtgtgtgtata

SEQ ID NO: 1849924 - DNA, 15 bp, Homo sapiens
atggtgtgtgtatag

SEQ ID NO: 1849925 - DNA, 15 bp, Homo sapiens
tggtgtgtgtatagt

SEQ ID NO: 1849926 - DNA, 15 bp, Homo sapiens
ggtgtgtgtatagtg

SEQ ID NO: 1849927 - DNA, 15 bp, Homo sapiens
gtgtgtgtatagtgt

SEQ ID NO: 1849928 - DNA, 15 bp, Homo sapiens
tgtgtgtatagtgtg

SEQ ID NO: 1849929 - DNA, 15 bp, Homo sapiens
gtgtgtatagtgtgt

SEQ ID NO: 1849930 - DNA, 15 bp, Homo sapiens
tgtgtatagtgtgtg

SEQ ID NO: 1849931 - DNA, 15 bp, Homo sapiens
gtgtatagtgtgtgt

SEQ ID NO: 1849932 - DNA, 15 bp, Homo sapiens
tgtatagtgtgtgta

SEQ ID NO: 1849933 - DNA, 15 bp, Homo sapiens
gtatagtgtgtgtat

SEQ ID NO: 1849934 - DNA, 15 bp, Homo sapiens
tatagtgtgtgtata

SEQ ID NO: 1849935 - DNA, 15 bp, Homo sapiens
atagtgtgtgtatac

SEQ ID NO: 1849936 - DNA, 15 bp, Homo sapiens
tagtgtgtgtatacc

SEQ ID NO: 1849937 - DNA, 15 bp, Homo sapiens
agtgtgtgtatacca

SEQ ID NO: 1849938 - DNA, 15 bp, Homo sapiens
gtgtgtgtataccac

SEQ ID NO: 1849939 - DNA, 15 bp, Homo sapiens
tgtgtgtataccact

SEQ ID NO: 1849940 - DNA, 15 bp, Homo sapiens
gtgtgtataccactt

SEQ ID NO: 1849941 - DNA, 15 bp, Homo sapiens
tgtgtataccacttg

SEQ ID NO: 1849942 - DNA, 15 bp, Homo sapiens
gtgtataccacttgt

SEQ ID NO: 1849943 - DNA, 15 bp, Homo sapiens
tgtataccacttgta

SEQ ID NO: 1849944 - DNA, 15 bp, Homo sapiens
gtataccacttgtat

SEQ ID NO: 1849945 - DNA, 15 bp, Homo sapiens
tataccacttgtatg

SEQ ID NO: 1849946 - DNA, 15 bp, Homo sapiens
ataccacttgtatgt

SEQ ID NO: 1849947 - DNA, 15 bp, Homo sapiens
taccacttgtatgtt

SEQ ID NO: 1849948 - DNA, 15 bp, Homo sapiens
accacttgtatgttt

SEQ ID NO: 1849949 - DNA, 15 bp, Homo sapiens
ccacttgtatgttta

SEQ ID NO: 1849950 - DNA, 15 bp, Homo sapiens
cacttgtatgtttat

SEQ ID NO: 1849951 - DNA, 15 bp, Homo sapiens
acttgtatgtttatg

SEQ ID NO: 1849952 - DNA, 15 bp, Homo sapiens
cttgtatgtttatgt

SEQ ID NO: 1849953 - DNA, 15 bp, Homo sapiens
ttgtatgtttatgtg

SEQ ID NO: 1849954 - DNA, 15 bp, Homo sapiens
tgtatgtttatgtgt

SEQ ID NO: 1849955 - DNA, 15 bp, Homo sapiens
gtatgtttatgtgtg

SEQ ID NO: 1849956 - DNA, 15 bp, Homo sapiens
tatgtttatgtgtgt

SEQ ID NO: 1849957 - DNA, 15 bp, Homo sapiens
atgtttatgtgtgtg

SEQ ID NO: 1849958 - DNA, 15 bp, Homo sapiens
tgtttatgtgtgtgt

SEQ ID NO: 1849959 - DNA, 15 bp, Homo sapiens
gtttatgtgtgtgta

SEQ ID NO: 1849960 - DNA, 15 bp, Homo sapiens
tttatgtgtgtgtat

SEQ ID NO: 1849961 - DNA, 15 bp, Homo sapiens
ttatgtgtgtgtata

SEQ ID NO: 1849962 - DNA, 15 bp, Homo sapiens
tatgtgtgtgtatat

SEQ ID NO: 1849963 - DNA, 15 bp, Homo sapiens
atgtgtgtgtatata

SEQ ID NO: 1849964 - DNA, 15 bp, Homo sapiens
gtgtgtgtatatatg

SEQ ID NO: 1849965 - DNA, 15 bp, Homo sapiens
gtgtatatatgtgtg

SEQ ID NO: 1849966 - DNA, 15 bp, Homo sapiens
tgtatatatgtgtga

SEQ ID NO: 1849967 - DNA, 15 bp, Homo sapiens
gtatatatgtgtgat

SEQ ID NO: 1849968 - DNA, 15 bp, Homo sapiens
tatatatgtgtgatg

SEQ ID NO: 1849969 - DNA, 15 bp, Homo sapiens
atatatgtgtgatgt

SEQ ID NO: 1849970 - DNA, 15 bp, Homo sapiens
tatatgtgtgatgtg

SEQ ID NO: 1849971 - DNA, 15 bp, Homo sapiens
atatgtgtgatgtgt

SEQ ID NO: 1849972 - DNA, 15 bp, Homo sapiens
tgtgtgatgtgtgta

SEQ ID NO: 1849973 - DNA, 15 bp, Homo sapiens
gtgtgatgtgtgtat

SEQ ID NO: 1849974 - DNA, 15 bp, Homo sapiens
tgtgatgtgtgtata

SEQ ID NO: 1849975 - DNA, 15 bp, Homo sapiens
gtgatgtgtgtatag

SEQ ID NO: 1849976 - DNA, 15 bp, Homo sapiens
tgatgtgtgtatagt

SEQ ID NO: 1849977 - DNA, 15 bp, Homo sapiens
gatgtgtgtatagtg

SEQ ID NO: 1849978 - DNA, 15 bp, Homo sapiens
atgtgtgtatagtgt

SEQ ID NO: 1849979 - DNA, 15 bp, Homo sapiens
tgtgtatagtgtgta

SEQ ID NO: 1849980 - DNA, 15 bp, Homo sapiens
gtgtatagtgtgtac

SEQ ID NO: 1849981 - DNA, 15 bp, Homo sapiens
tgtatagtgtgtaca

SEQ ID NO: 1849982 - DNA, 15 bp, Homo sapiens
gtatagtgtgtacat

SEQ ID NO: 1849983 - DNA, 15 bp, Homo sapiens
tatagtgtgtacatg

SEQ ID NO: 1849984 - DNA, 15 bp, Homo sapiens
atagtgtgtacatgc

SEQ ID NO: 1849985 - DNA, 15 bp, Homo sapiens
tagtgtgtacatgcg

SEQ ID NO: 1849986 - DNA, 15 bp, Homo sapiens
agtgtgtacatgcgt

SEQ ID NO: 1849987 - DNA, 15 bp, Homo sapiens
gtgtgtacatgcgtt

SEQ ID NO: 1849988 - DNA, 15 bp, Homo sapiens
tgtgtacatgcgttg

SEQ ID NO: 1849989 - DNA, 15 bp, Homo sapiens
gtgtacatgcgttgt

SEQ ID NO: 1849990 - DNA, 15 bp, Homo sapiens
tgtacatgcgttgtg

SEQ ID NO: 1849991 - DNA, 15 bp, Homo sapiens
gtacatgcgttgtgt

SEQ ID NO: 1849992 - DNA, 15 bp, Homo sapiens
tacatgcgttgtgta

SEQ ID NO: 1849993 - DNA, 15 bp, Homo sapiens
acatgcgttgtgtat

SEQ ID NO: 1849994 - DNA, 15 bp, Homo sapiens
catgcgttgtgtata

SEQ ID NO: 1849995 - DNA, 15 bp, Homo sapiens
atgcgttgtgtataa

SEQ ID NO: 1849996 - DNA, 15 bp, Homo sapiens
tgcgttgtgtataat

SEQ ID NO: 1849997 - DNA, 15 bp, Homo sapiens
gcgttgtgtataatg

SEQ ID NO: 1849998 - DNA, 15 bp, Homo sapiens
cgttgtgtataatgt

SEQ ID NO: 1849999 - DNA, 15 bp, Homo sapiens
gttgtgtataatgtg

SEQ ID NO: 1850000 - DNA, 15 bp, Homo sapiens
ttgtgtataatgtgt

SEQ ID NO: 1850001 - DNA, 15 bp, Homo sapiens
tgtgtataatgtgtg

SEQ ID NO: 1850002 - DNA, 15 bp, Homo sapiens
gtgtataatgtgtgt

SEQ ID NO: 1850003 - DNA, 15 bp, Homo sapiens
tgtataatgtgtgta

SEQ ID NO: 1850004 - DNA, 15 bp, Homo sapiens
gtataatgtgtgtat

SEQ ID NO: 1850005 - DNA, 15 bp, Homo sapiens
tataatgtgtgtata

SEQ ID NO: 1850006 - DNA, 15 bp, Homo sapiens
ataatgtgtgtatag

SEQ ID NO: 1850007 - DNA, 15 bp, Homo sapiens
taatgtgtgtatagt

SEQ ID NO: 1850008 - DNA, 15 bp, Homo sapiens
aatgtgtgtatagta

SEQ ID NO: 1850009 - DNA, 15 bp, Homo sapiens
atgtgtgtatagtat

SEQ ID NO: 1850010 - DNA, 15 bp, Homo sapiens
tgtgtgtatagtatg

SEQ ID NO: 1850011 - DNA, 15 bp, Homo sapiens
gtgtgtatagtatgt

SEQ ID NO: 1850012 - DNA, 15 bp, Homo sapiens
tgtgtatagtatgtg

SEQ ID NO: 1850013 - DNA, 15 bp, Homo sapiens
gtgtatagtatgtgt

SEQ ID NO: 1850014 - DNA, 15 bp, Homo sapiens
tgtatagtatgtgtg

SEQ ID NO: 1850015 - DNA, 15 bp, Homo sapiens
gtatagtatgtgtgt

SEQ ID NO: 1850016 - DNA, 15 bp, Homo sapiens
tatagtatgtgtgtg

SEQ ID NO: 1850017 - DNA, 15 bp, Homo sapiens
atagtatgtgtgtgc

SEQ ID NO: 1850018 - DNA, 15 bp, Homo sapiens
tagtatgtgtgtgct

SEQ ID NO: 1850019 - DNA, 15 bp, Homo sapiens
agtatgtgtgtgctg

SEQ ID NO: 1850020 - DNA, 15 bp, Homo sapiens
gtatgtgtgtgctgc

SEQ ID NO: 1850021 - DNA, 15 bp, Homo sapiens
tatgtgtgtgctgcg

SEQ ID NO: 1850022 - DNA, 15 bp, Homo sapiens
atgtgtgtgctgcgt

SEQ ID NO: 1850023 - DNA, 15 bp, Homo sapiens
tgtgtgtgctgcgtg

SEQ ID NO: 1850024 - DNA, 15 bp, Homo sapiens
gtgtgtgctgcgtgt

SEQ ID NO: 1850025 - DNA, 15 bp, Homo sapiens
tgtgtgctgcgtgta

SEQ ID NO: 1850026 - DNA, 15 bp, Homo sapiens
gtgtgctgcgtgtat

SEQ ID NO: 1850027 - DNA, 15 bp, Homo sapiens
tgtgctgcgtgtata

SEQ ID NO: 1850028 - DNA, 15 bp, Homo sapiens
gtgctgcgtgtatat

SEQ ID NO: 1850029 - DNA, 15 bp, Homo sapiens
tgctgcgtgtatatt

SEQ ID NO: 1850030 - DNA, 15 bp, Homo sapiens
gctgcgtgtatattt

SEQ ID NO: 1850031 - DNA, 15 bp, Homo sapiens
ctgcgtgtatatttg

SEQ ID NO: 1850032 - DNA, 15 bp, Homo sapiens
tgcgtgtatatttgt

SEQ ID NO: 1850033 - DNA, 15 bp, Homo sapiens
gcgtgtatatttgtt

SEQ ID NO: 1850034 - DNA, 15 bp, Homo sapiens
cgtgtatatttgttg

SEQ ID NO: 1850035 - DNA, 15 bp, Homo sapiens
gtgtatatttgttgg

SEQ ID NO: 1850036 - DNA, 15 bp, Homo sapiens
tgtatatttgttggg

SEQ ID NO: 1850037 - DNA, 15 bp, Homo sapiens
gtatatttgttgggt

SEQ ID NO: 1850038 - DNA, 15 bp, Homo sapiens
tatatttgttgggtg

SEQ ID NO: 1850039 - DNA, 15 bp, Homo sapiens
atatttgttgggtgt

SEQ ID NO: 1850040 - DNA, 15 bp, Homo sapiens
tatttgttgggtgtg

SEQ ID NO: 1850041 - DNA, 15 bp, Homo sapiens
atttgttgggtgtgt

SEQ ID NO: 1850042 - DNA, 15 bp, Homo sapiens
tttgttgggtgtgtg

SEQ ID NO: 1850043 - DNA, 15 bp, Homo sapiens
ttgttgggtgtgtgt

SEQ ID NO: 1850044 - DNA, 15 bp, Homo sapiens
tgttgggtgtgtgta

SEQ ID NO: 1850045 - DNA, 15 bp, Homo sapiens
gttgggtgtgtgtat

SEQ ID NO: 1850046 - DNA, 15 bp, Homo sapiens
ttgggtgtgtgtata

SEQ ID NO: 1850047 - DNA, 15 bp, Homo sapiens
tgggtgtgtgtatat

SEQ ID NO: 1850048 - DNA, 15 bp, Homo sapiens
gggtgtgtgtatatg

SEQ ID NO: 1850049 - DNA, 15 bp, Homo sapiens
ggtgtgtgtatatgt

SEQ ID NO: 1850050 - DNA, 15 bp, Homo sapiens
gtgtgtgtatatgtg

SEQ ID NO: 1850051 - DNA, 15 bp, Homo sapiens
tgtgtgtatatgtgt

SEQ ID NO: 1850052 - DNA, 15 bp, Homo sapiens
gtgtgtatatgtgtg

SEQ ID NO: 1850053 - DNA, 15 bp, Homo sapiens
tgtgtatatgtgtgg

SEQ ID NO: 1850054 - DNA, 15 bp, Homo sapiens
gtgtatatgtgtggt

SEQ ID NO: 1850055 - DNA, 15 bp, Homo sapiens
tgtatatgtgtggta

SEQ ID NO: 1850056 - DNA, 15 bp, Homo sapiens
gtatatgtgtggtat

SEQ ID NO: 1850057 - DNA, 15 bp, Homo sapiens
tatatgtgtggtatg

SEQ ID NO: 1850058 - DNA, 15 bp, Homo sapiens
atgtgtggtatgtac

SEQ ID NO: 1850059 - DNA, 15 bp, Homo sapiens
tgtgtggtatgtacg

SEQ ID NO: 1850060 - DNA, 15 bp, Homo sapiens
gtgtggtatgtacgt

SEQ ID NO: 1850061 - DNA, 15 bp, Homo sapiens
tgtggtatgtacgtg

SEQ ID NO: 1850062 - DNA, 15 bp, Homo sapiens
gtggtatgtacgtgg

SEQ ID NO: 1850063 - DNA, 15 bp, Homo sapiens
tggtatgtacgtgga

SEQ ID NO: 1850064 - DNA, 15 bp, Homo sapiens
ggtatgtacgtggat

SEQ ID NO: 1850065 - DNA, 15 bp, Homo sapiens
gtatgtacgtggatg

SEQ ID NO: 1850066 - DNA, 15 bp, Homo sapiens
tatgtacgtggatgg

SEQ ID NO: 1850067 - DNA, 15 bp, Homo sapiens
atgtacgtggatggt

SEQ ID NO: 1850068 - DNA, 15 bp, Homo sapiens
tgtacgtggatggtg

SEQ ID NO: 1850069 - DNA, 15 bp, Homo sapiens
gtacgtggatggtgt

SEQ ID NO: 1850070 - DNA, 15 bp, Homo sapiens
tacgtggatggtgtg

SEQ ID NO: 1850071 - DNA, 15 bp, Homo sapiens
acgtggatggtgtgt

SEQ ID NO: 1850072 - DNA, 15 bp, Homo sapiens
cgtggatggtgtgtg

SEQ ID NO: 1850073 - DNA, 15 bp, Homo sapiens
gtggatggtgtgtgg

SEQ ID NO: 1850074 - DNA, 15 bp, Homo sapiens
tggatggtgtgtgga

SEQ ID NO: 1850075 - DNA, 15 bp, Homo sapiens
ggatggtgtgtggac

SEQ ID NO: 1850076 - DNA, 15 bp, Homo sapiens
gatggtgtgtggaca

SEQ ID NO: 1850077 - DNA, 15 bp, Homo sapiens
atggtgtgtggacaa

SEQ ID NO: 1850078 - DNA, 15 bp, Homo sapiens
tggtgtgtggacaat

SEQ ID NO: 1850079 - DNA, 15 bp, Homo sapiens
ggtgtgtggacaatg

SEQ ID NO: 1850080 - DNA, 15 bp, Homo sapiens
gtgtgtggacaatgc

SEQ ID NO: 1850081 - DNA, 15 bp, Homo sapiens
tgtgtggacaatgcg

SEQ ID NO: 1850082 - DNA, 15 bp, Homo sapiens
gtgtggacaatgcgt

SEQ ID NO: 1850083 - DNA, 15 bp, Homo sapiens
tgtggacaatgcgtg

SEQ ID NO: 1850084 - DNA, 15 bp, Homo sapiens
gtggacaatgcgtgt

SEQ ID NO: 1850085 - DNA, 15 bp, Homo sapiens
tggacaatgcgtgta

SEQ ID NO: 1850086 - DNA, 15 bp, Homo sapiens
ggacaatgcgtgtat

SEQ ID NO: 1850087 - DNA, 15 bp, Homo sapiens
gacaatgcgtgtatg

SEQ ID NO: 1850088 - DNA, 15 bp, Homo sapiens
acaatgcgtgtatgt

SEQ ID NO: 1850089 - DNA, 15 bp, Homo sapiens
caatgcgtgtatgtg

SEQ ID NO: 1850090 - DNA, 15 bp, Homo sapiens
aatgcgtgtatgtgt

SEQ ID NO: 1850091 - DNA, 15 bp, Homo sapiens
atgcgtgtatgtgtg

SEQ ID NO: 1850092 - DNA, 15 bp, Homo sapiens
tgcgtgtatgtgtgt

SEQ ID NO: 1850093 - DNA, 15 bp, Homo sapiens
gcgtgtatgtgtgtt

SEQ ID NO: 1850094 - DNA, 15 bp, Homo sapiens
cgtgtatgtgtgtta

SEQ ID NO: 1850095 - DNA, 15 bp, Homo sapiens
gtgtatgtgtgttat

SEQ ID NO: 1850096 - DNA, 15 bp, Homo sapiens
tgtatgtgtgttatg

SEQ ID NO: 1850097 - DNA, 15 bp, Homo sapiens
gtatgtgtgttatgt

SEQ ID NO: 1850098 - DNA, 15 bp, Homo sapiens
tatgtgtgttatgtg

SEQ ID NO: 1850099 - DNA, 15 bp, Homo sapiens
atgtgtgttatgtgt

SEQ ID NO: 1850100 - DNA, 15 bp, Homo sapiens
tgtgtgttatgtgtg

SEQ ID NO: 1850101 - DNA, 15 bp, Homo sapiens
gtgtgttatgtgtgt

SEQ ID NO: 1850102 - DNA, 15 bp, Homo sapiens
tgtgttatgtgtgta

SEQ ID NO: 1850103 - DNA, 15 bp, Homo sapiens
gtgttatgtgtgtat

SEQ ID NO: 1850104 - DNA, 15 bp, Homo sapiens
tgttatgtgtgtatg

SEQ ID NO: 1850105 - DNA, 15 bp, Homo sapiens
gttatgtgtgtatgt

SEQ ID NO: 1850106 - DNA, 15 bp, Homo sapiens
ttatgtgtgtatgtg

SEQ ID NO: 1850107 - DNA, 15 bp, Homo sapiens
atgtgtgtatgtgtg

SEQ ID NO: 1850108 - DNA, 15 bp, Homo sapiens
tgtgtgtatgtgtga

SEQ ID NO: 1850109 - DNA, 15 bp, Homo sapiens
gtgtgtatgtgtgat

SEQ ID NO: 1850110 - DNA, 15 bp, Homo sapiens
tgtgtatgtgtgata

SEQ ID NO: 1850111 - DNA, 15 bp, Homo sapiens
gtgtatgtgtgatat

SEQ ID NO: 1850112 - DNA, 15 bp, Homo sapiens
tgtatgtgtgatatg

SEQ ID NO: 1850113 - DNA, 15 bp, Homo sapiens
gtatgtgtgatatgt

SEQ ID NO: 1850114 - DNA, 15 bp, Homo sapiens
tgtgtgatatgtgta

SEQ ID NO: 1850115 - DNA, 15 bp, Homo sapiens
gtgtgatatgtgtat

SEQ ID NO: 1850116 - DNA, 15 bp, Homo sapiens
tgtgatatgtgtata

SEQ ID NO: 1850117 - DNA, 15 bp, Homo sapiens
gtgatatgtgtatat

SEQ ID NO: 1850118 - DNA, 15 bp, Homo sapiens
tgatatgtgtatata

SEQ ID NO: 1850119 - DNA, 15 bp, Homo sapiens
gatatgtgtatataa

SEQ ID NO: 1850120 - DNA, 15 bp, Homo sapiens
atatgtgtatataat

SEQ ID NO: 1850121 - DNA, 15 bp, Homo sapiens
tatgtgtatataatg

SEQ ID NO: 1850122 - DNA, 15 bp, Homo sapiens
atgtgtatataatgt

SEQ ID NO: 1850123 - DNA, 15 bp, Homo sapiens
tgtgtatataatgtg

SEQ ID NO: 1850124 - DNA, 15 bp, Homo sapiens
gtgtatataatgtgt

SEQ ID NO: 1850125 - DNA, 15 bp, Homo sapiens
tgtatataatgtgta

SEQ ID NO: 1850126 - DNA, 15 bp, Homo sapiens
gtatataatgtgtat

SEQ ID NO: 1850127 - DNA, 15 bp, Homo sapiens
tatataatgtgtatg

SEQ ID NO: 1850128 - DNA, 15 bp, Homo sapiens
atataatgtgtatgt

SEQ ID NO: 1850129 - DNA, 15 bp, Homo sapiens
tataatgtgtatgtg

SEQ ID NO: 1850130 - DNA, 15 bp, Homo sapiens
ataatgtgtatgtgt

SEQ ID NO: 1850131 - DNA, 15 bp, Homo sapiens
taatgtgtatgtgtg

SEQ ID NO: 1850132 - DNA, 15 bp, Homo sapiens
aatgtgtatgtgtgt

SEQ ID NO: 1850133 - DNA, 15 bp, Homo sapiens
atgtgtatgtgtgta

SEQ ID NO: 1850134 - DNA, 15 bp, Homo sapiens
tgtgtatgtgtgtat

SEQ ID NO: 1850135 - DNA, 15 bp, Homo sapiens
gtgtatgtgtgtata

SEQ ID NO: 1850136 - DNA, 15 bp, Homo sapiens
tgtatgtgtgtatag

SEQ ID NO: 1850137 - DNA, 15 bp, Homo sapiens
gtatgtgtgtatagt

SEQ ID NO: 1850138 - DNA, 15 bp, Homo sapiens
tatgtgtgtatagtg

SEQ ID NO: 1850139 - DNA, 15 bp, Homo sapiens
gtatagtgtgtgtgg

SEQ ID NO: 1850140 - DNA, 15 bp, Homo sapiens
tatagtgtgtgtggt

SEQ ID NO: 1850141 - DNA, 15 bp, Homo sapiens
atagtgtgtgtggtg

SEQ ID NO: 1850142 - DNA, 15 bp, Homo sapiens
tagtgtgtgtggtgt

SEQ ID NO: 1850143 - DNA, 15 bp, Homo sapiens
agtgtgtgtggtgtg

SEQ ID NO: 1850144 - DNA, 15 bp, Homo sapiens
tgtgtggtgtgtgtg

SEQ ID NO: 1850145 - DNA, 15 bp, Homo sapiens
gtgtggtgtgtgtgt

SEQ ID NO: 1850146 - DNA, 15 bp, Homo sapiens
tggtgtgtgtgtgta

SEQ ID NO: 1850147 - DNA, 15 bp, Homo sapiens
ggtgtgtgtgtgtag

SEQ ID NO: 1850148 - DNA, 15 bp, Homo sapiens
gtgtgtgtgtgtagt

SEQ ID NO: 1850149 - DNA, 15 bp, Homo sapiens
tgtgtgtgtgtagtg

SEQ ID NO: 1850150 - DNA, 15 bp, Homo sapiens
gtgtgtagtgtgtga

SEQ ID NO: 1850151 - DNA, 15 bp, Homo sapiens
tgtgtagtgtgtgat

SEQ ID NO: 1850152 - DNA, 15 bp, Homo sapiens
gtgtagtgtgtgatg

SEQ ID NO: 1850153 - DNA, 15 bp, Homo sapiens
tgtagtgtgtgatgt

SEQ ID NO: 1850154 - DNA, 15 bp, Homo sapiens
gtagtgtgtgatgtg

SEQ ID NO: 1850155 - DNA, 15 bp, Homo sapiens
tagtgtgtgatgtgt

SEQ ID NO: 1850156 - DNA, 15 bp, Homo sapiens
agtgtgtgatgtgtc

SEQ ID NO: 1850157 - DNA, 15 bp, Homo sapiens
gtgtgtgatgtgtct

SEQ ID NO: 1850158 - DNA, 15 bp, Homo sapiens
tgtgtgatgtgtcta

SEQ ID NO: 1850159 - DNA, 15 bp, Homo sapiens
gtgtgatgtgtctat

SEQ ID NO: 1850160 - DNA, 15 bp, Homo sapiens
tgtgatgtgtctata

SEQ ID NO: 1850161 - DNA, 15 bp, Homo sapiens
gtgatgtgtctatat

SEQ ID NO: 1850162 - DNA, 15 bp, Homo sapiens
tgatgtgtctatatg

SEQ ID NO: 1850163 - DNA, 15 bp, Homo sapiens
gatgtgtctatatgt

SEQ ID NO: 1850164 - DNA, 15 bp, Homo sapiens
atgtgtctatatgtg

SEQ ID NO: 1850165 - DNA, 15 bp, Homo sapiens
tgtgtctatatgtgt

SEQ ID NO: 1850166 - DNA, 15 bp, Homo sapiens
gtgtctatatgtgtt

SEQ ID NO: 1850167 - DNA, 15 bp, Homo sapiens
tgtctatatgtgttg

SEQ ID NO: 1850168 - DNA, 15 bp, Homo sapiens
gtctatatgtgttgg

SEQ ID NO: 1850169 - DNA, 15 bp, Homo sapiens
tctatatgtgttggg

SEQ ID NO: 1850170 - DNA, 15 bp, Homo sapiens
ctatatgtgttgggt

SEQ ID NO: 1850171 - DNA, 15 bp, Homo sapiens
tatatgtgttgggtg

SEQ ID NO: 1850172 - DNA, 15 bp, Homo sapiens
atatgtgttgggtgt

SEQ ID NO: 1850173 - DNA, 15 bp, Homo sapiens
tatgtgttgggtgtg

SEQ ID NO: 1850174 - DNA, 15 bp, Homo sapiens
atgtgttgggtgtgt

SEQ ID NO: 1850175 - DNA, 15 bp, Homo sapiens
tgtgttgggtgtgta

SEQ ID NO: 1850176 - DNA, 15 bp, Homo sapiens
gtgttgggtgtgtat

SEQ ID NO: 1850177 - DNA, 15 bp, Homo sapiens
tgttgggtgtgtatt

SEQ ID NO: 1850178 - DNA, 15 bp, Homo sapiens
gttgggtgtgtatta

SEQ ID NO: 1850179 - DNA, 15 bp, Homo sapiens
ttgggtgtgtattat

SEQ ID NO: 1850180 - DNA, 15 bp, Homo sapiens
tgggtgtgtattatg

SEQ ID NO: 1850181 - DNA, 15 bp, Homo sapiens
gggtgtgtattatgt

SEQ ID NO: 1850182 - DNA, 15 bp, Homo sapiens
ggtgtgtattatgta

SEQ ID NO: 1850183 - DNA, 15 bp, Homo sapiens
gtgtgtattatgtat

SEQ ID NO: 1850184 - DNA, 15 bp, Homo sapiens
tgtgtattatgtatg

SEQ ID NO: 1850185 - DNA, 15 bp, Homo sapiens
gtgtattatgtatgt

SEQ ID NO: 1850186 - DNA, 15 bp, Homo sapiens
tgtattatgtatgta

SEQ ID NO: 1850187 - DNA, 15 bp, Homo sapiens
gtattatgtatgtat

SEQ ID NO: 1850188 - DNA, 15 bp, Homo sapiens
tattatgtatgtata

SEQ ID NO: 1850189 - DNA, 15 bp, Homo sapiens
attatgtatgtatat

SEQ ID NO: 1850190 - DNA, 15 bp, Homo sapiens
ttatgtatgtatatg

SEQ ID NO: 1850191 - DNA, 15 bp, Homo sapiens
tatgtatgtatatgt

SEQ ID NO: 1850192 - DNA, 15 bp, Homo sapiens
atgtatgtatatgta

SEQ ID NO: 1850193 - DNA, 15 bp, Homo sapiens
tgtatgtatatgtat

SEQ ID NO: 1850194 - DNA, 15 bp, Homo sapiens
gtatgtatatgtata

SEQ ID NO: 1850195 - DNA, 15 bp, Homo sapiens
tatgtatatgtatag

SEQ ID NO: 1850196 - DNA, 15 bp, Homo sapiens
atgtatatgtatagt

SEQ ID NO: 1850197 - DNA, 15 bp, Homo sapiens
tgtatatgtatagtg

SEQ ID NO: 1850198 - DNA, 15 bp, Homo sapiens
gtatatgtatagtgt

SEQ ID NO: 1850199 - DNA, 15 bp, Homo sapiens
tatatgtatagtgtg

SEQ ID NO: 1850200 - DNA, 15 bp, Homo sapiens
atatgtatagtgtgt

SEQ ID NO: 1850201 - DNA, 15 bp, Homo sapiens
ggtgtgtgtgtgtga

SEQ ID NO: 1850202 - DNA, 15 bp, Homo sapiens
gtgtgtgtgtgtgac

SEQ ID NO: 1850203 - DNA, 15 bp, Homo sapiens
tgtgtgtgtgtgacc

SEQ ID NO: 1850204 - DNA, 15 bp, Homo sapiens
gtgtgtgtgtgacct

SEQ ID NO: 1850205 - DNA, 15 bp, Homo sapiens
tgtgtgtgtgacctg

SEQ ID NO: 1850206 - DNA, 15 bp, Homo sapiens
gtgtgtgtgacctgt

SEQ ID NO: 1850207 - DNA, 15 bp, Homo sapiens
tgtgtgtgacctgtg

SEQ ID NO: 1850208 - DNA, 15 bp, Homo sapiens
gtgtgtgacctgtgg

SEQ ID NO: 1850209 - DNA, 15 bp, Homo sapiens
tgtgtgacctgtggt

SEQ ID NO: 1850210 - DNA, 15 bp, Homo sapiens
gtgtgacctgtggta

SEQ ID NO: 1850211 - DNA, 15 bp, Homo sapiens
tgtgacctgtggtat

SEQ ID NO: 1850212 - DNA, 15 bp, Homo sapiens
gtgacctgtggtatt

SEQ ID NO: 1850213 - DNA, 15 bp, Homo sapiens
tgacctgtggtattt

SEQ ID NO: 1850214 - DNA, 15 bp, Homo sapiens
gacctgtggtatttg

SEQ ID NO: 1850215 - DNA, 15 bp, Homo sapiens
acctgtggtatttgg

SEQ ID NO: 1850216 - DNA, 15 bp, Homo sapiens
cctgtggtatttggt

SEQ ID NO: 1850217 - DNA, 15 bp, Homo sapiens
ctgtggtatttggta

SEQ ID NO: 1850218 - DNA, 15 bp, Homo sapiens
tgtggtatttggtat

SEQ ID NO: 1850219 - DNA, 15 bp, Homo sapiens
gtggtatttggtatg

SEQ ID NO: 1850220 - DNA, 15 bp, Homo sapiens
tggtatttggtatgg

SEQ ID NO: 1850221 - DNA, 15 bp, Homo sapiens
ggtatttggtatgga

SEQ ID NO: 1850222 - DNA, 15 bp, Homo sapiens
gtatttggtatggag

SEQ ID NO: 1850223 - DNA, 15 bp, Homo sapiens
tatttggtatggagt

SEQ ID NO: 1850224 - DNA, 15 bp, Homo sapiens
atttggtatggagtg

SEQ ID NO: 1850225 - DNA, 15 bp, Homo sapiens
tttggtatggagtgt

SEQ ID NO: 1850226 - DNA, 15 bp, Homo sapiens
ttggtatggagtgtg

SEQ ID NO: 1850227 - DNA, 15 bp, Homo sapiens
tggtatggagtgtgt

SEQ ID NO: 1850228 - DNA, 15 bp, Homo sapiens
ggtatggagtgtgtg

SEQ ID NO: 1850229 - DNA, 15 bp, Homo sapiens
gtatggagtgtgtgc

SEQ ID NO: 1850230 - DNA, 15 bp, Homo sapiens
tatggagtgtgtgca

SEQ ID NO: 1850231 - DNA, 15 bp, Homo sapiens
atggagtgtgtgcag

SEQ ID NO: 1850232 - DNA, 15 bp, Homo sapiens
tggagtgtgtgcagt

SEQ ID NO: 1850233 - DNA, 15 bp, Homo sapiens
ggagtgtgtgcagtg

SEQ ID NO: 1850234 - DNA, 15 bp, Homo sapiens
gagtgtgtgcagtgt

SEQ ID NO: 1850235 - DNA, 15 bp, Homo sapiens
agtgtgtgcagtgta

SEQ ID NO: 1850236 - DNA, 15 bp, Homo sapiens
gtgtgtgcagtgtat

SEQ ID NO: 1850237 - DNA, 15 bp, Homo sapiens
tgtgtgcagtgtatg

SEQ ID NO: 1850238 - DNA, 15 bp, Homo sapiens
gtgtgcagtgtatgg

SEQ ID NO: 1850239 - DNA, 15 bp, Homo sapiens
tgtgcagtgtatggt

SEQ ID NO: 1850240 - DNA, 15 bp, Homo sapiens
gtgcagtgtatggtg

SEQ ID NO: 1850241 - DNA, 15 bp, Homo sapiens
tgcagtgtatggtgt

SEQ ID NO: 1850242 - DNA, 15 bp, Homo sapiens
gcagtgtatggtgtg

SEQ ID NO: 1850243 - DNA, 15 bp, Homo sapiens
cagtgtatggtgtgt

SEQ ID NO: 1850244 - DNA, 15 bp, Homo sapiens
agtgtatggtgtgtg

SEQ ID NO: 1850245 - DNA, 15 bp, Homo sapiens
gtgtatggtgtgtgt

SEQ ID NO: 1850246 - DNA, 15 bp, Homo sapiens
tgtatggtgtgtgtg

SEQ ID NO: 1850247 - DNA, 15 bp, Homo sapiens
gtatggtgtgtgtgt

SEQ ID NO: 1850248 - DNA, 15 bp, Homo sapiens
tatggtgtgtgtgta

SEQ ID NO: 1850249 - DNA, 15 bp, Homo sapiens
atggtgtgtgtgtag

SEQ ID NO: 1850250 - DNA, 15 bp, Homo sapiens
tggtgtgtgtgtagt

SEQ ID NO: 1850251 - DNA, 15 bp, Homo sapiens
ggtgtgtgtgtagtg

SEQ ID NO: 1850252 - DNA, 15 bp, Homo sapiens
gtgtgtagtgtgtgc

SEQ ID NO: 1850253 - DNA, 15 bp, Homo sapiens
tgtgtagtgtgtgct

SEQ ID NO: 1850254 - DNA, 15 bp, Homo sapiens
gtgtagtgtgtgctg

SEQ ID NO: 1850255 - DNA, 15 bp, Homo sapiens
tgtagtgtgtgctgt

SEQ ID NO: 1850256 - DNA, 15 bp, Homo sapiens
gtagtgtgtgctgtg

SEQ ID NO: 1850257 - DNA, 15 bp, Homo sapiens
tagtgtgtgctgtgt

SEQ ID NO: 1850258 - DNA, 15 bp, Homo sapiens
agtgtgtgctgtgtg

SEQ ID NO: 1850259 - DNA, 15 bp, Homo sapiens
gtgtgtgctgtgtgt

SEQ ID NO: 1850260 - DNA, 15 bp, Homo sapiens
tgtgtgctgtgtgta

SEQ ID NO: 1850261 - DNA, 15 bp, Homo sapiens
gtgtgctgtgtgtat

SEQ ID NO: 1850262 - DNA, 15 bp, Homo sapiens
tgtgctgtgtgtatg

SEQ ID NO: 1850263 - DNA, 15 bp, Homo sapiens
gtgctgtgtgtatgt

SEQ ID NO: 1850264 - DNA, 15 bp, Homo sapiens
tgctgtgtgtatgtg

SEQ ID NO: 1850265 - DNA, 15 bp, Homo sapiens
ctgtgtgtatgtgta

SEQ ID NO: 1850266 - DNA, 15 bp, Homo sapiens
tgtgtatgtgtatgg

SEQ ID NO: 1850267 - DNA, 15 bp, Homo sapiens
gtgtatgtgtatggt

SEQ ID NO: 1850268 - DNA, 15 bp, Homo sapiens
tgtatgtgtatggtg

SEQ ID NO: 1850269 - DNA, 15 bp, Homo sapiens
gtatgtgtatggtgt

SEQ ID NO: 1850270 - DNA, 15 bp, Homo sapiens
tatgtgtatggtgtg

SEQ ID NO: 1850271 - DNA, 15 bp, Homo sapiens
atgtgtatggtgtgt

SEQ ID NO: 1850272 - DNA, 15 bp, Homo sapiens
tgtgtatggtgtgtg

SEQ ID NO: 1850273 - DNA, 15 bp, Homo sapiens
gtgtatggtgtgtgg

SEQ ID NO: 1850274 - DNA, 15 bp, Homo sapiens
tgtatggtgtgtggt

SEQ ID NO: 1850275 - DNA, 15 bp, Homo sapiens
gtatggtgtgtggtg

SEQ ID NO: 1850276 - DNA, 15 bp, Homo sapiens
tatggtgtgtggtgt

SEQ ID NO: 1850277 - DNA, 15 bp, Homo sapiens
atggtgtgtggtgta

SEQ ID NO: 1850278 - DNA, 15 bp, Homo sapiens
gtgtgtggtgtatgg

SEQ ID NO: 1850279 - DNA, 15 bp, Homo sapiens
tgtgtggtgtatggt

SEQ ID NO: 1850280 - DNA, 15 bp, Homo sapiens
gtgtggtgtatggtg

SEQ ID NO: 1850281 - DNA, 15 bp, Homo sapiens
tgtggtgtatggtgt

SEQ ID NO: 1850282 - DNA, 15 bp, Homo sapiens
gtggtgtatggtgtg

SEQ ID NO: 1850283 - DNA, 15 bp, Homo sapiens
tggtgtatggtgtga

SEQ ID NO: 1850284 - DNA, 15 bp, Homo sapiens
ggtgtatggtgtgaa

SEQ ID NO: 1850285 - DNA, 15 bp, Homo sapiens
gtgtatggtgtgaag

SEQ ID NO: 1850286 - DNA, 15 bp, Homo sapiens
tgtatggtgtgaagt

SEQ ID NO: 1850287 - DNA, 15 bp, Homo sapiens
gtatggtgtgaagtg

SEQ ID NO: 1850288 - DNA, 15 bp, Homo sapiens
tatggtgtgaagtgt

SEQ ID NO: 1850289 - DNA, 15 bp, Homo sapiens
atggtgtgaagtgtg

SEQ ID NO: 1850290 - DNA, 15 bp, Homo sapiens
tggtgtgaagtgtgt

SEQ ID NO: 1850291 - DNA, 15 bp, Homo sapiens
ggtgtgaagtgtgtg

SEQ ID NO: 1850292 - DNA, 15 bp, Homo sapiens
gtgtgaagtgtgtgt

SEQ ID NO: 1850293 - DNA, 15 bp, Homo sapiens
tgtgaagtgtgtgtg

SEQ ID NO: 1850294 - DNA, 15 bp, Homo sapiens
gtgaagtgtgtgtgt

SEQ ID NO: 1850295 - DNA, 15 bp, Homo sapiens
tgaagtgtgtgtgta

SEQ ID NO: 1850296 - DNA, 15 bp, Homo sapiens
gaagtgtgtgtgtag

SEQ ID NO: 1850297 - DNA, 15 bp, Homo sapiens
aagtgtgtgtgtagc

SEQ ID NO: 1850298 - DNA, 15 bp, Homo sapiens
agtgtgtgtgtagca

SEQ ID NO: 1850299 - DNA, 15 bp, Homo sapiens
gtgtgtgtgtagcat

SEQ ID NO: 1850300 - DNA, 15 bp, Homo sapiens
tgtgtgtgtagcatg

SEQ ID NO: 1850301 - DNA, 15 bp, Homo sapiens
gtgtgtgtagcatgt

SEQ ID NO: 1850302 - DNA, 15 bp, Homo sapiens
tgtgtgtagcatgta

SEQ ID NO: 1850303 - DNA, 15 bp, Homo sapiens
gtgtgtagcatgtat

SEQ ID NO: 1850304 - DNA, 15 bp, Homo sapiens
tgtgtagcatgtatt

SEQ ID NO: 1850305 - DNA, 15 bp, Homo sapiens
gtgtagcatgtattg

SEQ ID NO: 1850306 - DNA, 15 bp, Homo sapiens
tgtagcatgtattgt

SEQ ID NO: 1850307 - DNA, 15 bp, Homo sapiens
gtagcatgtattgtg

SEQ ID NO: 1850308 - DNA, 15 bp, Homo sapiens
tagcatgtattgtgt

SEQ ID NO: 1850309 - DNA, 15 bp, Homo sapiens
agcatgtattgtgtt

SEQ ID NO: 1850310 - DNA, 15 bp, Homo sapiens
gcatgtattgtgtta

SEQ ID NO: 1850311 - DNA, 15 bp, Homo sapiens
catgtattgtgttac

SEQ ID NO: 1850312 - DNA, 15 bp, Homo sapiens
atgtattgtgttacg

SEQ ID NO: 1850313 - DNA, 15 bp, Homo sapiens
tgtattgtgttacgt

SEQ ID NO: 1850314 - DNA, 15 bp, Homo sapiens
gtattgtgttacgtg

SEQ ID NO: 1850315 - DNA, 15 bp, Homo sapiens
tattgtgttacgtgt

SEQ ID NO: 1850316 - DNA, 15 bp, Homo sapiens
attgtgttacgtgtg

SEQ ID NO: 1850317 - DNA, 15 bp, Homo sapiens
ttgtgttacgtgtgt

SEQ ID NO: 1850318 - DNA, 15 bp, Homo sapiens
tgtgttacgtgtgtg

SEQ ID NO: 1850319 - DNA, 15 bp, Homo sapiens
gtgttacgtgtgtgg

SEQ ID NO: 1850320 - DNA, 15 bp, Homo sapiens
tgttacgtgtgtggt

SEQ ID NO: 1850321 - DNA, 15 bp, Homo sapiens
gttacgtgtgtggtg

SEQ ID NO: 1850322 - DNA, 15 bp, Homo sapiens
ttacgtgtgtggtgc

SEQ ID NO: 1850323 - DNA, 15 bp, Homo sapiens
tacgtgtgtggtgca

SEQ ID NO: 1850324 - DNA, 15 bp, Homo sapiens
acgtgtgtggtgcat

SEQ ID NO: 1850325 - DNA, 15 bp, Homo sapiens
cgtgtgtggtgcatg

SEQ ID NO: 1850326 - DNA, 15 bp, Homo sapiens
gtgtgtggtgcatgg

SEQ ID NO: 1850327 - DNA, 15 bp, Homo sapiens
tgtgtggtgcatggt

SEQ ID NO: 1850328 - DNA, 15 bp, Homo sapiens
gtgtggtgcatggtg

SEQ ID NO: 1850329 - DNA, 15 bp, Homo sapiens
tgtggtgcatggtgt

SEQ ID NO: 1850330 - DNA, 15 bp, Homo sapiens
gtggtgcatggtgtg

SEQ ID NO: 1850331 - DNA, 15 bp, Homo sapiens
tggtgcatggtgtgt

SEQ ID NO: 1850332 - DNA, 15 bp, Homo sapiens
ggtgcatggtgtgtg

SEQ ID NO: 1850333 - DNA, 15 bp, Homo sapiens
gtgcatggtgtgtgt

SEQ ID NO: 1850334 - DNA, 15 bp, Homo sapiens
tgcatggtgtgtgtg

SEQ ID NO: 1850335 - DNA, 15 bp, Homo sapiens
gcatggtgtgtgtgt

SEQ ID NO: 1850336 - DNA, 15 bp, Homo sapiens
catggtgtgtgtgta

SEQ ID NO: 1850337 - DNA, 15 bp, Homo sapiens
gtgtgtgtagtgtga

SEQ ID NO: 1850338 - DNA, 15 bp, Homo sapiens
tgtgtgtagtgtgag

SEQ ID NO: 1850339 - DNA, 15 bp, Homo sapiens
tattagctgattaaa

SEQ ID NO: 1850340 - DNA, 15 bp, Homo sapiens
attagctgattaaaa

SEQ ID NO: 1850341 - DNA, 15 bp, Homo sapiens
ttagctgattaaaaa

SEQ ID NO: 1850342 - DNA, 15 bp, Homo sapiens
tagctgattaaaaag

SEQ ID NO: 1850343 - DNA, 15 bp, Homo sapiens
agctgattaaaaagt

SEQ ID NO: 1850344 - DNA, 15 bp, Homo sapiens
gctgattaaaaagtt

SEQ ID NO: 1850345 - DNA, 15 bp, Homo sapiens
ctgattaaaaagtta

SEQ ID NO: 1850346 - DNA, 15 bp, Homo sapiens
tgattaaaaagttaa

SEQ ID NO: 1850347 - DNA, 15 bp, Homo sapiens
gattaaaaagttaaa

SEQ ID NO: 1850348 - DNA, 15 bp, Homo sapiens
ttaaaaagttaaaaa

SEQ ID NO: 1850349 - DNA, 15 bp, Homo sapiens
taaaaagttaaaaaa

SEQ ID NO: 1850350 - DNA, 15 bp, Homo sapiens
aaaaagttaaaaaaa

SEQ ID NO: 1850351 - DNA, 15 bp, Homo sapiens
aaaagttaaaaaaaa

SEQ ID NO: 1850352 - DNA, 15 bp, Homo sapiens
aaagttaaaaaaaaa

SEQ ID NO: 1850353 - DNA, 15 bp, Homo sapiens
aagttaaaaaaaaaa

SEQ ID NO: 1850354 - DNA, 15 bp, Homo sapiens
agttaaaaaaaaaaa

SEQ ID NO: 1850355 - DNA, 15 bp, Homo sapiens
gttaaaaaaaaaaat

SEQ ID NO: 1850356 - DNA, 15 bp, Homo sapiens
ttaaaaaaaaaaatc

SEQ ID NO: 1850357 - DNA, 15 bp, Homo sapiens
taaaaaaaaaaatct

SEQ ID NO: 1850358 - DNA, 15 bp, Homo sapiens
aaaaaaaaaaatctg

SEQ ID NO: 1850359 - DNA, 15 bp, Homo sapiens
aaaaaaaaaatctgt

SEQ ID NO: 1850360 - DNA, 15 bp, Homo sapiens
aaaaaaaaatctgta

SEQ ID NO: 1850361 - DNA, 15 bp, Homo sapiens
aaaaaaaatctgtat

SEQ ID NO: 1850362 - DNA, 15 bp, Homo sapiens
aaaaaaatctgtatc

SEQ ID NO: 1850363 - DNA, 15 bp, Homo sapiens
aaaaaatctgtatcc

SEQ ID NO: 1850364 - DNA, 15 bp, Homo sapiens
aaaaatctgtatccc

SEQ ID NO: 1850365 - DNA, 15 bp, Homo sapiens
aaaatctgtatccct

SEQ ID NO: 1850366 - DNA, 15 bp, Homo sapiens
aaatctgtatccctg

SEQ ID NO: 1850367 - DNA, 15 bp, Homo sapiens
aatctgtatccctgg

SEQ ID NO: 1850368 - DNA, 15 bp, Homo sapiens
atctgtatccctggg

SEQ ID NO: 1850369 - DNA, 15 bp, Homo sapiens
tctgtatccctgggt

SEQ ID NO: 1850370 - DNA, 15 bp, Homo sapiens
ctgtatccctgggta

SEQ ID NO: 1850371 - DNA, 15 bp, Homo sapiens
tgtatccctgggtag

SEQ ID NO: 1850372 - DNA, 15 bp, Homo sapiens
gtatccctgggtagc

SEQ ID NO: 1850373 - DNA, 15 bp, Homo sapiens
tatccctgggtagcc

SEQ ID NO: 1850374 - DNA, 15 bp, Homo sapiens
atccctgggtagccc

SEQ ID NO: 1850375 - DNA, 15 bp, Homo sapiens
tccctgggtagccca

SEQ ID NO: 1850376 - DNA, 15 bp, Homo sapiens
ccctgggtagcccag

SEQ ID NO: 1850377 - DNA, 15 bp, Homo sapiens
cctgggtagcccagc

SEQ ID NO: 1850378 - DNA, 15 bp, Homo sapiens
ctgggtagcccagcc

SEQ ID NO: 1850379 - DNA, 15 bp, Homo sapiens
tgggtagcccagcct

SEQ ID NO: 1850380 - DNA, 15 bp, Homo sapiens
gggtagcccagcctg

SEQ ID NO: 1850381 - DNA, 15 bp, Homo sapiens
ggtagcccagcctgt

SEQ ID NO: 1850382 - DNA, 15 bp, Homo sapiens
gtagcccagcctgtt

SEQ ID NO: 1850383 - DNA, 15 bp, Homo sapiens
tagcccagcctgttc

SEQ ID NO: 1850384 - DNA, 15 bp, Homo sapiens
agcccagcctgttcc

SEQ ID NO: 1850385 - DNA, 15 bp, Homo sapiens
gcccagcctgttcct

SEQ ID NO: 1850386 - DNA, 15 bp, Homo sapiens
cccagcctgttcctt

SEQ ID NO: 1850387 - DNA, 15 bp, Homo sapiens
ccagcctgttccttg

SEQ ID NO: 1850388 - DNA, 15 bp, Homo sapiens
cagcctgttccttgc

SEQ ID NO: 1850389 - DNA, 15 bp, Homo sapiens
agcctgttccttgct

SEQ ID NO: 1850390 - DNA, 15 bp, Homo sapiens
gcctgttccttgctg

SEQ ID NO: 1850391 - DNA, 15 bp, Homo sapiens
cctgttccttgctgc

SEQ ID NO: 1850392 - DNA, 15 bp, Homo sapiens
ctgttccttgctgca

SEQ ID NO: 1850393 - DNA, 15 bp, Homo sapiens
tgttccttgctgcag

SEQ ID NO: 1850394 - DNA, 15 bp, Homo sapiens
gttccttgctgcagt

SEQ ID NO: 1850395 - DNA, 15 bp, Homo sapiens
ttccttgctgcagtt

SEQ ID NO: 1850396 - DNA, 15 bp, Homo sapiens
tccttgctgcagttg

SEQ ID NO: 1850397 - DNA, 15 bp, Homo sapiens
ccttgctgcagttga

SEQ ID NO: 1850398 - DNA, 15 bp, Homo sapiens
cttgctgcagttgaa

SEQ ID NO: 1850399 - DNA, 15 bp, Homo sapiens
ttgctgcagttgaag

SEQ ID NO: 1850400 - DNA, 15 bp, Homo sapiens
tgctgcagttgaaga

SEQ ID NO: 1850401 - DNA, 15 bp, Homo sapiens
gctgcagttgaagac

SEQ ID NO: 1850402 - DNA, 15 bp, Homo sapiens
ctgcagttgaagact

SEQ ID NO: 1850403 - DNA, 15 bp, Homo sapiens
tgcagttgaagactg

SEQ ID NO: 1850404 - DNA, 15 bp, Homo sapiens
gcagttgaagactga

SEQ ID NO: 1850405 - DNA, 15 bp, Homo sapiens
cagttgaagactgac

SEQ ID NO: 1850406 - DNA, 15 bp, Homo sapiens
agttgaagactgacc

SEQ ID NO: 1850407 - DNA, 15 bp, Homo sapiens
gttgaagactgaccg

SEQ ID NO: 1850408 - DNA, 15 bp, Homo sapiens
ttgaagactgaccga

SEQ ID NO: 1850409 - DNA, 15 bp, Homo sapiens
tgaagactgaccgag

SEQ ID NO: 1850410 - DNA, 15 bp, Homo sapiens
gaagactgaccgagg

SEQ ID NO: 1850411 - DNA, 15 bp, Homo sapiens
aagactgaccgagga

SEQ ID NO: 1850412 - DNA, 15 bp, Homo sapiens
agactgaccgaggag

SEQ ID NO: 1850413 - DNA, 15 bp, Homo sapiens
gactgaccgaggagc

SEQ ID NO: 1850414 - DNA, 15 bp, Homo sapiens
actgaccgaggagct

SEQ ID NO: 1850415 - DNA, 15 bp, Homo sapiens
ctgaccgaggagcta

SEQ ID NO: 1850416 - DNA, 15 bp, Homo sapiens
tgaccgaggagctat

SEQ ID NO: 1850417 - DNA, 15 bp, Homo sapiens
gaccgaggagctatc

SEQ ID NO: 1850418 - DNA, 15 bp, Homo sapiens
accgaggagctatca

SEQ ID NO: 1850419 - DNA, 15 bp, Homo sapiens
ccgaggagctatcag

SEQ ID NO: 1850420 - DNA, 15 bp, Homo sapiens
cgaggagctatcagc

SEQ ID NO: 1850421 - DNA, 15 bp, Homo sapiens
gaggagctatcagcg

SEQ ID NO: 1850422 - DNA, 15 bp, Homo sapiens
aggagctatcagcgg

SEQ ID NO: 1850423 - DNA, 15 bp, Homo sapiens
ggagctatcagcggc

SEQ ID NO: 1850424 - DNA, 15 bp, Homo sapiens
gagctatcagcggct

SEQ ID NO: 1850425 - DNA, 15 bp, Homo sapiens
agctatcagcggctt

SEQ ID NO: 1850426 - DNA, 15 bp, Homo sapiens
gctatcagcggcttc

SEQ ID NO: 1850427 - DNA, 15 bp, Homo sapiens
ctatcagcggcttcc

SEQ ID NO: 1850428 - DNA, 15 bp, Homo sapiens
tatcagcggcttccc

SEQ ID NO: 1850429 - DNA, 15 bp, Homo sapiens
atcagcggcttcccg

SEQ ID NO: 1850430 - DNA, 15 bp, Homo sapiens
tcagcggcttcccgg

SEQ ID NO: 1850431 - DNA, 15 bp, Homo sapiens
cagcggcttcccggc

SEQ ID NO: 1850432 - DNA, 15 bp, Homo sapiens
agcggcttcccggcc

SEQ ID NO: 1850433 - DNA, 15 bp, Homo sapiens
gcggcttcccggcca

SEQ ID NO: 1850434 - DNA, 15 bp, Homo sapiens
cggcttcccggccac

SEQ ID NO: 1850435 - DNA, 15 bp, Homo sapiens
ggcttcccggccact

SEQ ID NO: 1850436 - DNA, 15 bp, Homo sapiens
gcttcccggccactg

SEQ ID NO: 1850437 - DNA, 15 bp, Homo sapiens
cttcccggccactgt

SEQ ID NO: 1850438 - DNA, 15 bp, Homo sapiens
ttcccggccactgtg

SEQ ID NO: 1850439 - DNA, 15 bp, Homo sapiens
tcccggccactgtgg

SEQ ID NO: 1850440 - DNA, 15 bp, Homo sapiens
cccggccactgtggt

SEQ ID NO: 1850441 - DNA, 15 bp, Homo sapiens
ccggccactgtggtg

SEQ ID NO: 1850442 - DNA, 15 bp, Homo sapiens
cggccactgtggtgc

SEQ ID NO: 1850443 - DNA, 15 bp, Homo sapiens
ggccactgtggtgcc

SEQ ID NO: 1850444 - DNA, 15 bp, Homo sapiens
gccactgtggtgcca

SEQ ID NO: 1850445 - DNA, 15 bp, Homo sapiens
ccactgtggtgccat

SEQ ID NO: 1850446 - DNA, 15 bp, Homo sapiens
cactgtggtgccatt

SEQ ID NO: 1850447 - DNA, 15 bp, Homo sapiens
actgtggtgccattt

SEQ ID NO: 1850448 - DNA, 15 bp, Homo sapiens
ctgtggtgccatttt

SEQ ID NO: 1850449 - DNA, 15 bp, Homo sapiens
tgtggtgccattttt

SEQ ID NO: 1850450 - DNA, 15 bp, Homo sapiens
gtggtgccatttttg

SEQ ID NO: 1850451 - DNA, 15 bp, Homo sapiens
tggtgccatttttgg

SEQ ID NO: 1850452 - DNA, 15 bp, Homo sapiens
ggtgccatttttggc

SEQ ID NO: 1850453 - DNA, 15 bp, Homo sapiens
tgccatttttggcct

SEQ ID NO: 1850454 - DNA, 15 bp, Homo sapiens
gccatttttggcctc

SEQ ID NO: 1850455 - DNA, 15 bp, Homo sapiens
ccatttttggcctca

SEQ ID NO: 1850456 - DNA, 15 bp, Homo sapiens
catttttggcctcaa

SEQ ID NO: 1850457 - DNA, 15 bp, Homo sapiens
atttttggcctcaaa

SEQ ID NO: 1850458 - DNA, 15 bp, Homo sapiens
tttttggcctcaaac

SEQ ID NO: 1850459 - DNA, 15 bp, Homo sapiens
ttttggcctcaaacc

SEQ ID NO: 1850460 - DNA, 15 bp, Homo sapiens
tttggcctcaaaccc

SEQ ID NO: 1850461 - DNA, 15 bp, Homo sapiens
ttggcctcaaaccca

SEQ ID NO: 1850462 - DNA, 15 bp, Homo sapiens
tggcctcaaacccat

SEQ ID NO: 1850463 - DNA, 15 bp, Homo sapiens
ggcctcaaacccatt

SEQ ID NO: 1850464 - DNA, 15 bp, Homo sapiens
gcctcaaacccattg

SEQ ID NO: 1850465 - DNA, 15 bp, Homo sapiens
cctcaaacccattgt

SEQ ID NO: 1850466 - DNA, 15 bp, Homo sapiens
ctcaaacccattgtg

SEQ ID NO: 1850467 - DNA, 15 bp, Homo sapiens
tcaaacccattgtga

SEQ ID NO: 1850468 - DNA, 15 bp, Homo sapiens
caaacccattgtgaa

SEQ ID NO: 1850469 - DNA, 15 bp, Homo sapiens
aaacccattgtgaat

SEQ ID NO: 1850470 - DNA, 15 bp, Homo sapiens
aacccattgtgaatt

SEQ ID NO: 1850471 - DNA, 15 bp, Homo sapiens
acccattgtgaattg

SEQ ID NO: 1850472 - DNA, 15 bp, Homo sapiens
cccattgtgaattgc

SEQ ID NO: 1850473 - DNA, 15 bp, Homo sapiens
ccattgtgaattgct

SEQ ID NO: 1850474 - DNA, 15 bp, Homo sapiens
cattgtgaattgcta

SEQ ID NO: 1850475 - DNA, 15 bp, Homo sapiens
attgtgaattgctat

SEQ ID NO: 1850476 - DNA, 15 bp, Homo sapiens
ttgtgaattgctatc

SEQ ID NO: 1850477 - DNA, 15 bp, Homo sapiens
tgtgaattgctatct

SEQ ID NO: 1850478 - DNA, 15 bp, Homo sapiens
gtgaattgctatctt

SEQ ID NO: 1850479 - DNA, 15 bp, Homo sapiens
tgaattgctatcttt

SEQ ID NO: 1850480 - DNA, 15 bp, Homo sapiens
gaattgctatctttt

SEQ ID NO: 1850481 - DNA, 15 bp, Homo sapiens
aattgctatcttttc

SEQ ID NO: 1850482 - DNA, 15 bp, Homo sapiens
attgctatcttttcc

SEQ ID NO: 1850483 - DNA, 15 bp, Homo sapiens
ttgctatcttttccc

SEQ ID NO: 1850484 - DNA, 15 bp, Homo sapiens
tgctatcttttcccc

SEQ ID NO: 1850485 - DNA, 15 bp, Homo sapiens
gctatcttttccccc

SEQ ID NO: 1850486 - DNA, 15 bp, Homo sapiens
ctatcttttccccca

SEQ ID NO: 1850487 - DNA, 15 bp, Homo sapiens
tatcttttcccccag

SEQ ID NO: 1850488 - DNA, 15 bp, Homo sapiens
atcttttcccccagc

SEQ ID NO: 1850489 - DNA, 15 bp, Homo sapiens
tcttttcccccagcc

SEQ ID NO: 1850490 - DNA, 15 bp, Homo sapiens
cttttcccccagcca

SEQ ID NO: 1850491 - DNA, 15 bp, Homo sapiens
ttttcccccagccat

SEQ ID NO: 1850492 - DNA, 15 bp, Homo sapiens
tttcccccagccatc

SEQ ID NO: 1850493 - DNA, 15 bp, Homo sapiens
ttcccccagccatca

SEQ ID NO: 1850494 - DNA, 15 bp, Homo sapiens
tcccccagccatcag

SEQ ID NO: 1850495 - DNA, 15 bp, Homo sapiens
cccccagccatcagc

SEQ ID NO: 1850496 - DNA, 15 bp, Homo sapiens
ccccagccatcagcc

SEQ ID NO: 1850497 - DNA, 15 bp, Homo sapiens
cccagccatcagccg

SEQ ID NO: 1850498 - DNA, 15 bp, Homo sapiens
ccagccatcagccgg

SEQ ID NO: 1850499 - DNA, 15 bp, Homo sapiens
cagccatcagccgga

SEQ ID NO: 1850500 - DNA, 15 bp, Homo sapiens
agccatcagccggaa

SEQ ID NO: 1850501 - DNA, 15 bp, Homo sapiens
gccatcagccggaag

SEQ ID NO: 1850502 - DNA, 15 bp, Homo sapiens
ccatcagccggaaga

SEQ ID NO: 1850503 - DNA, 15 bp, Homo sapiens
catcagccggaagat

SEQ ID NO: 1850504 - DNA, 15 bp, Homo sapiens
atcagccggaagatc

SEQ ID NO: 1850505 - DNA, 15 bp, Homo sapiens
tcagccggaagatcc

SEQ ID NO: 1850506 - DNA, 15 bp, Homo sapiens
cagccggaagatcca

SEQ ID NO: 1850507 - DNA, 15 bp, Homo sapiens
agccggaagatccat

SEQ ID NO: 1850508 - DNA, 15 bp, Homo sapiens
gccggaagatccatt

SEQ ID NO: 1850509 - DNA, 15 bp, Homo sapiens
ccggaagatccatta

SEQ ID NO: 1850510 - DNA, 15 bp, Homo sapiens
cggaagatccattaa

SEQ ID NO: 1850511 - DNA, 15 bp, Homo sapiens
ggaagatccattaac

SEQ ID NO: 1850512 - DNA, 15 bp, Homo sapiens
gaagatccattaaca

SEQ ID NO: 1850513 - DNA, 15 bp, Homo sapiens
aagatccattaacaa

SEQ ID NO: 1850514 - DNA, 15 bp, Homo sapiens
agatccattaacaaa

SEQ ID NO: 1850515 - DNA, 15 bp, Homo sapiens
gatccattaacaaat

SEQ ID NO: 1850516 - DNA, 15 bp, Homo sapiens
atccattaacaaatt

SEQ ID NO: 1850517 - DNA, 15 bp, Homo sapiens
tccattaacaaatta

SEQ ID NO: 1850518 - DNA, 15 bp, Homo sapiens
ccattaacaaattaa

SEQ ID NO: 1850519 - DNA, 15 bp, Homo sapiens
cattaacaaattaaa

SEQ ID NO: 1850520 - DNA, 15 bp, Homo sapiens
attaacaaattaaaa

SEQ ID NO: 1850521 - DNA, 15 bp, Homo sapiens
ttaacaaattaaaat

SEQ ID NO: 1850522 - DNA, 15 bp, Homo sapiens
taacaaattaaaatt

SEQ ID NO: 1850523 - DNA, 15 bp, Homo sapiens
aacaaattaaaattc

SEQ ID NO: 1850524 - DNA, 15 bp, Homo sapiens
acaaattaaaattcc

SEQ ID NO: 1850525 - DNA, 15 bp, Homo sapiens
caaattaaaattccc

SEQ ID NO: 1850526 - DNA, 15 bp, Homo sapiens
aaattaaaattccct

SEQ ID NO: 1850527 - DNA, 15 bp, Homo sapiens
aattaaaattccctc

SEQ ID NO: 1850528 - DNA, 15 bp, Homo sapiens
attaaaattccctct

SEQ ID NO: 1850529 - DNA, 15 bp, Homo sapiens
ttaaaattccctcta

SEQ ID NO: 1850530 - DNA, 15 bp, Homo sapiens
taaaattccctctag

SEQ ID NO: 1850531 - DNA, 15 bp, Homo sapiens
aaaattccctctaga

SEQ ID NO: 1850532 - DNA, 15 bp, Homo sapiens
aaattccctctagag

SEQ ID NO: 1850533 - DNA, 15 bp, Homo sapiens
aattccctctagagt

SEQ ID NO: 1850534 - DNA, 15 bp, Homo sapiens
attccctctagagtc

SEQ ID NO: 1850535 - DNA, 15 bp, Homo sapiens
ttccctctagagtca

SEQ ID NO: 1850536 - DNA, 15 bp, Homo sapiens
tccctctagagtcag

SEQ ID NO: 1850537 - DNA, 15 bp, Homo sapiens
ccctctagagtcaga

SEQ ID NO: 1850538 - DNA, 15 bp, Homo sapiens
cctctagagtcagaa

SEQ ID NO: 1850539 - DNA, 15 bp, Homo sapiens
ctctagagtcagaat

SEQ ID NO: 1850540 - DNA, 15 bp, Homo sapiens
tctagagtcagaatg

SEQ ID NO: 1850541 - DNA, 15 bp, Homo sapiens
ctagagtcagaatgg

SEQ ID NO: 1850542 - DNA, 15 bp, Homo sapiens
tagagtcagaatggc

SEQ ID NO: 1850543 - DNA, 15 bp, Homo sapiens
agagtcagaatggct

SEQ ID NO: 1850544 - DNA, 15 bp, Homo sapiens
gagtcagaatggctt

SEQ ID NO: 1850545 - DNA, 15 bp, Homo sapiens
agtcagaatggcttt

SEQ ID NO: 1850546 - DNA, 15 bp, Homo sapiens
gtcagaatggctttg

SEQ ID NO: 1850547 - DNA, 15 bp, Homo sapiens
tcagaatggctttgg

SEQ ID NO: 1850548 - DNA, 15 bp, Homo sapiens
cagaatggctttggt

SEQ ID NO: 1850549 - DNA, 15 bp, Homo sapiens
agaatggctttggtt

SEQ ID NO: 1850550 - DNA, 15 bp, Homo sapiens
gaatggctttggttt

SEQ ID NO: 1850551 - DNA, 15 bp, Homo sapiens
aatggctttggtttc

SEQ ID NO: 1850552 - DNA, 15 bp, Homo sapiens
atggctttggtttct

SEQ ID NO: 1850553 - DNA, 15 bp, Homo sapiens
tggctttggtttctg

SEQ ID NO: 1850554 - DNA, 15 bp, Homo sapiens
ggctttggtttctgg

SEQ ID NO: 1850555 - DNA, 15 bp, Homo sapiens
gctttggtttctggg

SEQ ID NO: 1850556 - DNA, 15 bp, Homo sapiens
ctttggtttctgggt

SEQ ID NO: 1850557 - DNA, 15 bp, Homo sapiens
tttggtttctgggtt

SEQ ID NO: 1850558 - DNA, 15 bp, Homo sapiens
ttggtttctgggttc

SEQ ID NO: 1850559 - DNA, 15 bp, Homo sapiens
tggtttctgggttct

SEQ ID NO: 1850560 - DNA, 15 bp, Homo sapiens
ggtttctgggttcta

SEQ ID NO: 1850561 - DNA, 15 bp, Homo sapiens
gtttctgggttctaa

SEQ ID NO: 1850562 - DNA, 15 bp, Homo sapiens
tttctgggttctaaa

SEQ ID NO: 1850563 - DNA, 15 bp, Homo sapiens
ttctgggttctaaat

SEQ ID NO: 1850564 - DNA, 15 bp, Homo sapiens
tctgggttctaaatg

SEQ ID NO: 1850565 - DNA, 15 bp, Homo sapiens
ctgggttctaaatga

SEQ ID NO: 1850566 - DNA, 15 bp, Homo sapiens
tgggttctaaatgac

SEQ ID NO: 1850567 - DNA, 15 bp, Homo sapiens
gggttctaaatgacc

SEQ ID NO: 1850568 - DNA, 15 bp, Homo sapiens
ggttctaaatgacct

SEQ ID NO: 1850569 - DNA, 15 bp, Homo sapiens
gttctaaatgacctt

SEQ ID NO: 1850570 - DNA, 15 bp, Homo sapiens
ttctaaatgaccttg

SEQ ID NO: 1850571 - DNA, 15 bp, Homo sapiens
tctaaatgaccttga

SEQ ID NO: 1850572 - DNA, 15 bp, Homo sapiens
ctaaatgaccttgat

SEQ ID NO: 1850573 - DNA, 15 bp, Homo sapiens
taaatgaccttgatt

SEQ ID NO: 1850574 - DNA, 15 bp, Homo sapiens
aaatgaccttgattt

SEQ ID NO: 1850575 - DNA, 15 bp, Homo sapiens
aatgaccttgatttt

SEQ ID NO: 1850576 - DNA, 15 bp, Homo sapiens
atgaccttgatttta

SEQ ID NO: 1850577 - DNA, 15 bp, Homo sapiens
tgaccttgattttaa

SEQ ID NO: 1850578 - DNA, 15 bp, Homo sapiens
gaccttgattttaat

SEQ ID NO: 1850579 - DNA, 15 bp, Homo sapiens
accttgattttaatt

SEQ ID NO: 1850580 - DNA, 15 bp, Homo sapiens
ccttgattttaatta

SEQ ID NO: 1850581 - DNA, 15 bp, Homo sapiens
cttgattttaattac

SEQ ID NO: 1850582 - DNA, 15 bp, Homo sapiens
ttgattttaattacc

SEQ ID NO: 1850583 - DNA, 15 bp, Homo sapiens
tgattttaattacca

SEQ ID NO: 1850584 - DNA, 15 bp, Homo sapiens
gattttaattaccat

SEQ ID NO: 1850585 - DNA, 15 bp, Homo sapiens
attttaattaccatg

SEQ ID NO: 1850586 - DNA, 15 bp, Homo sapiens
ttttaattaccatgc

SEQ ID NO: 1850587 - DNA, 15 bp, Homo sapiens
tttaattaccatgcc

SEQ ID NO: 1850588 - DNA, 15 bp, Homo sapiens
ttaattaccatgcca

SEQ ID NO: 1850589 - DNA, 15 bp, Homo sapiens
taattaccatgccat

SEQ ID NO: 1850590 - DNA, 15 bp, Homo sapiens
aattaccatgccata

SEQ ID NO: 1850591 - DNA, 15 bp, Homo sapiens
attaccatgccatac

SEQ ID NO: 1850592 - DNA, 15 bp, Homo sapiens
ttaccatgccataca

SEQ ID NO: 1850593 - DNA, 15 bp, Homo sapiens
taccatgccatacag

SEQ ID NO: 1850594 - DNA, 15 bp, Homo sapiens
accatgccatacagg

SEQ ID NO: 1850595 - DNA, 15 bp, Homo sapiens
ccatgccatacaggt

SEQ ID NO: 1850596 - DNA, 15 bp, Homo sapiens
catgccatacaggtt

SEQ ID NO: 1850597 - DNA, 15 bp, Homo sapiens
atgccatacaggttt

SEQ ID NO: 1850598 - DNA, 15 bp, Homo sapiens
tgccatacaggtttg

SEQ ID NO: 1850599 - DNA, 15 bp, Homo sapiens
gccatacaggtttgg

SEQ ID NO: 1850600 - DNA, 15 bp, Homo sapiens
ccatacaggtttgga

SEQ ID NO: 1850601 - DNA, 15 bp, Homo sapiens
catacaggtttggaa

SEQ ID NO: 1850602 - DNA, 15 bp, Homo sapiens
atacaggtttggaag

SEQ ID NO: 1850603 - DNA, 15 bp, Homo sapiens
tacaggtttggaaga

SEQ ID NO: 1850604 - DNA, 15 bp, Homo sapiens
acaggtttggaagaa

SEQ ID NO: 1850605 - DNA, 15 bp, Homo sapiens
caggtttggaagaag

SEQ ID NO: 1850606 - DNA, 15 bp, Homo sapiens
aggtttggaagaaga

SEQ ID NO: 1850607 - DNA, 15 bp, Homo sapiens
ggtttggaagaagac

SEQ ID NO: 1850608 - DNA, 15 bp, Homo sapiens
gtttggaagaagaca

SEQ ID NO: 1850609 - DNA, 15 bp, Homo sapiens
tttggaagaagacac

SEQ ID NO: 1850610 - DNA, 15 bp, Homo sapiens
ttggaagaagacacc

SEQ ID NO: 1850611 - DNA, 15 bp, Homo sapiens
tggaagaagacacca

SEQ ID NO: 1850612 - DNA, 15 bp, Homo sapiens
ggaagaagacaccat

SEQ ID NO: 1850613 - DNA, 15 bp, Homo sapiens
gaagaagacaccatc

SEQ ID NO: 1850614 - DNA, 15 bp, Homo sapiens
aagaagacaccatca

SEQ ID NO: 1850615 - DNA, 15 bp, Homo sapiens
agaagacaccatcac

SEQ ID NO: 1850616 - DNA, 15 bp, Homo sapiens
gaagacaccatcact

SEQ ID NO: 1850617 - DNA, 15 bp, Homo sapiens
aagacaccatcactg

SEQ ID NO: 1850618 - DNA, 15 bp, Homo sapiens
agacaccatcactga

SEQ ID NO: 1850619 - DNA, 15 bp, Homo sapiens
gacaccatcactgaa

SEQ ID NO: 1850620 - DNA, 15 bp, Homo sapiens
acaccatcactgaat

SEQ ID NO: 1850621 - DNA, 15 bp, Homo sapiens
caccatcactgaatc

SEQ ID NO: 1850622 - DNA, 15 bp, Homo sapiens
accatcactgaatcc

SEQ ID NO: 1850623 - DNA, 15 bp, Homo sapiens
ccatcactgaatccc

SEQ ID NO: 1850624 - DNA, 15 bp, Homo sapiens
catcactgaatccct

SEQ ID NO: 1850625 - DNA, 15 bp, Homo sapiens
atcactgaatccctg

SEQ ID NO: 1850626 - DNA, 15 bp, Homo sapiens
tcactgaatccctgg

SEQ ID NO: 1850627 - DNA, 15 bp, Homo sapiens
cactgaatccctggc

SEQ ID NO: 1850628 - DNA, 15 bp, Homo sapiens
actgaatccctggct

SEQ ID NO: 1850629 - DNA, 15 bp, Homo sapiens
ctgaatccctggctc

SEQ ID NO: 1850630 - DNA, 15 bp, Homo sapiens
tgaatccctggctcc

SEQ ID NO: 1850631 - DNA, 15 bp, Homo sapiens
gaatccctggctcct

SEQ ID NO: 1850632 - DNA, 15 bp, Homo sapiens
aatccctggctcctt

SEQ ID NO: 1850633 - DNA, 15 bp, Homo sapiens
atccctggctccttg

SEQ ID NO: 1850634 - DNA, 15 bp, Homo sapiens
tccctggctccttgc

SEQ ID NO: 1850635 - DNA, 15 bp, Homo sapiens
ccctggctccttgct

SEQ ID NO: 1850636 - DNA, 15 bp, Homo sapiens
cctggctccttgctg

SEQ ID NO: 1850637 - DNA, 15 bp, Homo sapiens
ctggctccttgctga

SEQ ID NO: 1850638 - DNA, 15 bp, Homo sapiens
tggctccttgctgag

SEQ ID NO: 1850639 - DNA, 15 bp, Homo sapiens
ggctccttgctgagg

SEQ ID NO: 1850640 - DNA, 15 bp, Homo sapiens
gctccttgctgaggc

SEQ ID NO: 1850641 - DNA, 15 bp, Homo sapiens
ctccttgctgaggca

SEQ ID NO: 1850642 - DNA, 15 bp, Homo sapiens
tccttgctgaggcag

SEQ ID NO: 1850643 - DNA, 15 bp, Homo sapiens
ccttgctgaggcagc

SEQ ID NO: 1850644 - DNA, 15 bp, Homo sapiens
cttgctgaggcagca

SEQ ID NO: 1850645 - DNA, 15 bp, Homo sapiens
ttgctgaggcagcag

SEQ ID NO: 1850646 - DNA, 15 bp, Homo sapiens
tgctgaggcagcaga

SEQ ID NO: 1850647 - DNA, 15 bp, Homo sapiens
gctgaggcagcagag

SEQ ID NO: 1850648 - DNA, 15 bp, Homo sapiens
ctgaggcagcagaga

SEQ ID NO: 1850649 - DNA, 15 bp, Homo sapiens
tgaggcagcagagag

SEQ ID NO: 1850650 - DNA, 15 bp, Homo sapiens
gaggcagcagagagc

SEQ ID NO: 1850651 - DNA, 15 bp, Homo sapiens
aggcagcagagagct

SEQ ID NO: 1850652 - DNA, 15 bp, Homo sapiens
ggcagcagagagctg

SEQ ID NO: 1850653 - DNA, 15 bp, Homo sapiens
gcagcagagagctgg

SEQ ID NO: 1850654 - DNA, 15 bp, Homo sapiens
cagcagagagctggg

SEQ ID NO: 1850655 - DNA, 15 bp, Homo sapiens
agcagagagctgggg

SEQ ID NO: 1850656 - DNA, 15 bp, Homo sapiens
gcagagagctggggt

SEQ ID NO: 1850657 - DNA, 15 bp, Homo sapiens
cagagagctggggta

SEQ ID NO: 1850658 - DNA, 15 bp, Homo sapiens
agagagctggggtat

SEQ ID NO: 1850659 - DNA, 15 bp, Homo sapiens
gagagctggggtatt

SEQ ID NO: 1850660 - DNA, 15 bp, Homo sapiens
agagctggggtattc

SEQ ID NO: 1850661 - DNA, 15 bp, Homo sapiens
gagctggggtattca

SEQ ID NO: 1850662 - DNA, 15 bp, Homo sapiens
agctggggtattcag

SEQ ID NO: 1850663 - DNA, 15 bp, Homo sapiens
gctggggtattcagt

SEQ ID NO: 1850664 - DNA, 15 bp, Homo sapiens
ctggggtattcagtt

SEQ ID NO: 1850665 - DNA, 15 bp, Homo sapiens
tggggtattcagttt

SEQ ID NO: 1850666 - DNA, 15 bp, Homo sapiens
ggggtattcagtttg

SEQ ID NO: 1850667 - DNA, 15 bp, Homo sapiens
gggtattcagtttgg

SEQ ID NO: 1850668 - DNA, 15 bp, Homo sapiens
ggtattcagtttggc

SEQ ID NO: 1850669 - DNA, 15 bp, Homo sapiens
gtattcagtttggcc

SEQ ID NO: 1850670 - DNA, 15 bp, Homo sapiens
tattcagtttggcca

SEQ ID NO: 1850671 - DNA, 15 bp, Homo sapiens
attcagtttggccac

SEQ ID NO: 1850672 - DNA, 15 bp, Homo sapiens
ttcagtttggccaca

SEQ ID NO: 1850673 - DNA, 15 bp, Homo sapiens
tcagtttggccacac

SEQ ID NO: 1850674 - DNA, 15 bp, Homo sapiens
cagtttggccacact

SEQ ID NO: 1850675 - DNA, 15 bp, Homo sapiens
agtttggccacactt

SEQ ID NO: 1850676 - DNA, 15 bp, Homo sapiens
gtttggccacacttc

SEQ ID NO: 1850677 - DNA, 15 bp, Homo sapiens
tttggccacacttct

SEQ ID NO: 1850678 - DNA, 15 bp, Homo sapiens
ttggccacacttctg

SEQ ID NO: 1850679 - DNA, 15 bp, Homo sapiens
tggccacacttctgg

SEQ ID NO: 1850680 - DNA, 15 bp, Homo sapiens
ggccacacttctggg

SEQ ID NO: 1850681 - DNA, 15 bp, Homo sapiens
gccacacttctgggc

SEQ ID NO: 1850682 - DNA, 15 bp, Homo sapiens
ccacacttctgggct

SEQ ID NO: 1850683 - DNA, 15 bp, Homo sapiens
cacacttctgggctt

SEQ ID NO: 1850684 - DNA, 15 bp, Homo sapiens
acacttctgggcttg

SEQ ID NO: 1850685 - DNA, 15 bp, Homo sapiens
cacttctgggcttgt

SEQ ID NO: 1850686 - DNA, 15 bp, Homo sapiens
acttctgggcttgtg

SEQ ID NO: 1850687 - DNA, 15 bp, Homo sapiens
cttctgggcttgtgg

SEQ ID NO: 1850688 - DNA, 15 bp, Homo sapiens
ttctgggcttgtggg

SEQ ID NO: 1850689 - DNA, 15 bp, Homo sapiens
tctgggcttgtgggt

SEQ ID NO: 1850690 - DNA, 15 bp, Homo sapiens
ctgggcttgtgggtg

SEQ ID NO: 1850691 - DNA, 15 bp, Homo sapiens
tgggcttgtgggtga

SEQ ID NO: 1850692 - DNA, 15 bp, Homo sapiens
gggcttgtgggtgat

SEQ ID NO: 1850693 - DNA, 15 bp, Homo sapiens
ggcttgtgggtgata

SEQ ID NO: 1850694 - DNA, 15 bp, Homo sapiens
gcttgtgggtgatac

SEQ ID NO: 1850695 - DNA, 15 bp, Homo sapiens
cttgtgggtgatacc

SEQ ID NO: 1850696 - DNA, 15 bp, Homo sapiens
ttgtgggtgatacct

SEQ ID NO: 1850697 - DNA, 15 bp, Homo sapiens
tgtgggtgatacctc

SEQ ID NO: 1850698 - DNA, 15 bp, Homo sapiens
gtgggtgatacctct

SEQ ID NO: 1850699 - DNA, 15 bp, Homo sapiens
tgggtgatacctctg

SEQ ID NO: 1850700 - DNA, 15 bp, Homo sapiens
gggtgatacctctga

SEQ ID NO: 1850701 - DNA, 15 bp, Homo sapiens
ggtgatacctctgaa

SEQ ID NO: 1850702 - DNA, 15 bp, Homo sapiens
gtgatacctctgaag

SEQ ID NO: 1850703 - DNA, 15 bp, Homo sapiens
tgatacctctgaagt

SEQ ID NO: 1850704 - DNA, 15 bp, Homo sapiens
gatacctctgaagtc

SEQ ID NO: 1850705 - DNA, 15 bp, Homo sapiens
atacctctgaagtcc

SEQ ID NO: 1850706 - DNA, 15 bp, Homo sapiens
tacctctgaagtcct

SEQ ID NO: 1850707 - DNA, 15 bp, Homo sapiens
acctctgaagtcctt

SEQ ID NO: 1850708 - DNA, 15 bp, Homo sapiens
cctctgaagtcctta

SEQ ID NO: 1850709 - DNA, 15 bp, Homo sapiens
ctctgaagtccttat

SEQ ID NO: 1850710 - DNA, 15 bp, Homo sapiens
tctgaagtccttatt

SEQ ID NO: 1850711 - DNA, 15 bp, Homo sapiens
ctgaagtccttattg

SEQ ID NO: 1850712 - DNA, 15 bp, Homo sapiens
tgaagtccttattgg

SEQ ID NO: 1850713 - DNA, 15 bp, Homo sapiens
gaagtccttattggt

SEQ ID NO: 1850714 - DNA, 15 bp, Homo sapiens
aagtccttattggtt

SEQ ID NO: 1850715 - DNA, 15 bp, Homo sapiens
agtccttattggttt

SEQ ID NO: 1850716 - DNA, 15 bp, Homo sapiens
gtccttattggtttc

SEQ ID NO: 1850717 - DNA, 15 bp, Homo sapiens
tccttattggtttct

SEQ ID NO: 1850718 - DNA, 15 bp, Homo sapiens
ccttattggtttcta

SEQ ID NO: 1850719 - DNA, 15 bp, Homo sapiens
cttattggtttctaa

SEQ ID NO: 1850720 - DNA, 15 bp, Homo sapiens
tattggtttctaaag

SEQ ID NO: 1850721 - DNA, 15 bp, Homo sapiens
attggtttctaaagg

SEQ ID NO: 1850722 - DNA, 15 bp, Homo sapiens
ttggtttctaaaggt

SEQ ID NO: 1850723 - DNA, 15 bp, Homo sapiens
tggtttctaaaggtc

SEQ ID NO: 1850724 - DNA, 15 bp, Homo sapiens
ggtttctaaaggtct

SEQ ID NO: 1850725 - DNA, 15 bp, Homo sapiens
gtttctaaaggtctt

SEQ ID NO: 1850726 - DNA, 15 bp, Homo sapiens
tttctaaaggtcttt

SEQ ID NO: 1850727 - DNA, 15 bp, Homo sapiens
ttctaaaggtctttg

SEQ ID NO: 1850728 - DNA, 15 bp, Homo sapiens
tctaaaggtctttgt

SEQ ID NO: 1850729 - DNA, 15 bp, Homo sapiens
ctaaaggtctttgtg

SEQ ID NO: 1850730 - DNA, 15 bp, Homo sapiens
taaaggtctttgtgc

SEQ ID NO: 1850731 - DNA, 15 bp, Homo sapiens
aaaggtctttgtgcc

SEQ ID NO: 1850732 - DNA, 15 bp, Homo sapiens
aaggtctttgtgcca

SEQ ID NO: 1850733 - DNA, 15 bp, Homo sapiens
aggtctttgtgccac

SEQ ID NO: 1850734 - DNA, 15 bp, Homo sapiens
ggtctttgtgccact

SEQ ID NO: 1850735 - DNA, 15 bp, Homo sapiens
gtctttgtgccactc

SEQ ID NO: 1850736 - DNA, 15 bp, Homo sapiens
tctttgtgccactcc

SEQ ID NO: 1850737 - DNA, 15 bp, Homo sapiens
ctttgtgccactccc

SEQ ID NO: 1850738 - DNA, 15 bp, Homo sapiens
tttgtgccactccca

SEQ ID NO: 1850739 - DNA, 15 bp, Homo sapiens
ttgtgccactcccag

SEQ ID NO: 1850740 - DNA, 15 bp, Homo sapiens
tgtgccactcccagt

SEQ ID NO: 1850741 - DNA, 15 bp, Homo sapiens
gtgccactcccagtt

SEQ ID NO: 1850742 - DNA, 15 bp, Homo sapiens
tgccactcccagttt

SEQ ID NO: 1850743 - DNA, 15 bp, Homo sapiens
gccactcccagtttc

SEQ ID NO: 1850744 - DNA, 15 bp, Homo sapiens
ccactcccagtttct

SEQ ID NO: 1850745 - DNA, 15 bp, Homo sapiens
cactcccagtttctc

SEQ ID NO: 1850746 - DNA, 15 bp, Homo sapiens
actcccagtttctca

SEQ ID NO: 1850747 - DNA, 15 bp, Homo sapiens
ctcccagtttctcag

SEQ ID NO: 1850748 - DNA, 15 bp, Homo sapiens
tcccagtttctcagt

SEQ ID NO: 1850749 - DNA, 15 bp, Homo sapiens
cccagtttctcagtc

SEQ ID NO: 1850750 - DNA, 15 bp, Homo sapiens
ccagtttctcagtca

SEQ ID NO: 1850751 - DNA, 15 bp, Homo sapiens
cagtttctcagtcag

SEQ ID NO: 1850752 - DNA, 15 bp, Homo sapiens
agtttctcagtcagc

SEQ ID NO: 1850753 - DNA, 15 bp, Homo sapiens
gtttctcagtcagct

SEQ ID NO: 1850754 - DNA, 15 bp, Homo sapiens
tttctcagtcagctg

SEQ ID NO: 1850755 - DNA, 15 bp, Homo sapiens
ttctcagtcagctgc

SEQ ID NO: 1850756 - DNA, 15 bp, Homo sapiens
tctcagtcagctgcc

SEQ ID NO: 1850757 - DNA, 15 bp, Homo sapiens
ctcagtcagctgcca

SEQ ID NO: 1850758 - DNA, 15 bp, Homo sapiens
tcagtcagctgccag

SEQ ID NO: 1850759 - DNA, 15 bp, Homo sapiens
cagtcagctgccagt

SEQ ID NO: 1850760 - DNA, 15 bp, Homo sapiens
agtcagctgccagtg

SEQ ID NO: 1850761 - DNA, 15 bp, Homo sapiens
gtcagctgccagtga

SEQ ID NO: 1850762 - DNA, 15 bp, Homo sapiens
tcagctgccagtgag

SEQ ID NO: 1850763 - DNA, 15 bp, Homo sapiens
cagctgccagtgagt

SEQ ID NO: 1850764 - DNA, 15 bp, Homo sapiens
agctgccagtgagtt

SEQ ID NO: 1850765 - DNA, 15 bp, Homo sapiens
gctgccagtgagttc

SEQ ID NO: 1850766 - DNA, 15 bp, Homo sapiens
ctgccagtgagttca

SEQ ID NO: 1850767 - DNA, 15 bp, Homo sapiens
tgccagtgagttcac

SEQ ID NO: 1850768 - DNA, 15 bp, Homo sapiens
gccagtgagttcaca

SEQ ID NO: 1850769 - DNA, 15 bp, Homo sapiens
ccagtgagttcacac

SEQ ID NO: 1850770 - DNA, 15 bp, Homo sapiens
cagtgagttcacaca

SEQ ID NO: 1850771 - DNA, 15 bp, Homo sapiens
agtgagttcacacac

SEQ ID NO: 1850772 - DNA, 15 bp, Homo sapiens
gtgagttcacacacc

SEQ ID NO: 1850773 - DNA, 15 bp, Homo sapiens
tgagttcacacacct

SEQ ID NO: 1850774 - DNA, 15 bp, Homo sapiens
gagttcacacacctc

SEQ ID NO: 1850775 - DNA, 15 bp, Homo sapiens
agttcacacacctct

SEQ ID NO: 1850776 - DNA, 15 bp, Homo sapiens
gttcacacacctctg

SEQ ID NO: 1850777 - DNA, 15 bp, Homo sapiens
ttcacacacctctga

SEQ ID NO: 1850778 - DNA, 15 bp, Homo sapiens
tcacacacctctgag

SEQ ID NO: 1850779 - DNA, 15 bp, Homo sapiens
cacacacctctgaga

SEQ ID NO: 1850780 - DNA, 15 bp, Homo sapiens
acacacctctgagaa

SEQ ID NO: 1850781 - DNA, 15 bp, Homo sapiens
cacacctctgagaac

SEQ ID NO: 1850782 - DNA, 15 bp, Homo sapiens
acacctctgagaact

SEQ ID NO: 1850783 - DNA, 15 bp, Homo sapiens
cacctctgagaactc

SEQ ID NO: 1850784 - DNA, 15 bp, Homo sapiens
acctctgagaactct

SEQ ID NO: 1850785 - DNA, 15 bp, Homo sapiens
cctctgagaactctt

SEQ ID NO: 1850786 - DNA, 15 bp, Homo sapiens
ctctgagaactcttc

SEQ ID NO: 1850787 - DNA, 15 bp, Homo sapiens
tctgagaactcttcc

SEQ ID NO: 1850788 - DNA, 15 bp, Homo sapiens
ctgagaactcttcca

SEQ ID NO: 1850789 - DNA, 15 bp, Homo sapiens
tgagaactcttccag

SEQ ID NO: 1850790 - DNA, 15 bp, Homo sapiens
gagaactcttccagg

SEQ ID NO: 1850791 - DNA, 15 bp, Homo sapiens
agaactcttccagga

SEQ ID NO: 1850792 - DNA, 15 bp, Homo sapiens
gaactcttccaggac

SEQ ID NO: 1850793 - DNA, 15 bp, Homo sapiens
aactcttccaggacc

SEQ ID NO: 1850794 - DNA, 15 bp, Homo sapiens
actcttccaggaccc

SEQ ID NO: 1850795 - DNA, 15 bp, Homo sapiens
ctcttccaggacccc

SEQ ID NO: 1850796 - DNA, 15 bp, Homo sapiens
tcttccaggaccccc

SEQ ID NO: 1850797 - DNA, 15 bp, Homo sapiens
cttccaggaccccca

SEQ ID NO: 1850798 - DNA, 15 bp, Homo sapiens
ttccaggacccccag

SEQ ID NO: 1850799 - DNA, 15 bp, Homo sapiens
tccaggacccccagt

SEQ ID NO: 1850800 - DNA, 15 bp, Homo sapiens
ccaggacccccagta

SEQ ID NO: 1850801 - DNA, 15 bp, Homo sapiens
caggacccccagtaa

SEQ ID NO: 1850802 - DNA, 15 bp, Homo sapiens
aggacccccagtaag

SEQ ID NO: 1850803 - DNA, 15 bp, Homo sapiens
ggacccccagtaagc

SEQ ID NO: 1850804 - DNA, 15 bp, Homo sapiens
gacccccagtaagct

SEQ ID NO: 1850805 - DNA, 15 bp, Homo sapiens
acccccagtaagctt

SEQ ID NO: 1850806 - DNA, 15 bp, Homo sapiens
cccccagtaagcttg

SEQ ID NO: 1850807 - DNA, 15 bp, Homo sapiens
ccccagtaagcttgc

SEQ ID NO: 1850808 - DNA, 15 bp, Homo sapiens
cccagtaagcttgct

SEQ ID NO: 1850809 - DNA, 15 bp, Homo sapiens
ccagtaagcttgctc

SEQ ID NO: 1850810 - DNA, 15 bp, Homo sapiens
cagtaagcttgctct

SEQ ID NO: 1850811 - DNA, 15 bp, Homo sapiens
agtaagcttgctcta

SEQ ID NO: 1850812 - DNA, 15 bp, Homo sapiens
gtaagcttgctctag

SEQ ID NO: 1850813 - DNA, 15 bp, Homo sapiens
taagcttgctctagg

SEQ ID NO: 1850814 - DNA, 15 bp, Homo sapiens
aagcttgctctaggc

SEQ ID NO: 1850815 - DNA, 15 bp, Homo sapiens
agcttgctctaggcc

SEQ ID NO: 1850816 - DNA, 15 bp, Homo sapiens
gcttgctctaggccc

SEQ ID NO: 1850817 - DNA, 15 bp, Homo sapiens
cttgctctaggcccc

SEQ ID NO: 1850818 - DNA, 15 bp, Homo sapiens
ttgctctaggcccca

SEQ ID NO: 1850819 - DNA, 15 bp, Homo sapiens
tgctctaggccccaa

SEQ ID NO: 1850820 - DNA, 15 bp, Homo sapiens
gctctaggccccaag

SEQ ID NO: 1850821 - DNA, 15 bp, Homo sapiens
ctctaggccccaagg

SEQ ID NO: 1850822 - DNA, 15 bp, Homo sapiens
tctaggccccaagga

SEQ ID NO: 1850823 - DNA, 15 bp, Homo sapiens
ctaggccccaaggag

SEQ ID NO: 1850824 - DNA, 15 bp, Homo sapiens
taggccccaaggagt

SEQ ID NO: 1850825 - DNA, 15 bp, Homo sapiens
aggccccaaggagtc

SEQ ID NO: 1850826 - DNA, 15 bp, Homo sapiens
ggccccaaggagtcc

SEQ ID NO: 1850827 - DNA, 15 bp, Homo sapiens
gccccaaggagtccc

SEQ ID NO: 1850828 - DNA, 15 bp, Homo sapiens
ccccaaggagtcccc

SEQ ID NO: 1850829 - DNA, 15 bp, Homo sapiens
cccaaggagtcccct

SEQ ID NO: 1850830 - DNA, 15 bp, Homo sapiens
ccaaggagtcccctc

SEQ ID NO: 1850831 - DNA, 15 bp, Homo sapiens
caaggagtcccctct

SEQ ID NO: 1850832 - DNA, 15 bp, Homo sapiens
aaggagtcccctctg

SEQ ID NO: 1850833 - DNA, 15 bp, Homo sapiens
aggagtcccctctgg

SEQ ID NO: 1850834 - DNA, 15 bp, Homo sapiens
ggagtcccctctggc

SEQ ID NO: 1850835 - DNA, 15 bp, Homo sapiens
gagtcccctctggca

SEQ ID NO: 1850836 - DNA, 15 bp, Homo sapiens
agtcccctctggcaa

SEQ ID NO: 1850837 - DNA, 15 bp, Homo sapiens
gtcccctctggcaac

SEQ ID NO: 1850838 - DNA, 15 bp, Homo sapiens
tcccctctggcaacc

SEQ ID NO: 1850839 - DNA, 15 bp, Homo sapiens
cccctctggcaaccg

SEQ ID NO: 1850840 - DNA, 15 bp, Homo sapiens
ccctctggcaaccgt

SEQ ID NO: 1850841 - DNA, 15 bp, Homo sapiens
cctctggcaaccgtt

SEQ ID NO: 1850842 - DNA, 15 bp, Homo sapiens
ctctggcaaccgtta

SEQ ID NO: 1850843 - DNA, 15 bp, Homo sapiens
tctggcaaccgttat

SEQ ID NO: 1850844 - DNA, 15 bp, Homo sapiens
ctggcaaccgttata

SEQ ID NO: 1850845 - DNA, 15 bp, Homo sapiens
tggcaaccgttatat

SEQ ID NO: 1850846 - DNA, 15 bp, Homo sapiens
ggcaaccgttatatt

SEQ ID NO: 1850847 - DNA, 15 bp, Homo sapiens
gcaaccgttatattc

SEQ ID NO: 1850848 - DNA, 15 bp, Homo sapiens
caaccgttatattca

SEQ ID NO: 1850849 - DNA, 15 bp, Homo sapiens
aaccgttatattcag

SEQ ID NO: 1850850 - DNA, 15 bp, Homo sapiens
accgttatattcagg

SEQ ID NO: 1850851 - DNA, 15 bp, Homo sapiens
ccgttatattcaggg

SEQ ID NO: 1850852 - DNA, 15 bp, Homo sapiens
cgttatattcaggga

SEQ ID NO: 1850853 - DNA, 15 bp, Homo sapiens
gttatattcagggac

SEQ ID NO: 1850854 - DNA, 15 bp, Homo sapiens
ttatattcagggacc

SEQ ID NO: 1850855 - DNA, 15 bp, Homo sapiens
tatattcagggaccc

SEQ ID NO: 1850856 - DNA, 15 bp, Homo sapiens
atattcagggaccct

SEQ ID NO: 1850857 - DNA, 15 bp, Homo sapiens
tattcagggaccctt

SEQ ID NO: 1850858 - DNA, 15 bp, Homo sapiens
attcagggacccttc

SEQ ID NO: 1850859 - DNA, 15 bp, Homo sapiens
ttcagggacccttct

SEQ ID NO: 1850860 - DNA, 15 bp, Homo sapiens
tcagggacccttctc

SEQ ID NO: 1850861 - DNA, 15 bp, Homo sapiens
cagggacccttctca

SEQ ID NO: 1850862 - DNA, 15 bp, Homo sapiens
agggacccttctcaa

SEQ ID NO: 1850863 - DNA, 15 bp, Homo sapiens
gggacccttctcaag

SEQ ID NO: 1850864 - DNA, 15 bp, Homo sapiens
ggacccttctcaaga

SEQ ID NO: 1850865 - DNA, 15 bp, Homo sapiens
gacccttctcaagac

SEQ ID NO: 1850866 - DNA, 15 bp, Homo sapiens
acccttctcaagaca

SEQ ID NO: 1850867 - DNA, 15 bp, Homo sapiens
cccttctcaagacaa

SEQ ID NO: 1850868 - DNA, 15 bp, Homo sapiens
ccttctcaagacaaa

SEQ ID NO: 1850869 - DNA, 15 bp, Homo sapiens
cttctcaagacaaat

SEQ ID NO: 1850870 - DNA, 15 bp, Homo sapiens
ttctcaagacaaatt

SEQ ID NO: 1850871 - DNA, 15 bp, Homo sapiens
tctcaagacaaattt

SEQ ID NO: 1850872 - DNA, 15 bp, Homo sapiens
ctcaagacaaatttc

SEQ ID NO: 1850873 - DNA, 15 bp, Homo sapiens
tcaagacaaatttct

SEQ ID NO: 1850874 - DNA, 15 bp, Homo sapiens
caagacaaatttctt

SEQ ID NO: 1850875 - DNA, 15 bp, Homo sapiens
aagacaaatttcttg

SEQ ID NO: 1850876 - DNA, 15 bp, Homo sapiens
agacaaatttcttga

SEQ ID NO: 1850877 - DNA, 15 bp, Homo sapiens
gacaaatttcttgag

SEQ ID NO: 1850878 - DNA, 15 bp, Homo sapiens
acaaatttcttgagg

SEQ ID NO: 1850879 - DNA, 15 bp, Homo sapiens
caaatttcttgagga

SEQ ID NO: 1850880 - DNA, 15 bp, Homo sapiens
aaatttcttgaggag

SEQ ID NO: 1850881 - DNA, 15 bp, Homo sapiens
aatttcttgaggaga

SEQ ID NO: 1850882 - DNA, 15 bp, Homo sapiens
atttcttgaggagac

SEQ ID NO: 1850883 - DNA, 15 bp, Homo sapiens
tttcttgaggagaca

SEQ ID NO: 1850884 - DNA, 15 bp, Homo sapiens
ttcttgaggagacac

SEQ ID NO: 1850885 - DNA, 15 bp, Homo sapiens
tcttgaggagacaca

SEQ ID NO: 1850886 - DNA, 15 bp, Homo sapiens
cttgaggagacacag

SEQ ID NO: 1850887 - DNA, 15 bp, Homo sapiens
ttgaggagacacagt

SEQ ID NO: 1850888 - DNA, 15 bp, Homo sapiens
tgaggagacacagtt

SEQ ID NO: 1850889 - DNA, 15 bp, Homo sapiens
gaggagacacagttc

SEQ ID NO: 1850890 - DNA, 15 bp, Homo sapiens
aggagacacagttct

SEQ ID NO: 1850891 - DNA, 15 bp, Homo sapiens
ggagacacagttctg

SEQ ID NO: 1850892 - DNA, 15 bp, Homo sapiens
gagacacagttctgg

SEQ ID NO: 1850893 - DNA, 15 bp, Homo sapiens
agacacagttctggc

SEQ ID NO: 1850894 - DNA, 15 bp, Homo sapiens
gacacagttctggcg

SEQ ID NO: 1850895 - DNA, 15 bp, Homo sapiens
acacagttctggcgc

SEQ ID NO: 1850896 - DNA, 15 bp, Homo sapiens
cacagttctggcgct

SEQ ID NO: 1850897 - DNA, 15 bp, Homo sapiens
acagttctggcgctg

SEQ ID NO: 1850898 - DNA, 15 bp, Homo sapiens
cagttctggcgctgc

SEQ ID NO: 1850899 - DNA, 15 bp, Homo sapiens
agttctggcgctgcc

SEQ ID NO: 1850900 - DNA, 15 bp, Homo sapiens
gttctggcgctgccc

SEQ ID NO: 1850901 - DNA, 15 bp, Homo sapiens
ttctggcgctgccct

SEQ ID NO: 1850902 - DNA, 15 bp, Homo sapiens
tctggcgctgccctc

SEQ ID NO: 1850903 - DNA, 15 bp, Homo sapiens
ctggcgctgccctct

SEQ ID NO: 1850904 - DNA, 15 bp, Homo sapiens
tggcgctgccctcta

SEQ ID NO: 1850905 - DNA, 15 bp, Homo sapiens
ggcgctgccctctaa

SEQ ID NO: 1850906 - DNA, 15 bp, Homo sapiens
gcgctgccctctaaa

SEQ ID NO: 1850907 - DNA, 15 bp, Homo sapiens
cgctgccctctaaac

SEQ ID NO: 1850908 - DNA, 15 bp, Homo sapiens
gctgccctctaaacg

SEQ ID NO: 1850909 - DNA, 15 bp, Homo sapiens
ctgccctctaaacgc

SEQ ID NO: 1850910 - DNA, 15 bp, Homo sapiens
tgccctctaaacgct

SEQ ID NO: 1850911 - DNA, 15 bp, Homo sapiens
gccctctaaacgctg

SEQ ID NO: 1850912 - DNA, 15 bp, Homo sapiens
ccctctaaacgctgt

SEQ ID NO: 1850913 - DNA, 15 bp, Homo sapiens
cctctaaacgctgtg

SEQ ID NO: 1850914 - DNA, 15 bp, Homo sapiens
ctctaaacgctgtgt

SEQ ID NO: 1850915 - DNA, 15 bp, Homo sapiens
tctaaacgctgtgtt

SEQ ID NO: 1850916 - DNA, 15 bp, Homo sapiens
ctaaacgctgtgttt

SEQ ID NO: 1850917 - DNA, 15 bp, Homo sapiens
taaacgctgtgtttt

SEQ ID NO: 1850918 - DNA, 15 bp, Homo sapiens
aaacgctgtgttttc

SEQ ID NO: 1850919 - DNA, 15 bp, Homo sapiens
aacgctgtgttttcc

SEQ ID NO: 1850920 - DNA, 15 bp, Homo sapiens
acgctgtgttttcct

SEQ ID NO: 1850921 - DNA, 15 bp, Homo sapiens
cgctgtgttttcctt

SEQ ID NO: 1850922 - DNA, 15 bp, Homo sapiens
gctgtgttttcctta

SEQ ID NO: 1850923 - DNA, 15 bp, Homo sapiens
ctgtgttttccttag

SEQ ID NO: 1850924 - DNA, 15 bp, Homo sapiens
tgtgttttccttagg

SEQ ID NO: 1850925 - DNA, 15 bp, Homo sapiens
gtgttttccttaggt

SEQ ID NO: 1850926 - DNA, 15 bp, Homo sapiens
tgttttccttaggtg

SEQ ID NO: 1850927 - DNA, 15 bp, Homo sapiens
gttttccttaggtgg

SEQ ID NO: 1850928 - DNA, 15 bp, Homo sapiens
ttttccttaggtggc

SEQ ID NO: 1850929 - DNA, 15 bp, Homo sapiens
tttccttaggtggcc

SEQ ID NO: 1850930 - DNA, 15 bp, Homo sapiens
ttccttaggtggcca

SEQ ID NO: 1850931 - DNA, 15 bp, Homo sapiens
tccttaggtggccag

SEQ ID NO: 1850932 - DNA, 15 bp, Homo sapiens
ccttaggtggccagg

SEQ ID NO: 1850933 - DNA, 15 bp, Homo sapiens
cttaggtggccaggc

SEQ ID NO: 1850934 - DNA, 15 bp, Homo sapiens
ttaggtggccaggca

SEQ ID NO: 1850935 - DNA, 15 bp, Homo sapiens
taggtggccaggcaa

SEQ ID NO: 1850936 - DNA, 15 bp, Homo sapiens
aggtggccaggcaaa

SEQ ID NO: 1850937 - DNA, 15 bp, Homo sapiens
ggtggccaggcaaac

SEQ ID NO: 1850938 - DNA, 15 bp, Homo sapiens
gtggccaggcaaact

SEQ ID NO: 1850939 - DNA, 15 bp, Homo sapiens
tggccaggcaaactg

SEQ ID NO: 1850940 - DNA, 15 bp, Homo sapiens
ggccaggcaaactgt

SEQ ID NO: 1850941 - DNA, 15 bp, Homo sapiens
gccaggcaaactgtc

SEQ ID NO: 1850942 - DNA, 15 bp, Homo sapiens
ccaggcaaactgtcc

SEQ ID NO: 1850943 - DNA, 15 bp, Homo sapiens
caggcaaactgtcca

SEQ ID NO: 1850944 - DNA, 15 bp, Homo sapiens
aggcaaactgtccag

SEQ ID NO: 1850945 - DNA, 15 bp, Homo sapiens
ggcaaactgtccaga

SEQ ID NO: 1850946 - DNA, 15 bp, Homo sapiens
gcaaactgtccagag

SEQ ID NO: 1850947 - DNA, 15 bp, Homo sapiens
caaactgtccagagt

SEQ ID NO: 1850948 - DNA, 15 bp, Homo sapiens
aaactgtccagagtg

SEQ ID NO: 1850949 - DNA, 15 bp, Homo sapiens
aactgtccagagtgg

SEQ ID NO: 1850950 - DNA, 15 bp, Homo sapiens
actgtccagagtggt

SEQ ID NO: 1850951 - DNA, 15 bp, Homo sapiens
ctgtccagagtggtg

SEQ ID NO: 1850952 - DNA, 15 bp, Homo sapiens
tgtccagagtggtgt

SEQ ID NO: 1850953 - DNA, 15 bp, Homo sapiens
gtccagagtggtgtc

SEQ ID NO: 1850954 - DNA, 15 bp, Homo sapiens
tccagagtggtgtct

SEQ ID NO: 1850955 - DNA, 15 bp, Homo sapiens
ccagagtggtgtctg

SEQ ID NO: 1850956 - DNA, 15 bp, Homo sapiens
cagagtggtgtctgc

SEQ ID NO: 1850957 - DNA, 15 bp, Homo sapiens
agagtggtgtctgct

SEQ ID NO: 1850958 - DNA, 15 bp, Homo sapiens
gagtggtgtctgctc

SEQ ID NO: 1850959 - DNA, 15 bp, Homo sapiens
agtggtgtctgctct

SEQ ID NO: 1850960 - DNA, 15 bp, Homo sapiens
gtggtgtctgctctt

SEQ ID NO: 1850961 - DNA, 15 bp, Homo sapiens
tggtgtctgctcttc

SEQ ID NO: 1850962 - DNA, 15 bp, Homo sapiens
ggtgtctgctcttca

SEQ ID NO: 1850963 - DNA, 15 bp, Homo sapiens
gtgtctgctcttcac

SEQ ID NO: 1850964 - DNA, 15 bp, Homo sapiens
tgtctgctcttcacc

SEQ ID NO: 1850965 - DNA, 15 bp, Homo sapiens
gtctgctcttcacct

SEQ ID NO: 1850966 - DNA, 15 bp, Homo sapiens
tctgctcttcacctc

SEQ ID NO: 1850967 - DNA, 15 bp, Homo sapiens
ctgctcttcacctca

SEQ ID NO: 1850968 - DNA, 15 bp, Homo sapiens
tgctcttcacctcat

SEQ ID NO: 1850969 - DNA, 15 bp, Homo sapiens
gctcttcacctcatc

SEQ ID NO: 1850970 - DNA, 15 bp, Homo sapiens
ctcttcacctcatct

SEQ ID NO: 1850971 - DNA, 15 bp, Homo sapiens
tcttcacctcatctt

SEQ ID NO: 1850972 - DNA, 15 bp, Homo sapiens
cttcacctcatcttg

SEQ ID NO: 1850973 - DNA, 15 bp, Homo sapiens
ttcacctcatcttga

SEQ ID NO: 1850974 - DNA, 15 bp, Homo sapiens
tcacctcatcttgaa

SEQ ID NO: 1850975 - DNA, 15 bp, Homo sapiens
cacctcatcttgaag

SEQ ID NO: 1850976 - DNA, 15 bp, Homo sapiens
acctcatcttgaagg

SEQ ID NO: 1850977 - DNA, 15 bp, Homo sapiens
cctcatcttgaaggt

SEQ ID NO: 1850978 - DNA, 15 bp, Homo sapiens
ctcatcttgaaggtg

SEQ ID NO: 1850979 - DNA, 15 bp, Homo sapiens
tcatcttgaaggtgg

SEQ ID NO: 1850980 - DNA, 15 bp, Homo sapiens
catcttgaaggtgga

SEQ ID NO: 1850981 - DNA, 15 bp, Homo sapiens
atcttgaaggtggac

SEQ ID NO: 1850982 - DNA, 15 bp, Homo sapiens
tcttgaaggtggacg

SEQ ID NO: 1850983 - DNA, 15 bp, Homo sapiens
cttgaaggtggacgt

SEQ ID NO: 1850984 - DNA, 15 bp, Homo sapiens
ttgaaggtggacgtc

SEQ ID NO: 1850985 - DNA, 15 bp, Homo sapiens
tgaaggtggacgtct

SEQ ID NO: 1850986 - DNA, 15 bp, Homo sapiens
gaaggtggacgtctt

SEQ ID NO: 1850987 - DNA, 15 bp, Homo sapiens
aaggtggacgtcttg

SEQ ID NO: 1850988 - DNA, 15 bp, Homo sapiens
aggtggacgtcttga

SEQ ID NO: 1850989 - DNA, 15 bp, Homo sapiens
ggtggacgtcttgac

SEQ ID NO: 1850990 - DNA, 15 bp, Homo sapiens
gtggacgtcttgacc

SEQ ID NO: 1850991 - DNA, 15 bp, Homo sapiens
tggacgtcttgacca

SEQ ID NO: 1850992 - DNA, 15 bp, Homo sapiens
ggacgtcttgaccag

SEQ ID NO: 1850993 - DNA, 15 bp, Homo sapiens
gacgtcttgaccaga

SEQ ID NO: 1850994 - DNA, 15 bp, Homo sapiens
acgtcttgaccagaa

SEQ ID NO: 1850995 - DNA, 15 bp, Homo sapiens
cgtcttgaccagaaa

SEQ ID NO: 1850996 - DNA, 15 bp, Homo sapiens
gtcttgaccagaaat

SEQ ID NO: 1850997 - DNA, 15 bp, Homo sapiens
tcttgaccagaaatc

SEQ ID NO: 1850998 - DNA, 15 bp, Homo sapiens
cttgaccagaaatcc

SEQ ID NO: 1850999 - DNA, 15 bp, Homo sapiens
ttgaccagaaatcct

SEQ ID NO: 1851000 - DNA, 15 bp, Homo sapiens
tgaccagaaatcctc

SEQ ID NO: 1851001 - DNA, 15 bp, Homo sapiens
gaccagaaatcctcc

SEQ ID NO: 1851002 - DNA, 15 bp, Homo sapiens
accagaaatcctcct

SEQ ID NO: 1851003 - DNA, 15 bp, Homo sapiens
ccagaaatcctcctt

SEQ ID NO: 1851004 - DNA, 15 bp, Homo sapiens
cagaaatcctccttc

SEQ ID NO: 1851005 - DNA, 15 bp, Homo sapiens
agaaatcctccttct

SEQ ID NO: 1851006 - DNA, 15 bp, Homo sapiens
gaaatcctccttctc

SEQ ID NO: 1851007 - DNA, 15 bp, Homo sapiens
aaatcctccttctcc

SEQ ID NO: 1851008 - DNA, 15 bp, Homo sapiens
aatcctccttctcca

SEQ ID NO: 1851009 - DNA, 15 bp, Homo sapiens
atcctccttctccaa

SEQ ID NO: 1851010 - DNA, 15 bp, Homo sapiens
tcctccttctccaat

SEQ ID NO: 1851011 - DNA, 15 bp, Homo sapiens
cctccttctccaata

SEQ ID NO: 1851012 - DNA, 15 bp, Homo sapiens
ctccttctccaataa

SEQ ID NO: 1851013 - DNA, 15 bp, Homo sapiens
tccttctccaataaa

SEQ ID NO: 1851014 - DNA, 15 bp, Homo sapiens
ccttctccaataaac

SEQ ID NO: 1851015 - DNA, 15 bp, Homo sapiens
cttctccaataaact

SEQ ID NO: 1851016 - DNA, 15 bp, Homo sapiens
ttctccaataaactg

SEQ ID NO: 1851017 - DNA, 15 bp, Homo sapiens
tctccaataaactgg

SEQ ID NO: 1851018 - DNA, 15 bp, Homo sapiens
ctccaataaactgga

SEQ ID NO: 1851019 - DNA, 15 bp, Homo sapiens
tccaataaactggaa

SEQ ID NO: 1851020 - DNA, 15 bp, Homo sapiens
ccaataaactggaag

SEQ ID NO: 1851021 - DNA, 15 bp, Homo sapiens
caataaactggaagg

SEQ ID NO: 1851022 - DNA, 15 bp, Homo sapiens
aataaactggaagga

SEQ ID NO: 1851023 - DNA, 15 bp, Homo sapiens
ataaactggaaggag

SEQ ID NO: 1851024 - DNA, 15 bp, Homo sapiens
taaactggaaggaga

SEQ ID NO: 1851025 - DNA, 15 bp, Homo sapiens
aaactggaaggagag

SEQ ID NO: 1851026 - DNA, 15 bp, Homo sapiens
aactggaaggagagg

SEQ ID NO: 1851027 - DNA, 15 bp, Homo sapiens
actggaaggagaggc

SEQ ID NO: 1851028 - DNA, 15 bp, Homo sapiens
ctggaaggagaggct

SEQ ID NO: 1851029 - DNA, 15 bp, Homo sapiens
tggaaggagaggctt

SEQ ID NO: 1851030 - DNA, 15 bp, Homo sapiens
ggaaggagaggcttc

SEQ ID NO: 1851031 - DNA, 15 bp, Homo sapiens
gaaggagaggcttct

SEQ ID NO: 1851032 - DNA, 15 bp, Homo sapiens
aaggagaggcttcta

SEQ ID NO: 1851033 - DNA, 15 bp, Homo sapiens
aggagaggcttctaa

SEQ ID NO: 1851034 - DNA, 15 bp, Homo sapiens
ggagaggcttctaat

SEQ ID NO: 1851035 - DNA, 15 bp, Homo sapiens
gagaggcttctaatt

SEQ ID NO: 1851036 - DNA, 15 bp, Homo sapiens
agaggcttctaattt

SEQ ID NO: 1851037 - DNA, 15 bp, Homo sapiens
gaggcttctaatttc

SEQ ID NO: 1851038 - DNA, 15 bp, Homo sapiens
aggcttctaatttct

SEQ ID NO: 1851039 - DNA, 15 bp, Homo sapiens
ggcttctaatttctg

SEQ ID NO: 1851040 - DNA, 15 bp, Homo sapiens
gcttctaatttctgt

SEQ ID NO: 1851041 - DNA, 15 bp, Homo sapiens
cttctaatttctgta

SEQ ID NO: 1851042 - DNA, 15 bp, Homo sapiens
ttctaatttctgtaa

SEQ ID NO: 1851043 - DNA, 15 bp, Homo sapiens
tctaatttctgtaat

SEQ ID NO: 1851044 - DNA, 15 bp, Homo sapiens
ctaatttctgtaatg

SEQ ID NO: 1851045 - DNA, 15 bp, Homo sapiens
taatttctgtaatgt

SEQ ID NO: 1851046 - DNA, 15 bp, Homo sapiens
aatttctgtaatgtg

SEQ ID NO: 1851047 - DNA, 15 bp, Homo sapiens
atttctgtaatgtgg

SEQ ID NO: 1851048 - DNA, 15 bp, Homo sapiens
tttctgtaatgtggg

SEQ ID NO: 1851049 - DNA, 15 bp, Homo sapiens
ttctgtaatgtgggg

SEQ ID NO: 1851050 - DNA, 15 bp, Homo sapiens
tctgtaatgtgggga

SEQ ID NO: 1851051 - DNA, 15 bp, Homo sapiens
ctgtaatgtggggac

SEQ ID NO: 1851052 - DNA, 15 bp, Homo sapiens
tgtaatgtggggact

SEQ ID NO: 1851053 - DNA, 15 bp, Homo sapiens
gtaatgtggggactt

SEQ ID NO: 1851054 - DNA, 15 bp, Homo sapiens
taatgtggggacttg

SEQ ID NO: 1851055 - DNA, 15 bp, Homo sapiens
aatgtggggacttgg

SEQ ID NO: 1851056 - DNA, 15 bp, Homo sapiens
atgtggggacttgga

SEQ ID NO: 1851057 - DNA, 15 bp, Homo sapiens
tgtggggacttggat

SEQ ID NO: 1851058 - DNA, 15 bp, Homo sapiens
gtggggacttggatg

SEQ ID NO: 1851059 - DNA, 15 bp, Homo sapiens
tggggacttggatgg

SEQ ID NO: 1851060 - DNA, 15 bp, Homo sapiens
ggggacttggatggc

SEQ ID NO: 1851061 - DNA, 15 bp, Homo sapiens
gggacttggatggcg

SEQ ID NO: 1851062 - DNA, 15 bp, Homo sapiens
ggacttggatggcgt

SEQ ID NO: 1851063 - DNA, 15 bp, Homo sapiens
gacttggatggcgtg

SEQ ID NO: 1851064 - DNA, 15 bp, Homo sapiens
acttggatggcgtgt

SEQ ID NO: 1851065 - DNA, 15 bp, Homo sapiens
cttggatggcgtgtg

SEQ ID NO: 1851066 - DNA, 15 bp, Homo sapiens
ttggatggcgtgtgg

SEQ ID NO: 1851067 - DNA, 15 bp, Homo sapiens
tggatggcgtgtgga

SEQ ID NO: 1851068 - DNA, 15 bp, Homo sapiens
ggatggcgtgtggat

SEQ ID NO: 1851069 - DNA, 15 bp, Homo sapiens
gatggcgtgtggatc

SEQ ID NO: 1851070 - DNA, 15 bp, Homo sapiens
atggcgtgtggatct

SEQ ID NO: 1851071 - DNA, 15 bp, Homo sapiens
tggcgtgtggatctc

SEQ ID NO: 1851072 - DNA, 15 bp, Homo sapiens
ggcgtgtggatctct

SEQ ID NO: 1851073 - DNA, 15 bp, Homo sapiens
gcgtgtggatctcta

SEQ ID NO: 1851074 - DNA, 15 bp, Homo sapiens
cgtgtggatctctaa

SEQ ID NO: 1851075 - DNA, 15 bp, Homo sapiens
gtgtggatctctaac

SEQ ID NO: 1851076 - DNA, 15 bp, Homo sapiens
tgtggatctctaact

SEQ ID NO: 1851077 - DNA, 15 bp, Homo sapiens
gtggatctctaactg

SEQ ID NO: 1851078 - DNA, 15 bp, Homo sapiens
tggatctctaactgc

SEQ ID NO: 1851079 - DNA, 15 bp, Homo sapiens
ggatctctaactgca

SEQ ID NO: 1851080 - DNA, 15 bp, Homo sapiens
gatctctaactgcat

SEQ ID NO: 1851081 - DNA, 15 bp, Homo sapiens
atctctaactgcatc

SEQ ID NO: 1851082 - DNA, 15 bp, Homo sapiens
tctctaactgcatcc

SEQ ID NO: 1851083 - DNA, 15 bp, Homo sapiens
ctctaactgcatcct

SEQ ID NO: 1851084 - DNA, 15 bp, Homo sapiens
tctaactgcatccta

SEQ ID NO: 1851085 - DNA, 15 bp, Homo sapiens
ctaactgcatcctaa

SEQ ID NO: 1851086 - DNA, 15 bp, Homo sapiens
taactgcatcctaag

SEQ ID NO: 1851087 - DNA, 15 bp, Homo sapiens
aactgcatcctaagt

SEQ ID NO: 1851088 - DNA, 15 bp, Homo sapiens
actgcatcctaagtt

SEQ ID NO: 1851089 - DNA, 15 bp, Homo sapiens
ctgcatcctaagttg

SEQ ID NO: 1851090 - DNA, 15 bp, Homo sapiens
tgcatcctaagttgt

SEQ ID NO: 1851091 - DNA, 15 bp, Homo sapiens
gcatcctaagttgtc

SEQ ID NO: 1851092 - DNA, 15 bp, Homo sapiens
catcctaagttgtct

SEQ ID NO: 1851093 - DNA, 15 bp, Homo sapiens
atcctaagttgtcta

SEQ ID NO: 1851094 - DNA, 15 bp, Homo sapiens
tcctaagttgtctaa

SEQ ID NO: 1851095 - DNA, 15 bp, Homo sapiens
cctaagttgtctaat

SEQ ID NO: 1851096 - DNA, 15 bp, Homo sapiens
ctaagttgtctaata

SEQ ID NO: 1851097 - DNA, 15 bp, Homo sapiens
taagttgtctaatat

SEQ ID NO: 1851098 - DNA, 15 bp, Homo sapiens
aagttgtctaatatt

SEQ ID NO: 1851099 - DNA, 15 bp, Homo sapiens
agttgtctaatattg

SEQ ID NO: 1851100 - DNA, 15 bp, Homo sapiens
gttgtctaatattga

SEQ ID NO: 1851101 - DNA, 15 bp, Homo sapiens
ttgtctaatattgat

SEQ ID NO: 1851102 - DNA, 15 bp, Homo sapiens
tgtctaatattgata

SEQ ID NO: 1851103 - DNA, 15 bp, Homo sapiens
gtctaatattgataa

SEQ ID NO: 1851104 - DNA, 15 bp, Homo sapiens
tctaatattgataaa

SEQ ID NO: 1851105 - DNA, 15 bp, Homo sapiens
ctaatattgataaac

SEQ ID NO: 1851106 - DNA, 15 bp, Homo sapiens
taatattgataaacc

SEQ ID NO: 1851107 - DNA, 15 bp, Homo sapiens
aatattgataaacca

SEQ ID NO: 1851108 - DNA, 15 bp, Homo sapiens
atattgataaaccaa

SEQ ID NO: 1851109 - DNA, 15 bp, Homo sapiens
tattgataaaccaag

SEQ ID NO: 1851110 - DNA, 15 bp, Homo sapiens
attgataaaccaagg

SEQ ID NO: 1851111 - DNA, 15 bp, Homo sapiens
ttgataaaccaagga

SEQ ID NO: 1851112 - DNA, 15 bp, Homo sapiens
tgataaaccaaggag

SEQ ID NO: 1851113 - DNA, 15 bp, Homo sapiens
gataaaccaaggagt

SEQ ID NO: 1851114 - DNA, 15 bp, Homo sapiens
ataaaccaaggagta

SEQ ID NO: 1851115 - DNA, 15 bp, Homo sapiens
taaaccaaggagtag

SEQ ID NO: 1851116 - DNA, 15 bp, Homo sapiens
aaaccaaggagtagc

SEQ ID NO: 1851117 - DNA, 15 bp, Homo sapiens
aaccaaggagtagcg

SEQ ID NO: 1851118 - DNA, 15 bp, Homo sapiens
accaaggagtagcgg

SEQ ID NO: 1851119 - DNA, 15 bp, Homo sapiens
ccaaggagtagcggg

SEQ ID NO: 1851120 - DNA, 15 bp, Homo sapiens
caaggagtagcgggg

SEQ ID NO: 1851121 - DNA, 15 bp, Homo sapiens
aaggagtagcggggt

SEQ ID NO: 1851122 - DNA, 15 bp, Homo sapiens
aggagtagcggggtt

SEQ ID NO: 1851123 - DNA, 15 bp, Homo sapiens
ggagtagcggggttc

SEQ ID NO: 1851124 - DNA, 15 bp, Homo sapiens
gagtagcggggttcc

SEQ ID NO: 1851125 - DNA, 15 bp, Homo sapiens
agtagcggggttcct

SEQ ID NO: 1851126 - DNA, 15 bp, Homo sapiens
gtagcggggttccta

SEQ ID NO: 1851127 - DNA, 15 bp, Homo sapiens
tagcggggttcctat

SEQ ID NO: 1851128 - DNA, 15 bp, Homo sapiens
agcggggttcctatt

SEQ ID NO: 1851129 - DNA, 15 bp, Homo sapiens
gcggggttcctattg

SEQ ID NO: 1851130 - DNA, 15 bp, Homo sapiens
cggggttcctattgt

SEQ ID NO: 1851131 - DNA, 15 bp, Homo sapiens
ggggttcctattgtg

SEQ ID NO: 1851132 - DNA, 15 bp, Homo sapiens
gggttcctattgtgg

SEQ ID NO: 1851133 - DNA, 15 bp, Homo sapiens
ggttcctattgtggc

SEQ ID NO: 1851134 - DNA, 15 bp, Homo sapiens
gttcctattgtggcc

SEQ ID NO: 1851135 - DNA, 15 bp, Homo sapiens
ttcctattgtggcct

SEQ ID NO: 1851136 - DNA, 15 bp, Homo sapiens
tcctattgtggcctt

SEQ ID NO: 1851137 - DNA, 15 bp, Homo sapiens
cctattgtggccttt

SEQ ID NO: 1851138 - DNA, 15 bp, Homo sapiens
ctattgtggcctttg

SEQ ID NO: 1851139 - DNA, 15 bp, Homo sapiens
tattgtggcctttga

SEQ ID NO: 1851140 - DNA, 15 bp, Homo sapiens
attgtggcctttgaa

SEQ ID NO: 1851141 - DNA, 15 bp, Homo sapiens
ttgtggcctttgaag

SEQ ID NO: 1851142 - DNA, 15 bp, Homo sapiens
tgtggcctttgaagg

SEQ ID NO: 1851143 - DNA, 15 bp, Homo sapiens
gtggcctttgaaggt

SEQ ID NO: 1851144 - DNA, 15 bp, Homo sapiens
tggcctttgaaggta

SEQ ID NO: 1851145 - DNA, 15 bp, Homo sapiens
ggcctttgaaggtat

SEQ ID NO: 1851146 - DNA, 15 bp, Homo sapiens
gcctttgaaggtatt

SEQ ID NO: 1851147 - DNA, 15 bp, Homo sapiens
cctttgaaggtattg

SEQ ID NO: 1851148 - DNA, 15 bp, Homo sapiens
ctttgaaggtattgg

SEQ ID NO: 1851149 - DNA, 15 bp, Homo sapiens
tttgaaggtattggg

SEQ ID NO: 1851150 - DNA, 15 bp, Homo sapiens
ttgaaggtattgggt

SEQ ID NO: 1851151 - DNA, 15 bp, Homo sapiens
tgaaggtattgggtg

SEQ ID NO: 1851152 - DNA, 15 bp, Homo sapiens
gaaggtattgggtgg

SEQ ID NO: 1851153 - DNA, 15 bp, Homo sapiens
aaggtattgggtgga

SEQ ID NO: 1851154 - DNA, 15 bp, Homo sapiens
aggtattgggtggag

SEQ ID NO: 1851155 - DNA, 15 bp, Homo sapiens
ggtattgggtggaga

SEQ ID NO: 1851156 - DNA, 15 bp, Homo sapiens
gtattgggtggagag

SEQ ID NO: 1851157 - DNA, 15 bp, Homo sapiens
tattgggtggagaga

SEQ ID NO: 1851158 - DNA, 15 bp, Homo sapiens
attgggtggagagaa

SEQ ID NO: 1851159 - DNA, 15 bp, Homo sapiens
ttgggtggagagaac

SEQ ID NO: 1851160 - DNA, 15 bp, Homo sapiens
tgggtggagagaaca

SEQ ID NO: 1851161 - DNA, 15 bp, Homo sapiens
gggtggagagaacac

SEQ ID NO: 1851162 - DNA, 15 bp, Homo sapiens
ggtggagagaacaca

SEQ ID NO: 1851163 - DNA, 15 bp, Homo sapiens
gtggagagaacacag

SEQ ID NO: 1851164 - DNA, 15 bp, Homo sapiens
tggagagaacacagg

SEQ ID NO: 1851165 - DNA, 15 bp, Homo sapiens
ggagagaacacagga

SEQ ID NO: 1851166 - DNA, 15 bp, Homo sapiens
gagagaacacaggat

SEQ ID NO: 1851167 - DNA, 15 bp, Homo sapiens
agagaacacaggatg

SEQ ID NO: 1851168 - DNA, 15 bp, Homo sapiens
gagaacacaggatgg

SEQ ID NO: 1851169 - DNA, 15 bp, Homo sapiens
agaacacaggatggg

SEQ ID NO: 1851170 - DNA, 15 bp, Homo sapiens
gaacacaggatgggc

SEQ ID NO: 1851171 - DNA, 15 bp, Homo sapiens
aacacaggatgggca

SEQ ID NO: 1851172 - DNA, 15 bp, Homo sapiens
acacaggatgggcag

SEQ ID NO: 1851173 - DNA, 15 bp, Homo sapiens
cacaggatgggcagg

SEQ ID NO: 1851174 - DNA, 15 bp, Homo sapiens
acaggatgggcaggc

SEQ ID NO: 1851175 - DNA, 15 bp, Homo sapiens
caggatgggcaggcg

SEQ ID NO: 1851176 - DNA, 15 bp, Homo sapiens
aggatgggcaggcgg

SEQ ID NO: 1851177 - DNA, 15 bp, Homo sapiens
ggatgggcaggcggg

SEQ ID NO: 1851178 - DNA, 15 bp, Homo sapiens
gatgggcaggcgggt

SEQ ID NO: 1851179 - DNA, 15 bp, Homo sapiens
atgggcaggcgggtc

SEQ ID NO: 1851180 - DNA, 15 bp, Homo sapiens
tgggcaggcgggtcc

SEQ ID NO: 1851181 - DNA, 15 bp, Homo sapiens
gggcaggcgggtcct

SEQ ID NO: 1851182 - DNA, 15 bp, Homo sapiens
ggcaggcgggtccta

SEQ ID NO: 1851183 - DNA, 15 bp, Homo sapiens
gcaggcgggtcctac

SEQ ID NO: 1851184 - DNA, 15 bp, Homo sapiens
caggcgggtcctaca

SEQ ID NO: 1851185 - DNA, 15 bp, Homo sapiens
aggcgggtcctacaa

SEQ ID NO: 1851186 - DNA, 15 bp, Homo sapiens
ggcgggtcctacaac

SEQ ID NO: 1851187 - DNA, 15 bp, Homo sapiens
gcgggtcctacaaca

SEQ ID NO: 1851188 - DNA, 15 bp, Homo sapiens
cgggtcctacaacag

SEQ ID NO: 1851189 - DNA, 15 bp, Homo sapiens
gggtcctacaacagt

SEQ ID NO: 1851190 - DNA, 15 bp, Homo sapiens
ggtcctacaacagtc

SEQ ID NO: 1851191 - DNA, 15 bp, Homo sapiens
gtcctacaacagtca

SEQ ID NO: 1851192 - DNA, 15 bp, Homo sapiens
tcctacaacagtcag

SEQ ID NO: 1851193 - DNA, 15 bp, Homo sapiens
cctacaacagtcagc

SEQ ID NO: 1851194 - DNA, 15 bp, Homo sapiens
ctacaacagtcagca

SEQ ID NO: 1851195 - DNA, 15 bp, Homo sapiens
tacaacagtcagcaa

SEQ ID NO: 1851196 - DNA, 15 bp, Homo sapiens
acaacagtcagcaaa

SEQ ID NO: 1851197 - DNA, 15 bp, Homo sapiens
caacagtcagcaaag

SEQ ID NO: 1851198 - DNA, 15 bp, Homo sapiens
aacagtcagcaaagt

SEQ ID NO: 1851199 - DNA, 15 bp, Homo sapiens
acagtcagcaaagta

SEQ ID NO: 1851200 - DNA, 15 bp, Homo sapiens
cagtcagcaaagtac

SEQ ID NO: 1851201 - DNA, 15 bp, Homo sapiens
agtcagcaaagtaca

SEQ ID NO: 1851202 - DNA, 15 bp, Homo sapiens
gtcagcaaagtacat

SEQ ID NO: 1851203 - DNA, 15 bp, Homo sapiens
tcagcaaagtacatg

SEQ ID NO: 1851204 - DNA, 15 bp, Homo sapiens
cagcaaagtacatgg

SEQ ID NO: 1851205 - DNA, 15 bp, Homo sapiens
agcaaagtacatggc

SEQ ID NO: 1851206 - DNA, 15 bp, Homo sapiens
gcaaagtacatggct

SEQ ID NO: 1851207 - DNA, 15 bp, Homo sapiens
caaagtacatggcta

SEQ ID NO: 1851208 - DNA, 15 bp, Homo sapiens
aaagtacatggctag

SEQ ID NO: 1851209 - DNA, 15 bp, Homo sapiens
aagtacatggctaga

SEQ ID NO: 1851210 - DNA, 15 bp, Homo sapiens
agtacatggctagag

SEQ ID NO: 1851211 - DNA, 15 bp, Homo sapiens
gtacatggctagagc

SEQ ID NO: 1851212 - DNA, 15 bp, Homo sapiens
tacatggctagagca

SEQ ID NO: 1851213 - DNA, 15 bp, Homo sapiens
acatggctagagcaa

SEQ ID NO: 1851214 - DNA, 15 bp, Homo sapiens
catggctagagcaaa

SEQ ID NO: 1851215 - DNA, 15 bp, Homo sapiens
atggctagagcaaaa

SEQ ID NO: 1851216 - DNA, 15 bp, Homo sapiens
tggctagagcaaaag

SEQ ID NO: 1851217 - DNA, 15 bp, Homo sapiens
ggctagagcaaaaga

SEQ ID NO: 1851218 - DNA, 15 bp, Homo sapiens
gctagagcaaaagaa

SEQ ID NO: 1851219 - DNA, 15 bp, Homo sapiens
ctagagcaaaagaaa

SEQ ID NO: 1851220 - DNA, 15 bp, Homo sapiens
tagagcaaaagaaac

SEQ ID NO: 1851221 - DNA, 15 bp, Homo sapiens
agagcaaaagaaacc

SEQ ID NO: 1851222 - DNA, 15 bp, Homo sapiens
gagcaaaagaaacct

SEQ ID NO: 1851223 - DNA, 15 bp, Homo sapiens
agcaaaagaaacctt

SEQ ID NO: 1851224 - DNA, 15 bp, Homo sapiens
gcaaaagaaacctta

SEQ ID NO: 1851225 - DNA, 15 bp, Homo sapiens
aaaagaaaccttatg

SEQ ID NO: 1851226 - DNA, 15 bp, Homo sapiens
aaagaaaccttatgc

SEQ ID NO: 1851227 - DNA, 15 bp, Homo sapiens
aagaaaccttatgca

SEQ ID NO: 1851228 - DNA, 15 bp, Homo sapiens
agaaaccttatgcaa

SEQ ID NO: 1851229 - DNA, 15 bp, Homo sapiens
gaaaccttatgcaag

SEQ ID NO: 1851230 - DNA, 15 bp, Homo sapiens
aaaccttatgcaagt

SEQ ID NO: 1851231 - DNA, 15 bp, Homo sapiens
aaccttatgcaagtg

SEQ ID NO: 1851232 - DNA, 15 bp, Homo sapiens
accttatgcaagtgc

SEQ ID NO: 1851233 - DNA, 15 bp, Homo sapiens
ccttatgcaagtgca

SEQ ID NO: 1851234 - DNA, 15 bp, Homo sapiens
cttatgcaagtgcag

SEQ ID NO: 1851235 - DNA, 15 bp, Homo sapiens
ttatgcaagtgcaga

SEQ ID NO: 1851236 - DNA, 15 bp, Homo sapiens
tatgcaagtgcagat

SEQ ID NO: 1851237 - DNA, 15 bp, Homo sapiens
atgcaagtgcagatt

SEQ ID NO: 1851238 - DNA, 15 bp, Homo sapiens
tgcaagtgcagattt

SEQ ID NO: 1851239 - DNA, 15 bp, Homo sapiens
gcaagtgcagatttg

SEQ ID NO: 1851240 - DNA, 15 bp, Homo sapiens
caagtgcagatttgg

SEQ ID NO: 1851241 - DNA, 15 bp, Homo sapiens
aagtgcagatttggg

SEQ ID NO: 1851242 - DNA, 15 bp, Homo sapiens
agtgcagatttggga

SEQ ID NO: 1851243 - DNA, 15 bp, Homo sapiens
gtgcagatttgggac

SEQ ID NO: 1851244 - DNA, 15 bp, Homo sapiens
tgcagatttgggact

SEQ ID NO: 1851245 - DNA, 15 bp, Homo sapiens
gcagatttgggactc

SEQ ID NO: 1851246 - DNA, 15 bp, Homo sapiens
cagatttgggactca

SEQ ID NO: 1851247 - DNA, 15 bp, Homo sapiens
agatttgggactcaa

SEQ ID NO: 1851248 - DNA, 15 bp, Homo sapiens
gatttgggactcaaa

SEQ ID NO: 1851249 - DNA, 15 bp, Homo sapiens
atttgggactcaaac

SEQ ID NO: 1851250 - DNA, 15 bp, Homo sapiens
tttgggactcaaacc

SEQ ID NO: 1851251 - DNA, 15 bp, Homo sapiens
ttgggactcaaacca

SEQ ID NO: 1851252 - DNA, 15 bp, Homo sapiens
tgggactcaaaccat

SEQ ID NO: 1851253 - DNA, 15 bp, Homo sapiens
gggactcaaaccatt

SEQ ID NO: 1851254 - DNA, 15 bp, Homo sapiens
ggactcaaaccattc

SEQ ID NO: 1851255 - DNA, 15 bp, Homo sapiens
gactcaaaccattca

SEQ ID NO: 1851256 - DNA, 15 bp, Homo sapiens
actcaaaccattcaa

SEQ ID NO: 1851257 - DNA, 15 bp, Homo sapiens
ctcaaaccattcaac

SEQ ID NO: 1851258 - DNA, 15 bp, Homo sapiens
tcaaaccattcaacc

SEQ ID NO: 1851259 - DNA, 15 bp, Homo sapiens
caaaccattcaacct

SEQ ID NO: 1851260 - DNA, 15 bp, Homo sapiens
aaaccattcaacctt

SEQ ID NO: 1851261 - DNA, 15 bp, Homo sapiens
aaccattcaacctta

SEQ ID NO: 1851262 - DNA, 15 bp, Homo sapiens
accattcaaccttaa

SEQ ID NO: 1851263 - DNA, 15 bp, Homo sapiens
ccattcaaccttaag

SEQ ID NO: 1851264 - DNA, 15 bp, Homo sapiens
cattcaaccttaagg

SEQ ID NO: 1851265 - DNA, 15 bp, Homo sapiens
attcaaccttaaggt

SEQ ID NO: 1851266 - DNA, 15 bp, Homo sapiens
ttcaaccttaaggtg

SEQ ID NO: 1851267 - DNA, 15 bp, Homo sapiens
tcaaccttaaggtgc

SEQ ID NO: 1851268 - DNA, 15 bp, Homo sapiens
caaccttaaggtgct

SEQ ID NO: 1851269 - DNA, 15 bp, Homo sapiens
aaccttaaggtgctt

SEQ ID NO: 1851270 - DNA, 15 bp, Homo sapiens
accttaaggtgcttg

SEQ ID NO: 1851271 - DNA, 15 bp, Homo sapiens
ccttaaggtgcttgg

SEQ ID NO: 1851272 - DNA, 15 bp, Homo sapiens
cttaaggtgcttggg

SEQ ID NO: 1851273 - DNA, 15 bp, Homo sapiens
ttaaggtgcttgggg

SEQ ID NO: 1851274 - DNA, 15 bp, Homo sapiens
taaggtgcttggggc

SEQ ID NO: 1851275 - DNA, 15 bp, Homo sapiens
aaggtgcttggggcg

SEQ ID NO: 1851276 - DNA, 15 bp, Homo sapiens
aggtgcttggggcga

SEQ ID NO: 1851277 - DNA, 15 bp, Homo sapiens
ggtgcttggggcgaa

SEQ ID NO: 1851278 - DNA, 15 bp, Homo sapiens
gtgcttggggcgaag

SEQ ID NO: 1851279 - DNA, 15 bp, Homo sapiens
tgcttggggcgaagt

SEQ ID NO: 1851280 - DNA, 15 bp, Homo sapiens
gcttggggcgaagtg

SEQ ID NO: 1851281 - DNA, 15 bp, Homo sapiens
cttggggcgaagtgg

SEQ ID NO: 1851282 - DNA, 15 bp, Homo sapiens
ttggggcgaagtggt

SEQ ID NO: 1851283 - DNA, 15 bp, Homo sapiens
tggggcgaagtggtc

SEQ ID NO: 1851284 - DNA, 15 bp, Homo sapiens
ggggcgaagtggtcg

SEQ ID NO: 1851285 - DNA, 15 bp, Homo sapiens
gggcgaagtggtcgg

SEQ ID NO: 1851286 - DNA, 15 bp, Homo sapiens
ggcgaagtggtcggg

SEQ ID NO: 1851287 - DNA, 15 bp, Homo sapiens
gcgaagtggtcgggg

SEQ ID NO: 1851288 - DNA, 15 bp, Homo sapiens
cgaagtggtcgggga

SEQ ID NO: 1851289 - DNA, 15 bp, Homo sapiens
gaagtggtcggggag

SEQ ID NO: 1851290 - DNA, 15 bp, Homo sapiens
aagtggtcggggagg

SEQ ID NO: 1851291 - DNA, 15 bp, Homo sapiens
agtggtcggggaggg

SEQ ID NO: 1851292 - DNA, 15 bp, Homo sapiens
gtggtcggggagggt

SEQ ID NO: 1851293 - DNA, 15 bp, Homo sapiens
tggtcggggagggtg

SEQ ID NO: 1851294 - DNA, 15 bp, Homo sapiens
ggtcggggagggtgg

SEQ ID NO: 1851295 - DNA, 15 bp, Homo sapiens
gtcggggagggtggt

SEQ ID NO: 1851296 - DNA, 15 bp, Homo sapiens
tcggggagggtggtg

SEQ ID NO: 1851297 - DNA, 15 bp, Homo sapiens
cggggagggtggtgg

SEQ ID NO: 1851298 - DNA, 15 bp, Homo sapiens
ggggagggtggtggg

SEQ ID NO: 1851299 - DNA, 15 bp, Homo sapiens
gggagggtggtgggg

SEQ ID NO: 1851300 - DNA, 15 bp, Homo sapiens
ggagggtggtgggga

SEQ ID NO: 1851301 - DNA, 15 bp, Homo sapiens
gagggtggtggggat

SEQ ID NO: 1851302 - DNA, 15 bp, Homo sapiens
agggtggtggggatt

SEQ ID NO: 1851303 - DNA, 15 bp, Homo sapiens
gggtggtggggattg

SEQ ID NO: 1851304 - DNA, 15 bp, Homo sapiens
ggtggtggggattgt

SEQ ID NO: 1851305 - DNA, 15 bp, Homo sapiens
gtggtggggattgtg

SEQ ID NO: 1851306 - DNA, 15 bp, Homo sapiens
tggtggggattgtga

SEQ ID NO: 1851307 - DNA, 15 bp, Homo sapiens
ggtggggattgtgaa

SEQ ID NO: 1851308 - DNA, 15 bp, Homo sapiens
gtggggattgtgaag

SEQ ID NO: 1851309 - DNA, 15 bp, Homo sapiens
tggggattgtgaagt

SEQ ID NO: 1851310 - DNA, 15 bp, Homo sapiens
ggggattgtgaagtg

SEQ ID NO: 1851311 - DNA, 15 bp, Homo sapiens
gggattgtgaagtgt

SEQ ID NO: 1851312 - DNA, 15 bp, Homo sapiens
ggattgtgaagtgtg

SEQ ID NO: 1851313 - DNA, 15 bp, Homo sapiens
gattgtgaagtgtgt

SEQ ID NO: 1851314 - DNA, 15 bp, Homo sapiens
attgtgaagtgtgtg

SEQ ID NO: 1851315 - DNA, 15 bp, Homo sapiens
ttgtgaagtgtgtga

SEQ ID NO: 1851316 - DNA, 15 bp, Homo sapiens
tgtgaagtgtgtgac

SEQ ID NO: 1851317 - DNA, 15 bp, Homo sapiens
gtgaagtgtgtgact

SEQ ID NO: 1851318 - DNA, 15 bp, Homo sapiens
tgaagtgtgtgactt

SEQ ID NO: 1851319 - DNA, 15 bp, Homo sapiens
gaagtgtgtgacttg

SEQ ID NO: 1851320 - DNA, 15 bp, Homo sapiens
aagtgtgtgacttgt

SEQ ID NO: 1851321 - DNA, 15 bp, Homo sapiens
agtgtgtgacttgtc

SEQ ID NO: 1851322 - DNA, 15 bp, Homo sapiens
gtgtgtgacttgtct

SEQ ID NO: 1851323 - DNA, 15 bp, Homo sapiens
tgtgtgacttgtctg

SEQ ID NO: 1851324 - DNA, 15 bp, Homo sapiens
gtgtgacttgtctgc

SEQ ID NO: 1851325 - DNA, 15 bp, Homo sapiens
tgtgacttgtctgca

SEQ ID NO: 1851326 - DNA, 15 bp, Homo sapiens
gtgacttgtctgcag

SEQ ID NO: 1851327 - DNA, 15 bp, Homo sapiens
tgacttgtctgcaga

SEQ ID NO: 1851328 - DNA, 15 bp, Homo sapiens
gacttgtctgcagaa

SEQ ID NO: 1851329 - DNA, 15 bp, Homo sapiens
acttgtctgcagaat

SEQ ID NO: 1851330 - DNA, 15 bp, Homo sapiens
cttgtctgcagaatt

SEQ ID NO: 1851331 - DNA, 15 bp, Homo sapiens
ttgtctgcagaattt

SEQ ID NO: 1851332 - DNA, 15 bp, Homo sapiens
tgtctgcagaattta

SEQ ID NO: 1851333 - DNA, 15 bp, Homo sapiens
gtctgcagaatttac

SEQ ID NO: 1851334 - DNA, 15 bp, Homo sapiens
tctgcagaatttact

SEQ ID NO: 1851335 - DNA, 15 bp, Homo sapiens
ctgcagaatttactg

SEQ ID NO: 1851336 - DNA, 15 bp, Homo sapiens
tgcagaatttactgt

SEQ ID NO: 1851337 - DNA, 15 bp, Homo sapiens
gcagaatttactgtt

SEQ ID NO: 1851338 - DNA, 15 bp, Homo sapiens
cagaatttactgttc

SEQ ID NO: 1851339 - DNA, 15 bp, Homo sapiens
agaatttactgttct

SEQ ID NO: 1851340 - DNA, 15 bp, Homo sapiens
gaatttactgttctc

SEQ ID NO: 1851341 - DNA, 15 bp, Homo sapiens
aatttactgttctct

SEQ ID NO: 1851342 - DNA, 15 bp, Homo sapiens
atttactgttctctg

SEQ ID NO: 1851343 - DNA, 15 bp, Homo sapiens
tttactgttctctgc

SEQ ID NO: 1851344 - DNA, 15 bp, Homo sapiens
ttactgttctctgct

SEQ ID NO: 1851345 - DNA, 15 bp, Homo sapiens
tactgttctctgctt

SEQ ID NO: 1851346 - DNA, 15 bp, Homo sapiens
actgttctctgcttt

SEQ ID NO: 1851347 - DNA, 15 bp, Homo sapiens
ctgttctctgctttc

SEQ ID NO: 1851348 - DNA, 15 bp, Homo sapiens
tgttctctgctttca

SEQ ID NO: 1851349 - DNA, 15 bp, Homo sapiens
gttctctgctttcat

SEQ ID NO: 1851350 - DNA, 15 bp, Homo sapiens
ttctctgctttcatt

SEQ ID NO: 1851351 - DNA, 15 bp, Homo sapiens
tctctgctttcatta

SEQ ID NO: 1851352 - DNA, 15 bp, Homo sapiens
ctctgctttcattat

SEQ ID NO: 1851353 - DNA, 15 bp, Homo sapiens
tctgctttcattata

SEQ ID NO: 1851354 - DNA, 15 bp, Homo sapiens
ctgctttcattataa

SEQ ID NO: 1851355 - DNA, 15 bp, Homo sapiens
tgctttcattataag

SEQ ID NO: 1851356 - DNA, 15 bp, Homo sapiens
gctttcattataagc

SEQ ID NO: 1851357 - DNA, 15 bp, Homo sapiens
ctttcattataagcc

SEQ ID NO: 1851358 - DNA, 15 bp, Homo sapiens
tttcattataagcct

SEQ ID NO: 1851359 - DNA, 15 bp, Homo sapiens
ttcattataagcctc

SEQ ID NO: 1851360 - DNA, 15 bp, Homo sapiens
tcattataagcctct

SEQ ID NO: 1851361 - DNA, 15 bp, Homo sapiens
cattataagcctctt

SEQ ID NO: 1851362 - DNA, 15 bp, Homo sapiens
attataagcctcttt

SEQ ID NO: 1851363 - DNA, 15 bp, Homo sapiens
ttataagcctctttt

SEQ ID NO: 1851364 - DNA, 15 bp, Homo sapiens
tataagcctcttttc

SEQ ID NO: 1851365 - DNA, 15 bp, Homo sapiens
ataagcctcttttct

SEQ ID NO: 1851366 - DNA, 15 bp, Homo sapiens
taagcctcttttctc

SEQ ID NO: 1851367 - DNA, 15 bp, Homo sapiens
aagcctcttttctca

SEQ ID NO: 1851368 - DNA, 15 bp, Homo sapiens
agcctcttttctcac

SEQ ID NO: 1851369 - DNA, 15 bp, Homo sapiens
gcctcttttctcaca

SEQ ID NO: 1851370 - DNA, 15 bp, Homo sapiens
cctcttttctcacac

SEQ ID NO: 1851371 - DNA, 15 bp, Homo sapiens
ctcttttctcacaca

SEQ ID NO: 1851372 - DNA, 15 bp, Homo sapiens
tcttttctcacacag

SEQ ID NO: 1851373 - DNA, 15 bp, Homo sapiens
cttttctcacacaga

SEQ ID NO: 1851374 - DNA, 15 bp, Homo sapiens
ttttctcacacagaa

SEQ ID NO: 1851375 - DNA, 15 bp, Homo sapiens
tttctcacacagaag

SEQ ID NO: 1851376 - DNA, 15 bp, Homo sapiens
ttctcacacagaaga

SEQ ID NO: 1851377 - DNA, 15 bp, Homo sapiens
tctcacacagaagag

SEQ ID NO: 1851378 - DNA, 15 bp, Homo sapiens
ctcacacagaagagt

SEQ ID NO: 1851379 - DNA, 15 bp, Homo sapiens
tcacacagaagagta

SEQ ID NO: 1851380 - DNA, 15 bp, Homo sapiens
cacacagaagagtaa

SEQ ID NO: 1851381 - DNA, 15 bp, Homo sapiens
acacagaagagtaag

SEQ ID NO: 1851382 - DNA, 15 bp, Homo sapiens
cacagaagagtaaga

SEQ ID NO: 1851383 - DNA, 15 bp, Homo sapiens
acagaagagtaagat

SEQ ID NO: 1851384 - DNA, 15 bp, Homo sapiens
cagaagagtaagatg

SEQ ID NO: 1851385 - DNA, 15 bp, Homo sapiens
agaagagtaagatga

SEQ ID NO: 1851386 - DNA, 15 bp, Homo sapiens
gaagagtaagatgaa

SEQ ID NO: 1851387 - DNA, 15 bp, Homo sapiens
aagagtaagatgaag

SEQ ID NO: 1851388 - DNA, 15 bp, Homo sapiens
agagtaagatgaagc

SEQ ID NO: 1851389 - DNA, 15 bp, Homo sapiens
gagtaagatgaagca

SEQ ID NO: 1851390 - DNA, 15 bp, Homo sapiens
agtaagatgaagcat

SEQ ID NO: 1851391 - DNA, 15 bp, Homo sapiens
gtaagatgaagcatg

SEQ ID NO: 1851392 - DNA, 15 bp, Homo sapiens
taagatgaagcatgc

SEQ ID NO: 1851393 - DNA, 15 bp, Homo sapiens
aagatgaagcatgca

SEQ ID NO: 1851394 - DNA, 15 bp, Homo sapiens
agatgaagcatgcag

SEQ ID NO: 1851395 - DNA, 15 bp, Homo sapiens
gatgaagcatgcaga

SEQ ID NO: 1851396 - DNA, 15 bp, Homo sapiens
atgaagcatgcagag

SEQ ID NO: 1851397 - DNA, 15 bp, Homo sapiens
tgaagcatgcagaga

SEQ ID NO: 1851398 - DNA, 15 bp, Homo sapiens
gaagcatgcagagac

SEQ ID NO: 1851399 - DNA, 15 bp, Homo sapiens
aagcatgcagagacc

SEQ ID NO: 1851400 - DNA, 15 bp, Homo sapiens
agcatgcagagacca

SEQ ID NO: 1851401 - DNA, 15 bp, Homo sapiens
gcatgcagagaccag

SEQ ID NO: 1851402 - DNA, 15 bp, Homo sapiens
catgcagagaccagg

SEQ ID NO: 1851403 - DNA, 15 bp, Homo sapiens
atgcagagaccaggt

SEQ ID NO: 1851404 - DNA, 15 bp, Homo sapiens
tgcagagaccaggtt

SEQ ID NO: 1851405 - DNA, 15 bp, Homo sapiens
gcagagaccaggttg

SEQ ID NO: 1851406 - DNA, 15 bp, Homo sapiens
cagagaccaggttgg

SEQ ID NO: 1851407 - DNA, 15 bp, Homo sapiens
agagaccaggttggg

SEQ ID NO: 1851408 - DNA, 15 bp, Homo sapiens
gagaccaggttgggt

SEQ ID NO: 1851409 - DNA, 15 bp, Homo sapiens
agaccaggttgggtt

SEQ ID NO: 1851410 - DNA, 15 bp, Homo sapiens
gaccaggttgggtta

SEQ ID NO: 1851411 - DNA, 15 bp, Homo sapiens
accaggttgggttaa

SEQ ID NO: 1851412 - DNA, 15 bp, Homo sapiens
ccaggttgggttaag

SEQ ID NO: 1851413 - DNA, 15 bp, Homo sapiens
caggttgggttaaga

SEQ ID NO: 1851414 - DNA, 15 bp, Homo sapiens
aggttgggttaagac

SEQ ID NO: 1851415 - DNA, 15 bp, Homo sapiens
ggttgggttaagact

SEQ ID NO: 1851416 - DNA, 15 bp, Homo sapiens
gttgggttaagactc

SEQ ID NO: 1851417 - DNA, 15 bp, Homo sapiens
ttgggttaagactct

SEQ ID NO: 1851418 - DNA, 15 bp, Homo sapiens
tgggttaagactctg

SEQ ID NO: 1851419 - DNA, 15 bp, Homo sapiens
gggttaagactctgt

SEQ ID NO: 1851420 - DNA, 15 bp, Homo sapiens
ggttaagactctgta

SEQ ID NO: 1851421 - DNA, 15 bp, Homo sapiens
gttaagactctgtac

SEQ ID NO: 1851422 - DNA, 15 bp, Homo sapiens
ttaagactctgtact

SEQ ID NO: 1851423 - DNA, 15 bp, Homo sapiens
taagactctgtacta

SEQ ID NO: 1851424 - DNA, 15 bp, Homo sapiens
aagactctgtactaa

SEQ ID NO: 1851425 - DNA, 15 bp, Homo sapiens
agactctgtactaat

SEQ ID NO: 1851426 - DNA, 15 bp, Homo sapiens
gactctgtactaatc

SEQ ID NO: 1851427 - DNA, 15 bp, Homo sapiens
actctgtactaatca

SEQ ID NO: 1851428 - DNA, 15 bp, Homo sapiens
ctctgtactaatcac

SEQ ID NO: 1851429 - DNA, 15 bp, Homo sapiens
tctgtactaatcaca

SEQ ID NO: 1851430 - DNA, 15 bp, Homo sapiens
ctgtactaatcacaa

SEQ ID NO: 1851431 - DNA, 15 bp, Homo sapiens
tgtactaatcacaag

SEQ ID NO: 1851432 - DNA, 15 bp, Homo sapiens
gtactaatcacaagt

SEQ ID NO: 1851433 - DNA, 15 bp, Homo sapiens
tactaatcacaagta

SEQ ID NO: 1851434 - DNA, 15 bp, Homo sapiens
actaatcacaagtag

SEQ ID NO: 1851435 - DNA, 15 bp, Homo sapiens
ctaatcacaagtagt

SEQ ID NO: 1851436 - DNA, 15 bp, Homo sapiens
taatcacaagtagtg

SEQ ID NO: 1851437 - DNA, 15 bp, Homo sapiens
aatcacaagtagtgc

SEQ ID NO: 1851438 - DNA, 15 bp, Homo sapiens
atcacaagtagtgca

SEQ ID NO: 1851439 - DNA, 15 bp, Homo sapiens
tcacaagtagtgcaa

SEQ ID NO: 1851440 - DNA, 15 bp, Homo sapiens
cacaagtagtgcaag

SEQ ID NO: 1851441 - DNA, 15 bp, Homo sapiens
acaagtagtgcaaga

SEQ ID NO: 1851442 - DNA, 15 bp, Homo sapiens
caagtagtgcaagaa

SEQ ID NO: 1851443 - DNA, 15 bp, Homo sapiens
aagtagtgcaagaaa

SEQ ID NO: 1851444 - DNA, 15 bp, Homo sapiens
agtagtgcaagaaac

SEQ ID NO: 1851445 - DNA, 15 bp, Homo sapiens
gtagtgcaagaaaca

SEQ ID NO: 1851446 - DNA, 15 bp, Homo sapiens
tagtgcaagaaacat

SEQ ID NO: 1851447 - DNA, 15 bp, Homo sapiens
agtgcaagaaacatt

SEQ ID NO: 1851448 - DNA, 15 bp, Homo sapiens
gtgcaagaaacattt

SEQ ID NO: 1851449 - DNA, 15 bp, Homo sapiens
tgcaagaaacatttg

SEQ ID NO: 1851450 - DNA, 15 bp, Homo sapiens
gcaagaaacatttgc

SEQ ID NO: 1851451 - DNA, 15 bp, Homo sapiens
caagaaacatttgct

SEQ ID NO: 1851452 - DNA, 15 bp, Homo sapiens
aagaaacatttgctg

SEQ ID NO: 1851453 - DNA, 15 bp, Homo sapiens
agaaacatttgctgg

SEQ ID NO: 1851454 - DNA, 15 bp, Homo sapiens
gaaacatttgctgga

SEQ ID NO: 1851455 - DNA, 15 bp, Homo sapiens
aaacatttgctggac

SEQ ID NO: 1851456 - DNA, 15 bp, Homo sapiens
aacatttgctggaca

SEQ ID NO: 1851457 - DNA, 15 bp, Homo sapiens
acatttgctggacac

SEQ ID NO: 1851458 - DNA, 15 bp, Homo sapiens
catttgctggacacc

SEQ ID NO: 1851459 - DNA, 15 bp, Homo sapiens
atttgctggacacct

SEQ ID NO: 1851460 - DNA, 15 bp, Homo sapiens
tttgctggacaccta

SEQ ID NO: 1851461 - DNA, 15 bp, Homo sapiens
ttgctggacacctac

SEQ ID NO: 1851462 - DNA, 15 bp, Homo sapiens
tgctggacacctact

SEQ ID NO: 1851463 - DNA, 15 bp, Homo sapiens
gctggacacctactg

SEQ ID NO: 1851464 - DNA, 15 bp, Homo sapiens
ctggacacctactga

SEQ ID NO: 1851465 - DNA, 15 bp, Homo sapiens
tggacacctactgag

SEQ ID NO: 1851466 - DNA, 15 bp, Homo sapiens
ggacacctactgagt

SEQ ID NO: 1851467 - DNA, 15 bp, Homo sapiens
gacacctactgagtg

SEQ ID NO: 1851468 - DNA, 15 bp, Homo sapiens
acacctactgagtgc

SEQ ID NO: 1851469 - DNA, 15 bp, Homo sapiens
cacctactgagtgct

SEQ ID NO: 1851470 - DNA, 15 bp, Homo sapiens
acctactgagtgctg

SEQ ID NO: 1851471 - DNA, 15 bp, Homo sapiens
cctactgagtgctgg

SEQ ID NO: 1851472 - DNA, 15 bp, Homo sapiens
ctactgagtgctggg

SEQ ID NO: 1851473 - DNA, 15 bp, Homo sapiens
tactgagtgctggga

SEQ ID NO: 1851474 - DNA, 15 bp, Homo sapiens
actgagtgctgggaa

SEQ ID NO: 1851475 - DNA, 15 bp, Homo sapiens
ctgagtgctgggaac

SEQ ID NO: 1851476 - DNA, 15 bp, Homo sapiens
tgagtgctgggaact

SEQ ID NO: 1851477 - DNA, 15 bp, Homo sapiens
gagtgctgggaactg

SEQ ID NO: 1851478 - DNA, 15 bp, Homo sapiens
agtgctgggaactgg

SEQ ID NO: 1851479 - DNA, 15 bp, Homo sapiens
gtgctgggaactggg

SEQ ID NO: 1851480 - DNA, 15 bp, Homo sapiens
tgctgggaactgggt

SEQ ID NO: 1851481 - DNA, 15 bp, Homo sapiens
gctgggaactgggta

SEQ ID NO: 1851482 - DNA, 15 bp, Homo sapiens
ctgggaactgggtac

SEQ ID NO: 1851483 - DNA, 15 bp, Homo sapiens
tgggaactgggtact

SEQ ID NO: 1851484 - DNA, 15 bp, Homo sapiens
gggaactgggtactc

SEQ ID NO: 1851485 - DNA, 15 bp, Homo sapiens
ggaactgggtactca

SEQ ID NO: 1851486 - DNA, 15 bp, Homo sapiens
gaactgggtactcaa

SEQ ID NO: 1851487 - DNA, 15 bp, Homo sapiens
aactgggtactcaac

SEQ ID NO: 1851488 - DNA, 15 bp, Homo sapiens
actgggtactcaaca

SEQ ID NO: 1851489 - DNA, 15 bp, Homo sapiens
ctgggtactcaacac

SEQ ID NO: 1851490 - DNA, 15 bp, Homo sapiens
tgggtactcaacaca

SEQ ID NO: 1851491 - DNA, 15 bp, Homo sapiens
gggtactcaacacat

SEQ ID NO: 1851492 - DNA, 15 bp, Homo sapiens
ggtactcaacacatc

SEQ ID NO: 1851493 - DNA, 15 bp, Homo sapiens
gtactcaacacatct

SEQ ID NO: 1851494 - DNA, 15 bp, Homo sapiens
tactcaacacatctc

SEQ ID NO: 1851495 - DNA, 15 bp, Homo sapiens
actcaacacatctct

SEQ ID NO: 1851496 - DNA, 15 bp, Homo sapiens
ctcaacacatctctg

SEQ ID NO: 1851497 - DNA, 15 bp, Homo sapiens
tcaacacatctctgt

SEQ ID NO: 1851498 - DNA, 15 bp, Homo sapiens
caacacatctctgtg

SEQ ID NO: 1851499 - DNA, 15 bp, Homo sapiens
aacacatctctgtga

SEQ ID NO: 1851500 - DNA, 15 bp, Homo sapiens
acacatctctgtgag

SEQ ID NO: 1851501 - DNA, 15 bp, Homo sapiens
cacatctctgtgagg

SEQ ID NO: 1851502 - DNA, 15 bp, Homo sapiens
acatctctgtgagga

SEQ ID NO: 1851503 - DNA, 15 bp, Homo sapiens
catctctgtgaggaa

SEQ ID NO: 1851504 - DNA, 15 bp, Homo sapiens
atctctgtgaggaag

SEQ ID NO: 1851505 - DNA, 15 bp, Homo sapiens
tctctgtgaggaagg

SEQ ID NO: 1851506 - DNA, 15 bp, Homo sapiens
ctctgtgaggaaggg

SEQ ID NO: 1851507 - DNA, 15 bp, Homo sapiens
tctgtgaggaaggga

SEQ ID NO: 1851508 - DNA, 15 bp, Homo sapiens
ctgtgaggaagggac

SEQ ID NO: 1851509 - DNA, 15 bp, Homo sapiens
tgtgaggaagggact

SEQ ID NO: 1851510 - DNA, 15 bp, Homo sapiens
gtgaggaagggacta

SEQ ID NO: 1851511 - DNA, 15 bp, Homo sapiens
tgaggaagggactat

SEQ ID NO: 1851512 - DNA, 15 bp, Homo sapiens
gaggaagggactatt

SEQ ID NO: 1851513 - DNA, 15 bp, Homo sapiens
aggaagggactatta

SEQ ID NO: 1851514 - DNA, 15 bp, Homo sapiens
ggaagggactattat

SEQ ID NO: 1851515 - DNA, 15 bp, Homo sapiens
gaagggactattatc

SEQ ID NO: 1851516 - DNA, 15 bp, Homo sapiens
aagggactattatca

SEQ ID NO: 1851517 - DNA, 15 bp, Homo sapiens
agggactattatcat

SEQ ID NO: 1851518 - DNA, 15 bp, Homo sapiens
gggactattatcatt

SEQ ID NO: 1851519 - DNA, 15 bp, Homo sapiens
ggactattatcattt

SEQ ID NO: 1851520 - DNA, 15 bp, Homo sapiens
gactattatcatttc

SEQ ID NO: 1851521 - DNA, 15 bp, Homo sapiens
actattatcatttct

SEQ ID NO: 1851522 - DNA, 15 bp, Homo sapiens
ctattatcatttcta

SEQ ID NO: 1851523 - DNA, 15 bp, Homo sapiens
tattatcatttctat

SEQ ID NO: 1851524 - DNA, 15 bp, Homo sapiens
attatcatttctatt

SEQ ID NO: 1851525 - DNA, 15 bp, Homo sapiens
ttatcatttctattt

SEQ ID NO: 1851526 - DNA, 15 bp, Homo sapiens
tatcatttctatttt

SEQ ID NO: 1851527 - DNA, 15 bp, Homo sapiens
atcatttctattttc

SEQ ID NO: 1851528 - DNA, 15 bp, Homo sapiens
tcatttctattttct

SEQ ID NO: 1851529 - DNA, 15 bp, Homo sapiens
catttctattttctt

SEQ ID NO: 1851530 - DNA, 15 bp, Homo sapiens
atttctattttcttg

SEQ ID NO: 1851531 - DNA, 15 bp, Homo sapiens
tttctattttcttga

SEQ ID NO: 1851532 - DNA, 15 bp, Homo sapiens
ttctattttcttgat

SEQ ID NO: 1851533 - DNA, 15 bp, Homo sapiens
tctattttcttgatg

SEQ ID NO: 1851534 - DNA, 15 bp, Homo sapiens
ctattttcttgatga

SEQ ID NO: 1851535 - DNA, 15 bp, Homo sapiens
tattttcttgatgag

SEQ ID NO: 1851536 - DNA, 15 bp, Homo sapiens
attttcttgatgagg

SEQ ID NO: 1851537 - DNA, 15 bp, Homo sapiens
ttttcttgatgagga

SEQ ID NO: 1851538 - DNA, 15 bp, Homo sapiens
tttcttgatgaggaa

SEQ ID NO: 1851539 - DNA, 15 bp, Homo sapiens
ttcttgatgaggaaa

SEQ ID NO: 1851540 - DNA, 15 bp, Homo sapiens
tcttgatgaggaaag

SEQ ID NO: 1851541 - DNA, 15 bp, Homo sapiens
cttgatgaggaaagg

SEQ ID NO: 1851542 - DNA, 15 bp, Homo sapiens
ttgatgaggaaaggg

SEQ ID NO: 1851543 - DNA, 15 bp, Homo sapiens
tgatgaggaaaggga

SEQ ID NO: 1851544 - DNA, 15 bp, Homo sapiens
gatgaggaaagggag

SEQ ID NO: 1851545 - DNA, 15 bp, Homo sapiens
atgaggaaagggagg

SEQ ID NO: 1851546 - DNA, 15 bp, Homo sapiens
tgaggaaagggaggc

SEQ ID NO: 1851547 - DNA, 15 bp, Homo sapiens
gaggaaagggaggca

SEQ ID NO: 1851548 - DNA, 15 bp, Homo sapiens
aggaaagggaggcac

SEQ ID NO: 1851549 - DNA, 15 bp, Homo sapiens
ggaaagggaggcact

SEQ ID NO: 1851550 - DNA, 15 bp, Homo sapiens
gaaagggaggcactg

SEQ ID NO: 1851551 - DNA, 15 bp, Homo sapiens
aaagggaggcactgt

SEQ ID NO: 1851552 - DNA, 15 bp, Homo sapiens
aagggaggcactgta

SEQ ID NO: 1851553 - DNA, 15 bp, Homo sapiens
agggaggcactgtat

SEQ ID NO: 1851554 - DNA, 15 bp, Homo sapiens
gggaggcactgtatt

SEQ ID NO: 1851555 - DNA, 15 bp, Homo sapiens
ggaggcactgtatta

SEQ ID NO: 1851556 - DNA, 15 bp, Homo sapiens
gaggcactgtattag

SEQ ID NO: 1851557 - DNA, 15 bp, Homo sapiens
aggcactgtattagt

SEQ ID NO: 1851558 - DNA, 15 bp, Homo sapiens
ggcactgtattagtt

SEQ ID NO: 1851559 - DNA, 15 bp, Homo sapiens
gcactgtattagttt

SEQ ID NO: 1851560 - DNA, 15 bp, Homo sapiens
cactgtattagtttg

SEQ ID NO: 1851561 - DNA, 15 bp, Homo sapiens
actgtattagtttgc

SEQ ID NO: 1851562 - DNA, 15 bp, Homo sapiens
ctgtattagtttgct

SEQ ID NO: 1851563 - DNA, 15 bp, Homo sapiens
tgtattagtttgcta

SEQ ID NO: 1851564 - DNA, 15 bp, Homo sapiens
gtattagtttgctag

SEQ ID NO: 1851565 - DNA, 15 bp, Homo sapiens
tattagtttgctagg

SEQ ID NO: 1851566 - DNA, 15 bp, Homo sapiens
attagtttgctaggc

SEQ ID NO: 1851567 - DNA, 15 bp, Homo sapiens
ttagtttgctaggcc

SEQ ID NO: 1851568 - DNA, 15 bp, Homo sapiens
tagtttgctaggcct

SEQ ID NO: 1851569 - DNA, 15 bp, Homo sapiens
agtttgctaggcctg

SEQ ID NO: 1851570 - DNA, 15 bp, Homo sapiens
gtttgctaggcctgc

SEQ ID NO: 1851571 - DNA, 15 bp, Homo sapiens
tttgctaggcctgct

SEQ ID NO: 1851572 - DNA, 15 bp, Homo sapiens
ttgctaggcctgctg

SEQ ID NO: 1851573 - DNA, 15 bp, Homo sapiens
tgctaggcctgctgt

SEQ ID NO: 1851574 - DNA, 15 bp, Homo sapiens
gctaggcctgctgtg

SEQ ID NO: 1851575 - DNA, 15 bp, Homo sapiens
ctaggcctgctgtga

SEQ ID NO: 1851576 - DNA, 15 bp, Homo sapiens
taggcctgctgtgac

SEQ ID NO: 1851577 - DNA, 15 bp, Homo sapiens
aggcctgctgtgaca

SEQ ID NO: 1851578 - DNA, 15 bp, Homo sapiens
ggcctgctgtgacaa

SEQ ID NO: 1851579 - DNA, 15 bp, Homo sapiens
gcctgctgtgacaaa

SEQ ID NO: 1851580 - DNA, 15 bp, Homo sapiens
cctgctgtgacaaag

SEQ ID NO: 1851581 - DNA, 15 bp, Homo sapiens
ctgctgtgacaaagt

SEQ ID NO: 1851582 - DNA, 15 bp, Homo sapiens
tgctgtgacaaagta

SEQ ID NO: 1851583 - DNA, 15 bp, Homo sapiens
gctgtgacaaagtac

SEQ ID NO: 1851584 - DNA, 15 bp, Homo sapiens
ctgtgacaaagtact

SEQ ID NO: 1851585 - DNA, 15 bp, Homo sapiens
tgtgacaaagtacta

SEQ ID NO: 1851586 - DNA, 15 bp, Homo sapiens
gtgacaaagtactac

SEQ ID NO: 1851587 - DNA, 15 bp, Homo sapiens
tgacaaagtactaca

SEQ ID NO: 1851588 - DNA, 15 bp, Homo sapiens
gacaaagtactacag

SEQ ID NO: 1851589 - DNA, 15 bp, Homo sapiens
acaaagtactacagg

SEQ ID NO: 1851590 - DNA, 15 bp, Homo sapiens
caaagtactacaggc

SEQ ID NO: 1851591 - DNA, 15 bp, Homo sapiens
aaagtactacaggcc

SEQ ID NO: 1851592 - DNA, 15 bp, Homo sapiens
aagtactacaggcca

SEQ ID NO: 1851593 - DNA, 15 bp, Homo sapiens
agtactacaggccag

SEQ ID NO: 1851594 - DNA, 15 bp, Homo sapiens
gtactacaggccagg

SEQ ID NO: 1851595 - DNA, 15 bp, Homo sapiens
tactacaggccaggt

SEQ ID NO: 1851596 - DNA, 15 bp, Homo sapiens
actacaggccaggtg

SEQ ID NO: 1851597 - DNA, 15 bp, Homo sapiens
ctacaggccaggtgg

SEQ ID NO: 1851598 - DNA, 15 bp, Homo sapiens
tacaggccaggtggc

SEQ ID NO: 1851599 - DNA, 15 bp, Homo sapiens
acaggccaggtggct

SEQ ID NO: 1851600 - DNA, 15 bp, Homo sapiens
caggccaggtggctt

SEQ ID NO: 1851601 - DNA, 15 bp, Homo sapiens
aggccaggtggctta

SEQ ID NO: 1851602 - DNA, 15 bp, Homo sapiens
ggccaggtggcttac

SEQ ID NO: 1851603 - DNA, 15 bp, Homo sapiens
gccaggtggcttaca

SEQ ID NO: 1851604 - DNA, 15 bp, Homo sapiens
ccaggtggcttacac

SEQ ID NO: 1851605 - DNA, 15 bp, Homo sapiens
caggtggcttacaca

SEQ ID NO: 1851606 - DNA, 15 bp, Homo sapiens
aggtggcttacacaa

SEQ ID NO: 1851607 - DNA, 15 bp, Homo sapiens
ggtggcttacacaac

SEQ ID NO: 1851608 - DNA, 15 bp, Homo sapiens
gtggcttacacaaca

SEQ ID NO: 1851609 - DNA, 15 bp, Homo sapiens
tggcttacacaacag

SEQ ID NO: 1851610 - DNA, 15 bp, Homo sapiens
ggcttacacaacaga

SEQ ID NO: 1851611 - DNA, 15 bp, Homo sapiens
gcttacacaacagaa

SEQ ID NO: 1851612 - DNA, 15 bp, Homo sapiens
cttacacaacagaaa

SEQ ID NO: 1851613 - DNA, 15 bp, Homo sapiens
ttacacaacagaaat

SEQ ID NO: 1851614 - DNA, 15 bp, Homo sapiens
tacacaacagaaatt

SEQ ID NO: 1851615 - DNA, 15 bp, Homo sapiens
acacaacagaaatta

SEQ ID NO: 1851616 - DNA, 15 bp, Homo sapiens
cacaacagaaattaa

SEQ ID NO: 1851617 - DNA, 15 bp, Homo sapiens
acaacagaaattaat

SEQ ID NO: 1851618 - DNA, 15 bp, Homo sapiens
caacagaaattaatt

SEQ ID NO: 1851619 - DNA, 15 bp, Homo sapiens
aacagaaattaattt

SEQ ID NO: 1851620 - DNA, 15 bp, Homo sapiens
acagaaattaatttt

SEQ ID NO: 1851621 - DNA, 15 bp, Homo sapiens
cagaaattaattttc

SEQ ID NO: 1851622 - DNA, 15 bp, Homo sapiens
agaaattaattttct

SEQ ID NO: 1851623 - DNA, 15 bp, Homo sapiens
gaaattaattttctt

SEQ ID NO: 1851624 - DNA, 15 bp, Homo sapiens
aaattaattttctta

SEQ ID NO: 1851625 - DNA, 15 bp, Homo sapiens
aattaattttcttac

SEQ ID NO: 1851626 - DNA, 15 bp, Homo sapiens
attaattttcttaca

SEQ ID NO: 1851627 - DNA, 15 bp, Homo sapiens
ttaattttcttacag

SEQ ID NO: 1851628 - DNA, 15 bp, Homo sapiens
taattttcttacagt

SEQ ID NO: 1851629 - DNA, 15 bp, Homo sapiens
aattttcttacagtt

SEQ ID NO: 1851630 - DNA, 15 bp, Homo sapiens
attttcttacagttc

SEQ ID NO: 1851631 - DNA, 15 bp, Homo sapiens
ttttcttacagttct

SEQ ID NO: 1851632 - DNA, 15 bp, Homo sapiens
tttcttacagttcta

SEQ ID NO: 1851633 - DNA, 15 bp, Homo sapiens
ttcttacagttctag

SEQ ID NO: 1851634 - DNA, 15 bp, Homo sapiens
tcttacagttctaga

SEQ ID NO: 1851635 - DNA, 15 bp, Homo sapiens
cttacagttctagag

SEQ ID NO: 1851636 - DNA, 15 bp, Homo sapiens
ttacagttctagagg

SEQ ID NO: 1851637 - DNA, 15 bp, Homo sapiens
tacagttctagaggc

SEQ ID NO: 1851638 - DNA, 15 bp, Homo sapiens
acagttctagaggcc

SEQ ID NO: 1851639 - DNA, 15 bp, Homo sapiens
cagttctagaggcca

SEQ ID NO: 1851640 - DNA, 15 bp, Homo sapiens
agttctagaggccag

SEQ ID NO: 1851641 - DNA, 15 bp, Homo sapiens
gttctagaggccaga

SEQ ID NO: 1851642 - DNA, 15 bp, Homo sapiens
ttctagaggccagaa

SEQ ID NO: 1851643 - DNA, 15 bp, Homo sapiens
tctagaggccagaag

SEQ ID NO: 1851644 - DNA, 15 bp, Homo sapiens
ctagaggccagaagt

SEQ ID NO: 1851645 - DNA, 15 bp, Homo sapiens
tagaggccagaagtc

SEQ ID NO: 1851646 - DNA, 15 bp, Homo sapiens
agaggccagaagtct

SEQ ID NO: 1851647 - DNA, 15 bp, Homo sapiens
gaggccagaagtctg

SEQ ID NO: 1851648 - DNA, 15 bp, Homo sapiens
aggccagaagtctga

SEQ ID NO: 1851649 - DNA, 15 bp, Homo sapiens
ggccagaagtctgag

SEQ ID NO: 1851650 - DNA, 15 bp, Homo sapiens
gccagaagtctgaga

SEQ ID NO: 1851651 - DNA, 15 bp, Homo sapiens
ccagaagtctgagat

SEQ ID NO: 1851652 - DNA, 15 bp, Homo sapiens
cagaagtctgagatc

SEQ ID NO: 1851653 - DNA, 15 bp, Homo sapiens
agaagtctgagatca

SEQ ID NO: 1851654 - DNA, 15 bp, Homo sapiens
gaagtctgagatcaa

SEQ ID NO: 1851655 - DNA, 15 bp, Homo sapiens
aagtctgagatcaag

SEQ ID NO: 1851656 - DNA, 15 bp, Homo sapiens
agtctgagatcaagg

SEQ ID NO: 1851657 - DNA, 15 bp, Homo sapiens
gtctgagatcaaggt

SEQ ID NO: 1851658 - DNA, 15 bp, Homo sapiens
tctgagatcaaggtg

SEQ ID NO: 1851659 - DNA, 15 bp, Homo sapiens
ctgagatcaaggtgt

SEQ ID NO: 1851660 - DNA, 15 bp, Homo sapiens
tgagatcaaggtgtt

SEQ ID NO: 1851661 - DNA, 15 bp, Homo sapiens
gagatcaaggtgttg

SEQ ID NO: 1851662 - DNA, 15 bp, Homo sapiens
agatcaaggtgttgg

SEQ ID NO: 1851663 - DNA, 15 bp, Homo sapiens
gatcaaggtgttggc

SEQ ID NO: 1851664 - DNA, 15 bp, Homo sapiens
atcaaggtgttggca

SEQ ID NO: 1851665 - DNA, 15 bp, Homo sapiens
tcaaggtgttggcag

SEQ ID NO: 1851666 - DNA, 15 bp, Homo sapiens
caaggtgttggcagg

SEQ ID NO: 1851667 - DNA, 15 bp, Homo sapiens
aaggtgttggcaggg

SEQ ID NO: 1851668 - DNA, 15 bp, Homo sapiens
aggtgttggcagggc

SEQ ID NO: 1851669 - DNA, 15 bp, Homo sapiens
ggtgttggcagggct

SEQ ID NO: 1851670 - DNA, 15 bp, Homo sapiens
gtgttggcagggctg

SEQ ID NO: 1851671 - DNA, 15 bp, Homo sapiens
tgttggcagggctgg

SEQ ID NO: 1851672 - DNA, 15 bp, Homo sapiens
gttggcagggctggt

SEQ ID NO: 1851673 - DNA, 15 bp, Homo sapiens
ttggcagggctggtt

SEQ ID NO: 1851674 - DNA, 15 bp, Homo sapiens
tggcagggctggttc

SEQ ID NO: 1851675 - DNA, 15 bp, Homo sapiens
ggcagggctggttcc

SEQ ID NO: 1851676 - DNA, 15 bp, Homo sapiens
ggctggttccttctc

SEQ ID NO: 1851677 - DNA, 15 bp, Homo sapiens
gctggttccttctct

SEQ ID NO: 1851678 - DNA, 15 bp, Homo sapiens
ctggttccttctctg

SEQ ID NO: 1851679 - DNA, 15 bp, Homo sapiens
tggttccttctctgg

SEQ ID NO: 1851680 - DNA, 15 bp, Homo sapiens
ggttccttctctggg

SEQ ID NO: 1851681 - DNA, 15 bp, Homo sapiens
gttccttctctgggt

SEQ ID NO: 1851682 - DNA, 15 bp, Homo sapiens
ttccttctctgggtt

SEQ ID NO: 1851683 - DNA, 15 bp, Homo sapiens
tccttctctgggttg

SEQ ID NO: 1851684 - DNA, 15 bp, Homo sapiens
ccttctctgggttgt

SEQ ID NO: 1851685 - DNA, 15 bp, Homo sapiens
cttctctgggttgtg

SEQ ID NO: 1851686 - DNA, 15 bp, Homo sapiens
ttctctgggttgtga

SEQ ID NO: 1851687 - DNA, 15 bp, Homo sapiens
tctctgggttgtgaa

SEQ ID NO: 1851688 - DNA, 15 bp, Homo sapiens
ctctgggttgtgaag

SEQ ID NO: 1851689 - DNA, 15 bp, Homo sapiens
tctgggttgtgaagg

SEQ ID NO: 1851690 - DNA, 15 bp, Homo sapiens
ctgggttgtgaagga

SEQ ID NO: 1851691 - DNA, 15 bp, Homo sapiens
tgggttgtgaaggaa

SEQ ID NO: 1851692 - DNA, 15 bp, Homo sapiens
gggttgtgaaggaag

SEQ ID NO: 1851693 - DNA, 15 bp, Homo sapiens
ggttgtgaaggaagg

SEQ ID NO: 1851694 - DNA, 15 bp, Homo sapiens
gttgtgaaggaagga

SEQ ID NO: 1851695 - DNA, 15 bp, Homo sapiens
ttgtgaaggaaggat

SEQ ID NO: 1851696 - DNA, 15 bp, Homo sapiens
tgtgaaggaaggatc

SEQ ID NO: 1851697 - DNA, 15 bp, Homo sapiens
gtgaaggaaggatcg

SEQ ID NO: 1851698 - DNA, 15 bp, Homo sapiens
tgaaggaaggatcgg

SEQ ID NO: 1851699 - DNA, 15 bp, Homo sapiens
gaaggaaggatcggt

SEQ ID NO: 1851700 - DNA, 15 bp, Homo sapiens
aaggaaggatcggtt

SEQ ID NO: 1851701 - DNA, 15 bp, Homo sapiens
aggaaggatcggttc

SEQ ID NO: 1851702 - DNA, 15 bp, Homo sapiens
ggaaggatcggttcc

SEQ ID NO: 1851703 - DNA, 15 bp, Homo sapiens
gaaggatcggttcca

SEQ ID NO: 1851704 - DNA, 15 bp, Homo sapiens
aaggatcggttccag

SEQ ID NO: 1851705 - DNA, 15 bp, Homo sapiens
aggatcggttccagg

SEQ ID NO: 1851706 - DNA, 15 bp, Homo sapiens
ggatcggttccagga

SEQ ID NO: 1851707 - DNA, 15 bp, Homo sapiens
gatcggttccaggac

SEQ ID NO: 1851708 - DNA, 15 bp, Homo sapiens
atcggttccaggact

SEQ ID NO: 1851709 - DNA, 15 bp, Homo sapiens
tcggttccaggactc

SEQ ID NO: 1851710 - DNA, 15 bp, Homo sapiens
cggttccaggactct

SEQ ID NO: 1851711 - DNA, 15 bp, Homo sapiens
ggttccaggactctc

SEQ ID NO: 1851712 - DNA, 15 bp, Homo sapiens
gttccaggactctct

SEQ ID NO: 1851713 - DNA, 15 bp, Homo sapiens
ttccaggactctctc

SEQ ID NO: 1851714 - DNA, 15 bp, Homo sapiens
tccaggactctctca

SEQ ID NO: 1851715 - DNA, 15 bp, Homo sapiens
ccaggactctctcat

SEQ ID NO: 1851716 - DNA, 15 bp, Homo sapiens
caggactctctcatt

SEQ ID NO: 1851717 - DNA, 15 bp, Homo sapiens
aggactctctcattg

SEQ ID NO: 1851718 - DNA, 15 bp, Homo sapiens
ggactctctcattgc

SEQ ID NO: 1851719 - DNA, 15 bp, Homo sapiens
gactctctcattgcc

SEQ ID NO: 1851720 - DNA, 15 bp, Homo sapiens
actctctcattgcct

SEQ ID NO: 1851721 - DNA, 15 bp, Homo sapiens
ctctctcattgcctt

SEQ ID NO: 1851722 - DNA, 15 bp, Homo sapiens
tctctcattgccttg

SEQ ID NO: 1851723 - DNA, 15 bp, Homo sapiens
ctctcattgccttgt

SEQ ID NO: 1851724 - DNA, 15 bp, Homo sapiens
tctcattgccttgtg

SEQ ID NO: 1851725 - DNA, 15 bp, Homo sapiens
ctcattgccttgtgg

SEQ ID NO: 1851726 - DNA, 15 bp, Homo sapiens
tcattgccttgtgga

SEQ ID NO: 1851727 - DNA, 15 bp, Homo sapiens
cattgccttgtggaa

SEQ ID NO: 1851728 - DNA, 15 bp, Homo sapiens
attgccttgtggaag

SEQ ID NO: 1851729 - DNA, 15 bp, Homo sapiens
ttgccttgtggaaga

SEQ ID NO: 1851730 - DNA, 15 bp, Homo sapiens
tgccttgtggaagac

SEQ ID NO: 1851731 - DNA, 15 bp, Homo sapiens
gccttgtggaagact

SEQ ID NO: 1851732 - DNA, 15 bp, Homo sapiens
ccttgtggaagactg

SEQ ID NO: 1851733 - DNA, 15 bp, Homo sapiens
cttgtggaagactgc

SEQ ID NO: 1851734 - DNA, 15 bp, Homo sapiens
ttgtggaagactgcc

SEQ ID NO: 1851735 - DNA, 15 bp, Homo sapiens
tgtggaagactgcct

SEQ ID NO: 1851736 - DNA, 15 bp, Homo sapiens
gtggaagactgcctt

SEQ ID NO: 1851737 - DNA, 15 bp, Homo sapiens
tggaagactgccttc

SEQ ID NO: 1851738 - DNA, 15 bp, Homo sapiens
ggaagactgccttct

SEQ ID NO: 1851739 - DNA, 15 bp, Homo sapiens
gaagactgccttctt

SEQ ID NO: 1851740 - DNA, 15 bp, Homo sapiens
aagactgccttcttc

SEQ ID NO: 1851741 - DNA, 15 bp, Homo sapiens
agactgccttcttct

SEQ ID NO: 1851742 - DNA, 15 bp, Homo sapiens
gactgccttcttctc

SEQ ID NO: 1851743 - DNA, 15 bp, Homo sapiens
actgccttcttctcc

SEQ ID NO: 1851744 - DNA, 15 bp, Homo sapiens
ctgccttcttctccc

SEQ ID NO: 1851745 - DNA, 15 bp, Homo sapiens
tgccttcttctccct

SEQ ID NO: 1851746 - DNA, 15 bp, Homo sapiens
gccttcttctccctg

SEQ ID NO: 1851747 - DNA, 15 bp, Homo sapiens
ccttcttctccctgt

SEQ ID NO: 1851748 - DNA, 15 bp, Homo sapiens
cttcttctccctgtg

SEQ ID NO: 1851749 - DNA, 15 bp, Homo sapiens
ttcttctccctgtgt

SEQ ID NO: 1851750 - DNA, 15 bp, Homo sapiens
tcttctccctgtgta

SEQ ID NO: 1851751 - DNA, 15 bp, Homo sapiens
cttctccctgtgtat

SEQ ID NO: 1851752 - DNA, 15 bp, Homo sapiens
ttctccctgtgtatg

SEQ ID NO: 1851753 - DNA, 15 bp, Homo sapiens
tctccctgtgtatgt

SEQ ID NO: 1851754 - DNA, 15 bp, Homo sapiens
ctccctgtgtatgta

SEQ ID NO: 1851755 - DNA, 15 bp, Homo sapiens
tccctgtgtatgtat

SEQ ID NO: 1851756 - DNA, 15 bp, Homo sapiens
ccctgtgtatgtatc

SEQ ID NO: 1851757 - DNA, 15 bp, Homo sapiens
cctgtgtatgtatca

SEQ ID NO: 1851758 - DNA, 15 bp, Homo sapiens
ctgtgtatgtatcat

SEQ ID NO: 1851759 - DNA, 15 bp, Homo sapiens
tgtgtatgtatcatc

SEQ ID NO: 1851760 - DNA, 15 bp, Homo sapiens
gtgtatgtatcatct

SEQ ID NO: 1851761 - DNA, 15 bp, Homo sapiens
tgtatgtatcatctc

SEQ ID NO: 1851762 - DNA, 15 bp, Homo sapiens
gtatgtatcatctcc

SEQ ID NO: 1851763 - DNA, 15 bp, Homo sapiens
tatgtatcatctccc

SEQ ID NO: 1851764 - DNA, 15 bp, Homo sapiens
atgtatcatctccct

SEQ ID NO: 1851765 - DNA, 15 bp, Homo sapiens
tgtatcatctccctc

SEQ ID NO: 1851766 - DNA, 15 bp, Homo sapiens
gtatcatctccctcc

SEQ ID NO: 1851767 - DNA, 15 bp, Homo sapiens
tatcatctccctcct

SEQ ID NO: 1851768 - DNA, 15 bp, Homo sapiens
atcatctccctcctg

SEQ ID NO: 1851769 - DNA, 15 bp, Homo sapiens
tcatctccctcctgt

SEQ ID NO: 1851770 - DNA, 15 bp, Homo sapiens
catctccctcctgta

SEQ ID NO: 1851771 - DNA, 15 bp, Homo sapiens
atctccctcctgtat

SEQ ID NO: 1851772 - DNA, 15 bp, Homo sapiens
tctccctcctgtata

SEQ ID NO: 1851773 - DNA, 15 bp, Homo sapiens
ctccctcctgtatat

SEQ ID NO: 1851774 - DNA, 15 bp, Homo sapiens
tccctcctgtatatg

SEQ ID NO: 1851775 - DNA, 15 bp, Homo sapiens
ccctcctgtatatgt

SEQ ID NO: 1851776 - DNA, 15 bp, Homo sapiens
cctcctgtatatgtc

SEQ ID NO: 1851777 - DNA, 15 bp, Homo sapiens
ctcctgtatatgtct

SEQ ID NO: 1851778 - DNA, 15 bp, Homo sapiens
tcctgtatatgtctg

SEQ ID NO: 1851779 - DNA, 15 bp, Homo sapiens
cctgtatatgtctgt

SEQ ID NO: 1851780 - DNA, 15 bp, Homo sapiens
ctgtatatgtctgtg

SEQ ID NO: 1851781 - DNA, 15 bp, Homo sapiens
tgtatatgtctgtgt

SEQ ID NO: 1851782 - DNA, 15 bp, Homo sapiens
gtatatgtctgtgtc

SEQ ID NO: 1851783 - DNA, 15 bp, Homo sapiens
tatatgtctgtgtcc

SEQ ID NO: 1851784 - DNA, 15 bp, Homo sapiens
atatgtctgtgtcct

SEQ ID NO: 1851785 - DNA, 15 bp, Homo sapiens
tatgtctgtgtccta

SEQ ID NO: 1851786 - DNA, 15 bp, Homo sapiens
atgtctgtgtcctaa

SEQ ID NO: 1851787 - DNA, 15 bp, Homo sapiens
tgtctgtgtcctaat

SEQ ID NO: 1851788 - DNA, 15 bp, Homo sapiens
gtctgtgtcctaatt

SEQ ID NO: 1851789 - DNA, 15 bp, Homo sapiens
tctgtgtcctaattt

SEQ ID NO: 1851790 - DNA, 15 bp, Homo sapiens
ctgtgtcctaatttc

SEQ ID NO: 1851791 - DNA, 15 bp, Homo sapiens
tgtgtcctaatttcc

SEQ ID NO: 1851792 - DNA, 15 bp, Homo sapiens
gtgtcctaatttcct

SEQ ID NO: 1851793 - DNA, 15 bp, Homo sapiens
tgtcctaatttcctc

SEQ ID NO: 1851794 - DNA, 15 bp, Homo sapiens
gtcctaatttcctct

SEQ ID NO: 1851795 - DNA, 15 bp, Homo sapiens
tcctaatttcctctt

SEQ ID NO: 1851796 - DNA, 15 bp, Homo sapiens
cctaatttcctcttc

SEQ ID NO: 1851797 - DNA, 15 bp, Homo sapiens
ctaatttcctcttct

SEQ ID NO: 1851798 - DNA, 15 bp, Homo sapiens
taatttcctcttctt

SEQ ID NO: 1851799 - DNA, 15 bp, Homo sapiens
aatttcctcttcttc

SEQ ID NO: 1851800 - DNA, 15 bp, Homo sapiens
atttcctcttcttct

SEQ ID NO: 1851801 - DNA, 15 bp, Homo sapiens
tttcctcttcttcta

SEQ ID NO: 1851802 - DNA, 15 bp, Homo sapiens
tcctcttcttctaag

SEQ ID NO: 1851803 - DNA, 15 bp, Homo sapiens
cctcttcttctaagg

SEQ ID NO: 1851804 - DNA, 15 bp, Homo sapiens
ctcttcttctaagga

SEQ ID NO: 1851805 - DNA, 15 bp, Homo sapiens
tcttcttctaaggac

SEQ ID NO: 1851806 - DNA, 15 bp, Homo sapiens
cttcttctaaggaca

SEQ ID NO: 1851807 - DNA, 15 bp, Homo sapiens
ttcttctaaggacac

SEQ ID NO: 1851808 - DNA, 15 bp, Homo sapiens
tcttctaaggacacc

SEQ ID NO: 1851809 - DNA, 15 bp, Homo sapiens
cttctaaggacacca

SEQ ID NO: 1851810 - DNA, 15 bp, Homo sapiens
ttctaaggacaccag

SEQ ID NO: 1851811 - DNA, 15 bp, Homo sapiens
tctaaggacaccagt

SEQ ID NO: 1851812 - DNA, 15 bp, Homo sapiens
ctaaggacaccagtc

SEQ ID NO: 1851813 - DNA, 15 bp, Homo sapiens
taaggacaccagtca

SEQ ID NO: 1851814 - DNA, 15 bp, Homo sapiens
aaggacaccagtcat

SEQ ID NO: 1851815 - DNA, 15 bp, Homo sapiens
aggacaccagtcata

SEQ ID NO: 1851816 - DNA, 15 bp, Homo sapiens
ggacaccagtcatat

SEQ ID NO: 1851817 - DNA, 15 bp, Homo sapiens
gacaccagtcatatt

SEQ ID NO: 1851818 - DNA, 15 bp, Homo sapiens
acaccagtcatattg

SEQ ID NO: 1851819 - DNA, 15 bp, Homo sapiens
caccagtcatattgc

SEQ ID NO: 1851820 - DNA, 15 bp, Homo sapiens
accagtcatattgca

SEQ ID NO: 1851821 - DNA, 15 bp, Homo sapiens
ccagtcatattgcat

SEQ ID NO: 1851822 - DNA, 15 bp, Homo sapiens
cagtcatattgcatt

SEQ ID NO: 1851823 - DNA, 15 bp, Homo sapiens
agtcatattgcatta

SEQ ID NO: 1851824 - DNA, 15 bp, Homo sapiens
gtcatattgcattag

SEQ ID NO: 1851825 - DNA, 15 bp, Homo sapiens
tcatattgcattagg

SEQ ID NO: 1851826 - DNA, 15 bp, Homo sapiens
catattgcattagga

SEQ ID NO: 1851827 - DNA, 15 bp, Homo sapiens
atattgcattaggac

SEQ ID NO: 1851828 - DNA, 15 bp, Homo sapiens
tattgcattaggacc

SEQ ID NO: 1851829 - DNA, 15 bp, Homo sapiens
attgcattaggaccc

SEQ ID NO: 1851830 - DNA, 15 bp, Homo sapiens
ttgcattaggaccca

SEQ ID NO: 1851831 - DNA, 15 bp, Homo sapiens
tgcattaggacccac

SEQ ID NO: 1851832 - DNA, 15 bp, Homo sapiens
gcattaggacccacc

SEQ ID NO: 1851833 - DNA, 15 bp, Homo sapiens
cattaggacccaccc

SEQ ID NO: 1851834 - DNA, 15 bp, Homo sapiens
attaggacccaccct

SEQ ID NO: 1851835 - DNA, 15 bp, Homo sapiens
ttaggacccacccta

SEQ ID NO: 1851836 - DNA, 15 bp, Homo sapiens
taggacccaccctaa

SEQ ID NO: 1851837 - DNA, 15 bp, Homo sapiens
aggacccaccctaat

SEQ ID NO: 1851838 - DNA, 15 bp, Homo sapiens
ggacccaccctaatg

SEQ ID NO: 1851839 - DNA, 15 bp, Homo sapiens
gacccaccctaatga

SEQ ID NO: 1851840 - DNA, 15 bp, Homo sapiens
acccaccctaatgac

SEQ ID NO: 1851841 - DNA, 15 bp, Homo sapiens
tgacctcattttaat

SEQ ID NO: 1851842 - DNA, 15 bp, Homo sapiens
gacctcattttaatt

SEQ ID NO: 1851843 - DNA, 15 bp, Homo sapiens
acctcattttaattt

SEQ ID NO: 1851844 - DNA, 15 bp, Homo sapiens
cctcattttaatttt

SEQ ID NO: 1851845 - DNA, 15 bp, Homo sapiens
ctcattttaatttta

SEQ ID NO: 1851846 - DNA, 15 bp, Homo sapiens
tcattttaattttat

SEQ ID NO: 1851847 - DNA, 15 bp, Homo sapiens
cattttaattttatc

SEQ ID NO: 1851848 - DNA, 15 bp, Homo sapiens
attttaattttatca

SEQ ID NO: 1851849 - DNA, 15 bp, Homo sapiens
ttttaattttatcac

SEQ ID NO: 1851850 - DNA, 15 bp, Homo sapiens
tttaattttatcaca

SEQ ID NO: 1851851 - DNA, 15 bp, Homo sapiens
ttaattttatcacat

SEQ ID NO: 1851852 - DNA, 15 bp, Homo sapiens
taattttatcacatc

SEQ ID NO: 1851853 - DNA, 15 bp, Homo sapiens
aattttatcacatct

SEQ ID NO: 1851854 - DNA, 15 bp, Homo sapiens
attttatcacatctt

SEQ ID NO: 1851855 - DNA, 15 bp, Homo sapiens
ttttatcacatcttt

SEQ ID NO: 1851856 - DNA, 15 bp, Homo sapiens
tttatcacatctttg

SEQ ID NO: 1851857 - DNA, 15 bp, Homo sapiens
ttatcacatctttga

SEQ ID NO: 1851858 - DNA, 15 bp, Homo sapiens
tatcacatctttgaa

SEQ ID NO: 1851859 - DNA, 15 bp, Homo sapiens
atcacatctttgaat

SEQ ID NO: 1851860 - DNA, 15 bp, Homo sapiens
tcacatctttgaata

SEQ ID NO: 1851861 - DNA, 15 bp, Homo sapiens
cacatctttgaatac

SEQ ID NO: 1851862 - DNA, 15 bp, Homo sapiens
acatctttgaatacc

SEQ ID NO: 1851863 - DNA, 15 bp, Homo sapiens
catctttgaataccc

SEQ ID NO: 1851864 - DNA, 15 bp, Homo sapiens
atctttgaataccct

SEQ ID NO: 1851865 - DNA, 15 bp, Homo sapiens
tctttgaataccctg

SEQ ID NO: 1851866 - DNA, 15 bp, Homo sapiens
ctttgaataccctgt

SEQ ID NO: 1851867 - DNA, 15 bp, Homo sapiens
tttgaataccctgtc

SEQ ID NO: 1851868 - DNA, 15 bp, Homo sapiens
ttgaataccctgtct

SEQ ID NO: 1851869 - DNA, 15 bp, Homo sapiens
tgaataccctgtctc

SEQ ID NO: 1851870 - DNA, 15 bp, Homo sapiens
gaataccctgtctct

SEQ ID NO: 1851871 - DNA, 15 bp, Homo sapiens
aataccctgtctctg

SEQ ID NO: 1851872 - DNA, 15 bp, Homo sapiens
ataccctgtctctga

SEQ ID NO: 1851873 - DNA, 15 bp, Homo sapiens
taccctgtctctgaa

SEQ ID NO: 1851874 - DNA, 15 bp, Homo sapiens
accctgtctctgaat

SEQ ID NO: 1851875 - DNA, 15 bp, Homo sapiens
ccctgtctctgaata

SEQ ID NO: 1851876 - DNA, 15 bp, Homo sapiens
cctgtctctgaatac

SEQ ID NO: 1851877 - DNA, 15 bp, Homo sapiens
ctgtctctgaataca

SEQ ID NO: 1851878 - DNA, 15 bp, Homo sapiens
tgtctctgaatacat

SEQ ID NO: 1851879 - DNA, 15 bp, Homo sapiens
gtctctgaatacatc

SEQ ID NO: 1851880 - DNA, 15 bp, Homo sapiens
tctctgaatacatcc

SEQ ID NO: 1851881 - DNA, 15 bp, Homo sapiens
ctctgaatacatccc

SEQ ID NO: 1851882 - DNA, 15 bp, Homo sapiens
tctgaatacatccca

SEQ ID NO: 1851883 - DNA, 15 bp, Homo sapiens
ctgaatacatcccat

SEQ ID NO: 1851884 - DNA, 15 bp, Homo sapiens
tgaatacatcccatt

SEQ ID NO: 1851885 - DNA, 15 bp, Homo sapiens
gaatacatcccattc

SEQ ID NO: 1851886 - DNA, 15 bp, Homo sapiens
aatacatcccattct

SEQ ID NO: 1851887 - DNA, 15 bp, Homo sapiens
atacatcccattctg

SEQ ID NO: 1851888 - DNA, 15 bp, Homo sapiens
tacatcccattctga

SEQ ID NO: 1851889 - DNA, 15 bp, Homo sapiens
acatcccattctgag

SEQ ID NO: 1851890 - DNA, 15 bp, Homo sapiens
catcccattctgagg

SEQ ID NO: 1851891 - DNA, 15 bp, Homo sapiens
atcccattctgaggt

SEQ ID NO: 1851892 - DNA, 15 bp, Homo sapiens
tcccattctgaggta

SEQ ID NO: 1851893 - DNA, 15 bp, Homo sapiens
cccattctgaggtac

SEQ ID NO: 1851894 - DNA, 15 bp, Homo sapiens
ccattctgaggtact

SEQ ID NO: 1851895 - DNA, 15 bp, Homo sapiens
cattctgaggtactg

SEQ ID NO: 1851896 - DNA, 15 bp, Homo sapiens
attctgaggtactgg

SEQ ID NO: 1851897 - DNA, 15 bp, Homo sapiens
ttctgaggtactggg

SEQ ID NO: 1851898 - DNA, 15 bp, Homo sapiens
tctgaggtactgggc

SEQ ID NO: 1851899 - DNA, 15 bp, Homo sapiens
ctgaggtactgggca

SEQ ID NO: 1851900 - DNA, 15 bp, Homo sapiens
tgaggtactgggcat

SEQ ID NO: 1851901 - DNA, 15 bp, Homo sapiens
gaggtactgggcatt

SEQ ID NO: 1851902 - DNA, 15 bp, Homo sapiens
aggtactgggcatta

SEQ ID NO: 1851903 - DNA, 15 bp, Homo sapiens
ggtactgggcattag

SEQ ID NO: 1851904 - DNA, 15 bp, Homo sapiens
gtactgggcattagg

SEQ ID NO: 1851905 - DNA, 15 bp, Homo sapiens
tactgggcattagga

SEQ ID NO: 1851906 - DNA, 15 bp, Homo sapiens
actgggcattaggac

SEQ ID NO: 1851907 - DNA, 15 bp, Homo sapiens
ctgggcattaggact

SEQ ID NO: 1851908 - DNA, 15 bp, Homo sapiens
tgggcattaggactt

SEQ ID NO: 1851909 - DNA, 15 bp, Homo sapiens
gggcattaggacttc

SEQ ID NO: 1851910 - DNA, 15 bp, Homo sapiens
ggcattaggacttca

SEQ ID NO: 1851911 - DNA, 15 bp, Homo sapiens
gcattaggacttcaa

SEQ ID NO: 1851912 - DNA, 15 bp, Homo sapiens
cattaggacttcaat

SEQ ID NO: 1851913 - DNA, 15 bp, Homo sapiens
attaggacttcaatg

SEQ ID NO: 1851914 - DNA, 15 bp, Homo sapiens
ttaggacttcaatgt

SEQ ID NO: 1851915 - DNA, 15 bp, Homo sapiens
taggacttcaatgtg

SEQ ID NO: 1851916 - DNA, 15 bp, Homo sapiens
aggacttcaatgtga

SEQ ID NO: 1851917 - DNA, 15 bp, Homo sapiens
ggacttcaatgtgaa

SEQ ID NO: 1851918 - DNA, 15 bp, Homo sapiens
gacttcaatgtgaat

SEQ ID NO: 1851919 - DNA, 15 bp, Homo sapiens
acttcaatgtgaatt

SEQ ID NO: 1851920 - DNA, 15 bp, Homo sapiens
cttcaatgtgaattt

SEQ ID NO: 1851921 - DNA, 15 bp, Homo sapiens
ttcaatgtgaatttt

SEQ ID NO: 1851922 - DNA, 15 bp, Homo sapiens
tcaatgtgaattttt

SEQ ID NO: 1851923 - DNA, 15 bp, Homo sapiens
caatgtgaatttttg

SEQ ID NO: 1851924 - DNA, 15 bp, Homo sapiens
aatgtgaatttttgg

SEQ ID NO: 1851925 - DNA, 15 bp, Homo sapiens
atgtgaatttttggt

SEQ ID NO: 1851926 - DNA, 15 bp, Homo sapiens
tgtgaatttttggtg

SEQ ID NO: 1851927 - DNA, 15 bp, Homo sapiens
gtgaatttttggtgg

SEQ ID NO: 1851928 - DNA, 15 bp, Homo sapiens
tgaatttttggtggg

SEQ ID NO: 1851929 - DNA, 15 bp, Homo sapiens
gaatttttggtgggg

SEQ ID NO: 1851930 - DNA, 15 bp, Homo sapiens
aatttttggtgggga

SEQ ID NO: 1851931 - DNA, 15 bp, Homo sapiens
atttttggtggggaa

SEQ ID NO: 1851932 - DNA, 15 bp, Homo sapiens
tttttggtggggaac

SEQ ID NO: 1851933 - DNA, 15 bp, Homo sapiens
ttttggtggggaaca

SEQ ID NO: 1851934 - DNA, 15 bp, Homo sapiens
tttggtggggaacat

SEQ ID NO: 1851935 - DNA, 15 bp, Homo sapiens
ttggtggggaacata

SEQ ID NO: 1851936 - DNA, 15 bp, Homo sapiens
tggtggggaacataa

SEQ ID NO: 1851937 - DNA, 15 bp, Homo sapiens
ggtggggaacataaa

SEQ ID NO: 1851938 - DNA, 15 bp, Homo sapiens
gtggggaacataaat

SEQ ID NO: 1851939 - DNA, 15 bp, Homo sapiens
tggggaacataaatc

SEQ ID NO: 1851940 - DNA, 15 bp, Homo sapiens
ggggaacataaatca

SEQ ID NO: 1851941 - DNA, 15 bp, Homo sapiens
gggaacataaatcag

SEQ ID NO: 1851942 - DNA, 15 bp, Homo sapiens
ggaacataaatcagc

SEQ ID NO: 1851943 - DNA, 15 bp, Homo sapiens
gaacataaatcagcc

SEQ ID NO: 1851944 - DNA, 15 bp, Homo sapiens
aacataaatcagccc

SEQ ID NO: 1851945 - DNA, 15 bp, Homo sapiens
acataaatcagccct

SEQ ID NO: 1851946 - DNA, 15 bp, Homo sapiens
cataaatcagccctt

SEQ ID NO: 1851947 - DNA, 15 bp, Homo sapiens
ataaatcagccctta

SEQ ID NO: 1851948 - DNA, 15 bp, Homo sapiens
taaatcagcccttaa

SEQ ID NO: 1851949 - DNA, 15 bp, Homo sapiens
aaatcagcccttaat

SEQ ID NO: 1851950 - DNA, 15 bp, Homo sapiens
aatcagcccttaata

SEQ ID NO: 1851951 - DNA, 15 bp, Homo sapiens
atcagcccttaatag

SEQ ID NO: 1851952 - DNA, 15 bp, Homo sapiens
tcagcccttaatagg

SEQ ID NO: 1851953 - DNA, 15 bp, Homo sapiens
cagcccttaataggc

SEQ ID NO: 1851954 - DNA, 15 bp, Homo sapiens
agcccttaataggca

SEQ ID NO: 1851955 - DNA, 15 bp, Homo sapiens
gcccttaataggcac

SEQ ID NO: 1851956 - DNA, 15 bp, Homo sapiens
cccttaataggcaca

SEQ ID NO: 1851957 - DNA, 15 bp, Homo sapiens
ccttaataggcacag

SEQ ID NO: 1851958 - DNA, 15 bp, Homo sapiens
cttaataggcacaga

SEQ ID NO: 1851959 - DNA, 15 bp, Homo sapiens
ttaataggcacagag

SEQ ID NO: 1851960 - DNA, 15 bp, Homo sapiens
taataggcacagagg

SEQ ID NO: 1851961 - DNA, 15 bp, Homo sapiens
aataggcacagaggg

SEQ ID NO: 1851962 - DNA, 15 bp, Homo sapiens
ataggcacagagggg

SEQ ID NO: 1851963 - DNA, 15 bp, Homo sapiens
taggcacagaggggc

SEQ ID NO: 1851964 - DNA, 15 bp, Homo sapiens
aggcacagaggggct

SEQ ID NO: 1851965 - DNA, 15 bp, Homo sapiens
ggcacagaggggcta

SEQ ID NO: 1851966 - DNA, 15 bp, Homo sapiens
gcacagaggggctaa

SEQ ID NO: 1851967 - DNA, 15 bp, Homo sapiens
cacagaggggctaag

SEQ ID NO: 1851968 - DNA, 15 bp, Homo sapiens
acagaggggctaagt

SEQ ID NO: 1851969 - DNA, 15 bp, Homo sapiens
cagaggggctaagta

SEQ ID NO: 1851970 - DNA, 15 bp, Homo sapiens
agaggggctaagtaa

SEQ ID NO: 1851971 - DNA, 15 bp, Homo sapiens
gaggggctaagtaac

SEQ ID NO: 1851972 - DNA, 15 bp, Homo sapiens
aggggctaagtaact

SEQ ID NO: 1851973 - DNA, 15 bp, Homo sapiens
ggggctaagtaactt

SEQ ID NO: 1851974 - DNA, 15 bp, Homo sapiens
gggctaagtaacttg

SEQ ID NO: 1851975 - DNA, 15 bp, Homo sapiens
ggctaagtaacttgt

SEQ ID NO: 1851976 - DNA, 15 bp, Homo sapiens
gctaagtaacttgtg

SEQ ID NO: 1851977 - DNA, 15 bp, Homo sapiens
ctaagtaacttgtgt

SEQ ID NO: 1851978 - DNA, 15 bp, Homo sapiens
taagtaacttgtgtg

SEQ ID NO: 1851979 - DNA, 15 bp, Homo sapiens
aagtaacttgtgtgt

SEQ ID NO: 1851980 - DNA, 15 bp, Homo sapiens
agtaacttgtgtgta

SEQ ID NO: 1851981 - DNA, 15 bp, Homo sapiens
gtaacttgtgtgtag

SEQ ID NO: 1851982 - DNA, 15 bp, Homo sapiens
taacttgtgtgtaga

SEQ ID NO: 1851983 - DNA, 15 bp, Homo sapiens
aacttgtgtgtagac

SEQ ID NO: 1851984 - DNA, 15 bp, Homo sapiens
acttgtgtgtagaca

SEQ ID NO: 1851985 - DNA, 15 bp, Homo sapiens
cttgtgtgtagacac

SEQ ID NO: 1851986 - DNA, 15 bp, Homo sapiens
ttgtgtgtagacaca

SEQ ID NO: 1851987 - DNA, 15 bp, Homo sapiens
tgtgtgtagacacag

SEQ ID NO: 1851988 - DNA, 15 bp, Homo sapiens
gtgtgtagacacaga

SEQ ID NO: 1851989 - DNA, 15 bp, Homo sapiens
tgtgtagacacagag

SEQ ID NO: 1851990 - DNA, 15 bp, Homo sapiens
gtgtagacacagagc

SEQ ID NO: 1851991 - DNA, 15 bp, Homo sapiens
tgtagacacagagct

SEQ ID NO: 1851992 - DNA, 15 bp, Homo sapiens
gtagacacagagcta

SEQ ID NO: 1851993 - DNA, 15 bp, Homo sapiens
tagacacagagctat

SEQ ID NO: 1851994 - DNA, 15 bp, Homo sapiens
agacacagagctata

SEQ ID NO: 1851995 - DNA, 15 bp, Homo sapiens
gacacagagctatag

SEQ ID NO: 1851996 - DNA, 15 bp, Homo sapiens
acacagagctatagg

SEQ ID NO: 1851997 - DNA, 15 bp, Homo sapiens
cacagagctatagga

SEQ ID NO: 1851998 - DNA, 15 bp, Homo sapiens
acagagctataggag

SEQ ID NO: 1851999 - DNA, 15 bp, Homo sapiens
cagagctataggaga

SEQ ID NO: 1852000 - DNA, 15 bp, Homo sapiens
agagctataggagaa

SEQ ID NO: 1852001 - DNA, 15 bp, Homo sapiens
gagctataggagaag

SEQ ID NO: 1852002 - DNA, 15 bp, Homo sapiens
agctataggagaaga

SEQ ID NO: 1852003 - DNA, 15 bp, Homo sapiens
gctataggagaagat

SEQ ID NO: 1852004 - DNA, 15 bp, Homo sapiens
ctataggagaagatg

SEQ ID NO: 1852005 - DNA, 15 bp, Homo sapiens
tataggagaagatgg

SEQ ID NO: 1852006 - DNA, 15 bp, Homo sapiens
ataggagaagatggc

SEQ ID NO: 1852007 - DNA, 15 bp, Homo sapiens
taggagaagatggca

SEQ ID NO: 1852008 - DNA, 15 bp, Homo sapiens
aggagaagatggcag

SEQ ID NO: 1852009 - DNA, 15 bp, Homo sapiens
ggagaagatggcagg

SEQ ID NO: 1852010 - DNA, 15 bp, Homo sapiens
gagaagatggcaggc

SEQ ID NO: 1852011 - DNA, 15 bp, Homo sapiens
agaagatggcaggca

SEQ ID NO: 1852012 - DNA, 15 bp, Homo sapiens
gaagatggcaggcat

SEQ ID NO: 1852013 - DNA, 15 bp, Homo sapiens
aagatggcaggcatt

SEQ ID NO: 1852014 - DNA, 15 bp, Homo sapiens
agatggcaggcattc

SEQ ID NO: 1852015 - DNA, 15 bp, Homo sapiens
gatggcaggcattct

SEQ ID NO: 1852016 - DNA, 15 bp, Homo sapiens
atggcaggcattctg

SEQ ID NO: 1852017 - DNA, 15 bp, Homo sapiens
tggcaggcattctga

SEQ ID NO: 1852018 - DNA, 15 bp, Homo sapiens
ggcaggcattctgac

SEQ ID NO: 1852019 - DNA, 15 bp, Homo sapiens
gcaggcattctgact

SEQ ID NO: 1852020 - DNA, 15 bp, Homo sapiens
caggcattctgactc

SEQ ID NO: 1852021 - DNA, 15 bp, Homo sapiens
aggcattctgactcc

SEQ ID NO: 1852022 - DNA, 15 bp, Homo sapiens
ggcattctgactcca

SEQ ID NO: 1852023 - DNA, 15 bp, Homo sapiens
gcattctgactccag

SEQ ID NO: 1852024 - DNA, 15 bp, Homo sapiens
cattctgactccaga

SEQ ID NO: 1852025 - DNA, 15 bp, Homo sapiens
attctgactccagaa

SEQ ID NO: 1852026 - DNA, 15 bp, Homo sapiens
ttctgactccagaat

SEQ ID NO: 1852027 - DNA, 15 bp, Homo sapiens
tctgactccagaatc

SEQ ID NO: 1852028 - DNA, 15 bp, Homo sapiens
ctgactccagaatcc

SEQ ID NO: 1852029 - DNA, 15 bp, Homo sapiens
tgactccagaatccc

SEQ ID NO: 1852030 - DNA, 15 bp, Homo sapiens
gactccagaatcccc

SEQ ID NO: 1852031 - DNA, 15 bp, Homo sapiens
actccagaatcccct

SEQ ID NO: 1852032 - DNA, 15 bp, Homo sapiens
ctccagaatcccctg

SEQ ID NO: 1852033 - DNA, 15 bp, Homo sapiens
tccagaatcccctgg

SEQ ID NO: 1852034 - DNA, 15 bp, Homo sapiens
ccagaatcccctggt

SEQ ID NO: 1852035 - DNA, 15 bp, Homo sapiens
cagaatcccctggtt

SEQ ID NO: 1852036 - DNA, 15 bp, Homo sapiens
agaatcccctggttc

SEQ ID NO: 1852037 - DNA, 15 bp, Homo sapiens
gaatcccctggttct

SEQ ID NO: 1852038 - DNA, 15 bp, Homo sapiens
aatcccctggttctg

SEQ ID NO: 1852039 - DNA, 15 bp, Homo sapiens
atcccctggttctga

SEQ ID NO: 1852040 - DNA, 15 bp, Homo sapiens
tcccctggttctgac

SEQ ID NO: 1852041 - DNA, 15 bp, Homo sapiens
cccctggttctgaca

SEQ ID NO: 1852042 - DNA, 15 bp, Homo sapiens
ccctggttctgacag

SEQ ID NO: 1852043 - DNA, 15 bp, Homo sapiens
cctggttctgacaga

SEQ ID NO: 1852044 - DNA, 15 bp, Homo sapiens
ctggttctgacagaa

SEQ ID NO: 1852045 - DNA, 15 bp, Homo sapiens
tggttctgacagaat

SEQ ID NO: 1852046 - DNA, 15 bp, Homo sapiens
ggttctgacagaatc

SEQ ID NO: 1852047 - DNA, 15 bp, Homo sapiens
gttctgacagaatcc

SEQ ID NO: 1852048 - DNA, 15 bp, Homo sapiens
ttctgacagaatccc

SEQ ID NO: 1852049 - DNA, 15 bp, Homo sapiens
tctgacagaatcccc

SEQ ID NO: 1852050 - DNA, 15 bp, Homo sapiens
ctgacagaatcccct

SEQ ID NO: 1852051 - DNA, 15 bp, Homo sapiens
tgacagaatcccctg

SEQ ID NO: 1852052 - DNA, 15 bp, Homo sapiens
gacagaatcccctga

SEQ ID NO: 1852053 - DNA, 15 bp, Homo sapiens
acagaatcccctgac

SEQ ID NO: 1852054 - DNA, 15 bp, Homo sapiens
cagaatcccctgaca

SEQ ID NO: 1852055 - DNA, 15 bp, Homo sapiens
agaatcccctgacag

SEQ ID NO: 1852056 - DNA, 15 bp, Homo sapiens
gaatcccctgacagt

SEQ ID NO: 1852057 - DNA, 15 bp, Homo sapiens
aatcccctgacagtt

SEQ ID NO: 1852058 - DNA, 15 bp, Homo sapiens
atcccctgacagttc

SEQ ID NO: 1852059 - DNA, 15 bp, Homo sapiens
tcccctgacagttct

SEQ ID NO: 1852060 - DNA, 15 bp, Homo sapiens
cccctgacagttctg

SEQ ID NO: 1852061 - DNA, 15 bp, Homo sapiens
ccctgacagttctga

SEQ ID NO: 1852062 - DNA, 15 bp, Homo sapiens
cctgacagttctgac

SEQ ID NO: 1852063 - DNA, 15 bp, Homo sapiens
ctgacagttctgaca

SEQ ID NO: 1852064 - DNA, 15 bp, Homo sapiens
tgacagttctgacag

SEQ ID NO: 1852065 - DNA, 15 bp, Homo sapiens
gacagttctgacagt

SEQ ID NO: 1852066 - DNA, 15 bp, Homo sapiens
acagttctgacagtt

SEQ ID NO: 1852067 - DNA, 15 bp, Homo sapiens
cagttctgacagttc

SEQ ID NO: 1852068 - DNA, 15 bp, Homo sapiens
agttctgacagttcg

SEQ ID NO: 1852069 - DNA, 15 bp, Homo sapiens
gttctgacagttcga

SEQ ID NO: 1852070 - DNA, 15 bp, Homo sapiens
ttctgacagttcgag

SEQ ID NO: 1852071 - DNA, 15 bp, Homo sapiens
tctgacagttcgaga

SEQ ID NO: 1852072 - DNA, 15 bp, Homo sapiens
ctgacagttcgagac

SEQ ID NO: 1852073 - DNA, 15 bp, Homo sapiens
tgacagttcgagacc

SEQ ID NO: 1852074 - DNA, 15 bp, Homo sapiens
gacagttcgagacca

SEQ ID NO: 1852075 - DNA, 15 bp, Homo sapiens
acagttcgagaccag

SEQ ID NO: 1852076 - DNA, 15 bp, Homo sapiens
cagttcgagaccagc

SEQ ID NO: 1852077 - DNA, 15 bp, Homo sapiens
gttcgagaccagccc

SEQ ID NO: 1852078 - DNA, 15 bp, Homo sapiens
ttcgagaccagcccg

SEQ ID NO: 1852079 - DNA, 15 bp, Homo sapiens
tcgagaccagcccgg

SEQ ID NO: 1852080 - DNA, 15 bp, Homo sapiens
cgagaccagcccggc

SEQ ID NO: 1852081 - DNA, 15 bp, Homo sapiens
gagaccagcccggcc

SEQ ID NO: 1852082 - DNA, 15 bp, Homo sapiens
agaccagcccggccc

SEQ ID NO: 1852083 - DNA, 15 bp, Homo sapiens
gaccagcccggccca

SEQ ID NO: 1852084 - DNA, 15 bp, Homo sapiens
ccagcccggcccaca

SEQ ID NO: 1852085 - DNA, 15 bp, Homo sapiens
cagcccggcccacat

SEQ ID NO: 1852086 - DNA, 15 bp, Homo sapiens
agcccggcccacatg

SEQ ID NO: 1852087 - DNA, 15 bp, Homo sapiens
gcccggcccacatgg

SEQ ID NO: 1852088 - DNA, 15 bp, Homo sapiens
cccggcccacatggt

SEQ ID NO: 1852089 - DNA, 15 bp, Homo sapiens
ccggcccacatggtg

SEQ ID NO: 1852090 - DNA, 15 bp, Homo sapiens
cggcccacatggtga

SEQ ID NO: 1852091 - DNA, 15 bp, Homo sapiens
ggcccacatggtgaa

SEQ ID NO: 1852092 - DNA, 15 bp, Homo sapiens
gcccacatggtgaaa

SEQ ID NO: 1852093 - DNA, 15 bp, Homo sapiens
cccacatggtgaaac

SEQ ID NO: 1852094 - DNA, 15 bp, Homo sapiens
cacatggtgaaaccc

SEQ ID NO: 1852095 - DNA, 15 bp, Homo sapiens
aaccctgtctctacc

SEQ ID NO: 1852096 - DNA, 15 bp, Homo sapiens
accctgtctctacca

SEQ ID NO: 1852097 - DNA, 15 bp, Homo sapiens
ccctgtctctaccaa

SEQ ID NO: 1852098 - DNA, 15 bp, Homo sapiens
cctgtctctaccaaa

SEQ ID NO: 1852099 - DNA, 15 bp, Homo sapiens
ctgtctctaccaaaa

SEQ ID NO: 1852100 - DNA, 15 bp, Homo sapiens
tagccaggcatggtt

SEQ ID NO: 1852101 - DNA, 15 bp, Homo sapiens
agccaggcatggttg

SEQ ID NO: 1852102 - DNA, 15 bp, Homo sapiens
gccaggcatggttgt

SEQ ID NO: 1852103 - DNA, 15 bp, Homo sapiens
ccaggcatggttgtg

SEQ ID NO: 1852104 - DNA, 15 bp, Homo sapiens
caggcatggttgtgc

SEQ ID NO: 1852105 - DNA, 15 bp, Homo sapiens
aggcatggttgtgca

SEQ ID NO: 1852106 - DNA, 15 bp, Homo sapiens
ggcatggttgtgcac

SEQ ID NO: 1852107 - DNA, 15 bp, Homo sapiens
gcatggttgtgcaca

SEQ ID NO: 1852108 - DNA, 15 bp, Homo sapiens
catggttgtgcacat

SEQ ID NO: 1852109 - DNA, 15 bp, Homo sapiens
atggttgtgcacatc

SEQ ID NO: 1852110 - DNA, 15 bp, Homo sapiens
tggttgtgcacatct

SEQ ID NO: 1852111 - DNA, 15 bp, Homo sapiens
ggttgtgcacatctg

SEQ ID NO: 1852112 - DNA, 15 bp, Homo sapiens
gttgtgcacatctgt

SEQ ID NO: 1852113 - DNA, 15 bp, Homo sapiens
ttgtgcacatctgta

SEQ ID NO: 1852114 - DNA, 15 bp, Homo sapiens
tgtgcacatctgtag

SEQ ID NO: 1852115 - DNA, 15 bp, Homo sapiens
gtgcacatctgtagt

SEQ ID NO: 1852116 - DNA, 15 bp, Homo sapiens
tgcacatctgtagtc

SEQ ID NO: 1852117 - DNA, 15 bp, Homo sapiens
gcacatctgtagtcc

SEQ ID NO: 1852118 - DNA, 15 bp, Homo sapiens
cacatctgtagtccc

SEQ ID NO: 1852119 - DNA, 15 bp, Homo sapiens
acatctgtagtccca

SEQ ID NO: 1852120 - DNA, 15 bp, Homo sapiens
catctgtagtcccag

SEQ ID NO: 1852121 - DNA, 15 bp, Homo sapiens
gggaggctgaggcac

SEQ ID NO: 1852122 - DNA, 15 bp, Homo sapiens
gcacaagaatcactg

SEQ ID NO: 1852123 - DNA, 15 bp, Homo sapiens
cacaagaatcactgg

SEQ ID NO: 1852124 - DNA, 15 bp, Homo sapiens
acaagaatcactgga

SEQ ID NO: 1852125 - DNA, 15 bp, Homo sapiens
caagaatcactggaa

SEQ ID NO: 1852126 - DNA, 15 bp, Homo sapiens
aagaatcactggaac

SEQ ID NO: 1852127 - DNA, 15 bp, Homo sapiens
agaatcactggaacc

SEQ ID NO: 1852128 - DNA, 15 bp, Homo sapiens
gaatcactggaaccc

SEQ ID NO: 1852129 - DNA, 15 bp, Homo sapiens
aatcactggaacccg

SEQ ID NO: 1852130 - DNA, 15 bp, Homo sapiens
atcactggaacccgg

SEQ ID NO: 1852131 - DNA, 15 bp, Homo sapiens
tcactggaacccggg

SEQ ID NO: 1852132 - DNA, 15 bp, Homo sapiens
cactggaacccggga

SEQ ID NO: 1852133 - DNA, 15 bp, Homo sapiens
actggaacccgggag

SEQ ID NO: 1852134 - DNA, 15 bp, Homo sapiens
tggaacccgggaggc

SEQ ID NO: 1852135 - DNA, 15 bp, Homo sapiens
ggaacccgggaggcg

SEQ ID NO: 1852136 - DNA, 15 bp, Homo sapiens
taccagctaggcaac

SEQ ID NO: 1852137 - DNA, 15 bp, Homo sapiens
accagctaggcaacc

SEQ ID NO: 1852138 - DNA, 15 bp, Homo sapiens
ccagctaggcaaccc

SEQ ID NO: 1852139 - DNA, 15 bp, Homo sapiens
cagctaggcaaccca

SEQ ID NO: 1852140 - DNA, 15 bp, Homo sapiens
agctaggcaacccat

SEQ ID NO: 1852141 - DNA, 15 bp, Homo sapiens
gctaggcaacccata

SEQ ID NO: 1852142 - DNA, 15 bp, Homo sapiens
ctaggcaacccatat

SEQ ID NO: 1852143 - DNA, 15 bp, Homo sapiens
taggcaacccatatt

SEQ ID NO: 1852144 - DNA, 15 bp, Homo sapiens
aggcaacccatattt

SEQ ID NO: 1852145 - DNA, 15 bp, Homo sapiens
ggcaacccatatttg

SEQ ID NO: 1852146 - DNA, 15 bp, Homo sapiens
gcaacccatatttgc

SEQ ID NO: 1852147 - DNA, 15 bp, Homo sapiens
caacccatatttgct

SEQ ID NO: 1852148 - DNA, 15 bp, Homo sapiens
aacccatatttgctg

SEQ ID NO: 1852149 - DNA, 15 bp, Homo sapiens
acccatatttgctgg

SEQ ID NO: 1852150 - DNA, 15 bp, Homo sapiens
cccatatttgctggg

SEQ ID NO: 1852151 - DNA, 15 bp, Homo sapiens
ccatatttgctgggc

SEQ ID NO: 1852152 - DNA, 15 bp, Homo sapiens
catatttgctgggca

SEQ ID NO: 1852153 - DNA, 15 bp, Homo sapiens
atatttgctgggcat

SEQ ID NO: 1852154 - DNA, 15 bp, Homo sapiens
tatttgctgggcatc

SEQ ID NO: 1852155 - DNA, 15 bp, Homo sapiens
atttgctgggcatct

SEQ ID NO: 1852156 - DNA, 15 bp, Homo sapiens
tttgctgggcatcta

SEQ ID NO: 1852157 - DNA, 15 bp, Homo sapiens
ttgctgggcatctaa

SEQ ID NO: 1852158 - DNA, 15 bp, Homo sapiens
tgctgggcatctaat

SEQ ID NO: 1852159 - DNA, 15 bp, Homo sapiens
gctgggcatctaata

SEQ ID NO: 1852160 - DNA, 15 bp, Homo sapiens
ctgggcatctaatag

SEQ ID NO: 1852161 - DNA, 15 bp, Homo sapiens
tgggcatctaatagc

SEQ ID NO: 1852162 - DNA, 15 bp, Homo sapiens
gggcatctaatagcc

SEQ ID NO: 1852163 - DNA, 15 bp, Homo sapiens
ggcatctaatagccc

SEQ ID NO: 1852164 - DNA, 15 bp, Homo sapiens
gcatctaatagcccc

SEQ ID NO: 1852165 - DNA, 15 bp, Homo sapiens
catctaatagcccct

SEQ ID NO: 1852166 - DNA, 15 bp, Homo sapiens
atctaatagcccctc

SEQ ID NO: 1852167 - DNA, 15 bp, Homo sapiens
tctaatagcccctca

SEQ ID NO: 1852168 - DNA, 15 bp, Homo sapiens
ctaatagcccctcag

SEQ ID NO: 1852169 - DNA, 15 bp, Homo sapiens
taatagcccctcaga

SEQ ID NO: 1852170 - DNA, 15 bp, Homo sapiens
aatagcccctcagat

SEQ ID NO: 1852171 - DNA, 15 bp, Homo sapiens
atagcccctcagatg

SEQ ID NO: 1852172 - DNA, 15 bp, Homo sapiens
tagcccctcagatgg

SEQ ID NO: 1852173 - DNA, 15 bp, Homo sapiens
agcccctcagatggt

SEQ ID NO: 1852174 - DNA, 15 bp, Homo sapiens
gcccctcagatggtg

SEQ ID NO: 1852175 - DNA, 15 bp, Homo sapiens
cccctcagatggtga

SEQ ID NO: 1852176 - DNA, 15 bp, Homo sapiens
ccctcagatggtgaa

SEQ ID NO: 1852177 - DNA, 15 bp, Homo sapiens
cctcagatggtgaaa

SEQ ID NO: 1852178 - DNA, 15 bp, Homo sapiens
ctcagatggtgaaag

SEQ ID NO: 1852179 - DNA, 15 bp, Homo sapiens
tcagatggtgaaagg

SEQ ID NO: 1852180 - DNA, 15 bp, Homo sapiens
cagatggtgaaaggc

SEQ ID NO: 1852181 - DNA, 15 bp, Homo sapiens
agatggtgaaaggct

SEQ ID NO: 1852182 - DNA, 15 bp, Homo sapiens
gatggtgaaaggctg

SEQ ID NO: 1852183 - DNA, 15 bp, Homo sapiens
atggtgaaaggctgg

SEQ ID NO: 1852184 - DNA, 15 bp, Homo sapiens
tggtgaaaggctggt

SEQ ID NO: 1852185 - DNA, 15 bp, Homo sapiens
ggtgaaaggctggtc

SEQ ID NO: 1852186 - DNA, 15 bp, Homo sapiens
gtgaaaggctggtct

SEQ ID NO: 1852187 - DNA, 15 bp, Homo sapiens
tgaaaggctggtctt

SEQ ID NO: 1852188 - DNA, 15 bp, Homo sapiens
gaaaggctggtcttt

SEQ ID NO: 1852189 - DNA, 15 bp, Homo sapiens
aaaggctggtctttg

SEQ ID NO: 1852190 - DNA, 15 bp, Homo sapiens
aaggctggtctttgg

SEQ ID NO: 1852191 - DNA, 15 bp, Homo sapiens
aggctggtctttggc

SEQ ID NO: 1852192 - DNA, 15 bp, Homo sapiens
ggctggtctttggcc

SEQ ID NO: 1852193 - DNA, 15 bp, Homo sapiens
gctggtctttggcct

SEQ ID NO: 1852194 - DNA, 15 bp, Homo sapiens
ctggtctttggcctg

SEQ ID NO: 1852195 - DNA, 15 bp, Homo sapiens
tggtctttggcctgg

SEQ ID NO: 1852196 - DNA, 15 bp, Homo sapiens
ggtctttggcctgga

SEQ ID NO: 1852197 - DNA, 15 bp, Homo sapiens
gtctttggcctggat

SEQ ID NO: 1852198 - DNA, 15 bp, Homo sapiens
tctttggcctggatg

SEQ ID NO: 1852199 - DNA, 15 bp, Homo sapiens
ctttggcctggatgg

SEQ ID NO: 1852200 - DNA, 15 bp, Homo sapiens
tttggcctggatggc

SEQ ID NO: 1852201 - DNA, 15 bp, Homo sapiens
ttggcctggatggct

SEQ ID NO: 1852202 - DNA, 15 bp, Homo sapiens
tggcctggatggctt

SEQ ID NO: 1852203 - DNA, 15 bp, Homo sapiens
ggcctggatggctta

SEQ ID NO: 1852204 - DNA, 15 bp, Homo sapiens
gcctggatggcttat

SEQ ID NO: 1852205 - DNA, 15 bp, Homo sapiens
cctggatggcttatc

SEQ ID NO: 1852206 - DNA, 15 bp, Homo sapiens
ctggatggcttatct

SEQ ID NO: 1852207 - DNA, 15 bp, Homo sapiens
tggatggcttatctg

SEQ ID NO: 1852208 - DNA, 15 bp, Homo sapiens
ggatggcttatctgt

SEQ ID NO: 1852209 - DNA, 15 bp, Homo sapiens
gatggcttatctgtt

SEQ ID NO: 1852210 - DNA, 15 bp, Homo sapiens
atggcttatctgttt

SEQ ID NO: 1852211 - DNA, 15 bp, Homo sapiens
tggcttatctgtttc

SEQ ID NO: 1852212 - DNA, 15 bp, Homo sapiens
ggcttatctgtttcc

SEQ ID NO: 1852213 - DNA, 15 bp, Homo sapiens
gcttatctgtttcct

SEQ ID NO: 1852214 - DNA, 15 bp, Homo sapiens
cttatctgtttcctc

SEQ ID NO: 1852215 - DNA, 15 bp, Homo sapiens
ttatctgtttcctca

SEQ ID NO: 1852216 - DNA, 15 bp, Homo sapiens
tatctgtttcctcag

SEQ ID NO: 1852217 - DNA, 15 bp, Homo sapiens
atctgtttcctcaga

SEQ ID NO: 1852218 - DNA, 15 bp, Homo sapiens
tctgtttcctcagac

SEQ ID NO: 1852219 - DNA, 15 bp, Homo sapiens
ctgtttcctcagaca

SEQ ID NO: 1852220 - DNA, 15 bp, Homo sapiens
tgtttcctcagacag

SEQ ID NO: 1852221 - DNA, 15 bp, Homo sapiens
gtttcctcagacagc

SEQ ID NO: 1852222 - DNA, 15 bp, Homo sapiens
tttcctcagacagct

SEQ ID NO: 1852223 - DNA, 15 bp, Homo sapiens
ttcctcagacagctc

SEQ ID NO: 1852224 - DNA, 15 bp, Homo sapiens
tcctcagacagctcc

SEQ ID NO: 1852225 - DNA, 15 bp, Homo sapiens
cctcagacagctcca

SEQ ID NO: 1852226 - DNA, 15 bp, Homo sapiens
ctcagacagctccag

SEQ ID NO: 1852227 - DNA, 15 bp, Homo sapiens
tcagacagctccaga

SEQ ID NO: 1852228 - DNA, 15 bp, Homo sapiens
cagacagctccagac

SEQ ID NO: 1852229 - DNA, 15 bp, Homo sapiens
agacagctccagact

SEQ ID NO: 1852230 - DNA, 15 bp, Homo sapiens
gacagctccagactg

SEQ ID NO: 1852231 - DNA, 15 bp, Homo sapiens
acagctccagactga

SEQ ID NO: 1852232 - DNA, 15 bp, Homo sapiens
cagctccagactgaa

SEQ ID NO: 1852233 - DNA, 15 bp, Homo sapiens
agctccagactgaag

SEQ ID NO: 1852234 - DNA, 15 bp, Homo sapiens
gctccagactgaagg

SEQ ID NO: 1852235 - DNA, 15 bp, Homo sapiens
ctccagactgaaggg

SEQ ID NO: 1852236 - DNA, 15 bp, Homo sapiens
tccagactgaaggga

SEQ ID NO: 1852237 - DNA, 15 bp, Homo sapiens
ccagactgaagggac

SEQ ID NO: 1852238 - DNA, 15 bp, Homo sapiens
cagactgaagggact

SEQ ID NO: 1852239 - DNA, 15 bp, Homo sapiens
agactgaagggactt

SEQ ID NO: 1852240 - DNA, 15 bp, Homo sapiens
gactgaagggacttc

SEQ ID NO: 1852241 - DNA, 15 bp, Homo sapiens
actgaagggacttca

SEQ ID NO: 1852242 - DNA, 15 bp, Homo sapiens
ctgaagggacttcat

SEQ ID NO: 1852243 - DNA, 15 bp, Homo sapiens
tgaagggacttcata

SEQ ID NO: 1852244 - DNA, 15 bp, Homo sapiens
gaagggacttcatag

SEQ ID NO: 1852245 - DNA, 15 bp, Homo sapiens
aagggacttcatagg

SEQ ID NO: 1852246 - DNA, 15 bp, Homo sapiens
agggacttcataggc

SEQ ID NO: 1852247 - DNA, 15 bp, Homo sapiens
gggacttcataggca

SEQ ID NO: 1852248 - DNA, 15 bp, Homo sapiens
ggacttcataggcag

SEQ ID NO: 1852249 - DNA, 15 bp, Homo sapiens
gacttcataggcagt

SEQ ID NO: 1852250 - DNA, 15 bp, Homo sapiens
acttcataggcagtg

SEQ ID NO: 1852251 - DNA, 15 bp, Homo sapiens
cttcataggcagtga

SEQ ID NO: 1852252 - DNA, 15 bp, Homo sapiens
ttcataggcagtgac

SEQ ID NO: 1852253 - DNA, 15 bp, Homo sapiens
tcataggcagtgact

SEQ ID NO: 1852254 - DNA, 15 bp, Homo sapiens
cataggcagtgactc

SEQ ID NO: 1852255 - DNA, 15 bp, Homo sapiens
ataggcagtgactct

SEQ ID NO: 1852256 - DNA, 15 bp, Homo sapiens
taggcagtgactctg

SEQ ID NO: 1852257 - DNA, 15 bp, Homo sapiens
aggcagtgactctgt

SEQ ID NO: 1852258 - DNA, 15 bp, Homo sapiens
ggcagtgactctgtt

SEQ ID NO: 1852259 - DNA, 15 bp, Homo sapiens
gcagtgactctgttt

SEQ ID NO: 1852260 - DNA, 15 bp, Homo sapiens
cagtgactctgttta

SEQ ID NO: 1852261 - DNA, 15 bp, Homo sapiens
agtgactctgtttag

SEQ ID NO: 1852262 - DNA, 15 bp, Homo sapiens
gtgactctgtttagt

SEQ ID NO: 1852263 - DNA, 15 bp, Homo sapiens
tgactctgtttagtt

SEQ ID NO: 1852264 - DNA, 15 bp, Homo sapiens
gactctgtttagttt

SEQ ID NO: 1852265 - DNA, 15 bp, Homo sapiens
actctgtttagtttc

SEQ ID NO: 1852266 - DNA, 15 bp, Homo sapiens
ctctgtttagtttca

SEQ ID NO: 1852267 - DNA, 15 bp, Homo sapiens
tctgtttagtttcac

SEQ ID NO: 1852268 - DNA, 15 bp, Homo sapiens
ctgtttagtttcact

SEQ ID NO: 1852269 - DNA, 15 bp, Homo sapiens
tgtttagtttcactg

SEQ ID NO: 1852270 - DNA, 15 bp, Homo sapiens
gtttagtttcactgg

SEQ ID NO: 1852271 - DNA, 15 bp, Homo sapiens
tttagtttcactggt

SEQ ID NO: 1852272 - DNA, 15 bp, Homo sapiens
ttagtttcactggtg

SEQ ID NO: 1852273 - DNA, 15 bp, Homo sapiens
tagtttcactggtgg

SEQ ID NO: 1852274 - DNA, 15 bp, Homo sapiens
agtttcactggtggt

SEQ ID NO: 1852275 - DNA, 15 bp, Homo sapiens
gtttcactggtggtc

SEQ ID NO: 1852276 - DNA, 15 bp, Homo sapiens
tttcactggtggtcc

SEQ ID NO: 1852277 - DNA, 15 bp, Homo sapiens
ttcactggtggtcca

SEQ ID NO: 1852278 - DNA, 15 bp, Homo sapiens
tcactggtggtccaa

SEQ ID NO: 1852279 - DNA, 15 bp, Homo sapiens
cactggtggtccaag

SEQ ID NO: 1852280 - DNA, 15 bp, Homo sapiens
actggtggtccaagg

SEQ ID NO: 1852281 - DNA, 15 bp, Homo sapiens
ctggtggtccaaggg

SEQ ID NO: 1852282 - DNA, 15 bp, Homo sapiens
tggtggtccaagggc

SEQ ID NO: 1852283 - DNA, 15 bp, Homo sapiens
ggtggtccaagggcc

SEQ ID NO: 1852284 - DNA, 15 bp, Homo sapiens
gtggtccaagggcct

SEQ ID NO: 1852285 - DNA, 15 bp, Homo sapiens
tggtccaagggcctc

SEQ ID NO: 1852286 - DNA, 15 bp, Homo sapiens
ggtccaagggcctcc

SEQ ID NO: 1852287 - DNA, 15 bp, Homo sapiens
gtccaagggcctcct

SEQ ID NO: 1852288 - DNA, 15 bp, Homo sapiens
tccaagggcctcctt

SEQ ID NO: 1852289 - DNA, 15 bp, Homo sapiens
ccaagggcctcctta

SEQ ID NO: 1852290 - DNA, 15 bp, Homo sapiens
caagggcctccttag

SEQ ID NO: 1852291 - DNA, 15 bp, Homo sapiens
aagggcctccttagc

SEQ ID NO: 1852292 - DNA, 15 bp, Homo sapiens
agggcctccttagct

SEQ ID NO: 1852293 - DNA, 15 bp, Homo sapiens
gggcctccttagcta

SEQ ID NO: 1852294 - DNA, 15 bp, Homo sapiens
ggcctccttagctag

SEQ ID NO: 1852295 - DNA, 15 bp, Homo sapiens
gcctccttagctagg

SEQ ID NO: 1852296 - DNA, 15 bp, Homo sapiens
cctccttagctaggc

SEQ ID NO: 1852297 - DNA, 15 bp, Homo sapiens
ctccttagctaggcc

SEQ ID NO: 1852298 - DNA, 15 bp, Homo sapiens
tccttagctaggccc

SEQ ID NO: 1852299 - DNA, 15 bp, Homo sapiens
ccttagctaggccct

SEQ ID NO: 1852300 - DNA, 15 bp, Homo sapiens
cttagctaggccctg

SEQ ID NO: 1852301 - DNA, 15 bp, Homo sapiens
ttagctaggccctgg

SEQ ID NO: 1852302 - DNA, 15 bp, Homo sapiens
tagctaggccctggg

SEQ ID NO: 1852303 - DNA, 15 bp, Homo sapiens
agctaggccctgggg

SEQ ID NO: 1852304 - DNA, 15 bp, Homo sapiens
gctaggccctggggg

SEQ ID NO: 1852305 - DNA, 15 bp, Homo sapiens
ctaggccctggggga

SEQ ID NO: 1852306 - DNA, 15 bp, Homo sapiens
taggccctgggggaa

SEQ ID NO: 1852307 - DNA, 15 bp, Homo sapiens
aggccctgggggaat

SEQ ID NO: 1852308 - DNA, 15 bp, Homo sapiens
ggccctgggggaatc

SEQ ID NO: 1852309 - DNA, 15 bp, Homo sapiens
gccctgggggaatca

SEQ ID NO: 1852310 - DNA, 15 bp, Homo sapiens
ccctgggggaatcag

SEQ ID NO: 1852311 - DNA, 15 bp, Homo sapiens
cctgggggaatcagg

SEQ ID NO: 1852312 - DNA, 15 bp, Homo sapiens
ctgggggaatcaggg

SEQ ID NO: 1852313 - DNA, 15 bp, Homo sapiens
tgggggaatcagggg

SEQ ID NO: 1852314 - DNA, 15 bp, Homo sapiens
gggggaatcaggggc

SEQ ID NO: 1852315 - DNA, 15 bp, Homo sapiens
ggggaatcaggggct

SEQ ID NO: 1852316 - DNA, 15 bp, Homo sapiens
gggaatcaggggctg

SEQ ID NO: 1852317 - DNA, 15 bp, Homo sapiens
ggaatcaggggctgt

SEQ ID NO: 1852318 - DNA, 15 bp, Homo sapiens
gaatcaggggctgta

SEQ ID NO: 1852319 - DNA, 15 bp, Homo sapiens
aatcaggggctgtaa

SEQ ID NO: 1852320 - DNA, 15 bp, Homo sapiens
atcaggggctgtaag

SEQ ID NO: 1852321 - DNA, 15 bp, Homo sapiens
tcaggggctgtaaga

SEQ ID NO: 1852322 - DNA, 15 bp, Homo sapiens
caggggctgtaagag

SEQ ID NO: 1852323 - DNA, 15 bp, Homo sapiens
aggggctgtaagagt

SEQ ID NO: 1852324 - DNA, 15 bp, Homo sapiens
ggggctgtaagagtg

SEQ ID NO: 1852325 - DNA, 15 bp, Homo sapiens
gggctgtaagagtgg

SEQ ID NO: 1852326 - DNA, 15 bp, Homo sapiens
ggctgtaagagtggg

SEQ ID NO: 1852327 - DNA, 15 bp, Homo sapiens
gctgtaagagtggga

SEQ ID NO: 1852328 - DNA, 15 bp, Homo sapiens
ctgtaagagtgggac

SEQ ID NO: 1852329 - DNA, 15 bp, Homo sapiens
tgtaagagtgggaca

SEQ ID NO: 1852330 - DNA, 15 bp, Homo sapiens
gtaagagtgggacac

SEQ ID NO: 1852331 - DNA, 15 bp, Homo sapiens
taagagtgggacacc

SEQ ID NO: 1852332 - DNA, 15 bp, Homo sapiens
aagagtgggacaccg

SEQ ID NO: 1852333 - DNA, 15 bp, Homo sapiens
agagtgggacaccga

SEQ ID NO: 1852334 - DNA, 15 bp, Homo sapiens
gagtgggacaccgaa

SEQ ID NO: 1852335 - DNA, 15 bp, Homo sapiens
agtgggacaccgaac

SEQ ID NO: 1852336 - DNA, 15 bp, Homo sapiens
gtgggacaccgaaca

SEQ ID NO: 1852337 - DNA, 15 bp, Homo sapiens
tgggacaccgaacag

SEQ ID NO: 1852338 - DNA, 15 bp, Homo sapiens
gggacaccgaacaga

SEQ ID NO: 1852339 - DNA, 15 bp, Homo sapiens
ggacaccgaacagaa

SEQ ID NO: 1852340 - DNA, 15 bp, Homo sapiens
gacaccgaacagaag

SEQ ID NO: 1852341 - DNA, 15 bp, Homo sapiens
acaccgaacagaagt

SEQ ID NO: 1852342 - DNA, 15 bp, Homo sapiens
caccgaacagaagtt

SEQ ID NO: 1852343 - DNA, 15 bp, Homo sapiens
accgaacagaagttt

SEQ ID NO: 1852344 - DNA, 15 bp, Homo sapiens
ccgaacagaagtttc

SEQ ID NO: 1852345 - DNA, 15 bp, Homo sapiens
cgaacagaagtttca

SEQ ID NO: 1852346 - DNA, 15 bp, Homo sapiens
gaacagaagtttcat

SEQ ID NO: 1852347 - DNA, 15 bp, Homo sapiens
aacagaagtttcatc

SEQ ID NO: 1852348 - DNA, 15 bp, Homo sapiens
acagaagtttcatct

SEQ ID NO: 1852349 - DNA, 15 bp, Homo sapiens
cagaagtttcatctc

SEQ ID NO: 1852350 - DNA, 15 bp, Homo sapiens
agaagtttcatctca

SEQ ID NO: 1852351 - DNA, 15 bp, Homo sapiens
gaagtttcatctcat

SEQ ID NO: 1852352 - DNA, 15 bp, Homo sapiens
aagtttcatctcatg

SEQ ID NO: 1852353 - DNA, 15 bp, Homo sapiens
agtttcatctcatgg

SEQ ID NO: 1852354 - DNA, 15 bp, Homo sapiens
gtttcatctcatgga

SEQ ID NO: 1852355 - DNA, 15 bp, Homo sapiens
tttcatctcatggag

SEQ ID NO: 1852356 - DNA, 15 bp, Homo sapiens
ttcatctcatggagg

SEQ ID NO: 1852357 - DNA, 15 bp, Homo sapiens
tcatctcatggaggc

SEQ ID NO: 1852358 - DNA, 15 bp, Homo sapiens
catctcatggaggca

SEQ ID NO: 1852359 - DNA, 15 bp, Homo sapiens
atctcatggaggcag

SEQ ID NO: 1852360 - DNA, 15 bp, Homo sapiens
tctcatggaggcagg

SEQ ID NO: 1852361 - DNA, 15 bp, Homo sapiens
ctcatggaggcagga

SEQ ID NO: 1852362 - DNA, 15 bp, Homo sapiens
tcatggaggcaggat

SEQ ID NO: 1852363 - DNA, 15 bp, Homo sapiens
catggaggcaggatt

SEQ ID NO: 1852364 - DNA, 15 bp, Homo sapiens
atggaggcaggattt

SEQ ID NO: 1852365 - DNA, 15 bp, Homo sapiens
tggaggcaggattta

SEQ ID NO: 1852366 - DNA, 15 bp, Homo sapiens
ggaggcaggatttag

SEQ ID NO: 1852367 - DNA, 15 bp, Homo sapiens
gaggcaggatttaga

SEQ ID NO: 1852368 - DNA, 15 bp, Homo sapiens
aggcaggatttagaa

SEQ ID NO: 1852369 - DNA, 15 bp, Homo sapiens
ggcaggatttagaaa

SEQ ID NO: 1852370 - DNA, 15 bp, Homo sapiens
gcaggatttagaaag

SEQ ID NO: 1852371 - DNA, 15 bp, Homo sapiens
caggatttagaaagt

SEQ ID NO: 1852372 - DNA, 15 bp, Homo sapiens
aggatttagaaagtg

SEQ ID NO: 1852373 - DNA, 15 bp, Homo sapiens
ggatttagaaagtgt

SEQ ID NO: 1852374 - DNA, 15 bp, Homo sapiens
gatttagaaagtgta

SEQ ID NO: 1852375 - DNA, 15 bp, Homo sapiens
atttagaaagtgtag

SEQ ID NO: 1852376 - DNA, 15 bp, Homo sapiens
tttagaaagtgtaga

SEQ ID NO: 1852377 - DNA, 15 bp, Homo sapiens
ttagaaagtgtagat

SEQ ID NO: 1852378 - DNA, 15 bp, Homo sapiens
tagaaagtgtagatc

SEQ ID NO: 1852379 - DNA, 15 bp, Homo sapiens
agaaagtgtagatct

SEQ ID NO: 1852380 - DNA, 15 bp, Homo sapiens
gaaagtgtagatctc

SEQ ID NO: 1852381 - DNA, 15 bp, Homo sapiens
aaagtgtagatctct

SEQ ID NO: 1852382 - DNA, 15 bp, Homo sapiens
aagtgtagatctctt

SEQ ID NO: 1852383 - DNA, 15 bp, Homo sapiens
agtgtagatctcttt

SEQ ID NO: 1852384 - DNA, 15 bp, Homo sapiens
gtgtagatctctttg

SEQ ID NO: 1852385 - DNA, 15 bp, Homo sapiens
tgtagatctctttga

SEQ ID NO: 1852386 - DNA, 15 bp, Homo sapiens
gtagatctctttgaa

SEQ ID NO: 1852387 - DNA, 15 bp, Homo sapiens
tagatctctttgaag

SEQ ID NO: 1852388 - DNA, 15 bp, Homo sapiens
agatctctttgaaga

SEQ ID NO: 1852389 - DNA, 15 bp, Homo sapiens
gatctctttgaagag

SEQ ID NO: 1852390 - DNA, 15 bp, Homo sapiens
atctctttgaagaga

SEQ ID NO: 1852391 - DNA, 15 bp, Homo sapiens
tctctttgaagagag

SEQ ID NO: 1852392 - DNA, 15 bp, Homo sapiens
ctctttgaagagagg

SEQ ID NO: 1852393 - DNA, 15 bp, Homo sapiens
tctttgaagagaggt

SEQ ID NO: 1852394 - DNA, 15 bp, Homo sapiens
ctttgaagagaggtt

SEQ ID NO: 1852395 - DNA, 15 bp, Homo sapiens
tttgaagagaggttt

SEQ ID NO: 1852396 - DNA, 15 bp, Homo sapiens
ttgaagagaggtttc

SEQ ID NO: 1852397 - DNA, 15 bp, Homo sapiens
tgaagagaggtttca

SEQ ID NO: 1852398 - DNA, 15 bp, Homo sapiens
gaagagaggtttcag

SEQ ID NO: 1852399 - DNA, 15 bp, Homo sapiens
aagagaggtttcagg

SEQ ID NO: 1852400 - DNA, 15 bp, Homo sapiens
agagaggtttcaggg

SEQ ID NO: 1852401 - DNA, 15 bp, Homo sapiens
gagaggtttcaggga

SEQ ID NO: 1852402 - DNA, 15 bp, Homo sapiens
agaggtttcagggag

SEQ ID NO: 1852403 - DNA, 15 bp, Homo sapiens
gaggtttcagggaga

SEQ ID NO: 1852404 - DNA, 15 bp, Homo sapiens
aggtttcagggagag

SEQ ID NO: 1852405 - DNA, 15 bp, Homo sapiens
ggtttcagggagaga

SEQ ID NO: 1852406 - DNA, 15 bp, Homo sapiens
gtttcagggagagag

SEQ ID NO: 1852407 - DNA, 15 bp, Homo sapiens
tttcagggagagagg

SEQ ID NO: 1852408 - DNA, 15 bp, Homo sapiens
ttcagggagagaggt

SEQ ID NO: 1852409 - DNA, 15 bp, Homo sapiens
tcagggagagaggtt

SEQ ID NO: 1852410 - DNA, 15 bp, Homo sapiens
cagggagagaggttt

SEQ ID NO: 1852411 - DNA, 15 bp, Homo sapiens
agggagagaggtttc

SEQ ID NO: 1852412 - DNA, 15 bp, Homo sapiens
gggagagaggtttca

SEQ ID NO: 1852413 - DNA, 15 bp, Homo sapiens
ggagagaggtttcag

SEQ ID NO: 1852414 - DNA, 15 bp, Homo sapiens
gagagaggtttcagg

SEQ ID NO: 1852415 - DNA, 15 bp, Homo sapiens
agaggtttcagggat

SEQ ID NO: 1852416 - DNA, 15 bp, Homo sapiens
gaggtttcagggatt

SEQ ID NO: 1852417 - DNA, 15 bp, Homo sapiens
aggtttcagggatta

SEQ ID NO: 1852418 - DNA, 15 bp, Homo sapiens
ggtttcagggattag

SEQ ID NO: 1852419 - DNA, 15 bp, Homo sapiens
gtttcagggattagg

SEQ ID NO: 1852420 - DNA, 15 bp, Homo sapiens
tttcagggattaggg

SEQ ID NO: 1852421 - DNA, 15 bp, Homo sapiens
ttcagggattagggt

SEQ ID NO: 1852422 - DNA, 15 bp, Homo sapiens
tcagggattagggtc

SEQ ID NO: 1852423 - DNA, 15 bp, Homo sapiens
cagggattagggtcc

SEQ ID NO: 1852424 - DNA, 15 bp, Homo sapiens
agggattagggtcca

SEQ ID NO: 1852425 - DNA, 15 bp, Homo sapiens
gggattagggtccag

SEQ ID NO: 1852426 - DNA, 15 bp, Homo sapiens
ggattagggtccagc

SEQ ID NO: 1852427 - DNA, 15 bp, Homo sapiens
gattagggtccagcc

SEQ ID NO: 1852428 - DNA, 15 bp, Homo sapiens
attagggtccagcca

SEQ ID NO: 1852429 - DNA, 15 bp, Homo sapiens
ttagggtccagccag

SEQ ID NO: 1852430 - DNA, 15 bp, Homo sapiens
tagggtccagccagc

SEQ ID NO: 1852431 - DNA, 15 bp, Homo sapiens
agggtccagccagct

SEQ ID NO: 1852432 - DNA, 15 bp, Homo sapiens
gggtccagccagctc

SEQ ID NO: 1852433 - DNA, 15 bp, Homo sapiens
ggtccagccagctcc

SEQ ID NO: 1852434 - DNA, 15 bp, Homo sapiens
gtccagccagctccc

SEQ ID NO: 1852435 - DNA, 15 bp, Homo sapiens
tccagccagctccct

SEQ ID NO: 1852436 - DNA, 15 bp, Homo sapiens
ccagccagctccctc

SEQ ID NO: 1852437 - DNA, 15 bp, Homo sapiens
cagccagctccctcc

SEQ ID NO: 1852438 - DNA, 15 bp, Homo sapiens
agccagctccctccc

SEQ ID NO: 1852439 - DNA, 15 bp, Homo sapiens
gccagctccctcccg

SEQ ID NO: 1852440 - DNA, 15 bp, Homo sapiens
ccagctccctcccga

SEQ ID NO: 1852441 - DNA, 15 bp, Homo sapiens
cagctccctcccgat

SEQ ID NO: 1852442 - DNA, 15 bp, Homo sapiens
agctccctcccgatg

SEQ ID NO: 1852443 - DNA, 15 bp, Homo sapiens
gctccctcccgatgc

SEQ ID NO: 1852444 - DNA, 15 bp, Homo sapiens
ctccctcccgatgcc

SEQ ID NO: 1852445 - DNA, 15 bp, Homo sapiens
tccctcccgatgcca

SEQ ID NO: 1852446 - DNA, 15 bp, Homo sapiens
ccctcccgatgccag

SEQ ID NO: 1852447 - DNA, 15 bp, Homo sapiens
cctcccgatgccagc

SEQ ID NO: 1852448 - DNA, 15 bp, Homo sapiens
ctcccgatgccagcc

SEQ ID NO: 1852449 - DNA, 15 bp, Homo sapiens
tcccgatgccagcct

SEQ ID NO: 1852450 - DNA, 15 bp, Homo sapiens
cccgatgccagcctt

SEQ ID NO: 1852451 - DNA, 15 bp, Homo sapiens
ccgatgccagcctta

SEQ ID NO: 1852452 - DNA, 15 bp, Homo sapiens
cgatgccagccttac

SEQ ID NO: 1852453 - DNA, 15 bp, Homo sapiens
gatgccagccttacc

SEQ ID NO: 1852454 - DNA, 15 bp, Homo sapiens
atgccagccttacct

SEQ ID NO: 1852455 - DNA, 15 bp, Homo sapiens
tgccagccttacctg

SEQ ID NO: 1852456 - DNA, 15 bp, Homo sapiens
gccagccttacctgc

SEQ ID NO: 1852457 - DNA, 15 bp, Homo sapiens
ccagccttacctgct

SEQ ID NO: 1852458 - DNA, 15 bp, Homo sapiens
cagccttacctgcta

SEQ ID NO: 1852459 - DNA, 15 bp, Homo sapiens
agccttacctgctaa

SEQ ID NO: 1852460 - DNA, 15 bp, Homo sapiens
gccttacctgctaag

SEQ ID NO: 1852461 - DNA, 15 bp, Homo sapiens
ccttacctgctaagt

SEQ ID NO: 1852462 - DNA, 15 bp, Homo sapiens
cttacctgctaagtg

SEQ ID NO: 1852463 - DNA, 15 bp, Homo sapiens
ttacctgctaagtgc

SEQ ID NO: 1852464 - DNA, 15 bp, Homo sapiens
tacctgctaagtgcc

SEQ ID NO: 1852465 - DNA, 15 bp, Homo sapiens
acctgctaagtgcct

SEQ ID NO: 1852466 - DNA, 15 bp, Homo sapiens
cctgctaagtgcctt

SEQ ID NO: 1852467 - DNA, 15 bp, Homo sapiens
ctgctaagtgccttc

SEQ ID NO: 1852468 - DNA, 15 bp, Homo sapiens
tgctaagtgccttct

SEQ ID NO: 1852469 - DNA, 15 bp, Homo sapiens
gctaagtgccttcta

SEQ ID NO: 1852470 - DNA, 15 bp, Homo sapiens
ctaagtgccttctaa

SEQ ID NO: 1852471 - DNA, 15 bp, Homo sapiens
taagtgccttctaag

SEQ ID NO: 1852472 - DNA, 15 bp, Homo sapiens
aagtgccttctaagc

SEQ ID NO: 1852473 - DNA, 15 bp, Homo sapiens
agtgccttctaagct

SEQ ID NO: 1852474 - DNA, 15 bp, Homo sapiens
gtgccttctaagctt

SEQ ID NO: 1852475 - DNA, 15 bp, Homo sapiens
tgccttctaagcttt

SEQ ID NO: 1852476 - DNA, 15 bp, Homo sapiens
gccttctaagctttc

SEQ ID NO: 1852477 - DNA, 15 bp, Homo sapiens
ccttctaagctttcc

SEQ ID NO: 1852478 - DNA, 15 bp, Homo sapiens
cttctaagctttccc

SEQ ID NO: 1852479 - DNA, 15 bp, Homo sapiens
ttctaagctttccca

SEQ ID NO: 1852480 - DNA, 15 bp, Homo sapiens
tctaagctttcccac

SEQ ID NO: 1852481 - DNA, 15 bp, Homo sapiens
ctaagctttcccact

SEQ ID NO: 1852482 - DNA, 15 bp, Homo sapiens
taagctttcccactc

SEQ ID NO: 1852483 - DNA, 15 bp, Homo sapiens
aagctttcccactca

SEQ ID NO: 1852484 - DNA, 15 bp, Homo sapiens
agctttcccactcac

SEQ ID NO: 1852485 - DNA, 15 bp, Homo sapiens
gctttcccactcacc

SEQ ID NO: 1852486 - DNA, 15 bp, Homo sapiens
ctttcccactcaccc

SEQ ID NO: 1852487 - DNA, 15 bp, Homo sapiens
tttcccactcaccct

SEQ ID NO: 1852488 - DNA, 15 bp, Homo sapiens
ttcccactcaccctg

SEQ ID NO: 1852489 - DNA, 15 bp, Homo sapiens
tcccactcaccctgt

SEQ ID NO: 1852490 - DNA, 15 bp, Homo sapiens
cccactcaccctgtc

SEQ ID NO: 1852491 - DNA, 15 bp, Homo sapiens
ccactcaccctgtct

SEQ ID NO: 1852492 - DNA, 15 bp, Homo sapiens
cactcaccctgtctg

SEQ ID NO: 1852493 - DNA, 15 bp, Homo sapiens
actcaccctgtctgt

SEQ ID NO: 1852494 - DNA, 15 bp, Homo sapiens
ctcaccctgtctgtg

SEQ ID NO: 1852495 - DNA, 15 bp, Homo sapiens
tcaccctgtctgtgt

SEQ ID NO: 1852496 - DNA, 15 bp, Homo sapiens
caccctgtctgtgtt

SEQ ID NO: 1852497 - DNA, 15 bp, Homo sapiens
accctgtctgtgttt

SEQ ID NO: 1852498 - DNA, 15 bp, Homo sapiens
ccctgtctgtgtttc

SEQ ID NO: 1852499 - DNA, 15 bp, Homo sapiens
cctgtctgtgtttcc

SEQ ID NO: 1852500 - DNA, 15 bp, Homo sapiens
ctgtctgtgtttcca

SEQ ID NO: 1852501 - DNA, 15 bp, Homo sapiens
tgtctgtgtttccag

SEQ ID NO: 1852502 - DNA, 15 bp, Homo sapiens
gtctgtgtttccagc

SEQ ID NO: 1852503 - DNA, 15 bp, Homo sapiens
tctgtgtttccagcc

SEQ ID NO: 1852504 - DNA, 15 bp, Homo sapiens
ctgtgtttccagcct

SEQ ID NO: 1852505 - DNA, 15 bp, Homo sapiens
tgtgtttccagcctc

SEQ ID NO: 1852506 - DNA, 15 bp, Homo sapiens
gtgtttccagcctct

SEQ ID NO: 1852507 - DNA, 15 bp, Homo sapiens
tgtttccagcctctt

SEQ ID NO: 1852508 - DNA, 15 bp, Homo sapiens
gtttccagcctcttg

SEQ ID NO: 1852509 - DNA, 15 bp, Homo sapiens
tttccagcctcttgt

SEQ ID NO: 1852510 - DNA, 15 bp, Homo sapiens
ttccagcctcttgtg

SEQ ID NO: 1852511 - DNA, 15 bp, Homo sapiens
tccagcctcttgtgt

SEQ ID NO: 1852512 - DNA, 15 bp, Homo sapiens
ccagcctcttgtgtt

SEQ ID NO: 1852513 - DNA, 15 bp, Homo sapiens
cagcctcttgtgttt

SEQ ID NO: 1852514 - DNA, 15 bp, Homo sapiens
agcctcttgtgttta

SEQ ID NO: 1852515 - DNA, 15 bp, Homo sapiens
gcctcttgtgtttat

SEQ ID NO: 1852516 - DNA, 15 bp, Homo sapiens
cctcttgtgtttatc

SEQ ID NO: 1852517 - DNA, 15 bp, Homo sapiens
ctcttgtgtttatct

SEQ ID NO: 1852518 - DNA, 15 bp, Homo sapiens
tcttgtgtttatctc

SEQ ID NO: 1852519 - DNA, 15 bp, Homo sapiens
cttgtgtttatctct

SEQ ID NO: 1852520 - DNA, 15 bp, Homo sapiens
ttgtgtttatctctc

SEQ ID NO: 1852521 - DNA, 15 bp, Homo sapiens
tgtgtttatctctct

SEQ ID NO: 1852522 - DNA, 15 bp, Homo sapiens
gtgtttatctctctc

SEQ ID NO: 1852523 - DNA, 15 bp, Homo sapiens
tgtttatctctctct

SEQ ID NO: 1852524 - DNA, 15 bp, Homo sapiens
gtttatctctctctc

SEQ ID NO: 1852525 - DNA, 15 bp, Homo sapiens
tttatctctctctcc

SEQ ID NO: 1852526 - DNA, 15 bp, Homo sapiens
ttatctctctctcca

SEQ ID NO: 1852527 - DNA, 15 bp, Homo sapiens
tatctctctctccag

SEQ ID NO: 1852528 - DNA, 15 bp, Homo sapiens
atctctctctccagc

SEQ ID NO: 1852529 - DNA, 15 bp, Homo sapiens
tctctctctccagcc

SEQ ID NO: 1852530 - DNA, 15 bp, Homo sapiens
ctctctctccagccc

SEQ ID NO: 1852531 - DNA, 15 bp, Homo sapiens
tctctctccagccca

SEQ ID NO: 1852532 - DNA, 15 bp, Homo sapiens
ctctctccagcccac

SEQ ID NO: 1852533 - DNA, 15 bp, Homo sapiens
tctctccagcccaca

SEQ ID NO: 1852534 - DNA, 15 bp, Homo sapiens
ctctccagcccacac

SEQ ID NO: 1852535 - DNA, 15 bp, Homo sapiens
tctccagcccacact

SEQ ID NO: 1852536 - DNA, 15 bp, Homo sapiens
ctccagcccacactg

SEQ ID NO: 1852537 - DNA, 15 bp, Homo sapiens
tccagcccacactgc

SEQ ID NO: 1852538 - DNA, 15 bp, Homo sapiens
ccagcccacactgcc

SEQ ID NO: 1852539 - DNA, 15 bp, Homo sapiens
cagcccacactgcct

SEQ ID NO: 1852540 - DNA, 15 bp, Homo sapiens
agcccacactgcctt

SEQ ID NO: 1852541 - DNA, 15 bp, Homo sapiens
gcccacactgccttt

SEQ ID NO: 1852542 - DNA, 15 bp, Homo sapiens
cccacactgcctttt

SEQ ID NO: 1852543 - DNA, 15 bp, Homo sapiens
ccacactgccttttg

SEQ ID NO: 1852544 - DNA, 15 bp, Homo sapiens
cacactgccttttgg

SEQ ID NO: 1852545 - DNA, 15 bp, Homo sapiens
acactgccttttggc

SEQ ID NO: 1852546 - DNA, 15 bp, Homo sapiens
cactgccttttggcc

SEQ ID NO: 1852547 - DNA, 15 bp, Homo sapiens
actgccttttggccg

SEQ ID NO: 1852548 - DNA, 15 bp, Homo sapiens
ctgccttttggccga

SEQ ID NO: 1852549 - DNA, 15 bp, Homo sapiens
tgccttttggccgaa

SEQ ID NO: 1852550 - DNA, 15 bp, Homo sapiens
gccttttggccgaaa

SEQ ID NO: 1852551 - DNA, 15 bp, Homo sapiens
ccttttggccgaaaa

SEQ ID NO: 1852552 - DNA, 15 bp, Homo sapiens
cttttggccgaaaag

SEQ ID NO: 1852553 - DNA, 15 bp, Homo sapiens
ttttggccgaaaagg

SEQ ID NO: 1852554 - DNA, 15 bp, Homo sapiens
tttggccgaaaaggg

SEQ ID NO: 1852555 - DNA, 15 bp, Homo sapiens
ttggccgaaaagggc

SEQ ID NO: 1852556 - DNA, 15 bp, Homo sapiens
tggccgaaaagggcc

SEQ ID NO: 1852557 - DNA, 15 bp, Homo sapiens
ggccgaaaagggcca

SEQ ID NO: 1852558 - DNA, 15 bp, Homo sapiens
gccgaaaagggccat

SEQ ID NO: 1852559 - DNA, 15 bp, Homo sapiens
ccgaaaagggccata

SEQ ID NO: 1852560 - DNA, 15 bp, Homo sapiens
cgaaaagggccatac

SEQ ID NO: 1852561 - DNA, 15 bp, Homo sapiens
gaaaagggccatacc

SEQ ID NO: 1852562 - DNA, 15 bp, Homo sapiens
aaaagggccatacct

SEQ ID NO: 1852563 - DNA, 15 bp, Homo sapiens
aaagggccatacctt

SEQ ID NO: 1852564 - DNA, 15 bp, Homo sapiens
aagggccataccttg

SEQ ID NO: 1852565 - DNA, 15 bp, Homo sapiens
agggccataccttga

SEQ ID NO: 1852566 - DNA, 15 bp, Homo sapiens
gggccataccttgag

SEQ ID NO: 1852567 - DNA, 15 bp, Homo sapiens
ggccataccttgagt

SEQ ID NO: 1852568 - DNA, 15 bp, Homo sapiens
gccataccttgagtc

SEQ ID NO: 1852569 - DNA, 15 bp, Homo sapiens
ccataccttgagtcc

SEQ ID NO: 1852570 - DNA, 15 bp, Homo sapiens
cataccttgagtccc

SEQ ID NO: 1852571 - DNA, 15 bp, Homo sapiens
ataccttgagtccct

SEQ ID NO: 1852572 - DNA, 15 bp, Homo sapiens
taccttgagtccctg

SEQ ID NO: 1852573 - DNA, 15 bp, Homo sapiens
accttgagtccctgt

SEQ ID NO: 1852574 - DNA, 15 bp, Homo sapiens
ccttgagtccctgtt

SEQ ID NO: 1852575 - DNA, 15 bp, Homo sapiens
cttgagtccctgttg

SEQ ID NO: 1852576 - DNA, 15 bp, Homo sapiens
ttgagtccctgttgc

SEQ ID NO: 1852577 - DNA, 15 bp, Homo sapiens
tgagtccctgttgca

SEQ ID NO: 1852578 - DNA, 15 bp, Homo sapiens
gagtccctgttgcat

SEQ ID NO: 1852579 - DNA, 15 bp, Homo sapiens
agtccctgttgcatg

SEQ ID NO: 1852580 - DNA, 15 bp, Homo sapiens
gtccctgttgcatga

SEQ ID NO: 1852581 - DNA, 15 bp, Homo sapiens
tccctgttgcatgaa

SEQ ID NO: 1852582 - DNA, 15 bp, Homo sapiens
ccctgttgcatgaag

SEQ ID NO: 1852583 - DNA, 15 bp, Homo sapiens
cctgttgcatgaagt

SEQ ID NO: 1852584 - DNA, 15 bp, Homo sapiens
ctgttgcatgaagtt

SEQ ID NO: 1852585 - DNA, 15 bp, Homo sapiens
tgttgcatgaagttg

SEQ ID NO: 1852586 - DNA, 15 bp, Homo sapiens
gttgcatgaagttgg

SEQ ID NO: 1852587 - DNA, 15 bp, Homo sapiens
ttgcatgaagttgga

SEQ ID NO: 1852588 - DNA, 15 bp, Homo sapiens
tgcatgaagttggat

SEQ ID NO: 1852589 - DNA, 15 bp, Homo sapiens
gcatgaagttggatt

SEQ ID NO: 1852590 - DNA, 15 bp, Homo sapiens
catgaagttggattt

SEQ ID NO: 1852591 - DNA, 15 bp, Homo sapiens
atgaagttggatttc

SEQ ID NO: 1852592 - DNA, 15 bp, Homo sapiens
tgaagttggatttcc

SEQ ID NO: 1852593 - DNA, 15 bp, Homo sapiens
gaagttggatttcct

SEQ ID NO: 1852594 - DNA, 15 bp, Homo sapiens
aagttggatttcctt

SEQ ID NO: 1852595 - DNA, 15 bp, Homo sapiens
agttggatttccttt

SEQ ID NO: 1852596 - DNA, 15 bp, Homo sapiens
gttggatttcctttc

SEQ ID NO: 1852597 - DNA, 15 bp, Homo sapiens
ttggatttcctttca

SEQ ID NO: 1852598 - DNA, 15 bp, Homo sapiens
tggatttcctttcat

SEQ ID NO: 1852599 - DNA, 15 bp, Homo sapiens
ggatttcctttcatg

SEQ ID NO: 1852600 - DNA, 15 bp, Homo sapiens
gatttcctttcatgt

SEQ ID NO: 1852601 - DNA, 15 bp, Homo sapiens
atttcctttcatgtg

SEQ ID NO: 1852602 - DNA, 15 bp, Homo sapiens
tttcctttcatgtgt

SEQ ID NO: 1852603 - DNA, 15 bp, Homo sapiens
ttcctttcatgtgtc

SEQ ID NO: 1852604 - DNA, 15 bp, Homo sapiens
tcctttcatgtgtcc

SEQ ID NO: 1852605 - DNA, 15 bp, Homo sapiens
cctttcatgtgtcct

SEQ ID NO: 1852606 - DNA, 15 bp, Homo sapiens
ctttcatgtgtcctc

SEQ ID NO: 1852607 - DNA, 15 bp, Homo sapiens
tttcatgtgtcctca

SEQ ID NO: 1852608 - DNA, 15 bp, Homo sapiens
ttcatgtgtcctcag

SEQ ID NO: 1852609 - DNA, 15 bp, Homo sapiens
tcatgtgtcctcaga

SEQ ID NO: 1852610 - DNA, 15 bp, Homo sapiens
catgtgtcctcagag

SEQ ID NO: 1852611 - DNA, 15 bp, Homo sapiens
atgtgtcctcagagg

SEQ ID NO: 1852612 - DNA, 15 bp, Homo sapiens
tgtgtcctcagaggc

SEQ ID NO: 1852613 - DNA, 15 bp, Homo sapiens
gtgtcctcagaggcc

SEQ ID NO: 1852614 - DNA, 15 bp, Homo sapiens
tgtcctcagaggccc

SEQ ID NO: 1852615 - DNA, 15 bp, Homo sapiens
gtcctcagaggccct

SEQ ID NO: 1852616 - DNA, 15 bp, Homo sapiens
tcctcagaggccctg

SEQ ID NO: 1852617 - DNA, 15 bp, Homo sapiens
cctcagaggccctgg

SEQ ID NO: 1852618 - DNA, 15 bp, Homo sapiens
ctcagaggccctggc

SEQ ID NO: 1852619 - DNA, 15 bp, Homo sapiens
tcagaggccctggct

SEQ ID NO: 1852620 - DNA, 15 bp, Homo sapiens
cagaggccctggctt

SEQ ID NO: 1852621 - DNA, 15 bp, Homo sapiens
agaggccctggcttg

SEQ ID NO: 1852622 - DNA, 15 bp, Homo sapiens
gaggccctggcttgg

SEQ ID NO: 1852623 - DNA, 15 bp, Homo sapiens
aggccctggcttggg

SEQ ID NO: 1852624 - DNA, 15 bp, Homo sapiens
ggccctggcttgggt

SEQ ID NO: 1852625 - DNA, 15 bp, Homo sapiens
gccctggcttgggtg

SEQ ID NO: 1852626 - DNA, 15 bp, Homo sapiens
ccctggcttgggtgt

SEQ ID NO: 1852627 - DNA, 15 bp, Homo sapiens
cctggcttgggtgtt

SEQ ID NO: 1852628 - DNA, 15 bp, Homo sapiens
ctggcttgggtgttg

SEQ ID NO: 1852629 - DNA, 15 bp, Homo sapiens
tggcttgggtgttgt

SEQ ID NO: 1852630 - DNA, 15 bp, Homo sapiens
ggcttgggtgttgtc

SEQ ID NO: 1852631 - DNA, 15 bp, Homo sapiens
gcttgggtgttgtca

SEQ ID NO: 1852632 - DNA, 15 bp, Homo sapiens
cttgggtgttgtcat

SEQ ID NO: 1852633 - DNA, 15 bp, Homo sapiens
ttgggtgttgtcatg

SEQ ID NO: 1852634 - DNA, 15 bp, Homo sapiens
tgggtgttgtcatgg

SEQ ID NO: 1852635 - DNA, 15 bp, Homo sapiens
gggtgttgtcatggc

SEQ ID NO: 1852636 - DNA, 15 bp, Homo sapiens
ggtgttgtcatggca

SEQ ID NO: 1852637 - DNA, 15 bp, Homo sapiens
gtgttgtcatggcat

SEQ ID NO: 1852638 - DNA, 15 bp, Homo sapiens
tgttgtcatggcatt

SEQ ID NO: 1852639 - DNA, 15 bp, Homo sapiens
gttgtcatggcattt

SEQ ID NO: 1852640 - DNA, 15 bp, Homo sapiens
ttgtcatggcatttt

SEQ ID NO: 1852641 - DNA, 15 bp, Homo sapiens
tgtcatggcattttg

SEQ ID NO: 1852642 - DNA, 15 bp, Homo sapiens
gtcatggcattttgt

SEQ ID NO: 1852643 - DNA, 15 bp, Homo sapiens
tcatggcattttgtg

SEQ ID NO: 1852644 - DNA, 15 bp, Homo sapiens
catggcattttgtga

SEQ ID NO: 1852645 - DNA, 15 bp, Homo sapiens
atggcattttgtgat

SEQ ID NO: 1852646 - DNA, 15 bp, Homo sapiens
tggcattttgtgatt

SEQ ID NO: 1852647 - DNA, 15 bp, Homo sapiens
ggcattttgtgattt

SEQ ID NO: 1852648 - DNA, 15 bp, Homo sapiens
gcattttgtgatttg

SEQ ID NO: 1852649 - DNA, 15 bp, Homo sapiens
cattttgtgatttga

SEQ ID NO: 1852650 - DNA, 15 bp, Homo sapiens
attttgtgatttgat

SEQ ID NO: 1852651 - DNA, 15 bp, Homo sapiens
ttttgtgatttgatg

SEQ ID NO: 1852652 - DNA, 15 bp, Homo sapiens
tttgtgatttgatgg

SEQ ID NO: 1852653 - DNA, 15 bp, Homo sapiens
ttgtgatttgatgga

SEQ ID NO: 1852654 - DNA, 15 bp, Homo sapiens
tgtgatttgatggag

SEQ ID NO: 1852655 - DNA, 15 bp, Homo sapiens
gtgatttgatggagg

SEQ ID NO: 1852656 - DNA, 15 bp, Homo sapiens
tgatttgatggagga

SEQ ID NO: 1852657 - DNA, 15 bp, Homo sapiens
gatttgatggaggag

SEQ ID NO: 1852658 - DNA, 15 bp, Homo sapiens
atttgatggaggagg

SEQ ID NO: 1852659 - DNA, 15 bp, Homo sapiens
tttgatggaggagga

SEQ ID NO: 1852660 - DNA, 15 bp, Homo sapiens
ttgatggaggaggag

SEQ ID NO: 1852661 - DNA, 15 bp, Homo sapiens
tgatggaggaggaga

SEQ ID NO: 1852662 - DNA, 15 bp, Homo sapiens
gatggaggaggagag

SEQ ID NO: 1852663 - DNA, 15 bp, Homo sapiens
atggaggaggagaga

SEQ ID NO: 1852664 - DNA, 15 bp, Homo sapiens
tggaggaggagagat

SEQ ID NO: 1852665 - DNA, 15 bp, Homo sapiens
ggaggaggagagata

SEQ ID NO: 1852666 - DNA, 15 bp, Homo sapiens
gaggaggagagatag

SEQ ID NO: 1852667 - DNA, 15 bp, Homo sapiens
gaggagagatagagc

SEQ ID NO: 1852668 - DNA, 15 bp, Homo sapiens
aggagagatagagcg

SEQ ID NO: 1852669 - DNA, 15 bp, Homo sapiens
ggagagatagagcgg

SEQ ID NO: 1852670 - DNA, 15 bp, Homo sapiens
gagagatagagcggc

SEQ ID NO: 1852671 - DNA, 15 bp, Homo sapiens
agagatagagcggcc

SEQ ID NO: 1852672 - DNA, 15 bp, Homo sapiens
gagatagagcggccc

SEQ ID NO: 1852673 - DNA, 15 bp, Homo sapiens
agatagagcggcccc

SEQ ID NO: 1852674 - DNA, 15 bp, Homo sapiens
gatagagcggcccca

SEQ ID NO: 1852675 - DNA, 15 bp, Homo sapiens
atagagcggccccat

SEQ ID NO: 1852676 - DNA, 15 bp, Homo sapiens
tagagcggccccatc

SEQ ID NO: 1852677 - DNA, 15 bp, Homo sapiens
agagcggccccatcg

SEQ ID NO: 1852678 - DNA, 15 bp, Homo sapiens
gagcggccccatcgc

SEQ ID NO: 1852679 - DNA, 15 bp, Homo sapiens
agcggccccatcgcc

SEQ ID NO: 1852680 - DNA, 15 bp, Homo sapiens
gcggccccatcgcct

SEQ ID NO: 1852681 - DNA, 15 bp, Homo sapiens
cggccccatcgcctg

SEQ ID NO: 1852682 - DNA, 15 bp, Homo sapiens
ggccccatcgcctgt

SEQ ID NO: 1852683 - DNA, 15 bp, Homo sapiens
gccccatcgcctgtt

SEQ ID NO: 1852684 - DNA, 15 bp, Homo sapiens
ccccatcgcctgttt

SEQ ID NO: 1852685 - DNA, 15 bp, Homo sapiens
cccatcgcctgtttg

SEQ ID NO: 1852686 - DNA, 15 bp, Homo sapiens
ccatcgcctgtttgc

SEQ ID NO: 1852687 - DNA, 15 bp, Homo sapiens
catcgcctgtttgcg

SEQ ID NO: 1852688 - DNA, 15 bp, Homo sapiens
atcgcctgtttgcgc

SEQ ID NO: 1852689 - DNA, 15 bp, Homo sapiens
tcgcctgtttgcgct

SEQ ID NO: 1852690 - DNA, 15 bp, Homo sapiens
cgcctgtttgcgcta

SEQ ID NO: 1852691 - DNA, 15 bp, Homo sapiens
gcctgtttgcgctag

SEQ ID NO: 1852692 - DNA, 15 bp, Homo sapiens
cctgtttgcgctagc

SEQ ID NO: 1852693 - DNA, 15 bp, Homo sapiens
ctgtttgcgctagcc

SEQ ID NO: 1852694 - DNA, 15 bp, Homo sapiens
tgtttgcgctagcct

SEQ ID NO: 1852695 - DNA, 15 bp, Homo sapiens
gtttgcgctagcctc

SEQ ID NO: 1852696 - DNA, 15 bp, Homo sapiens
tttgcgctagcctct

SEQ ID NO: 1852697 - DNA, 15 bp, Homo sapiens
ttgcgctagcctctc

SEQ ID NO: 1852698 - DNA, 15 bp, Homo sapiens
tgcgctagcctctct

SEQ ID NO: 1852699 - DNA, 15 bp, Homo sapiens
gcgctagcctctctc

SEQ ID NO: 1852700 - DNA, 15 bp, Homo sapiens
cgctagcctctctca

SEQ ID NO: 1852701 - DNA, 15 bp, Homo sapiens
gctagcctctctcag

SEQ ID NO: 1852702 - DNA, 15 bp, Homo sapiens
ctagcctctctcagc

SEQ ID NO: 1852703 - DNA, 15 bp, Homo sapiens
tagcctctctcagct

SEQ ID NO: 1852704 - DNA, 15 bp, Homo sapiens
agcctctctcagctt

SEQ ID NO: 1852705 - DNA, 15 bp, Homo sapiens
gcctctctcagcttg

SEQ ID NO: 1852706 - DNA, 15 bp, Homo sapiens
cctctctcagcttga

SEQ ID NO: 1852707 - DNA, 15 bp, Homo sapiens
ctctctcagcttgac

SEQ ID NO: 1852708 - DNA, 15 bp, Homo sapiens
tctctcagcttgacc

SEQ ID NO: 1852709 - DNA, 15 bp, Homo sapiens
ctctcagcttgaccg

SEQ ID NO: 1852710 - DNA, 15 bp, Homo sapiens
tctcagcttgaccga

SEQ ID NO: 1852711 - DNA, 15 bp, Homo sapiens
ctcagcttgaccgat

SEQ ID NO: 1852712 - DNA, 15 bp, Homo sapiens
tcagcttgaccgatg

SEQ ID NO: 1852713 - DNA, 15 bp, Homo sapiens
cagcttgaccgatga

SEQ ID NO: 1852714 - DNA, 15 bp, Homo sapiens
agcttgaccgatgac

SEQ ID NO: 1852715 - DNA, 15 bp, Homo sapiens
gcttgaccgatgact

SEQ ID NO: 1852716 - DNA, 15 bp, Homo sapiens
cttgaccgatgactg

SEQ ID NO: 1852717 - DNA, 15 bp, Homo sapiens
ttgaccgatgactgt

SEQ ID NO: 1852718 - DNA, 15 bp, Homo sapiens
tgaccgatgactgtg

SEQ ID NO: 1852719 - DNA, 15 bp, Homo sapiens
gaccgatgactgtga

SEQ ID NO: 1852720 - DNA, 15 bp, Homo sapiens
accgatgactgtgat

SEQ ID NO: 1852721 - DNA, 15 bp, Homo sapiens
ccgatgactgtgatg

SEQ ID NO: 1852722 - DNA, 15 bp, Homo sapiens
cgatgactgtgatga

SEQ ID NO: 1852723 - DNA, 15 bp, Homo sapiens
gatgactgtgatgac

SEQ ID NO: 1852724 - DNA, 15 bp, Homo sapiens
atgactgtgatgaca

SEQ ID NO: 1852725 - DNA, 15 bp, Homo sapiens
tgactgtgatgacat

SEQ ID NO: 1852726 - DNA, 15 bp, Homo sapiens
gactgtgatgacatc

SEQ ID NO: 1852727 - DNA, 15 bp, Homo sapiens
actgtgatgacatct

SEQ ID NO: 1852728 - DNA, 15 bp, Homo sapiens
ctgtgatgacatctg

SEQ ID NO: 1852729 - DNA, 15 bp, Homo sapiens
tgtgatgacatctgt

SEQ ID NO: 1852730 - DNA, 15 bp, Homo sapiens
gtgatgacatctgtg

SEQ ID NO: 1852731 - DNA, 15 bp, Homo sapiens
tgatgacatctgtgg

SEQ ID NO: 1852732 - DNA, 15 bp, Homo sapiens
gatgacatctgtgga

SEQ ID NO: 1852733 - DNA, 15 bp, Homo sapiens
atgacatctgtggac

SEQ ID NO: 1852734 - DNA, 15 bp, Homo sapiens
tgacatctgtggaca

SEQ ID NO: 1852735 - DNA, 15 bp, Homo sapiens
gacatctgtggacag

SEQ ID NO: 1852736 - DNA, 15 bp, Homo sapiens
acatctgtggacagt

SEQ ID NO: 1852737 - DNA, 15 bp, Homo sapiens
catctgtggacagta

SEQ ID NO: 1852738 - DNA, 15 bp, Homo sapiens
atctgtggacagtaa

SEQ ID NO: 1852739 - DNA, 15 bp, Homo sapiens
tctgtggacagtaag

SEQ ID NO: 1852740 - DNA, 15 bp, Homo sapiens
ctgtggacagtaagc

SEQ ID NO: 1852741 - DNA, 15 bp, Homo sapiens
tgtggacagtaagca

SEQ ID NO: 1852742 - DNA, 15 bp, Homo sapiens
gtggacagtaagcag

SEQ ID NO: 1852743 - DNA, 15 bp, Homo sapiens
tggacagtaagcagg

SEQ ID NO: 1852744 - DNA, 15 bp, Homo sapiens
ggacagtaagcaggt

SEQ ID NO: 1852745 - DNA, 15 bp, Homo sapiens
gacagtaagcaggtc

SEQ ID NO: 1852746 - DNA, 15 bp, Homo sapiens
acagtaagcaggtcc

SEQ ID NO: 1852747 - DNA, 15 bp, Homo sapiens
cagtaagcaggtccc

SEQ ID NO: 1852748 - DNA, 15 bp, Homo sapiens
agtaagcaggtccct

SEQ ID NO: 1852749 - DNA, 15 bp, Homo sapiens
gtaagcaggtccctg

SEQ ID NO: 1852750 - DNA, 15 bp, Homo sapiens
taagcaggtccctgg

SEQ ID NO: 1852751 - DNA, 15 bp, Homo sapiens
aagcaggtccctggt

SEQ ID NO: 1852752 - DNA, 15 bp, Homo sapiens
agcaggtccctggtg

SEQ ID NO: 1852753 - DNA, 15 bp, Homo sapiens
gcaggtccctggtgg

SEQ ID NO: 1852754 - DNA, 15 bp, Homo sapiens
caggtccctggtggg

SEQ ID NO: 1852755 - DNA, 15 bp, Homo sapiens
aggtccctggtggga

SEQ ID NO: 1852756 - DNA, 15 bp, Homo sapiens
gtccctggtgggatt

SEQ ID NO: 1852757 - DNA, 15 bp, Homo sapiens
tccctggtgggattg

SEQ ID NO: 1852758 - DNA, 15 bp, Homo sapiens
ccctggtgggattga

SEQ ID NO: 1852759 - DNA, 15 bp, Homo sapiens
cctggtgggattgag

SEQ ID NO: 1852760 - DNA, 15 bp, Homo sapiens
ctggtgggattgagt

SEQ ID NO: 1852761 - DNA, 15 bp, Homo sapiens
tggtgggattgagtt

SEQ ID NO: 1852762 - DNA, 15 bp, Homo sapiens
ggtgggattgagttt

SEQ ID NO: 1852763 - DNA, 15 bp, Homo sapiens
gtgggattgagtttc

SEQ ID NO: 1852764 - DNA, 15 bp, Homo sapiens
tgggattgagtttcc

SEQ ID NO: 1852765 - DNA, 15 bp, Homo sapiens
gggattgagtttcct

SEQ ID NO: 1852766 - DNA, 15 bp, Homo sapiens
ggattgagtttcctg

SEQ ID NO: 1852767 - DNA, 15 bp, Homo sapiens
gattgagtttcctga

SEQ ID NO: 1852768 - DNA, 15 bp, Homo sapiens
attgagtttcctgag

SEQ ID NO: 1852769 - DNA, 15 bp, Homo sapiens
ttgagtttcctgagc

SEQ ID NO: 1852770 - DNA, 15 bp, Homo sapiens
tgagtttcctgagct

SEQ ID NO: 1852771 - DNA, 15 bp, Homo sapiens
gagtttcctgagcta

SEQ ID NO: 1852772 - DNA, 15 bp, Homo sapiens
agtttcctgagctat

SEQ ID NO: 1852773 - DNA, 15 bp, Homo sapiens
gtttcctgagctatt

SEQ ID NO: 1852774 - DNA, 15 bp, Homo sapiens
tttcctgagctattc

SEQ ID NO: 1852775 - DNA, 15 bp, Homo sapiens
ttcctgagctattcc

SEQ ID NO: 1852776 - DNA, 15 bp, Homo sapiens
tcctgagctattcca

SEQ ID NO: 1852777 - DNA, 15 bp, Homo sapiens
cctgagctattccat

SEQ ID NO: 1852778 - DNA, 15 bp, Homo sapiens
ctgagctattccata

SEQ ID NO: 1852779 - DNA, 15 bp, Homo sapiens
tgagctattccatat

SEQ ID NO: 1852780 - DNA, 15 bp, Homo sapiens
gagctattccatatc

SEQ ID NO: 1852781 - DNA, 15 bp, Homo sapiens
agctattccatatca

SEQ ID NO: 1852782 - DNA, 15 bp, Homo sapiens
gctattccatatcag

SEQ ID NO: 1852783 - DNA, 15 bp, Homo sapiens
ctattccatatcagc

SEQ ID NO: 1852784 - DNA, 15 bp, Homo sapiens
tattccatatcagca

SEQ ID NO: 1852785 - DNA, 15 bp, Homo sapiens
attccatatcagcat

SEQ ID NO: 1852786 - DNA, 15 bp, Homo sapiens
ttccatatcagcatt

SEQ ID NO: 1852787 - DNA, 15 bp, Homo sapiens
tccatatcagcattc

SEQ ID NO: 1852788 - DNA, 15 bp, Homo sapiens
ccatatcagcattcg

SEQ ID NO: 1852789 - DNA, 15 bp, Homo sapiens
catatcagcattcga

SEQ ID NO: 1852790 - DNA, 15 bp, Homo sapiens
atatcagcattcgag

SEQ ID NO: 1852791 - DNA, 15 bp, Homo sapiens
tatcagcattcgaga

SEQ ID NO: 1852792 - DNA, 15 bp, Homo sapiens
atcagcattcgagaa

SEQ ID NO: 1852793 - DNA, 15 bp, Homo sapiens
tcagcattcgagaag

SEQ ID NO: 1852794 - DNA, 15 bp, Homo sapiens
cagcattcgagaagc

SEQ ID NO: 1852795 - DNA, 15 bp, Homo sapiens
agcattcgagaagcc

SEQ ID NO: 1852796 - DNA, 15 bp, Homo sapiens
ggtgtgtgccttttg

SEQ ID NO: 1852797 - DNA, 15 bp, Homo sapiens
gtgtgtgccttttga

SEQ ID NO: 1852798 - DNA, 15 bp, Homo sapiens
tgtgtgccttttgag

SEQ ID NO: 1852799 - DNA, 15 bp, Homo sapiens
gtgtgccttttgaga

SEQ ID NO: 1852800 - DNA, 15 bp, Homo sapiens
tgtgccttttgagat

SEQ ID NO: 1852801 - DNA, 15 bp, Homo sapiens
gtgccttttgagatt

SEQ ID NO: 1852802 - DNA, 15 bp, Homo sapiens
tgccttttgagattt

SEQ ID NO: 1852803 - DNA, 15 bp, Homo sapiens
gccttttgagatttc

SEQ ID NO: 1852804 - DNA, 15 bp, Homo sapiens
ccttttgagatttca

SEQ ID NO: 1852805 - DNA, 15 bp, Homo sapiens
cttttgagatttcaa

SEQ ID NO: 1852806 - DNA, 15 bp, Homo sapiens
ttttgagatttcaat

SEQ ID NO: 1852807 - DNA, 15 bp, Homo sapiens
tttgagatttcaatt

SEQ ID NO: 1852808 - DNA, 15 bp, Homo sapiens
ttgagatttcaatta

SEQ ID NO: 1852809 - DNA, 15 bp, Homo sapiens
tgagatttcaattat

SEQ ID NO: 1852810 - DNA, 15 bp, Homo sapiens
gagatttcaattatt

SEQ ID NO: 1852811 - DNA, 15 bp, Homo sapiens
agatttcaattattg

SEQ ID NO: 1852812 - DNA, 15 bp, Homo sapiens
gatttcaattattga

SEQ ID NO: 1852813 - DNA, 15 bp, Homo sapiens
atttcaattattgag

SEQ ID NO: 1852814 - DNA, 15 bp, Homo sapiens
tttcaattattgagc

SEQ ID NO: 1852815 - DNA, 15 bp, Homo sapiens
ttcaattattgagcc

SEQ ID NO: 1852816 - DNA, 15 bp, Homo sapiens
tcaattattgagcca

SEQ ID NO: 1852817 - DNA, 15 bp, Homo sapiens
caattattgagccac

SEQ ID NO: 1852818 - DNA, 15 bp, Homo sapiens
aattattgagccact

SEQ ID NO: 1852819 - DNA, 15 bp, Homo sapiens
attattgagccactt

SEQ ID NO: 1852820 - DNA, 15 bp, Homo sapiens
ttattgagccacttc

SEQ ID NO: 1852821 - DNA, 15 bp, Homo sapiens
tattgagccacttcc

SEQ ID NO: 1852822 - DNA, 15 bp, Homo sapiens
attgagccacttcca

SEQ ID NO: 1852823 - DNA, 15 bp, Homo sapiens
ttgagccacttccat

SEQ ID NO: 1852824 - DNA, 15 bp, Homo sapiens
tgagccacttccatc

SEQ ID NO: 1852825 - DNA, 15 bp, Homo sapiens
gagccacttccatcg

SEQ ID NO: 1852826 - DNA, 15 bp, Homo sapiens
agccacttccatcgg

SEQ ID NO: 1852827 - DNA, 15 bp, Homo sapiens
gccacttccatcggg

SEQ ID NO: 1852828 - DNA, 15 bp, Homo sapiens
ccacttccatcggga

SEQ ID NO: 1852829 - DNA, 15 bp, Homo sapiens
cacttccatcgggag

SEQ ID NO: 1852830 - DNA, 15 bp, Homo sapiens
acttccatcgggagc

SEQ ID NO: 1852831 - DNA, 15 bp, Homo sapiens
cttccatcgggagct

SEQ ID NO: 1852832 - DNA, 15 bp, Homo sapiens
ttccatcgggagctc

SEQ ID NO: 1852833 - DNA, 15 bp, Homo sapiens
tccatcgggagctct

SEQ ID NO: 1852834 - DNA, 15 bp, Homo sapiens
ccatcgggagctctt

SEQ ID NO: 1852835 - DNA, 15 bp, Homo sapiens
catcgggagctcttc

SEQ ID NO: 1852836 - DNA, 15 bp, Homo sapiens
atcgggagctcttca

SEQ ID NO: 1852837 - DNA, 15 bp, Homo sapiens
tcgggagctcttcaa

SEQ ID NO: 1852838 - DNA, 15 bp, Homo sapiens
cgggagctcttcaat

SEQ ID NO: 1852839 - DNA, 15 bp, Homo sapiens
gggagctcttcaatt

SEQ ID NO: 1852840 - DNA, 15 bp, Homo sapiens
ggagctcttcaatta

SEQ ID NO: 1852841 - DNA, 15 bp, Homo sapiens
gagctcttcaattat

SEQ ID NO: 1852842 - DNA, 15 bp, Homo sapiens
agctcttcaattatt

SEQ ID NO: 1852843 - DNA, 15 bp, Homo sapiens
gctcttcaattattt

SEQ ID NO: 1852844 - DNA, 15 bp, Homo sapiens
ctcttcaattattta

SEQ ID NO: 1852845 - DNA, 15 bp, Homo sapiens
tcttcaattatttat

SEQ ID NO: 1852846 - DNA, 15 bp, Homo sapiens
cttcaattatttata

SEQ ID NO: 1852847 - DNA, 15 bp, Homo sapiens
ttcaattatttatac

SEQ ID NO: 1852848 - DNA, 15 bp, Homo sapiens
tcaattatttatact

SEQ ID NO: 1852849 - DNA, 15 bp, Homo sapiens
caattatttatactg

SEQ ID NO: 1852850 - DNA, 15 bp, Homo sapiens
aattatttatactgg

SEQ ID NO: 1852851 - DNA, 15 bp, Homo sapiens
attatttatactggg

SEQ ID NO: 1852852 - DNA, 15 bp, Homo sapiens
ttatttatactgggt

SEQ ID NO: 1852853 - DNA, 15 bp, Homo sapiens
tatttatactgggtg

SEQ ID NO: 1852854 - DNA, 15 bp, Homo sapiens
atttatactgggtgt

SEQ ID NO: 1852855 - DNA, 15 bp, Homo sapiens
tttatactgggtgtg

SEQ ID NO: 1852856 - DNA, 15 bp, Homo sapiens
ttatactgggtgtgt

SEQ ID NO: 1852857 - DNA, 15 bp, Homo sapiens
tatactgggtgtgtt

SEQ ID NO: 1852858 - DNA, 15 bp, Homo sapiens
atactgggtgtgttg

SEQ ID NO: 1852859 - DNA, 15 bp, Homo sapiens
tactgggtgtgttgc

SEQ ID NO: 1852860 - DNA, 15 bp, Homo sapiens
actgggtgtgttgca

SEQ ID NO: 1852861 - DNA, 15 bp, Homo sapiens
ctgggtgtgttgcaa

SEQ ID NO: 1852862 - DNA, 15 bp, Homo sapiens
tgggtgtgttgcaag

SEQ ID NO: 1852863 - DNA, 15 bp, Homo sapiens
gggtgtgttgcaagt

SEQ ID NO: 1852864 - DNA, 15 bp, Homo sapiens
ggtgtgttgcaagta

SEQ ID NO: 1852865 - DNA, 15 bp, Homo sapiens
gtgtgttgcaagtag

SEQ ID NO: 1852866 - DNA, 15 bp, Homo sapiens
tgtgttgcaagtaga

SEQ ID NO: 1852867 - DNA, 15 bp, Homo sapiens
gtgttgcaagtagat

SEQ ID NO: 1852868 - DNA, 15 bp, Homo sapiens
tgttgcaagtagatt

SEQ ID NO: 1852869 - DNA, 15 bp, Homo sapiens
gttgcaagtagattc

SEQ ID NO: 1852870 - DNA, 15 bp, Homo sapiens
ttgcaagtagattca

SEQ ID NO: 1852871 - DNA, 15 bp, Homo sapiens
tgcaagtagattcac

SEQ ID NO: 1852872 - DNA, 15 bp, Homo sapiens
gcaagtagattcacc

SEQ ID NO: 1852873 - DNA, 15 bp, Homo sapiens
caagtagattcacca

SEQ ID NO: 1852874 - DNA, 15 bp, Homo sapiens
aagtagattcaccaa

SEQ ID NO: 1852875 - DNA, 15 bp, Homo sapiens
agtagattcaccaat

SEQ ID NO: 1852876 - DNA, 15 bp, Homo sapiens
gtagattcaccaatt

SEQ ID NO: 1852877 - DNA, 15 bp, Homo sapiens
tagattcaccaattt

SEQ ID NO: 1852878 - DNA, 15 bp, Homo sapiens
agattcaccaattta

SEQ ID NO: 1852879 - DNA, 15 bp, Homo sapiens
gattcaccaatttag

SEQ ID NO: 1852880 - DNA, 15 bp, Homo sapiens
attcaccaatttaga

SEQ ID NO: 1852881 - DNA, 15 bp, Homo sapiens
ttcaccaatttagaa

SEQ ID NO: 1852882 - DNA, 15 bp, Homo sapiens
tcaccaatttagaaa

SEQ ID NO: 1852883 - DNA, 15 bp, Homo sapiens
caccaatttagaaag

SEQ ID NO: 1852884 - DNA, 15 bp, Homo sapiens
accaatttagaaagt

SEQ ID NO: 1852885 - DNA, 15 bp, Homo sapiens
ccaatttagaaagtt

SEQ ID NO: 1852886 - DNA, 15 bp, Homo sapiens
caatttagaaagttg

SEQ ID NO: 1852887 - DNA, 15 bp, Homo sapiens
aatttagaaagttgg

SEQ ID NO: 1852888 - DNA, 15 bp, Homo sapiens
atttagaaagttggg

SEQ ID NO: 1852889 - DNA, 15 bp, Homo sapiens
tttagaaagttgggg

SEQ ID NO: 1852890 - DNA, 15 bp, Homo sapiens
ttagaaagttggggg

SEQ ID NO: 1852891 - DNA, 15 bp, Homo sapiens
tagaaagttggggga

SEQ ID NO: 1852892 - DNA, 15 bp, Homo sapiens
agaaagttgggggaa

SEQ ID NO: 1852893 - DNA, 15 bp, Homo sapiens
gaaagttgggggaaa

SEQ ID NO: 1852894 - DNA, 15 bp, Homo sapiens
aaagttgggggaaag

SEQ ID NO: 1852895 - DNA, 15 bp, Homo sapiens
aagttgggggaaaga

SEQ ID NO: 1852896 - DNA, 15 bp, Homo sapiens
agttgggggaaagag

SEQ ID NO: 1852897 - DNA, 15 bp, Homo sapiens
gttgggggaaagagg

SEQ ID NO: 1852898 - DNA, 15 bp, Homo sapiens
ttgggggaaagaggg

SEQ ID NO: 1852899 - DNA, 15 bp, Homo sapiens
tgggggaaagagggg

SEQ ID NO: 1852900 - DNA, 15 bp, Homo sapiens
gggggaaagagggga

SEQ ID NO: 1852901 - DNA, 15 bp, Homo sapiens
ggggaaagaggggac

SEQ ID NO: 1852902 - DNA, 15 bp, Homo sapiens
gggaaagaggggaca

SEQ ID NO: 1852903 - DNA, 15 bp, Homo sapiens
ggaaagaggggacat

SEQ ID NO: 1852904 - DNA, 15 bp, Homo sapiens
gaaagaggggacatg

SEQ ID NO: 1852905 - DNA, 15 bp, Homo sapiens
aaagaggggacatgg

SEQ ID NO: 1852906 - DNA, 15 bp, Homo sapiens
aagaggggacatggt

SEQ ID NO: 1852907 - DNA, 15 bp, Homo sapiens
agaggggacatggta

SEQ ID NO: 1852908 - DNA, 15 bp, Homo sapiens
gaggggacatggtag

SEQ ID NO: 1852909 - DNA, 15 bp, Homo sapiens
aggggacatggtagg

SEQ ID NO: 1852910 - DNA, 15 bp, Homo sapiens
ggggacatggtagga

SEQ ID NO: 1852911 - DNA, 15 bp, Homo sapiens
gggacatggtaggag

SEQ ID NO: 1852912 - DNA, 15 bp, Homo sapiens
ggacatggtaggagg

SEQ ID NO: 1852913 - DNA, 15 bp, Homo sapiens
gacatggtaggaggg

SEQ ID NO: 1852914 - DNA, 15 bp, Homo sapiens
acatggtaggaggga

SEQ ID NO: 1852915 - DNA, 15 bp, Homo sapiens
catggtaggagggag

SEQ ID NO: 1852916 - DNA, 15 bp, Homo sapiens
atggtaggagggagg

SEQ ID NO: 1852917 - DNA, 15 bp, Homo sapiens
tggtaggagggaggc

SEQ ID NO: 1852918 - DNA, 15 bp, Homo sapiens
ggtaggagggaggcc

SEQ ID NO: 1852919 - DNA, 15 bp, Homo sapiens
gtaggagggaggccc

SEQ ID NO: 1852920 - DNA, 15 bp, Homo sapiens
taggagggaggcccc

SEQ ID NO: 1852921 - DNA, 15 bp, Homo sapiens
aggagggaggccccc

SEQ ID NO: 1852922 - DNA, 15 bp, Homo sapiens
ggagggaggcccccg

SEQ ID NO: 1852923 - DNA, 15 bp, Homo sapiens
gagggaggcccccgt

SEQ ID NO: 1852924 - DNA, 15 bp, Homo sapiens
agggaggcccccgtg

SEQ ID NO: 1852925 - DNA, 15 bp, Homo sapiens
gggaggcccccgtgg

SEQ ID NO: 1852926 - DNA, 15 bp, Homo sapiens
ggaggcccccgtgga

SEQ ID NO: 1852927 - DNA, 15 bp, Homo sapiens
gaggcccccgtggat

SEQ ID NO: 1852928 - DNA, 15 bp, Homo sapiens
aggcccccgtggatg

SEQ ID NO: 1852929 - DNA, 15 bp, Homo sapiens
ggcccccgtggatgc

SEQ ID NO: 1852930 - DNA, 15 bp, Homo sapiens
gcccccgtggatgca

SEQ ID NO: 1852931 - DNA, 15 bp, Homo sapiens
cccccgtggatgcaa

SEQ ID NO: 1852932 - DNA, 15 bp, Homo sapiens
ccccgtggatgcaag

SEQ ID NO: 1852933 - DNA, 15 bp, Homo sapiens
cccgtggatgcaagt

SEQ ID NO: 1852934 - DNA, 15 bp, Homo sapiens
ccgtggatgcaagtg

SEQ ID NO: 1852935 - DNA, 15 bp, Homo sapiens
cgtggatgcaagtgt

SEQ ID NO: 1852936 - DNA, 15 bp, Homo sapiens
gtggatgcaagtgtg

SEQ ID NO: 1852937 - DNA, 15 bp, Homo sapiens
tggatgcaagtgtgt

SEQ ID NO: 1852938 - DNA, 15 bp, Homo sapiens
ggatgcaagtgtgtg

SEQ ID NO: 1852939 - DNA, 15 bp, Homo sapiens
gatgcaagtgtgtgg

SEQ ID NO: 1852940 - DNA, 15 bp, Homo sapiens
atgcaagtgtgtggg

SEQ ID NO: 1852941 - DNA, 15 bp, Homo sapiens
tgcaagtgtgtgggc

SEQ ID NO: 1852942 - DNA, 15 bp, Homo sapiens
gcaagtgtgtgggca

SEQ ID NO: 1852943 - DNA, 15 bp, Homo sapiens
caagtgtgtgggcaa

SEQ ID NO: 1852944 - DNA, 15 bp, Homo sapiens
aagtgtgtgggcaag

SEQ ID NO: 1852945 - DNA, 15 bp, Homo sapiens
agtgtgtgggcaagt

SEQ ID NO: 1852946 - DNA, 15 bp, Homo sapiens
gtgtgtgggcaagtc

SEQ ID NO: 1852947 - DNA, 15 bp, Homo sapiens
tgtgtgggcaagtcc

SEQ ID NO: 1852948 - DNA, 15 bp, Homo sapiens
gtgtgggcaagtcct

SEQ ID NO: 1852949 - DNA, 15 bp, Homo sapiens
tgtgggcaagtcctt

SEQ ID NO: 1852950 - DNA, 15 bp, Homo sapiens
gtgggcaagtccttt

SEQ ID NO: 1852951 - DNA, 15 bp, Homo sapiens
tgggcaagtcctttt

SEQ ID NO: 1852952 - DNA, 15 bp, Homo sapiens
gggcaagtccttttg

SEQ ID NO: 1852953 - DNA, 15 bp, Homo sapiens
ggcaagtccttttgg

SEQ ID NO: 1852954 - DNA, 15 bp, Homo sapiens
gcaagtccttttggc

SEQ ID NO: 1852955 - DNA, 15 bp, Homo sapiens
caagtccttttggct

SEQ ID NO: 1852956 - DNA, 15 bp, Homo sapiens
aagtccttttggctt

SEQ ID NO: 1852957 - DNA, 15 bp, Homo sapiens
agtccttttggcttc

SEQ ID NO: 1852958 - DNA, 15 bp, Homo sapiens
gtccttttggcttcc

SEQ ID NO: 1852959 - DNA, 15 bp, Homo sapiens
tccttttggcttcct

SEQ ID NO: 1852960 - DNA, 15 bp, Homo sapiens
ccttttggcttcctc

SEQ ID NO: 1852961 - DNA, 15 bp, Homo sapiens
cttttggcttcctct

SEQ ID NO: 1852962 - DNA, 15 bp, Homo sapiens
ttttggcttcctctt

SEQ ID NO: 1852963 - DNA, 15 bp, Homo sapiens
tttggcttcctcttg

SEQ ID NO: 1852964 - DNA, 15 bp, Homo sapiens
ttggcttcctcttgg

SEQ ID NO: 1852965 - DNA, 15 bp, Homo sapiens
tggcttcctcttggc

SEQ ID NO: 1852966 - DNA, 15 bp, Homo sapiens
ggcttcctcttggct

SEQ ID NO: 1852967 - DNA, 15 bp, Homo sapiens
gcttcctcttggctc

SEQ ID NO: 1852968 - DNA, 15 bp, Homo sapiens
cttcctcttggctct

SEQ ID NO: 1852969 - DNA, 15 bp, Homo sapiens
ttcctcttggctctt

SEQ ID NO: 1852970 - DNA, 15 bp, Homo sapiens
tcctcttggctcttt

SEQ ID NO: 1852971 - DNA, 15 bp, Homo sapiens
cctcttggctctttt

SEQ ID NO: 1852972 - DNA, 15 bp, Homo sapiens
ctcttggctcttttt

SEQ ID NO: 1852973 - DNA, 15 bp, Homo sapiens
tcttggctctttttc

SEQ ID NO: 1852974 - DNA, 15 bp, Homo sapiens
cttggctctttttct

SEQ ID NO: 1852975 - DNA, 15 bp, Homo sapiens
ttggctctttttctg

SEQ ID NO: 1852976 - DNA, 15 bp, Homo sapiens
tggctctttttctgg

SEQ ID NO: 1852977 - DNA, 15 bp, Homo sapiens
ggctctttttctgga

SEQ ID NO: 1852978 - DNA, 15 bp, Homo sapiens
gctctttttctggat

SEQ ID NO: 1852979 - DNA, 15 bp, Homo sapiens
ctctttttctggatc

SEQ ID NO: 1852980 - DNA, 15 bp, Homo sapiens
tctttttctggatcc

SEQ ID NO: 1852981 - DNA, 15 bp, Homo sapiens
ctttttctggatcca

SEQ ID NO: 1852982 - DNA, 15 bp, Homo sapiens
tttttctggatccaa

SEQ ID NO: 1852983 - DNA, 15 bp, Homo sapiens
ttttctggatccaac

SEQ ID NO: 1852984 - DNA, 15 bp, Homo sapiens
tttctggatccaact

SEQ ID NO: 1852985 - DNA, 15 bp, Homo sapiens
ttctggatccaactt

SEQ ID NO: 1852986 - DNA, 15 bp, Homo sapiens
tctggatccaacttc

SEQ ID NO: 1852987 - DNA, 15 bp, Homo sapiens
ctggatccaacttca

SEQ ID NO: 1852988 - DNA, 15 bp, Homo sapiens
tggatccaacttcat

SEQ ID NO: 1852989 - DNA, 15 bp, Homo sapiens
ggatccaacttcatc

SEQ ID NO: 1852990 - DNA, 15 bp, Homo sapiens
gatccaacttcatcg

SEQ ID NO: 1852991 - DNA, 15 bp, Homo sapiens
atccaacttcatcgt

SEQ ID NO: 1852992 - DNA, 15 bp, Homo sapiens
tccaacttcatcgta

SEQ ID NO: 1852993 - DNA, 15 bp, Homo sapiens
ccaacttcatcgtag

SEQ ID NO: 1852994 - DNA, 15 bp, Homo sapiens
caacttcatcgtagg

SEQ ID NO: 1852995 - DNA, 15 bp, Homo sapiens
aacttcatcgtaggg

SEQ ID NO: 1852996 - DNA, 15 bp, Homo sapiens
acttcatcgtagggc

SEQ ID NO: 1852997 - DNA, 15 bp, Homo sapiens
cttcatcgtagggct

SEQ ID NO: 1852998 - DNA, 15 bp, Homo sapiens
ttcatcgtagggctg

SEQ ID NO: 1852999 - DNA, 15 bp, Homo sapiens
tcatcgtagggctgg

SEQ ID NO: 1853000 - DNA, 15 bp, Homo sapiens
catcgtagggctgga

SEQ ID NO: 1853001 - DNA, 15 bp, Homo sapiens
atcgtagggctggac

SEQ ID NO: 1853002 - DNA, 15 bp, Homo sapiens
tcgtagggctggacc

SEQ ID NO: 1853003 - DNA, 15 bp, Homo sapiens
cgtagggctggacca

SEQ ID NO: 1853004 - DNA, 15 bp, Homo sapiens
gtagggctggaccag

SEQ ID NO: 1853005 - DNA, 15 bp, Homo sapiens
tagggctggaccagc

SEQ ID NO: 1853006 - DNA, 15 bp, Homo sapiens
agggctggaccagcc

SEQ ID NO: 1853007 - DNA, 15 bp, Homo sapiens
gggctggaccagcca

SEQ ID NO: 1853008 - DNA, 15 bp, Homo sapiens
ggctggaccagccac

SEQ ID NO: 1853009 - DNA, 15 bp, Homo sapiens
gctggaccagccact

SEQ ID NO: 1853010 - DNA, 15 bp, Homo sapiens
ctggaccagccactt

SEQ ID NO: 1853011 - DNA, 15 bp, Homo sapiens
tggaccagccacttt

SEQ ID NO: 1853012 - DNA, 15 bp, Homo sapiens
ggaccagccactttg

SEQ ID NO: 1853013 - DNA, 15 bp, Homo sapiens
gaccagccactttgt

SEQ ID NO: 1853014 - DNA, 15 bp, Homo sapiens
accagccactttgtc

SEQ ID NO: 1853015 - DNA, 15 bp, Homo sapiens
ccagccactttgtca

SEQ ID NO: 1853016 - DNA, 15 bp, Homo sapiens
cagccactttgtcaa

SEQ ID NO: 1853017 - DNA, 15 bp, Homo sapiens
agccactttgtcaag

SEQ ID NO: 1853018 - DNA, 15 bp, Homo sapiens
gccactttgtcaagg

SEQ ID NO: 1853019 - DNA, 15 bp, Homo sapiens
ccactttgtcaaggg

SEQ ID NO: 1853020 - DNA, 15 bp, Homo sapiens
cactttgtcaagggt

SEQ ID NO: 1853021 - DNA, 15 bp, Homo sapiens
actttgtcaagggta

SEQ ID NO: 1853022 - DNA, 15 bp, Homo sapiens
ctttgtcaagggtat

SEQ ID NO: 1853023 - DNA, 15 bp, Homo sapiens
tttgtcaagggtatc

SEQ ID NO: 1853024 - DNA, 15 bp, Homo sapiens
ttgtcaagggtatcc

SEQ ID NO: 1853025 - DNA, 15 bp, Homo sapiens
tgtcaagggtatcct

SEQ ID NO: 1853026 - DNA, 15 bp, Homo sapiens
gtcaagggtatcctc

SEQ ID NO: 1853027 - DNA, 15 bp, Homo sapiens
tcaagggtatcctcc

SEQ ID NO: 1853028 - DNA, 15 bp, Homo sapiens
caagggtatcctcct

SEQ ID NO: 1853029 - DNA, 15 bp, Homo sapiens
aagggtatcctcctc

SEQ ID NO: 1853030 - DNA, 15 bp, Homo sapiens
agggtatcctcctca

SEQ ID NO: 1853031 - DNA, 15 bp, Homo sapiens
gggtatcctcctcac

SEQ ID NO: 1853032 - DNA, 15 bp, Homo sapiens
ggtatcctcctcact

SEQ ID NO: 1853033 - DNA, 15 bp, Homo sapiens
gtatcctcctcactg

SEQ ID NO: 1853034 - DNA, 15 bp, Homo sapiens
tatcctcctcactga

SEQ ID NO: 1853035 - DNA, 15 bp, Homo sapiens
atcctcctcactgag

SEQ ID NO: 1853036 - DNA, 15 bp, Homo sapiens
tcctcctcactgagg

SEQ ID NO: 1853037 - DNA, 15 bp, Homo sapiens
cctcctcactgaggt

SEQ ID NO: 1853038 - DNA, 15 bp, Homo sapiens
ctcctcactgaggtc

SEQ ID NO: 1853039 - DNA, 15 bp, Homo sapiens
tcctcactgaggtct

SEQ ID NO: 1853040 - DNA, 15 bp, Homo sapiens
cctcactgaggtctg

SEQ ID NO: 1853041 - DNA, 15 bp, Homo sapiens
ctcactgaggtctgg

SEQ ID NO: 1853042 - DNA, 15 bp, Homo sapiens
tcactgaggtctgga

SEQ ID NO: 1853043 - DNA, 15 bp, Homo sapiens
cactgaggtctggag

SEQ ID NO: 1853044 - DNA, 15 bp, Homo sapiens
actgaggtctggaga

SEQ ID NO: 1853045 - DNA, 15 bp, Homo sapiens
ctgaggtctggagat

SEQ ID NO: 1853046 - DNA, 15 bp, Homo sapiens
tgaggtctggagatg

SEQ ID NO: 1853047 - DNA, 15 bp, Homo sapiens
gaggtctggagatgg

SEQ ID NO: 1853048 - DNA, 15 bp, Homo sapiens
aggtctggagatggg

SEQ ID NO: 1853049 - DNA, 15 bp, Homo sapiens
ggtctggagatgggg

SEQ ID NO: 1853050 - DNA, 15 bp, Homo sapiens
gtctggagatgggga

SEQ ID NO: 1853051 - DNA, 15 bp, Homo sapiens
tctggagatggggac

SEQ ID NO: 1853052 - DNA, 15 bp, Homo sapiens
ctggagatggggaca

SEQ ID NO: 1853053 - DNA, 15 bp, Homo sapiens
tggagatggggacag

SEQ ID NO: 1853054 - DNA, 15 bp, Homo sapiens
ggagatggggacagg

SEQ ID NO: 1853055 - DNA, 15 bp, Homo sapiens
gagatggggacaggg

SEQ ID NO: 1853056 - DNA, 15 bp, Homo sapiens
agatggggacagggt

SEQ ID NO: 1853057 - DNA, 15 bp, Homo sapiens
gatggggacagggtg

SEQ ID NO: 1853058 - DNA, 15 bp, Homo sapiens
atggggacagggtgt

SEQ ID NO: 1853059 - DNA, 15 bp, Homo sapiens
tggggacagggtgtg

SEQ ID NO: 1853060 - DNA, 15 bp, Homo sapiens
ggggacagggtgtgg

SEQ ID NO: 1853061 - DNA, 15 bp, Homo sapiens
gggacagggtgtgga

SEQ ID NO: 1853062 - DNA, 15 bp, Homo sapiens
ggacagggtgtggat

SEQ ID NO: 1853063 - DNA, 15 bp, Homo sapiens
gacagggtgtggatg

SEQ ID NO: 1853064 - DNA, 15 bp, Homo sapiens
acagggtgtggatgc

SEQ ID NO: 1853065 - DNA, 15 bp, Homo sapiens
cagggtgtggatgcc

SEQ ID NO: 1853066 - DNA, 15 bp, Homo sapiens
agggtgtggatgccc

SEQ ID NO: 1853067 - DNA, 15 bp, Homo sapiens
gggtgtggatgcccc

SEQ ID NO: 1853068 - DNA, 15 bp, Homo sapiens
ggtgtggatgcccct

SEQ ID NO: 1853069 - DNA, 15 bp, Homo sapiens
gtgtggatgcccctg

SEQ ID NO: 1853070 - DNA, 15 bp, Homo sapiens
tgtggatgcccctgg

SEQ ID NO: 1853071 - DNA, 15 bp, Homo sapiens
gtggatgcccctggg

SEQ ID NO: 1853072 - DNA, 15 bp, Homo sapiens
tggatgcccctgggt

SEQ ID NO: 1853073 - DNA, 15 bp, Homo sapiens
ggatgcccctgggtg

SEQ ID NO: 1853074 - DNA, 15 bp, Homo sapiens
gatgcccctgggtgt

SEQ ID NO: 1853075 - DNA, 15 bp, Homo sapiens
atgcccctgggtgta

SEQ ID NO: 1853076 - DNA, 15 bp, Homo sapiens
tgcccctgggtgtag

SEQ ID NO: 1853077 - DNA, 15 bp, Homo sapiens
gcccctgggtgtagg

SEQ ID NO: 1853078 - DNA, 15 bp, Homo sapiens
cccctgggtgtaggg

SEQ ID NO: 1853079 - DNA, 15 bp, Homo sapiens
ccctgggtgtaggga

SEQ ID NO: 1853080 - DNA, 15 bp, Homo sapiens
cctgggtgtagggaa

SEQ ID NO: 1853081 - DNA, 15 bp, Homo sapiens
ctgggtgtagggaac

SEQ ID NO: 1853082 - DNA, 15 bp, Homo sapiens
tgggtgtagggaacc

SEQ ID NO: 1853083 - DNA, 15 bp, Homo sapiens
gggtgtagggaaccg

SEQ ID NO: 1853084 - DNA, 15 bp, Homo sapiens
ggtgtagggaaccga

SEQ ID NO: 1853085 - DNA, 15 bp, Homo sapiens
gtgtagggaaccgac

SEQ ID NO: 1853086 - DNA, 15 bp, Homo sapiens
tgtagggaaccgaca

SEQ ID NO: 1853087 - DNA, 15 bp, Homo sapiens
gtagggaaccgacac

SEQ ID NO: 1853088 - DNA, 15 bp, Homo sapiens
tagggaaccgacact

SEQ ID NO: 1853089 - DNA, 15 bp, Homo sapiens
agggaaccgacactt

SEQ ID NO: 1853090 - DNA, 15 bp, Homo sapiens
gggaaccgacacttc

SEQ ID NO: 1853091 - DNA, 15 bp, Homo sapiens
ggaaccgacacttcc

SEQ ID NO: 1853092 - DNA, 15 bp, Homo sapiens
gaaccgacacttcca

SEQ ID NO: 1853093 - DNA, 15 bp, Homo sapiens
aaccgacacttccag

SEQ ID NO: 1853094 - DNA, 15 bp, Homo sapiens
accgacacttccaga

SEQ ID NO: 1853095 - DNA, 15 bp, Homo sapiens
ccgacacttccagac

SEQ ID NO: 1853096 - DNA, 15 bp, Homo sapiens
cgacacttccagaca

SEQ ID NO: 1853097 - DNA, 15 bp, Homo sapiens
gacacttccagacac

SEQ ID NO: 1853098 - DNA, 15 bp, Homo sapiens
acacttccagacact

SEQ ID NO: 1853099 - DNA, 15 bp, Homo sapiens
cacttccagacactc

SEQ ID NO: 1853100 - DNA, 15 bp, Homo sapiens
acttccagacactcg

SEQ ID NO: 1853101 - DNA, 15 bp, Homo sapiens
cttccagacactcgg

SEQ ID NO: 1853102 - DNA, 15 bp, Homo sapiens
ttccagacactcggt

SEQ ID NO: 1853103 - DNA, 15 bp, Homo sapiens
tccagacactcggtg

SEQ ID NO: 1853104 - DNA, 15 bp, Homo sapiens
ccagacactcggtga

SEQ ID NO: 1853105 - DNA, 15 bp, Homo sapiens
cagacactcggtgag

SEQ ID NO: 1853106 - DNA, 15 bp, Homo sapiens
agacactcggtgagc

SEQ ID NO: 1853107 - DNA, 15 bp, Homo sapiens
gacactcggtgagct

SEQ ID NO: 1853108 - DNA, 15 bp, Homo sapiens
acactcggtgagctc

SEQ ID NO: 1853109 - DNA, 15 bp, Homo sapiens
cactcggtgagctct

SEQ ID NO: 1853110 - DNA, 15 bp, Homo sapiens
actcggtgagctctg

SEQ ID NO: 1853111 - DNA, 15 bp, Homo sapiens
ctcggtgagctctgt

SEQ ID NO: 1853112 - DNA, 15 bp, Homo sapiens
tcggtgagctctgtc

SEQ ID NO: 1853113 - DNA, 15 bp, Homo sapiens
cggtgagctctgtct

SEQ ID NO: 1853114 - DNA, 15 bp, Homo sapiens
ggtgagctctgtctg

SEQ ID NO: 1853115 - DNA, 15 bp, Homo sapiens
gtgagctctgtctgg

SEQ ID NO: 1853116 - DNA, 15 bp, Homo sapiens
tgagctctgtctggg

SEQ ID NO: 1853117 - DNA, 15 bp, Homo sapiens
gagctctgtctgggt

SEQ ID NO: 1853118 - DNA, 15 bp, Homo sapiens
agctctgtctgggtg

SEQ ID NO: 1853119 - DNA, 15 bp, Homo sapiens
gctctgtctgggtgg

SEQ ID NO: 1853120 - DNA, 15 bp, Homo sapiens
ctctgtctgggtgga

SEQ ID NO: 1853121 - DNA, 15 bp, Homo sapiens
tctgtctgggtggaa

SEQ ID NO: 1853122 - DNA, 15 bp, Homo sapiens
ctgtctgggtggaaa

SEQ ID NO: 1853123 - DNA, 15 bp, Homo sapiens
tgtctgggtggaaaa

SEQ ID NO: 1853124 - DNA, 15 bp, Homo sapiens
gtctgggtggaaaac

SEQ ID NO: 1853125 - DNA, 15 bp, Homo sapiens
tctgggtggaaaacc

SEQ ID NO: 1853126 - DNA, 15 bp, Homo sapiens
ctgggtggaaaacct

SEQ ID NO: 1853127 - DNA, 15 bp, Homo sapiens
tgggtggaaaacctc

SEQ ID NO: 1853128 - DNA, 15 bp, Homo sapiens
gggtggaaaacctca

SEQ ID NO: 1853129 - DNA, 15 bp, Homo sapiens
ggtggaaaacctcat

SEQ ID NO: 1853130 - DNA, 15 bp, Homo sapiens
gtggaaaacctcatc

SEQ ID NO: 1853131 - DNA, 15 bp, Homo sapiens
tggaaaacctcatca

SEQ ID NO: 1853132 - DNA, 15 bp, Homo sapiens
ggaaaacctcatcag

SEQ ID NO: 1853133 - DNA, 15 bp, Homo sapiens
gaaaacctcatcaga

SEQ ID NO: 1853134 - DNA, 15 bp, Homo sapiens
aaaacctcatcagaa

SEQ ID NO: 1853135 - DNA, 15 bp, Homo sapiens
aaacctcatcagaag

SEQ ID NO: 1853136 - DNA, 15 bp, Homo sapiens
aacctcatcagaagc

SEQ ID NO: 1853137 - DNA, 15 bp, Homo sapiens
acctcatcagaagcc

SEQ ID NO: 1853138 - DNA, 15 bp, Homo sapiens
cctcatcagaagcca

SEQ ID NO: 1853139 - DNA, 15 bp, Homo sapiens
ctcatcagaagccag

SEQ ID NO: 1853140 - DNA, 15 bp, Homo sapiens
tcatcagaagccaga

SEQ ID NO: 1853141 - DNA, 15 bp, Homo sapiens
catcagaagccagat

SEQ ID NO: 1853142 - DNA, 15 bp, Homo sapiens
atcagaagccagatt

SEQ ID NO: 1853143 - DNA, 15 bp, Homo sapiens
tcagaagccagattg

SEQ ID NO: 1853144 - DNA, 15 bp, Homo sapiens
cagaagccagattga

SEQ ID NO: 1853145 - DNA, 15 bp, Homo sapiens
agaagccagattgaa

SEQ ID NO: 1853146 - DNA, 15 bp, Homo sapiens
gaagccagattgaat

SEQ ID NO: 1853147 - DNA, 15 bp, Homo sapiens
aagccagattgaatc

SEQ ID NO: 1853148 - DNA, 15 bp, Homo sapiens
agccagattgaatca

SEQ ID NO: 1853149 - DNA, 15 bp, Homo sapiens
gccagattgaatcac

SEQ ID NO: 1853150 - DNA, 15 bp, Homo sapiens
ccagattgaatcaca

SEQ ID NO: 1853151 - DNA, 15 bp, Homo sapiens
cagattgaatcacac

SEQ ID NO: 1853152 - DNA, 15 bp, Homo sapiens
agattgaatcacacc

SEQ ID NO: 1853153 - DNA, 15 bp, Homo sapiens
gattgaatcacacca

SEQ ID NO: 1853154 - DNA, 15 bp, Homo sapiens
attgaatcacaccag

SEQ ID NO: 1853155 - DNA, 15 bp, Homo sapiens
ttgaatcacaccagt

SEQ ID NO: 1853156 - DNA, 15 bp, Homo sapiens
tgaatcacaccagtt

SEQ ID NO: 1853157 - DNA, 15 bp, Homo sapiens
gaatcacaccagttt

SEQ ID NO: 1853158 - DNA, 15 bp, Homo sapiens
aatcacaccagtttc

SEQ ID NO: 1853159 - DNA, 15 bp, Homo sapiens
atcacaccagtttct

SEQ ID NO: 1853160 - DNA, 15 bp, Homo sapiens
tcacaccagtttcta

SEQ ID NO: 1853161 - DNA, 15 bp, Homo sapiens
cacaccagtttctaa

SEQ ID NO: 1853162 - DNA, 15 bp, Homo sapiens
acaccagtttctaag

SEQ ID NO: 1853163 - DNA, 15 bp, Homo sapiens
caccagtttctaaga

SEQ ID NO: 1853164 - DNA, 15 bp, Homo sapiens
accagtttctaagac

SEQ ID NO: 1853165 - DNA, 15 bp, Homo sapiens
ccagtttctaagaca

SEQ ID NO: 1853166 - DNA, 15 bp, Homo sapiens
cagtttctaagacat

SEQ ID NO: 1853167 - DNA, 15 bp, Homo sapiens
agtttctaagacatt

SEQ ID NO: 1853168 - DNA, 15 bp, Homo sapiens
gtttctaagacattc

SEQ ID NO: 1853169 - DNA, 15 bp, Homo sapiens
tttctaagacattcc

SEQ ID NO: 1853170 - DNA, 15 bp, Homo sapiens
ttctaagacattcct

SEQ ID NO: 1853171 - DNA, 15 bp, Homo sapiens
tctaagacattcctc

SEQ ID NO: 1853172 - DNA, 15 bp, Homo sapiens
ctaagacattcctca

SEQ ID NO: 1853173 - DNA, 15 bp, Homo sapiens
taagacattcctcaa

SEQ ID NO: 1853174 - DNA, 15 bp, Homo sapiens
aagacattcctcaac

SEQ ID NO: 1853175 - DNA, 15 bp, Homo sapiens
agacattcctcaacc

SEQ ID NO: 1853176 - DNA, 15 bp, Homo sapiens
gacattcctcaacca

SEQ ID NO: 1853177 - DNA, 15 bp, Homo sapiens
acattcctcaaccat

SEQ ID NO: 1853178 - DNA, 15 bp, Homo sapiens
cattcctcaaccatg

SEQ ID NO: 1853179 - DNA, 15 bp, Homo sapiens
attcctcaaccatgt

SEQ ID NO: 1853180 - DNA, 15 bp, Homo sapiens
ttcctcaaccatgtt

SEQ ID NO: 1853181 - DNA, 15 bp, Homo sapiens
tcctcaaccatgtta

SEQ ID NO: 1853182 - DNA, 15 bp, Homo sapiens
cctcaaccatgttag

SEQ ID NO: 1853183 - DNA, 15 bp, Homo sapiens
ctcaaccatgttagg

SEQ ID NO: 1853184 - DNA, 15 bp, Homo sapiens
tcaaccatgttaggc

SEQ ID NO: 1853185 - DNA, 15 bp, Homo sapiens
caaccatgttaggca

SEQ ID NO: 1853186 - DNA, 15 bp, Homo sapiens
aaccatgttaggcaa

SEQ ID NO: 1853187 - DNA, 15 bp, Homo sapiens
accatgttaggcaaa

SEQ ID NO: 1853188 - DNA, 15 bp, Homo sapiens
ccatgttaggcaaaa

SEQ ID NO: 1853189 - DNA, 15 bp, Homo sapiens
catgttaggcaaaag

SEQ ID NO: 1853190 - DNA, 15 bp, Homo sapiens
atgttaggcaaaaga

SEQ ID NO: 1853191 - DNA, 15 bp, Homo sapiens
tgttaggcaaaagag

SEQ ID NO: 1853192 - DNA, 15 bp, Homo sapiens
gttaggcaaaagagt

SEQ ID NO: 1853193 - DNA, 15 bp, Homo sapiens
ttaggcaaaagagtc

SEQ ID NO: 1853194 - DNA, 15 bp, Homo sapiens
taggcaaaagagtcc

SEQ ID NO: 1853195 - DNA, 15 bp, Homo sapiens
aggcaaaagagtccc

SEQ ID NO: 1853196 - DNA, 15 bp, Homo sapiens
ggcaaaagagtcccc

SEQ ID NO: 1853197 - DNA, 15 bp, Homo sapiens
gcaaaagagtccccc

SEQ ID NO: 1853198 - DNA, 15 bp, Homo sapiens
caaaagagtccccca

SEQ ID NO: 1853199 - DNA, 15 bp, Homo sapiens
aaaagagtcccccac

SEQ ID NO: 1853200 - DNA, 15 bp, Homo sapiens
aaagagtcccccact

SEQ ID NO: 1853201 - DNA, 15 bp, Homo sapiens
aagagtcccccactg

SEQ ID NO: 1853202 - DNA, 15 bp, Homo sapiens
agagtcccccactga

SEQ ID NO: 1853203 - DNA, 15 bp, Homo sapiens
gagtcccccactgac

SEQ ID NO: 1853204 - DNA, 15 bp, Homo sapiens
agtcccccactgaca

SEQ ID NO: 1853205 - DNA, 15 bp, Homo sapiens
gtcccccactgacaa

SEQ ID NO: 1853206 - DNA, 15 bp, Homo sapiens
tcccccactgacaag

SEQ ID NO: 1853207 - DNA, 15 bp, Homo sapiens
cccccactgacaagc

SEQ ID NO: 1853208 - DNA, 15 bp, Homo sapiens
ccccactgacaagct

SEQ ID NO: 1853209 - DNA, 15 bp, Homo sapiens
cccactgacaagctg

SEQ ID NO: 1853210 - DNA, 15 bp, Homo sapiens
ccactgacaagctgg

SEQ ID NO: 1853211 - DNA, 15 bp, Homo sapiens
cactgacaagctggg

SEQ ID NO: 1853212 - DNA, 15 bp, Homo sapiens
actgacaagctgggg

SEQ ID NO: 1853213 - DNA, 15 bp, Homo sapiens
ctgacaagctggggt

SEQ ID NO: 1853214 - DNA, 15 bp, Homo sapiens
tgacaagctggggta

SEQ ID NO: 1853215 - DNA, 15 bp, Homo sapiens
gacaagctggggtag

SEQ ID NO: 1853216 - DNA, 15 bp, Homo sapiens
acaagctggggtaga

SEQ ID NO: 1853217 - DNA, 15 bp, Homo sapiens
caagctggggtagaa

SEQ ID NO: 1853218 - DNA, 15 bp, Homo sapiens
aagctggggtagaag

SEQ ID NO: 1853219 - DNA, 15 bp, Homo sapiens
agctggggtagaagg

SEQ ID NO: 1853220 - DNA, 15 bp, Homo sapiens
gctggggtagaagga

SEQ ID NO: 1853221 - DNA, 15 bp, Homo sapiens
ctggggtagaaggaa

SEQ ID NO: 1853222 - DNA, 15 bp, Homo sapiens
tggggtagaaggaaa

SEQ ID NO: 1853223 - DNA, 15 bp, Homo sapiens
ggggtagaaggaaac

SEQ ID NO: 1853224 - DNA, 15 bp, Homo sapiens
gggtagaaggaaacc

SEQ ID NO: 1853225 - DNA, 15 bp, Homo sapiens
ggtagaaggaaacct

SEQ ID NO: 1853226 - DNA, 15 bp, Homo sapiens
gtagaaggaaacctg

SEQ ID NO: 1853227 - DNA, 15 bp, Homo sapiens
tagaaggaaacctga

SEQ ID NO: 1853228 - DNA, 15 bp, Homo sapiens
agaaggaaacctgat

SEQ ID NO: 1853229 - DNA, 15 bp, Homo sapiens
gaaggaaacctgata

SEQ ID NO: 1853230 - DNA, 15 bp, Homo sapiens
aaggaaacctgatat

SEQ ID NO: 1853231 - DNA, 15 bp, Homo sapiens
aggaaacctgatata

SEQ ID NO: 1853232 - DNA, 15 bp, Homo sapiens
ggaaacctgatataa

SEQ ID NO: 1853233 - DNA, 15 bp, Homo sapiens
gaaacctgatataat

SEQ ID NO: 1853234 - DNA, 15 bp, Homo sapiens
aaacctgatataatt

SEQ ID NO: 1853235 - DNA, 15 bp, Homo sapiens
aacctgatataattt

SEQ ID NO: 1853236 - DNA, 15 bp, Homo sapiens
acctgatataatttt

SEQ ID NO: 1853237 - DNA, 15 bp, Homo sapiens
cctgatataattttg

SEQ ID NO: 1853238 - DNA, 15 bp, Homo sapiens
ctgatataattttgg

SEQ ID NO: 1853239 - DNA, 15 bp, Homo sapiens
tgatataattttgga

SEQ ID NO: 1853240 - DNA, 15 bp, Homo sapiens
gatataattttggaa

SEQ ID NO: 1853241 - DNA, 15 bp, Homo sapiens
atataattttggaaa

SEQ ID NO: 1853242 - DNA, 15 bp, Homo sapiens
tataattttggaaaa

SEQ ID NO: 1853243 - DNA, 15 bp, Homo sapiens
ataattttggaaaaa

SEQ ID NO: 1853244 - DNA, 15 bp, Homo sapiens
taattttggaaaaaa

SEQ ID NO: 1853245 - DNA, 15 bp, Homo sapiens
aattttggaaaaaaa

SEQ ID NO: 1853246 - DNA, 15 bp, Homo sapiens
attttggaaaaaaac

SEQ ID NO: 1853247 - DNA, 15 bp, Homo sapiens
ttttggaaaaaaacc

SEQ ID NO: 1853248 - DNA, 15 bp, Homo sapiens
tttggaaaaaaacct

SEQ ID NO: 1853249 - DNA, 15 bp, Homo sapiens
ttggaaaaaaacctt

SEQ ID NO: 1853250 - DNA, 15 bp, Homo sapiens
tggaaaaaaacctta

SEQ ID NO: 1853251 - DNA, 15 bp, Homo sapiens
ggaaaaaaaccttac

SEQ ID NO: 1853252 - DNA, 15 bp, Homo sapiens
gaaaaaaaccttact

SEQ ID NO: 1853253 - DNA, 15 bp, Homo sapiens
aaaaaaaccttactt

SEQ ID NO: 1853254 - DNA, 15 bp, Homo sapiens
aaaaaaccttacttg

SEQ ID NO: 1853255 - DNA, 15 bp, Homo sapiens
aaaaaccttacttga

SEQ ID NO: 1853256 - DNA, 15 bp, Homo sapiens
aaaaccttacttgag

SEQ ID NO: 1853257 - DNA, 15 bp, Homo sapiens
aaaccttacttgaga

SEQ ID NO: 1853258 - DNA, 15 bp, Homo sapiens
aaccttacttgagaa

SEQ ID NO: 1853259 - DNA, 15 bp, Homo sapiens
accttacttgagaaa

SEQ ID NO: 1853260 - DNA, 15 bp, Homo sapiens
ccttacttgagaaag

SEQ ID NO: 1853261 - DNA, 15 bp, Homo sapiens
cttacttgagaaaga

SEQ ID NO: 1853262 - DNA, 15 bp, Homo sapiens
ttacttgagaaagaa

SEQ ID NO: 1853263 - DNA, 15 bp, Homo sapiens
tacttgagaaagaag

SEQ ID NO: 1853264 - DNA, 15 bp, Homo sapiens
acttgagaaagaagg

SEQ ID NO: 1853265 - DNA, 15 bp, Homo sapiens
cttgagaaagaaggt

SEQ ID NO: 1853266 - DNA, 15 bp, Homo sapiens
ttgagaaagaaggtt

SEQ ID NO: 1853267 - DNA, 15 bp, Homo sapiens
tgagaaagaaggttc

SEQ ID NO: 1853268 - DNA, 15 bp, Homo sapiens
gagaaagaaggttct

SEQ ID NO: 1853269 - DNA, 15 bp, Homo sapiens
agaaagaaggttctc

SEQ ID NO: 1853270 - DNA, 15 bp, Homo sapiens
gaaagaaggttctca

SEQ ID NO: 1853271 - DNA, 15 bp, Homo sapiens
aaagaaggttctcac

SEQ ID NO: 1853272 - DNA, 15 bp, Homo sapiens
aagaaggttctcaca

SEQ ID NO: 1853273 - DNA, 15 bp, Homo sapiens
agaaggttctcacag

SEQ ID NO: 1853274 - DNA, 15 bp, Homo sapiens
gaaggttctcacagc

SEQ ID NO: 1853275 - DNA, 15 bp, Homo sapiens
aaggttctcacagct

SEQ ID NO: 1853276 - DNA, 15 bp, Homo sapiens
aggttctcacagctg

SEQ ID NO: 1853277 - DNA, 15 bp, Homo sapiens
ggttctcacagctgc

SEQ ID NO: 1853278 - DNA, 15 bp, Homo sapiens
gttctcacagctgcc

SEQ ID NO: 1853279 - DNA, 15 bp, Homo sapiens
ttctcacagctgccg

SEQ ID NO: 1853280 - DNA, 15 bp, Homo sapiens
tctcacagctgccga

SEQ ID NO: 1853281 - DNA, 15 bp, Homo sapiens
ctcacagctgccgag

SEQ ID NO: 1853282 - DNA, 15 bp, Homo sapiens
tcacagctgccgagt

SEQ ID NO: 1853283 - DNA, 15 bp, Homo sapiens
cacagctgccgagtc

SEQ ID NO: 1853284 - DNA, 15 bp, Homo sapiens
acagctgccgagtct

SEQ ID NO: 1853285 - DNA, 15 bp, Homo sapiens
cagctgccgagtctc

SEQ ID NO: 1853286 - DNA, 15 bp, Homo sapiens
gctgccgagtctctc

SEQ ID NO: 1853287 - DNA, 15 bp, Homo sapiens
ctgccgagtctctct

SEQ ID NO: 1853288 - DNA, 15 bp, Homo sapiens
tgccgagtctctctc

SEQ ID NO: 1853289 - DNA, 15 bp, Homo sapiens
gccgagtctctctcg

SEQ ID NO: 1853290 - DNA, 15 bp, Homo sapiens
ccgagtctctctcga

SEQ ID NO: 1853291 - DNA, 15 bp, Homo sapiens
cgagtctctctcgac

SEQ ID NO: 1853292 - DNA, 15 bp, Homo sapiens
gagtctctctcgacg

SEQ ID NO: 1853293 - DNA, 15 bp, Homo sapiens
agtctctctcgacgt

SEQ ID NO: 1853294 - DNA, 15 bp, Homo sapiens
gtctctctcgacgtc

SEQ ID NO: 1853295 - DNA, 15 bp, Homo sapiens
tctctctcgacgtcc

SEQ ID NO: 1853296 - DNA, 15 bp, Homo sapiens
ctctctcgacgtcca

SEQ ID NO: 1853297 - DNA, 15 bp, Homo sapiens
tctctcgacgtccag

SEQ ID NO: 1853298 - DNA, 15 bp, Homo sapiens
ctctcgacgtccagg

SEQ ID NO: 1853299 - DNA, 15 bp, Homo sapiens
tctcgacgtccaggg

SEQ ID NO: 1853300 - DNA, 15 bp, Homo sapiens
ctcgacgtccagggt

SEQ ID NO: 1853301 - DNA, 15 bp, Homo sapiens
tcgacgtccagggtt

SEQ ID NO: 1853302 - DNA, 15 bp, Homo sapiens
cgacgtccagggttg

SEQ ID NO: 1853303 - DNA, 15 bp, Homo sapiens
gacgtccagggttgg

SEQ ID NO: 1853304 - DNA, 15 bp, Homo sapiens
acgtccagggttgga

SEQ ID NO: 1853305 - DNA, 15 bp, Homo sapiens
cgtccagggttggag

SEQ ID NO: 1853306 - DNA, 15 bp, Homo sapiens
gtccagggttggagg

SEQ ID NO: 1853307 - DNA, 15 bp, Homo sapiens
tccagggttggaggg

SEQ ID NO: 1853308 - DNA, 15 bp, Homo sapiens
ccagggttggagggg

SEQ ID NO: 1853309 - DNA, 15 bp, Homo sapiens
cagggttggaggggt

SEQ ID NO: 1853310 - DNA, 15 bp, Homo sapiens
agggttggaggggtc

SEQ ID NO: 1853311 - DNA, 15 bp, Homo sapiens
gggttggaggggtcc

SEQ ID NO: 1853312 - DNA, 15 bp, Homo sapiens
ggttggaggggtccc

SEQ ID NO: 1853313 - DNA, 15 bp, Homo sapiens
gttggaggggtccca

SEQ ID NO: 1853314 - DNA, 15 bp, Homo sapiens
ttggaggggtcccag

SEQ ID NO: 1853315 - DNA, 15 bp, Homo sapiens
tggaggggtcccagg

SEQ ID NO: 1853316 - DNA, 15 bp, Homo sapiens
ggaggggtcccaggc

SEQ ID NO: 1853317 - DNA, 15 bp, Homo sapiens
gaggggtcccaggcc

SEQ ID NO: 1853318 - DNA, 15 bp, Homo sapiens
aggggtcccaggcca

SEQ ID NO: 1853319 - DNA, 15 bp, Homo sapiens
ggggtcccaggccat

SEQ ID NO: 1853320 - DNA, 15 bp, Homo sapiens
gggtcccaggccatg

SEQ ID NO: 1853321 - DNA, 15 bp, Homo sapiens
ggtcccaggccatgg

SEQ ID NO: 1853322 - DNA, 15 bp, Homo sapiens
gtcccaggccatgga

SEQ ID NO: 1853323 - DNA, 15 bp, Homo sapiens
tcccaggccatggag

SEQ ID NO: 1853324 - DNA, 15 bp, Homo sapiens
cccaggccatggaga

SEQ ID NO: 1853325 - DNA, 15 bp, Homo sapiens
ccaggccatggagag

SEQ ID NO: 1853326 - DNA, 15 bp, Homo sapiens
caggccatggagaga

SEQ ID NO: 1853327 - DNA, 15 bp, Homo sapiens
aggccatggagagaa

SEQ ID NO: 1853328 - DNA, 15 bp, Homo sapiens
ggccatggagagaag

SEQ ID NO: 1853329 - DNA, 15 bp, Homo sapiens
gccatggagagaaga

SEQ ID NO: 1853330 - DNA, 15 bp, Homo sapiens
ccatggagagaagat

SEQ ID NO: 1853331 - DNA, 15 bp, Homo sapiens
catggagagaagatt

SEQ ID NO: 1853332 - DNA, 15 bp, Homo sapiens
atggagagaagattg

SEQ ID NO: 1853333 - DNA, 15 bp, Homo sapiens
tggagagaagattga

SEQ ID NO: 1853334 - DNA, 15 bp, Homo sapiens
ggagagaagattgat

SEQ ID NO: 1853335 - DNA, 15 bp, Homo sapiens
gagagaagattgatg

SEQ ID NO: 1853336 - DNA, 15 bp, Homo sapiens
agagaagattgatgg

SEQ ID NO: 1853337 - DNA, 15 bp, Homo sapiens
gagaagattgatggg

SEQ ID NO: 1853338 - DNA, 15 bp, Homo sapiens
agaagattgatgggt

SEQ ID NO: 1853339 - DNA, 15 bp, Homo sapiens
gaagattgatgggtc

SEQ ID NO: 1853340 - DNA, 15 bp, Homo sapiens
aagattgatgggtct

SEQ ID NO: 1853341 - DNA, 15 bp, Homo sapiens
agattgatgggtcta

SEQ ID NO: 1853342 - DNA, 15 bp, Homo sapiens
gattgatgggtctag

SEQ ID NO: 1853343 - DNA, 15 bp, Homo sapiens
attgatgggtctagc

SEQ ID NO: 1853344 - DNA, 15 bp, Homo sapiens
ttgatgggtctagcg

SEQ ID NO: 1853345 - DNA, 15 bp, Homo sapiens
tgatgggtctagcgg

SEQ ID NO: 1853346 - DNA, 15 bp, Homo sapiens
gatgggtctagcgga

SEQ ID NO: 1853347 - DNA, 15 bp, Homo sapiens
atgggtctagcggag

SEQ ID NO: 1853348 - DNA, 15 bp, Homo sapiens
tgggtctagcggagc

SEQ ID NO: 1853349 - DNA, 15 bp, Homo sapiens
gggtctagcggagcc

SEQ ID NO: 1853350 - DNA, 15 bp, Homo sapiens
ggtctagcggagcca

SEQ ID NO: 1853351 - DNA, 15 bp, Homo sapiens
gtctagcggagccaa

SEQ ID NO: 1853352 - DNA, 15 bp, Homo sapiens
tctagcggagccaag

SEQ ID NO: 1853353 - DNA, 15 bp, Homo sapiens
ctagcggagccaagt

SEQ ID NO: 1853354 - DNA, 15 bp, Homo sapiens
tagcggagccaagta

SEQ ID NO: 1853355 - DNA, 15 bp, Homo sapiens
agcggagccaagtag

SEQ ID NO: 1853356 - DNA, 15 bp, Homo sapiens
gcggagccaagtaga

SEQ ID NO: 1853357 - DNA, 15 bp, Homo sapiens
cggagccaagtagag

SEQ ID NO: 1853358 - DNA, 15 bp, Homo sapiens
ggagccaagtagaga

SEQ ID NO: 1853359 - DNA, 15 bp, Homo sapiens
gagccaagtagagag

SEQ ID NO: 1853360 - DNA, 15 bp, Homo sapiens
agccaagtagagagt

SEQ ID NO: 1853361 - DNA, 15 bp, Homo sapiens
gccaagtagagagtt

SEQ ID NO: 1853362 - DNA, 15 bp, Homo sapiens
ccaagtagagagttg

SEQ ID NO: 1853363 - DNA, 15 bp, Homo sapiens
caagtagagagttga

SEQ ID NO: 1853364 - DNA, 15 bp, Homo sapiens
aagtagagagttgag

SEQ ID NO: 1853365 - DNA, 15 bp, Homo sapiens
agtagagagttgagg

SEQ ID NO: 1853366 - DNA, 15 bp, Homo sapiens
gtagagagttgaggc

SEQ ID NO: 1853367 - DNA, 15 bp, Homo sapiens
tagagagttgaggct

SEQ ID NO: 1853368 - DNA, 15 bp, Homo sapiens
agagagttgaggctt

SEQ ID NO: 1853369 - DNA, 15 bp, Homo sapiens
gagagttgaggcttt

SEQ ID NO: 1853370 - DNA, 15 bp, Homo sapiens
agagttgaggctttg

SEQ ID NO: 1853371 - DNA, 15 bp, Homo sapiens
gagttgaggctttgc

SEQ ID NO: 1853372 - DNA, 15 bp, Homo sapiens
agttgaggctttgca

SEQ ID NO: 1853373 - DNA, 15 bp, Homo sapiens
gttgaggctttgcag

SEQ ID NO: 1853374 - DNA, 15 bp, Homo sapiens
ttgaggctttgcagg

SEQ ID NO: 1853375 - DNA, 15 bp, Homo sapiens
tgaggctttgcaggg

SEQ ID NO: 1853376 - DNA, 15 bp, Homo sapiens
gaggctttgcagggc

SEQ ID NO: 1853377 - DNA, 15 bp, Homo sapiens
aggctttgcagggcc

SEQ ID NO: 1853378 - DNA, 15 bp, Homo sapiens
ggctttgcagggcca

SEQ ID NO: 1853379 - DNA, 15 bp, Homo sapiens
gctttgcagggccag

SEQ ID NO: 1853380 - DNA, 15 bp, Homo sapiens
ctttgcagggccagg

SEQ ID NO: 1853381 - DNA, 15 bp, Homo sapiens
tttgcagggccaggc

SEQ ID NO: 1853382 - DNA, 15 bp, Homo sapiens
ttgcagggccaggcg

SEQ ID NO: 1853383 - DNA, 15 bp, Homo sapiens
tgcagggccaggcgc

SEQ ID NO: 1853384 - DNA, 15 bp, Homo sapiens
gcagggccaggcgct

SEQ ID NO: 1853385 - DNA, 15 bp, Homo sapiens
cagggccaggcgctt

SEQ ID NO: 1853386 - DNA, 15 bp, Homo sapiens
agggccaggcgcttg

SEQ ID NO: 1853387 - DNA, 15 bp, Homo sapiens
gggccaggcgcttgc

SEQ ID NO: 1853388 - DNA, 15 bp, Homo sapiens
ggccaggcgcttgcc

SEQ ID NO: 1853389 - DNA, 15 bp, Homo sapiens
gccaggcgcttgcca

SEQ ID NO: 1853390 - DNA, 15 bp, Homo sapiens
ccaggcgcttgccat

SEQ ID NO: 1853391 - DNA, 15 bp, Homo sapiens
caggcgcttgccatc

SEQ ID NO: 1853392 - DNA, 15 bp, Homo sapiens
aggcgcttgccatcc

SEQ ID NO: 1853393 - DNA, 15 bp, Homo sapiens
ggcgcttgccatcct

SEQ ID NO: 1853394 - DNA, 15 bp, Homo sapiens
gcgcttgccatcctt

SEQ ID NO: 1853395 - DNA, 15 bp, Homo sapiens
cgcttgccatcctta

SEQ ID NO: 1853396 - DNA, 15 bp, Homo sapiens
gcttgccatccttaa

SEQ ID NO: 1853397 - DNA, 15 bp, Homo sapiens
cttgccatccttaac

SEQ ID NO: 1853398 - DNA, 15 bp, Homo sapiens
ttgccatccttaact

SEQ ID NO: 1853399 - DNA, 15 bp, Homo sapiens
tgccatccttaactc

SEQ ID NO: 1853400 - DNA, 15 bp, Homo sapiens
gccatccttaactcc

SEQ ID NO: 1853401 - DNA, 15 bp, Homo sapiens
ccatccttaactccc

SEQ ID NO: 1853402 - DNA, 15 bp, Homo sapiens
catccttaactccca

SEQ ID NO: 1853403 - DNA, 15 bp, Homo sapiens
atccttaactcccat

SEQ ID NO: 1853404 - DNA, 15 bp, Homo sapiens
tccttaactcccatt

SEQ ID NO: 1853405 - DNA, 15 bp, Homo sapiens
ccttaactcccatta

SEQ ID NO: 1853406 - DNA, 15 bp, Homo sapiens
cttaactcccattag

SEQ ID NO: 1853407 - DNA, 15 bp, Homo sapiens
ttaactcccattagg

SEQ ID NO: 1853408 - DNA, 15 bp, Homo sapiens
taactcccattaggg

SEQ ID NO: 1853409 - DNA, 15 bp, Homo sapiens
aactcccattaggga

SEQ ID NO: 1853410 - DNA, 15 bp, Homo sapiens
actcccattagggat

SEQ ID NO: 1853411 - DNA, 15 bp, Homo sapiens
ctcccattagggatc

SEQ ID NO: 1853412 - DNA, 15 bp, Homo sapiens
tcccattagggatcg

SEQ ID NO: 1853413 - DNA, 15 bp, Homo sapiens
cccattagggatcga

SEQ ID NO: 1853414 - DNA, 15 bp, Homo sapiens
ccattagggatcgag

SEQ ID NO: 1853415 - DNA, 15 bp, Homo sapiens
cattagggatcgaga

SEQ ID NO: 1853416 - DNA, 15 bp, Homo sapiens
attagggatcgagaa

SEQ ID NO: 1853417 - DNA, 15 bp, Homo sapiens
ttagggatcgagaag

SEQ ID NO: 1853418 - DNA, 15 bp, Homo sapiens
tagggatcgagaagg

SEQ ID NO: 1853419 - DNA, 15 bp, Homo sapiens
agggatcgagaagga

SEQ ID NO: 1853420 - DNA, 15 bp, Homo sapiens
gggatcgagaaggaa

SEQ ID NO: 1853421 - DNA, 15 bp, Homo sapiens
ggatcgagaaggaaa

SEQ ID NO: 1853422 - DNA, 15 bp, Homo sapiens
gatcgagaaggaaaa

SEQ ID NO: 1853423 - DNA, 15 bp, Homo sapiens
atcgagaaggaaaag

SEQ ID NO: 1853424 - DNA, 15 bp, Homo sapiens
tcgagaaggaaaagg

SEQ ID NO: 1853425 - DNA, 15 bp, Homo sapiens
cgagaaggaaaagga

SEQ ID NO: 1853426 - DNA, 15 bp, Homo sapiens
gagaaggaaaaggag

SEQ ID NO: 1853427 - DNA, 15 bp, Homo sapiens
agaaggaaaaggaga

SEQ ID NO: 1853428 - DNA, 15 bp, Homo sapiens
gaaggaaaaggagaa

SEQ ID NO: 1853429 - DNA, 15 bp, Homo sapiens
aaggaaaaggagaag

SEQ ID NO: 1853430 - DNA, 15 bp, Homo sapiens
aggaaaaggagaagg

SEQ ID NO: 1853431 - DNA, 15 bp, Homo sapiens
ggaaaaggagaagga

SEQ ID NO: 1853432 - DNA, 15 bp, Homo sapiens
gaaaaggagaaggag

SEQ ID NO: 1853433 - DNA, 15 bp, Homo sapiens
aaaaggagaaggagt

SEQ ID NO: 1853434 - DNA, 15 bp, Homo sapiens
aaaggagaaggagtt

SEQ ID NO: 1853435 - DNA, 15 bp, Homo sapiens
aaggagaaggagttc

SEQ ID NO: 1853436 - DNA, 15 bp, Homo sapiens
aggagaaggagttct

SEQ ID NO: 1853437 - DNA, 15 bp, Homo sapiens
ggagaaggagttctc

SEQ ID NO: 1853438 - DNA, 15 bp, Homo sapiens
gagaaggagttctct

SEQ ID NO: 1853439 - DNA, 15 bp, Homo sapiens
agaaggagttctctg

SEQ ID NO: 1853440 - DNA, 15 bp, Homo sapiens
gaaggagttctctga

SEQ ID NO: 1853441 - DNA, 15 bp, Homo sapiens
aaggagttctctgaa

SEQ ID NO: 1853442 - DNA, 15 bp, Homo sapiens
aggagttctctgaat

SEQ ID NO: 1853443 - DNA, 15 bp, Homo sapiens
ggagttctctgaatc

SEQ ID NO: 1853444 - DNA, 15 bp, Homo sapiens
gagttctctgaatcc

SEQ ID NO: 1853445 - DNA, 15 bp, Homo sapiens
agttctctgaatcca

SEQ ID NO: 1853446 - DNA, 15 bp, Homo sapiens
gttctctgaatccaa

SEQ ID NO: 1853447 - DNA, 15 bp, Homo sapiens
ttctctgaatccaat

SEQ ID NO: 1853448 - DNA, 15 bp, Homo sapiens
tctctgaatccaatg

SEQ ID NO: 1853449 - DNA, 15 bp, Homo sapiens
ctctgaatccaatgg

SEQ ID NO: 1853450 - DNA, 15 bp, Homo sapiens
tctgaatccaatgga

SEQ ID NO: 1853451 - DNA, 15 bp, Homo sapiens
ctgaatccaatggaa

SEQ ID NO: 1853452 - DNA, 15 bp, Homo sapiens
tgaatccaatggaaa

SEQ ID NO: 1853453 - DNA, 15 bp, Homo sapiens
gaatccaatggaaaa

SEQ ID NO: 1853454 - DNA, 15 bp, Homo sapiens
aatccaatggaaaaa

SEQ ID NO: 1853455 - DNA, 15 bp, Homo sapiens
atccaatggaaaaag

SEQ ID NO: 1853456 - DNA, 15 bp, Homo sapiens
tccaatggaaaaaga

SEQ ID NO: 1853457 - DNA, 15 bp, Homo sapiens
ccaatggaaaaagaa

SEQ ID NO: 1853458 - DNA, 15 bp, Homo sapiens
caatggaaaaagaag

SEQ ID NO: 1853459 - DNA, 15 bp, Homo sapiens
aatggaaaaagaagt

SEQ ID NO: 1853460 - DNA, 15 bp, Homo sapiens
atggaaaaagaagtc

SEQ ID NO: 1853461 - DNA, 15 bp, Homo sapiens
tggaaaaagaagtcc

SEQ ID NO: 1853462 - DNA, 15 bp, Homo sapiens
ggaaaaagaagtcct

SEQ ID NO: 1853463 - DNA, 15 bp, Homo sapiens
gaaaaagaagtcctg

SEQ ID NO: 1853464 - DNA, 15 bp, Homo sapiens
aaaaagaagtcctgt

SEQ ID NO: 1853465 - DNA, 15 bp, Homo sapiens
aaaagaagtcctgtc

SEQ ID NO: 1853466 - DNA, 15 bp, Homo sapiens
aaagaagtcctgtct

SEQ ID NO: 1853467 - DNA, 15 bp, Homo sapiens
aagaagtcctgtctc

SEQ ID NO: 1853468 - DNA, 15 bp, Homo sapiens
agaagtcctgtctcc

SEQ ID NO: 1853469 - DNA, 15 bp, Homo sapiens
gaagtcctgtctcct

SEQ ID NO: 1853470 - DNA, 15 bp, Homo sapiens
aagtcctgtctcctt

SEQ ID NO: 1853471 - DNA, 15 bp, Homo sapiens
agtcctgtctccttt

SEQ ID NO: 1853472 - DNA, 15 bp, Homo sapiens
gtcctgtctcctttc

SEQ ID NO: 1853473 - DNA, 15 bp, Homo sapiens
tcctgtctcctttcc

SEQ ID NO: 1853474 - DNA, 15 bp, Homo sapiens
cctgtctcctttccc

SEQ ID NO: 1853475 - DNA, 15 bp, Homo sapiens
ctgtctcctttccct

SEQ ID NO: 1853476 - DNA, 15 bp, Homo sapiens
tgtctcctttccctg

SEQ ID NO: 1853477 - DNA, 15 bp, Homo sapiens
gtctcctttccctgg

SEQ ID NO: 1853478 - DNA, 15 bp, Homo sapiens
tctcctttccctggg

SEQ ID NO: 1853479 - DNA, 15 bp, Homo sapiens
ctcctttccctgggc

SEQ ID NO: 1853480 - DNA, 15 bp, Homo sapiens
tcctttccctgggct

SEQ ID NO: 1853481 - DNA, 15 bp, Homo sapiens
cctttccctgggctg

SEQ ID NO: 1853482 - DNA, 15 bp, Homo sapiens
ctttccctgggctgt

SEQ ID NO: 1853483 - DNA, 15 bp, Homo sapiens
tttccctgggctgtt

SEQ ID NO: 1853484 - DNA, 15 bp, Homo sapiens
ttccctgggctgttg

SEQ ID NO: 1853485 - DNA, 15 bp, Homo sapiens
tccctgggctgttga

SEQ ID NO: 1853486 - DNA, 15 bp, Homo sapiens
ccctgggctgttgaa

SEQ ID NO: 1853487 - DNA, 15 bp, Homo sapiens
cctgggctgttgaat

SEQ ID NO: 1853488 - DNA, 15 bp, Homo sapiens
ctgggctgttgaatt

SEQ ID NO: 1853489 - DNA, 15 bp, Homo sapiens
tgggctgttgaattg

SEQ ID NO: 1853490 - DNA, 15 bp, Homo sapiens
gggctgttgaattgt

SEQ ID NO: 1853491 - DNA, 15 bp, Homo sapiens
ggctgttgaattgtt

SEQ ID NO: 1853492 - DNA, 15 bp, Homo sapiens
gctgttgaattgttt

SEQ ID NO: 1853493 - DNA, 15 bp, Homo sapiens
ctgttgaattgtttt

SEQ ID NO: 1853494 - DNA, 15 bp, Homo sapiens
tgttgaattgttttt

SEQ ID NO: 1853495 - DNA, 15 bp, Homo sapiens
gttgaattgttttta

SEQ ID NO: 1853496 - DNA, 15 bp, Homo sapiens
ttgaattgtttttat

SEQ ID NO: 1853497 - DNA, 15 bp, Homo sapiens
tgaattgtttttatt

SEQ ID NO: 1853498 - DNA, 15 bp, Homo sapiens
gaattgtttttattt

SEQ ID NO: 1853499 - DNA, 15 bp, Homo sapiens
aattgtttttatttc

SEQ ID NO: 1853500 - DNA, 15 bp, Homo sapiens
attgtttttatttca

SEQ ID NO: 1853501 - DNA, 15 bp, Homo sapiens
ttgtttttatttcac

SEQ ID NO: 1853502 - DNA, 15 bp, Homo sapiens
tgtttttatttcaca

SEQ ID NO: 1853503 - DNA, 15 bp, Homo sapiens
gtttttatttcacat

SEQ ID NO: 1853504 - DNA, 15 bp, Homo sapiens
tttttatttcacatt

SEQ ID NO: 1853505 - DNA, 15 bp, Homo sapiens
ttttatttcacatta

SEQ ID NO: 1853506 - DNA, 15 bp, Homo sapiens
tttatttcacattag

SEQ ID NO: 1853507 - DNA, 15 bp, Homo sapiens
ttatttcacattagc

SEQ ID NO: 1853508 - DNA, 15 bp, Homo sapiens
tatttcacattagca

SEQ ID NO: 1853509 - DNA, 15 bp, Homo sapiens
atttcacattagcaa

SEQ ID NO: 1853510 - DNA, 15 bp, Homo sapiens
tttcacattagcaac

SEQ ID NO: 1853511 - DNA, 15 bp, Homo sapiens
ttcacattagcaact

SEQ ID NO: 1853512 - DNA, 15 bp, Homo sapiens
tcacattagcaactg

SEQ ID NO: 1853513 - DNA, 15 bp, Homo sapiens
cacattagcaactgc

SEQ ID NO: 1853514 - DNA, 15 bp, Homo sapiens
acattagcaactgct

SEQ ID NO: 1853515 - DNA, 15 bp, Homo sapiens
cattagcaactgctc

SEQ ID NO: 1853516 - DNA, 15 bp, Homo sapiens
attagcaactgctct

SEQ ID NO: 1853517 - DNA, 15 bp, Homo sapiens
ttagcaactgctctg

SEQ ID NO: 1853518 - DNA, 15 bp, Homo sapiens
tagcaactgctctgg

SEQ ID NO: 1853519 - DNA, 15 bp, Homo sapiens
agcaactgctctgga

SEQ ID NO: 1853520 - DNA, 15 bp, Homo sapiens
gcaactgctctggac

SEQ ID NO: 1853521 - DNA, 15 bp, Homo sapiens
caactgctctggact

SEQ ID NO: 1853522 - DNA, 15 bp, Homo sapiens
aactgctctggactc

SEQ ID NO: 1853523 - DNA, 15 bp, Homo sapiens
actgctctggactct

SEQ ID NO: 1853524 - DNA, 15 bp, Homo sapiens
ctgctctggactctc

SEQ ID NO: 1853525 - DNA, 15 bp, Homo sapiens
tgctctggactctct

SEQ ID NO: 1853526 - DNA, 15 bp, Homo sapiens
gctctggactctctt

SEQ ID NO: 1853527 - DNA, 15 bp, Homo sapiens
ctctggactctcttg

SEQ ID NO: 1853528 - DNA, 15 bp, Homo sapiens
tctggactctcttgt

SEQ ID NO: 1853529 - DNA, 15 bp, Homo sapiens
ctggactctcttgtg

SEQ ID NO: 1853530 - DNA, 15 bp, Homo sapiens
tggactctcttgtgt

SEQ ID NO: 1853531 - DNA, 15 bp, Homo sapiens
ggactctcttgtgtt

SEQ ID NO: 1853532 - DNA, 15 bp, Homo sapiens
gactctcttgtgttt

SEQ ID NO: 1853533 - DNA, 15 bp, Homo sapiens
actctcttgtgtttg

SEQ ID NO: 1853534 - DNA, 15 bp, Homo sapiens
ctctcttgtgtttgg

SEQ ID NO: 1853535 - DNA, 15 bp, Homo sapiens
tctcttgtgtttggc

SEQ ID NO: 1853536 - DNA, 15 bp, Homo sapiens
ctcttgtgtttggct

SEQ ID NO: 1853537 - DNA, 15 bp, Homo sapiens
tcttgtgtttggctg

SEQ ID NO: 1853538 - DNA, 15 bp, Homo sapiens
cttgtgtttggctgc

SEQ ID NO: 1853539 - DNA, 15 bp, Homo sapiens
ttgtgtttggctgct

SEQ ID NO: 1853540 - DNA, 15 bp, Homo sapiens
tgtgtttggctgctg

SEQ ID NO: 1853541 - DNA, 15 bp, Homo sapiens
gtgtttggctgctgt

SEQ ID NO: 1853542 - DNA, 15 bp, Homo sapiens
tgtttggctgctgtg

SEQ ID NO: 1853543 - DNA, 15 bp, Homo sapiens
gtttggctgctgtgt

SEQ ID NO: 1853544 - DNA, 15 bp, Homo sapiens
tttggctgctgtgtt

SEQ ID NO: 1853545 - DNA, 15 bp, Homo sapiens
ttggctgctgtgttg

SEQ ID NO: 1853546 - DNA, 15 bp, Homo sapiens
tggctgctgtgttgg

SEQ ID NO: 1853547 - DNA, 15 bp, Homo sapiens
ggctgctgtgttgga

SEQ ID NO: 1853548 - DNA, 15 bp, Homo sapiens
gctgctgtgttggag

SEQ ID NO: 1853549 - DNA, 15 bp, Homo sapiens
ctgctgtgttggaga

SEQ ID NO: 1853550 - DNA, 15 bp, Homo sapiens
tgctgtgttggagac

SEQ ID NO: 1853551 - DNA, 15 bp, Homo sapiens
gctgtgttggagacc

SEQ ID NO: 1853552 - DNA, 15 bp, Homo sapiens
ctgtgttggagacct

SEQ ID NO: 1853553 - DNA, 15 bp, Homo sapiens
tgtgttggagaccta

SEQ ID NO: 1853554 - DNA, 15 bp, Homo sapiens
gtgttggagacctag

SEQ ID NO: 1853555 - DNA, 15 bp, Homo sapiens
tgttggagacctaga

SEQ ID NO: 1853556 - DNA, 15 bp, Homo sapiens
gttggagacctagat

SEQ ID NO: 1853557 - DNA, 15 bp, Homo sapiens
ttggagacctagatc

SEQ ID NO: 1853558 - DNA, 15 bp, Homo sapiens
tggagacctagatcc

SEQ ID NO: 1853559 - DNA, 15 bp, Homo sapiens
ggagacctagatcca

SEQ ID NO: 1853560 - DNA, 15 bp, Homo sapiens
gagacctagatccaa

SEQ ID NO: 1853561 - DNA, 15 bp, Homo sapiens
agacctagatccaaa

SEQ ID NO: 1853562 - DNA, 15 bp, Homo sapiens
gacctagatccaaac

SEQ ID NO: 1853563 - DNA, 15 bp, Homo sapiens
acctagatccaaact

SEQ ID NO: 1853564 - DNA, 15 bp, Homo sapiens
cctagatccaaacta

SEQ ID NO: 1853565 - DNA, 15 bp, Homo sapiens
ctagatccaaactag

SEQ ID NO: 1853566 - DNA, 15 bp, Homo sapiens
tagatccaaactagg

SEQ ID NO: 1853567 - DNA, 15 bp, Homo sapiens
agatccaaactaggg

SEQ ID NO: 1853568 - DNA, 15 bp, Homo sapiens
gatccaaactagggt

SEQ ID NO: 1853569 - DNA, 15 bp, Homo sapiens
atccaaactagggtg

SEQ ID NO: 1853570 - DNA, 15 bp, Homo sapiens
tccaaactagggtgt

SEQ ID NO: 1853571 - DNA, 15 bp, Homo sapiens
ccaaactagggtgtg

SEQ ID NO: 1853572 - DNA, 15 bp, Homo sapiens
caaactagggtgtgt

SEQ ID NO: 1853573 - DNA, 15 bp, Homo sapiens
aaactagggtgtgtg

SEQ ID NO: 1853574 - DNA, 15 bp, Homo sapiens
aactagggtgtgtgg

SEQ ID NO: 1853575 - DNA, 15 bp, Homo sapiens
actagggtgtgtggg

SEQ ID NO: 1853576 - DNA, 15 bp, Homo sapiens
ctagggtgtgtggga

SEQ ID NO: 1853577 - DNA, 15 bp, Homo sapiens
tagggtgtgtgggaa

SEQ ID NO: 1853578 - DNA, 15 bp, Homo sapiens
agggtgtgtgggaac

SEQ ID NO: 1853579 - DNA, 15 bp, Homo sapiens
gggtgtgtgggaacc

SEQ ID NO: 1853580 - DNA, 15 bp, Homo sapiens
ggtgtgtgggaaccc

SEQ ID NO: 1853581 - DNA, 15 bp, Homo sapiens
gtgtgtgggaaccca

SEQ ID NO: 1853582 - DNA, 15 bp, Homo sapiens
tgtgtgggaacccag

SEQ ID NO: 1853583 - DNA, 15 bp, Homo sapiens
gtgtgggaacccagg

SEQ ID NO: 1853584 - DNA, 15 bp, Homo sapiens
tgtgggaacccaggg

SEQ ID NO: 1853585 - DNA, 15 bp, Homo sapiens
gtgggaacccaggga

SEQ ID NO: 1853586 - DNA, 15 bp, Homo sapiens
tgggaacccagggac

SEQ ID NO: 1853587 - DNA, 15 bp, Homo sapiens
gggaacccagggaca

SEQ ID NO: 1853588 - DNA, 15 bp, Homo sapiens
ggaacccagggacat

SEQ ID NO: 1853589 - DNA, 15 bp, Homo sapiens
gaacccagggacata

SEQ ID NO: 1853590 - DNA, 15 bp, Homo sapiens
aacccagggacatag

SEQ ID NO: 1853591 - DNA, 15 bp, Homo sapiens
acccagggacataga

SEQ ID NO: 1853592 - DNA, 15 bp, Homo sapiens
cccagggacatagag

SEQ ID NO: 1853593 - DNA, 15 bp, Homo sapiens
ccagggacatagagg

SEQ ID NO: 1853594 - DNA, 15 bp, Homo sapiens
cagggacatagaggc

SEQ ID NO: 1853595 - DNA, 15 bp, Homo sapiens
agggacatagaggct

SEQ ID NO: 1853596 - DNA, 15 bp, Homo sapiens
gggacatagaggctg

SEQ ID NO: 1853597 - DNA, 15 bp, Homo sapiens
ggacatagaggctga

SEQ ID NO: 1853598 - DNA, 15 bp, Homo sapiens
gacatagaggctgaa

SEQ ID NO: 1853599 - DNA, 15 bp, Homo sapiens
acatagaggctgaag

SEQ ID NO: 1853600 - DNA, 15 bp, Homo sapiens
catagaggctgaagt

SEQ ID NO: 1853601 - DNA, 15 bp, Homo sapiens
atagaggctgaagtt

SEQ ID NO: 1853602 - DNA, 15 bp, Homo sapiens
tagaggctgaagttt

SEQ ID NO: 1853603 - DNA, 15 bp, Homo sapiens
agaggctgaagtttt

SEQ ID NO: 1853604 - DNA, 15 bp, Homo sapiens
gaggctgaagttttg

SEQ ID NO: 1853605 - DNA, 15 bp, Homo sapiens
aggctgaagttttgg

SEQ ID NO: 1853606 - DNA, 15 bp, Homo sapiens
ggctgaagttttgga

SEQ ID NO: 1853607 - DNA, 15 bp, Homo sapiens
gctgaagttttggaa

SEQ ID NO: 1853608 - DNA, 15 bp, Homo sapiens
ctgaagttttggaac

SEQ ID NO: 1853609 - DNA, 15 bp, Homo sapiens
tgaagttttggaacc

SEQ ID NO: 1853610 - DNA, 15 bp, Homo sapiens
gaagttttggaaccc

SEQ ID NO: 1853611 - DNA, 15 bp, Homo sapiens
aagttttggaaccca

SEQ ID NO: 1853612 - DNA, 15 bp, Homo sapiens
agttttggaacccag

SEQ ID NO: 1853613 - DNA, 15 bp, Homo sapiens
gttttggaacccagc

SEQ ID NO: 1853614 - DNA, 15 bp, Homo sapiens
ttttggaacccagcc

SEQ ID NO: 1853615 - DNA, 15 bp, Homo sapiens
tttggaacccagcca

SEQ ID NO: 1853616 - DNA, 15 bp, Homo sapiens
ttggaacccagccag

SEQ ID NO: 1853617 - DNA, 15 bp, Homo sapiens
tggaacccagccagt

SEQ ID NO: 1853618 - DNA, 15 bp, Homo sapiens
ggaacccagccagtt

SEQ ID NO: 1853619 - DNA, 15 bp, Homo sapiens
gaacccagccagttc

SEQ ID NO: 1853620 - DNA, 15 bp, Homo sapiens
aacccagccagttct

SEQ ID NO: 1853621 - DNA, 15 bp, Homo sapiens
acccagccagttctt

SEQ ID NO: 1853622 - DNA, 15 bp, Homo sapiens
cccagccagttcttc

SEQ ID NO: 1853623 - DNA, 15 bp, Homo sapiens
ccagccagttcttcc

SEQ ID NO: 1853624 - DNA, 15 bp, Homo sapiens
cagccagttcttcca

SEQ ID NO: 1853625 - DNA, 15 bp, Homo sapiens
agccagttcttccaa

SEQ ID NO: 1853626 - DNA, 15 bp, Homo sapiens
gccagttcttccaag

SEQ ID NO: 1853627 - DNA, 15 bp, Homo sapiens
ccagttcttccaagg

SEQ ID NO: 1853628 - DNA, 15 bp, Homo sapiens
cagttcttccaaggg

SEQ ID NO: 1853629 - DNA, 15 bp, Homo sapiens
agttcttccaagggg

SEQ ID NO: 1853630 - DNA, 15 bp, Homo sapiens
gttcttccaaggggt

SEQ ID NO: 1853631 - DNA, 15 bp, Homo sapiens
ttcttccaaggggtg

SEQ ID NO: 1853632 - DNA, 15 bp, Homo sapiens
tcttccaaggggtga

SEQ ID NO: 1853633 - DNA, 15 bp, Homo sapiens
cttccaaggggtgag

SEQ ID NO: 1853634 - DNA, 15 bp, Homo sapiens
ttccaaggggtgagg

SEQ ID NO: 1853635 - DNA, 15 bp, Homo sapiens
tccaaggggtgaggt

SEQ ID NO: 1853636 - DNA, 15 bp, Homo sapiens
ccaaggggtgaggtc

SEQ ID NO: 1853637 - DNA, 15 bp, Homo sapiens
caaggggtgaggtca

SEQ ID NO: 1853638 - DNA, 15 bp, Homo sapiens
aaggggtgaggtcag

SEQ ID NO: 1853639 - DNA, 15 bp, Homo sapiens
aggggtgaggtcaga

SEQ ID NO: 1853640 - DNA, 15 bp, Homo sapiens
ggggtgaggtcagag

SEQ ID NO: 1853641 - DNA, 15 bp, Homo sapiens
gggtgaggtcagagg

SEQ ID NO: 1853642 - DNA, 15 bp, Homo sapiens
ggtgaggtcagaggc

SEQ ID NO: 1853643 - DNA, 15 bp, Homo sapiens
gtgaggtcagaggca

SEQ ID NO: 1853644 - DNA, 15 bp, Homo sapiens
tgaggtcagaggcag

SEQ ID NO: 1853645 - DNA, 15 bp, Homo sapiens
gaggtcagaggcaga

SEQ ID NO: 1853646 - DNA, 15 bp, Homo sapiens
aggtcagaggcagag

SEQ ID NO: 1853647 - DNA, 15 bp, Homo sapiens
ggtcagaggcagagt

SEQ ID NO: 1853648 - DNA, 15 bp, Homo sapiens
gtcagaggcagagtc

SEQ ID NO: 1853649 - DNA, 15 bp, Homo sapiens
tcagaggcagagtcc

SEQ ID NO: 1853650 - DNA, 15 bp, Homo sapiens
cagaggcagagtcca

SEQ ID NO: 1853651 - DNA, 15 bp, Homo sapiens
agaggcagagtccag

SEQ ID NO: 1853652 - DNA, 15 bp, Homo sapiens
gaggcagagtccagg

SEQ ID NO: 1853653 - DNA, 15 bp, Homo sapiens
aggcagagtccaggg

SEQ ID NO: 1853654 - DNA, 15 bp, Homo sapiens
ggcagagtccaggga

SEQ ID NO: 1853655 - DNA, 15 bp, Homo sapiens
gcagagtccagggag

SEQ ID NO: 1853656 - DNA, 15 bp, Homo sapiens
cagagtccagggagc

SEQ ID NO: 1853657 - DNA, 15 bp, Homo sapiens
agagtccagggagca

SEQ ID NO: 1853658 - DNA, 15 bp, Homo sapiens
gagtccagggagcag

SEQ ID NO: 1853659 - DNA, 15 bp, Homo sapiens
agtccagggagcagg

SEQ ID NO: 1853660 - DNA, 15 bp, Homo sapiens
gtccagggagcaggg

SEQ ID NO: 1853661 - DNA, 15 bp, Homo sapiens
tccagggagcagggc

SEQ ID NO: 1853662 - DNA, 15 bp, Homo sapiens
ccagggagcagggca

SEQ ID NO: 1853663 - DNA, 15 bp, Homo sapiens
cagggagcagggcag

SEQ ID NO: 1853664 - DNA, 15 bp, Homo sapiens
agggagcagggcagc

SEQ ID NO: 1853665 - DNA, 15 bp, Homo sapiens
gggagcagggcagct

SEQ ID NO: 1853666 - DNA, 15 bp, Homo sapiens
ggagcagggcagctc

SEQ ID NO: 1853667 - DNA, 15 bp, Homo sapiens
gagcagggcagctct

SEQ ID NO: 1853668 - DNA, 15 bp, Homo sapiens
agcagggcagctctg

SEQ ID NO: 1853669 - DNA, 15 bp, Homo sapiens
gcagggcagctctgg

SEQ ID NO: 1853670 - DNA, 15 bp, Homo sapiens
cagggcagctctggg

SEQ ID NO: 1853671 - DNA, 15 bp, Homo sapiens
agggcagctctggga

SEQ ID NO: 1853672 - DNA, 15 bp, Homo sapiens
gggcagctctgggag

SEQ ID NO: 1853673 - DNA, 15 bp, Homo sapiens
agctctgggagcctg

SEQ ID NO: 1853674 - DNA, 15 bp, Homo sapiens
ctctgggagcctggt

SEQ ID NO: 1853675 - DNA, 15 bp, Homo sapiens
tctgggagcctggtt

SEQ ID NO: 1853676 - DNA, 15 bp, Homo sapiens
ctgggagcctggttc

SEQ ID NO: 1853677 - DNA, 15 bp, Homo sapiens
tgggagcctggttcc

SEQ ID NO: 1853678 - DNA, 15 bp, Homo sapiens
gggagcctggttcct

SEQ ID NO: 1853679 - DNA, 15 bp, Homo sapiens
ggagcctggttcctc

SEQ ID NO: 1853680 - DNA, 15 bp, Homo sapiens
gagcctggttcctca

SEQ ID NO: 1853681 - DNA, 15 bp, Homo sapiens
agcctggttcctcag

SEQ ID NO: 1853682 - DNA, 15 bp, Homo sapiens
gcctggttcctcagg

SEQ ID NO: 1853683 - DNA, 15 bp, Homo sapiens
cctggttcctcaggc

SEQ ID NO: 1853684 - DNA, 15 bp, Homo sapiens
ctggttcctcaggct

SEQ ID NO: 1853685 - DNA, 15 bp, Homo sapiens
tggttcctcaggctg

SEQ ID NO: 1853686 - DNA, 15 bp, Homo sapiens
ggttcctcaggctgg

SEQ ID NO: 1853687 - DNA, 15 bp, Homo sapiens
gttcctcaggctggg

SEQ ID NO: 1853688 - DNA, 15 bp, Homo sapiens
ttcctcaggctgggc

SEQ ID NO: 1853689 - DNA, 15 bp, Homo sapiens
tcctcaggctgggct

SEQ ID NO: 1853690 - DNA, 15 bp, Homo sapiens
cctcaggctgggctg

SEQ ID NO: 1853691 - DNA, 15 bp, Homo sapiens
ctcaggctgggctgt

SEQ ID NO: 1853692 - DNA, 15 bp, Homo sapiens
tcaggctgggctgtg

SEQ ID NO: 1853693 - DNA, 15 bp, Homo sapiens
caggctgggctgtgc

SEQ ID NO: 1853694 - DNA, 15 bp, Homo sapiens
aggctgggctgtgct

SEQ ID NO: 1853695 - DNA, 15 bp, Homo sapiens
ggctgggctgtgctc

SEQ ID NO: 1853696 - DNA, 15 bp, Homo sapiens
gctgggctgtgctcg

SEQ ID NO: 1853697 - DNA, 15 bp, Homo sapiens
ctgggctgtgctcgg

SEQ ID NO: 1853698 - DNA, 15 bp, Homo sapiens
tgggctgtgctcgga

SEQ ID NO: 1853699 - DNA, 15 bp, Homo sapiens
gggctgtgctcggag

SEQ ID NO: 1853700 - DNA, 15 bp, Homo sapiens
ggctgtgctcggagc

SEQ ID NO: 1853701 - DNA, 15 bp, Homo sapiens
gctgtgctcggagcg

SEQ ID NO: 1853702 - DNA, 15 bp, Homo sapiens
ctgtgctcggagcgg

SEQ ID NO: 1853703 - DNA, 15 bp, Homo sapiens
tgtgctcggagcggt

SEQ ID NO: 1853704 - DNA, 15 bp, Homo sapiens
gtgctcggagcggta

SEQ ID NO: 1853705 - DNA, 15 bp, Homo sapiens
tgctcggagcggtag

SEQ ID NO: 1853706 - DNA, 15 bp, Homo sapiens
gctcggagcggtaga

SEQ ID NO: 1853707 - DNA, 15 bp, Homo sapiens
ctcggagcggtagat

SEQ ID NO: 1853708 - DNA, 15 bp, Homo sapiens
tcggagcggtagatc

SEQ ID NO: 1853709 - DNA, 15 bp, Homo sapiens
cggagcggtagatcc

SEQ ID NO: 1853710 - DNA, 15 bp, Homo sapiens
ggagcggtagatcct

SEQ ID NO: 1853711 - DNA, 15 bp, Homo sapiens
gagcggtagatcctg

SEQ ID NO: 1853712 - DNA, 15 bp, Homo sapiens
agcggtagatcctga

SEQ ID NO: 1853713 - DNA, 15 bp, Homo sapiens
gcggtagatcctgac

SEQ ID NO: 1853714 - DNA, 15 bp, Homo sapiens
cggtagatcctgact

SEQ ID NO: 1853715 - DNA, 15 bp, Homo sapiens
ggtagatcctgactg

SEQ ID NO: 1853716 - DNA, 15 bp, Homo sapiens
gtagatcctgactgc

SEQ ID NO: 1853717 - DNA, 15 bp, Homo sapiens
tagatcctgactgcc

SEQ ID NO: 1853718 - DNA, 15 bp, Homo sapiens
agatcctgactgccg

SEQ ID NO: 1853719 - DNA, 15 bp, Homo sapiens
gatcctgactgccgc

SEQ ID NO: 1853720 - DNA, 15 bp, Homo sapiens
atcctgactgccgct

SEQ ID NO: 1853721 - DNA, 15 bp, Homo sapiens
tcctgactgccgctg

SEQ ID NO: 1853722 - DNA, 15 bp, Homo sapiens
cctgactgccgctgt

SEQ ID NO: 1853723 - DNA, 15 bp, Homo sapiens
ctgactgccgctgta

SEQ ID NO: 1853724 - DNA, 15 bp, Homo sapiens
tgactgccgctgtat

SEQ ID NO: 1853725 - DNA, 15 bp, Homo sapiens
gactgccgctgtatg

SEQ ID NO: 1853726 - DNA, 15 bp, Homo sapiens
actgccgctgtatgc

SEQ ID NO: 1853727 - DNA, 15 bp, Homo sapiens
ctgccgctgtatgcc

SEQ ID NO: 1853728 - DNA, 15 bp, Homo sapiens
tgccgctgtatgcct

SEQ ID NO: 1853729 - DNA, 15 bp, Homo sapiens
gccgctgtatgcctg

SEQ ID NO: 1853730 - DNA, 15 bp, Homo sapiens
ccgctgtatgcctgg

SEQ ID NO: 1853731 - DNA, 15 bp, Homo sapiens
cgctgtatgcctggt

SEQ ID NO: 1853732 - DNA, 15 bp, Homo sapiens
gctgtatgcctggta

SEQ ID NO: 1853733 - DNA, 15 bp, Homo sapiens
ctgtatgcctggtaa

SEQ ID NO: 1853734 - DNA, 15 bp, Homo sapiens
tgtatgcctggtaac

SEQ ID NO: 1853735 - DNA, 15 bp, Homo sapiens
gtatgcctggtaacc

SEQ ID NO: 1853736 - DNA, 15 bp, Homo sapiens
tatgcctggtaacct

SEQ ID NO: 1853737 - DNA, 15 bp, Homo sapiens
atgcctggtaacctg

SEQ ID NO: 1853738 - DNA, 15 bp, Homo sapiens
tgcctggtaacctgg

SEQ ID NO: 1853739 - DNA, 15 bp, Homo sapiens
gcctggtaacctggc

SEQ ID NO: 1853740 - DNA, 15 bp, Homo sapiens
cctggtaacctggcc

SEQ ID NO: 1853741 - DNA, 15 bp, Homo sapiens
ctggtaacctggcca

SEQ ID NO: 1853742 - DNA, 15 bp, Homo sapiens
tggtaacctggccat

SEQ ID NO: 1853743 - DNA, 15 bp, Homo sapiens
ggtaacctggccatc

SEQ ID NO: 1853744 - DNA, 15 bp, Homo sapiens
gtaacctggccatct

SEQ ID NO: 1853745 - DNA, 15 bp, Homo sapiens
taacctggccatctt

SEQ ID NO: 1853746 - DNA, 15 bp, Homo sapiens
aacctggccatcttt

SEQ ID NO: 1853747 - DNA, 15 bp, Homo sapiens
acctggccatctttc

SEQ ID NO: 1853748 - DNA, 15 bp, Homo sapiens
cctggccatctttct

SEQ ID NO: 1853749 - DNA, 15 bp, Homo sapiens
ctggccatctttctg

SEQ ID NO: 1853750 - DNA, 15 bp, Homo sapiens
tggccatctttctgc

SEQ ID NO: 1853751 - DNA, 15 bp, Homo sapiens
ggccatctttctgcc

SEQ ID NO: 1853752 - DNA, 15 bp, Homo sapiens
gccatctttctgcct

SEQ ID NO: 1853753 - DNA, 15 bp, Homo sapiens
ccatctttctgcctc

SEQ ID NO: 1853754 - DNA, 15 bp, Homo sapiens
catctttctgcctcc

SEQ ID NO: 1853755 - DNA, 15 bp, Homo sapiens
atctttctgcctccc

SEQ ID NO: 1853756 - DNA, 15 bp, Homo sapiens
tctttctgcctccca

SEQ ID NO: 1853757 - DNA, 15 bp, Homo sapiens
ctttctgcctcccaa

SEQ ID NO: 1853758 - DNA, 15 bp, Homo sapiens
tttctgcctcccaaa

SEQ ID NO: 1853759 - DNA, 15 bp, Homo sapiens
ttctgcctcccaaag

SEQ ID NO: 1853760 - DNA, 15 bp, Homo sapiens
tctgcctcccaaagt

SEQ ID NO: 1853761 - DNA, 15 bp, Homo sapiens
ctgcctcccaaagtc

SEQ ID NO: 1853762 - DNA, 15 bp, Homo sapiens
tgcctcccaaagtct

SEQ ID NO: 1853763 - DNA, 15 bp, Homo sapiens
gcctcccaaagtctg

SEQ ID NO: 1853764 - DNA, 15 bp, Homo sapiens
cctcccaaagtctgt

SEQ ID NO: 1853765 - DNA, 15 bp, Homo sapiens
ctcccaaagtctgtc

SEQ ID NO: 1853766 - DNA, 15 bp, Homo sapiens
tcccaaagtctgtct

SEQ ID NO: 1853767 - DNA, 15 bp, Homo sapiens
cccaaagtctgtctg

SEQ ID NO: 1853768 - DNA, 15 bp, Homo sapiens
ccaaagtctgtctgt

SEQ ID NO: 1853769 - DNA, 15 bp, Homo sapiens
caaagtctgtctgtc

SEQ ID NO: 1853770 - DNA, 15 bp, Homo sapiens
aaagtctgtctgtct

SEQ ID NO: 1853771 - DNA, 15 bp, Homo sapiens
aagtctgtctgtctt

SEQ ID NO: 1853772 - DNA, 15 bp, Homo sapiens
agtctgtctgtcttg

SEQ ID NO: 1853773 - DNA, 15 bp, Homo sapiens
gtctgtctgtcttgc

SEQ ID NO: 1853774 - DNA, 15 bp, Homo sapiens
tctgtctgtcttgct

SEQ ID NO: 1853775 - DNA, 15 bp, Homo sapiens
ctgtctgtcttgcta

SEQ ID NO: 1853776 - DNA, 15 bp, Homo sapiens
tgtctgtcttgctag

SEQ ID NO: 1853777 - DNA, 15 bp, Homo sapiens
gtctgtcttgctagc

SEQ ID NO: 1853778 - DNA, 15 bp, Homo sapiens
tctgtcttgctagcc

SEQ ID NO: 1853779 - DNA, 15 bp, Homo sapiens
ctgtcttgctagccc

SEQ ID NO: 1853780 - DNA, 15 bp, Homo sapiens
tgtcttgctagccct

SEQ ID NO: 1853781 - DNA, 15 bp, Homo sapiens
gtcttgctagccctt

SEQ ID NO: 1853782 - DNA, 15 bp, Homo sapiens
tcttgctagcccttg

SEQ ID NO: 1853783 - DNA, 15 bp, Homo sapiens
cttgctagcccttgg

SEQ ID NO: 1853784 - DNA, 15 bp, Homo sapiens
ttgctagcccttggt

SEQ ID NO: 1853785 - DNA, 15 bp, Homo sapiens
tgctagcccttggtt

SEQ ID NO: 1853786 - DNA, 15 bp, Homo sapiens
gctagcccttggttt

SEQ ID NO: 1853787 - DNA, 15 bp, Homo sapiens
ctagcccttggtttc

SEQ ID NO: 1853788 - DNA, 15 bp, Homo sapiens
tagcccttggtttcc

SEQ ID NO: 1853789 - DNA, 15 bp, Homo sapiens
agcccttggtttcct

SEQ ID NO: 1853790 - DNA, 15 bp, Homo sapiens
gcccttggtttcctg

SEQ ID NO: 1853791 - DNA, 15 bp, Homo sapiens
cccttggtttcctga

SEQ ID NO: 1853792 - DNA, 15 bp, Homo sapiens
ccttggtttcctgaa

SEQ ID NO: 1853793 - DNA, 15 bp, Homo sapiens
cttggtttcctgaat

SEQ ID NO: 1853794 - DNA, 15 bp, Homo sapiens
ttggtttcctgaatg

SEQ ID NO: 1853795 - DNA, 15 bp, Homo sapiens
tggtttcctgaatgg

SEQ ID NO: 1853796 - DNA, 15 bp, Homo sapiens
ggtttcctgaatggg

SEQ ID NO: 1853797 - DNA, 15 bp, Homo sapiens
gtttcctgaatgggg

SEQ ID NO: 1853798 - DNA, 15 bp, Homo sapiens
tttcctgaatgggga

SEQ ID NO: 1853799 - DNA, 15 bp, Homo sapiens
ttcctgaatggggat

SEQ ID NO: 1853800 - DNA, 15 bp, Homo sapiens
tcctgaatggggatc

SEQ ID NO: 1853801 - DNA, 15 bp, Homo sapiens
cctgaatggggatca

SEQ ID NO: 1853802 - DNA, 15 bp, Homo sapiens
ctgaatggggatcat

SEQ ID NO: 1853803 - DNA, 15 bp, Homo sapiens
tgaatggggatcatc

SEQ ID NO: 1853804 - DNA, 15 bp, Homo sapiens
gaatggggatcatct

SEQ ID NO: 1853805 - DNA, 15 bp, Homo sapiens
aatggggatcatctt

SEQ ID NO: 1853806 - DNA, 15 bp, Homo sapiens
atggggatcatctta

SEQ ID NO: 1853807 - DNA, 15 bp, Homo sapiens
tggggatcatcttaa

SEQ ID NO: 1853808 - DNA, 15 bp, Homo sapiens
ggggatcatcttaag

SEQ ID NO: 1853809 - DNA, 15 bp, Homo sapiens
gggatcatcttaagt

SEQ ID NO: 1853810 - DNA, 15 bp, Homo sapiens
ggatcatcttaagtg

SEQ ID NO: 1853811 - DNA, 15 bp, Homo sapiens
gatcatcttaagtgt

SEQ ID NO: 1853812 - DNA, 15 bp, Homo sapiens
atcatcttaagtgtg

SEQ ID NO: 1853813 - DNA, 15 bp, Homo sapiens
tcatcttaagtgtgg

SEQ ID NO: 1853814 - DNA, 15 bp, Homo sapiens
catcttaagtgtggg

SEQ ID NO: 1853815 - DNA, 15 bp, Homo sapiens
atcttaagtgtgggg

SEQ ID NO: 1853816 - DNA, 15 bp, Homo sapiens
tcttaagtgtgggga

SEQ ID NO: 1853817 - DNA, 15 bp, Homo sapiens
cttaagtgtggggaa

SEQ ID NO: 1853818 - DNA, 15 bp, Homo sapiens
ttaagtgtggggaaa

SEQ ID NO: 1853819 - DNA, 15 bp, Homo sapiens
taagtgtggggaaag

SEQ ID NO: 1853820 - DNA, 15 bp, Homo sapiens
aagtgtggggaaagg

SEQ ID NO: 1853821 - DNA, 15 bp, Homo sapiens
agtgtggggaaaggc

SEQ ID NO: 1853822 - DNA, 15 bp, Homo sapiens
gtgtggggaaaggct

SEQ ID NO: 1853823 - DNA, 15 bp, Homo sapiens
tgtggggaaaggctg

SEQ ID NO: 1853824 - DNA, 15 bp, Homo sapiens
gtggggaaaggctgt

SEQ ID NO: 1853825 - DNA, 15 bp, Homo sapiens
tggggaaaggctgtc

SEQ ID NO: 1853826 - DNA, 15 bp, Homo sapiens
ggggaaaggctgtct

SEQ ID NO: 1853827 - DNA, 15 bp, Homo sapiens
gggaaaggctgtctg

SEQ ID NO: 1853828 - DNA, 15 bp, Homo sapiens
ggaaaggctgtctga

SEQ ID NO: 1853829 - DNA, 15 bp, Homo sapiens
gaaaggctgtctgac

SEQ ID NO: 1853830 - DNA, 15 bp, Homo sapiens
aaaggctgtctgacg

SEQ ID NO: 1853831 - DNA, 15 bp, Homo sapiens
aaggctgtctgacga

SEQ ID NO: 1853832 - DNA, 15 bp, Homo sapiens
aggctgtctgacgac

SEQ ID NO: 1853833 - DNA, 15 bp, Homo sapiens
ggctgtctgacgacc

SEQ ID NO: 1853834 - DNA, 15 bp, Homo sapiens
gctgtctgacgacct

SEQ ID NO: 1853835 - DNA, 15 bp, Homo sapiens
ctgtctgacgaccta

SEQ ID NO: 1853836 - DNA, 15 bp, Homo sapiens
tgtctgacgacctaa

SEQ ID NO: 1853837 - DNA, 15 bp, Homo sapiens
gtctgacgacctaat

SEQ ID NO: 1853838 - DNA, 15 bp, Homo sapiens
tctgacgacctaatt

SEQ ID NO: 1853839 - DNA, 15 bp, Homo sapiens
ctgacgacctaattg

SEQ ID NO: 1853840 - DNA, 15 bp, Homo sapiens
tgacgacctaattgg

SEQ ID NO: 1853841 - DNA, 15 bp, Homo sapiens
gacgacctaattggg

SEQ ID NO: 1853842 - DNA, 15 bp, Homo sapiens
acgacctaattggga

SEQ ID NO: 1853843 - DNA, 15 bp, Homo sapiens
cgacctaattgggac

SEQ ID NO: 1853844 - DNA, 15 bp, Homo sapiens
gacctaattgggaca

SEQ ID NO: 1853845 - DNA, 15 bp, Homo sapiens
acctaattgggacag

SEQ ID NO: 1853846 - DNA, 15 bp, Homo sapiens
cctaattgggacagc

SEQ ID NO: 1853847 - DNA, 15 bp, Homo sapiens
ctaattgggacagct

SEQ ID NO: 1853848 - DNA, 15 bp, Homo sapiens
taattgggacagctc

SEQ ID NO: 1853849 - DNA, 15 bp, Homo sapiens
aattgggacagctct

SEQ ID NO: 1853850 - DNA, 15 bp, Homo sapiens
attgggacagctctt

SEQ ID NO: 1853851 - DNA, 15 bp, Homo sapiens
ttgggacagctcttt

SEQ ID NO: 1853852 - DNA, 15 bp, Homo sapiens
tgggacagctctttt

SEQ ID NO: 1853853 - DNA, 15 bp, Homo sapiens
gggacagctcttttg

SEQ ID NO: 1853854 - DNA, 15 bp, Homo sapiens
ggacagctcttttga

SEQ ID NO: 1853855 - DNA, 15 bp, Homo sapiens
gacagctcttttgac

SEQ ID NO: 1853856 - DNA, 15 bp, Homo sapiens
acagctcttttgacc

SEQ ID NO: 1853857 - DNA, 15 bp, Homo sapiens
cagctcttttgaccc

SEQ ID NO: 1853858 - DNA, 15 bp, Homo sapiens
agctcttttgacccg

SEQ ID NO: 1853859 - DNA, 15 bp, Homo sapiens
gctcttttgacccga

SEQ ID NO: 1853860 - DNA, 15 bp, Homo sapiens
ctcttttgacccgaa

SEQ ID NO: 1853861 - DNA, 15 bp, Homo sapiens
tcttttgacccgaag

SEQ ID NO: 1853862 - DNA, 15 bp, Homo sapiens
cttttgacccgaagc

SEQ ID NO: 1853863 - DNA, 15 bp, Homo sapiens
ttttgacccgaagcc

SEQ ID NO: 1853864 - DNA, 15 bp, Homo sapiens
tttgacccgaagcca

SEQ ID NO: 1853865 - DNA, 15 bp, Homo sapiens
ttgacccgaagccaa

SEQ ID NO: 1853866 - DNA, 15 bp, Homo sapiens
tgacccgaagccaag

SEQ ID NO: 1853867 - DNA, 15 bp, Homo sapiens
gacccgaagccaagc

SEQ ID NO: 1853868 - DNA, 15 bp, Homo sapiens
acccgaagccaagcc

SEQ ID NO: 1853869 - DNA, 15 bp, Homo sapiens
cccgaagccaagccc

SEQ ID NO: 1853870 - DNA, 15 bp, Homo sapiens
ccgaagccaagcccc

SEQ ID NO: 1853871 - DNA, 15 bp, Homo sapiens
cgaagccaagcccca

SEQ ID NO: 1853872 - DNA, 15 bp, Homo sapiens
gaagccaagccccat

SEQ ID NO: 1853873 - DNA, 15 bp, Homo sapiens
aagccaagccccatc

SEQ ID NO: 1853874 - DNA, 15 bp, Homo sapiens
agccaagccccatcc

SEQ ID NO: 1853875 - DNA, 15 bp, Homo sapiens
gccaagccccatcca

SEQ ID NO: 1853876 - DNA, 15 bp, Homo sapiens
ccaagccccatccaa

SEQ ID NO: 1853877 - DNA, 15 bp, Homo sapiens
caagccccatccaag

SEQ ID NO: 1853878 - DNA, 15 bp, Homo sapiens
aagccccatccaagt

SEQ ID NO: 1853879 - DNA, 15 bp, Homo sapiens
agccccatccaagtt

SEQ ID NO: 1853880 - DNA, 15 bp, Homo sapiens
gccccatccaagttc

SEQ ID NO: 1853881 - DNA, 15 bp, Homo sapiens
ccccatccaagttca

SEQ ID NO: 1853882 - DNA, 15 bp, Homo sapiens
cccatccaagttcag

SEQ ID NO: 1853883 - DNA, 15 bp, Homo sapiens
ccatccaagttcagc

SEQ ID NO: 1853884 - DNA, 15 bp, Homo sapiens
catccaagttcagca

SEQ ID NO: 1853885 - DNA, 15 bp, Homo sapiens
atccaagttcagcaa

SEQ ID NO: 1853886 - DNA, 15 bp, Homo sapiens
tccaagttcagcaaa

SEQ ID NO: 1853887 - DNA, 15 bp, Homo sapiens
ccaagttcagcaaat

SEQ ID NO: 1853888 - DNA, 15 bp, Homo sapiens
caagttcagcaaatg

SEQ ID NO: 1853889 - DNA, 15 bp, Homo sapiens
aagttcagcaaatgg

SEQ ID NO: 1853890 - DNA, 15 bp, Homo sapiens
agttcagcaaatgga

SEQ ID NO: 1853891 - DNA, 15 bp, Homo sapiens
gttcagcaaatggaa

SEQ ID NO: 1853892 - DNA, 15 bp, Homo sapiens
ttcagcaaatggaag

SEQ ID NO: 1853893 - DNA, 15 bp, Homo sapiens
tcagcaaatggaaga

SEQ ID NO: 1853894 - DNA, 15 bp, Homo sapiens
cagcaaatggaagaa

SEQ ID NO: 1853895 - DNA, 15 bp, Homo sapiens
agcaaatggaagaag

SEQ ID NO: 1853896 - DNA, 15 bp, Homo sapiens
gcaaatggaagaagc

SEQ ID NO: 1853897 - DNA, 15 bp, Homo sapiens
caaatggaagaagcg

SEQ ID NO: 1853898 - DNA, 15 bp, Homo sapiens
aaatggaagaagcgg

SEQ ID NO: 1853899 - DNA, 15 bp, Homo sapiens
aatggaagaagcggg

SEQ ID NO: 1853900 - DNA, 15 bp, Homo sapiens
atggaagaagcggga

SEQ ID NO: 1853901 - DNA, 15 bp, Homo sapiens
tggaagaagcgggaa

SEQ ID NO: 1853902 - DNA, 15 bp, Homo sapiens
ggaagaagcgggaac

SEQ ID NO: 1853903 - DNA, 15 bp, Homo sapiens
gaagaagcgggaaca

SEQ ID NO: 1853904 - DNA, 15 bp, Homo sapiens
aagaagcgggaacat

SEQ ID NO: 1853905 - DNA, 15 bp, Homo sapiens
agaagcgggaacatg

SEQ ID NO: 1853906 - DNA, 15 bp, Homo sapiens
gaagcgggaacatgt

SEQ ID NO: 1853907 - DNA, 15 bp, Homo sapiens
aagcgggaacatgtt

SEQ ID NO: 1853908 - DNA, 15 bp, Homo sapiens
agcgggaacatgttc

SEQ ID NO: 1853909 - DNA, 15 bp, Homo sapiens
gcgggaacatgttca

SEQ ID NO: 1853910 - DNA, 15 bp, Homo sapiens
cgggaacatgttcag

SEQ ID NO: 1853911 - DNA, 15 bp, Homo sapiens
gggaacatgttcagt

SEQ ID NO: 1853912 - DNA, 15 bp, Homo sapiens
ggaacatgttcagtt

SEQ ID NO: 1853913 - DNA, 15 bp, Homo sapiens
gaacatgttcagttg

SEQ ID NO: 1853914 - DNA, 15 bp, Homo sapiens
aacatgttcagttgg

SEQ ID NO: 1853915 - DNA, 15 bp, Homo sapiens
acatgttcagttggt

SEQ ID NO: 1853916 - DNA, 15 bp, Homo sapiens
catgttcagttggtg

SEQ ID NO: 1853917 - DNA, 15 bp, Homo sapiens
atgttcagttggtga

SEQ ID NO: 1853918 - DNA, 15 bp, Homo sapiens
tgttcagttggtgag

SEQ ID NO: 1853919 - DNA, 15 bp, Homo sapiens
gttcagttggtgagg

SEQ ID NO: 1853920 - DNA, 15 bp, Homo sapiens
ttcagttggtgaggt

SEQ ID NO: 1853921 - DNA, 15 bp, Homo sapiens
tcagttggtgaggtc

SEQ ID NO: 1853922 - DNA, 15 bp, Homo sapiens
cagttggtgaggtct

SEQ ID NO: 1853923 - DNA, 15 bp, Homo sapiens
agttggtgaggtcta

SEQ ID NO: 1853924 - DNA, 15 bp, Homo sapiens
gttggtgaggtctat

SEQ ID NO: 1853925 - DNA, 15 bp, Homo sapiens
ttggtgaggtctata

SEQ ID NO: 1853926 - DNA, 15 bp, Homo sapiens
tggtgaggtctatag

SEQ ID NO: 1853927 - DNA, 15 bp, Homo sapiens
ggtgaggtctatagg

SEQ ID NO: 1853928 - DNA, 15 bp, Homo sapiens
gtgaggtctataggc

SEQ ID NO: 1853929 - DNA, 15 bp, Homo sapiens
tgaggtctataggca

SEQ ID NO: 1853930 - DNA, 15 bp, Homo sapiens
gaggtctataggcac

SEQ ID NO: 1853931 - DNA, 15 bp, Homo sapiens
aggtctataggcaca

SEQ ID NO: 1853932 - DNA, 15 bp, Homo sapiens
ggtctataggcacag

SEQ ID NO: 1853933 - DNA, 15 bp, Homo sapiens
gtctataggcacaga

SEQ ID NO: 1853934 - DNA, 15 bp, Homo sapiens
tctataggcacagac

SEQ ID NO: 1853935 - DNA, 15 bp, Homo sapiens
ctataggcacagact

SEQ ID NO: 1853936 - DNA, 15 bp, Homo sapiens
tataggcacagactg

SEQ ID NO: 1853937 - DNA, 15 bp, Homo sapiens
ataggcacagactgg

SEQ ID NO: 1853938 - DNA, 15 bp, Homo sapiens
taggcacagactgga

SEQ ID NO: 1853939 - DNA, 15 bp, Homo sapiens
aggcacagactggat

SEQ ID NO: 1853940 - DNA, 15 bp, Homo sapiens
ggcacagactggatt

SEQ ID NO: 1853941 - DNA, 15 bp, Homo sapiens
gcacagactggatta

SEQ ID NO: 1853942 - DNA, 15 bp, Homo sapiens
cacagactggattag

SEQ ID NO: 1853943 - DNA, 15 bp, Homo sapiens
acagactggattagg

SEQ ID NO: 1853944 - DNA, 15 bp, Homo sapiens
cagactggattaggt

SEQ ID NO: 1853945 - DNA, 15 bp, Homo sapiens
agactggattaggtc

SEQ ID NO: 1853946 - DNA, 15 bp, Homo sapiens
gactggattaggtcc

SEQ ID NO: 1853947 - DNA, 15 bp, Homo sapiens
actggattaggtcct

SEQ ID NO: 1853948 - DNA, 15 bp, Homo sapiens
ctggattaggtccta

SEQ ID NO: 1853949 - DNA, 15 bp, Homo sapiens
tggattaggtcctaa

SEQ ID NO: 1853950 - DNA, 15 bp, Homo sapiens
ggattaggtcctaaa

SEQ ID NO: 1853951 - DNA, 15 bp, Homo sapiens
gattaggtcctaaat

SEQ ID NO: 1853952 - DNA, 15 bp, Homo sapiens
attaggtcctaaatc

SEQ ID NO: 1853953 - DNA, 15 bp, Homo sapiens
ttaggtcctaaatca

SEQ ID NO: 1853954 - DNA, 15 bp, Homo sapiens
taggtcctaaatcat

SEQ ID NO: 1853955 - DNA, 15 bp, Homo sapiens
aggtcctaaatcatg

SEQ ID NO: 1853956 - DNA, 15 bp, Homo sapiens
ggtcctaaatcatgg

SEQ ID NO: 1853957 - DNA, 15 bp, Homo sapiens
gtcctaaatcatggt

SEQ ID NO: 1853958 - DNA, 15 bp, Homo sapiens
tcctaaatcatggtg

SEQ ID NO: 1853959 - DNA, 15 bp, Homo sapiens
cctaaatcatggtgg

SEQ ID NO: 1853960 - DNA, 15 bp, Homo sapiens
ctaaatcatggtgga

SEQ ID NO: 1853961 - DNA, 15 bp, Homo sapiens
taaatcatggtggaa

SEQ ID NO: 1853962 - DNA, 15 bp, Homo sapiens
aaatcatggtggaaa

SEQ ID NO: 1853963 - DNA, 15 bp, Homo sapiens
aatcatggtggaaat

SEQ ID NO: 1853964 - DNA, 15 bp, Homo sapiens
atcatggtggaaatt

SEQ ID NO: 1853965 - DNA, 15 bp, Homo sapiens
tcatggtggaaattt

SEQ ID NO: 1853966 - DNA, 15 bp, Homo sapiens
catggtggaaatttt

SEQ ID NO: 1853967 - DNA, 15 bp, Homo sapiens
atggtggaaattttc

SEQ ID NO: 1853968 - DNA, 15 bp, Homo sapiens
tggtggaaattttcc

SEQ ID NO: 1853969 - DNA, 15 bp, Homo sapiens
ggtggaaattttcct

SEQ ID NO: 1853970 - DNA, 15 bp, Homo sapiens
gtggaaattttcctg

SEQ ID NO: 1853971 - DNA, 15 bp, Homo sapiens
tggaaattttcctgg

SEQ ID NO: 1853972 - DNA, 15 bp, Homo sapiens
ggaaattttcctggc

SEQ ID NO: 1853973 - DNA, 15 bp, Homo sapiens
gaaattttcctggca

SEQ ID NO: 1853974 - DNA, 15 bp, Homo sapiens
aaattttcctggcac

SEQ ID NO: 1853975 - DNA, 15 bp, Homo sapiens
aattttcctggcacg

SEQ ID NO: 1853976 - DNA, 15 bp, Homo sapiens
attttcctggcacgg

SEQ ID NO: 1853977 - DNA, 15 bp, Homo sapiens
ttttcctggcacggg

SEQ ID NO: 1853978 - DNA, 15 bp, Homo sapiens
tttcctggcacggga

SEQ ID NO: 1853979 - DNA, 15 bp, Homo sapiens
ttcctggcacgggac

SEQ ID NO: 1853980 - DNA, 15 bp, Homo sapiens
tcctggcacgggaca

SEQ ID NO: 1853981 - DNA, 15 bp, Homo sapiens
cctggcacgggacaa

SEQ ID NO: 1853982 - DNA, 15 bp, Homo sapiens
ctggcacgggacaaa

SEQ ID NO: 1853983 - DNA, 15 bp, Homo sapiens
tggcacgggacaaat

SEQ ID NO: 1853984 - DNA, 15 bp, Homo sapiens
ggcacgggacaaatc

SEQ ID NO: 1853985 - DNA, 15 bp, Homo sapiens
gcacgggacaaatcc

SEQ ID NO: 1853986 - DNA, 15 bp, Homo sapiens
cacgggacaaatcct

SEQ ID NO: 1853987 - DNA, 15 bp, Homo sapiens
acgggacaaatcctt

SEQ ID NO: 1853988 - DNA, 15 bp, Homo sapiens
cgggacaaatccttt

SEQ ID NO: 1853989 - DNA, 15 bp, Homo sapiens
gggacaaatcctttt

SEQ ID NO: 1853990 - DNA, 15 bp, Homo sapiens
ggacaaatccttttg

SEQ ID NO: 1853991 - DNA, 15 bp, Homo sapiens
gacaaatccttttgt

SEQ ID NO: 1853992 - DNA, 15 bp, Homo sapiens
acaaatccttttgta

SEQ ID NO: 1853993 - DNA, 15 bp, Homo sapiens
caaatccttttgtaa

SEQ ID NO: 1853994 - DNA, 15 bp, Homo sapiens
aaatccttttgtaaa

SEQ ID NO: 1853995 - DNA, 15 bp, Homo sapiens
aatccttttgtaaac

SEQ ID NO: 1853996 - DNA, 15 bp, Homo sapiens
atccttttgtaaaca

SEQ ID NO: 1853997 - DNA, 15 bp, Homo sapiens
tccttttgtaaacaa

SEQ ID NO: 1853998 - DNA, 15 bp, Homo sapiens
ccttttgtaaacaag

SEQ ID NO: 1853999 - DNA, 15 bp, Homo sapiens
cttttgtaaacaaga

SEQ ID NO: 1854000 - DNA, 15 bp, Homo sapiens
ttttgtaaacaagaa

SEQ ID NO: 1854001 - DNA, 15 bp, Homo sapiens
tttgtaaacaagaac

SEQ ID NO: 1854002 - DNA, 15 bp, Homo sapiens
ttgtaaacaagaaca

SEQ ID NO: 1854003 - DNA, 15 bp, Homo sapiens
tgtaaacaagaacat

SEQ ID NO: 1854004 - DNA, 15 bp, Homo sapiens
gtaaacaagaacatt

SEQ ID NO: 1854005 - DNA, 15 bp, Homo sapiens
taaacaagaacattc

SEQ ID NO: 1854006 - DNA, 15 bp, Homo sapiens
aaacaagaacattca

SEQ ID NO: 1854007 - DNA, 15 bp, Homo sapiens
aacaagaacattcat

SEQ ID NO: 1854008 - DNA, 15 bp, Homo sapiens
acaagaacattcatc

SEQ ID NO: 1854009 - DNA, 15 bp, Homo sapiens
caagaacattcatct

SEQ ID NO: 1854010 - DNA, 15 bp, Homo sapiens
aagaacattcatctt

SEQ ID NO: 1854011 - DNA, 15 bp, Homo sapiens
agaacattcatcttt

SEQ ID NO: 1854012 - DNA, 15 bp, Homo sapiens
gaacattcatctttc

SEQ ID NO: 1854013 - DNA, 15 bp, Homo sapiens
aacattcatctttct

SEQ ID NO: 1854014 - DNA, 15 bp, Homo sapiens
acattcatctttctt

SEQ ID NO: 1854015 - DNA, 15 bp, Homo sapiens
cattcatctttcttt

SEQ ID NO: 1854016 - DNA, 15 bp, Homo sapiens
attcatctttctttt

SEQ ID NO: 1854017 - DNA, 15 bp, Homo sapiens
ttcatctttcttttg

SEQ ID NO: 1854018 - DNA, 15 bp, Homo sapiens
tcatctttcttttga

SEQ ID NO: 1854019 - DNA, 15 bp, Homo sapiens
catctttcttttgac

SEQ ID NO: 1854020 - DNA, 15 bp, Homo sapiens
atctttcttttgact

SEQ ID NO: 1854021 - DNA, 15 bp, Homo sapiens
tctttcttttgactg

SEQ ID NO: 1854022 - DNA, 15 bp, Homo sapiens
ctttcttttgactga

SEQ ID NO: 1854023 - DNA, 15 bp, Homo sapiens
tttcttttgactgac

SEQ ID NO: 1854024 - DNA, 15 bp, Homo sapiens
ttcttttgactgaca

SEQ ID NO: 1854025 - DNA, 15 bp, Homo sapiens
tcttttgactgacat

SEQ ID NO: 1854026 - DNA, 15 bp, Homo sapiens
cttttgactgacatg

SEQ ID NO: 1854027 - DNA, 15 bp, Homo sapiens
ttttgactgacatgc

SEQ ID NO: 1854028 - DNA, 15 bp, Homo sapiens
tttgactgacatgcc

SEQ ID NO: 1854029 - DNA, 15 bp, Homo sapiens
ttgactgacatgcct

SEQ ID NO: 1854030 - DNA, 15 bp, Homo sapiens
tgactgacatgcctg

SEQ ID NO: 1854031 - DNA, 15 bp, Homo sapiens
gactgacatgcctgg

SEQ ID NO: 1854032 - DNA, 15 bp, Homo sapiens
actgacatgcctggt

SEQ ID NO: 1854033 - DNA, 15 bp, Homo sapiens
ctgacatgcctggta

SEQ ID NO: 1854034 - DNA, 15 bp, Homo sapiens
tgacatgcctggtag

SEQ ID NO: 1854035 - DNA, 15 bp, Homo sapiens
gacatgcctggtagg

SEQ ID NO: 1854036 - DNA, 15 bp, Homo sapiens
acatgcctggtaggg

SEQ ID NO: 1854037 - DNA, 15 bp, Homo sapiens
catgcctggtagggc

SEQ ID NO: 1854038 - DNA, 15 bp, Homo sapiens
atgcctggtagggca

SEQ ID NO: 1854039 - DNA, 15 bp, Homo sapiens
tgcctggtagggcat

SEQ ID NO: 1854040 - DNA, 15 bp, Homo sapiens
gcctggtagggcatg

SEQ ID NO: 1854041 - DNA, 15 bp, Homo sapiens
cctggtagggcatgt

SEQ ID NO: 1854042 - DNA, 15 bp, Homo sapiens
ctggtagggcatgtg

SEQ ID NO: 1854043 - DNA, 15 bp, Homo sapiens
tggtagggcatgtgc

SEQ ID NO: 1854044 - DNA, 15 bp, Homo sapiens
ggtagggcatgtgcc

SEQ ID NO: 1854045 - DNA, 15 bp, Homo sapiens
gtagggcatgtgcct

SEQ ID NO: 1854046 - DNA, 15 bp, Homo sapiens
tagggcatgtgcctc

SEQ ID NO: 1854047 - DNA, 15 bp, Homo sapiens
agggcatgtgcctct

SEQ ID NO: 1854048 - DNA, 15 bp, Homo sapiens
gggcatgtgcctctc

SEQ ID NO: 1854049 - DNA, 15 bp, Homo sapiens
ggcatgtgcctctca

SEQ ID NO: 1854050 - DNA, 15 bp, Homo sapiens
gcatgtgcctctcag

SEQ ID NO: 1854051 - DNA, 15 bp, Homo sapiens
catgtgcctctcaga

SEQ ID NO: 1854052 - DNA, 15 bp, Homo sapiens
atgtgcctctcagaa

SEQ ID NO: 1854053 - DNA, 15 bp, Homo sapiens
tgtgcctctcagaag

SEQ ID NO: 1854054 - DNA, 15 bp, Homo sapiens
gtgcctctcagaagc

SEQ ID NO: 1854055 - DNA, 15 bp, Homo sapiens
tgcctctcagaagct

SEQ ID NO: 1854056 - DNA, 15 bp, Homo sapiens
gcctctcagaagctc

SEQ ID NO: 1854057 - DNA, 15 bp, Homo sapiens
cctctcagaagctcc

SEQ ID NO: 1854058 - DNA, 15 bp, Homo sapiens
ctctcagaagctcca

SEQ ID NO: 1854059 - DNA, 15 bp, Homo sapiens
tctcagaagctccat

SEQ ID NO: 1854060 - DNA, 15 bp, Homo sapiens
ctcagaagctccatg

SEQ ID NO: 1854061 - DNA, 15 bp, Homo sapiens
tcagaagctccatgt

SEQ ID NO: 1854062 - DNA, 15 bp, Homo sapiens
cagaagctccatgtc

SEQ ID NO: 1854063 - DNA, 15 bp, Homo sapiens
agaagctccatgtca

SEQ ID NO: 1854064 - DNA, 15 bp, Homo sapiens
gaagctccatgtcat

SEQ ID NO: 1854065 - DNA, 15 bp, Homo sapiens
aagctccatgtcatc

SEQ ID NO: 1854066 - DNA, 15 bp, Homo sapiens
agctccatgtcatct

SEQ ID NO: 1854067 - DNA, 15 bp, Homo sapiens
gctccatgtcatctg

SEQ ID NO: 1854068 - DNA, 15 bp, Homo sapiens
ctccatgtcatctga

SEQ ID NO: 1854069 - DNA, 15 bp, Homo sapiens
tccatgtcatctgat

SEQ ID NO: 1854070 - DNA, 15 bp, Homo sapiens
ccatgtcatctgatc

SEQ ID NO: 1854071 - DNA, 15 bp, Homo sapiens
catgtcatctgatct

SEQ ID NO: 1854072 - DNA, 15 bp, Homo sapiens
atgtcatctgatctc

SEQ ID NO: 1854073 - DNA, 15 bp, Homo sapiens
tgtcatctgatctca

SEQ ID NO: 1854074 - DNA, 15 bp, Homo sapiens
gtcatctgatctcat

SEQ ID NO: 1854075 - DNA, 15 bp, Homo sapiens
tcatctgatctcatt

SEQ ID NO: 1854076 - DNA, 15 bp, Homo sapiens
catctgatctcattt

SEQ ID NO: 1854077 - DNA, 15 bp, Homo sapiens
atctgatctcatttg

SEQ ID NO: 1854078 - DNA, 15 bp, Homo sapiens
tctgatctcatttgg

SEQ ID NO: 1854079 - DNA, 15 bp, Homo sapiens
ctgatctcatttggg

SEQ ID NO: 1854080 - DNA, 15 bp, Homo sapiens
tgatctcatttggga

SEQ ID NO: 1854081 - DNA, 15 bp, Homo sapiens
gatctcatttgggat

SEQ ID NO: 1854082 - DNA, 15 bp, Homo sapiens
atctcatttgggatt

SEQ ID NO: 1854083 - DNA, 15 bp, Homo sapiens
tctcatttgggattt

SEQ ID NO: 1854084 - DNA, 15 bp, Homo sapiens
ctcatttgggattta

SEQ ID NO: 1854085 - DNA, 15 bp, Homo sapiens
tcatttgggatttag

SEQ ID NO: 1854086 - DNA, 15 bp, Homo sapiens
catttgggatttagt

SEQ ID NO: 1854087 - DNA, 15 bp, Homo sapiens
atttgggatttagtg

SEQ ID NO: 1854088 - DNA, 15 bp, Homo sapiens
tttgggatttagtgt

SEQ ID NO: 1854089 - DNA, 15 bp, Homo sapiens
ttgggatttagtgtt

SEQ ID NO: 1854090 - DNA, 15 bp, Homo sapiens
tgggatttagtgttt

SEQ ID NO: 1854091 - DNA, 15 bp, Homo sapiens
gggatttagtgtttt

SEQ ID NO: 1854092 - DNA, 15 bp, Homo sapiens
ggatttagtgttttt

SEQ ID NO: 1854093 - DNA, 15 bp, Homo sapiens
gatttagtgttttta

SEQ ID NO: 1854094 - DNA, 15 bp, Homo sapiens
atttagtgtttttat

SEQ ID NO: 1854095 - DNA, 15 bp, Homo sapiens
tttagtgtttttatt

SEQ ID NO: 1854096 - DNA, 15 bp, Homo sapiens
ttagtgtttttattt

SEQ ID NO: 1854097 - DNA, 15 bp, Homo sapiens
tagtgtttttatttg

SEQ ID NO: 1854098 - DNA, 15 bp, Homo sapiens
agtgtttttatttga

SEQ ID NO: 1854099 - DNA, 15 bp, Homo sapiens
gtgtttttatttgaa

SEQ ID NO: 1854100 - DNA, 15 bp, Homo sapiens
tgtttttatttgaaa

SEQ ID NO: 1854101 - DNA, 15 bp, Homo sapiens
gtttttatttgaaaa

SEQ ID NO: 1854102 - DNA, 15 bp, Homo sapiens
tttttatttgaaaat

SEQ ID NO: 1854103 - DNA, 15 bp, Homo sapiens
ttttatttgaaaatg

SEQ ID NO: 1854104 - DNA, 15 bp, Homo sapiens
tttatttgaaaatgt

SEQ ID NO: 1854105 - DNA, 15 bp, Homo sapiens
ttatttgaaaatgta

SEQ ID NO: 1854106 - DNA, 15 bp, Homo sapiens
tatttgaaaatgtag

SEQ ID NO: 1854107 - DNA, 15 bp, Homo sapiens
atttgaaaatgtagc

SEQ ID NO: 1854108 - DNA, 15 bp, Homo sapiens
tttgaaaatgtagct

SEQ ID NO: 1854109 - DNA, 15 bp, Homo sapiens
ttgaaaatgtagctg

SEQ ID NO: 1854110 - DNA, 15 bp, Homo sapiens
tgaaaatgtagctgc

SEQ ID NO: 1854111 - DNA, 15 bp, Homo sapiens
gaaaatgtagctgcc

SEQ ID NO: 1854112 - DNA, 15 bp, Homo sapiens
aaaatgtagctgccc

SEQ ID NO: 1854113 - DNA, 15 bp, Homo sapiens
aaatgtagctgccct

SEQ ID NO: 1854114 - DNA, 15 bp, Homo sapiens
aatgtagctgccctg

SEQ ID NO: 1854115 - DNA, 15 bp, Homo sapiens
atgtagctgccctga

SEQ ID NO: 1854116 - DNA, 15 bp, Homo sapiens
tgtagctgccctgag

SEQ ID NO: 1854117 - DNA, 15 bp, Homo sapiens
gtagctgccctgagg

SEQ ID NO: 1854118 - DNA, 15 bp, Homo sapiens
tagctgccctgagga

SEQ ID NO: 1854119 - DNA, 15 bp, Homo sapiens
agctgccctgaggaa

SEQ ID NO: 1854120 - DNA, 15 bp, Homo sapiens
gctgccctgaggaac

SEQ ID NO: 1854121 - DNA, 15 bp, Homo sapiens
ctgccctgaggaaca

SEQ ID NO: 1854122 - DNA, 15 bp, Homo sapiens
tgccctgaggaacag

SEQ ID NO: 1854123 - DNA, 15 bp, Homo sapiens
gccctgaggaacagc

SEQ ID NO: 1854124 - DNA, 15 bp, Homo sapiens
ccctgaggaacagca

SEQ ID NO: 1854125 - DNA, 15 bp, Homo sapiens
cctgaggaacagcag

SEQ ID NO: 1854126 - DNA, 15 bp, Homo sapiens
ctgaggaacagcagt

SEQ ID NO: 1854127 - DNA, 15 bp, Homo sapiens
tgaggaacagcagtt

SEQ ID NO: 1854128 - DNA, 15 bp, Homo sapiens
gaggaacagcagtta

SEQ ID NO: 1854129 - DNA, 15 bp, Homo sapiens
aggaacagcagttag

SEQ ID NO: 1854130 - DNA, 15 bp, Homo sapiens
ggaacagcagttagg

SEQ ID NO: 1854131 - DNA, 15 bp, Homo sapiens
gaacagcagttagga

SEQ ID NO: 1854132 - DNA, 15 bp, Homo sapiens
aacagcagttaggag

SEQ ID NO: 1854133 - DNA, 15 bp, Homo sapiens
acagcagttaggagc

SEQ ID NO: 1854134 - DNA, 15 bp, Homo sapiens
cagcagttaggagcc

SEQ ID NO: 1854135 - DNA, 15 bp, Homo sapiens
agcagttaggagcca

SEQ ID NO: 1854136 - DNA, 15 bp, Homo sapiens
gcagttaggagccaa

SEQ ID NO: 1854137 - DNA, 15 bp, Homo sapiens
cagttaggagccaac

SEQ ID NO: 1854138 - DNA, 15 bp, Homo sapiens
agttaggagccaacc

SEQ ID NO: 1854139 - DNA, 15 bp, Homo sapiens
gttaggagccaaccc

SEQ ID NO: 1854140 - DNA, 15 bp, Homo sapiens
ttaggagccaacccc

SEQ ID NO: 1854141 - DNA, 15 bp, Homo sapiens
taggagccaaccccc

SEQ ID NO: 1854142 - DNA, 15 bp, Homo sapiens
aggagccaaccccca

SEQ ID NO: 1854143 - DNA, 15 bp, Homo sapiens
ggagccaacccccag

SEQ ID NO: 1854144 - DNA, 15 bp, Homo sapiens
gagccaacccccagt

SEQ ID NO: 1854145 - DNA, 15 bp, Homo sapiens
agccaacccccagtt

SEQ ID NO: 1854146 - DNA, 15 bp, Homo sapiens
gccaacccccagttt

SEQ ID NO: 1854147 - DNA, 15 bp, Homo sapiens
ccaacccccagttta

SEQ ID NO: 1854148 - DNA, 15 bp, Homo sapiens
caacccccagtttaa

SEQ ID NO: 1854149 - DNA, 15 bp, Homo sapiens
aacccccagtttaag

SEQ ID NO: 1854150 - DNA, 15 bp, Homo sapiens
acccccagtttaagc

SEQ ID NO: 1854151 - DNA, 15 bp, Homo sapiens
cccccagtttaagct

SEQ ID NO: 1854152 - DNA, 15 bp, Homo sapiens
ccccagtttaagctt

SEQ ID NO: 1854153 - DNA, 15 bp, Homo sapiens
cccagtttaagcttc

SEQ ID NO: 1854154 - DNA, 15 bp, Homo sapiens
ccagtttaagcttca

SEQ ID NO: 1854155 - DNA, 15 bp, Homo sapiens
cagtttaagcttcaa

SEQ ID NO: 1854156 - DNA, 15 bp, Homo sapiens
agtttaagcttcaag

SEQ ID NO: 1854157 - DNA, 15 bp, Homo sapiens
gtttaagcttcaagt

SEQ ID NO: 1854158 - DNA, 15 bp, Homo sapiens
tttaagcttcaagtc

SEQ ID NO: 1854159 - DNA, 15 bp, Homo sapiens
ttaagcttcaagtca

SEQ ID NO: 1854160 - DNA, 15 bp, Homo sapiens
taagcttcaagtcat

SEQ ID NO: 1854161 - DNA, 15 bp, Homo sapiens
aagcttcaagtcatg

SEQ ID NO: 1854162 - DNA, 15 bp, Homo sapiens
agcttcaagtcatgg

SEQ ID NO: 1854163 - DNA, 15 bp, Homo sapiens
gcttcaagtcatgga

SEQ ID NO: 1854164 - DNA, 15 bp, Homo sapiens
cttcaagtcatggaa

SEQ ID NO: 1854165 - DNA, 15 bp, Homo sapiens
ttcaagtcatggaaa

SEQ ID NO: 1854166 - DNA, 15 bp, Homo sapiens
tcaagtcatggaaac

SEQ ID NO: 1854167 - DNA, 15 bp, Homo sapiens
caagtcatggaaact

SEQ ID NO: 1854168 - DNA, 15 bp, Homo sapiens
aagtcatggaaactg

SEQ ID NO: 1854169 - DNA, 15 bp, Homo sapiens
agtcatggaaactgg

SEQ ID NO: 1854170 - DNA, 15 bp, Homo sapiens
gtcatggaaactggc

SEQ ID NO: 1854171 - DNA, 15 bp, Homo sapiens
tcatggaaactggcc

SEQ ID NO: 1854172 - DNA, 15 bp, Homo sapiens
catggaaactggcct

SEQ ID NO: 1854173 - DNA, 15 bp, Homo sapiens
atggaaactggcctg

SEQ ID NO: 1854174 - DNA, 15 bp, Homo sapiens
tggaaactggcctgg

SEQ ID NO: 1854175 - DNA, 15 bp, Homo sapiens
ggaaactggcctggt

SEQ ID NO: 1854176 - DNA, 15 bp, Homo sapiens
gaaactggcctggtt

SEQ ID NO: 1854177 - DNA, 15 bp, Homo sapiens
aaactggcctggttt

SEQ ID NO: 1854178 - DNA, 15 bp, Homo sapiens
aactggcctggttta

SEQ ID NO: 1854179 - DNA, 15 bp, Homo sapiens
actggcctggtttac

SEQ ID NO: 1854180 - DNA, 15 bp, Homo sapiens
ctggcctggtttacc

SEQ ID NO: 1854181 - DNA, 15 bp, Homo sapiens
tggcctggtttaccc

SEQ ID NO: 1854182 - DNA, 15 bp, Homo sapiens
ggcctggtttaccca

SEQ ID NO: 1854183 - DNA, 15 bp, Homo sapiens
gcctggtttacccag

SEQ ID NO: 1854184 - DNA, 15 bp, Homo sapiens
cctggtttacccaga

SEQ ID NO: 1854185 - DNA, 15 bp, Homo sapiens
ctggtttacccagac

SEQ ID NO: 1854186 - DNA, 15 bp, Homo sapiens
tggtttacccagacg

SEQ ID NO: 1854187 - DNA, 15 bp, Homo sapiens
ggtttacccagacgt

SEQ ID NO: 1854188 - DNA, 15 bp, Homo sapiens
gtttacccagacgtc

SEQ ID NO: 1854189 - DNA, 15 bp, Homo sapiens
tttacccagacgtca

SEQ ID NO: 1854190 - DNA, 15 bp, Homo sapiens
ttacccagacgtcag

SEQ ID NO: 1854191 - DNA, 15 bp, Homo sapiens
tacccagacgtcagt

SEQ ID NO: 1854192 - DNA, 15 bp, Homo sapiens
acccagacgtcagtg

SEQ ID NO: 1854193 - DNA, 15 bp, Homo sapiens
cccagacgtcagtga

SEQ ID NO: 1854194 - DNA, 15 bp, Homo sapiens
ccagacgtcagtgat

SEQ ID NO: 1854195 - DNA, 15 bp, Homo sapiens
cagacgtcagtgatg

SEQ ID NO: 1854196 - DNA, 15 bp, Homo sapiens
agacgtcagtgatgc

SEQ ID NO: 1854197 - DNA, 15 bp, Homo sapiens
gacgtcagtgatgcc

SEQ ID NO: 1854198 - DNA, 15 bp, Homo sapiens
acgtcagtgatgcct

SEQ ID NO: 1854199 - DNA, 15 bp, Homo sapiens
cgtcagtgatgcctg

SEQ ID NO: 1854200 - DNA, 15 bp, Homo sapiens
gtcagtgatgcctgg

SEQ ID NO: 1854201 - DNA, 15 bp, Homo sapiens
tcagtgatgcctggg

SEQ ID NO: 1854202 - DNA, 15 bp, Homo sapiens
cagtgatgcctggga

SEQ ID NO: 1854203 - DNA, 15 bp, Homo sapiens
agtgatgcctgggaa

SEQ ID NO: 1854204 - DNA, 15 bp, Homo sapiens
gtgatgcctgggaaa

SEQ ID NO: 1854205 - DNA, 15 bp, Homo sapiens
tgatgcctgggaaag

SEQ ID NO: 1854206 - DNA, 15 bp, Homo sapiens
gatgcctgggaaagc

SEQ ID NO: 1854207 - DNA, 15 bp, Homo sapiens
atgcctgggaaagct

SEQ ID NO: 1854208 - DNA, 15 bp, Homo sapiens
tgcctgggaaagctc

SEQ ID NO: 1854209 - DNA, 15 bp, Homo sapiens
gcctgggaaagctct

SEQ ID NO: 1854210 - DNA, 15 bp, Homo sapiens
cctgggaaagctctt

SEQ ID NO: 1854211 - DNA, 15 bp, Homo sapiens
ctgggaaagctcttg

SEQ ID NO: 1854212 - DNA, 15 bp, Homo sapiens
tgggaaagctcttgc

SEQ ID NO: 1854213 - DNA, 15 bp, Homo sapiens
gggaaagctcttgct

SEQ ID NO: 1854214 - DNA, 15 bp, Homo sapiens
ggaaagctcttgctt

SEQ ID NO: 1854215 - DNA, 15 bp, Homo sapiens
gaaagctcttgcttt

SEQ ID NO: 1854216 - DNA, 15 bp, Homo sapiens
aaagctcttgctttt

SEQ ID NO: 1854217 - DNA, 15 bp, Homo sapiens
aagctcttgcttttc

SEQ ID NO: 1854218 - DNA, 15 bp, Homo sapiens
agctcttgcttttcc

SEQ ID NO: 1854219 - DNA, 15 bp, Homo sapiens
gctcttgcttttcca

SEQ ID NO: 1854220 - DNA, 15 bp, Homo sapiens
ctcttgcttttccag

SEQ ID NO: 1854221 - DNA, 15 bp, Homo sapiens
tcttgcttttccagt

SEQ ID NO: 1854222 - DNA, 15 bp, Homo sapiens
cttgcttttccagtg

SEQ ID NO: 1854223 - DNA, 15 bp, Homo sapiens
ttgcttttccagtgc

SEQ ID NO: 1854224 - DNA, 15 bp, Homo sapiens
tgcttttccagtgcc

SEQ ID NO: 1854225 - DNA, 15 bp, Homo sapiens
gcttttccagtgccc

SEQ ID NO: 1854226 - DNA, 15 bp, Homo sapiens
cttttccagtgccca

SEQ ID NO: 1854227 - DNA, 15 bp, Homo sapiens
ttttccagtgcccac

SEQ ID NO: 1854228 - DNA, 15 bp, Homo sapiens
tttccagtgcccact

SEQ ID NO: 1854229 - DNA, 15 bp, Homo sapiens
ttccagtgcccactg

SEQ ID NO: 1854230 - DNA, 15 bp, Homo sapiens
tccagtgcccactga

SEQ ID NO: 1854231 - DNA, 15 bp, Homo sapiens
ccagtgcccactgag

SEQ ID NO: 1854232 - DNA, 15 bp, Homo sapiens
cagtgcccactgagc

SEQ ID NO: 1854233 - DNA, 15 bp, Homo sapiens
agtgcccactgagca

SEQ ID NO: 1854234 - DNA, 15 bp, Homo sapiens
gtgcccactgagcag

SEQ ID NO: 1854235 - DNA, 15 bp, Homo sapiens
tgcccactgagcaga

SEQ ID NO: 1854236 - DNA, 15 bp, Homo sapiens
gcccactgagcagag

SEQ ID NO: 1854237 - DNA, 15 bp, Homo sapiens
cccactgagcagaga

SEQ ID NO: 1854238 - DNA, 15 bp, Homo sapiens
ccactgagcagagat

SEQ ID NO: 1854239 - DNA, 15 bp, Homo sapiens
cactgagcagagatt

SEQ ID NO: 1854240 - DNA, 15 bp, Homo sapiens
actgagcagagattt

SEQ ID NO: 1854241 - DNA, 15 bp, Homo sapiens
ctgagcagagattta

SEQ ID NO: 1854242 - DNA, 15 bp, Homo sapiens
tgagcagagatttaa

SEQ ID NO: 1854243 - DNA, 15 bp, Homo sapiens
gagcagagatttaat

SEQ ID NO: 1854244 - DNA, 15 bp, Homo sapiens
agcagagatttaatt

SEQ ID NO: 1854245 - DNA, 15 bp, Homo sapiens
gcagagatttaattt

SEQ ID NO: 1854246 - DNA, 15 bp, Homo sapiens
cagagatttaattta

SEQ ID NO: 1854247 - DNA, 15 bp, Homo sapiens
agagatttaatttac

SEQ ID NO: 1854248 - DNA, 15 bp, Homo sapiens
gagatttaatttact

SEQ ID NO: 1854249 - DNA, 15 bp, Homo sapiens
agatttaatttactc

SEQ ID NO: 1854250 - DNA, 15 bp, Homo sapiens
gatttaatttactca

SEQ ID NO: 1854251 - DNA, 15 bp, Homo sapiens
atttaatttactcaa

SEQ ID NO: 1854252 - DNA, 15 bp, Homo sapiens
tttaatttactcaat

SEQ ID NO: 1854253 - DNA, 15 bp, Homo sapiens
ttaatttactcaatc

SEQ ID NO: 1854254 - DNA, 15 bp, Homo sapiens
taatttactcaatcg

SEQ ID NO: 1854255 - DNA, 15 bp, Homo sapiens
aatttactcaatcgg

SEQ ID NO: 1854256 - DNA, 15 bp, Homo sapiens
atttactcaatcggt

SEQ ID NO: 1854257 - DNA, 15 bp, Homo sapiens
tttactcaatcggta

SEQ ID NO: 1854258 - DNA, 15 bp, Homo sapiens
ttactcaatcggtac

SEQ ID NO: 1854259 - DNA, 15 bp, Homo sapiens
tactcaatcggtacg

SEQ ID NO: 1854260 - DNA, 15 bp, Homo sapiens
actcaatcggtacgt

SEQ ID NO: 1854261 - DNA, 15 bp, Homo sapiens
ctcaatcggtacgtg

SEQ ID NO: 1854262 - DNA, 15 bp, Homo sapiens
tcaatcggtacgtgt

SEQ ID NO: 1854263 - DNA, 15 bp, Homo sapiens
caatcggtacgtgtc

SEQ ID NO: 1854264 - DNA, 15 bp, Homo sapiens
aatcggtacgtgtct

SEQ ID NO: 1854265 - DNA, 15 bp, Homo sapiens
atcggtacgtgtctg

SEQ ID NO: 1854266 - DNA, 15 bp, Homo sapiens
tcggtacgtgtctgt

SEQ ID NO: 1854267 - DNA, 15 bp, Homo sapiens
cggtacgtgtctgtt

SEQ ID NO: 1854268 - DNA, 15 bp, Homo sapiens
ggtacgtgtctgtta

SEQ ID NO: 1854269 - DNA, 15 bp, Homo sapiens
gtacgtgtctgttaa

SEQ ID NO: 1854270 - DNA, 15 bp, Homo sapiens
tacgtgtctgttaag

SEQ ID NO: 1854271 - DNA, 15 bp, Homo sapiens
acgtgtctgttaagc

SEQ ID NO: 1854272 - DNA, 15 bp, Homo sapiens
cgtgtctgttaagca

SEQ ID NO: 1854273 - DNA, 15 bp, Homo sapiens
gtgtctgttaagcac

SEQ ID NO: 1854274 - DNA, 15 bp, Homo sapiens
tgtctgttaagcaca

SEQ ID NO: 1854275 - DNA, 15 bp, Homo sapiens
gtctgttaagcacat

SEQ ID NO: 1854276 - DNA, 15 bp, Homo sapiens
tctgttaagcacatt

SEQ ID NO: 1854277 - DNA, 15 bp, Homo sapiens
ctgttaagcacattg

SEQ ID NO: 1854278 - DNA, 15 bp, Homo sapiens
tgttaagcacattgc

SEQ ID NO: 1854279 - DNA, 15 bp, Homo sapiens
gttaagcacattgct

SEQ ID NO: 1854280 - DNA, 15 bp, Homo sapiens
ttaagcacattgctg

SEQ ID NO: 1854281 - DNA, 15 bp, Homo sapiens
taagcacattgctgt

SEQ ID NO: 1854282 - DNA, 15 bp, Homo sapiens
aagcacattgctgta

SEQ ID NO: 1854283 - DNA, 15 bp, Homo sapiens
agcacattgctgtat

SEQ ID NO: 1854284 - DNA, 15 bp, Homo sapiens
gcacattgctgtatg

SEQ ID NO: 1854285 - DNA, 15 bp, Homo sapiens
cacattgctgtatgc

SEQ ID NO: 1854286 - DNA, 15 bp, Homo sapiens
acattgctgtatgcc

SEQ ID NO: 1854287 - DNA, 15 bp, Homo sapiens
cattgctgtatgcca

SEQ ID NO: 1854288 - DNA, 15 bp, Homo sapiens
attgctgtatgccaa

SEQ ID NO: 1854289 - DNA, 15 bp, Homo sapiens
ttgctgtatgccaaa

SEQ ID NO: 1854290 - DNA, 15 bp, Homo sapiens
tgctgtatgccaaac

SEQ ID NO: 1854291 - DNA, 15 bp, Homo sapiens
gctgtatgccaaaca

SEQ ID NO: 1854292 - DNA, 15 bp, Homo sapiens
ctgtatgccaaacac

SEQ ID NO: 1854293 - DNA, 15 bp, Homo sapiens
tgtatgccaaacact

SEQ ID NO: 1854294 - DNA, 15 bp, Homo sapiens
gtatgccaaacactt

SEQ ID NO: 1854295 - DNA, 15 bp, Homo sapiens
tatgccaaacacttt

SEQ ID NO: 1854296 - DNA, 15 bp, Homo sapiens
atgccaaacactttg

SEQ ID NO: 1854297 - DNA, 15 bp, Homo sapiens
tgccaaacactttgg

SEQ ID NO: 1854298 - DNA, 15 bp, Homo sapiens
gccaaacactttggg

SEQ ID NO: 1854299 - DNA, 15 bp, Homo sapiens
ccaaacactttgggc

SEQ ID NO: 1854300 - DNA, 15 bp, Homo sapiens
caaacactttgggca

SEQ ID NO: 1854301 - DNA, 15 bp, Homo sapiens
aaacactttgggcat

SEQ ID NO: 1854302 - DNA, 15 bp, Homo sapiens
aacactttgggcata

SEQ ID NO: 1854303 - DNA, 15 bp, Homo sapiens
acactttgggcataa

SEQ ID NO: 1854304 - DNA, 15 bp, Homo sapiens
cactttgggcataaa

SEQ ID NO: 1854305 - DNA, 15 bp, Homo sapiens
actttgggcataaaa

SEQ ID NO: 1854306 - DNA, 15 bp, Homo sapiens
ctttgggcataaaag

SEQ ID NO: 1854307 - DNA, 15 bp, Homo sapiens
tttgggcataaaagg

SEQ ID NO: 1854308 - DNA, 15 bp, Homo sapiens
ttgggcataaaaggt

SEQ ID NO: 1854309 - DNA, 15 bp, Homo sapiens
tgggcataaaaggta

SEQ ID NO: 1854310 - DNA, 15 bp, Homo sapiens
gggcataaaaggtat

SEQ ID NO: 1854311 - DNA, 15 bp, Homo sapiens
ggcataaaaggtata

SEQ ID NO: 1854312 - DNA, 15 bp, Homo sapiens
gcataaaaggtatat

SEQ ID NO: 1854313 - DNA, 15 bp, Homo sapiens
cataaaaggtatata

SEQ ID NO: 1854314 - DNA, 15 bp, Homo sapiens
ataaaaggtatatag

SEQ ID NO: 1854315 - DNA, 15 bp, Homo sapiens
taaaaggtatatagg

SEQ ID NO: 1854316 - DNA, 15 bp, Homo sapiens
aaaaggtatataggc

SEQ ID NO: 1854317 - DNA, 15 bp, Homo sapiens
aaaggtatataggcc

SEQ ID NO: 1854318 - DNA, 15 bp, Homo sapiens
aaggtatataggcct

SEQ ID NO: 1854319 - DNA, 15 bp, Homo sapiens
aggtatataggcctt

SEQ ID NO: 1854320 - DNA, 15 bp, Homo sapiens
ggtatataggccttg

SEQ ID NO: 1854321 - DNA, 15 bp, Homo sapiens
gtatataggccttgc

SEQ ID NO: 1854322 - DNA, 15 bp, Homo sapiens
tatataggccttgcc

SEQ ID NO: 1854323 - DNA, 15 bp, Homo sapiens
atataggccttgcct

SEQ ID NO: 1854324 - DNA, 15 bp, Homo sapiens
tataggccttgcctt

SEQ ID NO: 1854325 - DNA, 15 bp, Homo sapiens
ataggccttgccttc

SEQ ID NO: 1854326 - DNA, 15 bp, Homo sapiens
taggccttgccttca

SEQ ID NO: 1854327 - DNA, 15 bp, Homo sapiens
aggccttgccttcaa

SEQ ID NO: 1854328 - DNA, 15 bp, Homo sapiens
ggccttgccttcaag

SEQ ID NO: 1854329 - DNA, 15 bp, Homo sapiens
gccttgccttcaagg

SEQ ID NO: 1854330 - DNA, 15 bp, Homo sapiens
ccttgccttcaagga

SEQ ID NO: 1854331 - DNA, 15 bp, Homo sapiens
cttgccttcaaggat

SEQ ID NO: 1854332 - DNA, 15 bp, Homo sapiens
ttgccttcaaggatt

SEQ ID NO: 1854333 - DNA, 15 bp, Homo sapiens
tgccttcaaggattg

SEQ ID NO: 1854334 - DNA, 15 bp, Homo sapiens
gccttcaaggattgt

SEQ ID NO: 1854335 - DNA, 15 bp, Homo sapiens
ccttcaaggattgtc

SEQ ID NO: 1854336 - DNA, 15 bp, Homo sapiens
cttcaaggattgtcc

SEQ ID NO: 1854337 - DNA, 15 bp, Homo sapiens
ttcaaggattgtcca

SEQ ID NO: 1854338 - DNA, 15 bp, Homo sapiens
tcaaggattgtccag

SEQ ID NO: 1854339 - DNA, 15 bp, Homo sapiens
caaggattgtccagg

SEQ ID NO: 1854340 - DNA, 15 bp, Homo sapiens
aaggattgtccaggc

SEQ ID NO: 1854341 - DNA, 15 bp, Homo sapiens
aggattgtccaggct

SEQ ID NO: 1854342 - DNA, 15 bp, Homo sapiens
ggattgtccaggcta

SEQ ID NO: 1854343 - DNA, 15 bp, Homo sapiens
gattgtccaggctaa

SEQ ID NO: 1854344 - DNA, 15 bp, Homo sapiens
attgtccaggctaac

SEQ ID NO: 1854345 - DNA, 15 bp, Homo sapiens
ttgtccaggctaact

SEQ ID NO: 1854346 - DNA, 15 bp, Homo sapiens
tgtccaggctaactg

SEQ ID NO: 1854347 - DNA, 15 bp, Homo sapiens
gtccaggctaactgg

SEQ ID NO: 1854348 - DNA, 15 bp, Homo sapiens
tccaggctaactggg

SEQ ID NO: 1854349 - DNA, 15 bp, Homo sapiens
ccaggctaactgggg

SEQ ID NO: 1854350 - DNA, 15 bp, Homo sapiens
caggctaactggggc

SEQ ID NO: 1854351 - DNA, 15 bp, Homo sapiens
aggctaactggggca

SEQ ID NO: 1854352 - DNA, 15 bp, Homo sapiens
ggctaactggggcaa

SEQ ID NO: 1854353 - DNA, 15 bp, Homo sapiens
gctaactggggcaat

SEQ ID NO: 1854354 - DNA, 15 bp, Homo sapiens
ctaactggggcaatg

SEQ ID NO: 1854355 - DNA, 15 bp, Homo sapiens
taactggggcaatgc

SEQ ID NO: 1854356 - DNA, 15 bp, Homo sapiens
aactggggcaatgca

SEQ ID NO: 1854357 - DNA, 15 bp, Homo sapiens
actggggcaatgcaa

SEQ ID NO: 1854358 - DNA, 15 bp, Homo sapiens
ctggggcaatgcaac

SEQ ID NO: 1854359 - DNA, 15 bp, Homo sapiens
tggggcaatgcaaca

SEQ ID NO: 1854360 - DNA, 15 bp, Homo sapiens
ggggcaatgcaacat

SEQ ID NO: 1854361 - DNA, 15 bp, Homo sapiens
gggcaatgcaacatg

SEQ ID NO: 1854362 - DNA, 15 bp, Homo sapiens
ggcaatgcaacatgc

SEQ ID NO: 1854363 - DNA, 15 bp, Homo sapiens
gcaatgcaacatgca

SEQ ID NO: 1854364 - DNA, 15 bp, Homo sapiens
caatgcaacatgcat

SEQ ID NO: 1854365 - DNA, 15 bp, Homo sapiens
aatgcaacatgcatg

SEQ ID NO: 1854366 - DNA, 15 bp, Homo sapiens
atgcaacatgcatgg

SEQ ID NO: 1854367 - DNA, 15 bp, Homo sapiens
tgcaacatgcatgga

SEQ ID NO: 1854368 - DNA, 15 bp, Homo sapiens
gcaacatgcatggac

SEQ ID NO: 1854369 - DNA, 15 bp, Homo sapiens
caacatgcatggacc

SEQ ID NO: 1854370 - DNA, 15 bp, Homo sapiens
aacatgcatggacca

SEQ ID NO: 1854371 - DNA, 15 bp, Homo sapiens
acatgcatggaccaa

SEQ ID NO: 1854372 - DNA, 15 bp, Homo sapiens
catgcatggaccaaa

SEQ ID NO: 1854373 - DNA, 15 bp, Homo sapiens
atgcatggaccaaaa

SEQ ID NO: 1854374 - DNA, 15 bp, Homo sapiens
tgcatggaccaaaag

SEQ ID NO: 1854375 - DNA, 15 bp, Homo sapiens
gcatggaccaaaaga

SEQ ID NO: 1854376 - DNA, 15 bp, Homo sapiens
catggaccaaaagac

SEQ ID NO: 1854377 - DNA, 15 bp, Homo sapiens
atggaccaaaagaca

SEQ ID NO: 1854378 - DNA, 15 bp, Homo sapiens
tggaccaaaagacag

SEQ ID NO: 1854379 - DNA, 15 bp, Homo sapiens
ggaccaaaagacagc

SEQ ID NO: 1854380 - DNA, 15 bp, Homo sapiens
gaccaaaagacagct

SEQ ID NO: 1854381 - DNA, 15 bp, Homo sapiens
accaaaagacagcta

SEQ ID NO: 1854382 - DNA, 15 bp, Homo sapiens
ccaaaagacagctaa

SEQ ID NO: 1854383 - DNA, 15 bp, Homo sapiens
caaaagacagctaag

SEQ ID NO: 1854384 - DNA, 15 bp, Homo sapiens
aaaagacagctaagt

SEQ ID NO: 1854385 - DNA, 15 bp, Homo sapiens
aaagacagctaagta

SEQ ID NO: 1854386 - DNA, 15 bp, Homo sapiens
aagacagctaagtac

SEQ ID NO: 1854387 - DNA, 15 bp, Homo sapiens
agacagctaagtacc

SEQ ID NO: 1854388 - DNA, 15 bp, Homo sapiens
gacagctaagtacct

SEQ ID NO: 1854389 - DNA, 15 bp, Homo sapiens
acagctaagtacctg

SEQ ID NO: 1854390 - DNA, 15 bp, Homo sapiens
cagctaagtacctgt

SEQ ID NO: 1854391 - DNA, 15 bp, Homo sapiens
agctaagtacctgtc

SEQ ID NO: 1854392 - DNA, 15 bp, Homo sapiens
gctaagtacctgtcc

SEQ ID NO: 1854393 - DNA, 15 bp, Homo sapiens
ctaagtacctgtccc

SEQ ID NO: 1854394 - DNA, 15 bp, Homo sapiens
taagtacctgtccca

SEQ ID NO: 1854395 - DNA, 15 bp, Homo sapiens
aagtacctgtcccat

SEQ ID NO: 1854396 - DNA, 15 bp, Homo sapiens
agtacctgtcccatg

SEQ ID NO: 1854397 - DNA, 15 bp, Homo sapiens
gtacctgtcccatgt

SEQ ID NO: 1854398 - DNA, 15 bp, Homo sapiens
tacctgtcccatgtg

SEQ ID NO: 1854399 - DNA, 15 bp, Homo sapiens
acctgtcccatgtgg

SEQ ID NO: 1854400 - DNA, 15 bp, Homo sapiens
cctgtcccatgtgga

SEQ ID NO: 1854401 - DNA, 15 bp, Homo sapiens
ctgtcccatgtggaa

SEQ ID NO: 1854402 - DNA, 15 bp, Homo sapiens
tgtcccatgtggaat

SEQ ID NO: 1854403 - DNA, 15 bp, Homo sapiens
gtcccatgtggaatt

SEQ ID NO: 1854404 - DNA, 15 bp, Homo sapiens
tcccatgtggaattg

SEQ ID NO: 1854405 - DNA, 15 bp, Homo sapiens
cccatgtggaattgg

SEQ ID NO: 1854406 - DNA, 15 bp, Homo sapiens
ccatgtggaattggg

SEQ ID NO: 1854407 - DNA, 15 bp, Homo sapiens
catgtggaattgggg

SEQ ID NO: 1854408 - DNA, 15 bp, Homo sapiens
atgtggaattggggg

SEQ ID NO: 1854409 - DNA, 15 bp, Homo sapiens
tgtggaattggggga

SEQ ID NO: 1854410 - DNA, 15 bp, Homo sapiens
gtggaattgggggag

SEQ ID NO: 1854411 - DNA, 15 bp, Homo sapiens
tggaattgggggagc

SEQ ID NO: 1854412 - DNA, 15 bp, Homo sapiens
ggaattgggggagca

SEQ ID NO: 1854413 - DNA, 15 bp, Homo sapiens
gaattgggggagcag

SEQ ID NO: 1854414 - DNA, 15 bp, Homo sapiens
aattgggggagcaga

SEQ ID NO: 1854415 - DNA, 15 bp, Homo sapiens
attgggggagcagat

SEQ ID NO: 1854416 - DNA, 15 bp, Homo sapiens
ttgggggagcagatg

SEQ ID NO: 1854417 - DNA, 15 bp, Homo sapiens
tgggggagcagatgt

SEQ ID NO: 1854418 - DNA, 15 bp, Homo sapiens
gggggagcagatgtg

SEQ ID NO: 1854419 - DNA, 15 bp, Homo sapiens
ggggagcagatgtgg

SEQ ID NO: 1854420 - DNA, 15 bp, Homo sapiens
gggagcagatgtggg

SEQ ID NO: 1854421 - DNA, 15 bp, Homo sapiens
ggagcagatgtgggc

SEQ ID NO: 1854422 - DNA, 15 bp, Homo sapiens
gagcagatgtgggcc

SEQ ID NO: 1854423 - DNA, 15 bp, Homo sapiens
agcagatgtgggccc

SEQ ID NO: 1854424 - DNA, 15 bp, Homo sapiens
gcagatgtgggccct

SEQ ID NO: 1854425 - DNA, 15 bp, Homo sapiens
cagatgtgggccctg

SEQ ID NO: 1854426 - DNA, 15 bp, Homo sapiens
agatgtgggccctgg

SEQ ID NO: 1854427 - DNA, 15 bp, Homo sapiens
gatgtgggccctgga

SEQ ID NO: 1854428 - DNA, 15 bp, Homo sapiens
atgtgggccctggag

SEQ ID NO: 1854429 - DNA, 15 bp, Homo sapiens
tgtgggccctggaga

SEQ ID NO: 1854430 - DNA, 15 bp, Homo sapiens
gtgggccctggagac

SEQ ID NO: 1854431 - DNA, 15 bp, Homo sapiens
tgggccctggagaca

SEQ ID NO: 1854432 - DNA, 15 bp, Homo sapiens
gggccctggagacag

SEQ ID NO: 1854433 - DNA, 15 bp, Homo sapiens
ggccctggagacagg

SEQ ID NO: 1854434 - DNA, 15 bp, Homo sapiens
gccctggagacagga

SEQ ID NO: 1854435 - DNA, 15 bp, Homo sapiens
ccctggagacaggac

SEQ ID NO: 1854436 - DNA, 15 bp, Homo sapiens
cctggagacaggaca

SEQ ID NO: 1854437 - DNA, 15 bp, Homo sapiens
ctggagacaggacag

SEQ ID NO: 1854438 - DNA, 15 bp, Homo sapiens
tggagacaggacagg

SEQ ID NO: 1854439 - DNA, 15 bp, Homo sapiens
ggagacaggacaggg

SEQ ID NO: 1854440 - DNA, 15 bp, Homo sapiens
gagacaggacaggga

SEQ ID NO: 1854441 - DNA, 15 bp, Homo sapiens
agacaggacagggag

SEQ ID NO: 1854442 - DNA, 15 bp, Homo sapiens
gacaggacagggaga

SEQ ID NO: 1854443 - DNA, 15 bp, Homo sapiens
acaggacagggagag

SEQ ID NO: 1854444 - DNA, 15 bp, Homo sapiens
caggacagggagagc

SEQ ID NO: 1854445 - DNA, 15 bp, Homo sapiens
aggacagggagagct

SEQ ID NO: 1854446 - DNA, 15 bp, Homo sapiens
ggacagggagagctt

SEQ ID NO: 1854447 - DNA, 15 bp, Homo sapiens
gacagggagagcttt

SEQ ID NO: 1854448 - DNA, 15 bp, Homo sapiens
acagggagagctttg

SEQ ID NO: 1854449 - DNA, 15 bp, Homo sapiens
cagggagagctttgg

SEQ ID NO: 1854450 - DNA, 15 bp, Homo sapiens
agggagagctttggg

SEQ ID NO: 1854451 - DNA, 15 bp, Homo sapiens
gggagagctttgggg

SEQ ID NO: 1854452 - DNA, 15 bp, Homo sapiens
ggagagctttgggga

SEQ ID NO: 1854453 - DNA, 15 bp, Homo sapiens
gagagctttggggag

SEQ ID NO: 1854454 - DNA, 15 bp, Homo sapiens
agagctttggggaga

SEQ ID NO: 1854455 - DNA, 15 bp, Homo sapiens
gagctttggggagat

SEQ ID NO: 1854456 - DNA, 15 bp, Homo sapiens
agctttggggagatc

SEQ ID NO: 1854457 - DNA, 15 bp, Homo sapiens
gctttggggagatct

SEQ ID NO: 1854458 - DNA, 15 bp, Homo sapiens
ctttggggagatcta

SEQ ID NO: 1854459 - DNA, 15 bp, Homo sapiens
tttggggagatctag

SEQ ID NO: 1854460 - DNA, 15 bp, Homo sapiens
ttggggagatctagc

SEQ ID NO: 1854461 - DNA, 15 bp, Homo sapiens
tggggagatctagcc

SEQ ID NO: 1854462 - DNA, 15 bp, Homo sapiens
ggggagatctagcca

SEQ ID NO: 1854463 - DNA, 15 bp, Homo sapiens
gggagatctagccag

SEQ ID NO: 1854464 - DNA, 15 bp, Homo sapiens
ggagatctagccagg

SEQ ID NO: 1854465 - DNA, 15 bp, Homo sapiens
gagatctagccagga

SEQ ID NO: 1854466 - DNA, 15 bp, Homo sapiens
agatctagccaggaa

SEQ ID NO: 1854467 - DNA, 15 bp, Homo sapiens
gatctagccaggaag

SEQ ID NO: 1854468 - DNA, 15 bp, Homo sapiens
atctagccaggaagg

SEQ ID NO: 1854469 - DNA, 15 bp, Homo sapiens
tctagccaggaagga

SEQ ID NO: 1854470 - DNA, 15 bp, Homo sapiens
ctagccaggaaggag

SEQ ID NO: 1854471 - DNA, 15 bp, Homo sapiens
tagccaggaaggaga

SEQ ID NO: 1854472 - DNA, 15 bp, Homo sapiens
agccaggaaggagaa

SEQ ID NO: 1854473 - DNA, 15 bp, Homo sapiens
gccaggaaggagaac

SEQ ID NO: 1854474 - DNA, 15 bp, Homo sapiens
ccaggaaggagaact

SEQ ID NO: 1854475 - DNA, 15 bp, Homo sapiens
caggaaggagaactt

SEQ ID NO: 1854476 - DNA, 15 bp, Homo sapiens
aggaaggagaacttc

SEQ ID NO: 1854477 - DNA, 15 bp, Homo sapiens
ggaaggagaacttca

SEQ ID NO: 1854478 - DNA, 15 bp, Homo sapiens
gaaggagaacttcac

SEQ ID NO: 1854479 - DNA, 15 bp, Homo sapiens
aaggagaacttcact

SEQ ID NO: 1854480 - DNA, 15 bp, Homo sapiens
aggagaacttcactg

SEQ ID NO: 1854481 - DNA, 15 bp, Homo sapiens
ggagaacttcactgc

SEQ ID NO: 1854482 - DNA, 15 bp, Homo sapiens
gagaacttcactgca

SEQ ID NO: 1854483 - DNA, 15 bp, Homo sapiens
agaacttcactgcac

SEQ ID NO: 1854484 - DNA, 15 bp, Homo sapiens
gaacttcactgcacc

SEQ ID NO: 1854485 - DNA, 15 bp, Homo sapiens
aacttcactgcacct

SEQ ID NO: 1854486 - DNA, 15 bp, Homo sapiens
acttcactgcacctc

SEQ ID NO: 1854487 - DNA, 15 bp, Homo sapiens
cttcactgcacctct

SEQ ID NO: 1854488 - DNA, 15 bp, Homo sapiens
ttcactgcacctctg

SEQ ID NO: 1854489 - DNA, 15 bp, Homo sapiens
tcactgcacctctgg

SEQ ID NO: 1854490 - DNA, 15 bp, Homo sapiens
cactgcacctctggg

SEQ ID NO: 1854491 - DNA, 15 bp, Homo sapiens
actgcacctctggga

SEQ ID NO: 1854492 - DNA, 15 bp, Homo sapiens
ctgcacctctgggat

SEQ ID NO: 1854493 - DNA, 15 bp, Homo sapiens
tgcacctctgggatt

SEQ ID NO: 1854494 - DNA, 15 bp, Homo sapiens
gcacctctgggattt

SEQ ID NO: 1854495 - DNA, 15 bp, Homo sapiens
cacctctgggatttg

SEQ ID NO: 1854496 - DNA, 15 bp, Homo sapiens
acctctgggatttga

SEQ ID NO: 1854497 - DNA, 15 bp, Homo sapiens
cctctgggatttgat

SEQ ID NO: 1854498 - DNA, 15 bp, Homo sapiens
ctctgggatttgatc

SEQ ID NO: 1854499 - DNA, 15 bp, Homo sapiens
tctgggatttgatca

SEQ ID NO: 1854500 - DNA, 15 bp, Homo sapiens
ctgggatttgatcag

SEQ ID NO: 1854501 - DNA, 15 bp, Homo sapiens
tgggatttgatcagg

SEQ ID NO: 1854502 - DNA, 15 bp, Homo sapiens
gggatttgatcaggg

SEQ ID NO: 1854503 - DNA, 15 bp, Homo sapiens
ggatttgatcaggga

SEQ ID NO: 1854504 - DNA, 15 bp, Homo sapiens
gatttgatcagggag

SEQ ID NO: 1854505 - DNA, 15 bp, Homo sapiens
atttgatcagggagg

SEQ ID NO: 1854506 - DNA, 15 bp, Homo sapiens
tttgatcagggagga

SEQ ID NO: 1854507 - DNA, 15 bp, Homo sapiens
ttgatcagggaggat

SEQ ID NO: 1854508 - DNA, 15 bp, Homo sapiens
tgatcagggaggatg

SEQ ID NO: 1854509 - DNA, 15 bp, Homo sapiens
gatcagggaggatga

SEQ ID NO: 1854510 - DNA, 15 bp, Homo sapiens
atcagggaggatgaa

SEQ ID NO: 1854511 - DNA, 15 bp, Homo sapiens
tcagggaggatgaag

SEQ ID NO: 1854512 - DNA, 15 bp, Homo sapiens
cagggaggatgaaga

SEQ ID NO: 1854513 - DNA, 15 bp, Homo sapiens
agggaggatgaagat

SEQ ID NO: 1854514 - DNA, 15 bp, Homo sapiens
gggaggatgaagatg

SEQ ID NO: 1854515 - DNA, 15 bp, Homo sapiens
ggaggatgaagatgg

SEQ ID NO: 1854516 - DNA, 15 bp, Homo sapiens
gaggatgaagatggt

SEQ ID NO: 1854517 - DNA, 15 bp, Homo sapiens
aggatgaagatggtt

SEQ ID NO: 1854518 - DNA, 15 bp, Homo sapiens
ggatgaagatggttg

SEQ ID NO: 1854519 - DNA, 15 bp, Homo sapiens
gatgaagatggttgg

SEQ ID NO: 1854520 - DNA, 15 bp, Homo sapiens
atgaagatggttggg

SEQ ID NO: 1854521 - DNA, 15 bp, Homo sapiens
tgaagatggttgggg

SEQ ID NO: 1854522 - DNA, 15 bp, Homo sapiens
gaagatggttgggga

SEQ ID NO: 1854523 - DNA, 15 bp, Homo sapiens
aagatggttggggag

SEQ ID NO: 1854524 - DNA, 15 bp, Homo sapiens
agatggttggggagc

SEQ ID NO: 1854525 - DNA, 15 bp, Homo sapiens
gatggttggggagca

SEQ ID NO: 1854526 - DNA, 15 bp, Homo sapiens
atggttggggagcaa

SEQ ID NO: 1854527 - DNA, 15 bp, Homo sapiens
tggttggggagcaat

SEQ ID NO: 1854528 - DNA, 15 bp, Homo sapiens
ggttggggagcaatg

SEQ ID NO: 1854529 - DNA, 15 bp, Homo sapiens
gttggggagcaatgg

SEQ ID NO: 1854530 - DNA, 15 bp, Homo sapiens
ttggggagcaatggg

SEQ ID NO: 1854531 - DNA, 15 bp, Homo sapiens
tggggagcaatgggg

SEQ ID NO: 1854532 - DNA, 15 bp, Homo sapiens
ggggagcaatgggga

SEQ ID NO: 1854533 - DNA, 15 bp, Homo sapiens
gggagcaatggggag

SEQ ID NO: 1854534 - DNA, 15 bp, Homo sapiens
ggagcaatggggaga

SEQ ID NO: 1854535 - DNA, 15 bp, Homo sapiens
gagcaatggggagag

SEQ ID NO: 1854536 - DNA, 15 bp, Homo sapiens
agcaatggggagagc

SEQ ID NO: 1854537 - DNA, 15 bp, Homo sapiens
gcaatggggagagca

SEQ ID NO: 1854538 - DNA, 15 bp, Homo sapiens
caatggggagagcat

SEQ ID NO: 1854539 - DNA, 15 bp, Homo sapiens
aatggggagagcatc

SEQ ID NO: 1854540 - DNA, 15 bp, Homo sapiens
atggggagagcatcc

SEQ ID NO: 1854541 - DNA, 15 bp, Homo sapiens
tggggagagcatccc

SEQ ID NO: 1854542 - DNA, 15 bp, Homo sapiens
ggggagagcatccca

SEQ ID NO: 1854543 - DNA, 15 bp, Homo sapiens
gggagagcatcccag

SEQ ID NO: 1854544 - DNA, 15 bp, Homo sapiens
ggagagcatcccagg

SEQ ID NO: 1854545 - DNA, 15 bp, Homo sapiens
gagagcatcccagga

SEQ ID NO: 1854546 - DNA, 15 bp, Homo sapiens
agagcatcccaggag

SEQ ID NO: 1854547 - DNA, 15 bp, Homo sapiens
gagcatcccaggagt

SEQ ID NO: 1854548 - DNA, 15 bp, Homo sapiens
agcatcccaggagtg

SEQ ID NO: 1854549 - DNA, 15 bp, Homo sapiens
gcatcccaggagtgg

SEQ ID NO: 1854550 - DNA, 15 bp, Homo sapiens
catcccaggagtggg

SEQ ID NO: 1854551 - DNA, 15 bp, Homo sapiens
atcccaggagtggga

SEQ ID NO: 1854552 - DNA, 15 bp, Homo sapiens
tcccaggagtgggaa

SEQ ID NO: 1854553 - DNA, 15 bp, Homo sapiens
cccaggagtgggaac

SEQ ID NO: 1854554 - DNA, 15 bp, Homo sapiens
ccaggagtgggaaca

SEQ ID NO: 1854555 - DNA, 15 bp, Homo sapiens
caggagtgggaacag

SEQ ID NO: 1854556 - DNA, 15 bp, Homo sapiens
aggagtgggaacagc

SEQ ID NO: 1854557 - DNA, 15 bp, Homo sapiens
ggagtgggaacagcc

SEQ ID NO: 1854558 - DNA, 15 bp, Homo sapiens
gagtgggaacagcca

SEQ ID NO: 1854559 - DNA, 15 bp, Homo sapiens
agtgggaacagccag

SEQ ID NO: 1854560 - DNA, 15 bp, Homo sapiens
gtgggaacagccagc

SEQ ID NO: 1854561 - DNA, 15 bp, Homo sapiens
tgggaacagccagca

SEQ ID NO: 1854562 - DNA, 15 bp, Homo sapiens
gggaacagccagcac

SEQ ID NO: 1854563 - DNA, 15 bp, Homo sapiens
ggaacagccagcacg

SEQ ID NO: 1854564 - DNA, 15 bp, Homo sapiens
gaacagccagcacgg

SEQ ID NO: 1854565 - DNA, 15 bp, Homo sapiens
aacagccagcacgga

SEQ ID NO: 1854566 - DNA, 15 bp, Homo sapiens
acagccagcacggag

SEQ ID NO: 1854567 - DNA, 15 bp, Homo sapiens
cagccagcacggagg

SEQ ID NO: 1854568 - DNA, 15 bp, Homo sapiens
agccagcacggaggt

SEQ ID NO: 1854569 - DNA, 15 bp, Homo sapiens
gccagcacggaggtg

SEQ ID NO: 1854570 - DNA, 15 bp, Homo sapiens
ccagcacggaggtgt

SEQ ID NO: 1854571 - DNA, 15 bp, Homo sapiens
cagcacggaggtgtg

SEQ ID NO: 1854572 - DNA, 15 bp, Homo sapiens
agcacggaggtgtgg

SEQ ID NO: 1854573 - DNA, 15 bp, Homo sapiens
gcacggaggtgtggc

SEQ ID NO: 1854574 - DNA, 15 bp, Homo sapiens
cacggaggtgtggca

SEQ ID NO: 1854575 - DNA, 15 bp, Homo sapiens
acggaggtgtggcag

SEQ ID NO: 1854576 - DNA, 15 bp, Homo sapiens
cggaggtgtggcagt

SEQ ID NO: 1854577 - DNA, 15 bp, Homo sapiens
ggaggtgtggcagtc

SEQ ID NO: 1854578 - DNA, 15 bp, Homo sapiens
gaggtgtggcagtca

SEQ ID NO: 1854579 - DNA, 15 bp, Homo sapiens
aggtgtggcagtcag

SEQ ID NO: 1854580 - DNA, 15 bp, Homo sapiens
ggtgtggcagtcagg

SEQ ID NO: 1854581 - DNA, 15 bp, Homo sapiens
gtgtggcagtcagga

SEQ ID NO: 1854582 - DNA, 15 bp, Homo sapiens
tgtggcagtcaggag

SEQ ID NO: 1854583 - DNA, 15 bp, Homo sapiens
gtggcagtcaggagg

SEQ ID NO: 1854584 - DNA, 15 bp, Homo sapiens
tggcagtcaggagga

SEQ ID NO: 1854585 - DNA, 15 bp, Homo sapiens
ggcagtcaggaggac

SEQ ID NO: 1854586 - DNA, 15 bp, Homo sapiens
gcagtcaggaggacc

SEQ ID NO: 1854587 - DNA, 15 bp, Homo sapiens
cagtcaggaggacca

SEQ ID NO: 1854588 - DNA, 15 bp, Homo sapiens
agtcaggaggaccaa

SEQ ID NO: 1854589 - DNA, 15 bp, Homo sapiens
gtcaggaggaccaag

SEQ ID NO: 1854590 - DNA, 15 bp, Homo sapiens
tcaggaggaccaagt

SEQ ID NO: 1854591 - DNA, 15 bp, Homo sapiens
caggaggaccaagtc

SEQ ID NO: 1854592 - DNA, 15 bp, Homo sapiens
aggaggaccaagtca

SEQ ID NO: 1854593 - DNA, 15 bp, Homo sapiens
ggaggaccaagtcat

SEQ ID NO: 1854594 - DNA, 15 bp, Homo sapiens
gaggaccaagtcata

SEQ ID NO: 1854595 - DNA, 15 bp, Homo sapiens
aggaccaagtcatag

SEQ ID NO: 1854596 - DNA, 15 bp, Homo sapiens
ggaccaagtcatagc

SEQ ID NO: 1854597 - DNA, 15 bp, Homo sapiens
gaccaagtcatagcc

SEQ ID NO: 1854598 - DNA, 15 bp, Homo sapiens
accaagtcatagccg

SEQ ID NO: 1854599 - DNA, 15 bp, Homo sapiens
ccaagtcatagccga

SEQ ID NO: 1854600 - DNA, 15 bp, Homo sapiens
caagtcatagccgag

SEQ ID NO: 1854601 - DNA, 15 bp, Homo sapiens
aagtcatagccgaga

SEQ ID NO: 1854602 - DNA, 15 bp, Homo sapiens
agtcatagccgagaa

SEQ ID NO: 1854603 - DNA, 15 bp, Homo sapiens
gtcatagccgagaag

SEQ ID NO: 1854604 - DNA, 15 bp, Homo sapiens
tcatagccgagaagt

SEQ ID NO: 1854605 - DNA, 15 bp, Homo sapiens
catagccgagaagtc

SEQ ID NO: 1854606 - DNA, 15 bp, Homo sapiens
atagccgagaagtca

SEQ ID NO: 1854607 - DNA, 15 bp, Homo sapiens
tagccgagaagtcag

SEQ ID NO: 1854608 - DNA, 15 bp, Homo sapiens
agccgagaagtcagg

SEQ ID NO: 1854609 - DNA, 15 bp, Homo sapiens
gccgagaagtcaggt

SEQ ID NO: 1854610 - DNA, 15 bp, Homo sapiens
ccgagaagtcaggtg

SEQ ID NO: 1854611 - DNA, 15 bp, Homo sapiens
cgagaagtcaggtgg

SEQ ID NO: 1854612 - DNA, 15 bp, Homo sapiens
gagaagtcaggtgga

SEQ ID NO: 1854613 - DNA, 15 bp, Homo sapiens
agaagtcaggtggaa

SEQ ID NO: 1854614 - DNA, 15 bp, Homo sapiens
gaagtcaggtggaag

SEQ ID NO: 1854615 - DNA, 15 bp, Homo sapiens
aagtcaggtggaaga

SEQ ID NO: 1854616 - DNA, 15 bp, Homo sapiens
agtcaggtggaagag

SEQ ID NO: 1854617 - DNA, 15 bp, Homo sapiens
gtcaggtggaagagc

SEQ ID NO: 1854618 - DNA, 15 bp, Homo sapiens
tcaggtggaagagca

SEQ ID NO: 1854619 - DNA, 15 bp, Homo sapiens
caggtggaagagcag

SEQ ID NO: 1854620 - DNA, 15 bp, Homo sapiens
aggtggaagagcagg

SEQ ID NO: 1854621 - DNA, 15 bp, Homo sapiens
ggtggaagagcaggt

SEQ ID NO: 1854622 - DNA, 15 bp, Homo sapiens
gtggaagagcaggtc

SEQ ID NO: 1854623 - DNA, 15 bp, Homo sapiens
tggaagagcaggtca

SEQ ID NO: 1854624 - DNA, 15 bp, Homo sapiens
ggaagagcaggtcag

SEQ ID NO: 1854625 - DNA, 15 bp, Homo sapiens
gaagagcaggtcagt

SEQ ID NO: 1854626 - DNA, 15 bp, Homo sapiens
aagagcaggtcagtg

SEQ ID NO: 1854627 - DNA, 15 bp, Homo sapiens
agagcaggtcagtga

SEQ ID NO: 1854628 - DNA, 15 bp, Homo sapiens
gagcaggtcagtgac

SEQ ID NO: 1854629 - DNA, 15 bp, Homo sapiens
agcaggtcagtgacg

SEQ ID NO: 1854630 - DNA, 15 bp, Homo sapiens
gcaggtcagtgacga

SEQ ID NO: 1854631 - DNA, 15 bp, Homo sapiens
caggtcagtgacgag

SEQ ID NO: 1854632 - DNA, 15 bp, Homo sapiens
aggtcagtgacgagt

SEQ ID NO: 1854633 - DNA, 15 bp, Homo sapiens
ggtcagtgacgagtg

SEQ ID NO: 1854634 - DNA, 15 bp, Homo sapiens
gtcagtgacgagtgg

SEQ ID NO: 1854635 - DNA, 15 bp, Homo sapiens
tcagtgacgagtggg

SEQ ID NO: 1854636 - DNA, 15 bp, Homo sapiens
cagtgacgagtgggg

SEQ ID NO: 1854637 - DNA, 15 bp, Homo sapiens
agtgacgagtgggga

SEQ ID NO: 1854638 - DNA, 15 bp, Homo sapiens
gtgacgagtggggag

SEQ ID NO: 1854639 - DNA, 15 bp, Homo sapiens
tgacgagtggggagg

SEQ ID NO: 1854640 - DNA, 15 bp, Homo sapiens
gacgagtggggaggg

SEQ ID NO: 1854641 - DNA, 15 bp, Homo sapiens
acgagtggggagggc

SEQ ID NO: 1854642 - DNA, 15 bp, Homo sapiens
cgagtggggagggca

SEQ ID NO: 1854643 - DNA, 15 bp, Homo sapiens
gagtggggagggcag

SEQ ID NO: 1854644 - DNA, 15 bp, Homo sapiens
agtggggagggcagc

SEQ ID NO: 1854645 - DNA, 15 bp, Homo sapiens
gtggggagggcagcc

SEQ ID NO: 1854646 - DNA, 15 bp, Homo sapiens
tggggagggcagccg

SEQ ID NO: 1854647 - DNA, 15 bp, Homo sapiens
ggggagggcagccgg

SEQ ID NO: 1854648 - DNA, 15 bp, Homo sapiens
gggagggcagccggc

SEQ ID NO: 1854649 - DNA, 15 bp, Homo sapiens
tctcgggttactcat

SEQ ID NO: 1854650 - DNA, 15 bp, Homo sapiens
ctcgggttactcatc

SEQ ID NO: 1854651 - DNA, 15 bp, Homo sapiens
tcgggttactcatct

SEQ ID NO: 1854652 - DNA, 15 bp, Homo sapiens
cgggttactcatctt

SEQ ID NO: 1854653 - DNA, 15 bp, Homo sapiens
gggttactcatcttt

SEQ ID NO: 1854654 - DNA, 15 bp, Homo sapiens
ggttactcatctttt

SEQ ID NO: 1854655 - DNA, 15 bp, Homo sapiens
gttactcatcttttt

SEQ ID NO: 1854656 - DNA, 15 bp, Homo sapiens
ttactcatcttttta

SEQ ID NO: 1854657 - DNA, 15 bp, Homo sapiens
tactcatctttttac

SEQ ID NO: 1854658 - DNA, 15 bp, Homo sapiens
actcatctttttact

SEQ ID NO: 1854659 - DNA, 15 bp, Homo sapiens
ctcatctttttactc

SEQ ID NO: 1854660 - DNA, 15 bp, Homo sapiens
tcatctttttactcc

SEQ ID NO: 1854661 - DNA, 15 bp, Homo sapiens
catctttttactcca

SEQ ID NO: 1854662 - DNA, 15 bp, Homo sapiens
atctttttactccaa

SEQ ID NO: 1854663 - DNA, 15 bp, Homo sapiens
tctttttactccaaa

SEQ ID NO: 1854664 - DNA, 15 bp, Homo sapiens
ctttttactccaaat

SEQ ID NO: 1854665 - DNA, 15 bp, Homo sapiens
tttttactccaaatt

SEQ ID NO: 1854666 - DNA, 15 bp, Homo sapiens
ttttactccaaattg

SEQ ID NO: 1854667 - DNA, 15 bp, Homo sapiens
tttactccaaattgc

SEQ ID NO: 1854668 - DNA, 15 bp, Homo sapiens
ttactccaaattgct

SEQ ID NO: 1854669 - DNA, 15 bp, Homo sapiens
tactccaaattgctt

SEQ ID NO: 1854670 - DNA, 15 bp, Homo sapiens
actccaaattgcttg

SEQ ID NO: 1854671 - DNA, 15 bp, Homo sapiens
ctccaaattgcttgg

SEQ ID NO: 1854672 - DNA, 15 bp, Homo sapiens
tccaaattgcttgga

SEQ ID NO: 1854673 - DNA, 15 bp, Homo sapiens
ccaaattgcttggag

SEQ ID NO: 1854674 - DNA, 15 bp, Homo sapiens
caaattgcttggagt

SEQ ID NO: 1854675 - DNA, 15 bp, Homo sapiens
aaattgcttggagtc

SEQ ID NO: 1854676 - DNA, 15 bp, Homo sapiens
aattgcttggagtcc

SEQ ID NO: 1854677 - DNA, 15 bp, Homo sapiens
attgcttggagtcct

SEQ ID NO: 1854678 - DNA, 15 bp, Homo sapiens
ttgcttggagtcctc

SEQ ID NO: 1854679 - DNA, 15 bp, Homo sapiens
tgcttggagtcctct

SEQ ID NO: 1854680 - DNA, 15 bp, Homo sapiens
gcttggagtcctctg

SEQ ID NO: 1854681 - DNA, 15 bp, Homo sapiens
cttggagtcctctgt

SEQ ID NO: 1854682 - DNA, 15 bp, Homo sapiens
ttggagtcctctgtt

SEQ ID NO: 1854683 - DNA, 15 bp, Homo sapiens
tggagtcctctgttg

SEQ ID NO: 1854684 - DNA, 15 bp, Homo sapiens
ggagtcctctgttga

SEQ ID NO: 1854685 - DNA, 15 bp, Homo sapiens
gagtcctctgttgac

SEQ ID NO: 1854686 - DNA, 15 bp, Homo sapiens
agtcctctgttgact

SEQ ID NO: 1854687 - DNA, 15 bp, Homo sapiens
gtcctctgttgactc

SEQ ID NO: 1854688 - DNA, 15 bp, Homo sapiens
tcctctgttgactct

SEQ ID NO: 1854689 - DNA, 15 bp, Homo sapiens
cctctgttgactctg

SEQ ID NO: 1854690 - DNA, 15 bp, Homo sapiens
ctctgttgactctga

SEQ ID NO: 1854691 - DNA, 15 bp, Homo sapiens
tctgttgactctgaa

SEQ ID NO: 1854692 - DNA, 15 bp, Homo sapiens
ctgttgactctgaag

SEQ ID NO: 1854693 - DNA, 15 bp, Homo sapiens
tgttgactctgaagg

SEQ ID NO: 1854694 - DNA, 15 bp, Homo sapiens
gttgactctgaaggg

SEQ ID NO: 1854695 - DNA, 15 bp, Homo sapiens
ttgactctgaaggga

SEQ ID NO: 1854696 - DNA, 15 bp, Homo sapiens
tgactctgaagggaa

SEQ ID NO: 1854697 - DNA, 15 bp, Homo sapiens
gactctgaagggaat

SEQ ID NO: 1854698 - DNA, 15 bp, Homo sapiens
actctgaagggaata

SEQ ID NO: 1854699 - DNA, 15 bp, Homo sapiens
ctctgaagggaatat

SEQ ID NO: 1854700 - DNA, 15 bp, Homo sapiens
tctgaagggaatatt

SEQ ID NO: 1854701 - DNA, 15 bp, Homo sapiens
ctgaagggaatattc

SEQ ID NO: 1854702 - DNA, 15 bp, Homo sapiens
tgaagggaatattca

SEQ ID NO: 1854703 - DNA, 15 bp, Homo sapiens
gaagggaatattcaa

SEQ ID NO: 1854704 - DNA, 15 bp, Homo sapiens
aagggaatattcaac

SEQ ID NO: 1854705 - DNA, 15 bp, Homo sapiens
agggaatattcaacc

SEQ ID NO: 1854706 - DNA, 15 bp, Homo sapiens
gggaatattcaacca

SEQ ID NO: 1854707 - DNA, 15 bp, Homo sapiens
ggaatattcaaccat

SEQ ID NO: 1854708 - DNA, 15 bp, Homo sapiens
gaatattcaaccata

SEQ ID NO: 1854709 - DNA, 15 bp, Homo sapiens
aatattcaaccataa

SEQ ID NO: 1854710 - DNA, 15 bp, Homo sapiens
atattcaaccataaa

SEQ ID NO: 1854711 - DNA, 15 bp, Homo sapiens
tattcaaccataaac

SEQ ID NO: 1854712 - DNA, 15 bp, Homo sapiens
attcaaccataaaca

SEQ ID NO: 1854713 - DNA, 15 bp, Homo sapiens
ttcaaccataaacaa

SEQ ID NO: 1854714 - DNA, 15 bp, Homo sapiens
tcaaccataaacaat

SEQ ID NO: 1854715 - DNA, 15 bp, Homo sapiens
caaccataaacaatt

SEQ ID NO: 1854716 - DNA, 15 bp, Homo sapiens
aaccataaacaattc

SEQ ID NO: 1854717 - DNA, 15 bp, Homo sapiens
accataaacaattca

SEQ ID NO: 1854718 - DNA, 15 bp, Homo sapiens
ccataaacaattcat

SEQ ID NO: 1854719 - DNA, 15 bp, Homo sapiens
cataaacaattcatc

SEQ ID NO: 1854720 - DNA, 15 bp, Homo sapiens
ataaacaattcatcc

SEQ ID NO: 1854721 - DNA, 15 bp, Homo sapiens
taaacaattcatcct

SEQ ID NO: 1854722 - DNA, 15 bp, Homo sapiens
aaacaattcatccta

SEQ ID NO: 1854723 - DNA, 15 bp, Homo sapiens
aacaattcatcctat

SEQ ID NO: 1854724 - DNA, 15 bp, Homo sapiens
acaattcatcctatc

SEQ ID NO: 1854725 - DNA, 15 bp, Homo sapiens
caattcatcctatct

SEQ ID NO: 1854726 - DNA, 15 bp, Homo sapiens
aattcatcctatctg

SEQ ID NO: 1854727 - DNA, 15 bp, Homo sapiens
attcatcctatctgc

SEQ ID NO: 1854728 - DNA, 15 bp, Homo sapiens
ttcatcctatctgct

SEQ ID NO: 1854729 - DNA, 15 bp, Homo sapiens
tcatcctatctgcta

SEQ ID NO: 1854730 - DNA, 15 bp, Homo sapiens
catcctatctgctat

SEQ ID NO: 1854731 - DNA, 15 bp, Homo sapiens
atcctatctgctatc

SEQ ID NO: 1854732 - DNA, 15 bp, Homo sapiens
tcctatctgctatct

SEQ ID NO: 1854733 - DNA, 15 bp, Homo sapiens
cctatctgctatctg

SEQ ID NO: 1854734 - DNA, 15 bp, Homo sapiens
ctatctgctatctgt

SEQ ID NO: 1854735 - DNA, 15 bp, Homo sapiens
tatctgctatctgtg

SEQ ID NO: 1854736 - DNA, 15 bp, Homo sapiens
atctgctatctgtgg

SEQ ID NO: 1854737 - DNA, 15 bp, Homo sapiens
tctgctatctgtggt

SEQ ID NO: 1854738 - DNA, 15 bp, Homo sapiens
ctgctatctgtggtt

SEQ ID NO: 1854739 - DNA, 15 bp, Homo sapiens
tgctatctgtggttg

SEQ ID NO: 1854740 - DNA, 15 bp, Homo sapiens
gctatctgtggttga

SEQ ID NO: 1854741 - DNA, 15 bp, Homo sapiens
ctatctgtggttgaa

SEQ ID NO: 1854742 - DNA, 15 bp, Homo sapiens
tatctgtggttgaat

SEQ ID NO: 1854743 - DNA, 15 bp, Homo sapiens
atctgtggttgaatt

SEQ ID NO: 1854744 - DNA, 15 bp, Homo sapiens
tctgtggttgaattc

SEQ ID NO: 1854745 - DNA, 15 bp, Homo sapiens
ctgtggttgaattct

SEQ ID NO: 1854746 - DNA, 15 bp, Homo sapiens
tgtggttgaattctt

SEQ ID NO: 1854747 - DNA, 15 bp, Homo sapiens
gtggttgaattcttt

SEQ ID NO: 1854748 - DNA, 15 bp, Homo sapiens
tggttgaattctttc

SEQ ID NO: 1854749 - DNA, 15 bp, Homo sapiens
ggttgaattctttct

SEQ ID NO: 1854750 - DNA, 15 bp, Homo sapiens
gttgaattctttctt

SEQ ID NO: 1854751 - DNA, 15 bp, Homo sapiens
ttgaattctttcttc

SEQ ID NO: 1854752 - DNA, 15 bp, Homo sapiens
tgaattctttcttcc

SEQ ID NO: 1854753 - DNA, 15 bp, Homo sapiens
gaattctttcttccc

SEQ ID NO: 1854754 - DNA, 15 bp, Homo sapiens
aattctttcttccca

SEQ ID NO: 1854755 - DNA, 15 bp, Homo sapiens
attctttcttcccag

SEQ ID NO: 1854756 - DNA, 15 bp, Homo sapiens
ttctttcttcccagt

SEQ ID NO: 1854757 - DNA, 15 bp, Homo sapiens
tctttcttcccagtt

SEQ ID NO: 1854758 - DNA, 15 bp, Homo sapiens
ctttcttcccagttg

SEQ ID NO: 1854759 - DNA, 15 bp, Homo sapiens
tttcttcccagttgc

SEQ ID NO: 1854760 - DNA, 15 bp, Homo sapiens
ttcttcccagttgcc

SEQ ID NO: 1854761 - DNA, 15 bp, Homo sapiens
tcttcccagttgccc

SEQ ID NO: 1854762 - DNA, 15 bp, Homo sapiens
cttcccagttgcccc

SEQ ID NO: 1854763 - DNA, 15 bp, Homo sapiens
ttcccagttgcccct

SEQ ID NO: 1854764 - DNA, 15 bp, Homo sapiens
tcccagttgcccctt

SEQ ID NO: 1854765 - DNA, 15 bp, Homo sapiens
cccagttgccccttg

SEQ ID NO: 1854766 - DNA, 15 bp, Homo sapiens
ccagttgccccttgg

SEQ ID NO: 1854767 - DNA, 15 bp, Homo sapiens
cagttgccccttggg

SEQ ID NO: 1854768 - DNA, 15 bp, Homo sapiens
agttgccccttgggt

SEQ ID NO: 1854769 - DNA, 15 bp, Homo sapiens
gttgccccttgggtg

SEQ ID NO: 1854770 - DNA, 15 bp, Homo sapiens
ttgccccttgggtgg

SEQ ID NO: 1854771 - DNA, 15 bp, Homo sapiens
tgccccttgggtggt

SEQ ID NO: 1854772 - DNA, 15 bp, Homo sapiens
gccccttgggtggtg

SEQ ID NO: 1854773 - DNA, 15 bp, Homo sapiens
ccccttgggtggtgg

SEQ ID NO: 1854774 - DNA, 15 bp, Homo sapiens
cccttgggtggtggc

SEQ ID NO: 1854775 - DNA, 15 bp, Homo sapiens
ccttgggtggtggct

SEQ ID NO: 1854776 - DNA, 15 bp, Homo sapiens
cttgggtggtggctt

SEQ ID NO: 1854777 - DNA, 15 bp, Homo sapiens
ttgggtggtggcttg

SEQ ID NO: 1854778 - DNA, 15 bp, Homo sapiens
tgggtggtggcttgg

SEQ ID NO: 1854779 - DNA, 15 bp, Homo sapiens
gggtggtggcttggg

SEQ ID NO: 1854780 - DNA, 15 bp, Homo sapiens
ggtggtggcttgggg

SEQ ID NO: 1854781 - DNA, 15 bp, Homo sapiens
gtggtggcttggggc

SEQ ID NO: 1854782 - DNA, 15 bp, Homo sapiens
tggtggcttggggcc

SEQ ID NO: 1854783 - DNA, 15 bp, Homo sapiens
ggtggcttggggcca

SEQ ID NO: 1854784 - DNA, 15 bp, Homo sapiens
gtggcttggggccac

SEQ ID NO: 1854785 - DNA, 15 bp, Homo sapiens
tggcttggggccacg

SEQ ID NO: 1854786 - DNA, 15 bp, Homo sapiens
ggcttggggccacgg

SEQ ID NO: 1854787 - DNA, 15 bp, Homo sapiens
gcttggggccacggt

SEQ ID NO: 1854788 - DNA, 15 bp, Homo sapiens
cttggggccacggta

SEQ ID NO: 1854789 - DNA, 15 bp, Homo sapiens
ttggggccacggtaa

SEQ ID NO: 1854790 - DNA, 15 bp, Homo sapiens
tggggccacggtaac

SEQ ID NO: 1854791 - DNA, 15 bp, Homo sapiens
ggggccacggtaaca

SEQ ID NO: 1854792 - DNA, 15 bp, Homo sapiens
gggccacggtaacac

SEQ ID NO: 1854793 - DNA, 15 bp, Homo sapiens
ggccacggtaacact

SEQ ID NO: 1854794 - DNA, 15 bp, Homo sapiens
gccacggtaacactt

SEQ ID NO: 1854795 - DNA, 15 bp, Homo sapiens
ccacggtaacacttg

SEQ ID NO: 1854796 - DNA, 15 bp, Homo sapiens
cacggtaacacttgt

SEQ ID NO: 1854797 - DNA, 15 bp, Homo sapiens
acggtaacacttgta

SEQ ID NO: 1854798 - DNA, 15 bp, Homo sapiens
cggtaacacttgtag

SEQ ID NO: 1854799 - DNA, 15 bp, Homo sapiens
ggtaacacttgtagt

SEQ ID NO: 1854800 - DNA, 15 bp, Homo sapiens
gtaacacttgtagta

SEQ ID NO: 1854801 - DNA, 15 bp, Homo sapiens
taacacttgtagtat

SEQ ID NO: 1854802 - DNA, 15 bp, Homo sapiens
aacacttgtagtatt

SEQ ID NO: 1854803 - DNA, 15 bp, Homo sapiens
acacttgtagtattt

SEQ ID NO: 1854804 - DNA, 15 bp, Homo sapiens
cacttgtagtatttc

SEQ ID NO: 1854805 - DNA, 15 bp, Homo sapiens
acttgtagtatttcc

SEQ ID NO: 1854806 - DNA, 15 bp, Homo sapiens
cttgtagtatttccc

SEQ ID NO: 1854807 - DNA, 15 bp, Homo sapiens
ttgtagtatttcccg

SEQ ID NO: 1854808 - DNA, 15 bp, Homo sapiens
tgtagtatttcccgg

SEQ ID NO: 1854809 - DNA, 15 bp, Homo sapiens
gtagtatttcccggg

SEQ ID NO: 1854810 - DNA, 15 bp, Homo sapiens
tagtatttcccggga

SEQ ID NO: 1854811 - DNA, 15 bp, Homo sapiens
agtatttcccgggag

SEQ ID NO: 1854812 - DNA, 15 bp, Homo sapiens
gtatttcccgggagg

SEQ ID NO: 1854813 - DNA, 15 bp, Homo sapiens
tatttcccgggaggt

SEQ ID NO: 1854814 - DNA, 15 bp, Homo sapiens
atttcccgggaggtt

SEQ ID NO: 1854815 - DNA, 15 bp, Homo sapiens
tttcccgggaggttg

SEQ ID NO: 1854816 - DNA, 15 bp, Homo sapiens
ttcccgggaggttgt

SEQ ID NO: 1854817 - DNA, 15 bp, Homo sapiens
tcccgggaggttgtt

SEQ ID NO: 1854818 - DNA, 15 bp, Homo sapiens
cccgggaggttgtta

SEQ ID NO: 1854819 - DNA, 15 bp, Homo sapiens
ccgggaggttgttat

SEQ ID NO: 1854820 - DNA, 15 bp, Homo sapiens
cgggaggttgttata

SEQ ID NO: 1854821 - DNA, 15 bp, Homo sapiens
gggaggttgttatag

SEQ ID NO: 1854822 - DNA, 15 bp, Homo sapiens
ggaggttgttatagt

SEQ ID NO: 1854823 - DNA, 15 bp, Homo sapiens
gaggttgttatagtt

SEQ ID NO: 1854824 - DNA, 15 bp, Homo sapiens
aggttgttatagttc

SEQ ID NO: 1854825 - DNA, 15 bp, Homo sapiens
ggttgttatagttct

SEQ ID NO: 1854826 - DNA, 15 bp, Homo sapiens
gttgttatagttctg

SEQ ID NO: 1854827 - DNA, 15 bp, Homo sapiens
ttgttatagttctgt

SEQ ID NO: 1854828 - DNA, 15 bp, Homo sapiens
tgttatagttctgtg

SEQ ID NO: 1854829 - DNA, 15 bp, Homo sapiens
gttatagttctgtgc

SEQ ID NO: 1854830 - DNA, 15 bp, Homo sapiens
ttatagttctgtgca

SEQ ID NO: 1854831 - DNA, 15 bp, Homo sapiens
tatagttctgtgcat

SEQ ID NO: 1854832 - DNA, 15 bp, Homo sapiens
atagttctgtgcatt

SEQ ID NO: 1854833 - DNA, 15 bp, Homo sapiens
tagttctgtgcattt

SEQ ID NO: 1854834 - DNA, 15 bp, Homo sapiens
agttctgtgcatttc

SEQ ID NO: 1854835 - DNA, 15 bp, Homo sapiens
gttctgtgcatttcc

SEQ ID NO: 1854836 - DNA, 15 bp, Homo sapiens
ttctgtgcatttcct

SEQ ID NO: 1854837 - DNA, 15 bp, Homo sapiens
tctgtgcatttcctg

SEQ ID NO: 1854838 - DNA, 15 bp, Homo sapiens
ctgtgcatttcctgc

SEQ ID NO: 1854839 - DNA, 15 bp, Homo sapiens
tgtgcatttcctgca

SEQ ID NO: 1854840 - DNA, 15 bp, Homo sapiens
gtgcatttcctgcag

SEQ ID NO: 1854841 - DNA, 15 bp, Homo sapiens
tgcatttcctgcagt

SEQ ID NO: 1854842 - DNA, 15 bp, Homo sapiens
gcatttcctgcagta

SEQ ID NO: 1854843 - DNA, 15 bp, Homo sapiens
catttcctgcagtag

SEQ ID NO: 1854844 - DNA, 15 bp, Homo sapiens
atttcctgcagtagt

SEQ ID NO: 1854845 - DNA, 15 bp, Homo sapiens
tttcctgcagtagtg

SEQ ID NO: 1854846 - DNA, 15 bp, Homo sapiens
ttcctgcagtagtgg

SEQ ID NO: 1854847 - DNA, 15 bp, Homo sapiens
tcctgcagtagtggt

SEQ ID NO: 1854848 - DNA, 15 bp, Homo sapiens
cctgcagtagtggta

SEQ ID NO: 1854849 - DNA, 15 bp, Homo sapiens
ctgcagtagtggtag

SEQ ID NO: 1854850 - DNA, 15 bp, Homo sapiens
tgcagtagtggtagt

SEQ ID NO: 1854851 - DNA, 15 bp, Homo sapiens
gcagtagtggtagtg

SEQ ID NO: 1854852 - DNA, 15 bp, Homo sapiens
cagtagtggtagtga

SEQ ID NO: 1854853 - DNA, 15 bp, Homo sapiens
agtagtggtagtgaa

SEQ ID NO: 1854854 - DNA, 15 bp, Homo sapiens
gtagtggtagtgaag

SEQ ID NO: 1854855 - DNA, 15 bp, Homo sapiens
tagtggtagtgaagg

SEQ ID NO: 1854856 - DNA, 15 bp, Homo sapiens
agtggtagtgaaggc

SEQ ID NO: 1854857 - DNA, 15 bp, Homo sapiens
gtggtagtgaaggca

SEQ ID NO: 1854858 - DNA, 15 bp, Homo sapiens
tggtagtgaaggcat

SEQ ID NO: 1854859 - DNA, 15 bp, Homo sapiens
ggtagtgaaggcatt

SEQ ID NO: 1854860 - DNA, 15 bp, Homo sapiens
gtagtgaaggcatta

SEQ ID NO: 1854861 - DNA, 15 bp, Homo sapiens
tagtgaaggcattag

SEQ ID NO: 1854862 - DNA, 15 bp, Homo sapiens
agtgaaggcattaga

SEQ ID NO: 1854863 - DNA, 15 bp, Homo sapiens
gtgaaggcattagat

SEQ ID NO: 1854864 - DNA, 15 bp, Homo sapiens
tgaaggcattagatg

SEQ ID NO: 1854865 - DNA, 15 bp, Homo sapiens
gaaggcattagatgc

SEQ ID NO: 1854866 - DNA, 15 bp, Homo sapiens
aaggcattagatgcc

SEQ ID NO: 1854867 - DNA, 15 bp, Homo sapiens
aggcattagatgcca

SEQ ID NO: 1854868 - DNA, 15 bp, Homo sapiens
ggcattagatgccag

SEQ ID NO: 1854869 - DNA, 15 bp, Homo sapiens
gcattagatgccagg

SEQ ID NO: 1854870 - DNA, 15 bp, Homo sapiens
cattagatgccagga

SEQ ID NO: 1854871 - DNA, 15 bp, Homo sapiens
attagatgccaggaa

SEQ ID NO: 1854872 - DNA, 15 bp, Homo sapiens
ttagatgccaggaac

SEQ ID NO: 1854873 - DNA, 15 bp, Homo sapiens
tagatgccaggaact

SEQ ID NO: 1854874 - DNA, 15 bp, Homo sapiens
agatgccaggaactc

SEQ ID NO: 1854875 - DNA, 15 bp, Homo sapiens
gatgccaggaactca

SEQ ID NO: 1854876 - DNA, 15 bp, Homo sapiens
atgccaggaactcag

SEQ ID NO: 1854877 - DNA, 15 bp, Homo sapiens
tgccaggaactcagg

SEQ ID NO: 1854878 - DNA, 15 bp, Homo sapiens
gccaggaactcaggc

SEQ ID NO: 1854879 - DNA, 15 bp, Homo sapiens
ccaggaactcaggcg

SEQ ID NO: 1854880 - DNA, 15 bp, Homo sapiens
caggaactcaggcgg

SEQ ID NO: 1854881 - DNA, 15 bp, Homo sapiens
aggaactcaggcggt

SEQ ID NO: 1854882 - DNA, 15 bp, Homo sapiens
ggaactcaggcggtt

SEQ ID NO: 1854883 - DNA, 15 bp, Homo sapiens
gaactcaggcggttg

SEQ ID NO: 1854884 - DNA, 15 bp, Homo sapiens
aactcaggcggttgg

SEQ ID NO: 1854885 - DNA, 15 bp, Homo sapiens
actcaggcggttggt

SEQ ID NO: 1854886 - DNA, 15 bp, Homo sapiens
ctcaggcggttggta

SEQ ID NO: 1854887 - DNA, 15 bp, Homo sapiens
tcaggcggttggtat

SEQ ID NO: 1854888 - DNA, 15 bp, Homo sapiens
caggcggttggtatg

SEQ ID NO: 1854889 - DNA, 15 bp, Homo sapiens
aggcggttggtatgg

SEQ ID NO: 1854890 - DNA, 15 bp, Homo sapiens
ggcggttggtatggc

SEQ ID NO: 1854891 - DNA, 15 bp, Homo sapiens
gcggttggtatggcc

SEQ ID NO: 1854892 - DNA, 15 bp, Homo sapiens
cggttggtatggccc

SEQ ID NO: 1854893 - DNA, 15 bp, Homo sapiens
ggttggtatggccct

SEQ ID NO: 1854894 - DNA, 15 bp, Homo sapiens
gttggtatggccctg

SEQ ID NO: 1854895 - DNA, 15 bp, Homo sapiens
ttggtatggccctga

SEQ ID NO: 1854896 - DNA, 15 bp, Homo sapiens
tggtatggccctgag

SEQ ID NO: 1854897 - DNA, 15 bp, Homo sapiens
ggtatggccctgagc

SEQ ID NO: 1854898 - DNA, 15 bp, Homo sapiens
gtatggccctgagct

SEQ ID NO: 1854899 - DNA, 15 bp, Homo sapiens
tatggccctgagctc

SEQ ID NO: 1854900 - DNA, 15 bp, Homo sapiens
atggccctgagctct

SEQ ID NO: 1854901 - DNA, 15 bp, Homo sapiens
tggccctgagctctg

SEQ ID NO: 1854902 - DNA, 15 bp, Homo sapiens
ggccctgagctctga

SEQ ID NO: 1854903 - DNA, 15 bp, Homo sapiens
gccctgagctctgaa

SEQ ID NO: 1854904 - DNA, 15 bp, Homo sapiens
ccctgagctctgaaa

SEQ ID NO: 1854905 - DNA, 15 bp, Homo sapiens
cctgagctctgaaaa

SEQ ID NO: 1854906 - DNA, 15 bp, Homo sapiens
ctgagctctgaaaat

SEQ ID NO: 1854907 - DNA, 15 bp, Homo sapiens
tgagctctgaaaatg

SEQ ID NO: 1854908 - DNA, 15 bp, Homo sapiens
gagctctgaaaatgc

SEQ ID NO: 1854909 - DNA, 15 bp, Homo sapiens
agctctgaaaatgct

SEQ ID NO: 1854910 - DNA, 15 bp, Homo sapiens
gctctgaaaatgctt

SEQ ID NO: 1854911 - DNA, 15 bp, Homo sapiens
ctctgaaaatgcttg

SEQ ID NO: 1854912 - DNA, 15 bp, Homo sapiens
tctgaaaatgcttgc

SEQ ID NO: 1854913 - DNA, 15 bp, Homo sapiens
ctgaaaatgcttgcc

SEQ ID NO: 1854914 - DNA, 15 bp, Homo sapiens
tgaaaatgcttgcct

SEQ ID NO: 1854915 - DNA, 15 bp, Homo sapiens
gaaaatgcttgcctt

SEQ ID NO: 1854916 - DNA, 15 bp, Homo sapiens
aaaatgcttgccttc

SEQ ID NO: 1854917 - DNA, 15 bp, Homo sapiens
aaatgcttgccttcc

SEQ ID NO: 1854918 - DNA, 15 bp, Homo sapiens
aatgcttgccttccc

SEQ ID NO: 1854919 - DNA, 15 bp, Homo sapiens
atgcttgccttcccc

SEQ ID NO: 1854920 - DNA, 15 bp, Homo sapiens
tgcttgccttcccct

SEQ ID NO: 1854921 - DNA, 15 bp, Homo sapiens
gcttgccttcccctt

SEQ ID NO: 1854922 - DNA, 15 bp, Homo sapiens
cttgccttccccttt

SEQ ID NO: 1854923 - DNA, 15 bp, Homo sapiens
ttgccttcccctttc

SEQ ID NO: 1854924 - DNA, 15 bp, Homo sapiens
tgccttcccctttcc

SEQ ID NO: 1854925 - DNA, 15 bp, Homo sapiens
gccttcccctttccc

SEQ ID NO: 1854926 - DNA, 15 bp, Homo sapiens
ccttcccctttcccc

SEQ ID NO: 1854927 - DNA, 15 bp, Homo sapiens
cttcccctttcccct

SEQ ID NO: 1854928 - DNA, 15 bp, Homo sapiens
ttcccctttccccta

SEQ ID NO: 1854929 - DNA, 15 bp, Homo sapiens
tcccctttcccctat

SEQ ID NO: 1854930 - DNA, 15 bp, Homo sapiens
cccctttcccctatt

SEQ ID NO: 1854931 - DNA, 15 bp, Homo sapiens
ccctttcccctattg

SEQ ID NO: 1854932 - DNA, 15 bp, Homo sapiens
cctttcccctattgt

SEQ ID NO: 1854933 - DNA, 15 bp, Homo sapiens
ctttcccctattgtg

SEQ ID NO: 1854934 - DNA, 15 bp, Homo sapiens
tttcccctattgtgt

SEQ ID NO: 1854935 - DNA, 15 bp, Homo sapiens
ttcccctattgtgtg

SEQ ID NO: 1854936 - DNA, 15 bp, Homo sapiens
tcccctattgtgtgg

SEQ ID NO: 1854937 - DNA, 15 bp, Homo sapiens
cccctattgtgtggg

SEQ ID NO: 1854938 - DNA, 15 bp, Homo sapiens
ccctattgtgtgggc

SEQ ID NO: 1854939 - DNA, 15 bp, Homo sapiens
cctattgtgtgggcc

SEQ ID NO: 1854940 - DNA, 15 bp, Homo sapiens
ctattgtgtgggcca

SEQ ID NO: 1854941 - DNA, 15 bp, Homo sapiens
tattgtgtgggccag

SEQ ID NO: 1854942 - DNA, 15 bp, Homo sapiens
attgtgtgggccagc

SEQ ID NO: 1854943 - DNA, 15 bp, Homo sapiens
ttgtgtgggccagca

SEQ ID NO: 1854944 - DNA, 15 bp, Homo sapiens
tgtgtgggccagcag

SEQ ID NO: 1854945 - DNA, 15 bp, Homo sapiens
gtgtgggccagcagc

SEQ ID NO: 1854946 - DNA, 15 bp, Homo sapiens
tgtgggccagcagct

SEQ ID NO: 1854947 - DNA, 15 bp, Homo sapiens
gtgggccagcagctt

SEQ ID NO: 1854948 - DNA, 15 bp, Homo sapiens
tgggccagcagcttg

SEQ ID NO: 1854949 - DNA, 15 bp, Homo sapiens
gggccagcagcttgc

SEQ ID NO: 1854950 - DNA, 15 bp, Homo sapiens
ggccagcagcttgca

SEQ ID NO: 1854951 - DNA, 15 bp, Homo sapiens
gccagcagcttgcag

SEQ ID NO: 1854952 - DNA, 15 bp, Homo sapiens
ccagcagcttgcaga

SEQ ID NO: 1854953 - DNA, 15 bp, Homo sapiens
cagcagcttgcagag

SEQ ID NO: 1854954 - DNA, 15 bp, Homo sapiens
agcagcttgcagagc

SEQ ID NO: 1854955 - DNA, 15 bp, Homo sapiens
gcagcttgcagagct

SEQ ID NO: 1854956 - DNA, 15 bp, Homo sapiens
cagcttgcagagctc

SEQ ID NO: 1854957 - DNA, 15 bp, Homo sapiens
agcttgcagagctcc

SEQ ID NO: 1854958 - DNA, 15 bp, Homo sapiens
gcttgcagagctcct

SEQ ID NO: 1854959 - DNA, 15 bp, Homo sapiens
cttgcagagctcctc

SEQ ID NO: 1854960 - DNA, 15 bp, Homo sapiens
ttgcagagctcctcc

SEQ ID NO: 1854961 - DNA, 15 bp, Homo sapiens
tgcagagctcctcca

SEQ ID NO: 1854962 - DNA, 15 bp, Homo sapiens
gcagagctcctccag

SEQ ID NO: 1854963 - DNA, 15 bp, Homo sapiens
cagagctcctccagc

SEQ ID NO: 1854964 - DNA, 15 bp, Homo sapiens
agagctcctccagcc

SEQ ID NO: 1854965 - DNA, 15 bp, Homo sapiens
gagctcctccagccc

SEQ ID NO: 1854966 - DNA, 15 bp, Homo sapiens
agctcctccagccct

SEQ ID NO: 1854967 - DNA, 15 bp, Homo sapiens
gctcctccagccctg

SEQ ID NO: 1854968 - DNA, 15 bp, Homo sapiens
ctcctccagccctga

SEQ ID NO: 1854969 - DNA, 15 bp, Homo sapiens
tcctccagccctgag

SEQ ID NO: 1854970 - DNA, 15 bp, Homo sapiens
cctccagccctgaga

SEQ ID NO: 1854971 - DNA, 15 bp, Homo sapiens
ctccagccctgagag

SEQ ID NO: 1854972 - DNA, 15 bp, Homo sapiens
tccagccctgagaga

SEQ ID NO: 1854973 - DNA, 15 bp, Homo sapiens
ccagccctgagagac

SEQ ID NO: 1854974 - DNA, 15 bp, Homo sapiens
cagccctgagagacc

SEQ ID NO: 1854975 - DNA, 15 bp, Homo sapiens
agccctgagagacca

SEQ ID NO: 1854976 - DNA, 15 bp, Homo sapiens
gccctgagagaccat

SEQ ID NO: 1854977 - DNA, 15 bp, Homo sapiens
ccctgagagaccatg

SEQ ID NO: 1854978 - DNA, 15 bp, Homo sapiens
cctgagagaccatgc

SEQ ID NO: 1854979 - DNA, 15 bp, Homo sapiens
ctgagagaccatgcc

SEQ ID NO: 1854980 - DNA, 15 bp, Homo sapiens
tgagagaccatgcct

SEQ ID NO: 1854981 - DNA, 15 bp, Homo sapiens
gagagaccatgcctc

SEQ ID NO: 1854982 - DNA, 15 bp, Homo sapiens
agagaccatgcctcc

SEQ ID NO: 1854983 - DNA, 15 bp, Homo sapiens
gagaccatgcctcca

SEQ ID NO: 1854984 - DNA, 15 bp, Homo sapiens
agaccatgcctccat

SEQ ID NO: 1854985 - DNA, 15 bp, Homo sapiens
gaccatgcctccatc

SEQ ID NO: 1854986 - DNA, 15 bp, Homo sapiens
accatgcctccatcc

SEQ ID NO: 1854987 - DNA, 15 bp, Homo sapiens
ccatgcctccatccc

SEQ ID NO: 1854988 - DNA, 15 bp, Homo sapiens
catgcctccatccct

SEQ ID NO: 1854989 - DNA, 15 bp, Homo sapiens
atgcctccatccctc

SEQ ID NO: 1854990 - DNA, 15 bp, Homo sapiens
tgcctccatccctca

SEQ ID NO: 1854991 - DNA, 15 bp, Homo sapiens
gcctccatccctcag

SEQ ID NO: 1854992 - DNA, 15 bp, Homo sapiens
cctccatccctcaga

SEQ ID NO: 1854993 - DNA, 15 bp, Homo sapiens
ctccatccctcagac

SEQ ID NO: 1854994 - DNA, 15 bp, Homo sapiens
tccatccctcagacc

SEQ ID NO: 1854995 - DNA, 15 bp, Homo sapiens
ccatccctcagaccc

SEQ ID NO: 1854996 - DNA, 15 bp, Homo sapiens
catccctcagaccct

SEQ ID NO: 1854997 - DNA, 15 bp, Homo sapiens
atccctcagacccta

SEQ ID NO: 1854998 - DNA, 15 bp, Homo sapiens
tccctcagaccctac

SEQ ID NO: 1854999 - DNA, 15 bp, Homo sapiens
ccctcagaccctacc

SEQ ID NO: 1855000 - DNA, 15 bp, Homo sapiens
cctcagaccctacct

SEQ ID NO: 1855001 - DNA, 15 bp, Homo sapiens
ctcagaccctacctt

SEQ ID NO: 1855002 - DNA, 15 bp, Homo sapiens
tcagaccctaccttt

SEQ ID NO: 1855003 - DNA, 15 bp, Homo sapiens
cagaccctacctttc

SEQ ID NO: 1855004 - DNA, 15 bp, Homo sapiens
agaccctacctttcc

SEQ ID NO: 1855005 - DNA, 15 bp, Homo sapiens
gaccctacctttcct

SEQ ID NO: 1855006 - DNA, 15 bp, Homo sapiens
accctacctttcctg

SEQ ID NO: 1855007 - DNA, 15 bp, Homo sapiens
ccctacctttcctgg

SEQ ID NO: 1855008 - DNA, 15 bp, Homo sapiens
cctacctttcctggc

SEQ ID NO: 1855009 - DNA, 15 bp, Homo sapiens
ctacctttcctggcc

SEQ ID NO: 1855010 - DNA, 15 bp, Homo sapiens
tacctttcctggccc

SEQ ID NO: 1855011 - DNA, 15 bp, Homo sapiens
acctttcctggcccc

SEQ ID NO: 1855012 - DNA, 15 bp, Homo sapiens
cctttcctggcccca

SEQ ID NO: 1855013 - DNA, 15 bp, Homo sapiens
ctttcctggccccaa

SEQ ID NO: 1855014 - DNA, 15 bp, Homo sapiens
tttcctggccccaag

SEQ ID NO: 1855015 - DNA, 15 bp, Homo sapiens
ttcctggccccaagg

SEQ ID NO: 1855016 - DNA, 15 bp, Homo sapiens
tcctggccccaaggc

SEQ ID NO: 1855017 - DNA, 15 bp, Homo sapiens
cctggccccaaggct

SEQ ID NO: 1855018 - DNA, 15 bp, Homo sapiens
ctggccccaaggctg

SEQ ID NO: 1855019 - DNA, 15 bp, Homo sapiens
tggccccaaggctgc

SEQ ID NO: 1855020 - DNA, 15 bp, Homo sapiens
ggccccaaggctgcc

SEQ ID NO: 1855021 - DNA, 15 bp, Homo sapiens
gccccaaggctgcct

SEQ ID NO: 1855022 - DNA, 15 bp, Homo sapiens
ccccaaggctgcctc

SEQ ID NO: 1855023 - DNA, 15 bp, Homo sapiens
cccaaggctgcctct

SEQ ID NO: 1855024 - DNA, 15 bp, Homo sapiens
ccaaggctgcctctg

SEQ ID NO: 1855025 - DNA, 15 bp, Homo sapiens
caaggctgcctctgg

SEQ ID NO: 1855026 - DNA, 15 bp, Homo sapiens
aaggctgcctctggc

SEQ ID NO: 1855027 - DNA, 15 bp, Homo sapiens
aggctgcctctggct

SEQ ID NO: 1855028 - DNA, 15 bp, Homo sapiens
ggctgcctctggcta

SEQ ID NO: 1855029 - DNA, 15 bp, Homo sapiens
gctgcctctggctag

SEQ ID NO: 1855030 - DNA, 15 bp, Homo sapiens
ctgcctctggctagt

SEQ ID NO: 1855031 - DNA, 15 bp, Homo sapiens
tgcctctggctagtg

SEQ ID NO: 1855032 - DNA, 15 bp, Homo sapiens
gcctctggctagtgt

SEQ ID NO: 1855033 - DNA, 15 bp, Homo sapiens
cctctggctagtgtg

SEQ ID NO: 1855034 - DNA, 15 bp, Homo sapiens
ctctggctagtgtga

SEQ ID NO: 1855035 - DNA, 15 bp, Homo sapiens
tctggctagtgtgac

SEQ ID NO: 1855036 - DNA, 15 bp, Homo sapiens
ctggctagtgtgaca

SEQ ID NO: 1855037 - DNA, 15 bp, Homo sapiens
tggctagtgtgacag

SEQ ID NO: 1855038 - DNA, 15 bp, Homo sapiens
ggctagtgtgacaga

SEQ ID NO: 1855039 - DNA, 15 bp, Homo sapiens
gctagtgtgacagac

SEQ ID NO: 1855040 - DNA, 15 bp, Homo sapiens
ctagtgtgacagaca

SEQ ID NO: 1855041 - DNA, 15 bp, Homo sapiens
tagtgtgacagacac

SEQ ID NO: 1855042 - DNA, 15 bp, Homo sapiens
agtgtgacagacaca

SEQ ID NO: 1855043 - DNA, 15 bp, Homo sapiens
gtgtgacagacacac

SEQ ID NO: 1855044 - DNA, 15 bp, Homo sapiens
tgtgacagacacacc

SEQ ID NO: 1855045 - DNA, 15 bp, Homo sapiens
tgacagacacaccct

SEQ ID NO: 1855046 - DNA, 15 bp, Homo sapiens
gacagacacaccctg

SEQ ID NO: 1855047 - DNA, 15 bp, Homo sapiens
acagacacaccctgg

SEQ ID NO: 1855048 - DNA, 15 bp, Homo sapiens
cagacacaccctggg

SEQ ID NO: 1855049 - DNA, 15 bp, Homo sapiens
agacacaccctgggc

SEQ ID NO: 1855050 - DNA, 15 bp, Homo sapiens
gacacaccctgggcc

SEQ ID NO: 1855051 - DNA, 15 bp, Homo sapiens
acacaccctgggccc

SEQ ID NO: 1855052 - DNA, 15 bp, Homo sapiens
cacaccctgggcccc

SEQ ID NO: 1855053 - DNA, 15 bp, Homo sapiens
acaccctgggcccct

SEQ ID NO: 1855054 - DNA, 15 bp, Homo sapiens
caccctgggcccctg

SEQ ID NO: 1855055 - DNA, 15 bp, Homo sapiens
accctgggcccctga

SEQ ID NO: 1855056 - DNA, 15 bp, Homo sapiens
ccctgggcccctgaa

SEQ ID NO: 1855057 - DNA, 15 bp, Homo sapiens
cctgggcccctgaag

SEQ ID NO: 1855058 - DNA, 15 bp, Homo sapiens
ctgggcccctgaagt

SEQ ID NO: 1855059 - DNA, 15 bp, Homo sapiens
tgggcccctgaagtc

SEQ ID NO: 1855060 - DNA, 15 bp, Homo sapiens
gggcccctgaagtct

SEQ ID NO: 1855061 - DNA, 15 bp, Homo sapiens
ggcccctgaagtctg

SEQ ID NO: 1855062 - DNA, 15 bp, Homo sapiens
gcccctgaagtctga

SEQ ID NO: 1855063 - DNA, 15 bp, Homo sapiens
cccctgaagtctgaa

SEQ ID NO: 1855064 - DNA, 15 bp, Homo sapiens
ccctgaagtctgaaa

SEQ ID NO: 1855065 - DNA, 15 bp, Homo sapiens
cctgaagtctgaaag

SEQ ID NO: 1855066 - DNA, 15 bp, Homo sapiens
ctgaagtctgaaagc

SEQ ID NO: 1855067 - DNA, 15 bp, Homo sapiens
tgaagtctgaaagcc

SEQ ID NO: 1855068 - DNA, 15 bp, Homo sapiens
gaagtctgaaagcca

SEQ ID NO: 1855069 - DNA, 15 bp, Homo sapiens
aagtctgaaagccac

SEQ ID NO: 1855070 - DNA, 15 bp, Homo sapiens
agtctgaaagccaca

SEQ ID NO: 1855071 - DNA, 15 bp, Homo sapiens
gtctgaaagccacat

SEQ ID NO: 1855072 - DNA, 15 bp, Homo sapiens
tctgaaagccacatt

SEQ ID NO: 1855073 - DNA, 15 bp, Homo sapiens
ctgaaagccacattt

SEQ ID NO: 1855074 - DNA, 15 bp, Homo sapiens
tgaaagccacatttt

SEQ ID NO: 1855075 - DNA, 15 bp, Homo sapiens
gaaagccacattttt

SEQ ID NO: 1855076 - DNA, 15 bp, Homo sapiens
aaagccacatttttc

SEQ ID NO: 1855077 - DNA, 15 bp, Homo sapiens
aagccacatttttcg

SEQ ID NO: 1855078 - DNA, 15 bp, Homo sapiens
agccacatttttcga

SEQ ID NO: 1855079 - DNA, 15 bp, Homo sapiens
gccacatttttcgag

SEQ ID NO: 1855080 - DNA, 15 bp, Homo sapiens
ccacatttttcgagg

SEQ ID NO: 1855081 - DNA, 15 bp, Homo sapiens
cacatttttcgaggg

SEQ ID NO: 1855082 - DNA, 15 bp, Homo sapiens
acatttttcgagggg

SEQ ID NO: 1855083 - DNA, 15 bp, Homo sapiens
catttttcgagggga

SEQ ID NO: 1855084 - DNA, 15 bp, Homo sapiens
atttttcgaggggaa

SEQ ID NO: 1855085 - DNA, 15 bp, Homo sapiens
tttttcgaggggaac

SEQ ID NO: 1855086 - DNA, 15 bp, Homo sapiens
ttttcgaggggaacc

SEQ ID NO: 1855087 - DNA, 15 bp, Homo sapiens
tttcgaggggaacct

SEQ ID NO: 1855088 - DNA, 15 bp, Homo sapiens
ttcgaggggaacctg

SEQ ID NO: 1855089 - DNA, 15 bp, Homo sapiens
tcgaggggaacctgg

SEQ ID NO: 1855090 - DNA, 15 bp, Homo sapiens
cgaggggaacctggc

SEQ ID NO: 1855091 - DNA, 15 bp, Homo sapiens
gaggggaacctggcc

SEQ ID NO: 1855092 - DNA, 15 bp, Homo sapiens
aggggaacctggcca

SEQ ID NO: 1855093 - DNA, 15 bp, Homo sapiens
ggggaacctggccac

SEQ ID NO: 1855094 - DNA, 15 bp, Homo sapiens
gggaacctggccact

SEQ ID NO: 1855095 - DNA, 15 bp, Homo sapiens
ggaacctggccacta

SEQ ID NO: 1855096 - DNA, 15 bp, Homo sapiens
gaacctggccactat

SEQ ID NO: 1855097 - DNA, 15 bp, Homo sapiens
aacctggccactatg

SEQ ID NO: 1855098 - DNA, 15 bp, Homo sapiens
acctggccactatga

SEQ ID NO: 1855099 - DNA, 15 bp, Homo sapiens
cctggccactatgag

SEQ ID NO: 1855100 - DNA, 15 bp, Homo sapiens
ctggccactatgagt

SEQ ID NO: 1855101 - DNA, 15 bp, Homo sapiens
tggccactatgagtg

SEQ ID NO: 1855102 - DNA, 15 bp, Homo sapiens
ggccactatgagtgt

SEQ ID NO: 1855103 - DNA, 15 bp, Homo sapiens
gccactatgagtgtg

SEQ ID NO: 1855104 - DNA, 15 bp, Homo sapiens
ccactatgagtgtgg

SEQ ID NO: 1855105 - DNA, 15 bp, Homo sapiens
cactatgagtgtgga

SEQ ID NO: 1855106 - DNA, 15 bp, Homo sapiens
actatgagtgtggaa

SEQ ID NO: 1855107 - DNA, 15 bp, Homo sapiens
ctatgagtgtggaat

SEQ ID NO: 1855108 - DNA, 15 bp, Homo sapiens
tatgagtgtggaata

SEQ ID NO: 1855109 - DNA, 15 bp, Homo sapiens
atgagtgtggaatat

SEQ ID NO: 1855110 - DNA, 15 bp, Homo sapiens
tgagtgtggaatatt

SEQ ID NO: 1855111 - DNA, 15 bp, Homo sapiens
gagtgtggaatattg

SEQ ID NO: 1855112 - DNA, 15 bp, Homo sapiens
agtgtggaatattgg

SEQ ID NO: 1855113 - DNA, 15 bp, Homo sapiens
gtgtggaatattggg

SEQ ID NO: 1855114 - DNA, 15 bp, Homo sapiens
tgtggaatattgggg

SEQ ID NO: 1855115 - DNA, 15 bp, Homo sapiens
gtggaatattggggc

SEQ ID NO: 1855116 - DNA, 15 bp, Homo sapiens
tggaatattggggcc

SEQ ID NO: 1855117 - DNA, 15 bp, Homo sapiens
ggaatattggggcct

SEQ ID NO: 1855118 - DNA, 15 bp, Homo sapiens
gaatattggggcctt

SEQ ID NO: 1855119 - DNA, 15 bp, Homo sapiens
aatattggggcctta

SEQ ID NO: 1855120 - DNA, 15 bp, Homo sapiens
atattggggccttaa

SEQ ID NO: 1855121 - DNA, 15 bp, Homo sapiens
tattggggccttaaa

SEQ ID NO: 1855122 - DNA, 15 bp, Homo sapiens
attggggccttaaat

SEQ ID NO: 1855123 - DNA, 15 bp, Homo sapiens
ttggggccttaaatt

SEQ ID NO: 1855124 - DNA, 15 bp, Homo sapiens
tggggccttaaattt

SEQ ID NO: 1855125 - DNA, 15 bp, Homo sapiens
ggggccttaaatttc

SEQ ID NO: 1855126 - DNA, 15 bp, Homo sapiens
gggccttaaatttcc

SEQ ID NO: 1855127 - DNA, 15 bp, Homo sapiens
ggccttaaatttcct

SEQ ID NO: 1855128 - DNA, 15 bp, Homo sapiens
gccttaaatttcctg

SEQ ID NO: 1855129 - DNA, 15 bp, Homo sapiens
ccttaaatttcctgc

SEQ ID NO: 1855130 - DNA, 15 bp, Homo sapiens
cttaaatttcctgcc

SEQ ID NO: 1855131 - DNA, 15 bp, Homo sapiens
ttaaatttcctgcct

SEQ ID NO: 1855132 - DNA, 15 bp, Homo sapiens
taaatttcctgcctg

SEQ ID NO: 1855133 - DNA, 15 bp, Homo sapiens
aaatttcctgcctgt

SEQ ID NO: 1855134 - DNA, 15 bp, Homo sapiens
aatttcctgcctgta

SEQ ID NO: 1855135 - DNA, 15 bp, Homo sapiens
atttcctgcctgtag

SEQ ID NO: 1855136 - DNA, 15 bp, Homo sapiens
tttcctgcctgtaga

SEQ ID NO: 1855137 - DNA, 15 bp, Homo sapiens
ttcctgcctgtagaa

SEQ ID NO: 1855138 - DNA, 15 bp, Homo sapiens
tcctgcctgtagaat

SEQ ID NO: 1855139 - DNA, 15 bp, Homo sapiens
cctgcctgtagaatg

SEQ ID NO: 1855140 - DNA, 15 bp, Homo sapiens
ctgcctgtagaatga

SEQ ID NO: 1855141 - DNA, 15 bp, Homo sapiens
tgcctgtagaatgag

SEQ ID NO: 1855142 - DNA, 15 bp, Homo sapiens
gcctgtagaatgagg

SEQ ID NO: 1855143 - DNA, 15 bp, Homo sapiens
cctgtagaatgaggc

SEQ ID NO: 1855144 - DNA, 15 bp, Homo sapiens
ctgtagaatgaggca

SEQ ID NO: 1855145 - DNA, 15 bp, Homo sapiens
tgtagaatgaggcat

SEQ ID NO: 1855146 - DNA, 15 bp, Homo sapiens
gtagaatgaggcatt

SEQ ID NO: 1855147 - DNA, 15 bp, Homo sapiens
tagaatgaggcattt

SEQ ID NO: 1855148 - DNA, 15 bp, Homo sapiens
agaatgaggcatttg

SEQ ID NO: 1855149 - DNA, 15 bp, Homo sapiens
gaatgaggcatttgg

SEQ ID NO: 1855150 - DNA, 15 bp, Homo sapiens
aatgaggcatttggg

SEQ ID NO: 1855151 - DNA, 15 bp, Homo sapiens
atgaggcatttgggc

SEQ ID NO: 1855152 - DNA, 15 bp, Homo sapiens
tgaggcatttgggct

SEQ ID NO: 1855153 - DNA, 15 bp, Homo sapiens
gaggcatttgggcta

SEQ ID NO: 1855154 - DNA, 15 bp, Homo sapiens
aggcatttgggctag

SEQ ID NO: 1855155 - DNA, 15 bp, Homo sapiens
ggcatttgggctagg

SEQ ID NO: 1855156 - DNA, 15 bp, Homo sapiens
gcatttgggctaggg

SEQ ID NO: 1855157 - DNA, 15 bp, Homo sapiens
catttgggctagggg

SEQ ID NO: 1855158 - DNA, 15 bp, Homo sapiens
atttgggctagggga

SEQ ID NO: 1855159 - DNA, 15 bp, Homo sapiens
tttgggctaggggag

SEQ ID NO: 1855160 - DNA, 15 bp, Homo sapiens
ttgggctaggggagt

SEQ ID NO: 1855161 - DNA, 15 bp, Homo sapiens
tgggctaggggagtg

SEQ ID NO: 1855162 - DNA, 15 bp, Homo sapiens
gggctaggggagtgg

SEQ ID NO: 1855163 - DNA, 15 bp, Homo sapiens
ggctaggggagtggt

SEQ ID NO: 1855164 - DNA, 15 bp, Homo sapiens
gctaggggagtggtt

SEQ ID NO: 1855165 - DNA, 15 bp, Homo sapiens
ctaggggagtggttc

SEQ ID NO: 1855166 - DNA, 15 bp, Homo sapiens
taggggagtggttcc

SEQ ID NO: 1855167 - DNA, 15 bp, Homo sapiens
aggggagtggttcct

SEQ ID NO: 1855168 - DNA, 15 bp, Homo sapiens
ggggagtggttccta

SEQ ID NO: 1855169 - DNA, 15 bp, Homo sapiens
gggagtggttcctag

SEQ ID NO: 1855170 - DNA, 15 bp, Homo sapiens
ggagtggttcctaga

SEQ ID NO: 1855171 - DNA, 15 bp, Homo sapiens
gagtggttcctagac

SEQ ID NO: 1855172 - DNA, 15 bp, Homo sapiens
agtggttcctagact

SEQ ID NO: 1855173 - DNA, 15 bp, Homo sapiens
gtggttcctagactt

SEQ ID NO: 1855174 - DNA, 15 bp, Homo sapiens
tggttcctagacttt

SEQ ID NO: 1855175 - DNA, 15 bp, Homo sapiens
ggttcctagactttt

SEQ ID NO: 1855176 - DNA, 15 bp, Homo sapiens
gttcctagacttttt

SEQ ID NO: 1855177 - DNA, 15 bp, Homo sapiens
ttcctagactttttg

SEQ ID NO: 1855178 - DNA, 15 bp, Homo sapiens
tcctagactttttgt

SEQ ID NO: 1855179 - DNA, 15 bp, Homo sapiens
cctagactttttgtg

SEQ ID NO: 1855180 - DNA, 15 bp, Homo sapiens
ctagactttttgtgg

SEQ ID NO: 1855181 - DNA, 15 bp, Homo sapiens
tagactttttgtggg

SEQ ID NO: 1855182 - DNA, 15 bp, Homo sapiens
agactttttgtggga

SEQ ID NO: 1855183 - DNA, 15 bp, Homo sapiens
gactttttgtgggat

SEQ ID NO: 1855184 - DNA, 15 bp, Homo sapiens
actttttgtgggata

SEQ ID NO: 1855185 - DNA, 15 bp, Homo sapiens
ctttttgtgggataa

SEQ ID NO: 1855186 - DNA, 15 bp, Homo sapiens
tttttgtgggataat

SEQ ID NO: 1855187 - DNA, 15 bp, Homo sapiens
ttttgtgggataatc

SEQ ID NO: 1855188 - DNA, 15 bp, Homo sapiens
tttgtgggataatca

SEQ ID NO: 1855189 - DNA, 15 bp, Homo sapiens
ttgtgggataatcaa

SEQ ID NO: 1855190 - DNA, 15 bp, Homo sapiens
tgtgggataatcaat

SEQ ID NO: 1855191 - DNA, 15 bp, Homo sapiens
gtgggataatcaatg

SEQ ID NO: 1855192 - DNA, 15 bp, Homo sapiens
tgggataatcaatga

SEQ ID NO: 1855193 - DNA, 15 bp, Homo sapiens
gggataatcaatgaa

SEQ ID NO: 1855194 - DNA, 15 bp, Homo sapiens
ggataatcaatgaat

SEQ ID NO: 1855195 - DNA, 15 bp, Homo sapiens
gataatcaatgaatt

SEQ ID NO: 1855196 - DNA, 15 bp, Homo sapiens
ataatcaatgaattt

SEQ ID NO: 1855197 - DNA, 15 bp, Homo sapiens
atcaatgaattttta

SEQ ID NO: 1855198 - DNA, 15 bp, Homo sapiens
tcaatgaatttttat

SEQ ID NO: 1855199 - DNA, 15 bp, Homo sapiens
caatgaatttttata

SEQ ID NO: 1855200 - DNA, 15 bp, Homo sapiens
aatgaatttttataa

SEQ ID NO: 1855201 - DNA, 15 bp, Homo sapiens
atgaatttttataaa

SEQ ID NO: 1855202 - DNA, 15 bp, Homo sapiens
tgaatttttataaaa

SEQ ID NO: 1855203 - DNA, 15 bp, Homo sapiens
gaatttttataaaac

SEQ ID NO: 1855204 - DNA, 15 bp, Homo sapiens
aatttttataaaaca

SEQ ID NO: 1855205 - DNA, 15 bp, Homo sapiens
atttttataaaacag

SEQ ID NO: 1855206 - DNA, 15 bp, Homo sapiens
tttttataaaacaga

SEQ ID NO: 1855207 - DNA, 15 bp, Homo sapiens
tttataaaacagaat

SEQ ID NO: 1855208 - DNA, 15 bp, Homo sapiens
ttataaaacagaata

SEQ ID NO: 1855209 - DNA, 15 bp, Homo sapiens
tataaaacagaatat

SEQ ID NO: 1855210 - DNA, 15 bp, Homo sapiens
ataaaacagaatatc

SEQ ID NO: 1855211 - DNA, 15 bp, Homo sapiens
taaaacagaatatca

SEQ ID NO: 1855212 - DNA, 15 bp, Homo sapiens
aaaacagaatatcac

SEQ ID NO: 1855213 - DNA, 15 bp, Homo sapiens
aaacagaatatcaca

SEQ ID NO: 1855214 - DNA, 15 bp, Homo sapiens
aacagaatatcacaa

SEQ ID NO: 1855215 - DNA, 15 bp, Homo sapiens
acagaatatcacaag

SEQ ID NO: 1855216 - DNA, 15 bp, Homo sapiens
cagaatatcacaagg

SEQ ID NO: 1855217 - DNA, 15 bp, Homo sapiens
agaatatcacaaggc

SEQ ID NO: 1855218 - DNA, 15 bp, Homo sapiens
gaatatcacaaggcc

SEQ ID NO: 1855219 - DNA, 15 bp, Homo sapiens
aatatcacaaggcca

SEQ ID NO: 1855220 - DNA, 15 bp, Homo sapiens
atatcacaaggccac

SEQ ID NO: 1855221 - DNA, 15 bp, Homo sapiens
tatcacaaggccacc

SEQ ID NO: 1855222 - DNA, 15 bp, Homo sapiens
atcacaaggccacca

SEQ ID NO: 1855223 - DNA, 15 bp, Homo sapiens
tcacaaggccaccag

SEQ ID NO: 1855224 - DNA, 15 bp, Homo sapiens
cacaaggccaccagc

SEQ ID NO: 1855225 - DNA, 15 bp, Homo sapiens
acaaggccaccagct

SEQ ID NO: 1855226 - DNA, 15 bp, Homo sapiens
caaggccaccagctt

SEQ ID NO: 1855227 - DNA, 15 bp, Homo sapiens
aaggccaccagcttt

SEQ ID NO: 1855228 - DNA, 15 bp, Homo sapiens
aggccaccagctttt

SEQ ID NO: 1855229 - DNA, 15 bp, Homo sapiens
ggccaccagcttttt

SEQ ID NO: 1855230 - DNA, 15 bp, Homo sapiens
gccaccagcttttta

SEQ ID NO: 1855231 - DNA, 15 bp, Homo sapiens
ccaccagctttttat

SEQ ID NO: 1855232 - DNA, 15 bp, Homo sapiens
caccagctttttatt

SEQ ID NO: 1855233 - DNA, 15 bp, Homo sapiens
accagctttttattt

SEQ ID NO: 1855234 - DNA, 15 bp, Homo sapiens
ccagctttttatttt

SEQ ID NO: 1855235 - DNA, 15 bp, Homo sapiens
cagctttttattttg

SEQ ID NO: 1855236 - DNA, 15 bp, Homo sapiens
agctttttattttga

SEQ ID NO: 1855237 - DNA, 15 bp, Homo sapiens
gctttttattttgac

SEQ ID NO: 1855238 - DNA, 15 bp, Homo sapiens
ctttttattttgaca

SEQ ID NO: 1855239 - DNA, 15 bp, Homo sapiens
tttttattttgacaa

SEQ ID NO: 1855240 - DNA, 15 bp, Homo sapiens
ttttattttgacaag

SEQ ID NO: 1855241 - DNA, 15 bp, Homo sapiens
tttattttgacaagc

SEQ ID NO: 1855242 - DNA, 15 bp, Homo sapiens
ttattttgacaagca

SEQ ID NO: 1855243 - DNA, 15 bp, Homo sapiens
tattttgacaagcaa

SEQ ID NO: 1855244 - DNA, 15 bp, Homo sapiens
attttgacaagcaaa

SEQ ID NO: 1855245 - DNA, 15 bp, Homo sapiens
ttttgacaagcaaaa

SEQ ID NO: 1855246 - DNA, 15 bp, Homo sapiens
tttgacaagcaaaaa

SEQ ID NO: 1855247 - DNA, 15 bp, Homo sapiens
ttgacaagcaaaaac

SEQ ID NO: 1855248 - DNA, 15 bp, Homo sapiens
tgacaagcaaaaaca

SEQ ID NO: 1855249 - DNA, 15 bp, Homo sapiens
gacaagcaaaaacat

SEQ ID NO: 1855250 - DNA, 15 bp, Homo sapiens
acaagcaaaaacata

SEQ ID NO: 1855251 - DNA, 15 bp, Homo sapiens
caagcaaaaacataa

SEQ ID NO: 1855252 - DNA, 15 bp, Homo sapiens
aagcaaaaacataaa

SEQ ID NO: 1855253 - DNA, 15 bp, Homo sapiens
agcaaaaacataaaa

SEQ ID NO: 1855254 - DNA, 15 bp, Homo sapiens
gcaaaaacataaaaa

SEQ ID NO: 1855255 - DNA, 15 bp, Homo sapiens
caaaaacataaaaaa

SEQ ID NO: 1855256 - DNA, 15 bp, Homo sapiens
aaaaacataaaaaaa

SEQ ID NO: 1855257 - DNA, 15 bp, Homo sapiens
aaaacataaaaaaag

SEQ ID NO: 1855258 - DNA, 15 bp, Homo sapiens
aaacataaaaaaaga

SEQ ID NO: 1855259 - DNA, 15 bp, Homo sapiens
aacataaaaaaagaa

SEQ ID NO: 1855260 - DNA, 15 bp, Homo sapiens
acataaaaaaagaaa

SEQ ID NO: 1855261 - DNA, 15 bp, Homo sapiens
cataaaaaaagaaac

SEQ ID NO: 1855262 - DNA, 15 bp, Homo sapiens
ataaaaaaagaaact

SEQ ID NO: 1855263 - DNA, 15 bp, Homo sapiens
taaaaaaagaaactg

SEQ ID NO: 1855264 - DNA, 15 bp, Homo sapiens
aaaaaaagaaactgt

SEQ ID NO: 1855265 - DNA, 15 bp, Homo sapiens
aaaaaagaaactgtc

SEQ ID NO: 1855266 - DNA, 15 bp, Homo sapiens
aaaaagaaactgtca

SEQ ID NO: 1855267 - DNA, 15 bp, Homo sapiens
aaaagaaactgtcaa

SEQ ID NO: 1855268 - DNA, 15 bp, Homo sapiens
aaagaaactgtcaaa

SEQ ID NO: 1855269 - DNA, 15 bp, Homo sapiens
aagaaactgtcaaat

SEQ ID NO: 1855270 - DNA, 15 bp, Homo sapiens
agaaactgtcaaatg

SEQ ID NO: 1855271 - DNA, 15 bp, Homo sapiens
gaaactgtcaaatgc

SEQ ID NO: 1855272 - DNA, 15 bp, Homo sapiens
aaactgtcaaatgcc

SEQ ID NO: 1855273 - DNA, 15 bp, Homo sapiens
aactgtcaaatgcca

SEQ ID NO: 1855274 - DNA, 15 bp, Homo sapiens
actgtcaaatgccag

SEQ ID NO: 1855275 - DNA, 15 bp, Homo sapiens
ctgtcaaatgccagc

SEQ ID NO: 1855276 - DNA, 15 bp, Homo sapiens
tgtcaaatgccagct

SEQ ID NO: 1855277 - DNA, 15 bp, Homo sapiens
gtcaaatgccagctc

SEQ ID NO: 1855278 - DNA, 15 bp, Homo sapiens
tcaaatgccagctct

SEQ ID NO: 1855279 - DNA, 15 bp, Homo sapiens
caaatgccagctctg

SEQ ID NO: 1855280 - DNA, 15 bp, Homo sapiens
aaatgccagctctgc

SEQ ID NO: 1855281 - DNA, 15 bp, Homo sapiens
aatgccagctctgcc

SEQ ID NO: 1855282 - DNA, 15 bp, Homo sapiens
atgccagctctgcca

SEQ ID NO: 1855283 - DNA, 15 bp, Homo sapiens
tgccagctctgccac

SEQ ID NO: 1855284 - DNA, 15 bp, Homo sapiens
gccagctctgccacc

SEQ ID NO: 1855285 - DNA, 15 bp, Homo sapiens
ccagctctgccacca

SEQ ID NO: 1855286 - DNA, 15 bp, Homo sapiens
cagctctgccaccat

SEQ ID NO: 1855287 - DNA, 15 bp, Homo sapiens
agctctgccaccatt

SEQ ID NO: 1855288 - DNA, 15 bp, Homo sapiens
gctctgccaccattg

SEQ ID NO: 1855289 - DNA, 15 bp, Homo sapiens
ctctgccaccattgt

SEQ ID NO: 1855290 - DNA, 15 bp, Homo sapiens
tctgccaccattgtc

SEQ ID NO: 1855291 - DNA, 15 bp, Homo sapiens
ctgccaccattgtca

SEQ ID NO: 1855292 - DNA, 15 bp, Homo sapiens
tgccaccattgtcat

SEQ ID NO: 1855293 - DNA, 15 bp, Homo sapiens
gccaccattgtcatt

SEQ ID NO: 1855294 - DNA, 15 bp, Homo sapiens
ccaccattgtcattt

SEQ ID NO: 1855295 - DNA, 15 bp, Homo sapiens
caccattgtcatttc

SEQ ID NO: 1855296 - DNA, 15 bp, Homo sapiens
accattgtcatttca

SEQ ID NO: 1855297 - DNA, 15 bp, Homo sapiens
ccattgtcatttcat

SEQ ID NO: 1855298 - DNA, 15 bp, Homo sapiens
cattgtcatttcatt

SEQ ID NO: 1855299 - DNA, 15 bp, Homo sapiens
attgtcatttcatta

SEQ ID NO: 1855300 - DNA, 15 bp, Homo sapiens
ttgtcatttcattaa

SEQ ID NO: 1855301 - DNA, 15 bp, Homo sapiens
tgtcatttcattaaa

SEQ ID NO: 1855302 - DNA, 15 bp, Homo sapiens
gtcatttcattaaaa

SEQ ID NO: 1855303 - DNA, 15 bp, Homo sapiens
tcatttcattaaaag

SEQ ID NO: 1855304 - DNA, 15 bp, Homo sapiens
catttcattaaaagg

SEQ ID NO: 1855305 - DNA, 15 bp, Homo sapiens
atttcattaaaagga

SEQ ID NO: 1855306 - DNA, 15 bp, Homo sapiens
tttcattaaaaggac

SEQ ID NO: 1855307 - DNA, 15 bp, Homo sapiens
ttcattaaaaggaca

SEQ ID NO: 1855308 - DNA, 15 bp, Homo sapiens
tcattaaaaggacat

SEQ ID NO: 1855309 - DNA, 15 bp, Homo sapiens
cattaaaaggacatg

SEQ ID NO: 1855310 - DNA, 15 bp, Homo sapiens
attaaaaggacatgt

SEQ ID NO: 1855311 - DNA, 15 bp, Homo sapiens
ttaaaaggacatgtt

SEQ ID NO: 1855312 - DNA, 15 bp, Homo sapiens
taaaaggacatgtta

SEQ ID NO: 1855313 - DNA, 15 bp, Homo sapiens
aaaaggacatgttaa

SEQ ID NO: 1855314 - DNA, 15 bp, Homo sapiens
aaaggacatgttaat

SEQ ID NO: 1855315 - DNA, 15 bp, Homo sapiens
aaggacatgttaata

SEQ ID NO: 1855316 - DNA, 15 bp, Homo sapiens
aggacatgttaatac

SEQ ID NO: 1855317 - DNA, 15 bp, Homo sapiens
ggacatgttaatacc

SEQ ID NO: 1855318 - DNA, 15 bp, Homo sapiens
gacatgttaataccc

SEQ ID NO: 1855319 - DNA, 15 bp, Homo sapiens
acatgttaataccca

SEQ ID NO: 1855320 - DNA, 15 bp, Homo sapiens
catgttaatacccaa

SEQ ID NO: 1855321 - DNA, 15 bp, Homo sapiens
atgttaatacccaac

SEQ ID NO: 1855322 - DNA, 15 bp, Homo sapiens
tgttaatacccaaca

SEQ ID NO: 1855323 - DNA, 15 bp, Homo sapiens
gttaatacccaacaa

SEQ ID NO: 1855324 - DNA, 15 bp, Homo sapiens
ttaatacccaacaaa

SEQ ID NO: 1855325 - DNA, 15 bp, Homo sapiens
taatacccaacaaag

SEQ ID NO: 1855326 - DNA, 15 bp, Homo sapiens
aatacccaacaaagg

SEQ ID NO: 1855327 - DNA, 15 bp, Homo sapiens
atacccaacaaagga

SEQ ID NO: 1855328 - DNA, 15 bp, Homo sapiens
tacccaacaaaggag

SEQ ID NO: 1855329 - DNA, 15 bp, Homo sapiens
acccaacaaaggagt

SEQ ID NO: 1855330 - DNA, 15 bp, Homo sapiens
cccaacaaaggagta

SEQ ID NO: 1855331 - DNA, 15 bp, Homo sapiens
ccaacaaaggagtaa

SEQ ID NO: 1855332 - DNA, 15 bp, Homo sapiens
caacaaaggagtaac

SEQ ID NO: 1855333 - DNA, 15 bp, Homo sapiens
aacaaaggagtaacg

SEQ ID NO: 1855334 - DNA, 15 bp, Homo sapiens
acaaaggagtaacga

SEQ ID NO: 1855335 - DNA, 15 bp, Homo sapiens
caaaggagtaacgat

SEQ ID NO: 1855336 - DNA, 15 bp, Homo sapiens
aaaggagtaacgata

SEQ ID NO: 1855337 - DNA, 15 bp, Homo sapiens
aaggagtaacgatat

SEQ ID NO: 1855338 - DNA, 15 bp, Homo sapiens
aggagtaacgatata

SEQ ID NO: 1855339 - DNA, 15 bp, Homo sapiens
ggagtaacgatataa

SEQ ID NO: 1855340 - DNA, 15 bp, Homo sapiens
gagtaacgatataat

SEQ ID NO: 1855341 - DNA, 15 bp, Homo sapiens
agtaacgatataatg

SEQ ID NO: 1855342 - DNA, 15 bp, Homo sapiens
gtaacgatataatgt

SEQ ID NO: 1855343 - DNA, 15 bp, Homo sapiens
taacgatataatgtc

SEQ ID NO: 1855344 - DNA, 15 bp, Homo sapiens
aacgatataatgtca

SEQ ID NO: 1855345 - DNA, 15 bp, Homo sapiens
acgatataatgtcaa

SEQ ID NO: 1855346 - DNA, 15 bp, Homo sapiens
cgatataatgtcaaa

SEQ ID NO: 1855347 - DNA, 15 bp, Homo sapiens
gatataatgtcaaag

SEQ ID NO: 1855348 - DNA, 15 bp, Homo sapiens
atataatgtcaaaga

SEQ ID NO: 1855349 - DNA, 15 bp, Homo sapiens
tataatgtcaaagaa

SEQ ID NO: 1855350 - DNA, 15 bp, Homo sapiens
ataatgtcaaagaaa

SEQ ID NO: 1855351 - DNA, 15 bp, Homo sapiens
taatgtcaaagaaaa

SEQ ID NO: 1855352 - DNA, 15 bp, Homo sapiens
aatgtcaaagaaaag

SEQ ID NO: 1855353 - DNA, 15 bp, Homo sapiens
atgtcaaagaaaagg

SEQ ID NO: 1855354 - DNA, 15 bp, Homo sapiens
tgtcaaagaaaagga

SEQ ID NO: 1855355 - DNA, 15 bp, Homo sapiens
gtcaaagaaaaggac

SEQ ID NO: 1855356 - DNA, 15 bp, Homo sapiens
tcaaagaaaaggaca

SEQ ID NO: 1855357 - DNA, 15 bp, Homo sapiens
caaagaaaaggacag

SEQ ID NO: 1855358 - DNA, 15 bp, Homo sapiens
aaagaaaaggacagt

SEQ ID NO: 1855359 - DNA, 15 bp, Homo sapiens
aagaaaaggacagtt

SEQ ID NO: 1855360 - DNA, 15 bp, Homo sapiens
agaaaaggacagttc

SEQ ID NO: 1855361 - DNA, 15 bp, Homo sapiens
gaaaaggacagttct

SEQ ID NO: 1855362 - DNA, 15 bp, Homo sapiens
aaaaggacagttctt

SEQ ID NO: 1855363 - DNA, 15 bp, Homo sapiens
aaaggacagttcttc

SEQ ID NO: 1855364 - DNA, 15 bp, Homo sapiens
aaggacagttcttcc

SEQ ID NO: 1855365 - DNA, 15 bp, Homo sapiens
aggacagttcttcct

SEQ ID NO: 1855366 - DNA, 15 bp, Homo sapiens
ggacagttcttcctg

SEQ ID NO: 1855367 - DNA, 15 bp, Homo sapiens
gacagttcttcctgg

SEQ ID NO: 1855368 - DNA, 15 bp, Homo sapiens
acagttcttcctggg

SEQ ID NO: 1855369 - DNA, 15 bp, Homo sapiens
cagttcttcctggga

SEQ ID NO: 1855370 - DNA, 15 bp, Homo sapiens
agttcttcctgggag

SEQ ID NO: 1855371 - DNA, 15 bp, Homo sapiens
gttcttcctgggaga

SEQ ID NO: 1855372 - DNA, 15 bp, Homo sapiens
ttcttcctgggagag

SEQ ID NO: 1855373 - DNA, 15 bp, Homo sapiens
tcttcctgggagagg

SEQ ID NO: 1855374 - DNA, 15 bp, Homo sapiens
cttcctgggagaggc

SEQ ID NO: 1855375 - DNA, 15 bp, Homo sapiens
ttcctgggagaggcc

SEQ ID NO: 1855376 - DNA, 15 bp, Homo sapiens
tcctgggagaggccc

SEQ ID NO: 1855377 - DNA, 15 bp, Homo sapiens
cctgggagaggccct

SEQ ID NO: 1855378 - DNA, 15 bp, Homo sapiens
ctgggagaggccctt

SEQ ID NO: 1855379 - DNA, 15 bp, Homo sapiens
tgggagaggcccttc

SEQ ID NO: 1855380 - DNA, 15 bp, Homo sapiens
gggagaggcccttca

SEQ ID NO: 1855381 - DNA, 15 bp, Homo sapiens
ggagaggcccttcat

SEQ ID NO: 1855382 - DNA, 15 bp, Homo sapiens
gagaggcccttcatc

SEQ ID NO: 1855383 - DNA, 15 bp, Homo sapiens
agaggcccttcatca

SEQ ID NO: 1855384 - DNA, 15 bp, Homo sapiens
gaggcccttcatcag

SEQ ID NO: 1855385 - DNA, 15 bp, Homo sapiens
aggcccttcatcagt

SEQ ID NO: 1855386 - DNA, 15 bp, Homo sapiens
ggcccttcatcagtt

SEQ ID NO: 1855387 - DNA, 15 bp, Homo sapiens
gcccttcatcagttg

SEQ ID NO: 1855388 - DNA, 15 bp, Homo sapiens
cccttcatcagttgt

SEQ ID NO: 1855389 - DNA, 15 bp, Homo sapiens
ccttcatcagttgtc

SEQ ID NO: 1855390 - DNA, 15 bp, Homo sapiens
cttcatcagttgtct

SEQ ID NO: 1855391 - DNA, 15 bp, Homo sapiens
ttcatcagttgtctt

SEQ ID NO: 1855392 - DNA, 15 bp, Homo sapiens
tcatcagttgtcttc

SEQ ID NO: 1855393 - DNA, 15 bp, Homo sapiens
catcagttgtcttcc

SEQ ID NO: 1855394 - DNA, 15 bp, Homo sapiens
atcagttgtcttcca

SEQ ID NO: 1855395 - DNA, 15 bp, Homo sapiens
tcagttgtcttccac

SEQ ID NO: 1855396 - DNA, 15 bp, Homo sapiens
cagttgtcttccact

SEQ ID NO: 1855397 - DNA, 15 bp, Homo sapiens
agttgtcttccactg

SEQ ID NO: 1855398 - DNA, 15 bp, Homo sapiens
gttgtcttccactga

SEQ ID NO: 1855399 - DNA, 15 bp, Homo sapiens
ttgtcttccactgac

SEQ ID NO: 1855400 - DNA, 15 bp, Homo sapiens
tgtcttccactgaca

SEQ ID NO: 1855401 - DNA, 15 bp, Homo sapiens
gtcttccactgacac

SEQ ID NO: 1855402 - DNA, 15 bp, Homo sapiens
tcttccactgacaca

SEQ ID NO: 1855403 - DNA, 15 bp, Homo sapiens
cttccactgacacac

SEQ ID NO: 1855404 - DNA, 15 bp, Homo sapiens
ttccactgacacaca

SEQ ID NO: 1855405 - DNA, 15 bp, Homo sapiens
tccactgacacacac

SEQ ID NO: 1855406 - DNA, 15 bp, Homo sapiens
ccactgacacacaca

SEQ ID NO: 1855407 - DNA, 15 bp, Homo sapiens
cactgacacacacag

SEQ ID NO: 1855408 - DNA, 15 bp, Homo sapiens
actgacacacacagt

SEQ ID NO: 1855409 - DNA, 15 bp, Homo sapiens
ctgacacacacagtg

SEQ ID NO: 1855410 - DNA, 15 bp, Homo sapiens
tgacacacacagtgc

SEQ ID NO: 1855411 - DNA, 15 bp, Homo sapiens
gacacacacagtgcg

SEQ ID NO: 1855412 - DNA, 15 bp, Homo sapiens
acacacacagtgcgc

SEQ ID NO: 1855413 - DNA, 15 bp, Homo sapiens
cacacacagtgcgct

SEQ ID NO: 1855414 - DNA, 15 bp, Homo sapiens
acacacagtgcgctg

SEQ ID NO: 1855415 - DNA, 15 bp, Homo sapiens
cacacagtgcgctgt

SEQ ID NO: 1855416 - DNA, 15 bp, Homo sapiens
acacagtgcgctgta

SEQ ID NO: 1855417 - DNA, 15 bp, Homo sapiens
cacagtgcgctgtac

SEQ ID NO: 1855418 - DNA, 15 bp, Homo sapiens
acagtgcgctgtact

SEQ ID NO: 1855419 - DNA, 15 bp, Homo sapiens
cagtgcgctgtactg

SEQ ID NO: 1855420 - DNA, 15 bp, Homo sapiens
agtgcgctgtactga

SEQ ID NO: 1855421 - DNA, 15 bp, Homo sapiens
gtgcgctgtactgag

SEQ ID NO: 1855422 - DNA, 15 bp, Homo sapiens
tgcgctgtactgagg

SEQ ID NO: 1855423 - DNA, 15 bp, Homo sapiens
gcgctgtactgaggc

SEQ ID NO: 1855424 - DNA, 15 bp, Homo sapiens
cgctgtactgaggct

SEQ ID NO: 1855425 - DNA, 15 bp, Homo sapiens
gctgtactgaggctt

SEQ ID NO: 1855426 - DNA, 15 bp, Homo sapiens
ctgtactgaggcttt

SEQ ID NO: 1855427 - DNA, 15 bp, Homo sapiens
tgtactgaggctttt

SEQ ID NO: 1855428 - DNA, 15 bp, Homo sapiens
gtactgaggcttttc

SEQ ID NO: 1855429 - DNA, 15 bp, Homo sapiens
tactgaggcttttca

SEQ ID NO: 1855430 - DNA, 15 bp, Homo sapiens
actgaggcttttcat

SEQ ID NO: 1855431 - DNA, 15 bp, Homo sapiens
ctgaggcttttcatt

SEQ ID NO: 1855432 - DNA, 15 bp, Homo sapiens
tgaggcttttcattc

SEQ ID NO: 1855433 - DNA, 15 bp, Homo sapiens
gaggcttttcattcc

SEQ ID NO: 1855434 - DNA, 15 bp, Homo sapiens
aggcttttcattccg

SEQ ID NO: 1855435 - DNA, 15 bp, Homo sapiens
ggcttttcattccgt

SEQ ID NO: 1855436 - DNA, 15 bp, Homo sapiens
gcttttcattccgta

SEQ ID NO: 1855437 - DNA, 15 bp, Homo sapiens
cttttcattccgtac

SEQ ID NO: 1855438 - DNA, 15 bp, Homo sapiens
ttttcattccgtacc

SEQ ID NO: 1855439 - DNA, 15 bp, Homo sapiens
tttcattccgtacca

SEQ ID NO: 1855440 - DNA, 15 bp, Homo sapiens
ttcattccgtaccac

SEQ ID NO: 1855441 - DNA, 15 bp, Homo sapiens
tcattccgtaccaca

SEQ ID NO: 1855442 - DNA, 15 bp, Homo sapiens
cattccgtaccacat

SEQ ID NO: 1855443 - DNA, 15 bp, Homo sapiens
attccgtaccacatc

SEQ ID NO: 1855444 - DNA, 15 bp, Homo sapiens
ttccgtaccacatca

SEQ ID NO: 1855445 - DNA, 15 bp, Homo sapiens
tccgtaccacatcag

SEQ ID NO: 1855446 - DNA, 15 bp, Homo sapiens
ccgtaccacatcagg

SEQ ID NO: 1855447 - DNA, 15 bp, Homo sapiens
cgtaccacatcaggg

SEQ ID NO: 1855448 - DNA, 15 bp, Homo sapiens
gtaccacatcagggg

SEQ ID NO: 1855449 - DNA, 15 bp, Homo sapiens
taccacatcaggggc

SEQ ID NO: 1855450 - DNA, 15 bp, Homo sapiens
accacatcaggggca

SEQ ID NO: 1855451 - DNA, 15 bp, Homo sapiens
ccacatcaggggcag

SEQ ID NO: 1855452 - DNA, 15 bp, Homo sapiens
cacatcaggggcagc

SEQ ID NO: 1855453 - DNA, 15 bp, Homo sapiens
acatcaggggcagca

SEQ ID NO: 1855454 - DNA, 15 bp, Homo sapiens
catcaggggcagcac

SEQ ID NO: 1855455 - DNA, 15 bp, Homo sapiens
atcaggggcagcact

SEQ ID NO: 1855456 - DNA, 15 bp, Homo sapiens
tcaggggcagcactg

SEQ ID NO: 1855457 - DNA, 15 bp, Homo sapiens
aggggcagcactgcc

SEQ ID NO: 1855458 - DNA, 15 bp, Homo sapiens
ggggcagcactgccc

SEQ ID NO: 1855459 - DNA, 15 bp, Homo sapiens
gggcagcactgccct

SEQ ID NO: 1855460 - DNA, 15 bp, Homo sapiens
ggcagcactgccctg

SEQ ID NO: 1855461 - DNA, 15 bp, Homo sapiens
gcagcactgccctgt

SEQ ID NO: 1855462 - DNA, 15 bp, Homo sapiens
cagcactgccctgtg

SEQ ID NO: 1855463 - DNA, 15 bp, Homo sapiens
agcactgccctgtgg

SEQ ID NO: 1855464 - DNA, 15 bp, Homo sapiens
gcactgccctgtggc

SEQ ID NO: 1855465 - DNA, 15 bp, Homo sapiens
cactgccctgtggcc

SEQ ID NO: 1855466 - DNA, 15 bp, Homo sapiens
actgccctgtggcca

SEQ ID NO: 1855467 - DNA, 15 bp, Homo sapiens
ctgccctgtggccat

SEQ ID NO: 1855468 - DNA, 15 bp, Homo sapiens
tgccctgtggccatg

SEQ ID NO: 1855469 - DNA, 15 bp, Homo sapiens
gccctgtggccatgc

SEQ ID NO: 1855470 - DNA, 15 bp, Homo sapiens
ccctgtggccatgca

SEQ ID NO: 1855471 - DNA, 15 bp, Homo sapiens
cctgtggccatgcag

SEQ ID NO: 1855472 - DNA, 15 bp, Homo sapiens
ctgtggccatgcagg

SEQ ID NO: 1855473 - DNA, 15 bp, Homo sapiens
tgtggccatgcagga

SEQ ID NO: 1855474 - DNA, 15 bp, Homo sapiens
gtggccatgcaggac

SEQ ID NO: 1855475 - DNA, 15 bp, Homo sapiens
tggccatgcaggacc

SEQ ID NO: 1855476 - DNA, 15 bp, Homo sapiens
ggccatgcaggaccc

SEQ ID NO: 1855477 - DNA, 15 bp, Homo sapiens
gccatgcaggaccca

SEQ ID NO: 1855478 - DNA, 15 bp, Homo sapiens
ccatgcaggacccat

SEQ ID NO: 1855479 - DNA, 15 bp, Homo sapiens
catgcaggacccatg

SEQ ID NO: 1855480 - DNA, 15 bp, Homo sapiens
atgcaggacccatgg

SEQ ID NO: 1855481 - DNA, 15 bp, Homo sapiens
tgcaggacccatggg

SEQ ID NO: 1855482 - DNA, 15 bp, Homo sapiens
gcaggacccatggga

SEQ ID NO: 1855483 - DNA, 15 bp, Homo sapiens
caggacccatgggaa

SEQ ID NO: 1855484 - DNA, 15 bp, Homo sapiens
aggacccatgggaac

SEQ ID NO: 1855485 - DNA, 15 bp, Homo sapiens
ggacccatgggaaca

SEQ ID NO: 1855486 - DNA, 15 bp, Homo sapiens
gacccatgggaacag

SEQ ID NO: 1855487 - DNA, 15 bp, Homo sapiens
acccatgggaacaga

SEQ ID NO: 1855488 - DNA, 15 bp, Homo sapiens
cccatgggaacagag

SEQ ID NO: 1855489 - DNA, 15 bp, Homo sapiens
ccatgggaacagagc

SEQ ID NO: 1855490 - DNA, 15 bp, Homo sapiens
catgggaacagagca

SEQ ID NO: 1855491 - DNA, 15 bp, Homo sapiens
atgggaacagagcac

SEQ ID NO: 1855492 - DNA, 15 bp, Homo sapiens
tgggaacagagcacc

SEQ ID NO: 1855493 - DNA, 15 bp, Homo sapiens
gggaacagagcacct

SEQ ID NO: 1855494 - DNA, 15 bp, Homo sapiens
ggaacagagcacctg

SEQ ID NO: 1855495 - DNA, 15 bp, Homo sapiens
gaacagagcacctgt

SEQ ID NO: 1855496 - DNA, 15 bp, Homo sapiens
aacagagcacctgtg

SEQ ID NO: 1855497 - DNA, 15 bp, Homo sapiens
acagagcacctgtga

SEQ ID NO: 1855498 - DNA, 15 bp, Homo sapiens
cagagcacctgtgag

SEQ ID NO: 1855499 - DNA, 15 bp, Homo sapiens
agagcacctgtgagc

SEQ ID NO: 1855500 - DNA, 15 bp, Homo sapiens
gagcacctgtgagct

SEQ ID NO: 1855501 - DNA, 15 bp, Homo sapiens
agcacctgtgagcta

SEQ ID NO: 1855502 - DNA, 15 bp, Homo sapiens
gcacctgtgagctac

SEQ ID NO: 1855503 - DNA, 15 bp, Homo sapiens
cacctgtgagctacc

SEQ ID NO: 1855504 - DNA, 15 bp, Homo sapiens
acctgtgagctacct

SEQ ID NO: 1855505 - DNA, 15 bp, Homo sapiens
cctgtgagctacctg

SEQ ID NO: 1855506 - DNA, 15 bp, Homo sapiens
ctgtgagctacctgc

SEQ ID NO: 1855507 - DNA, 15 bp, Homo sapiens
tgtgagctacctgca

SEQ ID NO: 1855508 - DNA, 15 bp, Homo sapiens
gtgagctacctgcag

SEQ ID NO: 1855509 - DNA, 15 bp, Homo sapiens
tgagctacctgcagg

SEQ ID NO: 1855510 - DNA, 15 bp, Homo sapiens
gagctacctgcagga

SEQ ID NO: 1855511 - DNA, 15 bp, Homo sapiens
agctacctgcaggag

SEQ ID NO: 1855512 - DNA, 15 bp, Homo sapiens
gctacctgcaggagc

SEQ ID NO: 1855513 - DNA, 15 bp, Homo sapiens
ctacctgcaggagcc

SEQ ID NO: 1855514 - DNA, 15 bp, Homo sapiens
tacctgcaggagcct

SEQ ID NO: 1855515 - DNA, 15 bp, Homo sapiens
acctgcaggagcctt

SEQ ID NO: 1855516 - DNA, 15 bp, Homo sapiens
cctgcaggagccttt

SEQ ID NO: 1855517 - DNA, 15 bp, Homo sapiens
ctgcaggagcctttg

SEQ ID NO: 1855518 - DNA, 15 bp, Homo sapiens
tgcaggagcctttgc

SEQ ID NO: 1855519 - DNA, 15 bp, Homo sapiens
gcaggagcctttgct

SEQ ID NO: 1855520 - DNA, 15 bp, Homo sapiens
caggagcctttgctg

SEQ ID NO: 1855521 - DNA, 15 bp, Homo sapiens
aggagcctttgctga

SEQ ID NO: 1855522 - DNA, 15 bp, Homo sapiens
ggagcctttgctgag

SEQ ID NO: 1855523 - DNA, 15 bp, Homo sapiens
gagcctttgctgagg

SEQ ID NO: 1855524 - DNA, 15 bp, Homo sapiens
agcctttgctgagga

SEQ ID NO: 1855525 - DNA, 15 bp, Homo sapiens
gcctttgctgaggag

SEQ ID NO: 1855526 - DNA, 15 bp, Homo sapiens
cctttgctgaggaga

SEQ ID NO: 1855527 - DNA, 15 bp, Homo sapiens
ctttgctgaggagag

SEQ ID NO: 1855528 - DNA, 15 bp, Homo sapiens
tttgctgaggagagt

SEQ ID NO: 1855529 - DNA, 15 bp, Homo sapiens
ttgctgaggagagtg

SEQ ID NO: 1855530 - DNA, 15 bp, Homo sapiens
tgctgaggagagtga

SEQ ID NO: 1855531 - DNA, 15 bp, Homo sapiens
gctgaggagagtgag

SEQ ID NO: 1855532 - DNA, 15 bp, Homo sapiens
ctgaggagagtgagg

SEQ ID NO: 1855533 - DNA, 15 bp, Homo sapiens
tgaggagagtgaggc

SEQ ID NO: 1855534 - DNA, 15 bp, Homo sapiens
gaggagagtgaggct

SEQ ID NO: 1855535 - DNA, 15 bp, Homo sapiens
aggagagtgaggctc

SEQ ID NO: 1855536 - DNA, 15 bp, Homo sapiens
ggagagtgaggctcc

SEQ ID NO: 1855537 - DNA, 15 bp, Homo sapiens
gagagtgaggctcct

SEQ ID NO: 1855538 - DNA, 15 bp, Homo sapiens
agagtgaggctcctt

SEQ ID NO: 1855539 - DNA, 15 bp, Homo sapiens
gagtgaggctccttg

SEQ ID NO: 1855540 - DNA, 15 bp, Homo sapiens
agtgaggctccttgg

SEQ ID NO: 1855541 - DNA, 15 bp, Homo sapiens
gtgaggctccttggg

SEQ ID NO: 1855542 - DNA, 15 bp, Homo sapiens
tgaggctccttgggg

SEQ ID NO: 1855543 - DNA, 15 bp, Homo sapiens
gaggctccttggggg

SEQ ID NO: 1855544 - DNA, 15 bp, Homo sapiens
aggctccttgggggc

SEQ ID NO: 1855545 - DNA, 15 bp, Homo sapiens
ggctccttgggggct

SEQ ID NO: 1855546 - DNA, 15 bp, Homo sapiens
gctccttgggggctg

SEQ ID NO: 1855547 - DNA, 15 bp, Homo sapiens
ctccttgggggctgg

SEQ ID NO: 1855548 - DNA, 15 bp, Homo sapiens
tccttgggggctgga

SEQ ID NO: 1855549 - DNA, 15 bp, Homo sapiens
ccttgggggctggat

SEQ ID NO: 1855550 - DNA, 15 bp, Homo sapiens
cttgggggctggatc

SEQ ID NO: 1855551 - DNA, 15 bp, Homo sapiens
ttgggggctggatcc

SEQ ID NO: 1855552 - DNA, 15 bp, Homo sapiens
tgggggctggatcct

SEQ ID NO: 1855553 - DNA, 15 bp, Homo sapiens
gggggctggatcctc

SEQ ID NO: 1855554 - DNA, 15 bp, Homo sapiens
ggggctggatcctcc

SEQ ID NO: 1855555 - DNA, 15 bp, Homo sapiens
gggctggatcctcct

SEQ ID NO: 1855556 - DNA, 15 bp, Homo sapiens
ggctggatcctcctc

SEQ ID NO: 1855557 - DNA, 15 bp, Homo sapiens
gctggatcctcctcc

SEQ ID NO: 1855558 - DNA, 15 bp, Homo sapiens
ctggatcctcctcct

SEQ ID NO: 1855559 - DNA, 15 bp, Homo sapiens
tggatcctcctcctg

SEQ ID NO: 1855560 - DNA, 15 bp, Homo sapiens
ggatcctcctcctgg

SEQ ID NO: 1855561 - DNA, 15 bp, Homo sapiens
gatcctcctcctggt

SEQ ID NO: 1855562 - DNA, 15 bp, Homo sapiens
atcctcctcctggtc

SEQ ID NO: 1855563 - DNA, 15 bp, Homo sapiens
tcctcctcctggtct

SEQ ID NO: 1855564 - DNA, 15 bp, Homo sapiens
cctcctcctggtcta

SEQ ID NO: 1855565 - DNA, 15 bp, Homo sapiens
ctcctcctggtctac

SEQ ID NO: 1855566 - DNA, 15 bp, Homo sapiens
tcctcctggtctaca

SEQ ID NO: 1855567 - DNA, 15 bp, Homo sapiens
cctcctggtctacag

SEQ ID NO: 1855568 - DNA, 15 bp, Homo sapiens
ctcctggtctacagg

SEQ ID NO: 1855569 - DNA, 15 bp, Homo sapiens
tcctggtctacagga

SEQ ID NO: 1855570 - DNA, 15 bp, Homo sapiens
cctggtctacaggat

SEQ ID NO: 1855571 - DNA, 15 bp, Homo sapiens
ctggtctacaggatg

SEQ ID NO: 1855572 - DNA, 15 bp, Homo sapiens
tggtctacaggatgg

SEQ ID NO: 1855573 - DNA, 15 bp, Homo sapiens
ggtctacaggatggc

SEQ ID NO: 1855574 - DNA, 15 bp, Homo sapiens
gtctacaggatggca

SEQ ID NO: 1855575 - DNA, 15 bp, Homo sapiens
tctacaggatggcaa

SEQ ID NO: 1855576 - DNA, 15 bp, Homo sapiens
ctacaggatggcaat

SEQ ID NO: 1855577 - DNA, 15 bp, Homo sapiens
tacaggatggcaatg

SEQ ID NO: 1855578 - DNA, 15 bp, Homo sapiens
acaggatggcaatgg

SEQ ID NO: 1855579 - DNA, 15 bp, Homo sapiens
caggatggcaatggg

SEQ ID NO: 1855580 - DNA, 15 bp, Homo sapiens
aggatggcaatgggc

SEQ ID NO: 1855581 - DNA, 15 bp, Homo sapiens
ggatggcaatgggct

SEQ ID NO: 1855582 - DNA, 15 bp, Homo sapiens
gatggcaatgggctc

SEQ ID NO: 1855583 - DNA, 15 bp, Homo sapiens
atggcaatgggctcc

SEQ ID NO: 1855584 - DNA, 15 bp, Homo sapiens
ggcaatgggctccct

SEQ ID NO: 1855585 - DNA, 15 bp, Homo sapiens
gcaatgggctccctc

SEQ ID NO: 1855586 - DNA, 15 bp, Homo sapiens
caatgggctccctcc

SEQ ID NO: 1855587 - DNA, 15 bp, Homo sapiens
aatgggctccctccg

SEQ ID NO: 1855588 - DNA, 15 bp, Homo sapiens
atgggctccctccgg

SEQ ID NO: 1855589 - DNA, 15 bp, Homo sapiens
tgggctccctccggt

SEQ ID NO: 1855590 - DNA, 15 bp, Homo sapiens
gggctccctccggta

SEQ ID NO: 1855591 - DNA, 15 bp, Homo sapiens
ggctccctccggtaa

SEQ ID NO: 1855592 - DNA, 15 bp, Homo sapiens
gctccctccggtaaa

SEQ ID NO: 1855593 - DNA, 15 bp, Homo sapiens
ctccctccggtaaaa

SEQ ID NO: 1855594 - DNA, 15 bp, Homo sapiens
tccctccggtaaaag

SEQ ID NO: 1855595 - DNA, 15 bp, Homo sapiens
ccctccggtaaaagt

SEQ ID NO: 1855596 - DNA, 15 bp, Homo sapiens
cctccggtaaaagtt

SEQ ID NO: 1855597 - DNA, 15 bp, Homo sapiens
ctccggtaaaagtta

SEQ ID NO: 1855598 - DNA, 15 bp, Homo sapiens
tccggtaaaagttaa

SEQ ID NO: 1855599 - DNA, 15 bp, Homo sapiens
ccggtaaaagttaac

SEQ ID NO: 1855600 - DNA, 15 bp, Homo sapiens
cggtaaaagttaact

SEQ ID NO: 1855601 - DNA, 15 bp, Homo sapiens
ggtaaaagttaactt

SEQ ID NO: 1855602 - DNA, 15 bp, Homo sapiens
gtaaaagttaacttg

SEQ ID NO: 1855603 - DNA, 15 bp, Homo sapiens
taaaagttaacttgg

SEQ ID NO: 1855604 - DNA, 15 bp, Homo sapiens
aaaagttaacttggc

SEQ ID NO: 1855605 - DNA, 15 bp, Homo sapiens
aaagttaacttggca

SEQ ID NO: 1855606 - DNA, 15 bp, Homo sapiens
aagttaacttggcac

SEQ ID NO: 1855607 - DNA, 15 bp, Homo sapiens
agttaacttggcacg

SEQ ID NO: 1855608 - DNA, 15 bp, Homo sapiens
gttaacttggcacga

SEQ ID NO: 1855609 - DNA, 15 bp, Homo sapiens
ttaacttggcacgaa

SEQ ID NO: 1855610 - DNA, 15 bp, Homo sapiens
taacttggcacgaag

SEQ ID NO: 1855611 - DNA, 15 bp, Homo sapiens
aacttggcacgaaga

SEQ ID NO: 1855612 - DNA, 15 bp, Homo sapiens
acttggcacgaagat

SEQ ID NO: 1855613 - DNA, 15 bp, Homo sapiens
cttggcacgaagatt

SEQ ID NO: 1855614 - DNA, 15 bp, Homo sapiens
ttggcacgaagattt

SEQ ID NO: 1855615 - DNA, 15 bp, Homo sapiens
tggcacgaagatttc

SEQ ID NO: 1855616 - DNA, 15 bp, Homo sapiens
ggcacgaagatttct

SEQ ID NO: 1855617 - DNA, 15 bp, Homo sapiens
gcacgaagatttctg

SEQ ID NO: 1855618 - DNA, 15 bp, Homo sapiens
cacgaagatttctgc

SEQ ID NO: 1855619 - DNA, 15 bp, Homo sapiens
acgaagatttctgca

SEQ ID NO: 1855620 - DNA, 15 bp, Homo sapiens
cgaagatttctgcat

SEQ ID NO: 1855621 - DNA, 15 bp, Homo sapiens
gaagatttctgcatt

SEQ ID NO: 1855622 - DNA, 15 bp, Homo sapiens
aagatttctgcattc

SEQ ID NO: 1855623 - DNA, 15 bp, Homo sapiens
agatttctgcattct

SEQ ID NO: 1855624 - DNA, 15 bp, Homo sapiens
gatttctgcattctt

SEQ ID NO: 1855625 - DNA, 15 bp, Homo sapiens
atttctgcattcttt

SEQ ID NO: 1855626 - DNA, 15 bp, Homo sapiens
tttctgcattctttt

SEQ ID NO: 1855627 - DNA, 15 bp, Homo sapiens
ttctgcattctttta

SEQ ID NO: 1855628 - DNA, 15 bp, Homo sapiens
ctgcattcttttatg

SEQ ID NO: 1855629 - DNA, 15 bp, Homo sapiens
tgcattcttttatga

SEQ ID NO: 1855630 - DNA, 15 bp, Homo sapiens
gcattcttttatgaa

SEQ ID NO: 1855631 - DNA, 15 bp, Homo sapiens
cattcttttatgaac

SEQ ID NO: 1855632 - DNA, 15 bp, Homo sapiens
attcttttatgaaca

SEQ ID NO: 1855633 - DNA, 15 bp, Homo sapiens
ttcttttatgaacat

SEQ ID NO: 1855634 - DNA, 15 bp, Homo sapiens
tcttttatgaacatg

SEQ ID NO: 1855635 - DNA, 15 bp, Homo sapiens
cttttatgaacatga

SEQ ID NO: 1855636 - DNA, 15 bp, Homo sapiens
ttttatgaacatgag

SEQ ID NO: 1855637 - DNA, 15 bp, Homo sapiens
tttatgaacatgagg

SEQ ID NO: 1855638 - DNA, 15 bp, Homo sapiens
ttatgaacatgaggg

SEQ ID NO: 1855639 - DNA, 15 bp, Homo sapiens
tatgaacatgagggt

SEQ ID NO: 1855640 - DNA, 15 bp, Homo sapiens
atgaacatgagggtt

SEQ ID NO: 1855641 - DNA, 15 bp, Homo sapiens
tgaacatgagggttt

SEQ ID NO: 1855642 - DNA, 15 bp, Homo sapiens
gaacatgagggtttg

SEQ ID NO: 1855643 - DNA, 15 bp, Homo sapiens
aacatgagggtttgg

SEQ ID NO: 1855644 - DNA, 15 bp, Homo sapiens
acatgagggtttggg

SEQ ID NO: 1855645 - DNA, 15 bp, Homo sapiens
catgagggtttggga

SEQ ID NO: 1855646 - DNA, 15 bp, Homo sapiens
atgagggtttgggat

SEQ ID NO: 1855647 - DNA, 15 bp, Homo sapiens
tgagggtttgggatt

SEQ ID NO: 1855648 - DNA, 15 bp, Homo sapiens
gagggtttgggattt

SEQ ID NO: 1855649 - DNA, 15 bp, Homo sapiens
agggtttgggatttc

SEQ ID NO: 1855650 - DNA, 15 bp, Homo sapiens
gggtttgggatttcc

SEQ ID NO: 1855651 - DNA, 15 bp, Homo sapiens
ggtttgggatttcct

SEQ ID NO: 1855652 - DNA, 15 bp, Homo sapiens
gtttgggatttcctg

SEQ ID NO: 1855653 - DNA, 15 bp, Homo sapiens
tttgggatttcctgt

SEQ ID NO: 1855654 - DNA, 15 bp, Homo sapiens
ttgggatttcctgtg

SEQ ID NO: 1855655 - DNA, 15 bp, Homo sapiens
tgggatttcctgtgt

SEQ ID NO: 1855656 - DNA, 15 bp, Homo sapiens
gggatttcctgtgtg

SEQ ID NO: 1855657 - DNA, 15 bp, Homo sapiens
ggatttcctgtgtgt

SEQ ID NO: 1855658 - DNA, 15 bp, Homo sapiens
gatttcctgtgtgtt

SEQ ID NO: 1855659 - DNA, 15 bp, Homo sapiens
atttcctgtgtgttt

SEQ ID NO: 1855660 - DNA, 15 bp, Homo sapiens
tttcctgtgtgtttg

SEQ ID NO: 1855661 - DNA, 15 bp, Homo sapiens
ttcctgtgtgtttgg

SEQ ID NO: 1855662 - DNA, 15 bp, Homo sapiens
tcctgtgtgtttggt

SEQ ID NO: 1855663 - DNA, 15 bp, Homo sapiens
cctgtgtgtttggtt

SEQ ID NO: 1855664 - DNA, 15 bp, Homo sapiens
ctgtgtgtttggtta

SEQ ID NO: 1855665 - DNA, 15 bp, Homo sapiens
tgtgtgtttggttat

SEQ ID NO: 1855666 - DNA, 15 bp, Homo sapiens
gtgtgtttggttatc

SEQ ID NO: 1855667 - DNA, 15 bp, Homo sapiens
tgtgtttggttatcc

SEQ ID NO: 1855668 - DNA, 15 bp, Homo sapiens
gtgtttggttatcca

SEQ ID NO: 1855669 - DNA, 15 bp, Homo sapiens
tgtttggttatccat

SEQ ID NO: 1855670 - DNA, 15 bp, Homo sapiens
gtttggttatccata

SEQ ID NO: 1855671 - DNA, 15 bp, Homo sapiens
tttggttatccatat

SEQ ID NO: 1855672 - DNA, 15 bp, Homo sapiens
ttggttatccatatc

SEQ ID NO: 1855673 - DNA, 15 bp, Homo sapiens
tggttatccatatcc

SEQ ID NO: 1855674 - DNA, 15 bp, Homo sapiens
ggttatccatatccc

SEQ ID NO: 1855675 - DNA, 15 bp, Homo sapiens
gttatccatatccca

SEQ ID NO: 1855676 - DNA, 15 bp, Homo sapiens
ttatccatatcccag

SEQ ID NO: 1855677 - DNA, 15 bp, Homo sapiens
tatccatatcccagt

SEQ ID NO: 1855678 - DNA, 15 bp, Homo sapiens
atccatatcccagtc

SEQ ID NO: 1855679 - DNA, 15 bp, Homo sapiens
tccatatcccagtct

SEQ ID NO: 1855680 - DNA, 15 bp, Homo sapiens
ccatatcccagtctg

SEQ ID NO: 1855681 - DNA, 15 bp, Homo sapiens
catatcccagtctgc

SEQ ID NO: 1855682 - DNA, 15 bp, Homo sapiens
atatcccagtctgcc

SEQ ID NO: 1855683 - DNA, 15 bp, Homo sapiens
tatcccagtctgccc

SEQ ID NO: 1855684 - DNA, 15 bp, Homo sapiens
atcccagtctgccct

SEQ ID NO: 1855685 - DNA, 15 bp, Homo sapiens
tcccagtctgccctg

SEQ ID NO: 1855686 - DNA, 15 bp, Homo sapiens
cccagtctgccctga

SEQ ID NO: 1855687 - DNA, 15 bp, Homo sapiens
ccagtctgccctgat

SEQ ID NO: 1855688 - DNA, 15 bp, Homo sapiens
cagtctgccctgatg

SEQ ID NO: 1855689 - DNA, 15 bp, Homo sapiens
agtctgccctgatga

SEQ ID NO: 1855690 - DNA, 15 bp, Homo sapiens
gtctgccctgatgag

SEQ ID NO: 1855691 - DNA, 15 bp, Homo sapiens
tctgccctgatgaga

SEQ ID NO: 1855692 - DNA, 15 bp, Homo sapiens
ctgccctgatgagaa

SEQ ID NO: 1855693 - DNA, 15 bp, Homo sapiens
tgccctgatgagaaa

SEQ ID NO: 1855694 - DNA, 15 bp, Homo sapiens
gccctgatgagaaac

SEQ ID NO: 1855695 - DNA, 15 bp, Homo sapiens
ccctgatgagaaaca

SEQ ID NO: 1855696 - DNA, 15 bp, Homo sapiens
cctgatgagaaacaa

SEQ ID NO: 1855697 - DNA, 15 bp, Homo sapiens
ctgatgagaaacaaa

SEQ ID NO: 1855698 - DNA, 15 bp, Homo sapiens
tgatgagaaacaaat

SEQ ID NO: 1855699 - DNA, 15 bp, Homo sapiens
gatgagaaacaaatg

SEQ ID NO: 1855700 - DNA, 15 bp, Homo sapiens
atgagaaacaaatgt

SEQ ID NO: 1855701 - DNA, 15 bp, Homo sapiens
tgagaaacaaatgta

SEQ ID NO: 1855702 - DNA, 15 bp, Homo sapiens
gagaaacaaatgtaa

SEQ ID NO: 1855703 - DNA, 15 bp, Homo sapiens
agaaacaaatgtaat

SEQ ID NO: 1855704 - DNA, 15 bp, Homo sapiens
gaaacaaatgtaatt

SEQ ID NO: 1855705 - DNA, 15 bp, Homo sapiens
aaacaaatgtaattt

SEQ ID NO: 1855706 - DNA, 15 bp, Homo sapiens
aacaaatgtaatttt

SEQ ID NO: 1855707 - DNA, 15 bp, Homo sapiens
acaaatgtaattttt

SEQ ID NO: 1855708 - DNA, 15 bp, Homo sapiens
caaatgtaatttttg

SEQ ID NO: 1855709 - DNA, 15 bp, Homo sapiens
aaatgtaatttttgc

SEQ ID NO: 1855710 - DNA, 15 bp, Homo sapiens
aatgtaatttttgcc

SEQ ID NO: 1855711 - DNA, 15 bp, Homo sapiens
atgtaatttttgcct

SEQ ID NO: 1855712 - DNA, 15 bp, Homo sapiens
tgtaatttttgcctt

SEQ ID NO: 1855713 - DNA, 15 bp, Homo sapiens
gtaatttttgccttc

SEQ ID NO: 1855714 - DNA, 15 bp, Homo sapiens
taatttttgccttcc

SEQ ID NO: 1855715 - DNA, 15 bp, Homo sapiens
aatttttgccttcct

SEQ ID NO: 1855716 - DNA, 15 bp, Homo sapiens
atttttgccttcctg

SEQ ID NO: 1855717 - DNA, 15 bp, Homo sapiens
tttttgccttcctgc

SEQ ID NO: 1855718 - DNA, 15 bp, Homo sapiens
ttttgccttcctgct

SEQ ID NO: 1855719 - DNA, 15 bp, Homo sapiens
tttgccttcctgctg

SEQ ID NO: 1855720 - DNA, 15 bp, Homo sapiens
ttgccttcctgctgg

SEQ ID NO: 1855721 - DNA, 15 bp, Homo sapiens
tgccttcctgctggg

SEQ ID NO: 1855722 - DNA, 15 bp, Homo sapiens
gccttcctgctgggc

SEQ ID NO: 1855723 - DNA, 15 bp, Homo sapiens
ccttcctgctgggcc

SEQ ID NO: 1855724 - DNA, 15 bp, Homo sapiens
cttcctgctgggccc

SEQ ID NO: 1855725 - DNA, 15 bp, Homo sapiens
ttcctgctgggcccc

SEQ ID NO: 1855726 - DNA, 15 bp, Homo sapiens
tcctgctgggcccct

SEQ ID NO: 1855727 - DNA, 15 bp, Homo sapiens
cctgctgggcccctg

SEQ ID NO: 1855728 - DNA, 15 bp, Homo sapiens
ctgctgggcccctgc

SEQ ID NO: 1855729 - DNA, 15 bp, Homo sapiens
tgctgggcccctgcc

SEQ ID NO: 1855730 - DNA, 15 bp, Homo sapiens
gctgggcccctgcca

SEQ ID NO: 1855731 - DNA, 15 bp, Homo sapiens
ctgggcccctgccac

SEQ ID NO: 1855732 - DNA, 15 bp, Homo sapiens
tgggcccctgccaca

SEQ ID NO: 1855733 - DNA, 15 bp, Homo sapiens
gggcccctgccacag

SEQ ID NO: 1855734 - DNA, 15 bp, Homo sapiens
ggcccctgccacagt

SEQ ID NO: 1855735 - DNA, 15 bp, Homo sapiens
gcccctgccacagtt

SEQ ID NO: 1855736 - DNA, 15 bp, Homo sapiens
cccctgccacagttt

SEQ ID NO: 1855737 - DNA, 15 bp, Homo sapiens
ccctgccacagtttt

SEQ ID NO: 1855738 - DNA, 15 bp, Homo sapiens
cctgccacagttttc

SEQ ID NO: 1855739 - DNA, 15 bp, Homo sapiens
ctgccacagttttct

SEQ ID NO: 1855740 - DNA, 15 bp, Homo sapiens
tgccacagttttctt

SEQ ID NO: 1855741 - DNA, 15 bp, Homo sapiens
gccacagttttcttg

SEQ ID NO: 1855742 - DNA, 15 bp, Homo sapiens
ccacagttttcttgt

SEQ ID NO: 1855743 - DNA, 15 bp, Homo sapiens
cacagttttcttgtc

SEQ ID NO: 1855744 - DNA, 15 bp, Homo sapiens
acagttttcttgtct

SEQ ID NO: 1855745 - DNA, 15 bp, Homo sapiens
cagttttcttgtctg

SEQ ID NO: 1855746 - DNA, 15 bp, Homo sapiens
agttttcttgtctgg

SEQ ID NO: 1855747 - DNA, 15 bp, Homo sapiens
gttttcttgtctggg

SEQ ID NO: 1855748 - DNA, 15 bp, Homo sapiens
ttttcttgtctgggc

SEQ ID NO: 1855749 - DNA, 15 bp, Homo sapiens
tttcttgtctgggca

SEQ ID NO: 1855750 - DNA, 15 bp, Homo sapiens
ttcttgtctgggcag

SEQ ID NO: 1855751 - DNA, 15 bp, Homo sapiens
tcttgtctgggcagg

SEQ ID NO: 1855752 - DNA, 15 bp, Homo sapiens
cttgtctgggcaggt

SEQ ID NO: 1855753 - DNA, 15 bp, Homo sapiens
ttgtctgggcaggtc

SEQ ID NO: 1855754 - DNA, 15 bp, Homo sapiens
tgtctgggcaggtct

SEQ ID NO: 1855755 - DNA, 15 bp, Homo sapiens
gtctgggcaggtctt

SEQ ID NO: 1855756 - DNA, 15 bp, Homo sapiens
tctgggcaggtcttg

SEQ ID NO: 1855757 - DNA, 15 bp, Homo sapiens
ctgggcaggtcttga

SEQ ID NO: 1855758 - DNA, 15 bp, Homo sapiens
tgggcaggtcttgag

SEQ ID NO: 1855759 - DNA, 15 bp, Homo sapiens
gggcaggtcttgagc

SEQ ID NO: 1855760 - DNA, 15 bp, Homo sapiens
ggcaggtcttgagct

SEQ ID NO: 1855761 - DNA, 15 bp, Homo sapiens
gcaggtcttgagctg

SEQ ID NO: 1855762 - DNA, 15 bp, Homo sapiens
caggtcttgagctga

SEQ ID NO: 1855763 - DNA, 15 bp, Homo sapiens
aggtcttgagctgag

SEQ ID NO: 1855764 - DNA, 15 bp, Homo sapiens
ggtcttgagctgagc

SEQ ID NO: 1855765 - DNA, 15 bp, Homo sapiens
gtcttgagctgagct

SEQ ID NO: 1855766 - DNA, 15 bp, Homo sapiens
tcttgagctgagctt

SEQ ID NO: 1855767 - DNA, 15 bp, Homo sapiens
cttgagctgagcttc

SEQ ID NO: 1855768 - DNA, 15 bp, Homo sapiens
ttgagctgagcttct

SEQ ID NO: 1855769 - DNA, 15 bp, Homo sapiens
tgagctgagcttctg

SEQ ID NO: 1855770 - DNA, 15 bp, Homo sapiens
gagctgagcttctgg

SEQ ID NO: 1855771 - DNA, 15 bp, Homo sapiens
agctgagcttctggg

SEQ ID NO: 1855772 - DNA, 15 bp, Homo sapiens
gctgagcttctgggg

SEQ ID NO: 1855773 - DNA, 15 bp, Homo sapiens
ctgagcttctggggc

SEQ ID NO: 1855774 - DNA, 15 bp, Homo sapiens
tgagcttctggggca

SEQ ID NO: 1855775 - DNA, 15 bp, Homo sapiens
gagcttctggggcag

SEQ ID NO: 1855776 - DNA, 15 bp, Homo sapiens
agcttctggggcagg

SEQ ID NO: 1855777 - DNA, 15 bp, Homo sapiens
gcttctggggcagga

SEQ ID NO: 1855778 - DNA, 15 bp, Homo sapiens
cttctggggcaggat

SEQ ID NO: 1855779 - DNA, 15 bp, Homo sapiens
ttctggggcaggatg

SEQ ID NO: 1855780 - DNA, 15 bp, Homo sapiens
tctggggcaggatgg

SEQ ID NO: 1855781 - DNA, 15 bp, Homo sapiens
ctggggcaggatggg

SEQ ID NO: 1855782 - DNA, 15 bp, Homo sapiens
tggggcaggatgggc

SEQ ID NO: 1855783 - DNA, 15 bp, Homo sapiens
ggggcaggatgggct

SEQ ID NO: 1855784 - DNA, 15 bp, Homo sapiens
gggcaggatgggctg

SEQ ID NO: 1855785 - DNA, 15 bp, Homo sapiens
ggcaggatgggctgc

SEQ ID NO: 1855786 - DNA, 15 bp, Homo sapiens
gcaggatgggctgcc

SEQ ID NO: 1855787 - DNA, 15 bp, Homo sapiens
caggatgggctgccc

SEQ ID NO: 1855788 - DNA, 15 bp, Homo sapiens
aggatgggctgccct

SEQ ID NO: 1855789 - DNA, 15 bp, Homo sapiens
ggatgggctgccctg

SEQ ID NO: 1855790 - DNA, 15 bp, Homo sapiens
gatgggctgccctgc

SEQ ID NO: 1855791 - DNA, 15 bp, Homo sapiens
atgggctgccctgca

SEQ ID NO: 1855792 - DNA, 15 bp, Homo sapiens
tgggctgccctgcag

SEQ ID NO: 1855793 - DNA, 15 bp, Homo sapiens
gggctgccctgcaga

SEQ ID NO: 1855794 - DNA, 15 bp, Homo sapiens
ggctgccctgcagac

SEQ ID NO: 1855795 - DNA, 15 bp, Homo sapiens
gctgccctgcagact

SEQ ID NO: 1855796 - DNA, 15 bp, Homo sapiens
ctgccctgcagactg

SEQ ID NO: 1855797 - DNA, 15 bp, Homo sapiens
tgccctgcagactgg

SEQ ID NO: 1855798 - DNA, 15 bp, Homo sapiens
gccctgcagactggc

SEQ ID NO: 1855799 - DNA, 15 bp, Homo sapiens
ccctgcagactggca

SEQ ID NO: 1855800 - DNA, 15 bp, Homo sapiens
cctgcagactggcag

SEQ ID NO: 1855801 - DNA, 15 bp, Homo sapiens
ctgcagactggcagc

SEQ ID NO: 1855802 - DNA, 15 bp, Homo sapiens
tgcagactggcagct

SEQ ID NO: 1855803 - DNA, 15 bp, Homo sapiens
gcagactggcagctg

SEQ ID NO: 1855804 - DNA, 15 bp, Homo sapiens
cagactggcagctga

SEQ ID NO: 1855805 - DNA, 15 bp, Homo sapiens
agactggcagctgag

SEQ ID NO: 1855806 - DNA, 15 bp, Homo sapiens
gactggcagctgagt

SEQ ID NO: 1855807 - DNA, 15 bp, Homo sapiens
actggcagctgagtc

SEQ ID NO: 1855808 - DNA, 15 bp, Homo sapiens
ctggcagctgagtct

SEQ ID NO: 1855809 - DNA, 15 bp, Homo sapiens
tggcagctgagtctc

SEQ ID NO: 1855810 - DNA, 15 bp, Homo sapiens
ggcagctgagtctcc

SEQ ID NO: 1855811 - DNA, 15 bp, Homo sapiens
gcagctgagtctccg

SEQ ID NO: 1855812 - DNA, 15 bp, Homo sapiens
cagctgagtctccga

SEQ ID NO: 1855813 - DNA, 15 bp, Homo sapiens
agctgagtctccgag

SEQ ID NO: 1855814 - DNA, 15 bp, Homo sapiens
gctgagtctccgagt

SEQ ID NO: 1855815 - DNA, 15 bp, Homo sapiens
ctgagtctccgagtc

SEQ ID NO: 1855816 - DNA, 15 bp, Homo sapiens
tgagtctccgagtct

SEQ ID NO: 1855817 - DNA, 15 bp, Homo sapiens
gagtctccgagtctc

SEQ ID NO: 1855818 - DNA, 15 bp, Homo sapiens
agtctccgagtctct

SEQ ID NO: 1855819 - DNA, 15 bp, Homo sapiens
gtctccgagtctctg

SEQ ID NO: 1855820 - DNA, 15 bp, Homo sapiens
tctccgagtctctga

SEQ ID NO: 1855821 - DNA, 15 bp, Homo sapiens
ctccgagtctctgat

SEQ ID NO: 1855822 - DNA, 15 bp, Homo sapiens
tccgagtctctgatg

SEQ ID NO: 1855823 - DNA, 15 bp, Homo sapiens
ccgagtctctgatgg

SEQ ID NO: 1855824 - DNA, 15 bp, Homo sapiens
cgagtctctgatgga

SEQ ID NO: 1855825 - DNA, 15 bp, Homo sapiens
gagtctctgatggac

SEQ ID NO: 1855826 - DNA, 15 bp, Homo sapiens
agtctctgatggaca

SEQ ID NO: 1855827 - DNA, 15 bp, Homo sapiens
gtctctgatggacag

SEQ ID NO: 1855828 - DNA, 15 bp, Homo sapiens
tctctgatggacagc

SEQ ID NO: 1855829 - DNA, 15 bp, Homo sapiens
ctctgatggacagca

SEQ ID NO: 1855830 - DNA, 15 bp, Homo sapiens
tctgatggacagcag

SEQ ID NO: 1855831 - DNA, 15 bp, Homo sapiens
ctgatggacagcagg

SEQ ID NO: 1855832 - DNA, 15 bp, Homo sapiens
tgatggacagcaggc

SEQ ID NO: 1855833 - DNA, 15 bp, Homo sapiens
gatggacagcaggct

SEQ ID NO: 1855834 - DNA, 15 bp, Homo sapiens
atggacagcaggctg

SEQ ID NO: 1855835 - DNA, 15 bp, Homo sapiens
tggacagcaggctgt

SEQ ID NO: 1855836 - DNA, 15 bp, Homo sapiens
ggacagcaggctgtc

SEQ ID NO: 1855837 - DNA, 15 bp, Homo sapiens
gacagcaggctgtct

SEQ ID NO: 1855838 - DNA, 15 bp, Homo sapiens
acagcaggctgtctt

SEQ ID NO: 1855839 - DNA, 15 bp, Homo sapiens
cagcaggctgtcttg

SEQ ID NO: 1855840 - DNA, 15 bp, Homo sapiens
agcaggctgtcttgg

SEQ ID NO: 1855841 - DNA, 15 bp, Homo sapiens
gcaggctgtcttgga

SEQ ID NO: 1855842 - DNA, 15 bp, Homo sapiens
caggctgtcttggac

SEQ ID NO: 1855843 - DNA, 15 bp, Homo sapiens
aggctgtcttggacc

SEQ ID NO: 1855844 - DNA, 15 bp, Homo sapiens
ggctgtcttggaccc

SEQ ID NO: 1855845 - DNA, 15 bp, Homo sapiens
gctgtcttggaccct

SEQ ID NO: 1855846 - DNA, 15 bp, Homo sapiens
ctgtcttggaccctg

SEQ ID NO: 1855847 - DNA, 15 bp, Homo sapiens
tgtcttggaccctgc

SEQ ID NO: 1855848 - DNA, 15 bp, Homo sapiens
gtcttggaccctgcc

SEQ ID NO: 1855849 - DNA, 15 bp, Homo sapiens
tcttggaccctgcca

SEQ ID NO: 1855850 - DNA, 15 bp, Homo sapiens
cttggaccctgccag

SEQ ID NO: 1855851 - DNA, 15 bp, Homo sapiens
ttggaccctgccagg

SEQ ID NO: 1855852 - DNA, 15 bp, Homo sapiens
ggaccctgccagggt

SEQ ID NO: 1855853 - DNA, 15 bp, Homo sapiens
gaccctgccagggtc

SEQ ID NO: 1855854 - DNA, 15 bp, Homo sapiens
accctgccagggtca

SEQ ID NO: 1855855 - DNA, 15 bp, Homo sapiens
ccctgccagggtcat

SEQ ID NO: 1855856 - DNA, 15 bp, Homo sapiens
cctgccagggtcatc

SEQ ID NO: 1855857 - DNA, 15 bp, Homo sapiens
ctgccagggtcatcc

SEQ ID NO: 1855858 - DNA, 15 bp, Homo sapiens
tgccagggtcatcct

SEQ ID NO: 1855859 - DNA, 15 bp, Homo sapiens
gccagggtcatcctg

SEQ ID NO: 1855860 - DNA, 15 bp, Homo sapiens
ccagggtcatcctgg

SEQ ID NO: 1855861 - DNA, 15 bp, Homo sapiens
cagggtcatcctggc

SEQ ID NO: 1855862 - DNA, 15 bp, Homo sapiens
agggtcatcctggct

SEQ ID NO: 1855863 - DNA, 15 bp, Homo sapiens
gggtcatcctggctg

SEQ ID NO: 1855864 - DNA, 15 bp, Homo sapiens
ggtcatcctggctga

SEQ ID NO: 1855865 - DNA, 15 bp, Homo sapiens
gtcatcctggctgag

SEQ ID NO: 1855866 - DNA, 15 bp, Homo sapiens
tcatcctggctgagg

SEQ ID NO: 1855867 - DNA, 15 bp, Homo sapiens
catcctggctgagga

SEQ ID NO: 1855868 - DNA, 15 bp, Homo sapiens
atcctggctgaggac

SEQ ID NO: 1855869 - DNA, 15 bp, Homo sapiens
tcctggctgaggact

SEQ ID NO: 1855870 - DNA, 15 bp, Homo sapiens
cctggctgaggactc

SEQ ID NO: 1855871 - DNA, 15 bp, Homo sapiens
ctggctgaggactct

SEQ ID NO: 1855872 - DNA, 15 bp, Homo sapiens
tggctgaggactcta

SEQ ID NO: 1855873 - DNA, 15 bp, Homo sapiens
ggctgaggactctac

SEQ ID NO: 1855874 - DNA, 15 bp, Homo sapiens
gctgaggactctact

SEQ ID NO: 1855875 - DNA, 15 bp, Homo sapiens
ctgaggactctacta

SEQ ID NO: 1855876 - DNA, 15 bp, Homo sapiens
tgaggactctactaa

SEQ ID NO: 1855877 - DNA, 15 bp, Homo sapiens
gaggactctactaat

SEQ ID NO: 1855878 - DNA, 15 bp, Homo sapiens
aggactctactaatc

SEQ ID NO: 1855879 - DNA, 15 bp, Homo sapiens
ggactctactaatcc

SEQ ID NO: 1855880 - DNA, 15 bp, Homo sapiens
gactctactaatcca

SEQ ID NO: 1855881 - DNA, 15 bp, Homo sapiens
actctactaatccaa

SEQ ID NO: 1855882 - DNA, 15 bp, Homo sapiens
ctctactaatccaat

SEQ ID NO: 1855883 - DNA, 15 bp, Homo sapiens
tctactaatccaatt

SEQ ID NO: 1855884 - DNA, 15 bp, Homo sapiens
ctactaatccaattc

SEQ ID NO: 1855885 - DNA, 15 bp, Homo sapiens
tactaatccaattca

SEQ ID NO: 1855886 - DNA, 15 bp, Homo sapiens
actaatccaattcaa

SEQ ID NO: 1855887 - DNA, 15 bp, Homo sapiens
ctaatccaattcaaa

SEQ ID NO: 1855888 - DNA, 15 bp, Homo sapiens
taatccaattcaaag

SEQ ID NO: 1855889 - DNA, 15 bp, Homo sapiens
aatccaattcaaagt

SEQ ID NO: 1855890 - DNA, 15 bp, Homo sapiens
atccaattcaaagtc

SEQ ID NO: 1855891 - DNA, 15 bp, Homo sapiens
tccaattcaaagtct

SEQ ID NO: 1855892 - DNA, 15 bp, Homo sapiens
ccaattcaaagtctc

SEQ ID NO: 1855893 - DNA, 15 bp, Homo sapiens
caattcaaagtctct

SEQ ID NO: 1855894 - DNA, 15 bp, Homo sapiens
aattcaaagtctcta

SEQ ID NO: 1855895 - DNA, 15 bp, Homo sapiens
attcaaagtctctat

SEQ ID NO: 1855896 - DNA, 15 bp, Homo sapiens
ttcaaagtctctatg

SEQ ID NO: 1855897 - DNA, 15 bp, Homo sapiens
tcaaagtctctatgg

SEQ ID NO: 1855898 - DNA, 15 bp, Homo sapiens
caaagtctctatggc

SEQ ID NO: 1855899 - DNA, 15 bp, Homo sapiens
aaagtctctatggct

SEQ ID NO: 1855900 - DNA, 15 bp, Homo sapiens
aagtctctatggctc

SEQ ID NO: 1855901 - DNA, 15 bp, Homo sapiens
agtctctatggctct

SEQ ID NO: 1855902 - DNA, 15 bp, Homo sapiens
gtctctatggctctg

SEQ ID NO: 1855903 - DNA, 15 bp, Homo sapiens
tctctatggctctga

SEQ ID NO: 1855904 - DNA, 15 bp, Homo sapiens
ctctatggctctgat

SEQ ID NO: 1855905 - DNA, 15 bp, Homo sapiens
tctatggctctgata

SEQ ID NO: 1855906 - DNA, 15 bp, Homo sapiens
ctatggctctgatag

SEQ ID NO: 1855907 - DNA, 15 bp, Homo sapiens
tatggctctgatagt

SEQ ID NO: 1855908 - DNA, 15 bp, Homo sapiens
atggctctgatagtg

SEQ ID NO: 1855909 - DNA, 15 bp, Homo sapiens
tggctctgatagtgg

SEQ ID NO: 1855910 - DNA, 15 bp, Homo sapiens
ggctctgatagtgga

SEQ ID NO: 1855911 - DNA, 15 bp, Homo sapiens
gctctgatagtggac

SEQ ID NO: 1855912 - DNA, 15 bp, Homo sapiens
ctctgatagtggact

SEQ ID NO: 1855913 - DNA, 15 bp, Homo sapiens
tctgatagtggactc

SEQ ID NO: 1855914 - DNA, 15 bp, Homo sapiens
ctgatagtggactct

SEQ ID NO: 1855915 - DNA, 15 bp, Homo sapiens
tgatagtggactctg

SEQ ID NO: 1855916 - DNA, 15 bp, Homo sapiens
gatagtggactctgg

SEQ ID NO: 1855917 - DNA, 15 bp, Homo sapiens
atagtggactctgga

SEQ ID NO: 1855918 - DNA, 15 bp, Homo sapiens
tagtggactctggac

SEQ ID NO: 1855919 - DNA, 15 bp, Homo sapiens
agtggactctggact

SEQ ID NO: 1855920 - DNA, 15 bp, Homo sapiens
gtggactctggactg

SEQ ID NO: 1855921 - DNA, 15 bp, Homo sapiens
tggactctggactgt

SEQ ID NO: 1855922 - DNA, 15 bp, Homo sapiens
ggactctggactgtc

SEQ ID NO: 1855923 - DNA, 15 bp, Homo sapiens
gactctggactgtca

SEQ ID NO: 1855924 - DNA, 15 bp, Homo sapiens
actctggactgtcac

SEQ ID NO: 1855925 - DNA, 15 bp, Homo sapiens
ctctggactgtcact

SEQ ID NO: 1855926 - DNA, 15 bp, Homo sapiens
tctggactgtcactt

SEQ ID NO: 1855927 - DNA, 15 bp, Homo sapiens
ctggactgtcactta

SEQ ID NO: 1855928 - DNA, 15 bp, Homo sapiens
tggactgtcacttat

SEQ ID NO: 1855929 - DNA, 15 bp, Homo sapiens
ggactgtcacttata

SEQ ID NO: 1855930 - DNA, 15 bp, Homo sapiens
gactgtcacttatat

SEQ ID NO: 1855931 - DNA, 15 bp, Homo sapiens
actgtcacttatatt

SEQ ID NO: 1855932 - DNA, 15 bp, Homo sapiens
ctgtcacttatattt

SEQ ID NO: 1855933 - DNA, 15 bp, Homo sapiens
tgtcacttatatttt

SEQ ID NO: 1855934 - DNA, 15 bp, Homo sapiens
gtcacttatattttc

SEQ ID NO: 1855935 - DNA, 15 bp, Homo sapiens
tcacttatattttcc

SEQ ID NO: 1855936 - DNA, 15 bp, Homo sapiens
cacttatattttcca

SEQ ID NO: 1855937 - DNA, 15 bp, Homo sapiens
acttatattttccaa

SEQ ID NO: 1855938 - DNA, 15 bp, Homo sapiens
cttatattttccaat

SEQ ID NO: 1855939 - DNA, 15 bp, Homo sapiens
ttatattttccaatt

SEQ ID NO: 1855940 - DNA, 15 bp, Homo sapiens
tatattttccaattt

SEQ ID NO: 1855941 - DNA, 15 bp, Homo sapiens
atattttccaatttt

SEQ ID NO: 1855942 - DNA, 15 bp, Homo sapiens
tattttccaatttta

SEQ ID NO: 1855943 - DNA, 15 bp, Homo sapiens
attttccaattttat

SEQ ID NO: 1855944 - DNA, 15 bp, Homo sapiens
ttttccaattttatt

SEQ ID NO: 1855945 - DNA, 15 bp, Homo sapiens
tttccaattttatta

SEQ ID NO: 1855946 - DNA, 15 bp, Homo sapiens
ttccaattttattaa

SEQ ID NO: 1855947 - DNA, 15 bp, Homo sapiens
tccaattttattaag

SEQ ID NO: 1855948 - DNA, 15 bp, Homo sapiens
ccaattttattaagc

SEQ ID NO: 1855949 - DNA, 15 bp, Homo sapiens
caattttattaagct

SEQ ID NO: 1855950 - DNA, 15 bp, Homo sapiens
aattttattaagcta

SEQ ID NO: 1855951 - DNA, 15 bp, Homo sapiens
attttattaagctaa

SEQ ID NO: 1855952 - DNA, 15 bp, Homo sapiens
ttttattaagctaat

SEQ ID NO: 1855953 - DNA, 15 bp, Homo sapiens
tttattaagctaatt

SEQ ID NO: 1855954 - DNA, 15 bp, Homo sapiens
ttattaagctaattg

SEQ ID NO: 1855955 - DNA, 15 bp, Homo sapiens
tattaagctaattga

SEQ ID NO: 1855956 - DNA, 15 bp, Homo sapiens
attaagctaattgaa

SEQ ID NO: 1855957 - DNA, 15 bp, Homo sapiens
ttaagctaattgaaa

SEQ ID NO: 1855958 - DNA, 15 bp, Homo sapiens
taagctaattgaaag

SEQ ID NO: 1855959 - DNA, 15 bp, Homo sapiens
aagctaattgaaaga

SEQ ID NO: 1855960 - DNA, 15 bp, Homo sapiens
agctaattgaaagag

SEQ ID NO: 1855961 - DNA, 15 bp, Homo sapiens
gctaattgaaagaga

SEQ ID NO: 1855962 - DNA, 15 bp, Homo sapiens
ctaattgaaagagaa

SEQ ID NO: 1855963 - DNA, 15 bp, Homo sapiens
taattgaaagagaag

SEQ ID NO: 1855964 - DNA, 15 bp, Homo sapiens
aattgaaagagaagg

SEQ ID NO: 1855965 - DNA, 15 bp, Homo sapiens
attgaaagagaagga

SEQ ID NO: 1855966 - DNA, 15 bp, Homo sapiens
ttgaaagagaaggag

SEQ ID NO: 1855967 - DNA, 15 bp, Homo sapiens
tgaaagagaaggaga

SEQ ID NO: 1855968 - DNA, 15 bp, Homo sapiens
gaaagagaaggagat

SEQ ID NO: 1855969 - DNA, 15 bp, Homo sapiens
aaagagaaggagatt

SEQ ID NO: 1855970 - DNA, 15 bp, Homo sapiens
aagagaaggagattg

SEQ ID NO: 1855971 - DNA, 15 bp, Homo sapiens
agagaaggagattgt

SEQ ID NO: 1855972 - DNA, 15 bp, Homo sapiens
gagaaggagattgtt

SEQ ID NO: 1855973 - DNA, 15 bp, Homo sapiens
agaaggagattgtta

SEQ ID NO: 1855974 - DNA, 15 bp, Homo sapiens
gaaggagattgttat

SEQ ID NO: 1855975 - DNA, 15 bp, Homo sapiens
aaggagattgttatt

SEQ ID NO: 1855976 - DNA, 15 bp, Homo sapiens
aggagattgttattt

SEQ ID NO: 1855977 - DNA, 15 bp, Homo sapiens
ggagattgttatttt

SEQ ID NO: 1855978 - DNA, 15 bp, Homo sapiens
gagattgttatttta

SEQ ID NO: 1855979 - DNA, 15 bp, Homo sapiens
agattgttattttac

SEQ ID NO: 1855980 - DNA, 15 bp, Homo sapiens
gattgttattttaca

SEQ ID NO: 1855981 - DNA, 15 bp, Homo sapiens
attgttattttacaa

SEQ ID NO: 1855982 - DNA, 15 bp, Homo sapiens
ttgttattttacaaa

SEQ ID NO: 1855983 - DNA, 15 bp, Homo sapiens
tgttattttacaaat

SEQ ID NO: 1855984 - DNA, 15 bp, Homo sapiens
gttattttacaaata

SEQ ID NO: 1855985 - DNA, 15 bp, Homo sapiens
ttattttacaaatac

SEQ ID NO: 1855986 - DNA, 15 bp, Homo sapiens
tattttacaaatacg

SEQ ID NO: 1855987 - DNA, 15 bp, Homo sapiens
attttacaaatacgg

SEQ ID NO: 1855988 - DNA, 15 bp, Homo sapiens
ttttacaaatacggc

SEQ ID NO: 1855989 - DNA, 15 bp, Homo sapiens
tttacaaatacggca

SEQ ID NO: 1855990 - DNA, 15 bp, Homo sapiens
ttacaaatacggcac

SEQ ID NO: 1855991 - DNA, 15 bp, Homo sapiens
tacaaatacggcaca

SEQ ID NO: 1855992 - DNA, 15 bp, Homo sapiens
acaaatacggcacat

SEQ ID NO: 1855993 - DNA, 15 bp, Homo sapiens
caaatacggcacatt

SEQ ID NO: 1855994 - DNA, 15 bp, Homo sapiens
aaatacggcacattg

SEQ ID NO: 1855995 - DNA, 15 bp, Homo sapiens
aatacggcacattgg

SEQ ID NO: 1855996 - DNA, 15 bp, Homo sapiens
atacggcacattggc

SEQ ID NO: 1855997 - DNA, 15 bp, Homo sapiens
tacggcacattggcc

SEQ ID NO: 1855998 - DNA, 15 bp, Homo sapiens
acggcacattggcca

SEQ ID NO: 1855999 - DNA, 15 bp, Homo sapiens
cggcacattggccag

SEQ ID NO: 1856000 - DNA, 15 bp, Homo sapiens
ggcacattggccagg

SEQ ID NO: 1856001 - DNA, 15 bp, Homo sapiens
gcacattggccagga

SEQ ID NO: 1856002 - DNA, 15 bp, Homo sapiens
acattggccaggatg

SEQ ID NO: 1856003 - DNA, 15 bp, Homo sapiens
cattggccaggatgt

SEQ ID NO: 1856004 - DNA, 15 bp, Homo sapiens
attggccaggatgta

SEQ ID NO: 1856005 - DNA, 15 bp, Homo sapiens
ttggccaggatgtat

SEQ ID NO: 1856006 - DNA, 15 bp, Homo sapiens
tggccaggatgtatg

SEQ ID NO: 1856007 - DNA, 15 bp, Homo sapiens
ggccaggatgtatgt

SEQ ID NO: 1856008 - DNA, 15 bp, Homo sapiens
gccaggatgtatgta

SEQ ID NO: 1856009 - DNA, 15 bp, Homo sapiens
ccaggatgtatgtat

SEQ ID NO: 1856010 - DNA, 15 bp, Homo sapiens
caggatgtatgtatt

SEQ ID NO: 1856011 - DNA, 15 bp, Homo sapiens
aggatgtatgtatta

SEQ ID NO: 1856012 - DNA, 15 bp, Homo sapiens
ggatgtatgtattag

SEQ ID NO: 1856013 - DNA, 15 bp, Homo sapiens
gatgtatgtattagc

SEQ ID NO: 1856014 - DNA, 15 bp, Homo sapiens
atgtatgtattagcc

SEQ ID NO: 1856015 - DNA, 15 bp, Homo sapiens
tgtatgtattagccc

SEQ ID NO: 1856016 - DNA, 15 bp, Homo sapiens
gtatgtattagccct

SEQ ID NO: 1856017 - DNA, 15 bp, Homo sapiens
tatgtattagccctg

SEQ ID NO: 1856018 - DNA, 15 bp, Homo sapiens
atgtattagccctga

SEQ ID NO: 1856019 - DNA, 15 bp, Homo sapiens
tgtattagccctgaa

SEQ ID NO: 1856020 - DNA, 15 bp, Homo sapiens
gtattagccctgaaa

SEQ ID NO: 1856021 - DNA, 15 bp, Homo sapiens
tattagccctgaaag

SEQ ID NO: 1856022 - DNA, 15 bp, Homo sapiens
attagccctgaaagt

SEQ ID NO: 1856023 - DNA, 15 bp, Homo sapiens
ttagccctgaaagtt

SEQ ID NO: 1856024 - DNA, 15 bp, Homo sapiens
tagccctgaaagttt

SEQ ID NO: 1856025 - DNA, 15 bp, Homo sapiens
agccctgaaagtttg

SEQ ID NO: 1856026 - DNA, 15 bp, Homo sapiens
gccctgaaagtttgg

SEQ ID NO: 1856027 - DNA, 15 bp, Homo sapiens
ccctgaaagtttgga

SEQ ID NO: 1856028 - DNA, 15 bp, Homo sapiens
cctgaaagtttggag

SEQ ID NO: 1856029 - DNA, 15 bp, Homo sapiens
ctgaaagtttggagg

SEQ ID NO: 1856030 - DNA, 15 bp, Homo sapiens
tgaaagtttggaggt

SEQ ID NO: 1856031 - DNA, 15 bp, Homo sapiens
gaaagtttggaggtt

SEQ ID NO: 1856032 - DNA, 15 bp, Homo sapiens
aaagtttggaggttg

SEQ ID NO: 1856033 - DNA, 15 bp, Homo sapiens
aagtttggaggttgc

SEQ ID NO: 1856034 - DNA, 15 bp, Homo sapiens
agtttggaggttgcc

SEQ ID NO: 1856035 - DNA, 15 bp, Homo sapiens
gtttggaggttgcct

SEQ ID NO: 1856036 - DNA, 15 bp, Homo sapiens
tttggaggttgcctt

SEQ ID NO: 1856037 - DNA, 15 bp, Homo sapiens
ttggaggttgcctta

SEQ ID NO: 1856038 - DNA, 15 bp, Homo sapiens
tggaggttgccttac

SEQ ID NO: 1856039 - DNA, 15 bp, Homo sapiens
ggaggttgccttact

SEQ ID NO: 1856040 - DNA, 15 bp, Homo sapiens
gaggttgccttacta

SEQ ID NO: 1856041 - DNA, 15 bp, Homo sapiens
aggttgccttactaa

SEQ ID NO: 1856042 - DNA, 15 bp, Homo sapiens
ggttgccttactaat

SEQ ID NO: 1856043 - DNA, 15 bp, Homo sapiens
gttgccttactaatt

SEQ ID NO: 1856044 - DNA, 15 bp, Homo sapiens
ttgccttactaattt

SEQ ID NO: 1856045 - DNA, 15 bp, Homo sapiens
tgccttactaatttt

SEQ ID NO: 1856046 - DNA, 15 bp, Homo sapiens
gccttactaatttta

SEQ ID NO: 1856047 - DNA, 15 bp, Homo sapiens
ccttactaattttag

SEQ ID NO: 1856048 - DNA, 15 bp, Homo sapiens
cttactaattttagg

SEQ ID NO: 1856049 - DNA, 15 bp, Homo sapiens
ttactaattttaggc

SEQ ID NO: 1856050 - DNA, 15 bp, Homo sapiens
tactaattttaggca

SEQ ID NO: 1856051 - DNA, 15 bp, Homo sapiens
actaattttaggcag

SEQ ID NO: 1856052 - DNA, 15 bp, Homo sapiens
ctaattttaggcagc

SEQ ID NO: 1856053 - DNA, 15 bp, Homo sapiens
taattttaggcagca

SEQ ID NO: 1856054 - DNA, 15 bp, Homo sapiens
aattttaggcagcat

SEQ ID NO: 1856055 - DNA, 15 bp, Homo sapiens
attttaggcagcata

SEQ ID NO: 1856056 - DNA, 15 bp, Homo sapiens
ttttaggcagcatat

SEQ ID NO: 1856057 - DNA, 15 bp, Homo sapiens
tttaggcagcatatg

SEQ ID NO: 1856058 - DNA, 15 bp, Homo sapiens
ttaggcagcatatgt

SEQ ID NO: 1856059 - DNA, 15 bp, Homo sapiens
taggcagcatatgtg

SEQ ID NO: 1856060 - DNA, 15 bp, Homo sapiens
aggcagcatatgtgg

SEQ ID NO: 1856061 - DNA, 15 bp, Homo sapiens
ggcagcatatgtggc

SEQ ID NO: 1856062 - DNA, 15 bp, Homo sapiens
gcagcatatgtggcc

SEQ ID NO: 1856063 - DNA, 15 bp, Homo sapiens
cagcatatgtggcca

SEQ ID NO: 1856064 - DNA, 15 bp, Homo sapiens
agcatatgtggccat

SEQ ID NO: 1856065 - DNA, 15 bp, Homo sapiens
gcatatgtggccatt

SEQ ID NO: 1856066 - DNA, 15 bp, Homo sapiens
catatgtggccattt

SEQ ID NO: 1856067 - DNA, 15 bp, Homo sapiens
atatgtggccatttg

SEQ ID NO: 1856068 - DNA, 15 bp, Homo sapiens
tatgtggccatttga

SEQ ID NO: 1856069 - DNA, 15 bp, Homo sapiens
atgtggccatttgag

SEQ ID NO: 1856070 - DNA, 15 bp, Homo sapiens
tgtggccatttgaga

SEQ ID NO: 1856071 - DNA, 15 bp, Homo sapiens
gtggccatttgagaa

SEQ ID NO: 1856072 - DNA, 15 bp, Homo sapiens
tggccatttgagaac

SEQ ID NO: 1856073 - DNA, 15 bp, Homo sapiens
ggccatttgagaaca

SEQ ID NO: 1856074 - DNA, 15 bp, Homo sapiens
gccatttgagaacat

SEQ ID NO: 1856075 - DNA, 15 bp, Homo sapiens
ccatttgagaacata

SEQ ID NO: 1856076 - DNA, 15 bp, Homo sapiens
catttgagaacatat

SEQ ID NO: 1856077 - DNA, 15 bp, Homo sapiens
atttgagaacatatc

SEQ ID NO: 1856078 - DNA, 15 bp, Homo sapiens
tttgagaacatatct

SEQ ID NO: 1856079 - DNA, 15 bp, Homo sapiens
ttgagaacatatcta

SEQ ID NO: 1856080 - DNA, 15 bp, Homo sapiens
tgagaacatatctaa

SEQ ID NO: 1856081 - DNA, 15 bp, Homo sapiens
gagaacatatctaat

SEQ ID NO: 1856082 - DNA, 15 bp, Homo sapiens
agaacatatctaatg

SEQ ID NO: 1856083 - DNA, 15 bp, Homo sapiens
gaacatatctaatgt

SEQ ID NO: 1856084 - DNA, 15 bp, Homo sapiens
aacatatctaatgtc

SEQ ID NO: 1856085 - DNA, 15 bp, Homo sapiens
acatatctaatgtct

SEQ ID NO: 1856086 - DNA, 15 bp, Homo sapiens
catatctaatgtcta

SEQ ID NO: 1856087 - DNA, 15 bp, Homo sapiens
atatctaatgtctaa

SEQ ID NO: 1856088 - DNA, 15 bp, Homo sapiens
tatctaatgtctaat

SEQ ID NO: 1856089 - DNA, 15 bp, Homo sapiens
atctaatgtctaatg

SEQ ID NO: 1856090 - DNA, 15 bp, Homo sapiens
tctaatgtctaatga

SEQ ID NO: 1856091 - DNA, 15 bp, Homo sapiens
ctaatgtctaatgag

SEQ ID NO: 1856092 - DNA, 15 bp, Homo sapiens
taatgtctaatgagc

SEQ ID NO: 1856093 - DNA, 15 bp, Homo sapiens
aatgtctaatgagca

SEQ ID NO: 1856094 - DNA, 15 bp, Homo sapiens
atgtctaatgagcat

SEQ ID NO: 1856095 - DNA, 15 bp, Homo sapiens
tgtctaatgagcatt

SEQ ID NO: 1856096 - DNA, 15 bp, Homo sapiens
gtctaatgagcattg

SEQ ID NO: 1856097 - DNA, 15 bp, Homo sapiens
tctaatgagcattgt

SEQ ID NO: 1856098 - DNA, 15 bp, Homo sapiens
ctaatgagcattgta

SEQ ID NO: 1856099 - DNA, 15 bp, Homo sapiens
taatgagcattgtat

SEQ ID NO: 1856100 - DNA, 15 bp, Homo sapiens
aatgagcattgtatt

SEQ ID NO: 1856101 - DNA, 15 bp, Homo sapiens
atgagcattgtattc

SEQ ID NO: 1856102 - DNA, 15 bp, Homo sapiens
tgagcattgtattcc

SEQ ID NO: 1856103 - DNA, 15 bp, Homo sapiens
gagcattgtattccc

SEQ ID NO: 1856104 - DNA, 15 bp, Homo sapiens
agcattgtattccca

SEQ ID NO: 1856105 - DNA, 15 bp, Homo sapiens
gcattgtattcccag

SEQ ID NO: 1856106 - DNA, 15 bp, Homo sapiens
cattgtattcccagg

SEQ ID NO: 1856107 - DNA, 15 bp, Homo sapiens
attgtattcccaggt

SEQ ID NO: 1856108 - DNA, 15 bp, Homo sapiens
ttgtattcccaggtt

SEQ ID NO: 1856109 - DNA, 15 bp, Homo sapiens
tgtattcccaggttg

SEQ ID NO: 1856110 - DNA, 15 bp, Homo sapiens
gtattcccaggttgg

SEQ ID NO: 1856111 - DNA, 15 bp, Homo sapiens
tattcccaggttgga

SEQ ID NO: 1856112 - DNA, 15 bp, Homo sapiens
attcccaggttggat

SEQ ID NO: 1856113 - DNA, 15 bp, Homo sapiens
ttcccaggttggatc

SEQ ID NO: 1856114 - DNA, 15 bp, Homo sapiens
tcccaggttggatcc

SEQ ID NO: 1856115 - DNA, 15 bp, Homo sapiens
cccaggttggatccc

SEQ ID NO: 1856116 - DNA, 15 bp, Homo sapiens
ccaggttggatcccc

SEQ ID NO: 1856117 - DNA, 15 bp, Homo sapiens
caggttggatccccg

SEQ ID NO: 1856118 - DNA, 15 bp, Homo sapiens
aggttggatccccgt

SEQ ID NO: 1856119 - DNA, 15 bp, Homo sapiens
ggttggatccccgtc

SEQ ID NO: 1856120 - DNA, 15 bp, Homo sapiens
gttggatccccgtcc

SEQ ID NO: 1856121 - DNA, 15 bp, Homo sapiens
ttggatccccgtccc

SEQ ID NO: 1856122 - DNA, 15 bp, Homo sapiens
tggatccccgtcccc

SEQ ID NO: 1856123 - DNA, 15 bp, Homo sapiens
ggatccccgtcccct

SEQ ID NO: 1856124 - DNA, 15 bp, Homo sapiens
gatccccgtccccta

SEQ ID NO: 1856125 - DNA, 15 bp, Homo sapiens
atccccgtcccctag

SEQ ID NO: 1856126 - DNA, 15 bp, Homo sapiens
tccccgtcccctagc

SEQ ID NO: 1856127 - DNA, 15 bp, Homo sapiens
ccccgtcccctagcc

SEQ ID NO: 1856128 - DNA, 15 bp, Homo sapiens
cccgtcccctagccc

SEQ ID NO: 1856129 - DNA, 15 bp, Homo sapiens
ccgtcccctagccca

SEQ ID NO: 1856130 - DNA, 15 bp, Homo sapiens
cgtcccctagcccat

SEQ ID NO: 1856131 - DNA, 15 bp, Homo sapiens
gtcccctagcccatt

SEQ ID NO: 1856132 - DNA, 15 bp, Homo sapiens
tcccctagcccattt

SEQ ID NO: 1856133 - DNA, 15 bp, Homo sapiens
cccctagcccatttc

SEQ ID NO: 1856134 - DNA, 15 bp, Homo sapiens
ccctagcccatttct

SEQ ID NO: 1856135 - DNA, 15 bp, Homo sapiens
cctagcccatttctc

SEQ ID NO: 1856136 - DNA, 15 bp, Homo sapiens
ctagcccatttctcc

SEQ ID NO: 1856137 - DNA, 15 bp, Homo sapiens
tagcccatttctcca

SEQ ID NO: 1856138 - DNA, 15 bp, Homo sapiens
agcccatttctccaa

SEQ ID NO: 1856139 - DNA, 15 bp, Homo sapiens
gcccatttctccaac

SEQ ID NO: 1856140 - DNA, 15 bp, Homo sapiens
cccatttctccaact

SEQ ID NO: 1856141 - DNA, 15 bp, Homo sapiens
ccatttctccaactc

SEQ ID NO: 1856142 - DNA, 15 bp, Homo sapiens
catttctccaactct

SEQ ID NO: 1856143 - DNA, 15 bp, Homo sapiens
atttctccaactctc

SEQ ID NO: 1856144 - DNA, 15 bp, Homo sapiens
tttctccaactctct

SEQ ID NO: 1856145 - DNA, 15 bp, Homo sapiens
ttctccaactctctg

SEQ ID NO: 1856146 - DNA, 15 bp, Homo sapiens
tctccaactctctgt

SEQ ID NO: 1856147 - DNA, 15 bp, Homo sapiens
ctccaactctctgtc

SEQ ID NO: 1856148 - DNA, 15 bp, Homo sapiens
tccaactctctgtcc

SEQ ID NO: 1856149 - DNA, 15 bp, Homo sapiens
ccaactctctgtccg

SEQ ID NO: 1856150 - DNA, 15 bp, Homo sapiens
caactctctgtccgt

SEQ ID NO: 1856151 - DNA, 15 bp, Homo sapiens
aactctctgtccgta

SEQ ID NO: 1856152 - DNA, 15 bp, Homo sapiens
actctctgtccgtac

SEQ ID NO: 1856153 - DNA, 15 bp, Homo sapiens
ctctctgtccgtaca

SEQ ID NO: 1856154 - DNA, 15 bp, Homo sapiens
tctctgtccgtacat

SEQ ID NO: 1856155 - DNA, 15 bp, Homo sapiens
ctctgtccgtacata

SEQ ID NO: 1856156 - DNA, 15 bp, Homo sapiens
tctgtccgtacatag

SEQ ID NO: 1856157 - DNA, 15 bp, Homo sapiens
ctgtccgtacatagt

SEQ ID NO: 1856158 - DNA, 15 bp, Homo sapiens
tgtccgtacatagtg

SEQ ID NO: 1856159 - DNA, 15 bp, Homo sapiens
gtccgtacatagtgg

SEQ ID NO: 1856160 - DNA, 15 bp, Homo sapiens
tccgtacatagtgga

SEQ ID NO: 1856161 - DNA, 15 bp, Homo sapiens
ccgtacatagtggat

SEQ ID NO: 1856162 - DNA, 15 bp, Homo sapiens
cgtacatagtggatt

SEQ ID NO: 1856163 - DNA, 15 bp, Homo sapiens
gtacatagtggatta

SEQ ID NO: 1856164 - DNA, 15 bp, Homo sapiens
tacatagtggattat

SEQ ID NO: 1856165 - DNA, 15 bp, Homo sapiens
acatagtggattata

SEQ ID NO: 1856166 - DNA, 15 bp, Homo sapiens
catagtggattataa

SEQ ID NO: 1856167 - DNA, 15 bp, Homo sapiens
atagtggattataac

SEQ ID NO: 1856168 - DNA, 15 bp, Homo sapiens
tagtggattataact

SEQ ID NO: 1856169 - DNA, 15 bp, Homo sapiens
agtggattataactg

SEQ ID NO: 1856170 - DNA, 15 bp, Homo sapiens
gtggattataactga

SEQ ID NO: 1856171 - DNA, 15 bp, Homo sapiens
tggattataactgaa

SEQ ID NO: 1856172 - DNA, 15 bp, Homo sapiens
ggattataactgaat

SEQ ID NO: 1856173 - DNA, 15 bp, Homo sapiens
gattataactgaatt

SEQ ID NO: 1856174 - DNA, 15 bp, Homo sapiens
attataactgaattt

SEQ ID NO: 1856175 - DNA, 15 bp, Homo sapiens
ttataactgaattta

SEQ ID NO: 1856176 - DNA, 15 bp, Homo sapiens
tataactgaatttag

SEQ ID NO: 1856177 - DNA, 15 bp, Homo sapiens
ataactgaatttaga

SEQ ID NO: 1856178 - DNA, 15 bp, Homo sapiens
taactgaatttagat

SEQ ID NO: 1856179 - DNA, 15 bp, Homo sapiens
aactgaatttagatg

SEQ ID NO: 1856180 - DNA, 15 bp, Homo sapiens
actgaatttagatgt

SEQ ID NO: 1856181 - DNA, 15 bp, Homo sapiens
ctgaatttagatgtc

SEQ ID NO: 1856182 - DNA, 15 bp, Homo sapiens
tgaatttagatgtct

SEQ ID NO: 1856183 - DNA, 15 bp, Homo sapiens
gaatttagatgtctg

SEQ ID NO: 1856184 - DNA, 15 bp, Homo sapiens
aatttagatgtctgt

SEQ ID NO: 1856185 - DNA, 15 bp, Homo sapiens
atttagatgtctgta

SEQ ID NO: 1856186 - DNA, 15 bp, Homo sapiens
tttagatgtctgtac

SEQ ID NO: 1856187 - DNA, 15 bp, Homo sapiens
ttagatgtctgtact

SEQ ID NO: 1856188 - DNA, 15 bp, Homo sapiens
tagatgtctgtacta

SEQ ID NO: 1856189 - DNA, 15 bp, Homo sapiens
agatgtctgtactac

SEQ ID NO: 1856190 - DNA, 15 bp, Homo sapiens
gatgtctgtactaca

SEQ ID NO: 1856191 - DNA, 15 bp, Homo sapiens
atgtctgtactacag

SEQ ID NO: 1856192 - DNA, 15 bp, Homo sapiens
tgtctgtactacagg

SEQ ID NO: 1856193 - DNA, 15 bp, Homo sapiens
gtctgtactacagga

SEQ ID NO: 1856194 - DNA, 15 bp, Homo sapiens
tctgtactacaggat

SEQ ID NO: 1856195 - DNA, 15 bp, Homo sapiens
ctgtactacaggatt

SEQ ID NO: 1856196 - DNA, 15 bp, Homo sapiens
tgtactacaggattt

SEQ ID NO: 1856197 - DNA, 15 bp, Homo sapiens
gtactacaggatttt

SEQ ID NO: 1856198 - DNA, 15 bp, Homo sapiens
tactacaggattttg

SEQ ID NO: 1856199 - DNA, 15 bp, Homo sapiens
actacaggattttgt

SEQ ID NO: 1856200 - DNA, 15 bp, Homo sapiens
ctacaggattttgtt

SEQ ID NO: 1856201 - DNA, 15 bp, Homo sapiens
tacaggattttgtta

SEQ ID NO: 1856202 - DNA, 15 bp, Homo sapiens
acaggattttgttac

SEQ ID NO: 1856203 - DNA, 15 bp, Homo sapiens
caggattttgttact

SEQ ID NO: 1856204 - DNA, 15 bp, Homo sapiens
aggattttgttactt

SEQ ID NO: 1856205 - DNA, 15 bp, Homo sapiens
ggattttgttactta

SEQ ID NO: 1856206 - DNA, 15 bp, Homo sapiens
gattttgttacttag

SEQ ID NO: 1856207 - DNA, 15 bp, Homo sapiens
attttgttacttaga

SEQ ID NO: 1856208 - DNA, 15 bp, Homo sapiens
ttttgttacttagaa

SEQ ID NO: 1856209 - DNA, 15 bp, Homo sapiens
tttgttacttagaag

SEQ ID NO: 1856210 - DNA, 15 bp, Homo sapiens
ttgttacttagaagc

SEQ ID NO: 1856211 - DNA, 15 bp, Homo sapiens
tgttacttagaagcc

SEQ ID NO: 1856212 - DNA, 15 bp, Homo sapiens
gttacttagaagcca

SEQ ID NO: 1856213 - DNA, 15 bp, Homo sapiens
ttacttagaagccat

SEQ ID NO: 1856214 - DNA, 15 bp, Homo sapiens
tacttagaagccata

SEQ ID NO: 1856215 - DNA, 15 bp, Homo sapiens
acttagaagccatag

SEQ ID NO: 1856216 - DNA, 15 bp, Homo sapiens
cttagaagccatagg

SEQ ID NO: 1856217 - DNA, 15 bp, Homo sapiens
ttagaagccataggt

SEQ ID NO: 1856218 - DNA, 15 bp, Homo sapiens
tagaagccataggtt

SEQ ID NO: 1856219 - DNA, 15 bp, Homo sapiens
agaagccataggttg

SEQ ID NO: 1856220 - DNA, 15 bp, Homo sapiens
gaagccataggttgt

SEQ ID NO: 1856221 - DNA, 15 bp, Homo sapiens
aagccataggttgtg

SEQ ID NO: 1856222 - DNA, 15 bp, Homo sapiens
agccataggttgtga

SEQ ID NO: 1856223 - DNA, 15 bp, Homo sapiens
gccataggttgtgag

SEQ ID NO: 1856224 - DNA, 15 bp, Homo sapiens
ccataggttgtgaga

SEQ ID NO: 1856225 - DNA, 15 bp, Homo sapiens
cataggttgtgagat

SEQ ID NO: 1856226 - DNA, 15 bp, Homo sapiens
ataggttgtgagatg

SEQ ID NO: 1856227 - DNA, 15 bp, Homo sapiens
taggttgtgagatgg

SEQ ID NO: 1856228 - DNA, 15 bp, Homo sapiens
aggttgtgagatggt

SEQ ID NO: 1856229 - DNA, 15 bp, Homo sapiens
ggttgtgagatggtt

SEQ ID NO: 1856230 - DNA, 15 bp, Homo sapiens
gttgtgagatggttg

SEQ ID NO: 1856231 - DNA, 15 bp, Homo sapiens
ttgtgagatggttgt

SEQ ID NO: 1856232 - DNA, 15 bp, Homo sapiens
tgtgagatggttgtt

SEQ ID NO: 1856233 - DNA, 15 bp, Homo sapiens
gtgagatggttgttt

SEQ ID NO: 1856234 - DNA, 15 bp, Homo sapiens
tgagatggttgtttc

SEQ ID NO: 1856235 - DNA, 15 bp, Homo sapiens
gagatggttgtttca

SEQ ID NO: 1856236 - DNA, 15 bp, Homo sapiens
agatggttgtttcag

SEQ ID NO: 1856237 - DNA, 15 bp, Homo sapiens
gatggttgtttcagt

SEQ ID NO: 1856238 - DNA, 15 bp, Homo sapiens
atggttgtttcagta

SEQ ID NO: 1856239 - DNA, 15 bp, Homo sapiens
tggttgtttcagtag

SEQ ID NO: 1856240 - DNA, 15 bp, Homo sapiens
ggttgtttcagtagt

SEQ ID NO: 1856241 - DNA, 15 bp, Homo sapiens
gttgtttcagtagta

SEQ ID NO: 1856242 - DNA, 15 bp, Homo sapiens
ttgtttcagtagtag

SEQ ID NO: 1856243 - DNA, 15 bp, Homo sapiens
tgtttcagtagtagt

SEQ ID NO: 1856244 - DNA, 15 bp, Homo sapiens
gtttcagtagtagta

SEQ ID NO: 1856245 - DNA, 15 bp, Homo sapiens
tttcagtagtagtag

SEQ ID NO: 1856246 - DNA, 15 bp, Homo sapiens
ttcagtagtagtagt

SEQ ID NO: 1856247 - DNA, 15 bp, Homo sapiens
tcagtagtagtagta

SEQ ID NO: 1856248 - DNA, 15 bp, Homo sapiens
cagtagtagtagtaa

SEQ ID NO: 1856249 - DNA, 15 bp, Homo sapiens
agtagtagtagtaaa

SEQ ID NO: 1856250 - DNA, 15 bp, Homo sapiens
gtagtagtagtaaac

SEQ ID NO: 1856251 - DNA, 15 bp, Homo sapiens
tagtagtagtaaaca

SEQ ID NO: 1856252 - DNA, 15 bp, Homo sapiens
agtagtagtaaacag

SEQ ID NO: 1856253 - DNA, 15 bp, Homo sapiens
gtagtagtaaacaga

SEQ ID NO: 1856254 - DNA, 15 bp, Homo sapiens
tagtagtaaacagaa

SEQ ID NO: 1856255 - DNA, 15 bp, Homo sapiens
agtagtaaacagaat

SEQ ID NO: 1856256 - DNA, 15 bp, Homo sapiens
gtagtaaacagaatt

SEQ ID NO: 1856257 - DNA, 15 bp, Homo sapiens
tagtaaacagaattt

SEQ ID NO: 1856258 - DNA, 15 bp, Homo sapiens
agtaaacagaatttt

SEQ ID NO: 1856259 - DNA, 15 bp, Homo sapiens
gtaaacagaatttta

SEQ ID NO: 1856260 - DNA, 15 bp, Homo sapiens
taaacagaattttat

SEQ ID NO: 1856261 - DNA, 15 bp, Homo sapiens
aaacagaattttata

SEQ ID NO: 1856262 - DNA, 15 bp, Homo sapiens
aacagaattttatat

SEQ ID NO: 1856263 - DNA, 15 bp, Homo sapiens
acagaattttatatg

SEQ ID NO: 1856264 - DNA, 15 bp, Homo sapiens
cagaattttatatgg

SEQ ID NO: 1856265 - DNA, 15 bp, Homo sapiens
agaattttatatgga

SEQ ID NO: 1856266 - DNA, 15 bp, Homo sapiens
gaattttatatggag

SEQ ID NO: 1856267 - DNA, 15 bp, Homo sapiens
aattttatatggaga

SEQ ID NO: 1856268 - DNA, 15 bp, Homo sapiens
attttatatggagat

SEQ ID NO: 1856269 - DNA, 15 bp, Homo sapiens
ttttatatggagatt

SEQ ID NO: 1856270 - DNA, 15 bp, Homo sapiens
tttatatggagattc

SEQ ID NO: 1856271 - DNA, 15 bp, Homo sapiens
ttatatggagattcc

SEQ ID NO: 1856272 - DNA, 15 bp, Homo sapiens
tatatggagattcca

SEQ ID NO: 1856273 - DNA, 15 bp, Homo sapiens
atatggagattccat

SEQ ID NO: 1856274 - DNA, 15 bp, Homo sapiens
tatggagattccatc

SEQ ID NO: 1856275 - DNA, 15 bp, Homo sapiens
atggagattccatct

SEQ ID NO: 1856276 - DNA, 15 bp, Homo sapiens
tggagattccatctc

SEQ ID NO: 1856277 - DNA, 15 bp, Homo sapiens
ggagattccatctct

SEQ ID NO: 1856278 - DNA, 15 bp, Homo sapiens
gagattccatctctg

SEQ ID NO: 1856279 - DNA, 15 bp, Homo sapiens
agattccatctctgt

SEQ ID NO: 1856280 - DNA, 15 bp, Homo sapiens
gattccatctctgtt

SEQ ID NO: 1856281 - DNA, 15 bp, Homo sapiens
attccatctctgttc

SEQ ID NO: 1856282 - DNA, 15 bp, Homo sapiens
ttccatctctgttct

SEQ ID NO: 1856283 - DNA, 15 bp, Homo sapiens
tccatctctgttctt

SEQ ID NO: 1856284 - DNA, 15 bp, Homo sapiens
ccatctctgttcttg

SEQ ID NO: 1856285 - DNA, 15 bp, Homo sapiens
catctctgttcttgc

SEQ ID NO: 1856286 - DNA, 15 bp, Homo sapiens
atctctgttcttgca

SEQ ID NO: 1856287 - DNA, 15 bp, Homo sapiens
tctctgttcttgcac

SEQ ID NO: 1856288 - DNA, 15 bp, Homo sapiens
ctctgttcttgcaca

SEQ ID NO: 1856289 - DNA, 15 bp, Homo sapiens
tctgttcttgcacat

SEQ ID NO: 1856290 - DNA, 15 bp, Homo sapiens
ctgttcttgcacatt

SEQ ID NO: 1856291 - DNA, 15 bp, Homo sapiens
tgttcttgcacattg

SEQ ID NO: 1856292 - DNA, 15 bp, Homo sapiens
gttcttgcacattgg

SEQ ID NO: 1856293 - DNA, 15 bp, Homo sapiens
ttcttgcacattgga

SEQ ID NO: 1856294 - DNA, 15 bp, Homo sapiens
tcttgcacattggac

SEQ ID NO: 1856295 - DNA, 15 bp, Homo sapiens
cttgcacattggacc

SEQ ID NO: 1856296 - DNA, 15 bp, Homo sapiens
ttgcacattggacct

SEQ ID NO: 1856297 - DNA, 15 bp, Homo sapiens
tgcacattggaccta

SEQ ID NO: 1856298 - DNA, 15 bp, Homo sapiens
gcacattggacctat

SEQ ID NO: 1856299 - DNA, 15 bp, Homo sapiens
cacattggacctatc

SEQ ID NO: 1856300 - DNA, 15 bp, Homo sapiens
acattggacctatcc

SEQ ID NO: 1856301 - DNA, 15 bp, Homo sapiens
cattggacctatccc

SEQ ID NO: 1856302 - DNA, 15 bp, Homo sapiens
attggacctatccca

SEQ ID NO: 1856303 - DNA, 15 bp, Homo sapiens
ttggacctatcccaa

SEQ ID NO: 1856304 - DNA, 15 bp, Homo sapiens
tggacctatcccaag

SEQ ID NO: 1856305 - DNA, 15 bp, Homo sapiens
ggacctatcccaaga

SEQ ID NO: 1856306 - DNA, 15 bp, Homo sapiens
gacctatcccaagac

SEQ ID NO: 1856307 - DNA, 15 bp, Homo sapiens
acctatcccaagaca

SEQ ID NO: 1856308 - DNA, 15 bp, Homo sapiens
cctatcccaagacag

SEQ ID NO: 1856309 - DNA, 15 bp, Homo sapiens
ctatcccaagacagt

SEQ ID NO: 1856310 - DNA, 15 bp, Homo sapiens
tatcccaagacagtg

SEQ ID NO: 1856311 - DNA, 15 bp, Homo sapiens
atcccaagacagtgt

SEQ ID NO: 1856312 - DNA, 15 bp, Homo sapiens
tcccaagacagtgtg

SEQ ID NO: 1856313 - DNA, 15 bp, Homo sapiens
cccaagacagtgtgg

SEQ ID NO: 1856314 - DNA, 15 bp, Homo sapiens
ccaagacagtgtgga

SEQ ID NO: 1856315 - DNA, 15 bp, Homo sapiens
caagacagtgtggaa

SEQ ID NO: 1856316 - DNA, 15 bp, Homo sapiens
aagacagtgtggaat

SEQ ID NO: 1856317 - DNA, 15 bp, Homo sapiens
agacagtgtggaata

SEQ ID NO: 1856318 - DNA, 15 bp, Homo sapiens
gacagtgtggaatag

SEQ ID NO: 1856319 - DNA, 15 bp, Homo sapiens
acagtgtggaataga

SEQ ID NO: 1856320 - DNA, 15 bp, Homo sapiens
cagtgtggaatagag

SEQ ID NO: 1856321 - DNA, 15 bp, Homo sapiens
agtgtggaatagaga

SEQ ID NO: 1856322 - DNA, 15 bp, Homo sapiens
gtgtggaatagagag

SEQ ID NO: 1856323 - DNA, 15 bp, Homo sapiens
tgtggaatagagaga

SEQ ID NO: 1856324 - DNA, 15 bp, Homo sapiens
gtggaatagagagaa

SEQ ID NO: 1856325 - DNA, 15 bp, Homo sapiens
tggaatagagagaaa

SEQ ID NO: 1856326 - DNA, 15 bp, Homo sapiens
ggaatagagagaaaa

SEQ ID NO: 1856327 - DNA, 15 bp, Homo sapiens
gaatagagagaaaaa

SEQ ID NO: 1856328 - DNA, 15 bp, Homo sapiens
aatagagagaaaaaa

SEQ ID NO: 1856329 - DNA, 15 bp, Homo sapiens
atagagagaaaaaat

SEQ ID NO: 1856330 - DNA, 15 bp, Homo sapiens
tagagagaaaaaata

SEQ ID NO: 1856331 - DNA, 15 bp, Homo sapiens
agagagaaaaaatat

SEQ ID NO: 1856332 - DNA, 15 bp, Homo sapiens
gagagaaaaaatatg

SEQ ID NO: 1856333 - DNA, 15 bp, Homo sapiens
agagaaaaaatatgg

SEQ ID NO: 1856334 - DNA, 15 bp, Homo sapiens
gagaaaaaatatggc

SEQ ID NO: 1856335 - DNA, 15 bp, Homo sapiens
agaaaaaatatggcc

SEQ ID NO: 1856336 - DNA, 15 bp, Homo sapiens
gaaaaaatatggcct

SEQ ID NO: 1856337 - DNA, 15 bp, Homo sapiens
aaaaaatatggcctt

SEQ ID NO: 1856338 - DNA, 15 bp, Homo sapiens
aaaaatatggccttc

SEQ ID NO: 1856339 - DNA, 15 bp, Homo sapiens
aaaatatggccttca

SEQ ID NO: 1856340 - DNA, 15 bp, Homo sapiens
aaatatggccttcag

SEQ ID NO: 1856341 - DNA, 15 bp, Homo sapiens
aatatggccttcaga

SEQ ID NO: 1856342 - DNA, 15 bp, Homo sapiens
atatggccttcagag

SEQ ID NO: 1856343 - DNA, 15 bp, Homo sapiens
tatggccttcagagt

SEQ ID NO: 1856344 - DNA, 15 bp, Homo sapiens
atggccttcagagtt

SEQ ID NO: 1856345 - DNA, 15 bp, Homo sapiens
tggccttcagagtta

SEQ ID NO: 1856346 - DNA, 15 bp, Homo sapiens
ggccttcagagttag

SEQ ID NO: 1856347 - DNA, 15 bp, Homo sapiens
gccttcagagttaga

SEQ ID NO: 1856348 - DNA, 15 bp, Homo sapiens
ccttcagagttagaa

SEQ ID NO: 1856349 - DNA, 15 bp, Homo sapiens
cttcagagttagaat

SEQ ID NO: 1856350 - DNA, 15 bp, Homo sapiens
ttcagagttagaatg

SEQ ID NO: 1856351 - DNA, 15 bp, Homo sapiens
tcagagttagaatgg

SEQ ID NO: 1856352 - DNA, 15 bp, Homo sapiens
cagagttagaatgga

SEQ ID NO: 1856353 - DNA, 15 bp, Homo sapiens
agagttagaatggac

SEQ ID NO: 1856354 - DNA, 15 bp, Homo sapiens
gagttagaatggact

SEQ ID NO: 1856355 - DNA, 15 bp, Homo sapiens
agttagaatggacta

SEQ ID NO: 1856356 - DNA, 15 bp, Homo sapiens
gttagaatggactag

SEQ ID NO: 1856357 - DNA, 15 bp, Homo sapiens
ttagaatggactaga

SEQ ID NO: 1856358 - DNA, 15 bp, Homo sapiens
tagaatggactagat

SEQ ID NO: 1856359 - DNA, 15 bp, Homo sapiens
agaatggactagatt

SEQ ID NO: 1856360 - DNA, 15 bp, Homo sapiens
gaatggactagattg

SEQ ID NO: 1856361 - DNA, 15 bp, Homo sapiens
aatggactagattga

SEQ ID NO: 1856362 - DNA, 15 bp, Homo sapiens
atggactagattgaa

SEQ ID NO: 1856363 - DNA, 15 bp, Homo sapiens
tggactagattgaaa

SEQ ID NO: 1856364 - DNA, 15 bp, Homo sapiens
ggactagattgaaat

SEQ ID NO: 1856365 - DNA, 15 bp, Homo sapiens
gactagattgaaatt

SEQ ID NO: 1856366 - DNA, 15 bp, Homo sapiens
actagattgaaattt

SEQ ID NO: 1856367 - DNA, 15 bp, Homo sapiens
ctagattgaaatttc

SEQ ID NO: 1856368 - DNA, 15 bp, Homo sapiens
tagattgaaatttca

SEQ ID NO: 1856369 - DNA, 15 bp, Homo sapiens
agattgaaatttcag

SEQ ID NO: 1856370 - DNA, 15 bp, Homo sapiens
gattgaaatttcagc

SEQ ID NO: 1856371 - DNA, 15 bp, Homo sapiens
attgaaatttcagct

SEQ ID NO: 1856372 - DNA, 15 bp, Homo sapiens
ttgaaatttcagctc

SEQ ID NO: 1856373 - DNA, 15 bp, Homo sapiens
tgaaatttcagctct

SEQ ID NO: 1856374 - DNA, 15 bp, Homo sapiens
gaaatttcagctctg

SEQ ID NO: 1856375 - DNA, 15 bp, Homo sapiens
aaatttcagctctgc

SEQ ID NO: 1856376 - DNA, 15 bp, Homo sapiens
aatttcagctctgcc

SEQ ID NO: 1856377 - DNA, 15 bp, Homo sapiens
atttcagctctgcca

SEQ ID NO: 1856378 - DNA, 15 bp, Homo sapiens
tttcagctctgccac

SEQ ID NO: 1856379 - DNA, 15 bp, Homo sapiens
ttcagctctgccact

SEQ ID NO: 1856380 - DNA, 15 bp, Homo sapiens
tcagctctgccactt

SEQ ID NO: 1856381 - DNA, 15 bp, Homo sapiens
cagctctgccactta

SEQ ID NO: 1856382 - DNA, 15 bp, Homo sapiens
agctctgccacttac

SEQ ID NO: 1856383 - DNA, 15 bp, Homo sapiens
gctctgccacttaca

SEQ ID NO: 1856384 - DNA, 15 bp, Homo sapiens
ctctgccacttacaa

SEQ ID NO: 1856385 - DNA, 15 bp, Homo sapiens
tctgccacttacaag

SEQ ID NO: 1856386 - DNA, 15 bp, Homo sapiens
ctgccacttacaaga

SEQ ID NO: 1856387 - DNA, 15 bp, Homo sapiens
tgccacttacaagat

SEQ ID NO: 1856388 - DNA, 15 bp, Homo sapiens
gccacttacaagatg

SEQ ID NO: 1856389 - DNA, 15 bp, Homo sapiens
ccacttacaagatgg

SEQ ID NO: 1856390 - DNA, 15 bp, Homo sapiens
cacttacaagatggg

SEQ ID NO: 1856391 - DNA, 15 bp, Homo sapiens
acttacaagatgggt

SEQ ID NO: 1856392 - DNA, 15 bp, Homo sapiens
cttacaagatgggta

SEQ ID NO: 1856393 - DNA, 15 bp, Homo sapiens
ttacaagatgggtaa

SEQ ID NO: 1856394 - DNA, 15 bp, Homo sapiens
tacaagatgggtaat

SEQ ID NO: 1856395 - DNA, 15 bp, Homo sapiens
acaagatgggtaatc

SEQ ID NO: 1856396 - DNA, 15 bp, Homo sapiens
caagatgggtaatct

SEQ ID NO: 1856397 - DNA, 15 bp, Homo sapiens
aagatgggtaatctt

SEQ ID NO: 1856398 - DNA, 15 bp, Homo sapiens
agatgggtaatcttg

SEQ ID NO: 1856399 - DNA, 15 bp, Homo sapiens
gatgggtaatcttgg

SEQ ID NO: 1856400 - DNA, 15 bp, Homo sapiens
atgggtaatcttgga

SEQ ID NO: 1856401 - DNA, 15 bp, Homo sapiens
tgggtaatcttggaa

SEQ ID NO: 1856402 - DNA, 15 bp, Homo sapiens
gggtaatcttggaaa

SEQ ID NO: 1856403 - DNA, 15 bp, Homo sapiens
ggtaatcttggaaaa

SEQ ID NO: 1856404 - DNA, 15 bp, Homo sapiens
gtaatcttggaaaat

SEQ ID NO: 1856405 - DNA, 15 bp, Homo sapiens
taatcttggaaaatt

SEQ ID NO: 1856406 - DNA, 15 bp, Homo sapiens
aatcttggaaaatta

SEQ ID NO: 1856407 - DNA, 15 bp, Homo sapiens
atcttggaaaattac

SEQ ID NO: 1856408 - DNA, 15 bp, Homo sapiens
tcttggaaaattacc

SEQ ID NO: 1856409 - DNA, 15 bp, Homo sapiens
cttggaaaattaccc

SEQ ID NO: 1856410 - DNA, 15 bp, Homo sapiens
ttggaaaattaccca

SEQ ID NO: 1856411 - DNA, 15 bp, Homo sapiens
tggaaaattacccaa

SEQ ID NO: 1856412 - DNA, 15 bp, Homo sapiens
ggaaaattacccaat

SEQ ID NO: 1856413 - DNA, 15 bp, Homo sapiens
gaaaattacccaatc

SEQ ID NO: 1856414 - DNA, 15 bp, Homo sapiens
aaaattacccaatct

SEQ ID NO: 1856415 - DNA, 15 bp, Homo sapiens
aaattacccaatctc

SEQ ID NO: 1856416 - DNA, 15 bp, Homo sapiens
aattacccaatctct

SEQ ID NO: 1856417 - DNA, 15 bp, Homo sapiens
attacccaatctctc

SEQ ID NO: 1856418 - DNA, 15 bp, Homo sapiens
ttacccaatctctct

SEQ ID NO: 1856419 - DNA, 15 bp, Homo sapiens
tacccaatctctctg

SEQ ID NO: 1856420 - DNA, 15 bp, Homo sapiens
acccaatctctctga

SEQ ID NO: 1856421 - DNA, 15 bp, Homo sapiens
cccaatctctctgag

SEQ ID NO: 1856422 - DNA, 15 bp, Homo sapiens
ccaatctctctgagc

SEQ ID NO: 1856423 - DNA, 15 bp, Homo sapiens
caatctctctgagcc

SEQ ID NO: 1856424 - DNA, 15 bp, Homo sapiens
aatctctctgagcct

SEQ ID NO: 1856425 - DNA, 15 bp, Homo sapiens
atctctctgagcctc

SEQ ID NO: 1856426 - DNA, 15 bp, Homo sapiens
tctctctgagcctca

SEQ ID NO: 1856427 - DNA, 15 bp, Homo sapiens
ctctctgagcctcat

SEQ ID NO: 1856428 - DNA, 15 bp, Homo sapiens
tctctgagcctcatg

SEQ ID NO: 1856429 - DNA, 15 bp, Homo sapiens
ctctgagcctcatga

SEQ ID NO: 1856430 - DNA, 15 bp, Homo sapiens
tctgagcctcatgac

SEQ ID NO: 1856431 - DNA, 15 bp, Homo sapiens
ctgagcctcatgaca

SEQ ID NO: 1856432 - DNA, 15 bp, Homo sapiens
tgagcctcatgacat

SEQ ID NO: 1856433 - DNA, 15 bp, Homo sapiens
gagcctcatgacatt

SEQ ID NO: 1856434 - DNA, 15 bp, Homo sapiens
agcctcatgacattc

SEQ ID NO: 1856435 - DNA, 15 bp, Homo sapiens
gcctcatgacattcc

SEQ ID NO: 1856436 - DNA, 15 bp, Homo sapiens
cctcatgacattcct

SEQ ID NO: 1856437 - DNA, 15 bp, Homo sapiens
ctcatgacattccta

SEQ ID NO: 1856438 - DNA, 15 bp, Homo sapiens
tcatgacattcctac

SEQ ID NO: 1856439 - DNA, 15 bp, Homo sapiens
catgacattcctacc

SEQ ID NO: 1856440 - DNA, 15 bp, Homo sapiens
atgacattcctacct

SEQ ID NO: 1856441 - DNA, 15 bp, Homo sapiens
tgacattcctacctt

SEQ ID NO: 1856442 - DNA, 15 bp, Homo sapiens
gacattcctaccttg

SEQ ID NO: 1856443 - DNA, 15 bp, Homo sapiens
acattcctaccttgc

SEQ ID NO: 1856444 - DNA, 15 bp, Homo sapiens
cattcctaccttgca

SEQ ID NO: 1856445 - DNA, 15 bp, Homo sapiens
attcctaccttgcag

SEQ ID NO: 1856446 - DNA, 15 bp, Homo sapiens
gaagccgggttgccc

SEQ ID NO: 1856447 - DNA, 15 bp, Homo sapiens
aagccgggttgccca

SEQ ID NO: 1856448 - DNA, 15 bp, Homo sapiens
agccgggttgcccag

SEQ ID NO: 1856449 - DNA, 15 bp, Homo sapiens
gccgggttgcccagc

SEQ ID NO: 1856450 - DNA, 15 bp, Homo sapiens
ccgggttgcccagca

SEQ ID NO: 1856451 - DNA, 15 bp, Homo sapiens
cgggttgcccagcat

SEQ ID NO: 1856452 - DNA, 15 bp, Homo sapiens
gggttgcccagcatc

SEQ ID NO: 1856453 - DNA, 15 bp, Homo sapiens
ggttgcccagcatcc

SEQ ID NO: 1856454 - DNA, 15 bp, Homo sapiens
gttgcccagcatcct

SEQ ID NO: 1856455 - DNA, 15 bp, Homo sapiens
ttgcccagcatcctt

SEQ ID NO: 1856456 - DNA, 15 bp, Homo sapiens
tgcccagcatccttg

SEQ ID NO: 1856457 - DNA, 15 bp, Homo sapiens
gcccagcatccttgc

SEQ ID NO: 1856458 - DNA, 15 bp, Homo sapiens
cccagcatccttgct

SEQ ID NO: 1856459 - DNA, 15 bp, Homo sapiens
ccagcatccttgctc

SEQ ID NO: 1856460 - DNA, 15 bp, Homo sapiens
cagcatccttgctct

SEQ ID NO: 1856461 - DNA, 15 bp, Homo sapiens
agcatccttgctctc

SEQ ID NO: 1856462 - DNA, 15 bp, Homo sapiens
gcatccttgctctca

SEQ ID NO: 1856463 - DNA, 15 bp, Homo sapiens
catccttgctctcag

SEQ ID NO: 1856464 - DNA, 15 bp, Homo sapiens
atccttgctctcaga

SEQ ID NO: 1856465 - DNA, 15 bp, Homo sapiens
tccttgctctcagag

SEQ ID NO: 1856466 - DNA, 15 bp, Homo sapiens
ccttgctctcagagc

SEQ ID NO: 1856467 - DNA, 15 bp, Homo sapiens
cttgctctcagagcc

SEQ ID NO: 1856468 - DNA, 15 bp, Homo sapiens
ttgctctcagagccc

SEQ ID NO: 1856469 - DNA, 15 bp, Homo sapiens
tgctctcagagcccc

SEQ ID NO: 1856470 - DNA, 15 bp, Homo sapiens
gctctcagagcccca

SEQ ID NO: 1856471 - DNA, 15 bp, Homo sapiens
ctctcagagccccac

SEQ ID NO: 1856472 - DNA, 15 bp, Homo sapiens
tctcagagccccact

SEQ ID NO: 1856473 - DNA, 15 bp, Homo sapiens
ctcagagccccactt

SEQ ID NO: 1856474 - DNA, 15 bp, Homo sapiens
tcagagccccacttg

SEQ ID NO: 1856475 - DNA, 15 bp, Homo sapiens
cagagccccacttga

SEQ ID NO: 1856476 - DNA, 15 bp, Homo sapiens
agagccccacttgat

SEQ ID NO: 1856477 - DNA, 15 bp, Homo sapiens
gagccccacttgatg

SEQ ID NO: 1856478 - DNA, 15 bp, Homo sapiens
agccccacttgatga

SEQ ID NO: 1856479 - DNA, 15 bp, Homo sapiens
gccccacttgatgac

SEQ ID NO: 1856480 - DNA, 15 bp, Homo sapiens
ccccacttgatgacc

SEQ ID NO: 1856481 - DNA, 15 bp, Homo sapiens
cccacttgatgacct

SEQ ID NO: 1856482 - DNA, 15 bp, Homo sapiens
ccacttgatgacctt

SEQ ID NO: 1856483 - DNA, 15 bp, Homo sapiens
cacttgatgaccttc

SEQ ID NO: 1856484 - DNA, 15 bp, Homo sapiens
acttgatgaccttct

SEQ ID NO: 1856485 - DNA, 15 bp, Homo sapiens
cttgatgaccttctt

SEQ ID NO: 1856486 - DNA, 15 bp, Homo sapiens
ttgatgaccttctta

SEQ ID NO: 1856487 - DNA, 15 bp, Homo sapiens
tgatgaccttcttag

SEQ ID NO: 1856488 - DNA, 15 bp, Homo sapiens
gatgaccttcttagg

SEQ ID NO: 1856489 - DNA, 15 bp, Homo sapiens
atgaccttcttaggg

SEQ ID NO: 1856490 - DNA, 15 bp, Homo sapiens
tgaccttcttagggg

SEQ ID NO: 1856491 - DNA, 15 bp, Homo sapiens
gaccttcttaggggt

SEQ ID NO: 1856492 - DNA, 15 bp, Homo sapiens
accttcttaggggtt

SEQ ID NO: 1856493 - DNA, 15 bp, Homo sapiens
ccttcttaggggtta

SEQ ID NO: 1856494 - DNA, 15 bp, Homo sapiens
cttcttaggggttag

SEQ ID NO: 1856495 - DNA, 15 bp, Homo sapiens
ttcttaggggttagt

SEQ ID NO: 1856496 - DNA, 15 bp, Homo sapiens
tcttaggggttagtg

SEQ ID NO: 1856497 - DNA, 15 bp, Homo sapiens
cttaggggttagtgc

SEQ ID NO: 1856498 - DNA, 15 bp, Homo sapiens
ttaggggttagtgcc

SEQ ID NO: 1856499 - DNA, 15 bp, Homo sapiens
taggggttagtgcct

SEQ ID NO: 1856500 - DNA, 15 bp, Homo sapiens
aggggttagtgccta

SEQ ID NO: 1856501 - DNA, 15 bp, Homo sapiens
ggggttagtgcctat

SEQ ID NO: 1856502 - DNA, 15 bp, Homo sapiens
gggttagtgcctatc

SEQ ID NO: 1856503 - DNA, 15 bp, Homo sapiens
ggttagtgcctatca

SEQ ID NO: 1856504 - DNA, 15 bp, Homo sapiens
gttagtgcctatcag

SEQ ID NO: 1856505 - DNA, 15 bp, Homo sapiens
ttagtgcctatcagg

SEQ ID NO: 1856506 - DNA, 15 bp, Homo sapiens
tagtgcctatcagga

SEQ ID NO: 1856507 - DNA, 15 bp, Homo sapiens
agtgcctatcaggag

SEQ ID NO: 1856508 - DNA, 15 bp, Homo sapiens
gtgcctatcaggagg

SEQ ID NO: 1856509 - DNA, 15 bp, Homo sapiens
tgcctatcaggaggc

SEQ ID NO: 1856510 - DNA, 15 bp, Homo sapiens
gcctatcaggaggct

SEQ ID NO: 1856511 - DNA, 15 bp, Homo sapiens
cctatcaggaggctg

SEQ ID NO: 1856512 - DNA, 15 bp, Homo sapiens
ctatcaggaggctgt

SEQ ID NO: 1856513 - DNA, 15 bp, Homo sapiens
tatcaggaggctgtt

SEQ ID NO: 1856514 - DNA, 15 bp, Homo sapiens
atcaggaggctgttt

SEQ ID NO: 1856515 - DNA, 15 bp, Homo sapiens
tcaggaggctgtttt

SEQ ID NO: 1856516 - DNA, 15 bp, Homo sapiens
caggaggctgttttg

SEQ ID NO: 1856517 - DNA, 15 bp, Homo sapiens
aggaggctgttttga

SEQ ID NO: 1856518 - DNA, 15 bp, Homo sapiens
ggaggctgttttgag

SEQ ID NO: 1856519 - DNA, 15 bp, Homo sapiens
gaggctgttttgaga

SEQ ID NO: 1856520 - DNA, 15 bp, Homo sapiens
aggctgttttgagag

SEQ ID NO: 1856521 - DNA, 15 bp, Homo sapiens
ggctgttttgagagt

SEQ ID NO: 1856522 - DNA, 15 bp, Homo sapiens
gctgttttgagagta

SEQ ID NO: 1856523 - DNA, 15 bp, Homo sapiens
ctgttttgagagtat

SEQ ID NO: 1856524 - DNA, 15 bp, Homo sapiens
tgttttgagagtatc

SEQ ID NO: 1856525 - DNA, 15 bp, Homo sapiens
gttttgagagtatct

SEQ ID NO: 1856526 - DNA, 15 bp, Homo sapiens
ttttgagagtatctg

SEQ ID NO: 1856527 - DNA, 15 bp, Homo sapiens
tttgagagtatctgt

SEQ ID NO: 1856528 - DNA, 15 bp, Homo sapiens
ttgagagtatctgtg

SEQ ID NO: 1856529 - DNA, 15 bp, Homo sapiens
tgagagtatctgtgg

SEQ ID NO: 1856530 - DNA, 15 bp, Homo sapiens
gagagtatctgtggg

SEQ ID NO: 1856531 - DNA, 15 bp, Homo sapiens
agagtatctgtgggg

SEQ ID NO: 1856532 - DNA, 15 bp, Homo sapiens
gagtatctgtgggga

SEQ ID NO: 1856533 - DNA, 15 bp, Homo sapiens
agtatctgtggggaa

SEQ ID NO: 1856534 - DNA, 15 bp, Homo sapiens
gtatctgtggggaag

SEQ ID NO: 1856535 - DNA, 15 bp, Homo sapiens
tatctgtggggaaga

SEQ ID NO: 1856536 - DNA, 15 bp, Homo sapiens
atctgtggggaagaa

SEQ ID NO: 1856537 - DNA, 15 bp, Homo sapiens
tctgtggggaagaag

SEQ ID NO: 1856538 - DNA, 15 bp, Homo sapiens
ctgtggggaagaagg

SEQ ID NO: 1856539 - DNA, 15 bp, Homo sapiens
tgtggggaagaaggg

SEQ ID NO: 1856540 - DNA, 15 bp, Homo sapiens
gtggggaagaagggc

SEQ ID NO: 1856541 - DNA, 15 bp, Homo sapiens
tggggaagaagggct

SEQ ID NO: 1856542 - DNA, 15 bp, Homo sapiens
ggggaagaagggctc

SEQ ID NO: 1856543 - DNA, 15 bp, Homo sapiens
gggaagaagggctca

SEQ ID NO: 1856544 - DNA, 15 bp, Homo sapiens
ggaagaagggctcag

SEQ ID NO: 1856545 - DNA, 15 bp, Homo sapiens
gaagaagggctcaga

SEQ ID NO: 1856546 - DNA, 15 bp, Homo sapiens
aagaagggctcagat

SEQ ID NO: 1856547 - DNA, 15 bp, Homo sapiens
agaagggctcagatt

SEQ ID NO: 1856548 - DNA, 15 bp, Homo sapiens
gaagggctcagattt

SEQ ID NO: 1856549 - DNA, 15 bp, Homo sapiens
aagggctcagattta

SEQ ID NO: 1856550 - DNA, 15 bp, Homo sapiens
agggctcagatttaa

SEQ ID NO: 1856551 - DNA, 15 bp, Homo sapiens
gggctcagatttaaa

SEQ ID NO: 1856552 - DNA, 15 bp, Homo sapiens
ggctcagatttaaaa

SEQ ID NO: 1856553 - DNA, 15 bp, Homo sapiens
gctcagatttaaaac

SEQ ID NO: 1856554 - DNA, 15 bp, Homo sapiens
ctcagatttaaaact

SEQ ID NO: 1856555 - DNA, 15 bp, Homo sapiens
tcagatttaaaactg

SEQ ID NO: 1856556 - DNA, 15 bp, Homo sapiens
cagatttaaaactga

SEQ ID NO: 1856557 - DNA, 15 bp, Homo sapiens
agatttaaaactgat

SEQ ID NO: 1856558 - DNA, 15 bp, Homo sapiens
gatttaaaactgatt

SEQ ID NO: 1856559 - DNA, 15 bp, Homo sapiens
atttaaaactgattc

SEQ ID NO: 1856560 - DNA, 15 bp, Homo sapiens
tttaaaactgattct

SEQ ID NO: 1856561 - DNA, 15 bp, Homo sapiens
ttaaaactgattcta

SEQ ID NO: 1856562 - DNA, 15 bp, Homo sapiens
taaaactgattctaa

SEQ ID NO: 1856563 - DNA, 15 bp, Homo sapiens
aaaactgattctaag

SEQ ID NO: 1856564 - DNA, 15 bp, Homo sapiens
aaactgattctaagt

SEQ ID NO: 1856565 - DNA, 15 bp, Homo sapiens
aactgattctaagtc

SEQ ID NO: 1856566 - DNA, 15 bp, Homo sapiens
actgattctaagtca

SEQ ID NO: 1856567 - DNA, 15 bp, Homo sapiens
ctgattctaagtcaa

SEQ ID NO: 1856568 - DNA, 15 bp, Homo sapiens
tgattctaagtcaac

SEQ ID NO: 1856569 - DNA, 15 bp, Homo sapiens
gattctaagtcaaca

SEQ ID NO: 1856570 - DNA, 15 bp, Homo sapiens
attctaagtcaacaa

SEQ ID NO: 1856571 - DNA, 15 bp, Homo sapiens
ttctaagtcaacaat

SEQ ID NO: 1856572 - DNA, 15 bp, Homo sapiens
tctaagtcaacaatt

SEQ ID NO: 1856573 - DNA, 15 bp, Homo sapiens
ctaagtcaacaattc

SEQ ID NO: 1856574 - DNA, 15 bp, Homo sapiens
taagtcaacaattca

SEQ ID NO: 1856575 - DNA, 15 bp, Homo sapiens
aagtcaacaattcaa

SEQ ID NO: 1856576 - DNA, 15 bp, Homo sapiens
agtcaacaattcaaa

SEQ ID NO: 1856577 - DNA, 15 bp, Homo sapiens
gtcaacaattcaaaa

SEQ ID NO: 1856578 - DNA, 15 bp, Homo sapiens
tcaacaattcaaaaa

SEQ ID NO: 1856579 - DNA, 15 bp, Homo sapiens
caacaattcaaaaat

SEQ ID NO: 1856580 - DNA, 15 bp, Homo sapiens
aacaattcaaaaata

SEQ ID NO: 1856581 - DNA, 15 bp, Homo sapiens
acaattcaaaaatat

SEQ ID NO: 1856582 - DNA, 15 bp, Homo sapiens
caattcaaaaatata

SEQ ID NO: 1856583 - DNA, 15 bp, Homo sapiens
aattcaaaaatataa

SEQ ID NO: 1856584 - DNA, 15 bp, Homo sapiens
attcaaaaatataaa

SEQ ID NO: 1856585 - DNA, 15 bp, Homo sapiens
ttcaaaaatataaac

SEQ ID NO: 1856586 - DNA, 15 bp, Homo sapiens
tcaaaaatataaaca

SEQ ID NO: 1856587 - DNA, 15 bp, Homo sapiens
caaaaatataaacaa

SEQ ID NO: 1856588 - DNA, 15 bp, Homo sapiens
aaaaatataaacaag

SEQ ID NO: 1856589 - DNA, 15 bp, Homo sapiens
aaaatataaacaagg

SEQ ID NO: 1856590 - DNA, 15 bp, Homo sapiens
aaatataaacaaggg

SEQ ID NO: 1856591 - DNA, 15 bp, Homo sapiens
aatataaacaaggga

SEQ ID NO: 1856592 - DNA, 15 bp, Homo sapiens
atataaacaagggaa

SEQ ID NO: 1856593 - DNA, 15 bp, Homo sapiens
tataaacaagggaat

SEQ ID NO: 1856594 - DNA, 15 bp, Homo sapiens
ataaacaagggaatt

SEQ ID NO: 1856595 - DNA, 15 bp, Homo sapiens
taaacaagggaattt

SEQ ID NO: 1856596 - DNA, 15 bp, Homo sapiens
aaacaagggaatttg

SEQ ID NO: 1856597 - DNA, 15 bp, Homo sapiens
aacaagggaatttgt

SEQ ID NO: 1856598 - DNA, 15 bp, Homo sapiens
acaagggaatttgtg

SEQ ID NO: 1856599 - DNA, 15 bp, Homo sapiens
caagggaatttgtgg

SEQ ID NO: 1856600 - DNA, 15 bp, Homo sapiens
aagggaatttgtggt

SEQ ID NO: 1856601 - DNA, 15 bp, Homo sapiens
agggaatttgtggtt

SEQ ID NO: 1856602 - DNA, 15 bp, Homo sapiens
gggaatttgtggttg

SEQ ID NO: 1856603 - DNA, 15 bp, Homo sapiens
ggaatttgtggttgc

SEQ ID NO: 1856604 - DNA, 15 bp, Homo sapiens
gaatttgtggttgct

SEQ ID NO: 1856605 - DNA, 15 bp, Homo sapiens
aatttgtggttgctc

SEQ ID NO: 1856606 - DNA, 15 bp, Homo sapiens
atttgtggttgctct

SEQ ID NO: 1856607 - DNA, 15 bp, Homo sapiens
tttgtggttgctctc

SEQ ID NO: 1856608 - DNA, 15 bp, Homo sapiens
ttgtggttgctctca

SEQ ID NO: 1856609 - DNA, 15 bp, Homo sapiens
tgtggttgctctcac

SEQ ID NO: 1856610 - DNA, 15 bp, Homo sapiens
gtggttgctctcaca

SEQ ID NO: 1856611 - DNA, 15 bp, Homo sapiens
tggttgctctcacaa

SEQ ID NO: 1856612 - DNA, 15 bp, Homo sapiens
ggttgctctcacaat

SEQ ID NO: 1856613 - DNA, 15 bp, Homo sapiens
gttgctctcacaatt

SEQ ID NO: 1856614 - DNA, 15 bp, Homo sapiens
ttgctctcacaatta

SEQ ID NO: 1856615 - DNA, 15 bp, Homo sapiens
tgctctcacaattaa

SEQ ID NO: 1856616 - DNA, 15 bp, Homo sapiens
gctctcacaattaat

SEQ ID NO: 1856617 - DNA, 15 bp, Homo sapiens
ctctcacaattaatt

SEQ ID NO: 1856618 - DNA, 15 bp, Homo sapiens
tctcacaattaattt

SEQ ID NO: 1856619 - DNA, 15 bp, Homo sapiens
ctcacaattaatttg

SEQ ID NO: 1856620 - DNA, 15 bp, Homo sapiens
tcacaattaatttgg

SEQ ID NO: 1856621 - DNA, 15 bp, Homo sapiens
cacaattaatttgga

SEQ ID NO: 1856622 - DNA, 15 bp, Homo sapiens
acaattaatttggac

SEQ ID NO: 1856623 - DNA, 15 bp, Homo sapiens
caattaatttggacc

SEQ ID NO: 1856624 - DNA, 15 bp, Homo sapiens
aattaatttggacca

SEQ ID NO: 1856625 - DNA, 15 bp, Homo sapiens
attaatttggaccag

SEQ ID NO: 1856626 - DNA, 15 bp, Homo sapiens
ttaatttggaccagc

SEQ ID NO: 1856627 - DNA, 15 bp, Homo sapiens
taatttggaccagca

SEQ ID NO: 1856628 - DNA, 15 bp, Homo sapiens
aatttggaccagcag

SEQ ID NO: 1856629 - DNA, 15 bp, Homo sapiens
atttggaccagcagc

SEQ ID NO: 1856630 - DNA, 15 bp, Homo sapiens
tttggaccagcagcc

SEQ ID NO: 1856631 - DNA, 15 bp, Homo sapiens
ttggaccagcagccc

SEQ ID NO: 1856632 - DNA, 15 bp, Homo sapiens
tggaccagcagccca

SEQ ID NO: 1856633 - DNA, 15 bp, Homo sapiens
ggaccagcagcccac

SEQ ID NO: 1856634 - DNA, 15 bp, Homo sapiens
gaccagcagcccact

SEQ ID NO: 1856635 - DNA, 15 bp, Homo sapiens
accagcagcccactg

SEQ ID NO: 1856636 - DNA, 15 bp, Homo sapiens
ccagcagcccactgg

SEQ ID NO: 1856637 - DNA, 15 bp, Homo sapiens
cagcagcccactgga

SEQ ID NO: 1856638 - DNA, 15 bp, Homo sapiens
agcagcccactggag

SEQ ID NO: 1856639 - DNA, 15 bp, Homo sapiens
gcagcccactggaga

SEQ ID NO: 1856640 - DNA, 15 bp, Homo sapiens
cagcccactggagac

SEQ ID NO: 1856641 - DNA, 15 bp, Homo sapiens
agcccactggagaca

SEQ ID NO: 1856642 - DNA, 15 bp, Homo sapiens
gcccactggagacat

SEQ ID NO: 1856643 - DNA, 15 bp, Homo sapiens
cccactggagacatt

SEQ ID NO: 1856644 - DNA, 15 bp, Homo sapiens
ccactggagacattg

SEQ ID NO: 1856645 - DNA, 15 bp, Homo sapiens
cactggagacattgc

SEQ ID NO: 1856646 - DNA, 15 bp, Homo sapiens
actggagacattgct

SEQ ID NO: 1856647 - DNA, 15 bp, Homo sapiens
ctggagacattgctg

SEQ ID NO: 1856648 - DNA, 15 bp, Homo sapiens
tggagacattgctgg

SEQ ID NO: 1856649 - DNA, 15 bp, Homo sapiens
ggagacattgctggg

SEQ ID NO: 1856650 - DNA, 15 bp, Homo sapiens
gagacattgctggga

SEQ ID NO: 1856651 - DNA, 15 bp, Homo sapiens
agacattgctgggaa

SEQ ID NO: 1856652 - DNA, 15 bp, Homo sapiens
gacattgctgggaac

SEQ ID NO: 1856653 - DNA, 15 bp, Homo sapiens
acattgctgggaacc

SEQ ID NO: 1856654 - DNA, 15 bp, Homo sapiens
cattgctgggaaccc

SEQ ID NO: 1856655 - DNA, 15 bp, Homo sapiens
attgctgggaacccc

SEQ ID NO: 1856656 - DNA, 15 bp, Homo sapiens
ttgctgggaacccca

SEQ ID NO: 1856657 - DNA, 15 bp, Homo sapiens
tgctgggaaccccaa

SEQ ID NO: 1856658 - DNA, 15 bp, Homo sapiens
gctgggaaccccaag

SEQ ID NO: 1856659 - DNA, 15 bp, Homo sapiens
ctgggaaccccaagg

SEQ ID NO: 1856660 - DNA, 15 bp, Homo sapiens
tgggaaccccaagga

SEQ ID NO: 1856661 - DNA, 15 bp, Homo sapiens
gggaaccccaaggaa

SEQ ID NO: 1856662 - DNA, 15 bp, Homo sapiens
ggaaccccaaggaat

SEQ ID NO: 1856663 - DNA, 15 bp, Homo sapiens
gaaccccaaggaatg

SEQ ID NO: 1856664 - DNA, 15 bp, Homo sapiens
aaccccaaggaatgt

SEQ ID NO: 1856665 - DNA, 15 bp, Homo sapiens
accccaaggaatgta

SEQ ID NO: 1856666 - DNA, 15 bp, Homo sapiens
ccccaaggaatgtag

SEQ ID NO: 1856667 - DNA, 15 bp, Homo sapiens
cccaaggaatgtagg

SEQ ID NO: 1856668 - DNA, 15 bp, Homo sapiens
ccaaggaatgtaggg

SEQ ID NO: 1856669 - DNA, 15 bp, Homo sapiens
caaggaatgtaggga

SEQ ID NO: 1856670 - DNA, 15 bp, Homo sapiens
aaggaatgtagggat

SEQ ID NO: 1856671 - DNA, 15 bp, Homo sapiens
aggaatgtagggatt

SEQ ID NO: 1856672 - DNA, 15 bp, Homo sapiens
ggaatgtagggattt

SEQ ID NO: 1856673 - DNA, 15 bp, Homo sapiens
gaatgtagggattta

SEQ ID NO: 1856674 - DNA, 15 bp, Homo sapiens
aatgtagggatttaa

SEQ ID NO: 1856675 - DNA, 15 bp, Homo sapiens
atgtagggatttaaa

SEQ ID NO: 1856676 - DNA, 15 bp, Homo sapiens
tgtagggatttaaaa

SEQ ID NO: 1856677 - DNA, 15 bp, Homo sapiens
gtagggatttaaaaa

SEQ ID NO: 1856678 - DNA, 15 bp, Homo sapiens
tagggatttaaaaaa

SEQ ID NO: 1856679 - DNA, 15 bp, Homo sapiens
agggatttaaaaaaa

SEQ ID NO: 1856680 - DNA, 15 bp, Homo sapiens
gggatttaaaaaaaa

SEQ ID NO: 1856681 - DNA, 15 bp, Homo sapiens
ggatttaaaaaaaaa

SEQ ID NO: 1856682 - DNA, 15 bp, Homo sapiens
gatttaaaaaaaaag

SEQ ID NO: 1856683 - DNA, 15 bp, Homo sapiens
ttaaaaaaaaagtca

SEQ ID NO: 1856684 - DNA, 15 bp, Homo sapiens
taaaaaaaaagtcat

SEQ ID NO: 1856685 - DNA, 15 bp, Homo sapiens
aaaaaaaaagtcatt

SEQ ID NO: 1856686 - DNA, 15 bp, Homo sapiens
aaaaaaaagtcattg

SEQ ID NO: 1856687 - DNA, 15 bp, Homo sapiens
aaaaaaagtcattga

SEQ ID NO: 1856688 - DNA, 15 bp, Homo sapiens
aaaaaagtcattgaa

SEQ ID NO: 1856689 - DNA, 15 bp, Homo sapiens
aaaaagtcattgaaa

SEQ ID NO: 1856690 - DNA, 15 bp, Homo sapiens
aaaagtcattgaaac

SEQ ID NO: 1856691 - DNA, 15 bp, Homo sapiens
aaagtcattgaaact

SEQ ID NO: 1856692 - DNA, 15 bp, Homo sapiens
aagtcattgaaactt

SEQ ID NO: 1856693 - DNA, 15 bp, Homo sapiens
agtcattgaaactta

SEQ ID NO: 1856694 - DNA, 15 bp, Homo sapiens
gtcattgaaacttag

SEQ ID NO: 1856695 - DNA, 15 bp, Homo sapiens
tcattgaaacttaga

SEQ ID NO: 1856696 - DNA, 15 bp, Homo sapiens
cattgaaacttagac

SEQ ID NO: 1856697 - DNA, 15 bp, Homo sapiens
attgaaacttagacc

SEQ ID NO: 1856698 - DNA, 15 bp, Homo sapiens
ttgaaacttagacca

SEQ ID NO: 1856699 - DNA, 15 bp, Homo sapiens
tgaaacttagaccac

SEQ ID NO: 1856700 - DNA, 15 bp, Homo sapiens
gaaacttagaccaca

SEQ ID NO: 1856701 - DNA, 15 bp, Homo sapiens
aaacttagaccacaa

SEQ ID NO: 1856702 - DNA, 15 bp, Homo sapiens
aacttagaccacaat

SEQ ID NO: 1856703 - DNA, 15 bp, Homo sapiens
acttagaccacaatc

SEQ ID NO: 1856704 - DNA, 15 bp, Homo sapiens
cttagaccacaatca

SEQ ID NO: 1856705 - DNA, 15 bp, Homo sapiens
ttagaccacaatcac

SEQ ID NO: 1856706 - DNA, 15 bp, Homo sapiens
tagaccacaatcact

SEQ ID NO: 1856707 - DNA, 15 bp, Homo sapiens
agaccacaatcactg

SEQ ID NO: 1856708 - DNA, 15 bp, Homo sapiens
gaccacaatcactgg

SEQ ID NO: 1856709 - DNA, 15 bp, Homo sapiens
accacaatcactggg

SEQ ID NO: 1856710 - DNA, 15 bp, Homo sapiens
ccacaatcactgggt

SEQ ID NO: 1856711 - DNA, 15 bp, Homo sapiens
cacaatcactgggtc

SEQ ID NO: 1856712 - DNA, 15 bp, Homo sapiens
acaatcactgggtcc

SEQ ID NO: 1856713 - DNA, 15 bp, Homo sapiens
caatcactgggtccc

SEQ ID NO: 1856714 - DNA, 15 bp, Homo sapiens
aatcactgggtccca

SEQ ID NO: 1856715 - DNA, 15 bp, Homo sapiens
atcactgggtcccaa

SEQ ID NO: 1856716 - DNA, 15 bp, Homo sapiens
tcactgggtcccaac

SEQ ID NO: 1856717 - DNA, 15 bp, Homo sapiens
cactgggtcccaaca

SEQ ID NO: 1856718 - DNA, 15 bp, Homo sapiens
actgggtcccaacag

SEQ ID NO: 1856719 - DNA, 15 bp, Homo sapiens
ctgggtcccaacagg

SEQ ID NO: 1856720 - DNA, 15 bp, Homo sapiens
tgggtcccaacaggc

SEQ ID NO: 1856721 - DNA, 15 bp, Homo sapiens
gggtcccaacaggct

SEQ ID NO: 1856722 - DNA, 15 bp, Homo sapiens
ggtcccaacaggctc

SEQ ID NO: 1856723 - DNA, 15 bp, Homo sapiens
gtcccaacaggctct

SEQ ID NO: 1856724 - DNA, 15 bp, Homo sapiens
tcccaacaggctcta

SEQ ID NO: 1856725 - DNA, 15 bp, Homo sapiens
cccaacaggctctag

SEQ ID NO: 1856726 - DNA, 15 bp, Homo sapiens
ccaacaggctctagt

SEQ ID NO: 1856727 - DNA, 15 bp, Homo sapiens
caacaggctctagtg

SEQ ID NO: 1856728 - DNA, 15 bp, Homo sapiens
aacaggctctagtgt

SEQ ID NO: 1856729 - DNA, 15 bp, Homo sapiens
acaggctctagtgtt

SEQ ID NO: 1856730 - DNA, 15 bp, Homo sapiens
caggctctagtgtta

SEQ ID NO: 1856731 - DNA, 15 bp, Homo sapiens
aggctctagtgttaa

SEQ ID NO: 1856732 - DNA, 15 bp, Homo sapiens
ggctctagtgttaat

SEQ ID NO: 1856733 - DNA, 15 bp, Homo sapiens
gctctagtgttaatt

SEQ ID NO: 1856734 - DNA, 15 bp, Homo sapiens
ctctagtgttaattc

SEQ ID NO: 1856735 - DNA, 15 bp, Homo sapiens
tctagtgttaattca

SEQ ID NO: 1856736 - DNA, 15 bp, Homo sapiens
ctagtgttaattcaa

SEQ ID NO: 1856737 - DNA, 15 bp, Homo sapiens
tagtgttaattcaaa

SEQ ID NO: 1856738 - DNA, 15 bp, Homo sapiens
agtgttaattcaaat

SEQ ID NO: 1856739 - DNA, 15 bp, Homo sapiens
gtgttaattcaaatt

SEQ ID NO: 1856740 - DNA, 15 bp, Homo sapiens
tgttaattcaaattg

SEQ ID NO: 1856741 - DNA, 15 bp, Homo sapiens
gttaattcaaattgc

SEQ ID NO: 1856742 - DNA, 15 bp, Homo sapiens
ttaattcaaattgct

SEQ ID NO: 1856743 - DNA, 15 bp, Homo sapiens
taattcaaattgcta

SEQ ID NO: 1856744 - DNA, 15 bp, Homo sapiens
aattcaaattgctat

SEQ ID NO: 1856745 - DNA, 15 bp, Homo sapiens
attcaaattgctatc

SEQ ID NO: 1856746 - DNA, 15 bp, Homo sapiens
ttcaaattgctatct

SEQ ID NO: 1856747 - DNA, 15 bp, Homo sapiens
tcaaattgctatcta

SEQ ID NO: 1856748 - DNA, 15 bp, Homo sapiens
caaattgctatctat

SEQ ID NO: 1856749 - DNA, 15 bp, Homo sapiens
aaattgctatctatt

SEQ ID NO: 1856750 - DNA, 15 bp, Homo sapiens
aattgctatctattg

SEQ ID NO: 1856751 - DNA, 15 bp, Homo sapiens
attgctatctattgg

SEQ ID NO: 1856752 - DNA, 15 bp, Homo sapiens
ttgctatctattggg

SEQ ID NO: 1856753 - DNA, 15 bp, Homo sapiens
tgctatctattgggt

SEQ ID NO: 1856754 - DNA, 15 bp, Homo sapiens
gctatctattgggta

SEQ ID NO: 1856755 - DNA, 15 bp, Homo sapiens
ctatctattgggtag

SEQ ID NO: 1856756 - DNA, 15 bp, Homo sapiens
tatctattgggtaga

SEQ ID NO: 1856757 - DNA, 15 bp, Homo sapiens
atctattgggtagag

SEQ ID NO: 1856758 - DNA, 15 bp, Homo sapiens
tctattgggtagaga

SEQ ID NO: 1856759 - DNA, 15 bp, Homo sapiens
ctattgggtagagaa

SEQ ID NO: 1856760 - DNA, 15 bp, Homo sapiens
tattgggtagagaaa

SEQ ID NO: 1856761 - DNA, 15 bp, Homo sapiens
attgggtagagaaag

SEQ ID NO: 1856762 - DNA, 15 bp, Homo sapiens
ttgggtagagaaaga

SEQ ID NO: 1856763 - DNA, 15 bp, Homo sapiens
tgggtagagaaagag

SEQ ID NO: 1856764 - DNA, 15 bp, Homo sapiens
gggtagagaaagaga

SEQ ID NO: 1856765 - DNA, 15 bp, Homo sapiens
ggtagagaaagagaa

SEQ ID NO: 1856766 - DNA, 15 bp, Homo sapiens
gtagagaaagagaat

SEQ ID NO: 1856767 - DNA, 15 bp, Homo sapiens
tagagaaagagaatt

SEQ ID NO: 1856768 - DNA, 15 bp, Homo sapiens
agagaaagagaattt

SEQ ID NO: 1856769 - DNA, 15 bp, Homo sapiens
gagaaagagaatttc

SEQ ID NO: 1856770 - DNA, 15 bp, Homo sapiens
agaaagagaatttca

SEQ ID NO: 1856771 - DNA, 15 bp, Homo sapiens
gaaagagaatttcag

SEQ ID NO: 1856772 - DNA, 15 bp, Homo sapiens
aaagagaatttcagt

SEQ ID NO: 1856773 - DNA, 15 bp, Homo sapiens
aagagaatttcagtg

SEQ ID NO: 1856774 - DNA, 15 bp, Homo sapiens
agagaatttcagtgc

SEQ ID NO: 1856775 - DNA, 15 bp, Homo sapiens
gagaatttcagtgcc

SEQ ID NO: 1856776 - DNA, 15 bp, Homo sapiens
agaatttcagtgcca

SEQ ID NO: 1856777 - DNA, 15 bp, Homo sapiens
gaatttcagtgccag

SEQ ID NO: 1856778 - DNA, 15 bp, Homo sapiens
aatttcagtgccaga

SEQ ID NO: 1856779 - DNA, 15 bp, Homo sapiens
atttcagtgccagaa

SEQ ID NO: 1856780 - DNA, 15 bp, Homo sapiens
tttcagtgccagaag

SEQ ID NO: 1856781 - DNA, 15 bp, Homo sapiens
ttcagtgccagaagc

SEQ ID NO: 1856782 - DNA, 15 bp, Homo sapiens
tcagtgccagaagct

SEQ ID NO: 1856783 - DNA, 15 bp, Homo sapiens
cagtgccagaagcta

SEQ ID NO: 1856784 - DNA, 15 bp, Homo sapiens
agtgccagaagctac

SEQ ID NO: 1856785 - DNA, 15 bp, Homo sapiens
gtgccagaagctacc

SEQ ID NO: 1856786 - DNA, 15 bp, Homo sapiens
tgccagaagctacca

SEQ ID NO: 1856787 - DNA, 15 bp, Homo sapiens
gccagaagctaccat

SEQ ID NO: 1856788 - DNA, 15 bp, Homo sapiens
ccagaagctaccata

SEQ ID NO: 1856789 - DNA, 15 bp, Homo sapiens
cagaagctaccatag

SEQ ID NO: 1856790 - DNA, 15 bp, Homo sapiens
agaagctaccataga

SEQ ID NO: 1856791 - DNA, 15 bp, Homo sapiens
gaagctaccatagag

SEQ ID NO: 1856792 - DNA, 15 bp, Homo sapiens
aagctaccatagaga

SEQ ID NO: 1856793 - DNA, 15 bp, Homo sapiens
agctaccatagagat

SEQ ID NO: 1856794 - DNA, 15 bp, Homo sapiens
gctaccatagagata

SEQ ID NO: 1856795 - DNA, 15 bp, Homo sapiens
ctaccatagagatac

SEQ ID NO: 1856796 - DNA, 15 bp, Homo sapiens
taccatagagatacc

SEQ ID NO: 1856797 - DNA, 15 bp, Homo sapiens
accatagagatacct

SEQ ID NO: 1856798 - DNA, 15 bp, Homo sapiens
ccatagagatacctt

SEQ ID NO: 1856799 - DNA, 15 bp, Homo sapiens
catagagataccttg

SEQ ID NO: 1856800 - DNA, 15 bp, Homo sapiens
atagagataccttgt

SEQ ID NO: 1856801 - DNA, 15 bp, Homo sapiens
tagagataccttgta

SEQ ID NO: 1856802 - DNA, 15 bp, Homo sapiens
agagataccttgtag

SEQ ID NO: 1856803 - DNA, 15 bp, Homo sapiens
gagataccttgtagt

SEQ ID NO: 1856804 - DNA, 15 bp, Homo sapiens
agataccttgtagtt

SEQ ID NO: 1856805 - DNA, 15 bp, Homo sapiens
gataccttgtagttc

SEQ ID NO: 1856806 - DNA, 15 bp, Homo sapiens
ataccttgtagttcc

SEQ ID NO: 1856807 - DNA, 15 bp, Homo sapiens
taccttgtagttcca

SEQ ID NO: 1856808 - DNA, 15 bp, Homo sapiens
accttgtagttccac

SEQ ID NO: 1856809 - DNA, 15 bp, Homo sapiens
tgttgcttgtaactg

SEQ ID NO: 1856810 - DNA, 15 bp, Homo sapiens
gttgcttgtaactga

SEQ ID NO: 1856811 - DNA, 15 bp, Homo sapiens
ttgcttgtaactgaa

SEQ ID NO: 1856812 - DNA, 15 bp, Homo sapiens
tgcttgtaactgaac

SEQ ID NO: 1856813 - DNA, 15 bp, Homo sapiens
gcttgtaactgaaca

SEQ ID NO: 1856814 - DNA, 15 bp, Homo sapiens
cttgtaactgaacag

SEQ ID NO: 1856815 - DNA, 15 bp, Homo sapiens
ttgtaactgaacagt

SEQ ID NO: 1856816 - DNA, 15 bp, Homo sapiens
tgtaactgaacagtg

SEQ ID NO: 1856817 - DNA, 15 bp, Homo sapiens
gtaactgaacagtga

SEQ ID NO: 1856818 - DNA, 15 bp, Homo sapiens
taactgaacagtgaa

SEQ ID NO: 1856819 - DNA, 15 bp, Homo sapiens
aactgaacagtgaaa

SEQ ID NO: 1856820 - DNA, 15 bp, Homo sapiens
actgaacagtgaaaa

SEQ ID NO: 1856821 - DNA, 15 bp, Homo sapiens
ctgaacagtgaaaat

SEQ ID NO: 1856822 - DNA, 15 bp, Homo sapiens
tgaacagtgaaaatg

SEQ ID NO: 1856823 - DNA, 15 bp, Homo sapiens
gaacagtgaaaatga

SEQ ID NO: 1856824 - DNA, 15 bp, Homo sapiens
aacagtgaaaatgag

SEQ ID NO: 1856825 - DNA, 15 bp, Homo sapiens
acagtgaaaatgagc

SEQ ID NO: 1856826 - DNA, 15 bp, Homo sapiens
cagtgaaaatgagcg

SEQ ID NO: 1856827 - DNA, 15 bp, Homo sapiens
agtgaaaatgagcgt

SEQ ID NO: 1856828 - DNA, 15 bp, Homo sapiens
gtgaaaatgagcgta

SEQ ID NO: 1856829 - DNA, 15 bp, Homo sapiens
tgaaaatgagcgtac

SEQ ID NO: 1856830 - DNA, 15 bp, Homo sapiens
gaaaatgagcgtaca

SEQ ID NO: 1856831 - DNA, 15 bp, Homo sapiens
aaaatgagcgtacat

SEQ ID NO: 1856832 - DNA, 15 bp, Homo sapiens
aaatgagcgtacatg

SEQ ID NO: 1856833 - DNA, 15 bp, Homo sapiens
aatgagcgtacatgt

SEQ ID NO: 1856834 - DNA, 15 bp, Homo sapiens
atgagcgtacatgta

SEQ ID NO: 1856835 - DNA, 15 bp, Homo sapiens
tgagcgtacatgtag

SEQ ID NO: 1856836 - DNA, 15 bp, Homo sapiens
gagcgtacatgtagg

SEQ ID NO: 1856837 - DNA, 15 bp, Homo sapiens
agcgtacatgtaggg

SEQ ID NO: 1856838 - DNA, 15 bp, Homo sapiens
gcgtacatgtagggg

SEQ ID NO: 1856839 - DNA, 15 bp, Homo sapiens
cgtacatgtaggggc

SEQ ID NO: 1856840 - DNA, 15 bp, Homo sapiens
gtacatgtaggggcc

SEQ ID NO: 1856841 - DNA, 15 bp, Homo sapiens
tacatgtaggggcca

SEQ ID NO: 1856842 - DNA, 15 bp, Homo sapiens
acatgtaggggccat

SEQ ID NO: 1856843 - DNA, 15 bp, Homo sapiens
catgtaggggccatg

SEQ ID NO: 1856844 - DNA, 15 bp, Homo sapiens
atgtaggggccatgg

SEQ ID NO: 1856845 - DNA, 15 bp, Homo sapiens
tgtaggggccatgga

SEQ ID NO: 1856846 - DNA, 15 bp, Homo sapiens
gtaggggccatggaa

SEQ ID NO: 1856847 - DNA, 15 bp, Homo sapiens
taggggccatggaat

SEQ ID NO: 1856848 - DNA, 15 bp, Homo sapiens
aggggccatggaatg

SEQ ID NO: 1856849 - DNA, 15 bp, Homo sapiens
ggggccatggaatga

SEQ ID NO: 1856850 - DNA, 15 bp, Homo sapiens
gggccatggaatgag

SEQ ID NO: 1856851 - DNA, 15 bp, Homo sapiens
ggccatggaatgagg

SEQ ID NO: 1856852 - DNA, 15 bp, Homo sapiens
gccatggaatgagga

SEQ ID NO: 1856853 - DNA, 15 bp, Homo sapiens
ccatggaatgaggat

SEQ ID NO: 1856854 - DNA, 15 bp, Homo sapiens
catggaatgaggatt

SEQ ID NO: 1856855 - DNA, 15 bp, Homo sapiens
atggaatgaggattt

SEQ ID NO: 1856856 - DNA, 15 bp, Homo sapiens
tggaatgaggatttt

SEQ ID NO: 1856857 - DNA, 15 bp, Homo sapiens
ggaatgaggatttta

SEQ ID NO: 1856858 - DNA, 15 bp, Homo sapiens
gaatgaggattttaa

SEQ ID NO: 1856859 - DNA, 15 bp, Homo sapiens
aatgaggattttaat

SEQ ID NO: 1856860 - DNA, 15 bp, Homo sapiens
atgaggattttaatt

SEQ ID NO: 1856861 - DNA, 15 bp, Homo sapiens
tgaggattttaattt

SEQ ID NO: 1856862 - DNA, 15 bp, Homo sapiens
gaggattttaatttg

SEQ ID NO: 1856863 - DNA, 15 bp, Homo sapiens
aggattttaatttga

SEQ ID NO: 1856864 - DNA, 15 bp, Homo sapiens
ggattttaatttgaa

SEQ ID NO: 1856865 - DNA, 15 bp, Homo sapiens
gattttaatttgaat

SEQ ID NO: 1856866 - DNA, 15 bp, Homo sapiens
attttaatttgaatc

SEQ ID NO: 1856867 - DNA, 15 bp, Homo sapiens
ttttaatttgaatca

SEQ ID NO: 1856868 - DNA, 15 bp, Homo sapiens
tttaatttgaatcag

SEQ ID NO: 1856869 - DNA, 15 bp, Homo sapiens
ttaatttgaatcaga

SEQ ID NO: 1856870 - DNA, 15 bp, Homo sapiens
taatttgaatcagag

SEQ ID NO: 1856871 - DNA, 15 bp, Homo sapiens
aatttgaatcagagg

SEQ ID NO: 1856872 - DNA, 15 bp, Homo sapiens
atttgaatcagagga

SEQ ID NO: 1856873 - DNA, 15 bp, Homo sapiens
tttgaatcagaggat

SEQ ID NO: 1856874 - DNA, 15 bp, Homo sapiens
ttgaatcagaggatg

SEQ ID NO: 1856875 - DNA, 15 bp, Homo sapiens
tgaatcagaggatgg

SEQ ID NO: 1856876 - DNA, 15 bp, Homo sapiens
gaatcagaggatggg

SEQ ID NO: 1856877 - DNA, 15 bp, Homo sapiens
aatcagaggatgggg

SEQ ID NO: 1856878 - DNA, 15 bp, Homo sapiens
atcagaggatggggt

SEQ ID NO: 1856879 - DNA, 15 bp, Homo sapiens
tcagaggatggggtg

SEQ ID NO: 1856880 - DNA, 15 bp, Homo sapiens
cagaggatggggtga

SEQ ID NO: 1856881 - DNA, 15 bp, Homo sapiens
agaggatggggtgaa

SEQ ID NO: 1856882 - DNA, 15 bp, Homo sapiens
gaggatggggtgaag

SEQ ID NO: 1856883 - DNA, 15 bp, Homo sapiens
aggatggggtgaaga

SEQ ID NO: 1856884 - DNA, 15 bp, Homo sapiens
ggatggggtgaagag

SEQ ID NO: 1856885 - DNA, 15 bp, Homo sapiens
gatggggtgaagagc

SEQ ID NO: 1856886 - DNA, 15 bp, Homo sapiens
atggggtgaagagca

SEQ ID NO: 1856887 - DNA, 15 bp, Homo sapiens
tggggtgaagagcag

SEQ ID NO: 1856888 - DNA, 15 bp, Homo sapiens
ggggtgaagagcagt

SEQ ID NO: 1856889 - DNA, 15 bp, Homo sapiens
gggtgaagagcagtc

SEQ ID NO: 1856890 - DNA, 15 bp, Homo sapiens
ggtgaagagcagtca

SEQ ID NO: 1856891 - DNA, 15 bp, Homo sapiens
gtgaagagcagtcat

SEQ ID NO: 1856892 - DNA, 15 bp, Homo sapiens
tgaagagcagtcatt

SEQ ID NO: 1856893 - DNA, 15 bp, Homo sapiens
gaagagcagtcattt

SEQ ID NO: 1856894 - DNA, 15 bp, Homo sapiens
aagagcagtcattta

SEQ ID NO: 1856895 - DNA, 15 bp, Homo sapiens
agagcagtcatttac

SEQ ID NO: 1856896 - DNA, 15 bp, Homo sapiens
gagcagtcatttaca

SEQ ID NO: 1856897 - DNA, 15 bp, Homo sapiens
agcagtcatttacaa

SEQ ID NO: 1856898 - DNA, 15 bp, Homo sapiens
gcagtcatttacaat

SEQ ID NO: 1856899 - DNA, 15 bp, Homo sapiens
cagtcatttacaata

SEQ ID NO: 1856900 - DNA, 15 bp, Homo sapiens
agtcatttacaatat

SEQ ID NO: 1856901 - DNA, 15 bp, Homo sapiens
gtcatttacaatatt

SEQ ID NO: 1856902 - DNA, 15 bp, Homo sapiens
tcatttacaatatta

SEQ ID NO: 1856903 - DNA, 15 bp, Homo sapiens
catttacaatattac

SEQ ID NO: 1856904 - DNA, 15 bp, Homo sapiens
atttacaatattaca

SEQ ID NO: 1856905 - DNA, 15 bp, Homo sapiens
tttacaatattacac

SEQ ID NO: 1856906 - DNA, 15 bp, Homo sapiens
ttacaatattacaca

SEQ ID NO: 1856907 - DNA, 15 bp, Homo sapiens
tacaatattacacaa

SEQ ID NO: 1856908 - DNA, 15 bp, Homo sapiens
acaatattacacaag

SEQ ID NO: 1856909 - DNA, 15 bp, Homo sapiens
caatattacacaagt

SEQ ID NO: 1856910 - DNA, 15 bp, Homo sapiens
aatattacacaagtc

SEQ ID NO: 1856911 - DNA, 15 bp, Homo sapiens
atattacacaagtca

SEQ ID NO: 1856912 - DNA, 15 bp, Homo sapiens
tattacacaagtcat

SEQ ID NO: 1856913 - DNA, 15 bp, Homo sapiens
attacacaagtcatc

SEQ ID NO: 1856914 - DNA, 15 bp, Homo sapiens
ttacacaagtcatct

SEQ ID NO: 1856915 - DNA, 15 bp, Homo sapiens
tacacaagtcatctt

SEQ ID NO: 1856916 - DNA, 15 bp, Homo sapiens
acacaagtcatctta

SEQ ID NO: 1856917 - DNA, 15 bp, Homo sapiens
cacaagtcatcttac

SEQ ID NO: 1856918 - DNA, 15 bp, Homo sapiens
acaagtcatcttaca

SEQ ID NO: 1856919 - DNA, 15 bp, Homo sapiens
caagtcatcttacaa

SEQ ID NO: 1856920 - DNA, 15 bp, Homo sapiens
aagtcatcttacaat

SEQ ID NO: 1856921 - DNA, 15 bp, Homo sapiens
agtcatcttacaatg

SEQ ID NO: 1856922 - DNA, 15 bp, Homo sapiens
gtcatcttacaatga

SEQ ID NO: 1856923 - DNA, 15 bp, Homo sapiens
tcatcttacaatgaa

SEQ ID NO: 1856924 - DNA, 15 bp, Homo sapiens
catcttacaatgaat

SEQ ID NO: 1856925 - DNA, 15 bp, Homo sapiens
atcttacaatgaata

SEQ ID NO: 1856926 - DNA, 15 bp, Homo sapiens
tcttacaatgaataa

SEQ ID NO: 1856927 - DNA, 15 bp, Homo sapiens
cttacaatgaataat

SEQ ID NO: 1856928 - DNA, 15 bp, Homo sapiens
ttacaatgaataata

SEQ ID NO: 1856929 - DNA, 15 bp, Homo sapiens
tacaatgaataataa

SEQ ID NO: 1856930 - DNA, 15 bp, Homo sapiens
acaatgaataataat

SEQ ID NO: 1856931 - DNA, 15 bp, Homo sapiens
caatgaataataatt

SEQ ID NO: 1856932 - DNA, 15 bp, Homo sapiens
aatgaataataattc

SEQ ID NO: 1856933 - DNA, 15 bp, Homo sapiens
atgaataataattct

SEQ ID NO: 1856934 - DNA, 15 bp, Homo sapiens
tgaataataattcta

SEQ ID NO: 1856935 - DNA, 15 bp, Homo sapiens
gaataataattctat

SEQ ID NO: 1856936 - DNA, 15 bp, Homo sapiens
aataataattctatc

SEQ ID NO: 1856937 - DNA, 15 bp, Homo sapiens
ataataattctatct

SEQ ID NO: 1856938 - DNA, 15 bp, Homo sapiens
taataattctatctt

SEQ ID NO: 1856939 - DNA, 15 bp, Homo sapiens
aataattctatcttg

SEQ ID NO: 1856940 - DNA, 15 bp, Homo sapiens
ataattctatcttga

SEQ ID NO: 1856941 - DNA, 15 bp, Homo sapiens
taattctatcttgaa

SEQ ID NO: 1856942 - DNA, 15 bp, Homo sapiens
aattctatcttgaaa

SEQ ID NO: 1856943 - DNA, 15 bp, Homo sapiens
attctatcttgaaat

SEQ ID NO: 1856944 - DNA, 15 bp, Homo sapiens
ttctatcttgaaatt

SEQ ID NO: 1856945 - DNA, 15 bp, Homo sapiens
tctatcttgaaattc

SEQ ID NO: 1856946 - DNA, 15 bp, Homo sapiens
ctatcttgaaattcc

SEQ ID NO: 1856947 - DNA, 15 bp, Homo sapiens
tatcttgaaattcca

SEQ ID NO: 1856948 - DNA, 15 bp, Homo sapiens
atcttgaaattccac

SEQ ID NO: 1856949 - DNA, 15 bp, Homo sapiens
tcttgaaattccacc

SEQ ID NO: 1856950 - DNA, 15 bp, Homo sapiens
cttgaaattccaccc

SEQ ID NO: 1856951 - DNA, 15 bp, Homo sapiens
ttgaaattccaccct

SEQ ID NO: 1856952 - DNA, 15 bp, Homo sapiens
tgaaattccaccctt

SEQ ID NO: 1856953 - DNA, 15 bp, Homo sapiens
gaaattccacccttc

SEQ ID NO: 1856954 - DNA, 15 bp, Homo sapiens
aaattccacccttcc

SEQ ID NO: 1856955 - DNA, 15 bp, Homo sapiens
aattccacccttcct

SEQ ID NO: 1856956 - DNA, 15 bp, Homo sapiens
attccacccttcctg

SEQ ID NO: 1856957 - DNA, 15 bp, Homo sapiens
ttccacccttcctgc

SEQ ID NO: 1856958 - DNA, 15 bp, Homo sapiens
tccacccttcctgcc

SEQ ID NO: 1856959 - DNA, 15 bp, Homo sapiens
ccacccttcctgcca

SEQ ID NO: 1856960 - DNA, 15 bp, Homo sapiens
cacccttcctgccat

SEQ ID NO: 1856961 - DNA, 15 bp, Homo sapiens
acccttcctgccatg

SEQ ID NO: 1856962 - DNA, 15 bp, Homo sapiens
cccttcctgccatgt

SEQ ID NO: 1856963 - DNA, 15 bp, Homo sapiens
ccttcctgccatgtg

SEQ ID NO: 1856964 - DNA, 15 bp, Homo sapiens
cttcctgccatgtga

SEQ ID NO: 1856965 - DNA, 15 bp, Homo sapiens
ttcctgccatgtgat

SEQ ID NO: 1856966 - DNA, 15 bp, Homo sapiens
tcctgccatgtgatt

SEQ ID NO: 1856967 - DNA, 15 bp, Homo sapiens
cctgccatgtgatta

SEQ ID NO: 1856968 - DNA, 15 bp, Homo sapiens
ctgccatgtgattat

SEQ ID NO: 1856969 - DNA, 15 bp, Homo sapiens
tgccatgtgattata

SEQ ID NO: 1856970 - DNA, 15 bp, Homo sapiens
gccatgtgattataa

SEQ ID NO: 1856971 - DNA, 15 bp, Homo sapiens
ccatgtgattataaa

SEQ ID NO: 1856972 - DNA, 15 bp, Homo sapiens
catgtgattataaat

SEQ ID NO: 1856973 - DNA, 15 bp, Homo sapiens
atgtgattataaatt

SEQ ID NO: 1856974 - DNA, 15 bp, Homo sapiens
tgtgattataaattt

SEQ ID NO: 1856975 - DNA, 15 bp, Homo sapiens
gtgattataaatttg

SEQ ID NO: 1856976 - DNA, 15 bp, Homo sapiens
tgattataaatttgt

SEQ ID NO: 1856977 - DNA, 15 bp, Homo sapiens
gattataaatttgtt

SEQ ID NO: 1856978 - DNA, 15 bp, Homo sapiens
attataaatttgttt

SEQ ID NO: 1856979 - DNA, 15 bp, Homo sapiens
ttataaatttgttta

SEQ ID NO: 1856980 - DNA, 15 bp, Homo sapiens
tataaatttgtttat

SEQ ID NO: 1856981 - DNA, 15 bp, Homo sapiens
ataaatttgtttata

SEQ ID NO: 1856982 - DNA, 15 bp, Homo sapiens
taaatttgtttataa

SEQ ID NO: 1856983 - DNA, 15 bp, Homo sapiens
aaatttgtttataat

SEQ ID NO: 1856984 - DNA, 15 bp, Homo sapiens
aatttgtttataatt

SEQ ID NO: 1856985 - DNA, 15 bp, Homo sapiens
atttgtttataattg

SEQ ID NO: 1856986 - DNA, 15 bp, Homo sapiens
tttgtttataattgg

SEQ ID NO: 1856987 - DNA, 15 bp, Homo sapiens
ttgtttataattggg

SEQ ID NO: 1856988 - DNA, 15 bp, Homo sapiens
tgtttataattgggt

SEQ ID NO: 1856989 - DNA, 15 bp, Homo sapiens
gtttataattgggta

SEQ ID NO: 1856990 - DNA, 15 bp, Homo sapiens
tttataattgggtaa

SEQ ID NO: 1856991 - DNA, 15 bp, Homo sapiens
ttataattgggtaag

SEQ ID NO: 1856992 - DNA, 15 bp, Homo sapiens
tataattgggtaagt

SEQ ID NO: 1856993 - DNA, 15 bp, Homo sapiens
ataattgggtaagtc

SEQ ID NO: 1856994 - DNA, 15 bp, Homo sapiens
taattgggtaagtcc

SEQ ID NO: 1856995 - DNA, 15 bp, Homo sapiens
aattgggtaagtccc

SEQ ID NO: 1856996 - DNA, 15 bp, Homo sapiens
attgggtaagtccca

SEQ ID NO: 1856997 - DNA, 15 bp, Homo sapiens
ttgggtaagtcccac

SEQ ID NO: 1856998 - DNA, 15 bp, Homo sapiens
tgggtaagtcccacc

SEQ ID NO: 1856999 - DNA, 15 bp, Homo sapiens
gggtaagtcccacca

SEQ ID NO: 1857000 - DNA, 15 bp, Homo sapiens
ggtaagtcccaccag

SEQ ID NO: 1857001 - DNA, 15 bp, Homo sapiens
gtaagtcccaccagt

SEQ ID NO: 1857002 - DNA, 15 bp, Homo sapiens
taagtcccaccagtc

SEQ ID NO: 1857003 - DNA, 15 bp, Homo sapiens
aagtcccaccagtcc

SEQ ID NO: 1857004 - DNA, 15 bp, Homo sapiens
agtcccaccagtcct

SEQ ID NO: 1857005 - DNA, 15 bp, Homo sapiens
gtcccaccagtcctg

SEQ ID NO: 1857006 - DNA, 15 bp, Homo sapiens
tcccaccagtcctgt

SEQ ID NO: 1857007 - DNA, 15 bp, Homo sapiens
cccaccagtcctgtg

SEQ ID NO: 1857008 - DNA, 15 bp, Homo sapiens
ccaccagtcctgtga

SEQ ID NO: 1857009 - DNA, 15 bp, Homo sapiens
caccagtcctgtgag

SEQ ID NO: 1857010 - DNA, 15 bp, Homo sapiens
accagtcctgtgaga

SEQ ID NO: 1857011 - DNA, 15 bp, Homo sapiens
ccagtcctgtgagat

SEQ ID NO: 1857012 - DNA, 15 bp, Homo sapiens
cagtcctgtgagatt

SEQ ID NO: 1857013 - DNA, 15 bp, Homo sapiens
agtcctgtgagattg

SEQ ID NO: 1857014 - DNA, 15 bp, Homo sapiens
gtcctgtgagattgc

SEQ ID NO: 1857015 - DNA, 15 bp, Homo sapiens
tcctgtgagattgca

SEQ ID NO: 1857016 - DNA, 15 bp, Homo sapiens
cctgtgagattgcac

SEQ ID NO: 1857017 - DNA, 15 bp, Homo sapiens
ctgtgagattgcacc

SEQ ID NO: 1857018 - DNA, 15 bp, Homo sapiens
tgtgagattgcacca

SEQ ID NO: 1857019 - DNA, 15 bp, Homo sapiens
tgagattgcaccatg

SEQ ID NO: 1857020 - DNA, 15 bp, Homo sapiens
gagattgcaccatgc

SEQ ID NO: 1857021 - DNA, 15 bp, Homo sapiens
agattgcaccatgct

SEQ ID NO: 1857022 - DNA, 15 bp, Homo sapiens
gattgcaccatgctt

SEQ ID NO: 1857023 - DNA, 15 bp, Homo sapiens
attgcaccatgcttt

SEQ ID NO: 1857024 - DNA, 15 bp, Homo sapiens
ttgcaccatgcttta

SEQ ID NO: 1857025 - DNA, 15 bp, Homo sapiens
tgcaccatgctttat

SEQ ID NO: 1857026 - DNA, 15 bp, Homo sapiens
gcaccatgctttatg

SEQ ID NO: 1857027 - DNA, 15 bp, Homo sapiens
caccatgctttatgt

SEQ ID NO: 1857028 - DNA, 15 bp, Homo sapiens
accatgctttatgtt

SEQ ID NO: 1857029 - DNA, 15 bp, Homo sapiens
ccatgctttatgttt

SEQ ID NO: 1857030 - DNA, 15 bp, Homo sapiens
catgctttatgtttg

SEQ ID NO: 1857031 - DNA, 15 bp, Homo sapiens
atgctttatgtttgc

SEQ ID NO: 1857032 - DNA, 15 bp, Homo sapiens
tgctttatgtttgca

SEQ ID NO: 1857033 - DNA, 15 bp, Homo sapiens
gctttatgtttgcat

SEQ ID NO: 1857034 - DNA, 15 bp, Homo sapiens
ctttatgtttgcata

SEQ ID NO: 1857035 - DNA, 15 bp, Homo sapiens
tttatgtttgcatac

SEQ ID NO: 1857036 - DNA, 15 bp, Homo sapiens
ttatgtttgcataca

SEQ ID NO: 1857037 - DNA, 15 bp, Homo sapiens
tatgtttgcatacag

SEQ ID NO: 1857038 - DNA, 15 bp, Homo sapiens
atgtttgcatacagt

SEQ ID NO: 1857039 - DNA, 15 bp, Homo sapiens
tgtttgcatacagtg

SEQ ID NO: 1857040 - DNA, 15 bp, Homo sapiens
gtttgcatacagtgc

SEQ ID NO: 1857041 - DNA, 15 bp, Homo sapiens
tttgcatacagtgct

SEQ ID NO: 1857042 - DNA, 15 bp, Homo sapiens
ttgcatacagtgctt

SEQ ID NO: 1857043 - DNA, 15 bp, Homo sapiens
tgcatacagtgcttt

SEQ ID NO: 1857044 - DNA, 15 bp, Homo sapiens
gcatacagtgcttta

SEQ ID NO: 1857045 - DNA, 15 bp, Homo sapiens
catacagtgctttat

SEQ ID NO: 1857046 - DNA, 15 bp, Homo sapiens
atacagtgctttatg

SEQ ID NO: 1857047 - DNA, 15 bp, Homo sapiens
tacagtgctttatgc

SEQ ID NO: 1857048 - DNA, 15 bp, Homo sapiens
acagtgctttatgct

SEQ ID NO: 1857049 - DNA, 15 bp, Homo sapiens
cagtgctttatgctt

SEQ ID NO: 1857050 - DNA, 15 bp, Homo sapiens
agtgctttatgcttg

SEQ ID NO: 1857051 - DNA, 15 bp, Homo sapiens
gtgctttatgcttgt

SEQ ID NO: 1857052 - DNA, 15 bp, Homo sapiens
tgctttatgcttgtc

SEQ ID NO: 1857053 - DNA, 15 bp, Homo sapiens
gctttatgcttgtca

SEQ ID NO: 1857054 - DNA, 15 bp, Homo sapiens
ctttatgcttgtcaa

SEQ ID NO: 1857055 - DNA, 15 bp, Homo sapiens
tttatgcttgtcaag

SEQ ID NO: 1857056 - DNA, 15 bp, Homo sapiens
ttatgcttgtcaagg

SEQ ID NO: 1857057 - DNA, 15 bp, Homo sapiens
tatgcttgtcaaggt

SEQ ID NO: 1857058 - DNA, 15 bp, Homo sapiens
atgcttgtcaaggtg

SEQ ID NO: 1857059 - DNA, 15 bp, Homo sapiens
tgcttgtcaaggtgc

SEQ ID NO: 1857060 - DNA, 15 bp, Homo sapiens
gcttgtcaaggtgct

SEQ ID NO: 1857061 - DNA, 15 bp, Homo sapiens
cttgtcaaggtgctc

SEQ ID NO: 1857062 - DNA, 15 bp, Homo sapiens
ttgtcaaggtgctct

SEQ ID NO: 1857063 - DNA, 15 bp, Homo sapiens
tgtcaaggtgctctg

SEQ ID NO: 1857064 - DNA, 15 bp, Homo sapiens
gtcaaggtgctctgc

SEQ ID NO: 1857065 - DNA, 15 bp, Homo sapiens
tcaaggtgctctgcc

SEQ ID NO: 1857066 - DNA, 15 bp, Homo sapiens
caaggtgctctgcct

SEQ ID NO: 1857067 - DNA, 15 bp, Homo sapiens
aaggtgctctgcctt

SEQ ID NO: 1857068 - DNA, 15 bp, Homo sapiens
aggtgctctgccttc

SEQ ID NO: 1857069 - DNA, 15 bp, Homo sapiens
ggtgctctgccttct

SEQ ID NO: 1857070 - DNA, 15 bp, Homo sapiens
gtgctctgccttctg

SEQ ID NO: 1857071 - DNA, 15 bp, Homo sapiens
tgctctgccttctgc

SEQ ID NO: 1857072 - DNA, 15 bp, Homo sapiens
gctctgccttctgct

SEQ ID NO: 1857073 - DNA, 15 bp, Homo sapiens
ctctgccttctgctg

SEQ ID NO: 1857074 - DNA, 15 bp, Homo sapiens
tctgccttctgctgt

SEQ ID NO: 1857075 - DNA, 15 bp, Homo sapiens
ctgccttctgctgtc

SEQ ID NO: 1857076 - DNA, 15 bp, Homo sapiens
tgccttctgctgtct

SEQ ID NO: 1857077 - DNA, 15 bp, Homo sapiens
gccttctgctgtctt

SEQ ID NO: 1857078 - DNA, 15 bp, Homo sapiens
ccttctgctgtctta

SEQ ID NO: 1857079 - DNA, 15 bp, Homo sapiens
cttctgctgtcttat

SEQ ID NO: 1857080 - DNA, 15 bp, Homo sapiens
ttctgctgtcttatt

SEQ ID NO: 1857081 - DNA, 15 bp, Homo sapiens
tctgctgtcttattt

SEQ ID NO: 1857082 - DNA, 15 bp, Homo sapiens
ctgctgtcttatttg

SEQ ID NO: 1857083 - DNA, 15 bp, Homo sapiens
tgctgtcttatttgg

SEQ ID NO: 1857084 - DNA, 15 bp, Homo sapiens
gctgtcttatttggc

SEQ ID NO: 1857085 - DNA, 15 bp, Homo sapiens
ctgtcttatttggca

SEQ ID NO: 1857086 - DNA, 15 bp, Homo sapiens
tgtcttatttggcat

SEQ ID NO: 1857087 - DNA, 15 bp, Homo sapiens
gtcttatttggcatc

SEQ ID NO: 1857088 - DNA, 15 bp, Homo sapiens
tcttatttggcatct

SEQ ID NO: 1857089 - DNA, 15 bp, Homo sapiens
cttatttggcatcta

SEQ ID NO: 1857090 - DNA, 15 bp, Homo sapiens
ttatttggcatctaa

SEQ ID NO: 1857091 - DNA, 15 bp, Homo sapiens
tatttggcatctaaa

SEQ ID NO: 1857092 - DNA, 15 bp, Homo sapiens
atttggcatctaaac

SEQ ID NO: 1857093 - DNA, 15 bp, Homo sapiens
tttggcatctaaaca

SEQ ID NO: 1857094 - DNA, 15 bp, Homo sapiens
ttggcatctaaacat

SEQ ID NO: 1857095 - DNA, 15 bp, Homo sapiens
tggcatctaaacatc

SEQ ID NO: 1857096 - DNA, 15 bp, Homo sapiens
ggcatctaaacatcc

SEQ ID NO: 1857097 - DNA, 15 bp, Homo sapiens
gcatctaaacatcct

SEQ ID NO: 1857098 - DNA, 15 bp, Homo sapiens
catctaaacatccta

SEQ ID NO: 1857099 - DNA, 15 bp, Homo sapiens
atctaaacatcctaa

SEQ ID NO: 1857100 - DNA, 15 bp, Homo sapiens
tctaaacatcctaaa

SEQ ID NO: 1857101 - DNA, 15 bp, Homo sapiens
ctaaacatcctaaat

SEQ ID NO: 1857102 - DNA, 15 bp, Homo sapiens
taaacatcctaaata

SEQ ID NO: 1857103 - DNA, 15 bp, Homo sapiens
aaacatcctaaatac

SEQ ID NO: 1857104 - DNA, 15 bp, Homo sapiens
aacatcctaaatacc

SEQ ID NO: 1857105 - DNA, 15 bp, Homo sapiens
acatcctaaataccc

SEQ ID NO: 1857106 - DNA, 15 bp, Homo sapiens
catcctaaataccct

SEQ ID NO: 1857107 - DNA, 15 bp, Homo sapiens
atcctaaataccctg

SEQ ID NO: 1857108 - DNA, 15 bp, Homo sapiens
tcctaaataccctga

SEQ ID NO: 1857109 - DNA, 15 bp, Homo sapiens
cctaaataccctgaa

SEQ ID NO: 1857110 - DNA, 15 bp, Homo sapiens
ctaaataccctgaaa

SEQ ID NO: 1857111 - DNA, 15 bp, Homo sapiens
taaataccctgaaag

SEQ ID NO: 1857112 - DNA, 15 bp, Homo sapiens
aaataccctgaaagt

SEQ ID NO: 1857113 - DNA, 15 bp, Homo sapiens
aataccctgaaagta

SEQ ID NO: 1857114 - DNA, 15 bp, Homo sapiens
ataccctgaaagtaa

SEQ ID NO: 1857115 - DNA, 15 bp, Homo sapiens
taccctgaaagtaat

SEQ ID NO: 1857116 - DNA, 15 bp, Homo sapiens
accctgaaagtaatg

SEQ ID NO: 1857117 - DNA, 15 bp, Homo sapiens
ccctgaaagtaatga

SEQ ID NO: 1857118 - DNA, 15 bp, Homo sapiens
cctgaaagtaatgag

SEQ ID NO: 1857119 - DNA, 15 bp, Homo sapiens
ctgaaagtaatgaga

SEQ ID NO: 1857120 - DNA, 15 bp, Homo sapiens
tgaaagtaatgagac

SEQ ID NO: 1857121 - DNA, 15 bp, Homo sapiens
gaaagtaatgagacc

SEQ ID NO: 1857122 - DNA, 15 bp, Homo sapiens
aaagtaatgagacct

SEQ ID NO: 1857123 - DNA, 15 bp, Homo sapiens
aagtaatgagacctg

SEQ ID NO: 1857124 - DNA, 15 bp, Homo sapiens
gtaatgagacctgga

SEQ ID NO: 1857125 - DNA, 15 bp, Homo sapiens
taatgagacctggag

SEQ ID NO: 1857126 - DNA, 15 bp, Homo sapiens
aatgagacctggagc

SEQ ID NO: 1857127 - DNA, 15 bp, Homo sapiens
atgagacctggagct

SEQ ID NO: 1857128 - DNA, 15 bp, Homo sapiens
tgagacctggagcta

SEQ ID NO: 1857129 - DNA, 15 bp, Homo sapiens
gagacctggagctaa

SEQ ID NO: 1857130 - DNA, 15 bp, Homo sapiens
agacctggagctaag

SEQ ID NO: 1857131 - DNA, 15 bp, Homo sapiens
gacctggagctaaga

SEQ ID NO: 1857132 - DNA, 15 bp, Homo sapiens
acctggagctaagag

SEQ ID NO: 1857133 - DNA, 15 bp, Homo sapiens
cctggagctaagagc

SEQ ID NO: 1857134 - DNA, 15 bp, Homo sapiens
ctggagctaagagct

SEQ ID NO: 1857135 - DNA, 15 bp, Homo sapiens
tggagctaagagctc

SEQ ID NO: 1857136 - DNA, 15 bp, Homo sapiens
ggagctaagagctct

SEQ ID NO: 1857137 - DNA, 15 bp, Homo sapiens
gagctaagagctctc

SEQ ID NO: 1857138 - DNA, 15 bp, Homo sapiens
agctaagagctctct

SEQ ID NO: 1857139 - DNA, 15 bp, Homo sapiens
gctaagagctctctt

SEQ ID NO: 1857140 - DNA, 15 bp, Homo sapiens
ctaagagctctcttt

SEQ ID NO: 1857141 - DNA, 15 bp, Homo sapiens
taagagctctcttta

SEQ ID NO: 1857142 - DNA, 15 bp, Homo sapiens
aagagctctctttac

SEQ ID NO: 1857143 - DNA, 15 bp, Homo sapiens
agagctctctttaca

SEQ ID NO: 1857144 - DNA, 15 bp, Homo sapiens
gagctctctttacaa

SEQ ID NO: 1857145 - DNA, 15 bp, Homo sapiens
agctctctttacaat

SEQ ID NO: 1857146 - DNA, 15 bp, Homo sapiens
gctctctttacaatg

SEQ ID NO: 1857147 - DNA, 15 bp, Homo sapiens
ctctctttacaatga

SEQ ID NO: 1857148 - DNA, 15 bp, Homo sapiens
tctctttacaatgag

SEQ ID NO: 1857149 - DNA, 15 bp, Homo sapiens
ctctttacaatgagg

SEQ ID NO: 1857150 - DNA, 15 bp, Homo sapiens
tctttacaatgagga

SEQ ID NO: 1857151 - DNA, 15 bp, Homo sapiens
ctttacaatgaggaa

SEQ ID NO: 1857152 - DNA, 15 bp, Homo sapiens
tttacaatgaggaag

SEQ ID NO: 1857153 - DNA, 15 bp, Homo sapiens
ttacaatgaggaagc

SEQ ID NO: 1857154 - DNA, 15 bp, Homo sapiens
tacaatgaggaagct

SEQ ID NO: 1857155 - DNA, 15 bp, Homo sapiens
acaatgaggaagctg

SEQ ID NO: 1857156 - DNA, 15 bp, Homo sapiens
caatgaggaagctga

SEQ ID NO: 1857157 - DNA, 15 bp, Homo sapiens
aatgaggaagctgag

SEQ ID NO: 1857158 - DNA, 15 bp, Homo sapiens
tgaggaagctgagga

SEQ ID NO: 1857159 - DNA, 15 bp, Homo sapiens
gaggaagctgaggat

SEQ ID NO: 1857160 - DNA, 15 bp, Homo sapiens
aggaagctgaggatc

SEQ ID NO: 1857161 - DNA, 15 bp, Homo sapiens
ggaagctgaggatca

SEQ ID NO: 1857162 - DNA, 15 bp, Homo sapiens
gaagctgaggatcag

SEQ ID NO: 1857163 - DNA, 15 bp, Homo sapiens
aagctgaggatcaga

SEQ ID NO: 1857164 - DNA, 15 bp, Homo sapiens
agctgaggatcagag

SEQ ID NO: 1857165 - DNA, 15 bp, Homo sapiens
gctgaggatcagaga

SEQ ID NO: 1857166 - DNA, 15 bp, Homo sapiens
ctgaggatcagagag

SEQ ID NO: 1857167 - DNA, 15 bp, Homo sapiens
tgaggatcagagagc

SEQ ID NO: 1857168 - DNA, 15 bp, Homo sapiens
gaggatcagagagct

SEQ ID NO: 1857169 - DNA, 15 bp, Homo sapiens
aggatcagagagctt

SEQ ID NO: 1857170 - DNA, 15 bp, Homo sapiens
ggatcagagagctta

SEQ ID NO: 1857171 - DNA, 15 bp, Homo sapiens
gatcagagagcttat

SEQ ID NO: 1857172 - DNA, 15 bp, Homo sapiens
atcagagagcttatg

SEQ ID NO: 1857173 - DNA, 15 bp, Homo sapiens
tcagagagcttatgt

SEQ ID NO: 1857174 - DNA, 15 bp, Homo sapiens
cagagagcttatgtc

SEQ ID NO: 1857175 - DNA, 15 bp, Homo sapiens
agagagcttatgtca

SEQ ID NO: 1857176 - DNA, 15 bp, Homo sapiens
gagagcttatgtcat

SEQ ID NO: 1857177 - DNA, 15 bp, Homo sapiens
agagcttatgtcatt

SEQ ID NO: 1857178 - DNA, 15 bp, Homo sapiens
gagcttatgtcattt

SEQ ID NO: 1857179 - DNA, 15 bp, Homo sapiens
agcttatgtcatttg

SEQ ID NO: 1857180 - DNA, 15 bp, Homo sapiens
gcttatgtcatttgc

SEQ ID NO: 1857181 - DNA, 15 bp, Homo sapiens
cttatgtcatttgcc

SEQ ID NO: 1857182 - DNA, 15 bp, Homo sapiens
ttatgtcatttgcct

SEQ ID NO: 1857183 - DNA, 15 bp, Homo sapiens
tatgtcatttgcctt

SEQ ID NO: 1857184 - DNA, 15 bp, Homo sapiens
atgtcatttgccttg

SEQ ID NO: 1857185 - DNA, 15 bp, Homo sapiens
tgtcatttgccttga

SEQ ID NO: 1857186 - DNA, 15 bp, Homo sapiens
gtcatttgccttgac

SEQ ID NO: 1857187 - DNA, 15 bp, Homo sapiens
tcatttgccttgact

SEQ ID NO: 1857188 - DNA, 15 bp, Homo sapiens
catttgccttgacta

SEQ ID NO: 1857189 - DNA, 15 bp, Homo sapiens
atttgccttgactac

SEQ ID NO: 1857190 - DNA, 15 bp, Homo sapiens
tttgccttgactaca

SEQ ID NO: 1857191 - DNA, 15 bp, Homo sapiens
ttgccttgactacag

SEQ ID NO: 1857192 - DNA, 15 bp, Homo sapiens
tgccttgactacagc

SEQ ID NO: 1857193 - DNA, 15 bp, Homo sapiens
gccttgactacagca

SEQ ID NO: 1857194 - DNA, 15 bp, Homo sapiens
ccttgactacagcaa

SEQ ID NO: 1857195 - DNA, 15 bp, Homo sapiens
cttgactacagcaag

SEQ ID NO: 1857196 - DNA, 15 bp, Homo sapiens
ttgactacagcaagt

SEQ ID NO: 1857197 - DNA, 15 bp, Homo sapiens
tgactacagcaagtt

SEQ ID NO: 1857198 - DNA, 15 bp, Homo sapiens
gactacagcaagttg

SEQ ID NO: 1857199 - DNA, 15 bp, Homo sapiens
actacagcaagttgc

SEQ ID NO: 1857200 - DNA, 15 bp, Homo sapiens
ctacagcaagttgct

SEQ ID NO: 1857201 - DNA, 15 bp, Homo sapiens
tacagcaagttgcta

SEQ ID NO: 1857202 - DNA, 15 bp, Homo sapiens
acagcaagttgctag

SEQ ID NO: 1857203 - DNA, 15 bp, Homo sapiens
cagcaagttgctagt

SEQ ID NO: 1857204 - DNA, 15 bp, Homo sapiens
agcaagttgctagtg

SEQ ID NO: 1857205 - DNA, 15 bp, Homo sapiens
gcaagttgctagtgg

SEQ ID NO: 1857206 - DNA, 15 bp, Homo sapiens
caagttgctagtggc

SEQ ID NO: 1857207 - DNA, 15 bp, Homo sapiens
aagttgctagtggct

SEQ ID NO: 1857208 - DNA, 15 bp, Homo sapiens
agttgctagtggctg

SEQ ID NO: 1857209 - DNA, 15 bp, Homo sapiens
gttgctagtggctgt

SEQ ID NO: 1857210 - DNA, 15 bp, Homo sapiens
ttgctagtggctgta

SEQ ID NO: 1857211 - DNA, 15 bp, Homo sapiens
tgctagtggctgtag

SEQ ID NO: 1857212 - DNA, 15 bp, Homo sapiens
gctagtggctgtaga

SEQ ID NO: 1857213 - DNA, 15 bp, Homo sapiens
ctagtggctgtagac

SEQ ID NO: 1857214 - DNA, 15 bp, Homo sapiens
tagtggctgtagacc

SEQ ID NO: 1857215 - DNA, 15 bp, Homo sapiens
agtggctgtagaccc

SEQ ID NO: 1857216 - DNA, 15 bp, Homo sapiens
gtggctgtagaccca

SEQ ID NO: 1857217 - DNA, 15 bp, Homo sapiens
tggctgtagacccaa

SEQ ID NO: 1857218 - DNA, 15 bp, Homo sapiens
ggctgtagacccaat

SEQ ID NO: 1857219 - DNA, 15 bp, Homo sapiens
gctgtagacccaatg

SEQ ID NO: 1857220 - DNA, 15 bp, Homo sapiens
ctgtagacccaatgc

SEQ ID NO: 1857221 - DNA, 15 bp, Homo sapiens
tgtagacccaatgca

SEQ ID NO: 1857222 - DNA, 15 bp, Homo sapiens
gtagacccaatgcaa

SEQ ID NO: 1857223 - DNA, 15 bp, Homo sapiens
tagacccaatgcaaa

SEQ ID NO: 1857224 - DNA, 15 bp, Homo sapiens
agacccaatgcaaac

SEQ ID NO: 1857225 - DNA, 15 bp, Homo sapiens
gacccaatgcaaacc

SEQ ID NO: 1857226 - DNA, 15 bp, Homo sapiens
acccaatgcaaaccc

SEQ ID NO: 1857227 - DNA, 15 bp, Homo sapiens
cccaatgcaaacccc

SEQ ID NO: 1857228 - DNA, 15 bp, Homo sapiens
ccaatgcaaacccca

SEQ ID NO: 1857229 - DNA, 15 bp, Homo sapiens
caatgcaaaccccac

SEQ ID NO: 1857230 - DNA, 15 bp, Homo sapiens
aatgcaaaccccacc

SEQ ID NO: 1857231 - DNA, 15 bp, Homo sapiens
atgcaaaccccaccc

SEQ ID NO: 1857232 - DNA, 15 bp, Homo sapiens
tgcaaaccccaccca

SEQ ID NO: 1857233 - DNA, 15 bp, Homo sapiens
gcaaaccccacccaa

SEQ ID NO: 1857234 - DNA, 15 bp, Homo sapiens
caaaccccacccaaa

SEQ ID NO: 1857235 - DNA, 15 bp, Homo sapiens
aaaccccacccaaac

SEQ ID NO: 1857236 - DNA, 15 bp, Homo sapiens
aaccccacccaaacc

SEQ ID NO: 1857237 - DNA, 15 bp, Homo sapiens
accccacccaaacca

SEQ ID NO: 1857238 - DNA, 15 bp, Homo sapiens
ccccacccaaaccag

SEQ ID NO: 1857239 - DNA, 15 bp, Homo sapiens
cccacccaaaccaga

SEQ ID NO: 1857240 - DNA, 15 bp, Homo sapiens
ccacccaaaccagag

SEQ ID NO: 1857241 - DNA, 15 bp, Homo sapiens
cacccaaaccagagc

SEQ ID NO: 1857242 - DNA, 15 bp, Homo sapiens
acccaaaccagagcc

SEQ ID NO: 1857243 - DNA, 15 bp, Homo sapiens
cccaaaccagagccc

SEQ ID NO: 1857244 - DNA, 15 bp, Homo sapiens
ccaaaccagagcccc

SEQ ID NO: 1857245 - DNA, 15 bp, Homo sapiens
caaaccagagcccca

SEQ ID NO: 1857246 - DNA, 15 bp, Homo sapiens
aaaccagagccccac

SEQ ID NO: 1857247 - DNA, 15 bp, Homo sapiens
aaccagagccccacc

SEQ ID NO: 1857248 - DNA, 15 bp, Homo sapiens
accagagccccaccc

SEQ ID NO: 1857249 - DNA, 15 bp, Homo sapiens
ccagagccccaccca

SEQ ID NO: 1857250 - DNA, 15 bp, Homo sapiens
cagagccccacccaa

SEQ ID NO: 1857251 - DNA, 15 bp, Homo sapiens
agagccccacccaaa

SEQ ID NO: 1857252 - DNA, 15 bp, Homo sapiens
gagccccacccaaac

SEQ ID NO: 1857253 - DNA, 15 bp, Homo sapiens
agccccacccaaacc

SEQ ID NO: 1857254 - DNA, 15 bp, Homo sapiens
gccccacccaaacca

SEQ ID NO: 1857255 - DNA, 15 bp, Homo sapiens
cccacccaaaccagg

SEQ ID NO: 1857256 - DNA, 15 bp, Homo sapiens
ccacccaaaccaggg

SEQ ID NO: 1857257 - DNA, 15 bp, Homo sapiens
cacccaaaccagggc

SEQ ID NO: 1857258 - DNA, 15 bp, Homo sapiens
acccaaaccagggct

SEQ ID NO: 1857259 - DNA, 15 bp, Homo sapiens
cccaaaccagggctt

SEQ ID NO: 1857260 - DNA, 15 bp, Homo sapiens
ccaaaccagggcttt

SEQ ID NO: 1857261 - DNA, 15 bp, Homo sapiens
caaaccagggctttt

SEQ ID NO: 1857262 - DNA, 15 bp, Homo sapiens
aaaccagggcttttc

SEQ ID NO: 1857263 - DNA, 15 bp, Homo sapiens
aaccagggcttttct

SEQ ID NO: 1857264 - DNA, 15 bp, Homo sapiens
accagggcttttctc

SEQ ID NO: 1857265 - DNA, 15 bp, Homo sapiens
ccagggcttttctct

SEQ ID NO: 1857266 - DNA, 15 bp, Homo sapiens
cagggcttttctctt

SEQ ID NO: 1857267 - DNA, 15 bp, Homo sapiens
agggcttttctcttg

SEQ ID NO: 1857268 - DNA, 15 bp, Homo sapiens
gggcttttctcttga

SEQ ID NO: 1857269 - DNA, 15 bp, Homo sapiens
ggcttttctcttgaa

SEQ ID NO: 1857270 - DNA, 15 bp, Homo sapiens
gcttttctcttgaat

SEQ ID NO: 1857271 - DNA, 15 bp, Homo sapiens
cttttctcttgaatg

SEQ ID NO: 1857272 - DNA, 15 bp, Homo sapiens
ttttctcttgaatgc

SEQ ID NO: 1857273 - DNA, 15 bp, Homo sapiens
tttctcttgaatgca

SEQ ID NO: 1857274 - DNA, 15 bp, Homo sapiens
ttctcttgaatgcat

SEQ ID NO: 1857275 - DNA, 15 bp, Homo sapiens
tctcttgaatgcata

SEQ ID NO: 1857276 - DNA, 15 bp, Homo sapiens
ctcttgaatgcatat

SEQ ID NO: 1857277 - DNA, 15 bp, Homo sapiens
tcttgaatgcatatg

SEQ ID NO: 1857278 - DNA, 15 bp, Homo sapiens
cttgaatgcatatgg

SEQ ID NO: 1857279 - DNA, 15 bp, Homo sapiens
ttgaatgcatatggc

SEQ ID NO: 1857280 - DNA, 15 bp, Homo sapiens
tgaatgcatatggca

SEQ ID NO: 1857281 - DNA, 15 bp, Homo sapiens
gaatgcatatggcaa

SEQ ID NO: 1857282 - DNA, 15 bp, Homo sapiens
aatgcatatggcaag

SEQ ID NO: 1857283 - DNA, 15 bp, Homo sapiens
atgcatatggcaaga

SEQ ID NO: 1857284 - DNA, 15 bp, Homo sapiens
tgcatatggcaagag

SEQ ID NO: 1857285 - DNA, 15 bp, Homo sapiens
gcatatggcaagaga

SEQ ID NO: 1857286 - DNA, 15 bp, Homo sapiens
catatggcaagagag

SEQ ID NO: 1857287 - DNA, 15 bp, Homo sapiens
atatggcaagagaga

SEQ ID NO: 1857288 - DNA, 15 bp, Homo sapiens
tatggcaagagagag

SEQ ID NO: 1857289 - DNA, 15 bp, Homo sapiens
atggcaagagagaga

SEQ ID NO: 1857290 - DNA, 15 bp, Homo sapiens
tggcaagagagagac

SEQ ID NO: 1857291 - DNA, 15 bp, Homo sapiens
ggcaagagagagaca

SEQ ID NO: 1857292 - DNA, 15 bp, Homo sapiens
gcaagagagagacat

SEQ ID NO: 1857293 - DNA, 15 bp, Homo sapiens
caagagagagacatc

SEQ ID NO: 1857294 - DNA, 15 bp, Homo sapiens
aagagagagacatcc

SEQ ID NO: 1857295 - DNA, 15 bp, Homo sapiens
agagagagacatccc

SEQ ID NO: 1857296 - DNA, 15 bp, Homo sapiens
gagagagacatccca

SEQ ID NO: 1857297 - DNA, 15 bp, Homo sapiens
agagagacatcccac

SEQ ID NO: 1857298 - DNA, 15 bp, Homo sapiens
gagagacatcccact

SEQ ID NO: 1857299 - DNA, 15 bp, Homo sapiens
agagacatcccactg

SEQ ID NO: 1857300 - DNA, 15 bp, Homo sapiens
gagacatcccactgt

SEQ ID NO: 1857301 - DNA, 15 bp, Homo sapiens
agacatcccactgtc

SEQ ID NO: 1857302 - DNA, 15 bp, Homo sapiens
gacatcccactgtcc

SEQ ID NO: 1857303 - DNA, 15 bp, Homo sapiens
acatcccactgtcca

SEQ ID NO: 1857304 - DNA, 15 bp, Homo sapiens
catcccactgtccat

SEQ ID NO: 1857305 - DNA, 15 bp, Homo sapiens
atcccactgtccatt

SEQ ID NO: 1857306 - DNA, 15 bp, Homo sapiens
tcccactgtccattg

SEQ ID NO: 1857307 - DNA, 15 bp, Homo sapiens
cccactgtccattgt

SEQ ID NO: 1857308 - DNA, 15 bp, Homo sapiens
ccactgtccattgtg

SEQ ID NO: 1857309 - DNA, 15 bp, Homo sapiens
cactgtccattgtgt

SEQ ID NO: 1857310 - DNA, 15 bp, Homo sapiens
actgtccattgtgtt

SEQ ID NO: 1857311 - DNA, 15 bp, Homo sapiens
ctgtccattgtgttg

SEQ ID NO: 1857312 - DNA, 15 bp, Homo sapiens
tgtccattgtgttga

SEQ ID NO: 1857313 - DNA, 15 bp, Homo sapiens
gtccattgtgttgaa

SEQ ID NO: 1857314 - DNA, 15 bp, Homo sapiens
tccattgtgttgaag

SEQ ID NO: 1857315 - DNA, 15 bp, Homo sapiens
ccattgtgttgaagg

SEQ ID NO: 1857316 - DNA, 15 bp, Homo sapiens
cattgtgttgaaggt

SEQ ID NO: 1857317 - DNA, 15 bp, Homo sapiens
attgtgttgaaggta

SEQ ID NO: 1857318 - DNA, 15 bp, Homo sapiens
ttgtgttgaaggtag

SEQ ID NO: 1857319 - DNA, 15 bp, Homo sapiens
tgtgttgaaggtaga

SEQ ID NO: 1857320 - DNA, 15 bp, Homo sapiens
gtgttgaaggtagaa

SEQ ID NO: 1857321 - DNA, 15 bp, Homo sapiens
tgttgaaggtagaaa

SEQ ID NO: 1857322 - DNA, 15 bp, Homo sapiens
gttgaaggtagaaaa

SEQ ID NO: 1857323 - DNA, 15 bp, Homo sapiens
ttgaaggtagaaaat

SEQ ID NO: 1857324 - DNA, 15 bp, Homo sapiens
tgaaggtagaaaatg

SEQ ID NO: 1857325 - DNA, 15 bp, Homo sapiens
gaaggtagaaaatgc

SEQ ID NO: 1857326 - DNA, 15 bp, Homo sapiens
aaggtagaaaatgca

SEQ ID NO: 1857327 - DNA, 15 bp, Homo sapiens
aggtagaaaatgcag

SEQ ID NO: 1857328 - DNA, 15 bp, Homo sapiens
ggtagaaaatgcaga

SEQ ID NO: 1857329 - DNA, 15 bp, Homo sapiens
gtagaaaatgcagaa

SEQ ID NO: 1857330 - DNA, 15 bp, Homo sapiens
tagaaaatgcagaat

SEQ ID NO: 1857331 - DNA, 15 bp, Homo sapiens
agaaaatgcagaatg

SEQ ID NO: 1857332 - DNA, 15 bp, Homo sapiens
gaaaatgcagaatgt

SEQ ID NO: 1857333 - DNA, 15 bp, Homo sapiens
aaaatgcagaatgtg

SEQ ID NO: 1857334 - DNA, 15 bp, Homo sapiens
aaatgcagaatgtgg

SEQ ID NO: 1857335 - DNA, 15 bp, Homo sapiens
aatgcagaatgtggc

SEQ ID NO: 1857336 - DNA, 15 bp, Homo sapiens
atgcagaatgtggca

SEQ ID NO: 1857337 - DNA, 15 bp, Homo sapiens
tgcagaatgtggcag

SEQ ID NO: 1857338 - DNA, 15 bp, Homo sapiens
gcagaatgtggcaga

SEQ ID NO: 1857339 - DNA, 15 bp, Homo sapiens
cagaatgtggcagag

SEQ ID NO: 1857340 - DNA, 15 bp, Homo sapiens
agaatgtggcagagt

SEQ ID NO: 1857341 - DNA, 15 bp, Homo sapiens
gaatgtggcagagtg

SEQ ID NO: 1857342 - DNA, 15 bp, Homo sapiens
aatgtggcagagtga

SEQ ID NO: 1857343 - DNA, 15 bp, Homo sapiens
atgtggcagagtgag

SEQ ID NO: 1857344 - DNA, 15 bp, Homo sapiens
tgtggcagagtgagc

SEQ ID NO: 1857345 - DNA, 15 bp, Homo sapiens
gtggcagagtgagct

SEQ ID NO: 1857346 - DNA, 15 bp, Homo sapiens
tggcagagtgagcta

SEQ ID NO: 1857347 - DNA, 15 bp, Homo sapiens
ggcagagtgagctaa

SEQ ID NO: 1857348 - DNA, 15 bp, Homo sapiens
gcagagtgagctaac

SEQ ID NO: 1857349 - DNA, 15 bp, Homo sapiens
cagagtgagctaacc

SEQ ID NO: 1857350 - DNA, 15 bp, Homo sapiens
agagtgagctaaccc

SEQ ID NO: 1857351 - DNA, 15 bp, Homo sapiens
gagtgagctaacccg

SEQ ID NO: 1857352 - DNA, 15 bp, Homo sapiens
agtgagctaacccgc

SEQ ID NO: 1857353 - DNA, 15 bp, Homo sapiens
gtgagctaacccgct

SEQ ID NO: 1857354 - DNA, 15 bp, Homo sapiens
tgagctaacccgctt

SEQ ID NO: 1857355 - DNA, 15 bp, Homo sapiens
gagctaacccgcttg

SEQ ID NO: 1857356 - DNA, 15 bp, Homo sapiens
agctaacccgcttgg

SEQ ID NO: 1857357 - DNA, 15 bp, Homo sapiens
gctaacccgcttggt

SEQ ID NO: 1857358 - DNA, 15 bp, Homo sapiens
ctaacccgcttggtg

SEQ ID NO: 1857359 - DNA, 15 bp, Homo sapiens
taacccgcttggtgg

SEQ ID NO: 1857360 - DNA, 15 bp, Homo sapiens
aacccgcttggtggc

SEQ ID NO: 1857361 - DNA, 15 bp, Homo sapiens
acccgcttggtggcc

SEQ ID NO: 1857362 - DNA, 15 bp, Homo sapiens
cccgcttggtggccc

SEQ ID NO: 1857363 - DNA, 15 bp, Homo sapiens
ccgcttggtggccct

SEQ ID NO: 1857364 - DNA, 15 bp, Homo sapiens
cgcttggtggccctc

SEQ ID NO: 1857365 - DNA, 15 bp, Homo sapiens
gcttggtggccctca

SEQ ID NO: 1857366 - DNA, 15 bp, Homo sapiens
cttggtggccctcac

SEQ ID NO: 1857367 - DNA, 15 bp, Homo sapiens
ttggtggccctcacc

SEQ ID NO: 1857368 - DNA, 15 bp, Homo sapiens
tggtggccctcaccc

SEQ ID NO: 1857369 - DNA, 15 bp, Homo sapiens
ggtggccctcaccct

SEQ ID NO: 1857370 - DNA, 15 bp, Homo sapiens
gtggccctcaccctg

SEQ ID NO: 1857371 - DNA, 15 bp, Homo sapiens
tggccctcaccctgg

SEQ ID NO: 1857372 - DNA, 15 bp, Homo sapiens
ggccctcaccctggc

SEQ ID NO: 1857373 - DNA, 15 bp, Homo sapiens
gccctcaccctggca

SEQ ID NO: 1857374 - DNA, 15 bp, Homo sapiens
ccctcaccctggcaa

SEQ ID NO: 1857375 - DNA, 15 bp, Homo sapiens
cctcaccctggcaag

SEQ ID NO: 1857376 - DNA, 15 bp, Homo sapiens
ctcaccctggcaaga

SEQ ID NO: 1857377 - DNA, 15 bp, Homo sapiens
tcaccctggcaagag

SEQ ID NO: 1857378 - DNA, 15 bp, Homo sapiens
caccctggcaagaga

SEQ ID NO: 1857379 - DNA, 15 bp, Homo sapiens
accctggcaagagac

SEQ ID NO: 1857380 - DNA, 15 bp, Homo sapiens
ccctggcaagagaca

SEQ ID NO: 1857381 - DNA, 15 bp, Homo sapiens
cctggcaagagacag

SEQ ID NO: 1857382 - DNA, 15 bp, Homo sapiens
ctggcaagagacaga

SEQ ID NO: 1857383 - DNA, 15 bp, Homo sapiens
tggcaagagacagat

SEQ ID NO: 1857384 - DNA, 15 bp, Homo sapiens
ggcaagagacagatt

SEQ ID NO: 1857385 - DNA, 15 bp, Homo sapiens
gcaagagacagattt

SEQ ID NO: 1857386 - DNA, 15 bp, Homo sapiens
caagagacagatttt

SEQ ID NO: 1857387 - DNA, 15 bp, Homo sapiens
aagagacagattttc

SEQ ID NO: 1857388 - DNA, 15 bp, Homo sapiens
agagacagattttcc

SEQ ID NO: 1857389 - DNA, 15 bp, Homo sapiens
gagacagattttcct

SEQ ID NO: 1857390 - DNA, 15 bp, Homo sapiens
agacagattttcctt

SEQ ID NO: 1857391 - DNA, 15 bp, Homo sapiens
gacagattttccttc

SEQ ID NO: 1857392 - DNA, 15 bp, Homo sapiens
acagattttccttcc

SEQ ID NO: 1857393 - DNA, 15 bp, Homo sapiens
cagattttccttcct

SEQ ID NO: 1857394 - DNA, 15 bp, Homo sapiens
agattttccttcctc

SEQ ID NO: 1857395 - DNA, 15 bp, Homo sapiens
gattttccttcctct

SEQ ID NO: 1857396 - DNA, 15 bp, Homo sapiens
attttccttcctctc

SEQ ID NO: 1857397 - DNA, 15 bp, Homo sapiens
ttttccttcctctcc

SEQ ID NO: 1857398 - DNA, 15 bp, Homo sapiens
tttccttcctctccc

SEQ ID NO: 1857399 - DNA, 15 bp, Homo sapiens
ttccttcctctccct

SEQ ID NO: 1857400 - DNA, 15 bp, Homo sapiens
tccttcctctccctg

SEQ ID NO: 1857401 - DNA, 15 bp, Homo sapiens
ccttcctctccctga

SEQ ID NO: 1857402 - DNA, 15 bp, Homo sapiens
cttcctctccctgaa

SEQ ID NO: 1857403 - DNA, 15 bp, Homo sapiens
ttcctctccctgaag

SEQ ID NO: 1857404 - DNA, 15 bp, Homo sapiens
tcctctccctgaagg

SEQ ID NO: 1857405 - DNA, 15 bp, Homo sapiens
cctctccctgaaggg

SEQ ID NO: 1857406 - DNA, 15 bp, Homo sapiens
ctctccctgaagggt

SEQ ID NO: 1857407 - DNA, 15 bp, Homo sapiens
tctccctgaagggtt

SEQ ID NO: 1857408 - DNA, 15 bp, Homo sapiens
ctccctgaagggtta

SEQ ID NO: 1857409 - DNA, 15 bp, Homo sapiens
tccctgaagggttaa

SEQ ID NO: 1857410 - DNA, 15 bp, Homo sapiens
ccctgaagggttaag

SEQ ID NO: 1857411 - DNA, 15 bp, Homo sapiens
cctgaagggttaaga

SEQ ID NO: 1857412 - DNA, 15 bp, Homo sapiens
ctgaagggttaagac

SEQ ID NO: 1857413 - DNA, 15 bp, Homo sapiens
tgaagggttaagaca

SEQ ID NO: 1857414 - DNA, 15 bp, Homo sapiens
gaagggttaagacaa

SEQ ID NO: 1857415 - DNA, 15 bp, Homo sapiens
aagggttaagacaaa

SEQ ID NO: 1857416 - DNA, 15 bp, Homo sapiens
agggttaagacaaag

SEQ ID NO: 1857417 - DNA, 15 bp, Homo sapiens
gggttaagacaaaga

SEQ ID NO: 1857418 - DNA, 15 bp, Homo sapiens
ggttaagacaaagaa

SEQ ID NO: 1857419 - DNA, 15 bp, Homo sapiens
gttaagacaaagaaa

SEQ ID NO: 1857420 - DNA, 15 bp, Homo sapiens
ttaagacaaagaaaa

SEQ ID NO: 1857421 - DNA, 15 bp, Homo sapiens
taagacaaagaaaat

SEQ ID NO: 1857422 - DNA, 15 bp, Homo sapiens
aagacaaagaaaata

SEQ ID NO: 1857423 - DNA, 15 bp, Homo sapiens
agacaaagaaaatat

SEQ ID NO: 1857424 - DNA, 15 bp, Homo sapiens
gacaaagaaaatatc

SEQ ID NO: 1857425 - DNA, 15 bp, Homo sapiens
acaaagaaaatatct

SEQ ID NO: 1857426 - DNA, 15 bp, Homo sapiens
caaagaaaatatctg

SEQ ID NO: 1857427 - DNA, 15 bp, Homo sapiens
aaagaaaatatctga

SEQ ID NO: 1857428 - DNA, 15 bp, Homo sapiens
aagaaaatatctgaa

SEQ ID NO: 1857429 - DNA, 15 bp, Homo sapiens
agaaaatatctgaaa

SEQ ID NO: 1857430 - DNA, 15 bp, Homo sapiens
gaaaatatctgaaac

SEQ ID NO: 1857431 - DNA, 15 bp, Homo sapiens
aaaatatctgaaact

SEQ ID NO: 1857432 - DNA, 15 bp, Homo sapiens
aaatatctgaaactt

SEQ ID NO: 1857433 - DNA, 15 bp, Homo sapiens
aatatctgaaacttt

SEQ ID NO: 1857434 - DNA, 15 bp, Homo sapiens
atatctgaaactttt

SEQ ID NO: 1857435 - DNA, 15 bp, Homo sapiens
tatctgaaacttttc

SEQ ID NO: 1857436 - DNA, 15 bp, Homo sapiens
atctgaaacttttcc

SEQ ID NO: 1857437 - DNA, 15 bp, Homo sapiens
tctgaaacttttcct

SEQ ID NO: 1857438 - DNA, 15 bp, Homo sapiens
ctgaaacttttccta

SEQ ID NO: 1857439 - DNA, 15 bp, Homo sapiens
tgaaacttttcctag

SEQ ID NO: 1857440 - DNA, 15 bp, Homo sapiens
gaaacttttcctagc

SEQ ID NO: 1857441 - DNA, 15 bp, Homo sapiens
aaacttttcctagct

SEQ ID NO: 1857442 - DNA, 15 bp, Homo sapiens
aacttttcctagctg

SEQ ID NO: 1857443 - DNA, 15 bp, Homo sapiens
acttttcctagctga

SEQ ID NO: 1857444 - DNA, 15 bp, Homo sapiens
cttttcctagctgag

SEQ ID NO: 1857445 - DNA, 15 bp, Homo sapiens
ttttcctagctgagc

SEQ ID NO: 1857446 - DNA, 15 bp, Homo sapiens
tttcctagctgagcc

SEQ ID NO: 1857447 - DNA, 15 bp, Homo sapiens
ttcctagctgagcct

SEQ ID NO: 1857448 - DNA, 15 bp, Homo sapiens
tcctagctgagcctt

SEQ ID NO: 1857449 - DNA, 15 bp, Homo sapiens
cctagctgagccttt

SEQ ID NO: 1857450 - DNA, 15 bp, Homo sapiens
ctagctgagcctttg

SEQ ID NO: 1857451 - DNA, 15 bp, Homo sapiens
tagctgagcctttgc

SEQ ID NO: 1857452 - DNA, 15 bp, Homo sapiens
agctgagcctttgct

SEQ ID NO: 1857453 - DNA, 15 bp, Homo sapiens
gctgagcctttgctc

SEQ ID NO: 1857454 - DNA, 15 bp, Homo sapiens
ctgagcctttgctcc

SEQ ID NO: 1857455 - DNA, 15 bp, Homo sapiens
tgagcctttgctcca

SEQ ID NO: 1857456 - DNA, 15 bp, Homo sapiens
gagcctttgctccag

SEQ ID NO: 1857457 - DNA, 15 bp, Homo sapiens
agcctttgctccaga

SEQ ID NO: 1857458 - DNA, 15 bp, Homo sapiens
gcctttgctccagaa

SEQ ID NO: 1857459 - DNA, 15 bp, Homo sapiens
cctttgctccagaac

SEQ ID NO: 1857460 - DNA, 15 bp, Homo sapiens
ctttgctccagaact

SEQ ID NO: 1857461 - DNA, 15 bp, Homo sapiens
tttgctccagaactc

SEQ ID NO: 1857462 - DNA, 15 bp, Homo sapiens
ttgctccagaactca

SEQ ID NO: 1857463 - DNA, 15 bp, Homo sapiens
tgctccagaactcag

SEQ ID NO: 1857464 - DNA, 15 bp, Homo sapiens
gctccagaactcaga

SEQ ID NO: 1857465 - DNA, 15 bp, Homo sapiens
ctccagaactcagac

SEQ ID NO: 1857466 - DNA, 15 bp, Homo sapiens
tccagaactcagaca

SEQ ID NO: 1857467 - DNA, 15 bp, Homo sapiens
ccagaactcagacac

SEQ ID NO: 1857468 - DNA, 15 bp, Homo sapiens
cagaactcagacact

SEQ ID NO: 1857469 - DNA, 15 bp, Homo sapiens
agaactcagacactt

SEQ ID NO: 1857470 - DNA, 15 bp, Homo sapiens
gaactcagacacttt

SEQ ID NO: 1857471 - DNA, 15 bp, Homo sapiens
aactcagacactttt

SEQ ID NO: 1857472 - DNA, 15 bp, Homo sapiens
actcagacacttttg

SEQ ID NO: 1857473 - DNA, 15 bp, Homo sapiens
ctcagacacttttgc

SEQ ID NO: 1857474 - DNA, 15 bp, Homo sapiens
tcagacacttttgcg

SEQ ID NO: 1857475 - DNA, 15 bp, Homo sapiens
cagacacttttgcga

SEQ ID NO: 1857476 - DNA, 15 bp, Homo sapiens
agacacttttgcgac

SEQ ID NO: 1857477 - DNA, 15 bp, Homo sapiens
gacacttttgcgacg

SEQ ID NO: 1857478 - DNA, 15 bp, Homo sapiens
acacttttgcgacgg

SEQ ID NO: 1857479 - DNA, 15 bp, Homo sapiens
cacttttgcgacgga

SEQ ID NO: 1857480 - DNA, 15 bp, Homo sapiens
acttttgcgacggaa

SEQ ID NO: 1857481 - DNA, 15 bp, Homo sapiens
cttttgcgacggaag

SEQ ID NO: 1857482 - DNA, 15 bp, Homo sapiens
ttttgcgacggaagt

SEQ ID NO: 1857483 - DNA, 15 bp, Homo sapiens
tttgcgacggaagtg

SEQ ID NO: 1857484 - DNA, 15 bp, Homo sapiens
ttgcgacggaagtgg

SEQ ID NO: 1857485 - DNA, 15 bp, Homo sapiens
tgcgacggaagtggg

SEQ ID NO: 1857486 - DNA, 15 bp, Homo sapiens
gcgacggaagtgggg

SEQ ID NO: 1857487 - DNA, 15 bp, Homo sapiens
cgacggaagtggggc

SEQ ID NO: 1857488 - DNA, 15 bp, Homo sapiens
gacggaagtggggca

SEQ ID NO: 1857489 - DNA, 15 bp, Homo sapiens
acggaagtggggcat

SEQ ID NO: 1857490 - DNA, 15 bp, Homo sapiens
cggaagtggggcatt

SEQ ID NO: 1857491 - DNA, 15 bp, Homo sapiens
ggaagtggggcattg

SEQ ID NO: 1857492 - DNA, 15 bp, Homo sapiens
gaagtggggcattgg

SEQ ID NO: 1857493 - DNA, 15 bp, Homo sapiens
aagtggggcattggg

SEQ ID NO: 1857494 - DNA, 15 bp, Homo sapiens
agtggggcattgggg

SEQ ID NO: 1857495 - DNA, 15 bp, Homo sapiens
gtggggcattgggga

SEQ ID NO: 1857496 - DNA, 15 bp, Homo sapiens
tggggcattggggag

SEQ ID NO: 1857497 - DNA, 15 bp, Homo sapiens
ggggcattggggagg

SEQ ID NO: 1857498 - DNA, 15 bp, Homo sapiens
gggcattggggaggc

SEQ ID NO: 1857499 - DNA, 15 bp, Homo sapiens
ggcattggggaggca

SEQ ID NO: 1857500 - DNA, 15 bp, Homo sapiens
gcattggggaggcag

SEQ ID NO: 1857501 - DNA, 15 bp, Homo sapiens
cattggggaggcaga

SEQ ID NO: 1857502 - DNA, 15 bp, Homo sapiens
attggggaggcagaa

SEQ ID NO: 1857503 - DNA, 15 bp, Homo sapiens
ttggggaggcagaaa

SEQ ID NO: 1857504 - DNA, 15 bp, Homo sapiens
tggggaggcagaaaa

SEQ ID NO: 1857505 - DNA, 15 bp, Homo sapiens
ggggaggcagaaaaa

SEQ ID NO: 1857506 - DNA, 15 bp, Homo sapiens
gggaggcagaaaaag

SEQ ID NO: 1857507 - DNA, 15 bp, Homo sapiens
ggaggcagaaaaagc

SEQ ID NO: 1857508 - DNA, 15 bp, Homo sapiens
gaggcagaaaaagcc

SEQ ID NO: 1857509 - DNA, 15 bp, Homo sapiens
aggcagaaaaagcca

SEQ ID NO: 1857510 - DNA, 15 bp, Homo sapiens
ggcagaaaaagccaa

SEQ ID NO: 1857511 - DNA, 15 bp, Homo sapiens
gcagaaaaagccaat

SEQ ID NO: 1857512 - DNA, 15 bp, Homo sapiens
cagaaaaagccaata

SEQ ID NO: 1857513 - DNA, 15 bp, Homo sapiens
agaaaaagccaatac

SEQ ID NO: 1857514 - DNA, 15 bp, Homo sapiens
gaaaaagccaataca

SEQ ID NO: 1857515 - DNA, 15 bp, Homo sapiens
aaaaagccaatacat

SEQ ID NO: 1857516 - DNA, 15 bp, Homo sapiens
aaaagccaatacata

SEQ ID NO: 1857517 - DNA, 15 bp, Homo sapiens
aaagccaatacataa

SEQ ID NO: 1857518 - DNA, 15 bp, Homo sapiens
aagccaatacataaa

SEQ ID NO: 1857519 - DNA, 15 bp, Homo sapiens
agccaatacataaaa

SEQ ID NO: 1857520 - DNA, 15 bp, Homo sapiens
gccaatacataaaaa

SEQ ID NO: 1857521 - DNA, 15 bp, Homo sapiens
ccaatacataaaaaa

SEQ ID NO: 1857522 - DNA, 15 bp, Homo sapiens
caatacataaaaaag

SEQ ID NO: 1857523 - DNA, 15 bp, Homo sapiens
aatacataaaaaagc

SEQ ID NO: 1857524 - DNA, 15 bp, Homo sapiens
atacataaaaaagca

SEQ ID NO: 1857525 - DNA, 15 bp, Homo sapiens
tacataaaaaagcag

SEQ ID NO: 1857526 - DNA, 15 bp, Homo sapiens
acataaaaaagcagc

SEQ ID NO: 1857527 - DNA, 15 bp, Homo sapiens
cataaaaaagcagca

SEQ ID NO: 1857528 - DNA, 15 bp, Homo sapiens
ataaaaaagcagcaa

SEQ ID NO: 1857529 - DNA, 15 bp, Homo sapiens
taaaaaagcagcaac

SEQ ID NO: 1857530 - DNA, 15 bp, Homo sapiens
aaaaaagcagcaacc

SEQ ID NO: 1857531 - DNA, 15 bp, Homo sapiens
aaaaagcagcaacct

SEQ ID NO: 1857532 - DNA, 15 bp, Homo sapiens
aaaagcagcaacctc

SEQ ID NO: 1857533 - DNA, 15 bp, Homo sapiens
aaagcagcaacctca

SEQ ID NO: 1857534 - DNA, 15 bp, Homo sapiens
aagcagcaacctcac

SEQ ID NO: 1857535 - DNA, 15 bp, Homo sapiens
agcagcaacctcacc

SEQ ID NO: 1857536 - DNA, 15 bp, Homo sapiens
gcagcaacctcacca

SEQ ID NO: 1857537 - DNA, 15 bp, Homo sapiens
cagcaacctcaccac

SEQ ID NO: 1857538 - DNA, 15 bp, Homo sapiens
agcaacctcaccacc

SEQ ID NO: 1857539 - DNA, 15 bp, Homo sapiens
gcaacctcaccacct

SEQ ID NO: 1857540 - DNA, 15 bp, Homo sapiens
caacctcaccacctc

SEQ ID NO: 1857541 - DNA, 15 bp, Homo sapiens
aacctcaccacctca

SEQ ID NO: 1857542 - DNA, 15 bp, Homo sapiens
acctcaccacctcac

SEQ ID NO: 1857543 - DNA, 15 bp, Homo sapiens
cctcaccacctcacc

SEQ ID NO: 1857544 - DNA, 15 bp, Homo sapiens
ctcaccacctcacct

SEQ ID NO: 1857545 - DNA, 15 bp, Homo sapiens
tcaccacctcacctg

SEQ ID NO: 1857546 - DNA, 15 bp, Homo sapiens
caccacctcacctgg

SEQ ID NO: 1857547 - DNA, 15 bp, Homo sapiens
accacctcacctggg

SEQ ID NO: 1857548 - DNA, 15 bp, Homo sapiens
ccacctcacctgggt

SEQ ID NO: 1857549 - DNA, 15 bp, Homo sapiens
cacctcacctgggtc

SEQ ID NO: 1857550 - DNA, 15 bp, Homo sapiens
acctcacctgggtcc

SEQ ID NO: 1857551 - DNA, 15 bp, Homo sapiens
cctcacctgggtccc

SEQ ID NO: 1857552 - DNA, 15 bp, Homo sapiens
ctcacctgggtcccc

SEQ ID NO: 1857553 - DNA, 15 bp, Homo sapiens
tcacctgggtcccca

SEQ ID NO: 1857554 - DNA, 15 bp, Homo sapiens
cacctgggtccccat

SEQ ID NO: 1857555 - DNA, 15 bp, Homo sapiens
acctgggtccccatg

SEQ ID NO: 1857556 - DNA, 15 bp, Homo sapiens
cctgggtccccatga

SEQ ID NO: 1857557 - DNA, 15 bp, Homo sapiens
ctgggtccccatgaa

SEQ ID NO: 1857558 - DNA, 15 bp, Homo sapiens
tgggtccccatgaaa

SEQ ID NO: 1857559 - DNA, 15 bp, Homo sapiens
gggtccccatgaaac

SEQ ID NO: 1857560 - DNA, 15 bp, Homo sapiens
ggtccccatgaaacc

SEQ ID NO: 1857561 - DNA, 15 bp, Homo sapiens
gtccccatgaaacca

SEQ ID NO: 1857562 - DNA, 15 bp, Homo sapiens
tccccatgaaaccat

SEQ ID NO: 1857563 - DNA, 15 bp, Homo sapiens
ccccatgaaaccatt

SEQ ID NO: 1857564 - DNA, 15 bp, Homo sapiens
cccatgaaaccattc

SEQ ID NO: 1857565 - DNA, 15 bp, Homo sapiens
ccatgaaaccattcc

SEQ ID NO: 1857566 - DNA, 15 bp, Homo sapiens
catgaaaccattcca

SEQ ID NO: 1857567 - DNA, 15 bp, Homo sapiens
atgaaaccattccac

SEQ ID NO: 1857568 - DNA, 15 bp, Homo sapiens
tgaaaccattccacc

SEQ ID NO: 1857569 - DNA, 15 bp, Homo sapiens
gaaaccattccaccc

SEQ ID NO: 1857570 - DNA, 15 bp, Homo sapiens
aaaccattccaccca

SEQ ID NO: 1857571 - DNA, 15 bp, Homo sapiens
aaccattccacccag

SEQ ID NO: 1857572 - DNA, 15 bp, Homo sapiens
accattccacccaga

SEQ ID NO: 1857573 - DNA, 15 bp, Homo sapiens
ccattccacccagat

SEQ ID NO: 1857574 - DNA, 15 bp, Homo sapiens
cattccacccagatg

SEQ ID NO: 1857575 - DNA, 15 bp, Homo sapiens
attccacccagatga

SEQ ID NO: 1857576 - DNA, 15 bp, Homo sapiens
ttccacccagatgag

SEQ ID NO: 1857577 - DNA, 15 bp, Homo sapiens
tccacccagatgagt

SEQ ID NO: 1857578 - DNA, 15 bp, Homo sapiens
ccacccagatgagtg

SEQ ID NO: 1857579 - DNA, 15 bp, Homo sapiens
cacccagatgagtga

SEQ ID NO: 1857580 - DNA, 15 bp, Homo sapiens
acccagatgagtgag

SEQ ID NO: 1857581 - DNA, 15 bp, Homo sapiens
cccagatgagtgagt

SEQ ID NO: 1857582 - DNA, 15 bp, Homo sapiens
ccagatgagtgagtc

SEQ ID NO: 1857583 - DNA, 15 bp, Homo sapiens
cagatgagtgagtca

SEQ ID NO: 1857584 - DNA, 15 bp, Homo sapiens
agatgagtgagtcag

SEQ ID NO: 1857585 - DNA, 15 bp, Homo sapiens
gatgagtgagtcagt

SEQ ID NO: 1857586 - DNA, 15 bp, Homo sapiens
atgagtgagtcagtg

SEQ ID NO: 1857587 - DNA, 15 bp, Homo sapiens
tgagtgagtcagtgg

SEQ ID NO: 1857588 - DNA, 15 bp, Homo sapiens
gagtgagtcagtggg

SEQ ID NO: 1857589 - DNA, 15 bp, Homo sapiens
agtgagtcagtgggt

SEQ ID NO: 1857590 - DNA, 15 bp, Homo sapiens
gtgagtcagtgggtg

SEQ ID NO: 1857591 - DNA, 15 bp, Homo sapiens
tgagtcagtgggtgt

SEQ ID NO: 1857592 - DNA, 15 bp, Homo sapiens
gagtcagtgggtgtt

SEQ ID NO: 1857593 - DNA, 15 bp, Homo sapiens
agtcagtgggtgttc

SEQ ID NO: 1857594 - DNA, 15 bp, Homo sapiens
gtcagtgggtgttct

SEQ ID NO: 1857595 - DNA, 15 bp, Homo sapiens
tcagtgggtgttctt

SEQ ID NO: 1857596 - DNA, 15 bp, Homo sapiens
cagtgggtgttcttt

SEQ ID NO: 1857597 - DNA, 15 bp, Homo sapiens
agtgggtgttctttt

SEQ ID NO: 1857598 - DNA, 15 bp, Homo sapiens
gtgggtgttcttttc

SEQ ID NO: 1857599 - DNA, 15 bp, Homo sapiens
tgggtgttcttttca

SEQ ID NO: 1857600 - DNA, 15 bp, Homo sapiens
gggtgttcttttcat

SEQ ID NO: 1857601 - DNA, 15 bp, Homo sapiens
ggtgttcttttcatg

SEQ ID NO: 1857602 - DNA, 15 bp, Homo sapiens
gtgttcttttcatgg

SEQ ID NO: 1857603 - DNA, 15 bp, Homo sapiens
tgttcttttcatggc

SEQ ID NO: 1857604 - DNA, 15 bp, Homo sapiens
gttcttttcatggcc

SEQ ID NO: 1857605 - DNA, 15 bp, Homo sapiens
ttcttttcatggcct

SEQ ID NO: 1857606 - DNA, 15 bp, Homo sapiens
tcttttcatggcctg

SEQ ID NO: 1857607 - DNA, 15 bp, Homo sapiens
cttttcatggcctgt

SEQ ID NO: 1857608 - DNA, 15 bp, Homo sapiens
ttttcatggcctgtc

SEQ ID NO: 1857609 - DNA, 15 bp, Homo sapiens
tttcatggcctgtcg

SEQ ID NO: 1857610 - DNA, 15 bp, Homo sapiens
ttcatggcctgtcgg

SEQ ID NO: 1857611 - DNA, 15 bp, Homo sapiens
tcatggcctgtcggc

SEQ ID NO: 1857612 - DNA, 15 bp, Homo sapiens
catggcctgtcggct

SEQ ID NO: 1857613 - DNA, 15 bp, Homo sapiens
atggcctgtcggctc

SEQ ID NO: 1857614 - DNA, 15 bp, Homo sapiens
tggcctgtcggctcg

SEQ ID NO: 1857615 - DNA, 15 bp, Homo sapiens
ggcctgtcggctcgg

SEQ ID NO: 1857616 - DNA, 15 bp, Homo sapiens
gcctgtcggctcggt

SEQ ID NO: 1857617 - DNA, 15 bp, Homo sapiens
cctgtcggctcggtg

SEQ ID NO: 1857618 - DNA, 15 bp, Homo sapiens
ctgtcggctcggtgg

SEQ ID NO: 1857619 - DNA, 15 bp, Homo sapiens
tgtcggctcggtggc

SEQ ID NO: 1857620 - DNA, 15 bp, Homo sapiens
gtcggctcggtggca

SEQ ID NO: 1857621 - DNA, 15 bp, Homo sapiens
tcggctcggtggcac

SEQ ID NO: 1857622 - DNA, 15 bp, Homo sapiens
cggctcggtggcacc

SEQ ID NO: 1857623 - DNA, 15 bp, Homo sapiens
ggctcggtggcacct

SEQ ID NO: 1857624 - DNA, 15 bp, Homo sapiens
gctcggtggcacctg

SEQ ID NO: 1857625 - DNA, 15 bp, Homo sapiens
ctcggtggcacctga

SEQ ID NO: 1857626 - DNA, 15 bp, Homo sapiens
tcggtggcacctgag

SEQ ID NO: 1857627 - DNA, 15 bp, Homo sapiens
cggtggcacctgagg

SEQ ID NO: 1857628 - DNA, 15 bp, Homo sapiens
ggtggcacctgaggc

SEQ ID NO: 1857629 - DNA, 15 bp, Homo sapiens
gtggcacctgaggct

SEQ ID NO: 1857630 - DNA, 15 bp, Homo sapiens
tggcacctgaggctg

SEQ ID NO: 1857631 - DNA, 15 bp, Homo sapiens
ggcacctgaggctgc

SEQ ID NO: 1857632 - DNA, 15 bp, Homo sapiens
gcacctgaggctgca

SEQ ID NO: 1857633 - DNA, 15 bp, Homo sapiens
cacctgaggctgcag

SEQ ID NO: 1857634 - DNA, 15 bp, Homo sapiens
acctgaggctgcagt

SEQ ID NO: 1857635 - DNA, 15 bp, Homo sapiens
cctgaggctgcagtg

SEQ ID NO: 1857636 - DNA, 15 bp, Homo sapiens
ctgaggctgcagtga

SEQ ID NO: 1857637 - DNA, 15 bp, Homo sapiens
tgaggctgcagtgac

SEQ ID NO: 1857638 - DNA, 15 bp, Homo sapiens
gaggctgcagtgacc

SEQ ID NO: 1857639 - DNA, 15 bp, Homo sapiens
aggctgcagtgaccc

SEQ ID NO: 1857640 - DNA, 15 bp, Homo sapiens
ggctgcagtgacccc

SEQ ID NO: 1857641 - DNA, 15 bp, Homo sapiens
gctgcagtgaccccc

SEQ ID NO: 1857642 - DNA, 15 bp, Homo sapiens
ctgcagtgaccccca

SEQ ID NO: 1857643 - DNA, 15 bp, Homo sapiens
tgcagtgacccccag

SEQ ID NO: 1857644 - DNA, 15 bp, Homo sapiens
gcagtgacccccagt

SEQ ID NO: 1857645 - DNA, 15 bp, Homo sapiens
cagtgacccccagtg

SEQ ID NO: 1857646 - DNA, 15 bp, Homo sapiens
agtgacccccagtgc

SEQ ID NO: 1857647 - DNA, 15 bp, Homo sapiens
gtgacccccagtgct

SEQ ID NO: 1857648 - DNA, 15 bp, Homo sapiens
tgacccccagtgctg

SEQ ID NO: 1857649 - DNA, 15 bp, Homo sapiens
gacccccagtgctgc

SEQ ID NO: 1857650 - DNA, 15 bp, Homo sapiens
acccccagtgctgct

SEQ ID NO: 1857651 - DNA, 15 bp, Homo sapiens
cccccagtgctgctt

SEQ ID NO: 1857652 - DNA, 15 bp, Homo sapiens
ccccagtgctgcttc

SEQ ID NO: 1857653 - DNA, 15 bp, Homo sapiens
cccagtgctgcttca

SEQ ID NO: 1857654 - DNA, 15 bp, Homo sapiens
ccagtgctgcttcag

SEQ ID NO: 1857655 - DNA, 15 bp, Homo sapiens
cagtgctgcttcagg

SEQ ID NO: 1857656 - DNA, 15 bp, Homo sapiens
agtgctgcttcaggt

SEQ ID NO: 1857657 - DNA, 15 bp, Homo sapiens
gtgctgcttcaggtg

SEQ ID NO: 1857658 - DNA, 15 bp, Homo sapiens
tgctgcttcaggtga

SEQ ID NO: 1857659 - DNA, 15 bp, Homo sapiens
gctgcttcaggtgaa

SEQ ID NO: 1857660 - DNA, 15 bp, Homo sapiens
ctgcttcaggtgaat

SEQ ID NO: 1857661 - DNA, 15 bp, Homo sapiens
tgcttcaggtgaatg

SEQ ID NO: 1857662 - DNA, 15 bp, Homo sapiens
gcttcaggtgaatga

SEQ ID NO: 1857663 - DNA, 15 bp, Homo sapiens
cttcaggtgaatgag

SEQ ID NO: 1857664 - DNA, 15 bp, Homo sapiens
ttcaggtgaatgagc

SEQ ID NO: 1857665 - DNA, 15 bp, Homo sapiens
tcaggtgaatgagca

SEQ ID NO: 1857666 - DNA, 15 bp, Homo sapiens
caggtgaatgagcac

SEQ ID NO: 1857667 - DNA, 15 bp, Homo sapiens
aggtgaatgagcaca

SEQ ID NO: 1857668 - DNA, 15 bp, Homo sapiens
ggtgaatgagcacac

SEQ ID NO: 1857669 - DNA, 15 bp, Homo sapiens
gtgaatgagcacaca

SEQ ID NO: 1857670 - DNA, 15 bp, Homo sapiens
tgaatgagcacacag

SEQ ID NO: 1857671 - DNA, 15 bp, Homo sapiens
gaatgagcacacaga

SEQ ID NO: 1857672 - DNA, 15 bp, Homo sapiens
aatgagcacacagag

SEQ ID NO: 1857673 - DNA, 15 bp, Homo sapiens
atgagcacacagagc

SEQ ID NO: 1857674 - DNA, 15 bp, Homo sapiens
tgagcacacagagca

SEQ ID NO: 1857675 - DNA, 15 bp, Homo sapiens
gagcacacagagcat

SEQ ID NO: 1857676 - DNA, 15 bp, Homo sapiens
agcacacagagcatt

SEQ ID NO: 1857677 - DNA, 15 bp, Homo sapiens
gcacacagagcattt

SEQ ID NO: 1857678 - DNA, 15 bp, Homo sapiens
cacacagagcatttt

SEQ ID NO: 1857679 - DNA, 15 bp, Homo sapiens
acacagagcattttc

SEQ ID NO: 1857680 - DNA, 15 bp, Homo sapiens
cacagagcattttca

SEQ ID NO: 1857681 - DNA, 15 bp, Homo sapiens
acagagcattttcag

SEQ ID NO: 1857682 - DNA, 15 bp, Homo sapiens
cagagcattttcaga

SEQ ID NO: 1857683 - DNA, 15 bp, Homo sapiens
agagcattttcagaa

SEQ ID NO: 1857684 - DNA, 15 bp, Homo sapiens
gagcattttcagaac

SEQ ID NO: 1857685 - DNA, 15 bp, Homo sapiens
agcattttcagaact

SEQ ID NO: 1857686 - DNA, 15 bp, Homo sapiens
gcattttcagaacta

SEQ ID NO: 1857687 - DNA, 15 bp, Homo sapiens
cattttcagaactat

SEQ ID NO: 1857688 - DNA, 15 bp, Homo sapiens
attttcagaactatg

SEQ ID NO: 1857689 - DNA, 15 bp, Homo sapiens
ttttcagaactatgg

SEQ ID NO: 1857690 - DNA, 15 bp, Homo sapiens
tttcagaactatggc

SEQ ID NO: 1857691 - DNA, 15 bp, Homo sapiens
ttcagaactatggct

SEQ ID NO: 1857692 - DNA, 15 bp, Homo sapiens
tcagaactatggctt

SEQ ID NO: 1857693 - DNA, 15 bp, Homo sapiens
cagaactatggctta

SEQ ID NO: 1857694 - DNA, 15 bp, Homo sapiens
agaactatggcttac

SEQ ID NO: 1857695 - DNA, 15 bp, Homo sapiens
gaactatggcttact

SEQ ID NO: 1857696 - DNA, 15 bp, Homo sapiens
aactatggcttactc

SEQ ID NO: 1857697 - DNA, 15 bp, Homo sapiens
actatggcttactct

SEQ ID NO: 1857698 - DNA, 15 bp, Homo sapiens
ctatggcttactctc

SEQ ID NO: 1857699 - DNA, 15 bp, Homo sapiens
tatggcttactctct

SEQ ID NO: 1857700 - DNA, 15 bp, Homo sapiens
atggcttactctctc

SEQ ID NO: 1857701 - DNA, 15 bp, Homo sapiens
tggcttactctctca

SEQ ID NO: 1857702 - DNA, 15 bp, Homo sapiens
ggcttactctctcag

SEQ ID NO: 1857703 - DNA, 15 bp, Homo sapiens
gcttactctctcagt

SEQ ID NO: 1857704 - DNA, 15 bp, Homo sapiens
cttactctctcagtg

SEQ ID NO: 1857705 - DNA, 15 bp, Homo sapiens
ttactctctcagtgt

SEQ ID NO: 1857706 - DNA, 15 bp, Homo sapiens
tactctctcagtgta

SEQ ID NO: 1857707 - DNA, 15 bp, Homo sapiens
actctctcagtgtat

SEQ ID NO: 1857708 - DNA, 15 bp, Homo sapiens
ctctctcagtgtata

SEQ ID NO: 1857709 - DNA, 15 bp, Homo sapiens
tctctcagtgtatag

SEQ ID NO: 1857710 - DNA, 15 bp, Homo sapiens
ctctcagtgtatagc

SEQ ID NO: 1857711 - DNA, 15 bp, Homo sapiens
tctcagtgtatagca

SEQ ID NO: 1857712 - DNA, 15 bp, Homo sapiens
ctcagtgtatagcag

SEQ ID NO: 1857713 - DNA, 15 bp, Homo sapiens
tcagtgtatagcagt

SEQ ID NO: 1857714 - DNA, 15 bp, Homo sapiens
cagtgtatagcagtt

SEQ ID NO: 1857715 - DNA, 15 bp, Homo sapiens
agtgtatagcagttt

SEQ ID NO: 1857716 - DNA, 15 bp, Homo sapiens
gtgtatagcagttta

SEQ ID NO: 1857717 - DNA, 15 bp, Homo sapiens
tgtatagcagtttaa

SEQ ID NO: 1857718 - DNA, 15 bp, Homo sapiens
gtatagcagtttaag

SEQ ID NO: 1857719 - DNA, 15 bp, Homo sapiens
tatagcagtttaagt

SEQ ID NO: 1857720 - DNA, 15 bp, Homo sapiens
atagcagtttaagtg

SEQ ID NO: 1857721 - DNA, 15 bp, Homo sapiens
tagcagtttaagtgc

SEQ ID NO: 1857722 - DNA, 15 bp, Homo sapiens
agcagtttaagtgct

SEQ ID NO: 1857723 - DNA, 15 bp, Homo sapiens
gcagtttaagtgcta

SEQ ID NO: 1857724 - DNA, 15 bp, Homo sapiens
cagtttaagtgctag

SEQ ID NO: 1857725 - DNA, 15 bp, Homo sapiens
agtttaagtgctagg

SEQ ID NO: 1857726 - DNA, 15 bp, Homo sapiens
gtttaagtgctaggg

SEQ ID NO: 1857727 - DNA, 15 bp, Homo sapiens
tttaagtgctaggga

SEQ ID NO: 1857728 - DNA, 15 bp, Homo sapiens
ttaagtgctagggac

SEQ ID NO: 1857729 - DNA, 15 bp, Homo sapiens
taagtgctagggact

SEQ ID NO: 1857730 - DNA, 15 bp, Homo sapiens
aagtgctagggactt

SEQ ID NO: 1857731 - DNA, 15 bp, Homo sapiens
agtgctagggacttc

SEQ ID NO: 1857732 - DNA, 15 bp, Homo sapiens
gtgctagggacttct

SEQ ID NO: 1857733 - DNA, 15 bp, Homo sapiens
tgctagggacttctc

SEQ ID NO: 1857734 - DNA, 15 bp, Homo sapiens
gctagggacttctct

SEQ ID NO: 1857735 - DNA, 15 bp, Homo sapiens
ctagggacttctctg

SEQ ID NO: 1857736 - DNA, 15 bp, Homo sapiens
tagggacttctctga

SEQ ID NO: 1857737 - DNA, 15 bp, Homo sapiens
agggacttctctgaa

SEQ ID NO: 1857738 - DNA, 15 bp, Homo sapiens
gggacttctctgaac

SEQ ID NO: 1857739 - DNA, 15 bp, Homo sapiens
ggacttctctgaact

SEQ ID NO: 1857740 - DNA, 15 bp, Homo sapiens
gacttctctgaactc

SEQ ID NO: 1857741 - DNA, 15 bp, Homo sapiens
acttctctgaactca

SEQ ID NO: 1857742 - DNA, 15 bp, Homo sapiens
cttctctgaactcat

SEQ ID NO: 1857743 - DNA, 15 bp, Homo sapiens
ttctctgaactcatt

SEQ ID NO: 1857744 - DNA, 15 bp, Homo sapiens
tctctgaactcattg

SEQ ID NO: 1857745 - DNA, 15 bp, Homo sapiens
ctctgaactcattga

SEQ ID NO: 1857746 - DNA, 15 bp, Homo sapiens
tctgaactcattgaa

SEQ ID NO: 1857747 - DNA, 15 bp, Homo sapiens
ctgaactcattgaaa

SEQ ID NO: 1857748 - DNA, 15 bp, Homo sapiens
tgaactcattgaaag

SEQ ID NO: 1857749 - DNA, 15 bp, Homo sapiens
gaactcattgaaaga

SEQ ID NO: 1857750 - DNA, 15 bp, Homo sapiens
aactcattgaaagaa

SEQ ID NO: 1857751 - DNA, 15 bp, Homo sapiens
actcattgaaagaaa

SEQ ID NO: 1857752 - DNA, 15 bp, Homo sapiens
ctcattgaaagaaat

SEQ ID NO: 1857753 - DNA, 15 bp, Homo sapiens
tcattgaaagaaata

SEQ ID NO: 1857754 - DNA, 15 bp, Homo sapiens
cattgaaagaaataa

SEQ ID NO: 1857755 - DNA, 15 bp, Homo sapiens
attgaaagaaataaa

SEQ ID NO: 1857756 - DNA, 15 bp, Homo sapiens
ttgaaagaaataaag

SEQ ID NO: 1857757 - DNA, 15 bp, Homo sapiens
tgaaagaaataaagc

SEQ ID NO: 1857758 - DNA, 15 bp, Homo sapiens
gaaagaaataaagcc

SEQ ID NO: 1857759 - DNA, 15 bp, Homo sapiens
aaagaaataaagccc

SEQ ID NO: 1857760 - DNA, 15 bp, Homo sapiens
aagaaataaagcccc

SEQ ID NO: 1857761 - DNA, 15 bp, Homo sapiens
agaaataaagcccct

SEQ ID NO: 1857762 - DNA, 15 bp, Homo sapiens
gaaataaagcccctc

SEQ ID NO: 1857763 - DNA, 15 bp, Homo sapiens
aaataaagcccctct

SEQ ID NO: 1857764 - DNA, 15 bp, Homo sapiens
aataaagcccctctg

SEQ ID NO: 1857765 - DNA, 15 bp, Homo sapiens
ataaagcccctctgt

SEQ ID NO: 1857766 - DNA, 15 bp, Homo sapiens
taaagcccctctgtc

SEQ ID NO: 1857767 - DNA, 15 bp, Homo sapiens
aaagcccctctgtct

SEQ ID NO: 1857768 - DNA, 15 bp, Homo sapiens
aagcccctctgtctt

SEQ ID NO: 1857769 - DNA, 15 bp, Homo sapiens
agcccctctgtcttt

SEQ ID NO: 1857770 - DNA, 15 bp, Homo sapiens
gcccctctgtctttg

SEQ ID NO: 1857771 - DNA, 15 bp, Homo sapiens
cccctctgtctttgt

SEQ ID NO: 1857772 - DNA, 15 bp, Homo sapiens
ccctctgtctttgta

SEQ ID NO: 1857773 - DNA, 15 bp, Homo sapiens
cctctgtctttgtat

SEQ ID NO: 1857774 - DNA, 15 bp, Homo sapiens
ctctgtctttgtatc

SEQ ID NO: 1857775 - DNA, 15 bp, Homo sapiens
tctgtctttgtatcc

SEQ ID NO: 1857776 - DNA, 15 bp, Homo sapiens
ctgtctttgtatccc

SEQ ID NO: 1857777 - DNA, 15 bp, Homo sapiens
tgtctttgtatccct

SEQ ID NO: 1857778 - DNA, 15 bp, Homo sapiens
gtctttgtatcccta

SEQ ID NO: 1857779 - DNA, 15 bp, Homo sapiens
tctttgtatccctag

SEQ ID NO: 1857780 - DNA, 15 bp, Homo sapiens
ctttgtatccctaga

SEQ ID NO: 1857781 - DNA, 15 bp, Homo sapiens
tttgtatccctagaa

SEQ ID NO: 1857782 - DNA, 15 bp, Homo sapiens
ttgtatccctagaat

SEQ ID NO: 1857783 - DNA, 15 bp, Homo sapiens
tgtatccctagaatt

SEQ ID NO: 1857784 - DNA, 15 bp, Homo sapiens
gtatccctagaattg

SEQ ID NO: 1857785 - DNA, 15 bp, Homo sapiens
tatccctagaattgg

SEQ ID NO: 1857786 - DNA, 15 bp, Homo sapiens
atccctagaattgga

SEQ ID NO: 1857787 - DNA, 15 bp, Homo sapiens
tccctagaattggaa

SEQ ID NO: 1857788 - DNA, 15 bp, Homo sapiens
ccctagaattggaag

SEQ ID NO: 1857789 - DNA, 15 bp, Homo sapiens
cctagaattggaagc

SEQ ID NO: 1857790 - DNA, 15 bp, Homo sapiens
ctagaattggaagct

SEQ ID NO: 1857791 - DNA, 15 bp, Homo sapiens
tagaattggaagctc

SEQ ID NO: 1857792 - DNA, 15 bp, Homo sapiens
agaattggaagctca

SEQ ID NO: 1857793 - DNA, 15 bp, Homo sapiens
gaattggaagctcat

SEQ ID NO: 1857794 - DNA, 15 bp, Homo sapiens
aattggaagctcatg

SEQ ID NO: 1857795 - DNA, 15 bp, Homo sapiens
attggaagctcatgt

SEQ ID NO: 1857796 - DNA, 15 bp, Homo sapiens
ttggaagctcatgta

SEQ ID NO: 1857797 - DNA, 15 bp, Homo sapiens
tggaagctcatgtat

SEQ ID NO: 1857798 - DNA, 15 bp, Homo sapiens
ggaagctcatgtatt

SEQ ID NO: 1857799 - DNA, 15 bp, Homo sapiens
gaagctcatgtattt

SEQ ID NO: 1857800 - DNA, 15 bp, Homo sapiens
aagctcatgtatttg

SEQ ID NO: 1857801 - DNA, 15 bp, Homo sapiens
agctcatgtatttgt

SEQ ID NO: 1857802 - DNA, 15 bp, Homo sapiens
gctcatgtatttgtg

SEQ ID NO: 1857803 - DNA, 15 bp, Homo sapiens
ctcatgtatttgtga

SEQ ID NO: 1857804 - DNA, 15 bp, Homo sapiens
tcatgtatttgtgat

SEQ ID NO: 1857805 - DNA, 15 bp, Homo sapiens
catgtatttgtgatg

SEQ ID NO: 1857806 - DNA, 15 bp, Homo sapiens
atgtatttgtgatgc

SEQ ID NO: 1857807 - DNA, 15 bp, Homo sapiens
tgtatttgtgatgct

SEQ ID NO: 1857808 - DNA, 15 bp, Homo sapiens
gtatttgtgatgctg

SEQ ID NO: 1857809 - DNA, 15 bp, Homo sapiens
tatttgtgatgctgg

SEQ ID NO: 1857810 - DNA, 15 bp, Homo sapiens
atttgtgatgctgga

SEQ ID NO: 1857811 - DNA, 15 bp, Homo sapiens
tttgtgatgctggaa

SEQ ID NO: 1857812 - DNA, 15 bp, Homo sapiens
ttgtgatgctggaaa

SEQ ID NO: 1857813 - DNA, 15 bp, Homo sapiens
tgtgatgctggaaag

SEQ ID NO: 1857814 - DNA, 15 bp, Homo sapiens
gtgatgctggaaagg

SEQ ID NO: 1857815 - DNA, 15 bp, Homo sapiens
tgatgctggaaaggg

SEQ ID NO: 1857816 - DNA, 15 bp, Homo sapiens
gatgctggaaagggc

SEQ ID NO: 1857817 - DNA, 15 bp, Homo sapiens
atgctggaaagggca

SEQ ID NO: 1857818 - DNA, 15 bp, Homo sapiens
tgctggaaagggcaa

SEQ ID NO: 1857819 - DNA, 15 bp, Homo sapiens
gctggaaagggcaaa

SEQ ID NO: 1857820 - DNA, 15 bp, Homo sapiens
ctggaaagggcaaat

SEQ ID NO: 1857821 - DNA, 15 bp, Homo sapiens
tggaaagggcaaata

SEQ ID NO: 1857822 - DNA, 15 bp, Homo sapiens
ggaaagggcaaatat

SEQ ID NO: 1857823 - DNA, 15 bp, Homo sapiens
gaaagggcaaatatt

SEQ ID NO: 1857824 - DNA, 15 bp, Homo sapiens
aaagggcaaatattc

SEQ ID NO: 1857825 - DNA, 15 bp, Homo sapiens
aagggcaaatattca

SEQ ID NO: 1857826 - DNA, 15 bp, Homo sapiens
agggcaaatattcat

SEQ ID NO: 1857827 - DNA, 15 bp, Homo sapiens
gggcaaatattcatt

SEQ ID NO: 1857828 - DNA, 15 bp, Homo sapiens
ggcaaatattcattg

SEQ ID NO: 1857829 - DNA, 15 bp, Homo sapiens
gcaaatattcattga

SEQ ID NO: 1857830 - DNA, 15 bp, Homo sapiens
caaatattcattgaa

SEQ ID NO: 1857831 - DNA, 15 bp, Homo sapiens
aaatattcattgaaa

SEQ ID NO: 1857832 - DNA, 15 bp, Homo sapiens
aatattcattgaaag

SEQ ID NO: 1857833 - DNA, 15 bp, Homo sapiens
atattcattgaaaga

SEQ ID NO: 1857834 - DNA, 15 bp, Homo sapiens
tattcattgaaagaa

SEQ ID NO: 1857835 - DNA, 15 bp, Homo sapiens
attcattgaaagaaa

SEQ ID NO: 1857836 - DNA, 15 bp, Homo sapiens
ttcattgaaagaaaa

SEQ ID NO: 1857837 - DNA, 15 bp, Homo sapiens
tcattgaaagaaaat

SEQ ID NO: 1857838 - DNA, 15 bp, Homo sapiens
cattgaaagaaaata

SEQ ID NO: 1857839 - DNA, 15 bp, Homo sapiens
attgaaagaaaatag

SEQ ID NO: 1857840 - DNA, 15 bp, Homo sapiens
ttgaaagaaaatagc

SEQ ID NO: 1857841 - DNA, 15 bp, Homo sapiens
tgaaagaaaatagct

SEQ ID NO: 1857842 - DNA, 15 bp, Homo sapiens
gaaagaaaatagctc

SEQ ID NO: 1857843 - DNA, 15 bp, Homo sapiens
aaagaaaatagctca

SEQ ID NO: 1857844 - DNA, 15 bp, Homo sapiens
aagaaaatagctcac

SEQ ID NO: 1857845 - DNA, 15 bp, Homo sapiens
agaaaatagctcaca

SEQ ID NO: 1857846 - DNA, 15 bp, Homo sapiens
gaaaatagctcacat

SEQ ID NO: 1857847 - DNA, 15 bp, Homo sapiens
aaaatagctcacatt

SEQ ID NO: 1857848 - DNA, 15 bp, Homo sapiens
aaatagctcacattt

SEQ ID NO: 1857849 - DNA, 15 bp, Homo sapiens
aatagctcacattta

SEQ ID NO: 1857850 - DNA, 15 bp, Homo sapiens
atagctcacatttac

SEQ ID NO: 1857851 - DNA, 15 bp, Homo sapiens
tagctcacatttact

SEQ ID NO: 1857852 - DNA, 15 bp, Homo sapiens
agctcacatttactg

SEQ ID NO: 1857853 - DNA, 15 bp, Homo sapiens
gctcacatttactga

SEQ ID NO: 1857854 - DNA, 15 bp, Homo sapiens
ctcacatttactgag

SEQ ID NO: 1857855 - DNA, 15 bp, Homo sapiens
tcacatttactgagg

SEQ ID NO: 1857856 - DNA, 15 bp, Homo sapiens
cacatttactgaggt

SEQ ID NO: 1857857 - DNA, 15 bp, Homo sapiens
acatttactgaggtc

SEQ ID NO: 1857858 - DNA, 15 bp, Homo sapiens
catttactgaggtct

SEQ ID NO: 1857859 - DNA, 15 bp, Homo sapiens
atttactgaggtctc

SEQ ID NO: 1857860 - DNA, 15 bp, Homo sapiens
tttactgaggtctca

SEQ ID NO: 1857861 - DNA, 15 bp, Homo sapiens
ttactgaggtctcac

SEQ ID NO: 1857862 - DNA, 15 bp, Homo sapiens
tactgaggtctcact

SEQ ID NO: 1857863 - DNA, 15 bp, Homo sapiens
actgaggtctcacta

SEQ ID NO: 1857864 - DNA, 15 bp, Homo sapiens
ctgaggtctcactat

SEQ ID NO: 1857865 - DNA, 15 bp, Homo sapiens
tgaggtctcactatg

SEQ ID NO: 1857866 - DNA, 15 bp, Homo sapiens
gaggtctcactatga

SEQ ID NO: 1857867 - DNA, 15 bp, Homo sapiens
aggtctcactatgag

SEQ ID NO: 1857868 - DNA, 15 bp, Homo sapiens
ggtctcactatgagc

SEQ ID NO: 1857869 - DNA, 15 bp, Homo sapiens
gtctcactatgagcc

SEQ ID NO: 1857870 - DNA, 15 bp, Homo sapiens
tctcactatgagcca

SEQ ID NO: 1857871 - DNA, 15 bp, Homo sapiens
ctcactatgagccag

SEQ ID NO: 1857872 - DNA, 15 bp, Homo sapiens
tcactatgagccagg

SEQ ID NO: 1857873 - DNA, 15 bp, Homo sapiens
cactatgagccaggc

SEQ ID NO: 1857874 - DNA, 15 bp, Homo sapiens
actatgagccaggca

SEQ ID NO: 1857875 - DNA, 15 bp, Homo sapiens
ctatgagccaggcac

SEQ ID NO: 1857876 - DNA, 15 bp, Homo sapiens
tatgagccaggcacg

SEQ ID NO: 1857877 - DNA, 15 bp, Homo sapiens
atgagccaggcacgg

SEQ ID NO: 1857878 - DNA, 15 bp, Homo sapiens
tgagccaggcacgga

SEQ ID NO: 1857879 - DNA, 15 bp, Homo sapiens
gagccaggcacggag

SEQ ID NO: 1857880 - DNA, 15 bp, Homo sapiens
agccaggcacggagt

SEQ ID NO: 1857881 - DNA, 15 bp, Homo sapiens
gccaggcacggagtg

SEQ ID NO: 1857882 - DNA, 15 bp, Homo sapiens
ccaggcacggagtga

SEQ ID NO: 1857883 - DNA, 15 bp, Homo sapiens
caggcacggagtgaa

SEQ ID NO: 1857884 - DNA, 15 bp, Homo sapiens
aggcacggagtgaag

SEQ ID NO: 1857885 - DNA, 15 bp, Homo sapiens
ggcacggagtgaagc

SEQ ID NO: 1857886 - DNA, 15 bp, Homo sapiens
gcacggagtgaagca

SEQ ID NO: 1857887 - DNA, 15 bp, Homo sapiens
cacggagtgaagcaa

SEQ ID NO: 1857888 - DNA, 15 bp, Homo sapiens
acggagtgaagcaac

SEQ ID NO: 1857889 - DNA, 15 bp, Homo sapiens
cggagtgaagcaact

SEQ ID NO: 1857890 - DNA, 15 bp, Homo sapiens
ggagtgaagcaactg

SEQ ID NO: 1857891 - DNA, 15 bp, Homo sapiens
gagtgaagcaactgg

SEQ ID NO: 1857892 - DNA, 15 bp, Homo sapiens
agtgaagcaactggt

SEQ ID NO: 1857893 - DNA, 15 bp, Homo sapiens
gtgaagcaactggtt

SEQ ID NO: 1857894 - DNA, 15 bp, Homo sapiens
tgaagcaactggttg

SEQ ID NO: 1857895 - DNA, 15 bp, Homo sapiens
gaagcaactggttgg

SEQ ID NO: 1857896 - DNA, 15 bp, Homo sapiens
aagcaactggttggc

SEQ ID NO: 1857897 - DNA, 15 bp, Homo sapiens
agcaactggttggcc

SEQ ID NO: 1857898 - DNA, 15 bp, Homo sapiens
gcaactggttggcct

SEQ ID NO: 1857899 - DNA, 15 bp, Homo sapiens
caactggttggcctc

SEQ ID NO: 1857900 - DNA, 15 bp, Homo sapiens
aactggttggcctca

SEQ ID NO: 1857901 - DNA, 15 bp, Homo sapiens
actggttggcctcac

SEQ ID NO: 1857902 - DNA, 15 bp, Homo sapiens
ctggttggcctcacc

SEQ ID NO: 1857903 - DNA, 15 bp, Homo sapiens
tggttggcctcacct

SEQ ID NO: 1857904 - DNA, 15 bp, Homo sapiens
ggttggcctcacctt

SEQ ID NO: 1857905 - DNA, 15 bp, Homo sapiens
gttggcctcaccttg

SEQ ID NO: 1857906 - DNA, 15 bp, Homo sapiens
ttggcctcaccttga

SEQ ID NO: 1857907 - DNA, 15 bp, Homo sapiens
tggcctcaccttgaa

SEQ ID NO: 1857908 - DNA, 15 bp, Homo sapiens
ggcctcaccttgaac

SEQ ID NO: 1857909 - DNA, 15 bp, Homo sapiens
gcctcaccttgaact

SEQ ID NO: 1857910 - DNA, 15 bp, Homo sapiens
cctcaccttgaactc

SEQ ID NO: 1857911 - DNA, 15 bp, Homo sapiens
ctcaccttgaactct

SEQ ID NO: 1857912 - DNA, 15 bp, Homo sapiens
tcaccttgaactctc

SEQ ID NO: 1857913 - DNA, 15 bp, Homo sapiens
caccttgaactctca

SEQ ID NO: 1857914 - DNA, 15 bp, Homo sapiens
accttgaactctcac

SEQ ID NO: 1857915 - DNA, 15 bp, Homo sapiens
ccttgaactctcaca

SEQ ID NO: 1857916 - DNA, 15 bp, Homo sapiens
cttgaactctcacac

SEQ ID NO: 1857917 - DNA, 15 bp, Homo sapiens
ttgaactctcacacc

SEQ ID NO: 1857918 - DNA, 15 bp, Homo sapiens
tgaactctcacaccc

SEQ ID NO: 1857919 - DNA, 15 bp, Homo sapiens
gaactctcacaccca

SEQ ID NO: 1857920 - DNA, 15 bp, Homo sapiens
aactctcacacccag

SEQ ID NO: 1857921 - DNA, 15 bp, Homo sapiens
actctcacacccaga

SEQ ID NO: 1857922 - DNA, 15 bp, Homo sapiens
ctctcacacccagac

SEQ ID NO: 1857923 - DNA, 15 bp, Homo sapiens
tctcacacccagact

SEQ ID NO: 1857924 - DNA, 15 bp, Homo sapiens
ctcacacccagacta

SEQ ID NO: 1857925 - DNA, 15 bp, Homo sapiens
tcacacccagactag

SEQ ID NO: 1857926 - DNA, 15 bp, Homo sapiens
cacacccagactagg

SEQ ID NO: 1857927 - DNA, 15 bp, Homo sapiens
acacccagactagga

SEQ ID NO: 1857928 - DNA, 15 bp, Homo sapiens
cacccagactaggag

SEQ ID NO: 1857929 - DNA, 15 bp, Homo sapiens
acccagactaggagc

SEQ ID NO: 1857930 - DNA, 15 bp, Homo sapiens
cccagactaggagct

SEQ ID NO: 1857931 - DNA, 15 bp, Homo sapiens
ccagactaggagcta

SEQ ID NO: 1857932 - DNA, 15 bp, Homo sapiens
cagactaggagctag

SEQ ID NO: 1857933 - DNA, 15 bp, Homo sapiens
agactaggagctagg

SEQ ID NO: 1857934 - DNA, 15 bp, Homo sapiens
gactaggagctaggc

SEQ ID NO: 1857935 - DNA, 15 bp, Homo sapiens
actaggagctaggca

SEQ ID NO: 1857936 - DNA, 15 bp, Homo sapiens
ctaggagctaggcac

SEQ ID NO: 1857937 - DNA, 15 bp, Homo sapiens
taggagctaggcact

SEQ ID NO: 1857938 - DNA, 15 bp, Homo sapiens
aggagctaggcactg

SEQ ID NO: 1857939 - DNA, 15 bp, Homo sapiens
ggagctaggcactgt

SEQ ID NO: 1857940 - DNA, 15 bp, Homo sapiens
gagctaggcactgtg

SEQ ID NO: 1857941 - DNA, 15 bp, Homo sapiens
agctaggcactgtga

SEQ ID NO: 1857942 - DNA, 15 bp, Homo sapiens
gctaggcactgtgat

SEQ ID NO: 1857943 - DNA, 15 bp, Homo sapiens
ctaggcactgtgata

SEQ ID NO: 1857944 - DNA, 15 bp, Homo sapiens
taggcactgtgataa

SEQ ID NO: 1857945 - DNA, 15 bp, Homo sapiens
aggcactgtgataac

SEQ ID NO: 1857946 - DNA, 15 bp, Homo sapiens
ggcactgtgataact

SEQ ID NO: 1857947 - DNA, 15 bp, Homo sapiens
gcactgtgataactg

SEQ ID NO: 1857948 - DNA, 15 bp, Homo sapiens
cactgtgataactgc

SEQ ID NO: 1857949 - DNA, 15 bp, Homo sapiens
actgtgataactgct

SEQ ID NO: 1857950 - DNA, 15 bp, Homo sapiens
ctgtgataactgctg

SEQ ID NO: 1857951 - DNA, 15 bp, Homo sapiens
tgtgataactgctgt

SEQ ID NO: 1857952 - DNA, 15 bp, Homo sapiens
gtgataactgctgtt

SEQ ID NO: 1857953 - DNA, 15 bp, Homo sapiens
tgataactgctgttt

SEQ ID NO: 1857954 - DNA, 15 bp, Homo sapiens
gataactgctgtttt

SEQ ID NO: 1857955 - DNA, 15 bp, Homo sapiens
ataactgctgtttta

SEQ ID NO: 1857956 - DNA, 15 bp, Homo sapiens
taactgctgttttac

SEQ ID NO: 1857957 - DNA, 15 bp, Homo sapiens
aactgctgttttaca

SEQ ID NO: 1857958 - DNA, 15 bp, Homo sapiens
actgctgttttacac

SEQ ID NO: 1857959 - DNA, 15 bp, Homo sapiens
ctgctgttttacaca

SEQ ID NO: 1857960 - DNA, 15 bp, Homo sapiens
tgctgttttacacag

SEQ ID NO: 1857961 - DNA, 15 bp, Homo sapiens
gctgttttacacagg

SEQ ID NO: 1857962 - DNA, 15 bp, Homo sapiens
ctgttttacacagga

SEQ ID NO: 1857963 - DNA, 15 bp, Homo sapiens
tgttttacacaggag

SEQ ID NO: 1857964 - DNA, 15 bp, Homo sapiens
gttttacacaggagg

SEQ ID NO: 1857965 - DNA, 15 bp, Homo sapiens
ttttacacaggaggg

SEQ ID NO: 1857966 - DNA, 15 bp, Homo sapiens
tttacacaggaggga

SEQ ID NO: 1857967 - DNA, 15 bp, Homo sapiens
ttacacaggagggaa

SEQ ID NO: 1857968 - DNA, 15 bp, Homo sapiens
tacacaggagggaac

SEQ ID NO: 1857969 - DNA, 15 bp, Homo sapiens
acacaggagggaact

SEQ ID NO: 1857970 - DNA, 15 bp, Homo sapiens
cacaggagggaactc

SEQ ID NO: 1857971 - DNA, 15 bp, Homo sapiens
acaggagggaactcg

SEQ ID NO: 1857972 - DNA, 15 bp, Homo sapiens
caggagggaactcgg

SEQ ID NO: 1857973 - DNA, 15 bp, Homo sapiens
aggagggaactcggg

SEQ ID NO: 1857974 - DNA, 15 bp, Homo sapiens
ggagggaactcgggc

SEQ ID NO: 1857975 - DNA, 15 bp, Homo sapiens
gagggaactcgggct

SEQ ID NO: 1857976 - DNA, 15 bp, Homo sapiens
agggaactcgggctc

SEQ ID NO: 1857977 - DNA, 15 bp, Homo sapiens
gggaactcgggctca

SEQ ID NO: 1857978 - DNA, 15 bp, Homo sapiens
ggaactcgggctcag

SEQ ID NO: 1857979 - DNA, 15 bp, Homo sapiens
gaactcgggctcaga

SEQ ID NO: 1857980 - DNA, 15 bp, Homo sapiens
aactcgggctcagag

SEQ ID NO: 1857981 - DNA, 15 bp, Homo sapiens
actcgggctcagagt

SEQ ID NO: 1857982 - DNA, 15 bp, Homo sapiens
ctcgggctcagagtg

SEQ ID NO: 1857983 - DNA, 15 bp, Homo sapiens
tcgggctcagagtgg

SEQ ID NO: 1857984 - DNA, 15 bp, Homo sapiens
cgggctcagagtgga

SEQ ID NO: 1857985 - DNA, 15 bp, Homo sapiens
gggctcagagtggat

SEQ ID NO: 1857986 - DNA, 15 bp, Homo sapiens
ggctcagagtggatg

SEQ ID NO: 1857987 - DNA, 15 bp, Homo sapiens
gctcagagtggatga

SEQ ID NO: 1857988 - DNA, 15 bp, Homo sapiens
ctcagagtggatgaa

SEQ ID NO: 1857989 - DNA, 15 bp, Homo sapiens
tcagagtggatgaat

SEQ ID NO: 1857990 - DNA, 15 bp, Homo sapiens
cagagtggatgaatg

SEQ ID NO: 1857991 - DNA, 15 bp, Homo sapiens
agagtggatgaatga

SEQ ID NO: 1857992 - DNA, 15 bp, Homo sapiens
gagtggatgaatgac

SEQ ID NO: 1857993 - DNA, 15 bp, Homo sapiens
agtggatgaatgact

SEQ ID NO: 1857994 - DNA, 15 bp, Homo sapiens
gtggatgaatgactt

SEQ ID NO: 1857995 - DNA, 15 bp, Homo sapiens
tggatgaatgacttg

SEQ ID NO: 1857996 - DNA, 15 bp, Homo sapiens
ggatgaatgacttgc

SEQ ID NO: 1857997 - DNA, 15 bp, Homo sapiens
gatgaatgacttgct

SEQ ID NO: 1857998 - DNA, 15 bp, Homo sapiens
atgaatgacttgctg

SEQ ID NO: 1857999 - DNA, 15 bp, Homo sapiens
tgaatgacttgctga

SEQ ID NO: 1858000 - DNA, 15 bp, Homo sapiens
gaatgacttgctgag

SEQ ID NO: 1858001 - DNA, 15 bp, Homo sapiens
aatgacttgctgagg

SEQ ID NO: 1858002 - DNA, 15 bp, Homo sapiens
atgacttgctgaggg

SEQ ID NO: 1858003 - DNA, 15 bp, Homo sapiens
tgacttgctgagggt

SEQ ID NO: 1858004 - DNA, 15 bp, Homo sapiens
gacttgctgagggtt

SEQ ID NO: 1858005 - DNA, 15 bp, Homo sapiens
acttgctgagggttg

SEQ ID NO: 1858006 - DNA, 15 bp, Homo sapiens
cttgctgagggttgc

SEQ ID NO: 1858007 - DNA, 15 bp, Homo sapiens
ttgctgagggttgca

SEQ ID NO: 1858008 - DNA, 15 bp, Homo sapiens
tgctgagggttgcac

SEQ ID NO: 1858009 - DNA, 15 bp, Homo sapiens
gctgagggttgcaca

SEQ ID NO: 1858010 - DNA, 15 bp, Homo sapiens
ctgagggttgcacag

SEQ ID NO: 1858011 - DNA, 15 bp, Homo sapiens
tgagggttgcacagc

SEQ ID NO: 1858012 - DNA, 15 bp, Homo sapiens
gagggttgcacagct

SEQ ID NO: 1858013 - DNA, 15 bp, Homo sapiens
agggttgcacagcta

SEQ ID NO: 1858014 - DNA, 15 bp, Homo sapiens
gggttgcacagctat

SEQ ID NO: 1858015 - DNA, 15 bp, Homo sapiens
ggttgcacagctatt

SEQ ID NO: 1858016 - DNA, 15 bp, Homo sapiens
gttgcacagctatta

SEQ ID NO: 1858017 - DNA, 15 bp, Homo sapiens
ttgcacagctattaa

SEQ ID NO: 1858018 - DNA, 15 bp, Homo sapiens
tgcacagctattaag

SEQ ID NO: 1858019 - DNA, 15 bp, Homo sapiens
gcacagctattaagt

SEQ ID NO: 1858020 - DNA, 15 bp, Homo sapiens
cacagctattaagtg

SEQ ID NO: 1858021 - DNA, 15 bp, Homo sapiens
acagctattaagtgg

SEQ ID NO: 1858022 - DNA, 15 bp, Homo sapiens
cagctattaagtggt

SEQ ID NO: 1858023 - DNA, 15 bp, Homo sapiens
agctattaagtggtc

SEQ ID NO: 1858024 - DNA, 15 bp, Homo sapiens
gctattaagtggtct

SEQ ID NO: 1858025 - DNA, 15 bp, Homo sapiens
ctattaagtggtctg

SEQ ID NO: 1858026 - DNA, 15 bp, Homo sapiens
tattaagtggtctgc

SEQ ID NO: 1858027 - DNA, 15 bp, Homo sapiens
attaagtggtctgcc

SEQ ID NO: 1858028 - DNA, 15 bp, Homo sapiens
ttaagtggtctgcct

SEQ ID NO: 1858029 - DNA, 15 bp, Homo sapiens
taagtggtctgcctc

SEQ ID NO: 1858030 - DNA, 15 bp, Homo sapiens
aagtggtctgcctcc

SEQ ID NO: 1858031 - DNA, 15 bp, Homo sapiens
agtggtctgcctcca

SEQ ID NO: 1858032 - DNA, 15 bp, Homo sapiens
gtggtctgcctccat

SEQ ID NO: 1858033 - DNA, 15 bp, Homo sapiens
tggtctgcctccata

SEQ ID NO: 1858034 - DNA, 15 bp, Homo sapiens
ggtctgcctccatag

SEQ ID NO: 1858035 - DNA, 15 bp, Homo sapiens
gtctgcctccatagc

SEQ ID NO: 1858036 - DNA, 15 bp, Homo sapiens
tctgcctccatagcc

SEQ ID NO: 1858037 - DNA, 15 bp, Homo sapiens
ctgcctccatagcct

SEQ ID NO: 1858038 - DNA, 15 bp, Homo sapiens
tgcctccatagcctc

SEQ ID NO: 1858039 - DNA, 15 bp, Homo sapiens
gcctccatagcctct

SEQ ID NO: 1858040 - DNA, 15 bp, Homo sapiens
cctccatagcctcta

SEQ ID NO: 1858041 - DNA, 15 bp, Homo sapiens
ctccatagcctctac

SEQ ID NO: 1858042 - DNA, 15 bp, Homo sapiens
tccatagcctctact

SEQ ID NO: 1858043 - DNA, 15 bp, Homo sapiens
ccatagcctctactt

SEQ ID NO: 1858044 - DNA, 15 bp, Homo sapiens
catagcctctacttc

SEQ ID NO: 1858045 - DNA, 15 bp, Homo sapiens
atagcctctacttcc

SEQ ID NO: 1858046 - DNA, 15 bp, Homo sapiens
tagcctctacttccc

SEQ ID NO: 1858047 - DNA, 15 bp, Homo sapiens
agcctctacttccca

SEQ ID NO: 1858048 - DNA, 15 bp, Homo sapiens
gcctctacttcccag

SEQ ID NO: 1858049 - DNA, 15 bp, Homo sapiens
cctctacttcccagg

SEQ ID NO: 1858050 - DNA, 15 bp, Homo sapiens
ctctacttcccagga

SEQ ID NO: 1858051 - DNA, 15 bp, Homo sapiens
tctacttcccaggat

SEQ ID NO: 1858052 - DNA, 15 bp, Homo sapiens
ctacttcccaggatc

SEQ ID NO: 1858053 - DNA, 15 bp, Homo sapiens
tacttcccaggatct

SEQ ID NO: 1858054 - DNA, 15 bp, Homo sapiens
acttcccaggatctc

SEQ ID NO: 1858055 - DNA, 15 bp, Homo sapiens
cttcccaggatctcc

SEQ ID NO: 1858056 - DNA, 15 bp, Homo sapiens
ttcccaggatctcca

SEQ ID NO: 1858057 - DNA, 15 bp, Homo sapiens
tcccaggatctccag

SEQ ID NO: 1858058 - DNA, 15 bp, Homo sapiens
cccaggatctccagc

SEQ ID NO: 1858059 - DNA, 15 bp, Homo sapiens
ccaggatctccagca

SEQ ID NO: 1858060 - DNA, 15 bp, Homo sapiens
caggatctccagcaa

SEQ ID NO: 1858061 - DNA, 15 bp, Homo sapiens
aggatctccagcaag

SEQ ID NO: 1858062 - DNA, 15 bp, Homo sapiens
ggatctccagcaagg

SEQ ID NO: 1858063 - DNA, 15 bp, Homo sapiens
gatctccagcaaggg

SEQ ID NO: 1858064 - DNA, 15 bp, Homo sapiens
atctccagcaaggga

SEQ ID NO: 1858065 - DNA, 15 bp, Homo sapiens
tctccagcaagggat

SEQ ID NO: 1858066 - DNA, 15 bp, Homo sapiens
ctccagcaagggata

SEQ ID NO: 1858067 - DNA, 15 bp, Homo sapiens
tccagcaagggatat

SEQ ID NO: 1858068 - DNA, 15 bp, Homo sapiens
ccagcaagggatatc

SEQ ID NO: 1858069 - DNA, 15 bp, Homo sapiens
cagcaagggatatct

SEQ ID NO: 1858070 - DNA, 15 bp, Homo sapiens
agcaagggatatctc

SEQ ID NO: 1858071 - DNA, 15 bp, Homo sapiens
gcaagggatatctcc

SEQ ID NO: 1858072 - DNA, 15 bp, Homo sapiens
caagggatatctcct

SEQ ID NO: 1858073 - DNA, 15 bp, Homo sapiens
aagggatatctcctg

SEQ ID NO: 1858074 - DNA, 15 bp, Homo sapiens
agggatatctcctga

SEQ ID NO: 1858075 - DNA, 15 bp, Homo sapiens
gggatatctcctgag

SEQ ID NO: 1858076 - DNA, 15 bp, Homo sapiens
ggatatctcctgagg

SEQ ID NO: 1858077 - DNA, 15 bp, Homo sapiens
gatatctcctgaggc

SEQ ID NO: 1858078 - DNA, 15 bp, Homo sapiens
atatctcctgaggca

SEQ ID NO: 1858079 - DNA, 15 bp, Homo sapiens
tatctcctgaggcag

SEQ ID NO: 1858080 - DNA, 15 bp, Homo sapiens
atctcctgaggcagt

SEQ ID NO: 1858081 - DNA, 15 bp, Homo sapiens
tctcctgaggcagtg

SEQ ID NO: 1858082 - DNA, 15 bp, Homo sapiens
ctcctgaggcagtgg

SEQ ID NO: 1858083 - DNA, 15 bp, Homo sapiens
tcctgaggcagtggc

SEQ ID NO: 1858084 - DNA, 15 bp, Homo sapiens
cctgaggcagtggct

SEQ ID NO: 1858085 - DNA, 15 bp, Homo sapiens
ctgaggcagtggctt

SEQ ID NO: 1858086 - DNA, 15 bp, Homo sapiens
tgaggcagtggcttt

SEQ ID NO: 1858087 - DNA, 15 bp, Homo sapiens
gaggcagtggctttc

SEQ ID NO: 1858088 - DNA, 15 bp, Homo sapiens
aggcagtggctttca

SEQ ID NO: 1858089 - DNA, 15 bp, Homo sapiens
ggcagtggctttcac

SEQ ID NO: 1858090 - DNA, 15 bp, Homo sapiens
gcagtggctttcaca

SEQ ID NO: 1858091 - DNA, 15 bp, Homo sapiens
cagtggctttcacac

SEQ ID NO: 1858092 - DNA, 15 bp, Homo sapiens
agtggctttcacact

SEQ ID NO: 1858093 - DNA, 15 bp, Homo sapiens
gtggctttcacactc

SEQ ID NO: 1858094 - DNA, 15 bp, Homo sapiens
tggctttcacactct

SEQ ID NO: 1858095 - DNA, 15 bp, Homo sapiens
ggctttcacactctt

SEQ ID NO: 1858096 - DNA, 15 bp, Homo sapiens
gctttcacactctta

SEQ ID NO: 1858097 - DNA, 15 bp, Homo sapiens
ctttcacactcttag

SEQ ID NO: 1858098 - DNA, 15 bp, Homo sapiens
tttcacactcttaga

SEQ ID NO: 1858099 - DNA, 15 bp, Homo sapiens
ttcacactcttagag

SEQ ID NO: 1858100 - DNA, 15 bp, Homo sapiens
tcacactcttagagg

SEQ ID NO: 1858101 - DNA, 15 bp, Homo sapiens
cacactcttagaggc

SEQ ID NO: 1858102 - DNA, 15 bp, Homo sapiens
acactcttagaggcc

SEQ ID NO: 1858103 - DNA, 15 bp, Homo sapiens
cactcttagaggcct

SEQ ID NO: 1858104 - DNA, 15 bp, Homo sapiens
actcttagaggcctg

SEQ ID NO: 1858105 - DNA, 15 bp, Homo sapiens
ctcttagaggcctgg

SEQ ID NO: 1858106 - DNA, 15 bp, Homo sapiens
tcttagaggcctgga

SEQ ID NO: 1858107 - DNA, 15 bp, Homo sapiens
cttagaggcctggag

SEQ ID NO: 1858108 - DNA, 15 bp, Homo sapiens
ttagaggcctggagc

SEQ ID NO: 1858109 - DNA, 15 bp, Homo sapiens
tagaggcctggagct

SEQ ID NO: 1858110 - DNA, 15 bp, Homo sapiens
agaggcctggagctc

SEQ ID NO: 1858111 - DNA, 15 bp, Homo sapiens
gaggcctggagctct

SEQ ID NO: 1858112 - DNA, 15 bp, Homo sapiens
aggcctggagctctg

SEQ ID NO: 1858113 - DNA, 15 bp, Homo sapiens
ggcctggagctctgt

SEQ ID NO: 1858114 - DNA, 15 bp, Homo sapiens
gcctggagctctgtg

SEQ ID NO: 1858115 - DNA, 15 bp, Homo sapiens
cctggagctctgtgt

SEQ ID NO: 1858116 - DNA, 15 bp, Homo sapiens
ctggagctctgtgta

SEQ ID NO: 1858117 - DNA, 15 bp, Homo sapiens
tggagctctgtgtac

SEQ ID NO: 1858118 - DNA, 15 bp, Homo sapiens
ggagctctgtgtaca

SEQ ID NO: 1858119 - DNA, 15 bp, Homo sapiens
gagctctgtgtacac

SEQ ID NO: 1858120 - DNA, 15 bp, Homo sapiens
agctctgtgtacact

SEQ ID NO: 1858121 - DNA, 15 bp, Homo sapiens
gctctgtgtacacta

SEQ ID NO: 1858122 - DNA, 15 bp, Homo sapiens
ctctgtgtacactaa

SEQ ID NO: 1858123 - DNA, 15 bp, Homo sapiens
tctgtgtacactaac

SEQ ID NO: 1858124 - DNA, 15 bp, Homo sapiens
ctgtgtacactaact

SEQ ID NO: 1858125 - DNA, 15 bp, Homo sapiens
tgtgtacactaactg

SEQ ID NO: 1858126 - DNA, 15 bp, Homo sapiens
gtgtacactaactga

SEQ ID NO: 1858127 - DNA, 15 bp, Homo sapiens
tgtacactaactgaa

SEQ ID NO: 1858128 - DNA, 15 bp, Homo sapiens
gtacactaactgaaa

SEQ ID NO: 1858129 - DNA, 15 bp, Homo sapiens
tacactaactgaaac

SEQ ID NO: 1858130 - DNA, 15 bp, Homo sapiens
acactaactgaaacc

SEQ ID NO: 1858131 - DNA, 15 bp, Homo sapiens
cactaactgaaacct

SEQ ID NO: 1858132 - DNA, 15 bp, Homo sapiens
actaactgaaaccta

SEQ ID NO: 1858133 - DNA, 15 bp, Homo sapiens
ctaactgaaacctag

SEQ ID NO: 1858134 - DNA, 15 bp, Homo sapiens
taactgaaacctagc

SEQ ID NO: 1858135 - DNA, 15 bp, Homo sapiens
aactgaaacctagct

SEQ ID NO: 1858136 - DNA, 15 bp, Homo sapiens
actgaaacctagctg

SEQ ID NO: 1858137 - DNA, 15 bp, Homo sapiens
ctgaaacctagctgc

SEQ ID NO: 1858138 - DNA, 15 bp, Homo sapiens
tgaaacctagctgct

SEQ ID NO: 1858139 - DNA, 15 bp, Homo sapiens
gaaacctagctgctt

SEQ ID NO: 1858140 - DNA, 15 bp, Homo sapiens
aaacctagctgcttt

SEQ ID NO: 1858141 - DNA, 15 bp, Homo sapiens
aacctagctgctttg

SEQ ID NO: 1858142 - DNA, 15 bp, Homo sapiens
acctagctgctttgg

SEQ ID NO: 1858143 - DNA, 15 bp, Homo sapiens
cctagctgctttggt

SEQ ID NO: 1858144 - DNA, 15 bp, Homo sapiens
ctagctgctttggtt

SEQ ID NO: 1858145 - DNA, 15 bp, Homo sapiens
tagctgctttggtta

SEQ ID NO: 1858146 - DNA, 15 bp, Homo sapiens
agctgctttggttag

SEQ ID NO: 1858147 - DNA, 15 bp, Homo sapiens
gctgctttggttaga

SEQ ID NO: 1858148 - DNA, 15 bp, Homo sapiens
ctgctttggttagag

SEQ ID NO: 1858149 - DNA, 15 bp, Homo sapiens
tgctttggttagagg

SEQ ID NO: 1858150 - DNA, 15 bp, Homo sapiens
gctttggttagagga

SEQ ID NO: 1858151 - DNA, 15 bp, Homo sapiens
ctttggttagaggat

SEQ ID NO: 1858152 - DNA, 15 bp, Homo sapiens
tttggttagaggatt

SEQ ID NO: 1858153 - DNA, 15 bp, Homo sapiens
ttggttagaggattg

SEQ ID NO: 1858154 - DNA, 15 bp, Homo sapiens
tggttagaggattgg

SEQ ID NO: 1858155 - DNA, 15 bp, Homo sapiens
ggttagaggattggg

SEQ ID NO: 1858156 - DNA, 15 bp, Homo sapiens
gttagaggattgggg

SEQ ID NO: 1858157 - DNA, 15 bp, Homo sapiens
ttagaggattggggt

SEQ ID NO: 1858158 - DNA, 15 bp, Homo sapiens
tagaggattggggtc

SEQ ID NO: 1858159 - DNA, 15 bp, Homo sapiens
agaggattggggtca

SEQ ID NO: 1858160 - DNA, 15 bp, Homo sapiens
gaggattggggtcag

SEQ ID NO: 1858161 - DNA, 15 bp, Homo sapiens
aggattggggtcagg

SEQ ID NO: 1858162 - DNA, 15 bp, Homo sapiens
ggattggggtcagga

SEQ ID NO: 1858163 - DNA, 15 bp, Homo sapiens
gattggggtcaggag

SEQ ID NO: 1858164 - DNA, 15 bp, Homo sapiens
attggggtcaggagg

SEQ ID NO: 1858165 - DNA, 15 bp, Homo sapiens
ttggggtcaggagga

SEQ ID NO: 1858166 - DNA, 15 bp, Homo sapiens
tggggtcaggaggag

SEQ ID NO: 1858167 - DNA, 15 bp, Homo sapiens
ggggtcaggaggaga

SEQ ID NO: 1858168 - DNA, 15 bp, Homo sapiens
gggtcaggaggagac

SEQ ID NO: 1858169 - DNA, 15 bp, Homo sapiens
ggtcaggaggagact

SEQ ID NO: 1858170 - DNA, 15 bp, Homo sapiens
gtcaggaggagactg

SEQ ID NO: 1858171 - DNA, 15 bp, Homo sapiens
tcaggaggagactgt

SEQ ID NO: 1858172 - DNA, 15 bp, Homo sapiens
caggaggagactgta

SEQ ID NO: 1858173 - DNA, 15 bp, Homo sapiens
aggaggagactgtat

SEQ ID NO: 1858174 - DNA, 15 bp, Homo sapiens
ggaggagactgtatc

SEQ ID NO: 1858175 - DNA, 15 bp, Homo sapiens
gaggagactgtatcc

SEQ ID NO: 1858176 - DNA, 15 bp, Homo sapiens
aggagactgtatcct

SEQ ID NO: 1858177 - DNA, 15 bp, Homo sapiens
ggagactgtatcctc

SEQ ID NO: 1858178 - DNA, 15 bp, Homo sapiens
gagactgtatcctca

SEQ ID NO: 1858179 - DNA, 15 bp, Homo sapiens
agactgtatcctcat

SEQ ID NO: 1858180 - DNA, 15 bp, Homo sapiens
gactgtatcctcatg

SEQ ID NO: 1858181 - DNA, 15 bp, Homo sapiens
actgtatcctcatgg

SEQ ID NO: 1858182 - DNA, 15 bp, Homo sapiens
ctgtatcctcatggc

SEQ ID NO: 1858183 - DNA, 15 bp, Homo sapiens
tgtatcctcatggcc

SEQ ID NO: 1858184 - DNA, 15 bp, Homo sapiens
gtatcctcatggccc

SEQ ID NO: 1858185 - DNA, 15 bp, Homo sapiens
tatcctcatggccca

SEQ ID NO: 1858186 - DNA, 15 bp, Homo sapiens
atcctcatggcccag

SEQ ID NO: 1858187 - DNA, 15 bp, Homo sapiens
tcctcatggcccagc

SEQ ID NO: 1858188 - DNA, 15 bp, Homo sapiens
cctcatggcccagca

SEQ ID NO: 1858189 - DNA, 15 bp, Homo sapiens
ctcatggcccagcaa

SEQ ID NO: 1858190 - DNA, 15 bp, Homo sapiens
tcatggcccagcaag

SEQ ID NO: 1858191 - DNA, 15 bp, Homo sapiens
catggcccagcaaga

SEQ ID NO: 1858192 - DNA, 15 bp, Homo sapiens
atggcccagcaagag

SEQ ID NO: 1858193 - DNA, 15 bp, Homo sapiens
tggcccagcaagagt

SEQ ID NO: 1858194 - DNA, 15 bp, Homo sapiens
ggcccagcaagagtt

SEQ ID NO: 1858195 - DNA, 15 bp, Homo sapiens
gcccagcaagagttc

SEQ ID NO: 1858196 - DNA, 15 bp, Homo sapiens
cccagcaagagttcc

SEQ ID NO: 1858197 - DNA, 15 bp, Homo sapiens
ccagcaagagttccg

SEQ ID NO: 1858198 - DNA, 15 bp, Homo sapiens
cagcaagagttccgc

SEQ ID NO: 1858199 - DNA, 15 bp, Homo sapiens
agcaagagttccgca

SEQ ID NO: 1858200 - DNA, 15 bp, Homo sapiens
gcaagagttccgcaa

SEQ ID NO: 1858201 - DNA, 15 bp, Homo sapiens
caagagttccgcaaa

SEQ ID NO: 1858202 - DNA, 15 bp, Homo sapiens
aagagttccgcaaaa

SEQ ID NO: 1858203 - DNA, 15 bp, Homo sapiens
agagttccgcaaaac

SEQ ID NO: 1858204 - DNA, 15 bp, Homo sapiens
gagttccgcaaaacc

SEQ ID NO: 1858205 - DNA, 15 bp, Homo sapiens
agttccgcaaaaccc

SEQ ID NO: 1858206 - DNA, 15 bp, Homo sapiens
gttccgcaaaaccct

SEQ ID NO: 1858207 - DNA, 15 bp, Homo sapiens
ttccgcaaaaccctt

SEQ ID NO: 1858208 - DNA, 15 bp, Homo sapiens
tccgcaaaacccttg

SEQ ID NO: 1858209 - DNA, 15 bp, Homo sapiens
ccgcaaaacccttgg

SEQ ID NO: 1858210 - DNA, 15 bp, Homo sapiens
cgcaaaacccttggg

SEQ ID NO: 1858211 - DNA, 15 bp, Homo sapiens
gcaaaacccttggga

SEQ ID NO: 1858212 - DNA, 15 bp, Homo sapiens
caaaacccttgggat

SEQ ID NO: 1858213 - DNA, 15 bp, Homo sapiens
aaaacccttgggatt

SEQ ID NO: 1858214 - DNA, 15 bp, Homo sapiens
aaacccttgggattc

SEQ ID NO: 1858215 - DNA, 15 bp, Homo sapiens
aacccttgggattct

SEQ ID NO: 1858216 - DNA, 15 bp, Homo sapiens
acccttgggattctc

SEQ ID NO: 1858217 - DNA, 15 bp, Homo sapiens
cccttgggattctca

SEQ ID NO: 1858218 - DNA, 15 bp, Homo sapiens
ccttgggattctcag

SEQ ID NO: 1858219 - DNA, 15 bp, Homo sapiens
cttgggattctcagt

SEQ ID NO: 1858220 - DNA, 15 bp, Homo sapiens
ttgggattctcagta

SEQ ID NO: 1858221 - DNA, 15 bp, Homo sapiens
tgggattctcagtag

SEQ ID NO: 1858222 - DNA, 15 bp, Homo sapiens
gggattctcagtaga

SEQ ID NO: 1858223 - DNA, 15 bp, Homo sapiens
ggattctcagtagag

SEQ ID NO: 1858224 - DNA, 15 bp, Homo sapiens
gattctcagtagagc

SEQ ID NO: 1858225 - DNA, 15 bp, Homo sapiens
attctcagtagagca

SEQ ID NO: 1858226 - DNA, 15 bp, Homo sapiens
ttctcagtagagcag

SEQ ID NO: 1858227 - DNA, 15 bp, Homo sapiens
tctcagtagagcaga

SEQ ID NO: 1858228 - DNA, 15 bp, Homo sapiens
ctcagtagagcagat

SEQ ID NO: 1858229 - DNA, 15 bp, Homo sapiens
tcagtagagcagatc

SEQ ID NO: 1858230 - DNA, 15 bp, Homo sapiens
cagtagagcagatca

SEQ ID NO: 1858231 - DNA, 15 bp, Homo sapiens
agtagagcagatcag

SEQ ID NO: 1858232 - DNA, 15 bp, Homo sapiens
gtagagcagatcagg

SEQ ID NO: 1858233 - DNA, 15 bp, Homo sapiens
tagagcagatcagga

SEQ ID NO: 1858234 - DNA, 15 bp, Homo sapiens
agagcagatcaggat

SEQ ID NO: 1858235 - DNA, 15 bp, Homo sapiens
gagcagatcaggatg

SEQ ID NO: 1858236 - DNA, 15 bp, Homo sapiens
agcagatcaggatgc

SEQ ID NO: 1858237 - DNA, 15 bp, Homo sapiens
gcagatcaggatgct

SEQ ID NO: 1858238 - DNA, 15 bp, Homo sapiens
cagatcaggatgcta

SEQ ID NO: 1858239 - DNA, 15 bp, Homo sapiens
agatcaggatgctaa

SEQ ID NO: 1858240 - DNA, 15 bp, Homo sapiens
gatcaggatgctaat

SEQ ID NO: 1858241 - DNA, 15 bp, Homo sapiens
atcaggatgctaatg

SEQ ID NO: 1858242 - DNA, 15 bp, Homo sapiens
tcaggatgctaatgc

SEQ ID NO: 1858243 - DNA, 15 bp, Homo sapiens
caggatgctaatgcc

SEQ ID NO: 1858244 - DNA, 15 bp, Homo sapiens
aggatgctaatgcca

SEQ ID NO: 1858245 - DNA, 15 bp, Homo sapiens
ggatgctaatgccag

SEQ ID NO: 1858246 - DNA, 15 bp, Homo sapiens
gatgctaatgccagc

SEQ ID NO: 1858247 - DNA, 15 bp, Homo sapiens
atgctaatgccagcc

SEQ ID NO: 1858248 - DNA, 15 bp, Homo sapiens
tgctaatgccagcct

SEQ ID NO: 1858249 - DNA, 15 bp, Homo sapiens
ttgtctcacagccta

SEQ ID NO: 1858250 - DNA, 15 bp, Homo sapiens
tgtctcacagcctat

SEQ ID NO: 1858251 - DNA, 15 bp, Homo sapiens
gtctcacagcctatc

SEQ ID NO: 1858252 - DNA, 15 bp, Homo sapiens
tctcacagcctatcc

SEQ ID NO: 1858253 - DNA, 15 bp, Homo sapiens
ctcacagcctatccc

SEQ ID NO: 1858254 - DNA, 15 bp, Homo sapiens
tcacagcctatccca

SEQ ID NO: 1858255 - DNA, 15 bp, Homo sapiens
cacagcctatcccag

SEQ ID NO: 1858256 - DNA, 15 bp, Homo sapiens
acagcctatcccagc

SEQ ID NO: 1858257 - DNA, 15 bp, Homo sapiens
cagcctatcccagca

SEQ ID NO: 1858258 - DNA, 15 bp, Homo sapiens
agcctatcccagcat

SEQ ID NO: 1858259 - DNA, 15 bp, Homo sapiens
gcctatcccagcatc

SEQ ID NO: 1858260 - DNA, 15 bp, Homo sapiens
cctatcccagcatcg

SEQ ID NO: 1858261 - DNA, 15 bp, Homo sapiens
ctatcccagcatcgt

SEQ ID NO: 1858262 - DNA, 15 bp, Homo sapiens
tatcccagcatcgtg

SEQ ID NO: 1858263 - DNA, 15 bp, Homo sapiens
atcccagcatcgtgt

SEQ ID NO: 1858264 - DNA, 15 bp, Homo sapiens
tcccagcatcgtgtg

SEQ ID NO: 1858265 - DNA, 15 bp, Homo sapiens
cccagcatcgtgtgt

SEQ ID NO: 1858266 - DNA, 15 bp, Homo sapiens
ccagcatcgtgtgtg

SEQ ID NO: 1858267 - DNA, 15 bp, Homo sapiens
cagcatcgtgtgtgt

SEQ ID NO: 1858268 - DNA, 15 bp, Homo sapiens
agcatcgtgtgtgtg

SEQ ID NO: 1858269 - DNA, 15 bp, Homo sapiens
gcatcgtgtgtgtgt

SEQ ID NO: 1858270 - DNA, 15 bp, Homo sapiens
catcgtgtgtgtgtg

SEQ ID NO: 1858271 - DNA, 15 bp, Homo sapiens
atcgtgtgtgtgtgt

SEQ ID NO: 1858272 - DNA, 15 bp, Homo sapiens
tcgtgtgtgtgtgtg

SEQ ID NO: 1858273 - DNA, 15 bp, Homo sapiens
gtgtgtgtgtgtggg

SEQ ID NO: 1858274 - DNA, 15 bp, Homo sapiens
tgtgtgtgtgtgggg

SEQ ID NO: 1858275 - DNA, 15 bp, Homo sapiens
gtgtgtgtgtggggt

SEQ ID NO: 1858276 - DNA, 15 bp, Homo sapiens
tgtgtgtgtggggtg

SEQ ID NO: 1858277 - DNA, 15 bp, Homo sapiens
gtgtgtgtggggtgg

SEQ ID NO: 1858278 - DNA, 15 bp, Homo sapiens
tgtgtgtggggtggg

SEQ ID NO: 1858279 - DNA, 15 bp, Homo sapiens
gtgtgtggggtgggg

SEQ ID NO: 1858280 - DNA, 15 bp, Homo sapiens
tgtgtggggtggggg

SEQ ID NO: 1858281 - DNA, 15 bp, Homo sapiens
gtgtggggtgggggg

SEQ ID NO: 1858282 - DNA, 15 bp, Homo sapiens
tgtggggtggggggg

SEQ ID NO: 1858283 - DNA, 15 bp, Homo sapiens
gtggggtgggggggg

SEQ ID NO: 1858284 - DNA, 15 bp, Homo sapiens
tggggtggggggggt

SEQ ID NO: 1858285 - DNA, 15 bp, Homo sapiens
ggggtggggggggtg

SEQ ID NO: 1858286 - DNA, 15 bp, Homo sapiens
gggtggggggggtgg

SEQ ID NO: 1858287 - DNA, 15 bp, Homo sapiens
ggtggggggggtggg

SEQ ID NO: 1858288 - DNA, 15 bp, Homo sapiens
gtggggggggtgggg

SEQ ID NO: 1858289 - DNA, 15 bp, Homo sapiens
tggggggggtggggg

SEQ ID NO: 1858290 - DNA, 15 bp, Homo sapiens
ggggggggtgggggg

SEQ ID NO: 1858291 - DNA, 15 bp, Homo sapiens
gggggggtggggggg

SEQ ID NO: 1858292 - DNA, 15 bp, Homo sapiens
ggggggtgggggggg

SEQ ID NO: 1858293 - DNA, 15 bp, Homo sapiens
gggggtgggggggga

SEQ ID NO: 1858294 - DNA, 15 bp, Homo sapiens
ggggtggggggggat

SEQ ID NO: 1858295 - DNA, 15 bp, Homo sapiens
gggtggggggggata

SEQ ID NO: 1858296 - DNA, 15 bp, Homo sapiens
ggtggggggggatag

SEQ ID NO: 1858297 - DNA, 15 bp, Homo sapiens
gtggggggggatagg

SEQ ID NO: 1858298 - DNA, 15 bp, Homo sapiens
tggggggggataggg

SEQ ID NO: 1858299 - DNA, 15 bp, Homo sapiens
ggggggggatagggg

SEQ ID NO: 1858300 - DNA, 15 bp, Homo sapiens
gggggggataggggg

SEQ ID NO: 1858301 - DNA, 15 bp, Homo sapiens
ggggggatagggggt

SEQ ID NO: 1858302 - DNA, 15 bp, Homo sapiens
gggggatagggggtg

SEQ ID NO: 1858303 - DNA, 15 bp, Homo sapiens
ggggatagggggtgg

SEQ ID NO: 1858304 - DNA, 15 bp, Homo sapiens
gggatagggggtggg

SEQ ID NO: 1858305 - DNA, 15 bp, Homo sapiens
ggatagggggtgggg

SEQ ID NO: 1858306 - DNA, 15 bp, Homo sapiens
gatagggggtggggg

SEQ ID NO: 1858307 - DNA, 15 bp, Homo sapiens
atagggggtgggggc

SEQ ID NO: 1858308 - DNA, 15 bp, Homo sapiens
tagggggtgggggct

SEQ ID NO: 1858309 - DNA, 15 bp, Homo sapiens
agggggtgggggctg

SEQ ID NO: 1858310 - DNA, 15 bp, Homo sapiens
gggggtgggggctgg

SEQ ID NO: 1858311 - DNA, 15 bp, Homo sapiens
ggggtgggggctggt

SEQ ID NO: 1858312 - DNA, 15 bp, Homo sapiens
gggtgggggctggtg

SEQ ID NO: 1858313 - DNA, 15 bp, Homo sapiens
ggtgggggctggtgg

SEQ ID NO: 1858314 - DNA, 15 bp, Homo sapiens
gtgggggctggtggt

SEQ ID NO: 1858315 - DNA, 15 bp, Homo sapiens
tgggggctggtggta

SEQ ID NO: 1858316 - DNA, 15 bp, Homo sapiens
gggggctggtggtat

SEQ ID NO: 1858317 - DNA, 15 bp, Homo sapiens
ggggctggtggtatt

SEQ ID NO: 1858318 - DNA, 15 bp, Homo sapiens
gggctggtggtattt

SEQ ID NO: 1858319 - DNA, 15 bp, Homo sapiens
ggctggtggtattta

SEQ ID NO: 1858320 - DNA, 15 bp, Homo sapiens
gctggtggtatttag

SEQ ID NO: 1858321 - DNA, 15 bp, Homo sapiens
ctggtggtatttagg

SEQ ID NO: 1858322 - DNA, 15 bp, Homo sapiens
tggtggtatttaggg

SEQ ID NO: 1858323 - DNA, 15 bp, Homo sapiens
ggtggtatttaggga

SEQ ID NO: 1858324 - DNA, 15 bp, Homo sapiens
gtggtatttagggat

SEQ ID NO: 1858325 - DNA, 15 bp, Homo sapiens
tggtatttagggatg

SEQ ID NO: 1858326 - DNA, 15 bp, Homo sapiens
ggtatttagggatgc

SEQ ID NO: 1858327 - DNA, 15 bp, Homo sapiens
gtatttagggatgcc

SEQ ID NO: 1858328 - DNA, 15 bp, Homo sapiens
tatttagggatgccc

SEQ ID NO: 1858329 - DNA, 15 bp, Homo sapiens
atttagggatgccct

SEQ ID NO: 1858330 - DNA, 15 bp, Homo sapiens
tttagggatgccctc

SEQ ID NO: 1858331 - DNA, 15 bp, Homo sapiens
ttagggatgccctct

SEQ ID NO: 1858332 - DNA, 15 bp, Homo sapiens
tagggatgccctctt

SEQ ID NO: 1858333 - DNA, 15 bp, Homo sapiens
agggatgccctcttc

SEQ ID NO: 1858334 - DNA, 15 bp, Homo sapiens
gggatgccctcttct

SEQ ID NO: 1858335 - DNA, 15 bp, Homo sapiens
ggatgccctcttctt

SEQ ID NO: 1858336 - DNA, 15 bp, Homo sapiens
gatgccctcttctta

SEQ ID NO: 1858337 - DNA, 15 bp, Homo sapiens
atgccctcttcttaa

SEQ ID NO: 1858338 - DNA, 15 bp, Homo sapiens
tgccctcttcttaag

SEQ ID NO: 1858339 - DNA, 15 bp, Homo sapiens
gccctcttcttaagg

SEQ ID NO: 1858340 - DNA, 15 bp, Homo sapiens
ccctcttcttaagga

SEQ ID NO: 1858341 - DNA, 15 bp, Homo sapiens
cctcttcttaaggat

SEQ ID NO: 1858342 - DNA, 15 bp, Homo sapiens
ctcttcttaaggatg

SEQ ID NO: 1858343 - DNA, 15 bp, Homo sapiens
tcttcttaaggatgt

SEQ ID NO: 1858344 - DNA, 15 bp, Homo sapiens
cttcttaaggatgtg

SEQ ID NO: 1858345 - DNA, 15 bp, Homo sapiens
ttcttaaggatgtgt

SEQ ID NO: 1858346 - DNA, 15 bp, Homo sapiens
tcttaaggatgtgtc

SEQ ID NO: 1858347 - DNA, 15 bp, Homo sapiens
cttaaggatgtgtcc

SEQ ID NO: 1858348 - DNA, 15 bp, Homo sapiens
ttaaggatgtgtcct

SEQ ID NO: 1858349 - DNA, 15 bp, Homo sapiens
taaggatgtgtcctg

SEQ ID NO: 1858350 - DNA, 15 bp, Homo sapiens
aaggatgtgtcctgg

SEQ ID NO: 1858351 - DNA, 15 bp, Homo sapiens
aggatgtgtcctggg

SEQ ID NO: 1858352 - DNA, 15 bp, Homo sapiens
ggatgtgtcctgggg

SEQ ID NO: 1858353 - DNA, 15 bp, Homo sapiens
gatgtgtcctggggc

SEQ ID NO: 1858354 - DNA, 15 bp, Homo sapiens
atgtgtcctggggct

SEQ ID NO: 1858355 - DNA, 15 bp, Homo sapiens
tgtgtcctggggcta

SEQ ID NO: 1858356 - DNA, 15 bp, Homo sapiens
gtgtcctggggctaa

SEQ ID NO: 1858357 - DNA, 15 bp, Homo sapiens
tgtcctggggctaag

SEQ ID NO: 1858358 - DNA, 15 bp, Homo sapiens
gtcctggggctaagt

SEQ ID NO: 1858359 - DNA, 15 bp, Homo sapiens
tcctggggctaagtc

SEQ ID NO: 1858360 - DNA, 15 bp, Homo sapiens
cctggggctaagtca

SEQ ID NO: 1858361 - DNA, 15 bp, Homo sapiens
ctggggctaagtcat

SEQ ID NO: 1858362 - DNA, 15 bp, Homo sapiens
tggggctaagtcatt

SEQ ID NO: 1858363 - DNA, 15 bp, Homo sapiens
ggggctaagtcattg

SEQ ID NO: 1858364 - DNA, 15 bp, Homo sapiens
gggctaagtcattgt

SEQ ID NO: 1858365 - DNA, 15 bp, Homo sapiens
ggctaagtcattgtt

SEQ ID NO: 1858366 - DNA, 15 bp, Homo sapiens
gctaagtcattgttc

SEQ ID NO: 1858367 - DNA, 15 bp, Homo sapiens
ctaagtcattgttct

SEQ ID NO: 1858368 - DNA, 15 bp, Homo sapiens
taagtcattgttctt

SEQ ID NO: 1858369 - DNA, 15 bp, Homo sapiens
aagtcattgttcttg

SEQ ID NO: 1858370 - DNA, 15 bp, Homo sapiens
agtcattgttcttgg

SEQ ID NO: 1858371 - DNA, 15 bp, Homo sapiens
gtcattgttcttggg

SEQ ID NO: 1858372 - DNA, 15 bp, Homo sapiens
tcattgttcttgggg

SEQ ID NO: 1858373 - DNA, 15 bp, Homo sapiens
cattgttcttggggg

SEQ ID NO: 1858374 - DNA, 15 bp, Homo sapiens
attgttcttgggggt

SEQ ID NO: 1858375 - DNA, 15 bp, Homo sapiens
ttgttcttgggggtg

SEQ ID NO: 1858376 - DNA, 15 bp, Homo sapiens
tgttcttgggggtgc

SEQ ID NO: 1858377 - DNA, 15 bp, Homo sapiens
gttcttgggggtgca

SEQ ID NO: 1858378 - DNA, 15 bp, Homo sapiens
ttcttgggggtgcag

SEQ ID NO: 1858379 - DNA, 15 bp, Homo sapiens
tcttgggggtgcagg

SEQ ID NO: 1858380 - DNA, 15 bp, Homo sapiens
cttgggggtgcaggg

SEQ ID NO: 1858381 - DNA, 15 bp, Homo sapiens
ggggtgcagggaagg

SEQ ID NO: 1858382 - DNA, 15 bp, Homo sapiens
gggtgcagggaaggg

SEQ ID NO: 1858383 - DNA, 15 bp, Homo sapiens
ggtgcagggaaggga

SEQ ID NO: 1858384 - DNA, 15 bp, Homo sapiens
gtgcagggaagggac

SEQ ID NO: 1858385 - DNA, 15 bp, Homo sapiens
tgcagggaagggaca

SEQ ID NO: 1858386 - DNA, 15 bp, Homo sapiens
gcagggaagggacaa

SEQ ID NO: 1858387 - DNA, 15 bp, Homo sapiens
cagggaagggacaat

SEQ ID NO: 1858388 - DNA, 15 bp, Homo sapiens
agggaagggacaatg

SEQ ID NO: 1858389 - DNA, 15 bp, Homo sapiens
gggaagggacaatgg

SEQ ID NO: 1858390 - DNA, 15 bp, Homo sapiens
ggaagggacaatgga

SEQ ID NO: 1858391 - DNA, 15 bp, Homo sapiens
gaagggacaatggat

SEQ ID NO: 1858392 - DNA, 15 bp, Homo sapiens
aagggacaatggatc

SEQ ID NO: 1858393 - DNA, 15 bp, Homo sapiens
agggacaatggatcg

SEQ ID NO: 1858394 - DNA, 15 bp, Homo sapiens
gggacaatggatcgg

SEQ ID NO: 1858395 - DNA, 15 bp, Homo sapiens
ggacaatggatcgga

SEQ ID NO: 1858396 - DNA, 15 bp, Homo sapiens
gacaatggatcggaa

SEQ ID NO: 1858397 - DNA, 15 bp, Homo sapiens
acaatggatcggaag

SEQ ID NO: 1858398 - DNA, 15 bp, Homo sapiens
caatggatcggaagg

SEQ ID NO: 1858399 - DNA, 15 bp, Homo sapiens
aatggatcggaaggg

SEQ ID NO: 1858400 - DNA, 15 bp, Homo sapiens
atggatcggaagggt

SEQ ID NO: 1858401 - DNA, 15 bp, Homo sapiens
tggatcggaagggtc

SEQ ID NO: 1858402 - DNA, 15 bp, Homo sapiens
ggatcggaagggtct

SEQ ID NO: 1858403 - DNA, 15 bp, Homo sapiens
gatcggaagggtctc

SEQ ID NO: 1858404 - DNA, 15 bp, Homo sapiens
atcggaagggtctca

SEQ ID NO: 1858405 - DNA, 15 bp, Homo sapiens
tcggaagggtctcag

SEQ ID NO: 1858406 - DNA, 15 bp, Homo sapiens
cggaagggtctcagt

SEQ ID NO: 1858407 - DNA, 15 bp, Homo sapiens
ggaagggtctcagtt

SEQ ID NO: 1858408 - DNA, 15 bp, Homo sapiens
gaagggtctcagttt

SEQ ID NO: 1858409 - DNA, 15 bp, Homo sapiens
aagggtctcagtttg

SEQ ID NO: 1858410 - DNA, 15 bp, Homo sapiens
agggtctcagtttgc

SEQ ID NO: 1858411 - DNA, 15 bp, Homo sapiens
gggtctcagtttgcc

SEQ ID NO: 1858412 - DNA, 15 bp, Homo sapiens
ggtctcagtttgcct

SEQ ID NO: 1858413 - DNA, 15 bp, Homo sapiens
gtctcagtttgcctc

SEQ ID NO: 1858414 - DNA, 15 bp, Homo sapiens
tctcagtttgcctct

SEQ ID NO: 1858415 - DNA, 15 bp, Homo sapiens
ctcagtttgcctctg

SEQ ID NO: 1858416 - DNA, 15 bp, Homo sapiens
tcagtttgcctctgg

SEQ ID NO: 1858417 - DNA, 15 bp, Homo sapiens
cagtttgcctctggc

SEQ ID NO: 1858418 - DNA, 15 bp, Homo sapiens
agtttgcctctggcc

SEQ ID NO: 1858419 - DNA, 15 bp, Homo sapiens
gtttgcctctggcct

SEQ ID NO: 1858420 - DNA, 15 bp, Homo sapiens
tttgcctctggcctg

SEQ ID NO: 1858421 - DNA, 15 bp, Homo sapiens
ttgcctctggcctgt

SEQ ID NO: 1858422 - DNA, 15 bp, Homo sapiens
tgcctctggcctgtc

SEQ ID NO: 1858423 - DNA, 15 bp, Homo sapiens
gcctctggcctgtca

SEQ ID NO: 1858424 - DNA, 15 bp, Homo sapiens
cctctggcctgtcag

SEQ ID NO: 1858425 - DNA, 15 bp, Homo sapiens
ctctggcctgtcagt

SEQ ID NO: 1858426 - DNA, 15 bp, Homo sapiens
tctggcctgtcagtg

SEQ ID NO: 1858427 - DNA, 15 bp, Homo sapiens
ctggcctgtcagtgg

SEQ ID NO: 1858428 - DNA, 15 bp, Homo sapiens
tggcctgtcagtggg

SEQ ID NO: 1858429 - DNA, 15 bp, Homo sapiens
ggcctgtcagtgggc

SEQ ID NO: 1858430 - DNA, 15 bp, Homo sapiens
gcctgtcagtgggcc

SEQ ID NO: 1858431 - DNA, 15 bp, Homo sapiens
cctgtcagtgggcca

SEQ ID NO: 1858432 - DNA, 15 bp, Homo sapiens
ctgtcagtgggccac

SEQ ID NO: 1858433 - DNA, 15 bp, Homo sapiens
tgtcagtgggccacc

SEQ ID NO: 1858434 - DNA, 15 bp, Homo sapiens
gtcagtgggccaccc

SEQ ID NO: 1858435 - DNA, 15 bp, Homo sapiens
tcagtgggccaccct

SEQ ID NO: 1858436 - DNA, 15 bp, Homo sapiens
cagtgggccaccctc

SEQ ID NO: 1858437 - DNA, 15 bp, Homo sapiens
agtgggccaccctcc

SEQ ID NO: 1858438 - DNA, 15 bp, Homo sapiens
gtgggccaccctcct

SEQ ID NO: 1858439 - DNA, 15 bp, Homo sapiens
tgggccaccctcctc

SEQ ID NO: 1858440 - DNA, 15 bp, Homo sapiens
gggccaccctcctct

SEQ ID NO: 1858441 - DNA, 15 bp, Homo sapiens
ggccaccctcctctc

SEQ ID NO: 1858442 - DNA, 15 bp, Homo sapiens
gccaccctcctctcc

SEQ ID NO: 1858443 - DNA, 15 bp, Homo sapiens
ccaccctcctctcct

SEQ ID NO: 1858444 - DNA, 15 bp, Homo sapiens
caccctcctctcctc

SEQ ID NO: 1858445 - DNA, 15 bp, Homo sapiens
accctcctctcctct

SEQ ID NO: 1858446 - DNA, 15 bp, Homo sapiens
ccctcctctcctctg

SEQ ID NO: 1858447 - DNA, 15 bp, Homo sapiens
cctcctctcctctgt

SEQ ID NO: 1858448 - DNA, 15 bp, Homo sapiens
ctcctctcctctgtg

SEQ ID NO: 1858449 - DNA, 15 bp, Homo sapiens
tcctctcctctgtga

SEQ ID NO: 1858450 - DNA, 15 bp, Homo sapiens
cctctcctctgtgat

SEQ ID NO: 1858451 - DNA, 15 bp, Homo sapiens
ctctcctctgtgatg

SEQ ID NO: 1858452 - DNA, 15 bp, Homo sapiens
tctcctctgtgatgc

SEQ ID NO: 1858453 - DNA, 15 bp, Homo sapiens
ctcctctgtgatgca

SEQ ID NO: 1858454 - DNA, 15 bp, Homo sapiens
tcctctgtgatgcag

SEQ ID NO: 1858455 - DNA, 15 bp, Homo sapiens
cctctgtgatgcagg

SEQ ID NO: 1858456 - DNA, 15 bp, Homo sapiens
ctctgtgatgcaggg

SEQ ID NO: 1858457 - DNA, 15 bp, Homo sapiens
tctgtgatgcagggg

SEQ ID NO: 1858458 - DNA, 15 bp, Homo sapiens
ctgtgatgcaggggc

SEQ ID NO: 1858459 - DNA, 15 bp, Homo sapiens
tgtgatgcaggggca

SEQ ID NO: 1858460 - DNA, 15 bp, Homo sapiens
gtgatgcaggggcag

SEQ ID NO: 1858461 - DNA, 15 bp, Homo sapiens
tgatgcaggggcagt

SEQ ID NO: 1858462 - DNA, 15 bp, Homo sapiens
gatgcaggggcagtg

SEQ ID NO: 1858463 - DNA, 15 bp, Homo sapiens
atgcaggggcagtgt

SEQ ID NO: 1858464 - DNA, 15 bp, Homo sapiens
tgcaggggcagtgtg

SEQ ID NO: 1858465 - DNA, 15 bp, Homo sapiens
gcaggggcagtgtgg

SEQ ID NO: 1858466 - DNA, 15 bp, Homo sapiens
caggggcagtgtggc

SEQ ID NO: 1858467 - DNA, 15 bp, Homo sapiens
aggggcagtgtggct

SEQ ID NO: 1858468 - DNA, 15 bp, Homo sapiens
ggggcagtgtggctg

SEQ ID NO: 1858469 - DNA, 15 bp, Homo sapiens
gggcagtgtggctgc

SEQ ID NO: 1858470 - DNA, 15 bp, Homo sapiens
ggcagtgtggctgcc

SEQ ID NO: 1858471 - DNA, 15 bp, Homo sapiens
gcagtgtggctgcct

SEQ ID NO: 1858472 - DNA, 15 bp, Homo sapiens
cagtgtggctgcctt

SEQ ID NO: 1858473 - DNA, 15 bp, Homo sapiens
agtgtggctgccttg

SEQ ID NO: 1858474 - DNA, 15 bp, Homo sapiens
gtgtggctgccttgc

SEQ ID NO: 1858475 - DNA, 15 bp, Homo sapiens
tgtggctgccttgcc

SEQ ID NO: 1858476 - DNA, 15 bp, Homo sapiens
gtggctgccttgcca

SEQ ID NO: 1858477 - DNA, 15 bp, Homo sapiens
tggctgccttgccag

SEQ ID NO: 1858478 - DNA, 15 bp, Homo sapiens
ggctgccttgccagc

SEQ ID NO: 1858479 - DNA, 15 bp, Homo sapiens
gctgccttgccagcc

SEQ ID NO: 1858480 - DNA, 15 bp, Homo sapiens
tgccttgccagcctg

SEQ ID NO: 1858481 - DNA, 15 bp, Homo sapiens
gccttgccagcctgc

SEQ ID NO: 1858482 - DNA, 15 bp, Homo sapiens
ccttgccagcctgcc

SEQ ID NO: 1858483 - DNA, 15 bp, Homo sapiens
cttgccagcctgccc

SEQ ID NO: 1858484 - DNA, 15 bp, Homo sapiens
ttgccagcctgccct

SEQ ID NO: 1858485 - DNA, 15 bp, Homo sapiens
tgccagcctgccctc

SEQ ID NO: 1858486 - DNA, 15 bp, Homo sapiens
gccagcctgccctcc

SEQ ID NO: 1858487 - DNA, 15 bp, Homo sapiens
ccagcctgccctcct

SEQ ID NO: 1858488 - DNA, 15 bp, Homo sapiens
cagcctgccctcctc

SEQ ID NO: 1858489 - DNA, 15 bp, Homo sapiens
agcctgccctcctcc

SEQ ID NO: 1858490 - DNA, 15 bp, Homo sapiens
gcctgccctcctcca

SEQ ID NO: 1858491 - DNA, 15 bp, Homo sapiens
cctgccctcctccag

SEQ ID NO: 1858492 - DNA, 15 bp, Homo sapiens
ctgccctcctccagc

SEQ ID NO: 1858493 - DNA, 15 bp, Homo sapiens
tgccctcctccagcc

SEQ ID NO: 1858494 - DNA, 15 bp, Homo sapiens
gccctcctccagcct

SEQ ID NO: 1858495 - DNA, 15 bp, Homo sapiens
ccctcctccagcctg

SEQ ID NO: 1858496 - DNA, 15 bp, Homo sapiens
cctcctccagcctgc

SEQ ID NO: 1858497 - DNA, 15 bp, Homo sapiens
ctcctccagcctgct

SEQ ID NO: 1858498 - DNA, 15 bp, Homo sapiens
tcctccagcctgctg

SEQ ID NO: 1858499 - DNA, 15 bp, Homo sapiens
cctccagcctgctgg

SEQ ID NO: 1858500 - DNA, 15 bp, Homo sapiens
ctccagcctgctggg

SEQ ID NO: 1858501 - DNA, 15 bp, Homo sapiens
tccagcctgctggga

SEQ ID NO: 1858502 - DNA, 15 bp, Homo sapiens
ccagcctgctgggag

SEQ ID NO: 1858503 - DNA, 15 bp, Homo sapiens
cagcctgctgggagc

SEQ ID NO: 1858504 - DNA, 15 bp, Homo sapiens
agcctgctgggagcc

SEQ ID NO: 1858505 - DNA, 15 bp, Homo sapiens
gcctgctgggagcct

SEQ ID NO: 1858506 - DNA, 15 bp, Homo sapiens
cctgctgggagcctc

SEQ ID NO: 1858507 - DNA, 15 bp, Homo sapiens
ctgctgggagcctcg

SEQ ID NO: 1858508 - DNA, 15 bp, Homo sapiens
tgctgggagcctcgc

SEQ ID NO: 1858509 - DNA, 15 bp, Homo sapiens
gctgggagcctcgcg

SEQ ID NO: 1858510 - DNA, 15 bp, Homo sapiens
ctgggagcctcgcgt

SEQ ID NO: 1858511 - DNA, 15 bp, Homo sapiens
tgggagcctcgcgtg

SEQ ID NO: 1858512 - DNA, 15 bp, Homo sapiens
gggagcctcgcgtga

SEQ ID NO: 1858513 - DNA, 15 bp, Homo sapiens
ggagcctcgcgtgag

SEQ ID NO: 1858514 - DNA, 15 bp, Homo sapiens
gagcctcgcgtgaga

SEQ ID NO: 1858515 - DNA, 15 bp, Homo sapiens
agcctcgcgtgagac

SEQ ID NO: 1858516 - DNA, 15 bp, Homo sapiens
gcctcgcgtgagaca

SEQ ID NO: 1858517 - DNA, 15 bp, Homo sapiens
cctcgcgtgagacaa

SEQ ID NO: 1858518 - DNA, 15 bp, Homo sapiens
ctcgcgtgagacaac

SEQ ID NO: 1858519 - DNA, 15 bp, Homo sapiens
tcgcgtgagacaacc

SEQ ID NO: 1858520 - DNA, 15 bp, Homo sapiens
cgcgtgagacaaccg

SEQ ID NO: 1858521 - DNA, 15 bp, Homo sapiens
gcgtgagacaaccga

SEQ ID NO: 1858522 - DNA, 15 bp, Homo sapiens
cgtgagacaaccgat

SEQ ID NO: 1858523 - DNA, 15 bp, Homo sapiens
gtgagacaaccgatc

SEQ ID NO: 1858524 - DNA, 15 bp, Homo sapiens
tgagacaaccgatct

SEQ ID NO: 1858525 - DNA, 15 bp, Homo sapiens
gagacaaccgatctg

SEQ ID NO: 1858526 - DNA, 15 bp, Homo sapiens
agacaaccgatctgg

SEQ ID NO: 1858527 - DNA, 15 bp, Homo sapiens
gacaaccgatctgga

SEQ ID NO: 1858528 - DNA, 15 bp, Homo sapiens
acaaccgatctggaa

SEQ ID NO: 1858529 - DNA, 15 bp, Homo sapiens
caaccgatctggaag

SEQ ID NO: 1858530 - DNA, 15 bp, Homo sapiens
aaccgatctggaagc

SEQ ID NO: 1858531 - DNA, 15 bp, Homo sapiens
accgatctggaagcc

SEQ ID NO: 1858532 - DNA, 15 bp, Homo sapiens
ccgatctggaagccc

SEQ ID NO: 1858533 - DNA, 15 bp, Homo sapiens
cgatctggaagcccc

SEQ ID NO: 1858534 - DNA, 15 bp, Homo sapiens
gatctggaagcccct

SEQ ID NO: 1858535 - DNA, 15 bp, Homo sapiens
atctggaagcccctt

SEQ ID NO: 1858536 - DNA, 15 bp, Homo sapiens
tctggaagcccctta

SEQ ID NO: 1858537 - DNA, 15 bp, Homo sapiens
ctggaagccccttag

SEQ ID NO: 1858538 - DNA, 15 bp, Homo sapiens
tggaagccccttagg

SEQ ID NO: 1858539 - DNA, 15 bp, Homo sapiens
ggaagccccttaggg

SEQ ID NO: 1858540 - DNA, 15 bp, Homo sapiens
gaagccccttaggga

SEQ ID NO: 1858541 - DNA, 15 bp, Homo sapiens
aagccccttagggag

SEQ ID NO: 1858542 - DNA, 15 bp, Homo sapiens
agccccttagggagg

SEQ ID NO: 1858543 - DNA, 15 bp, Homo sapiens
gccccttagggagga

SEQ ID NO: 1858544 - DNA, 15 bp, Homo sapiens
ccccttagggaggac

SEQ ID NO: 1858545 - DNA, 15 bp, Homo sapiens
cccttagggaggaca

SEQ ID NO: 1858546 - DNA, 15 bp, Homo sapiens
ccttagggaggacac

SEQ ID NO: 1858547 - DNA, 15 bp, Homo sapiens
cttagggaggacaca

SEQ ID NO: 1858548 - DNA, 15 bp, Homo sapiens
ttagggaggacacag

SEQ ID NO: 1858549 - DNA, 15 bp, Homo sapiens
tagggaggacacagc

SEQ ID NO: 1858550 - DNA, 15 bp, Homo sapiens
agggaggacacagcg

SEQ ID NO: 1858551 - DNA, 15 bp, Homo sapiens
gggaggacacagcgc

SEQ ID NO: 1858552 - DNA, 15 bp, Homo sapiens
ggaggacacagcgca

SEQ ID NO: 1858553 - DNA, 15 bp, Homo sapiens
gaggacacagcgcag

SEQ ID NO: 1858554 - DNA, 15 bp, Homo sapiens
aggacacagcgcagg

SEQ ID NO: 1858555 - DNA, 15 bp, Homo sapiens
ggacacagcgcagga

SEQ ID NO: 1858556 - DNA, 15 bp, Homo sapiens
gacacagcgcaggag

SEQ ID NO: 1858557 - DNA, 15 bp, Homo sapiens
acacagcgcaggaga

SEQ ID NO: 1858558 - DNA, 15 bp, Homo sapiens
cacagcgcaggagag

SEQ ID NO: 1858559 - DNA, 15 bp, Homo sapiens
acagcgcaggagagg

SEQ ID NO: 1858560 - DNA, 15 bp, Homo sapiens
cagcgcaggagaggc

SEQ ID NO: 1858561 - DNA, 15 bp, Homo sapiens
agcgcaggagaggca

SEQ ID NO: 1858562 - DNA, 15 bp, Homo sapiens
gcgcaggagaggcag

SEQ ID NO: 1858563 - DNA, 15 bp, Homo sapiens
cgcaggagaggcagc

SEQ ID NO: 1858564 - DNA, 15 bp, Homo sapiens
gcaggagaggcagct

SEQ ID NO: 1858565 - DNA, 15 bp, Homo sapiens
caggagaggcagctg

SEQ ID NO: 1858566 - DNA, 15 bp, Homo sapiens
aggagaggcagctga

SEQ ID NO: 1858567 - DNA, 15 bp, Homo sapiens
ggagaggcagctgag

SEQ ID NO: 1858568 - DNA, 15 bp, Homo sapiens
gagaggcagctgagg

SEQ ID NO: 1858569 - DNA, 15 bp, Homo sapiens
agaggcagctgaggc

SEQ ID NO: 1858570 - DNA, 15 bp, Homo sapiens
gaggcagctgaggct

SEQ ID NO: 1858571 - DNA, 15 bp, Homo sapiens
aggcagctgaggctc

SEQ ID NO: 1858572 - DNA, 15 bp, Homo sapiens
ggcagctgaggctct

SEQ ID NO: 1858573 - DNA, 15 bp, Homo sapiens
gcagctgaggctcta

SEQ ID NO: 1858574 - DNA, 15 bp, Homo sapiens
cagctgaggctctaa

SEQ ID NO: 1858575 - DNA, 15 bp, Homo sapiens
agctgaggctctaag

SEQ ID NO: 1858576 - DNA, 15 bp, Homo sapiens
gctgaggctctaagg

SEQ ID NO: 1858577 - DNA, 15 bp, Homo sapiens
ctgaggctctaagga

SEQ ID NO: 1858578 - DNA, 15 bp, Homo sapiens
tgaggctctaaggac

SEQ ID NO: 1858579 - DNA, 15 bp, Homo sapiens
gaggctctaaggaca

SEQ ID NO: 1858580 - DNA, 15 bp, Homo sapiens
aggctctaaggacag

SEQ ID NO: 1858581 - DNA, 15 bp, Homo sapiens
ggctctaaggacagc

SEQ ID NO: 1858582 - DNA, 15 bp, Homo sapiens
gctctaaggacagct

SEQ ID NO: 1858583 - DNA, 15 bp, Homo sapiens
ctctaaggacagctg

SEQ ID NO: 1858584 - DNA, 15 bp, Homo sapiens
tctaaggacagctgc

SEQ ID NO: 1858585 - DNA, 15 bp, Homo sapiens
ctaaggacagctgct

SEQ ID NO: 1858586 - DNA, 15 bp, Homo sapiens
taaggacagctgcta

SEQ ID NO: 1858587 - DNA, 15 bp, Homo sapiens
aaggacagctgctat

SEQ ID NO: 1858588 - DNA, 15 bp, Homo sapiens
aggacagctgctatc

SEQ ID NO: 1858589 - DNA, 15 bp, Homo sapiens
ggacagctgctatca

SEQ ID NO: 1858590 - DNA, 15 bp, Homo sapiens
gacagctgctatcaa

SEQ ID NO: 1858591 - DNA, 15 bp, Homo sapiens
acagctgctatcaac

SEQ ID NO: 1858592 - DNA, 15 bp, Homo sapiens
cagctgctatcaact

SEQ ID NO: 1858593 - DNA, 15 bp, Homo sapiens
agctgctatcaactg

SEQ ID NO: 1858594 - DNA, 15 bp, Homo sapiens
gctgctatcaactgc

SEQ ID NO: 1858595 - DNA, 15 bp, Homo sapiens
ctgctatcaactgcc

SEQ ID NO: 1858596 - DNA, 15 bp, Homo sapiens
tgctatcaactgcca

SEQ ID NO: 1858597 - DNA, 15 bp, Homo sapiens
gctatcaactgccag

SEQ ID NO: 1858598 - DNA, 15 bp, Homo sapiens
ctatcaactgccagc

SEQ ID NO: 1858599 - DNA, 15 bp, Homo sapiens
tatcaactgccagca

SEQ ID NO: 1858600 - DNA, 15 bp, Homo sapiens
atcaactgccagcag

SEQ ID NO: 1858601 - DNA, 15 bp, Homo sapiens
tcaactgccagcagc

SEQ ID NO: 1858602 - DNA, 15 bp, Homo sapiens
caactgccagcagcc

SEQ ID NO: 1858603 - DNA, 15 bp, Homo sapiens
aactgccagcagcca

SEQ ID NO: 1858604 - DNA, 15 bp, Homo sapiens
actgccagcagccac

SEQ ID NO: 1858605 - DNA, 15 bp, Homo sapiens
ctgccagcagccact

SEQ ID NO: 1858606 - DNA, 15 bp, Homo sapiens
tgccagcagccactg

SEQ ID NO: 1858607 - DNA, 15 bp, Homo sapiens
gccagcagccactga

SEQ ID NO: 1858608 - DNA, 15 bp, Homo sapiens
ccagcagccactgag

SEQ ID NO: 1858609 - DNA, 15 bp, Homo sapiens
cagcagccactgagg

SEQ ID NO: 1858610 - DNA, 15 bp, Homo sapiens
agcagccactgaggg

SEQ ID NO: 1858611 - DNA, 15 bp, Homo sapiens
gcagccactgaggga

SEQ ID NO: 1858612 - DNA, 15 bp, Homo sapiens
cagccactgagggag

SEQ ID NO: 1858613 - DNA, 15 bp, Homo sapiens
agccactgagggaga

SEQ ID NO: 1858614 - DNA, 15 bp, Homo sapiens
gccactgagggagac

SEQ ID NO: 1858615 - DNA, 15 bp, Homo sapiens
ccactgagggagacc

SEQ ID NO: 1858616 - DNA, 15 bp, Homo sapiens
cactgagggagaccc

SEQ ID NO: 1858617 - DNA, 15 bp, Homo sapiens
actgagggagaccct

SEQ ID NO: 1858618 - DNA, 15 bp, Homo sapiens
ctgagggagaccctg

SEQ ID NO: 1858619 - DNA, 15 bp, Homo sapiens
tgagggagaccctgg

SEQ ID NO: 1858620 - DNA, 15 bp, Homo sapiens
gagggagaccctggg

SEQ ID NO: 1858621 - DNA, 15 bp, Homo sapiens
agggagaccctgggc

SEQ ID NO: 1858622 - DNA, 15 bp, Homo sapiens
gggagaccctgggcc

SEQ ID NO: 1858623 - DNA, 15 bp, Homo sapiens
ggagaccctgggcct

SEQ ID NO: 1858624 - DNA, 15 bp, Homo sapiens
gagaccctgggcctg

SEQ ID NO: 1858625 - DNA, 15 bp, Homo sapiens
agaccctgggcctgg

SEQ ID NO: 1858626 - DNA, 15 bp, Homo sapiens
gaccctgggcctggc

SEQ ID NO: 1858627 - DNA, 15 bp, Homo sapiens
accctgggcctggca

SEQ ID NO: 1858628 - DNA, 15 bp, Homo sapiens
ccctgggcctggcat

SEQ ID NO: 1858629 - DNA, 15 bp, Homo sapiens
cctgggcctggcatg

SEQ ID NO: 1858630 - DNA, 15 bp, Homo sapiens
ctgggcctggcatgg

SEQ ID NO: 1858631 - DNA, 15 bp, Homo sapiens
tgggcctggcatggc

SEQ ID NO: 1858632 - DNA, 15 bp, Homo sapiens
gggcctggcatggct

SEQ ID NO: 1858633 - DNA, 15 bp, Homo sapiens
ggcctggcatggcta

SEQ ID NO: 1858634 - DNA, 15 bp, Homo sapiens
gcctggcatggctac

SEQ ID NO: 1858635 - DNA, 15 bp, Homo sapiens
cctggcatggctaca

SEQ ID NO: 1858636 - DNA, 15 bp, Homo sapiens
ctggcatggctacaa

SEQ ID NO: 1858637 - DNA, 15 bp, Homo sapiens
tggcatggctacaaa

SEQ ID NO: 1858638 - DNA, 15 bp, Homo sapiens
ggcatggctacaaat

SEQ ID NO: 1858639 - DNA, 15 bp, Homo sapiens
gcatggctacaaatg

SEQ ID NO: 1858640 - DNA, 15 bp, Homo sapiens
catggctacaaatgg

SEQ ID NO: 1858641 - DNA, 15 bp, Homo sapiens
atggctacaaatggg

SEQ ID NO: 1858642 - DNA, 15 bp, Homo sapiens
tggctacaaatgggc

SEQ ID NO: 1858643 - DNA, 15 bp, Homo sapiens
ggctacaaatgggct

SEQ ID NO: 1858644 - DNA, 15 bp, Homo sapiens
gctacaaatgggctc

SEQ ID NO: 1858645 - DNA, 15 bp, Homo sapiens
ctacaaatgggctca

SEQ ID NO: 1858646 - DNA, 15 bp, Homo sapiens
tacaaatgggctcag

SEQ ID NO: 1858647 - DNA, 15 bp, Homo sapiens
acaaatgggctcagc

SEQ ID NO: 1858648 - DNA, 15 bp, Homo sapiens
caaatgggctcagct

SEQ ID NO: 1858649 - DNA, 15 bp, Homo sapiens
aaatgggctcagctc

SEQ ID NO: 1858650 - DNA, 15 bp, Homo sapiens
aatgggctcagctcc

SEQ ID NO: 1858651 - DNA, 15 bp, Homo sapiens
atgggctcagctcca

SEQ ID NO: 1858652 - DNA, 15 bp, Homo sapiens
tgggctcagctccaa

SEQ ID NO: 1858653 - DNA, 15 bp, Homo sapiens
gggctcagctccaag

SEQ ID NO: 1858654 - DNA, 15 bp, Homo sapiens
ggctcagctccaagg

SEQ ID NO: 1858655 - DNA, 15 bp, Homo sapiens
gctcagctccaaggg

SEQ ID NO: 1858656 - DNA, 15 bp, Homo sapiens
ctcagctccaaggga

SEQ ID NO: 1858657 - DNA, 15 bp, Homo sapiens
tcagctccaagggaa

SEQ ID NO: 1858658 - DNA, 15 bp, Homo sapiens
cagctccaagggaac

SEQ ID NO: 1858659 - DNA, 15 bp, Homo sapiens
agctccaagggaaca

SEQ ID NO: 1858660 - DNA, 15 bp, Homo sapiens
gctccaagggaacag

SEQ ID NO: 1858661 - DNA, 15 bp, Homo sapiens
ctccaagggaacaga

SEQ ID NO: 1858662 - DNA, 15 bp, Homo sapiens
tccaagggaacagag

SEQ ID NO: 1858663 - DNA, 15 bp, Homo sapiens
ccaagggaacagaga

SEQ ID NO: 1858664 - DNA, 15 bp, Homo sapiens
caagggaacagagaa

SEQ ID NO: 1858665 - DNA, 15 bp, Homo sapiens
aagggaacagagaat

SEQ ID NO: 1858666 - DNA, 15 bp, Homo sapiens
agggaacagagaatt

SEQ ID NO: 1858667 - DNA, 15 bp, Homo sapiens
gggaacagagaattg

SEQ ID NO: 1858668 - DNA, 15 bp, Homo sapiens
ggaacagagaattgg

SEQ ID NO: 1858669 - DNA, 15 bp, Homo sapiens
gaacagagaattggg

SEQ ID NO: 1858670 - DNA, 15 bp, Homo sapiens
aacagagaattgggc

SEQ ID NO: 1858671 - DNA, 15 bp, Homo sapiens
acagagaattgggcc

SEQ ID NO: 1858672 - DNA, 15 bp, Homo sapiens
cagagaattgggcca

SEQ ID NO: 1858673 - DNA, 15 bp, Homo sapiens
agagaattgggccac

SEQ ID NO: 1858674 - DNA, 15 bp, Homo sapiens
gagaattgggccaca

SEQ ID NO: 1858675 - DNA, 15 bp, Homo sapiens
agaattgggccacat

SEQ ID NO: 1858676 - DNA, 15 bp, Homo sapiens
gaattgggccacatt

SEQ ID NO: 1858677 - DNA, 15 bp, Homo sapiens
aattgggccacattt

SEQ ID NO: 1858678 - DNA, 15 bp, Homo sapiens
attgggccacatttg

SEQ ID NO: 1858679 - DNA, 15 bp, Homo sapiens
ttgggccacatttgt

SEQ ID NO: 1858680 - DNA, 15 bp, Homo sapiens
tgggccacatttgtc

SEQ ID NO: 1858681 - DNA, 15 bp, Homo sapiens
gggccacatttgtct

SEQ ID NO: 1858682 - DNA, 15 bp, Homo sapiens
ggccacatttgtctg

SEQ ID NO: 1858683 - DNA, 15 bp, Homo sapiens
gccacatttgtctgg

SEQ ID NO: 1858684 - DNA, 15 bp, Homo sapiens
ccacatttgtctggg

SEQ ID NO: 1858685 - DNA, 15 bp, Homo sapiens
cacatttgtctgggc

SEQ ID NO: 1858686 - DNA, 15 bp, Homo sapiens
acatttgtctgggct

SEQ ID NO: 1858687 - DNA, 15 bp, Homo sapiens
catttgtctgggctg

SEQ ID NO: 1858688 - DNA, 15 bp, Homo sapiens
atttgtctgggctgg

SEQ ID NO: 1858689 - DNA, 15 bp, Homo sapiens
tttgtctgggctggg

SEQ ID NO: 1858690 - DNA, 15 bp, Homo sapiens
ttgtctgggctgggt

SEQ ID NO: 1858691 - DNA, 15 bp, Homo sapiens
tgtctgggctgggtc

SEQ ID NO: 1858692 - DNA, 15 bp, Homo sapiens
gtctgggctgggtca

SEQ ID NO: 1858693 - DNA, 15 bp, Homo sapiens
tctgggctgggtcag

SEQ ID NO: 1858694 - DNA, 15 bp, Homo sapiens
ctgggctgggtcaga

SEQ ID NO: 1858695 - DNA, 15 bp, Homo sapiens
tgggctgggtcagaa

SEQ ID NO: 1858696 - DNA, 15 bp, Homo sapiens
gggctgggtcagaaa

SEQ ID NO: 1858697 - DNA, 15 bp, Homo sapiens
ggctgggtcagaaat

SEQ ID NO: 1858698 - DNA, 15 bp, Homo sapiens
gctgggtcagaaatg

SEQ ID NO: 1858699 - DNA, 15 bp, Homo sapiens
ctgggtcagaaatgg

SEQ ID NO: 1858700 - DNA, 15 bp, Homo sapiens
tgggtcagaaatggc

SEQ ID NO: 1858701 - DNA, 15 bp, Homo sapiens
gggtcagaaatggca

SEQ ID NO: 1858702 - DNA, 15 bp, Homo sapiens
ggtcagaaatggcag

SEQ ID NO: 1858703 - DNA, 15 bp, Homo sapiens
gtcagaaatggcagt

SEQ ID NO: 1858704 - DNA, 15 bp, Homo sapiens
tcagaaatggcagtt

SEQ ID NO: 1858705 - DNA, 15 bp, Homo sapiens
cagaaatggcagttc

SEQ ID NO: 1858706 - DNA, 15 bp, Homo sapiens
agaaatggcagttcc

SEQ ID NO: 1858707 - DNA, 15 bp, Homo sapiens
gaaatggcagttcct

SEQ ID NO: 1858708 - DNA, 15 bp, Homo sapiens
aaatggcagttcctg

SEQ ID NO: 1858709 - DNA, 15 bp, Homo sapiens
aatggcagttcctga

SEQ ID NO: 1858710 - DNA, 15 bp, Homo sapiens
atggcagttcctgag

SEQ ID NO: 1858711 - DNA, 15 bp, Homo sapiens
tggcagttcctgagc

SEQ ID NO: 1858712 - DNA, 15 bp, Homo sapiens
ggcagttcctgagcc

SEQ ID NO: 1858713 - DNA, 15 bp, Homo sapiens
gcagttcctgagccc

SEQ ID NO: 1858714 - DNA, 15 bp, Homo sapiens
cagttcctgagccca

SEQ ID NO: 1858715 - DNA, 15 bp, Homo sapiens
agttcctgagcccat

SEQ ID NO: 1858716 - DNA, 15 bp, Homo sapiens
gttcctgagcccata

SEQ ID NO: 1858717 - DNA, 15 bp, Homo sapiens
ttcctgagcccatat

SEQ ID NO: 1858718 - DNA, 15 bp, Homo sapiens
tcctgagcccatatc

SEQ ID NO: 1858719 - DNA, 15 bp, Homo sapiens
cctgagcccatatca

SEQ ID NO: 1858720 - DNA, 15 bp, Homo sapiens
ctgagcccatatcac

SEQ ID NO: 1858721 - DNA, 15 bp, Homo sapiens
tgagcccatatcacc

SEQ ID NO: 1858722 - DNA, 15 bp, Homo sapiens
gagcccatatcacca

SEQ ID NO: 1858723 - DNA, 15 bp, Homo sapiens
agcccatatcaccag

SEQ ID NO: 1858724 - DNA, 15 bp, Homo sapiens
gcccatatcaccagc

SEQ ID NO: 1858725 - DNA, 15 bp, Homo sapiens
cccatatcaccagct

SEQ ID NO: 1858726 - DNA, 15 bp, Homo sapiens
ccatatcaccagctc

SEQ ID NO: 1858727 - DNA, 15 bp, Homo sapiens
catatcaccagctcc

SEQ ID NO: 1858728 - DNA, 15 bp, Homo sapiens
atatcaccagctccc

SEQ ID NO: 1858729 - DNA, 15 bp, Homo sapiens
tatcaccagctccca

SEQ ID NO: 1858730 - DNA, 15 bp, Homo sapiens
atcaccagctcccat

SEQ ID NO: 1858731 - DNA, 15 bp, Homo sapiens
tcaccagctcccatt

SEQ ID NO: 1858732 - DNA, 15 bp, Homo sapiens
caccagctcccattt

SEQ ID NO: 1858733 - DNA, 15 bp, Homo sapiens
accagctcccatttg

SEQ ID NO: 1858734 - DNA, 15 bp, Homo sapiens
ccagctcccatttgc

SEQ ID NO: 1858735 - DNA, 15 bp, Homo sapiens
cagctcccatttgca

SEQ ID NO: 1858736 - DNA, 15 bp, Homo sapiens
agctcccatttgcaa

SEQ ID NO: 1858737 - DNA, 15 bp, Homo sapiens
gctcccatttgcaag

SEQ ID NO: 1858738 - DNA, 15 bp, Homo sapiens
ctcccatttgcaagg

SEQ ID NO: 1858739 - DNA, 15 bp, Homo sapiens
tcccatttgcaaggc

SEQ ID NO: 1858740 - DNA, 15 bp, Homo sapiens
cccatttgcaaggct

SEQ ID NO: 1858741 - DNA, 15 bp, Homo sapiens
ccatttgcaaggctg

SEQ ID NO: 1858742 - DNA, 15 bp, Homo sapiens
catttgcaaggctga

SEQ ID NO: 1858743 - DNA, 15 bp, Homo sapiens
atttgcaaggctgag

SEQ ID NO: 1858744 - DNA, 15 bp, Homo sapiens
tttgcaaggctgagg

SEQ ID NO: 1858745 - DNA, 15 bp, Homo sapiens
ttgcaaggctgagga

SEQ ID NO: 1858746 - DNA, 15 bp, Homo sapiens
tgcaaggctgaggag

SEQ ID NO: 1858747 - DNA, 15 bp, Homo sapiens
gcaaggctgaggagg

SEQ ID NO: 1858748 - DNA, 15 bp, Homo sapiens
caaggctgaggaggt

SEQ ID NO: 1858749 - DNA, 15 bp, Homo sapiens
aaggctgaggaggtg

SEQ ID NO: 1858750 - DNA, 15 bp, Homo sapiens
aggctgaggaggtgc

SEQ ID NO: 1858751 - DNA, 15 bp, Homo sapiens
ggctgaggaggtgcc

SEQ ID NO: 1858752 - DNA, 15 bp, Homo sapiens
gctgaggaggtgcct

SEQ ID NO: 1858753 - DNA, 15 bp, Homo sapiens
ctgaggaggtgcctg

SEQ ID NO: 1858754 - DNA, 15 bp, Homo sapiens
tgaggaggtgcctgg

SEQ ID NO: 1858755 - DNA, 15 bp, Homo sapiens
gaggaggtgcctggg

SEQ ID NO: 1858756 - DNA, 15 bp, Homo sapiens
aggaggtgcctgggc

SEQ ID NO: 1858757 - DNA, 15 bp, Homo sapiens
ggaggtgcctgggct

SEQ ID NO: 1858758 - DNA, 15 bp, Homo sapiens
gaggtgcctgggctt

SEQ ID NO: 1858759 - DNA, 15 bp, Homo sapiens
aggtgcctgggcttg

SEQ ID NO: 1858760 - DNA, 15 bp, Homo sapiens
ggtgcctgggcttgc

SEQ ID NO: 1858761 - DNA, 15 bp, Homo sapiens
gtgcctgggcttgct

SEQ ID NO: 1858762 - DNA, 15 bp, Homo sapiens
tgcctgggcttgctg

SEQ ID NO: 1858763 - DNA, 15 bp, Homo sapiens
gcctgggcttgctgt

SEQ ID NO: 1858764 - DNA, 15 bp, Homo sapiens
cctgggcttgctgtg

SEQ ID NO: 1858765 - DNA, 15 bp, Homo sapiens
ctgggcttgctgtgt

SEQ ID NO: 1858766 - DNA, 15 bp, Homo sapiens
tgggcttgctgtgtg

SEQ ID NO: 1858767 - DNA, 15 bp, Homo sapiens
gggcttgctgtgtgc

SEQ ID NO: 1858768 - DNA, 15 bp, Homo sapiens
ggcttgctgtgtgct

SEQ ID NO: 1858769 - DNA, 15 bp, Homo sapiens
gcttgctgtgtgctg

SEQ ID NO: 1858770 - DNA, 15 bp, Homo sapiens
cttgctgtgtgctgc

SEQ ID NO: 1858771 - DNA, 15 bp, Homo sapiens
ttgctgtgtgctgcc

SEQ ID NO: 1858772 - DNA, 15 bp, Homo sapiens
tgctgtgtgctgcct

SEQ ID NO: 1858773 - DNA, 15 bp, Homo sapiens
gctgtgtgctgcctt

SEQ ID NO: 1858774 - DNA, 15 bp, Homo sapiens
ctgtgtgctgccttg

SEQ ID NO: 1858775 - DNA, 15 bp, Homo sapiens
tgtgtgctgccttgc

SEQ ID NO: 1858776 - DNA, 15 bp, Homo sapiens
gtgtgctgccttgct

SEQ ID NO: 1858777 - DNA, 15 bp, Homo sapiens
tgtgctgccttgctt

SEQ ID NO: 1858778 - DNA, 15 bp, Homo sapiens
gtgctgccttgcttt

SEQ ID NO: 1858779 - DNA, 15 bp, Homo sapiens
tgctgccttgctttc

SEQ ID NO: 1858780 - DNA, 15 bp, Homo sapiens
gctgccttgctttcg

SEQ ID NO: 1858781 - DNA, 15 bp, Homo sapiens
ctgccttgctttcgt

SEQ ID NO: 1858782 - DNA, 15 bp, Homo sapiens
tgccttgctttcgtt

SEQ ID NO: 1858783 - DNA, 15 bp, Homo sapiens
gccttgctttcgttc

SEQ ID NO: 1858784 - DNA, 15 bp, Homo sapiens
ccttgctttcgttcc

SEQ ID NO: 1858785 - DNA, 15 bp, Homo sapiens
cttgctttcgttccc

SEQ ID NO: 1858786 - DNA, 15 bp, Homo sapiens
ttgctttcgttcccg

SEQ ID NO: 1858787 - DNA, 15 bp, Homo sapiens
tgctttcgttcccgc

SEQ ID NO: 1858788 - DNA, 15 bp, Homo sapiens
gctttcgttcccgct

SEQ ID NO: 1858789 - DNA, 15 bp, Homo sapiens
ctttcgttcccgctt

SEQ ID NO: 1858790 - DNA, 15 bp, Homo sapiens
tttcgttcccgcttt

SEQ ID NO: 1858791 - DNA, 15 bp, Homo sapiens
ttcgttcccgctttt

SEQ ID NO: 1858792 - DNA, 15 bp, Homo sapiens
tcgttcccgcttttt

SEQ ID NO: 1858793 - DNA, 15 bp, Homo sapiens
cgttcccgcttttta

SEQ ID NO: 1858794 - DNA, 15 bp, Homo sapiens
gttcccgctttttaa

SEQ ID NO: 1858795 - DNA, 15 bp, Homo sapiens
ttcccgctttttaag

SEQ ID NO: 1858796 - DNA, 15 bp, Homo sapiens
tcccgctttttaagg

SEQ ID NO: 1858797 - DNA, 15 bp, Homo sapiens
cccgctttttaaggc

SEQ ID NO: 1858798 - DNA, 15 bp, Homo sapiens
ccgctttttaaggca

SEQ ID NO: 1858799 - DNA, 15 bp, Homo sapiens
cgctttttaaggcac

SEQ ID NO: 1858800 - DNA, 15 bp, Homo sapiens
gctttttaaggcaca

SEQ ID NO: 1858801 - DNA, 15 bp, Homo sapiens
ctttttaaggcacat

SEQ ID NO: 1858802 - DNA, 15 bp, Homo sapiens
tttttaaggcacata

SEQ ID NO: 1858803 - DNA, 15 bp, Homo sapiens
ttttaaggcacatat

SEQ ID NO: 1858804 - DNA, 15 bp, Homo sapiens
tttaaggcacatatc

SEQ ID NO: 1858805 - DNA, 15 bp, Homo sapiens
ttaaggcacatatca

SEQ ID NO: 1858806 - DNA, 15 bp, Homo sapiens
taaggcacatatcag

SEQ ID NO: 1858807 - DNA, 15 bp, Homo sapiens
aaggcacatatcagc

SEQ ID NO: 1858808 - DNA, 15 bp, Homo sapiens
aggcacatatcagcc

SEQ ID NO: 1858809 - DNA, 15 bp, Homo sapiens
ggcacatatcagcct

SEQ ID NO: 1858810 - DNA, 15 bp, Homo sapiens
gcacatatcagcctg

SEQ ID NO: 1858811 - DNA, 15 bp, Homo sapiens
cacatatcagcctgg

SEQ ID NO: 1858812 - DNA, 15 bp, Homo sapiens
acatatcagcctggg

SEQ ID NO: 1858813 - DNA, 15 bp, Homo sapiens
catatcagcctgggc

SEQ ID NO: 1858814 - DNA, 15 bp, Homo sapiens
atatcagcctgggca

SEQ ID NO: 1858815 - DNA, 15 bp, Homo sapiens
tatcagcctgggcag

SEQ ID NO: 1858816 - DNA, 15 bp, Homo sapiens
atcagcctgggcagc

SEQ ID NO: 1858817 - DNA, 15 bp, Homo sapiens
tcagcctgggcagct

SEQ ID NO: 1858818 - DNA, 15 bp, Homo sapiens
cagcctgggcagctc

SEQ ID NO: 1858819 - DNA, 15 bp, Homo sapiens
agcctgggcagctct

SEQ ID NO: 1858820 - DNA, 15 bp, Homo sapiens
gcctgggcagctctt

SEQ ID NO: 1858821 - DNA, 15 bp, Homo sapiens
cctgggcagctcttg

SEQ ID NO: 1858822 - DNA, 15 bp, Homo sapiens
ctgggcagctcttga

SEQ ID NO: 1858823 - DNA, 15 bp, Homo sapiens
tgggcagctcttgac

SEQ ID NO: 1858824 - DNA, 15 bp, Homo sapiens
gggcagctcttgacc

SEQ ID NO: 1858825 - DNA, 15 bp, Homo sapiens
ggcagctcttgaccc

SEQ ID NO: 1858826 - DNA, 15 bp, Homo sapiens
gcagctcttgaccca

SEQ ID NO: 1858827 - DNA, 15 bp, Homo sapiens
cagctcttgacccac

SEQ ID NO: 1858828 - DNA, 15 bp, Homo sapiens
agctcttgacccaca

SEQ ID NO: 1858829 - DNA, 15 bp, Homo sapiens
gctcttgacccacaa

SEQ ID NO: 1858830 - DNA, 15 bp, Homo sapiens
ctcttgacccacaag

SEQ ID NO: 1858831 - DNA, 15 bp, Homo sapiens
tcttgacccacaagg

SEQ ID NO: 1858832 - DNA, 15 bp, Homo sapiens
cttgacccacaaggt

SEQ ID NO: 1858833 - DNA, 15 bp, Homo sapiens
ttgacccacaaggtg

SEQ ID NO: 1858834 - DNA, 15 bp, Homo sapiens
tgacccacaaggtgg

SEQ ID NO: 1858835 - DNA, 15 bp, Homo sapiens
gacccacaaggtgga

SEQ ID NO: 1858836 - DNA, 15 bp, Homo sapiens
acccacaaggtggac

SEQ ID NO: 1858837 - DNA, 15 bp, Homo sapiens
cccacaaggtggact

SEQ ID NO: 1858838 - DNA, 15 bp, Homo sapiens
ccacaaggtggactc

SEQ ID NO: 1858839 - DNA, 15 bp, Homo sapiens
cacaaggtggactct

SEQ ID NO: 1858840 - DNA, 15 bp, Homo sapiens
acaaggtggactctt

SEQ ID NO: 1858841 - DNA, 15 bp, Homo sapiens
caaggtggactcttc

SEQ ID NO: 1858842 - DNA, 15 bp, Homo sapiens
aaggtggactcttct

SEQ ID NO: 1858843 - DNA, 15 bp, Homo sapiens
aggtggactcttctg

SEQ ID NO: 1858844 - DNA, 15 bp, Homo sapiens
ggtggactcttctgg

SEQ ID NO: 1858845 - DNA, 15 bp, Homo sapiens
gtggactcttctggg

SEQ ID NO: 1858846 - DNA, 15 bp, Homo sapiens
tggactcttctgggc

SEQ ID NO: 1858847 - DNA, 15 bp, Homo sapiens
ggactcttctgggcc

SEQ ID NO: 1858848 - DNA, 15 bp, Homo sapiens
gactcttctgggcca

SEQ ID NO: 1858849 - DNA, 15 bp, Homo sapiens
actcttctgggccag

SEQ ID NO: 1858850 - DNA, 15 bp, Homo sapiens
ctcttctgggccagc

SEQ ID NO: 1858851 - DNA, 15 bp, Homo sapiens
tcttctgggccagcc

SEQ ID NO: 1858852 - DNA, 15 bp, Homo sapiens
cttctgggccagcca

SEQ ID NO: 1858853 - DNA, 15 bp, Homo sapiens
ttctgggccagccac

SEQ ID NO: 1858854 - DNA, 15 bp, Homo sapiens
tctgggccagccacg

SEQ ID NO: 1858855 - DNA, 15 bp, Homo sapiens
ctgggccagccacgg

SEQ ID NO: 1858856 - DNA, 15 bp, Homo sapiens
tgggccagccacggg

SEQ ID NO: 1858857 - DNA, 15 bp, Homo sapiens
gggccagccacgggc

SEQ ID NO: 1858858 - DNA, 15 bp, Homo sapiens
ggccagccacgggca

SEQ ID NO: 1858859 - DNA, 15 bp, Homo sapiens
gccagccacgggcag

SEQ ID NO: 1858860 - DNA, 15 bp, Homo sapiens
ccagccacgggcagt

SEQ ID NO: 1858861 - DNA, 15 bp, Homo sapiens
cagccacgggcagtg

SEQ ID NO: 1858862 - DNA, 15 bp, Homo sapiens
agccacgggcagtgg

SEQ ID NO: 1858863 - DNA, 15 bp, Homo sapiens
gccacgggcagtggc

SEQ ID NO: 1858864 - DNA, 15 bp, Homo sapiens
ccacgggcagtggcc

SEQ ID NO: 1858865 - DNA, 15 bp, Homo sapiens
cacgggcagtggcca

SEQ ID NO: 1858866 - DNA, 15 bp, Homo sapiens
acgggcagtggccac

SEQ ID NO: 1858867 - DNA, 15 bp, Homo sapiens
cgggcagtggccacc

SEQ ID NO: 1858868 - DNA, 15 bp, Homo sapiens
gggcagtggccaccc

SEQ ID NO: 1858869 - DNA, 15 bp, Homo sapiens
ggcagtggccaccct

SEQ ID NO: 1858870 - DNA, 15 bp, Homo sapiens
gcagtggccaccctg

SEQ ID NO: 1858871 - DNA, 15 bp, Homo sapiens
cagtggccaccctgt

SEQ ID NO: 1858872 - DNA, 15 bp, Homo sapiens
agtggccaccctgtc

SEQ ID NO: 1858873 - DNA, 15 bp, Homo sapiens
gtggccaccctgtcc

SEQ ID NO: 1858874 - DNA, 15 bp, Homo sapiens
tggccaccctgtcct

SEQ ID NO: 1858875 - DNA, 15 bp, Homo sapiens
ggccaccctgtcctg

SEQ ID NO: 1858876 - DNA, 15 bp, Homo sapiens
gccaccctgtcctgc

SEQ ID NO: 1858877 - DNA, 15 bp, Homo sapiens
ccaccctgtcctgcc

SEQ ID NO: 1858878 - DNA, 15 bp, Homo sapiens
caccctgtcctgcca

SEQ ID NO: 1858879 - DNA, 15 bp, Homo sapiens
accctgtcctgccag

SEQ ID NO: 1858880 - DNA, 15 bp, Homo sapiens
ccctgtcctgccagg

SEQ ID NO: 1858881 - DNA, 15 bp, Homo sapiens
cctgtcctgccaggc

SEQ ID NO: 1858882 - DNA, 15 bp, Homo sapiens
ctgtcctgccaggcc

SEQ ID NO: 1858883 - DNA, 15 bp, Homo sapiens
tgtcctgccaggccg

SEQ ID NO: 1858884 - DNA, 15 bp, Homo sapiens
gtcctgccaggccgc

SEQ ID NO: 1858885 - DNA, 15 bp, Homo sapiens
tcctgccaggccgca

SEQ ID NO: 1858886 - DNA, 15 bp, Homo sapiens
cctgccaggccgcag

SEQ ID NO: 1858887 - DNA, 15 bp, Homo sapiens
ctgccaggccgcaga

SEQ ID NO: 1858888 - DNA, 15 bp, Homo sapiens
tgccaggccgcagaa

SEQ ID NO: 1858889 - DNA, 15 bp, Homo sapiens
gccaggccgcagaaa

SEQ ID NO: 1858890 - DNA, 15 bp, Homo sapiens
ccaggccgcagaaag

SEQ ID NO: 1858891 - DNA, 15 bp, Homo sapiens
caggccgcagaaagg

SEQ ID NO: 1858892 - DNA, 15 bp, Homo sapiens
aggccgcagaaaggc

SEQ ID NO: 1858893 - DNA, 15 bp, Homo sapiens
ggccgcagaaaggcc

SEQ ID NO: 1858894 - DNA, 15 bp, Homo sapiens
gccgcagaaaggccc

SEQ ID NO: 1858895 - DNA, 15 bp, Homo sapiens
ccgcagaaaggccct

SEQ ID NO: 1858896 - DNA, 15 bp, Homo sapiens
cgcagaaaggccctg

SEQ ID NO: 1858897 - DNA, 15 bp, Homo sapiens
gcagaaaggccctgg

SEQ ID NO: 1858898 - DNA, 15 bp, Homo sapiens
cagaaaggccctggg

SEQ ID NO: 1858899 - DNA, 15 bp, Homo sapiens
agaaaggccctgggc

SEQ ID NO: 1858900 - DNA, 15 bp, Homo sapiens
gaaaggccctgggcc

SEQ ID NO: 1858901 - DNA, 15 bp, Homo sapiens
aaaggccctgggcca

SEQ ID NO: 1858902 - DNA, 15 bp, Homo sapiens
aaggccctgggccac

SEQ ID NO: 1858903 - DNA, 15 bp, Homo sapiens
aggccctgggccact

SEQ ID NO: 1858904 - DNA, 15 bp, Homo sapiens
ggccctgggccactc

SEQ ID NO: 1858905 - DNA, 15 bp, Homo sapiens
gccctgggccactcc

SEQ ID NO: 1858906 - DNA, 15 bp, Homo sapiens
ccctgggccactccc

SEQ ID NO: 1858907 - DNA, 15 bp, Homo sapiens
cctgggccactccca

SEQ ID NO: 1858908 - DNA, 15 bp, Homo sapiens
ctgggccactcccaa

SEQ ID NO: 1858909 - DNA, 15 bp, Homo sapiens
tgggccactcccaac

SEQ ID NO: 1858910 - DNA, 15 bp, Homo sapiens
gggccactcccaact

SEQ ID NO: 1858911 - DNA, 15 bp, Homo sapiens
ggccactcccaactg

SEQ ID NO: 1858912 - DNA, 15 bp, Homo sapiens
gccactcccaactgg

SEQ ID NO: 1858913 - DNA, 15 bp, Homo sapiens
ccactcccaactgga

SEQ ID NO: 1858914 - DNA, 15 bp, Homo sapiens
cactcccaactggag

SEQ ID NO: 1858915 - DNA, 15 bp, Homo sapiens
actcccaactggagc

SEQ ID NO: 1858916 - DNA, 15 bp, Homo sapiens
ctcccaactggagcc

SEQ ID NO: 1858917 - DNA, 15 bp, Homo sapiens
tcccaactggagcca

SEQ ID NO: 1858918 - DNA, 15 bp, Homo sapiens
cccaactggagccag

SEQ ID NO: 1858919 - DNA, 15 bp, Homo sapiens
ccaactggagccagt

SEQ ID NO: 1858920 - DNA, 15 bp, Homo sapiens
caactggagccagtg

SEQ ID NO: 1858921 - DNA, 15 bp, Homo sapiens
aactggagccagtgc

SEQ ID NO: 1858922 - DNA, 15 bp, Homo sapiens
actggagccagtgct

SEQ ID NO: 1858923 - DNA, 15 bp, Homo sapiens
ctggagccagtgctc

SEQ ID NO: 1858924 - DNA, 15 bp, Homo sapiens
tggagccagtgctcc

SEQ ID NO: 1858925 - DNA, 15 bp, Homo sapiens
ggagccagtgctcct

SEQ ID NO: 1858926 - DNA, 15 bp, Homo sapiens
gagccagtgctcctg

SEQ ID NO: 1858927 - DNA, 15 bp, Homo sapiens
agccagtgctcctgg

SEQ ID NO: 1858928 - DNA, 15 bp, Homo sapiens
gccagtgctcctgga

SEQ ID NO: 1858929 - DNA, 15 bp, Homo sapiens
ccagtgctcctggag

SEQ ID NO: 1858930 - DNA, 15 bp, Homo sapiens
cagtgctcctggaga

SEQ ID NO: 1858931 - DNA, 15 bp, Homo sapiens
agtgctcctggagag

SEQ ID NO: 1858932 - DNA, 15 bp, Homo sapiens
gtgctcctggagaga

SEQ ID NO: 1858933 - DNA, 15 bp, Homo sapiens
tgctcctggagagag

SEQ ID NO: 1858934 - DNA, 15 bp, Homo sapiens
gctcctggagagagc

SEQ ID NO: 1858935 - DNA, 15 bp, Homo sapiens
ctcctggagagagca

SEQ ID NO: 1858936 - DNA, 15 bp, Homo sapiens
tcctggagagagcag

SEQ ID NO: 1858937 - DNA, 15 bp, Homo sapiens
cctggagagagcagt

SEQ ID NO: 1858938 - DNA, 15 bp, Homo sapiens
ctggagagagcagtg

SEQ ID NO: 1858939 - DNA, 15 bp, Homo sapiens
tggagagagcagtga

SEQ ID NO: 1858940 - DNA, 15 bp, Homo sapiens
ggagagagcagtgac

SEQ ID NO: 1858941 - DNA, 15 bp, Homo sapiens
gagagagcagtgacc

SEQ ID NO: 1858942 - DNA, 15 bp, Homo sapiens
agagagcagtgacct

SEQ ID NO: 1858943 - DNA, 15 bp, Homo sapiens
gagagcagtgacctg

SEQ ID NO: 1858944 - DNA, 15 bp, Homo sapiens
agagcagtgacctgg

SEQ ID NO: 1858945 - DNA, 15 bp, Homo sapiens
gagcagtgacctgga

SEQ ID NO: 1858946 - DNA, 15 bp, Homo sapiens
agcagtgacctggac

SEQ ID NO: 1858947 - DNA, 15 bp, Homo sapiens
gcagtgacctggacc

SEQ ID NO: 1858948 - DNA, 15 bp, Homo sapiens
cagtgacctggacca

SEQ ID NO: 1858949 - DNA, 15 bp, Homo sapiens
agtgacctggaccag

SEQ ID NO: 1858950 - DNA, 15 bp, Homo sapiens
gtgacctggaccagc

SEQ ID NO: 1858951 - DNA, 15 bp, Homo sapiens
tgacctggaccagca

SEQ ID NO: 1858952 - DNA, 15 bp, Homo sapiens
gacctggaccagcag

SEQ ID NO: 1858953 - DNA, 15 bp, Homo sapiens
acctggaccagcaga

SEQ ID NO: 1858954 - DNA, 15 bp, Homo sapiens
cctggaccagcagac

SEQ ID NO: 1858955 - DNA, 15 bp, Homo sapiens
ctggaccagcagacc

SEQ ID NO: 1858956 - DNA, 15 bp, Homo sapiens
tggaccagcagacct

SEQ ID NO: 1858957 - DNA, 15 bp, Homo sapiens
ggaccagcagaccta

SEQ ID NO: 1858958 - DNA, 15 bp, Homo sapiens
gaccagcagacctat

SEQ ID NO: 1858959 - DNA, 15 bp, Homo sapiens
accagcagacctatg

SEQ ID NO: 1858960 - DNA, 15 bp, Homo sapiens
ccagcagacctatgg

SEQ ID NO: 1858961 - DNA, 15 bp, Homo sapiens
cagcagacctatgga

SEQ ID NO: 1858962 - DNA, 15 bp, Homo sapiens
agcagacctatggat

SEQ ID NO: 1858963 - DNA, 15 bp, Homo sapiens
gcagacctatggatc

SEQ ID NO: 1858964 - DNA, 15 bp, Homo sapiens
cagacctatggatcc

SEQ ID NO: 1858965 - DNA, 15 bp, Homo sapiens
agacctatggatccc

SEQ ID NO: 1858966 - DNA, 15 bp, Homo sapiens
gacctatggatcccc

SEQ ID NO: 1858967 - DNA, 15 bp, Homo sapiens
acctatggatcccct

SEQ ID NO: 1858968 - DNA, 15 bp, Homo sapiens
cctatggatcccctc

SEQ ID NO: 1858969 - DNA, 15 bp, Homo sapiens
ctatggatcccctct

SEQ ID NO: 1858970 - DNA, 15 bp, Homo sapiens
tatggatcccctctt

SEQ ID NO: 1858971 - DNA, 15 bp, Homo sapiens
atggatcccctcttg

SEQ ID NO: 1858972 - DNA, 15 bp, Homo sapiens
tggatcccctcttgc

SEQ ID NO: 1858973 - DNA, 15 bp, Homo sapiens
ggatcccctcttgct

SEQ ID NO: 1858974 - DNA, 15 bp, Homo sapiens
gatcccctcttgctc

SEQ ID NO: 1858975 - DNA, 15 bp, Homo sapiens
atcccctcttgctcc

SEQ ID NO: 1858976 - DNA, 15 bp, Homo sapiens
cccctcttgctcctg

SEQ ID NO: 1858977 - DNA, 15 bp, Homo sapiens
ccctcttgctcctgc

SEQ ID NO: 1858978 - DNA, 15 bp, Homo sapiens
cctcttgctcctgca

SEQ ID NO: 1858979 - DNA, 15 bp, Homo sapiens
ctcttgctcctgcac

SEQ ID NO: 1858980 - DNA, 15 bp, Homo sapiens
tcttgctcctgcact

SEQ ID NO: 1858981 - DNA, 15 bp, Homo sapiens
cttgctcctgcactc

SEQ ID NO: 1858982 - DNA, 15 bp, Homo sapiens
ttgctcctgcactcg

SEQ ID NO: 1858983 - DNA, 15 bp, Homo sapiens
tgctcctgcactcgc

SEQ ID NO: 1858984 - DNA, 15 bp, Homo sapiens
gctcctgcactcgcc

SEQ ID NO: 1858985 - DNA, 15 bp, Homo sapiens
ctcctgcactcgcct

SEQ ID NO: 1858986 - DNA, 15 bp, Homo sapiens
tcctgcactcgcctg

SEQ ID NO: 1858987 - DNA, 15 bp, Homo sapiens
cctgcactcgcctgc

SEQ ID NO: 1858988 - DNA, 15 bp, Homo sapiens
ctgcactcgcctgct

SEQ ID NO: 1858989 - DNA, 15 bp, Homo sapiens
tgcactcgcctgctc

SEQ ID NO: 1858990 - DNA, 15 bp, Homo sapiens
gcactcgcctgctcc

SEQ ID NO: 1858991 - DNA, 15 bp, Homo sapiens
cactcgcctgctcct

SEQ ID NO: 1858992 - DNA, 15 bp, Homo sapiens
actcgcctgctcctt

SEQ ID NO: 1858993 - DNA, 15 bp, Homo sapiens
ctcgcctgctccttg

SEQ ID NO: 1858994 - DNA, 15 bp, Homo sapiens
tcgcctgctccttgc

SEQ ID NO: 1858995 - DNA, 15 bp, Homo sapiens
cgcctgctccttgca

SEQ ID NO: 1858996 - DNA, 15 bp, Homo sapiens
gcctgctccttgcag

SEQ ID NO: 1858997 - DNA, 15 bp, Homo sapiens
cctgctccttgcagt

SEQ ID NO: 1858998 - DNA, 15 bp, Homo sapiens
ctgctccttgcagtg

SEQ ID NO: 1858999 - DNA, 15 bp, Homo sapiens
tgctccttgcagtga

SEQ ID NO: 1859000 - DNA, 15 bp, Homo sapiens
gctccttgcagtgac

SEQ ID NO: 1859001 - DNA, 15 bp, Homo sapiens
ctccttgcagtgact

SEQ ID NO: 1859002 - DNA, 15 bp, Homo sapiens
tccttgcagtgactc

SEQ ID NO: 1859003 - DNA, 15 bp, Homo sapiens
ccttgcagtgactcg

SEQ ID NO: 1859004 - DNA, 15 bp, Homo sapiens
cttgcagtgactcgg

SEQ ID NO: 1859005 - DNA, 15 bp, Homo sapiens
ttgcagtgactcggc

SEQ ID NO: 1859006 - DNA, 15 bp, Homo sapiens
tgcagtgactcggca

SEQ ID NO: 1859007 - DNA, 15 bp, Homo sapiens
gcagtgactcggcag

SEQ ID NO: 1859008 - DNA, 15 bp, Homo sapiens
cagtgactcggcagt

SEQ ID NO: 1859009 - DNA, 15 bp, Homo sapiens
agtgactcggcagtg

SEQ ID NO: 1859010 - DNA, 15 bp, Homo sapiens
gtgactcggcagtgg

SEQ ID NO: 1859011 - DNA, 15 bp, Homo sapiens
tgactcggcagtggg

SEQ ID NO: 1859012 - DNA, 15 bp, Homo sapiens
gactcggcagtggga

SEQ ID NO: 1859013 - DNA, 15 bp, Homo sapiens
actcggcagtgggag

SEQ ID NO: 1859014 - DNA, 15 bp, Homo sapiens
ctcggcagtgggagt

SEQ ID NO: 1859015 - DNA, 15 bp, Homo sapiens
tcggcagtgggagtg

SEQ ID NO: 1859016 - DNA, 15 bp, Homo sapiens
cggcagtgggagtgg

SEQ ID NO: 1859017 - DNA, 15 bp, Homo sapiens
gcagtgggagtggga

SEQ ID NO: 1859018 - DNA, 15 bp, Homo sapiens
cagtgggagtgggag

SEQ ID NO: 1859019 - DNA, 15 bp, Homo sapiens
agtgggagtgggagg

SEQ ID NO: 1859020 - DNA, 15 bp, Homo sapiens
gtgggagtgggaggt

SEQ ID NO: 1859021 - DNA, 15 bp, Homo sapiens
tgggagtgggaggtg

SEQ ID NO: 1859022 - DNA, 15 bp, Homo sapiens
gggagtgggaggtgt

SEQ ID NO: 1859023 - DNA, 15 bp, Homo sapiens
ggagtgggaggtgtc

SEQ ID NO: 1859024 - DNA, 15 bp, Homo sapiens
gagtgggaggtgtca

SEQ ID NO: 1859025 - DNA, 15 bp, Homo sapiens
agtgggaggtgtcag

SEQ ID NO: 1859026 - DNA, 15 bp, Homo sapiens
gtgggaggtgtcaga

SEQ ID NO: 1859027 - DNA, 15 bp, Homo sapiens
tgggaggtgtcagag

SEQ ID NO: 1859028 - DNA, 15 bp, Homo sapiens
gggaggtgtcagagc

SEQ ID NO: 1859029 - DNA, 15 bp, Homo sapiens
ggaggtgtcagagca

SEQ ID NO: 1859030 - DNA, 15 bp, Homo sapiens
gaggtgtcagagcaa

SEQ ID NO: 1859031 - DNA, 15 bp, Homo sapiens
aggtgtcagagcaat

SEQ ID NO: 1859032 - DNA, 15 bp, Homo sapiens
ggtgtcagagcaatt

SEQ ID NO: 1859033 - DNA, 15 bp, Homo sapiens
gtgtcagagcaatta

SEQ ID NO: 1859034 - DNA, 15 bp, Homo sapiens
tgtcagagcaattag

SEQ ID NO: 1859035 - DNA, 15 bp, Homo sapiens
gtcagagcaattagg

SEQ ID NO: 1859036 - DNA, 15 bp, Homo sapiens
tcagagcaattaggc

SEQ ID NO: 1859037 - DNA, 15 bp, Homo sapiens
cagagcaattaggcg

SEQ ID NO: 1859038 - DNA, 15 bp, Homo sapiens
agagcaattaggcgg

SEQ ID NO: 1859039 - DNA, 15 bp, Homo sapiens
gagcaattaggcgga

SEQ ID NO: 1859040 - DNA, 15 bp, Homo sapiens
agcaattaggcggaa

SEQ ID NO: 1859041 - DNA, 15 bp, Homo sapiens
gcaattaggcggaaa

SEQ ID NO: 1859042 - DNA, 15 bp, Homo sapiens
caattaggcggaaac

SEQ ID NO: 1859043 - DNA, 15 bp, Homo sapiens
aattaggcggaaact

SEQ ID NO: 1859044 - DNA, 15 bp, Homo sapiens
attaggcggaaactc

SEQ ID NO: 1859045 - DNA, 15 bp, Homo sapiens
ttaggcggaaactcc

SEQ ID NO: 1859046 - DNA, 15 bp, Homo sapiens
taggcggaaactcct

SEQ ID NO: 1859047 - DNA, 15 bp, Homo sapiens
aggcggaaactcctt

SEQ ID NO: 1859048 - DNA, 15 bp, Homo sapiens
ggcggaaactccttt

SEQ ID NO: 1859049 - DNA, 15 bp, Homo sapiens
gcggaaactcctttc

SEQ ID NO: 1859050 - DNA, 15 bp, Homo sapiens
cggaaactcctttcg

SEQ ID NO: 1859051 - DNA, 15 bp, Homo sapiens
ggaaactcctttcgt

SEQ ID NO: 1859052 - DNA, 15 bp, Homo sapiens
gaaactcctttcgtg

SEQ ID NO: 1859053 - DNA, 15 bp, Homo sapiens
aaactcctttcgtgc

SEQ ID NO: 1859054 - DNA, 15 bp, Homo sapiens
aactcctttcgtgca

SEQ ID NO: 1859055 - DNA, 15 bp, Homo sapiens
actcctttcgtgcac

SEQ ID NO: 1859056 - DNA, 15 bp, Homo sapiens
ctcctttcgtgcacc

SEQ ID NO: 1859057 - DNA, 15 bp, Homo sapiens
tcctttcgtgcacct

SEQ ID NO: 1859058 - DNA, 15 bp, Homo sapiens
cctttcgtgcacctc

SEQ ID NO: 1859059 - DNA, 15 bp, Homo sapiens
ctttcgtgcacctct

SEQ ID NO: 1859060 - DNA, 15 bp, Homo sapiens
tttcgtgcacctcta

SEQ ID NO: 1859061 - DNA, 15 bp, Homo sapiens
ttcgtgcacctctaa

SEQ ID NO: 1859062 - DNA, 15 bp, Homo sapiens
tcgtgcacctctaat

SEQ ID NO: 1859063 - DNA, 15 bp, Homo sapiens
cgtgcacctctaatt

SEQ ID NO: 1859064 - DNA, 15 bp, Homo sapiens
gtgcacctctaattt

SEQ ID NO: 1859065 - DNA, 15 bp, Homo sapiens
tgcacctctaatttt

SEQ ID NO: 1859066 - DNA, 15 bp, Homo sapiens
gcacctctaattttc

SEQ ID NO: 1859067 - DNA, 15 bp, Homo sapiens
cacctctaattttcg

SEQ ID NO: 1859068 - DNA, 15 bp, Homo sapiens
acctctaattttcga

SEQ ID NO: 1859069 - DNA, 15 bp, Homo sapiens
cctctaattttcgag

SEQ ID NO: 1859070 - DNA, 15 bp, Homo sapiens
ctctaattttcgagc

SEQ ID NO: 1859071 - DNA, 15 bp, Homo sapiens
tctaattttcgagct

SEQ ID NO: 1859072 - DNA, 15 bp, Homo sapiens
ctaattttcgagctc

SEQ ID NO: 1859073 - DNA, 15 bp, Homo sapiens
taattttcgagctct

SEQ ID NO: 1859074 - DNA, 15 bp, Homo sapiens
aattttcgagctctc

SEQ ID NO: 1859075 - DNA, 15 bp, Homo sapiens
attttcgagctctct

SEQ ID NO: 1859076 - DNA, 15 bp, Homo sapiens
ttttcgagctctctg

SEQ ID NO: 1859077 - DNA, 15 bp, Homo sapiens
tttcgagctctctga

SEQ ID NO: 1859078 - DNA, 15 bp, Homo sapiens
ttcgagctctctgaa

SEQ ID NO: 1859079 - DNA, 15 bp, Homo sapiens
tcgagctctctgaat

SEQ ID NO: 1859080 - DNA, 15 bp, Homo sapiens
cgagctctctgaatc

SEQ ID NO: 1859081 - DNA, 15 bp, Homo sapiens
gagctctctgaatct

SEQ ID NO: 1859082 - DNA, 15 bp, Homo sapiens
agctctctgaatctc

SEQ ID NO: 1859083 - DNA, 15 bp, Homo sapiens
gctctctgaatctca

SEQ ID NO: 1859084 - DNA, 15 bp, Homo sapiens
ctctctgaatctcat

SEQ ID NO: 1859085 - DNA, 15 bp, Homo sapiens
tctctgaatctcatt

SEQ ID NO: 1859086 - DNA, 15 bp, Homo sapiens
ctctgaatctcatta

SEQ ID NO: 1859087 - DNA, 15 bp, Homo sapiens
tctgaatctcattag

SEQ ID NO: 1859088 - DNA, 15 bp, Homo sapiens
ctgaatctcattagt

SEQ ID NO: 1859089 - DNA, 15 bp, Homo sapiens
tgaatctcattagtt

SEQ ID NO: 1859090 - DNA, 15 bp, Homo sapiens
gaatctcattagttc

SEQ ID NO: 1859091 - DNA, 15 bp, Homo sapiens
aatctcattagttcc

SEQ ID NO: 1859092 - DNA, 15 bp, Homo sapiens
atctcattagttccc

SEQ ID NO: 1859093 - DNA, 15 bp, Homo sapiens
tctcattagttcccg

SEQ ID NO: 1859094 - DNA, 15 bp, Homo sapiens
ctcattagttcccgg

SEQ ID NO: 1859095 - DNA, 15 bp, Homo sapiens
tcattagttcccggg

SEQ ID NO: 1859096 - DNA, 15 bp, Homo sapiens
cattagttcccgggc

SEQ ID NO: 1859097 - DNA, 15 bp, Homo sapiens
attagttcccgggct

SEQ ID NO: 1859098 - DNA, 15 bp, Homo sapiens
ttagttcccgggctt

SEQ ID NO: 1859099 - DNA, 15 bp, Homo sapiens
tagttcccgggcttt

SEQ ID NO: 1859100 - DNA, 15 bp, Homo sapiens
agttcccgggctttt

SEQ ID NO: 1859101 - DNA, 15 bp, Homo sapiens
gttcccgggcttttc

SEQ ID NO: 1859102 - DNA, 15 bp, Homo sapiens
ttcccgggcttttct

SEQ ID NO: 1859103 - DNA, 15 bp, Homo sapiens
tcccgggcttttctg

SEQ ID NO: 1859104 - DNA, 15 bp, Homo sapiens
cccgggcttttctgc

SEQ ID NO: 1859105 - DNA, 15 bp, Homo sapiens
ccgggcttttctgct

SEQ ID NO: 1859106 - DNA, 15 bp, Homo sapiens
cgggcttttctgctc

SEQ ID NO: 1859107 - DNA, 15 bp, Homo sapiens
gggcttttctgctct

SEQ ID NO: 1859108 - DNA, 15 bp, Homo sapiens
ggcttttctgctctg

SEQ ID NO: 1859109 - DNA, 15 bp, Homo sapiens
gcttttctgctctgc

SEQ ID NO: 1859110 - DNA, 15 bp, Homo sapiens
cttttctgctctgcc

SEQ ID NO: 1859111 - DNA, 15 bp, Homo sapiens
ttttctgctctgccc

SEQ ID NO: 1859112 - DNA, 15 bp, Homo sapiens
tttctgctctgccct

SEQ ID NO: 1859113 - DNA, 15 bp, Homo sapiens
ttctgctctgccctc

SEQ ID NO: 1859114 - DNA, 15 bp, Homo sapiens
tctgctctgccctcc

SEQ ID NO: 1859115 - DNA, 15 bp, Homo sapiens
ctgctctgccctcct

SEQ ID NO: 1859116 - DNA, 15 bp, Homo sapiens
tgctctgccctcctg

SEQ ID NO: 1859117 - DNA, 15 bp, Homo sapiens
gctctgccctcctgt

SEQ ID NO: 1859118 - DNA, 15 bp, Homo sapiens
ctctgccctcctgtt

SEQ ID NO: 1859119 - DNA, 15 bp, Homo sapiens
tctgccctcctgttc

SEQ ID NO: 1859120 - DNA, 15 bp, Homo sapiens
ctgccctcctgttct

SEQ ID NO: 1859121 - DNA, 15 bp, Homo sapiens
tgccctcctgttctt

SEQ ID NO: 1859122 - DNA, 15 bp, Homo sapiens
gccctcctgttcttt

SEQ ID NO: 1859123 - DNA, 15 bp, Homo sapiens
ccctcctgttctttg

SEQ ID NO: 1859124 - DNA, 15 bp, Homo sapiens
cctcctgttctttgc

SEQ ID NO: 1859125 - DNA, 15 bp, Homo sapiens
ctcctgttctttgct

SEQ ID NO: 1859126 - DNA, 15 bp, Homo sapiens
tcctgttctttgctt

SEQ ID NO: 1859127 - DNA, 15 bp, Homo sapiens
cctgttctttgcttg

SEQ ID NO: 1859128 - DNA, 15 bp, Homo sapiens
ctgttctttgcttgc

SEQ ID NO: 1859129 - DNA, 15 bp, Homo sapiens
tgttctttgcttgca

SEQ ID NO: 1859130 - DNA, 15 bp, Homo sapiens
gttctttgcttgcag

SEQ ID NO: 1859131 - DNA, 15 bp, Homo sapiens
ttctttgcttgcaga

SEQ ID NO: 1859132 - DNA, 15 bp, Homo sapiens
tctttgcttgcagaa

SEQ ID NO: 1859133 - DNA, 15 bp, Homo sapiens
ctttgcttgcagaaa

SEQ ID NO: 1859134 - DNA, 15 bp, Homo sapiens
tttgcttgcagaaaa

SEQ ID NO: 1859135 - DNA, 15 bp, Homo sapiens
ttgcttgcagaaaat

SEQ ID NO: 1859136 - DNA, 15 bp, Homo sapiens
tgcttgcagaaaatc

SEQ ID NO: 1859137 - DNA, 15 bp, Homo sapiens
gcttgcagaaaatcc

SEQ ID NO: 1859138 - DNA, 15 bp, Homo sapiens
cttgcagaaaatcca

SEQ ID NO: 1859139 - DNA, 15 bp, Homo sapiens
ttgcagaaaatccag

SEQ ID NO: 1859140 - DNA, 15 bp, Homo sapiens
tgcagaaaatccagg

SEQ ID NO: 1859141 - DNA, 15 bp, Homo sapiens
gcagaaaatccaggg

SEQ ID NO: 1859142 - DNA, 15 bp, Homo sapiens
cagaaaatccagggg

SEQ ID NO: 1859143 - DNA, 15 bp, Homo sapiens
agaaaatccaggggg

SEQ ID NO: 1859144 - DNA, 15 bp, Homo sapiens
gaaaatccagggggc

SEQ ID NO: 1859145 - DNA, 15 bp, Homo sapiens
aaaatccagggggca

SEQ ID NO: 1859146 - DNA, 15 bp, Homo sapiens
aaatccagggggcag

SEQ ID NO: 1859147 - DNA, 15 bp, Homo sapiens
aatccagggggcagc

SEQ ID NO: 1859148 - DNA, 15 bp, Homo sapiens
atccagggggcagcc

SEQ ID NO: 1859149 - DNA, 15 bp, Homo sapiens
tccagggggcagcca

SEQ ID NO: 1859150 - DNA, 15 bp, Homo sapiens
ccagggggcagccag

SEQ ID NO: 1859151 - DNA, 15 bp, Homo sapiens
cagggggcagccagt

SEQ ID NO: 1859152 - DNA, 15 bp, Homo sapiens
agggggcagccagtc

SEQ ID NO: 1859153 - DNA, 15 bp, Homo sapiens
gggggcagccagtca

SEQ ID NO: 1859154 - DNA, 15 bp, Homo sapiens
ggggcagccagtcac

SEQ ID NO: 1859155 - DNA, 15 bp, Homo sapiens
gggcagccagtcacc

SEQ ID NO: 1859156 - DNA, 15 bp, Homo sapiens
ggcagccagtcaccc

SEQ ID NO: 1859157 - DNA, 15 bp, Homo sapiens
gcagccagtcaccct

SEQ ID NO: 1859158 - DNA, 15 bp, Homo sapiens
cagccagtcaccctg

SEQ ID NO: 1859159 - DNA, 15 bp, Homo sapiens
agccagtcaccctgt

SEQ ID NO: 1859160 - DNA, 15 bp, Homo sapiens
gccagtcaccctgtt

SEQ ID NO: 1859161 - DNA, 15 bp, Homo sapiens
ccagtcaccctgttg

SEQ ID NO: 1859162 - DNA, 15 bp, Homo sapiens
cagtcaccctgttgc

SEQ ID NO: 1859163 - DNA, 15 bp, Homo sapiens
agtcaccctgttgct

SEQ ID NO: 1859164 - DNA, 15 bp, Homo sapiens
gtcaccctgttgctg

SEQ ID NO: 1859165 - DNA, 15 bp, Homo sapiens
tcaccctgttgctgg

SEQ ID NO: 1859166 - DNA, 15 bp, Homo sapiens
caccctgttgctggc

SEQ ID NO: 1859167 - DNA, 15 bp, Homo sapiens
accctgttgctggcg

SEQ ID NO: 1859168 - DNA, 15 bp, Homo sapiens
ccctgttgctggcgg

SEQ ID NO: 1859169 - DNA, 15 bp, Homo sapiens
cctgttgctggcggt

SEQ ID NO: 1859170 - DNA, 15 bp, Homo sapiens
ctgttgctggcggtg

SEQ ID NO: 1859171 - DNA, 15 bp, Homo sapiens
tgttgctggcggtga

SEQ ID NO: 1859172 - DNA, 15 bp, Homo sapiens
gttgctggcggtgat

SEQ ID NO: 1859173 - DNA, 15 bp, Homo sapiens
ttgctggcggtgatg

SEQ ID NO: 1859174 - DNA, 15 bp, Homo sapiens
tgctggcggtgatga

SEQ ID NO: 1859175 - DNA, 15 bp, Homo sapiens
gctggcggtgatgat

SEQ ID NO: 1859176 - DNA, 15 bp, Homo sapiens
ctggcggtgatgatg

SEQ ID NO: 1859177 - DNA, 15 bp, Homo sapiens
tggcggtgatgatga

SEQ ID NO: 1859178 - DNA, 15 bp, Homo sapiens
ggcggtgatgatgag

SEQ ID NO: 1859179 - DNA, 15 bp, Homo sapiens
gcggtgatgatgaga

SEQ ID NO: 1859180 - DNA, 15 bp, Homo sapiens
cggtgatgatgagac

SEQ ID NO: 1859181 - DNA, 15 bp, Homo sapiens
ggtgatgatgagacc

SEQ ID NO: 1859182 - DNA, 15 bp, Homo sapiens
gtgatgatgagaccc

SEQ ID NO: 1859183 - DNA, 15 bp, Homo sapiens
tgatgatgagacccc

SEQ ID NO: 1859184 - DNA, 15 bp, Homo sapiens
gatgatgagacccca

SEQ ID NO: 1859185 - DNA, 15 bp, Homo sapiens
atgatgagaccccag

SEQ ID NO: 1859186 - DNA, 15 bp, Homo sapiens
tgatgagaccccagg

SEQ ID NO: 1859187 - DNA, 15 bp, Homo sapiens
gatgagaccccaggc

SEQ ID NO: 1859188 - DNA, 15 bp, Homo sapiens
atgagaccccaggcc

SEQ ID NO: 1859189 - DNA, 15 bp, Homo sapiens
tgagaccccaggcca

SEQ ID NO: 1859190 - DNA, 15 bp, Homo sapiens
gagaccccaggccag

SEQ ID NO: 1859191 - DNA, 15 bp, Homo sapiens
agaccccaggccagt

SEQ ID NO: 1859192 - DNA, 15 bp, Homo sapiens
gaccccaggccagtg

SEQ ID NO: 1859193 - DNA, 15 bp, Homo sapiens
accccaggccagtgg

SEQ ID NO: 1859194 - DNA, 15 bp, Homo sapiens
ccccaggccagtggc

SEQ ID NO: 1859195 - DNA, 15 bp, Homo sapiens
cccaggccagtggca

SEQ ID NO: 1859196 - DNA, 15 bp, Homo sapiens
ccaggccagtggcac

SEQ ID NO: 1859197 - DNA, 15 bp, Homo sapiens
caggccagtggcaca

SEQ ID NO: 1859198 - DNA, 15 bp, Homo sapiens
aggccagtggcacag

SEQ ID NO: 1859199 - DNA, 15 bp, Homo sapiens
ggccagtggcacaga

SEQ ID NO: 1859200 - DNA, 15 bp, Homo sapiens
gccagtggcacagag

SEQ ID NO: 1859201 - DNA, 15 bp, Homo sapiens
ccagtggcacagagg

SEQ ID NO: 1859202 - DNA, 15 bp, Homo sapiens
cagtggcacagaggc

SEQ ID NO: 1859203 - DNA, 15 bp, Homo sapiens
agtggcacagaggcc

SEQ ID NO: 1859204 - DNA, 15 bp, Homo sapiens
gtggcacagaggcct

SEQ ID NO: 1859205 - DNA, 15 bp, Homo sapiens
tggcacagaggcctc

SEQ ID NO: 1859206 - DNA, 15 bp, Homo sapiens
ggcacagaggcctcc

SEQ ID NO: 1859207 - DNA, 15 bp, Homo sapiens
gcacagaggcctcct

SEQ ID NO: 1859208 - DNA, 15 bp, Homo sapiens
cacagaggcctcctg

SEQ ID NO: 1859209 - DNA, 15 bp, Homo sapiens
acagaggcctcctgg

SEQ ID NO: 1859210 - DNA, 15 bp, Homo sapiens
cagaggcctcctggg

SEQ ID NO: 1859211 - DNA, 15 bp, Homo sapiens
agaggcctcctggga

SEQ ID NO: 1859212 - DNA, 15 bp, Homo sapiens
gaggcctcctgggag

SEQ ID NO: 1859213 - DNA, 15 bp, Homo sapiens
aggcctcctgggagg

SEQ ID NO: 1859214 - DNA, 15 bp, Homo sapiens
ggcctcctgggagga

SEQ ID NO: 1859215 - DNA, 15 bp, Homo sapiens
gcctcctgggaggaa

SEQ ID NO: 1859216 - DNA, 15 bp, Homo sapiens
cctcctgggaggaag

SEQ ID NO: 1859217 - DNA, 15 bp, Homo sapiens
ctcctgggaggaagt

SEQ ID NO: 1859218 - DNA, 15 bp, Homo sapiens
tcctgggaggaagtc

SEQ ID NO: 1859219 - DNA, 15 bp, Homo sapiens
cctgggaggaagtcc

SEQ ID NO: 1859220 - DNA, 15 bp, Homo sapiens
ctgggaggaagtccc

SEQ ID NO: 1859221 - DNA, 15 bp, Homo sapiens
tgggaggaagtccct

SEQ ID NO: 1859222 - DNA, 15 bp, Homo sapiens
gggaggaagtccctg

SEQ ID NO: 1859223 - DNA, 15 bp, Homo sapiens
ggaggaagtccctgt

SEQ ID NO: 1859224 - DNA, 15 bp, Homo sapiens
gaggaagtccctgtt

SEQ ID NO: 1859225 - DNA, 15 bp, Homo sapiens
aggaagtccctgttt

SEQ ID NO: 1859226 - DNA, 15 bp, Homo sapiens
ggaagtccctgtttg

SEQ ID NO: 1859227 - DNA, 15 bp, Homo sapiens
gaagtccctgtttgg

SEQ ID NO: 1859228 - DNA, 15 bp, Homo sapiens
aagtccctgtttggg

SEQ ID NO: 1859229 - DNA, 15 bp, Homo sapiens
agtccctgtttgggc

SEQ ID NO: 1859230 - DNA, 15 bp, Homo sapiens
gtccctgtttgggcg

SEQ ID NO: 1859231 - DNA, 15 bp, Homo sapiens
tccctgtttgggcgc

SEQ ID NO: 1859232 - DNA, 15 bp, Homo sapiens
ccctgtttgggcgcc

SEQ ID NO: 1859233 - DNA, 15 bp, Homo sapiens
cctgtttgggcgccc

SEQ ID NO: 1859234 - DNA, 15 bp, Homo sapiens
ctgtttgggcgccca

SEQ ID NO: 1859235 - DNA, 15 bp, Homo sapiens
tgtttgggcgcccag

SEQ ID NO: 1859236 - DNA, 15 bp, Homo sapiens
gtttgggcgcccagc

SEQ ID NO: 1859237 - DNA, 15 bp, Homo sapiens
tttgggcgcccagca

SEQ ID NO: 1859238 - DNA, 15 bp, Homo sapiens
ttgggcgcccagcac

SEQ ID NO: 1859239 - DNA, 15 bp, Homo sapiens
tgggcgcccagcact

SEQ ID NO: 1859240 - DNA, 15 bp, Homo sapiens
gggcgcccagcactg

SEQ ID NO: 1859241 - DNA, 15 bp, Homo sapiens
ggcgcccagcactgt

SEQ ID NO: 1859242 - DNA, 15 bp, Homo sapiens
gcgcccagcactgtt

SEQ ID NO: 1859243 - DNA, 15 bp, Homo sapiens
cgcccagcactgttc

SEQ ID NO: 1859244 - DNA, 15 bp, Homo sapiens
gcccagcactgttca

SEQ ID NO: 1859245 - DNA, 15 bp, Homo sapiens
cccagcactgttcag

SEQ ID NO: 1859246 - DNA, 15 bp, Homo sapiens
ccagcactgttcagg

SEQ ID NO: 1859247 - DNA, 15 bp, Homo sapiens
cagcactgttcaggg

SEQ ID NO: 1859248 - DNA, 15 bp, Homo sapiens
agcactgttcagggc

SEQ ID NO: 1859249 - DNA, 15 bp, Homo sapiens
gcactgttcagggcc

SEQ ID NO: 1859250 - DNA, 15 bp, Homo sapiens
cactgttcagggcct

SEQ ID NO: 1859251 - DNA, 15 bp, Homo sapiens
actgttcagggcctc

SEQ ID NO: 1859252 - DNA, 15 bp, Homo sapiens
ctgttcagggcctcc

SEQ ID NO: 1859253 - DNA, 15 bp, Homo sapiens
tgttcagggcctcct

SEQ ID NO: 1859254 - DNA, 15 bp, Homo sapiens
gttcagggcctcctc

SEQ ID NO: 1859255 - DNA, 15 bp, Homo sapiens
ttcagggcctcctct

SEQ ID NO: 1859256 - DNA, 15 bp, Homo sapiens
tcagggcctcctcta

SEQ ID NO: 1859257 - DNA, 15 bp, Homo sapiens
cagggcctcctctag

SEQ ID NO: 1859258 - DNA, 15 bp, Homo sapiens
agggcctcctctagt

SEQ ID NO: 1859259 - DNA, 15 bp, Homo sapiens
gggcctcctctagtc

SEQ ID NO: 1859260 - DNA, 15 bp, Homo sapiens
ggcctcctctagtct

SEQ ID NO: 1859261 - DNA, 15 bp, Homo sapiens
gcctcctctagtctt

SEQ ID NO: 1859262 - DNA, 15 bp, Homo sapiens
cctcctctagtcttg

SEQ ID NO: 1859263 - DNA, 15 bp, Homo sapiens
ctcctctagtcttgt

SEQ ID NO: 1859264 - DNA, 15 bp, Homo sapiens
tcctctagtcttgtt

SEQ ID NO: 1859265 - DNA, 15 bp, Homo sapiens
cctctagtcttgttc

SEQ ID NO: 1859266 - DNA, 15 bp, Homo sapiens
ctctagtcttgttct

SEQ ID NO: 1859267 - DNA, 15 bp, Homo sapiens
tctagtcttgttcta

SEQ ID NO: 1859268 - DNA, 15 bp, Homo sapiens
ctagtcttgttctac

SEQ ID NO: 1859269 - DNA, 15 bp, Homo sapiens
tagtcttgttctact

SEQ ID NO: 1859270 - DNA, 15 bp, Homo sapiens
agtcttgttctactt

SEQ ID NO: 1859271 - DNA, 15 bp, Homo sapiens
gtcttgttctacttt

SEQ ID NO: 1859272 - DNA, 15 bp, Homo sapiens
tcttgttctacttta

SEQ ID NO: 1859273 - DNA, 15 bp, Homo sapiens
cttgttctactttag

SEQ ID NO: 1859274 - DNA, 15 bp, Homo sapiens
ttgttctactttagg

SEQ ID NO: 1859275 - DNA, 15 bp, Homo sapiens
tgttctactttaggc

SEQ ID NO: 1859276 - DNA, 15 bp, Homo sapiens
gttctactttaggcc

SEQ ID NO: 1859277 - DNA, 15 bp, Homo sapiens
ttctactttaggcct

SEQ ID NO: 1859278 - DNA, 15 bp, Homo sapiens
tctactttaggcctt

SEQ ID NO: 1859279 - DNA, 15 bp, Homo sapiens
ctactttaggcctta

SEQ ID NO: 1859280 - DNA, 15 bp, Homo sapiens
tactttaggccttac

SEQ ID NO: 1859281 - DNA, 15 bp, Homo sapiens
actttaggccttacc

SEQ ID NO: 1859282 - DNA, 15 bp, Homo sapiens
ctttaggccttacct

SEQ ID NO: 1859283 - DNA, 15 bp, Homo sapiens
tttaggccttacctt

SEQ ID NO: 1859284 - DNA, 15 bp, Homo sapiens
ttaggccttaccttc

SEQ ID NO: 1859285 - DNA, 15 bp, Homo sapiens
taggccttaccttct

SEQ ID NO: 1859286 - DNA, 15 bp, Homo sapiens
aggccttaccttctc

SEQ ID NO: 1859287 - DNA, 15 bp, Homo sapiens
ggccttaccttctca

SEQ ID NO: 1859288 - DNA, 15 bp, Homo sapiens
gccttaccttctcat

SEQ ID NO: 1859289 - DNA, 15 bp, Homo sapiens
ccttaccttctcatt

SEQ ID NO: 1859290 - DNA, 15 bp, Homo sapiens
cttaccttctcattt

SEQ ID NO: 1859291 - DNA, 15 bp, Homo sapiens
ttaccttctcatttc

SEQ ID NO: 1859292 - DNA, 15 bp, Homo sapiens
taccttctcatttct

SEQ ID NO: 1859293 - DNA, 15 bp, Homo sapiens
accttctcatttctg

SEQ ID NO: 1859294 - DNA, 15 bp, Homo sapiens
ccttctcatttctgt

SEQ ID NO: 1859295 - DNA, 15 bp, Homo sapiens
cttctcatttctgtt

SEQ ID NO: 1859296 - DNA, 15 bp, Homo sapiens
ttctcatttctgttg

SEQ ID NO: 1859297 - DNA, 15 bp, Homo sapiens
tctcatttctgttgc

SEQ ID NO: 1859298 - DNA, 15 bp, Homo sapiens
ctcatttctgttgct

SEQ ID NO: 1859299 - DNA, 15 bp, Homo sapiens
tcatttctgttgctg

SEQ ID NO: 1859300 - DNA, 15 bp, Homo sapiens
catttctgttgctgg

SEQ ID NO: 1859301 - DNA, 15 bp, Homo sapiens
atttctgttgctgga

SEQ ID NO: 1859302 - DNA, 15 bp, Homo sapiens
tttctgttgctggag

SEQ ID NO: 1859303 - DNA, 15 bp, Homo sapiens
ttctgttgctggagc

SEQ ID NO: 1859304 - DNA, 15 bp, Homo sapiens
tctgttgctggagca

SEQ ID NO: 1859305 - DNA, 15 bp, Homo sapiens
ctgttgctggagcaa

SEQ ID NO: 1859306 - DNA, 15 bp, Homo sapiens
tgttgctggagcaaa

SEQ ID NO: 1859307 - DNA, 15 bp, Homo sapiens
gttgctggagcaaaa

SEQ ID NO: 1859308 - DNA, 15 bp, Homo sapiens
ttgctggagcaaaag

SEQ ID NO: 1859309 - DNA, 15 bp, Homo sapiens
tgctggagcaaaagg

SEQ ID NO: 1859310 - DNA, 15 bp, Homo sapiens
gctggagcaaaaggc

SEQ ID NO: 1859311 - DNA, 15 bp, Homo sapiens
ctggagcaaaaggct

SEQ ID NO: 1859312 - DNA, 15 bp, Homo sapiens
tggagcaaaaggctc

SEQ ID NO: 1859313 - DNA, 15 bp, Homo sapiens
ggagcaaaaggctct

SEQ ID NO: 1859314 - DNA, 15 bp, Homo sapiens
gagcaaaaggctctg

SEQ ID NO: 1859315 - DNA, 15 bp, Homo sapiens
agcaaaaggctctga

SEQ ID NO: 1859316 - DNA, 15 bp, Homo sapiens
gcaaaaggctctgaa

SEQ ID NO: 1859317 - DNA, 15 bp, Homo sapiens
caaaaggctctgaat

SEQ ID NO: 1859318 - DNA, 15 bp, Homo sapiens
aaaaggctctgaatt

SEQ ID NO: 1859319 - DNA, 15 bp, Homo sapiens
aaaggctctgaattc

SEQ ID NO: 1859320 - DNA, 15 bp, Homo sapiens
aaggctctgaattca

SEQ ID NO: 1859321 - DNA, 15 bp, Homo sapiens
aggctctgaattcag

SEQ ID NO: 1859322 - DNA, 15 bp, Homo sapiens
ggctctgaattcaga

SEQ ID NO: 1859323 - DNA, 15 bp, Homo sapiens
gctctgaattcagag

SEQ ID NO: 1859324 - DNA, 15 bp, Homo sapiens
ctctgaattcagagt

SEQ ID NO: 1859325 - DNA, 15 bp, Homo sapiens
tctgaattcagagtt

SEQ ID NO: 1859326 - DNA, 15 bp, Homo sapiens
ctgaattcagagttg

SEQ ID NO: 1859327 - DNA, 15 bp, Homo sapiens
tgaattcagagttgg

SEQ ID NO: 1859328 - DNA, 15 bp, Homo sapiens
gaattcagagttggg

SEQ ID NO: 1859329 - DNA, 15 bp, Homo sapiens
aattcagagttggga

SEQ ID NO: 1859330 - DNA, 15 bp, Homo sapiens
attcagagttgggaa

SEQ ID NO: 1859331 - DNA, 15 bp, Homo sapiens
ttcagagttgggaat

SEQ ID NO: 1859332 - DNA, 15 bp, Homo sapiens
tcagagttgggaatt

SEQ ID NO: 1859333 - DNA, 15 bp, Homo sapiens
cagagttgggaattc

SEQ ID NO: 1859334 - DNA, 15 bp, Homo sapiens
agagttgggaattct

SEQ ID NO: 1859335 - DNA, 15 bp, Homo sapiens
gagttgggaattctc

SEQ ID NO: 1859336 - DNA, 15 bp, Homo sapiens
agttgggaattctca

SEQ ID NO: 1859337 - DNA, 15 bp, Homo sapiens
gttgggaattctcag

SEQ ID NO: 1859338 - DNA, 15 bp, Homo sapiens
ttgggaattctcagg

SEQ ID NO: 1859339 - DNA, 15 bp, Homo sapiens
tgggaattctcaggc

SEQ ID NO: 1859340 - DNA, 15 bp, Homo sapiens
gggaattctcaggcc

SEQ ID NO: 1859341 - DNA, 15 bp, Homo sapiens
ggaattctcaggcct

SEQ ID NO: 1859342 - DNA, 15 bp, Homo sapiens
gaattctcaggcctg

SEQ ID NO: 1859343 - DNA, 15 bp, Homo sapiens
aattctcaggcctgg

SEQ ID NO: 1859344 - DNA, 15 bp, Homo sapiens
attctcaggcctggt

SEQ ID NO: 1859345 - DNA, 15 bp, Homo sapiens
ttctcaggcctggtc

SEQ ID NO: 1859346 - DNA, 15 bp, Homo sapiens
tctcaggcctggtct

SEQ ID NO: 1859347 - DNA, 15 bp, Homo sapiens
ctcaggcctggtctg

SEQ ID NO: 1859348 - DNA, 15 bp, Homo sapiens
tcaggcctggtctga

SEQ ID NO: 1859349 - DNA, 15 bp, Homo sapiens
caggcctggtctgag

SEQ ID NO: 1859350 - DNA, 15 bp, Homo sapiens
aggcctggtctgaga

SEQ ID NO: 1859351 - DNA, 15 bp, Homo sapiens
ggcctggtctgagat

SEQ ID NO: 1859352 - DNA, 15 bp, Homo sapiens
gcctggtctgagatt

SEQ ID NO: 1859353 - DNA, 15 bp, Homo sapiens
cctggtctgagattt

SEQ ID NO: 1859354 - DNA, 15 bp, Homo sapiens
ctggtctgagatttg

SEQ ID NO: 1859355 - DNA, 15 bp, Homo sapiens
tggtctgagatttgt

SEQ ID NO: 1859356 - DNA, 15 bp, Homo sapiens
ggtctgagatttgtc

SEQ ID NO: 1859357 - DNA, 15 bp, Homo sapiens
gtctgagatttgtct

SEQ ID NO: 1859358 - DNA, 15 bp, Homo sapiens
tctgagatttgtctg

SEQ ID NO: 1859359 - DNA, 15 bp, Homo sapiens
ctgagatttgtctgc

SEQ ID NO: 1859360 - DNA, 15 bp, Homo sapiens
tgagatttgtctgcc

SEQ ID NO: 1859361 - DNA, 15 bp, Homo sapiens
gagatttgtctgccc

SEQ ID NO: 1859362 - DNA, 15 bp, Homo sapiens
agatttgtctgcccc

SEQ ID NO: 1859363 - DNA, 15 bp, Homo sapiens
gatttgtctgcccca

SEQ ID NO: 1859364 - DNA, 15 bp, Homo sapiens
atttgtctgccccaa

SEQ ID NO: 1859365 - DNA, 15 bp, Homo sapiens
tttgtctgccccaat

SEQ ID NO: 1859366 - DNA, 15 bp, Homo sapiens
ttgtctgccccaatg

SEQ ID NO: 1859367 - DNA, 15 bp, Homo sapiens
tgtctgccccaatga

SEQ ID NO: 1859368 - DNA, 15 bp, Homo sapiens
gtctgccccaatgat

SEQ ID NO: 1859369 - DNA, 15 bp, Homo sapiens
tctgccccaatgatg

SEQ ID NO: 1859370 - DNA, 15 bp, Homo sapiens
ctgccccaatgatga

SEQ ID NO: 1859371 - DNA, 15 bp, Homo sapiens
tgccccaatgatgat

SEQ ID NO: 1859372 - DNA, 15 bp, Homo sapiens
gccccaatgatgatg

SEQ ID NO: 1859373 - DNA, 15 bp, Homo sapiens
ccccaatgatgatga

SEQ ID NO: 1859374 - DNA, 15 bp, Homo sapiens
cccaatgatgatgat

SEQ ID NO: 1859375 - DNA, 15 bp, Homo sapiens
ccaatgatgatgatg

SEQ ID NO: 1859376 - DNA, 15 bp, Homo sapiens
caatgatgatgatga

SEQ ID NO: 1859377 - DNA, 15 bp, Homo sapiens
aatgatgatgatgat

SEQ ID NO: 1859378 - DNA, 15 bp, Homo sapiens
atgatgatgatgacg

SEQ ID NO: 1859379 - DNA, 15 bp, Homo sapiens
tgatgatgatgacga

SEQ ID NO: 1859380 - DNA, 15 bp, Homo sapiens
gatgatgatgacgat

SEQ ID NO: 1859381 - DNA, 15 bp, Homo sapiens
atgatgatgacgatg

SEQ ID NO: 1859382 - DNA, 15 bp, Homo sapiens
tgatgatgacgatga

SEQ ID NO: 1859383 - DNA, 15 bp, Homo sapiens
gatgatgacgatgac

SEQ ID NO: 1859384 - DNA, 15 bp, Homo sapiens
atgatgacgatgacg

SEQ ID NO: 1859385 - DNA, 15 bp, Homo sapiens
tgatgacgatgacga

SEQ ID NO: 1859386 - DNA, 15 bp, Homo sapiens
gatgacgatgacgat

SEQ ID NO: 1859387 - DNA, 15 bp, Homo sapiens
atgacgatgacgatc

SEQ ID NO: 1859388 - DNA, 15 bp, Homo sapiens
tgacgatgacgatca

SEQ ID NO: 1859389 - DNA, 15 bp, Homo sapiens
gacgatgacgatcat

SEQ ID NO: 1859390 - DNA, 15 bp, Homo sapiens
acgatgacgatcatg

SEQ ID NO: 1859391 - DNA, 15 bp, Homo sapiens
cgatgacgatcatga

SEQ ID NO: 1859392 - DNA, 15 bp, Homo sapiens
gatgacgatcatgat

SEQ ID NO: 1859393 - DNA, 15 bp, Homo sapiens
atgacgatcatgata

SEQ ID NO: 1859394 - DNA, 15 bp, Homo sapiens
tgacgatcatgataa

SEQ ID NO: 1859395 - DNA, 15 bp, Homo sapiens
gacgatcatgataat

SEQ ID NO: 1859396 - DNA, 15 bp, Homo sapiens
acgatcatgataata

SEQ ID NO: 1859397 - DNA, 15 bp, Homo sapiens
cgatcatgataatac

SEQ ID NO: 1859398 - DNA, 15 bp, Homo sapiens
gatcatgataatact

SEQ ID NO: 1859399 - DNA, 15 bp, Homo sapiens
atcatgataatacta

SEQ ID NO: 1859400 - DNA, 15 bp, Homo sapiens
tcatgataatactac

SEQ ID NO: 1859401 - DNA, 15 bp, Homo sapiens
catgataatactaca

SEQ ID NO: 1859402 - DNA, 15 bp, Homo sapiens
atgataatactacac

SEQ ID NO: 1859403 - DNA, 15 bp, Homo sapiens
tgataatactacact

SEQ ID NO: 1859404 - DNA, 15 bp, Homo sapiens
gataatactacacta

SEQ ID NO: 1859405 - DNA, 15 bp, Homo sapiens
ataatactacactaa

SEQ ID NO: 1859406 - DNA, 15 bp, Homo sapiens
taatactacactaat

SEQ ID NO: 1859407 - DNA, 15 bp, Homo sapiens
aatactacactaata

SEQ ID NO: 1859408 - DNA, 15 bp, Homo sapiens
atactacactaatag

SEQ ID NO: 1859409 - DNA, 15 bp, Homo sapiens
tactacactaatagt

SEQ ID NO: 1859410 - DNA, 15 bp, Homo sapiens
actacactaatagta

SEQ ID NO: 1859411 - DNA, 15 bp, Homo sapiens
ctacactaatagtag

SEQ ID NO: 1859412 - DNA, 15 bp, Homo sapiens
tacactaatagtagt

SEQ ID NO: 1859413 - DNA, 15 bp, Homo sapiens
acactaatagtagtt

SEQ ID NO: 1859414 - DNA, 15 bp, Homo sapiens
cactaatagtagtta

SEQ ID NO: 1859415 - DNA, 15 bp, Homo sapiens
actaatagtagttaa

SEQ ID NO: 1859416 - DNA, 15 bp, Homo sapiens
ctaatagtagttaag

SEQ ID NO: 1859417 - DNA, 15 bp, Homo sapiens
taatagtagttaaga

SEQ ID NO: 1859418 - DNA, 15 bp, Homo sapiens
aatagtagttaagag

SEQ ID NO: 1859419 - DNA, 15 bp, Homo sapiens
atagtagttaagagt

SEQ ID NO: 1859420 - DNA, 15 bp, Homo sapiens
tagtagttaagagtt

SEQ ID NO: 1859421 - DNA, 15 bp, Homo sapiens
agtagttaagagtta

SEQ ID NO: 1859422 - DNA, 15 bp, Homo sapiens
gtagttaagagttac

SEQ ID NO: 1859423 - DNA, 15 bp, Homo sapiens
tagttaagagttacc

SEQ ID NO: 1859424 - DNA, 15 bp, Homo sapiens
agttaagagttacca

SEQ ID NO: 1859425 - DNA, 15 bp, Homo sapiens
gttaagagttaccaa

SEQ ID NO: 1859426 - DNA, 15 bp, Homo sapiens
ttaagagttaccaat

SEQ ID NO: 1859427 - DNA, 15 bp, Homo sapiens
taagagttaccaatt

SEQ ID NO: 1859428 - DNA, 15 bp, Homo sapiens
aagagttaccaattg

SEQ ID NO: 1859429 - DNA, 15 bp, Homo sapiens
agagttaccaattgc

SEQ ID NO: 1859430 - DNA, 15 bp, Homo sapiens
gagttaccaattgcc

SEQ ID NO: 1859431 - DNA, 15 bp, Homo sapiens
agttaccaattgcct

SEQ ID NO: 1859432 - DNA, 15 bp, Homo sapiens
gttaccaattgccta

SEQ ID NO: 1859433 - DNA, 15 bp, Homo sapiens
ttaccaattgcctat

SEQ ID NO: 1859434 - DNA, 15 bp, Homo sapiens
taccaattgcctatt

SEQ ID NO: 1859435 - DNA, 15 bp, Homo sapiens
accaattgcctattc

SEQ ID NO: 1859436 - DNA, 15 bp, Homo sapiens
ccaattgcctattct

SEQ ID NO: 1859437 - DNA, 15 bp, Homo sapiens
caattgcctattctg

SEQ ID NO: 1859438 - DNA, 15 bp, Homo sapiens
aattgcctattctgt

SEQ ID NO: 1859439 - DNA, 15 bp, Homo sapiens
attgcctattctgta

SEQ ID NO: 1859440 - DNA, 15 bp, Homo sapiens
ttgcctattctgtac

SEQ ID NO: 1859441 - DNA, 15 bp, Homo sapiens
tgcctattctgtact

SEQ ID NO: 1859442 - DNA, 15 bp, Homo sapiens
gcctattctgtacta

SEQ ID NO: 1859443 - DNA, 15 bp, Homo sapiens
cctattctgtactag

SEQ ID NO: 1859444 - DNA, 15 bp, Homo sapiens
ctattctgtactagg

SEQ ID NO: 1859445 - DNA, 15 bp, Homo sapiens
tattctgtactagga

SEQ ID NO: 1859446 - DNA, 15 bp, Homo sapiens
attctgtactaggag

SEQ ID NO: 1859447 - DNA, 15 bp, Homo sapiens
ttctgtactaggagc

SEQ ID NO: 1859448 - DNA, 15 bp, Homo sapiens
tctgtactaggagca

SEQ ID NO: 1859449 - DNA, 15 bp, Homo sapiens
ctgtactaggagcaa

SEQ ID NO: 1859450 - DNA, 15 bp, Homo sapiens
tgtactaggagcaat

SEQ ID NO: 1859451 - DNA, 15 bp, Homo sapiens
gtactaggagcaatt

SEQ ID NO: 1859452 - DNA, 15 bp, Homo sapiens
tactaggagcaattt

SEQ ID NO: 1859453 - DNA, 15 bp, Homo sapiens
actaggagcaattta

SEQ ID NO: 1859454 - DNA, 15 bp, Homo sapiens
ctaggagcaatttag

SEQ ID NO: 1859455 - DNA, 15 bp, Homo sapiens
taggagcaatttaga

SEQ ID NO: 1859456 - DNA, 15 bp, Homo sapiens
aggagcaatttagac

SEQ ID NO: 1859457 - DNA, 15 bp, Homo sapiens
ggagcaatttagacc

SEQ ID NO: 1859458 - DNA, 15 bp, Homo sapiens
gagcaatttagacct

SEQ ID NO: 1859459 - DNA, 15 bp, Homo sapiens
agcaatttagacctc

SEQ ID NO: 1859460 - DNA, 15 bp, Homo sapiens
gcaatttagacctca

SEQ ID NO: 1859461 - DNA, 15 bp, Homo sapiens
caatttagacctcat

SEQ ID NO: 1859462 - DNA, 15 bp, Homo sapiens
aatttagacctcatc

SEQ ID NO: 1859463 - DNA, 15 bp, Homo sapiens
atttagacctcatca

SEQ ID NO: 1859464 - DNA, 15 bp, Homo sapiens
tttagacctcatcac

SEQ ID NO: 1859465 - DNA, 15 bp, Homo sapiens
ttagacctcatcaca

SEQ ID NO: 1859466 - DNA, 15 bp, Homo sapiens
tagacctcatcacat

SEQ ID NO: 1859467 - DNA, 15 bp, Homo sapiens
agacctcatcacatg

SEQ ID NO: 1859468 - DNA, 15 bp, Homo sapiens
gacctcatcacatgt

SEQ ID NO: 1859469 - DNA, 15 bp, Homo sapiens
acctcatcacatgta

SEQ ID NO: 1859470 - DNA, 15 bp, Homo sapiens
cctcatcacatgtaa

SEQ ID NO: 1859471 - DNA, 15 bp, Homo sapiens
ctcatcacatgtaat

SEQ ID NO: 1859472 - DNA, 15 bp, Homo sapiens
tcatcacatgtaatt

SEQ ID NO: 1859473 - DNA, 15 bp, Homo sapiens
catcacatgtaattc

SEQ ID NO: 1859474 - DNA, 15 bp, Homo sapiens
atcacatgtaattct

SEQ ID NO: 1859475 - DNA, 15 bp, Homo sapiens
tcacatgtaattcta

SEQ ID NO: 1859476 - DNA, 15 bp, Homo sapiens
cacatgtaattctaa

SEQ ID NO: 1859477 - DNA, 15 bp, Homo sapiens
acatgtaattctaac

SEQ ID NO: 1859478 - DNA, 15 bp, Homo sapiens
catgtaattctaaca

SEQ ID NO: 1859479 - DNA, 15 bp, Homo sapiens
atgtaattctaacaa

SEQ ID NO: 1859480 - DNA, 15 bp, Homo sapiens
tgtaattctaacaac

SEQ ID NO: 1859481 - DNA, 15 bp, Homo sapiens
gtaattctaacaaca

SEQ ID NO: 1859482 - DNA, 15 bp, Homo sapiens
taattctaacaacat

SEQ ID NO: 1859483 - DNA, 15 bp, Homo sapiens
aattctaacaacatc

SEQ ID NO: 1859484 - DNA, 15 bp, Homo sapiens
attctaacaacatcc

SEQ ID NO: 1859485 - DNA, 15 bp, Homo sapiens
ttctaacaacatccc

SEQ ID NO: 1859486 - DNA, 15 bp, Homo sapiens
tctaacaacatcccc

SEQ ID NO: 1859487 - DNA, 15 bp, Homo sapiens
ctaacaacatccccg

SEQ ID NO: 1859488 - DNA, 15 bp, Homo sapiens
taacaacatccccgc

SEQ ID NO: 1859489 - DNA, 15 bp, Homo sapiens
aacaacatccccgca

SEQ ID NO: 1859490 - DNA, 15 bp, Homo sapiens
acaacatccccgcaa

SEQ ID NO: 1859491 - DNA, 15 bp, Homo sapiens
caacatccccgcaag

SEQ ID NO: 1859492 - DNA, 15 bp, Homo sapiens
aacatccccgcaaga

SEQ ID NO: 1859493 - DNA, 15 bp, Homo sapiens
acatccccgcaagac

SEQ ID NO: 1859494 - DNA, 15 bp, Homo sapiens
catccccgcaagaca

SEQ ID NO: 1859495 - DNA, 15 bp, Homo sapiens
atccccgcaagacaa

SEQ ID NO: 1859496 - DNA, 15 bp, Homo sapiens
tccccgcaagacaag

SEQ ID NO: 1859497 - DNA, 15 bp, Homo sapiens
ccccgcaagacaagc

SEQ ID NO: 1859498 - DNA, 15 bp, Homo sapiens
cccgcaagacaagca

SEQ ID NO: 1859499 - DNA, 15 bp, Homo sapiens
ccgcaagacaagcat

SEQ ID NO: 1859500 - DNA, 15 bp, Homo sapiens
cgcaagacaagcatt

SEQ ID NO: 1859501 - DNA, 15 bp, Homo sapiens
gcaagacaagcatta

SEQ ID NO: 1859502 - DNA, 15 bp, Homo sapiens
caagacaagcattat

SEQ ID NO: 1859503 - DNA, 15 bp, Homo sapiens
aagacaagcattata

SEQ ID NO: 1859504 - DNA, 15 bp, Homo sapiens
agacaagcattatag

SEQ ID NO: 1859505 - DNA, 15 bp, Homo sapiens
gacaagcattatagt

SEQ ID NO: 1859506 - DNA, 15 bp, Homo sapiens
acaagcattatagtc

SEQ ID NO: 1859507 - DNA, 15 bp, Homo sapiens
caagcattatagtcc

SEQ ID NO: 1859508 - DNA, 15 bp, Homo sapiens
aagcattatagtcct

SEQ ID NO: 1859509 - DNA, 15 bp, Homo sapiens
agcattatagtcctt

SEQ ID NO: 1859510 - DNA, 15 bp, Homo sapiens
gcattatagtccttt

SEQ ID NO: 1859511 - DNA, 15 bp, Homo sapiens
cattatagtcctttc

SEQ ID NO: 1859512 - DNA, 15 bp, Homo sapiens
attatagtcctttca

SEQ ID NO: 1859513 - DNA, 15 bp, Homo sapiens
ttatagtcctttcat

SEQ ID NO: 1859514 - DNA, 15 bp, Homo sapiens
tatagtcctttcata

SEQ ID NO: 1859515 - DNA, 15 bp, Homo sapiens
atagtcctttcatag

SEQ ID NO: 1859516 - DNA, 15 bp, Homo sapiens
tagtcctttcataga

SEQ ID NO: 1859517 - DNA, 15 bp, Homo sapiens
agtcctttcatagat

SEQ ID NO: 1859518 - DNA, 15 bp, Homo sapiens
gtcctttcatagatg

SEQ ID NO: 1859519 - DNA, 15 bp, Homo sapiens
tcctttcatagatga

SEQ ID NO: 1859520 - DNA, 15 bp, Homo sapiens
cctttcatagatgag

SEQ ID NO: 1859521 - DNA, 15 bp, Homo sapiens
ctttcatagatgaga

SEQ ID NO: 1859522 - DNA, 15 bp, Homo sapiens
tttcatagatgagaa

SEQ ID NO: 1859523 - DNA, 15 bp, Homo sapiens
ttcatagatgagaac

SEQ ID NO: 1859524 - DNA, 15 bp, Homo sapiens
tcatagatgagaaca

SEQ ID NO: 1859525 - DNA, 15 bp, Homo sapiens
catagatgagaacat

SEQ ID NO: 1859526 - DNA, 15 bp, Homo sapiens
atagatgagaacatc

SEQ ID NO: 1859527 - DNA, 15 bp, Homo sapiens
tagatgagaacatct

SEQ ID NO: 1859528 - DNA, 15 bp, Homo sapiens
agatgagaacatctg

SEQ ID NO: 1859529 - DNA, 15 bp, Homo sapiens
gatgagaacatctgt

SEQ ID NO: 1859530 - DNA, 15 bp, Homo sapiens
atgagaacatctgtg

SEQ ID NO: 1859531 - DNA, 15 bp, Homo sapiens
tgagaacatctgtgc

SEQ ID NO: 1859532 - DNA, 15 bp, Homo sapiens
gagaacatctgtgct

SEQ ID NO: 1859533 - DNA, 15 bp, Homo sapiens
agaacatctgtgctt

SEQ ID NO: 1859534 - DNA, 15 bp, Homo sapiens
gaacatctgtgctta

SEQ ID NO: 1859535 - DNA, 15 bp, Homo sapiens
aacatctgtgcttag

SEQ ID NO: 1859536 - DNA, 15 bp, Homo sapiens
acatctgtgcttaga

SEQ ID NO: 1859537 - DNA, 15 bp, Homo sapiens
catctgtgcttagag

SEQ ID NO: 1859538 - DNA, 15 bp, Homo sapiens
atctgtgcttagaga

SEQ ID NO: 1859539 - DNA, 15 bp, Homo sapiens
tctgtgcttagagag

SEQ ID NO: 1859540 - DNA, 15 bp, Homo sapiens
ctgtgcttagagaga

SEQ ID NO: 1859541 - DNA, 15 bp, Homo sapiens
tgtgcttagagagat

SEQ ID NO: 1859542 - DNA, 15 bp, Homo sapiens
gtgcttagagagatt

SEQ ID NO: 1859543 - DNA, 15 bp, Homo sapiens
tgcttagagagatta

SEQ ID NO: 1859544 - DNA, 15 bp, Homo sapiens
gcttagagagattaa

SEQ ID NO: 1859545 - DNA, 15 bp, Homo sapiens
cttagagagattaag

SEQ ID NO: 1859546 - DNA, 15 bp, Homo sapiens
ttagagagattaagt

SEQ ID NO: 1859547 - DNA, 15 bp, Homo sapiens
tagagagattaagta

SEQ ID NO: 1859548 - DNA, 15 bp, Homo sapiens
agagagattaagtaa

SEQ ID NO: 1859549 - DNA, 15 bp, Homo sapiens
gagagattaagtaac

SEQ ID NO: 1859550 - DNA, 15 bp, Homo sapiens
agagattaagtaact

SEQ ID NO: 1859551 - DNA, 15 bp, Homo sapiens
gagattaagtaactt

SEQ ID NO: 1859552 - DNA, 15 bp, Homo sapiens
agattaagtaacttt

SEQ ID NO: 1859553 - DNA, 15 bp, Homo sapiens
gattaagtaactttc

SEQ ID NO: 1859554 - DNA, 15 bp, Homo sapiens
attaagtaactttca

SEQ ID NO: 1859555 - DNA, 15 bp, Homo sapiens
ttaagtaactttcag

SEQ ID NO: 1859556 - DNA, 15 bp, Homo sapiens
taagtaactttcaga

SEQ ID NO: 1859557 - DNA, 15 bp, Homo sapiens
aagtaactttcagac

SEQ ID NO: 1859558 - DNA, 15 bp, Homo sapiens
agtaactttcagact

SEQ ID NO: 1859559 - DNA, 15 bp, Homo sapiens
gtaactttcagactc

SEQ ID NO: 1859560 - DNA, 15 bp, Homo sapiens
taactttcagactca

SEQ ID NO: 1859561 - DNA, 15 bp, Homo sapiens
aactttcagactcaa

SEQ ID NO: 1859562 - DNA, 15 bp, Homo sapiens
actttcagactcaaa

SEQ ID NO: 1859563 - DNA, 15 bp, Homo sapiens
ctttcagactcaaac

SEQ ID NO: 1859564 - DNA, 15 bp, Homo sapiens
tttcagactcaaaca

SEQ ID NO: 1859565 - DNA, 15 bp, Homo sapiens
ttcagactcaaacag

SEQ ID NO: 1859566 - DNA, 15 bp, Homo sapiens
tcagactcaaacagc

SEQ ID NO: 1859567 - DNA, 15 bp, Homo sapiens
cagactcaaacagct

SEQ ID NO: 1859568 - DNA, 15 bp, Homo sapiens
agactcaaacagctg

SEQ ID NO: 1859569 - DNA, 15 bp, Homo sapiens
gactcaaacagctgg

SEQ ID NO: 1859570 - DNA, 15 bp, Homo sapiens
actcaaacagctgga

SEQ ID NO: 1859571 - DNA, 15 bp, Homo sapiens
ctcaaacagctggat

SEQ ID NO: 1859572 - DNA, 15 bp, Homo sapiens
tcaaacagctggatg

SEQ ID NO: 1859573 - DNA, 15 bp, Homo sapiens
aaacagctggatggt

SEQ ID NO: 1859574 - DNA, 15 bp, Homo sapiens
aacagctggatggtg

SEQ ID NO: 1859575 - DNA, 15 bp, Homo sapiens
acagctggatggtga

SEQ ID NO: 1859576 - DNA, 15 bp, Homo sapiens
cagctggatggtgac

SEQ ID NO: 1859577 - DNA, 15 bp, Homo sapiens
agctggatggtgact

SEQ ID NO: 1859578 - DNA, 15 bp, Homo sapiens
gctggatggtgactg

SEQ ID NO: 1859579 - DNA, 15 bp, Homo sapiens
ctggatggtgactga

SEQ ID NO: 1859580 - DNA, 15 bp, Homo sapiens
tggatggtgactgag

SEQ ID NO: 1859581 - DNA, 15 bp, Homo sapiens
ggatggtgactgagc

SEQ ID NO: 1859582 - DNA, 15 bp, Homo sapiens
gatggtgactgagct

SEQ ID NO: 1859583 - DNA, 15 bp, Homo sapiens
atggtgactgagctg

SEQ ID NO: 1859584 - DNA, 15 bp, Homo sapiens
tggtgactgagctga

SEQ ID NO: 1859585 - DNA, 15 bp, Homo sapiens
ggtgactgagctgag

SEQ ID NO: 1859586 - DNA, 15 bp, Homo sapiens
gtgactgagctgagg

SEQ ID NO: 1859587 - DNA, 15 bp, Homo sapiens
tgactgagctgaggt

SEQ ID NO: 1859588 - DNA, 15 bp, Homo sapiens
gactgagctgaggtt

SEQ ID NO: 1859589 - DNA, 15 bp, Homo sapiens
actgagctgaggttt

SEQ ID NO: 1859590 - DNA, 15 bp, Homo sapiens
ctgagctgaggtttg

SEQ ID NO: 1859591 - DNA, 15 bp, Homo sapiens
tgagctgaggtttgt

SEQ ID NO: 1859592 - DNA, 15 bp, Homo sapiens
gagctgaggtttgta

SEQ ID NO: 1859593 - DNA, 15 bp, Homo sapiens
agctgaggtttgtac

SEQ ID NO: 1859594 - DNA, 15 bp, Homo sapiens
gctgaggtttgtacc

SEQ ID NO: 1859595 - DNA, 15 bp, Homo sapiens
ctgaggtttgtaccc

SEQ ID NO: 1859596 - DNA, 15 bp, Homo sapiens
tgaggtttgtaccca

SEQ ID NO: 1859597 - DNA, 15 bp, Homo sapiens
gaggtttgtacccat

SEQ ID NO: 1859598 - DNA, 15 bp, Homo sapiens
aggtttgtacccatg

SEQ ID NO: 1859599 - DNA, 15 bp, Homo sapiens
ggtttgtacccatgt

SEQ ID NO: 1859600 - DNA, 15 bp, Homo sapiens
gtttgtacccatgtc

SEQ ID NO: 1859601 - DNA, 15 bp, Homo sapiens
tttgtacccatgtct

SEQ ID NO: 1859602 - DNA, 15 bp, Homo sapiens
ttgtacccatgtctt

SEQ ID NO: 1859603 - DNA, 15 bp, Homo sapiens
tgtacccatgtcttg

SEQ ID NO: 1859604 - DNA, 15 bp, Homo sapiens
gtacccatgtcttga

SEQ ID NO: 1859605 - DNA, 15 bp, Homo sapiens
tacccatgtcttgat

SEQ ID NO: 1859606 - DNA, 15 bp, Homo sapiens
acccatgtcttgatg

SEQ ID NO: 1859607 - DNA, 15 bp, Homo sapiens
cccatgtcttgatga

SEQ ID NO: 1859608 - DNA, 15 bp, Homo sapiens
ccatgtcttgatgac

SEQ ID NO: 1859609 - DNA, 15 bp, Homo sapiens
catgtcttgatgact

SEQ ID NO: 1859610 - DNA, 15 bp, Homo sapiens
atgtcttgatgacta

SEQ ID NO: 1859611 - DNA, 15 bp, Homo sapiens
tgtcttgatgactaa

SEQ ID NO: 1859612 - DNA, 15 bp, Homo sapiens
gtcttgatgactaag

SEQ ID NO: 1859613 - DNA, 15 bp, Homo sapiens
tcttgatgactaagc

SEQ ID NO: 1859614 - DNA, 15 bp, Homo sapiens
cttgatgactaagcc

SEQ ID NO: 1859615 - DNA, 15 bp, Homo sapiens
ttgatgactaagccc

SEQ ID NO: 1859616 - DNA, 15 bp, Homo sapiens
tgatgactaagccca

SEQ ID NO: 1859617 - DNA, 15 bp, Homo sapiens
gatgactaagcccag

SEQ ID NO: 1859618 - DNA, 15 bp, Homo sapiens
atgactaagcccagc

SEQ ID NO: 1859619 - DNA, 15 bp, Homo sapiens
tgactaagcccagct

SEQ ID NO: 1859620 - DNA, 15 bp, Homo sapiens
gactaagcccagctg

SEQ ID NO: 1859621 - DNA, 15 bp, Homo sapiens
actaagcccagctgt

SEQ ID NO: 1859622 - DNA, 15 bp, Homo sapiens
ctaagcccagctgtg

SEQ ID NO: 1859623 - DNA, 15 bp, Homo sapiens
taagcccagctgtgc

SEQ ID NO: 1859624 - DNA, 15 bp, Homo sapiens
aagcccagctgtgcc

SEQ ID NO: 1859625 - DNA, 15 bp, Homo sapiens
agcccagctgtgccc

SEQ ID NO: 1859626 - DNA, 15 bp, Homo sapiens
gcccagctgtgccca

SEQ ID NO: 1859627 - DNA, 15 bp, Homo sapiens
cccagctgtgcccac

SEQ ID NO: 1859628 - DNA, 15 bp, Homo sapiens
ccagctgtgcccacc

SEQ ID NO: 1859629 - DNA, 15 bp, Homo sapiens
cagctgtgcccaccg

SEQ ID NO: 1859630 - DNA, 15 bp, Homo sapiens
agctgtgcccaccgg

SEQ ID NO: 1859631 - DNA, 15 bp, Homo sapiens
gctgtgcccaccggg

SEQ ID NO: 1859632 - DNA, 15 bp, Homo sapiens
ctgtgcccaccggga

SEQ ID NO: 1859633 - DNA, 15 bp, Homo sapiens
tgtgcccaccgggac

SEQ ID NO: 1859634 - DNA, 15 bp, Homo sapiens
gtgcccaccgggaca

SEQ ID NO: 1859635 - DNA, 15 bp, Homo sapiens
tgcccaccgggacac

SEQ ID NO: 1859636 - DNA, 15 bp, Homo sapiens
gcccaccgggacacc

SEQ ID NO: 1859637 - DNA, 15 bp, Homo sapiens
cccaccgggacacct

SEQ ID NO: 1859638 - DNA, 15 bp, Homo sapiens
ccaccgggacacctt

SEQ ID NO: 1859639 - DNA, 15 bp, Homo sapiens
caccgggacaccttg

SEQ ID NO: 1859640 - DNA, 15 bp, Homo sapiens
accgggacaccttga

SEQ ID NO: 1859641 - DNA, 15 bp, Homo sapiens
ccgggacaccttgac

SEQ ID NO: 1859642 - DNA, 15 bp, Homo sapiens
cgggacaccttgacc

SEQ ID NO: 1859643 - DNA, 15 bp, Homo sapiens
gggacaccttgacct

SEQ ID NO: 1859644 - DNA, 15 bp, Homo sapiens
ggacaccttgaccta

SEQ ID NO: 1859645 - DNA, 15 bp, Homo sapiens
gacaccttgacctag

SEQ ID NO: 1859646 - DNA, 15 bp, Homo sapiens
acaccttgacctagt

SEQ ID NO: 1859647 - DNA, 15 bp, Homo sapiens
caccttgacctagta

SEQ ID NO: 1859648 - DNA, 15 bp, Homo sapiens
accttgacctagtac

SEQ ID NO: 1859649 - DNA, 15 bp, Homo sapiens
ccttgacctagtact

SEQ ID NO: 1859650 - DNA, 15 bp, Homo sapiens
cttgacctagtactt

SEQ ID NO: 1859651 - DNA, 15 bp, Homo sapiens
ttgacctagtacttc

SEQ ID NO: 1859652 - DNA, 15 bp, Homo sapiens
tgacctagtacttct

SEQ ID NO: 1859653 - DNA, 15 bp, Homo sapiens
gacctagtacttctg

SEQ ID NO: 1859654 - DNA, 15 bp, Homo sapiens
acctagtacttctga

SEQ ID NO: 1859655 - DNA, 15 bp, Homo sapiens
cctagtacttctgag

SEQ ID NO: 1859656 - DNA, 15 bp, Homo sapiens
ctagtacttctgaga

SEQ ID NO: 1859657 - DNA, 15 bp, Homo sapiens
tagtacttctgagag

SEQ ID NO: 1859658 - DNA, 15 bp, Homo sapiens
agtacttctgagagc

SEQ ID NO: 1859659 - DNA, 15 bp, Homo sapiens
gtacttctgagagcc

SEQ ID NO: 1859660 - DNA, 15 bp, Homo sapiens
tacttctgagagccc

SEQ ID NO: 1859661 - DNA, 15 bp, Homo sapiens
acttctgagagcccc

SEQ ID NO: 1859662 - DNA, 15 bp, Homo sapiens
cttctgagagcccca

SEQ ID NO: 1859663 - DNA, 15 bp, Homo sapiens
ttctgagagccccag

SEQ ID NO: 1859664 - DNA, 15 bp, Homo sapiens
tctgagagccccagg

SEQ ID NO: 1859665 - DNA, 15 bp, Homo sapiens
ctgagagccccaggg

SEQ ID NO: 1859666 - DNA, 15 bp, Homo sapiens
tgagagccccagggt

SEQ ID NO: 1859667 - DNA, 15 bp, Homo sapiens
gagagccccagggtc

SEQ ID NO: 1859668 - DNA, 15 bp, Homo sapiens
agagccccagggtca

SEQ ID NO: 1859669 - DNA, 15 bp, Homo sapiens
gagccccagggtcac

SEQ ID NO: 1859670 - DNA, 15 bp, Homo sapiens
agccccagggtcact

SEQ ID NO: 1859671 - DNA, 15 bp, Homo sapiens
gccccagggtcacta

SEQ ID NO: 1859672 - DNA, 15 bp, Homo sapiens
ccccagggtcactat

SEQ ID NO: 1859673 - DNA, 15 bp, Homo sapiens
cccagggtcactatt

SEQ ID NO: 1859674 - DNA, 15 bp, Homo sapiens
ccagggtcactattc

SEQ ID NO: 1859675 - DNA, 15 bp, Homo sapiens
cagggtcactattca

SEQ ID NO: 1859676 - DNA, 15 bp, Homo sapiens
agggtcactattcag

SEQ ID NO: 1859677 - DNA, 15 bp, Homo sapiens
gggtcactattcaga

SEQ ID NO: 1859678 - DNA, 15 bp, Homo sapiens
ggtcactattcagag

SEQ ID NO: 1859679 - DNA, 15 bp, Homo sapiens
gtcactattcagagg

SEQ ID NO: 1859680 - DNA, 15 bp, Homo sapiens
tcactattcagaggc

SEQ ID NO: 1859681 - DNA, 15 bp, Homo sapiens
cactattcagaggct

SEQ ID NO: 1859682 - DNA, 15 bp, Homo sapiens
actattcagaggctc

SEQ ID NO: 1859683 - DNA, 15 bp, Homo sapiens
ctattcagaggctcc

SEQ ID NO: 1859684 - DNA, 15 bp, Homo sapiens
tattcagaggctccc

SEQ ID NO: 1859685 - DNA, 15 bp, Homo sapiens
attcagaggctccca

SEQ ID NO: 1859686 - DNA, 15 bp, Homo sapiens
ttcagaggctcccag

SEQ ID NO: 1859687 - DNA, 15 bp, Homo sapiens
tcagaggctcccaga

SEQ ID NO: 1859688 - DNA, 15 bp, Homo sapiens
cagaggctcccagag

SEQ ID NO: 1859689 - DNA, 15 bp, Homo sapiens
agaggctcccagagc

SEQ ID NO: 1859690 - DNA, 15 bp, Homo sapiens
gaggctcccagagct

SEQ ID NO: 1859691 - DNA, 15 bp, Homo sapiens
ctcccagagctgcca

SEQ ID NO: 1859692 - DNA, 15 bp, Homo sapiens
tcccagagctgccag

SEQ ID NO: 1859693 - DNA, 15 bp, Homo sapiens
cccagagctgccagt

SEQ ID NO: 1859694 - DNA, 15 bp, Homo sapiens
ccagagctgccagta

SEQ ID NO: 1859695 - DNA, 15 bp, Homo sapiens
cagagctgccagtac

SEQ ID NO: 1859696 - DNA, 15 bp, Homo sapiens
agagctgccagtacc

SEQ ID NO: 1859697 - DNA, 15 bp, Homo sapiens
gagctgccagtaccc

SEQ ID NO: 1859698 - DNA, 15 bp, Homo sapiens
agctgccagtacccc

SEQ ID NO: 1859699 - DNA, 15 bp, Homo sapiens
gctgccagtacccca

SEQ ID NO: 1859700 - DNA, 15 bp, Homo sapiens
ctgccagtaccccag

SEQ ID NO: 1859701 - DNA, 15 bp, Homo sapiens
tgccagtaccccaga

SEQ ID NO: 1859702 - DNA, 15 bp, Homo sapiens
gccagtaccccagat

SEQ ID NO: 1859703 - DNA, 15 bp, Homo sapiens
ccagtaccccagatc

SEQ ID NO: 1859704 - DNA, 15 bp, Homo sapiens
cagtaccccagatca

SEQ ID NO: 1859705 - DNA, 15 bp, Homo sapiens
agtaccccagatcat

SEQ ID NO: 1859706 - DNA, 15 bp, Homo sapiens
gtaccccagatcatt

SEQ ID NO: 1859707 - DNA, 15 bp, Homo sapiens
taccccagatcattg

SEQ ID NO: 1859708 - DNA, 15 bp, Homo sapiens
accccagatcattgc

SEQ ID NO: 1859709 - DNA, 15 bp, Homo sapiens
ccccagatcattgcg

SEQ ID NO: 1859710 - DNA, 15 bp, Homo sapiens
cccagatcattgcgg

SEQ ID NO: 1859711 - DNA, 15 bp, Homo sapiens
ccagatcattgcggc

SEQ ID NO: 1859712 - DNA, 15 bp, Homo sapiens
cagatcattgcggct

SEQ ID NO: 1859713 - DNA, 15 bp, Homo sapiens
agatcattgcggctc

SEQ ID NO: 1859714 - DNA, 15 bp, Homo sapiens
gatcattgcggctcc

SEQ ID NO: 1859715 - DNA, 15 bp, Homo sapiens
atcattgcggctccc

SEQ ID NO: 1859716 - DNA, 15 bp, Homo sapiens
tcattgcggctccct

SEQ ID NO: 1859717 - DNA, 15 bp, Homo sapiens
cattgcggctccctc

SEQ ID NO: 1859718 - DNA, 15 bp, Homo sapiens
attgcggctccctca

SEQ ID NO: 1859719 - DNA, 15 bp, Homo sapiens
ttgcggctccctcat

SEQ ID NO: 1859720 - DNA, 15 bp, Homo sapiens
tgcggctccctcatc

SEQ ID NO: 1859721 - DNA, 15 bp, Homo sapiens
gcggctccctcatcc

SEQ ID NO: 1859722 - DNA, 15 bp, Homo sapiens
cggctccctcatcct

SEQ ID NO: 1859723 - DNA, 15 bp, Homo sapiens
ggctccctcatcctg

SEQ ID NO: 1859724 - DNA, 15 bp, Homo sapiens
gctccctcatcctgg

SEQ ID NO: 1859725 - DNA, 15 bp, Homo sapiens
ctccctcatcctggc

SEQ ID NO: 1859726 - DNA, 15 bp, Homo sapiens
tccctcatcctggca

SEQ ID NO: 1859727 - DNA, 15 bp, Homo sapiens
ccctcatcctggcag

SEQ ID NO: 1859728 - DNA, 15 bp, Homo sapiens
cctcatcctggcagt

SEQ ID NO: 1859729 - DNA, 15 bp, Homo sapiens
ctcatcctggcagtg

SEQ ID NO: 1859730 - DNA, 15 bp, Homo sapiens
tcatcctggcagtga

SEQ ID NO: 1859731 - DNA, 15 bp, Homo sapiens
catcctggcagtgag

SEQ ID NO: 1859732 - DNA, 15 bp, Homo sapiens
atcctggcagtgagg

SEQ ID NO: 1859733 - DNA, 15 bp, Homo sapiens
tcctggcagtgagga

SEQ ID NO: 1859734 - DNA, 15 bp, Homo sapiens
cctggcagtgaggag

SEQ ID NO: 1859735 - DNA, 15 bp, Homo sapiens
ctggcagtgaggagg

SEQ ID NO: 1859736 - DNA, 15 bp, Homo sapiens
tggcagtgaggaggc

SEQ ID NO: 1859737 - DNA, 15 bp, Homo sapiens
ggcagtgaggaggct

SEQ ID NO: 1859738 - DNA, 15 bp, Homo sapiens
gcagtgaggaggctc

SEQ ID NO: 1859739 - DNA, 15 bp, Homo sapiens
cagtgaggaggctca

SEQ ID NO: 1859740 - DNA, 15 bp, Homo sapiens
agtgaggaggctcag

SEQ ID NO: 1859741 - DNA, 15 bp, Homo sapiens
gtgaggaggctcagg

SEQ ID NO: 1859742 - DNA, 15 bp, Homo sapiens
tgaggaggctcaggc

SEQ ID NO: 1859743 - DNA, 15 bp, Homo sapiens
gaggaggctcaggcc

SEQ ID NO: 1859744 - DNA, 15 bp, Homo sapiens
aggaggctcaggcct

SEQ ID NO: 1859745 - DNA, 15 bp, Homo sapiens
ggaggctcaggcctc

SEQ ID NO: 1859746 - DNA, 15 bp, Homo sapiens
gaggctcaggcctcc

SEQ ID NO: 1859747 - DNA, 15 bp, Homo sapiens
aggctcaggcctccg

SEQ ID NO: 1859748 - DNA, 15 bp, Homo sapiens
ggctcaggcctccgt

SEQ ID NO: 1859749 - DNA, 15 bp, Homo sapiens
gctcaggcctccgtg

SEQ ID NO: 1859750 - DNA, 15 bp, Homo sapiens
ctcaggcctccgtgc

SEQ ID NO: 1859751 - DNA, 15 bp, Homo sapiens
tcaggcctccgtgct

SEQ ID NO: 1859752 - DNA, 15 bp, Homo sapiens
caggcctccgtgcta

SEQ ID NO: 1859753 - DNA, 15 bp, Homo sapiens
aggcctccgtgctag

SEQ ID NO: 1859754 - DNA, 15 bp, Homo sapiens
ggcctccgtgctagt

SEQ ID NO: 1859755 - DNA, 15 bp, Homo sapiens
gcctccgtgctagtg

SEQ ID NO: 1859756 - DNA, 15 bp, Homo sapiens
cctccgtgctagtgc

SEQ ID NO: 1859757 - DNA, 15 bp, Homo sapiens
ctccgtgctagtgcc

SEQ ID NO: 1859758 - DNA, 15 bp, Homo sapiens
tccgtgctagtgccc

SEQ ID NO: 1859759 - DNA, 15 bp, Homo sapiens
ccgtgctagtgcccc

SEQ ID NO: 1859760 - DNA, 15 bp, Homo sapiens
cgtgctagtgcccca

SEQ ID NO: 1859761 - DNA, 15 bp, Homo sapiens
gtgctagtgccccac

SEQ ID NO: 1859762 - DNA, 15 bp, Homo sapiens
tgctagtgccccact

SEQ ID NO: 1859763 - DNA, 15 bp, Homo sapiens
gctagtgccccactc

SEQ ID NO: 1859764 - DNA, 15 bp, Homo sapiens
ctagtgccccactcc

SEQ ID NO: 1859765 - DNA, 15 bp, Homo sapiens
tagtgccccactcct

SEQ ID NO: 1859766 - DNA, 15 bp, Homo sapiens
agtgccccactcctt

SEQ ID NO: 1859767 - DNA, 15 bp, Homo sapiens
gtgccccactccttg

SEQ ID NO: 1859768 - DNA, 15 bp, Homo sapiens
tgccccactccttga

SEQ ID NO: 1859769 - DNA, 15 bp, Homo sapiens
gccccactccttgat

SEQ ID NO: 1859770 - DNA, 15 bp, Homo sapiens
ccccactccttgatt

SEQ ID NO: 1859771 - DNA, 15 bp, Homo sapiens
cccactccttgattc

SEQ ID NO: 1859772 - DNA, 15 bp, Homo sapiens
ccactccttgattct

SEQ ID NO: 1859773 - DNA, 15 bp, Homo sapiens
cactccttgattcta

SEQ ID NO: 1859774 - DNA, 15 bp, Homo sapiens
actccttgattctac

SEQ ID NO: 1859775 - DNA, 15 bp, Homo sapiens
ctccttgattctacc

SEQ ID NO: 1859776 - DNA, 15 bp, Homo sapiens
tccttgattctaccc

SEQ ID NO: 1859777 - DNA, 15 bp, Homo sapiens
ccttgattctacccg

SEQ ID NO: 1859778 - DNA, 15 bp, Homo sapiens
cttgattctacccgt

SEQ ID NO: 1859779 - DNA, 15 bp, Homo sapiens
ttgattctacccgtc

SEQ ID NO: 1859780 - DNA, 15 bp, Homo sapiens
tgattctacccgtcc

SEQ ID NO: 1859781 - DNA, 15 bp, Homo sapiens
gattctacccgtccc

SEQ ID NO: 1859782 - DNA, 15 bp, Homo sapiens
attctacccgtccct

SEQ ID NO: 1859783 - DNA, 15 bp, Homo sapiens
ttctacccgtccctc

SEQ ID NO: 1859784 - DNA, 15 bp, Homo sapiens
tctacccgtccctcc

SEQ ID NO: 1859785 - DNA, 15 bp, Homo sapiens
ctacccgtccctccc

SEQ ID NO: 1859786 - DNA, 15 bp, Homo sapiens
tacccgtccctccct

SEQ ID NO: 1859787 - DNA, 15 bp, Homo sapiens
acccgtccctccctc

SEQ ID NO: 1859788 - DNA, 15 bp, Homo sapiens
cccgtccctccctcc

SEQ ID NO: 1859789 - DNA, 15 bp, Homo sapiens
ccgtccctccctccc

SEQ ID NO: 1859790 - DNA, 15 bp, Homo sapiens
cgtccctccctccct

SEQ ID NO: 1859791 - DNA, 15 bp, Homo sapiens
gtccctccctccctg

SEQ ID NO: 1859792 - DNA, 15 bp, Homo sapiens
ccctccctccctgtg

SEQ ID NO: 1859793 - DNA, 15 bp, Homo sapiens
cctccctccctgtgg

SEQ ID NO: 1859794 - DNA, 15 bp, Homo sapiens
ctttggtgtctttat

SEQ ID NO: 1859795 - DNA, 15 bp, Homo sapiens
tttggtgtctttatc

SEQ ID NO: 1859796 - DNA, 15 bp, Homo sapiens
ttggtgtctttatca

SEQ ID NO: 1859797 - DNA, 15 bp, Homo sapiens
tggtgtctttatcaa

SEQ ID NO: 1859798 - DNA, 15 bp, Homo sapiens
ggtgtctttatcaaa

SEQ ID NO: 1859799 - DNA, 15 bp, Homo sapiens
gtgtctttatcaaag

SEQ ID NO: 1859800 - DNA, 15 bp, Homo sapiens
tgtctttatcaaagg

SEQ ID NO: 1859801 - DNA, 15 bp, Homo sapiens
gtctttatcaaaggc

SEQ ID NO: 1859802 - DNA, 15 bp, Homo sapiens
tctttatcaaaggct

SEQ ID NO: 1859803 - DNA, 15 bp, Homo sapiens
ctttatcaaaggctg

SEQ ID NO: 1859804 - DNA, 15 bp, Homo sapiens
tttatcaaaggctgg

SEQ ID NO: 1859805 - DNA, 15 bp, Homo sapiens
ttatcaaaggctggc

SEQ ID NO: 1859806 - DNA, 15 bp, Homo sapiens
tatcaaaggctggca

SEQ ID NO: 1859807 - DNA, 15 bp, Homo sapiens
atcaaaggctggcac

SEQ ID NO: 1859808 - DNA, 15 bp, Homo sapiens
tcaaaggctggcacc

SEQ ID NO: 1859809 - DNA, 15 bp, Homo sapiens
caaaggctggcacct

SEQ ID NO: 1859810 - DNA, 15 bp, Homo sapiens
aaaggctggcacctt

SEQ ID NO: 1859811 - DNA, 15 bp, Homo sapiens
aaggctggcaccttt

SEQ ID NO: 1859812 - DNA, 15 bp, Homo sapiens
aggctggcacctttt

SEQ ID NO: 1859813 - DNA, 15 bp, Homo sapiens
ggctggcacctttta

SEQ ID NO: 1859814 - DNA, 15 bp, Homo sapiens
gctggcaccttttag

SEQ ID NO: 1859815 - DNA, 15 bp, Homo sapiens
ctggcaccttttagg

SEQ ID NO: 1859816 - DNA, 15 bp, Homo sapiens
tggcaccttttaggc

SEQ ID NO: 1859817 - DNA, 15 bp, Homo sapiens
ggcaccttttaggcc

SEQ ID NO: 1859818 - DNA, 15 bp, Homo sapiens
gcaccttttaggccc

SEQ ID NO: 1859819 - DNA, 15 bp, Homo sapiens
caccttttaggccct

SEQ ID NO: 1859820 - DNA, 15 bp, Homo sapiens
accttttaggcccta

SEQ ID NO: 1859821 - DNA, 15 bp, Homo sapiens
ccttttaggccctaa

SEQ ID NO: 1859822 - DNA, 15 bp, Homo sapiens
cttttaggccctaat

SEQ ID NO: 1859823 - DNA, 15 bp, Homo sapiens
ttttaggccctaata

SEQ ID NO: 1859824 - DNA, 15 bp, Homo sapiens
tttaggccctaatat

SEQ ID NO: 1859825 - DNA, 15 bp, Homo sapiens
ttaggccctaatatg

SEQ ID NO: 1859826 - DNA, 15 bp, Homo sapiens
taggccctaatatga

SEQ ID NO: 1859827 - DNA, 15 bp, Homo sapiens
aggccctaatatgac

SEQ ID NO: 1859828 - DNA, 15 bp, Homo sapiens
ggccctaatatgact

SEQ ID NO: 1859829 - DNA, 15 bp, Homo sapiens
gccctaatatgactg

SEQ ID NO: 1859830 - DNA, 15 bp, Homo sapiens
ccctaatatgactga

SEQ ID NO: 1859831 - DNA, 15 bp, Homo sapiens
cctaatatgactgaa

SEQ ID NO: 1859832 - DNA, 15 bp, Homo sapiens
ctaatatgactgaag

SEQ ID NO: 1859833 - DNA, 15 bp, Homo sapiens
taatatgactgaagg

SEQ ID NO: 1859834 - DNA, 15 bp, Homo sapiens
aatatgactgaagga

SEQ ID NO: 1859835 - DNA, 15 bp, Homo sapiens
atatgactgaaggag

SEQ ID NO: 1859836 - DNA, 15 bp, Homo sapiens
tatgactgaaggagc

SEQ ID NO: 1859837 - DNA, 15 bp, Homo sapiens
atgactgaaggagct

SEQ ID NO: 1859838 - DNA, 15 bp, Homo sapiens
tgactgaaggagctc

SEQ ID NO: 1859839 - DNA, 15 bp, Homo sapiens
gactgaaggagctcc

SEQ ID NO: 1859840 - DNA, 15 bp, Homo sapiens
actgaaggagctcct

SEQ ID NO: 1859841 - DNA, 15 bp, Homo sapiens
ctgaaggagctcctg

SEQ ID NO: 1859842 - DNA, 15 bp, Homo sapiens
tgaaggagctcctgg

SEQ ID NO: 1859843 - DNA, 15 bp, Homo sapiens
gaaggagctcctggg

SEQ ID NO: 1859844 - DNA, 15 bp, Homo sapiens
aaggagctcctgggg

SEQ ID NO: 1859845 - DNA, 15 bp, Homo sapiens
aggagctcctggggc

SEQ ID NO: 1859846 - DNA, 15 bp, Homo sapiens
ggagctcctggggct

SEQ ID NO: 1859847 - DNA, 15 bp, Homo sapiens
gagctcctggggcta

SEQ ID NO: 1859848 - DNA, 15 bp, Homo sapiens
agctcctggggctag

SEQ ID NO: 1859849 - DNA, 15 bp, Homo sapiens
gctcctggggctaga

SEQ ID NO: 1859850 - DNA, 15 bp, Homo sapiens
ctcctggggctagat

SEQ ID NO: 1859851 - DNA, 15 bp, Homo sapiens
tcctggggctagatg

SEQ ID NO: 1859852 - DNA, 15 bp, Homo sapiens
cctggggctagatgc

SEQ ID NO: 1859853 - DNA, 15 bp, Homo sapiens
ctggggctagatgct

SEQ ID NO: 1859854 - DNA, 15 bp, Homo sapiens
tggggctagatgctt

SEQ ID NO: 1859855 - DNA, 15 bp, Homo sapiens
ggggctagatgcttc

SEQ ID NO: 1859856 - DNA, 15 bp, Homo sapiens
gggctagatgcttcc

SEQ ID NO: 1859857 - DNA, 15 bp, Homo sapiens
ggctagatgcttcct

SEQ ID NO: 1859858 - DNA, 15 bp, Homo sapiens
gctagatgcttcctt

SEQ ID NO: 1859859 - DNA, 15 bp, Homo sapiens
ctagatgcttccttc

SEQ ID NO: 1859860 - DNA, 15 bp, Homo sapiens
tagatgcttccttca

SEQ ID NO: 1859861 - DNA, 15 bp, Homo sapiens
agatgcttccttcat

SEQ ID NO: 1859862 - DNA, 15 bp, Homo sapiens
gatgcttccttcatc

SEQ ID NO: 1859863 - DNA, 15 bp, Homo sapiens
atgcttccttcatca

SEQ ID NO: 1859864 - DNA, 15 bp, Homo sapiens
tgcttccttcatcat

SEQ ID NO: 1859865 - DNA, 15 bp, Homo sapiens
gcttccttcatcatg

SEQ ID NO: 1859866 - DNA, 15 bp, Homo sapiens
cttccttcatcatgc

SEQ ID NO: 1859867 - DNA, 15 bp, Homo sapiens
ttccttcatcatgcc

SEQ ID NO: 1859868 - DNA, 15 bp, Homo sapiens
tccttcatcatgccc

SEQ ID NO: 1859869 - DNA, 15 bp, Homo sapiens
ccttcatcatgccca

SEQ ID NO: 1859870 - DNA, 15 bp, Homo sapiens
cttcatcatgcccaa

SEQ ID NO: 1859871 - DNA, 15 bp, Homo sapiens
ttcatcatgcccaac

SEQ ID NO: 1859872 - DNA, 15 bp, Homo sapiens
tcatcatgcccaaca

SEQ ID NO: 1859873 - DNA, 15 bp, Homo sapiens
catcatgcccaacag

SEQ ID NO: 1859874 - DNA, 15 bp, Homo sapiens
atcatgcccaacagg

SEQ ID NO: 1859875 - DNA, 15 bp, Homo sapiens
tcatgcccaacagga

SEQ ID NO: 1859876 - DNA, 15 bp, Homo sapiens
catgcccaacaggaa

SEQ ID NO: 1859877 - DNA, 15 bp, Homo sapiens
atgcccaacaggaag

SEQ ID NO: 1859878 - DNA, 15 bp, Homo sapiens
tgcccaacaggaagg

SEQ ID NO: 1859879 - DNA, 15 bp, Homo sapiens
gcccaacaggaagga

SEQ ID NO: 1859880 - DNA, 15 bp, Homo sapiens
cccaacaggaaggaa

SEQ ID NO: 1859881 - DNA, 15 bp, Homo sapiens
ccaacaggaaggaaa

SEQ ID NO: 1859882 - DNA, 15 bp, Homo sapiens
caacaggaaggaaat

SEQ ID NO: 1859883 - DNA, 15 bp, Homo sapiens
aacaggaaggaaatg

SEQ ID NO: 1859884 - DNA, 15 bp, Homo sapiens
acaggaaggaaatgg

SEQ ID NO: 1859885 - DNA, 15 bp, Homo sapiens
caggaaggaaatggc

SEQ ID NO: 1859886 - DNA, 15 bp, Homo sapiens
aggaaggaaatggca

SEQ ID NO: 1859887 - DNA, 15 bp, Homo sapiens
ggaaggaaatggcat

SEQ ID NO: 1859888 - DNA, 15 bp, Homo sapiens
gaaggaaatggcatc

SEQ ID NO: 1859889 - DNA, 15 bp, Homo sapiens
aaggaaatggcatcg

SEQ ID NO: 1859890 - DNA, 15 bp, Homo sapiens
aggaaatggcatcgt

SEQ ID NO: 1859891 - DNA, 15 bp, Homo sapiens
ggaaatggcatcgtt

SEQ ID NO: 1859892 - DNA, 15 bp, Homo sapiens
gaaatggcatcgttt

SEQ ID NO: 1859893 - DNA, 15 bp, Homo sapiens
aaatggcatcgtttc

SEQ ID NO: 1859894 - DNA, 15 bp, Homo sapiens
aatggcatcgtttcc

SEQ ID NO: 1859895 - DNA, 15 bp, Homo sapiens
atggcatcgtttcca

SEQ ID NO: 1859896 - DNA, 15 bp, Homo sapiens
tggcatcgtttccag

SEQ ID NO: 1859897 - DNA, 15 bp, Homo sapiens
ggcatcgtttccagg

SEQ ID NO: 1859898 - DNA, 15 bp, Homo sapiens
gcatcgtttccaggc

SEQ ID NO: 1859899 - DNA, 15 bp, Homo sapiens
catcgtttccaggca

SEQ ID NO: 1859900 - DNA, 15 bp, Homo sapiens
atcgtttccaggcac

SEQ ID NO: 1859901 - DNA, 15 bp, Homo sapiens
tcgtttccaggcact

SEQ ID NO: 1859902 - DNA, 15 bp, Homo sapiens
cgtttccaggcactt

SEQ ID NO: 1859903 - DNA, 15 bp, Homo sapiens
gtttccaggcacttt

SEQ ID NO: 1859904 - DNA, 15 bp, Homo sapiens
tttccaggcactttc

SEQ ID NO: 1859905 - DNA, 15 bp, Homo sapiens
ttccaggcactttca

SEQ ID NO: 1859906 - DNA, 15 bp, Homo sapiens
tccaggcactttcag

SEQ ID NO: 1859907 - DNA, 15 bp, Homo sapiens
ccaggcactttcagc

SEQ ID NO: 1859908 - DNA, 15 bp, Homo sapiens
caggcactttcagca

SEQ ID NO: 1859909 - DNA, 15 bp, Homo sapiens
aggcactttcagcaa

SEQ ID NO: 1859910 - DNA, 15 bp, Homo sapiens
ggcactttcagcaag

SEQ ID NO: 1859911 - DNA, 15 bp, Homo sapiens
gcactttcagcaaga

SEQ ID NO: 1859912 - DNA, 15 bp, Homo sapiens
cactttcagcaagac

SEQ ID NO: 1859913 - DNA, 15 bp, Homo sapiens
actttcagcaagacc

SEQ ID NO: 1859914 - DNA, 15 bp, Homo sapiens
ctttcagcaagacct

SEQ ID NO: 1859915 - DNA, 15 bp, Homo sapiens
tttcagcaagacctg

SEQ ID NO: 1859916 - DNA, 15 bp, Homo sapiens
ttcagcaagacctga

SEQ ID NO: 1859917 - DNA, 15 bp, Homo sapiens
tcagcaagacctgag

SEQ ID NO: 1859918 - DNA, 15 bp, Homo sapiens
cagcaagacctgaga

SEQ ID NO: 1859919 - DNA, 15 bp, Homo sapiens
agcaagacctgagag

SEQ ID NO: 1859920 - DNA, 15 bp, Homo sapiens
gcaagacctgagagt

SEQ ID NO: 1859921 - DNA, 15 bp, Homo sapiens
caagacctgagagtc

SEQ ID NO: 1859922 - DNA, 15 bp, Homo sapiens
aagacctgagagtca

SEQ ID NO: 1859923 - DNA, 15 bp, Homo sapiens
agacctgagagtcac

SEQ ID NO: 1859924 - DNA, 15 bp, Homo sapiens
gacctgagagtcact

SEQ ID NO: 1859925 - DNA, 15 bp, Homo sapiens
acctgagagtcactc

SEQ ID NO: 1859926 - DNA, 15 bp, Homo sapiens
cctgagagtcactct

SEQ ID NO: 1859927 - DNA, 15 bp, Homo sapiens
ctgagagtcactctg

SEQ ID NO: 1859928 - DNA, 15 bp, Homo sapiens
tgagagtcactctga

SEQ ID NO: 1859929 - DNA, 15 bp, Homo sapiens
gagagtcactctgat

SEQ ID NO: 1859930 - DNA, 15 bp, Homo sapiens
agagtcactctgatt

SEQ ID NO: 1859931 - DNA, 15 bp, Homo sapiens
gagtcactctgattg

SEQ ID NO: 1859932 - DNA, 15 bp, Homo sapiens
agtcactctgattgg

SEQ ID NO: 1859933 - DNA, 15 bp, Homo sapiens
gtcactctgattgga

SEQ ID NO: 1859934 - DNA, 15 bp, Homo sapiens
tcactctgattggac

SEQ ID NO: 1859935 - DNA, 15 bp, Homo sapiens
cactctgattggact

SEQ ID NO: 1859936 - DNA, 15 bp, Homo sapiens
actctgattggactg

SEQ ID NO: 1859937 - DNA, 15 bp, Homo sapiens
ctctgattggactgg

SEQ ID NO: 1859938 - DNA, 15 bp, Homo sapiens
tctgattggactggc

SEQ ID NO: 1859939 - DNA, 15 bp, Homo sapiens
ctgattggactggct

SEQ ID NO: 1859940 - DNA, 15 bp, Homo sapiens
tgattggactggctt

SEQ ID NO: 1859941 - DNA, 15 bp, Homo sapiens
gattggactggctta

SEQ ID NO: 1859942 - DNA, 15 bp, Homo sapiens
attggactggcttag

SEQ ID NO: 1859943 - DNA, 15 bp, Homo sapiens
ttggactggcttagg

SEQ ID NO: 1859944 - DNA, 15 bp, Homo sapiens
tggactggcttaggt

SEQ ID NO: 1859945 - DNA, 15 bp, Homo sapiens
ggactggcttaggtc

SEQ ID NO: 1859946 - DNA, 15 bp, Homo sapiens
gactggcttaggtca

SEQ ID NO: 1859947 - DNA, 15 bp, Homo sapiens
actggcttaggtcac

SEQ ID NO: 1859948 - DNA, 15 bp, Homo sapiens
ctggcttaggtcaca

SEQ ID NO: 1859949 - DNA, 15 bp, Homo sapiens
tggcttaggtcacat

SEQ ID NO: 1859950 - DNA, 15 bp, Homo sapiens
ggcttaggtcacatg

SEQ ID NO: 1859951 - DNA, 15 bp, Homo sapiens
gcttaggtcacatgc

SEQ ID NO: 1859952 - DNA, 15 bp, Homo sapiens
cttaggtcacatgcc

SEQ ID NO: 1859953 - DNA, 15 bp, Homo sapiens
ttaggtcacatgccc

SEQ ID NO: 1859954 - DNA, 15 bp, Homo sapiens
taggtcacatgccca

SEQ ID NO: 1859955 - DNA, 15 bp, Homo sapiens
aggtcacatgcccat

SEQ ID NO: 1859956 - DNA, 15 bp, Homo sapiens
ggtcacatgcccatc

SEQ ID NO: 1859957 - DNA, 15 bp, Homo sapiens
gtcacatgcccatcc

SEQ ID NO: 1859958 - DNA, 15 bp, Homo sapiens
tcacatgcccatccc

SEQ ID NO: 1859959 - DNA, 15 bp, Homo sapiens
cacatgcccatccct

SEQ ID NO: 1859960 - DNA, 15 bp, Homo sapiens
acatgcccatccctg

SEQ ID NO: 1859961 - DNA, 15 bp, Homo sapiens
catgcccatccctga

SEQ ID NO: 1859962 - DNA, 15 bp, Homo sapiens
atgcccatccctgaa

SEQ ID NO: 1859963 - DNA, 15 bp, Homo sapiens
tgcccatccctgaac

SEQ ID NO: 1859964 - DNA, 15 bp, Homo sapiens
gcccatccctgaacc

SEQ ID NO: 1859965 - DNA, 15 bp, Homo sapiens
cccatccctgaaccc

SEQ ID NO: 1859966 - DNA, 15 bp, Homo sapiens
ccatccctgaaccca

SEQ ID NO: 1859967 - DNA, 15 bp, Homo sapiens
catccctgaacccat

SEQ ID NO: 1859968 - DNA, 15 bp, Homo sapiens
atccctgaacccatc

SEQ ID NO: 1859969 - DNA, 15 bp, Homo sapiens
tccctgaacccatca

SEQ ID NO: 1859970 - DNA, 15 bp, Homo sapiens
ccctgaacccatcac

SEQ ID NO: 1859971 - DNA, 15 bp, Homo sapiens
cctgaacccatcact

SEQ ID NO: 1859972 - DNA, 15 bp, Homo sapiens
ctgaacccatcactg

SEQ ID NO: 1859973 - DNA, 15 bp, Homo sapiens
tgaacccatcactgc

SEQ ID NO: 1859974 - DNA, 15 bp, Homo sapiens
gaacccatcactgct

SEQ ID NO: 1859975 - DNA, 15 bp, Homo sapiens
aacccatcactgctg

SEQ ID NO: 1859976 - DNA, 15 bp, Homo sapiens
acccatcactgctgc

SEQ ID NO: 1859977 - DNA, 15 bp, Homo sapiens
cccatcactgctgcc

SEQ ID NO: 1859978 - DNA, 15 bp, Homo sapiens
ccatcactgctgcca

SEQ ID NO: 1859979 - DNA, 15 bp, Homo sapiens
catcactgctgccac

SEQ ID NO: 1859980 - DNA, 15 bp, Homo sapiens
atcactgctgccacg

SEQ ID NO: 1859981 - DNA, 15 bp, Homo sapiens
tcactgctgccacgg

SEQ ID NO: 1859982 - DNA, 15 bp, Homo sapiens
cactgctgccacgga

SEQ ID NO: 1859983 - DNA, 15 bp, Homo sapiens
actgctgccacggaa

SEQ ID NO: 1859984 - DNA, 15 bp, Homo sapiens
ctgctgccacggaac

SEQ ID NO: 1859985 - DNA, 15 bp, Homo sapiens
tgctgccacggaaca

SEQ ID NO: 1859986 - DNA, 15 bp, Homo sapiens
gctgccacggaacag

SEQ ID NO: 1859987 - DNA, 15 bp, Homo sapiens
ctgccacggaacaga

SEQ ID NO: 1859988 - DNA, 15 bp, Homo sapiens
tgccacggaacagag

SEQ ID NO: 1859989 - DNA, 15 bp, Homo sapiens
gccacggaacagaga

SEQ ID NO: 1859990 - DNA, 15 bp, Homo sapiens
ccacggaacagagaa

SEQ ID NO: 1859991 - DNA, 15 bp, Homo sapiens
cacggaacagagaac

SEQ ID NO: 1859992 - DNA, 15 bp, Homo sapiens
acggaacagagaaca

SEQ ID NO: 1859993 - DNA, 15 bp, Homo sapiens
cggaacagagaacat

SEQ ID NO: 1859994 - DNA, 15 bp, Homo sapiens
ggaacagagaacatt

SEQ ID NO: 1859995 - DNA, 15 bp, Homo sapiens
gaacagagaacattg

SEQ ID NO: 1859996 - DNA, 15 bp, Homo sapiens
aacagagaacattga

SEQ ID NO: 1859997 - DNA, 15 bp, Homo sapiens
acagagaacattgat

SEQ ID NO: 1859998 - DNA, 15 bp, Homo sapiens
cagagaacattgata

SEQ ID NO: 1859999 - DNA, 15 bp, Homo sapiens
agagaacattgataa

SEQ ID NO: 1860000 - DNA, 15 bp, Homo sapiens
gagaacattgataaa

SEQ ID NO: 1860001 - DNA, 15 bp, Homo sapiens
agaacattgataaag

SEQ ID NO: 1860002 - DNA, 15 bp, Homo sapiens
gaacattgataaagt

SEQ ID NO: 1860003 - DNA, 15 bp, Homo sapiens
aacattgataaagtt

SEQ ID NO: 1860004 - DNA, 15 bp, Homo sapiens
acattgataaagttg

SEQ ID NO: 1860005 - DNA, 15 bp, Homo sapiens
cattgataaagttga

SEQ ID NO: 1860006 - DNA, 15 bp, Homo sapiens
attgataaagttgat

SEQ ID NO: 1860007 - DNA, 15 bp, Homo sapiens
ttgataaagttgatt

SEQ ID NO: 1860008 - DNA, 15 bp, Homo sapiens
tgataaagttgattt

SEQ ID NO: 1860009 - DNA, 15 bp, Homo sapiens
gataaagttgatttc

SEQ ID NO: 1860010 - DNA, 15 bp, Homo sapiens
ataaagttgatttcc

SEQ ID NO: 1860011 - DNA, 15 bp, Homo sapiens
taaagttgatttccc

SEQ ID NO: 1860012 - DNA, 15 bp, Homo sapiens
aaagttgatttccct

SEQ ID NO: 1860013 - DNA, 15 bp, Homo sapiens
aagttgatttccctg

SEQ ID NO: 1860014 - DNA, 15 bp, Homo sapiens
agttgatttccctga

SEQ ID NO: 1860015 - DNA, 15 bp, Homo sapiens
gttgatttccctgaa

SEQ ID NO: 1860016 - DNA, 15 bp, Homo sapiens
ttgatttccctgaag

SEQ ID NO: 1860017 - DNA, 15 bp, Homo sapiens
tgatttccctgaagc

SEQ ID NO: 1860018 - DNA, 15 bp, Homo sapiens
gatttccctgaagcc

SEQ ID NO: 1860019 - DNA, 15 bp, Homo sapiens
atttccctgaagcca

SEQ ID NO: 1860020 - DNA, 15 bp, Homo sapiens
tttccctgaagccac

SEQ ID NO: 1860021 - DNA, 15 bp, Homo sapiens
ttccctgaagccaca

SEQ ID NO: 1860022 - DNA, 15 bp, Homo sapiens
tccctgaagccacat

SEQ ID NO: 1860023 - DNA, 15 bp, Homo sapiens
ccctgaagccacatg

SEQ ID NO: 1860024 - DNA, 15 bp, Homo sapiens
cctgaagccacatgg

SEQ ID NO: 1860025 - DNA, 15 bp, Homo sapiens
ctgaagccacatgga

SEQ ID NO: 1860026 - DNA, 15 bp, Homo sapiens
tgaagccacatggat

SEQ ID NO: 1860027 - DNA, 15 bp, Homo sapiens
gaagccacatggatc

SEQ ID NO: 1860028 - DNA, 15 bp, Homo sapiens
aagccacatggatcc

SEQ ID NO: 1860029 - DNA, 15 bp, Homo sapiens
agccacatggatccc

SEQ ID NO: 1860030 - DNA, 15 bp, Homo sapiens
gccacatggatcccc

SEQ ID NO: 1860031 - DNA, 15 bp, Homo sapiens
ccacatggatcccca

SEQ ID NO: 1860032 - DNA, 15 bp, Homo sapiens
cacatggatccccaa

SEQ ID NO: 1860033 - DNA, 15 bp, Homo sapiens
acatggatccccaaa

SEQ ID NO: 1860034 - DNA, 15 bp, Homo sapiens
catggatccccaaat

SEQ ID NO: 1860035 - DNA, 15 bp, Homo sapiens
atggatccccaaatg

SEQ ID NO: 1860036 - DNA, 15 bp, Homo sapiens
tggatccccaaatgg

SEQ ID NO: 1860037 - DNA, 15 bp, Homo sapiens
ggatccccaaatgga

SEQ ID NO: 1860038 - DNA, 15 bp, Homo sapiens
gatccccaaatggaa

SEQ ID NO: 1860039 - DNA, 15 bp, Homo sapiens
atccccaaatggaat

SEQ ID NO: 1860040 - DNA, 15 bp, Homo sapiens
tccccaaatggaatt

SEQ ID NO: 1860041 - DNA, 15 bp, Homo sapiens
ccccaaatggaattt

SEQ ID NO: 1860042 - DNA, 15 bp, Homo sapiens
cccaaatggaatttt

SEQ ID NO: 1860043 - DNA, 15 bp, Homo sapiens
ccaaatggaattttg

SEQ ID NO: 1860044 - DNA, 15 bp, Homo sapiens
caaatggaattttgc

SEQ ID NO: 1860045 - DNA, 15 bp, Homo sapiens
aaatggaattttgca

SEQ ID NO: 1860046 - DNA, 15 bp, Homo sapiens
aatggaattttgcag

SEQ ID NO: 1860047 - DNA, 15 bp, Homo sapiens
atggaattttgcaga

SEQ ID NO: 1860048 - DNA, 15 bp, Homo sapiens
tggaattttgcagac

SEQ ID NO: 1860049 - DNA, 15 bp, Homo sapiens
ggaattttgcagact

SEQ ID NO: 1860050 - DNA, 15 bp, Homo sapiens
gaattttgcagactg

SEQ ID NO: 1860051 - DNA, 15 bp, Homo sapiens
aattttgcagactga

SEQ ID NO: 1860052 - DNA, 15 bp, Homo sapiens
attttgcagactgat

SEQ ID NO: 1860053 - DNA, 15 bp, Homo sapiens
ttttgcagactgatg

SEQ ID NO: 1860054 - DNA, 15 bp, Homo sapiens
tttgcagactgatgg

SEQ ID NO: 1860055 - DNA, 15 bp, Homo sapiens
ttgcagactgatgga

SEQ ID NO: 1860056 - DNA, 15 bp, Homo sapiens
tgcagactgatggaa

SEQ ID NO: 1860057 - DNA, 15 bp, Homo sapiens
gcagactgatggaag

SEQ ID NO: 1860058 - DNA, 15 bp, Homo sapiens
cagactgatggaagg

SEQ ID NO: 1860059 - DNA, 15 bp, Homo sapiens
agactgatggaagga

SEQ ID NO: 1860060 - DNA, 15 bp, Homo sapiens
gactgatggaaggag

SEQ ID NO: 1860061 - DNA, 15 bp, Homo sapiens
actgatggaaggagg

SEQ ID NO: 1860062 - DNA, 15 bp, Homo sapiens
ctgatggaaggagga

SEQ ID NO: 1860063 - DNA, 15 bp, Homo sapiens
tgatggaaggaggaa

SEQ ID NO: 1860064 - DNA, 15 bp, Homo sapiens
gatggaaggaggaag

SEQ ID NO: 1860065 - DNA, 15 bp, Homo sapiens
atggaaggaggaagt

SEQ ID NO: 1860066 - DNA, 15 bp, Homo sapiens
tggaaggaggaagtg

SEQ ID NO: 1860067 - DNA, 15 bp, Homo sapiens
ggaaggaggaagtgg

SEQ ID NO: 1860068 - DNA, 15 bp, Homo sapiens
gaaggaggaagtgga

SEQ ID NO: 1860069 - DNA, 15 bp, Homo sapiens
aaggaggaagtggac

SEQ ID NO: 1860070 - DNA, 15 bp, Homo sapiens
aggaggaagtggaca

SEQ ID NO: 1860071 - DNA, 15 bp, Homo sapiens
ggaggaagtggacaa

SEQ ID NO: 1860072 - DNA, 15 bp, Homo sapiens
gaggaagtggacaac

SEQ ID NO: 1860073 - DNA, 15 bp, Homo sapiens
aggaagtggacaacg

SEQ ID NO: 1860074 - DNA, 15 bp, Homo sapiens
ggaagtggacaacgg

SEQ ID NO: 1860075 - DNA, 15 bp, Homo sapiens
gaagtggacaacgga

SEQ ID NO: 1860076 - DNA, 15 bp, Homo sapiens
aagtggacaacggat

SEQ ID NO: 1860077 - DNA, 15 bp, Homo sapiens
agtggacaacggatg

SEQ ID NO: 1860078 - DNA, 15 bp, Homo sapiens
gtggacaacggatgc

SEQ ID NO: 1860079 - DNA, 15 bp, Homo sapiens
tggacaacggatgct

SEQ ID NO: 1860080 - DNA, 15 bp, Homo sapiens
ggacaacggatgcta

SEQ ID NO: 1860081 - DNA, 15 bp, Homo sapiens
gacaacggatgctat

SEQ ID NO: 1860082 - DNA, 15 bp, Homo sapiens
acaacggatgctata

SEQ ID NO: 1860083 - DNA, 15 bp, Homo sapiens
caacggatgctatat

SEQ ID NO: 1860084 - DNA, 15 bp, Homo sapiens
aacggatgctatatt

SEQ ID NO: 1860085 - DNA, 15 bp, Homo sapiens
acggatgctatatta

SEQ ID NO: 1860086 - DNA, 15 bp, Homo sapiens
cggatgctatattag

SEQ ID NO: 1860087 - DNA, 15 bp, Homo sapiens
ggatgctatattagt

SEQ ID NO: 1860088 - DNA, 15 bp, Homo sapiens
gatgctatattagtc

SEQ ID NO: 1860089 - DNA, 15 bp, Homo sapiens
atgctatattagtcc

SEQ ID NO: 1860090 - DNA, 15 bp, Homo sapiens
tgctatattagtccg

SEQ ID NO: 1860091 - DNA, 15 bp, Homo sapiens
gctatattagtccgt

SEQ ID NO: 1860092 - DNA, 15 bp, Homo sapiens
ctatattagtccgtt

SEQ ID NO: 1860093 - DNA, 15 bp, Homo sapiens
tatattagtccgttt

SEQ ID NO: 1860094 - DNA, 15 bp, Homo sapiens
atattagtccgtttt

SEQ ID NO: 1860095 - DNA, 15 bp, Homo sapiens
tattagtccgttttc

SEQ ID NO: 1860096 - DNA, 15 bp, Homo sapiens
attagtccgttttca

SEQ ID NO: 1860097 - DNA, 15 bp, Homo sapiens
ttagtccgttttcac

SEQ ID NO: 1860098 - DNA, 15 bp, Homo sapiens
tagtccgttttcaca

SEQ ID NO: 1860099 - DNA, 15 bp, Homo sapiens
agtccgttttcacac

SEQ ID NO: 1860100 - DNA, 15 bp, Homo sapiens
gtccgttttcacact

SEQ ID NO: 1860101 - DNA, 15 bp, Homo sapiens
tccgttttcacactg

SEQ ID NO: 1860102 - DNA, 15 bp, Homo sapiens
ccgttttcacactgc

SEQ ID NO: 1860103 - DNA, 15 bp, Homo sapiens
cgttttcacactgct

SEQ ID NO: 1860104 - DNA, 15 bp, Homo sapiens
gttttcacactgctg

SEQ ID NO: 1860105 - DNA, 15 bp, Homo sapiens
ttttcacactgctga

SEQ ID NO: 1860106 - DNA, 15 bp, Homo sapiens
tttcacactgctgat

SEQ ID NO: 1860107 - DNA, 15 bp, Homo sapiens
ttcacactgctgata

SEQ ID NO: 1860108 - DNA, 15 bp, Homo sapiens
tcacactgctgataa

SEQ ID NO: 1860109 - DNA, 15 bp, Homo sapiens
cacactgctgataaa

SEQ ID NO: 1860110 - DNA, 15 bp, Homo sapiens
catacctgagactgt

SEQ ID NO: 1860111 - DNA, 15 bp, Homo sapiens
atacctgagactgtg

SEQ ID NO: 1860112 - DNA, 15 bp, Homo sapiens
tacctgagactgtga

SEQ ID NO: 1860113 - DNA, 15 bp, Homo sapiens
acctgagactgtgaa

SEQ ID NO: 1860114 - DNA, 15 bp, Homo sapiens
cctgagactgtgaag

SEQ ID NO: 1860115 - DNA, 15 bp, Homo sapiens
ctgagactgtgaaga

SEQ ID NO: 1860116 - DNA, 15 bp, Homo sapiens
tgagactgtgaagaa

SEQ ID NO: 1860117 - DNA, 15 bp, Homo sapiens
gagactgtgaagaaa

SEQ ID NO: 1860118 - DNA, 15 bp, Homo sapiens
agactgtgaagaaaa

SEQ ID NO: 1860119 - DNA, 15 bp, Homo sapiens
gactgtgaagaaaaa

SEQ ID NO: 1860120 - DNA, 15 bp, Homo sapiens
actgtgaagaaaaag

SEQ ID NO: 1860121 - DNA, 15 bp, Homo sapiens
ctgtgaagaaaaaga

SEQ ID NO: 1860122 - DNA, 15 bp, Homo sapiens
tgtgaagaaaaagag

SEQ ID NO: 1860123 - DNA, 15 bp, Homo sapiens
gtgaagaaaaagagg

SEQ ID NO: 1860124 - DNA, 15 bp, Homo sapiens
tgaagaaaaagaggt

SEQ ID NO: 1860125 - DNA, 15 bp, Homo sapiens
gaagaaaaagaggtt

SEQ ID NO: 1860126 - DNA, 15 bp, Homo sapiens
aagaaaaagaggtta

SEQ ID NO: 1860127 - DNA, 15 bp, Homo sapiens
agaaaaagaggttaa

SEQ ID NO: 1860128 - DNA, 15 bp, Homo sapiens
gaaaaagaggttaaa

SEQ ID NO: 1860129 - DNA, 15 bp, Homo sapiens
aaaaagaggttaaat

SEQ ID NO: 1860130 - DNA, 15 bp, Homo sapiens
aaaagaggttaaatt

SEQ ID NO: 1860131 - DNA, 15 bp, Homo sapiens
aaagaggttaaattg

SEQ ID NO: 1860132 - DNA, 15 bp, Homo sapiens
aagaggttaaattgg

SEQ ID NO: 1860133 - DNA, 15 bp, Homo sapiens
agaggttaaattgga

SEQ ID NO: 1860134 - DNA, 15 bp, Homo sapiens
gaggttaaattggac

SEQ ID NO: 1860135 - DNA, 15 bp, Homo sapiens
aggttaaattggact

SEQ ID NO: 1860136 - DNA, 15 bp, Homo sapiens
ggttaaattggactt

SEQ ID NO: 1860137 - DNA, 15 bp, Homo sapiens
gttaaattggactta

SEQ ID NO: 1860138 - DNA, 15 bp, Homo sapiens
ttaaattggacttac

SEQ ID NO: 1860139 - DNA, 15 bp, Homo sapiens
taaattggacttaca

SEQ ID NO: 1860140 - DNA, 15 bp, Homo sapiens
aaattggacttacag

SEQ ID NO: 1860141 - DNA, 15 bp, Homo sapiens
aattggacttacagt

SEQ ID NO: 1860142 - DNA, 15 bp, Homo sapiens
tggacttacagttcc

SEQ ID NO: 1860143 - DNA, 15 bp, Homo sapiens
ggacttacagttcca

SEQ ID NO: 1860144 - DNA, 15 bp, Homo sapiens
gacttacagttccac

SEQ ID NO: 1860145 - DNA, 15 bp, Homo sapiens
acttacagttccaca

SEQ ID NO: 1860146 - DNA, 15 bp, Homo sapiens
cttacagttccacat

SEQ ID NO: 1860147 - DNA, 15 bp, Homo sapiens
ttacagttccacatg

SEQ ID NO: 1860148 - DNA, 15 bp, Homo sapiens
tacagttccacatgg

SEQ ID NO: 1860149 - DNA, 15 bp, Homo sapiens
tggggaggcctcaga

SEQ ID NO: 1860150 - DNA, 15 bp, Homo sapiens
ggggaggcctcagaa

SEQ ID NO: 1860151 - DNA, 15 bp, Homo sapiens
gggaggcctcagaat

SEQ ID NO: 1860152 - DNA, 15 bp, Homo sapiens
ggaggcctcagaatc

SEQ ID NO: 1860153 - DNA, 15 bp, Homo sapiens
gaggcctcagaatca

SEQ ID NO: 1860154 - DNA, 15 bp, Homo sapiens
aggcctcagaatcac

SEQ ID NO: 1860155 - DNA, 15 bp, Homo sapiens
ggcctcagaatcaca

SEQ ID NO: 1860156 - DNA, 15 bp, Homo sapiens
gcctcagaatcacag

SEQ ID NO: 1860157 - DNA, 15 bp, Homo sapiens
cctcagaatcacagt

SEQ ID NO: 1860158 - DNA, 15 bp, Homo sapiens
ctcagaatcacagtg

SEQ ID NO: 1860159 - DNA, 15 bp, Homo sapiens
tcagaatcacagtgg

SEQ ID NO: 1860160 - DNA, 15 bp, Homo sapiens
cagaatcacagtggg

SEQ ID NO: 1860161 - DNA, 15 bp, Homo sapiens
agaatcacagtggga

SEQ ID NO: 1860162 - DNA, 15 bp, Homo sapiens
gaatcacagtgggag

SEQ ID NO: 1860163 - DNA, 15 bp, Homo sapiens
aatcacagtgggagg

SEQ ID NO: 1860164 - DNA, 15 bp, Homo sapiens
atcacagtgggaggt

SEQ ID NO: 1860165 - DNA, 15 bp, Homo sapiens
tcacagtgggaggtg

SEQ ID NO: 1860166 - DNA, 15 bp, Homo sapiens
cacagtgggaggtga

SEQ ID NO: 1860167 - DNA, 15 bp, Homo sapiens
acagtgggaggtgaa

SEQ ID NO: 1860168 - DNA, 15 bp, Homo sapiens
cagtgggaggtgaaa

SEQ ID NO: 1860169 - DNA, 15 bp, Homo sapiens
agtgggaggtgaaag

SEQ ID NO: 1860170 - DNA, 15 bp, Homo sapiens
gtgggaggtgaaagg

SEQ ID NO: 1860171 - DNA, 15 bp, Homo sapiens
tgggaggtgaaaggc

SEQ ID NO: 1860172 - DNA, 15 bp, Homo sapiens
gggaggtgaaaggca

SEQ ID NO: 1860173 - DNA, 15 bp, Homo sapiens
ggaggtgaaaggcac

SEQ ID NO: 1860174 - DNA, 15 bp, Homo sapiens
gaggtgaaaggcact

SEQ ID NO: 1860175 - DNA, 15 bp, Homo sapiens
aggtgaaaggcactt

SEQ ID NO: 1860176 - DNA, 15 bp, Homo sapiens
ggtgaaaggcacttc

SEQ ID NO: 1860177 - DNA, 15 bp, Homo sapiens
gtgaaaggcacttct

SEQ ID NO: 1860178 - DNA, 15 bp, Homo sapiens
tgaaaggcacttctt

SEQ ID NO: 1860179 - DNA, 15 bp, Homo sapiens
gaaaggcacttcttt

SEQ ID NO: 1860180 - DNA, 15 bp, Homo sapiens
aaaggcacttcttta

SEQ ID NO: 1860181 - DNA, 15 bp, Homo sapiens
aaggcacttctttac

SEQ ID NO: 1860182 - DNA, 15 bp, Homo sapiens
aggcacttctttacc

SEQ ID NO: 1860183 - DNA, 15 bp, Homo sapiens
ggcacttctttacct

SEQ ID NO: 1860184 - DNA, 15 bp, Homo sapiens
gcacttctttacctg

SEQ ID NO: 1860185 - DNA, 15 bp, Homo sapiens
cacttctttacctga

SEQ ID NO: 1860186 - DNA, 15 bp, Homo sapiens
acttctttacctgac

SEQ ID NO: 1860187 - DNA, 15 bp, Homo sapiens
cttctttacctgaca

SEQ ID NO: 1860188 - DNA, 15 bp, Homo sapiens
ttctttacctgacag

SEQ ID NO: 1860189 - DNA, 15 bp, Homo sapiens
tctttacctgacagc

SEQ ID NO: 1860190 - DNA, 15 bp, Homo sapiens
ctttacctgacagca

SEQ ID NO: 1860191 - DNA, 15 bp, Homo sapiens
tttacctgacagcag

SEQ ID NO: 1860192 - DNA, 15 bp, Homo sapiens
ttacctgacagcagc

SEQ ID NO: 1860193 - DNA, 15 bp, Homo sapiens
tacctgacagcagca

SEQ ID NO: 1860194 - DNA, 15 bp, Homo sapiens
acctgacagcagcaa

SEQ ID NO: 1860195 - DNA, 15 bp, Homo sapiens
cctgacagcagcaag

SEQ ID NO: 1860196 - DNA, 15 bp, Homo sapiens
ctgacagcagcaaga

SEQ ID NO: 1860197 - DNA, 15 bp, Homo sapiens
tgacagcagcaagat

SEQ ID NO: 1860198 - DNA, 15 bp, Homo sapiens
gacagcagcaagata

SEQ ID NO: 1860199 - DNA, 15 bp, Homo sapiens
acagcagcaagataa

SEQ ID NO: 1860200 - DNA, 15 bp, Homo sapiens
cagcagcaagataaa

SEQ ID NO: 1860201 - DNA, 15 bp, Homo sapiens
agcagcaagataaaa

SEQ ID NO: 1860202 - DNA, 15 bp, Homo sapiens
gcagcaagataaaaa

SEQ ID NO: 1860203 - DNA, 15 bp, Homo sapiens
cagcaagataaaaat

SEQ ID NO: 1860204 - DNA, 15 bp, Homo sapiens
agcaagataaaaatg

SEQ ID NO: 1860205 - DNA, 15 bp, Homo sapiens
gcaagataaaaatga

SEQ ID NO: 1860206 - DNA, 15 bp, Homo sapiens
caagataaaaatgag

SEQ ID NO: 1860207 - DNA, 15 bp, Homo sapiens
aagataaaaatgagg

SEQ ID NO: 1860208 - DNA, 15 bp, Homo sapiens
agataaaaatgagga

SEQ ID NO: 1860209 - DNA, 15 bp, Homo sapiens
gataaaaatgaggag

SEQ ID NO: 1860210 - DNA, 15 bp, Homo sapiens
ataaaaatgaggagg

SEQ ID NO: 1860211 - DNA, 15 bp, Homo sapiens
taaaaatgaggagga

SEQ ID NO: 1860212 - DNA, 15 bp, Homo sapiens
aaaaatgaggaggat

SEQ ID NO: 1860213 - DNA, 15 bp, Homo sapiens
aaaatgaggaggatg

SEQ ID NO: 1860214 - DNA, 15 bp, Homo sapiens
aaatgaggaggatgc

SEQ ID NO: 1860215 - DNA, 15 bp, Homo sapiens
aatgaggaggatgca

SEQ ID NO: 1860216 - DNA, 15 bp, Homo sapiens
atgaggaggatgcaa

SEQ ID NO: 1860217 - DNA, 15 bp, Homo sapiens
tgaggaggatgcaaa

SEQ ID NO: 1860218 - DNA, 15 bp, Homo sapiens
gaggaggatgcaaaa

SEQ ID NO: 1860219 - DNA, 15 bp, Homo sapiens
aggaggatgcaaaag

SEQ ID NO: 1860220 - DNA, 15 bp, Homo sapiens
ggaggatgcaaaagt

SEQ ID NO: 1860221 - DNA, 15 bp, Homo sapiens
gaggatgcaaaagtg

SEQ ID NO: 1860222 - DNA, 15 bp, Homo sapiens
aggatgcaaaagtgg

SEQ ID NO: 1860223 - DNA, 15 bp, Homo sapiens
ggatgcaaaagtgga

SEQ ID NO: 1860224 - DNA, 15 bp, Homo sapiens
gatgcaaaagtggaa

SEQ ID NO: 1860225 - DNA, 15 bp, Homo sapiens
atgcaaaagtggaaa

SEQ ID NO: 1860226 - DNA, 15 bp, Homo sapiens
tgcaaaagtggaaac

SEQ ID NO: 1860227 - DNA, 15 bp, Homo sapiens
gcaaaagtggaaacc

SEQ ID NO: 1860228 - DNA, 15 bp, Homo sapiens
caaaagtggaaaccc

SEQ ID NO: 1860229 - DNA, 15 bp, Homo sapiens
aaaagtggaaacccc

SEQ ID NO: 1860230 - DNA, 15 bp, Homo sapiens
aaagtggaaacccct

SEQ ID NO: 1860231 - DNA, 15 bp, Homo sapiens
aagtggaaacccctg

SEQ ID NO: 1860232 - DNA, 15 bp, Homo sapiens
agtggaaacccctga

SEQ ID NO: 1860233 - DNA, 15 bp, Homo sapiens
gtggaaacccctgat

SEQ ID NO: 1860234 - DNA, 15 bp, Homo sapiens
tggaaacccctgata

SEQ ID NO: 1860235 - DNA, 15 bp, Homo sapiens
ggaaacccctgataa

SEQ ID NO: 1860236 - DNA, 15 bp, Homo sapiens
gaaacccctgataaa

SEQ ID NO: 1860237 - DNA, 15 bp, Homo sapiens
aaacccctgataaaa

SEQ ID NO: 1860238 - DNA, 15 bp, Homo sapiens
aacccctgataaaac

SEQ ID NO: 1860239 - DNA, 15 bp, Homo sapiens
acccctgataaaacc

SEQ ID NO: 1860240 - DNA, 15 bp, Homo sapiens
cccctgataaaacca

SEQ ID NO: 1860241 - DNA, 15 bp, Homo sapiens
ccctgataaaaccat

SEQ ID NO: 1860242 - DNA, 15 bp, Homo sapiens
cctgataaaaccatc

SEQ ID NO: 1860243 - DNA, 15 bp, Homo sapiens
ctgataaaaccatca

SEQ ID NO: 1860244 - DNA, 15 bp, Homo sapiens
tgataaaaccatcag

SEQ ID NO: 1860245 - DNA, 15 bp, Homo sapiens
gataaaaccatcaga

SEQ ID NO: 1860246 - DNA, 15 bp, Homo sapiens
cagatctcatgagat

SEQ ID NO: 1860247 - DNA, 15 bp, Homo sapiens
agatctcatgagatt

SEQ ID NO: 1860248 - DNA, 15 bp, Homo sapiens
gatctcatgagattt

SEQ ID NO: 1860249 - DNA, 15 bp, Homo sapiens
atctcatgagattta

SEQ ID NO: 1860250 - DNA, 15 bp, Homo sapiens
tctcatgagatttat

SEQ ID NO: 1860251 - DNA, 15 bp, Homo sapiens
ctcatgagatttatt

SEQ ID NO: 1860252 - DNA, 15 bp, Homo sapiens
tcatgagatttattc

SEQ ID NO: 1860253 - DNA, 15 bp, Homo sapiens
catgagatttattcg

SEQ ID NO: 1860254 - DNA, 15 bp, Homo sapiens
atgagatttattcgc

SEQ ID NO: 1860255 - DNA, 15 bp, Homo sapiens
tgagatttattcgct

SEQ ID NO: 1860256 - DNA, 15 bp, Homo sapiens
gagatttattcgcta

SEQ ID NO: 1860257 - DNA, 15 bp, Homo sapiens
agatttattcgctac

SEQ ID NO: 1860258 - DNA, 15 bp, Homo sapiens
gatttattcgctacc

SEQ ID NO: 1860259 - DNA, 15 bp, Homo sapiens
atttattcgctacca

SEQ ID NO: 1860260 - DNA, 15 bp, Homo sapiens
tttattcgctaccac

SEQ ID NO: 1860261 - DNA, 15 bp, Homo sapiens
ttattcgctaccacg

SEQ ID NO: 1860262 - DNA, 15 bp, Homo sapiens
tattcgctaccacga

SEQ ID NO: 1860263 - DNA, 15 bp, Homo sapiens
attcgctaccacgag

SEQ ID NO: 1860264 - DNA, 15 bp, Homo sapiens
ttcgctaccacgaga

SEQ ID NO: 1860265 - DNA, 15 bp, Homo sapiens
tcgctaccacgagaa

SEQ ID NO: 1860266 - DNA, 15 bp, Homo sapiens
cgctaccacgagaac

SEQ ID NO: 1860267 - DNA, 15 bp, Homo sapiens
gctaccacgagaaca

SEQ ID NO: 1860268 - DNA, 15 bp, Homo sapiens
ctaccacgagaacag

SEQ ID NO: 1860269 - DNA, 15 bp, Homo sapiens
taccacgagaacagt

SEQ ID NO: 1860270 - DNA, 15 bp, Homo sapiens
accacgagaacagta

SEQ ID NO: 1860271 - DNA, 15 bp, Homo sapiens
ccacgagaacagtat

SEQ ID NO: 1860272 - DNA, 15 bp, Homo sapiens
cacgagaacagtatg

SEQ ID NO: 1860273 - DNA, 15 bp, Homo sapiens
acgagaacagtatgg

SEQ ID NO: 1860274 - DNA, 15 bp, Homo sapiens
cgagaacagtatggg

SEQ ID NO: 1860275 - DNA, 15 bp, Homo sapiens
gagaacagtatgggg

SEQ ID NO: 1860276 - DNA, 15 bp, Homo sapiens
agaacagtatggggg

SEQ ID NO: 1860277 - DNA, 15 bp, Homo sapiens
gaacagtatggggga

SEQ ID NO: 1860278 - DNA, 15 bp, Homo sapiens
aacagtatgggggaa

SEQ ID NO: 1860279 - DNA, 15 bp, Homo sapiens
acagtatgggggaaa

SEQ ID NO: 1860280 - DNA, 15 bp, Homo sapiens
cagtatgggggaaac

SEQ ID NO: 1860281 - DNA, 15 bp, Homo sapiens
agtatgggggaaacc

SEQ ID NO: 1860282 - DNA, 15 bp, Homo sapiens
gtatgggggaaacca

SEQ ID NO: 1860283 - DNA, 15 bp, Homo sapiens
tatgggggaaaccac

SEQ ID NO: 1860284 - DNA, 15 bp, Homo sapiens
atgggggaaaccacc

SEQ ID NO: 1860285 - DNA, 15 bp, Homo sapiens
tgggggaaaccaccc

SEQ ID NO: 1860286 - DNA, 15 bp, Homo sapiens
gggggaaaccacccc

SEQ ID NO: 1860287 - DNA, 15 bp, Homo sapiens
ggggaaaccaccccg

SEQ ID NO: 1860288 - DNA, 15 bp, Homo sapiens
gggaaaccaccccgt

SEQ ID NO: 1860289 - DNA, 15 bp, Homo sapiens
ggaaaccaccccgtg

SEQ ID NO: 1860290 - DNA, 15 bp, Homo sapiens
gaaaccaccccgtga

SEQ ID NO: 1860291 - DNA, 15 bp, Homo sapiens
aaaccaccccgtgat

SEQ ID NO: 1860292 - DNA, 15 bp, Homo sapiens
aaccaccccgtgatt

SEQ ID NO: 1860293 - DNA, 15 bp, Homo sapiens
accaccccgtgattc

SEQ ID NO: 1860294 - DNA, 15 bp, Homo sapiens
ccaccccgtgattca

SEQ ID NO: 1860295 - DNA, 15 bp, Homo sapiens
caccccgtgattcag

SEQ ID NO: 1860296 - DNA, 15 bp, Homo sapiens
accccgtgattcaga

SEQ ID NO: 1860297 - DNA, 15 bp, Homo sapiens
ccccgtgattcagat

SEQ ID NO: 1860298 - DNA, 15 bp, Homo sapiens
cccgtgattcagatt

SEQ ID NO: 1860299 - DNA, 15 bp, Homo sapiens
ccgtgattcagatta

SEQ ID NO: 1860300 - DNA, 15 bp, Homo sapiens
cgtgattcagattat

SEQ ID NO: 1860301 - DNA, 15 bp, Homo sapiens
gtgattcagattatc

SEQ ID NO: 1860302 - DNA, 15 bp, Homo sapiens
tgattcagattatct

SEQ ID NO: 1860303 - DNA, 15 bp, Homo sapiens
gattcagattatctc

SEQ ID NO: 1860304 - DNA, 15 bp, Homo sapiens
attcagattatctcc

SEQ ID NO: 1860305 - DNA, 15 bp, Homo sapiens
ttcagattatctccc

SEQ ID NO: 1860306 - DNA, 15 bp, Homo sapiens
tcagattatctccca

SEQ ID NO: 1860307 - DNA, 15 bp, Homo sapiens
cagattatctcccac

SEQ ID NO: 1860308 - DNA, 15 bp, Homo sapiens
agattatctcccacg

SEQ ID NO: 1860309 - DNA, 15 bp, Homo sapiens
gattatctcccacgg

SEQ ID NO: 1860310 - DNA, 15 bp, Homo sapiens
attatctcccacgga

SEQ ID NO: 1860311 - DNA, 15 bp, Homo sapiens
ttatctcccacggaa

SEQ ID NO: 1860312 - DNA, 15 bp, Homo sapiens
tatctcccacggaat

SEQ ID NO: 1860313 - DNA, 15 bp, Homo sapiens
atctcccacggaatc

SEQ ID NO: 1860314 - DNA, 15 bp, Homo sapiens
tctcccacggaatcc

SEQ ID NO: 1860315 - DNA, 15 bp, Homo sapiens
ctcccacggaatccc

SEQ ID NO: 1860316 - DNA, 15 bp, Homo sapiens
tcccacggaatccct

SEQ ID NO: 1860317 - DNA, 15 bp, Homo sapiens
cccacggaatccctc

SEQ ID NO: 1860318 - DNA, 15 bp, Homo sapiens
ccacggaatccctcc

SEQ ID NO: 1860319 - DNA, 15 bp, Homo sapiens
cacggaatccctccc

SEQ ID NO: 1860320 - DNA, 15 bp, Homo sapiens
acggaatccctccca

SEQ ID NO: 1860321 - DNA, 15 bp, Homo sapiens
cggaatccctcccac

SEQ ID NO: 1860322 - DNA, 15 bp, Homo sapiens
ggaatccctcccaca

SEQ ID NO: 1860323 - DNA, 15 bp, Homo sapiens
gaatccctcccacaa

SEQ ID NO: 1860324 - DNA, 15 bp, Homo sapiens
aatccctcccacaat

SEQ ID NO: 1860325 - DNA, 15 bp, Homo sapiens
atccctcccacaata

SEQ ID NO: 1860326 - DNA, 15 bp, Homo sapiens
tccctcccacaatac

SEQ ID NO: 1860327 - DNA, 15 bp, Homo sapiens
ccctcccacaatacg

SEQ ID NO: 1860328 - DNA, 15 bp, Homo sapiens
cctcccacaatacgt

SEQ ID NO: 1860329 - DNA, 15 bp, Homo sapiens
ctcccacaatacgtg

SEQ ID NO: 1860330 - DNA, 15 bp, Homo sapiens
atacgtgggaattat

SEQ ID NO: 1860331 - DNA, 15 bp, Homo sapiens
tacgtgggaattatg

SEQ ID NO: 1860332 - DNA, 15 bp, Homo sapiens
acgtgggaattatgg

SEQ ID NO: 1860333 - DNA, 15 bp, Homo sapiens
cgtgggaattatggg

SEQ ID NO: 1860334 - DNA, 15 bp, Homo sapiens
gtgggaattatggga

SEQ ID NO: 1860335 - DNA, 15 bp, Homo sapiens
tgggaattatgggaa

SEQ ID NO: 1860336 - DNA, 15 bp, Homo sapiens
gggaattatgggaat

SEQ ID NO: 1860337 - DNA, 15 bp, Homo sapiens
ggaattatgggaata

SEQ ID NO: 1860338 - DNA, 15 bp, Homo sapiens
gaattatgggaatac

SEQ ID NO: 1860339 - DNA, 15 bp, Homo sapiens
aattatgggaataca

SEQ ID NO: 1860340 - DNA, 15 bp, Homo sapiens
attatgggaatacaa

SEQ ID NO: 1860341 - DNA, 15 bp, Homo sapiens
ttatgggaatacaat

SEQ ID NO: 1860342 - DNA, 15 bp, Homo sapiens
tatgggaatacaatt

SEQ ID NO: 1860343 - DNA, 15 bp, Homo sapiens
atgggaatacaattc

SEQ ID NO: 1860344 - DNA, 15 bp, Homo sapiens
tgggaatacaattca

SEQ ID NO: 1860345 - DNA, 15 bp, Homo sapiens
gggaatacaattcaa

SEQ ID NO: 1860346 - DNA, 15 bp, Homo sapiens
ggaatacaattcaag

SEQ ID NO: 1860347 - DNA, 15 bp, Homo sapiens
gaatacaattcaaga

SEQ ID NO: 1860348 - DNA, 15 bp, Homo sapiens
atacaattcaagatg

SEQ ID NO: 1860349 - DNA, 15 bp, Homo sapiens
aagatgagatttggg

SEQ ID NO: 1860350 - DNA, 15 bp, Homo sapiens
agatgagatttgggt

SEQ ID NO: 1860351 - DNA, 15 bp, Homo sapiens
gatgagatttgggtg

SEQ ID NO: 1860352 - DNA, 15 bp, Homo sapiens
atgagatttgggtgg

SEQ ID NO: 1860353 - DNA, 15 bp, Homo sapiens
tgagatttgggtggg

SEQ ID NO: 1860354 - DNA, 15 bp, Homo sapiens
gggtggggacacaga

SEQ ID NO: 1860355 - DNA, 15 bp, Homo sapiens
ggtggggacacagag

SEQ ID NO: 1860356 - DNA, 15 bp, Homo sapiens
cagagccaaaccata

SEQ ID NO: 1860357 - DNA, 15 bp, Homo sapiens
agagccaaaccatat

SEQ ID NO: 1860358 - DNA, 15 bp, Homo sapiens
gagccaaaccatatc

SEQ ID NO: 1860359 - DNA, 15 bp, Homo sapiens
ccaaaccatatcaaa

SEQ ID NO: 1860360 - DNA, 15 bp, Homo sapiens
caaaccatatcaaat

SEQ ID NO: 1860361 - DNA, 15 bp, Homo sapiens
aaaccatatcaaatg

SEQ ID NO: 1860362 - DNA, 15 bp, Homo sapiens
aaccatatcaaatgc

SEQ ID NO: 1860363 - DNA, 15 bp, Homo sapiens
accatatcaaatgct

SEQ ID NO: 1860364 - DNA, 15 bp, Homo sapiens
ccatatcaaatgctc

SEQ ID NO: 1860365 - DNA, 15 bp, Homo sapiens
catatcaaatgctca

SEQ ID NO: 1860366 - DNA, 15 bp, Homo sapiens
atatcaaatgctcag

SEQ ID NO: 1860367 - DNA, 15 bp, Homo sapiens
tatcaaatgctcaga

SEQ ID NO: 1860368 - DNA, 15 bp, Homo sapiens
atcaaatgctcagaa

SEQ ID NO: 1860369 - DNA, 15 bp, Homo sapiens
tcaaatgctcagaag

SEQ ID NO: 1860370 - DNA, 15 bp, Homo sapiens
caaatgctcagaagg

SEQ ID NO: 1860371 - DNA, 15 bp, Homo sapiens
aaatgctcagaaggc

SEQ ID NO: 1860372 - DNA, 15 bp, Homo sapiens
aatgctcagaaggca

SEQ ID NO: 1860373 - DNA, 15 bp, Homo sapiens
atgctcagaaggcat

SEQ ID NO: 1860374 - DNA, 15 bp, Homo sapiens
tgctcagaaggcata

SEQ ID NO: 1860375 - DNA, 15 bp, Homo sapiens
gctcagaaggcatat

SEQ ID NO: 1860376 - DNA, 15 bp, Homo sapiens
ctcagaaggcatatg

SEQ ID NO: 1860377 - DNA, 15 bp, Homo sapiens
tcagaaggcatatgt

SEQ ID NO: 1860378 - DNA, 15 bp, Homo sapiens
cagaaggcatatgtt

SEQ ID NO: 1860379 - DNA, 15 bp, Homo sapiens
agaaggcatatgttt

SEQ ID NO: 1860380 - DNA, 15 bp, Homo sapiens
gaaggcatatgtttt

SEQ ID NO: 1860381 - DNA, 15 bp, Homo sapiens
aaggcatatgttttg

SEQ ID NO: 1860382 - DNA, 15 bp, Homo sapiens
aggcatatgttttgg

SEQ ID NO: 1860383 - DNA, 15 bp, Homo sapiens
ggcatatgttttggt

SEQ ID NO: 1860384 - DNA, 15 bp, Homo sapiens
gcatatgttttggta

SEQ ID NO: 1860385 - DNA, 15 bp, Homo sapiens
catatgttttggtaa

SEQ ID NO: 1860386 - DNA, 15 bp, Homo sapiens
tatgttttggtaagg

SEQ ID NO: 1860387 - DNA, 15 bp, Homo sapiens
atgttttggtaaggc

SEQ ID NO: 1860388 - DNA, 15 bp, Homo sapiens
tgttttggtaaggca

SEQ ID NO: 1860389 - DNA, 15 bp, Homo sapiens
gttttggtaaggcat

SEQ ID NO: 1860390 - DNA, 15 bp, Homo sapiens
ttttggtaaggcatc

SEQ ID NO: 1860391 - DNA, 15 bp, Homo sapiens
tttggtaaggcatca

SEQ ID NO: 1860392 - DNA, 15 bp, Homo sapiens
ttggtaaggcatcaa

SEQ ID NO: 1860393 - DNA, 15 bp, Homo sapiens
tggtaaggcatcaaa

SEQ ID NO: 1860394 - DNA, 15 bp, Homo sapiens
ggtaaggcatcaaag

SEQ ID NO: 1860395 - DNA, 15 bp, Homo sapiens
gtaaggcatcaaaga

SEQ ID NO: 1860396 - DNA, 15 bp, Homo sapiens
taaggcatcaaagaa

SEQ ID NO: 1860397 - DNA, 15 bp, Homo sapiens
aaggcatcaaagaaa

SEQ ID NO: 1860398 - DNA, 15 bp, Homo sapiens
aggcatcaaagaaat

SEQ ID NO: 1860399 - DNA, 15 bp, Homo sapiens
ggcatcaaagaaatg

SEQ ID NO: 1860400 - DNA, 15 bp, Homo sapiens
gcatcaaagaaatgt

SEQ ID NO: 1860401 - DNA, 15 bp, Homo sapiens
catcaaagaaatgtt

SEQ ID NO: 1860402 - DNA, 15 bp, Homo sapiens
atcaaagaaatgttt

SEQ ID NO: 1860403 - DNA, 15 bp, Homo sapiens
tcaaagaaatgttta

SEQ ID NO: 1860404 - DNA, 15 bp, Homo sapiens
caaagaaatgtttac

SEQ ID NO: 1860405 - DNA, 15 bp, Homo sapiens
aaagaaatgtttacc

SEQ ID NO: 1860406 - DNA, 15 bp, Homo sapiens
aagaaatgtttacca

SEQ ID NO: 1860407 - DNA, 15 bp, Homo sapiens
agaaatgtttaccag

SEQ ID NO: 1860408 - DNA, 15 bp, Homo sapiens
gaaatgtttaccaga

SEQ ID NO: 1860409 - DNA, 15 bp, Homo sapiens
aaatgtttaccagag

SEQ ID NO: 1860410 - DNA, 15 bp, Homo sapiens
aatgtttaccagagc

SEQ ID NO: 1860411 - DNA, 15 bp, Homo sapiens
atgtttaccagagca

SEQ ID NO: 1860412 - DNA, 15 bp, Homo sapiens
tgtttaccagagcac

SEQ ID NO: 1860413 - DNA, 15 bp, Homo sapiens
gtttaccagagcact

SEQ ID NO: 1860414 - DNA, 15 bp, Homo sapiens
tttaccagagcactg

SEQ ID NO: 1860415 - DNA, 15 bp, Homo sapiens
ttaccagagcactga

SEQ ID NO: 1860416 - DNA, 15 bp, Homo sapiens
taccagagcactgaa

SEQ ID NO: 1860417 - DNA, 15 bp, Homo sapiens
ccagagcactgaagt

SEQ ID NO: 1860418 - DNA, 15 bp, Homo sapiens
cagagcactgaagtt

SEQ ID NO: 1860419 - DNA, 15 bp, Homo sapiens
agagcactgaagttt

SEQ ID NO: 1860420 - DNA, 15 bp, Homo sapiens
gagcactgaagtttc

SEQ ID NO: 1860421 - DNA, 15 bp, Homo sapiens
agcactgaagtttcc

SEQ ID NO: 1860422 - DNA, 15 bp, Homo sapiens
gcactgaagtttcca

SEQ ID NO: 1860423 - DNA, 15 bp, Homo sapiens
cactgaagtttccat

SEQ ID NO: 1860424 - DNA, 15 bp, Homo sapiens
actgaagtttccata

SEQ ID NO: 1860425 - DNA, 15 bp, Homo sapiens
ctgaagtttccatag

SEQ ID NO: 1860426 - DNA, 15 bp, Homo sapiens
tgaagtttccatagt

SEQ ID NO: 1860427 - DNA, 15 bp, Homo sapiens
gaagtttccatagtc

SEQ ID NO: 1860428 - DNA, 15 bp, Homo sapiens
aagtttccatagtct

SEQ ID NO: 1860429 - DNA, 15 bp, Homo sapiens
agtttccatagtctc

SEQ ID NO: 1860430 - DNA, 15 bp, Homo sapiens
gtttccatagtctct

SEQ ID NO: 1860431 - DNA, 15 bp, Homo sapiens
tttccatagtctctc

SEQ ID NO: 1860432 - DNA, 15 bp, Homo sapiens
ttccatagtctctct

SEQ ID NO: 1860433 - DNA, 15 bp, Homo sapiens
tccatagtctctctt

SEQ ID NO: 1860434 - DNA, 15 bp, Homo sapiens
ccatagtctctcttt

SEQ ID NO: 1860435 - DNA, 15 bp, Homo sapiens
catagtctctctttt

SEQ ID NO: 1860436 - DNA, 15 bp, Homo sapiens
atagtctctcttttt

SEQ ID NO: 1860437 - DNA, 15 bp, Homo sapiens
tagtctctctttttt

SEQ ID NO: 1860438 - DNA, 15 bp, Homo sapiens
agtctctcttttttg

SEQ ID NO: 1860439 - DNA, 15 bp, Homo sapiens
gtctctcttttttgg

SEQ ID NO: 1860440 - DNA, 15 bp, Homo sapiens
tctctcttttttggg

SEQ ID NO: 1860441 - DNA, 15 bp, Homo sapiens
ctctcttttttgggc

SEQ ID NO: 1860442 - DNA, 15 bp, Homo sapiens
tctcttttttgggca

SEQ ID NO: 1860443 - DNA, 15 bp, Homo sapiens
ctcttttttgggcag

SEQ ID NO: 1860444 - DNA, 15 bp, Homo sapiens
tcttttttgggcagt

SEQ ID NO: 1860445 - DNA, 15 bp, Homo sapiens
cttttttgggcagta

SEQ ID NO: 1860446 - DNA, 15 bp, Homo sapiens
ttttttgggcagtaa

SEQ ID NO: 1860447 - DNA, 15 bp, Homo sapiens
tttttgggcagtaaa

SEQ ID NO: 1860448 - DNA, 15 bp, Homo sapiens
ttttgggcagtaaag

SEQ ID NO: 1860449 - DNA, 15 bp, Homo sapiens
tttgggcagtaaagg

SEQ ID NO: 1860450 - DNA, 15 bp, Homo sapiens
ttgggcagtaaaggt

SEQ ID NO: 1860451 - DNA, 15 bp, Homo sapiens
tgggcagtaaaggtt

SEQ ID NO: 1860452 - DNA, 15 bp, Homo sapiens
gggcagtaaaggttc

SEQ ID NO: 1860453 - DNA, 15 bp, Homo sapiens
ggcagtaaaggttct

SEQ ID NO: 1860454 - DNA, 15 bp, Homo sapiens
gcagtaaaggttcta

SEQ ID NO: 1860455 - DNA, 15 bp, Homo sapiens
cagtaaaggttctat

SEQ ID NO: 1860456 - DNA, 15 bp, Homo sapiens
agtaaaggttctata

SEQ ID NO: 1860457 - DNA, 15 bp, Homo sapiens
gtaaaggttctatat

SEQ ID NO: 1860458 - DNA, 15 bp, Homo sapiens
taaaggttctatata

SEQ ID NO: 1860459 - DNA, 15 bp, Homo sapiens
aaaggttctatatag

SEQ ID NO: 1860460 - DNA, 15 bp, Homo sapiens
aaggttctatatagc

SEQ ID NO: 1860461 - DNA, 15 bp, Homo sapiens
aggttctatatagct

SEQ ID NO: 1860462 - DNA, 15 bp, Homo sapiens
ggttctatatagctc

SEQ ID NO: 1860463 - DNA, 15 bp, Homo sapiens
gttctatatagctcc

SEQ ID NO: 1860464 - DNA, 15 bp, Homo sapiens
ttctatatagctcca

SEQ ID NO: 1860465 - DNA, 15 bp, Homo sapiens
tctatatagctccaa

SEQ ID NO: 1860466 - DNA, 15 bp, Homo sapiens
ctatatagctccaag

SEQ ID NO: 1860467 - DNA, 15 bp, Homo sapiens
tatatagctccaaga

SEQ ID NO: 1860468 - DNA, 15 bp, Homo sapiens
atatagctccaagac

SEQ ID NO: 1860469 - DNA, 15 bp, Homo sapiens
tatagctccaagaca

SEQ ID NO: 1860470 - DNA, 15 bp, Homo sapiens
atagctccaagacat

SEQ ID NO: 1860471 - DNA, 15 bp, Homo sapiens
tagctccaagacata

SEQ ID NO: 1860472 - DNA, 15 bp, Homo sapiens
agctccaagacataa

SEQ ID NO: 1860473 - DNA, 15 bp, Homo sapiens
gctccaagacataat

SEQ ID NO: 1860474 - DNA, 15 bp, Homo sapiens
ctccaagacataatc

SEQ ID NO: 1860475 - DNA, 15 bp, Homo sapiens
tccaagacataatct

SEQ ID NO: 1860476 - DNA, 15 bp, Homo sapiens
ccaagacataatctt

SEQ ID NO: 1860477 - DNA, 15 bp, Homo sapiens
caagacataatcttt

SEQ ID NO: 1860478 - DNA, 15 bp, Homo sapiens
aagacataatctttg

SEQ ID NO: 1860479 - DNA, 15 bp, Homo sapiens
agacataatctttga

SEQ ID NO: 1860480 - DNA, 15 bp, Homo sapiens
gacataatctttgat

SEQ ID NO: 1860481 - DNA, 15 bp, Homo sapiens
acataatctttgatg

SEQ ID NO: 1860482 - DNA, 15 bp, Homo sapiens
cataatctttgatgc

SEQ ID NO: 1860483 - DNA, 15 bp, Homo sapiens
ataatctttgatgct

SEQ ID NO: 1860484 - DNA, 15 bp, Homo sapiens
taatctttgatgctc

SEQ ID NO: 1860485 - DNA, 15 bp, Homo sapiens
aatctttgatgctca

SEQ ID NO: 1860486 - DNA, 15 bp, Homo sapiens
atctttgatgctcag

SEQ ID NO: 1860487 - DNA, 15 bp, Homo sapiens
tctttgatgctcagt

SEQ ID NO: 1860488 - DNA, 15 bp, Homo sapiens
ctttgatgctcagtc

SEQ ID NO: 1860489 - DNA, 15 bp, Homo sapiens
tttgatgctcagtct

SEQ ID NO: 1860490 - DNA, 15 bp, Homo sapiens
ttgatgctcagtcta

SEQ ID NO: 1860491 - DNA, 15 bp, Homo sapiens
tgatgctcagtctat

SEQ ID NO: 1860492 - DNA, 15 bp, Homo sapiens
gatgctcagtctatg

SEQ ID NO: 1860493 - DNA, 15 bp, Homo sapiens
atgctcagtctatga

SEQ ID NO: 1860494 - DNA, 15 bp, Homo sapiens
tgctcagtctatgac

SEQ ID NO: 1860495 - DNA, 15 bp, Homo sapiens
gctcagtctatgaca

SEQ ID NO: 1860496 - DNA, 15 bp, Homo sapiens
ctcagtctatgacaa

SEQ ID NO: 1860497 - DNA, 15 bp, Homo sapiens
tcagtctatgacaac

SEQ ID NO: 1860498 - DNA, 15 bp, Homo sapiens
cagtctatgacaact

SEQ ID NO: 1860499 - DNA, 15 bp, Homo sapiens
agtctatgacaactc

SEQ ID NO: 1860500 - DNA, 15 bp, Homo sapiens
gtctatgacaactca

SEQ ID NO: 1860501 - DNA, 15 bp, Homo sapiens
tctatgacaactcaa

SEQ ID NO: 1860502 - DNA, 15 bp, Homo sapiens
ctatgacaactcaaa

SEQ ID NO: 1860503 - DNA, 15 bp, Homo sapiens
tatgacaactcaaat

SEQ ID NO: 1860504 - DNA, 15 bp, Homo sapiens
atgacaactcaaatt

SEQ ID NO: 1860505 - DNA, 15 bp, Homo sapiens
tgacaactcaaattc

SEQ ID NO: 1860506 - DNA, 15 bp, Homo sapiens
gacaactcaaattct

SEQ ID NO: 1860507 - DNA, 15 bp, Homo sapiens
acaactcaaattcta

SEQ ID NO: 1860508 - DNA, 15 bp, Homo sapiens
caactcaaattctag

SEQ ID NO: 1860509 - DNA, 15 bp, Homo sapiens
aactcaaattctagg

SEQ ID NO: 1860510 - DNA, 15 bp, Homo sapiens
actcaaattctaggc

SEQ ID NO: 1860511 - DNA, 15 bp, Homo sapiens
ctcaaattctaggcc

SEQ ID NO: 1860512 - DNA, 15 bp, Homo sapiens
tcaaattctaggcct

SEQ ID NO: 1860513 - DNA, 15 bp, Homo sapiens
caaattctaggcctt

SEQ ID NO: 1860514 - DNA, 15 bp, Homo sapiens
aaattctaggccttt

SEQ ID NO: 1860515 - DNA, 15 bp, Homo sapiens
aattctaggcctttc

SEQ ID NO: 1860516 - DNA, 15 bp, Homo sapiens
attctaggcctttcc

SEQ ID NO: 1860517 - DNA, 15 bp, Homo sapiens
ttctaggcctttcct

SEQ ID NO: 1860518 - DNA, 15 bp, Homo sapiens
tctaggcctttcctt

SEQ ID NO: 1860519 - DNA, 15 bp, Homo sapiens
ctaggcctttccttg

SEQ ID NO: 1860520 - DNA, 15 bp, Homo sapiens
taggcctttccttgg

SEQ ID NO: 1860521 - DNA, 15 bp, Homo sapiens
aggcctttccttgga

SEQ ID NO: 1860522 - DNA, 15 bp, Homo sapiens
ggcctttccttggat

SEQ ID NO: 1860523 - DNA, 15 bp, Homo sapiens
gcctttccttggata

SEQ ID NO: 1860524 - DNA, 15 bp, Homo sapiens
cctttccttggataa

SEQ ID NO: 1860525 - DNA, 15 bp, Homo sapiens
ctttccttggataat

SEQ ID NO: 1860526 - DNA, 15 bp, Homo sapiens
tttccttggataatt

SEQ ID NO: 1860527 - DNA, 15 bp, Homo sapiens
ttccttggataattc

SEQ ID NO: 1860528 - DNA, 15 bp, Homo sapiens
tccttggataattca

SEQ ID NO: 1860529 - DNA, 15 bp, Homo sapiens
ccttggataattcag

SEQ ID NO: 1860530 - DNA, 15 bp, Homo sapiens
cttggataattcagc

SEQ ID NO: 1860531 - DNA, 15 bp, Homo sapiens
ttggataattcagcc

SEQ ID NO: 1860532 - DNA, 15 bp, Homo sapiens
tggataattcagcca

SEQ ID NO: 1860533 - DNA, 15 bp, Homo sapiens
ggataattcagccac

SEQ ID NO: 1860534 - DNA, 15 bp, Homo sapiens
gataattcagccact

SEQ ID NO: 1860535 - DNA, 15 bp, Homo sapiens
ataattcagccactg

SEQ ID NO: 1860536 - DNA, 15 bp, Homo sapiens
taattcagccactga

SEQ ID NO: 1860537 - DNA, 15 bp, Homo sapiens
aattcagccactgaa

SEQ ID NO: 1860538 - DNA, 15 bp, Homo sapiens
attcagccactgaac

SEQ ID NO: 1860539 - DNA, 15 bp, Homo sapiens
ttcagccactgaact

SEQ ID NO: 1860540 - DNA, 15 bp, Homo sapiens
tcagccactgaacta

SEQ ID NO: 1860541 - DNA, 15 bp, Homo sapiens
cagccactgaactac

SEQ ID NO: 1860542 - DNA, 15 bp, Homo sapiens
agccactgaactacc

SEQ ID NO: 1860543 - DNA, 15 bp, Homo sapiens
gccactgaactacct

SEQ ID NO: 1860544 - DNA, 15 bp, Homo sapiens
ccactgaactacctt

SEQ ID NO: 1860545 - DNA, 15 bp, Homo sapiens
cactgaactaccttt

SEQ ID NO: 1860546 - DNA, 15 bp, Homo sapiens
actgaactacctttt

SEQ ID NO: 1860547 - DNA, 15 bp, Homo sapiens
ctgaactaccttttg

SEQ ID NO: 1860548 - DNA, 15 bp, Homo sapiens
tgaactaccttttgc

SEQ ID NO: 1860549 - DNA, 15 bp, Homo sapiens
gaactaccttttgct

SEQ ID NO: 1860550 - DNA, 15 bp, Homo sapiens
aactaccttttgctt

SEQ ID NO: 1860551 - DNA, 15 bp, Homo sapiens
actaccttttgcttc

SEQ ID NO: 1860552 - DNA, 15 bp, Homo sapiens
ctaccttttgcttcc

SEQ ID NO: 1860553 - DNA, 15 bp, Homo sapiens
taccttttgcttccc

SEQ ID NO: 1860554 - DNA, 15 bp, Homo sapiens
accttttgcttccct

SEQ ID NO: 1860555 - DNA, 15 bp, Homo sapiens
ccttttgcttccctc

SEQ ID NO: 1860556 - DNA, 15 bp, Homo sapiens
cttttgcttccctct

SEQ ID NO: 1860557 - DNA, 15 bp, Homo sapiens
ttttgcttccctctg

SEQ ID NO: 1860558 - DNA, 15 bp, Homo sapiens
tttgcttccctctgt

SEQ ID NO: 1860559 - DNA, 15 bp, Homo sapiens
ttgcttccctctgta

SEQ ID NO: 1860560 - DNA, 15 bp, Homo sapiens
tgcttccctctgtag

SEQ ID NO: 1860561 - DNA, 15 bp, Homo sapiens
gcttccctctgtagt

SEQ ID NO: 1860562 - DNA, 15 bp, Homo sapiens
cttccctctgtagtc

SEQ ID NO: 1860563 - DNA, 15 bp, Homo sapiens
ttccctctgtagtct

SEQ ID NO: 1860564 - DNA, 15 bp, Homo sapiens
tccctctgtagtctc

SEQ ID NO: 1860565 - DNA, 15 bp, Homo sapiens
ccctctgtagtctct

SEQ ID NO: 1860566 - DNA, 15 bp, Homo sapiens
cctctgtagtctctt

SEQ ID NO: 1860567 - DNA, 15 bp, Homo sapiens
ctctgtagtctcttc

SEQ ID NO: 1860568 - DNA, 15 bp, Homo sapiens
tctgtagtctcttct

SEQ ID NO: 1860569 - DNA, 15 bp, Homo sapiens
ctgtagtctcttctt

SEQ ID NO: 1860570 - DNA, 15 bp, Homo sapiens
tgtagtctcttctta

SEQ ID NO: 1860571 - DNA, 15 bp, Homo sapiens
gtagtctcttcttag

SEQ ID NO: 1860572 - DNA, 15 bp, Homo sapiens
tagtctcttcttagt

SEQ ID NO: 1860573 - DNA, 15 bp, Homo sapiens
agtctcttcttagtt

SEQ ID NO: 1860574 - DNA, 15 bp, Homo sapiens
gtctcttcttagtta

SEQ ID NO: 1860575 - DNA, 15 bp, Homo sapiens
tctcttcttagttag

SEQ ID NO: 1860576 - DNA, 15 bp, Homo sapiens
ctcttcttagttagt

SEQ ID NO: 1860577 - DNA, 15 bp, Homo sapiens
tcttcttagttagta

SEQ ID NO: 1860578 - DNA, 15 bp, Homo sapiens
cttcttagttagtac

SEQ ID NO: 1860579 - DNA, 15 bp, Homo sapiens
ttcttagttagtact

SEQ ID NO: 1860580 - DNA, 15 bp, Homo sapiens
tcttagttagtactc

SEQ ID NO: 1860581 - DNA, 15 bp, Homo sapiens
cttagttagtactct

SEQ ID NO: 1860582 - DNA, 15 bp, Homo sapiens
ttagttagtactctg

SEQ ID NO: 1860583 - DNA, 15 bp, Homo sapiens
tagttagtactctgg

SEQ ID NO: 1860584 - DNA, 15 bp, Homo sapiens
agttagtactctgga

SEQ ID NO: 1860585 - DNA, 15 bp, Homo sapiens
gttagtactctggac

SEQ ID NO: 1860586 - DNA, 15 bp, Homo sapiens
ttagtactctggaca

SEQ ID NO: 1860587 - DNA, 15 bp, Homo sapiens
tagtactctggacaa

SEQ ID NO: 1860588 - DNA, 15 bp, Homo sapiens
agtactctggacaaa

SEQ ID NO: 1860589 - DNA, 15 bp, Homo sapiens
gtactctggacaaac

SEQ ID NO: 1860590 - DNA, 15 bp, Homo sapiens
tactctggacaaact

SEQ ID NO: 1860591 - DNA, 15 bp, Homo sapiens
actctggacaaactt

SEQ ID NO: 1860592 - DNA, 15 bp, Homo sapiens
ctctggacaaacttg

SEQ ID NO: 1860593 - DNA, 15 bp, Homo sapiens
tctggacaaacttgc

SEQ ID NO: 1860594 - DNA, 15 bp, Homo sapiens
ctggacaaacttgct

SEQ ID NO: 1860595 - DNA, 15 bp, Homo sapiens
tggacaaacttgctt

SEQ ID NO: 1860596 - DNA, 15 bp, Homo sapiens
ggacaaacttgcttt

SEQ ID NO: 1860597 - DNA, 15 bp, Homo sapiens
gacaaacttgctttg

SEQ ID NO: 1860598 - DNA, 15 bp, Homo sapiens
acaaacttgctttga

SEQ ID NO: 1860599 - DNA, 15 bp, Homo sapiens
caaacttgctttgac

SEQ ID NO: 1860600 - DNA, 15 bp, Homo sapiens
aaacttgctttgact

SEQ ID NO: 1860601 - DNA, 15 bp, Homo sapiens
aacttgctttgactt

SEQ ID NO: 1860602 - DNA, 15 bp, Homo sapiens
acttgctttgacttt

SEQ ID NO: 1860603 - DNA, 15 bp, Homo sapiens
cttgctttgactttg

SEQ ID NO: 1860604 - DNA, 15 bp, Homo sapiens
ttgctttgactttgt

SEQ ID NO: 1860605 - DNA, 15 bp, Homo sapiens
tgctttgactttgtc

SEQ ID NO: 1860606 - DNA, 15 bp, Homo sapiens
gctttgactttgtcc

SEQ ID NO: 1860607 - DNA, 15 bp, Homo sapiens
ctttgactttgtcca

SEQ ID NO: 1860608 - DNA, 15 bp, Homo sapiens
tttgactttgtccaa

SEQ ID NO: 1860609 - DNA, 15 bp, Homo sapiens
ttgactttgtccaaa

SEQ ID NO: 1860610 - DNA, 15 bp, Homo sapiens
tgactttgtccaaag

SEQ ID NO: 1860611 - DNA, 15 bp, Homo sapiens
gactttgtccaaaga

SEQ ID NO: 1860612 - DNA, 15 bp, Homo sapiens
actttgtccaaagac

SEQ ID NO: 1860613 - DNA, 15 bp, Homo sapiens
ctttgtccaaagaca

SEQ ID NO: 1860614 - DNA, 15 bp, Homo sapiens
tttgtccaaagacac

SEQ ID NO: 1860615 - DNA, 15 bp, Homo sapiens
ttgtccaaagacacc

SEQ ID NO: 1860616 - DNA, 15 bp, Homo sapiens
tgtccaaagacaccc

SEQ ID NO: 1860617 - DNA, 15 bp, Homo sapiens
gtccaaagacaccca

SEQ ID NO: 1860618 - DNA, 15 bp, Homo sapiens
tccaaagacacccat

SEQ ID NO: 1860619 - DNA, 15 bp, Homo sapiens
ccaaagacacccatt

SEQ ID NO: 1860620 - DNA, 15 bp, Homo sapiens
caaagacacccattc

SEQ ID NO: 1860621 - DNA, 15 bp, Homo sapiens
aaagacacccattct

SEQ ID NO: 1860622 - DNA, 15 bp, Homo sapiens
aagacacccattctt

SEQ ID NO: 1860623 - DNA, 15 bp, Homo sapiens
agacacccattcttt

SEQ ID NO: 1860624 - DNA, 15 bp, Homo sapiens
gacacccattcttta

SEQ ID NO: 1860625 - DNA, 15 bp, Homo sapiens
acacccattctttat

SEQ ID NO: 1860626 - DNA, 15 bp, Homo sapiens
cacccattctttatt

SEQ ID NO: 1860627 - DNA, 15 bp, Homo sapiens
acccattctttatta

SEQ ID NO: 1860628 - DNA, 15 bp, Homo sapiens
cccattctttattag

SEQ ID NO: 1860629 - DNA, 15 bp, Homo sapiens
ccattctttattagt

SEQ ID NO: 1860630 - DNA, 15 bp, Homo sapiens
cattctttattagta

SEQ ID NO: 1860631 - DNA, 15 bp, Homo sapiens
attctttattagtat

SEQ ID NO: 1860632 - DNA, 15 bp, Homo sapiens
ttctttattagtata

SEQ ID NO: 1860633 - DNA, 15 bp, Homo sapiens
tctttattagtatat

SEQ ID NO: 1860634 - DNA, 15 bp, Homo sapiens
ctttattagtatatg

SEQ ID NO: 1860635 - DNA, 15 bp, Homo sapiens
tttattagtatatga

SEQ ID NO: 1860636 - DNA, 15 bp, Homo sapiens
ttattagtatatgac

SEQ ID NO: 1860637 - DNA, 15 bp, Homo sapiens
tattagtatatgacg

SEQ ID NO: 1860638 - DNA, 15 bp, Homo sapiens
attagtatatgacga

SEQ ID NO: 1860639 - DNA, 15 bp, Homo sapiens
ttagtatatgacgaa

SEQ ID NO: 1860640 - DNA, 15 bp, Homo sapiens
tagtatatgacgaat

SEQ ID NO: 1860641 - DNA, 15 bp, Homo sapiens
agtatatgacgaatt

SEQ ID NO: 1860642 - DNA, 15 bp, Homo sapiens
gtatatgacgaattt

SEQ ID NO: 1860643 - DNA, 15 bp, Homo sapiens
tatatgacgaatttt

SEQ ID NO: 1860644 - DNA, 15 bp, Homo sapiens
atatgacgaattttg

SEQ ID NO: 1860645 - DNA, 15 bp, Homo sapiens
tatgacgaattttgt

SEQ ID NO: 1860646 - DNA, 15 bp, Homo sapiens
atgacgaattttgtg

SEQ ID NO: 1860647 - DNA, 15 bp, Homo sapiens
tgacgaattttgtgg

SEQ ID NO: 1860648 - DNA, 15 bp, Homo sapiens
gacgaattttgtgga

SEQ ID NO: 1860649 - DNA, 15 bp, Homo sapiens
acgaattttgtggac

SEQ ID NO: 1860650 - DNA, 15 bp, Homo sapiens
cgaattttgtggaca

SEQ ID NO: 1860651 - DNA, 15 bp, Homo sapiens
gaattttgtggacag

SEQ ID NO: 1860652 - DNA, 15 bp, Homo sapiens
aattttgtggacaga

SEQ ID NO: 1860653 - DNA, 15 bp, Homo sapiens
attttgtggacagag

SEQ ID NO: 1860654 - DNA, 15 bp, Homo sapiens
ttttgtggacagaga

SEQ ID NO: 1860655 - DNA, 15 bp, Homo sapiens
tttgtggacagagaa

SEQ ID NO: 1860656 - DNA, 15 bp, Homo sapiens
ttgtggacagagaag

SEQ ID NO: 1860657 - DNA, 15 bp, Homo sapiens
tgtggacagagaaga

SEQ ID NO: 1860658 - DNA, 15 bp, Homo sapiens
gtggacagagaagag

SEQ ID NO: 1860659 - DNA, 15 bp, Homo sapiens
tggacagagaagagt

SEQ ID NO: 1860660 - DNA, 15 bp, Homo sapiens
ggacagagaagagtg

SEQ ID NO: 1860661 - DNA, 15 bp, Homo sapiens
gacagagaagagtgc

SEQ ID NO: 1860662 - DNA, 15 bp, Homo sapiens
acagagaagagtgct

SEQ ID NO: 1860663 - DNA, 15 bp, Homo sapiens
cagagaagagtgcta

SEQ ID NO: 1860664 - DNA, 15 bp, Homo sapiens
agagaagagtgctat

SEQ ID NO: 1860665 - DNA, 15 bp, Homo sapiens
gagaagagtgctatg

SEQ ID NO: 1860666 - DNA, 15 bp, Homo sapiens
agaagagtgctatgg

SEQ ID NO: 1860667 - DNA, 15 bp, Homo sapiens
gaagagtgctatggg

SEQ ID NO: 1860668 - DNA, 15 bp, Homo sapiens
aagagtgctatgggc

SEQ ID NO: 1860669 - DNA, 15 bp, Homo sapiens
agagtgctatgggca

SEQ ID NO: 1860670 - DNA, 15 bp, Homo sapiens
gagtgctatgggcat

SEQ ID NO: 1860671 - DNA, 15 bp, Homo sapiens
agtgctatgggcatg

SEQ ID NO: 1860672 - DNA, 15 bp, Homo sapiens
gtgctatgggcatga

SEQ ID NO: 1860673 - DNA, 15 bp, Homo sapiens
tgctatgggcatgat

SEQ ID NO: 1860674 - DNA, 15 bp, Homo sapiens
gctatgggcatgatg

SEQ ID NO: 1860675 - DNA, 15 bp, Homo sapiens
ctatgggcatgatgg

SEQ ID NO: 1860676 - DNA, 15 bp, Homo sapiens
tatgggcatgatggc

SEQ ID NO: 1860677 - DNA, 15 bp, Homo sapiens
atgggcatgatggca

SEQ ID NO: 1860678 - DNA, 15 bp, Homo sapiens
tgggcatgatggcat

SEQ ID NO: 1860679 - DNA, 15 bp, Homo sapiens
gggcatgatggcata

SEQ ID NO: 1860680 - DNA, 15 bp, Homo sapiens
ggcatgatggcatac

SEQ ID NO: 1860681 - DNA, 15 bp, Homo sapiens
gcatgatggcatact

SEQ ID NO: 1860682 - DNA, 15 bp, Homo sapiens
catgatggcatactt

SEQ ID NO: 1860683 - DNA, 15 bp, Homo sapiens
atgatggcatactta

SEQ ID NO: 1860684 - DNA, 15 bp, Homo sapiens
tgatggcatacttac

SEQ ID NO: 1860685 - DNA, 15 bp, Homo sapiens
gatggcatacttacc

SEQ ID NO: 1860686 - DNA, 15 bp, Homo sapiens
atggcatacttacca

SEQ ID NO: 1860687 - DNA, 15 bp, Homo sapiens
tggcatacttaccac

SEQ ID NO: 1860688 - DNA, 15 bp, Homo sapiens
ggcatacttaccaca

SEQ ID NO: 1860689 - DNA, 15 bp, Homo sapiens
gcatacttaccacac

SEQ ID NO: 1860690 - DNA, 15 bp, Homo sapiens
catacttaccacaca

SEQ ID NO: 1860691 - DNA, 15 bp, Homo sapiens
atacttaccacacag

SEQ ID NO: 1860692 - DNA, 15 bp, Homo sapiens
tacttaccacacaga

SEQ ID NO: 1860693 - DNA, 15 bp, Homo sapiens
acttaccacacagaa

SEQ ID NO: 1860694 - DNA, 15 bp, Homo sapiens
cttaccacacagaat

SEQ ID NO: 1860695 - DNA, 15 bp, Homo sapiens
ttaccacacagaatg

SEQ ID NO: 1860696 - DNA, 15 bp, Homo sapiens
taccacacagaatga

SEQ ID NO: 1860697 - DNA, 15 bp, Homo sapiens
accacacagaatgat

SEQ ID NO: 1860698 - DNA, 15 bp, Homo sapiens
ccacacagaatgatc

SEQ ID NO: 1860699 - DNA, 15 bp, Homo sapiens
cacacagaatgatct

SEQ ID NO: 1860700 - DNA, 15 bp, Homo sapiens
acacagaatgatcta

SEQ ID NO: 1860701 - DNA, 15 bp, Homo sapiens
cacagaatgatctag

SEQ ID NO: 1860702 - DNA, 15 bp, Homo sapiens
acagaatgatctaga

SEQ ID NO: 1860703 - DNA, 15 bp, Homo sapiens
cagaatgatctagaa

SEQ ID NO: 1860704 - DNA, 15 bp, Homo sapiens
agaatgatctagaac

SEQ ID NO: 1860705 - DNA, 15 bp, Homo sapiens
gaatgatctagaact

SEQ ID NO: 1860706 - DNA, 15 bp, Homo sapiens
aatgatctagaactt

SEQ ID NO: 1860707 - DNA, 15 bp, Homo sapiens
atgatctagaacttt

SEQ ID NO: 1860708 - DNA, 15 bp, Homo sapiens
tgatctagaactttg

SEQ ID NO: 1860709 - DNA, 15 bp, Homo sapiens
gatctagaactttgt

SEQ ID NO: 1860710 - DNA, 15 bp, Homo sapiens
atctagaactttgta

SEQ ID NO: 1860711 - DNA, 15 bp, Homo sapiens
tctagaactttgtag

SEQ ID NO: 1860712 - DNA, 15 bp, Homo sapiens
ctagaactttgtagc

SEQ ID NO: 1860713 - DNA, 15 bp, Homo sapiens
tagaactttgtagca

SEQ ID NO: 1860714 - DNA, 15 bp, Homo sapiens
agaactttgtagcaa

SEQ ID NO: 1860715 - DNA, 15 bp, Homo sapiens
gaactttgtagcaac

SEQ ID NO: 1860716 - DNA, 15 bp, Homo sapiens
aactttgtagcaact

SEQ ID NO: 1860717 - DNA, 15 bp, Homo sapiens
actttgtagcaacta

SEQ ID NO: 1860718 - DNA, 15 bp, Homo sapiens
ctttgtagcaactaa

SEQ ID NO: 1860719 - DNA, 15 bp, Homo sapiens
tttgtagcaactaat

SEQ ID NO: 1860720 - DNA, 15 bp, Homo sapiens
ttgtagcaactaatg

SEQ ID NO: 1860721 - DNA, 15 bp, Homo sapiens
tgtagcaactaatgt

SEQ ID NO: 1860722 - DNA, 15 bp, Homo sapiens
gtagcaactaatgtc

SEQ ID NO: 1860723 - DNA, 15 bp, Homo sapiens
tagcaactaatgtcc

SEQ ID NO: 1860724 - DNA, 15 bp, Homo sapiens
agcaactaatgtcct

SEQ ID NO: 1860725 - DNA, 15 bp, Homo sapiens
gcaactaatgtccta

SEQ ID NO: 1860726 - DNA, 15 bp, Homo sapiens
caactaatgtcctag

SEQ ID NO: 1860727 - DNA, 15 bp, Homo sapiens
aactaatgtcctagg

SEQ ID NO: 1860728 - DNA, 15 bp, Homo sapiens
actaatgtcctaggc

SEQ ID NO: 1860729 - DNA, 15 bp, Homo sapiens
ctaatgtcctaggcc

SEQ ID NO: 1860730 - DNA, 15 bp, Homo sapiens
taatgtcctaggcct

SEQ ID NO: 1860731 - DNA, 15 bp, Homo sapiens
aatgtcctaggcctt

SEQ ID NO: 1860732 - DNA, 15 bp, Homo sapiens
atgtcctaggccttt

SEQ ID NO: 1860733 - DNA, 15 bp, Homo sapiens
tgtcctaggcctttt

SEQ ID NO: 1860734 - DNA, 15 bp, Homo sapiens
gtcctaggccttttc

SEQ ID NO: 1860735 - DNA, 15 bp, Homo sapiens
tcctaggccttttcc

SEQ ID NO: 1860736 - DNA, 15 bp, Homo sapiens
cctaggccttttcca

SEQ ID NO: 1860737 - DNA, 15 bp, Homo sapiens
ctaggccttttccag

SEQ ID NO: 1860738 - DNA, 15 bp, Homo sapiens
taggccttttccaga

SEQ ID NO: 1860739 - DNA, 15 bp, Homo sapiens
aggccttttccagag

SEQ ID NO: 1860740 - DNA, 15 bp, Homo sapiens
ggccttttccagagc

SEQ ID NO: 1860741 - DNA, 15 bp, Homo sapiens
gccttttccagagct

SEQ ID NO: 1860742 - DNA, 15 bp, Homo sapiens
ccttttccagagctg

SEQ ID NO: 1860743 - DNA, 15 bp, Homo sapiens
cttttccagagctgc

SEQ ID NO: 1860744 - DNA, 15 bp, Homo sapiens
ttttccagagctgct

SEQ ID NO: 1860745 - DNA, 15 bp, Homo sapiens
tttccagagctgctt

SEQ ID NO: 1860746 - DNA, 15 bp, Homo sapiens
ttccagagctgcttt

SEQ ID NO: 1860747 - DNA, 15 bp, Homo sapiens
tccagagctgctttc

SEQ ID NO: 1860748 - DNA, 15 bp, Homo sapiens
ccagagctgctttct

SEQ ID NO: 1860749 - DNA, 15 bp, Homo sapiens
cagagctgctttctt

SEQ ID NO: 1860750 - DNA, 15 bp, Homo sapiens
agagctgctttcttc

SEQ ID NO: 1860751 - DNA, 15 bp, Homo sapiens
gagctgctttcttca

SEQ ID NO: 1860752 - DNA, 15 bp, Homo sapiens
agctgctttcttcaa

SEQ ID NO: 1860753 - DNA, 15 bp, Homo sapiens
gctgctttcttcaaa

SEQ ID NO: 1860754 - DNA, 15 bp, Homo sapiens
ctgctttcttcaaat

SEQ ID NO: 1860755 - DNA, 15 bp, Homo sapiens
tgctttcttcaaatg

SEQ ID NO: 1860756 - DNA, 15 bp, Homo sapiens
gctttcttcaaatgg

SEQ ID NO: 1860757 - DNA, 15 bp, Homo sapiens
ctttcttcaaatggg

SEQ ID NO: 1860758 - DNA, 15 bp, Homo sapiens
tttcttcaaatgggg

SEQ ID NO: 1860759 - DNA, 15 bp, Homo sapiens
ttcttcaaatggggc

SEQ ID NO: 1860760 - DNA, 15 bp, Homo sapiens
tcttcaaatggggca

SEQ ID NO: 1860761 - DNA, 15 bp, Homo sapiens
cttcaaatggggcaa

SEQ ID NO: 1860762 - DNA, 15 bp, Homo sapiens
ttcaaatggggcaac

SEQ ID NO: 1860763 - DNA, 15 bp, Homo sapiens
tcaaatggggcaaca

SEQ ID NO: 1860764 - DNA, 15 bp, Homo sapiens
caaatggggcaacag

SEQ ID NO: 1860765 - DNA, 15 bp, Homo sapiens
aaatggggcaacaga

SEQ ID NO: 1860766 - DNA, 15 bp, Homo sapiens
aatggggcaacagac

SEQ ID NO: 1860767 - DNA, 15 bp, Homo sapiens
atggggcaacagacg

SEQ ID NO: 1860768 - DNA, 15 bp, Homo sapiens
tggggcaacagacgt

SEQ ID NO: 1860769 - DNA, 15 bp, Homo sapiens
ggggcaacagacgtg

SEQ ID NO: 1860770 - DNA, 15 bp, Homo sapiens
gggcaacagacgtga

SEQ ID NO: 1860771 - DNA, 15 bp, Homo sapiens
ggcaacagacgtgat

SEQ ID NO: 1860772 - DNA, 15 bp, Homo sapiens
gcaacagacgtgatg

SEQ ID NO: 1860773 - DNA, 15 bp, Homo sapiens
caacagacgtgatgc

SEQ ID NO: 1860774 - DNA, 15 bp, Homo sapiens
aacagacgtgatgcc

SEQ ID NO: 1860775 - DNA, 15 bp, Homo sapiens
acagacgtgatgccg

SEQ ID NO: 1860776 - DNA, 15 bp, Homo sapiens
cagacgtgatgccgc

SEQ ID NO: 1860777 - DNA, 15 bp, Homo sapiens
agacgtgatgccgca

SEQ ID NO: 1860778 - DNA, 15 bp, Homo sapiens
gacgtgatgccgcat

SEQ ID NO: 1860779 - DNA, 15 bp, Homo sapiens
acgtgatgccgcatt

SEQ ID NO: 1860780 - DNA, 15 bp, Homo sapiens
cgtgatgccgcattt

SEQ ID NO: 1860781 - DNA, 15 bp, Homo sapiens
gtgatgccgcatttt

SEQ ID NO: 1860782 - DNA, 15 bp, Homo sapiens
tgatgccgcattttc

SEQ ID NO: 1860783 - DNA, 15 bp, Homo sapiens
gatgccgcattttct

SEQ ID NO: 1860784 - DNA, 15 bp, Homo sapiens
atgccgcattttcta

SEQ ID NO: 1860785 - DNA, 15 bp, Homo sapiens
tgccgcattttctaa

SEQ ID NO: 1860786 - DNA, 15 bp, Homo sapiens
gccgcattttctaaa

SEQ ID NO: 1860787 - DNA, 15 bp, Homo sapiens
ccgcattttctaaag

SEQ ID NO: 1860788 - DNA, 15 bp, Homo sapiens
cgcattttctaaagc

SEQ ID NO: 1860789 - DNA, 15 bp, Homo sapiens
gcattttctaaagct

SEQ ID NO: 1860790 - DNA, 15 bp, Homo sapiens
cattttctaaagctc

SEQ ID NO: 1860791 - DNA, 15 bp, Homo sapiens
attttctaaagctct

SEQ ID NO: 1860792 - DNA, 15 bp, Homo sapiens
ttttctaaagctctt

SEQ ID NO: 1860793 - DNA, 15 bp, Homo sapiens
tttctaaagctcttc

SEQ ID NO: 1860794 - DNA, 15 bp, Homo sapiens
ttctaaagctcttcc

SEQ ID NO: 1860795 - DNA, 15 bp, Homo sapiens
tctaaagctcttccc

SEQ ID NO: 1860796 - DNA, 15 bp, Homo sapiens
ctaaagctcttccca

SEQ ID NO: 1860797 - DNA, 15 bp, Homo sapiens
taaagctcttcccaa

SEQ ID NO: 1860798 - DNA, 15 bp, Homo sapiens
aaagctcttcccaac

SEQ ID NO: 1860799 - DNA, 15 bp, Homo sapiens
aagctcttcccaacc

SEQ ID NO: 1860800 - DNA, 15 bp, Homo sapiens
agctcttcccaacct

SEQ ID NO: 1860801 - DNA, 15 bp, Homo sapiens
gctcttcccaacctc

SEQ ID NO: 1860802 - DNA, 15 bp, Homo sapiens
ctcttcccaacctcc

SEQ ID NO: 1860803 - DNA, 15 bp, Homo sapiens
tcttcccaacctcca

SEQ ID NO: 1860804 - DNA, 15 bp, Homo sapiens
cttcccaacctccaa

SEQ ID NO: 1860805 - DNA, 15 bp, Homo sapiens
ttcccaacctccaaa

SEQ ID NO: 1860806 - DNA, 15 bp, Homo sapiens
tcccaacctccaaaa

SEQ ID NO: 1860807 - DNA, 15 bp, Homo sapiens
cccaacctccaaaac

SEQ ID NO: 1860808 - DNA, 15 bp, Homo sapiens
ccaacctccaaaaca

SEQ ID NO: 1860809 - DNA, 15 bp, Homo sapiens
caacctccaaaacag

SEQ ID NO: 1860810 - DNA, 15 bp, Homo sapiens
aacctccaaaacagc

SEQ ID NO: 1860811 - DNA, 15 bp, Homo sapiens
acctccaaaacagct

SEQ ID NO: 1860812 - DNA, 15 bp, Homo sapiens
cctccaaaacagctt

SEQ ID NO: 1860813 - DNA, 15 bp, Homo sapiens
ctccaaaacagcttc

SEQ ID NO: 1860814 - DNA, 15 bp, Homo sapiens
tccaaaacagcttct

SEQ ID NO: 1860815 - DNA, 15 bp, Homo sapiens
ccaaaacagcttctt

SEQ ID NO: 1860816 - DNA, 15 bp, Homo sapiens
caaaacagcttcttt

SEQ ID NO: 1860817 - DNA, 15 bp, Homo sapiens
aaaacagcttctttt

SEQ ID NO: 1860818 - DNA, 15 bp, Homo sapiens
aaacagcttcttttc

SEQ ID NO: 1860819 - DNA, 15 bp, Homo sapiens
aacagcttcttttct

SEQ ID NO: 1860820 - DNA, 15 bp, Homo sapiens
acagcttcttttctt

SEQ ID NO: 1860821 - DNA, 15 bp, Homo sapiens
cagcttcttttcttt

SEQ ID NO: 1860822 - DNA, 15 bp, Homo sapiens
agcttcttttctttc

SEQ ID NO: 1860823 - DNA, 15 bp, Homo sapiens
gcttcttttctttct

SEQ ID NO: 1860824 - DNA, 15 bp, Homo sapiens
cttcttttctttctg

SEQ ID NO: 1860825 - DNA, 15 bp, Homo sapiens
ttcttttctttctgc

SEQ ID NO: 1860826 - DNA, 15 bp, Homo sapiens
tcttttctttctgct

SEQ ID NO: 1860827 - DNA, 15 bp, Homo sapiens
cttttctttctgctg

SEQ ID NO: 1860828 - DNA, 15 bp, Homo sapiens
ttttctttctgctga

SEQ ID NO: 1860829 - DNA, 15 bp, Homo sapiens
tttctttctgctgag

SEQ ID NO: 1860830 - DNA, 15 bp, Homo sapiens
ttctttctgctgagg

SEQ ID NO: 1860831 - DNA, 15 bp, Homo sapiens
tctttctgctgagga

SEQ ID NO: 1860832 - DNA, 15 bp, Homo sapiens
ctttctgctgaggaa

SEQ ID NO: 1860833 - DNA, 15 bp, Homo sapiens
tttctgctgaggaag

SEQ ID NO: 1860834 - DNA, 15 bp, Homo sapiens
ttctgctgaggaagc

SEQ ID NO: 1860835 - DNA, 15 bp, Homo sapiens
tctgctgaggaagct

SEQ ID NO: 1860836 - DNA, 15 bp, Homo sapiens
ctgctgaggaagcta

SEQ ID NO: 1860837 - DNA, 15 bp, Homo sapiens
tgctgaggaagctaa

SEQ ID NO: 1860838 - DNA, 15 bp, Homo sapiens
gctgaggaagctaaa

SEQ ID NO: 1860839 - DNA, 15 bp, Homo sapiens
ctgaggaagctaaat

SEQ ID NO: 1860840 - DNA, 15 bp, Homo sapiens
tgaggaagctaaatt

SEQ ID NO: 1860841 - DNA, 15 bp, Homo sapiens
gaggaagctaaattt

SEQ ID NO: 1860842 - DNA, 15 bp, Homo sapiens
aggaagctaaattta

SEQ ID NO: 1860843 - DNA, 15 bp, Homo sapiens
ggaagctaaatttac

SEQ ID NO: 1860844 - DNA, 15 bp, Homo sapiens
gaagctaaatttact

SEQ ID NO: 1860845 - DNA, 15 bp, Homo sapiens
aagctaaatttactt

SEQ ID NO: 1860846 - DNA, 15 bp, Homo sapiens
agctaaatttacttt

SEQ ID NO: 1860847 - DNA, 15 bp, Homo sapiens
gctaaatttactttc

SEQ ID NO: 1860848 - DNA, 15 bp, Homo sapiens
ctaaatttactttca

SEQ ID NO: 1860849 - DNA, 15 bp, Homo sapiens
taaatttactttcag

SEQ ID NO: 1860850 - DNA, 15 bp, Homo sapiens
aaatttactttcagt

SEQ ID NO: 1860851 - DNA, 15 bp, Homo sapiens
aatttactttcagtc

SEQ ID NO: 1860852 - DNA, 15 bp, Homo sapiens
atttactttcagtcc

SEQ ID NO: 1860853 - DNA, 15 bp, Homo sapiens
tttactttcagtcct

SEQ ID NO: 1860854 - DNA, 15 bp, Homo sapiens
ttactttcagtcctc

SEQ ID NO: 1860855 - DNA, 15 bp, Homo sapiens
tactttcagtcctca

SEQ ID NO: 1860856 - DNA, 15 bp, Homo sapiens
actttcagtcctcaa

SEQ ID NO: 1860857 - DNA, 15 bp, Homo sapiens
ctttcagtcctcaaa

SEQ ID NO: 1860858 - DNA, 15 bp, Homo sapiens
tttcagtcctcaaat

SEQ ID NO: 1860859 - DNA, 15 bp, Homo sapiens
ttcagtcctcaaatg

SEQ ID NO: 1860860 - DNA, 15 bp, Homo sapiens
tcagtcctcaaatgg

SEQ ID NO: 1860861 - DNA, 15 bp, Homo sapiens
cagtcctcaaatggt

SEQ ID NO: 1860862 - DNA, 15 bp, Homo sapiens
agtcctcaaatggtg

SEQ ID NO: 1860863 - DNA, 15 bp, Homo sapiens
gtcctcaaatggtga

SEQ ID NO: 1860864 - DNA, 15 bp, Homo sapiens
tcctcaaatggtgaa

SEQ ID NO: 1860865 - DNA, 15 bp, Homo sapiens
cctcaaatggtgaaa

SEQ ID NO: 1860866 - DNA, 15 bp, Homo sapiens
ctcaaatggtgaaaa

SEQ ID NO: 1860867 - DNA, 15 bp, Homo sapiens
tcaaatggtgaaaaa

SEQ ID NO: 1860868 - DNA, 15 bp, Homo sapiens
caaatggtgaaaaaa

SEQ ID NO: 1860869 - DNA, 15 bp, Homo sapiens
aaatggtgaaaaaaa

SEQ ID NO: 1860870 - DNA, 15 bp, Homo sapiens
aatggtgaaaaaaag

SEQ ID NO: 1860871 - DNA, 15 bp, Homo sapiens
atggtgaaaaaaagg

SEQ ID NO: 1860872 - DNA, 15 bp, Homo sapiens
tggtgaaaaaaaggg

SEQ ID NO: 1860873 - DNA, 15 bp, Homo sapiens
ggtgaaaaaaagggg

SEQ ID NO: 1860874 - DNA, 15 bp, Homo sapiens
gtgaaaaaaagggga

SEQ ID NO: 1860875 - DNA, 15 bp, Homo sapiens
tgaaaaaaaggggag

SEQ ID NO: 1860876 - DNA, 15 bp, Homo sapiens
gaaaaaaaggggagc

SEQ ID NO: 1860877 - DNA, 15 bp, Homo sapiens
aaaaaaaggggagcc

SEQ ID NO: 1860878 - DNA, 15 bp, Homo sapiens
aaaaaaggggagcct

SEQ ID NO: 1860879 - DNA, 15 bp, Homo sapiens
aaaaaggggagcctc

SEQ ID NO: 1860880 - DNA, 15 bp, Homo sapiens
aaaaggggagcctcc

SEQ ID NO: 1860881 - DNA, 15 bp, Homo sapiens
aaaggggagcctccc

SEQ ID NO: 1860882 - DNA, 15 bp, Homo sapiens
aaggggagcctcccc

SEQ ID NO: 1860883 - DNA, 15 bp, Homo sapiens
aggggagcctcccca

SEQ ID NO: 1860884 - DNA, 15 bp, Homo sapiens
ggggagcctccccag

SEQ ID NO: 1860885 - DNA, 15 bp, Homo sapiens
gggagcctccccaga

SEQ ID NO: 1860886 - DNA, 15 bp, Homo sapiens
ggagcctccccagat

SEQ ID NO: 1860887 - DNA, 15 bp, Homo sapiens
gagcctccccagatg

SEQ ID NO: 1860888 - DNA, 15 bp, Homo sapiens
agcctccccagatgt

SEQ ID NO: 1860889 - DNA, 15 bp, Homo sapiens
gcctccccagatgtc

SEQ ID NO: 1860890 - DNA, 15 bp, Homo sapiens
cctccccagatgtct

SEQ ID NO: 1860891 - DNA, 15 bp, Homo sapiens
ctccccagatgtctc

SEQ ID NO: 1860892 - DNA, 15 bp, Homo sapiens
tccccagatgtctca

SEQ ID NO: 1860893 - DNA, 15 bp, Homo sapiens
ccccagatgtctcac

SEQ ID NO: 1860894 - DNA, 15 bp, Homo sapiens
cccagatgtctcaca

SEQ ID NO: 1860895 - DNA, 15 bp, Homo sapiens
ccagatgtctcacac

SEQ ID NO: 1860896 - DNA, 15 bp, Homo sapiens
cagatgtctcacact

SEQ ID NO: 1860897 - DNA, 15 bp, Homo sapiens
agatgtctcacactg

SEQ ID NO: 1860898 - DNA, 15 bp, Homo sapiens
gatgtctcacactga

SEQ ID NO: 1860899 - DNA, 15 bp, Homo sapiens
atgtctcacactgat

SEQ ID NO: 1860900 - DNA, 15 bp, Homo sapiens
tgtctcacactgata

SEQ ID NO: 1860901 - DNA, 15 bp, Homo sapiens
gtctcacactgataa

SEQ ID NO: 1860902 - DNA, 15 bp, Homo sapiens
tctcacactgataag

SEQ ID NO: 1860903 - DNA, 15 bp, Homo sapiens
ctcacactgataaga

SEQ ID NO: 1860904 - DNA, 15 bp, Homo sapiens
tcacactgataagag

SEQ ID NO: 1860905 - DNA, 15 bp, Homo sapiens
cacactgataagagg

SEQ ID NO: 1860906 - DNA, 15 bp, Homo sapiens
acactgataagagga

SEQ ID NO: 1860907 - DNA, 15 bp, Homo sapiens
cactgataagaggaa

SEQ ID NO: 1860908 - DNA, 15 bp, Homo sapiens
actgataagaggaag

SEQ ID NO: 1860909 - DNA, 15 bp, Homo sapiens
ctgataagaggaaga

SEQ ID NO: 1860910 - DNA, 15 bp, Homo sapiens
tgataagaggaagaa

SEQ ID NO: 1860911 - DNA, 15 bp, Homo sapiens
gataagaggaagaaa

SEQ ID NO: 1860912 - DNA, 15 bp, Homo sapiens
ataagaggaagaaat

SEQ ID NO: 1860913 - DNA, 15 bp, Homo sapiens
taagaggaagaaata

SEQ ID NO: 1860914 - DNA, 15 bp, Homo sapiens
aagaggaagaaatat

SEQ ID NO: 1860915 - DNA, 15 bp, Homo sapiens
agaggaagaaatatc

SEQ ID NO: 1860916 - DNA, 15 bp, Homo sapiens
gaggaagaaatatcc

SEQ ID NO: 1860917 - DNA, 15 bp, Homo sapiens
aggaagaaatatcca

SEQ ID NO: 1860918 - DNA, 15 bp, Homo sapiens
ggaagaaatatccaa

SEQ ID NO: 1860919 - DNA, 15 bp, Homo sapiens
gaagaaatatccaaa

SEQ ID NO: 1860920 - DNA, 15 bp, Homo sapiens
aagaaatatccaaag

SEQ ID NO: 1860921 - DNA, 15 bp, Homo sapiens
agaaatatccaaagc

SEQ ID NO: 1860922 - DNA, 15 bp, Homo sapiens
gaaatatccaaagcc

SEQ ID NO: 1860923 - DNA, 15 bp, Homo sapiens
aaatatccaaagcca

SEQ ID NO: 1860924 - DNA, 15 bp, Homo sapiens
aatatccaaagccat

SEQ ID NO: 1860925 - DNA, 15 bp, Homo sapiens
atatccaaagccatt

SEQ ID NO: 1860926 - DNA, 15 bp, Homo sapiens
tatccaaagccatta

SEQ ID NO: 1860927 - DNA, 15 bp, Homo sapiens
atccaaagccattag

SEQ ID NO: 1860928 - DNA, 15 bp, Homo sapiens
tccaaagccattagc

SEQ ID NO: 1860929 - DNA, 15 bp, Homo sapiens
ccaaagccattagcc

SEQ ID NO: 1860930 - DNA, 15 bp, Homo sapiens
caaagccattagcca

SEQ ID NO: 1860931 - DNA, 15 bp, Homo sapiens
aaagccattagccag

SEQ ID NO: 1860932 - DNA, 15 bp, Homo sapiens
aagccattagccagt

SEQ ID NO: 1860933 - DNA, 15 bp, Homo sapiens
agccattagccagtg

SEQ ID NO: 1860934 - DNA, 15 bp, Homo sapiens
gccattagccagtgg

SEQ ID NO: 1860935 - DNA, 15 bp, Homo sapiens
ccattagccagtggt

SEQ ID NO: 1860936 - DNA, 15 bp, Homo sapiens
cattagccagtggtg

SEQ ID NO: 1860937 - DNA, 15 bp, Homo sapiens
attagccagtggtga

SEQ ID NO: 1860938 - DNA, 15 bp, Homo sapiens
ttagccagtggtgac

SEQ ID NO: 1860939 - DNA, 15 bp, Homo sapiens
tagccagtggtgaca

SEQ ID NO: 1860940 - DNA, 15 bp, Homo sapiens
agccagtggtgacaa

SEQ ID NO: 1860941 - DNA, 15 bp, Homo sapiens
gccagtggtgacaaa

SEQ ID NO: 1860942 - DNA, 15 bp, Homo sapiens
ccagtggtgacaaac

SEQ ID NO: 1860943 - DNA, 15 bp, Homo sapiens
cagtggtgacaaaca

SEQ ID NO: 1860944 - DNA, 15 bp, Homo sapiens
agtggtgacaaacag

SEQ ID NO: 1860945 - DNA, 15 bp, Homo sapiens
gtggtgacaaacagt

SEQ ID NO: 1860946 - DNA, 15 bp, Homo sapiens
tggtgacaaacagtg

SEQ ID NO: 1860947 - DNA, 15 bp, Homo sapiens
ggtgacaaacagtgt

SEQ ID NO: 1860948 - DNA, 15 bp, Homo sapiens
gtgacaaacagtgtg

SEQ ID NO: 1860949 - DNA, 15 bp, Homo sapiens
tgacaaacagtgtgt

SEQ ID NO: 1860950 - DNA, 15 bp, Homo sapiens
gacaaacagtgtgtg

SEQ ID NO: 1860951 - DNA, 15 bp, Homo sapiens
acaaacagtgtgtga

SEQ ID NO: 1860952 - DNA, 15 bp, Homo sapiens
caaacagtgtgtgaa

SEQ ID NO: 1860953 - DNA, 15 bp, Homo sapiens
aaacagtgtgtgaat

SEQ ID NO: 1860954 - DNA, 15 bp, Homo sapiens
aacagtgtgtgaatt

SEQ ID NO: 1860955 - DNA, 15 bp, Homo sapiens
acagtgtgtgaattg

SEQ ID NO: 1860956 - DNA, 15 bp, Homo sapiens
cagtgtgtgaattgt

SEQ ID NO: 1860957 - DNA, 15 bp, Homo sapiens
agtgtgtgaattgta

SEQ ID NO: 1860958 - DNA, 15 bp, Homo sapiens
gtgtgtgaattgtaa

SEQ ID NO: 1860959 - DNA, 15 bp, Homo sapiens
tgtgtgaattgtaac

SEQ ID NO: 1860960 - DNA, 15 bp, Homo sapiens
gtgtgaattgtaacg

SEQ ID NO: 1860961 - DNA, 15 bp, Homo sapiens
tgtgaattgtaacgg

SEQ ID NO: 1860962 - DNA, 15 bp, Homo sapiens
gtgaattgtaacgga

SEQ ID NO: 1860963 - DNA, 15 bp, Homo sapiens
tgaattgtaacggac

SEQ ID NO: 1860964 - DNA, 15 bp, Homo sapiens
gaattgtaacggacg

SEQ ID NO: 1860965 - DNA, 15 bp, Homo sapiens
aattgtaacggacgc

SEQ ID NO: 1860966 - DNA, 15 bp, Homo sapiens
attgtaacggacgca

SEQ ID NO: 1860967 - DNA, 15 bp, Homo sapiens
ttgtaacggacgcag

SEQ ID NO: 1860968 - DNA, 15 bp, Homo sapiens
tgtaacggacgcagg

SEQ ID NO: 1860969 - DNA, 15 bp, Homo sapiens
gtaacggacgcaggg

SEQ ID NO: 1860970 - DNA, 15 bp, Homo sapiens
taacggacgcagggt

SEQ ID NO: 1860971 - DNA, 15 bp, Homo sapiens
aacggacgcagggtg

SEQ ID NO: 1860972 - DNA, 15 bp, Homo sapiens
acggacgcagggtgg

SEQ ID NO: 1860973 - DNA, 15 bp, Homo sapiens
cggacgcagggtggc

SEQ ID NO: 1860974 - DNA, 15 bp, Homo sapiens
ggacgcagggtggct

SEQ ID NO: 1860975 - DNA, 15 bp, Homo sapiens
gacgcagggtggctg

SEQ ID NO: 1860976 - DNA, 15 bp, Homo sapiens
acgcagggtggctga

SEQ ID NO: 1860977 - DNA, 15 bp, Homo sapiens
cgcagggtggctgaa

SEQ ID NO: 1860978 - DNA, 15 bp, Homo sapiens
gcagggtggctgaag

SEQ ID NO: 1860979 - DNA, 15 bp, Homo sapiens
cagggtggctgaaga

SEQ ID NO: 1860980 - DNA, 15 bp, Homo sapiens
agggtggctgaagaa

SEQ ID NO: 1860981 - DNA, 15 bp, Homo sapiens
gggtggctgaagaaa

SEQ ID NO: 1860982 - DNA, 15 bp, Homo sapiens
ggtggctgaagaaaa

SEQ ID NO: 1860983 - DNA, 15 bp, Homo sapiens
gtggctgaagaaaag

SEQ ID NO: 1860984 - DNA, 15 bp, Homo sapiens
tggctgaagaaaaga

SEQ ID NO: 1860985 - DNA, 15 bp, Homo sapiens
ggctgaagaaaagac

SEQ ID NO: 1860986 - DNA, 15 bp, Homo sapiens
gctgaagaaaagact

SEQ ID NO: 1860987 - DNA, 15 bp, Homo sapiens
ctgaagaaaagactg

SEQ ID NO: 1860988 - DNA, 15 bp, Homo sapiens
tgaagaaaagactga

SEQ ID NO: 1860989 - DNA, 15 bp, Homo sapiens
gaagaaaagactgag

SEQ ID NO: 1860990 - DNA, 15 bp, Homo sapiens
aagaaaagactgagt

SEQ ID NO: 1860991 - DNA, 15 bp, Homo sapiens
agaaaagactgagtg

SEQ ID NO: 1860992 - DNA, 15 bp, Homo sapiens
gaaaagactgagtgg

SEQ ID NO: 1860993 - DNA, 15 bp, Homo sapiens
aaaagactgagtggt

SEQ ID NO: 1860994 - DNA, 15 bp, Homo sapiens
aaagactgagtggtt

SEQ ID NO: 1860995 - DNA, 15 bp, Homo sapiens
aagactgagtggttg

SEQ ID NO: 1860996 - DNA, 15 bp, Homo sapiens
agactgagtggttgg

SEQ ID NO: 1860997 - DNA, 15 bp, Homo sapiens
gactgagtggttgga

SEQ ID NO: 1860998 - DNA, 15 bp, Homo sapiens
actgagtggttggag

SEQ ID NO: 1860999 - DNA, 15 bp, Homo sapiens
ctgagtggttggaga

SEQ ID NO: 1861000 - DNA, 15 bp, Homo sapiens
tgagtggttggagac

SEQ ID NO: 1861001 - DNA, 15 bp, Homo sapiens
gagtggttggagaca

SEQ ID NO: 1861002 - DNA, 15 bp, Homo sapiens
agtggttggagacag

SEQ ID NO: 1861003 - DNA, 15 bp, Homo sapiens
gtggttggagacagg

SEQ ID NO: 1861004 - DNA, 15 bp, Homo sapiens
tggttggagacaggc

SEQ ID NO: 1861005 - DNA, 15 bp, Homo sapiens
ggttggagacaggca

SEQ ID NO: 1861006 - DNA, 15 bp, Homo sapiens
gttggagacaggcag

SEQ ID NO: 1861007 - DNA, 15 bp, Homo sapiens
ttggagacaggcagg

SEQ ID NO: 1861008 - DNA, 15 bp, Homo sapiens
tggagacaggcaggc

SEQ ID NO: 1861009 - DNA, 15 bp, Homo sapiens
ggagacaggcaggca

SEQ ID NO: 1861010 - DNA, 15 bp, Homo sapiens
gagacaggcaggcag

SEQ ID NO: 1861011 - DNA, 15 bp, Homo sapiens
agacaggcaggcagg

SEQ ID NO: 1861012 - DNA, 15 bp, Homo sapiens
gacaggcaggcaggc

SEQ ID NO: 1861013 - DNA, 15 bp, Homo sapiens
acaggcaggcaggcc

SEQ ID NO: 1861014 - DNA, 15 bp, Homo sapiens
caggcaggcaggcct

SEQ ID NO: 1861015 - DNA, 15 bp, Homo sapiens
aggcaggcaggcctg

SEQ ID NO: 1861016 - DNA, 15 bp, Homo sapiens
ggcaggcaggcctga

SEQ ID NO: 1861017 - DNA, 15 bp, Homo sapiens
gcaggcaggcctgag

SEQ ID NO: 1861018 - DNA, 15 bp, Homo sapiens
caggcaggcctgagt

SEQ ID NO: 1861019 - DNA, 15 bp, Homo sapiens
aggcaggcctgagtt

SEQ ID NO: 1861020 - DNA, 15 bp, Homo sapiens
ggcaggcctgagttt

SEQ ID NO: 1861021 - DNA, 15 bp, Homo sapiens
gcaggcctgagtttc

SEQ ID NO: 1861022 - DNA, 15 bp, Homo sapiens
caggcctgagtttca

SEQ ID NO: 1861023 - DNA, 15 bp, Homo sapiens
aggcctgagtttcaa

SEQ ID NO: 1861024 - DNA, 15 bp, Homo sapiens
ggcctgagtttcaaa

SEQ ID NO: 1861025 - DNA, 15 bp, Homo sapiens
gcctgagtttcaaat

SEQ ID NO: 1861026 - DNA, 15 bp, Homo sapiens
cctgagtttcaaatc

SEQ ID NO: 1861027 - DNA, 15 bp, Homo sapiens
ctgagtttcaaatcc

SEQ ID NO: 1861028 - DNA, 15 bp, Homo sapiens
tgagtttcaaatcct

SEQ ID NO: 1861029 - DNA, 15 bp, Homo sapiens
gagtttcaaatcctt

SEQ ID NO: 1861030 - DNA, 15 bp, Homo sapiens
agtttcaaatcctta

SEQ ID NO: 1861031 - DNA, 15 bp, Homo sapiens
gtttcaaatccttac

SEQ ID NO: 1861032 - DNA, 15 bp, Homo sapiens
tttcaaatccttacc

SEQ ID NO: 1861033 - DNA, 15 bp, Homo sapiens
ttcaaatccttaccc

SEQ ID NO: 1861034 - DNA, 15 bp, Homo sapiens
tcaaatccttaccct

SEQ ID NO: 1861035 - DNA, 15 bp, Homo sapiens
caaatccttaccctg

SEQ ID NO: 1861036 - DNA, 15 bp, Homo sapiens
aaatccttaccctgt

SEQ ID NO: 1861037 - DNA, 15 bp, Homo sapiens
aatccttaccctgtc

SEQ ID NO: 1861038 - DNA, 15 bp, Homo sapiens
atccttaccctgtca

SEQ ID NO: 1861039 - DNA, 15 bp, Homo sapiens
tccttaccctgtcac

SEQ ID NO: 1861040 - DNA, 15 bp, Homo sapiens
ccttaccctgtcact

SEQ ID NO: 1861041 - DNA, 15 bp, Homo sapiens
cttaccctgtcactt

SEQ ID NO: 1861042 - DNA, 15 bp, Homo sapiens
ttaccctgtcacttt

SEQ ID NO: 1861043 - DNA, 15 bp, Homo sapiens
taccctgtcactttc

SEQ ID NO: 1861044 - DNA, 15 bp, Homo sapiens
accctgtcactttca

SEQ ID NO: 1861045 - DNA, 15 bp, Homo sapiens
ccctgtcactttcag

SEQ ID NO: 1861046 - DNA, 15 bp, Homo sapiens
cctgtcactttcagc

SEQ ID NO: 1861047 - DNA, 15 bp, Homo sapiens
ctgtcactttcagca

SEQ ID NO: 1861048 - DNA, 15 bp, Homo sapiens
tgtcactttcagcac

SEQ ID NO: 1861049 - DNA, 15 bp, Homo sapiens
gtcactttcagcact

SEQ ID NO: 1861050 - DNA, 15 bp, Homo sapiens
tcactttcagcactt

SEQ ID NO: 1861051 - DNA, 15 bp, Homo sapiens
cactttcagcacttt

SEQ ID NO: 1861052 - DNA, 15 bp, Homo sapiens
actttcagcactttg

SEQ ID NO: 1861053 - DNA, 15 bp, Homo sapiens
ctttcagcactttgg

SEQ ID NO: 1861054 - DNA, 15 bp, Homo sapiens
tttcagcactttggg

SEQ ID NO: 1861055 - DNA, 15 bp, Homo sapiens
ttcagcactttggga

SEQ ID NO: 1861056 - DNA, 15 bp, Homo sapiens
tcagcactttgggat

SEQ ID NO: 1861057 - DNA, 15 bp, Homo sapiens
cagcactttgggatg

SEQ ID NO: 1861058 - DNA, 15 bp, Homo sapiens
agcactttgggatgc

SEQ ID NO: 1861059 - DNA, 15 bp, Homo sapiens
gcactttgggatgct

SEQ ID NO: 1861060 - DNA, 15 bp, Homo sapiens
cactttgggatgctg

SEQ ID NO: 1861061 - DNA, 15 bp, Homo sapiens
actttgggatgctga

SEQ ID NO: 1861062 - DNA, 15 bp, Homo sapiens
ctttgggatgctgag

SEQ ID NO: 1861063 - DNA, 15 bp, Homo sapiens
tttgggatgctgagg

SEQ ID NO: 1861064 - DNA, 15 bp, Homo sapiens
ttgggatgctgaggc

SEQ ID NO: 1861065 - DNA, 15 bp, Homo sapiens
tgggatgctgaggca

SEQ ID NO: 1861066 - DNA, 15 bp, Homo sapiens
gggatgctgaggcag

SEQ ID NO: 1861067 - DNA, 15 bp, Homo sapiens
ggatgctgaggcagg

SEQ ID NO: 1861068 - DNA, 15 bp, Homo sapiens
gatgctgaggcaggc

SEQ ID NO: 1861069 - DNA, 15 bp, Homo sapiens
atgctgaggcaggca

SEQ ID NO: 1861070 - DNA, 15 bp, Homo sapiens
tgctgaggcaggcag

SEQ ID NO: 1861071 - DNA, 15 bp, Homo sapiens
ggcaggcagatcacg

SEQ ID NO: 1861072 - DNA, 15 bp, Homo sapiens
gcaggcagatcacga

SEQ ID NO: 1861073 - DNA, 15 bp, Homo sapiens
caggcagatcacgag

SEQ ID NO: 1861074 - DNA, 15 bp, Homo sapiens
aggcagatcacgagg

SEQ ID NO: 1861075 - DNA, 15 bp, Homo sapiens
ggcagatcacgaggt

SEQ ID NO: 1861076 - DNA, 15 bp, Homo sapiens
gcagatcacgaggtc

SEQ ID NO: 1861077 - DNA, 15 bp, Homo sapiens
cagatcacgaggtca

SEQ ID NO: 1861078 - DNA, 15 bp, Homo sapiens
agatcacgaggtcaa

SEQ ID NO: 1861079 - DNA, 15 bp, Homo sapiens
gatcacgaggtcaag

SEQ ID NO: 1861080 - DNA, 15 bp, Homo sapiens
atcacgaggtcaaga

SEQ ID NO: 1861081 - DNA, 15 bp, Homo sapiens
tcacgaggtcaagag

SEQ ID NO: 1861082 - DNA, 15 bp, Homo sapiens
cacgaggtcaagaga

SEQ ID NO: 1861083 - DNA, 15 bp, Homo sapiens
acgaggtcaagagat

SEQ ID NO: 1861084 - DNA, 15 bp, Homo sapiens
cgaggtcaagagatc

SEQ ID NO: 1861085 - DNA, 15 bp, Homo sapiens
gaggtcaagagatcg

SEQ ID NO: 1861086 - DNA, 15 bp, Homo sapiens
aggtcaagagatcga

SEQ ID NO: 1861087 - DNA, 15 bp, Homo sapiens
ggtcaagagatcgag

SEQ ID NO: 1861088 - DNA, 15 bp, Homo sapiens
agagatcgagaccat

SEQ ID NO: 1861089 - DNA, 15 bp, Homo sapiens
agatcgagaccatcg

SEQ ID NO: 1861090 - DNA, 15 bp, Homo sapiens
gatcgagaccatcgt

SEQ ID NO: 1861091 - DNA, 15 bp, Homo sapiens
atcgagaccatcgtg

SEQ ID NO: 1861092 - DNA, 15 bp, Homo sapiens
tcgagaccatcgtgc

SEQ ID NO: 1861093 - DNA, 15 bp, Homo sapiens
cgagaccatcgtgcc

SEQ ID NO: 1861094 - DNA, 15 bp, Homo sapiens
gagaccatcgtgcca

SEQ ID NO: 1861095 - DNA, 15 bp, Homo sapiens
agaccatcgtgccat

SEQ ID NO: 1861096 - DNA, 15 bp, Homo sapiens
gaccatcgtgccatc

SEQ ID NO: 1861097 - DNA, 15 bp, Homo sapiens
accatcgtgccatca

SEQ ID NO: 1861098 - DNA, 15 bp, Homo sapiens
ccatcgtgccatcat

SEQ ID NO: 1861099 - DNA, 15 bp, Homo sapiens
catcgtgccatcatg

SEQ ID NO: 1861100 - DNA, 15 bp, Homo sapiens
atcgtgccatcatgg

SEQ ID NO: 1861101 - DNA, 15 bp, Homo sapiens
tcgtgccatcatggc

SEQ ID NO: 1861102 - DNA, 15 bp, Homo sapiens
cgtgccatcatggcc

SEQ ID NO: 1861103 - DNA, 15 bp, Homo sapiens
gtgccatcatggcca

SEQ ID NO: 1861104 - DNA, 15 bp, Homo sapiens
tgccatcatggccaa

SEQ ID NO: 1861105 - DNA, 15 bp, Homo sapiens
gccatcatggccaac

SEQ ID NO: 1861106 - DNA, 15 bp, Homo sapiens
ccatcatggccaaca

SEQ ID NO: 1861107 - DNA, 15 bp, Homo sapiens
catcatggccaacat

SEQ ID NO: 1861108 - DNA, 15 bp, Homo sapiens
atcatggccaacatg

SEQ ID NO: 1861109 - DNA, 15 bp, Homo sapiens
tcatggccaacatgg

SEQ ID NO: 1861110 - DNA, 15 bp, Homo sapiens
catggccaacatggt

SEQ ID NO: 1861111 - DNA, 15 bp, Homo sapiens
atggccaacatggtg

SEQ ID NO: 1861112 - DNA, 15 bp, Homo sapiens
gggtgtggtggcacg

SEQ ID NO: 1861113 - DNA, 15 bp, Homo sapiens
ggtgtggtggcacgc

SEQ ID NO: 1861114 - DNA, 15 bp, Homo sapiens
gtgtggtggcacgca

SEQ ID NO: 1861115 - DNA, 15 bp, Homo sapiens
tgtggtggcacgcat

SEQ ID NO: 1861116 - DNA, 15 bp, Homo sapiens
gtggtggcacgcatc

SEQ ID NO: 1861117 - DNA, 15 bp, Homo sapiens
tggtggcacgcatct

SEQ ID NO: 1861118 - DNA, 15 bp, Homo sapiens
ggtggcacgcatctg

SEQ ID NO: 1861119 - DNA, 15 bp, Homo sapiens
gtggcacgcatctgt

SEQ ID NO: 1861120 - DNA, 15 bp, Homo sapiens
tggcacgcatctgta

SEQ ID NO: 1861121 - DNA, 15 bp, Homo sapiens
ggcacgcatctgtag

SEQ ID NO: 1861122 - DNA, 15 bp, Homo sapiens
gcacgcatctgtagt

SEQ ID NO: 1861123 - DNA, 15 bp, Homo sapiens
cacgcatctgtagtc

SEQ ID NO: 1861124 - DNA, 15 bp, Homo sapiens
acgcatctgtagtcc

SEQ ID NO: 1861125 - DNA, 15 bp, Homo sapiens
cgcatctgtagtccc

SEQ ID NO: 1861126 - DNA, 15 bp, Homo sapiens
gcatctgtagtccca

SEQ ID NO: 1861127 - DNA, 15 bp, Homo sapiens
gcggaggttgcagtt

SEQ ID NO: 1861128 - DNA, 15 bp, Homo sapiens
cggaggttgcagtta

SEQ ID NO: 1861129 - DNA, 15 bp, Homo sapiens
ggaggttgcagttag

SEQ ID NO: 1861130 - DNA, 15 bp, Homo sapiens
ggttgcagttagccg

SEQ ID NO: 1861131 - DNA, 15 bp, Homo sapiens
gttgcagttagccga

SEQ ID NO: 1861132 - DNA, 15 bp, Homo sapiens
ttgcagttagccgag

SEQ ID NO: 1861133 - DNA, 15 bp, Homo sapiens
tgcagttagccgaga

SEQ ID NO: 1861134 - DNA, 15 bp, Homo sapiens
gcagttagccgagat

SEQ ID NO: 1861135 - DNA, 15 bp, Homo sapiens
cagttagccgagatt

SEQ ID NO: 1861136 - DNA, 15 bp, Homo sapiens
agttagccgagattg

SEQ ID NO: 1861137 - DNA, 15 bp, Homo sapiens
gttagccgagattgc

SEQ ID NO: 1861138 - DNA, 15 bp, Homo sapiens
ttagccgagattgca

SEQ ID NO: 1861139 - DNA, 15 bp, Homo sapiens
tagccgagattgcac

SEQ ID NO: 1861140 - DNA, 15 bp, Homo sapiens
agattgcaccactca

SEQ ID NO: 1861141 - DNA, 15 bp, Homo sapiens
gattgcaccactcac

SEQ ID NO: 1861142 - DNA, 15 bp, Homo sapiens
attgcaccactcact

SEQ ID NO: 1861143 - DNA, 15 bp, Homo sapiens
ttgcaccactcactg

SEQ ID NO: 1861144 - DNA, 15 bp, Homo sapiens
tgcaccactcactga

SEQ ID NO: 1861145 - DNA, 15 bp, Homo sapiens
gcaccactcactgaa

SEQ ID NO: 1861146 - DNA, 15 bp, Homo sapiens
caccactcactgaac

SEQ ID NO: 1861147 - DNA, 15 bp, Homo sapiens
accactcactgaact

SEQ ID NO: 1861148 - DNA, 15 bp, Homo sapiens
ccactcactgaactc

SEQ ID NO: 1861149 - DNA, 15 bp, Homo sapiens
cactcactgaactcc

SEQ ID NO: 1861150 - DNA, 15 bp, Homo sapiens
actcactgaactcca

SEQ ID NO: 1861151 - DNA, 15 bp, Homo sapiens
ctcactgaactccag

SEQ ID NO: 1861152 - DNA, 15 bp, Homo sapiens
tcactgaactccagc

SEQ ID NO: 1861153 - DNA, 15 bp, Homo sapiens
cactgaactccagcc

SEQ ID NO: 1861154 - DNA, 15 bp, Homo sapiens
actgaactccagcct

SEQ ID NO: 1861155 - DNA, 15 bp, Homo sapiens
cctgggtgacagaac

SEQ ID NO: 1861156 - DNA, 15 bp, Homo sapiens
ctgggtgacagaaca

SEQ ID NO: 1861157 - DNA, 15 bp, Homo sapiens
tgggtgacagaacaa

SEQ ID NO: 1861158 - DNA, 15 bp, Homo sapiens
gggtgacagaacaag

SEQ ID NO: 1861159 - DNA, 15 bp, Homo sapiens
cagaacaagactcca

SEQ ID NO: 1861160 - DNA, 15 bp, Homo sapiens
agaacaagactccat

SEQ ID NO: 1861161 - DNA, 15 bp, Homo sapiens
gaacaagactccatc

SEQ ID NO: 1861162 - DNA, 15 bp, Homo sapiens
aacaagactccatcc

SEQ ID NO: 1861163 - DNA, 15 bp, Homo sapiens
acaagactccatccc

SEQ ID NO: 1861164 - DNA, 15 bp, Homo sapiens
caagactccatcccc

SEQ ID NO: 1861165 - DNA, 15 bp, Homo sapiens
aagactccatcccca

SEQ ID NO: 1861166 - DNA, 15 bp, Homo sapiens
agactccatccccac

SEQ ID NO: 1861167 - DNA, 15 bp, Homo sapiens
gactccatccccacc

SEQ ID NO: 1861168 - DNA, 15 bp, Homo sapiens
actccatccccaccc

SEQ ID NO: 1861169 - DNA, 15 bp, Homo sapiens
ctccatccccacccc

SEQ ID NO: 1861170 - DNA, 15 bp, Homo sapiens
tccatccccacccct

SEQ ID NO: 1861171 - DNA, 15 bp, Homo sapiens
ccatccccacccctc

SEQ ID NO: 1861172 - DNA, 15 bp, Homo sapiens
catccccacccctcc

SEQ ID NO: 1861173 - DNA, 15 bp, Homo sapiens
atccccacccctcca

SEQ ID NO: 1861174 - DNA, 15 bp, Homo sapiens
tccccacccctccac

SEQ ID NO: 1861175 - DNA, 15 bp, Homo sapiens
ccccacccctccacc

SEQ ID NO: 1861176 - DNA, 15 bp, Homo sapiens
cccacccctccaccc

SEQ ID NO: 1861177 - DNA, 15 bp, Homo sapiens
ccacccctccacccc

SEQ ID NO: 1861178 - DNA, 15 bp, Homo sapiens
cacccctccaccccc

SEQ ID NO: 1861179 - DNA, 15 bp, Homo sapiens
acccctccaccccca

SEQ ID NO: 1861180 - DNA, 15 bp, Homo sapiens
cccctccacccccac

SEQ ID NO: 1861181 - DNA, 15 bp, Homo sapiens
ccctccacccccacc

SEQ ID NO: 1861182 - DNA, 15 bp, Homo sapiens
cctccacccccacca

SEQ ID NO: 1861183 - DNA, 15 bp, Homo sapiens
ctccacccccaccac

SEQ ID NO: 1861184 - DNA, 15 bp, Homo sapiens
tccacccccaccacc

SEQ ID NO: 1861185 - DNA, 15 bp, Homo sapiens
ccacccccaccaccc

SEQ ID NO: 1861186 - DNA, 15 bp, Homo sapiens
cacccccaccacccc

SEQ ID NO: 1861187 - DNA, 15 bp, Homo sapiens
acccccaccaccccc

SEQ ID NO: 1861188 - DNA, 15 bp, Homo sapiens
cccccaccacccccc

SEQ ID NO: 1861189 - DNA, 15 bp, Homo sapiens
ccccaccaccccccc

SEQ ID NO: 1861190 - DNA, 15 bp, Homo sapiens
cccaccacccccccc

SEQ ID NO: 1861191 - DNA, 15 bp, Homo sapiens
ccaccaccccccccc

SEQ ID NO: 1861192 - DNA, 15 bp, Homo sapiens
cccccccccccaaaa

SEQ ID NO: 1861193 - DNA, 15 bp, Homo sapiens
cccccccaaaaaaag

SEQ ID NO: 1861194 - DNA, 15 bp, Homo sapiens
ccccccaaaaaaaga

SEQ ID NO: 1861195 - DNA, 15 bp, Homo sapiens
cccccaaaaaaagag

SEQ ID NO: 1861196 - DNA, 15 bp, Homo sapiens
ccccaaaaaaagagg

SEQ ID NO: 1861197 - DNA, 15 bp, Homo sapiens
cccaaaaaaagaggc

SEQ ID NO: 1861198 - DNA, 15 bp, Homo sapiens
ccaaaaaaagaggca

SEQ ID NO: 1861199 - DNA, 15 bp, Homo sapiens
caaaaaaagaggcag

SEQ ID NO: 1861200 - DNA, 15 bp, Homo sapiens
aaaaaaagaggcagg

SEQ ID NO: 1861201 - DNA, 15 bp, Homo sapiens
aaaaaagaggcagga

SEQ ID NO: 1861202 - DNA, 15 bp, Homo sapiens
aaaaagaggcaggat

SEQ ID NO: 1861203 - DNA, 15 bp, Homo sapiens
aaaagaggcaggatg

SEQ ID NO: 1861204 - DNA, 15 bp, Homo sapiens
aaagaggcaggatgc

SEQ ID NO: 1861205 - DNA, 15 bp, Homo sapiens
aagaggcaggatgcc

SEQ ID NO: 1861206 - DNA, 15 bp, Homo sapiens
agaggcaggatgcca

SEQ ID NO: 1861207 - DNA, 15 bp, Homo sapiens
gaggcaggatgccat

SEQ ID NO: 1861208 - DNA, 15 bp, Homo sapiens
aggcaggatgccatg

SEQ ID NO: 1861209 - DNA, 15 bp, Homo sapiens
ggcaggatgccatgg

SEQ ID NO: 1861210 - DNA, 15 bp, Homo sapiens
gcaggatgccatggg

SEQ ID NO: 1861211 - DNA, 15 bp, Homo sapiens
caggatgccatgggg

SEQ ID NO: 1861212 - DNA, 15 bp, Homo sapiens
aggatgccatggggt

SEQ ID NO: 1861213 - DNA, 15 bp, Homo sapiens
ggatgccatggggtt

SEQ ID NO: 1861214 - DNA, 15 bp, Homo sapiens
gatgccatggggttg

SEQ ID NO: 1861215 - DNA, 15 bp, Homo sapiens
atgccatggggttga

SEQ ID NO: 1861216 - DNA, 15 bp, Homo sapiens
tgccatggggttgaa

SEQ ID NO: 1861217 - DNA, 15 bp, Homo sapiens
gccatggggttgaag

SEQ ID NO: 1861218 - DNA, 15 bp, Homo sapiens
ccatggggttgaaga

SEQ ID NO: 1861219 - DNA, 15 bp, Homo sapiens
catggggttgaagaa

SEQ ID NO: 1861220 - DNA, 15 bp, Homo sapiens
atggggttgaagaaa

SEQ ID NO: 1861221 - DNA, 15 bp, Homo sapiens
tggggttgaagaaaa

SEQ ID NO: 1861222 - DNA, 15 bp, Homo sapiens
ggggttgaagaaaac

SEQ ID NO: 1861223 - DNA, 15 bp, Homo sapiens
gggttgaagaaaaca

SEQ ID NO: 1861224 - DNA, 15 bp, Homo sapiens
ggttgaagaaaacag

SEQ ID NO: 1861225 - DNA, 15 bp, Homo sapiens
gttgaagaaaacagg

SEQ ID NO: 1861226 - DNA, 15 bp, Homo sapiens
ttgaagaaaacaggc

SEQ ID NO: 1861227 - DNA, 15 bp, Homo sapiens
tgaagaaaacaggcc

SEQ ID NO: 1861228 - DNA, 15 bp, Homo sapiens
gaagaaaacaggccc

SEQ ID NO: 1861229 - DNA, 15 bp, Homo sapiens
aagaaaacaggccct

SEQ ID NO: 1861230 - DNA, 15 bp, Homo sapiens
agaaaacaggccctg

SEQ ID NO: 1861231 - DNA, 15 bp, Homo sapiens
gaaaacaggccctgt

SEQ ID NO: 1861232 - DNA, 15 bp, Homo sapiens
aaaacaggccctgta

SEQ ID NO: 1861233 - DNA, 15 bp, Homo sapiens
aaacaggccctgtag

SEQ ID NO: 1861234 - DNA, 15 bp, Homo sapiens
aacaggccctgtagc

SEQ ID NO: 1861235 - DNA, 15 bp, Homo sapiens
acaggccctgtagcc

SEQ ID NO: 1861236 - DNA, 15 bp, Homo sapiens
caggccctgtagcca

SEQ ID NO: 1861237 - DNA, 15 bp, Homo sapiens
aggccctgtagccag

SEQ ID NO: 1861238 - DNA, 15 bp, Homo sapiens
ggccctgtagccagg

SEQ ID NO: 1861239 - DNA, 15 bp, Homo sapiens
gccctgtagccaggc

SEQ ID NO: 1861240 - DNA, 15 bp, Homo sapiens
ccctgtagccaggct

SEQ ID NO: 1861241 - DNA, 15 bp, Homo sapiens
cctgtagccaggctg

SEQ ID NO: 1861242 - DNA, 15 bp, Homo sapiens
ctgtagccaggctgc

SEQ ID NO: 1861243 - DNA, 15 bp, Homo sapiens
tgtagccaggctgcc

SEQ ID NO: 1861244 - DNA, 15 bp, Homo sapiens
gtagccaggctgcct

SEQ ID NO: 1861245 - DNA, 15 bp, Homo sapiens
tagccaggctgcctg

SEQ ID NO: 1861246 - DNA, 15 bp, Homo sapiens
agccaggctgcctga

SEQ ID NO: 1861247 - DNA, 15 bp, Homo sapiens
gccaggctgcctgag

SEQ ID NO: 1861248 - DNA, 15 bp, Homo sapiens
ccaggctgcctgagt

SEQ ID NO: 1861249 - DNA, 15 bp, Homo sapiens
caggctgcctgagtc

SEQ ID NO: 1861250 - DNA, 15 bp, Homo sapiens
aggctgcctgagtct

SEQ ID NO: 1861251 - DNA, 15 bp, Homo sapiens
ggctgcctgagtctg

SEQ ID NO: 1861252 - DNA, 15 bp, Homo sapiens
gctgcctgagtctga

SEQ ID NO: 1861253 - DNA, 15 bp, Homo sapiens
ctgcctgagtctgaa

SEQ ID NO: 1861254 - DNA, 15 bp, Homo sapiens
tgcctgagtctgaat

SEQ ID NO: 1861255 - DNA, 15 bp, Homo sapiens
gcctgagtctgaatc

SEQ ID NO: 1861256 - DNA, 15 bp, Homo sapiens
cctgagtctgaatcc

SEQ ID NO: 1861257 - DNA, 15 bp, Homo sapiens
ctgagtctgaatcct

SEQ ID NO: 1861258 - DNA, 15 bp, Homo sapiens
tgagtctgaatcctg

SEQ ID NO: 1861259 - DNA, 15 bp, Homo sapiens
gagtctgaatcctgg

SEQ ID NO: 1861260 - DNA, 15 bp, Homo sapiens
agtctgaatcctggc

SEQ ID NO: 1861261 - DNA, 15 bp, Homo sapiens
gtctgaatcctggct

SEQ ID NO: 1861262 - DNA, 15 bp, Homo sapiens
tctgaatcctggctc

SEQ ID NO: 1861263 - DNA, 15 bp, Homo sapiens
ctgaatcctggctct

SEQ ID NO: 1861264 - DNA, 15 bp, Homo sapiens
tgaatcctggctcta

SEQ ID NO: 1861265 - DNA, 15 bp, Homo sapiens
gaatcctggctctac

SEQ ID NO: 1861266 - DNA, 15 bp, Homo sapiens
tcctggctctactgt

SEQ ID NO: 1861267 - DNA, 15 bp, Homo sapiens
cctggctctactgtt

SEQ ID NO: 1861268 - DNA, 15 bp, Homo sapiens
ctggctctactgttc

SEQ ID NO: 1861269 - DNA, 15 bp, Homo sapiens
tggctctactgttca

SEQ ID NO: 1861270 - DNA, 15 bp, Homo sapiens
ggctctactgttcac

SEQ ID NO: 1861271 - DNA, 15 bp, Homo sapiens
gctctactgttcacc

SEQ ID NO: 1861272 - DNA, 15 bp, Homo sapiens
ctctactgttcacca

SEQ ID NO: 1861273 - DNA, 15 bp, Homo sapiens
tctactgttcaccaa

SEQ ID NO: 1861274 - DNA, 15 bp, Homo sapiens
ctactgttcaccaac

SEQ ID NO: 1861275 - DNA, 15 bp, Homo sapiens
tactgttcaccaact

SEQ ID NO: 1861276 - DNA, 15 bp, Homo sapiens
actgttcaccaactg

SEQ ID NO: 1861277 - DNA, 15 bp, Homo sapiens
ctgttcaccaactgt

SEQ ID NO: 1861278 - DNA, 15 bp, Homo sapiens
tgttcaccaactgtg

SEQ ID NO: 1861279 - DNA, 15 bp, Homo sapiens
gttcaccaactgtgc

SEQ ID NO: 1861280 - DNA, 15 bp, Homo sapiens
ttcaccaactgtgcc

SEQ ID NO: 1861281 - DNA, 15 bp, Homo sapiens
tcaccaactgtgcct

SEQ ID NO: 1861282 - DNA, 15 bp, Homo sapiens
caccaactgtgcctg

SEQ ID NO: 1861283 - DNA, 15 bp, Homo sapiens
accaactgtgcctgc

SEQ ID NO: 1861284 - DNA, 15 bp, Homo sapiens
ccaactgtgcctgcg

SEQ ID NO: 1861285 - DNA, 15 bp, Homo sapiens
caactgtgcctgcgt

SEQ ID NO: 1861286 - DNA, 15 bp, Homo sapiens
aactgtgcctgcgtt

SEQ ID NO: 1861287 - DNA, 15 bp, Homo sapiens
actgtgcctgcgttc

SEQ ID NO: 1861288 - DNA, 15 bp, Homo sapiens
ctgtgcctgcgttca

SEQ ID NO: 1861289 - DNA, 15 bp, Homo sapiens
tgtgcctgcgttcat

SEQ ID NO: 1861290 - DNA, 15 bp, Homo sapiens
gtgcctgcgttcatg

SEQ ID NO: 1861291 - DNA, 15 bp, Homo sapiens
tgcctgcgttcatgt

SEQ ID NO: 1861292 - DNA, 15 bp, Homo sapiens
gcctgcgttcatgtc

SEQ ID NO: 1861293 - DNA, 15 bp, Homo sapiens
cctgcgttcatgtcc

SEQ ID NO: 1861294 - DNA, 15 bp, Homo sapiens
ctgcgttcatgtccc

SEQ ID NO: 1861295 - DNA, 15 bp, Homo sapiens
tgcgttcatgtccca

SEQ ID NO: 1861296 - DNA, 15 bp, Homo sapiens
gcgttcatgtcccag

SEQ ID NO: 1861297 - DNA, 15 bp, Homo sapiens
cgttcatgtcccagc

SEQ ID NO: 1861298 - DNA, 15 bp, Homo sapiens
gttcatgtcccagct

SEQ ID NO: 1861299 - DNA, 15 bp, Homo sapiens
ttcatgtcccagctc

SEQ ID NO: 1861300 - DNA, 15 bp, Homo sapiens
tcatgtcccagctct

SEQ ID NO: 1861301 - DNA, 15 bp, Homo sapiens
catgtcccagctctt

SEQ ID NO: 1861302 - DNA, 15 bp, Homo sapiens
atgtcccagctcttc

SEQ ID NO: 1861303 - DNA, 15 bp, Homo sapiens
tgtcccagctcttcc

SEQ ID NO: 1861304 - DNA, 15 bp, Homo sapiens
gtcccagctcttcca

SEQ ID NO: 1861305 - DNA, 15 bp, Homo sapiens
tcccagctcttccat

SEQ ID NO: 1861306 - DNA, 15 bp, Homo sapiens
cccagctcttccatt

SEQ ID NO: 1861307 - DNA, 15 bp, Homo sapiens
ccagctcttccattg

SEQ ID NO: 1861308 - DNA, 15 bp, Homo sapiens
cagctcttccattga

SEQ ID NO: 1861309 - DNA, 15 bp, Homo sapiens
agctcttccattgac

SEQ ID NO: 1861310 - DNA, 15 bp, Homo sapiens
gctcttccattgact

SEQ ID NO: 1861311 - DNA, 15 bp, Homo sapiens
ctcttccattgacta

SEQ ID NO: 1861312 - DNA, 15 bp, Homo sapiens
tcttccattgactaa

SEQ ID NO: 1861313 - DNA, 15 bp, Homo sapiens
cttccattgactaag

SEQ ID NO: 1861314 - DNA, 15 bp, Homo sapiens
ttccattgactaagc

SEQ ID NO: 1861315 - DNA, 15 bp, Homo sapiens
tccattgactaagcc

SEQ ID NO: 1861316 - DNA, 15 bp, Homo sapiens
ccattgactaagcct

SEQ ID NO: 1861317 - DNA, 15 bp, Homo sapiens
cattgactaagcctg

SEQ ID NO: 1861318 - DNA, 15 bp, Homo sapiens
attgactaagcctgg

SEQ ID NO: 1861319 - DNA, 15 bp, Homo sapiens
ttgactaagcctgga

SEQ ID NO: 1861320 - DNA, 15 bp, Homo sapiens
tgactaagcctggat

SEQ ID NO: 1861321 - DNA, 15 bp, Homo sapiens
gactaagcctggatc

SEQ ID NO: 1861322 - DNA, 15 bp, Homo sapiens
actaagcctggatca

SEQ ID NO: 1861323 - DNA, 15 bp, Homo sapiens
ctaagcctggatcaa

SEQ ID NO: 1861324 - DNA, 15 bp, Homo sapiens
taagcctggatcaag

SEQ ID NO: 1861325 - DNA, 15 bp, Homo sapiens
aagcctggatcaaga

SEQ ID NO: 1861326 - DNA, 15 bp, Homo sapiens
agcctggatcaagaa

SEQ ID NO: 1861327 - DNA, 15 bp, Homo sapiens
gcctggatcaagaaa

SEQ ID NO: 1861328 - DNA, 15 bp, Homo sapiens
cctggatcaagaaat

SEQ ID NO: 1861329 - DNA, 15 bp, Homo sapiens
ctggatcaagaaata

SEQ ID NO: 1861330 - DNA, 15 bp, Homo sapiens
tggatcaagaaataa

SEQ ID NO: 1861331 - DNA, 15 bp, Homo sapiens
ggatcaagaaataat

SEQ ID NO: 1861332 - DNA, 15 bp, Homo sapiens
gatcaagaaataatc

SEQ ID NO: 1861333 - DNA, 15 bp, Homo sapiens
atcaagaaataatcc

SEQ ID NO: 1861334 - DNA, 15 bp, Homo sapiens
tcaagaaataatccc

SEQ ID NO: 1861335 - DNA, 15 bp, Homo sapiens
caagaaataatccct

SEQ ID NO: 1861336 - DNA, 15 bp, Homo sapiens
aagaaataatccctg

SEQ ID NO: 1861337 - DNA, 15 bp, Homo sapiens
agaaataatccctga

SEQ ID NO: 1861338 - DNA, 15 bp, Homo sapiens
gaaataatccctgag

SEQ ID NO: 1861339 - DNA, 15 bp, Homo sapiens
aaataatccctgagt

SEQ ID NO: 1861340 - DNA, 15 bp, Homo sapiens
aataatccctgagtt

SEQ ID NO: 1861341 - DNA, 15 bp, Homo sapiens
ataatccctgagttc

SEQ ID NO: 1861342 - DNA, 15 bp, Homo sapiens
taatccctgagttct

SEQ ID NO: 1861343 - DNA, 15 bp, Homo sapiens
aatccctgagttcta

SEQ ID NO: 1861344 - DNA, 15 bp, Homo sapiens
atccctgagttctaa

SEQ ID NO: 1861345 - DNA, 15 bp, Homo sapiens
tccctgagttctaat

SEQ ID NO: 1861346 - DNA, 15 bp, Homo sapiens
ccctgagttctaatc

SEQ ID NO: 1861347 - DNA, 15 bp, Homo sapiens
cctgagttctaatct

SEQ ID NO: 1861348 - DNA, 15 bp, Homo sapiens
ctgagttctaatctg

SEQ ID NO: 1861349 - DNA, 15 bp, Homo sapiens
tgagttctaatctgt

SEQ ID NO: 1861350 - DNA, 15 bp, Homo sapiens
gagttctaatctgtc

SEQ ID NO: 1861351 - DNA, 15 bp, Homo sapiens
agttctaatctgtca

SEQ ID NO: 1861352 - DNA, 15 bp, Homo sapiens
gttctaatctgtcat

SEQ ID NO: 1861353 - DNA, 15 bp, Homo sapiens
ttctaatctgtcatt

SEQ ID NO: 1861354 - DNA, 15 bp, Homo sapiens
tctaatctgtcattc

SEQ ID NO: 1861355 - DNA, 15 bp, Homo sapiens
ctaatctgtcattca

SEQ ID NO: 1861356 - DNA, 15 bp, Homo sapiens
taatctgtcattcag

SEQ ID NO: 1861357 - DNA, 15 bp, Homo sapiens
aatctgtcattcagg

SEQ ID NO: 1861358 - DNA, 15 bp, Homo sapiens
atctgtcattcaggt

SEQ ID NO: 1861359 - DNA, 15 bp, Homo sapiens
tctgtcattcaggta

SEQ ID NO: 1861360 - DNA, 15 bp, Homo sapiens
ctgtcattcaggtaa

SEQ ID NO: 1861361 - DNA, 15 bp, Homo sapiens
tgtcattcaggtaat

SEQ ID NO: 1861362 - DNA, 15 bp, Homo sapiens
gtcattcaggtaatt

SEQ ID NO: 1861363 - DNA, 15 bp, Homo sapiens
tcattcaggtaattg

SEQ ID NO: 1861364 - DNA, 15 bp, Homo sapiens
cattcaggtaattgc

SEQ ID NO: 1861365 - DNA, 15 bp, Homo sapiens
attcaggtaattgcg

SEQ ID NO: 1861366 - DNA, 15 bp, Homo sapiens
ttcaggtaattgcgt

SEQ ID NO: 1861367 - DNA, 15 bp, Homo sapiens
tcaggtaattgcgtt

SEQ ID NO: 1861368 - DNA, 15 bp, Homo sapiens
caggtaattgcgttc

SEQ ID NO: 1861369 - DNA, 15 bp, Homo sapiens
aggtaattgcgttct

SEQ ID NO: 1861370 - DNA, 15 bp, Homo sapiens
ggtaattgcgttctt

SEQ ID NO: 1861371 - DNA, 15 bp, Homo sapiens
gtaattgcgttctta

SEQ ID NO: 1861372 - DNA, 15 bp, Homo sapiens
taattgcgttcttat

SEQ ID NO: 1861373 - DNA, 15 bp, Homo sapiens
aattgcgttcttatg

SEQ ID NO: 1861374 - DNA, 15 bp, Homo sapiens
attgcgttcttatgt

SEQ ID NO: 1861375 - DNA, 15 bp, Homo sapiens
ttgcgttcttatgtt

SEQ ID NO: 1861376 - DNA, 15 bp, Homo sapiens
tgcgttcttatgttt

SEQ ID NO: 1861377 - DNA, 15 bp, Homo sapiens
gcgttcttatgtttc

SEQ ID NO: 1861378 - DNA, 15 bp, Homo sapiens
cgttcttatgtttcc

SEQ ID NO: 1861379 - DNA, 15 bp, Homo sapiens
gttcttatgtttcct

SEQ ID NO: 1861380 - DNA, 15 bp, Homo sapiens
ttcttatgtttcctt

SEQ ID NO: 1861381 - DNA, 15 bp, Homo sapiens
tcttatgtttccttt

SEQ ID NO: 1861382 - DNA, 15 bp, Homo sapiens
cttatgtttcctttt

SEQ ID NO: 1861383 - DNA, 15 bp, Homo sapiens
ttatgtttccttttg

SEQ ID NO: 1861384 - DNA, 15 bp, Homo sapiens
tatgtttccttttgt

SEQ ID NO: 1861385 - DNA, 15 bp, Homo sapiens
atgtttccttttgtc

SEQ ID NO: 1861386 - DNA, 15 bp, Homo sapiens
tgtttccttttgtca

SEQ ID NO: 1861387 - DNA, 15 bp, Homo sapiens
gtttccttttgtcat

SEQ ID NO: 1861388 - DNA, 15 bp, Homo sapiens
tttccttttgtcatt

SEQ ID NO: 1861389 - DNA, 15 bp, Homo sapiens
ttccttttgtcattt

SEQ ID NO: 1861390 - DNA, 15 bp, Homo sapiens
tccttttgtcatttg

SEQ ID NO: 1861391 - DNA, 15 bp, Homo sapiens
ccttttgtcatttgg

SEQ ID NO: 1861392 - DNA, 15 bp, Homo sapiens
cttttgtcatttggc

SEQ ID NO: 1861393 - DNA, 15 bp, Homo sapiens
ttttgtcatttggcc

SEQ ID NO: 1861394 - DNA, 15 bp, Homo sapiens
tttgtcatttggcct

SEQ ID NO: 1861395 - DNA, 15 bp, Homo sapiens
ttgtcatttggcctt

SEQ ID NO: 1861396 - DNA, 15 bp, Homo sapiens
tgtcatttggccttc

SEQ ID NO: 1861397 - DNA, 15 bp, Homo sapiens
gtcatttggccttcc

SEQ ID NO: 1861398 - DNA, 15 bp, Homo sapiens
agggagggaaggcca

SEQ ID NO: 1861399 - DNA, 15 bp, Homo sapiens
gggagggaaggccag

SEQ ID NO: 1861400 - DNA, 15 bp, Homo sapiens
ggagggaaggccagt

SEQ ID NO: 1861401 - DNA, 15 bp, Homo sapiens
gagggaaggccagtg

SEQ ID NO: 1861402 - DNA, 15 bp, Homo sapiens
agggaaggccagtga

SEQ ID NO: 1861403 - DNA, 15 bp, Homo sapiens
gggaaggccagtgag

SEQ ID NO: 1861404 - DNA, 15 bp, Homo sapiens
ggaaggccagtgaga

SEQ ID NO: 1861405 - DNA, 15 bp, Homo sapiens
gaaggccagtgagag

SEQ ID NO: 1861406 - DNA, 15 bp, Homo sapiens
aaggccagtgagagg

SEQ ID NO: 1861407 - DNA, 15 bp, Homo sapiens
aggccagtgagaggg

SEQ ID NO: 1861408 - DNA, 15 bp, Homo sapiens
ggccagtgagagggc

SEQ ID NO: 1861409 - DNA, 15 bp, Homo sapiens
gccagtgagagggca

SEQ ID NO: 1861410 - DNA, 15 bp, Homo sapiens
ccagtgagagggcaa

SEQ ID NO: 1861411 - DNA, 15 bp, Homo sapiens
cagtgagagggcaag

SEQ ID NO: 1861412 - DNA, 15 bp, Homo sapiens
agtgagagggcaaga

SEQ ID NO: 1861413 - DNA, 15 bp, Homo sapiens
gtgagagggcaagat

SEQ ID NO: 1861414 - DNA, 15 bp, Homo sapiens
tgagagggcaagatt

SEQ ID NO: 1861415 - DNA, 15 bp, Homo sapiens
gagagggcaagatta

SEQ ID NO: 1861416 - DNA, 15 bp, Homo sapiens
agagggcaagattat

SEQ ID NO: 1861417 - DNA, 15 bp, Homo sapiens
gagggcaagattatt

SEQ ID NO: 1861418 - DNA, 15 bp, Homo sapiens
agggcaagattatta

SEQ ID NO: 1861419 - DNA, 15 bp, Homo sapiens
gggcaagattattaa

SEQ ID NO: 1861420 - DNA, 15 bp, Homo sapiens
ggcaagattattaat

SEQ ID NO: 1861421 - DNA, 15 bp, Homo sapiens
gcaagattattaata

SEQ ID NO: 1861422 - DNA, 15 bp, Homo sapiens
caagattattaatat

SEQ ID NO: 1861423 - DNA, 15 bp, Homo sapiens
aagattattaatatg

SEQ ID NO: 1861424 - DNA, 15 bp, Homo sapiens
agattattaatatgc

SEQ ID NO: 1861425 - DNA, 15 bp, Homo sapiens
gattattaatatgct

SEQ ID NO: 1861426 - DNA, 15 bp, Homo sapiens
attattaatatgctt

SEQ ID NO: 1861427 - DNA, 15 bp, Homo sapiens
ttattaatatgcttt

SEQ ID NO: 1861428 - DNA, 15 bp, Homo sapiens
tattaatatgctttt

SEQ ID NO: 1861429 - DNA, 15 bp, Homo sapiens
attaatatgcttttc

SEQ ID NO: 1861430 - DNA, 15 bp, Homo sapiens
ttaatatgcttttct

SEQ ID NO: 1861431 - DNA, 15 bp, Homo sapiens
taatatgcttttctt

SEQ ID NO: 1861432 - DNA, 15 bp, Homo sapiens
aatatgcttttctta

SEQ ID NO: 1861433 - DNA, 15 bp, Homo sapiens
atatgcttttcttac

SEQ ID NO: 1861434 - DNA, 15 bp, Homo sapiens
tatgcttttcttact

SEQ ID NO: 1861435 - DNA, 15 bp, Homo sapiens
atgcttttcttacta

SEQ ID NO: 1861436 - DNA, 15 bp, Homo sapiens
tgcttttcttactaa

SEQ ID NO: 1861437 - DNA, 15 bp, Homo sapiens
gcttttcttactaaa

SEQ ID NO: 1861438 - DNA, 15 bp, Homo sapiens
cttttcttactaaat

SEQ ID NO: 1861439 - DNA, 15 bp, Homo sapiens
ttttcttactaaatt

SEQ ID NO: 1861440 - DNA, 15 bp, Homo sapiens
tttcttactaaattg

SEQ ID NO: 1861441 - DNA, 15 bp, Homo sapiens
ttcttactaaattgg

SEQ ID NO: 1861442 - DNA, 15 bp, Homo sapiens
tcttactaaattggc

SEQ ID NO: 1861443 - DNA, 15 bp, Homo sapiens
cttactaaattggct

SEQ ID NO: 1861444 - DNA, 15 bp, Homo sapiens
ttactaaattggctt

SEQ ID NO: 1861445 - DNA, 15 bp, Homo sapiens
tactaaattggcttt

SEQ ID NO: 1861446 - DNA, 15 bp, Homo sapiens
actaaattggctttc

SEQ ID NO: 1861447 - DNA, 15 bp, Homo sapiens
ctaaattggctttca

SEQ ID NO: 1861448 - DNA, 15 bp, Homo sapiens
taaattggctttcag

SEQ ID NO: 1861449 - DNA, 15 bp, Homo sapiens
aaattggctttcaga

SEQ ID NO: 1861450 - DNA, 15 bp, Homo sapiens
aattggctttcagaa

SEQ ID NO: 1861451 - DNA, 15 bp, Homo sapiens
attggctttcagaat

SEQ ID NO: 1861452 - DNA, 15 bp, Homo sapiens
ttggctttcagaatc

SEQ ID NO: 1861453 - DNA, 15 bp, Homo sapiens
tggctttcagaatca

SEQ ID NO: 1861454 - DNA, 15 bp, Homo sapiens
ggctttcagaatcaa

SEQ ID NO: 1861455 - DNA, 15 bp, Homo sapiens
gctttcagaatcaag

SEQ ID NO: 1861456 - DNA, 15 bp, Homo sapiens
ctttcagaatcaagg

SEQ ID NO: 1861457 - DNA, 15 bp, Homo sapiens
tttcagaatcaaggg

SEQ ID NO: 1861458 - DNA, 15 bp, Homo sapiens
ttcagaatcaagggg

SEQ ID NO: 1861459 - DNA, 15 bp, Homo sapiens
tcagaatcaagggga

SEQ ID NO: 1861460 - DNA, 15 bp, Homo sapiens
cagaatcaaggggaa

SEQ ID NO: 1861461 - DNA, 15 bp, Homo sapiens
agaatcaaggggaag

SEQ ID NO: 1861462 - DNA, 15 bp, Homo sapiens
gaatcaaggggaaga

SEQ ID NO: 1861463 - DNA, 15 bp, Homo sapiens
aatcaaggggaagaa

SEQ ID NO: 1861464 - DNA, 15 bp, Homo sapiens
atcaaggggaagaac

SEQ ID NO: 1861465 - DNA, 15 bp, Homo sapiens
tcaaggggaagaacc

SEQ ID NO: 1861466 - DNA, 15 bp, Homo sapiens
caaggggaagaacca

SEQ ID NO: 1861467 - DNA, 15 bp, Homo sapiens
aaggggaagaaccaa

SEQ ID NO: 1861468 - DNA, 15 bp, Homo sapiens
aggggaagaaccaag

SEQ ID NO: 1861469 - DNA, 15 bp, Homo sapiens
ggggaagaaccaagg

SEQ ID NO: 1861470 - DNA, 15 bp, Homo sapiens
gggaagaaccaaggt

SEQ ID NO: 1861471 - DNA, 15 bp, Homo sapiens
ggaagaaccaaggtg

SEQ ID NO: 1861472 - DNA, 15 bp, Homo sapiens
gaagaaccaaggtgg

SEQ ID NO: 1861473 - DNA, 15 bp, Homo sapiens
aagaaccaaggtggg

SEQ ID NO: 1861474 - DNA, 15 bp, Homo sapiens
agaaccaaggtgggt

SEQ ID NO: 1861475 - DNA, 15 bp, Homo sapiens
gaaccaaggtgggtt

SEQ ID NO: 1861476 - DNA, 15 bp, Homo sapiens
aaccaaggtgggttg

SEQ ID NO: 1861477 - DNA, 15 bp, Homo sapiens
accaaggtgggttgt

SEQ ID NO: 1861478 - DNA, 15 bp, Homo sapiens
ccaaggtgggttgtt

SEQ ID NO: 1861479 - DNA, 15 bp, Homo sapiens
caaggtgggttgtta

SEQ ID NO: 1861480 - DNA, 15 bp, Homo sapiens
aaggtgggttgttaa

SEQ ID NO: 1861481 - DNA, 15 bp, Homo sapiens
aggtgggttgttaag

SEQ ID NO: 1861482 - DNA, 15 bp, Homo sapiens
ggtgggttgttaagg

SEQ ID NO: 1861483 - DNA, 15 bp, Homo sapiens
gtgggttgttaaggg

SEQ ID NO: 1861484 - DNA, 15 bp, Homo sapiens
tgggttgttaaggga

SEQ ID NO: 1861485 - DNA, 15 bp, Homo sapiens
gggttgttaagggag

SEQ ID NO: 1861486 - DNA, 15 bp, Homo sapiens
ggttgttaagggagt

SEQ ID NO: 1861487 - DNA, 15 bp, Homo sapiens
gttgttaagggagta

SEQ ID NO: 1861488 - DNA, 15 bp, Homo sapiens
ttgttaagggagtac

SEQ ID NO: 1861489 - DNA, 15 bp, Homo sapiens
tgttaagggagtact

SEQ ID NO: 1861490 - DNA, 15 bp, Homo sapiens
gttaagggagtactg

SEQ ID NO: 1861491 - DNA, 15 bp, Homo sapiens
ttaagggagtactga

SEQ ID NO: 1861492 - DNA, 15 bp, Homo sapiens
taagggagtactgat

SEQ ID NO: 1861493 - DNA, 15 bp, Homo sapiens
aagggagtactgatt

SEQ ID NO: 1861494 - DNA, 15 bp, Homo sapiens
agggagtactgattt

SEQ ID NO: 1861495 - DNA, 15 bp, Homo sapiens
gggagtactgattta

SEQ ID NO: 1861496 - DNA, 15 bp, Homo sapiens
ggagtactgatttag

SEQ ID NO: 1861497 - DNA, 15 bp, Homo sapiens
gagtactgatttaga

SEQ ID NO: 1861498 - DNA, 15 bp, Homo sapiens
agtactgatttagat

SEQ ID NO: 1861499 - DNA, 15 bp, Homo sapiens
gtactgatttagatg

SEQ ID NO: 1861500 - DNA, 15 bp, Homo sapiens
tactgatttagatgt

SEQ ID NO: 1861501 - DNA, 15 bp, Homo sapiens
actgatttagatgtg

SEQ ID NO: 1861502 - DNA, 15 bp, Homo sapiens
ctgatttagatgtgc

SEQ ID NO: 1861503 - DNA, 15 bp, Homo sapiens
tgatttagatgtgct

SEQ ID NO: 1861504 - DNA, 15 bp, Homo sapiens
gatttagatgtgctg

SEQ ID NO: 1861505 - DNA, 15 bp, Homo sapiens
atttagatgtgctga

SEQ ID NO: 1861506 - DNA, 15 bp, Homo sapiens
tttagatgtgctgag

SEQ ID NO: 1861507 - DNA, 15 bp, Homo sapiens
ttagatgtgctgagc

SEQ ID NO: 1861508 - DNA, 15 bp, Homo sapiens
tagatgtgctgagca

SEQ ID NO: 1861509 - DNA, 15 bp, Homo sapiens
agatgtgctgagcag

SEQ ID NO: 1861510 - DNA, 15 bp, Homo sapiens
gatgtgctgagcagt

SEQ ID NO: 1861511 - DNA, 15 bp, Homo sapiens
atgtgctgagcagtt

SEQ ID NO: 1861512 - DNA, 15 bp, Homo sapiens
tgtgctgagcagttg

SEQ ID NO: 1861513 - DNA, 15 bp, Homo sapiens
gtgctgagcagttga

SEQ ID NO: 1861514 - DNA, 15 bp, Homo sapiens
tgctgagcagttgaa

SEQ ID NO: 1861515 - DNA, 15 bp, Homo sapiens
gctgagcagttgaaa

SEQ ID NO: 1861516 - DNA, 15 bp, Homo sapiens
ctgagcagttgaaat

SEQ ID NO: 1861517 - DNA, 15 bp, Homo sapiens
tgagcagttgaaatg

SEQ ID NO: 1861518 - DNA, 15 bp, Homo sapiens
gagcagttgaaatgt

SEQ ID NO: 1861519 - DNA, 15 bp, Homo sapiens
agcagttgaaatgtt

SEQ ID NO: 1861520 - DNA, 15 bp, Homo sapiens
gcagttgaaatgttt

SEQ ID NO: 1861521 - DNA, 15 bp, Homo sapiens
cagttgaaatgtttt

SEQ ID NO: 1861522 - DNA, 15 bp, Homo sapiens
agttgaaatgttttt

SEQ ID NO: 1861523 - DNA, 15 bp, Homo sapiens
gttgaaatgtttttg

SEQ ID NO: 1861524 - DNA, 15 bp, Homo sapiens
ttgaaatgtttttgt

SEQ ID NO: 1861525 - DNA, 15 bp, Homo sapiens
tgaaatgtttttgtt

SEQ ID NO: 1861526 - DNA, 15 bp, Homo sapiens
gaaatgtttttgttt

SEQ ID NO: 1861527 - DNA, 15 bp, Homo sapiens
aaatgtttttgtttc

SEQ ID NO: 1861528 - DNA, 15 bp, Homo sapiens
aatgtttttgtttct

SEQ ID NO: 1861529 - DNA, 15 bp, Homo sapiens
atgtttttgtttctc

SEQ ID NO: 1861530 - DNA, 15 bp, Homo sapiens
tgtttttgtttctca

SEQ ID NO: 1861531 - DNA, 15 bp, Homo sapiens
gtttttgtttctcaa

SEQ ID NO: 1861532 - DNA, 15 bp, Homo sapiens
tttttgtttctcaaa

SEQ ID NO: 1861533 - DNA, 15 bp, Homo sapiens
ttttgtttctcaaac

SEQ ID NO: 1861534 - DNA, 15 bp, Homo sapiens
tttgtttctcaaaca

SEQ ID NO: 1861535 - DNA, 15 bp, Homo sapiens
ttgtttctcaaacat

SEQ ID NO: 1861536 - DNA, 15 bp, Homo sapiens
tgtttctcaaacatg

SEQ ID NO: 1861537 - DNA, 15 bp, Homo sapiens
gtttctcaaacatga

SEQ ID NO: 1861538 - DNA, 15 bp, Homo sapiens
tttctcaaacatgaa

SEQ ID NO: 1861539 - DNA, 15 bp, Homo sapiens
ttctcaaacatgaaa

SEQ ID NO: 1861540 - DNA, 15 bp, Homo sapiens
tctcaaacatgaaag

SEQ ID NO: 1861541 - DNA, 15 bp, Homo sapiens
ctcaaacatgaaagc

SEQ ID NO: 1861542 - DNA, 15 bp, Homo sapiens
tcaaacatgaaagca

SEQ ID NO: 1861543 - DNA, 15 bp, Homo sapiens
caaacatgaaagcac

SEQ ID NO: 1861544 - DNA, 15 bp, Homo sapiens
aaacatgaaagcact

SEQ ID NO: 1861545 - DNA, 15 bp, Homo sapiens
aacatgaaagcactt

SEQ ID NO: 1861546 - DNA, 15 bp, Homo sapiens
acatgaaagcacttg

SEQ ID NO: 1861547 - DNA, 15 bp, Homo sapiens
catgaaagcacttgg

SEQ ID NO: 1861548 - DNA, 15 bp, Homo sapiens
atgaaagcacttggc

SEQ ID NO: 1861549 - DNA, 15 bp, Homo sapiens
tgaaagcacttggct

SEQ ID NO: 1861550 - DNA, 15 bp, Homo sapiens
gaaagcacttggctt

SEQ ID NO: 1861551 - DNA, 15 bp, Homo sapiens
aaagcacttggcttt

SEQ ID NO: 1861552 - DNA, 15 bp, Homo sapiens
aagcacttggctttg

SEQ ID NO: 1861553 - DNA, 15 bp, Homo sapiens
agcacttggctttgc

SEQ ID NO: 1861554 - DNA, 15 bp, Homo sapiens
gcacttggctttgca

SEQ ID NO: 1861555 - DNA, 15 bp, Homo sapiens
cacttggctttgcat

SEQ ID NO: 1861556 - DNA, 15 bp, Homo sapiens
acttggctttgcatg

SEQ ID NO: 1861557 - DNA, 15 bp, Homo sapiens
cttggctttgcatga

SEQ ID NO: 1861558 - DNA, 15 bp, Homo sapiens
ttggctttgcatgac

SEQ ID NO: 1861559 - DNA, 15 bp, Homo sapiens
tggctttgcatgact

SEQ ID NO: 1861560 - DNA, 15 bp, Homo sapiens
ggctttgcatgactg

SEQ ID NO: 1861561 - DNA, 15 bp, Homo sapiens
gctttgcatgactgg

SEQ ID NO: 1861562 - DNA, 15 bp, Homo sapiens
ctttgcatgactggg

SEQ ID NO: 1861563 - DNA, 15 bp, Homo sapiens
tttgcatgactgggt

SEQ ID NO: 1861564 - DNA, 15 bp, Homo sapiens
ttgcatgactgggtt

SEQ ID NO: 1861565 - DNA, 15 bp, Homo sapiens
tgcatgactgggttt

SEQ ID NO: 1861566 - DNA, 15 bp, Homo sapiens
gcatgactgggtttt

SEQ ID NO: 1861567 - DNA, 15 bp, Homo sapiens
catgactgggtttta

SEQ ID NO: 1861568 - DNA, 15 bp, Homo sapiens
atgactgggttttaa

SEQ ID NO: 1861569 - DNA, 15 bp, Homo sapiens
tgactgggttttaaa

SEQ ID NO: 1861570 - DNA, 15 bp, Homo sapiens
gactgggttttaaat

SEQ ID NO: 1861571 - DNA, 15 bp, Homo sapiens
actgggttttaaatt

SEQ ID NO: 1861572 - DNA, 15 bp, Homo sapiens
ctgggttttaaattg

SEQ ID NO: 1861573 - DNA, 15 bp, Homo sapiens
tgggttttaaattgc

SEQ ID NO: 1861574 - DNA, 15 bp, Homo sapiens
gggttttaaattgct

SEQ ID NO: 1861575 - DNA, 15 bp, Homo sapiens
ggttttaaattgctc

SEQ ID NO: 1861576 - DNA, 15 bp, Homo sapiens
gttttaaattgctca

SEQ ID NO: 1861577 - DNA, 15 bp, Homo sapiens
ttttaaattgctcag

SEQ ID NO: 1861578 - DNA, 15 bp, Homo sapiens
tttaaattgctcagc

SEQ ID NO: 1861579 - DNA, 15 bp, Homo sapiens
ttaaattgctcagca

SEQ ID NO: 1861580 - DNA, 15 bp, Homo sapiens
taaattgctcagcaa

SEQ ID NO: 1861581 - DNA, 15 bp, Homo sapiens
aaattgctcagcaaa

SEQ ID NO: 1861582 - DNA, 15 bp, Homo sapiens
aattgctcagcaaag

SEQ ID NO: 1861583 - DNA, 15 bp, Homo sapiens
attgctcagcaaagc

SEQ ID NO: 1861584 - DNA, 15 bp, Homo sapiens
ttgctcagcaaagca

SEQ ID NO: 1861585 - DNA, 15 bp, Homo sapiens
tgctcagcaaagcat

SEQ ID NO: 1861586 - DNA, 15 bp, Homo sapiens
gctcagcaaagcatc

SEQ ID NO: 1861587 - DNA, 15 bp, Homo sapiens
ctcagcaaagcatca

SEQ ID NO: 1861588 - DNA, 15 bp, Homo sapiens
tcagcaaagcatcac

SEQ ID NO: 1861589 - DNA, 15 bp, Homo sapiens
cagcaaagcatcact

SEQ ID NO: 1861590 - DNA, 15 bp, Homo sapiens
agcaaagcatcactt

SEQ ID NO: 1861591 - DNA, 15 bp, Homo sapiens
gcaaagcatcacttg

SEQ ID NO: 1861592 - DNA, 15 bp, Homo sapiens
caaagcatcacttgg

SEQ ID NO: 1861593 - DNA, 15 bp, Homo sapiens
aaagcatcacttggg

SEQ ID NO: 1861594 - DNA, 15 bp, Homo sapiens
aagcatcacttgggg

SEQ ID NO: 1861595 - DNA, 15 bp, Homo sapiens
agcatcacttggggc

SEQ ID NO: 1861596 - DNA, 15 bp, Homo sapiens
gcatcacttggggct

SEQ ID NO: 1861597 - DNA, 15 bp, Homo sapiens
catcacttggggcta

SEQ ID NO: 1861598 - DNA, 15 bp, Homo sapiens
atcacttggggctaa

SEQ ID NO: 1861599 - DNA, 15 bp, Homo sapiens
tcacttggggctaac

SEQ ID NO: 1861600 - DNA, 15 bp, Homo sapiens
cacttggggctaacc

SEQ ID NO: 1861601 - DNA, 15 bp, Homo sapiens
acttggggctaacct

SEQ ID NO: 1861602 - DNA, 15 bp, Homo sapiens
cttggggctaacctg

SEQ ID NO: 1861603 - DNA, 15 bp, Homo sapiens
ttggggctaacctga

SEQ ID NO: 1861604 - DNA, 15 bp, Homo sapiens
tggggctaacctgag

SEQ ID NO: 1861605 - DNA, 15 bp, Homo sapiens
ggggctaacctgagt

SEQ ID NO: 1861606 - DNA, 15 bp, Homo sapiens
gggctaacctgagtc

SEQ ID NO: 1861607 - DNA, 15 bp, Homo sapiens
ggctaacctgagtct

SEQ ID NO: 1861608 - DNA, 15 bp, Homo sapiens
gctaacctgagtctg

SEQ ID NO: 1861609 - DNA, 15 bp, Homo sapiens
ctaacctgagtctgt

SEQ ID NO: 1861610 - DNA, 15 bp, Homo sapiens
taacctgagtctgtg

SEQ ID NO: 1861611 - DNA, 15 bp, Homo sapiens
aacctgagtctgtga

SEQ ID NO: 1861612 - DNA, 15 bp, Homo sapiens
acctgagtctgtgaa

SEQ ID NO: 1861613 - DNA, 15 bp, Homo sapiens
cctgagtctgtgaag

SEQ ID NO: 1861614 - DNA, 15 bp, Homo sapiens
ctgagtctgtgaagt

SEQ ID NO: 1861615 - DNA, 15 bp, Homo sapiens
tgagtctgtgaagtt

SEQ ID NO: 1861616 - DNA, 15 bp, Homo sapiens
gagtctgtgaagttc

SEQ ID NO: 1861617 - DNA, 15 bp, Homo sapiens
agtctgtgaagttcc

SEQ ID NO: 1861618 - DNA, 15 bp, Homo sapiens
gtctgtgaagttcca

SEQ ID NO: 1861619 - DNA, 15 bp, Homo sapiens
tctgtgaagttccac

SEQ ID NO: 1861620 - DNA, 15 bp, Homo sapiens
ctgtgaagttccaca

SEQ ID NO: 1861621 - DNA, 15 bp, Homo sapiens
tgtgaagttccacaa

SEQ ID NO: 1861622 - DNA, 15 bp, Homo sapiens
gtgaagttccacaat

SEQ ID NO: 1861623 - DNA, 15 bp, Homo sapiens
tgaagttccacaatt

SEQ ID NO: 1861624 - DNA, 15 bp, Homo sapiens
gaagttccacaattc

SEQ ID NO: 1861625 - DNA, 15 bp, Homo sapiens
aagttccacaattca

SEQ ID NO: 1861626 - DNA, 15 bp, Homo sapiens
agttccacaattcag

SEQ ID NO: 1861627 - DNA, 15 bp, Homo sapiens
gttccacaattcagg

SEQ ID NO: 1861628 - DNA, 15 bp, Homo sapiens
ttccacaattcagga

SEQ ID NO: 1861629 - DNA, 15 bp, Homo sapiens
tccacaattcaggaa

SEQ ID NO: 1861630 - DNA, 15 bp, Homo sapiens
ccacaattcaggaat

SEQ ID NO: 1861631 - DNA, 15 bp, Homo sapiens
cacaattcaggaatg

SEQ ID NO: 1861632 - DNA, 15 bp, Homo sapiens
acaattcaggaatga

SEQ ID NO: 1861633 - DNA, 15 bp, Homo sapiens
caattcaggaatgat

SEQ ID NO: 1861634 - DNA, 15 bp, Homo sapiens
aattcaggaatgatg

SEQ ID NO: 1861635 - DNA, 15 bp, Homo sapiens
attcaggaatgatgg

SEQ ID NO: 1861636 - DNA, 15 bp, Homo sapiens
ttcaggaatgatggt

SEQ ID NO: 1861637 - DNA, 15 bp, Homo sapiens
tcaggaatgatggtt

SEQ ID NO: 1861638 - DNA, 15 bp, Homo sapiens
caggaatgatggtta

SEQ ID NO: 1861639 - DNA, 15 bp, Homo sapiens
aggaatgatggttac

SEQ ID NO: 1861640 - DNA, 15 bp, Homo sapiens
ggaatgatggttact

SEQ ID NO: 1861641 - DNA, 15 bp, Homo sapiens
gaatgatggttactg

SEQ ID NO: 1861642 - DNA, 15 bp, Homo sapiens
aatgatggttactgc

SEQ ID NO: 1861643 - DNA, 15 bp, Homo sapiens
atgatggttactgca

SEQ ID NO: 1861644 - DNA, 15 bp, Homo sapiens
tgatggttactgcag

SEQ ID NO: 1861645 - DNA, 15 bp, Homo sapiens
gatggttactgcagc

SEQ ID NO: 1861646 - DNA, 15 bp, Homo sapiens
atggttactgcagca

SEQ ID NO: 1861647 - DNA, 15 bp, Homo sapiens
tggttactgcagcac

SEQ ID NO: 1861648 - DNA, 15 bp, Homo sapiens
ggttactgcagcact

SEQ ID NO: 1861649 - DNA, 15 bp, Homo sapiens
gttactgcagcactc

SEQ ID NO: 1861650 - DNA, 15 bp, Homo sapiens
ttactgcagcactct

SEQ ID NO: 1861651 - DNA, 15 bp, Homo sapiens
tactgcagcactctt

SEQ ID NO: 1861652 - DNA, 15 bp, Homo sapiens
actgcagcactcttg

SEQ ID NO: 1861653 - DNA, 15 bp, Homo sapiens
ctgcagcactcttgt

SEQ ID NO: 1861654 - DNA, 15 bp, Homo sapiens
tgcagcactcttgtg

SEQ ID NO: 1861655 - DNA, 15 bp, Homo sapiens
gcagcactcttgtgt

SEQ ID NO: 1861656 - DNA, 15 bp, Homo sapiens
cagcactcttgtgtt

SEQ ID NO: 1861657 - DNA, 15 bp, Homo sapiens
agcactcttgtgttt

SEQ ID NO: 1861658 - DNA, 15 bp, Homo sapiens
gcactcttgtgtttc

SEQ ID NO: 1861659 - DNA, 15 bp, Homo sapiens
cactcttgtgtttca

SEQ ID NO: 1861660 - DNA, 15 bp, Homo sapiens
actcttgtgtttcaa

SEQ ID NO: 1861661 - DNA, 15 bp, Homo sapiens
ctcttgtgtttcaag

SEQ ID NO: 1861662 - DNA, 15 bp, Homo sapiens
tcttgtgtttcaagg

SEQ ID NO: 1861663 - DNA, 15 bp, Homo sapiens
cttgtgtttcaaggt

SEQ ID NO: 1861664 - DNA, 15 bp, Homo sapiens
ttgtgtttcaaggtt

SEQ ID NO: 1861665 - DNA, 15 bp, Homo sapiens
gtgtttcaaggttcg

SEQ ID NO: 1861666 - DNA, 15 bp, Homo sapiens
tgtttcaaggttcgt

SEQ ID NO: 1861667 - DNA, 15 bp, Homo sapiens
gtttcaaggttcgtc

SEQ ID NO: 1861668 - DNA, 15 bp, Homo sapiens
tttcaaggttcgtca

SEQ ID NO: 1861669 - DNA, 15 bp, Homo sapiens
ttcaaggttcgtcat

SEQ ID NO: 1861670 - DNA, 15 bp, Homo sapiens
tcaaggttcgtcatg

SEQ ID NO: 1861671 - DNA, 15 bp, Homo sapiens
caaggttcgtcatga

SEQ ID NO: 1861672 - DNA, 15 bp, Homo sapiens
aaggttcgtcatgaa

SEQ ID NO: 1861673 - DNA, 15 bp, Homo sapiens
aggttcgtcatgaag

SEQ ID NO: 1861674 - DNA, 15 bp, Homo sapiens
ggttcgtcatgaaga

SEQ ID NO: 1861675 - DNA, 15 bp, Homo sapiens
gttcgtcatgaagac

SEQ ID NO: 1861676 - DNA, 15 bp, Homo sapiens
ttcgtcatgaagact

SEQ ID NO: 1861677 - DNA, 15 bp, Homo sapiens
tcgtcatgaagacta

SEQ ID NO: 1861678 - DNA, 15 bp, Homo sapiens
cgtcatgaagactag

SEQ ID NO: 1861679 - DNA, 15 bp, Homo sapiens
gtcatgaagactagc

SEQ ID NO: 1861680 - DNA, 15 bp, Homo sapiens
tcatgaagactagca

SEQ ID NO: 1861681 - DNA, 15 bp, Homo sapiens
catgaagactagcat

SEQ ID NO: 1861682 - DNA, 15 bp, Homo sapiens
atgaagactagcata

SEQ ID NO: 1861683 - DNA, 15 bp, Homo sapiens
tgaagactagcatag

SEQ ID NO: 1861684 - DNA, 15 bp, Homo sapiens
gaagactagcataga

SEQ ID NO: 1861685 - DNA, 15 bp, Homo sapiens
aagactagcatagat

SEQ ID NO: 1861686 - DNA, 15 bp, Homo sapiens
agactagcatagatt

SEQ ID NO: 1861687 - DNA, 15 bp, Homo sapiens
gactagcatagattc

SEQ ID NO: 1861688 - DNA, 15 bp, Homo sapiens
actagcatagattcc

SEQ ID NO: 1861689 - DNA, 15 bp, Homo sapiens
ctagcatagattcca

SEQ ID NO: 1861690 - DNA, 15 bp, Homo sapiens
tagcatagattccac

SEQ ID NO: 1861691 - DNA, 15 bp, Homo sapiens
agcatagattccact

SEQ ID NO: 1861692 - DNA, 15 bp, Homo sapiens
gcatagattccactg

SEQ ID NO: 1861693 - DNA, 15 bp, Homo sapiens
catagattccactgt

SEQ ID NO: 1861694 - DNA, 15 bp, Homo sapiens
atagattccactgtt

SEQ ID NO: 1861695 - DNA, 15 bp, Homo sapiens
tagattccactgttc

SEQ ID NO: 1861696 - DNA, 15 bp, Homo sapiens
agattccactgttca

SEQ ID NO: 1861697 - DNA, 15 bp, Homo sapiens
gattccactgttcaa

SEQ ID NO: 1861698 - DNA, 15 bp, Homo sapiens
attccactgttcaat

SEQ ID NO: 1861699 - DNA, 15 bp, Homo sapiens
ttccactgttcaatt

SEQ ID NO: 1861700 - DNA, 15 bp, Homo sapiens
tccactgttcaatta

SEQ ID NO: 1861701 - DNA, 15 bp, Homo sapiens
ccactgttcaattaa

SEQ ID NO: 1861702 - DNA, 15 bp, Homo sapiens
cactgttcaattaaa

SEQ ID NO: 1861703 - DNA, 15 bp, Homo sapiens
actgttcaattaaag

SEQ ID NO: 1861704 - DNA, 15 bp, Homo sapiens
ctgttcaattaaagc

SEQ ID NO: 1861705 - DNA, 15 bp, Homo sapiens
tgttcaattaaagca

SEQ ID NO: 1861706 - DNA, 15 bp, Homo sapiens
gttcaattaaagcaa

SEQ ID NO: 1861707 - DNA, 15 bp, Homo sapiens
ttcaattaaagcaac

SEQ ID NO: 1861708 - DNA, 15 bp, Homo sapiens
tcaattaaagcaacg

SEQ ID NO: 1861709 - DNA, 15 bp, Homo sapiens
caattaaagcaacgt

SEQ ID NO: 1861710 - DNA, 15 bp, Homo sapiens
aattaaagcaacgtt

SEQ ID NO: 1861711 - DNA, 15 bp, Homo sapiens
attaaagcaacgttt

SEQ ID NO: 1861712 - DNA, 15 bp, Homo sapiens
ttaaagcaacgttta

SEQ ID NO: 1861713 - DNA, 15 bp, Homo sapiens
taaagcaacgtttac

SEQ ID NO: 1861714 - DNA, 15 bp, Homo sapiens
aaagcaacgtttacc

SEQ ID NO: 1861715 - DNA, 15 bp, Homo sapiens
aagcaacgtttacca

SEQ ID NO: 1861716 - DNA, 15 bp, Homo sapiens
agcaacgtttaccat

SEQ ID NO: 1861717 - DNA, 15 bp, Homo sapiens
gcaacgtttaccatg

SEQ ID NO: 1861718 - DNA, 15 bp, Homo sapiens
caacgtttaccatga

SEQ ID NO: 1861719 - DNA, 15 bp, Homo sapiens
aacgtttaccatgat

SEQ ID NO: 1861720 - DNA, 15 bp, Homo sapiens
acgtttaccatgata

SEQ ID NO: 1861721 - DNA, 15 bp, Homo sapiens
cgtttaccatgatat

SEQ ID NO: 1861722 - DNA, 15 bp, Homo sapiens
gtttaccatgatatt

SEQ ID NO: 1861723 - DNA, 15 bp, Homo sapiens
tttaccatgatattc

SEQ ID NO: 1861724 - DNA, 15 bp, Homo sapiens
ttaccatgatattcc

SEQ ID NO: 1861725 - DNA, 15 bp, Homo sapiens
taccatgatattcct

SEQ ID NO: 1861726 - DNA, 15 bp, Homo sapiens
accatgatattccta

SEQ ID NO: 1861727 - DNA, 15 bp, Homo sapiens
ccatgatattcctat

SEQ ID NO: 1861728 - DNA, 15 bp, Homo sapiens
catgatattcctatt

SEQ ID NO: 1861729 - DNA, 15 bp, Homo sapiens
atgatattcctattt

SEQ ID NO: 1861730 - DNA, 15 bp, Homo sapiens
tgatattcctatttt

SEQ ID NO: 1861731 - DNA, 15 bp, Homo sapiens
gatattcctattttc

SEQ ID NO: 1861732 - DNA, 15 bp, Homo sapiens
atattcctattttcc

SEQ ID NO: 1861733 - DNA, 15 bp, Homo sapiens
tattcctattttcca

SEQ ID NO: 1861734 - DNA, 15 bp, Homo sapiens
attcctattttccat

SEQ ID NO: 1861735 - DNA, 15 bp, Homo sapiens
ttcctattttccatg

SEQ ID NO: 1861736 - DNA, 15 bp, Homo sapiens
tcctattttccatga

SEQ ID NO: 1861737 - DNA, 15 bp, Homo sapiens
cctattttccatgat

SEQ ID NO: 1861738 - DNA, 15 bp, Homo sapiens
ctattttccatgatg

SEQ ID NO: 1861739 - DNA, 15 bp, Homo sapiens
tattttccatgatgc

SEQ ID NO: 1861740 - DNA, 15 bp, Homo sapiens
attttccatgatgca

SEQ ID NO: 1861741 - DNA, 15 bp, Homo sapiens
ttttccatgatgcag

SEQ ID NO: 1861742 - DNA, 15 bp, Homo sapiens
tttccatgatgcagg

SEQ ID NO: 1861743 - DNA, 15 bp, Homo sapiens
ttccatgatgcaggg

SEQ ID NO: 1861744 - DNA, 15 bp, Homo sapiens
tccatgatgcagggt

SEQ ID NO: 1861745 - DNA, 15 bp, Homo sapiens
ccatgatgcagggtc

SEQ ID NO: 1861746 - DNA, 15 bp, Homo sapiens
catgatgcagggtcc

SEQ ID NO: 1861747 - DNA, 15 bp, Homo sapiens
atgatgcagggtcct

SEQ ID NO: 1861748 - DNA, 15 bp, Homo sapiens
tgatgcagggtcctg

SEQ ID NO: 1861749 - DNA, 15 bp, Homo sapiens
gatgcagggtcctgg

SEQ ID NO: 1861750 - DNA, 15 bp, Homo sapiens
atgcagggtcctggg

SEQ ID NO: 1861751 - DNA, 15 bp, Homo sapiens
tgcagggtcctggga

SEQ ID NO: 1861752 - DNA, 15 bp, Homo sapiens
gcagggtcctgggaa

SEQ ID NO: 1861753 - DNA, 15 bp, Homo sapiens
cagggtcctgggaag

SEQ ID NO: 1861754 - DNA, 15 bp, Homo sapiens
agggtcctgggaagc

SEQ ID NO: 1861755 - DNA, 15 bp, Homo sapiens
gggtcctgggaagca

SEQ ID NO: 1861756 - DNA, 15 bp, Homo sapiens
ggtcctgggaagcat

SEQ ID NO: 1861757 - DNA, 15 bp, Homo sapiens
gtcctgggaagcatc

SEQ ID NO: 1861758 - DNA, 15 bp, Homo sapiens
tcctgggaagcatct

SEQ ID NO: 1861759 - DNA, 15 bp, Homo sapiens
cctgggaagcatctc

SEQ ID NO: 1861760 - DNA, 15 bp, Homo sapiens
ctgggaagcatctct

SEQ ID NO: 1861761 - DNA, 15 bp, Homo sapiens
tgggaagcatctctt

SEQ ID NO: 1861762 - DNA, 15 bp, Homo sapiens
gggaagcatctcttt

SEQ ID NO: 1861763 - DNA, 15 bp, Homo sapiens
ggaagcatctctttc

SEQ ID NO: 1861764 - DNA, 15 bp, Homo sapiens
gaagcatctctttca

SEQ ID NO: 1861765 - DNA, 15 bp, Homo sapiens
aagcatctctttcag

SEQ ID NO: 1861766 - DNA, 15 bp, Homo sapiens
agcatctctttcagg

SEQ ID NO: 1861767 - DNA, 15 bp, Homo sapiens
gcatctctttcagga

SEQ ID NO: 1861768 - DNA, 15 bp, Homo sapiens
catctctttcaggaa

SEQ ID NO: 1861769 - DNA, 15 bp, Homo sapiens
atctctttcaggaag

SEQ ID NO: 1861770 - DNA, 15 bp, Homo sapiens
tctctttcaggaagg

SEQ ID NO: 1861771 - DNA, 15 bp, Homo sapiens
ctctttcaggaaggg

SEQ ID NO: 1861772 - DNA, 15 bp, Homo sapiens
tctttcaggaaggga

SEQ ID NO: 1861773 - DNA, 15 bp, Homo sapiens
ctttcaggaagggag

SEQ ID NO: 1861774 - DNA, 15 bp, Homo sapiens
tttcaggaagggagt

SEQ ID NO: 1861775 - DNA, 15 bp, Homo sapiens
ttcaggaagggagta

SEQ ID NO: 1861776 - DNA, 15 bp, Homo sapiens
tcaggaagggagtat

SEQ ID NO: 1861777 - DNA, 15 bp, Homo sapiens
caggaagggagtatg

SEQ ID NO: 1861778 - DNA, 15 bp, Homo sapiens
aggaagggagtatgt

SEQ ID NO: 1861779 - DNA, 15 bp, Homo sapiens
ggaagggagtatgta

SEQ ID NO: 1861780 - DNA, 15 bp, Homo sapiens
gaagggagtatgtat

SEQ ID NO: 1861781 - DNA, 15 bp, Homo sapiens
aagggagtatgtatt

SEQ ID NO: 1861782 - DNA, 15 bp, Homo sapiens
agggagtatgtattc

SEQ ID NO: 1861783 - DNA, 15 bp, Homo sapiens
gggagtatgtattca

SEQ ID NO: 1861784 - DNA, 15 bp, Homo sapiens
ggagtatgtattcaa

SEQ ID NO: 1861785 - DNA, 15 bp, Homo sapiens
gagtatgtattcaag

SEQ ID NO: 1861786 - DNA, 15 bp, Homo sapiens
agtatgtattcaagg

SEQ ID NO: 1861787 - DNA, 15 bp, Homo sapiens
gtatgtattcaaggt

SEQ ID NO: 1861788 - DNA, 15 bp, Homo sapiens
tatgtattcaaggtc

SEQ ID NO: 1861789 - DNA, 15 bp, Homo sapiens
atgtattcaaggtca

SEQ ID NO: 1861790 - DNA, 15 bp, Homo sapiens
tgtattcaaggtcag

SEQ ID NO: 1861791 - DNA, 15 bp, Homo sapiens
gtattcaaggtcagt

SEQ ID NO: 1861792 - DNA, 15 bp, Homo sapiens
tattcaaggtcagtc

SEQ ID NO: 1861793 - DNA, 15 bp, Homo sapiens
attcaaggtcagtca

SEQ ID NO: 1861794 - DNA, 15 bp, Homo sapiens
ttcaaggtcagtcag

SEQ ID NO: 1861795 - DNA, 15 bp, Homo sapiens
tcaaggtcagtcagt

SEQ ID NO: 1861796 - DNA, 15 bp, Homo sapiens
caaggtcagtcagta

SEQ ID NO: 1861797 - DNA, 15 bp, Homo sapiens
aaggtcagtcagtat

SEQ ID NO: 1861798 - DNA, 15 bp, Homo sapiens
aggtcagtcagtata

SEQ ID NO: 1861799 - DNA, 15 bp, Homo sapiens
ggtcagtcagtatat

SEQ ID NO: 1861800 - DNA, 15 bp, Homo sapiens
gtcagtcagtatatg

SEQ ID NO: 1861801 - DNA, 15 bp, Homo sapiens
tcagtcagtatatga

SEQ ID NO: 1861802 - DNA, 15 bp, Homo sapiens
cagtcagtatatgaa

SEQ ID NO: 1861803 - DNA, 15 bp, Homo sapiens
agtcagtatatgaat

SEQ ID NO: 1861804 - DNA, 15 bp, Homo sapiens
gtcagtatatgaatg

SEQ ID NO: 1861805 - DNA, 15 bp, Homo sapiens
tcagtatatgaatgt

SEQ ID NO: 1861806 - DNA, 15 bp, Homo sapiens
cagtatatgaatgtg

SEQ ID NO: 1861807 - DNA, 15 bp, Homo sapiens
agtatatgaatgtgt

SEQ ID NO: 1861808 - DNA, 15 bp, Homo sapiens
gtatatgaatgtgtc

SEQ ID NO: 1861809 - DNA, 15 bp, Homo sapiens
tatatgaatgtgtct

SEQ ID NO: 1861810 - DNA, 15 bp, Homo sapiens
atatgaatgtgtctg

SEQ ID NO: 1861811 - DNA, 15 bp, Homo sapiens
tatgaatgtgtctga

SEQ ID NO: 1861812 - DNA, 15 bp, Homo sapiens
atgaatgtgtctgag

SEQ ID NO: 1861813 - DNA, 15 bp, Homo sapiens
tgaatgtgtctgaga

SEQ ID NO: 1861814 - DNA, 15 bp, Homo sapiens
gaatgtgtctgagac

SEQ ID NO: 1861815 - DNA, 15 bp, Homo sapiens
aatgtgtctgagact

SEQ ID NO: 1861816 - DNA, 15 bp, Homo sapiens
atgtgtctgagactt

SEQ ID NO: 1861817 - DNA, 15 bp, Homo sapiens
tgtgtctgagacttg

SEQ ID NO: 1861818 - DNA, 15 bp, Homo sapiens
gtgtctgagacttgg

SEQ ID NO: 1861819 - DNA, 15 bp, Homo sapiens
tgtctgagacttgga

SEQ ID NO: 1861820 - DNA, 15 bp, Homo sapiens
gtctgagacttggat

SEQ ID NO: 1861821 - DNA, 15 bp, Homo sapiens
tctgagacttggatg

SEQ ID NO: 1861822 - DNA, 15 bp, Homo sapiens
ctgagacttggatgg

SEQ ID NO: 1861823 - DNA, 15 bp, Homo sapiens
tgagacttggatggc

SEQ ID NO: 1861824 - DNA, 15 bp, Homo sapiens
gagacttggatggct

SEQ ID NO: 1861825 - DNA, 15 bp, Homo sapiens
agacttggatggctc

SEQ ID NO: 1861826 - DNA, 15 bp, Homo sapiens
gacttggatggctca

SEQ ID NO: 1861827 - DNA, 15 bp, Homo sapiens
acttggatggctcaa

SEQ ID NO: 1861828 - DNA, 15 bp, Homo sapiens
cttggatggctcaag

SEQ ID NO: 1861829 - DNA, 15 bp, Homo sapiens
ttggatggctcaagg

SEQ ID NO: 1861830 - DNA, 15 bp, Homo sapiens
tggatggctcaaggg

SEQ ID NO: 1861831 - DNA, 15 bp, Homo sapiens
ggatggctcaagggg

SEQ ID NO: 1861832 - DNA, 15 bp, Homo sapiens
gatggctcaagggga

SEQ ID NO: 1861833 - DNA, 15 bp, Homo sapiens
atggctcaaggggat

SEQ ID NO: 1861834 - DNA, 15 bp, Homo sapiens
tggctcaaggggata

SEQ ID NO: 1861835 - DNA, 15 bp, Homo sapiens
ggctcaaggggatag

SEQ ID NO: 1861836 - DNA, 15 bp, Homo sapiens
gctcaaggggataga

SEQ ID NO: 1861837 - DNA, 15 bp, Homo sapiens
ctcaaggggatagag

SEQ ID NO: 1861838 - DNA, 15 bp, Homo sapiens
tcaaggggatagagc

SEQ ID NO: 1861839 - DNA, 15 bp, Homo sapiens
caaggggatagagct

SEQ ID NO: 1861840 - DNA, 15 bp, Homo sapiens
aaggggatagagcta

SEQ ID NO: 1861841 - DNA, 15 bp, Homo sapiens
aggggatagagctag

SEQ ID NO: 1861842 - DNA, 15 bp, Homo sapiens
ggggatagagctagg

SEQ ID NO: 1861843 - DNA, 15 bp, Homo sapiens
gggatagagctaggt

SEQ ID NO: 1861844 - DNA, 15 bp, Homo sapiens
ggatagagctaggtg

SEQ ID NO: 1861845 - DNA, 15 bp, Homo sapiens
gatagagctaggtgt

SEQ ID NO: 1861846 - DNA, 15 bp, Homo sapiens
atagagctaggtgtt

SEQ ID NO: 1861847 - DNA, 15 bp, Homo sapiens
tagagctaggtgtta

SEQ ID NO: 1861848 - DNA, 15 bp, Homo sapiens
agagctaggtgttat

SEQ ID NO: 1861849 - DNA, 15 bp, Homo sapiens
gagctaggtgttatc

SEQ ID NO: 1861850 - DNA, 15 bp, Homo sapiens
agctaggtgttatct

SEQ ID NO: 1861851 - DNA, 15 bp, Homo sapiens
gctaggtgttatctg

SEQ ID NO: 1861852 - DNA, 15 bp, Homo sapiens
ctaggtgttatctgg

SEQ ID NO: 1861853 - DNA, 15 bp, Homo sapiens
taggtgttatctggc

SEQ ID NO: 1861854 - DNA, 15 bp, Homo sapiens
aggtgttatctggca

SEQ ID NO: 1861855 - DNA, 15 bp, Homo sapiens
ggtgttatctggcag

SEQ ID NO: 1861856 - DNA, 15 bp, Homo sapiens
gtgttatctggcagt

SEQ ID NO: 1861857 - DNA, 15 bp, Homo sapiens
tgttatctggcagtc

SEQ ID NO: 1861858 - DNA, 15 bp, Homo sapiens
gttatctggcagtcg

SEQ ID NO: 1861859 - DNA, 15 bp, Homo sapiens
ttatctggcagtcgc

SEQ ID NO: 1861860 - DNA, 15 bp, Homo sapiens
tatctggcagtcgca

SEQ ID NO: 1861861 - DNA, 15 bp, Homo sapiens
atctggcagtcgcaa

SEQ ID NO: 1861862 - DNA, 15 bp, Homo sapiens
tctggcagtcgcaaa

SEQ ID NO: 1861863 - DNA, 15 bp, Homo sapiens
ctggcagtcgcaaaa

SEQ ID NO: 1861864 - DNA, 15 bp, Homo sapiens
tggcagtcgcaaaag

SEQ ID NO: 1861865 - DNA, 15 bp, Homo sapiens
ggcagtcgcaaaagt

SEQ ID NO: 1861866 - DNA, 15 bp, Homo sapiens
gcagtcgcaaaagtg

SEQ ID NO: 1861867 - DNA, 15 bp, Homo sapiens
cagtcgcaaaagtga

SEQ ID NO: 1861868 - DNA, 15 bp, Homo sapiens
agtcgcaaaagtgag

SEQ ID NO: 1861869 - DNA, 15 bp, Homo sapiens
gtcgcaaaagtgaga

SEQ ID NO: 1861870 - DNA, 15 bp, Homo sapiens
tcgcaaaagtgagag

SEQ ID NO: 1861871 - DNA, 15 bp, Homo sapiens
cgcaaaagtgagaga

SEQ ID NO: 1861872 - DNA, 15 bp, Homo sapiens
gcaaaagtgagagat

SEQ ID NO: 1861873 - DNA, 15 bp, Homo sapiens
caaaagtgagagatg

SEQ ID NO: 1861874 - DNA, 15 bp, Homo sapiens
aaaagtgagagatga

SEQ ID NO: 1861875 - DNA, 15 bp, Homo sapiens
aaagtgagagatgat

SEQ ID NO: 1861876 - DNA, 15 bp, Homo sapiens
aagtgagagatgatg

SEQ ID NO: 1861877 - DNA, 15 bp, Homo sapiens
agtgagagatgatga

SEQ ID NO: 1861878 - DNA, 15 bp, Homo sapiens
gtgagagatgatgac

SEQ ID NO: 1861879 - DNA, 15 bp, Homo sapiens
tgagagatgatgaca

SEQ ID NO: 1861880 - DNA, 15 bp, Homo sapiens
gagagatgatgacaa

SEQ ID NO: 1861881 - DNA, 15 bp, Homo sapiens
agagatgatgacaag

SEQ ID NO: 1861882 - DNA, 15 bp, Homo sapiens
gagatgatgacaagg

SEQ ID NO: 1861883 - DNA, 15 bp, Homo sapiens
agatgatgacaaggc

SEQ ID NO: 1861884 - DNA, 15 bp, Homo sapiens
gatgatgacaaggcc

SEQ ID NO: 1861885 - DNA, 15 bp, Homo sapiens
atgatgacaaggcca

SEQ ID NO: 1861886 - DNA, 15 bp, Homo sapiens
tgatgacaaggccaa

SEQ ID NO: 1861887 - DNA, 15 bp, Homo sapiens
gatgacaaggccaag

SEQ ID NO: 1861888 - DNA, 15 bp, Homo sapiens
atgacaaggccaagg

SEQ ID NO: 1861889 - DNA, 15 bp, Homo sapiens
tgacaaggccaaggt

SEQ ID NO: 1861890 - DNA, 15 bp, Homo sapiens
gacaaggccaaggta

SEQ ID NO: 1861891 - DNA, 15 bp, Homo sapiens
acaaggccaaggtag

SEQ ID NO: 1861892 - DNA, 15 bp, Homo sapiens
caaggccaaggtagg

SEQ ID NO: 1861893 - DNA, 15 bp, Homo sapiens
aaggccaaggtaggt

SEQ ID NO: 1861894 - DNA, 15 bp, Homo sapiens
aggccaaggtaggta

SEQ ID NO: 1861895 - DNA, 15 bp, Homo sapiens
ggccaaggtaggtag

SEQ ID NO: 1861896 - DNA, 15 bp, Homo sapiens
gccaaggtaggtagg

SEQ ID NO: 1861897 - DNA, 15 bp, Homo sapiens
ccaaggtaggtagga

SEQ ID NO: 1861898 - DNA, 15 bp, Homo sapiens
caaggtaggtaggag

SEQ ID NO: 1861899 - DNA, 15 bp, Homo sapiens
aaggtaggtaggaga

SEQ ID NO: 1861900 - DNA, 15 bp, Homo sapiens
aggtaggtaggagaa

SEQ ID NO: 1861901 - DNA, 15 bp, Homo sapiens
ggtaggtaggagaat

SEQ ID NO: 1861902 - DNA, 15 bp, Homo sapiens
gtaggtaggagaatg

SEQ ID NO: 1861903 - DNA, 15 bp, Homo sapiens
taggtaggagaatgg

SEQ ID NO: 1861904 - DNA, 15 bp, Homo sapiens
aggtaggagaatggg

SEQ ID NO: 1861905 - DNA, 15 bp, Homo sapiens
ggtaggagaatgggg

SEQ ID NO: 1861906 - DNA, 15 bp, Homo sapiens
gtaggagaatgggga

SEQ ID NO: 1861907 - DNA, 15 bp, Homo sapiens
taggagaatggggat

SEQ ID NO: 1861908 - DNA, 15 bp, Homo sapiens
aggagaatggggatc

SEQ ID NO: 1861909 - DNA, 15 bp, Homo sapiens
ggagaatggggatcc

SEQ ID NO: 1861910 - DNA, 15 bp, Homo sapiens
gagaatggggatccc

SEQ ID NO: 1861911 - DNA, 15 bp, Homo sapiens
agaatggggatccct

SEQ ID NO: 1861912 - DNA, 15 bp, Homo sapiens
gaatggggatccctc

SEQ ID NO: 1861913 - DNA, 15 bp, Homo sapiens
aatggggatccctca

SEQ ID NO: 1861914 - DNA, 15 bp, Homo sapiens
atggggatccctcat

SEQ ID NO: 1861915 - DNA, 15 bp, Homo sapiens
tggggatccctcatt

SEQ ID NO: 1861916 - DNA, 15 bp, Homo sapiens
ggggatccctcattc

SEQ ID NO: 1861917 - DNA, 15 bp, Homo sapiens
gggatccctcattca

SEQ ID NO: 1861918 - DNA, 15 bp, Homo sapiens
ggatccctcattcat

SEQ ID NO: 1861919 - DNA, 15 bp, Homo sapiens
gatccctcattcatt

SEQ ID NO: 1861920 - DNA, 15 bp, Homo sapiens
atccctcattcattt

SEQ ID NO: 1861921 - DNA, 15 bp, Homo sapiens
tccctcattcattta

SEQ ID NO: 1861922 - DNA, 15 bp, Homo sapiens
ccctcattcatttat

SEQ ID NO: 1861923 - DNA, 15 bp, Homo sapiens
cctcattcatttatc

SEQ ID NO: 1861924 - DNA, 15 bp, Homo sapiens
ctcattcatttatcc

SEQ ID NO: 1861925 - DNA, 15 bp, Homo sapiens
tcattcatttatccc

SEQ ID NO: 1861926 - DNA, 15 bp, Homo sapiens
cattcatttatccca

SEQ ID NO: 1861927 - DNA, 15 bp, Homo sapiens
attcatttatcccat

SEQ ID NO: 1861928 - DNA, 15 bp, Homo sapiens
ttcatttatcccatc

SEQ ID NO: 1861929 - DNA, 15 bp, Homo sapiens
tcatttatcccatca

SEQ ID NO: 1861930 - DNA, 15 bp, Homo sapiens
catttatcccatcat

SEQ ID NO: 1861931 - DNA, 15 bp, Homo sapiens
atttatcccatcatt

SEQ ID NO: 1861932 - DNA, 15 bp, Homo sapiens
tttatcccatcatta

SEQ ID NO: 1861933 - DNA, 15 bp, Homo sapiens
ttatcccatcattat

SEQ ID NO: 1861934 - DNA, 15 bp, Homo sapiens
tatcccatcattatt

SEQ ID NO: 1861935 - DNA, 15 bp, Homo sapiens
atcccatcattattt

SEQ ID NO: 1861936 - DNA, 15 bp, Homo sapiens
tcccatcattattta

SEQ ID NO: 1861937 - DNA, 15 bp, Homo sapiens
cccatcattatttat

SEQ ID NO: 1861938 - DNA, 15 bp, Homo sapiens
ccatcattatttatt

SEQ ID NO: 1861939 - DNA, 15 bp, Homo sapiens
catcattatttattg

SEQ ID NO: 1861940 - DNA, 15 bp, Homo sapiens
atcattatttattga

SEQ ID NO: 1861941 - DNA, 15 bp, Homo sapiens
tcattatttattgag

SEQ ID NO: 1861942 - DNA, 15 bp, Homo sapiens
cattatttattgagc

SEQ ID NO: 1861943 - DNA, 15 bp, Homo sapiens
attatttattgagca

SEQ ID NO: 1861944 - DNA, 15 bp, Homo sapiens
atttattgagcacca

SEQ ID NO: 1861945 - DNA, 15 bp, Homo sapiens
tttattgagcaccaa

SEQ ID NO: 1861946 - DNA, 15 bp, Homo sapiens
ttattgagcaccaac

SEQ ID NO: 1861947 - DNA, 15 bp, Homo sapiens
tattgagcaccaact

SEQ ID NO: 1861948 - DNA, 15 bp, Homo sapiens
attgagcaccaactg

SEQ ID NO: 1861949 - DNA, 15 bp, Homo sapiens
ttgagcaccaactgt

SEQ ID NO: 1861950 - DNA, 15 bp, Homo sapiens
tgagcaccaactgtg

SEQ ID NO: 1861951 - DNA, 15 bp, Homo sapiens
gagcaccaactgtgt

SEQ ID NO: 1861952 - DNA, 15 bp, Homo sapiens
agcaccaactgtgtc

SEQ ID NO: 1861953 - DNA, 15 bp, Homo sapiens
gcaccaactgtgtcc

SEQ ID NO: 1861954 - DNA, 15 bp, Homo sapiens
caccaactgtgtccc

SEQ ID NO: 1861955 - DNA, 15 bp, Homo sapiens
accaactgtgtccca

SEQ ID NO: 1861956 - DNA, 15 bp, Homo sapiens
ccaactgtgtcccag

SEQ ID NO: 1861957 - DNA, 15 bp, Homo sapiens
caactgtgtcccagg

SEQ ID NO: 1861958 - DNA, 15 bp, Homo sapiens
aactgtgtcccaggc

SEQ ID NO: 1861959 - DNA, 15 bp, Homo sapiens
actgtgtcccaggca

SEQ ID NO: 1861960 - DNA, 15 bp, Homo sapiens
ctgtgtcccaggcat

SEQ ID NO: 1861961 - DNA, 15 bp, Homo sapiens
tgtgtcccaggcatt

SEQ ID NO: 1861962 - DNA, 15 bp, Homo sapiens
gtgtcccaggcattg

SEQ ID NO: 1861963 - DNA, 15 bp, Homo sapiens
tgtcccaggcattgt

SEQ ID NO: 1861964 - DNA, 15 bp, Homo sapiens
gtcccaggcattgtt

SEQ ID NO: 1861965 - DNA, 15 bp, Homo sapiens
tcccaggcattgttc

SEQ ID NO: 1861966 - DNA, 15 bp, Homo sapiens
cccaggcattgttca

SEQ ID NO: 1861967 - DNA, 15 bp, Homo sapiens
tcaatgaattgaaat

SEQ ID NO: 1861968 - DNA, 15 bp, Homo sapiens
caatgaattgaaatt

SEQ ID NO: 1861969 - DNA, 15 bp, Homo sapiens
aatgaattgaaatta

SEQ ID NO: 1861970 - DNA, 15 bp, Homo sapiens
atgaattgaaattaa

SEQ ID NO: 1861971 - DNA, 15 bp, Homo sapiens
tgaattgaaattaag

SEQ ID NO: 1861972 - DNA, 15 bp, Homo sapiens
gaattgaaattaagg

SEQ ID NO: 1861973 - DNA, 15 bp, Homo sapiens
aattgaaattaagga

SEQ ID NO: 1861974 - DNA, 15 bp, Homo sapiens
attgaaattaaggac

SEQ ID NO: 1861975 - DNA, 15 bp, Homo sapiens
ttgaaattaaggacc

SEQ ID NO: 1861976 - DNA, 15 bp, Homo sapiens
tgaaattaaggaccg

SEQ ID NO: 1861977 - DNA, 15 bp, Homo sapiens
gaaattaaggaccgt

SEQ ID NO: 1861978 - DNA, 15 bp, Homo sapiens
aaattaaggaccgtt

SEQ ID NO: 1861979 - DNA, 15 bp, Homo sapiens
aattaaggaccgttc

SEQ ID NO: 1861980 - DNA, 15 bp, Homo sapiens
attaaggaccgttca

SEQ ID NO: 1861981 - DNA, 15 bp, Homo sapiens
ttaaggaccgttcat

SEQ ID NO: 1861982 - DNA, 15 bp, Homo sapiens
taaggaccgttcatt

SEQ ID NO: 1861983 - DNA, 15 bp, Homo sapiens
aaggaccgttcattt

SEQ ID NO: 1861984 - DNA, 15 bp, Homo sapiens
aggaccgttcatttg

SEQ ID NO: 1861985 - DNA, 15 bp, Homo sapiens
ggaccgttcatttgg

SEQ ID NO: 1861986 - DNA, 15 bp, Homo sapiens
gaccgttcatttgga

SEQ ID NO: 1861987 - DNA, 15 bp, Homo sapiens
accgttcatttggaa

SEQ ID NO: 1861988 - DNA, 15 bp, Homo sapiens
ccgttcatttggaaa

SEQ ID NO: 1861989 - DNA, 15 bp, Homo sapiens
cgttcatttggaaaa

SEQ ID NO: 1861990 - DNA, 15 bp, Homo sapiens
gttcatttggaaaaa

SEQ ID NO: 1861991 - DNA, 15 bp, Homo sapiens
ttcatttggaaaaac

SEQ ID NO: 1861992 - DNA, 15 bp, Homo sapiens
tcatttggaaaaacc

SEQ ID NO: 1861993 - DNA, 15 bp, Homo sapiens
catttggaaaaacct

SEQ ID NO: 1861994 - DNA, 15 bp, Homo sapiens
atttggaaaaaccta

SEQ ID NO: 1861995 - DNA, 15 bp, Homo sapiens
tttggaaaaacctat

SEQ ID NO: 1861996 - DNA, 15 bp, Homo sapiens
ttggaaaaacctatt

SEQ ID NO: 1861997 - DNA, 15 bp, Homo sapiens
tggaaaaacctatta

SEQ ID NO: 1861998 - DNA, 15 bp, Homo sapiens
ggaaaaacctattaa

SEQ ID NO: 1861999 - DNA, 15 bp, Homo sapiens
gaaaaacctattaac

SEQ ID NO: 1862000 - DNA, 15 bp, Homo sapiens
aaaaacctattaact

SEQ ID NO: 1862001 - DNA, 15 bp, Homo sapiens
aaaacctattaactc

SEQ ID NO: 1862002 - DNA, 15 bp, Homo sapiens
aaacctattaactcc

SEQ ID NO: 1862003 - DNA, 15 bp, Homo sapiens
aacctattaactccc

SEQ ID NO: 1862004 - DNA, 15 bp, Homo sapiens
acctattaactccct

SEQ ID NO: 1862005 - DNA, 15 bp, Homo sapiens
cctattaactccctg

SEQ ID NO: 1862006 - DNA, 15 bp, Homo sapiens
ctattaactccctgc

SEQ ID NO: 1862007 - DNA, 15 bp, Homo sapiens
tattaactccctgct

SEQ ID NO: 1862008 - DNA, 15 bp, Homo sapiens
attaactccctgctt

SEQ ID NO: 1862009 - DNA, 15 bp, Homo sapiens
ttaactccctgcttg

SEQ ID NO: 1862010 - DNA, 15 bp, Homo sapiens
taactccctgcttgt

SEQ ID NO: 1862011 - DNA, 15 bp, Homo sapiens
aactccctgcttgtc

SEQ ID NO: 1862012 - DNA, 15 bp, Homo sapiens
actccctgcttgtcg

SEQ ID NO: 1862013 - DNA, 15 bp, Homo sapiens
ctccctgcttgtcga

SEQ ID NO: 1862014 - DNA, 15 bp, Homo sapiens
tccctgcttgtcgat

SEQ ID NO: 1862015 - DNA, 15 bp, Homo sapiens
ccctgcttgtcgatg

SEQ ID NO: 1862016 - DNA, 15 bp, Homo sapiens
cctgcttgtcgatgg

SEQ ID NO: 1862017 - DNA, 15 bp, Homo sapiens
ctgcttgtcgatggc

SEQ ID NO: 1862018 - DNA, 15 bp, Homo sapiens
tgcttgtcgatggct

SEQ ID NO: 1862019 - DNA, 15 bp, Homo sapiens
gcttgtcgatggctt

SEQ ID NO: 1862020 - DNA, 15 bp, Homo sapiens
cttgtcgatggctta

SEQ ID NO: 1862021 - DNA, 15 bp, Homo sapiens
ttgtcgatggcttac

SEQ ID NO: 1862022 - DNA, 15 bp, Homo sapiens
tgtcgatggcttact

SEQ ID NO: 1862023 - DNA, 15 bp, Homo sapiens
gtcgatggcttactt

SEQ ID NO: 1862024 - DNA, 15 bp, Homo sapiens
tcgatggcttacttt

SEQ ID NO: 1862025 - DNA, 15 bp, Homo sapiens
cgatggcttactttc

SEQ ID NO: 1862026 - DNA, 15 bp, Homo sapiens
gatggcttactttct

SEQ ID NO: 1862027 - DNA, 15 bp, Homo sapiens
atggcttactttcta

SEQ ID NO: 1862028 - DNA, 15 bp, Homo sapiens
tggcttactttctac

SEQ ID NO: 1862029 - DNA, 15 bp, Homo sapiens
ggcttactttctact

SEQ ID NO: 1862030 - DNA, 15 bp, Homo sapiens
gcttactttctactc

SEQ ID NO: 1862031 - DNA, 15 bp, Homo sapiens
cttactttctactca

SEQ ID NO: 1862032 - DNA, 15 bp, Homo sapiens
ttactttctactcag

SEQ ID NO: 1862033 - DNA, 15 bp, Homo sapiens
tactttctactcagc

SEQ ID NO: 1862034 - DNA, 15 bp, Homo sapiens
actttctactcagcc

SEQ ID NO: 1862035 - DNA, 15 bp, Homo sapiens
ctttctactcagcct

SEQ ID NO: 1862036 - DNA, 15 bp, Homo sapiens
tttctactcagcctg

SEQ ID NO: 1862037 - DNA, 15 bp, Homo sapiens
ttctactcagcctgg

SEQ ID NO: 1862038 - DNA, 15 bp, Homo sapiens
tctactcagcctggc

SEQ ID NO: 1862039 - DNA, 15 bp, Homo sapiens
ctactcagcctggct

SEQ ID NO: 1862040 - DNA, 15 bp, Homo sapiens
tactcagcctggctg

SEQ ID NO: 1862041 - DNA, 15 bp, Homo sapiens
actcagcctggctgg

SEQ ID NO: 1862042 - DNA, 15 bp, Homo sapiens
ctcagcctggctggg

SEQ ID NO: 1862043 - DNA, 15 bp, Homo sapiens
tcagcctggctgggt

SEQ ID NO: 1862044 - DNA, 15 bp, Homo sapiens
cagcctggctgggtt

SEQ ID NO: 1862045 - DNA, 15 bp, Homo sapiens
agcctggctgggttc

SEQ ID NO: 1862046 - DNA, 15 bp, Homo sapiens
gcctggctgggttcc

SEQ ID NO: 1862047 - DNA, 15 bp, Homo sapiens
cctggctgggttcca

SEQ ID NO: 1862048 - DNA, 15 bp, Homo sapiens
ctggctgggttccac

SEQ ID NO: 1862049 - DNA, 15 bp, Homo sapiens
tggctgggttccacc

SEQ ID NO: 1862050 - DNA, 15 bp, Homo sapiens
ggctgggttccacct

SEQ ID NO: 1862051 - DNA, 15 bp, Homo sapiens
gctgggttccacctc

SEQ ID NO: 1862052 - DNA, 15 bp, Homo sapiens
ctgggttccacctct

SEQ ID NO: 1862053 - DNA, 15 bp, Homo sapiens
tgggttccacctctt

SEQ ID NO: 1862054 - DNA, 15 bp, Homo sapiens
gggttccacctctta

SEQ ID NO: 1862055 - DNA, 15 bp, Homo sapiens
ggttccacctcttag

SEQ ID NO: 1862056 - DNA, 15 bp, Homo sapiens
gttccacctcttagc

SEQ ID NO: 1862057 - DNA, 15 bp, Homo sapiens
ttccacctcttagct

SEQ ID NO: 1862058 - DNA, 15 bp, Homo sapiens
tccacctcttagctc

SEQ ID NO: 1862059 - DNA, 15 bp, Homo sapiens
ccacctcttagctcg

SEQ ID NO: 1862060 - DNA, 15 bp, Homo sapiens
cacctcttagctcgt

SEQ ID NO: 1862061 - DNA, 15 bp, Homo sapiens
acctcttagctcgtg

SEQ ID NO: 1862062 - DNA, 15 bp, Homo sapiens
cctcttagctcgtga

SEQ ID NO: 1862063 - DNA, 15 bp, Homo sapiens
ctcttagctcgtgag

SEQ ID NO: 1862064 - DNA, 15 bp, Homo sapiens
tcttagctcgtgagc

SEQ ID NO: 1862065 - DNA, 15 bp, Homo sapiens
cttagctcgtgagcc

SEQ ID NO: 1862066 - DNA, 15 bp, Homo sapiens
ttagctcgtgagccc

SEQ ID NO: 1862067 - DNA, 15 bp, Homo sapiens
tagctcgtgagccct

SEQ ID NO: 1862068 - DNA, 15 bp, Homo sapiens
agctcgtgagccctc

SEQ ID NO: 1862069 - DNA, 15 bp, Homo sapiens
gctcgtgagccctca

SEQ ID NO: 1862070 - DNA, 15 bp, Homo sapiens
ctcgtgagccctcac

SEQ ID NO: 1862071 - DNA, 15 bp, Homo sapiens
tcgtgagccctcacg

SEQ ID NO: 1862072 - DNA, 15 bp, Homo sapiens
cgtgagccctcacgc

SEQ ID NO: 1862073 - DNA, 15 bp, Homo sapiens
gtgagccctcacgca

SEQ ID NO: 1862074 - DNA, 15 bp, Homo sapiens
tgagccctcacgcaa

SEQ ID NO: 1862075 - DNA, 15 bp, Homo sapiens
gagccctcacgcaac

SEQ ID NO: 1862076 - DNA, 15 bp, Homo sapiens
agccctcacgcaact

SEQ ID NO: 1862077 - DNA, 15 bp, Homo sapiens
gccctcacgcaactc

SEQ ID NO: 1862078 - DNA, 15 bp, Homo sapiens
ccctcacgcaactct

SEQ ID NO: 1862079 - DNA, 15 bp, Homo sapiens
cctcacgcaactctg

SEQ ID NO: 1862080 - DNA, 15 bp, Homo sapiens
ctcacgcaactctgc

SEQ ID NO: 1862081 - DNA, 15 bp, Homo sapiens
tcacgcaactctgct

SEQ ID NO: 1862082 - DNA, 15 bp, Homo sapiens
cacgcaactctgctg

SEQ ID NO: 1862083 - DNA, 15 bp, Homo sapiens
acgcaactctgctgt

SEQ ID NO: 1862084 - DNA, 15 bp, Homo sapiens
cgcaactctgctgtc

SEQ ID NO: 1862085 - DNA, 15 bp, Homo sapiens
gcaactctgctgtct

SEQ ID NO: 1862086 - DNA, 15 bp, Homo sapiens
caactctgctgtctc

SEQ ID NO: 1862087 - DNA, 15 bp, Homo sapiens
aactctgctgtctcc

SEQ ID NO: 1862088 - DNA, 15 bp, Homo sapiens
actctgctgtctcca

SEQ ID NO: 1862089 - DNA, 15 bp, Homo sapiens
ctctgctgtctccat

SEQ ID NO: 1862090 - DNA, 15 bp, Homo sapiens
tctgctgtctccatt

SEQ ID NO: 1862091 - DNA, 15 bp, Homo sapiens
ctgctgtctccatta

SEQ ID NO: 1862092 - DNA, 15 bp, Homo sapiens
tgctgtctccattag

SEQ ID NO: 1862093 - DNA, 15 bp, Homo sapiens
gctgtctccattagt

SEQ ID NO: 1862094 - DNA, 15 bp, Homo sapiens
ctgtctccattagtg

SEQ ID NO: 1862095 - DNA, 15 bp, Homo sapiens
tgtctccattagtgt

SEQ ID NO: 1862096 - DNA, 15 bp, Homo sapiens
gtctccattagtgtc

SEQ ID NO: 1862097 - DNA, 15 bp, Homo sapiens
tctccattagtgtcc

SEQ ID NO: 1862098 - DNA, 15 bp, Homo sapiens
ctccattagtgtccc

SEQ ID NO: 1862099 - DNA, 15 bp, Homo sapiens
tccattagtgtccct

SEQ ID NO: 1862100 - DNA, 15 bp, Homo sapiens
ccattagtgtccctt

SEQ ID NO: 1862101 - DNA, 15 bp, Homo sapiens
cattagtgtcccttg

SEQ ID NO: 1862102 - DNA, 15 bp, Homo sapiens
attagtgtcccttgt

SEQ ID NO: 1862103 - DNA, 15 bp, Homo sapiens
ttagtgtcccttgtg

SEQ ID NO: 1862104 - DNA, 15 bp, Homo sapiens
tagtgtcccttgtgg

SEQ ID NO: 1862105 - DNA, 15 bp, Homo sapiens
agtgtcccttgtggg

SEQ ID NO: 1862106 - DNA, 15 bp, Homo sapiens
gtgtcccttgtgggc

SEQ ID NO: 1862107 - DNA, 15 bp, Homo sapiens
tgtcccttgtgggct

SEQ ID NO: 1862108 - DNA, 15 bp, Homo sapiens
gtcccttgtgggctg

SEQ ID NO: 1862109 - DNA, 15 bp, Homo sapiens
tcccttgtgggctgg

SEQ ID NO: 1862110 - DNA, 15 bp, Homo sapiens
cccttgtgggctggt

SEQ ID NO: 1862111 - DNA, 15 bp, Homo sapiens
ccttgtgggctggtg

SEQ ID NO: 1862112 - DNA, 15 bp, Homo sapiens
cttgtgggctggtgg

SEQ ID NO: 1862113 - DNA, 15 bp, Homo sapiens
ttgtgggctggtggc

SEQ ID NO: 1862114 - DNA, 15 bp, Homo sapiens
tgtgggctggtggcc

SEQ ID NO: 1862115 - DNA, 15 bp, Homo sapiens
gtgggctggtggccg

SEQ ID NO: 1862116 - DNA, 15 bp, Homo sapiens
tgggctggtggccga

SEQ ID NO: 1862117 - DNA, 15 bp, Homo sapiens
gggctggtggccgag

SEQ ID NO: 1862118 - DNA, 15 bp, Homo sapiens
ggctggtggccgagg

SEQ ID NO: 1862119 - DNA, 15 bp, Homo sapiens
gctggtggccgaggc

SEQ ID NO: 1862120 - DNA, 15 bp, Homo sapiens
ctggtggccgaggca

SEQ ID NO: 1862121 - DNA, 15 bp, Homo sapiens
tggtggccgaggcag

SEQ ID NO: 1862122 - DNA, 15 bp, Homo sapiens
ggtggccgaggcagt

SEQ ID NO: 1862123 - DNA, 15 bp, Homo sapiens
gtggccgaggcagtt

SEQ ID NO: 1862124 - DNA, 15 bp, Homo sapiens
tggccgaggcagtta

SEQ ID NO: 1862125 - DNA, 15 bp, Homo sapiens
ggccgaggcagttag

SEQ ID NO: 1862126 - DNA, 15 bp, Homo sapiens
gccgaggcagttagg

SEQ ID NO: 1862127 - DNA, 15 bp, Homo sapiens
ccgaggcagttaggc

SEQ ID NO: 1862128 - DNA, 15 bp, Homo sapiens
cgaggcagttaggct

SEQ ID NO: 1862129 - DNA, 15 bp, Homo sapiens
gaggcagttaggctt

SEQ ID NO: 1862130 - DNA, 15 bp, Homo sapiens
aggcagttaggctta

SEQ ID NO: 1862131 - DNA, 15 bp, Homo sapiens
ggcagttaggcttat

SEQ ID NO: 1862132 - DNA, 15 bp, Homo sapiens
gcagttaggcttatg

SEQ ID NO: 1862133 - DNA, 15 bp, Homo sapiens
cagttaggcttatga

SEQ ID NO: 1862134 - DNA, 15 bp, Homo sapiens
agttaggcttatgaa

SEQ ID NO: 1862135 - DNA, 15 bp, Homo sapiens
gttaggcttatgaat

SEQ ID NO: 1862136 - DNA, 15 bp, Homo sapiens
ttaggcttatgaata

SEQ ID NO: 1862137 - DNA, 15 bp, Homo sapiens
taggcttatgaatat

SEQ ID NO: 1862138 - DNA, 15 bp, Homo sapiens
aggcttatgaatatt

SEQ ID NO: 1862139 - DNA, 15 bp, Homo sapiens
ggcttatgaatattc

SEQ ID NO: 1862140 - DNA, 15 bp, Homo sapiens
gcttatgaatattcc

SEQ ID NO: 1862141 - DNA, 15 bp, Homo sapiens
cttatgaatattcca

SEQ ID NO: 1862142 - DNA, 15 bp, Homo sapiens
ttatgaatattccag

SEQ ID NO: 1862143 - DNA, 15 bp, Homo sapiens
tatgaatattccagt

SEQ ID NO: 1862144 - DNA, 15 bp, Homo sapiens
atgaatattccagtt

SEQ ID NO: 1862145 - DNA, 15 bp, Homo sapiens
tgaatattccagttg

SEQ ID NO: 1862146 - DNA, 15 bp, Homo sapiens
gaatattccagttgc

SEQ ID NO: 1862147 - DNA, 15 bp, Homo sapiens
aatattccagttgct

SEQ ID NO: 1862148 - DNA, 15 bp, Homo sapiens
atattccagttgctc

SEQ ID NO: 1862149 - DNA, 15 bp, Homo sapiens
tattccagttgctcc

SEQ ID NO: 1862150 - DNA, 15 bp, Homo sapiens
attccagttgctcct

SEQ ID NO: 1862151 - DNA, 15 bp, Homo sapiens
ttccagttgctcctg

SEQ ID NO: 1862152 - DNA, 15 bp, Homo sapiens
tccagttgctcctgt

SEQ ID NO: 1862153 - DNA, 15 bp, Homo sapiens
ccagttgctcctgta

SEQ ID NO: 1862154 - DNA, 15 bp, Homo sapiens
cagttgctcctgtaa

SEQ ID NO: 1862155 - DNA, 15 bp, Homo sapiens
agttgctcctgtaaa

SEQ ID NO: 1862156 - DNA, 15 bp, Homo sapiens
gttgctcctgtaaat

SEQ ID NO: 1862157 - DNA, 15 bp, Homo sapiens
ttgctcctgtaaatt

SEQ ID NO: 1862158 - DNA, 15 bp, Homo sapiens
tgctcctgtaaattt

SEQ ID NO: 1862159 - DNA, 15 bp, Homo sapiens
gctcctgtaaatttc

SEQ ID NO: 1862160 - DNA, 15 bp, Homo sapiens
ctcctgtaaatttcc

SEQ ID NO: 1862161 - DNA, 15 bp, Homo sapiens
tcctgtaaatttcca

SEQ ID NO: 1862162 - DNA, 15 bp, Homo sapiens
cctgtaaatttccag

SEQ ID NO: 1862163 - DNA, 15 bp, Homo sapiens
ctgtaaatttccagc

SEQ ID NO: 1862164 - DNA, 15 bp, Homo sapiens
tgtaaatttccagca

SEQ ID NO: 1862165 - DNA, 15 bp, Homo sapiens
gtaaatttccagcat

SEQ ID NO: 1862166 - DNA, 15 bp, Homo sapiens
taaatttccagcatc

SEQ ID NO: 1862167 - DNA, 15 bp, Homo sapiens
aaatttccagcatcc

SEQ ID NO: 1862168 - DNA, 15 bp, Homo sapiens
aatttccagcatcca

SEQ ID NO: 1862169 - DNA, 15 bp, Homo sapiens
atttccagcatccac

SEQ ID NO: 1862170 - DNA, 15 bp, Homo sapiens
tttccagcatccact

SEQ ID NO: 1862171 - DNA, 15 bp, Homo sapiens
ttccagcatccactg

SEQ ID NO: 1862172 - DNA, 15 bp, Homo sapiens
tccagcatccactgt

SEQ ID NO: 1862173 - DNA, 15 bp, Homo sapiens
ccagcatccactgtt

SEQ ID NO: 1862174 - DNA, 15 bp, Homo sapiens
cagcatccactgtta

SEQ ID NO: 1862175 - DNA, 15 bp, Homo sapiens
agcatccactgttag

SEQ ID NO: 1862176 - DNA, 15 bp, Homo sapiens
gcatccactgttagg

SEQ ID NO: 1862177 - DNA, 15 bp, Homo sapiens
catccactgttaggc

SEQ ID NO: 1862178 - DNA, 15 bp, Homo sapiens
atccactgttaggca

SEQ ID NO: 1862179 - DNA, 15 bp, Homo sapiens
tccactgttaggcag

SEQ ID NO: 1862180 - DNA, 15 bp, Homo sapiens
ccactgttaggcagg

SEQ ID NO: 1862181 - DNA, 15 bp, Homo sapiens
cactgttaggcagga

SEQ ID NO: 1862182 - DNA, 15 bp, Homo sapiens
actgttaggcaggac

SEQ ID NO: 1862183 - DNA, 15 bp, Homo sapiens
ctgttaggcaggaca

SEQ ID NO: 1862184 - DNA, 15 bp, Homo sapiens
tgttaggcaggacat

SEQ ID NO: 1862185 - DNA, 15 bp, Homo sapiens
gttaggcaggacatg

SEQ ID NO: 1862186 - DNA, 15 bp, Homo sapiens
ttaggcaggacatga

SEQ ID NO: 1862187 - DNA, 15 bp, Homo sapiens
taggcaggacatgag

SEQ ID NO: 1862188 - DNA, 15 bp, Homo sapiens
aggcaggacatgagg

SEQ ID NO: 1862189 - DNA, 15 bp, Homo sapiens
ggcaggacatgaggc

SEQ ID NO: 1862190 - DNA, 15 bp, Homo sapiens
gcaggacatgaggca

SEQ ID NO: 1862191 - DNA, 15 bp, Homo sapiens
caggacatgaggcac

SEQ ID NO: 1862192 - DNA, 15 bp, Homo sapiens
aggacatgaggcact

SEQ ID NO: 1862193 - DNA, 15 bp, Homo sapiens
ggacatgaggcacta

SEQ ID NO: 1862194 - DNA, 15 bp, Homo sapiens
gacatgaggcactaa

SEQ ID NO: 1862195 - DNA, 15 bp, Homo sapiens
acatgaggcactaag

SEQ ID NO: 1862196 - DNA, 15 bp, Homo sapiens
catgaggcactaagg

SEQ ID NO: 1862197 - DNA, 15 bp, Homo sapiens
atgaggcactaaggg

SEQ ID NO: 1862198 - DNA, 15 bp, Homo sapiens
tgaggcactaaggga

SEQ ID NO: 1862199 - DNA, 15 bp, Homo sapiens
gaggcactaagggat

SEQ ID NO: 1862200 - DNA, 15 bp, Homo sapiens
aggcactaagggatg

SEQ ID NO: 1862201 - DNA, 15 bp, Homo sapiens
ggcactaagggatgt

SEQ ID NO: 1862202 - DNA, 15 bp, Homo sapiens
gcactaagggatgtg

SEQ ID NO: 1862203 - DNA, 15 bp, Homo sapiens
cactaagggatgtgc

SEQ ID NO: 1862204 - DNA, 15 bp, Homo sapiens
actaagggatgtgca

SEQ ID NO: 1862205 - DNA, 15 bp, Homo sapiens
ctaagggatgtgcat

SEQ ID NO: 1862206 - DNA, 15 bp, Homo sapiens
taagggatgtgcatc

SEQ ID NO: 1862207 - DNA, 15 bp, Homo sapiens
aagggatgtgcatca

SEQ ID NO: 1862208 - DNA, 15 bp, Homo sapiens
agggatgtgcatcac

SEQ ID NO: 1862209 - DNA, 15 bp, Homo sapiens
gggatgtgcatcact

SEQ ID NO: 1862210 - DNA, 15 bp, Homo sapiens
ggatgtgcatcactt

SEQ ID NO: 1862211 - DNA, 15 bp, Homo sapiens
gatgtgcatcacttc

SEQ ID NO: 1862212 - DNA, 15 bp, Homo sapiens
atgtgcatcacttct

SEQ ID NO: 1862213 - DNA, 15 bp, Homo sapiens
tgtgcatcacttctg

SEQ ID NO: 1862214 - DNA, 15 bp, Homo sapiens
gtgcatcacttctgg

SEQ ID NO: 1862215 - DNA, 15 bp, Homo sapiens
tgcatcacttctggg

SEQ ID NO: 1862216 - DNA, 15 bp, Homo sapiens
gcatcacttctgggc

SEQ ID NO: 1862217 - DNA, 15 bp, Homo sapiens
catcacttctgggct

SEQ ID NO: 1862218 - DNA, 15 bp, Homo sapiens
atcacttctgggctg

SEQ ID NO: 1862219 - DNA, 15 bp, Homo sapiens
tcacttctgggctgg

SEQ ID NO: 1862220 - DNA, 15 bp, Homo sapiens
cacttctgggctggg

SEQ ID NO: 1862221 - DNA, 15 bp, Homo sapiens
acttctgggctgggg

SEQ ID NO: 1862222 - DNA, 15 bp, Homo sapiens
cttctgggctggggc

SEQ ID NO: 1862223 - DNA, 15 bp, Homo sapiens
ttctgggctggggca

SEQ ID NO: 1862224 - DNA, 15 bp, Homo sapiens
tctgggctggggcag

SEQ ID NO: 1862225 - DNA, 15 bp, Homo sapiens
ctgggctggggcagg

SEQ ID NO: 1862226 - DNA, 15 bp, Homo sapiens
tgggctggggcaggg

SEQ ID NO: 1862227 - DNA, 15 bp, Homo sapiens
gggctggggcagggg

SEQ ID NO: 1862228 - DNA, 15 bp, Homo sapiens
ggctggggcagggga

SEQ ID NO: 1862229 - DNA, 15 bp, Homo sapiens
gctggggcaggggat

SEQ ID NO: 1862230 - DNA, 15 bp, Homo sapiens
ctggggcaggggatg

SEQ ID NO: 1862231 - DNA, 15 bp, Homo sapiens
tggggcaggggatgc

SEQ ID NO: 1862232 - DNA, 15 bp, Homo sapiens
ggggcaggggatgcc

SEQ ID NO: 1862233 - DNA, 15 bp, Homo sapiens
gggcaggggatgcct

SEQ ID NO: 1862234 - DNA, 15 bp, Homo sapiens
ggcaggggatgcctg

SEQ ID NO: 1862235 - DNA, 15 bp, Homo sapiens
gcaggggatgcctgt

SEQ ID NO: 1862236 - DNA, 15 bp, Homo sapiens
caggggatgcctgtg

SEQ ID NO: 1862237 - DNA, 15 bp, Homo sapiens
aggggatgcctgtgt

SEQ ID NO: 1862238 - DNA, 15 bp, Homo sapiens
ggggatgcctgtgtg

SEQ ID NO: 1862239 - DNA, 15 bp, Homo sapiens
gggatgcctgtgtgt

SEQ ID NO: 1862240 - DNA, 15 bp, Homo sapiens
ggatgcctgtgtgtg

SEQ ID NO: 1862241 - DNA, 15 bp, Homo sapiens
gatgcctgtgtgtgg

SEQ ID NO: 1862242 - DNA, 15 bp, Homo sapiens
atgcctgtgtgtggt

SEQ ID NO: 1862243 - DNA, 15 bp, Homo sapiens
tgcctgtgtgtggtg

SEQ ID NO: 1862244 - DNA, 15 bp, Homo sapiens
gcctgtgtgtggtgg

SEQ ID NO: 1862245 - DNA, 15 bp, Homo sapiens
cctgtgtgtggtggt

SEQ ID NO: 1862246 - DNA, 15 bp, Homo sapiens
ctgtgtgtggtggtg

SEQ ID NO: 1862247 - DNA, 15 bp, Homo sapiens
tgtgtgtggtggtgc

SEQ ID NO: 1862248 - DNA, 15 bp, Homo sapiens
gtgtgtggtggtgca

SEQ ID NO: 1862249 - DNA, 15 bp, Homo sapiens
tgtgtggtggtgcag

SEQ ID NO: 1862250 - DNA, 15 bp, Homo sapiens
gtgtggtggtgcagt

SEQ ID NO: 1862251 - DNA, 15 bp, Homo sapiens
tgtggtggtgcagtt

SEQ ID NO: 1862252 - DNA, 15 bp, Homo sapiens
gtggtggtgcagttg

SEQ ID NO: 1862253 - DNA, 15 bp, Homo sapiens
tggtggtgcagttgc

SEQ ID NO: 1862254 - DNA, 15 bp, Homo sapiens
ggtggtgcagttgct

SEQ ID NO: 1862255 - DNA, 15 bp, Homo sapiens
gtggtgcagttgctg

SEQ ID NO: 1862256 - DNA, 15 bp, Homo sapiens
tggtgcagttgctgt

SEQ ID NO: 1862257 - DNA, 15 bp, Homo sapiens
ggtgcagttgctgtc

SEQ ID NO: 1862258 - DNA, 15 bp, Homo sapiens
gtgcagttgctgtct

SEQ ID NO: 1862259 - DNA, 15 bp, Homo sapiens
tgcagttgctgtctt

SEQ ID NO: 1862260 - DNA, 15 bp, Homo sapiens
gcagttgctgtcttc

SEQ ID NO: 1862261 - DNA, 15 bp, Homo sapiens
agttgctgtcttccc

SEQ ID NO: 1862262 - DNA, 15 bp, Homo sapiens
gttgctgtcttccct

SEQ ID NO: 1862263 - DNA, 15 bp, Homo sapiens
ttgctgtcttccctg

SEQ ID NO: 1862264 - DNA, 15 bp, Homo sapiens
tgctgtcttccctga

SEQ ID NO: 1862265 - DNA, 15 bp, Homo sapiens
gctgtcttccctgat

SEQ ID NO: 1862266 - DNA, 15 bp, Homo sapiens
ctgtcttccctgatg

SEQ ID NO: 1862267 - DNA, 15 bp, Homo sapiens
tgtcttccctgatgg

SEQ ID NO: 1862268 - DNA, 15 bp, Homo sapiens
gtcttccctgatggc

SEQ ID NO: 1862269 - DNA, 15 bp, Homo sapiens
tcttccctgatggca

SEQ ID NO: 1862270 - DNA, 15 bp, Homo sapiens
cttccctgatggcac

SEQ ID NO: 1862271 - DNA, 15 bp, Homo sapiens
ttccctgatggcact

SEQ ID NO: 1862272 - DNA, 15 bp, Homo sapiens
tccctgatggcactg

SEQ ID NO: 1862273 - DNA, 15 bp, Homo sapiens
ccctgatggcactga

SEQ ID NO: 1862274 - DNA, 15 bp, Homo sapiens
cctgatggcactgaa

SEQ ID NO: 1862275 - DNA, 15 bp, Homo sapiens
ctgatggcactgaag

SEQ ID NO: 1862276 - DNA, 15 bp, Homo sapiens
tgatggcactgaaga

SEQ ID NO: 1862277 - DNA, 15 bp, Homo sapiens
gatggcactgaagag

SEQ ID NO: 1862278 - DNA, 15 bp, Homo sapiens
atggcactgaagaga

SEQ ID NO: 1862279 - DNA, 15 bp, Homo sapiens
tggcactgaagagac

SEQ ID NO: 1862280 - DNA, 15 bp, Homo sapiens
ggcactgaagagact

SEQ ID NO: 1862281 - DNA, 15 bp, Homo sapiens
gcactgaagagactg

SEQ ID NO: 1862282 - DNA, 15 bp, Homo sapiens
cactgaagagactgt

SEQ ID NO: 1862283 - DNA, 15 bp, Homo sapiens
actgaagagactgtg

SEQ ID NO: 1862284 - DNA, 15 bp, Homo sapiens
ctgaagagactgtgg

SEQ ID NO: 1862285 - DNA, 15 bp, Homo sapiens
tgaagagactgtggc

SEQ ID NO: 1862286 - DNA, 15 bp, Homo sapiens
gaagagactgtggct

SEQ ID NO: 1862287 - DNA, 15 bp, Homo sapiens
aagagactgtggctt

SEQ ID NO: 1862288 - DNA, 15 bp, Homo sapiens
agagactgtggcttc

SEQ ID NO: 1862289 - DNA, 15 bp, Homo sapiens
gagactgtggcttcc

SEQ ID NO: 1862290 - DNA, 15 bp, Homo sapiens
agactgtggcttcca

SEQ ID NO: 1862291 - DNA, 15 bp, Homo sapiens
gactgtggcttccag

SEQ ID NO: 1862292 - DNA, 15 bp, Homo sapiens
actgtggcttccagg

SEQ ID NO: 1862293 - DNA, 15 bp, Homo sapiens
ctgtggcttccaggg

SEQ ID NO: 1862294 - DNA, 15 bp, Homo sapiens
tgtggcttccagggt

SEQ ID NO: 1862295 - DNA, 15 bp, Homo sapiens
gtggcttccagggtt

SEQ ID NO: 1862296 - DNA, 15 bp, Homo sapiens
tggcttccagggttg

SEQ ID NO: 1862297 - DNA, 15 bp, Homo sapiens
ggcttccagggttgc

SEQ ID NO: 1862298 - DNA, 15 bp, Homo sapiens
gcttccagggttgca

SEQ ID NO: 1862299 - DNA, 15 bp, Homo sapiens
cttccagggttgcag

SEQ ID NO: 1862300 - DNA, 15 bp, Homo sapiens
ttccagggttgcagt

SEQ ID NO: 1862301 - DNA, 15 bp, Homo sapiens
tccagggttgcagtg

SEQ ID NO: 1862302 - DNA, 15 bp, Homo sapiens
ccagggttgcagtgc

SEQ ID NO: 1862303 - DNA, 15 bp, Homo sapiens
cagggttgcagtgca

SEQ ID NO: 1862304 - DNA, 15 bp, Homo sapiens
agggttgcagtgcaa

SEQ ID NO: 1862305 - DNA, 15 bp, Homo sapiens
gggttgcagtgcaag

SEQ ID NO: 1862306 - DNA, 15 bp, Homo sapiens
ggttgcagtgcaaga

SEQ ID NO: 1862307 - DNA, 15 bp, Homo sapiens
gttgcagtgcaagat

SEQ ID NO: 1862308 - DNA, 15 bp, Homo sapiens
ttgcagtgcaagatg

SEQ ID NO: 1862309 - DNA, 15 bp, Homo sapiens
tgcagtgcaagatgg

SEQ ID NO: 1862310 - DNA, 15 bp, Homo sapiens
gcagtgcaagatggc

SEQ ID NO: 1862311 - DNA, 15 bp, Homo sapiens
cagtgcaagatggcg

SEQ ID NO: 1862312 - DNA, 15 bp, Homo sapiens
agtgcaagatggcgg

SEQ ID NO: 1862313 - DNA, 15 bp, Homo sapiens
gtgcaagatggcgga

SEQ ID NO: 1862314 - DNA, 15 bp, Homo sapiens
tgcaagatggcggag

SEQ ID NO: 1862315 - DNA, 15 bp, Homo sapiens
gcaagatggcggagc

SEQ ID NO: 1862316 - DNA, 15 bp, Homo sapiens
caagatggcggagct

SEQ ID NO: 1862317 - DNA, 15 bp, Homo sapiens
aagatggcggagctt

SEQ ID NO: 1862318 - DNA, 15 bp, Homo sapiens
agatggcggagcttc

SEQ ID NO: 1862319 - DNA, 15 bp, Homo sapiens
gatggcggagcttct

SEQ ID NO: 1862320 - DNA, 15 bp, Homo sapiens
atggcggagcttctg

SEQ ID NO: 1862321 - DNA, 15 bp, Homo sapiens
tggcggagcttctga

SEQ ID NO: 1862322 - DNA, 15 bp, Homo sapiens
ggcggagcttctgat

SEQ ID NO: 1862323 - DNA, 15 bp, Homo sapiens
gcggagcttctgatg

SEQ ID NO: 1862324 - DNA, 15 bp, Homo sapiens
cggagcttctgatgc

SEQ ID NO: 1862325 - DNA, 15 bp, Homo sapiens
ggagcttctgatgcc

SEQ ID NO: 1862326 - DNA, 15 bp, Homo sapiens
gagcttctgatgcct

SEQ ID NO: 1862327 - DNA, 15 bp, Homo sapiens
agcttctgatgccta

SEQ ID NO: 1862328 - DNA, 15 bp, Homo sapiens
gcttctgatgcctag

SEQ ID NO: 1862329 - DNA, 15 bp, Homo sapiens
cttctgatgcctagg

SEQ ID NO: 1862330 - DNA, 15 bp, Homo sapiens
ttctgatgcctaggc

SEQ ID NO: 1862331 - DNA, 15 bp, Homo sapiens
tctgatgcctaggcc

SEQ ID NO: 1862332 - DNA, 15 bp, Homo sapiens
ctgatgcctaggccc

SEQ ID NO: 1862333 - DNA, 15 bp, Homo sapiens
tgatgcctaggccca

SEQ ID NO: 1862334 - DNA, 15 bp, Homo sapiens
gatgcctaggcccat

SEQ ID NO: 1862335 - DNA, 15 bp, Homo sapiens
atgcctaggcccatg

SEQ ID NO: 1862336 - DNA, 15 bp, Homo sapiens
tgcctaggcccatga

SEQ ID NO: 1862337 - DNA, 15 bp, Homo sapiens
gcctaggcccatgag

SEQ ID NO: 1862338 - DNA, 15 bp, Homo sapiens
cctaggcccatgagt

SEQ ID NO: 1862339 - DNA, 15 bp, Homo sapiens
ctaggcccatgagtg

SEQ ID NO: 1862340 - DNA, 15 bp, Homo sapiens
taggcccatgagtgg

SEQ ID NO: 1862341 - DNA, 15 bp, Homo sapiens
aggcccatgagtggg

SEQ ID NO: 1862342 - DNA, 15 bp, Homo sapiens
ggcccatgagtgggc

SEQ ID NO: 1862343 - DNA, 15 bp, Homo sapiens
gcccatgagtgggca

SEQ ID NO: 1862344 - DNA, 15 bp, Homo sapiens
cccatgagtgggcag

SEQ ID NO: 1862345 - DNA, 15 bp, Homo sapiens
ccatgagtgggcagg

SEQ ID NO: 1862346 - DNA, 15 bp, Homo sapiens
catgagtgggcaggt

SEQ ID NO: 1862347 - DNA, 15 bp, Homo sapiens
atgagtgggcaggtg

SEQ ID NO: 1862348 - DNA, 15 bp, Homo sapiens
tgagtgggcaggtgg

SEQ ID NO: 1862349 - DNA, 15 bp, Homo sapiens
gagtgggcaggtgga

SEQ ID NO: 1862350 - DNA, 15 bp, Homo sapiens
agtgggcaggtggag

SEQ ID NO: 1862351 - DNA, 15 bp, Homo sapiens
gtgggcaggtggagc

SEQ ID NO: 1862352 - DNA, 15 bp, Homo sapiens
tgggcaggtggagca

SEQ ID NO: 1862353 - DNA, 15 bp, Homo sapiens
gggcaggtggagcag

SEQ ID NO: 1862354 - DNA, 15 bp, Homo sapiens
ggcaggtggagcaga

SEQ ID NO: 1862355 - DNA, 15 bp, Homo sapiens
gcaggtggagcagag

SEQ ID NO: 1862356 - DNA, 15 bp, Homo sapiens
aggtggagcagagcc

SEQ ID NO: 1862357 - DNA, 15 bp, Homo sapiens
ggtggagcagagccc

SEQ ID NO: 1862358 - DNA, 15 bp, Homo sapiens
gtggagcagagccca

SEQ ID NO: 1862359 - DNA, 15 bp, Homo sapiens
tggagcagagcccag

SEQ ID NO: 1862360 - DNA, 15 bp, Homo sapiens
ggagcagagcccagg

SEQ ID NO: 1862361 - DNA, 15 bp, Homo sapiens
gagcagagcccaggc

SEQ ID NO: 1862362 - DNA, 15 bp, Homo sapiens
agcagagcccaggct

SEQ ID NO: 1862363 - DNA, 15 bp, Homo sapiens
gcagagcccaggctg

SEQ ID NO: 1862364 - DNA, 15 bp, Homo sapiens
cagagcccaggctgc

SEQ ID NO: 1862365 - DNA, 15 bp, Homo sapiens
agagcccaggctgcc

SEQ ID NO: 1862366 - DNA, 15 bp, Homo sapiens
gagcccaggctgcct

SEQ ID NO: 1862367 - DNA, 15 bp, Homo sapiens
agcccaggctgcctt

SEQ ID NO: 1862368 - DNA, 15 bp, Homo sapiens
gcccaggctgccttt

SEQ ID NO: 1862369 - DNA, 15 bp, Homo sapiens
cccaggctgcctttg

SEQ ID NO: 1862370 - DNA, 15 bp, Homo sapiens
ccaggctgcctttgt

SEQ ID NO: 1862371 - DNA, 15 bp, Homo sapiens
caggctgcctttgtc

SEQ ID NO: 1862372 - DNA, 15 bp, Homo sapiens
aggctgcctttgtct

SEQ ID NO: 1862373 - DNA, 15 bp, Homo sapiens
ggctgcctttgtctt

SEQ ID NO: 1862374 - DNA, 15 bp, Homo sapiens
gctgcctttgtcttc

SEQ ID NO: 1862375 - DNA, 15 bp, Homo sapiens
ctgcctttgtcttca

SEQ ID NO: 1862376 - DNA, 15 bp, Homo sapiens
tgcctttgtcttcat

SEQ ID NO: 1862377 - DNA, 15 bp, Homo sapiens
gcctttgtcttcata

SEQ ID NO: 1862378 - DNA, 15 bp, Homo sapiens
cctttgtcttcatag

SEQ ID NO: 1862379 - DNA, 15 bp, Homo sapiens
ctttgtcttcatagg

SEQ ID NO: 1862380 - DNA, 15 bp, Homo sapiens
tttgtcttcataggt

SEQ ID NO: 1862381 - DNA, 15 bp, Homo sapiens
ttgtcttcataggtc

SEQ ID NO: 1862382 - DNA, 15 bp, Homo sapiens
tgtcttcataggtct

SEQ ID NO: 1862383 - DNA, 15 bp, Homo sapiens
gtcttcataggtctc

SEQ ID NO: 1862384 - DNA, 15 bp, Homo sapiens
tcttcataggtctct

SEQ ID NO: 1862385 - DNA, 15 bp, Homo sapiens
cttcataggtctcta

SEQ ID NO: 1862386 - DNA, 15 bp, Homo sapiens
ttcataggtctctaa

SEQ ID NO: 1862387 - DNA, 15 bp, Homo sapiens
tcataggtctctaac

SEQ ID NO: 1862388 - DNA, 15 bp, Homo sapiens
cataggtctctaact

SEQ ID NO: 1862389 - DNA, 15 bp, Homo sapiens
ataggtctctaactt

SEQ ID NO: 1862390 - DNA, 15 bp, Homo sapiens
taggtctctaacttc

SEQ ID NO: 1862391 - DNA, 15 bp, Homo sapiens
aggtctctaacttct

SEQ ID NO: 1862392 - DNA, 15 bp, Homo sapiens
ggtctctaacttctt

SEQ ID NO: 1862393 - DNA, 15 bp, Homo sapiens
gtctctaacttcttg

SEQ ID NO: 1862394 - DNA, 15 bp, Homo sapiens
tctctaacttcttga

SEQ ID NO: 1862395 - DNA, 15 bp, Homo sapiens
ctctaacttcttgac

SEQ ID NO: 1862396 - DNA, 15 bp, Homo sapiens
tctaacttcttgact

SEQ ID NO: 1862397 - DNA, 15 bp, Homo sapiens
ctaacttcttgactt

SEQ ID NO: 1862398 - DNA, 15 bp, Homo sapiens
taacttcttgacttc

SEQ ID NO: 1862399 - DNA, 15 bp, Homo sapiens
aacttcttgacttct

SEQ ID NO: 1862400 - DNA, 15 bp, Homo sapiens
acttcttgacttctc

SEQ ID NO: 1862401 - DNA, 15 bp, Homo sapiens
cttcttgacttctca

SEQ ID NO: 1862402 - DNA, 15 bp, Homo sapiens
ttcttgacttctcaa

SEQ ID NO: 1862403 - DNA, 15 bp, Homo sapiens
tcttgacttctcaat

SEQ ID NO: 1862404 - DNA, 15 bp, Homo sapiens
cttgacttctcaata

SEQ ID NO: 1862405 - DNA, 15 bp, Homo sapiens
ttgacttctcaatag

SEQ ID NO: 1862406 - DNA, 15 bp, Homo sapiens
tgacttctcaatagc

SEQ ID NO: 1862407 - DNA, 15 bp, Homo sapiens
gacttctcaatagcc

SEQ ID NO: 1862408 - DNA, 15 bp, Homo sapiens
acttctcaatagcct

SEQ ID NO: 1862409 - DNA, 15 bp, Homo sapiens
cttctcaatagcctc

SEQ ID NO: 1862410 - DNA, 15 bp, Homo sapiens
ttctcaatagcctca

SEQ ID NO: 1862411 - DNA, 15 bp, Homo sapiens
tctcaatagcctcaa

SEQ ID NO: 1862412 - DNA, 15 bp, Homo sapiens
ctcaatagcctcaat

SEQ ID NO: 1862413 - DNA, 15 bp, Homo sapiens
tcaatagcctcaatg

SEQ ID NO: 1862414 - DNA, 15 bp, Homo sapiens
caatagcctcaatga

SEQ ID NO: 1862415 - DNA, 15 bp, Homo sapiens
aatagcctcaatgac

SEQ ID NO: 1862416 - DNA, 15 bp, Homo sapiens
atagcctcaatgact

SEQ ID NO: 1862417 - DNA, 15 bp, Homo sapiens
tagcctcaatgactg

SEQ ID NO: 1862418 - DNA, 15 bp, Homo sapiens
agcctcaatgactgg

SEQ ID NO: 1862419 - DNA, 15 bp, Homo sapiens
gcctcaatgactggt

SEQ ID NO: 1862420 - DNA, 15 bp, Homo sapiens
cctcaatgactggtt

SEQ ID NO: 1862421 - DNA, 15 bp, Homo sapiens
ctcaatgactggttc

SEQ ID NO: 1862422 - DNA, 15 bp, Homo sapiens
tcaatgactggttcc

SEQ ID NO: 1862423 - DNA, 15 bp, Homo sapiens
caatgactggttcct

SEQ ID NO: 1862424 - DNA, 15 bp, Homo sapiens
aatgactggttcctt

SEQ ID NO: 1862425 - DNA, 15 bp, Homo sapiens
atgactggttccttc

SEQ ID NO: 1862426 - DNA, 15 bp, Homo sapiens
tgactggttccttcc

SEQ ID NO: 1862427 - DNA, 15 bp, Homo sapiens
gactggttccttcct

SEQ ID NO: 1862428 - DNA, 15 bp, Homo sapiens
actggttccttcctg

SEQ ID NO: 1862429 - DNA, 15 bp, Homo sapiens
ctggttccttcctgt

SEQ ID NO: 1862430 - DNA, 15 bp, Homo sapiens
tggttccttcctgta

SEQ ID NO: 1862431 - DNA, 15 bp, Homo sapiens
ggttccttcctgtat

SEQ ID NO: 1862432 - DNA, 15 bp, Homo sapiens
gttccttcctgtatt

SEQ ID NO: 1862433 - DNA, 15 bp, Homo sapiens
ttccttcctgtattt

SEQ ID NO: 1862434 - DNA, 15 bp, Homo sapiens
tccttcctgtatttg

SEQ ID NO: 1862435 - DNA, 15 bp, Homo sapiens
ccttcctgtatttgg

SEQ ID NO: 1862436 - DNA, 15 bp, Homo sapiens
cttcctgtatttggt

SEQ ID NO: 1862437 - DNA, 15 bp, Homo sapiens
ttcctgtatttggta

SEQ ID NO: 1862438 - DNA, 15 bp, Homo sapiens
tcctgtatttggtag

SEQ ID NO: 1862439 - DNA, 15 bp, Homo sapiens
cctgtatttggtagg

SEQ ID NO: 1862440 - DNA, 15 bp, Homo sapiens
ctgtatttggtaggt

SEQ ID NO: 1862441 - DNA, 15 bp, Homo sapiens
tgtatttggtaggtg

SEQ ID NO: 1862442 - DNA, 15 bp, Homo sapiens
gtatttggtaggtga

SEQ ID NO: 1862443 - DNA, 15 bp, Homo sapiens
tatttggtaggtgat

SEQ ID NO: 1862444 - DNA, 15 bp, Homo sapiens
atttggtaggtgatt

SEQ ID NO: 1862445 - DNA, 15 bp, Homo sapiens
tttggtaggtgattg

SEQ ID NO: 1862446 - DNA, 15 bp, Homo sapiens
ttggtaggtgattga

SEQ ID NO: 1862447 - DNA, 15 bp, Homo sapiens
tggtaggtgattgaa

SEQ ID NO: 1862448 - DNA, 15 bp, Homo sapiens
ggtaggtgattgaaa

SEQ ID NO: 1862449 - DNA, 15 bp, Homo sapiens
gtaggtgattgaaaa

SEQ ID NO: 1862450 - DNA, 15 bp, Homo sapiens
taggtgattgaaaac

SEQ ID NO: 1862451 - DNA, 15 bp, Homo sapiens
aggtgattgaaaacc

SEQ ID NO: 1862452 - DNA, 15 bp, Homo sapiens
ggtgattgaaaacct

SEQ ID NO: 1862453 - DNA, 15 bp, Homo sapiens
gtgattgaaaacctc

SEQ ID NO: 1862454 - DNA, 15 bp, Homo sapiens
tgattgaaaacctct

SEQ ID NO: 1862455 - DNA, 15 bp, Homo sapiens
gattgaaaacctctt

SEQ ID NO: 1862456 - DNA, 15 bp, Homo sapiens
attgaaaacctctta

SEQ ID NO: 1862457 - DNA, 15 bp, Homo sapiens
ttgaaaacctcttaa

SEQ ID NO: 1862458 - DNA, 15 bp, Homo sapiens
tgaaaacctcttaac

SEQ ID NO: 1862459 - DNA, 15 bp, Homo sapiens
gaaaacctcttaaca

SEQ ID NO: 1862460 - DNA, 15 bp, Homo sapiens
aaaacctcttaacac

SEQ ID NO: 1862461 - DNA, 15 bp, Homo sapiens
aaacctcttaacaca

SEQ ID NO: 1862462 - DNA, 15 bp, Homo sapiens
aacctcttaacacat

SEQ ID NO: 1862463 - DNA, 15 bp, Homo sapiens
acctcttaacacatg

SEQ ID NO: 1862464 - DNA, 15 bp, Homo sapiens
cctcttaacacatga

SEQ ID NO: 1862465 - DNA, 15 bp, Homo sapiens
ctcttaacacatgaa

SEQ ID NO: 1862466 - DNA, 15 bp, Homo sapiens
tcttaacacatgaat

SEQ ID NO: 1862467 - DNA, 15 bp, Homo sapiens
cttaacacatgaatt

SEQ ID NO: 1862468 - DNA, 15 bp, Homo sapiens
ttaacacatgaatta

SEQ ID NO: 1862469 - DNA, 15 bp, Homo sapiens
taacacatgaattat

SEQ ID NO: 1862470 - DNA, 15 bp, Homo sapiens
aacacatgaattatt

SEQ ID NO: 1862471 - DNA, 15 bp, Homo sapiens
acacatgaattattc

SEQ ID NO: 1862472 - DNA, 15 bp, Homo sapiens
cacatgaattattca

SEQ ID NO: 1862473 - DNA, 15 bp, Homo sapiens
acatgaattattcag

SEQ ID NO: 1862474 - DNA, 15 bp, Homo sapiens
catgaattattcagt

SEQ ID NO: 1862475 - DNA, 15 bp, Homo sapiens
atgaattattcagtc

SEQ ID NO: 1862476 - DNA, 15 bp, Homo sapiens
tgaattattcagtct

SEQ ID NO: 1862477 - DNA, 15 bp, Homo sapiens
gaattattcagtctt

SEQ ID NO: 1862478 - DNA, 15 bp, Homo sapiens
aattattcagtcttg

SEQ ID NO: 1862479 - DNA, 15 bp, Homo sapiens
attattcagtcttgg

SEQ ID NO: 1862480 - DNA, 15 bp, Homo sapiens
ttattcagtcttggc

SEQ ID NO: 1862481 - DNA, 15 bp, Homo sapiens
tattcagtcttggct

SEQ ID NO: 1862482 - DNA, 15 bp, Homo sapiens
attcagtcttggcta

SEQ ID NO: 1862483 - DNA, 15 bp, Homo sapiens
ttcagtcttggctag

SEQ ID NO: 1862484 - DNA, 15 bp, Homo sapiens
tcagtcttggctagg

SEQ ID NO: 1862485 - DNA, 15 bp, Homo sapiens
cagtcttggctaggc

SEQ ID NO: 1862486 - DNA, 15 bp, Homo sapiens
agtcttggctaggcc

SEQ ID NO: 1862487 - DNA, 15 bp, Homo sapiens
gtcttggctaggcct

SEQ ID NO: 1862488 - DNA, 15 bp, Homo sapiens
tcttggctaggcctt

SEQ ID NO: 1862489 - DNA, 15 bp, Homo sapiens
cttggctaggccttc

SEQ ID NO: 1862490 - DNA, 15 bp, Homo sapiens
ttggctaggccttct

SEQ ID NO: 1862491 - DNA, 15 bp, Homo sapiens
tggctaggccttctc

SEQ ID NO: 1862492 - DNA, 15 bp, Homo sapiens
ggctaggccttctcc

SEQ ID NO: 1862493 - DNA, 15 bp, Homo sapiens
gctaggccttctcct

SEQ ID NO: 1862494 - DNA, 15 bp, Homo sapiens
ctaggccttctccta

SEQ ID NO: 1862495 - DNA, 15 bp, Homo sapiens
taggccttctcctaa

SEQ ID NO: 1862496 - DNA, 15 bp, Homo sapiens
aggccttctcctaaa

SEQ ID NO: 1862497 - DNA, 15 bp, Homo sapiens
ggccttctcctaaac

SEQ ID NO: 1862498 - DNA, 15 bp, Homo sapiens
gccttctcctaaaca

SEQ ID NO: 1862499 - DNA, 15 bp, Homo sapiens
ccttctcctaaacag

SEQ ID NO: 1862500 - DNA, 15 bp, Homo sapiens
cttctcctaaacagt

SEQ ID NO: 1862501 - DNA, 15 bp, Homo sapiens
ttctcctaaacagtt

SEQ ID NO: 1862502 - DNA, 15 bp, Homo sapiens
tctcctaaacagttg

SEQ ID NO: 1862503 - DNA, 15 bp, Homo sapiens
ctcctaaacagttgt

SEQ ID NO: 1862504 - DNA, 15 bp, Homo sapiens
tcctaaacagttgtc

SEQ ID NO: 1862505 - DNA, 15 bp, Homo sapiens
cctaaacagttgtct

SEQ ID NO: 1862506 - DNA, 15 bp, Homo sapiens
ctaaacagttgtctc

SEQ ID NO: 1862507 - DNA, 15 bp, Homo sapiens
taaacagttgtctct

SEQ ID NO: 1862508 - DNA, 15 bp, Homo sapiens
aaacagttgtctctg

SEQ ID NO: 1862509 - DNA, 15 bp, Homo sapiens
aacagttgtctctgg

SEQ ID NO: 1862510 - DNA, 15 bp, Homo sapiens
acagttgtctctggt

SEQ ID NO: 1862511 - DNA, 15 bp, Homo sapiens
cagttgtctctggtt

SEQ ID NO: 1862512 - DNA, 15 bp, Homo sapiens
agttgtctctggttc

SEQ ID NO: 1862513 - DNA, 15 bp, Homo sapiens
gttgtctctggttct

SEQ ID NO: 1862514 - DNA, 15 bp, Homo sapiens
ttgtctctggttctt

SEQ ID NO: 1862515 - DNA, 15 bp, Homo sapiens
tgtctctggttctta

SEQ ID NO: 1862516 - DNA, 15 bp, Homo sapiens
gtctctggttcttaa

SEQ ID NO: 1862517 - DNA, 15 bp, Homo sapiens
tctctggttcttaaa

SEQ ID NO: 1862518 - DNA, 15 bp, Homo sapiens
ctctggttcttaaag

SEQ ID NO: 1862519 - DNA, 15 bp, Homo sapiens
tctggttcttaaagt

SEQ ID NO: 1862520 - DNA, 15 bp, Homo sapiens
ctggttcttaaagtt

SEQ ID NO: 1862521 - DNA, 15 bp, Homo sapiens
tggttcttaaagtta

SEQ ID NO: 1862522 - DNA, 15 bp, Homo sapiens
ggttcttaaagttac

SEQ ID NO: 1862523 - DNA, 15 bp, Homo sapiens
gttcttaaagttacc

SEQ ID NO: 1862524 - DNA, 15 bp, Homo sapiens
ttcttaaagttacct

SEQ ID NO: 1862525 - DNA, 15 bp, Homo sapiens
tcttaaagttacctt

SEQ ID NO: 1862526 - DNA, 15 bp, Homo sapiens
cttaaagttaccttt

SEQ ID NO: 1862527 - DNA, 15 bp, Homo sapiens
ttaaagttacctttt

SEQ ID NO: 1862528 - DNA, 15 bp, Homo sapiens
taaagttaccttttc

SEQ ID NO: 1862529 - DNA, 15 bp, Homo sapiens
aaagttaccttttcc

SEQ ID NO: 1862530 - DNA, 15 bp, Homo sapiens
aagttaccttttcct

SEQ ID NO: 1862531 - DNA, 15 bp, Homo sapiens
agttaccttttcctc

SEQ ID NO: 1862532 - DNA, 15 bp, Homo sapiens
gttaccttttcctcc

SEQ ID NO: 1862533 - DNA, 15 bp, Homo sapiens
ttaccttttcctcct

SEQ ID NO: 1862534 - DNA, 15 bp, Homo sapiens
taccttttcctcctc

SEQ ID NO: 1862535 - DNA, 15 bp, Homo sapiens
accttttcctcctct

SEQ ID NO: 1862536 - DNA, 15 bp, Homo sapiens
ccttttcctcctctc

SEQ ID NO: 1862537 - DNA, 15 bp, Homo sapiens
cttttcctcctctct

SEQ ID NO: 1862538 - DNA, 15 bp, Homo sapiens
ttttcctcctctcta

SEQ ID NO: 1862539 - DNA, 15 bp, Homo sapiens
tttcctcctctctaa

SEQ ID NO: 1862540 - DNA, 15 bp, Homo sapiens
ttcctcctctctaaa

SEQ ID NO: 1862541 - DNA, 15 bp, Homo sapiens
tcctcctctctaaaa

SEQ ID NO: 1862542 - DNA, 15 bp, Homo sapiens
cctcctctctaaaat

SEQ ID NO: 1862543 - DNA, 15 bp, Homo sapiens
ctcctctctaaaata

SEQ ID NO: 1862544 - DNA, 15 bp, Homo sapiens
tcctctctaaaataa

SEQ ID NO: 1862545 - DNA, 15 bp, Homo sapiens
cctctctaaaataac

SEQ ID NO: 1862546 - DNA, 15 bp, Homo sapiens
ctctctaaaataact

SEQ ID NO: 1862547 - DNA, 15 bp, Homo sapiens
tctctaaaataactt

SEQ ID NO: 1862548 - DNA, 15 bp, Homo sapiens
ctctaaaataactta

SEQ ID NO: 1862549 - DNA, 15 bp, Homo sapiens
tctaaaataacttac

SEQ ID NO: 1862550 - DNA, 15 bp, Homo sapiens
ctaaaataacttact

SEQ ID NO: 1862551 - DNA, 15 bp, Homo sapiens
taaaataacttactt

SEQ ID NO: 1862552 - DNA, 15 bp, Homo sapiens
aaaataacttactta

SEQ ID NO: 1862553 - DNA, 15 bp, Homo sapiens
aaataacttacttac

SEQ ID NO: 1862554 - DNA, 15 bp, Homo sapiens
aataacttacttacc

SEQ ID NO: 1862555 - DNA, 15 bp, Homo sapiens
ataacttacttacct

SEQ ID NO: 1862556 - DNA, 15 bp, Homo sapiens
taacttacttacctt

SEQ ID NO: 1862557 - DNA, 15 bp, Homo sapiens
aacttacttaccttt

SEQ ID NO: 1862558 - DNA, 15 bp, Homo sapiens
acttacttacctttt

SEQ ID NO: 1862559 - DNA, 15 bp, Homo sapiens
cttacttaccttttc

SEQ ID NO: 1862560 - DNA, 15 bp, Homo sapiens
ttacttaccttttcc

SEQ ID NO: 1862561 - DNA, 15 bp, Homo sapiens
tacttaccttttcct

SEQ ID NO: 1862562 - DNA, 15 bp, Homo sapiens
acttaccttttcctg

SEQ ID NO: 1862563 - DNA, 15 bp, Homo sapiens
cttaccttttcctgc

SEQ ID NO: 1862564 - DNA, 15 bp, Homo sapiens
ttaccttttcctgcc

SEQ ID NO: 1862565 - DNA, 15 bp, Homo sapiens
taccttttcctgcca

SEQ ID NO: 1862566 - DNA, 15 bp, Homo sapiens
accttttcctgccac

SEQ ID NO: 1862567 - DNA, 15 bp, Homo sapiens
ccttttcctgccacg

SEQ ID NO: 1862568 - DNA, 15 bp, Homo sapiens
cttttcctgccacgg

SEQ ID NO: 1862569 - DNA, 15 bp, Homo sapiens
ttttcctgccacgga

SEQ ID NO: 1862570 - DNA, 15 bp, Homo sapiens
tttcctgccacggac

SEQ ID NO: 1862571 - DNA, 15 bp, Homo sapiens
ttcctgccacggaca

SEQ ID NO: 1862572 - DNA, 15 bp, Homo sapiens
tcctgccacggacac

SEQ ID NO: 1862573 - DNA, 15 bp, Homo sapiens
cctgccacggacact

SEQ ID NO: 1862574 - DNA, 15 bp, Homo sapiens
ctgccacggacacta

SEQ ID NO: 1862575 - DNA, 15 bp, Homo sapiens
tgccacggacactat

SEQ ID NO: 1862576 - DNA, 15 bp, Homo sapiens
gccacggacactatg

SEQ ID NO: 1862577 - DNA, 15 bp, Homo sapiens
ccacggacactatga

SEQ ID NO: 1862578 - DNA, 15 bp, Homo sapiens
cacggacactatgac

SEQ ID NO: 1862579 - DNA, 15 bp, Homo sapiens
acggacactatgacc

SEQ ID NO: 1862580 - DNA, 15 bp, Homo sapiens
cggacactatgacct

SEQ ID NO: 1862581 - DNA, 15 bp, Homo sapiens
ggacactatgacctc

SEQ ID NO: 1862582 - DNA, 15 bp, Homo sapiens
gacactatgacctct

SEQ ID NO: 1862583 - DNA, 15 bp, Homo sapiens
acactatgacctctt

SEQ ID NO: 1862584 - DNA, 15 bp, Homo sapiens
cactatgacctcttg

SEQ ID NO: 1862585 - DNA, 15 bp, Homo sapiens
actatgacctcttgg

SEQ ID NO: 1862586 - DNA, 15 bp, Homo sapiens
ctatgacctcttggt

SEQ ID NO: 1862587 - DNA, 15 bp, Homo sapiens
tatgacctcttggtt

SEQ ID NO: 1862588 - DNA, 15 bp, Homo sapiens
atgacctcttggttt

SEQ ID NO: 1862589 - DNA, 15 bp, Homo sapiens
tgacctcttggtttt

SEQ ID NO: 1862590 - DNA, 15 bp, Homo sapiens
gacctcttggtttta

SEQ ID NO: 1862591 - DNA, 15 bp, Homo sapiens
acctcttggttttat

SEQ ID NO: 1862592 - DNA, 15 bp, Homo sapiens
cctcttggttttatt

SEQ ID NO: 1862593 - DNA, 15 bp, Homo sapiens
ctcttggttttattt

SEQ ID NO: 1862594 - DNA, 15 bp, Homo sapiens
tcttggttttatttt

SEQ ID NO: 1862595 - DNA, 15 bp, Homo sapiens
cttggttttattttc

SEQ ID NO: 1862596 - DNA, 15 bp, Homo sapiens
ttggttttattttct

SEQ ID NO: 1862597 - DNA, 15 bp, Homo sapiens
tggttttattttctt

SEQ ID NO: 1862598 - DNA, 15 bp, Homo sapiens
ggttttattttcttg

SEQ ID NO: 1862599 - DNA, 15 bp, Homo sapiens
gttttattttcttga

SEQ ID NO: 1862600 - DNA, 15 bp, Homo sapiens
ttttattttcttgat

SEQ ID NO: 1862601 - DNA, 15 bp, Homo sapiens
tttattttcttgatt

SEQ ID NO: 1862602 - DNA, 15 bp, Homo sapiens
ttattttcttgattg

SEQ ID NO: 1862603 - DNA, 15 bp, Homo sapiens
tattttcttgattgt

SEQ ID NO: 1862604 - DNA, 15 bp, Homo sapiens
attttcttgattgta

SEQ ID NO: 1862605 - DNA, 15 bp, Homo sapiens
ttttcttgattgtat

SEQ ID NO: 1862606 - DNA, 15 bp, Homo sapiens
tttcttgattgtatt

SEQ ID NO: 1862607 - DNA, 15 bp, Homo sapiens
ttcttgattgtattt

SEQ ID NO: 1862608 - DNA, 15 bp, Homo sapiens
tcttgattgtatttg

SEQ ID NO: 1862609 - DNA, 15 bp, Homo sapiens
cttgattgtatttgg

SEQ ID NO: 1862610 - DNA, 15 bp, Homo sapiens
ttgattgtatttggc

SEQ ID NO: 1862611 - DNA, 15 bp, Homo sapiens
tgattgtatttggca

SEQ ID NO: 1862612 - DNA, 15 bp, Homo sapiens
gattgtatttggcat

SEQ ID NO: 1862613 - DNA, 15 bp, Homo sapiens
attgtatttggcatt

SEQ ID NO: 1862614 - DNA, 15 bp, Homo sapiens
ttgtatttggcattc

SEQ ID NO: 1862615 - DNA, 15 bp, Homo sapiens
tgtatttggcattct

SEQ ID NO: 1862616 - DNA, 15 bp, Homo sapiens
gtatttggcattctc

SEQ ID NO: 1862617 - DNA, 15 bp, Homo sapiens
tatttggcattctct

SEQ ID NO: 1862618 - DNA, 15 bp, Homo sapiens
atttggcattctctg

SEQ ID NO: 1862619 - DNA, 15 bp, Homo sapiens
tttggcattctctga

SEQ ID NO: 1862620 - DNA, 15 bp, Homo sapiens
ttggcattctctgaa

SEQ ID NO: 1862621 - DNA, 15 bp, Homo sapiens
tggcattctctgaaa

SEQ ID NO: 1862622 - DNA, 15 bp, Homo sapiens
ggcattctctgaaat

SEQ ID NO: 1862623 - DNA, 15 bp, Homo sapiens
gcattctctgaaatt

SEQ ID NO: 1862624 - DNA, 15 bp, Homo sapiens
cattctctgaaattg

SEQ ID NO: 1862625 - DNA, 15 bp, Homo sapiens
attctctgaaattgt

SEQ ID NO: 1862626 - DNA, 15 bp, Homo sapiens
ttctctgaaattgtc

SEQ ID NO: 1862627 - DNA, 15 bp, Homo sapiens
tctctgaaattgtct

SEQ ID NO: 1862628 - DNA, 15 bp, Homo sapiens
ctctgaaattgtctt

SEQ ID NO: 1862629 - DNA, 15 bp, Homo sapiens
tctgaaattgtctta

SEQ ID NO: 1862630 - DNA, 15 bp, Homo sapiens
ctgaaattgtcttat

SEQ ID NO: 1862631 - DNA, 15 bp, Homo sapiens
tgaaattgtcttatt

SEQ ID NO: 1862632 - DNA, 15 bp, Homo sapiens
gaaattgtcttattt

SEQ ID NO: 1862633 - DNA, 15 bp, Homo sapiens
aaattgtcttatttg

SEQ ID NO: 1862634 - DNA, 15 bp, Homo sapiens
aattgtcttatttgt

SEQ ID NO: 1862635 - DNA, 15 bp, Homo sapiens
attgtcttatttgta

SEQ ID NO: 1862636 - DNA, 15 bp, Homo sapiens
ttgtcttatttgtac

SEQ ID NO: 1862637 - DNA, 15 bp, Homo sapiens
tgtcttatttgtaca

SEQ ID NO: 1862638 - DNA, 15 bp, Homo sapiens
gtcttatttgtacat

SEQ ID NO: 1862639 - DNA, 15 bp, Homo sapiens
tcttatttgtacatt

SEQ ID NO: 1862640 - DNA, 15 bp, Homo sapiens
cttatttgtacattt

SEQ ID NO: 1862641 - DNA, 15 bp, Homo sapiens
ttatttgtacattta

SEQ ID NO: 1862642 - DNA, 15 bp, Homo sapiens
tatttgtacatttat

SEQ ID NO: 1862643 - DNA, 15 bp, Homo sapiens
atttgtacatttata

SEQ ID NO: 1862644 - DNA, 15 bp, Homo sapiens
tttgtacatttatat

SEQ ID NO: 1862645 - DNA, 15 bp, Homo sapiens
ttgtacatttatatg

SEQ ID NO: 1862646 - DNA, 15 bp, Homo sapiens
tgtacatttatatgg

SEQ ID NO: 1862647 - DNA, 15 bp, Homo sapiens
gtacatttatatggg

SEQ ID NO: 1862648 - DNA, 15 bp, Homo sapiens
tacatttatatggga

SEQ ID NO: 1862649 - DNA, 15 bp, Homo sapiens
acatttatatgggat

SEQ ID NO: 1862650 - DNA, 15 bp, Homo sapiens
catttatatgggatt

SEQ ID NO: 1862651 - DNA, 15 bp, Homo sapiens
atttatatgggattt

SEQ ID NO: 1862652 - DNA, 15 bp, Homo sapiens
tttatatgggatttg

SEQ ID NO: 1862653 - DNA, 15 bp, Homo sapiens
ttatatgggatttgt

SEQ ID NO: 1862654 - DNA, 15 bp, Homo sapiens
tatatgggatttgtg

SEQ ID NO: 1862655 - DNA, 15 bp, Homo sapiens
atatgggatttgtgt

SEQ ID NO: 1862656 - DNA, 15 bp, Homo sapiens
tatgggatttgtgtc

SEQ ID NO: 1862657 - DNA, 15 bp, Homo sapiens
atgggatttgtgtct

SEQ ID NO: 1862658 - DNA, 15 bp, Homo sapiens
tgggatttgtgtctc

SEQ ID NO: 1862659 - DNA, 15 bp, Homo sapiens
gggatttgtgtctcc

SEQ ID NO: 1862660 - DNA, 15 bp, Homo sapiens
ggatttgtgtctcct

SEQ ID NO: 1862661 - DNA, 15 bp, Homo sapiens
gatttgtgtctcctc

SEQ ID NO: 1862662 - DNA, 15 bp, Homo sapiens
atttgtgtctcctcg

SEQ ID NO: 1862663 - DNA, 15 bp, Homo sapiens
tttgtgtctcctcgc

SEQ ID NO: 1862664 - DNA, 15 bp, Homo sapiens
ttgtgtctcctcgct

SEQ ID NO: 1862665 - DNA, 15 bp, Homo sapiens
tgtgtctcctcgcta

SEQ ID NO: 1862666 - DNA, 15 bp, Homo sapiens
gtgtctcctcgctag

SEQ ID NO: 1862667 - DNA, 15 bp, Homo sapiens
tgtctcctcgctaga

SEQ ID NO: 1862668 - DNA, 15 bp, Homo sapiens
gtctcctcgctagaa

SEQ ID NO: 1862669 - DNA, 15 bp, Homo sapiens
tctcctcgctagaat

SEQ ID NO: 1862670 - DNA, 15 bp, Homo sapiens
ctcctcgctagaata

SEQ ID NO: 1862671 - DNA, 15 bp, Homo sapiens
tcctcgctagaatat

SEQ ID NO: 1862672 - DNA, 15 bp, Homo sapiens
cctcgctagaatata

SEQ ID NO: 1862673 - DNA, 15 bp, Homo sapiens
ctcgctagaatataa

SEQ ID NO: 1862674 - DNA, 15 bp, Homo sapiens
tcgctagaatataac

SEQ ID NO: 1862675 - DNA, 15 bp, Homo sapiens
cgctagaatataact

SEQ ID NO: 1862676 - DNA, 15 bp, Homo sapiens
gctagaatataactc

SEQ ID NO: 1862677 - DNA, 15 bp, Homo sapiens
ctagaatataactct

SEQ ID NO: 1862678 - DNA, 15 bp, Homo sapiens
tagaatataactctt

SEQ ID NO: 1862679 - DNA, 15 bp, Homo sapiens
agaatataactctta

SEQ ID NO: 1862680 - DNA, 15 bp, Homo sapiens
gaatataactcttat

SEQ ID NO: 1862681 - DNA, 15 bp, Homo sapiens
aatataactcttatc

SEQ ID NO: 1862682 - DNA, 15 bp, Homo sapiens
atataactcttatct

SEQ ID NO: 1862683 - DNA, 15 bp, Homo sapiens
tataactcttatcta

SEQ ID NO: 1862684 - DNA, 15 bp, Homo sapiens
ataactcttatctat

SEQ ID NO: 1862685 - DNA, 15 bp, Homo sapiens
taactcttatctatt

SEQ ID NO: 1862686 - DNA, 15 bp, Homo sapiens
aactcttatctattt

SEQ ID NO: 1862687 - DNA, 15 bp, Homo sapiens
actcttatctattta

SEQ ID NO: 1862688 - DNA, 15 bp, Homo sapiens
ctcttatctatttat

SEQ ID NO: 1862689 - DNA, 15 bp, Homo sapiens
tcttatctatttata

SEQ ID NO: 1862690 - DNA, 15 bp, Homo sapiens
cttatctatttatac

SEQ ID NO: 1862691 - DNA, 15 bp, Homo sapiens
ttatctatttatact

SEQ ID NO: 1862692 - DNA, 15 bp, Homo sapiens
tatctatttatactc

SEQ ID NO: 1862693 - DNA, 15 bp, Homo sapiens
atctatttatactcc

SEQ ID NO: 1862694 - DNA, 15 bp, Homo sapiens
tctatttatactcca

SEQ ID NO: 1862695 - DNA, 15 bp, Homo sapiens
ctatttatactccac

SEQ ID NO: 1862696 - DNA, 15 bp, Homo sapiens
tatttatactccact

SEQ ID NO: 1862697 - DNA, 15 bp, Homo sapiens
atttatactccactg

SEQ ID NO: 1862698 - DNA, 15 bp, Homo sapiens
tttatactccactgt

SEQ ID NO: 1862699 - DNA, 15 bp, Homo sapiens
ttatactccactgta

SEQ ID NO: 1862700 - DNA, 15 bp, Homo sapiens
tatactccactgtat

SEQ ID NO: 1862701 - DNA, 15 bp, Homo sapiens
atactccactgtatc

SEQ ID NO: 1862702 - DNA, 15 bp, Homo sapiens
tactccactgtatcc

SEQ ID NO: 1862703 - DNA, 15 bp, Homo sapiens
actccactgtatcct

SEQ ID NO: 1862704 - DNA, 15 bp, Homo sapiens
ctccactgtatcctc

SEQ ID NO: 1862705 - DNA, 15 bp, Homo sapiens
tccactgtatcctca

SEQ ID NO: 1862706 - DNA, 15 bp, Homo sapiens
ccactgtatcctcag

SEQ ID NO: 1862707 - DNA, 15 bp, Homo sapiens
cactgtatcctcagt

SEQ ID NO: 1862708 - DNA, 15 bp, Homo sapiens
actgtatcctcagtg

SEQ ID NO: 1862709 - DNA, 15 bp, Homo sapiens
ctgtatcctcagtgc

SEQ ID NO: 1862710 - DNA, 15 bp, Homo sapiens
tgtatcctcagtgcc

SEQ ID NO: 1862711 - DNA, 15 bp, Homo sapiens
gtatcctcagtgcct

SEQ ID NO: 1862712 - DNA, 15 bp, Homo sapiens
tatcctcagtgccta

SEQ ID NO: 1862713 - DNA, 15 bp, Homo sapiens
atcctcagtgcctac

SEQ ID NO: 1862714 - DNA, 15 bp, Homo sapiens
tcctcagtgcctaca

SEQ ID NO: 1862715 - DNA, 15 bp, Homo sapiens
cctcagtgcctacag

SEQ ID NO: 1862716 - DNA, 15 bp, Homo sapiens
ctcagtgcctacagc

SEQ ID NO: 1862717 - DNA, 15 bp, Homo sapiens
tcagtgcctacagca

SEQ ID NO: 1862718 - DNA, 15 bp, Homo sapiens
cagtgcctacagcag

SEQ ID NO: 1862719 - DNA, 15 bp, Homo sapiens
agtgcctacagcagt

SEQ ID NO: 1862720 - DNA, 15 bp, Homo sapiens
gtgcctacagcagta

SEQ ID NO: 1862721 - DNA, 15 bp, Homo sapiens
tgcctacagcagtat

SEQ ID NO: 1862722 - DNA, 15 bp, Homo sapiens
gcctacagcagtatc

SEQ ID NO: 1862723 - DNA, 15 bp, Homo sapiens
cctacagcagtatct

SEQ ID NO: 1862724 - DNA, 15 bp, Homo sapiens
ctacagcagtatctg

SEQ ID NO: 1862725 - DNA, 15 bp, Homo sapiens
tacagcagtatctgg

SEQ ID NO: 1862726 - DNA, 15 bp, Homo sapiens
acagcagtatctggt

SEQ ID NO: 1862727 - DNA, 15 bp, Homo sapiens
cagcagtatctggtt

SEQ ID NO: 1862728 - DNA, 15 bp, Homo sapiens
agcagtatctggttg

SEQ ID NO: 1862729 - DNA, 15 bp, Homo sapiens
gcagtatctggttga

SEQ ID NO: 1862730 - DNA, 15 bp, Homo sapiens
cagtatctggttgaa

SEQ ID NO: 1862731 - DNA, 15 bp, Homo sapiens
agtatctggttgaaa

SEQ ID NO: 1862732 - DNA, 15 bp, Homo sapiens
gtatctggttgaaag

SEQ ID NO: 1862733 - DNA, 15 bp, Homo sapiens
tatctggttgaaagg

SEQ ID NO: 1862734 - DNA, 15 bp, Homo sapiens
atctggttgaaaggg

SEQ ID NO: 1862735 - DNA, 15 bp, Homo sapiens
tctggttgaaagggg

SEQ ID NO: 1862736 - DNA, 15 bp, Homo sapiens
ctggttgaaaggggt

SEQ ID NO: 1862737 - DNA, 15 bp, Homo sapiens
tggttgaaaggggtg

SEQ ID NO: 1862738 - DNA, 15 bp, Homo sapiens
ggttgaaaggggtgc

SEQ ID NO: 1862739 - DNA, 15 bp, Homo sapiens
gttgaaaggggtgcc

SEQ ID NO: 1862740 - DNA, 15 bp, Homo sapiens
ttgaaaggggtgcct

SEQ ID NO: 1862741 - DNA, 15 bp, Homo sapiens
tgaaaggggtgcctg

SEQ ID NO: 1862742 - DNA, 15 bp, Homo sapiens
gaaaggggtgcctga

SEQ ID NO: 1862743 - DNA, 15 bp, Homo sapiens
aaaggggtgcctgat

SEQ ID NO: 1862744 - DNA, 15 bp, Homo sapiens
aaggggtgcctgata

SEQ ID NO: 1862745 - DNA, 15 bp, Homo sapiens
aggggtgcctgataa

SEQ ID NO: 1862746 - DNA, 15 bp, Homo sapiens
ggggtgcctgataaa

SEQ ID NO: 1862747 - DNA, 15 bp, Homo sapiens
gggtgcctgataaaa

SEQ ID NO: 1862748 - DNA, 15 bp, Homo sapiens
ggtgcctgataaaaa

SEQ ID NO: 1862749 - DNA, 15 bp, Homo sapiens
gtgcctgataaaaat

SEQ ID NO: 1862750 - DNA, 15 bp, Homo sapiens
tgcctgataaaaatg

SEQ ID NO: 1862751 - DNA, 15 bp, Homo sapiens
gcctgataaaaatgt

SEQ ID NO: 1862752 - DNA, 15 bp, Homo sapiens
cctgataaaaatgtg

SEQ ID NO: 1862753 - DNA, 15 bp, Homo sapiens
ctgataaaaatgtga

SEQ ID NO: 1862754 - DNA, 15 bp, Homo sapiens
tgataaaaatgtgaa

SEQ ID NO: 1862755 - DNA, 15 bp, Homo sapiens
gataaaaatgtgaat

SEQ ID NO: 1862756 - DNA, 15 bp, Homo sapiens
ataaaaatgtgaatg

SEQ ID NO: 1862757 - DNA, 15 bp, Homo sapiens
taaaaatgtgaatga

SEQ ID NO: 1862758 - DNA, 15 bp, Homo sapiens
aaaaatgtgaatgaa

SEQ ID NO: 1862759 - DNA, 15 bp, Homo sapiens
aaaatgtgaatgaaa

SEQ ID NO: 1862760 - DNA, 15 bp, Homo sapiens
aaatgtgaatgaaat

SEQ ID NO: 1862761 - DNA, 15 bp, Homo sapiens
aatgtgaatgaaatg

SEQ ID NO: 1862762 - DNA, 15 bp, Homo sapiens
atgtgaatgaaatga

SEQ ID NO: 1862763 - DNA, 15 bp, Homo sapiens
tgtgaatgaaatgaa

SEQ ID NO: 1862764 - DNA, 15 bp, Homo sapiens
gtgaatgaaatgaat

SEQ ID NO: 1862765 - DNA, 15 bp, Homo sapiens
tgaatgaaatgaatg

SEQ ID NO: 1862766 - DNA, 15 bp, Homo sapiens
gaatgaaatgaatgc

SEQ ID NO: 1862767 - DNA, 15 bp, Homo sapiens
aatgaaatgaatgcc

SEQ ID NO: 1862768 - DNA, 15 bp, Homo sapiens
atgaaatgaatgcca

SEQ ID NO: 1862769 - DNA, 15 bp, Homo sapiens
tgaaatgaatgccaa

SEQ ID NO: 1862770 - DNA, 15 bp, Homo sapiens
gaaatgaatgccaac

SEQ ID NO: 1862771 - DNA, 15 bp, Homo sapiens
aaatgaatgccaaca

SEQ ID NO: 1862772 - DNA, 15 bp, Homo sapiens
aatgaatgccaacag

SEQ ID NO: 1862773 - DNA, 15 bp, Homo sapiens
atgaatgccaacagc

SEQ ID NO: 1862774 - DNA, 15 bp, Homo sapiens
tgaatgccaacagcc

SEQ ID NO: 1862775 - DNA, 15 bp, Homo sapiens
gaatgccaacagcca

SEQ ID NO: 1862776 - DNA, 15 bp, Homo sapiens
aatgccaacagccag

SEQ ID NO: 1862777 - DNA, 15 bp, Homo sapiens
atgccaacagccagg

SEQ ID NO: 1862778 - DNA, 15 bp, Homo sapiens
tgccaacagccagga

SEQ ID NO: 1862779 - DNA, 15 bp, Homo sapiens
gccaacagccaggaa

SEQ ID NO: 1862780 - DNA, 15 bp, Homo sapiens
ccaacagccaggaag

SEQ ID NO: 1862781 - DNA, 15 bp, Homo sapiens
caacagccaggaagg

SEQ ID NO: 1862782 - DNA, 15 bp, Homo sapiens
aacagccaggaaggc

SEQ ID NO: 1862783 - DNA, 15 bp, Homo sapiens
acagccaggaaggca

SEQ ID NO: 1862784 - DNA, 15 bp, Homo sapiens
cagccaggaaggcac

SEQ ID NO: 1862785 - DNA, 15 bp, Homo sapiens
agccaggaaggcacc

SEQ ID NO: 1862786 - DNA, 15 bp, Homo sapiens
gccaggaaggcacct

SEQ ID NO: 1862787 - DNA, 15 bp, Homo sapiens
ccaggaaggcacctc

SEQ ID NO: 1862788 - DNA, 15 bp, Homo sapiens
caggaaggcacctca

SEQ ID NO: 1862789 - DNA, 15 bp, Homo sapiens
aggaaggcacctcat

SEQ ID NO: 1862790 - DNA, 15 bp, Homo sapiens
ggaaggcacctcatc

SEQ ID NO: 1862791 - DNA, 15 bp, Homo sapiens
gaaggcacctcatcc

SEQ ID NO: 1862792 - DNA, 15 bp, Homo sapiens
aaggcacctcatccc

SEQ ID NO: 1862793 - DNA, 15 bp, Homo sapiens
aggcacctcatcccc

SEQ ID NO: 1862794 - DNA, 15 bp, Homo sapiens
ggcacctcatccccc

SEQ ID NO: 1862795 - DNA, 15 bp, Homo sapiens
gcacctcatccccct

SEQ ID NO: 1862796 - DNA, 15 bp, Homo sapiens
cacctcatccccctc

SEQ ID NO: 1862797 - DNA, 15 bp, Homo sapiens
acctcatccccctcc

SEQ ID NO: 1862798 - DNA, 15 bp, Homo sapiens
cctcatccccctccc

SEQ ID NO: 1862799 - DNA, 15 bp, Homo sapiens
ctcatccccctcccc

SEQ ID NO: 1862800 - DNA, 15 bp, Homo sapiens
tcatccccctcccct

SEQ ID NO: 1862801 - DNA, 15 bp, Homo sapiens
catccccctcccctc

SEQ ID NO: 1862802 - DNA, 15 bp, Homo sapiens
atccccctcccctct

SEQ ID NO: 1862803 - DNA, 15 bp, Homo sapiens
tccccctcccctctg

SEQ ID NO: 1862804 - DNA, 15 bp, Homo sapiens
ccccctcccctctgc

SEQ ID NO: 1862805 - DNA, 15 bp, Homo sapiens
cccctcccctctgcc

SEQ ID NO: 1862806 - DNA, 15 bp, Homo sapiens
ccctcccctctgcca

SEQ ID NO: 1862807 - DNA, 15 bp, Homo sapiens
cctcccctctgccac

SEQ ID NO: 1862808 - DNA, 15 bp, Homo sapiens
ctcccctctgccacc

SEQ ID NO: 1862809 - DNA, 15 bp, Homo sapiens
tcccctctgccaccc

SEQ ID NO: 1862810 - DNA, 15 bp, Homo sapiens
cccctctgccacccc

SEQ ID NO: 1862811 - DNA, 15 bp, Homo sapiens
ccctctgccaccccc

SEQ ID NO: 1862812 - DNA, 15 bp, Homo sapiens
cctctgccaccccct

SEQ ID NO: 1862813 - DNA, 15 bp, Homo sapiens
ctctgccaccccctt

SEQ ID NO: 1862814 - DNA, 15 bp, Homo sapiens
tctgccacccccttt

SEQ ID NO: 1862815 - DNA, 15 bp, Homo sapiens
ctgccacccccttta

SEQ ID NO: 1862816 - DNA, 15 bp, Homo sapiens
tgccaccccctttat

SEQ ID NO: 1862817 - DNA, 15 bp, Homo sapiens
gccaccccctttatc

SEQ ID NO: 1862818 - DNA, 15 bp, Homo sapiens
ccaccccctttatca

SEQ ID NO: 1862819 - DNA, 15 bp, Homo sapiens
caccccctttatcag

SEQ ID NO: 1862820 - DNA, 15 bp, Homo sapiens
accccctttatcagg

SEQ ID NO: 1862821 - DNA, 15 bp, Homo sapiens
ccccctttatcaggg

SEQ ID NO: 1862822 - DNA, 15 bp, Homo sapiens
cccctttatcagggc

SEQ ID NO: 1862823 - DNA, 15 bp, Homo sapiens
ccctttatcagggct

SEQ ID NO: 1862824 - DNA, 15 bp, Homo sapiens
cctttatcagggctg

SEQ ID NO: 1862825 - DNA, 15 bp, Homo sapiens
ctttatcagggctgg

SEQ ID NO: 1862826 - DNA, 15 bp, Homo sapiens
tttatcagggctggg

SEQ ID NO: 1862827 - DNA, 15 bp, Homo sapiens
ttatcagggctgggc

SEQ ID NO: 1862828 - DNA, 15 bp, Homo sapiens
tatcagggctgggct

SEQ ID NO: 1862829 - DNA, 15 bp, Homo sapiens
atcagggctgggctg

SEQ ID NO: 1862830 - DNA, 15 bp, Homo sapiens
tcagggctgggctgt

SEQ ID NO: 1862831 - DNA, 15 bp, Homo sapiens
cagggctgggctgtg

SEQ ID NO: 1862832 - DNA, 15 bp, Homo sapiens
agggctgggctgtgt

SEQ ID NO: 1862833 - DNA, 15 bp, Homo sapiens
gggctgggctgtgtc

SEQ ID NO: 1862834 - DNA, 15 bp, Homo sapiens
ggctgggctgtgtca

SEQ ID NO: 1862835 - DNA, 15 bp, Homo sapiens
gctgggctgtgtcag

SEQ ID NO: 1862836 - DNA, 15 bp, Homo sapiens
ctgggctgtgtcagc

SEQ ID NO: 1862837 - DNA, 15 bp, Homo sapiens
tgggctgtgtcagct

SEQ ID NO: 1862838 - DNA, 15 bp, Homo sapiens
gggctgtgtcagctc

SEQ ID NO: 1862839 - DNA, 15 bp, Homo sapiens
ggctgtgtcagctca

SEQ ID NO: 1862840 - DNA, 15 bp, Homo sapiens
gctgtgtcagctcat

SEQ ID NO: 1862841 - DNA, 15 bp, Homo sapiens
ctgtgtcagctcatt

SEQ ID NO: 1862842 - DNA, 15 bp, Homo sapiens
tgtgtcagctcattg

SEQ ID NO: 1862843 - DNA, 15 bp, Homo sapiens
gtgtcagctcattga

SEQ ID NO: 1862844 - DNA, 15 bp, Homo sapiens
tgtcagctcattgag

SEQ ID NO: 1862845 - DNA, 15 bp, Homo sapiens
gtcagctcattgagg

SEQ ID NO: 1862846 - DNA, 15 bp, Homo sapiens
tcagctcattgaggc

SEQ ID NO: 1862847 - DNA, 15 bp, Homo sapiens
cagctcattgaggca

SEQ ID NO: 1862848 - DNA, 15 bp, Homo sapiens
agctcattgaggcag

SEQ ID NO: 1862849 - DNA, 15 bp, Homo sapiens
gctcattgaggcagt

SEQ ID NO: 1862850 - DNA, 15 bp, Homo sapiens
ctcattgaggcagta

SEQ ID NO: 1862851 - DNA, 15 bp, Homo sapiens
tcattgaggcagtag

SEQ ID NO: 1862852 - DNA, 15 bp, Homo sapiens
cattgaggcagtagg

SEQ ID NO: 1862853 - DNA, 15 bp, Homo sapiens
attgaggcagtaggg

SEQ ID NO: 1862854 - DNA, 15 bp, Homo sapiens
ttgaggcagtaggga

SEQ ID NO: 1862855 - DNA, 15 bp, Homo sapiens
tgaggcagtagggag

SEQ ID NO: 1862856 - DNA, 15 bp, Homo sapiens
gaggcagtagggagt

SEQ ID NO: 1862857 - DNA, 15 bp, Homo sapiens
aggcagtagggagta

SEQ ID NO: 1862858 - DNA, 15 bp, Homo sapiens
ggcagtagggagtat

SEQ ID NO: 1862859 - DNA, 15 bp, Homo sapiens
gcagtagggagtatg

SEQ ID NO: 1862860 - DNA, 15 bp, Homo sapiens
cagtagggagtatgg

SEQ ID NO: 1862861 - DNA, 15 bp, Homo sapiens
agtagggagtatggt

SEQ ID NO: 1862862 - DNA, 15 bp, Homo sapiens
gtagggagtatggtt

SEQ ID NO: 1862863 - DNA, 15 bp, Homo sapiens
tagggagtatggtta

SEQ ID NO: 1862864 - DNA, 15 bp, Homo sapiens
agggagtatggttag

SEQ ID NO: 1862865 - DNA, 15 bp, Homo sapiens
gggagtatggttagg

SEQ ID NO: 1862866 - DNA, 15 bp, Homo sapiens
ggagtatggttagga

SEQ ID NO: 1862867 - DNA, 15 bp, Homo sapiens
gagtatggttaggat

SEQ ID NO: 1862868 - DNA, 15 bp, Homo sapiens
agtatggttaggatg

SEQ ID NO: 1862869 - DNA, 15 bp, Homo sapiens
gtatggttaggatga

SEQ ID NO: 1862870 - DNA, 15 bp, Homo sapiens
tatggttaggatgat

SEQ ID NO: 1862871 - DNA, 15 bp, Homo sapiens
atggttaggatgatg

SEQ ID NO: 1862872 - DNA, 15 bp, Homo sapiens
tggttaggatgatgg

SEQ ID NO: 1862873 - DNA, 15 bp, Homo sapiens
ggttaggatgatgga

SEQ ID NO: 1862874 - DNA, 15 bp, Homo sapiens
gttaggatgatggac

SEQ ID NO: 1862875 - DNA, 15 bp, Homo sapiens
ttaggatgatggact

SEQ ID NO: 1862876 - DNA, 15 bp, Homo sapiens
taggatgatggactg

SEQ ID NO: 1862877 - DNA, 15 bp, Homo sapiens
aggatgatggactgc

SEQ ID NO: 1862878 - DNA, 15 bp, Homo sapiens
ggatgatggactgcc

SEQ ID NO: 1862879 - DNA, 15 bp, Homo sapiens
gatgatggactgccc

SEQ ID NO: 1862880 - DNA, 15 bp, Homo sapiens
atgatggactgcccg

SEQ ID NO: 1862881 - DNA, 15 bp, Homo sapiens
tgatggactgcccgg

SEQ ID NO: 1862882 - DNA, 15 bp, Homo sapiens
gatggactgcccggg

SEQ ID NO: 1862883 - DNA, 15 bp, Homo sapiens
atggactgcccgggc

SEQ ID NO: 1862884 - DNA, 15 bp, Homo sapiens
tggactgcccgggct

SEQ ID NO: 1862885 - DNA, 15 bp, Homo sapiens
ggactgcccgggctc

SEQ ID NO: 1862886 - DNA, 15 bp, Homo sapiens
gactgcccgggctca

SEQ ID NO: 1862887 - DNA, 15 bp, Homo sapiens
actgcccgggctcaa

SEQ ID NO: 1862888 - DNA, 15 bp, Homo sapiens
ctgcccgggctcaaa

SEQ ID NO: 1862889 - DNA, 15 bp, Homo sapiens
tgcccgggctcaaac

SEQ ID NO: 1862890 - DNA, 15 bp, Homo sapiens
gcccgggctcaaaca

SEQ ID NO: 1862891 - DNA, 15 bp, Homo sapiens
cccgggctcaaacac

SEQ ID NO: 1862892 - DNA, 15 bp, Homo sapiens
ccgggctcaaacaca

SEQ ID NO: 1862893 - DNA, 15 bp, Homo sapiens
cgggctcaaacacaa

SEQ ID NO: 1862894 - DNA, 15 bp, Homo sapiens
gggctcaaacacaac

SEQ ID NO: 1862895 - DNA, 15 bp, Homo sapiens
ggctcaaacacaact

SEQ ID NO: 1862896 - DNA, 15 bp, Homo sapiens
gctcaaacacaactt

SEQ ID NO: 1862897 - DNA, 15 bp, Homo sapiens
ctcaaacacaacttc

SEQ ID NO: 1862898 - DNA, 15 bp, Homo sapiens
tcaaacacaacttcc

SEQ ID NO: 1862899 - DNA, 15 bp, Homo sapiens
caaacacaacttccc

SEQ ID NO: 1862900 - DNA, 15 bp, Homo sapiens
aaacacaacttccca

SEQ ID NO: 1862901 - DNA, 15 bp, Homo sapiens
aacacaacttcccac

SEQ ID NO: 1862902 - DNA, 15 bp, Homo sapiens
acacaacttcccacc

SEQ ID NO: 1862903 - DNA, 15 bp, Homo sapiens
cacaacttcccacct

SEQ ID NO: 1862904 - DNA, 15 bp, Homo sapiens
acaacttcccacctg

SEQ ID NO: 1862905 - DNA, 15 bp, Homo sapiens
caacttcccacctgt

SEQ ID NO: 1862906 - DNA, 15 bp, Homo sapiens
aacttcccacctgtg

SEQ ID NO: 1862907 - DNA, 15 bp, Homo sapiens
acttcccacctgtgt

SEQ ID NO: 1862908 - DNA, 15 bp, Homo sapiens
cttcccacctgtgtg

SEQ ID NO: 1862909 - DNA, 15 bp, Homo sapiens
ttcccacctgtgtga

SEQ ID NO: 1862910 - DNA, 15 bp, Homo sapiens
tcccacctgtgtgat

SEQ ID NO: 1862911 - DNA, 15 bp, Homo sapiens
cccacctgtgtgatc

SEQ ID NO: 1862912 - DNA, 15 bp, Homo sapiens
ccacctgtgtgatct

SEQ ID NO: 1862913 - DNA, 15 bp, Homo sapiens
cacctgtgtgatctt

SEQ ID NO: 1862914 - DNA, 15 bp, Homo sapiens
acctgtgtgatctta

SEQ ID NO: 1862915 - DNA, 15 bp, Homo sapiens
cctgtgtgatcttag

SEQ ID NO: 1862916 - DNA, 15 bp, Homo sapiens
ctgtgtgatcttaga

SEQ ID NO: 1862917 - DNA, 15 bp, Homo sapiens
tgtgtgatcttagat

SEQ ID NO: 1862918 - DNA, 15 bp, Homo sapiens
gtgtgatcttagata

SEQ ID NO: 1862919 - DNA, 15 bp, Homo sapiens
tgtgatcttagataa

SEQ ID NO: 1862920 - DNA, 15 bp, Homo sapiens
gtgatcttagataaa

SEQ ID NO: 1862921 - DNA, 15 bp, Homo sapiens
tgatcttagataaat

SEQ ID NO: 1862922 - DNA, 15 bp, Homo sapiens
gatcttagataaatt

SEQ ID NO: 1862923 - DNA, 15 bp, Homo sapiens
atcttagataaattc

SEQ ID NO: 1862924 - DNA, 15 bp, Homo sapiens
tcttagataaattca

SEQ ID NO: 1862925 - DNA, 15 bp, Homo sapiens
cttagataaattcac

SEQ ID NO: 1862926 - DNA, 15 bp, Homo sapiens
ttagataaattcacc

SEQ ID NO: 1862927 - DNA, 15 bp, Homo sapiens
tagataaattcacct

SEQ ID NO: 1862928 - DNA, 15 bp, Homo sapiens
agataaattcacctc

SEQ ID NO: 1862929 - DNA, 15 bp, Homo sapiens
gataaattcacctct

SEQ ID NO: 1862930 - DNA, 15 bp, Homo sapiens
ataaattcacctctc

SEQ ID NO: 1862931 - DNA, 15 bp, Homo sapiens
taaattcacctctct

SEQ ID NO: 1862932 - DNA, 15 bp, Homo sapiens
aaattcacctctctg

SEQ ID NO: 1862933 - DNA, 15 bp, Homo sapiens
aattcacctctctgt

SEQ ID NO: 1862934 - DNA, 15 bp, Homo sapiens
attcacctctctgtg

SEQ ID NO: 1862935 - DNA, 15 bp, Homo sapiens
ttcacctctctgtgc

SEQ ID NO: 1862936 - DNA, 15 bp, Homo sapiens
tcacctctctgtgcc

SEQ ID NO: 1862937 - DNA, 15 bp, Homo sapiens
cacctctctgtgcct

SEQ ID NO: 1862938 - DNA, 15 bp, Homo sapiens
acctctctgtgcctc

SEQ ID NO: 1862939 - DNA, 15 bp, Homo sapiens
cctctctgtgcctca

SEQ ID NO: 1862940 - DNA, 15 bp, Homo sapiens
ctctctgtgcctcaa

SEQ ID NO: 1862941 - DNA, 15 bp, Homo sapiens
tctctgtgcctcaat

SEQ ID NO: 1862942 - DNA, 15 bp, Homo sapiens
ctctgtgcctcaatt

SEQ ID NO: 1862943 - DNA, 15 bp, Homo sapiens
tctgtgcctcaattt

SEQ ID NO: 1862944 - DNA, 15 bp, Homo sapiens
ctgtgcctcaatttc

SEQ ID NO: 1862945 - DNA, 15 bp, Homo sapiens
tgtgcctcaatttct

SEQ ID NO: 1862946 - DNA, 15 bp, Homo sapiens
gtgcctcaatttctt

SEQ ID NO: 1862947 - DNA, 15 bp, Homo sapiens
tgcctcaatttcttt

SEQ ID NO: 1862948 - DNA, 15 bp, Homo sapiens
gcctcaatttcttta

SEQ ID NO: 1862949 - DNA, 15 bp, Homo sapiens
cctcaatttctttat

SEQ ID NO: 1862950 - DNA, 15 bp, Homo sapiens
ctcaatttctttatc

SEQ ID NO: 1862951 - DNA, 15 bp, Homo sapiens
tcaatttctttatct

SEQ ID NO: 1862952 - DNA, 15 bp, Homo sapiens
caatttctttatcta

SEQ ID NO: 1862953 - DNA, 15 bp, Homo sapiens
aatttctttatctat

SEQ ID NO: 1862954 - DNA, 15 bp, Homo sapiens
atttctttatctata

SEQ ID NO: 1862955 - DNA, 15 bp, Homo sapiens
tttctttatctatac

SEQ ID NO: 1862956 - DNA, 15 bp, Homo sapiens
ttctttatctataca

SEQ ID NO: 1862957 - DNA, 15 bp, Homo sapiens
tctttatctatacaa

SEQ ID NO: 1862958 - DNA, 15 bp, Homo sapiens
ctttatctatacaat

SEQ ID NO: 1862959 - DNA, 15 bp, Homo sapiens
tttatctatacaatc

SEQ ID NO: 1862960 - DNA, 15 bp, Homo sapiens
ttatctatacaatca

SEQ ID NO: 1862961 - DNA, 15 bp, Homo sapiens
tatctatacaatcag

SEQ ID NO: 1862962 - DNA, 15 bp, Homo sapiens
atctatacaatcagg

SEQ ID NO: 1862963 - DNA, 15 bp, Homo sapiens
tctatacaatcagga

SEQ ID NO: 1862964 - DNA, 15 bp, Homo sapiens
ctatacaatcaggac

SEQ ID NO: 1862965 - DNA, 15 bp, Homo sapiens
tatacaatcaggaca

SEQ ID NO: 1862966 - DNA, 15 bp, Homo sapiens
atacaatcaggacaa

SEQ ID NO: 1862967 - DNA, 15 bp, Homo sapiens
tacaatcaggacaat

SEQ ID NO: 1862968 - DNA, 15 bp, Homo sapiens
acaatcaggacaatg

SEQ ID NO: 1862969 - DNA, 15 bp, Homo sapiens
caatcaggacaatgg

SEQ ID NO: 1862970 - DNA, 15 bp, Homo sapiens
aatcaggacaatggc

SEQ ID NO: 1862971 - DNA, 15 bp, Homo sapiens
atcaggacaatggca

SEQ ID NO: 1862972 - DNA, 15 bp, Homo sapiens
tcaggacaatggcaa

SEQ ID NO: 1862973 - DNA, 15 bp, Homo sapiens
caggacaatggcaat

SEQ ID NO: 1862974 - DNA, 15 bp, Homo sapiens
aggacaatggcaata

SEQ ID NO: 1862975 - DNA, 15 bp, Homo sapiens
ggacaatggcaatac

SEQ ID NO: 1862976 - DNA, 15 bp, Homo sapiens
gacaatggcaatacc

SEQ ID NO: 1862977 - DNA, 15 bp, Homo sapiens
acaatggcaatacct

SEQ ID NO: 1862978 - DNA, 15 bp, Homo sapiens
caatggcaataccta

SEQ ID NO: 1862979 - DNA, 15 bp, Homo sapiens
aatggcaatacctat

SEQ ID NO: 1862980 - DNA, 15 bp, Homo sapiens
atggcaatacctatc

SEQ ID NO: 1862981 - DNA, 15 bp, Homo sapiens
tggcaatacctatca

SEQ ID NO: 1862982 - DNA, 15 bp, Homo sapiens
ggcaatacctatcac

SEQ ID NO: 1862983 - DNA, 15 bp, Homo sapiens
gcaatacctatcaca

SEQ ID NO: 1862984 - DNA, 15 bp, Homo sapiens
caatacctatcacat

SEQ ID NO: 1862985 - DNA, 15 bp, Homo sapiens
aatacctatcacatg

SEQ ID NO: 1862986 - DNA, 15 bp, Homo sapiens
atacctatcacatgg

SEQ ID NO: 1862987 - DNA, 15 bp, Homo sapiens
tacctatcacatgga

SEQ ID NO: 1862988 - DNA, 15 bp, Homo sapiens
acctatcacatggat

SEQ ID NO: 1862989 - DNA, 15 bp, Homo sapiens
cctatcacatggatt

SEQ ID NO: 1862990 - DNA, 15 bp, Homo sapiens
ctatcacatggattg

SEQ ID NO: 1862991 - DNA, 15 bp, Homo sapiens
tatcacatggattgt

SEQ ID NO: 1862992 - DNA, 15 bp, Homo sapiens
atcacatggattgtt

SEQ ID NO: 1862993 - DNA, 15 bp, Homo sapiens
tcacatggattgttt

SEQ ID NO: 1862994 - DNA, 15 bp, Homo sapiens
cacatggattgtttt

SEQ ID NO: 1862995 - DNA, 15 bp, Homo sapiens
acatggattgttttt

SEQ ID NO: 1862996 - DNA, 15 bp, Homo sapiens
catggattgtttttc

SEQ ID NO: 1862997 - DNA, 15 bp, Homo sapiens
atggattgtttttca

SEQ ID NO: 1862998 - DNA, 15 bp, Homo sapiens
tggattgtttttcag

SEQ ID NO: 1862999 - DNA, 15 bp, Homo sapiens
ggattgtttttcagt

SEQ ID NO: 1863000 - DNA, 15 bp, Homo sapiens
gattgtttttcagtt

SEQ ID NO: 1863001 - DNA, 15 bp, Homo sapiens
attgtttttcagttt

SEQ ID NO: 1863002 - DNA, 15 bp, Homo sapiens
ttgtttttcagttta

SEQ ID NO: 1863003 - DNA, 15 bp, Homo sapiens
tgtttttcagtttaa

SEQ ID NO: 1863004 - DNA, 15 bp, Homo sapiens
gtttttcagtttaaa

SEQ ID NO: 1863005 - DNA, 15 bp, Homo sapiens
tttttcagtttaaat

SEQ ID NO: 1863006 - DNA, 15 bp, Homo sapiens
ttttcagtttaaatg

SEQ ID NO: 1863007 - DNA, 15 bp, Homo sapiens
tttcagtttaaatga

SEQ ID NO: 1863008 - DNA, 15 bp, Homo sapiens
ttcagtttaaatgag

SEQ ID NO: 1863009 - DNA, 15 bp, Homo sapiens
tcagtttaaatgagt

SEQ ID NO: 1863010 - DNA, 15 bp, Homo sapiens
cagtttaaatgagtt

SEQ ID NO: 1863011 - DNA, 15 bp, Homo sapiens
agtttaaatgagtta

SEQ ID NO: 1863012 - DNA, 15 bp, Homo sapiens
gtttaaatgagttaa

SEQ ID NO: 1863013 - DNA, 15 bp, Homo sapiens
tttaaatgagttaat

SEQ ID NO: 1863014 - DNA, 15 bp, Homo sapiens
taaatgagttaatat

SEQ ID NO: 1863015 - DNA, 15 bp, Homo sapiens
aaatgagttaatata

SEQ ID NO: 1863016 - DNA, 15 bp, Homo sapiens
aatgagttaatatac

SEQ ID NO: 1863017 - DNA, 15 bp, Homo sapiens
atgagttaatataca

SEQ ID NO: 1863018 - DNA, 15 bp, Homo sapiens
tgagttaatatacat

SEQ ID NO: 1863019 - DNA, 15 bp, Homo sapiens
gagttaatatacata

SEQ ID NO: 1863020 - DNA, 15 bp, Homo sapiens
agttaatatacataa

SEQ ID NO: 1863021 - DNA, 15 bp, Homo sapiens
gttaatatacataaa

SEQ ID NO: 1863022 - DNA, 15 bp, Homo sapiens
ttaatatacataaag

SEQ ID NO: 1863023 - DNA, 15 bp, Homo sapiens
taatatacataaagt

SEQ ID NO: 1863024 - DNA, 15 bp, Homo sapiens
aatatacataaagtc

SEQ ID NO: 1863025 - DNA, 15 bp, Homo sapiens
atatacataaagtcc

SEQ ID NO: 1863026 - DNA, 15 bp, Homo sapiens
tatacataaagtcct

SEQ ID NO: 1863027 - DNA, 15 bp, Homo sapiens
atacataaagtcctc

SEQ ID NO: 1863028 - DNA, 15 bp, Homo sapiens
tacataaagtcctca

SEQ ID NO: 1863029 - DNA, 15 bp, Homo sapiens
acataaagtcctcag

SEQ ID NO: 1863030 - DNA, 15 bp, Homo sapiens
cataaagtcctcaga

SEQ ID NO: 1863031 - DNA, 15 bp, Homo sapiens
ataaagtcctcagaa

SEQ ID NO: 1863032 - DNA, 15 bp, Homo sapiens
taaagtcctcagaaa

SEQ ID NO: 1863033 - DNA, 15 bp, Homo sapiens
aaagtcctcagaaaa

SEQ ID NO: 1863034 - DNA, 15 bp, Homo sapiens
aagtcctcagaaaat

SEQ ID NO: 1863035 - DNA, 15 bp, Homo sapiens
agtcctcagaaaatt

SEQ ID NO: 1863036 - DNA, 15 bp, Homo sapiens
gtcctcagaaaatta

SEQ ID NO: 1863037 - DNA, 15 bp, Homo sapiens
tcctcagaaaattat

SEQ ID NO: 1863038 - DNA, 15 bp, Homo sapiens
cctcagaaaattatc

SEQ ID NO: 1863039 - DNA, 15 bp, Homo sapiens
ctcagaaaattatct

SEQ ID NO: 1863040 - DNA, 15 bp, Homo sapiens
tcagaaaattatctg

SEQ ID NO: 1863041 - DNA, 15 bp, Homo sapiens
cagaaaattatctga

SEQ ID NO: 1863042 - DNA, 15 bp, Homo sapiens
agaaaattatctgat

SEQ ID NO: 1863043 - DNA, 15 bp, Homo sapiens
gaaaattatctgatt

SEQ ID NO: 1863044 - DNA, 15 bp, Homo sapiens
aaaattatctgattc

SEQ ID NO: 1863045 - DNA, 15 bp, Homo sapiens
aaattatctgattca

SEQ ID NO: 1863046 - DNA, 15 bp, Homo sapiens
aattatctgattcat

SEQ ID NO: 1863047 - DNA, 15 bp, Homo sapiens
attatctgattcata

SEQ ID NO: 1863048 - DNA, 15 bp, Homo sapiens
ttatctgattcatag

SEQ ID NO: 1863049 - DNA, 15 bp, Homo sapiens
tatctgattcatagt

SEQ ID NO: 1863050 - DNA, 15 bp, Homo sapiens
atctgattcatagta

SEQ ID NO: 1863051 - DNA, 15 bp, Homo sapiens
tctgattcatagtag

SEQ ID NO: 1863052 - DNA, 15 bp, Homo sapiens
ctgattcatagtagg

SEQ ID NO: 1863053 - DNA, 15 bp, Homo sapiens
tgattcatagtaggg

SEQ ID NO: 1863054 - DNA, 15 bp, Homo sapiens
gattcatagtagggg

SEQ ID NO: 1863055 - DNA, 15 bp, Homo sapiens
attcatagtaggggc

SEQ ID NO: 1863056 - DNA, 15 bp, Homo sapiens
ttcatagtaggggcc

SEQ ID NO: 1863057 - DNA, 15 bp, Homo sapiens
tcatagtaggggcca

SEQ ID NO: 1863058 - DNA, 15 bp, Homo sapiens
catagtaggggccat

SEQ ID NO: 1863059 - DNA, 15 bp, Homo sapiens
atagtaggggccatg

SEQ ID NO: 1863060 - DNA, 15 bp, Homo sapiens
tagtaggggccatgg

SEQ ID NO: 1863061 - DNA, 15 bp, Homo sapiens
agtaggggccatgga

SEQ ID NO: 1863062 - DNA, 15 bp, Homo sapiens
gtaggggccatggag

SEQ ID NO: 1863063 - DNA, 15 bp, Homo sapiens
taggggccatggagg

SEQ ID NO: 1863064 - DNA, 15 bp, Homo sapiens
aggggccatggaggt

SEQ ID NO: 1863065 - DNA, 15 bp, Homo sapiens
ggggccatggaggta

SEQ ID NO: 1863066 - DNA, 15 bp, Homo sapiens
gggccatggaggtat

SEQ ID NO: 1863067 - DNA, 15 bp, Homo sapiens
ggccatggaggtatt

SEQ ID NO: 1863068 - DNA, 15 bp, Homo sapiens
gccatggaggtatta

SEQ ID NO: 1863069 - DNA, 15 bp, Homo sapiens
ccatggaggtattac

SEQ ID NO: 1863070 - DNA, 15 bp, Homo sapiens
catggaggtattacc

SEQ ID NO: 1863071 - DNA, 15 bp, Homo sapiens
atggaggtattacca

SEQ ID NO: 1863072 - DNA, 15 bp, Homo sapiens
tggaggtattaccat

SEQ ID NO: 1863073 - DNA, 15 bp, Homo sapiens
ggaggtattaccatt

SEQ ID NO: 1863074 - DNA, 15 bp, Homo sapiens
gaggtattaccattg

SEQ ID NO: 1863075 - DNA, 15 bp, Homo sapiens
aggtattaccattgt

SEQ ID NO: 1863076 - DNA, 15 bp, Homo sapiens
ggtattaccattgtc

SEQ ID NO: 1863077 - DNA, 15 bp, Homo sapiens
gtattaccattgtca

SEQ ID NO: 1863078 - DNA, 15 bp, Homo sapiens
tattaccattgtcaa

SEQ ID NO: 1863079 - DNA, 15 bp, Homo sapiens
attaccattgtcaac

SEQ ID NO: 1863080 - DNA, 15 bp, Homo sapiens
ttaccattgtcaaca

SEQ ID NO: 1863081 - DNA, 15 bp, Homo sapiens
taccattgtcaacag

SEQ ID NO: 1863082 - DNA, 15 bp, Homo sapiens
accattgtcaacagt

SEQ ID NO: 1863083 - DNA, 15 bp, Homo sapiens
ccattgtcaacagtt

SEQ ID NO: 1863084 - DNA, 15 bp, Homo sapiens
cattgtcaacagtta

SEQ ID NO: 1863085 - DNA, 15 bp, Homo sapiens
attgtcaacagttac

SEQ ID NO: 1863086 - DNA, 15 bp, Homo sapiens
ttgtcaacagttact

SEQ ID NO: 1863087 - DNA, 15 bp, Homo sapiens
tgtcaacagttactg

SEQ ID NO: 1863088 - DNA, 15 bp, Homo sapiens
gtcaacagttactgg

SEQ ID NO: 1863089 - DNA, 15 bp, Homo sapiens
tcaacagttactggg

SEQ ID NO: 1863090 - DNA, 15 bp, Homo sapiens
caacagttactgggg

SEQ ID NO: 1863091 - DNA, 15 bp, Homo sapiens
aacagttactgggga

SEQ ID NO: 1863092 - DNA, 15 bp, Homo sapiens
acagttactggggaa

SEQ ID NO: 1863093 - DNA, 15 bp, Homo sapiens
cagttactggggaag

SEQ ID NO: 1863094 - DNA, 15 bp, Homo sapiens
agttactggggaagc

SEQ ID NO: 1863095 - DNA, 15 bp, Homo sapiens
gttactggggaagca

SEQ ID NO: 1863096 - DNA, 15 bp, Homo sapiens
ttactggggaagcaa

SEQ ID NO: 1863097 - DNA, 15 bp, Homo sapiens
tactggggaagcaaa

SEQ ID NO: 1863098 - DNA, 15 bp, Homo sapiens
actggggaagcaaag

SEQ ID NO: 1863099 - DNA, 15 bp, Homo sapiens
ctggggaagcaaagg

SEQ ID NO: 1863100 - DNA, 15 bp, Homo sapiens
tggggaagcaaaggg

SEQ ID NO: 1863101 - DNA, 15 bp, Homo sapiens
ggggaagcaaagggc

SEQ ID NO: 1863102 - DNA, 15 bp, Homo sapiens
gggaagcaaagggcc

SEQ ID NO: 1863103 - DNA, 15 bp, Homo sapiens
ggaagcaaagggcct

SEQ ID NO: 1863104 - DNA, 15 bp, Homo sapiens
gaagcaaagggcctg

SEQ ID NO: 1863105 - DNA, 15 bp, Homo sapiens
aagcaaagggcctgt

SEQ ID NO: 1863106 - DNA, 15 bp, Homo sapiens
agcaaagggcctgtc

SEQ ID NO: 1863107 - DNA, 15 bp, Homo sapiens
gcaaagggcctgtcc

SEQ ID NO: 1863108 - DNA, 15 bp, Homo sapiens
caaagggcctgtcct

SEQ ID NO: 1863109 - DNA, 15 bp, Homo sapiens
aaagggcctgtcctc

SEQ ID NO: 1863110 - DNA, 15 bp, Homo sapiens
aagggcctgtcctct

SEQ ID NO: 1863111 - DNA, 15 bp, Homo sapiens
agggcctgtcctctc

SEQ ID NO: 1863112 - DNA, 15 bp, Homo sapiens
gggcctgtcctctct

SEQ ID NO: 1863113 - DNA, 15 bp, Homo sapiens
ggcctgtcctctctc

SEQ ID NO: 1863114 - DNA, 15 bp, Homo sapiens
gcctgtcctctctct

SEQ ID NO: 1863115 - DNA, 15 bp, Homo sapiens
cctgtcctctctctg

SEQ ID NO: 1863116 - DNA, 15 bp, Homo sapiens
ctgtcctctctctgg

SEQ ID NO: 1863117 - DNA, 15 bp, Homo sapiens
tgtcctctctctggt

SEQ ID NO: 1863118 - DNA, 15 bp, Homo sapiens
gtcctctctctggta

SEQ ID NO: 1863119 - DNA, 15 bp, Homo sapiens
tcctctctctggtaa

SEQ ID NO: 1863120 - DNA, 15 bp, Homo sapiens
cctctctctggtaac

SEQ ID NO: 1863121 - DNA, 15 bp, Homo sapiens
ctctctctggtaacc

SEQ ID NO: 1863122 - DNA, 15 bp, Homo sapiens
tctctctggtaaccc

SEQ ID NO: 1863123 - DNA, 15 bp, Homo sapiens
ctctctggtaacccc

SEQ ID NO: 1863124 - DNA, 15 bp, Homo sapiens
tctctggtaaccccc

SEQ ID NO: 1863125 - DNA, 15 bp, Homo sapiens
ctctggtaacccccc

SEQ ID NO: 1863126 - DNA, 15 bp, Homo sapiens
tctggtaaccccccg

SEQ ID NO: 1863127 - DNA, 15 bp, Homo sapiens
ctggtaaccccccga

SEQ ID NO: 1863128 - DNA, 15 bp, Homo sapiens
tggtaaccccccgac

SEQ ID NO: 1863129 - DNA, 15 bp, Homo sapiens
ggtaaccccccgacc

SEQ ID NO: 1863130 - DNA, 15 bp, Homo sapiens
gtaaccccccgaccc

SEQ ID NO: 1863131 - DNA, 15 bp, Homo sapiens
taaccccccgacccc

SEQ ID NO: 1863132 - DNA, 15 bp, Homo sapiens
aaccccccgaccccc

SEQ ID NO: 1863133 - DNA, 15 bp, Homo sapiens
accccccgaccccct

SEQ ID NO: 1863134 - DNA, 15 bp, Homo sapiens
ccccccgaccccctt

SEQ ID NO: 1863135 - DNA, 15 bp, Homo sapiens
cccccgacccccttc

SEQ ID NO: 1863136 - DNA, 15 bp, Homo sapiens
ccccgacccccttca

SEQ ID NO: 1863137 - DNA, 15 bp, Homo sapiens
cccgacccccttcag

SEQ ID NO: 1863138 - DNA, 15 bp, Homo sapiens
ccgacccccttcagt

SEQ ID NO: 1863139 - DNA, 15 bp, Homo sapiens
cgacccccttcagtc

SEQ ID NO: 1863140 - DNA, 15 bp, Homo sapiens
gacccccttcagtct

SEQ ID NO: 1863141 - DNA, 15 bp, Homo sapiens
acccccttcagtctc

SEQ ID NO: 1863142 - DNA, 15 bp, Homo sapiens
cccccttcagtctct

SEQ ID NO: 1863143 - DNA, 15 bp, Homo sapiens
ccccttcagtctctt

SEQ ID NO: 1863144 - DNA, 15 bp, Homo sapiens
cccttcagtctcttg

SEQ ID NO: 1863145 - DNA, 15 bp, Homo sapiens
ccttcagtctcttga

SEQ ID NO: 1863146 - DNA, 15 bp, Homo sapiens
cttcagtctcttgag

SEQ ID NO: 1863147 - DNA, 15 bp, Homo sapiens
ttcagtctcttgaga

SEQ ID NO: 1863148 - DNA, 15 bp, Homo sapiens
tcagtctcttgagaa

SEQ ID NO: 1863149 - DNA, 15 bp, Homo sapiens
cagtctcttgagaac

SEQ ID NO: 1863150 - DNA, 15 bp, Homo sapiens
agtctcttgagaacc

SEQ ID NO: 1863151 - DNA, 15 bp, Homo sapiens
gtctcttgagaaccc

SEQ ID NO: 1863152 - DNA, 15 bp, Homo sapiens
tctcttgagaacccg

SEQ ID NO: 1863153 - DNA, 15 bp, Homo sapiens
ctcttgagaacccgg

SEQ ID NO: 1863154 - DNA, 15 bp, Homo sapiens
tcttgagaacccggc

SEQ ID NO: 1863155 - DNA, 15 bp, Homo sapiens
cttgagaacccggcc

SEQ ID NO: 1863156 - DNA, 15 bp, Homo sapiens
ttgagaacccggcct

SEQ ID NO: 1863157 - DNA, 15 bp, Homo sapiens
tgagaacccggcctc

SEQ ID NO: 1863158 - DNA, 15 bp, Homo sapiens
gagaacccggcctca

SEQ ID NO: 1863159 - DNA, 15 bp, Homo sapiens
agaacccggcctcaa

SEQ ID NO: 1863160 - DNA, 15 bp, Homo sapiens
gaacccggcctcaat

SEQ ID NO: 1863161 - DNA, 15 bp, Homo sapiens
aacccggcctcaatg

SEQ ID NO: 1863162 - DNA, 15 bp, Homo sapiens
acccggcctcaatgc

SEQ ID NO: 1863163 - DNA, 15 bp, Homo sapiens
cccggcctcaatgct

SEQ ID NO: 1863164 - DNA, 15 bp, Homo sapiens
ccggcctcaatgctc

SEQ ID NO: 1863165 - DNA, 15 bp, Homo sapiens
cggcctcaatgctca

SEQ ID NO: 1863166 - DNA, 15 bp, Homo sapiens
ggcctcaatgctcac

SEQ ID NO: 1863167 - DNA, 15 bp, Homo sapiens
gcctcaatgctcacc

SEQ ID NO: 1863168 - DNA, 15 bp, Homo sapiens
cctcaatgctcacct

SEQ ID NO: 1863169 - DNA, 15 bp, Homo sapiens
ctcaatgctcacctg

SEQ ID NO: 1863170 - DNA, 15 bp, Homo sapiens
tcaatgctcacctgg

SEQ ID NO: 1863171 - DNA, 15 bp, Homo sapiens
caatgctcacctggg

SEQ ID NO: 1863172 - DNA, 15 bp, Homo sapiens
aatgctcacctgggg

SEQ ID NO: 1863173 - DNA, 15 bp, Homo sapiens
atgctcacctggggt

SEQ ID NO: 1863174 - DNA, 15 bp, Homo sapiens
tgctcacctggggtc

SEQ ID NO: 1863175 - DNA, 15 bp, Homo sapiens
gctcacctggggtcc

SEQ ID NO: 1863176 - DNA, 15 bp, Homo sapiens
ctcacctggggtccc

SEQ ID NO: 1863177 - DNA, 15 bp, Homo sapiens
tcacctggggtcccc

SEQ ID NO: 1863178 - DNA, 15 bp, Homo sapiens
cacctggggtcccct

SEQ ID NO: 1863179 - DNA, 15 bp, Homo sapiens
acctggggtcccctg

SEQ ID NO: 1863180 - DNA, 15 bp, Homo sapiens
cctggggtcccctgg

SEQ ID NO: 1863181 - DNA, 15 bp, Homo sapiens
ctggggtcccctggg

SEQ ID NO: 1863182 - DNA, 15 bp, Homo sapiens
tggggtcccctggga

SEQ ID NO: 1863183 - DNA, 15 bp, Homo sapiens
ggggtcccctgggat

SEQ ID NO: 1863184 - DNA, 15 bp, Homo sapiens
gggtcccctgggatc

SEQ ID NO: 1863185 - DNA, 15 bp, Homo sapiens
ggtcccctgggatcc

SEQ ID NO: 1863186 - DNA, 15 bp, Homo sapiens
gtcccctgggatcca

SEQ ID NO: 1863187 - DNA, 15 bp, Homo sapiens
tcccctgggatccat

SEQ ID NO: 1863188 - DNA, 15 bp, Homo sapiens
cccctgggatccatt

SEQ ID NO: 1863189 - DNA, 15 bp, Homo sapiens
ccctgggatccattc

SEQ ID NO: 1863190 - DNA, 15 bp, Homo sapiens
cctgggatccattca

SEQ ID NO: 1863191 - DNA, 15 bp, Homo sapiens
ctgggatccattcag

SEQ ID NO: 1863192 - DNA, 15 bp, Homo sapiens
tgggatccattcagc

SEQ ID NO: 1863193 - DNA, 15 bp, Homo sapiens
gggatccattcagca

SEQ ID NO: 1863194 - DNA, 15 bp, Homo sapiens
ggatccattcagcaa

SEQ ID NO: 1863195 - DNA, 15 bp, Homo sapiens
gatccattcagcaag

SEQ ID NO: 1863196 - DNA, 15 bp, Homo sapiens
atccattcagcaaga

SEQ ID NO: 1863197 - DNA, 15 bp, Homo sapiens
tccattcagcaagaa

SEQ ID NO: 1863198 - DNA, 15 bp, Homo sapiens
ccattcagcaagaag

SEQ ID NO: 1863199 - DNA, 15 bp, Homo sapiens
cattcagcaagaagg

SEQ ID NO: 1863200 - DNA, 15 bp, Homo sapiens
attcagcaagaaggt

SEQ ID NO: 1863201 - DNA, 15 bp, Homo sapiens
ttcagcaagaaggtt

SEQ ID NO: 1863202 - DNA, 15 bp, Homo sapiens
tcagcaagaaggttc

SEQ ID NO: 1863203 - DNA, 15 bp, Homo sapiens
cagcaagaaggttca

SEQ ID NO: 1863204 - DNA, 15 bp, Homo sapiens
agcaagaaggttcag

SEQ ID NO: 1863205 - DNA, 15 bp, Homo sapiens
gcaagaaggttcagc

SEQ ID NO: 1863206 - DNA, 15 bp, Homo sapiens
caagaaggttcagcc

SEQ ID NO: 1863207 - DNA, 15 bp, Homo sapiens
aagaaggttcagcca

SEQ ID NO: 1863208 - DNA, 15 bp, Homo sapiens
agaaggttcagccac

SEQ ID NO: 1863209 - DNA, 15 bp, Homo sapiens
gaaggttcagccaca

SEQ ID NO: 1863210 - DNA, 15 bp, Homo sapiens
aaggttcagccacac

SEQ ID NO: 1863211 - DNA, 15 bp, Homo sapiens
aggttcagccacacc

SEQ ID NO: 1863212 - DNA, 15 bp, Homo sapiens
ggttcagccacacca

SEQ ID NO: 1863213 - DNA, 15 bp, Homo sapiens
gttcagccacaccaa

SEQ ID NO: 1863214 - DNA, 15 bp, Homo sapiens
ttcagccacaccaag

SEQ ID NO: 1863215 - DNA, 15 bp, Homo sapiens
tcagccacaccaagc

SEQ ID NO: 1863216 - DNA, 15 bp, Homo sapiens
cagccacaccaagcc

SEQ ID NO: 1863217 - DNA, 15 bp, Homo sapiens
agccacaccaagccc

SEQ ID NO: 1863218 - DNA, 15 bp, Homo sapiens
gccacaccaagccct

SEQ ID NO: 1863219 - DNA, 15 bp, Homo sapiens
ccacaccaagccctg

SEQ ID NO: 1863220 - DNA, 15 bp, Homo sapiens
cacaccaagccctgt

SEQ ID NO: 1863221 - DNA, 15 bp, Homo sapiens
acaccaagccctgtt

SEQ ID NO: 1863222 - DNA, 15 bp, Homo sapiens
caccaagccctgttc

SEQ ID NO: 1863223 - DNA, 15 bp, Homo sapiens
accaagccctgttcc

SEQ ID NO: 1863224 - DNA, 15 bp, Homo sapiens
ccaagccctgttcct

SEQ ID NO: 1863225 - DNA, 15 bp, Homo sapiens
caagccctgttcctt

SEQ ID NO: 1863226 - DNA, 15 bp, Homo sapiens
aagccctgttcctta

SEQ ID NO: 1863227 - DNA, 15 bp, Homo sapiens
agccctgttccttaa

SEQ ID NO: 1863228 - DNA, 15 bp, Homo sapiens
gccctgttccttaag

SEQ ID NO: 1863229 - DNA, 15 bp, Homo sapiens
ccctgttccttaagc

SEQ ID NO: 1863230 - DNA, 15 bp, Homo sapiens
cctgttccttaagcc

SEQ ID NO: 1863231 - DNA, 15 bp, Homo sapiens
ctgttccttaagccc

SEQ ID NO: 1863232 - DNA, 15 bp, Homo sapiens
tgttccttaagccca

SEQ ID NO: 1863233 - DNA, 15 bp, Homo sapiens
gttccttaagcccag

SEQ ID NO: 1863234 - DNA, 15 bp, Homo sapiens
ttccttaagcccagg

SEQ ID NO: 1863235 - DNA, 15 bp, Homo sapiens
tccttaagcccagga

SEQ ID NO: 1863236 - DNA, 15 bp, Homo sapiens
ccttaagcccaggag

SEQ ID NO: 1863237 - DNA, 15 bp, Homo sapiens
cttaagcccaggaga

SEQ ID NO: 1863238 - DNA, 15 bp, Homo sapiens
ttaagcccaggagac

SEQ ID NO: 1863239 - DNA, 15 bp, Homo sapiens
taagcccaggagaca

SEQ ID NO: 1863240 - DNA, 15 bp, Homo sapiens
aagcccaggagacat

SEQ ID NO: 1863241 - DNA, 15 bp, Homo sapiens
agcccaggagacata

SEQ ID NO: 1863242 - DNA, 15 bp, Homo sapiens
gcccaggagacataa

SEQ ID NO: 1863243 - DNA, 15 bp, Homo sapiens
cccaggagacataaa

SEQ ID NO: 1863244 - DNA, 15 bp, Homo sapiens
ccaggagacataaat

SEQ ID NO: 1863245 - DNA, 15 bp, Homo sapiens
caggagacataaatc

SEQ ID NO: 1863246 - DNA, 15 bp, Homo sapiens
aggagacataaatcc

SEQ ID NO: 1863247 - DNA, 15 bp, Homo sapiens
ggagacataaatcca

SEQ ID NO: 1863248 - DNA, 15 bp, Homo sapiens
gagacataaatccac

SEQ ID NO: 1863249 - DNA, 15 bp, Homo sapiens
agacataaatccaca

SEQ ID NO: 1863250 - DNA, 15 bp, Homo sapiens
gacataaatccacaa

SEQ ID NO: 1863251 - DNA, 15 bp, Homo sapiens
acataaatccacaaa

SEQ ID NO: 1863252 - DNA, 15 bp, Homo sapiens
cataaatccacaaag

SEQ ID NO: 1863253 - DNA, 15 bp, Homo sapiens
ataaatccacaaagc

SEQ ID NO: 1863254 - DNA, 15 bp, Homo sapiens
taaatccacaaagcc

SEQ ID NO: 1863255 - DNA, 15 bp, Homo sapiens
aaatccacaaagcct

SEQ ID NO: 1863256 - DNA, 15 bp, Homo sapiens
aatccacaaagccta

SEQ ID NO: 1863257 - DNA, 15 bp, Homo sapiens
atccacaaagcctac

SEQ ID NO: 1863258 - DNA, 15 bp, Homo sapiens
tccacaaagcctaca

SEQ ID NO: 1863259 - DNA, 15 bp, Homo sapiens
ccacaaagcctacag

SEQ ID NO: 1863260 - DNA, 15 bp, Homo sapiens
cacaaagcctacagg

SEQ ID NO: 1863261 - DNA, 15 bp, Homo sapiens
acaaagcctacagga

SEQ ID NO: 1863262 - DNA, 15 bp, Homo sapiens
caaagcctacaggag

SEQ ID NO: 1863263 - DNA, 15 bp, Homo sapiens
aaagcctacaggaga

SEQ ID NO: 1863264 - DNA, 15 bp, Homo sapiens
aagcctacaggagag

SEQ ID NO: 1863265 - DNA, 15 bp, Homo sapiens
agcctacaggagaga

SEQ ID NO: 1863266 - DNA, 15 bp, Homo sapiens
gcctacaggagagat

SEQ ID NO: 1863267 - DNA, 15 bp, Homo sapiens
cctacaggagagatc

SEQ ID NO: 1863268 - DNA, 15 bp, Homo sapiens
ctacaggagagatcc

SEQ ID NO: 1863269 - DNA, 15 bp, Homo sapiens
tacaggagagatccc

SEQ ID NO: 1863270 - DNA, 15 bp, Homo sapiens
acaggagagatccct

SEQ ID NO: 1863271 - DNA, 15 bp, Homo sapiens
caggagagatccctg

SEQ ID NO: 1863272 - DNA, 15 bp, Homo sapiens
aggagagatccctga

SEQ ID NO: 1863273 - DNA, 15 bp, Homo sapiens
ggagagatccctgag

SEQ ID NO: 1863274 - DNA, 15 bp, Homo sapiens
gagagatccctgagg

SEQ ID NO: 1863275 - DNA, 15 bp, Homo sapiens
agagatccctgagga

SEQ ID NO: 1863276 - DNA, 15 bp, Homo sapiens
gagatccctgaggaa

SEQ ID NO: 1863277 - DNA, 15 bp, Homo sapiens
agatccctgaggaaa

SEQ ID NO: 1863278 - DNA, 15 bp, Homo sapiens
gatccctgaggaaag

SEQ ID NO: 1863279 - DNA, 15 bp, Homo sapiens
atccctgaggaaagt

SEQ ID NO: 1863280 - DNA, 15 bp, Homo sapiens
tccctgaggaaagtg

SEQ ID NO: 1863281 - DNA, 15 bp, Homo sapiens
ccctgaggaaagtgg

SEQ ID NO: 1863282 - DNA, 15 bp, Homo sapiens
cctgaggaaagtggc

SEQ ID NO: 1863283 - DNA, 15 bp, Homo sapiens
ctgaggaaagtggct

SEQ ID NO: 1863284 - DNA, 15 bp, Homo sapiens
tgaggaaagtggcta

SEQ ID NO: 1863285 - DNA, 15 bp, Homo sapiens
gaggaaagtggctat

SEQ ID NO: 1863286 - DNA, 15 bp, Homo sapiens
aggaaagtggctatt

SEQ ID NO: 1863287 - DNA, 15 bp, Homo sapiens
ggaaagtggctattc

SEQ ID NO: 1863288 - DNA, 15 bp, Homo sapiens
gaaagtggctattct

SEQ ID NO: 1863289 - DNA, 15 bp, Homo sapiens
aaagtggctattctg

SEQ ID NO: 1863290 - DNA, 15 bp, Homo sapiens
aagtggctattctgg

SEQ ID NO: 1863291 - DNA, 15 bp, Homo sapiens
agtggctattctgga

SEQ ID NO: 1863292 - DNA, 15 bp, Homo sapiens
gtggctattctggat

SEQ ID NO: 1863293 - DNA, 15 bp, Homo sapiens
tggctattctggatg

SEQ ID NO: 1863294 - DNA, 15 bp, Homo sapiens
ggctattctggatgg

SEQ ID NO: 1863295 - DNA, 15 bp, Homo sapiens
gctattctggatggg

SEQ ID NO: 1863296 - DNA, 15 bp, Homo sapiens
ctattctggatgggg

SEQ ID NO: 1863297 - DNA, 15 bp, Homo sapiens
tattctggatggggc

SEQ ID NO: 1863298 - DNA, 15 bp, Homo sapiens
attctggatggggcc

SEQ ID NO: 1863299 - DNA, 15 bp, Homo sapiens
ttctggatggggcca

SEQ ID NO: 1863300 - DNA, 15 bp, Homo sapiens
tctggatggggccag

SEQ ID NO: 1863301 - DNA, 15 bp, Homo sapiens
ctggatggggccaga

SEQ ID NO: 1863302 - DNA, 15 bp, Homo sapiens
tggatggggccagaa

SEQ ID NO: 1863303 - DNA, 15 bp, Homo sapiens
ggatggggccagaag

SEQ ID NO: 1863304 - DNA, 15 bp, Homo sapiens
gatggggccagaagg

SEQ ID NO: 1863305 - DNA, 15 bp, Homo sapiens
atggggccagaaggt

SEQ ID NO: 1863306 - DNA, 15 bp, Homo sapiens
tggggccagaaggtt

SEQ ID NO: 1863307 - DNA, 15 bp, Homo sapiens
ggggccagaaggttc

SEQ ID NO: 1863308 - DNA, 15 bp, Homo sapiens
gggccagaaggttct

SEQ ID NO: 1863309 - DNA, 15 bp, Homo sapiens
ggccagaaggttctt

SEQ ID NO: 1863310 - DNA, 15 bp, Homo sapiens
gccagaaggttcttt

SEQ ID NO: 1863311 - DNA, 15 bp, Homo sapiens
ccagaaggttctttc

SEQ ID NO: 1863312 - DNA, 15 bp, Homo sapiens
cagaaggttctttct

SEQ ID NO: 1863313 - DNA, 15 bp, Homo sapiens
agaaggttctttctc

SEQ ID NO: 1863314 - DNA, 15 bp, Homo sapiens
gaaggttctttctca

SEQ ID NO: 1863315 - DNA, 15 bp, Homo sapiens
aaggttctttctcaa

SEQ ID NO: 1863316 - DNA, 15 bp, Homo sapiens
aggttctttctcaag

SEQ ID NO: 1863317 - DNA, 15 bp, Homo sapiens
ggttctttctcaagg

SEQ ID NO: 1863318 - DNA, 15 bp, Homo sapiens
gttctttctcaaggt

SEQ ID NO: 1863319 - DNA, 15 bp, Homo sapiens
ttctttctcaaggtc

SEQ ID NO: 1863320 - DNA, 15 bp, Homo sapiens
tctttctcaaggtca

SEQ ID NO: 1863321 - DNA, 15 bp, Homo sapiens
ctttctcaaggtcaa

SEQ ID NO: 1863322 - DNA, 15 bp, Homo sapiens
tttctcaaggtcaaa

SEQ ID NO: 1863323 - DNA, 15 bp, Homo sapiens
ttctcaaggtcaaag

SEQ ID NO: 1863324 - DNA, 15 bp, Homo sapiens
tctcaaggtcaaagc

SEQ ID NO: 1863325 - DNA, 15 bp, Homo sapiens
ctcaaggtcaaagct

SEQ ID NO: 1863326 - DNA, 15 bp, Homo sapiens
tcaaggtcaaagctc

SEQ ID NO: 1863327 - DNA, 15 bp, Homo sapiens
caaggtcaaagctct

SEQ ID NO: 1863328 - DNA, 15 bp, Homo sapiens
aaggtcaaagctctc

SEQ ID NO: 1863329 - DNA, 15 bp, Homo sapiens
aggtcaaagctctcg

SEQ ID NO: 1863330 - DNA, 15 bp, Homo sapiens
ggtcaaagctctcgg

SEQ ID NO: 1863331 - DNA, 15 bp, Homo sapiens
gtcaaagctctcgga

SEQ ID NO: 1863332 - DNA, 15 bp, Homo sapiens
tcaaagctctcggag

SEQ ID NO: 1863333 - DNA, 15 bp, Homo sapiens
caaagctctcggaga

SEQ ID NO: 1863334 - DNA, 15 bp, Homo sapiens
aaagctctcggagac

SEQ ID NO: 1863335 - DNA, 15 bp, Homo sapiens
aagctctcggagacc

SEQ ID NO: 1863336 - DNA, 15 bp, Homo sapiens
agctctcggagacct

SEQ ID NO: 1863337 - DNA, 15 bp, Homo sapiens
gctctcggagacctg

SEQ ID NO: 1863338 - DNA, 15 bp, Homo sapiens
ctctcggagacctga

SEQ ID NO: 1863339 - DNA, 15 bp, Homo sapiens
tctcggagacctgat

SEQ ID NO: 1863340 - DNA, 15 bp, Homo sapiens
ctcggagacctgatg

SEQ ID NO: 1863341 - DNA, 15 bp, Homo sapiens
tcggagacctgatga

SEQ ID NO: 1863342 - DNA, 15 bp, Homo sapiens
cggagacctgatgag

SEQ ID NO: 1863343 - DNA, 15 bp, Homo sapiens
ggagacctgatgagg

SEQ ID NO: 1863344 - DNA, 15 bp, Homo sapiens
gagacctgatgaggc

SEQ ID NO: 1863345 - DNA, 15 bp, Homo sapiens
agacctgatgaggcc

SEQ ID NO: 1863346 - DNA, 15 bp, Homo sapiens
gacctgatgaggccc

SEQ ID NO: 1863347 - DNA, 15 bp, Homo sapiens
acctgatgaggccct

SEQ ID NO: 1863348 - DNA, 15 bp, Homo sapiens
cctgatgaggccctg

SEQ ID NO: 1863349 - DNA, 15 bp, Homo sapiens
ctgatgaggccctgc

SEQ ID NO: 1863350 - DNA, 15 bp, Homo sapiens
tgatgaggccctgcc

SEQ ID NO: 1863351 - DNA, 15 bp, Homo sapiens
gatgaggccctgccc

SEQ ID NO: 1863352 - DNA, 15 bp, Homo sapiens
atgaggccctgcccc

SEQ ID NO: 1863353 - DNA, 15 bp, Homo sapiens
tgaggccctgcccct

SEQ ID NO: 1863354 - DNA, 15 bp, Homo sapiens
gaggccctgcccctc

SEQ ID NO: 1863355 - DNA, 15 bp, Homo sapiens
aggccctgcccctca

SEQ ID NO: 1863356 - DNA, 15 bp, Homo sapiens
ggccctgcccctcaa

SEQ ID NO: 1863357 - DNA, 15 bp, Homo sapiens
gccctgcccctcaag

SEQ ID NO: 1863358 - DNA, 15 bp, Homo sapiens
ccctgcccctcaagc

SEQ ID NO: 1863359 - DNA, 15 bp, Homo sapiens
cctgcccctcaagct

SEQ ID NO: 1863360 - DNA, 15 bp, Homo sapiens
ctgcccctcaagctt

SEQ ID NO: 1863361 - DNA, 15 bp, Homo sapiens
tgcccctcaagcttc

SEQ ID NO: 1863362 - DNA, 15 bp, Homo sapiens
gcccctcaagcttct

SEQ ID NO: 1863363 - DNA, 15 bp, Homo sapiens
cccctcaagcttctg

SEQ ID NO: 1863364 - DNA, 15 bp, Homo sapiens
ccctcaagcttctgt

SEQ ID NO: 1863365 - DNA, 15 bp, Homo sapiens
cctcaagcttctgtc

SEQ ID NO: 1863366 - DNA, 15 bp, Homo sapiens
ctcaagcttctgtcc

SEQ ID NO: 1863367 - DNA, 15 bp, Homo sapiens
tcaagcttctgtcct

SEQ ID NO: 1863368 - DNA, 15 bp, Homo sapiens
caagcttctgtcctt

SEQ ID NO: 1863369 - DNA, 15 bp, Homo sapiens
aagcttctgtccttt

SEQ ID NO: 1863370 - DNA, 15 bp, Homo sapiens
agcttctgtcctttc

SEQ ID NO: 1863371 - DNA, 15 bp, Homo sapiens
gcttctgtcctttcc

SEQ ID NO: 1863372 - DNA, 15 bp, Homo sapiens
cttctgtcctttcca

SEQ ID NO: 1863373 - DNA, 15 bp, Homo sapiens
ttctgtcctttccac

SEQ ID NO: 1863374 - DNA, 15 bp, Homo sapiens
tctgtcctttccaca

SEQ ID NO: 1863375 - DNA, 15 bp, Homo sapiens
ctgtcctttccacag

SEQ ID NO: 1863376 - DNA, 15 bp, Homo sapiens
tgtcctttccacagc

SEQ ID NO: 1863377 - DNA, 15 bp, Homo sapiens
gtcctttccacagcc

SEQ ID NO: 1863378 - DNA, 15 bp, Homo sapiens
tcctttccacagccc

SEQ ID NO: 1863379 - DNA, 15 bp, Homo sapiens
cctttccacagccct

SEQ ID NO: 1863380 - DNA, 15 bp, Homo sapiens
ctttccacagccctg

SEQ ID NO: 1863381 - DNA, 15 bp, Homo sapiens
tttccacagccctgc

SEQ ID NO: 1863382 - DNA, 15 bp, Homo sapiens
ttccacagccctgca

SEQ ID NO: 1863383 - DNA, 15 bp, Homo sapiens
tccacagccctgcag

SEQ ID NO: 1863384 - DNA, 15 bp, Homo sapiens
ccacagccctgcagc

SEQ ID NO: 1863385 - DNA, 15 bp, Homo sapiens
cacagccctgcagca

SEQ ID NO: 1863386 - DNA, 15 bp, Homo sapiens
acagccctgcagcat

SEQ ID NO: 1863387 - DNA, 15 bp, Homo sapiens
cagccctgcagcatt

SEQ ID NO: 1863388 - DNA, 15 bp, Homo sapiens
agccctgcagcatta

SEQ ID NO: 1863389 - DNA, 15 bp, Homo sapiens
gccctgcagcattat

SEQ ID NO: 1863390 - DNA, 15 bp, Homo sapiens
ccctgcagcattatt

SEQ ID NO: 1863391 - DNA, 15 bp, Homo sapiens
cctgcagcattattt

SEQ ID NO: 1863392 - DNA, 15 bp, Homo sapiens
ctgcagcattatttc

SEQ ID NO: 1863393 - DNA, 15 bp, Homo sapiens
tgcagcattatttcc

SEQ ID NO: 1863394 - DNA, 15 bp, Homo sapiens
gcagcattatttcca

SEQ ID NO: 1863395 - DNA, 15 bp, Homo sapiens
cagcattatttccat

SEQ ID NO: 1863396 - DNA, 15 bp, Homo sapiens
agcattatttccata

SEQ ID NO: 1863397 - DNA, 15 bp, Homo sapiens
gcattatttccataa

SEQ ID NO: 1863398 - DNA, 15 bp, Homo sapiens
cattatttccataat

SEQ ID NO: 1863399 - DNA, 15 bp, Homo sapiens
attatttccataatg

SEQ ID NO: 1863400 - DNA, 15 bp, Homo sapiens
ttatttccataatgt

SEQ ID NO: 1863401 - DNA, 15 bp, Homo sapiens
tatttccataatgtt

SEQ ID NO: 1863402 - DNA, 15 bp, Homo sapiens
atttccataatgtta

SEQ ID NO: 1863403 - DNA, 15 bp, Homo sapiens
tttccataatgttat

SEQ ID NO: 1863404 - DNA, 15 bp, Homo sapiens
ttccataatgttatt

SEQ ID NO: 1863405 - DNA, 15 bp, Homo sapiens
tccataatgttatta

SEQ ID NO: 1863406 - DNA, 15 bp, Homo sapiens
ccataatgttattaa

SEQ ID NO: 1863407 - DNA, 15 bp, Homo sapiens
cataatgttattaaa

SEQ ID NO: 1863408 - DNA, 15 bp, Homo sapiens
ataatgttattaaaa

SEQ ID NO: 1863409 - DNA, 15 bp, Homo sapiens
taatgttattaaaaa

SEQ ID NO: 1863410 - DNA, 15 bp, Homo sapiens
aatgttattaaaaac

SEQ ID NO: 1863411 - DNA, 15 bp, Homo sapiens
atgttattaaaaacc

SEQ ID NO: 1863412 - DNA, 15 bp, Homo sapiens
tgttattaaaaacca

SEQ ID NO: 1863413 - DNA, 15 bp, Homo sapiens
gttattaaaaaccaa

SEQ ID NO: 1863414 - DNA, 15 bp, Homo sapiens
ttattaaaaaccaat

SEQ ID NO: 1863415 - DNA, 15 bp, Homo sapiens
tattaaaaaccaatg

SEQ ID NO: 1863416 - DNA, 15 bp, Homo sapiens
attaaaaaccaatgt

SEQ ID NO: 1863417 - DNA, 15 bp, Homo sapiens
ttaaaaaccaatgtg

SEQ ID NO: 1863418 - DNA, 15 bp, Homo sapiens
taaaaaccaatgtgt

SEQ ID NO: 1863419 - DNA, 15 bp, Homo sapiens
aaaaaccaatgtgtg

SEQ ID NO: 1863420 - DNA, 15 bp, Homo sapiens
aaaaccaatgtgtgc

SEQ ID NO: 1863421 - DNA, 15 bp, Homo sapiens
aaaccaatgtgtgct

SEQ ID NO: 1863422 - DNA, 15 bp, Homo sapiens
aaccaatgtgtgctg

SEQ ID NO: 1863423 - DNA, 15 bp, Homo sapiens
accaatgtgtgctgg

SEQ ID NO: 1863424 - DNA, 15 bp, Homo sapiens
ccaatgtgtgctggc

SEQ ID NO: 1863425 - DNA, 15 bp, Homo sapiens
caatgtgtgctggcc

SEQ ID NO: 1863426 - DNA, 15 bp, Homo sapiens
aatgtgtgctggcca

SEQ ID NO: 1863427 - DNA, 15 bp, Homo sapiens
atgtgtgctggccag

SEQ ID NO: 1863428 - DNA, 15 bp, Homo sapiens
tgtgtgctggccaga

SEQ ID NO: 1863429 - DNA, 15 bp, Homo sapiens
gtgtgctggccagat

SEQ ID NO: 1863430 - DNA, 15 bp, Homo sapiens
tgtgctggccagatg

SEQ ID NO: 1863431 - DNA, 15 bp, Homo sapiens
gtgctggccagatga

SEQ ID NO: 1863432 - DNA, 15 bp, Homo sapiens
tgctggccagatgag

SEQ ID NO: 1863433 - DNA, 15 bp, Homo sapiens
gctggccagatgagt

SEQ ID NO: 1863434 - DNA, 15 bp, Homo sapiens
ctggccagatgagtg

SEQ ID NO: 1863435 - DNA, 15 bp, Homo sapiens
tggccagatgagtga

SEQ ID NO: 1863436 - DNA, 15 bp, Homo sapiens
ggccagatgagtgac

SEQ ID NO: 1863437 - DNA, 15 bp, Homo sapiens
gccagatgagtgaca

SEQ ID NO: 1863438 - DNA, 15 bp, Homo sapiens
ccagatgagtgacac

SEQ ID NO: 1863439 - DNA, 15 bp, Homo sapiens
cagatgagtgacact

SEQ ID NO: 1863440 - DNA, 15 bp, Homo sapiens
agatgagtgacactt

SEQ ID NO: 1863441 - DNA, 15 bp, Homo sapiens
gatgagtgacacttc

SEQ ID NO: 1863442 - DNA, 15 bp, Homo sapiens
atgagtgacacttcc

SEQ ID NO: 1863443 - DNA, 15 bp, Homo sapiens
tgagtgacacttccc

SEQ ID NO: 1863444 - DNA, 15 bp, Homo sapiens
gagtgacacttccca

SEQ ID NO: 1863445 - DNA, 15 bp, Homo sapiens
agtgacacttcccag

SEQ ID NO: 1863446 - DNA, 15 bp, Homo sapiens
gtgacacttcccagt

SEQ ID NO: 1863447 - DNA, 15 bp, Homo sapiens
tgacacttcccagtg

SEQ ID NO: 1863448 - DNA, 15 bp, Homo sapiens
gacacttcccagtga

SEQ ID NO: 1863449 - DNA, 15 bp, Homo sapiens
acacttcccagtgat

SEQ ID NO: 1863450 - DNA, 15 bp, Homo sapiens
cacttcccagtgatg

SEQ ID NO: 1863451 - DNA, 15 bp, Homo sapiens
acttcccagtgatgg

SEQ ID NO: 1863452 - DNA, 15 bp, Homo sapiens
cttcccagtgatggg

SEQ ID NO: 1863453 - DNA, 15 bp, Homo sapiens
ttcccagtgatgggg

SEQ ID NO: 1863454 - DNA, 15 bp, Homo sapiens
tcccagtgatggggc

SEQ ID NO: 1863455 - DNA, 15 bp, Homo sapiens
cccagtgatggggct

SEQ ID NO: 1863456 - DNA, 15 bp, Homo sapiens
ccagtgatggggctc

SEQ ID NO: 1863457 - DNA, 15 bp, Homo sapiens
cagtgatggggctcg

SEQ ID NO: 1863458 - DNA, 15 bp, Homo sapiens
agtgatggggctcgg

SEQ ID NO: 1863459 - DNA, 15 bp, Homo sapiens
gtgatggggctcggc

SEQ ID NO: 1863460 - DNA, 15 bp, Homo sapiens
tgatggggctcggct

SEQ ID NO: 1863461 - DNA, 15 bp, Homo sapiens
gatggggctcggctc

SEQ ID NO: 1863462 - DNA, 15 bp, Homo sapiens
atggggctcggctct

SEQ ID NO: 1863463 - DNA, 15 bp, Homo sapiens
tggggctcggctctg

SEQ ID NO: 1863464 - DNA, 15 bp, Homo sapiens
ggggctcggctctgc

SEQ ID NO: 1863465 - DNA, 15 bp, Homo sapiens
gggctcggctctgct

SEQ ID NO: 1863466 - DNA, 15 bp, Homo sapiens
ggctcggctctgctc

SEQ ID NO: 1863467 - DNA, 15 bp, Homo sapiens
gctcggctctgctcc

SEQ ID NO: 1863468 - DNA, 15 bp, Homo sapiens
ctcggctctgctcct

SEQ ID NO: 1863469 - DNA, 15 bp, Homo sapiens
tcggctctgctcctc

SEQ ID NO: 1863470 - DNA, 15 bp, Homo sapiens
cggctctgctcctcc

SEQ ID NO: 1863471 - DNA, 15 bp, Homo sapiens
ggctctgctcctcca

SEQ ID NO: 1863472 - DNA, 15 bp, Homo sapiens
gctctgctcctccag

SEQ ID NO: 1863473 - DNA, 15 bp, Homo sapiens
ctctgctcctccagg

SEQ ID NO: 1863474 - DNA, 15 bp, Homo sapiens
tctgctcctccaggc

SEQ ID NO: 1863475 - DNA, 15 bp, Homo sapiens
ctgctcctccaggca

SEQ ID NO: 1863476 - DNA, 15 bp, Homo sapiens
tgctcctccaggcat

SEQ ID NO: 1863477 - DNA, 15 bp, Homo sapiens
gctcctccaggcatg

SEQ ID NO: 1863478 - DNA, 15 bp, Homo sapiens
ctcctccaggcatgg

SEQ ID NO: 1863479 - DNA, 15 bp, Homo sapiens
tcctccaggcatgga

SEQ ID NO: 1863480 - DNA, 15 bp, Homo sapiens
cctccaggcatggag

SEQ ID NO: 1863481 - DNA, 15 bp, Homo sapiens
ctccaggcatggaga

SEQ ID NO: 1863482 - DNA, 15 bp, Homo sapiens
tccaggcatggagaa

SEQ ID NO: 1863483 - DNA, 15 bp, Homo sapiens
ccaggcatggagaac

SEQ ID NO: 1863484 - DNA, 15 bp, Homo sapiens
caggcatggagaact

SEQ ID NO: 1863485 - DNA, 15 bp, Homo sapiens
aggcatggagaactt

SEQ ID NO: 1863486 - DNA, 15 bp, Homo sapiens
ggcatggagaacttg

SEQ ID NO: 1863487 - DNA, 15 bp, Homo sapiens
gcatggagaacttgt

SEQ ID NO: 1863488 - DNA, 15 bp, Homo sapiens
catggagaacttgtt

SEQ ID NO: 1863489 - DNA, 15 bp, Homo sapiens
atggagaacttgttc

SEQ ID NO: 1863490 - DNA, 15 bp, Homo sapiens
tggagaacttgttca

SEQ ID NO: 1863491 - DNA, 15 bp, Homo sapiens
ggagaacttgttcaa

SEQ ID NO: 1863492 - DNA, 15 bp, Homo sapiens
gagaacttgttcaat

SEQ ID NO: 1863493 - DNA, 15 bp, Homo sapiens
agaacttgttcaatt

SEQ ID NO: 1863494 - DNA, 15 bp, Homo sapiens
gaacttgttcaatta

SEQ ID NO: 1863495 - DNA, 15 bp, Homo sapiens
aacttgttcaattat

SEQ ID NO: 1863496 - DNA, 15 bp, Homo sapiens
acttgttcaattatg

SEQ ID NO: 1863497 - DNA, 15 bp, Homo sapiens
cttgttcaattatgt

SEQ ID NO: 1863498 - DNA, 15 bp, Homo sapiens
ttgttcaattatgtg

SEQ ID NO: 1863499 - DNA, 15 bp, Homo sapiens
tgttcaattatgtgc

SEQ ID NO: 1863500 - DNA, 15 bp, Homo sapiens
gttcaattatgtgcc

SEQ ID NO: 1863501 - DNA, 15 bp, Homo sapiens
ttcaattatgtgcca

SEQ ID NO: 1863502 - DNA, 15 bp, Homo sapiens
tcaattatgtgccac

SEQ ID NO: 1863503 - DNA, 15 bp, Homo sapiens
caattatgtgccacc

SEQ ID NO: 1863504 - DNA, 15 bp, Homo sapiens
aattatgtgccaccc

SEQ ID NO: 1863505 - DNA, 15 bp, Homo sapiens
attatgtgccacccc

SEQ ID NO: 1863506 - DNA, 15 bp, Homo sapiens
ttatgtgccaccccg

SEQ ID NO: 1863507 - DNA, 15 bp, Homo sapiens
tatgtgccaccccgt

SEQ ID NO: 1863508 - DNA, 15 bp, Homo sapiens
atgtgccaccccgtg

SEQ ID NO: 1863509 - DNA, 15 bp, Homo sapiens
tgtgccaccccgtga

SEQ ID NO: 1863510 - DNA, 15 bp, Homo sapiens
gtgccaccccgtgat

SEQ ID NO: 1863511 - DNA, 15 bp, Homo sapiens
tgccaccccgtgatg

SEQ ID NO: 1863512 - DNA, 15 bp, Homo sapiens
gccaccccgtgatgg

SEQ ID NO: 1863513 - DNA, 15 bp, Homo sapiens
ccaccccgtgatggg

SEQ ID NO: 1863514 - DNA, 15 bp, Homo sapiens
caccccgtgatgggc

SEQ ID NO: 1863515 - DNA, 15 bp, Homo sapiens
accccgtgatgggcc

SEQ ID NO: 1863516 - DNA, 15 bp, Homo sapiens
ccccgtgatgggccc

SEQ ID NO: 1863517 - DNA, 15 bp, Homo sapiens
cccgtgatgggccca

SEQ ID NO: 1863518 - DNA, 15 bp, Homo sapiens
ccgtgatgggcccaa

SEQ ID NO: 1863519 - DNA, 15 bp, Homo sapiens
cgtgatgggcccaat

SEQ ID NO: 1863520 - DNA, 15 bp, Homo sapiens
gtgatgggcccaatc

SEQ ID NO: 1863521 - DNA, 15 bp, Homo sapiens
tgatgggcccaatca

SEQ ID NO: 1863522 - DNA, 15 bp, Homo sapiens
gatgggcccaatcac

SEQ ID NO: 1863523 - DNA, 15 bp, Homo sapiens
atgggcccaatcaca

SEQ ID NO: 1863524 - DNA, 15 bp, Homo sapiens
tgggcccaatcacag

SEQ ID NO: 1863525 - DNA, 15 bp, Homo sapiens
gggcccaatcacagt

SEQ ID NO: 1863526 - DNA, 15 bp, Homo sapiens
ggcccaatcacagta

SEQ ID NO: 1863527 - DNA, 15 bp, Homo sapiens
gcccaatcacagtac

SEQ ID NO: 1863528 - DNA, 15 bp, Homo sapiens
cccaatcacagtaca

SEQ ID NO: 1863529 - DNA, 15 bp, Homo sapiens
ccaatcacagtacac

SEQ ID NO: 1863530 - DNA, 15 bp, Homo sapiens
caatcacagtacaca

SEQ ID NO: 1863531 - DNA, 15 bp, Homo sapiens
aatcacagtacacac

SEQ ID NO: 1863532 - DNA, 15 bp, Homo sapiens
atcacagtacacaca

SEQ ID NO: 1863533 - DNA, 15 bp, Homo sapiens
tcacagtacacacat

SEQ ID NO: 1863534 - DNA, 15 bp, Homo sapiens
cacagtacacacatt

SEQ ID NO: 1863535 - DNA, 15 bp, Homo sapiens
acagtacacacatta

SEQ ID NO: 1863536 - DNA, 15 bp, Homo sapiens
cagtacacacattag

SEQ ID NO: 1863537 - DNA, 15 bp, Homo sapiens
agtacacacattagc

SEQ ID NO: 1863538 - DNA, 15 bp, Homo sapiens
gtacacacattagct

SEQ ID NO: 1863539 - DNA, 15 bp, Homo sapiens
tacacacattagctt

SEQ ID NO: 1863540 - DNA, 15 bp, Homo sapiens
acacacattagcttc

SEQ ID NO: 1863541 - DNA, 15 bp, Homo sapiens
cacacattagcttct

SEQ ID NO: 1863542 - DNA, 15 bp, Homo sapiens
acacattagcttctg

SEQ ID NO: 1863543 - DNA, 15 bp, Homo sapiens
cacattagcttctga

SEQ ID NO: 1863544 - DNA, 15 bp, Homo sapiens
acattagcttctgat

SEQ ID NO: 1863545 - DNA, 15 bp, Homo sapiens
cattagcttctgatt

SEQ ID NO: 1863546 - DNA, 15 bp, Homo sapiens
attagcttctgatta

SEQ ID NO: 1863547 - DNA, 15 bp, Homo sapiens
ttagcttctgattat

SEQ ID NO: 1863548 - DNA, 15 bp, Homo sapiens
tagcttctgattata

SEQ ID NO: 1863549 - DNA, 15 bp, Homo sapiens
agcttctgattatac

SEQ ID NO: 1863550 - DNA, 15 bp, Homo sapiens
gcttctgattatacc

SEQ ID NO: 1863551 - DNA, 15 bp, Homo sapiens
cttctgattataccc

SEQ ID NO: 1863552 - DNA, 15 bp, Homo sapiens
ttctgattataccct

SEQ ID NO: 1863553 - DNA, 15 bp, Homo sapiens
tctgattataccctt

SEQ ID NO: 1863554 - DNA, 15 bp, Homo sapiens
ctgattatacccttg

SEQ ID NO: 1863555 - DNA, 15 bp, Homo sapiens
tgattatacccttgt

SEQ ID NO: 1863556 - DNA, 15 bp, Homo sapiens
gattatacccttgtt

SEQ ID NO: 1863557 - DNA, 15 bp, Homo sapiens
ctgtcttccacaatg

SEQ ID NO: 1863558 - DNA, 15 bp, Homo sapiens
tgtcttccacaatgg

SEQ ID NO: 1863559 - DNA, 15 bp, Homo sapiens
gtcttccacaatggt

SEQ ID NO: 1863560 - DNA, 15 bp, Homo sapiens
gtttcctgacttttg

SEQ ID NO: 1863561 - DNA, 15 bp, Homo sapiens
tttcctgacttttga

SEQ ID NO: 1863562 - DNA, 15 bp, Homo sapiens
ttcctgacttttgaa

SEQ ID NO: 1863563 - DNA, 15 bp, Homo sapiens
tcctgacttttgaat

SEQ ID NO: 1863564 - DNA, 15 bp, Homo sapiens
cctgacttttgaatg

SEQ ID NO: 1863565 - DNA, 15 bp, Homo sapiens
ctgacttttgaatga

SEQ ID NO: 1863566 - DNA, 15 bp, Homo sapiens
tgacttttgaatgat

SEQ ID NO: 1863567 - DNA, 15 bp, Homo sapiens
gacttttgaatgatc

SEQ ID NO: 1863568 - DNA, 15 bp, Homo sapiens
acttttgaatgatca

SEQ ID NO: 1863569 - DNA, 15 bp, Homo sapiens
cttttgaatgatcac

SEQ ID NO: 1863570 - DNA, 15 bp, Homo sapiens
ttttgaatgatcacc

SEQ ID NO: 1863571 - DNA, 15 bp, Homo sapiens
tttgaatgatcacca

SEQ ID NO: 1863572 - DNA, 15 bp, Homo sapiens
ttgaatgatcaccat

SEQ ID NO: 1863573 - DNA, 15 bp, Homo sapiens
tgaatgatcaccatt

SEQ ID NO: 1863574 - DNA, 15 bp, Homo sapiens
gaatgatcaccattc

SEQ ID NO: 1863575 - DNA, 15 bp, Homo sapiens
aatgatcaccattct

SEQ ID NO: 1863576 - DNA, 15 bp, Homo sapiens
atgatcaccattcta

SEQ ID NO: 1863577 - DNA, 15 bp, Homo sapiens
tgatcaccattctaa

SEQ ID NO: 1863578 - DNA, 15 bp, Homo sapiens
gatcaccattctaac

SEQ ID NO: 1863579 - DNA, 15 bp, Homo sapiens
atcaccattctaact

SEQ ID NO: 1863580 - DNA, 15 bp, Homo sapiens
tcaccattctaactg

SEQ ID NO: 1863581 - DNA, 15 bp, Homo sapiens
caccattctaactgg

SEQ ID NO: 1863582 - DNA, 15 bp, Homo sapiens
accattctaactggt

SEQ ID NO: 1863583 - DNA, 15 bp, Homo sapiens
ccattctaactggtg

SEQ ID NO: 1863584 - DNA, 15 bp, Homo sapiens
cattctaactggtgt

SEQ ID NO: 1863585 - DNA, 15 bp, Homo sapiens
attctaactggtgtg

SEQ ID NO: 1863586 - DNA, 15 bp, Homo sapiens
ttctaactggtgtga

SEQ ID NO: 1863587 - DNA, 15 bp, Homo sapiens
tctaactggtgtgag

SEQ ID NO: 1863588 - DNA, 15 bp, Homo sapiens
ctaactggtgtgaga

SEQ ID NO: 1863589 - DNA, 15 bp, Homo sapiens
taactggtgtgagat

SEQ ID NO: 1863590 - DNA, 15 bp, Homo sapiens
gatggccagtgatga

SEQ ID NO: 1863591 - DNA, 15 bp, Homo sapiens
atggccagtgatgat

SEQ ID NO: 1863592 - DNA, 15 bp, Homo sapiens
tggccagtgatgatg

SEQ ID NO: 1863593 - DNA, 15 bp, Homo sapiens
ggccagtgatgatga

SEQ ID NO: 1863594 - DNA, 15 bp, Homo sapiens
gccagtgatgatgag

SEQ ID NO: 1863595 - DNA, 15 bp, Homo sapiens
ccagtgatgatgagc

SEQ ID NO: 1863596 - DNA, 15 bp, Homo sapiens
cagtgatgatgagca

SEQ ID NO: 1863597 - DNA, 15 bp, Homo sapiens
agtgatgatgagcat

SEQ ID NO: 1863598 - DNA, 15 bp, Homo sapiens
gtgatgatgagcatt

SEQ ID NO: 1863599 - DNA, 15 bp, Homo sapiens
tgatgatgagcattt

SEQ ID NO: 1863600 - DNA, 15 bp, Homo sapiens
gatgatgagcatttt

SEQ ID NO: 1863601 - DNA, 15 bp, Homo sapiens
atgatgagcattttt

SEQ ID NO: 1863602 - DNA, 15 bp, Homo sapiens
tgatgagcatttttt

SEQ ID NO: 1863603 - DNA, 15 bp, Homo sapiens
gatgagcattttttc

SEQ ID NO: 1863604 - DNA, 15 bp, Homo sapiens
atgagcattttttca

SEQ ID NO: 1863605 - DNA, 15 bp, Homo sapiens
tgagcattttttcat

SEQ ID NO: 1863606 - DNA, 15 bp, Homo sapiens
gagcattttttcatg

SEQ ID NO: 1863607 - DNA, 15 bp, Homo sapiens
agcattttttcatgt

SEQ ID NO: 1863608 - DNA, 15 bp, Homo sapiens
gcattttttcatgtg

SEQ ID NO: 1863609 - DNA, 15 bp, Homo sapiens
cattttttcatgtgt

SEQ ID NO: 1863610 - DNA, 15 bp, Homo sapiens
attttttcatgtgtc

SEQ ID NO: 1863611 - DNA, 15 bp, Homo sapiens
ttttttcatgtgtct

SEQ ID NO: 1863612 - DNA, 15 bp, Homo sapiens
tttttcatgtgtctg

SEQ ID NO: 1863613 - DNA, 15 bp, Homo sapiens
ttttcatgtgtctgt

SEQ ID NO: 1863614 - DNA, 15 bp, Homo sapiens
tttcatgtgtctgtg

SEQ ID NO: 1863615 - DNA, 15 bp, Homo sapiens
ttcatgtgtctgtgc

SEQ ID NO: 1863616 - DNA, 15 bp, Homo sapiens
tcatgtgtctgtgcc

SEQ ID NO: 1863617 - DNA, 15 bp, Homo sapiens
catgtgtctgtgcct

SEQ ID NO: 1863618 - DNA, 15 bp, Homo sapiens
atgtgtctgtgcctg

SEQ ID NO: 1863619 - DNA, 15 bp, Homo sapiens
tgtgtctgtgcctgt

SEQ ID NO: 1863620 - DNA, 15 bp, Homo sapiens
gtgtctgtgcctgtc

SEQ ID NO: 1863621 - DNA, 15 bp, Homo sapiens
tgtctgtgcctgtca

SEQ ID NO: 1863622 - DNA, 15 bp, Homo sapiens
tctgtgcctgtcact

SEQ ID NO: 1863623 - DNA, 15 bp, Homo sapiens
ctgtgcctgtcactc

SEQ ID NO: 1863624 - DNA, 15 bp, Homo sapiens
tgtgcctgtcactct

SEQ ID NO: 1863625 - DNA, 15 bp, Homo sapiens
gtgcctgtcactctt

SEQ ID NO: 1863626 - DNA, 15 bp, Homo sapiens
tgcctgtcactcttg

SEQ ID NO: 1863627 - DNA, 15 bp, Homo sapiens
gcctgtcactcttga

SEQ ID NO: 1863628 - DNA, 15 bp, Homo sapiens
cctgtcactcttgac

SEQ ID NO: 1863629 - DNA, 15 bp, Homo sapiens
ctgtcactcttgact

SEQ ID NO: 1863630 - DNA, 15 bp, Homo sapiens
tgtcactcttgactt

SEQ ID NO: 1863631 - DNA, 15 bp, Homo sapiens
gtcactcttgacttc

SEQ ID NO: 1863632 - DNA, 15 bp, Homo sapiens
tcactcttgacttct

SEQ ID NO: 1863633 - DNA, 15 bp, Homo sapiens
cactcttgacttctg

SEQ ID NO: 1863634 - DNA, 15 bp, Homo sapiens
actcttgacttctgt

SEQ ID NO: 1863635 - DNA, 15 bp, Homo sapiens
ctcttgacttctgtg

SEQ ID NO: 1863636 - DNA, 15 bp, Homo sapiens
tcttgacttctgtgt

SEQ ID NO: 1863637 - DNA, 15 bp, Homo sapiens
cttgacttctgtgtt

SEQ ID NO: 1863638 - DNA, 15 bp, Homo sapiens
ttgacttctgtgtta

SEQ ID NO: 1863639 - DNA, 15 bp, Homo sapiens
tgacttctgtgttag

SEQ ID NO: 1863640 - DNA, 15 bp, Homo sapiens
gacttctgtgttagt

SEQ ID NO: 1863641 - DNA, 15 bp, Homo sapiens
acttctgtgttagtt

SEQ ID NO: 1863642 - DNA, 15 bp, Homo sapiens
cttctgtgttagtta

SEQ ID NO: 1863643 - DNA, 15 bp, Homo sapiens
ttctgtgttagttag

SEQ ID NO: 1863644 - DNA, 15 bp, Homo sapiens
tctgtgttagttagg

SEQ ID NO: 1863645 - DNA, 15 bp, Homo sapiens
ctgtgttagttagga

SEQ ID NO: 1863646 - DNA, 15 bp, Homo sapiens
tgtgttagttaggat

SEQ ID NO: 1863647 - DNA, 15 bp, Homo sapiens
gtgttagttaggatt

SEQ ID NO: 1863648 - DNA, 15 bp, Homo sapiens
tgttagttaggattc

SEQ ID NO: 1863649 - DNA, 15 bp, Homo sapiens
gttagttaggattcc

SEQ ID NO: 1863650 - DNA, 15 bp, Homo sapiens
ttagttaggattcct

SEQ ID NO: 1863651 - DNA, 15 bp, Homo sapiens
tagttaggattcctt

SEQ ID NO: 1863652 - DNA, 15 bp, Homo sapiens
agttaggattccttg

SEQ ID NO: 1863653 - DNA, 15 bp, Homo sapiens
gttaggattccttgg

SEQ ID NO: 1863654 - DNA, 15 bp, Homo sapiens
ttaggattccttggg

SEQ ID NO: 1863655 - DNA, 15 bp, Homo sapiens
taggattccttgggc

SEQ ID NO: 1863656 - DNA, 15 bp, Homo sapiens
aggattccttgggct

SEQ ID NO: 1863657 - DNA, 15 bp, Homo sapiens
ggattccttgggctt

SEQ ID NO: 1863658 - DNA, 15 bp, Homo sapiens
gattccttgggcttc

SEQ ID NO: 1863659 - DNA, 15 bp, Homo sapiens
attccttgggcttca

SEQ ID NO: 1863660 - DNA, 15 bp, Homo sapiens
ttccttgggcttcat

SEQ ID NO: 1863661 - DNA, 15 bp, Homo sapiens
tccttgggcttcatg

SEQ ID NO: 1863662 - DNA, 15 bp, Homo sapiens
ccttgggcttcatgt

SEQ ID NO: 1863663 - DNA, 15 bp, Homo sapiens
cttgggcttcatgta

SEQ ID NO: 1863664 - DNA, 15 bp, Homo sapiens
ttgggcttcatgtaa

SEQ ID NO: 1863665 - DNA, 15 bp, Homo sapiens
tgggcttcatgtaac

SEQ ID NO: 1863666 - DNA, 15 bp, Homo sapiens
gggcttcatgtaaca

SEQ ID NO: 1863667 - DNA, 15 bp, Homo sapiens
ggcttcatgtaacag

SEQ ID NO: 1863668 - DNA, 15 bp, Homo sapiens
gcttcatgtaacaga

SEQ ID NO: 1863669 - DNA, 15 bp, Homo sapiens
cttcatgtaacagag

SEQ ID NO: 1863670 - DNA, 15 bp, Homo sapiens
ttcatgtaacagaga

SEQ ID NO: 1863671 - DNA, 15 bp, Homo sapiens
tcatgtaacagagag

SEQ ID NO: 1863672 - DNA, 15 bp, Homo sapiens
catgtaacagagaga

SEQ ID NO: 1863673 - DNA, 15 bp, Homo sapiens
atgtaacagagagaa

SEQ ID NO: 1863674 - DNA, 15 bp, Homo sapiens
tgtaacagagagaaa

SEQ ID NO: 1863675 - DNA, 15 bp, Homo sapiens
gtaacagagagaaaa

SEQ ID NO: 1863676 - DNA, 15 bp, Homo sapiens
taacagagagaaaag

SEQ ID NO: 1863677 - DNA, 15 bp, Homo sapiens
aacagagagaaaagc

SEQ ID NO: 1863678 - DNA, 15 bp, Homo sapiens
acagagagaaaagca

SEQ ID NO: 1863679 - DNA, 15 bp, Homo sapiens
cagagagaaaagcag

SEQ ID NO: 1863680 - DNA, 15 bp, Homo sapiens
agagagaaaagcagt

SEQ ID NO: 1863681 - DNA, 15 bp, Homo sapiens
gagagaaaagcagtt

SEQ ID NO: 1863682 - DNA, 15 bp, Homo sapiens
agagaaaagcagttt

SEQ ID NO: 1863683 - DNA, 15 bp, Homo sapiens
gagaaaagcagtttt

SEQ ID NO: 1863684 - DNA, 15 bp, Homo sapiens
agaaaagcagttttt

SEQ ID NO: 1863685 - DNA, 15 bp, Homo sapiens
gaaaagcagtttttc

SEQ ID NO: 1863686 - DNA, 15 bp, Homo sapiens
aaaagcagtttttcc

SEQ ID NO: 1863687 - DNA, 15 bp, Homo sapiens
aaagcagtttttcct

SEQ ID NO: 1863688 - DNA, 15 bp, Homo sapiens
aagcagtttttccta

SEQ ID NO: 1863689 - DNA, 15 bp, Homo sapiens
agcagtttttcctac

SEQ ID NO: 1863690 - DNA, 15 bp, Homo sapiens
gcagtttttcctaca

SEQ ID NO: 1863691 - DNA, 15 bp, Homo sapiens
cagtttttcctacaa

SEQ ID NO: 1863692 - DNA, 15 bp, Homo sapiens
agtttttcctacaag

SEQ ID NO: 1863693 - DNA, 15 bp, Homo sapiens
gtttttcctacaagt

SEQ ID NO: 1863694 - DNA, 15 bp, Homo sapiens
tttttcctacaagta

SEQ ID NO: 1863695 - DNA, 15 bp, Homo sapiens
ttttcctacaagtag

SEQ ID NO: 1863696 - DNA, 15 bp, Homo sapiens
tttcctacaagtaga

SEQ ID NO: 1863697 - DNA, 15 bp, Homo sapiens
ttcctacaagtagaa

SEQ ID NO: 1863698 - DNA, 15 bp, Homo sapiens
tcctacaagtagaag

SEQ ID NO: 1863699 - DNA, 15 bp, Homo sapiens
cctacaagtagaagt

SEQ ID NO: 1863700 - DNA, 15 bp, Homo sapiens
ctacaagtagaagtc

SEQ ID NO: 1863701 - DNA, 15 bp, Homo sapiens
tacaagtagaagtct

SEQ ID NO: 1863702 - DNA, 15 bp, Homo sapiens
acaagtagaagtcta

SEQ ID NO: 1863703 - DNA, 15 bp, Homo sapiens
caagtagaagtctag

SEQ ID NO: 1863704 - DNA, 15 bp, Homo sapiens
aagtagaagtctaga

SEQ ID NO: 1863705 - DNA, 15 bp, Homo sapiens
agtagaagtctagat

SEQ ID NO: 1863706 - DNA, 15 bp, Homo sapiens
gtagaagtctagatg

SEQ ID NO: 1863707 - DNA, 15 bp, Homo sapiens
tagaagtctagatgt

SEQ ID NO: 1863708 - DNA, 15 bp, Homo sapiens
agaagtctagatgta

SEQ ID NO: 1863709 - DNA, 15 bp, Homo sapiens
gaagtctagatgtag

SEQ ID NO: 1863710 - DNA, 15 bp, Homo sapiens
aagtctagatgtagg

SEQ ID NO: 1863711 - DNA, 15 bp, Homo sapiens
agtctagatgtaggg

SEQ ID NO: 1863712 - DNA, 15 bp, Homo sapiens
gtctagatgtagggg

SEQ ID NO: 1863713 - DNA, 15 bp, Homo sapiens
tctagatgtaggggt

SEQ ID NO: 1863714 - DNA, 15 bp, Homo sapiens
ctagatgtaggggtt

SEQ ID NO: 1863715 - DNA, 15 bp, Homo sapiens
tagatgtaggggttt

SEQ ID NO: 1863716 - DNA, 15 bp, Homo sapiens
agatgtaggggtttc

SEQ ID NO: 1863717 - DNA, 15 bp, Homo sapiens
gatgtaggggtttct

SEQ ID NO: 1863718 - DNA, 15 bp, Homo sapiens
atgtaggggtttctg

SEQ ID NO: 1863719 - DNA, 15 bp, Homo sapiens
tgtaggggtttctgg

SEQ ID NO: 1863720 - DNA, 15 bp, Homo sapiens
gtaggggtttctggc

SEQ ID NO: 1863721 - DNA, 15 bp, Homo sapiens
taggggtttctggca

SEQ ID NO: 1863722 - DNA, 15 bp, Homo sapiens
aggggtttctggcac

SEQ ID NO: 1863723 - DNA, 15 bp, Homo sapiens
ggggtttctggcact

SEQ ID NO: 1863724 - DNA, 15 bp, Homo sapiens
gggtttctggcacta

SEQ ID NO: 1863725 - DNA, 15 bp, Homo sapiens
ggtttctggcactag

SEQ ID NO: 1863726 - DNA, 15 bp, Homo sapiens
gtttctggcactagt

SEQ ID NO: 1863727 - DNA, 15 bp, Homo sapiens
tttctggcactagtg

SEQ ID NO: 1863728 - DNA, 15 bp, Homo sapiens
ttctggcactagtgc

SEQ ID NO: 1863729 - DNA, 15 bp, Homo sapiens
tctggcactagtgct

SEQ ID NO: 1863730 - DNA, 15 bp, Homo sapiens
ctggcactagtgctg

SEQ ID NO: 1863731 - DNA, 15 bp, Homo sapiens
tggcactagtgctgc

SEQ ID NO: 1863732 - DNA, 15 bp, Homo sapiens
ggcactagtgctgct

SEQ ID NO: 1863733 - DNA, 15 bp, Homo sapiens
gcactagtgctgctg

SEQ ID NO: 1863734 - DNA, 15 bp, Homo sapiens
cactagtgctgctgc

SEQ ID NO: 1863735 - DNA, 15 bp, Homo sapiens
actagtgctgctgct

SEQ ID NO: 1863736 - DNA, 15 bp, Homo sapiens
ctagtgctgctgcta

SEQ ID NO: 1863737 - DNA, 15 bp, Homo sapiens
tagtgctgctgctac

SEQ ID NO: 1863738 - DNA, 15 bp, Homo sapiens
agtgctgctgctaca

SEQ ID NO: 1863739 - DNA, 15 bp, Homo sapiens
gtgctgctgctacat

SEQ ID NO: 1863740 - DNA, 15 bp, Homo sapiens
tgctgctgctacatc

SEQ ID NO: 1863741 - DNA, 15 bp, Homo sapiens
gctgctgctacatca

SEQ ID NO: 1863742 - DNA, 15 bp, Homo sapiens
ctgctgctacatcat

SEQ ID NO: 1863743 - DNA, 15 bp, Homo sapiens
tgctgctacatcatg

SEQ ID NO: 1863744 - DNA, 15 bp, Homo sapiens
gctgctacatcatgt

SEQ ID NO: 1863745 - DNA, 15 bp, Homo sapiens
ctgctacatcatgtc

SEQ ID NO: 1863746 - DNA, 15 bp, Homo sapiens
tgctacatcatgtca

SEQ ID NO: 1863747 - DNA, 15 bp, Homo sapiens
gctacatcatgtcaa

SEQ ID NO: 1863748 - DNA, 15 bp, Homo sapiens
ctacatcatgtcaag

SEQ ID NO: 1863749 - DNA, 15 bp, Homo sapiens
tacatcatgtcaaga

SEQ ID NO: 1863750 - DNA, 15 bp, Homo sapiens
acatcatgtcaagat

SEQ ID NO: 1863751 - DNA, 15 bp, Homo sapiens
catcatgtcaagata

SEQ ID NO: 1863752 - DNA, 15 bp, Homo sapiens
atcatgtcaagatag

SEQ ID NO: 1863753 - DNA, 15 bp, Homo sapiens
tcatgtcaagatagt

SEQ ID NO: 1863754 - DNA, 15 bp, Homo sapiens
catgtcaagatagtg

SEQ ID NO: 1863755 - DNA, 15 bp, Homo sapiens
atgtcaagatagtgt

SEQ ID NO: 1863756 - DNA, 15 bp, Homo sapiens
tgtcaagatagtgtc

SEQ ID NO: 1863757 - DNA, 15 bp, Homo sapiens
gtcaagatagtgtct

SEQ ID NO: 1863758 - DNA, 15 bp, Homo sapiens
tcaagatagtgtctg

SEQ ID NO: 1863759 - DNA, 15 bp, Homo sapiens
caagatagtgtctgt

SEQ ID NO: 1863760 - DNA, 15 bp, Homo sapiens
aagatagtgtctgta

SEQ ID NO: 1863761 - DNA, 15 bp, Homo sapiens
agatagtgtctgtag

SEQ ID NO: 1863762 - DNA, 15 bp, Homo sapiens
gatagtgtctgtagg

SEQ ID NO: 1863763 - DNA, 15 bp, Homo sapiens
atagtgtctgtagga

SEQ ID NO: 1863764 - DNA, 15 bp, Homo sapiens
tagtgtctgtaggat

SEQ ID NO: 1863765 - DNA, 15 bp, Homo sapiens
agtgtctgtaggatg

SEQ ID NO: 1863766 - DNA, 15 bp, Homo sapiens
gtgtctgtaggatgt

SEQ ID NO: 1863767 - DNA, 15 bp, Homo sapiens
tgtctgtaggatgtc

SEQ ID NO: 1863768 - DNA, 15 bp, Homo sapiens
gtctgtaggatgtca

SEQ ID NO: 1863769 - DNA, 15 bp, Homo sapiens
tctgtaggatgtcag

SEQ ID NO: 1863770 - DNA, 15 bp, Homo sapiens
ctgtaggatgtcagg

SEQ ID NO: 1863771 - DNA, 15 bp, Homo sapiens
tgtaggatgtcagga

SEQ ID NO: 1863772 - DNA, 15 bp, Homo sapiens
gtaggatgtcaggat

SEQ ID NO: 1863773 - DNA, 15 bp, Homo sapiens
taggatgtcaggatt

SEQ ID NO: 1863774 - DNA, 15 bp, Homo sapiens
aggatgtcaggattc

SEQ ID NO: 1863775 - DNA, 15 bp, Homo sapiens
ggatgtcaggattcc

SEQ ID NO: 1863776 - DNA, 15 bp, Homo sapiens
gatgtcaggattccc

SEQ ID NO: 1863777 - DNA, 15 bp, Homo sapiens
atgtcaggattccct

SEQ ID NO: 1863778 - DNA, 15 bp, Homo sapiens
tgtcaggattccctt

SEQ ID NO: 1863779 - DNA, 15 bp, Homo sapiens
gtcaggattcccttg

SEQ ID NO: 1863780 - DNA, 15 bp, Homo sapiens
tcaggattcccttgg

SEQ ID NO: 1863781 - DNA, 15 bp, Homo sapiens
caggattcccttggc

SEQ ID NO: 1863782 - DNA, 15 bp, Homo sapiens
aggattcccttggct

SEQ ID NO: 1863783 - DNA, 15 bp, Homo sapiens
ggattcccttggctt

SEQ ID NO: 1863784 - DNA, 15 bp, Homo sapiens
gattcccttggcttt

SEQ ID NO: 1863785 - DNA, 15 bp, Homo sapiens
attcccttggctttt

SEQ ID NO: 1863786 - DNA, 15 bp, Homo sapiens
ttcccttggcttttc

SEQ ID NO: 1863787 - DNA, 15 bp, Homo sapiens
tcccttggcttttca

SEQ ID NO: 1863788 - DNA, 15 bp, Homo sapiens
cccttggcttttcac

SEQ ID NO: 1863789 - DNA, 15 bp, Homo sapiens
ccttggcttttcact

SEQ ID NO: 1863790 - DNA, 15 bp, Homo sapiens
cttggcttttcactc

SEQ ID NO: 1863791 - DNA, 15 bp, Homo sapiens
ttggcttttcactca

SEQ ID NO: 1863792 - DNA, 15 bp, Homo sapiens
tggcttttcactcat

SEQ ID NO: 1863793 - DNA, 15 bp, Homo sapiens
ggcttttcactcatg

SEQ ID NO: 1863794 - DNA, 15 bp, Homo sapiens
gcttttcactcatgg

SEQ ID NO: 1863795 - DNA, 15 bp, Homo sapiens
cttttcactcatggc

SEQ ID NO: 1863796 - DNA, 15 bp, Homo sapiens
ttttcactcatggct

SEQ ID NO: 1863797 - DNA, 15 bp, Homo sapiens
tttcactcatggctg

SEQ ID NO: 1863798 - DNA, 15 bp, Homo sapiens
ttcactcatggctgc

SEQ ID NO: 1863799 - DNA, 15 bp, Homo sapiens
tcactcatggctgca

SEQ ID NO: 1863800 - DNA, 15 bp, Homo sapiens
cactcatggctgcaa

SEQ ID NO: 1863801 - DNA, 15 bp, Homo sapiens
actcatggctgcaag

SEQ ID NO: 1863802 - DNA, 15 bp, Homo sapiens
ctcatggctgcaaga

SEQ ID NO: 1863803 - DNA, 15 bp, Homo sapiens
tcatggctgcaagag

SEQ ID NO: 1863804 - DNA, 15 bp, Homo sapiens
catggctgcaagaga

SEQ ID NO: 1863805 - DNA, 15 bp, Homo sapiens
atggctgcaagagag

SEQ ID NO: 1863806 - DNA, 15 bp, Homo sapiens
tggctgcaagagaga

SEQ ID NO: 1863807 - DNA, 15 bp, Homo sapiens
ggctgcaagagagat

SEQ ID NO: 1863808 - DNA, 15 bp, Homo sapiens
gctgcaagagagatg

SEQ ID NO: 1863809 - DNA, 15 bp, Homo sapiens
ctgcaagagagatgg

SEQ ID NO: 1863810 - DNA, 15 bp, Homo sapiens
tgcaagagagatgga

SEQ ID NO: 1863811 - DNA, 15 bp, Homo sapiens
gcaagagagatggag

SEQ ID NO: 1863812 - DNA, 15 bp, Homo sapiens
caagagagatggaga

SEQ ID NO: 1863813 - DNA, 15 bp, Homo sapiens
aagagagatggagag

SEQ ID NO: 1863814 - DNA, 15 bp, Homo sapiens
agagagatggagagc

SEQ ID NO: 1863815 - DNA, 15 bp, Homo sapiens
gagagatggagagct

SEQ ID NO: 1863816 - DNA, 15 bp, Homo sapiens
agagatggagagctt

SEQ ID NO: 1863817 - DNA, 15 bp, Homo sapiens
gagatggagagcttc

SEQ ID NO: 1863818 - DNA, 15 bp, Homo sapiens
agatggagagcttca

SEQ ID NO: 1863819 - DNA, 15 bp, Homo sapiens
gatggagagcttcag

SEQ ID NO: 1863820 - DNA, 15 bp, Homo sapiens
atggagagcttcaga

SEQ ID NO: 1863821 - DNA, 15 bp, Homo sapiens
tggagagcttcagac

SEQ ID NO: 1863822 - DNA, 15 bp, Homo sapiens
ggagagcttcagact

SEQ ID NO: 1863823 - DNA, 15 bp, Homo sapiens
gagagcttcagactt

SEQ ID NO: 1863824 - DNA, 15 bp, Homo sapiens
agagcttcagacttt

SEQ ID NO: 1863825 - DNA, 15 bp, Homo sapiens
gagcttcagactttg

SEQ ID NO: 1863826 - DNA, 15 bp, Homo sapiens
agcttcagactttgg

SEQ ID NO: 1863827 - DNA, 15 bp, Homo sapiens
gcttcagactttggg

SEQ ID NO: 1863828 - DNA, 15 bp, Homo sapiens
cttcagactttgggt

SEQ ID NO: 1863829 - DNA, 15 bp, Homo sapiens
ttcagactttgggtc

SEQ ID NO: 1863830 - DNA, 15 bp, Homo sapiens
tcagactttgggtcc

SEQ ID NO: 1863831 - DNA, 15 bp, Homo sapiens
cagactttgggtcca

SEQ ID NO: 1863832 - DNA, 15 bp, Homo sapiens
agactttgggtccat

SEQ ID NO: 1863833 - DNA, 15 bp, Homo sapiens
gactttgggtccatt

SEQ ID NO: 1863834 - DNA, 15 bp, Homo sapiens
actttgggtccattt

SEQ ID NO: 1863835 - DNA, 15 bp, Homo sapiens
ctttgggtccatttc

SEQ ID NO: 1863836 - DNA, 15 bp, Homo sapiens
tttgggtccatttca

SEQ ID NO: 1863837 - DNA, 15 bp, Homo sapiens
ttgggtccatttcaa

SEQ ID NO: 1863838 - DNA, 15 bp, Homo sapiens
tgggtccatttcaag

SEQ ID NO: 1863839 - DNA, 15 bp, Homo sapiens
gggtccatttcaagg

SEQ ID NO: 1863840 - DNA, 15 bp, Homo sapiens
ggtccatttcaaggt

SEQ ID NO: 1863841 - DNA, 15 bp, Homo sapiens
gtccatttcaaggta

SEQ ID NO: 1863842 - DNA, 15 bp, Homo sapiens
tccatttcaaggtag

SEQ ID NO: 1863843 - DNA, 15 bp, Homo sapiens
ccatttcaaggtaga

SEQ ID NO: 1863844 - DNA, 15 bp, Homo sapiens
catttcaaggtagaa

SEQ ID NO: 1863845 - DNA, 15 bp, Homo sapiens
atttcaaggtagaaa

SEQ ID NO: 1863846 - DNA, 15 bp, Homo sapiens
tttcaaggtagaaag

SEQ ID NO: 1863847 - DNA, 15 bp, Homo sapiens
ttcaaggtagaaaga

SEQ ID NO: 1863848 - DNA, 15 bp, Homo sapiens
tcaaggtagaaagaa

SEQ ID NO: 1863849 - DNA, 15 bp, Homo sapiens
caaggtagaaagaaa

SEQ ID NO: 1863850 - DNA, 15 bp, Homo sapiens
aaggtagaaagaaaa

SEQ ID NO: 1863851 - DNA, 15 bp, Homo sapiens
aggtagaaagaaaag

SEQ ID NO: 1863852 - DNA, 15 bp, Homo sapiens
ggtagaaagaaaagg

SEQ ID NO: 1863853 - DNA, 15 bp, Homo sapiens
gtagaaagaaaaggg

SEQ ID NO: 1863854 - DNA, 15 bp, Homo sapiens
tagaaagaaaagggg

SEQ ID NO: 1863855 - DNA, 15 bp, Homo sapiens
agaaagaaaaggggg

SEQ ID NO: 1863856 - DNA, 15 bp, Homo sapiens
gaaagaaaaggggga

SEQ ID NO: 1863857 - DNA, 15 bp, Homo sapiens
aaagaaaagggggaa

SEQ ID NO: 1863858 - DNA, 15 bp, Homo sapiens
aagaaaagggggaag

SEQ ID NO: 1863859 - DNA, 15 bp, Homo sapiens
agaaaagggggaagg

SEQ ID NO: 1863860 - DNA, 15 bp, Homo sapiens
gaaaagggggaaggg

SEQ ID NO: 1863861 - DNA, 15 bp, Homo sapiens
aaaagggggaagggc

SEQ ID NO: 1863862 - DNA, 15 bp, Homo sapiens
aaagggggaagggca

SEQ ID NO: 1863863 - DNA, 15 bp, Homo sapiens
aagggggaagggcaa

SEQ ID NO: 1863864 - DNA, 15 bp, Homo sapiens
agggggaagggcaat

SEQ ID NO: 1863865 - DNA, 15 bp, Homo sapiens
gggggaagggcaata

SEQ ID NO: 1863866 - DNA, 15 bp, Homo sapiens
ggggaagggcaatat

SEQ ID NO: 1863867 - DNA, 15 bp, Homo sapiens
gggaagggcaatatc

SEQ ID NO: 1863868 - DNA, 15 bp, Homo sapiens
ggaagggcaatatca

SEQ ID NO: 1863869 - DNA, 15 bp, Homo sapiens
gaagggcaatatcag

SEQ ID NO: 1863870 - DNA, 15 bp, Homo sapiens
aagggcaatatcagg

SEQ ID NO: 1863871 - DNA, 15 bp, Homo sapiens
agggcaatatcaggt

SEQ ID NO: 1863872 - DNA, 15 bp, Homo sapiens
gggcaatatcaggtt

SEQ ID NO: 1863873 - DNA, 15 bp, Homo sapiens
ggcaatatcaggtta

SEQ ID NO: 1863874 - DNA, 15 bp, Homo sapiens
gcaatatcaggttaa

SEQ ID NO: 1863875 - DNA, 15 bp, Homo sapiens
caatatcaggttaag

SEQ ID NO: 1863876 - DNA, 15 bp, Homo sapiens
aatatcaggttaagc

SEQ ID NO: 1863877 - DNA, 15 bp, Homo sapiens
atatcaggttaagct

SEQ ID NO: 1863878 - DNA, 15 bp, Homo sapiens
tatcaggttaagctg

SEQ ID NO: 1863879 - DNA, 15 bp, Homo sapiens
atcaggttaagctgt

SEQ ID NO: 1863880 - DNA, 15 bp, Homo sapiens
tcaggttaagctgtt

SEQ ID NO: 1863881 - DNA, 15 bp, Homo sapiens
caggttaagctgttc

SEQ ID NO: 1863882 - DNA, 15 bp, Homo sapiens
aggttaagctgttcc

SEQ ID NO: 1863883 - DNA, 15 bp, Homo sapiens
ggttaagctgttccc

SEQ ID NO: 1863884 - DNA, 15 bp, Homo sapiens
gttaagctgttccct

SEQ ID NO: 1863885 - DNA, 15 bp, Homo sapiens
ttaagctgttccctc

SEQ ID NO: 1863886 - DNA, 15 bp, Homo sapiens
taagctgttccctcc

SEQ ID NO: 1863887 - DNA, 15 bp, Homo sapiens
aagctgttccctcct

SEQ ID NO: 1863888 - DNA, 15 bp, Homo sapiens
agctgttccctcctg

SEQ ID NO: 1863889 - DNA, 15 bp, Homo sapiens
gctgttccctcctgc

SEQ ID NO: 1863890 - DNA, 15 bp, Homo sapiens
ctgttccctcctgct

SEQ ID NO: 1863891 - DNA, 15 bp, Homo sapiens
tgttccctcctgctt

SEQ ID NO: 1863892 - DNA, 15 bp, Homo sapiens
gttccctcctgcttt

SEQ ID NO: 1863893 - DNA, 15 bp, Homo sapiens
ttccctcctgctttt

SEQ ID NO: 1863894 - DNA, 15 bp, Homo sapiens
tccctcctgcttttt

SEQ ID NO: 1863895 - DNA, 15 bp, Homo sapiens
ccctcctgcttttta

SEQ ID NO: 1863896 - DNA, 15 bp, Homo sapiens
cctcctgctttttat

SEQ ID NO: 1863897 - DNA, 15 bp, Homo sapiens
ctcctgctttttatc

SEQ ID NO: 1863898 - DNA, 15 bp, Homo sapiens
tcctgctttttatca

SEQ ID NO: 1863899 - DNA, 15 bp, Homo sapiens
cctgctttttatcag

SEQ ID NO: 1863900 - DNA, 15 bp, Homo sapiens
ctgctttttatcaga

SEQ ID NO: 1863901 - DNA, 15 bp, Homo sapiens
tgctttttatcagac

SEQ ID NO: 1863902 - DNA, 15 bp, Homo sapiens
gctttttatcagaca

SEQ ID NO: 1863903 - DNA, 15 bp, Homo sapiens
ctttttatcagacat

SEQ ID NO: 1863904 - DNA, 15 bp, Homo sapiens
tttttatcagacatc

SEQ ID NO: 1863905 - DNA, 15 bp, Homo sapiens
ttttatcagacatct

SEQ ID NO: 1863906 - DNA, 15 bp, Homo sapiens
tttatcagacatctt

SEQ ID NO: 1863907 - DNA, 15 bp, Homo sapiens
ttatcagacatcttc

SEQ ID NO: 1863908 - DNA, 15 bp, Homo sapiens
tatcagacatcttcc

SEQ ID NO: 1863909 - DNA, 15 bp, Homo sapiens
atcagacatcttccc

SEQ ID NO: 1863910 - DNA, 15 bp, Homo sapiens
tcagacatcttcccc

SEQ ID NO: 1863911 - DNA, 15 bp, Homo sapiens
cagacatcttcccct

SEQ ID NO: 1863912 - DNA, 15 bp, Homo sapiens
agacatcttcccctg

SEQ ID NO: 1863913 - DNA, 15 bp, Homo sapiens
gacatcttcccctgc

SEQ ID NO: 1863914 - DNA, 15 bp, Homo sapiens
acatcttcccctgca

SEQ ID NO: 1863915 - DNA, 15 bp, Homo sapiens
catcttcccctgcag

SEQ ID NO: 1863916 - DNA, 15 bp, Homo sapiens
atcttcccctgcaga

SEQ ID NO: 1863917 - DNA, 15 bp, Homo sapiens
tcttcccctgcagaa

SEQ ID NO: 1863918 - DNA, 15 bp, Homo sapiens
cttcccctgcagaat

SEQ ID NO: 1863919 - DNA, 15 bp, Homo sapiens
ttcccctgcagaata

SEQ ID NO: 1863920 - DNA, 15 bp, Homo sapiens
tcccctgcagaatat

SEQ ID NO: 1863921 - DNA, 15 bp, Homo sapiens
cccctgcagaatatg

SEQ ID NO: 1863922 - DNA, 15 bp, Homo sapiens
ccctgcagaatatgt

SEQ ID NO: 1863923 - DNA, 15 bp, Homo sapiens
cctgcagaatatgtg

SEQ ID NO: 1863924 - DNA, 15 bp, Homo sapiens
ctgcagaatatgtgg

SEQ ID NO: 1863925 - DNA, 15 bp, Homo sapiens
tgcagaatatgtggc

SEQ ID NO: 1863926 - DNA, 15 bp, Homo sapiens
gcagaatatgtggcg

SEQ ID NO: 1863927 - DNA, 15 bp, Homo sapiens
cagaatatgtggcgt

SEQ ID NO: 1863928 - DNA, 15 bp, Homo sapiens
agaatatgtggcgtg

SEQ ID NO: 1863929 - DNA, 15 bp, Homo sapiens
gaatatgtggcgtgg

SEQ ID NO: 1863930 - DNA, 15 bp, Homo sapiens
aatatgtggcgtggc

SEQ ID NO: 1863931 - DNA, 15 bp, Homo sapiens
atatgtggcgtggcc

SEQ ID NO: 1863932 - DNA, 15 bp, Homo sapiens
tatgtggcgtggcca

SEQ ID NO: 1863933 - DNA, 15 bp, Homo sapiens
atgtggcgtggccac

SEQ ID NO: 1863934 - DNA, 15 bp, Homo sapiens
tgtggcgtggccacc

SEQ ID NO: 1863935 - DNA, 15 bp, Homo sapiens
gtggcgtggccacct

SEQ ID NO: 1863936 - DNA, 15 bp, Homo sapiens
tggcgtggccaccta

SEQ ID NO: 1863937 - DNA, 15 bp, Homo sapiens
ggcgtggccacctat

SEQ ID NO: 1863938 - DNA, 15 bp, Homo sapiens
gcgtggccacctata

SEQ ID NO: 1863939 - DNA, 15 bp, Homo sapiens
cgtggccacctatag

SEQ ID NO: 1863940 - DNA, 15 bp, Homo sapiens
gtggccacctatagc

SEQ ID NO: 1863941 - DNA, 15 bp, Homo sapiens
tggccacctatagct

SEQ ID NO: 1863942 - DNA, 15 bp, Homo sapiens
ggccacctatagctg

SEQ ID NO: 1863943 - DNA, 15 bp, Homo sapiens
gccacctatagctgc

SEQ ID NO: 1863944 - DNA, 15 bp, Homo sapiens
ccacctatagctgca

SEQ ID NO: 1863945 - DNA, 15 bp, Homo sapiens
cacctatagctgcaa

SEQ ID NO: 1863946 - DNA, 15 bp, Homo sapiens
acctatagctgcaag

SEQ ID NO: 1863947 - DNA, 15 bp, Homo sapiens
cctatagctgcaagg

SEQ ID NO: 1863948 - DNA, 15 bp, Homo sapiens
ctatagctgcaaggg

SEQ ID NO: 1863949 - DNA, 15 bp, Homo sapiens
tatagctgcaaggga

SEQ ID NO: 1863950 - DNA, 15 bp, Homo sapiens
atagctgcaagggag

SEQ ID NO: 1863951 - DNA, 15 bp, Homo sapiens
tagctgcaagggagg

SEQ ID NO: 1863952 - DNA, 15 bp, Homo sapiens
agctgcaagggaggc

SEQ ID NO: 1863953 - DNA, 15 bp, Homo sapiens
gctgcaagggaggct

SEQ ID NO: 1863954 - DNA, 15 bp, Homo sapiens
ctgcaagggaggctg

SEQ ID NO: 1863955 - DNA, 15 bp, Homo sapiens
tgcaagggaggctgg

SEQ ID NO: 1863956 - DNA, 15 bp, Homo sapiens
gcaagggaggctgga

SEQ ID NO: 1863957 - DNA, 15 bp, Homo sapiens
caagggaggctggaa

SEQ ID NO: 1863958 - DNA, 15 bp, Homo sapiens
aagggaggctggaag

SEQ ID NO: 1863959 - DNA, 15 bp, Homo sapiens
agggaggctggaagg

SEQ ID NO: 1863960 - DNA, 15 bp, Homo sapiens
gggaggctggaaggt

SEQ ID NO: 1863961 - DNA, 15 bp, Homo sapiens
ggaggctggaaggtg

SEQ ID NO: 1863962 - DNA, 15 bp, Homo sapiens
gaggctggaaggtga

SEQ ID NO: 1863963 - DNA, 15 bp, Homo sapiens
aggctggaaggtgat

SEQ ID NO: 1863964 - DNA, 15 bp, Homo sapiens
ggctggaaggtgatt

SEQ ID NO: 1863965 - DNA, 15 bp, Homo sapiens
gctggaaggtgatta

SEQ ID NO: 1863966 - DNA, 15 bp, Homo sapiens
ctggaaggtgattat

SEQ ID NO: 1863967 - DNA, 15 bp, Homo sapiens
tggaaggtgattatt

SEQ ID NO: 1863968 - DNA, 15 bp, Homo sapiens
ggaaggtgattattc

SEQ ID NO: 1863969 - DNA, 15 bp, Homo sapiens
gaaggtgattattca

SEQ ID NO: 1863970 - DNA, 15 bp, Homo sapiens
aaggtgattattcag

SEQ ID NO: 1863971 - DNA, 15 bp, Homo sapiens
aggtgattattcagc

SEQ ID NO: 1863972 - DNA, 15 bp, Homo sapiens
ggtgattattcagct

SEQ ID NO: 1863973 - DNA, 15 bp, Homo sapiens
gtgattattcagctt

SEQ ID NO: 1863974 - DNA, 15 bp, Homo sapiens
tgattattcagcttt

SEQ ID NO: 1863975 - DNA, 15 bp, Homo sapiens
gattattcagctttc

SEQ ID NO: 1863976 - DNA, 15 bp, Homo sapiens
attattcagctttcc

SEQ ID NO: 1863977 - DNA, 15 bp, Homo sapiens
ttattcagctttcca

SEQ ID NO: 1863978 - DNA, 15 bp, Homo sapiens
tattcagctttccat

SEQ ID NO: 1863979 - DNA, 15 bp, Homo sapiens
attcagctttccatc

SEQ ID NO: 1863980 - DNA, 15 bp, Homo sapiens
ttcagctttccatct

SEQ ID NO: 1863981 - DNA, 15 bp, Homo sapiens
tcagctttccatctt

SEQ ID NO: 1863982 - DNA, 15 bp, Homo sapiens
cagctttccatcttc

SEQ ID NO: 1863983 - DNA, 15 bp, Homo sapiens
agctttccatcttcg

SEQ ID NO: 1863984 - DNA, 15 bp, Homo sapiens
gctttccatcttcga

SEQ ID NO: 1863985 - DNA, 15 bp, Homo sapiens
ctttccatcttcgag

SEQ ID NO: 1863986 - DNA, 15 bp, Homo sapiens
tttccatcttcgagg

SEQ ID NO: 1863987 - DNA, 15 bp, Homo sapiens
ttccatcttcgagga

SEQ ID NO: 1863988 - DNA, 15 bp, Homo sapiens
tccatcttcgaggac

SEQ ID NO: 1863989 - DNA, 15 bp, Homo sapiens
ccatcttcgaggaca

SEQ ID NO: 1863990 - DNA, 15 bp, Homo sapiens
catcttcgaggacag

SEQ ID NO: 1863991 - DNA, 15 bp, Homo sapiens
atcttcgaggacagg

SEQ ID NO: 1863992 - DNA, 15 bp, Homo sapiens
tcttcgaggacaggc

SEQ ID NO: 1863993 - DNA, 15 bp, Homo sapiens
cttcgaggacaggca

SEQ ID NO: 1863994 - DNA, 15 bp, Homo sapiens
ttcgaggacaggcaa

SEQ ID NO: 1863995 - DNA, 15 bp, Homo sapiens
tcgaggacaggcaag

SEQ ID NO: 1863996 - DNA, 15 bp, Homo sapiens
cgaggacaggcaagg

SEQ ID NO: 1863997 - DNA, 15 bp, Homo sapiens
gaggacaggcaaggt

SEQ ID NO: 1863998 - DNA, 15 bp, Homo sapiens
aggacaggcaaggtt

SEQ ID NO: 1863999 - DNA, 15 bp, Homo sapiens
ggacaggcaaggttg

SEQ ID NO: 1864000 - DNA, 15 bp, Homo sapiens
gacaggcaaggttgg

SEQ ID NO: 1864001 - DNA, 15 bp, Homo sapiens
acaggcaaggttgga

SEQ ID NO: 1864002 - DNA, 15 bp, Homo sapiens
caggcaaggttggac

SEQ ID NO: 1864003 - DNA, 15 bp, Homo sapiens
aggcaaggttggact

SEQ ID NO: 1864004 - DNA, 15 bp, Homo sapiens
ggcaaggttggactc

SEQ ID NO: 1864005 - DNA, 15 bp, Homo sapiens
gcaaggttggactcc

SEQ ID NO: 1864006 - DNA, 15 bp, Homo sapiens
caaggttggactcca

SEQ ID NO: 1864007 - DNA, 15 bp, Homo sapiens
aaggttggactccac

SEQ ID NO: 1864008 - DNA, 15 bp, Homo sapiens
aggttggactccacc

SEQ ID NO: 1864009 - DNA, 15 bp, Homo sapiens
ggttggactccacct

SEQ ID NO: 1864010 - DNA, 15 bp, Homo sapiens
gttggactccacctt

SEQ ID NO: 1864011 - DNA, 15 bp, Homo sapiens
ttggactccaccttg

SEQ ID NO: 1864012 - DNA, 15 bp, Homo sapiens
tggactccaccttgg

SEQ ID NO: 1864013 - DNA, 15 bp, Homo sapiens
ggactccaccttggg

SEQ ID NO: 1864014 - DNA, 15 bp, Homo sapiens
gactccaccttgggt

SEQ ID NO: 1864015 - DNA, 15 bp, Homo sapiens
actccaccttgggtg

SEQ ID NO: 1864016 - DNA, 15 bp, Homo sapiens
ctccaccttgggtga

SEQ ID NO: 1864017 - DNA, 15 bp, Homo sapiens
tccaccttgggtgag

SEQ ID NO: 1864018 - DNA, 15 bp, Homo sapiens
ccaccttgggtgagc

SEQ ID NO: 1864019 - DNA, 15 bp, Homo sapiens
caccttgggtgagcc

SEQ ID NO: 1864020 - DNA, 15 bp, Homo sapiens
accttgggtgagcca

SEQ ID NO: 1864021 - DNA, 15 bp, Homo sapiens
ccttgggtgagccaa

SEQ ID NO: 1864022 - DNA, 15 bp, Homo sapiens
cttgggtgagccaaa

SEQ ID NO: 1864023 - DNA, 15 bp, Homo sapiens
ttgggtgagccaaac

SEQ ID NO: 1864024 - DNA, 15 bp, Homo sapiens
tgggtgagccaaact

SEQ ID NO: 1864025 - DNA, 15 bp, Homo sapiens
gggtgagccaaactg

SEQ ID NO: 1864026 - DNA, 15 bp, Homo sapiens
ggtgagccaaactgc

SEQ ID NO: 1864027 - DNA, 15 bp, Homo sapiens
gtgagccaaactgca

SEQ ID NO: 1864028 - DNA, 15 bp, Homo sapiens
tgagccaaactgcag

SEQ ID NO: 1864029 - DNA, 15 bp, Homo sapiens
gagccaaactgcagt

SEQ ID NO: 1864030 - DNA, 15 bp, Homo sapiens
agccaaactgcagtg

SEQ ID NO: 1864031 - DNA, 15 bp, Homo sapiens
gccaaactgcagtgt

SEQ ID NO: 1864032 - DNA, 15 bp, Homo sapiens
ccaaactgcagtgtc

SEQ ID NO: 1864033 - DNA, 15 bp, Homo sapiens
caaactgcagtgtca

SEQ ID NO: 1864034 - DNA, 15 bp, Homo sapiens
aaactgcagtgtcag

SEQ ID NO: 1864035 - DNA, 15 bp, Homo sapiens
aactgcagtgtcagc

SEQ ID NO: 1864036 - DNA, 15 bp, Homo sapiens
actgcagtgtcagcc

SEQ ID NO: 1864037 - DNA, 15 bp, Homo sapiens
ctgcagtgtcagcca

SEQ ID NO: 1864038 - DNA, 15 bp, Homo sapiens
tgcagtgtcagccac

SEQ ID NO: 1864039 - DNA, 15 bp, Homo sapiens
gcagtgtcagccacc

SEQ ID NO: 1864040 - DNA, 15 bp, Homo sapiens
cagtgtcagccacct

SEQ ID NO: 1864041 - DNA, 15 bp, Homo sapiens
agtgtcagccacctt

SEQ ID NO: 1864042 - DNA, 15 bp, Homo sapiens
gtgtcagccaccttc

SEQ ID NO: 1864043 - DNA, 15 bp, Homo sapiens
tgtcagccaccttcc

SEQ ID NO: 1864044 - DNA, 15 bp, Homo sapiens
gtcagccaccttcca

SEQ ID NO: 1864045 - DNA, 15 bp, Homo sapiens
tcagccaccttccaa

SEQ ID NO: 1864046 - DNA, 15 bp, Homo sapiens
cagccaccttccaac

SEQ ID NO: 1864047 - DNA, 15 bp, Homo sapiens
agccaccttccaaca

SEQ ID NO: 1864048 - DNA, 15 bp, Homo sapiens
gccaccttccaacaa

SEQ ID NO: 1864049 - DNA, 15 bp, Homo sapiens
ccaccttccaacaaa

SEQ ID NO: 1864050 - DNA, 15 bp, Homo sapiens
caccttccaacaaac

SEQ ID NO: 1864051 - DNA, 15 bp, Homo sapiens
accttccaacaaacc

SEQ ID NO: 1864052 - DNA, 15 bp, Homo sapiens
ccttccaacaaacca

SEQ ID NO: 1864053 - DNA, 15 bp, Homo sapiens
cttccaacaaaccag

SEQ ID NO: 1864054 - DNA, 15 bp, Homo sapiens
ttccaacaaaccagc

SEQ ID NO: 1864055 - DNA, 15 bp, Homo sapiens
tccaacaaaccagcc

SEQ ID NO: 1864056 - DNA, 15 bp, Homo sapiens
ccaacaaaccagcct

SEQ ID NO: 1864057 - DNA, 15 bp, Homo sapiens
caacaaaccagccta

SEQ ID NO: 1864058 - DNA, 15 bp, Homo sapiens
aacaaaccagcctaa

SEQ ID NO: 1864059 - DNA, 15 bp, Homo sapiens
acaaaccagcctaag

SEQ ID NO: 1864060 - DNA, 15 bp, Homo sapiens
caaaccagcctaagc

SEQ ID NO: 1864061 - DNA, 15 bp, Homo sapiens
aaaccagcctaagcc

SEQ ID NO: 1864062 - DNA, 15 bp, Homo sapiens
aaccagcctaagccc

SEQ ID NO: 1864063 - DNA, 15 bp, Homo sapiens
accagcctaagccca

SEQ ID NO: 1864064 - DNA, 15 bp, Homo sapiens
ccagcctaagcccaa

SEQ ID NO: 1864065 - DNA, 15 bp, Homo sapiens
cagcctaagcccaaa

SEQ ID NO: 1864066 - DNA, 15 bp, Homo sapiens
agcctaagcccaaac

SEQ ID NO: 1864067 - DNA, 15 bp, Homo sapiens
gcctaagcccaaacc

SEQ ID NO: 1864068 - DNA, 15 bp, Homo sapiens
cctaagcccaaaccc

SEQ ID NO: 1864069 - DNA, 15 bp, Homo sapiens
ctaagcccaaaccca

SEQ ID NO: 1864070 - DNA, 15 bp, Homo sapiens
taagcccaaacccac

SEQ ID NO: 1864071 - DNA, 15 bp, Homo sapiens
aagcccaaacccacc

SEQ ID NO: 1864072 - DNA, 15 bp, Homo sapiens
agcccaaacccacca

SEQ ID NO: 1864073 - DNA, 15 bp, Homo sapiens
gcccaaacccaccag

SEQ ID NO: 1864074 - DNA, 15 bp, Homo sapiens
cccaaacccaccagt

SEQ ID NO: 1864075 - DNA, 15 bp, Homo sapiens
ccaaacccaccagta

SEQ ID NO: 1864076 - DNA, 15 bp, Homo sapiens
caaacccaccagtaa

SEQ ID NO: 1864077 - DNA, 15 bp, Homo sapiens
aaacccaccagtaac

SEQ ID NO: 1864078 - DNA, 15 bp, Homo sapiens
aacccaccagtaacc

SEQ ID NO: 1864079 - DNA, 15 bp, Homo sapiens
acccaccagtaaccc

SEQ ID NO: 1864080 - DNA, 15 bp, Homo sapiens
cccaccagtaaccct

SEQ ID NO: 1864081 - DNA, 15 bp, Homo sapiens
ccaccagtaaccctc

SEQ ID NO: 1864082 - DNA, 15 bp, Homo sapiens
caccagtaaccctcc

SEQ ID NO: 1864083 - DNA, 15 bp, Homo sapiens
accagtaaccctccc

SEQ ID NO: 1864084 - DNA, 15 bp, Homo sapiens
ccagtaaccctcccc

SEQ ID NO: 1864085 - DNA, 15 bp, Homo sapiens
cagtaaccctcccct

SEQ ID NO: 1864086 - DNA, 15 bp, Homo sapiens
agtaaccctccccta

SEQ ID NO: 1864087 - DNA, 15 bp, Homo sapiens
gtaaccctcccctag

SEQ ID NO: 1864088 - DNA, 15 bp, Homo sapiens
taaccctcccctagt

SEQ ID NO: 1864089 - DNA, 15 bp, Homo sapiens
aaccctcccctagtg

SEQ ID NO: 1864090 - DNA, 15 bp, Homo sapiens
accctcccctagtgg

SEQ ID NO: 1864091 - DNA, 15 bp, Homo sapiens
ccctcccctagtgga

SEQ ID NO: 1864092 - DNA, 15 bp, Homo sapiens
cctcccctagtggag

SEQ ID NO: 1864093 - DNA, 15 bp, Homo sapiens
ctcccctagtggagg

SEQ ID NO: 1864094 - DNA, 15 bp, Homo sapiens
tcccctagtggaggg

SEQ ID NO: 1864095 - DNA, 15 bp, Homo sapiens
cccctagtggaggga

SEQ ID NO: 1864096 - DNA, 15 bp, Homo sapiens
ccctagtggagggaa

SEQ ID NO: 1864097 - DNA, 15 bp, Homo sapiens
cctagtggagggaaa

SEQ ID NO: 1864098 - DNA, 15 bp, Homo sapiens
ctagtggagggaaac

SEQ ID NO: 1864099 - DNA, 15 bp, Homo sapiens
tagtggagggaaaca

SEQ ID NO: 1864100 - DNA, 15 bp, Homo sapiens
agtggagggaaacat

SEQ ID NO: 1864101 - DNA, 15 bp, Homo sapiens
gtggagggaaacatt

SEQ ID NO: 1864102 - DNA, 15 bp, Homo sapiens
tggagggaaacattt

SEQ ID NO: 1864103 - DNA, 15 bp, Homo sapiens
ggagggaaacattta

SEQ ID NO: 1864104 - DNA, 15 bp, Homo sapiens
gagggaaacatttag

SEQ ID NO: 1864105 - DNA, 15 bp, Homo sapiens
agggaaacatttagt

SEQ ID NO: 1864106 - DNA, 15 bp, Homo sapiens
gggaaacatttagtt

SEQ ID NO: 1864107 - DNA, 15 bp, Homo sapiens
ggaaacatttagttc

SEQ ID NO: 1864108 - DNA, 15 bp, Homo sapiens
gaaacatttagttct

SEQ ID NO: 1864109 - DNA, 15 bp, Homo sapiens
aaacatttagttctc

SEQ ID NO: 1864110 - DNA, 15 bp, Homo sapiens
aacatttagttctct

SEQ ID NO: 1864111 - DNA, 15 bp, Homo sapiens
acatttagttctctt

SEQ ID NO: 1864112 - DNA, 15 bp, Homo sapiens
catttagttctcttg

SEQ ID NO: 1864113 - DNA, 15 bp, Homo sapiens
atttagttctcttgg

SEQ ID NO: 1864114 - DNA, 15 bp, Homo sapiens
tttagttctcttggg

SEQ ID NO: 1864115 - DNA, 15 bp, Homo sapiens
ttagttctcttggga

SEQ ID NO: 1864116 - DNA, 15 bp, Homo sapiens
tagttctcttgggag

SEQ ID NO: 1864117 - DNA, 15 bp, Homo sapiens
agttctcttgggagt

SEQ ID NO: 1864118 - DNA, 15 bp, Homo sapiens
gttctcttgggagtt

SEQ ID NO: 1864119 - DNA, 15 bp, Homo sapiens
ttctcttgggagttg

SEQ ID NO: 1864120 - DNA, 15 bp, Homo sapiens
tctcttgggagttgc

SEQ ID NO: 1864121 - DNA, 15 bp, Homo sapiens
ctcttgggagttgca

SEQ ID NO: 1864122 - DNA, 15 bp, Homo sapiens
tcttgggagttgcag

SEQ ID NO: 1864123 - DNA, 15 bp, Homo sapiens
cttgggagttgcagg

SEQ ID NO: 1864124 - DNA, 15 bp, Homo sapiens
ttgggagttgcaggc

SEQ ID NO: 1864125 - DNA, 15 bp, Homo sapiens
tgggagttgcaggca

SEQ ID NO: 1864126 - DNA, 15 bp, Homo sapiens
gggagttgcaggcag

SEQ ID NO: 1864127 - DNA, 15 bp, Homo sapiens
ggagttgcaggcagg

SEQ ID NO: 1864128 - DNA, 15 bp, Homo sapiens
gagttgcaggcaggt

SEQ ID NO: 1864129 - DNA, 15 bp, Homo sapiens
agttgcaggcaggtc

SEQ ID NO: 1864130 - DNA, 15 bp, Homo sapiens
gttgcaggcaggtct

SEQ ID NO: 1864131 - DNA, 15 bp, Homo sapiens
ttgcaggcaggtctt

SEQ ID NO: 1864132 - DNA, 15 bp, Homo sapiens
tgcaggcaggtcttt

SEQ ID NO: 1864133 - DNA, 15 bp, Homo sapiens
gcaggcaggtctttg

SEQ ID NO: 1864134 - DNA, 15 bp, Homo sapiens
caggcaggtctttga

SEQ ID NO: 1864135 - DNA, 15 bp, Homo sapiens
ctcctctttccactt

SEQ ID NO: 1864136 - DNA, 15 bp, Homo sapiens
tcctctttccacttt

SEQ ID NO: 1864137 - DNA, 15 bp, Homo sapiens
cctctttccactttt

SEQ ID NO: 1864138 - DNA, 15 bp, Homo sapiens
ctctttccacttttg

SEQ ID NO: 1864139 - DNA, 15 bp, Homo sapiens
tctttccacttttgg

SEQ ID NO: 1864140 - DNA, 15 bp, Homo sapiens
ctttccacttttggt

SEQ ID NO: 1864141 - DNA, 15 bp, Homo sapiens
tttccacttttggtc

SEQ ID NO: 1864142 - DNA, 15 bp, Homo sapiens
ttccacttttggtca

SEQ ID NO: 1864143 - DNA, 15 bp, Homo sapiens
tccacttttggtcaa

SEQ ID NO: 1864144 - DNA, 15 bp, Homo sapiens
ccacttttggtcaat

SEQ ID NO: 1864145 - DNA, 15 bp, Homo sapiens
cacttttggtcaatc

SEQ ID NO: 1864146 - DNA, 15 bp, Homo sapiens
acttttggtcaatca

SEQ ID NO: 1864147 - DNA, 15 bp, Homo sapiens
cttttggtcaatcag

SEQ ID NO: 1864148 - DNA, 15 bp, Homo sapiens
ttttggtcaatcagc

SEQ ID NO: 1864149 - DNA, 15 bp, Homo sapiens
tttggtcaatcagcc

SEQ ID NO: 1864150 - DNA, 15 bp, Homo sapiens
ttggtcaatcagcca

SEQ ID NO: 1864151 - DNA, 15 bp, Homo sapiens
tggtcaatcagccaa

SEQ ID NO: 1864152 - DNA, 15 bp, Homo sapiens
ggtcaatcagccaaa

SEQ ID NO: 1864153 - DNA, 15 bp, Homo sapiens
gtcaatcagccaaaa

SEQ ID NO: 1864154 - DNA, 15 bp, Homo sapiens
tcaatcagccaaaat

SEQ ID NO: 1864155 - DNA, 15 bp, Homo sapiens
caatcagccaaaatt

SEQ ID NO: 1864156 - DNA, 15 bp, Homo sapiens
aatcagccaaaatta

SEQ ID NO: 1864157 - DNA, 15 bp, Homo sapiens
atcagccaaaattac

SEQ ID NO: 1864158 - DNA, 15 bp, Homo sapiens
tcagccaaaattaca

SEQ ID NO: 1864159 - DNA, 15 bp, Homo sapiens
cagccaaaattacaa

SEQ ID NO: 1864160 - DNA, 15 bp, Homo sapiens
agccaaaattacaag

SEQ ID NO: 1864161 - DNA, 15 bp, Homo sapiens
gccaaaattacaagt

SEQ ID NO: 1864162 - DNA, 15 bp, Homo sapiens
ccaaaattacaagta

SEQ ID NO: 1864163 - DNA, 15 bp, Homo sapiens
caaaattacaagtac

SEQ ID NO: 1864164 - DNA, 15 bp, Homo sapiens
aaaattacaagtact

SEQ ID NO: 1864165 - DNA, 15 bp, Homo sapiens
aaattacaagtactt

SEQ ID NO: 1864166 - DNA, 15 bp, Homo sapiens
aattacaagtacttt

SEQ ID NO: 1864167 - DNA, 15 bp, Homo sapiens
attacaagtactttt

SEQ ID NO: 1864168 - DNA, 15 bp, Homo sapiens
ttacaagtacttttc

SEQ ID NO: 1864169 - DNA, 15 bp, Homo sapiens
tacaagtacttttcc

SEQ ID NO: 1864170 - DNA, 15 bp, Homo sapiens
acaagtacttttcca

SEQ ID NO: 1864171 - DNA, 15 bp, Homo sapiens
caagtacttttccaa

SEQ ID NO: 1864172 - DNA, 15 bp, Homo sapiens
aagtacttttccaaa

SEQ ID NO: 1864173 - DNA, 15 bp, Homo sapiens
agtacttttccaaac

SEQ ID NO: 1864174 - DNA, 15 bp, Homo sapiens
gtacttttccaaacc

SEQ ID NO: 1864175 - DNA, 15 bp, Homo sapiens
tacttttccaaacct

SEQ ID NO: 1864176 - DNA, 15 bp, Homo sapiens
acttttccaaacctt

SEQ ID NO: 1864177 - DNA, 15 bp, Homo sapiens
cttttccaaaccttg

SEQ ID NO: 1864178 - DNA, 15 bp, Homo sapiens
ttttccaaaccttgg

SEQ ID NO: 1864179 - DNA, 15 bp, Homo sapiens
tttccaaaccttggg

SEQ ID NO: 1864180 - DNA, 15 bp, Homo sapiens
ttccaaaccttgggg

SEQ ID NO: 1864181 - DNA, 15 bp, Homo sapiens
tccaaaccttggggt

SEQ ID NO: 1864182 - DNA, 15 bp, Homo sapiens
ccaaaccttggggta

SEQ ID NO: 1864183 - DNA, 15 bp, Homo sapiens
caaaccttggggtat

SEQ ID NO: 1864184 - DNA, 15 bp, Homo sapiens
aaaccttggggtatt

SEQ ID NO: 1864185 - DNA, 15 bp, Homo sapiens
aaccttggggtattg

SEQ ID NO: 1864186 - DNA, 15 bp, Homo sapiens
accttggggtattgg

SEQ ID NO: 1864187 - DNA, 15 bp, Homo sapiens
ccttggggtattgga

SEQ ID NO: 1864188 - DNA, 15 bp, Homo sapiens
cttggggtattggag

SEQ ID NO: 1864189 - DNA, 15 bp, Homo sapiens
ttggggtattggagt

SEQ ID NO: 1864190 - DNA, 15 bp, Homo sapiens
tggggtattggagtc

SEQ ID NO: 1864191 - DNA, 15 bp, Homo sapiens
ggggtattggagtcc

SEQ ID NO: 1864192 - DNA, 15 bp, Homo sapiens
gggtattggagtcca

SEQ ID NO: 1864193 - DNA, 15 bp, Homo sapiens
ggtattggagtccat

SEQ ID NO: 1864194 - DNA, 15 bp, Homo sapiens
gtattggagtccatg

SEQ ID NO: 1864195 - DNA, 15 bp, Homo sapiens
tattggagtccatgg

SEQ ID NO: 1864196 - DNA, 15 bp, Homo sapiens
attggagtccatggc

SEQ ID NO: 1864197 - DNA, 15 bp, Homo sapiens
ttggagtccatggct

SEQ ID NO: 1864198 - DNA, 15 bp, Homo sapiens
tggagtccatggctc

SEQ ID NO: 1864199 - DNA, 15 bp, Homo sapiens
ggagtccatggctcc

SEQ ID NO: 1864200 - DNA, 15 bp, Homo sapiens
gagtccatggctcct

SEQ ID NO: 1864201 - DNA, 15 bp, Homo sapiens
agtccatggctcctg

SEQ ID NO: 1864202 - DNA, 15 bp, Homo sapiens
gtccatggctcctgg

SEQ ID NO: 1864203 - DNA, 15 bp, Homo sapiens
tccatggctcctggc

SEQ ID NO: 1864204 - DNA, 15 bp, Homo sapiens
ccatggctcctggct

SEQ ID NO: 1864205 - DNA, 15 bp, Homo sapiens
catggctcctggctg

SEQ ID NO: 1864206 - DNA, 15 bp, Homo sapiens
atggctcctggctgc

SEQ ID NO: 1864207 - DNA, 15 bp, Homo sapiens
tggctcctggctgct

SEQ ID NO: 1864208 - DNA, 15 bp, Homo sapiens
ggctcctggctgctg

SEQ ID NO: 1864209 - DNA, 15 bp, Homo sapiens
gctcctggctgctgt

SEQ ID NO: 1864210 - DNA, 15 bp, Homo sapiens
ctcctggctgctgtg

SEQ ID NO: 1864211 - DNA, 15 bp, Homo sapiens
tcctggctgctgtgc

SEQ ID NO: 1864212 - DNA, 15 bp, Homo sapiens
cctggctgctgtgca

SEQ ID NO: 1864213 - DNA, 15 bp, Homo sapiens
ctggctgctgtgcat

SEQ ID NO: 1864214 - DNA, 15 bp, Homo sapiens
tggctgctgtgcatg

SEQ ID NO: 1864215 - DNA, 15 bp, Homo sapiens
ggctgctgtgcatgg

SEQ ID NO: 1864216 - DNA, 15 bp, Homo sapiens
gctgctgtgcatggt

SEQ ID NO: 1864217 - DNA, 15 bp, Homo sapiens
ctgctgtgcatggtt

SEQ ID NO: 1864218 - DNA, 15 bp, Homo sapiens
tgctgtgcatggttt

SEQ ID NO: 1864219 - DNA, 15 bp, Homo sapiens
gctgtgcatggtttc

SEQ ID NO: 1864220 - DNA, 15 bp, Homo sapiens
ctgtgcatggtttcc

SEQ ID NO: 1864221 - DNA, 15 bp, Homo sapiens
tgtgcatggtttccc

SEQ ID NO: 1864222 - DNA, 15 bp, Homo sapiens
gtgcatggtttcccc

SEQ ID NO: 1864223 - DNA, 15 bp, Homo sapiens
tgcatggtttcccct

SEQ ID NO: 1864224 - DNA, 15 bp, Homo sapiens
gcatggtttcccctt

SEQ ID NO: 1864225 - DNA, 15 bp, Homo sapiens
catggtttccccttt

SEQ ID NO: 1864226 - DNA, 15 bp, Homo sapiens
atggtttcccctttt

SEQ ID NO: 1864227 - DNA, 15 bp, Homo sapiens
tggtttccccttttc

SEQ ID NO: 1864228 - DNA, 15 bp, Homo sapiens
ggtttccccttttcc

SEQ ID NO: 1864229 - DNA, 15 bp, Homo sapiens
gtttccccttttcct

SEQ ID NO: 1864230 - DNA, 15 bp, Homo sapiens
tttccccttttcctg

SEQ ID NO: 1864231 - DNA, 15 bp, Homo sapiens
ttccccttttcctgg

SEQ ID NO: 1864232 - DNA, 15 bp, Homo sapiens
tccccttttcctggg

SEQ ID NO: 1864233 - DNA, 15 bp, Homo sapiens
ccccttttcctggga

SEQ ID NO: 1864234 - DNA, 15 bp, Homo sapiens
cccttttcctgggaa

SEQ ID NO: 1864235 - DNA, 15 bp, Homo sapiens
ccttttcctgggaag

SEQ ID NO: 1864236 - DNA, 15 bp, Homo sapiens
cttttcctgggaagc

SEQ ID NO: 1864237 - DNA, 15 bp, Homo sapiens
ttttcctgggaagct

SEQ ID NO: 1864238 - DNA, 15 bp, Homo sapiens
tttcctgggaagctt

SEQ ID NO: 1864239 - DNA, 15 bp, Homo sapiens
ttcctgggaagcttc

SEQ ID NO: 1864240 - DNA, 15 bp, Homo sapiens
tcctgggaagcttct

SEQ ID NO: 1864241 - DNA, 15 bp, Homo sapiens
cctgggaagcttctg

SEQ ID NO: 1864242 - DNA, 15 bp, Homo sapiens
ctgggaagcttctgt

SEQ ID NO: 1864243 - DNA, 15 bp, Homo sapiens
tgggaagcttctgtc

SEQ ID NO: 1864244 - DNA, 15 bp, Homo sapiens
gggaagcttctgtcc

SEQ ID NO: 1864245 - DNA, 15 bp, Homo sapiens
ggaagcttctgtccc

SEQ ID NO: 1864246 - DNA, 15 bp, Homo sapiens
gaagcttctgtccca

SEQ ID NO: 1864247 - DNA, 15 bp, Homo sapiens
aagcttctgtcccac

SEQ ID NO: 1864248 - DNA, 15 bp, Homo sapiens
agcttctgtcccact

SEQ ID NO: 1864249 - DNA, 15 bp, Homo sapiens
gcttctgtcccactc

SEQ ID NO: 1864250 - DNA, 15 bp, Homo sapiens
cttctgtcccactcc

SEQ ID NO: 1864251 - DNA, 15 bp, Homo sapiens
ttctgtcccactccc

SEQ ID NO: 1864252 - DNA, 15 bp, Homo sapiens
tctgtcccactccct

SEQ ID NO: 1864253 - DNA, 15 bp, Homo sapiens
ctgtcccactccctg

SEQ ID NO: 1864254 - DNA, 15 bp, Homo sapiens
tgtcccactccctgc

SEQ ID NO: 1864255 - DNA, 15 bp, Homo sapiens
gtcccactccctgcc

SEQ ID NO: 1864256 - DNA, 15 bp, Homo sapiens
tcccactccctgccc

SEQ ID NO: 1864257 - DNA, 15 bp, Homo sapiens
cccactccctgcccc

SEQ ID NO: 1864258 - DNA, 15 bp, Homo sapiens
ccactccctgcccct

SEQ ID NO: 1864259 - DNA, 15 bp, Homo sapiens
cactccctgcccctc

SEQ ID NO: 1864260 - DNA, 15 bp, Homo sapiens
actccctgcccctca

SEQ ID NO: 1864261 - DNA, 15 bp, Homo sapiens
ctccctgcccctcac

SEQ ID NO: 1864262 - DNA, 15 bp, Homo sapiens
tccctgcccctcacc

SEQ ID NO: 1864263 - DNA, 15 bp, Homo sapiens
ccctgcccctcacct

SEQ ID NO: 1864264 - DNA, 15 bp, Homo sapiens
cctgcccctcacctc

SEQ ID NO: 1864265 - DNA, 15 bp, Homo sapiens
ctgcccctcacctca

SEQ ID NO: 1864266 - DNA, 15 bp, Homo sapiens
tgcccctcacctcac

SEQ ID NO: 1864267 - DNA, 15 bp, Homo sapiens
gcccctcacctcacc

SEQ ID NO: 1864268 - DNA, 15 bp, Homo sapiens
cccctcacctcaccc

SEQ ID NO: 1864269 - DNA, 15 bp, Homo sapiens
ccctcacctcaccct

SEQ ID NO: 1864270 - DNA, 15 bp, Homo sapiens
cctcacctcacccta

SEQ ID NO: 1864271 - DNA, 15 bp, Homo sapiens
ctcacctcaccctag

SEQ ID NO: 1864272 - DNA, 15 bp, Homo sapiens
tcacctcaccctagc

SEQ ID NO: 1864273 - DNA, 15 bp, Homo sapiens
cacctcaccctagca

SEQ ID NO: 1864274 - DNA, 15 bp, Homo sapiens
acctcaccctagcac

SEQ ID NO: 1864275 - DNA, 15 bp, Homo sapiens
cctcaccctagcact

SEQ ID NO: 1864276 - DNA, 15 bp, Homo sapiens
ctcaccctagcactc

SEQ ID NO: 1864277 - DNA, 15 bp, Homo sapiens
tcaccctagcactct

SEQ ID NO: 1864278 - DNA, 15 bp, Homo sapiens
caccctagcactctt

SEQ ID NO: 1864279 - DNA, 15 bp, Homo sapiens
accctagcactcttc

SEQ ID NO: 1864280 - DNA, 15 bp, Homo sapiens
ccctagcactcttca

SEQ ID NO: 1864281 - DNA, 15 bp, Homo sapiens
cctagcactcttcat

SEQ ID NO: 1864282 - DNA, 15 bp, Homo sapiens
ctagcactcttcata

SEQ ID NO: 1864283 - DNA, 15 bp, Homo sapiens
tagcactcttcatac

SEQ ID NO: 1864284 - DNA, 15 bp, Homo sapiens
agcactcttcatacc

SEQ ID NO: 1864285 - DNA, 15 bp, Homo sapiens
gcactcttcatacca

SEQ ID NO: 1864286 - DNA, 15 bp, Homo sapiens
cactcttcataccaa

SEQ ID NO: 1864287 - DNA, 15 bp, Homo sapiens
actcttcataccaaa

SEQ ID NO: 1864288 - DNA, 15 bp, Homo sapiens
ctcttcataccaaac

SEQ ID NO: 1864289 - DNA, 15 bp, Homo sapiens
tcttcataccaaaca

SEQ ID NO: 1864290 - DNA, 15 bp, Homo sapiens
cttcataccaaacaa

SEQ ID NO: 1864291 - DNA, 15 bp, Homo sapiens
ttcataccaaacaaa

SEQ ID NO: 1864292 - DNA, 15 bp, Homo sapiens
tcataccaaacaaaa

SEQ ID NO: 1864293 - DNA, 15 bp, Homo sapiens
cataccaaacaaaat

SEQ ID NO: 1864294 - DNA, 15 bp, Homo sapiens
ataccaaacaaaatg

SEQ ID NO: 1864295 - DNA, 15 bp, Homo sapiens
taccaaacaaaatga

SEQ ID NO: 1864296 - DNA, 15 bp, Homo sapiens
accaaacaaaatgac

SEQ ID NO: 1864297 - DNA, 15 bp, Homo sapiens
ccaaacaaaatgacc

SEQ ID NO: 1864298 - DNA, 15 bp, Homo sapiens
caaacaaaatgacct

SEQ ID NO: 1864299 - DNA, 15 bp, Homo sapiens
aaacaaaatgacctt

SEQ ID NO: 1864300 - DNA, 15 bp, Homo sapiens
aacaaaatgaccttt

SEQ ID NO: 1864301 - DNA, 15 bp, Homo sapiens
acaaaatgacctttc

SEQ ID NO: 1864302 - DNA, 15 bp, Homo sapiens
caaaatgacctttct

SEQ ID NO: 1864303 - DNA, 15 bp, Homo sapiens
aaaatgacctttctg

SEQ ID NO: 1864304 - DNA, 15 bp, Homo sapiens
aaatgacctttctgg

SEQ ID NO: 1864305 - DNA, 15 bp, Homo sapiens
aatgacctttctggg

SEQ ID NO: 1864306 - DNA, 15 bp, Homo sapiens
atgacctttctgggt

SEQ ID NO: 1864307 - DNA, 15 bp, Homo sapiens
tgacctttctgggtg

SEQ ID NO: 1864308 - DNA, 15 bp, Homo sapiens
gacctttctgggtgt

SEQ ID NO: 1864309 - DNA, 15 bp, Homo sapiens
acctttctgggtgtt

SEQ ID NO: 1864310 - DNA, 15 bp, Homo sapiens
cctttctgggtgttc

SEQ ID NO: 1864311 - DNA, 15 bp, Homo sapiens
ctttctgggtgttct

SEQ ID NO: 1864312 - DNA, 15 bp, Homo sapiens
tttctgggtgttctc

SEQ ID NO: 1864313 - DNA, 15 bp, Homo sapiens
ttctgggtgttctcc

SEQ ID NO: 1864314 - DNA, 15 bp, Homo sapiens
tctgggtgttctccc

SEQ ID NO: 1864315 - DNA, 15 bp, Homo sapiens
ctgggtgttctccct

SEQ ID NO: 1864316 - DNA, 15 bp, Homo sapiens
tgggtgttctccctg

SEQ ID NO: 1864317 - DNA, 15 bp, Homo sapiens
gggtgttctccctgg

SEQ ID NO: 1864318 - DNA, 15 bp, Homo sapiens
ggtgttctccctgga

SEQ ID NO: 1864319 - DNA, 15 bp, Homo sapiens
gtgttctccctggag

SEQ ID NO: 1864320 - DNA, 15 bp, Homo sapiens
tgttctccctggagt

SEQ ID NO: 1864321 - DNA, 15 bp, Homo sapiens
gttctccctggagtt

SEQ ID NO: 1864322 - DNA, 15 bp, Homo sapiens
ttctccctggagttc

SEQ ID NO: 1864323 - DNA, 15 bp, Homo sapiens
tctccctggagttcc

SEQ ID NO: 1864324 - DNA, 15 bp, Homo sapiens
ctccctggagttcct

SEQ ID NO: 1864325 - DNA, 15 bp, Homo sapiens
tccctggagttcctt

SEQ ID NO: 1864326 - DNA, 15 bp, Homo sapiens
ccctggagttccttc

SEQ ID NO: 1864327 - DNA, 15 bp, Homo sapiens
cctggagttccttcg

SEQ ID NO: 1864328 - DNA, 15 bp, Homo sapiens
ctggagttccttcgc

SEQ ID NO: 1864329 - DNA, 15 bp, Homo sapiens
tggagttccttcgct

SEQ ID NO: 1864330 - DNA, 15 bp, Homo sapiens
ggagttccttcgctt

SEQ ID NO: 1864331 - DNA, 15 bp, Homo sapiens
gagttccttcgcttg

SEQ ID NO: 1864332 - DNA, 15 bp, Homo sapiens
agttccttcgcttgc

SEQ ID NO: 1864333 - DNA, 15 bp, Homo sapiens
gttccttcgcttgcg

SEQ ID NO: 1864334 - DNA, 15 bp, Homo sapiens
ttccttcgcttgcgc

SEQ ID NO: 1864335 - DNA, 15 bp, Homo sapiens
tccttcgcttgcgca

SEQ ID NO: 1864336 - DNA, 15 bp, Homo sapiens
ccttcgcttgcgcag

SEQ ID NO: 1864337 - DNA, 15 bp, Homo sapiens
cttcgcttgcgcagt

SEQ ID NO: 1864338 - DNA, 15 bp, Homo sapiens
ttcgcttgcgcagtc

SEQ ID NO: 1864339 - DNA, 15 bp, Homo sapiens
tcgcttgcgcagtca

SEQ ID NO: 1864340 - DNA, 15 bp, Homo sapiens
cgcttgcgcagtcat

SEQ ID NO: 1864341 - DNA, 15 bp, Homo sapiens
gcttgcgcagtcata

SEQ ID NO: 1864342 - DNA, 15 bp, Homo sapiens
cttgcgcagtcatag

SEQ ID NO: 1864343 - DNA, 15 bp, Homo sapiens
ttgcgcagtcatagc

SEQ ID NO: 1864344 - DNA, 15 bp, Homo sapiens
tgcgcagtcatagca

SEQ ID NO: 1864345 - DNA, 15 bp, Homo sapiens
gcgcagtcatagcag

SEQ ID NO: 1864346 - DNA, 15 bp, Homo sapiens
cgcagtcatagcagg

SEQ ID NO: 1864347 - DNA, 15 bp, Homo sapiens
gcagtcatagcaggc

SEQ ID NO: 1864348 - DNA, 15 bp, Homo sapiens
cagtcatagcaggct

SEQ ID NO: 1864349 - DNA, 15 bp, Homo sapiens
agtcatagcaggcta

SEQ ID NO: 1864350 - DNA, 15 bp, Homo sapiens
gtcatagcaggctag

SEQ ID NO: 1864351 - DNA, 15 bp, Homo sapiens
tcatagcaggctagc

SEQ ID NO: 1864352 - DNA, 15 bp, Homo sapiens
catagcaggctagcg

SEQ ID NO: 1864353 - DNA, 15 bp, Homo sapiens
atagcaggctagcgc

SEQ ID NO: 1864354 - DNA, 15 bp, Homo sapiens
tagcaggctagcgcc

SEQ ID NO: 1864355 - DNA, 15 bp, Homo sapiens
agcaggctagcgcct

SEQ ID NO: 1864356 - DNA, 15 bp, Homo sapiens
gcaggctagcgccta

SEQ ID NO: 1864357 - DNA, 15 bp, Homo sapiens
caggctagcgcctag

SEQ ID NO: 1864358 - DNA, 15 bp, Homo sapiens
aggctagcgcctagt

SEQ ID NO: 1864359 - DNA, 15 bp, Homo sapiens
ggctagcgcctagtg

SEQ ID NO: 1864360 - DNA, 15 bp, Homo sapiens
gctagcgcctagtgg

SEQ ID NO: 1864361 - DNA, 15 bp, Homo sapiens
ctagcgcctagtggg

SEQ ID NO: 1864362 - DNA, 15 bp, Homo sapiens
tagcgcctagtgggc

SEQ ID NO: 1864363 - DNA, 15 bp, Homo sapiens
agcgcctagtgggct

SEQ ID NO: 1864364 - DNA, 15 bp, Homo sapiens
gcgcctagtgggctg

SEQ ID NO: 1864365 - DNA, 15 bp, Homo sapiens
cgcctagtgggctgt

SEQ ID NO: 1864366 - DNA, 15 bp, Homo sapiens
gcctagtgggctgtg

SEQ ID NO: 1864367 - DNA, 15 bp, Homo sapiens
cctagtgggctgtgt

SEQ ID NO: 1864368 - DNA, 15 bp, Homo sapiens
ctagtgggctgtgtg

SEQ ID NO: 1864369 - DNA, 15 bp, Homo sapiens
tagtgggctgtgtgc

SEQ ID NO: 1864370 - DNA, 15 bp, Homo sapiens
agtgggctgtgtgca

SEQ ID NO: 1864371 - DNA, 15 bp, Homo sapiens
gtgggctgtgtgcat

SEQ ID NO: 1864372 - DNA, 15 bp, Homo sapiens
tgggctgtgtgcatc

SEQ ID NO: 1864373 - DNA, 15 bp, Homo sapiens
gggctgtgtgcatct

SEQ ID NO: 1864374 - DNA, 15 bp, Homo sapiens
ggctgtgtgcatctg

SEQ ID NO: 1864375 - DNA, 15 bp, Homo sapiens
gctgtgtgcatctga

SEQ ID NO: 1864376 - DNA, 15 bp, Homo sapiens
ctgtgtgcatctgaa

SEQ ID NO: 1864377 - DNA, 15 bp, Homo sapiens
tgtgtgcatctgaat

SEQ ID NO: 1864378 - DNA, 15 bp, Homo sapiens
gtgtgcatctgaatt

SEQ ID NO: 1864379 - DNA, 15 bp, Homo sapiens
tgtgcatctgaattg

SEQ ID NO: 1864380 - DNA, 15 bp, Homo sapiens
gtgcatctgaattgc

SEQ ID NO: 1864381 - DNA, 15 bp, Homo sapiens
tgcatctgaattgca

SEQ ID NO: 1864382 - DNA, 15 bp, Homo sapiens
gcatctgaattgcag

SEQ ID NO: 1864383 - DNA, 15 bp, Homo sapiens
catctgaattgcagg

SEQ ID NO: 1864384 - DNA, 15 bp, Homo sapiens
atctgaattgcaggt

SEQ ID NO: 1864385 - DNA, 15 bp, Homo sapiens
tctgaattgcaggtt

SEQ ID NO: 1864386 - DNA, 15 bp, Homo sapiens
ctgaattgcaggttg

SEQ ID NO: 1864387 - DNA, 15 bp, Homo sapiens
tgaattgcaggttga

SEQ ID NO: 1864388 - DNA, 15 bp, Homo sapiens
gaattgcaggttgaa

SEQ ID NO: 1864389 - DNA, 15 bp, Homo sapiens
aattgcaggttgaat

SEQ ID NO: 1864390 - DNA, 15 bp, Homo sapiens
attgcaggttgaatc

SEQ ID NO: 1864391 - DNA, 15 bp, Homo sapiens
ttgcaggttgaatcc

SEQ ID NO: 1864392 - DNA, 15 bp, Homo sapiens
tgcaggttgaatcca

SEQ ID NO: 1864393 - DNA, 15 bp, Homo sapiens
gcaggttgaatccaa

SEQ ID NO: 1864394 - DNA, 15 bp, Homo sapiens
caggttgaatccaac

SEQ ID NO: 1864395 - DNA, 15 bp, Homo sapiens
aggttgaatccaaca

SEQ ID NO: 1864396 - DNA, 15 bp, Homo sapiens
ggttgaatccaacaa

SEQ ID NO: 1864397 - DNA, 15 bp, Homo sapiens
gttgaatccaacaac

SEQ ID NO: 1864398 - DNA, 15 bp, Homo sapiens
ttgaatccaacaaca

SEQ ID NO: 1864399 - DNA, 15 bp, Homo sapiens
tgaatccaacaacat

SEQ ID NO: 1864400 - DNA, 15 bp, Homo sapiens
gaatccaacaacatc

SEQ ID NO: 1864401 - DNA, 15 bp, Homo sapiens
aatccaacaacatca

SEQ ID NO: 1864402 - DNA, 15 bp, Homo sapiens
atccaacaacatcag

SEQ ID NO: 1864403 - DNA, 15 bp, Homo sapiens
tccaacaacatcagt

SEQ ID NO: 1864404 - DNA, 15 bp, Homo sapiens
ccaacaacatcagtg

SEQ ID NO: 1864405 - DNA, 15 bp, Homo sapiens
caacaacatcagtga

SEQ ID NO: 1864406 - DNA, 15 bp, Homo sapiens
aacaacatcagtgag

SEQ ID NO: 1864407 - DNA, 15 bp, Homo sapiens
acaacatcagtgagg

SEQ ID NO: 1864408 - DNA, 15 bp, Homo sapiens
caacatcagtgaggt

SEQ ID NO: 1864409 - DNA, 15 bp, Homo sapiens
aacatcagtgaggtg

SEQ ID NO: 1864410 - DNA, 15 bp, Homo sapiens
acatcagtgaggtgg

SEQ ID NO: 1864411 - DNA, 15 bp, Homo sapiens
catcagtgaggtggg

SEQ ID NO: 1864412 - DNA, 15 bp, Homo sapiens
atcagtgaggtggga

SEQ ID NO: 1864413 - DNA, 15 bp, Homo sapiens
tcagtgaggtgggag

SEQ ID NO: 1864414 - DNA, 15 bp, Homo sapiens
cagtgaggtgggagg

SEQ ID NO: 1864415 - DNA, 15 bp, Homo sapiens
agtgaggtgggaggc

SEQ ID NO: 1864416 - DNA, 15 bp, Homo sapiens
gtgaggtgggaggca

SEQ ID NO: 1864417 - DNA, 15 bp, Homo sapiens
tgaggtgggaggcaa

SEQ ID NO: 1864418 - DNA, 15 bp, Homo sapiens
gaggtgggaggcaag

SEQ ID NO: 1864419 - DNA, 15 bp, Homo sapiens
aggtgggaggcaagt

SEQ ID NO: 1864420 - DNA, 15 bp, Homo sapiens
ggtgggaggcaagtg

SEQ ID NO: 1864421 - DNA, 15 bp, Homo sapiens
gtgggaggcaagtgg

SEQ ID NO: 1864422 - DNA, 15 bp, Homo sapiens
tgggaggcaagtggc

SEQ ID NO: 1864423 - DNA, 15 bp, Homo sapiens
gggaggcaagtggct

SEQ ID NO: 1864424 - DNA, 15 bp, Homo sapiens
ggaggcaagtggctg

SEQ ID NO: 1864425 - DNA, 15 bp, Homo sapiens
gaggcaagtggctgg

SEQ ID NO: 1864426 - DNA, 15 bp, Homo sapiens
aggcaagtggctggg

SEQ ID NO: 1864427 - DNA, 15 bp, Homo sapiens
ggcaagtggctgggt

SEQ ID NO: 1864428 - DNA, 15 bp, Homo sapiens
gcaagtggctgggtg

SEQ ID NO: 1864429 - DNA, 15 bp, Homo sapiens
caagtggctgggtgc

SEQ ID NO: 1864430 - DNA, 15 bp, Homo sapiens
aagtggctgggtgcg

SEQ ID NO: 1864431 - DNA, 15 bp, Homo sapiens
agtggctgggtgcgg

SEQ ID NO: 1864432 - DNA, 15 bp, Homo sapiens
gtggctgggtgcggt

SEQ ID NO: 1864433 - DNA, 15 bp, Homo sapiens
tggctgggtgcggtg

SEQ ID NO: 1864434 - DNA, 15 bp, Homo sapiens
ggctgggtgcggtgc

SEQ ID NO: 1864435 - DNA, 15 bp, Homo sapiens
gctgggtgcggtgcc

SEQ ID NO: 1864436 - DNA, 15 bp, Homo sapiens
ctgggtgcggtgcca

SEQ ID NO: 1864437 - DNA, 15 bp, Homo sapiens
tgggtgcggtgccat

SEQ ID NO: 1864438 - DNA, 15 bp, Homo sapiens
gggtgcggtgccatg

SEQ ID NO: 1864439 - DNA, 15 bp, Homo sapiens
ggtgcggtgccatga

SEQ ID NO: 1864440 - DNA, 15 bp, Homo sapiens
gtgcggtgccatgac

SEQ ID NO: 1864441 - DNA, 15 bp, Homo sapiens
tgcggtgccatgaca

SEQ ID NO: 1864442 - DNA, 15 bp, Homo sapiens
gcggtgccatgacat

SEQ ID NO: 1864443 - DNA, 15 bp, Homo sapiens
cggtgccatgacatt

SEQ ID NO: 1864444 - DNA, 15 bp, Homo sapiens
ggtgccatgacattc

SEQ ID NO: 1864445 - DNA, 15 bp, Homo sapiens
gtgccatgacattct

SEQ ID NO: 1864446 - DNA, 15 bp, Homo sapiens
tgccatgacattctg

SEQ ID NO: 1864447 - DNA, 15 bp, Homo sapiens
gccatgacattctgg

SEQ ID NO: 1864448 - DNA, 15 bp, Homo sapiens
ccatgacattctggc

SEQ ID NO: 1864449 - DNA, 15 bp, Homo sapiens
catgacattctggct

SEQ ID NO: 1864450 - DNA, 15 bp, Homo sapiens
atgacattctggctc

SEQ ID NO: 1864451 - DNA, 15 bp, Homo sapiens
tgacattctggctca

SEQ ID NO: 1864452 - DNA, 15 bp, Homo sapiens
gacattctggctcac

SEQ ID NO: 1864453 - DNA, 15 bp, Homo sapiens
acattctggctcacc

SEQ ID NO: 1864454 - DNA, 15 bp, Homo sapiens
cattctggctcacct

SEQ ID NO: 1864455 - DNA, 15 bp, Homo sapiens
attctggctcacctg

SEQ ID NO: 1864456 - DNA, 15 bp, Homo sapiens
ttctggctcacctgt

SEQ ID NO: 1864457 - DNA, 15 bp, Homo sapiens
tctggctcacctgtc

SEQ ID NO: 1864458 - DNA, 15 bp, Homo sapiens
ctggctcacctgtca

SEQ ID NO: 1864459 - DNA, 15 bp, Homo sapiens
tggctcacctgtcat

SEQ ID NO: 1864460 - DNA, 15 bp, Homo sapiens
ggctcacctgtcatg

SEQ ID NO: 1864461 - DNA, 15 bp, Homo sapiens
gctcacctgtcatgt

SEQ ID NO: 1864462 - DNA, 15 bp, Homo sapiens
ctcacctgtcatgtt

SEQ ID NO: 1864463 - DNA, 15 bp, Homo sapiens
tcacctgtcatgttg

SEQ ID NO: 1864464 - DNA, 15 bp, Homo sapiens
cacctgtcatgttgg

SEQ ID NO: 1864465 - DNA, 15 bp, Homo sapiens
acctgtcatgttgga

SEQ ID NO: 1864466 - DNA, 15 bp, Homo sapiens
cctgtcatgttggat

SEQ ID NO: 1864467 - DNA, 15 bp, Homo sapiens
ctgtcatgttggatg

SEQ ID NO: 1864468 - DNA, 15 bp, Homo sapiens
tgtcatgttggatgg

SEQ ID NO: 1864469 - DNA, 15 bp, Homo sapiens
gtcatgttggatggc

SEQ ID NO: 1864470 - DNA, 15 bp, Homo sapiens
tcatgttggatggct

SEQ ID NO: 1864471 - DNA, 15 bp, Homo sapiens
catgttggatggctt

SEQ ID NO: 1864472 - DNA, 15 bp, Homo sapiens
atgttggatggcttg

SEQ ID NO: 1864473 - DNA, 15 bp, Homo sapiens
tgttggatggcttgt

SEQ ID NO: 1864474 - DNA, 15 bp, Homo sapiens
gttggatggcttgtg

SEQ ID NO: 1864475 - DNA, 15 bp, Homo sapiens
ttggatggcttgtgt

SEQ ID NO: 1864476 - DNA, 15 bp, Homo sapiens
tggatggcttgtgtg

SEQ ID NO: 1864477 - DNA, 15 bp, Homo sapiens
ggatggcttgtgtga

SEQ ID NO: 1864478 - DNA, 15 bp, Homo sapiens
gatggcttgtgtgag

SEQ ID NO: 1864479 - DNA, 15 bp, Homo sapiens
atggcttgtgtgagc

SEQ ID NO: 1864480 - DNA, 15 bp, Homo sapiens
tggcttgtgtgagcc

SEQ ID NO: 1864481 - DNA, 15 bp, Homo sapiens
ggcttgtgtgagccc

SEQ ID NO: 1864482 - DNA, 15 bp, Homo sapiens
cttgtgtgagcccca

SEQ ID NO: 1864483 - DNA, 15 bp, Homo sapiens
ttgtgtgagccccag

SEQ ID NO: 1864484 - DNA, 15 bp, Homo sapiens
tgtgtgagccccagg

SEQ ID NO: 1864485 - DNA, 15 bp, Homo sapiens
gtgtgagccccagga

SEQ ID NO: 1864486 - DNA, 15 bp, Homo sapiens
tgtgagccccaggaa

SEQ ID NO: 1864487 - DNA, 15 bp, Homo sapiens
gtgagccccaggaaa

SEQ ID NO: 1864488 - DNA, 15 bp, Homo sapiens
agccccaggaaaccc

SEQ ID NO: 1864489 - DNA, 15 bp, Homo sapiens
gccccaggaaacccg

SEQ ID NO: 1864490 - DNA, 15 bp, Homo sapiens
ccccaggaaacccgt

SEQ ID NO: 1864491 - DNA, 15 bp, Homo sapiens
cccaggaaacccgtg

SEQ ID NO: 1864492 - DNA, 15 bp, Homo sapiens
ccaggaaacccgtgc

SEQ ID NO: 1864493 - DNA, 15 bp, Homo sapiens
caggaaacccgtgca

SEQ ID NO: 1864494 - DNA, 15 bp, Homo sapiens
aggaaacccgtgcac

SEQ ID NO: 1864495 - DNA, 15 bp, Homo sapiens
ggaaacccgtgcacc

SEQ ID NO: 1864496 - DNA, 15 bp, Homo sapiens
gaaacccgtgcaccc

SEQ ID NO: 1864497 - DNA, 15 bp, Homo sapiens
aaacccgtgcaccct

SEQ ID NO: 1864498 - DNA, 15 bp, Homo sapiens
aacccgtgcaccctt

SEQ ID NO: 1864499 - DNA, 15 bp, Homo sapiens
acccgtgcaccctta

SEQ ID NO: 1864500 - DNA, 15 bp, Homo sapiens
cccgtgcacccttag

SEQ ID NO: 1864501 - DNA, 15 bp, Homo sapiens
ccgtgcacccttagg

SEQ ID NO: 1864502 - DNA, 15 bp, Homo sapiens
cgtgcacccttagga

SEQ ID NO: 1864503 - DNA, 15 bp, Homo sapiens
gtgcacccttaggaa

SEQ ID NO: 1864504 - DNA, 15 bp, Homo sapiens
tgcacccttaggaaa

SEQ ID NO: 1864505 - DNA, 15 bp, Homo sapiens
gcacccttaggaaag

SEQ ID NO: 1864506 - DNA, 15 bp, Homo sapiens
cacccttaggaaagc

SEQ ID NO: 1864507 - DNA, 15 bp, Homo sapiens
acccttaggaaagca

SEQ ID NO: 1864508 - DNA, 15 bp, Homo sapiens
cccttaggaaagcat

SEQ ID NO: 1864509 - DNA, 15 bp, Homo sapiens
ccttaggaaagcatg

SEQ ID NO: 1864510 - DNA, 15 bp, Homo sapiens
cttaggaaagcatgg

SEQ ID NO: 1864511 - DNA, 15 bp, Homo sapiens
ttaggaaagcatggg

SEQ ID NO: 1864512 - DNA, 15 bp, Homo sapiens
taggaaagcatggga

SEQ ID NO: 1864513 - DNA, 15 bp, Homo sapiens
aggaaagcatgggat

SEQ ID NO: 1864514 - DNA, 15 bp, Homo sapiens
ggaaagcatgggata

SEQ ID NO: 1864515 - DNA, 15 bp, Homo sapiens
gaaagcatgggatag

SEQ ID NO: 1864516 - DNA, 15 bp, Homo sapiens
aaagcatgggataga

SEQ ID NO: 1864517 - DNA, 15 bp, Homo sapiens
aagcatgggatagat

SEQ ID NO: 1864518 - DNA, 15 bp, Homo sapiens
agcatgggatagatc

SEQ ID NO: 1864519 - DNA, 15 bp, Homo sapiens
gcatgggatagatct

SEQ ID NO: 1864520 - DNA, 15 bp, Homo sapiens
catgggatagatctc

SEQ ID NO: 1864521 - DNA, 15 bp, Homo sapiens
atgggatagatctcc

SEQ ID NO: 1864522 - DNA, 15 bp, Homo sapiens
tgggatagatctcct

SEQ ID NO: 1864523 - DNA, 15 bp, Homo sapiens
gggatagatctcctg

SEQ ID NO: 1864524 - DNA, 15 bp, Homo sapiens
ggatagatctcctga

SEQ ID NO: 1864525 - DNA, 15 bp, Homo sapiens
gatagatctcctgag

SEQ ID NO: 1864526 - DNA, 15 bp, Homo sapiens
atagatctcctgaga

SEQ ID NO: 1864527 - DNA, 15 bp, Homo sapiens
tagatctcctgagat

SEQ ID NO: 1864528 - DNA, 15 bp, Homo sapiens
agatctcctgagatg

SEQ ID NO: 1864529 - DNA, 15 bp, Homo sapiens
gatctcctgagatga

SEQ ID NO: 1864530 - DNA, 15 bp, Homo sapiens
atctcctgagatgat

SEQ ID NO: 1864531 - DNA, 15 bp, Homo sapiens
tctcctgagatgatt

SEQ ID NO: 1864532 - DNA, 15 bp, Homo sapiens
ctcctgagatgattt

SEQ ID NO: 1864533 - DNA, 15 bp, Homo sapiens
tcctgagatgatttc

SEQ ID NO: 1864534 - DNA, 15 bp, Homo sapiens
cctgagatgatttca

SEQ ID NO: 1864535 - DNA, 15 bp, Homo sapiens
ctgagatgatttcag

SEQ ID NO: 1864536 - DNA, 15 bp, Homo sapiens
tgagatgatttcaga

SEQ ID NO: 1864537 - DNA, 15 bp, Homo sapiens
gagatgatttcagag

SEQ ID NO: 1864538 - DNA, 15 bp, Homo sapiens
agatgatttcagaga

SEQ ID NO: 1864539 - DNA, 15 bp, Homo sapiens
gatgatttcagagaa

SEQ ID NO: 1864540 - DNA, 15 bp, Homo sapiens
atgatttcagagaaa

SEQ ID NO: 1864541 - DNA, 15 bp, Homo sapiens
tgatttcagagaaat

SEQ ID NO: 1864542 - DNA, 15 bp, Homo sapiens
gatttcagagaaatg

SEQ ID NO: 1864543 - DNA, 15 bp, Homo sapiens
atttcagagaaatga

SEQ ID NO: 1864544 - DNA, 15 bp, Homo sapiens
tttcagagaaatgac

SEQ ID NO: 1864545 - DNA, 15 bp, Homo sapiens
ttcagagaaatgaca

SEQ ID NO: 1864546 - DNA, 15 bp, Homo sapiens
tcagagaaatgacag

SEQ ID NO: 1864547 - DNA, 15 bp, Homo sapiens
cagagaaatgacagc

SEQ ID NO: 1864548 - DNA, 15 bp, Homo sapiens
agagaaatgacagca

SEQ ID NO: 1864549 - DNA, 15 bp, Homo sapiens
gagaaatgacagcag

SEQ ID NO: 1864550 - DNA, 15 bp, Homo sapiens
agaaatgacagcaga

SEQ ID NO: 1864551 - DNA, 15 bp, Homo sapiens
gaaatgacagcagac

SEQ ID NO: 1864552 - DNA, 15 bp, Homo sapiens
aaatgacagcagacc

SEQ ID NO: 1864553 - DNA, 15 bp, Homo sapiens
aatgacagcagacca

SEQ ID NO: 1864554 - DNA, 15 bp, Homo sapiens
atgacagcagaccat

SEQ ID NO: 1864555 - DNA, 15 bp, Homo sapiens
tgacagcagaccatt

SEQ ID NO: 1864556 - DNA, 15 bp, Homo sapiens
gacagcagaccattg

SEQ ID NO: 1864557 - DNA, 15 bp, Homo sapiens
acagcagaccattgt

SEQ ID NO: 1864558 - DNA, 15 bp, Homo sapiens
cagcagaccattgtg

SEQ ID NO: 1864559 - DNA, 15 bp, Homo sapiens
agcagaccattgtga

SEQ ID NO: 1864560 - DNA, 15 bp, Homo sapiens
gcagaccattgtgag

SEQ ID NO: 1864561 - DNA, 15 bp, Homo sapiens
cagaccattgtgagg

SEQ ID NO: 1864562 - DNA, 15 bp, Homo sapiens
agaccattgtgaggg

SEQ ID NO: 1864563 - DNA, 15 bp, Homo sapiens
gaccattgtgaggga

SEQ ID NO: 1864564 - DNA, 15 bp, Homo sapiens
accattgtgagggag

SEQ ID NO: 1864565 - DNA, 15 bp, Homo sapiens
ccattgtgagggagg

SEQ ID NO: 1864566 - DNA, 15 bp, Homo sapiens
cattgtgagggaggc

SEQ ID NO: 1864567 - DNA, 15 bp, Homo sapiens
attgtgagggaggca

SEQ ID NO: 1864568 - DNA, 15 bp, Homo sapiens
ttgtgagggaggcag

SEQ ID NO: 1864569 - DNA, 15 bp, Homo sapiens
tgtgagggaggcagc

SEQ ID NO: 1864570 - DNA, 15 bp, Homo sapiens
gtgagggaggcagca

SEQ ID NO: 1864571 - DNA, 15 bp, Homo sapiens
tgagggaggcagcat

SEQ ID NO: 1864572 - DNA, 15 bp, Homo sapiens
gagggaggcagcatg

SEQ ID NO: 1864573 - DNA, 15 bp, Homo sapiens
agggaggcagcatga

SEQ ID NO: 1864574 - DNA, 15 bp, Homo sapiens
gggaggcagcatgac

SEQ ID NO: 1864575 - DNA, 15 bp, Homo sapiens
ggaggcagcatgact

SEQ ID NO: 1864576 - DNA, 15 bp, Homo sapiens
gaggcagcatgactg

SEQ ID NO: 1864577 - DNA, 15 bp, Homo sapiens
aggcagcatgactgg

SEQ ID NO: 1864578 - DNA, 15 bp, Homo sapiens
ggcagcatgactggg

SEQ ID NO: 1864579 - DNA, 15 bp, Homo sapiens
gcagcatgactgggg

SEQ ID NO: 1864580 - DNA, 15 bp, Homo sapiens
cagcatgactggggg

SEQ ID NO: 1864581 - DNA, 15 bp, Homo sapiens
agcatgactggggga

SEQ ID NO: 1864582 - DNA, 15 bp, Homo sapiens
gcatgactgggggaa

SEQ ID NO: 1864583 - DNA, 15 bp, Homo sapiens
catgactgggggaat

SEQ ID NO: 1864584 - DNA, 15 bp, Homo sapiens
atgactgggggaatg

SEQ ID NO: 1864585 - DNA, 15 bp, Homo sapiens
tgactgggggaatgg

SEQ ID NO: 1864586 - DNA, 15 bp, Homo sapiens
gactgggggaatgga

SEQ ID NO: 1864587 - DNA, 15 bp, Homo sapiens
actgggggaatggat

SEQ ID NO: 1864588 - DNA, 15 bp, Homo sapiens
ctgggggaatggata

SEQ ID NO: 1864589 - DNA, 15 bp, Homo sapiens
tgggggaatggataa

SEQ ID NO: 1864590 - DNA, 15 bp, Homo sapiens
gggggaatggataag

SEQ ID NO: 1864591 - DNA, 15 bp, Homo sapiens
ggggaatggataagg

SEQ ID NO: 1864592 - DNA, 15 bp, Homo sapiens
gggaatggataaggc

SEQ ID NO: 1864593 - DNA, 15 bp, Homo sapiens
ggaatggataaggct

SEQ ID NO: 1864594 - DNA, 15 bp, Homo sapiens
gaatggataaggctt

SEQ ID NO: 1864595 - DNA, 15 bp, Homo sapiens
aatggataaggctta

SEQ ID NO: 1864596 - DNA, 15 bp, Homo sapiens
atggataaggcttag

SEQ ID NO: 1864597 - DNA, 15 bp, Homo sapiens
tggataaggcttagg

SEQ ID NO: 1864598 - DNA, 15 bp, Homo sapiens
ggataaggcttaggt

SEQ ID NO: 1864599 - DNA, 15 bp, Homo sapiens
gataaggcttaggtc

SEQ ID NO: 1864600 - DNA, 15 bp, Homo sapiens
ataaggcttaggtcc

SEQ ID NO: 1864601 - DNA, 15 bp, Homo sapiens
taaggcttaggtccc

SEQ ID NO: 1864602 - DNA, 15 bp, Homo sapiens
aaggcttaggtccct

SEQ ID NO: 1864603 - DNA, 15 bp, Homo sapiens
aggcttaggtccctg

SEQ ID NO: 1864604 - DNA, 15 bp, Homo sapiens
ggcttaggtccctga

SEQ ID NO: 1864605 - DNA, 15 bp, Homo sapiens
gcttaggtccctgag

SEQ ID NO: 1864606 - DNA, 15 bp, Homo sapiens
cttaggtccctgaga

SEQ ID NO: 1864607 - DNA, 15 bp, Homo sapiens
ttaggtccctgagag

SEQ ID NO: 1864608 - DNA, 15 bp, Homo sapiens
taggtccctgagagg

SEQ ID NO: 1864609 - DNA, 15 bp, Homo sapiens
aggtccctgagaggc

SEQ ID NO: 1864610 - DNA, 15 bp, Homo sapiens
ggtccctgagaggca

SEQ ID NO: 1864611 - DNA, 15 bp, Homo sapiens
gtccctgagaggcag

SEQ ID NO: 1864612 - DNA, 15 bp, Homo sapiens
tccctgagaggcaga

SEQ ID NO: 1864613 - DNA, 15 bp, Homo sapiens
ccctgagaggcagat

SEQ ID NO: 1864614 - DNA, 15 bp, Homo sapiens
cctgagaggcagatc

SEQ ID NO: 1864615 - DNA, 15 bp, Homo sapiens
ctgagaggcagatcc

SEQ ID NO: 1864616 - DNA, 15 bp, Homo sapiens
tgagaggcagatcca

SEQ ID NO: 1864617 - DNA, 15 bp, Homo sapiens
gagaggcagatccac

SEQ ID NO: 1864618 - DNA, 15 bp, Homo sapiens
agaggcagatccact

SEQ ID NO: 1864619 - DNA, 15 bp, Homo sapiens
gaggcagatccactc

SEQ ID NO: 1864620 - DNA, 15 bp, Homo sapiens
aggcagatccactcc

SEQ ID NO: 1864621 - DNA, 15 bp, Homo sapiens
ggcagatccactcca

SEQ ID NO: 1864622 - DNA, 15 bp, Homo sapiens
gcagatccactccag

SEQ ID NO: 1864623 - DNA, 15 bp, Homo sapiens
cagatccactccagc

SEQ ID NO: 1864624 - DNA, 15 bp, Homo sapiens
agatccactccagcc

SEQ ID NO: 1864625 - DNA, 15 bp, Homo sapiens
gatccactccagcct

SEQ ID NO: 1864626 - DNA, 15 bp, Homo sapiens
atccactccagcctt

SEQ ID NO: 1864627 - DNA, 15 bp, Homo sapiens
tccactccagccttg

SEQ ID NO: 1864628 - DNA, 15 bp, Homo sapiens
ccactccagccttgc

SEQ ID NO: 1864629 - DNA, 15 bp, Homo sapiens
cactccagccttgcg

SEQ ID NO: 1864630 - DNA, 15 bp, Homo sapiens
actccagccttgcgg

SEQ ID NO: 1864631 - DNA, 15 bp, Homo sapiens
ctccagccttgcgga

SEQ ID NO: 1864632 - DNA, 15 bp, Homo sapiens
tccagccttgcggaa

SEQ ID NO: 1864633 - DNA, 15 bp, Homo sapiens
ccagccttgcggaat

SEQ ID NO: 1864634 - DNA, 15 bp, Homo sapiens
cagccttgcggaatg

SEQ ID NO: 1864635 - DNA, 15 bp, Homo sapiens
agccttgcggaatgt

SEQ ID NO: 1864636 - DNA, 15 bp, Homo sapiens
gccttgcggaatgtc

SEQ ID NO: 1864637 - DNA, 15 bp, Homo sapiens
ccttgcggaatgtca

SEQ ID NO: 1864638 - DNA, 15 bp, Homo sapiens
cttgcggaatgtcat

SEQ ID NO: 1864639 - DNA, 15 bp, Homo sapiens
ttgcggaatgtcatg

SEQ ID NO: 1864640 - DNA, 15 bp, Homo sapiens
tgcggaatgtcatgc

SEQ ID NO: 1864641 - DNA, 15 bp, Homo sapiens
gcggaatgtcatgct

SEQ ID NO: 1864642 - DNA, 15 bp, Homo sapiens
cggaatgtcatgctc

SEQ ID NO: 1864643 - DNA, 15 bp, Homo sapiens
ggaatgtcatgctcc

SEQ ID NO: 1864644 - DNA, 15 bp, Homo sapiens
gaatgtcatgctcct

SEQ ID NO: 1864645 - DNA, 15 bp, Homo sapiens
aatgtcatgctcctg

SEQ ID NO: 1864646 - DNA, 15 bp, Homo sapiens
atgtcatgctcctgc

SEQ ID NO: 1864647 - DNA, 15 bp, Homo sapiens
tgtcatgctcctgca

SEQ ID NO: 1864648 - DNA, 15 bp, Homo sapiens
gtcatgctcctgcag

SEQ ID NO: 1864649 - DNA, 15 bp, Homo sapiens
tcatgctcctgcaga

SEQ ID NO: 1864650 - DNA, 15 bp, Homo sapiens
catgctcctgcagag

SEQ ID NO: 1864651 - DNA, 15 bp, Homo sapiens
atgctcctgcagagg

SEQ ID NO: 1864652 - DNA, 15 bp, Homo sapiens
tgctcctgcagaggg

SEQ ID NO: 1864653 - DNA, 15 bp, Homo sapiens
gctcctgcagagggc

SEQ ID NO: 1864654 - DNA, 15 bp, Homo sapiens
ctcctgcagagggct

SEQ ID NO: 1864655 - DNA, 15 bp, Homo sapiens
tcctgcagagggctg

SEQ ID NO: 1864656 - DNA, 15 bp, Homo sapiens
cctgcagagggctgc

SEQ ID NO: 1864657 - DNA, 15 bp, Homo sapiens
ctgcagagggctgca

SEQ ID NO: 1864658 - DNA, 15 bp, Homo sapiens
tgcagagggctgcaa

SEQ ID NO: 1864659 - DNA, 15 bp, Homo sapiens
gcagagggctgcaag

SEQ ID NO: 1864660 - DNA, 15 bp, Homo sapiens
cagagggctgcaaga

SEQ ID NO: 1864661 - DNA, 15 bp, Homo sapiens
agagggctgcaagaa

SEQ ID NO: 1864662 - DNA, 15 bp, Homo sapiens
gagggctgcaagaag

SEQ ID NO: 1864663 - DNA, 15 bp, Homo sapiens
agggctgcaagaaga

SEQ ID NO: 1864664 - DNA, 15 bp, Homo sapiens
gggctgcaagaagag

SEQ ID NO: 1864665 - DNA, 15 bp, Homo sapiens
ggctgcaagaagagg

SEQ ID NO: 1864666 - DNA, 15 bp, Homo sapiens
gctgcaagaagaggt

SEQ ID NO: 1864667 - DNA, 15 bp, Homo sapiens
ctgcaagaagaggtg

SEQ ID NO: 1864668 - DNA, 15 bp, Homo sapiens
tgcaagaagaggtga

SEQ ID NO: 1864669 - DNA, 15 bp, Homo sapiens
gcaagaagaggtgaa

SEQ ID NO: 1864670 - DNA, 15 bp, Homo sapiens
caagaagaggtgaac

SEQ ID NO: 1864671 - DNA, 15 bp, Homo sapiens
aagaagaggtgaacc

SEQ ID NO: 1864672 - DNA, 15 bp, Homo sapiens
agaagaggtgaaccc

SEQ ID NO: 1864673 - DNA, 15 bp, Homo sapiens
gaagaggtgaaccca

SEQ ID NO: 1864674 - DNA, 15 bp, Homo sapiens
aagaggtgaacccat

SEQ ID NO: 1864675 - DNA, 15 bp, Homo sapiens
agaggtgaacccatt

SEQ ID NO: 1864676 - DNA, 15 bp, Homo sapiens
gaggtgaacccattc

SEQ ID NO: 1864677 - DNA, 15 bp, Homo sapiens
aggtgaacccattcc

SEQ ID NO: 1864678 - DNA, 15 bp, Homo sapiens
ggtgaacccattccc

SEQ ID NO: 1864679 - DNA, 15 bp, Homo sapiens
gtgaacccattccca

SEQ ID NO: 1864680 - DNA, 15 bp, Homo sapiens
tgaacccattcccaa

SEQ ID NO: 1864681 - DNA, 15 bp, Homo sapiens
gaacccattcccaat

SEQ ID NO: 1864682 - DNA, 15 bp, Homo sapiens
aacccattcccaatc

SEQ ID NO: 1864683 - DNA, 15 bp, Homo sapiens
acccattcccaatca

SEQ ID NO: 1864684 - DNA, 15 bp, Homo sapiens
cccattcccaatcac

SEQ ID NO: 1864685 - DNA, 15 bp, Homo sapiens
ccattcccaatcact

SEQ ID NO: 1864686 - DNA, 15 bp, Homo sapiens
cattcccaatcactg

SEQ ID NO: 1864687 - DNA, 15 bp, Homo sapiens
attcccaatcactgg

SEQ ID NO: 1864688 - DNA, 15 bp, Homo sapiens
ttcccaatcactggc

SEQ ID NO: 1864689 - DNA, 15 bp, Homo sapiens
tcccaatcactggcc

SEQ ID NO: 1864690 - DNA, 15 bp, Homo sapiens
cccaatcactggcca

SEQ ID NO: 1864691 - DNA, 15 bp, Homo sapiens
ccaatcactggccag

SEQ ID NO: 1864692 - DNA, 15 bp, Homo sapiens
caatcactggccagg

SEQ ID NO: 1864693 - DNA, 15 bp, Homo sapiens
aatcactggccaggt

SEQ ID NO: 1864694 - DNA, 15 bp, Homo sapiens
atcactggccaggtt

SEQ ID NO: 1864695 - DNA, 15 bp, Homo sapiens
tcactggccaggtta

SEQ ID NO: 1864696 - DNA, 15 bp, Homo sapiens
cactggccaggttag

SEQ ID NO: 1864697 - DNA, 15 bp, Homo sapiens
actggccaggttaga

SEQ ID NO: 1864698 - DNA, 15 bp, Homo sapiens
ctggccaggttagac

SEQ ID NO: 1864699 - DNA, 15 bp, Homo sapiens
tggccaggttagaca

SEQ ID NO: 1864700 - DNA, 15 bp, Homo sapiens
ggccaggttagacaa

SEQ ID NO: 1864701 - DNA, 15 bp, Homo sapiens
gccaggttagacaaa

SEQ ID NO: 1864702 - DNA, 15 bp, Homo sapiens
ccaggttagacaaat

SEQ ID NO: 1864703 - DNA, 15 bp, Homo sapiens
caggttagacaaatc

SEQ ID NO: 1864704 - DNA, 15 bp, Homo sapiens
aggttagacaaatca

SEQ ID NO: 1864705 - DNA, 15 bp, Homo sapiens
ggttagacaaatcat

SEQ ID NO: 1864706 - DNA, 15 bp, Homo sapiens
gttagacaaatcatt

SEQ ID NO: 1864707 - DNA, 15 bp, Homo sapiens
ttagacaaatcattg

SEQ ID NO: 1864708 - DNA, 15 bp, Homo sapiens
tagacaaatcattgg

SEQ ID NO: 1864709 - DNA, 15 bp, Homo sapiens
agacaaatcattgga

SEQ ID NO: 1864710 - DNA, 15 bp, Homo sapiens
gacaaatcattggat

SEQ ID NO: 1864711 - DNA, 15 bp, Homo sapiens
acaaatcattggatt

SEQ ID NO: 1864712 - DNA, 15 bp, Homo sapiens
caaatcattggattc

SEQ ID NO: 1864713 - DNA, 15 bp, Homo sapiens
aaatcattggattct

SEQ ID NO: 1864714 - DNA, 15 bp, Homo sapiens
aatcattggattctg

SEQ ID NO: 1864715 - DNA, 15 bp, Homo sapiens
atcattggattctgg

SEQ ID NO: 1864716 - DNA, 15 bp, Homo sapiens
tcattggattctggg

SEQ ID NO: 1864717 - DNA, 15 bp, Homo sapiens
cattggattctggga

SEQ ID NO: 1864718 - DNA, 15 bp, Homo sapiens
attggattctgggac

SEQ ID NO: 1864719 - DNA, 15 bp, Homo sapiens
ttggattctgggaca

SEQ ID NO: 1864720 - DNA, 15 bp, Homo sapiens
tggattctgggacat

SEQ ID NO: 1864721 - DNA, 15 bp, Homo sapiens
ggattctgggacatc

SEQ ID NO: 1864722 - DNA, 15 bp, Homo sapiens
gattctgggacatca

SEQ ID NO: 1864723 - DNA, 15 bp, Homo sapiens
attctgggacatcag

SEQ ID NO: 1864724 - DNA, 15 bp, Homo sapiens
ttctgggacatcaga

SEQ ID NO: 1864725 - DNA, 15 bp, Homo sapiens
tctgggacatcagag

SEQ ID NO: 1864726 - DNA, 15 bp, Homo sapiens
ctgggacatcagagc

SEQ ID NO: 1864727 - DNA, 15 bp, Homo sapiens
tgggacatcagagct

SEQ ID NO: 1864728 - DNA, 15 bp, Homo sapiens
gggacatcagagctg

SEQ ID NO: 1864729 - DNA, 15 bp, Homo sapiens
ggacatcagagctga

SEQ ID NO: 1864730 - DNA, 15 bp, Homo sapiens
gacatcagagctgaa

SEQ ID NO: 1864731 - DNA, 15 bp, Homo sapiens
acatcagagctgaaa

SEQ ID NO: 1864732 - DNA, 15 bp, Homo sapiens
catcagagctgaaat

SEQ ID NO: 1864733 - DNA, 15 bp, Homo sapiens
atcagagctgaaata

SEQ ID NO: 1864734 - DNA, 15 bp, Homo sapiens
tcagagctgaaatag

SEQ ID NO: 1864735 - DNA, 15 bp, Homo sapiens
cagagctgaaatagc

SEQ ID NO: 1864736 - DNA, 15 bp, Homo sapiens
agagctgaaatagct

SEQ ID NO: 1864737 - DNA, 15 bp, Homo sapiens
gagctgaaatagctt

SEQ ID NO: 1864738 - DNA, 15 bp, Homo sapiens
agctgaaatagcttt

SEQ ID NO: 1864739 - DNA, 15 bp, Homo sapiens
gctgaaatagcttta

SEQ ID NO: 1864740 - DNA, 15 bp, Homo sapiens
ctgaaatagctttat

SEQ ID NO: 1864741 - DNA, 15 bp, Homo sapiens
tgaaatagctttatt

SEQ ID NO: 1864742 - DNA, 15 bp, Homo sapiens
gaaatagctttattg

SEQ ID NO: 1864743 - DNA, 15 bp, Homo sapiens
aaatagctttattgg

SEQ ID NO: 1864744 - DNA, 15 bp, Homo sapiens
aatagctttattgga

SEQ ID NO: 1864745 - DNA, 15 bp, Homo sapiens
atagctttattggat

SEQ ID NO: 1864746 - DNA, 15 bp, Homo sapiens
tagctttattggatc

SEQ ID NO: 1864747 - DNA, 15 bp, Homo sapiens
agctttattggatca

SEQ ID NO: 1864748 - DNA, 15 bp, Homo sapiens
gctttattggatcat

SEQ ID NO: 1864749 - DNA, 15 bp, Homo sapiens
ctttattggatcatc

SEQ ID NO: 1864750 - DNA, 15 bp, Homo sapiens
tttattggatcatct

SEQ ID NO: 1864751 - DNA, 15 bp, Homo sapiens
ttattggatcatctc

SEQ ID NO: 1864752 - DNA, 15 bp, Homo sapiens
tattggatcatctct

SEQ ID NO: 1864753 - DNA, 15 bp, Homo sapiens
attggatcatctctg

SEQ ID NO: 1864754 - DNA, 15 bp, Homo sapiens
ttggatcatctctgg

SEQ ID NO: 1864755 - DNA, 15 bp, Homo sapiens
tggatcatctctggc

SEQ ID NO: 1864756 - DNA, 15 bp, Homo sapiens
ggatcatctctggcc

SEQ ID NO: 1864757 - DNA, 15 bp, Homo sapiens
gatcatctctggccc

SEQ ID NO: 1864758 - DNA, 15 bp, Homo sapiens
atcatctctggccca

SEQ ID NO: 1864759 - DNA, 15 bp, Homo sapiens
tcatctctggcccag

SEQ ID NO: 1864760 - DNA, 15 bp, Homo sapiens
catctctggcccagc

SEQ ID NO: 1864761 - DNA, 15 bp, Homo sapiens
atctctggcccagct

SEQ ID NO: 1864762 - DNA, 15 bp, Homo sapiens
tctctggcccagctc

SEQ ID NO: 1864763 - DNA, 15 bp, Homo sapiens
ctctggcccagctcg

SEQ ID NO: 1864764 - DNA, 15 bp, Homo sapiens
tctggcccagctcgc

SEQ ID NO: 1864765 - DNA, 15 bp, Homo sapiens
ctggcccagctcgct

SEQ ID NO: 1864766 - DNA, 15 bp, Homo sapiens
tggcccagctcgctt

SEQ ID NO: 1864767 - DNA, 15 bp, Homo sapiens
ggcccagctcgcttg

SEQ ID NO: 1864768 - DNA, 15 bp, Homo sapiens
gcccagctcgcttgc

SEQ ID NO: 1864769 - DNA, 15 bp, Homo sapiens
cccagctcgcttgct

SEQ ID NO: 1864770 - DNA, 15 bp, Homo sapiens
ccagctcgcttgctc

SEQ ID NO: 1864771 - DNA, 15 bp, Homo sapiens
cagctcgcttgctct

SEQ ID NO: 1864772 - DNA, 15 bp, Homo sapiens
agctcgcttgctctc

SEQ ID NO: 1864773 - DNA, 15 bp, Homo sapiens
gctcgcttgctctct

SEQ ID NO: 1864774 - DNA, 15 bp, Homo sapiens
ctcgcttgctctctc

SEQ ID NO: 1864775 - DNA, 15 bp, Homo sapiens
tcgcttgctctctct

SEQ ID NO: 1864776 - DNA, 15 bp, Homo sapiens
cgcttgctctctctc

SEQ ID NO: 1864777 - DNA, 15 bp, Homo sapiens
gcttgctctctctct

SEQ ID NO: 1864778 - DNA, 15 bp, Homo sapiens
ttgctctctctctca

SEQ ID NO: 1864779 - DNA, 15 bp, Homo sapiens
tgctctctctctcaa

SEQ ID NO: 1864780 - DNA, 15 bp, Homo sapiens
gctctctctctcaat

SEQ ID NO: 1864781 - DNA, 15 bp, Homo sapiens
ctctctctctcaatc

SEQ ID NO: 1864782 - DNA, 15 bp, Homo sapiens
tctctctctcaatct

SEQ ID NO: 1864783 - DNA, 15 bp, Homo sapiens
ctctctctcaatctc

SEQ ID NO: 1864784 - DNA, 15 bp, Homo sapiens
tctctctcaatctct

SEQ ID NO: 1864785 - DNA, 15 bp, Homo sapiens
ctctctcaatctctt

SEQ ID NO: 1864786 - DNA, 15 bp, Homo sapiens
tctctcaatctcttg

SEQ ID NO: 1864787 - DNA, 15 bp, Homo sapiens
ctctcaatctcttga

SEQ ID NO: 1864788 - DNA, 15 bp, Homo sapiens
tctcaatctcttgat

SEQ ID NO: 1864789 - DNA, 15 bp, Homo sapiens
ctcaatctcttgatc

SEQ ID NO: 1864790 - DNA, 15 bp, Homo sapiens
tcaatctcttgatct

SEQ ID NO: 1864791 - DNA, 15 bp, Homo sapiens
caatctcttgatctt

SEQ ID NO: 1864792 - DNA, 15 bp, Homo sapiens
aatctcttgatcttt

SEQ ID NO: 1864793 - DNA, 15 bp, Homo sapiens
atctcttgatctttt

SEQ ID NO: 1864794 - DNA, 15 bp, Homo sapiens
tctcttgatcttttt

SEQ ID NO: 1864795 - DNA, 15 bp, Homo sapiens
ctcttgatctttttt

SEQ ID NO: 1864796 - DNA, 15 bp, Homo sapiens
tcttgatctttttta

SEQ ID NO: 1864797 - DNA, 15 bp, Homo sapiens
cttgatcttttttat

SEQ ID NO: 1864798 - DNA, 15 bp, Homo sapiens
ttgatcttttttatt

SEQ ID NO: 1864799 - DNA, 15 bp, Homo sapiens
tgatcttttttattt

SEQ ID NO: 1864800 - DNA, 15 bp, Homo sapiens
gatcttttttattta

SEQ ID NO: 1864801 - DNA, 15 bp, Homo sapiens
atcttttttatttat

SEQ ID NO: 1864802 - DNA, 15 bp, Homo sapiens
tatttatttttttaa

SEQ ID NO: 1864803 - DNA, 15 bp, Homo sapiens
atttatttttttaaa

SEQ ID NO: 1864804 - DNA, 15 bp, Homo sapiens
tttatttttttaaat

SEQ ID NO: 1864805 - DNA, 15 bp, Homo sapiens
ttatttttttaaatg

SEQ ID NO: 1864806 - DNA, 15 bp, Homo sapiens
tatttttttaaatga

SEQ ID NO: 1864807 - DNA, 15 bp, Homo sapiens
atttttttaaatgat

SEQ ID NO: 1864808 - DNA, 15 bp, Homo sapiens
tttttttaaatgata

SEQ ID NO: 1864809 - DNA, 15 bp, Homo sapiens
ttttttaaatgataa

SEQ ID NO: 1864810 - DNA, 15 bp, Homo sapiens
tttttaaatgataaa

SEQ ID NO: 1864811 - DNA, 15 bp, Homo sapiens
ttttaaatgataaaa

SEQ ID NO: 1864812 - DNA, 15 bp, Homo sapiens
tttaaatgataaaaa

SEQ ID NO: 1864813 - DNA, 15 bp, Homo sapiens
ttaaatgataaaaac

SEQ ID NO: 1864814 - DNA, 15 bp, Homo sapiens
taaatgataaaaaca

SEQ ID NO: 1864815 - DNA, 15 bp, Homo sapiens
aaatgataaaaacaa

SEQ ID NO: 1864816 - DNA, 15 bp, Homo sapiens
aatgataaaaacaaa

SEQ ID NO: 1864817 - DNA, 15 bp, Homo sapiens
atgataaaaacaaag

SEQ ID NO: 1864818 - DNA, 15 bp, Homo sapiens
tgataaaaacaaagt

SEQ ID NO: 1864819 - DNA, 15 bp, Homo sapiens
gataaaaacaaagtt

SEQ ID NO: 1864820 - DNA, 15 bp, Homo sapiens
ataaaaacaaagttc

SEQ ID NO: 1864821 - DNA, 15 bp, Homo sapiens
taaaaacaaagttca

SEQ ID NO: 1864822 - DNA, 15 bp, Homo sapiens
aaaaacaaagttcag

SEQ ID NO: 1864823 - DNA, 15 bp, Homo sapiens
aaaacaaagttcaga

SEQ ID NO: 1864824 - DNA, 15 bp, Homo sapiens
aaacaaagttcagag

SEQ ID NO: 1864825 - DNA, 15 bp, Homo sapiens
aacaaagttcagagc

SEQ ID NO: 1864826 - DNA, 15 bp, Homo sapiens
acaaagttcagagct

SEQ ID NO: 1864827 - DNA, 15 bp, Homo sapiens
caaagttcagagctg

SEQ ID NO: 1864828 - DNA, 15 bp, Homo sapiens
aaagttcagagctgg

SEQ ID NO: 1864829 - DNA, 15 bp, Homo sapiens
aagttcagagctggg

SEQ ID NO: 1864830 - DNA, 15 bp, Homo sapiens
agttcagagctgggg

SEQ ID NO: 1864831 - DNA, 15 bp, Homo sapiens
gttcagagctggggc

SEQ ID NO: 1864832 - DNA, 15 bp, Homo sapiens
ttcagagctggggca

SEQ ID NO: 1864833 - DNA, 15 bp, Homo sapiens
tcagagctggggcat

SEQ ID NO: 1864834 - DNA, 15 bp, Homo sapiens
cagagctggggcata

SEQ ID NO: 1864835 - DNA, 15 bp, Homo sapiens
agagctggggcataa

SEQ ID NO: 1864836 - DNA, 15 bp, Homo sapiens
gagctggggcataac

SEQ ID NO: 1864837 - DNA, 15 bp, Homo sapiens
agctggggcataact

SEQ ID NO: 1864838 - DNA, 15 bp, Homo sapiens
gctggggcataactt

SEQ ID NO: 1864839 - DNA, 15 bp, Homo sapiens
ctggggcataacttg

SEQ ID NO: 1864840 - DNA, 15 bp, Homo sapiens
tggggcataacttgt

SEQ ID NO: 1864841 - DNA, 15 bp, Homo sapiens
ggggcataacttgtc

SEQ ID NO: 1864842 - DNA, 15 bp, Homo sapiens
gggcataacttgtcc

SEQ ID NO: 1864843 - DNA, 15 bp, Homo sapiens
ggcataacttgtcca

SEQ ID NO: 1864844 - DNA, 15 bp, Homo sapiens
gcataacttgtccaa

SEQ ID NO: 1864845 - DNA, 15 bp, Homo sapiens
cataacttgtccaag

SEQ ID NO: 1864846 - DNA, 15 bp, Homo sapiens
ataacttgtccaagg

SEQ ID NO: 1864847 - DNA, 15 bp, Homo sapiens
taacttgtccaaggt

SEQ ID NO: 1864848 - DNA, 15 bp, Homo sapiens
aacttgtccaaggtc

SEQ ID NO: 1864849 - DNA, 15 bp, Homo sapiens
acttgtccaaggtca

SEQ ID NO: 1864850 - DNA, 15 bp, Homo sapiens
cttgtccaaggtcac

SEQ ID NO: 1864851 - DNA, 15 bp, Homo sapiens
ttgtccaaggtcact

SEQ ID NO: 1864852 - DNA, 15 bp, Homo sapiens
tgtccaaggtcactg

SEQ ID NO: 1864853 - DNA, 15 bp, Homo sapiens
gtccaaggtcactga

SEQ ID NO: 1864854 - DNA, 15 bp, Homo sapiens
tccaaggtcactgag

SEQ ID NO: 1864855 - DNA, 15 bp, Homo sapiens
ccaaggtcactgaga

SEQ ID NO: 1864856 - DNA, 15 bp, Homo sapiens
caaggtcactgagag

SEQ ID NO: 1864857 - DNA, 15 bp, Homo sapiens
aaggtcactgagagc

SEQ ID NO: 1864858 - DNA, 15 bp, Homo sapiens
aggtcactgagagct

SEQ ID NO: 1864859 - DNA, 15 bp, Homo sapiens
ggtcactgagagctg

SEQ ID NO: 1864860 - DNA, 15 bp, Homo sapiens
gtcactgagagctgt

SEQ ID NO: 1864861 - DNA, 15 bp, Homo sapiens
tcactgagagctgta

SEQ ID NO: 1864862 - DNA, 15 bp, Homo sapiens
cactgagagctgtaa

SEQ ID NO: 1864863 - DNA, 15 bp, Homo sapiens
actgagagctgtaac

SEQ ID NO: 1864864 - DNA, 15 bp, Homo sapiens
ctgagagctgtaacc

SEQ ID NO: 1864865 - DNA, 15 bp, Homo sapiens
tgagagctgtaacca

SEQ ID NO: 1864866 - DNA, 15 bp, Homo sapiens
gagagctgtaaccat

SEQ ID NO: 1864867 - DNA, 15 bp, Homo sapiens
agagctgtaaccatc

SEQ ID NO: 1864868 - DNA, 15 bp, Homo sapiens
gagctgtaaccatca

SEQ ID NO: 1864869 - DNA, 15 bp, Homo sapiens
agctgtaaccatcaa

SEQ ID NO: 1864870 - DNA, 15 bp, Homo sapiens
gctgtaaccatcaac

SEQ ID NO: 1864871 - DNA, 15 bp, Homo sapiens
ctgtaaccatcaaca

SEQ ID NO: 1864872 - DNA, 15 bp, Homo sapiens
tgtaaccatcaacat

SEQ ID NO: 1864873 - DNA, 15 bp, Homo sapiens
gtaaccatcaacatg

SEQ ID NO: 1864874 - DNA, 15 bp, Homo sapiens
taaccatcaacatgt

SEQ ID NO: 1864875 - DNA, 15 bp, Homo sapiens
aaccatcaacatgtg

SEQ ID NO: 1864876 - DNA, 15 bp, Homo sapiens
accatcaacatgtgg

SEQ ID NO: 1864877 - DNA, 15 bp, Homo sapiens
ccatcaacatgtggg

SEQ ID NO: 1864878 - DNA, 15 bp, Homo sapiens
catcaacatgtgggg

SEQ ID NO: 1864879 - DNA, 15 bp, Homo sapiens
atcaacatgtggggc

SEQ ID NO: 1864880 - DNA, 15 bp, Homo sapiens
tcaacatgtggggca

SEQ ID NO: 1864881 - DNA, 15 bp, Homo sapiens
caacatgtggggcag

SEQ ID NO: 1864882 - DNA, 15 bp, Homo sapiens
aacatgtggggcagc

SEQ ID NO: 1864883 - DNA, 15 bp, Homo sapiens
acatgtggggcagca

SEQ ID NO: 1864884 - DNA, 15 bp, Homo sapiens
catgtggggcagcag

SEQ ID NO: 1864885 - DNA, 15 bp, Homo sapiens
atgtggggcagcagc

SEQ ID NO: 1864886 - DNA, 15 bp, Homo sapiens
tgtggggcagcagct

SEQ ID NO: 1864887 - DNA, 15 bp, Homo sapiens
gtggggcagcagctg

SEQ ID NO: 1864888 - DNA, 15 bp, Homo sapiens
tggggcagcagctgc

SEQ ID NO: 1864889 - DNA, 15 bp, Homo sapiens
ggggcagcagctgcc

SEQ ID NO: 1864890 - DNA, 15 bp, Homo sapiens
gggcagcagctgcct

SEQ ID NO: 1864891 - DNA, 15 bp, Homo sapiens
ggcagcagctgcctg

SEQ ID NO: 1864892 - DNA, 15 bp, Homo sapiens
gcagcagctgcctgg

SEQ ID NO: 1864893 - DNA, 15 bp, Homo sapiens
cagcagctgcctggg

SEQ ID NO: 1864894 - DNA, 15 bp, Homo sapiens
agcagctgcctgggt

SEQ ID NO: 1864895 - DNA, 15 bp, Homo sapiens
gcagctgcctgggtt

SEQ ID NO: 1864896 - DNA, 15 bp, Homo sapiens
cagctgcctgggttt

SEQ ID NO: 1864897 - DNA, 15 bp, Homo sapiens
agctgcctgggtttc

SEQ ID NO: 1864898 - DNA, 15 bp, Homo sapiens
gctgcctgggtttca

SEQ ID NO: 1864899 - DNA, 15 bp, Homo sapiens
ctgcctgggtttcaa

SEQ ID NO: 1864900 - DNA, 15 bp, Homo sapiens
tgcctgggtttcaaa

SEQ ID NO: 1864901 - DNA, 15 bp, Homo sapiens
gcctgggtttcaaag

SEQ ID NO: 1864902 - DNA, 15 bp, Homo sapiens
cctgggtttcaaaga

SEQ ID NO: 1864903 - DNA, 15 bp, Homo sapiens
ctgggtttcaaagaa

SEQ ID NO: 1864904 - DNA, 15 bp, Homo sapiens
tgggtttcaaagaaa

SEQ ID NO: 1864905 - DNA, 15 bp, Homo sapiens
gggtttcaaagaaag

SEQ ID NO: 1864906 - DNA, 15 bp, Homo sapiens
ggtttcaaagaaagg

SEQ ID NO: 1864907 - DNA, 15 bp, Homo sapiens
gtttcaaagaaaggg

SEQ ID NO: 1864908 - DNA, 15 bp, Homo sapiens
tttcaaagaaagggg

SEQ ID NO: 1864909 - DNA, 15 bp, Homo sapiens
ttcaaagaaagggga

SEQ ID NO: 1864910 - DNA, 15 bp, Homo sapiens
tcaaagaaaggggac

SEQ ID NO: 1864911 - DNA, 15 bp, Homo sapiens
caaagaaaggggact

SEQ ID NO: 1864912 - DNA, 15 bp, Homo sapiens
aaagaaaggggactt

SEQ ID NO: 1864913 - DNA, 15 bp, Homo sapiens
aagaaaggggacttg

SEQ ID NO: 1864914 - DNA, 15 bp, Homo sapiens
agaaaggggacttgc

SEQ ID NO: 1864915 - DNA, 15 bp, Homo sapiens
gaaaggggacttgct

SEQ ID NO: 1864916 - DNA, 15 bp, Homo sapiens
aaaggggacttgctg

SEQ ID NO: 1864917 - DNA, 15 bp, Homo sapiens
aaggggacttgctgc

SEQ ID NO: 1864918 - DNA, 15 bp, Homo sapiens
aggggacttgctgcc

SEQ ID NO: 1864919 - DNA, 15 bp, Homo sapiens
ggggacttgctgcca

SEQ ID NO: 1864920 - DNA, 15 bp, Homo sapiens
gggacttgctgccat

SEQ ID NO: 1864921 - DNA, 15 bp, Homo sapiens
ggacttgctgccatt

SEQ ID NO: 1864922 - DNA, 15 bp, Homo sapiens
gacttgctgccattc

SEQ ID NO: 1864923 - DNA, 15 bp, Homo sapiens
acttgctgccattcc

SEQ ID NO: 1864924 - DNA, 15 bp, Homo sapiens
cttgctgccattcct

SEQ ID NO: 1864925 - DNA, 15 bp, Homo sapiens
ttgctgccattcctc

SEQ ID NO: 1864926 - DNA, 15 bp, Homo sapiens
tgctgccattcctcc

SEQ ID NO: 1864927 - DNA, 15 bp, Homo sapiens
gctgccattcctcct

SEQ ID NO: 1864928 - DNA, 15 bp, Homo sapiens
ctgccattcctcctc

SEQ ID NO: 1864929 - DNA, 15 bp, Homo sapiens
tgccattcctcctcc

SEQ ID NO: 1864930 - DNA, 15 bp, Homo sapiens
gccattcctcctccc

SEQ ID NO: 1864931 - DNA, 15 bp, Homo sapiens
ccattcctcctcccc

SEQ ID NO: 1864932 - DNA, 15 bp, Homo sapiens
cattcctcctccccc

SEQ ID NO: 1864933 - DNA, 15 bp, Homo sapiens
ttcctcctcccccta

SEQ ID NO: 1864934 - DNA, 15 bp, Homo sapiens
tcctcctccccctag

SEQ ID NO: 1864935 - DNA, 15 bp, Homo sapiens
cctcctccccctagt

SEQ ID NO: 1864936 - DNA, 15 bp, Homo sapiens
ctcctccccctagtt

SEQ ID NO: 1864937 - DNA, 15 bp, Homo sapiens
tcctccccctagttg

SEQ ID NO: 1864938 - DNA, 15 bp, Homo sapiens
cctccccctagttgc

SEQ ID NO: 1864939 - DNA, 15 bp, Homo sapiens
ctccccctagttgcc

SEQ ID NO: 1864940 - DNA, 15 bp, Homo sapiens
tccccctagttgcca

SEQ ID NO: 1864941 - DNA, 15 bp, Homo sapiens
ccccctagttgccac

SEQ ID NO: 1864942 - DNA, 15 bp, Homo sapiens
cccctagttgccact

SEQ ID NO: 1864943 - DNA, 15 bp, Homo sapiens
ccctagttgccactg

SEQ ID NO: 1864944 - DNA, 15 bp, Homo sapiens
cctagttgccactgt

SEQ ID NO: 1864945 - DNA, 15 bp, Homo sapiens
ctagttgccactgtc

SEQ ID NO: 1864946 - DNA, 15 bp, Homo sapiens
tagttgccactgtct

SEQ ID NO: 1864947 - DNA, 15 bp, Homo sapiens
agttgccactgtctt

SEQ ID NO: 1864948 - DNA, 15 bp, Homo sapiens
gttgccactgtcttc

SEQ ID NO: 1864949 - DNA, 15 bp, Homo sapiens
ttgccactgtcttct

SEQ ID NO: 1864950 - DNA, 15 bp, Homo sapiens
tgccactgtcttctc

SEQ ID NO: 1864951 - DNA, 15 bp, Homo sapiens
gccactgtcttctca

SEQ ID NO: 1864952 - DNA, 15 bp, Homo sapiens
ccactgtcttctcat

SEQ ID NO: 1864953 - DNA, 15 bp, Homo sapiens
cactgtcttctcatg

SEQ ID NO: 1864954 - DNA, 15 bp, Homo sapiens
actgtcttctcatgg

SEQ ID NO: 1864955 - DNA, 15 bp, Homo sapiens
ctgtcttctcatggg

SEQ ID NO: 1864956 - DNA, 15 bp, Homo sapiens
tgtcttctcatgggt

SEQ ID NO: 1864957 - DNA, 15 bp, Homo sapiens
gtcttctcatgggtt

SEQ ID NO: 1864958 - DNA, 15 bp, Homo sapiens
tcttctcatgggttt

SEQ ID NO: 1864959 - DNA, 15 bp, Homo sapiens
cttctcatgggtttc

SEQ ID NO: 1864960 - DNA, 15 bp, Homo sapiens
ttctcatgggtttcc

SEQ ID NO: 1864961 - DNA, 15 bp, Homo sapiens
tctcatgggtttcct

SEQ ID NO: 1864962 - DNA, 15 bp, Homo sapiens
ctcatgggtttcctt

SEQ ID NO: 1864963 - DNA, 15 bp, Homo sapiens
tcatgggtttccttg

SEQ ID NO: 1864964 - DNA, 15 bp, Homo sapiens
catgggtttccttgt

SEQ ID NO: 1864965 - DNA, 15 bp, Homo sapiens
atgggtttccttgtc

SEQ ID NO: 1864966 - DNA, 15 bp, Homo sapiens
tgggtttccttgtcc

SEQ ID NO: 1864967 - DNA, 15 bp, Homo sapiens
gggtttccttgtcct

SEQ ID NO: 1864968 - DNA, 15 bp, Homo sapiens
ggtttccttgtcctt

SEQ ID NO: 1864969 - DNA, 15 bp, Homo sapiens
gtttccttgtccttc

SEQ ID NO: 1864970 - DNA, 15 bp, Homo sapiens
tttccttgtccttcc

SEQ ID NO: 1864971 - DNA, 15 bp, Homo sapiens
ttccttgtccttccc

SEQ ID NO: 1864972 - DNA, 15 bp, Homo sapiens
tccttgtccttccct

SEQ ID NO: 1864973 - DNA, 15 bp, Homo sapiens
cttgtccttccctgg

SEQ ID NO: 1864974 - DNA, 15 bp, Homo sapiens
ttgtccttccctggt

SEQ ID NO: 1864975 - DNA, 15 bp, Homo sapiens
tgtccttccctggtg

SEQ ID NO: 1864976 - DNA, 15 bp, Homo sapiens
gtccttccctggtgc

SEQ ID NO: 1864977 - DNA, 15 bp, Homo sapiens
tccttccctggtgcc

SEQ ID NO: 1864978 - DNA, 15 bp, Homo sapiens
ccttccctggtgccg

SEQ ID NO: 1864979 - DNA, 15 bp, Homo sapiens
cttccctggtgccga

SEQ ID NO: 1864980 - DNA, 15 bp, Homo sapiens
ttccctggtgccgag

SEQ ID NO: 1864981 - DNA, 15 bp, Homo sapiens
tccctggtgccgaga

SEQ ID NO: 1864982 - DNA, 15 bp, Homo sapiens
ccctggtgccgagaa

SEQ ID NO: 1864983 - DNA, 15 bp, Homo sapiens
cctggtgccgagaag

SEQ ID NO: 1864984 - DNA, 15 bp, Homo sapiens
ctggtgccgagaagc

SEQ ID NO: 1864985 - DNA, 15 bp, Homo sapiens
tggtgccgagaagca

SEQ ID NO: 1864986 - DNA, 15 bp, Homo sapiens
ggtgccgagaagcag

SEQ ID NO: 1864987 - DNA, 15 bp, Homo sapiens
gtgccgagaagcagg

SEQ ID NO: 1864988 - DNA, 15 bp, Homo sapiens
tgccgagaagcaggg

SEQ ID NO: 1864989 - DNA, 15 bp, Homo sapiens
gccgagaagcaggga

SEQ ID NO: 1864990 - DNA, 15 bp, Homo sapiens
ccgagaagcagggag

SEQ ID NO: 1864991 - DNA, 15 bp, Homo sapiens
cgagaagcagggagg

SEQ ID NO: 1864992 - DNA, 15 bp, Homo sapiens
gagaagcagggagga

SEQ ID NO: 1864993 - DNA, 15 bp, Homo sapiens
agaagcagggaggag

SEQ ID NO: 1864994 - DNA, 15 bp, Homo sapiens
gaagcagggaggagg

SEQ ID NO: 1864995 - DNA, 15 bp, Homo sapiens
aagcagggaggaggg

SEQ ID NO: 1864996 - DNA, 15 bp, Homo sapiens
agcagggaggaggga

SEQ ID NO: 1864997 - DNA, 15 bp, Homo sapiens
gcagggaggagggag

SEQ ID NO: 1864998 - DNA, 15 bp, Homo sapiens
cagggaggagggagc

SEQ ID NO: 1864999 - DNA, 15 bp, Homo sapiens
agggaggagggagca

SEQ ID NO: 1865000 - DNA, 15 bp, Homo sapiens
gggaggagggagcat

SEQ ID NO: 1865001 - DNA, 15 bp, Homo sapiens
ggaggagggagcatc

SEQ ID NO: 1865002 - DNA, 15 bp, Homo sapiens
gaggagggagcatct

SEQ ID NO: 1865003 - DNA, 15 bp, Homo sapiens
aggagggagcatctg

SEQ ID NO: 1865004 - DNA, 15 bp, Homo sapiens
ggagggagcatctgt

SEQ ID NO: 1865005 - DNA, 15 bp, Homo sapiens
gagggagcatctgtt

SEQ ID NO: 1865006 - DNA, 15 bp, Homo sapiens
agggagcatctgttg

SEQ ID NO: 1865007 - DNA, 15 bp, Homo sapiens
gggagcatctgttgc

SEQ ID NO: 1865008 - DNA, 15 bp, Homo sapiens
ggagcatctgttgcc

SEQ ID NO: 1865009 - DNA, 15 bp, Homo sapiens
gagcatctgttgcca

SEQ ID NO: 1865010 - DNA, 15 bp, Homo sapiens
agcatctgttgccat

SEQ ID NO: 1865011 - DNA, 15 bp, Homo sapiens
gcatctgttgccatg

SEQ ID NO: 1865012 - DNA, 15 bp, Homo sapiens
catctgttgccatgg

SEQ ID NO: 1865013 - DNA, 15 bp, Homo sapiens
atctgttgccatgga

SEQ ID NO: 1865014 - DNA, 15 bp, Homo sapiens
tctgttgccatggaa

SEQ ID NO: 1865015 - DNA, 15 bp, Homo sapiens
ctgttgccatggaaa

SEQ ID NO: 1865016 - DNA, 15 bp, Homo sapiens
tgttgccatggaaac

SEQ ID NO: 1865017 - DNA, 15 bp, Homo sapiens
gttgccatggaaaca

SEQ ID NO: 1865018 - DNA, 15 bp, Homo sapiens
ttgccatggaaacaa

SEQ ID NO: 1865019 - DNA, 15 bp, Homo sapiens
tgccatggaaacaag

SEQ ID NO: 1865020 - DNA, 15 bp, Homo sapiens
gccatggaaacaagc

SEQ ID NO: 1865021 - DNA, 15 bp, Homo sapiens
ccatggaaacaagcc

SEQ ID NO: 1865022 - DNA, 15 bp, Homo sapiens
catggaaacaagcct

SEQ ID NO: 1865023 - DNA, 15 bp, Homo sapiens
atggaaacaagccta

SEQ ID NO: 1865024 - DNA, 15 bp, Homo sapiens
tggaaacaagcctat

SEQ ID NO: 1865025 - DNA, 15 bp, Homo sapiens
ggaaacaagcctata

SEQ ID NO: 1865026 - DNA, 15 bp, Homo sapiens
gaaacaagcctatag

SEQ ID NO: 1865027 - DNA, 15 bp, Homo sapiens
aaacaagcctatagt

SEQ ID NO: 1865028 - DNA, 15 bp, Homo sapiens
aacaagcctatagta

SEQ ID NO: 1865029 - DNA, 15 bp, Homo sapiens
acaagcctatagtat

SEQ ID NO: 1865030 - DNA, 15 bp, Homo sapiens
caagcctatagtatg

SEQ ID NO: 1865031 - DNA, 15 bp, Homo sapiens
aagcctatagtatga

SEQ ID NO: 1865032 - DNA, 15 bp, Homo sapiens
agcctatagtatgag

SEQ ID NO: 1865033 - DNA, 15 bp, Homo sapiens
gcctatagtatgagt

SEQ ID NO: 1865034 - DNA, 15 bp, Homo sapiens
cctatagtatgagtt

SEQ ID NO: 1865035 - DNA, 15 bp, Homo sapiens
ctatagtatgagttc

SEQ ID NO: 1865036 - DNA, 15 bp, Homo sapiens
tatagtatgagttcg

SEQ ID NO: 1865037 - DNA, 15 bp, Homo sapiens
atagtatgagttcgc

SEQ ID NO: 1865038 - DNA, 15 bp, Homo sapiens
tagtatgagttcgct

SEQ ID NO: 1865039 - DNA, 15 bp, Homo sapiens
agtatgagttcgctc

SEQ ID NO: 1865040 - DNA, 15 bp, Homo sapiens
gtatgagttcgctct

SEQ ID NO: 1865041 - DNA, 15 bp, Homo sapiens
tatgagttcgctctc

SEQ ID NO: 1865042 - DNA, 15 bp, Homo sapiens
atgagttcgctctcc

SEQ ID NO: 1865043 - DNA, 15 bp, Homo sapiens
tgagttcgctctccc

SEQ ID NO: 1865044 - DNA, 15 bp, Homo sapiens
gagttcgctctcccc

SEQ ID NO: 1865045 - DNA, 15 bp, Homo sapiens
agttcgctctcccca

SEQ ID NO: 1865046 - DNA, 15 bp, Homo sapiens
gttcgctctccccaa

SEQ ID NO: 1865047 - DNA, 15 bp, Homo sapiens
ttcgctctccccaac

SEQ ID NO: 1865048 - DNA, 15 bp, Homo sapiens
tcgctctccccaact

SEQ ID NO: 1865049 - DNA, 15 bp, Homo sapiens
cgctctccccaactg

SEQ ID NO: 1865050 - DNA, 15 bp, Homo sapiens
gctctccccaactgg

SEQ ID NO: 1865051 - DNA, 15 bp, Homo sapiens
ctctccccaactggc

SEQ ID NO: 1865052 - DNA, 15 bp, Homo sapiens
tctccccaactggct

SEQ ID NO: 1865053 - DNA, 15 bp, Homo sapiens
ctccccaactggctg

SEQ ID NO: 1865054 - DNA, 15 bp, Homo sapiens
tccccaactggctgt

SEQ ID NO: 1865055 - DNA, 15 bp, Homo sapiens
ccccaactggctgtg

SEQ ID NO: 1865056 - DNA, 15 bp, Homo sapiens
cccaactggctgtgg

SEQ ID NO: 1865057 - DNA, 15 bp, Homo sapiens
ccaactggctgtggt

SEQ ID NO: 1865058 - DNA, 15 bp, Homo sapiens
caactggctgtggtt

SEQ ID NO: 1865059 - DNA, 15 bp, Homo sapiens
aactggctgtggttt

SEQ ID NO: 1865060 - DNA, 15 bp, Homo sapiens
actggctgtggtttc

SEQ ID NO: 1865061 - DNA, 15 bp, Homo sapiens
ctggctgtggtttct

SEQ ID NO: 1865062 - DNA, 15 bp, Homo sapiens
tggctgtggtttctc

SEQ ID NO: 1865063 - DNA, 15 bp, Homo sapiens
ggctgtggtttctct

SEQ ID NO: 1865064 - DNA, 15 bp, Homo sapiens
gctgtggtttctctg

SEQ ID NO: 1865065 - DNA, 15 bp, Homo sapiens
ctgtggtttctctga

SEQ ID NO: 1865066 - DNA, 15 bp, Homo sapiens
tgtggtttctctgac

SEQ ID NO: 1865067 - DNA, 15 bp, Homo sapiens
gtggtttctctgaca

SEQ ID NO: 1865068 - DNA, 15 bp, Homo sapiens
tggtttctctgacag

SEQ ID NO: 1865069 - DNA, 15 bp, Homo sapiens
ggtttctctgacagg

SEQ ID NO: 1865070 - DNA, 15 bp, Homo sapiens
gtttctctgacaggg

SEQ ID NO: 1865071 - DNA, 15 bp, Homo sapiens
tttctctgacagggg

SEQ ID NO: 1865072 - DNA, 15 bp, Homo sapiens
ttctctgacaggggc

SEQ ID NO: 1865073 - DNA, 15 bp, Homo sapiens
tctctgacaggggct

SEQ ID NO: 1865074 - DNA, 15 bp, Homo sapiens
ctctgacaggggctg

SEQ ID NO: 1865075 - DNA, 15 bp, Homo sapiens
tctgacaggggctgc

SEQ ID NO: 1865076 - DNA, 15 bp, Homo sapiens
ctgacaggggctgct

SEQ ID NO: 1865077 - DNA, 15 bp, Homo sapiens
tgacaggggctgcta

SEQ ID NO: 1865078 - DNA, 15 bp, Homo sapiens
gacaggggctgctac

SEQ ID NO: 1865079 - DNA, 15 bp, Homo sapiens
acaggggctgctact

SEQ ID NO: 1865080 - DNA, 15 bp, Homo sapiens
caggggctgctactg

SEQ ID NO: 1865081 - DNA, 15 bp, Homo sapiens
aggggctgctactgg

SEQ ID NO: 1865082 - DNA, 15 bp, Homo sapiens
ggggctgctactggt

SEQ ID NO: 1865083 - DNA, 15 bp, Homo sapiens
gggctgctactggtc

SEQ ID NO: 1865084 - DNA, 15 bp, Homo sapiens
ggctgctactggtcc

SEQ ID NO: 1865085 - DNA, 15 bp, Homo sapiens
gctgctactggtcct

SEQ ID NO: 1865086 - DNA, 15 bp, Homo sapiens
ctgctactggtcctg

SEQ ID NO: 1865087 - DNA, 15 bp, Homo sapiens
tgctactggtcctgc

SEQ ID NO: 1865088 - DNA, 15 bp, Homo sapiens
gctactggtcctgct

SEQ ID NO: 1865089 - DNA, 15 bp, Homo sapiens
ctactggtcctgctg

SEQ ID NO: 1865090 - DNA, 15 bp, Homo sapiens
tactggtcctgctgt

SEQ ID NO: 1865091 - DNA, 15 bp, Homo sapiens
actggtcctgctgtt

SEQ ID NO: 1865092 - DNA, 15 bp, Homo sapiens
ctggtcctgctgttg

SEQ ID NO: 1865093 - DNA, 15 bp, Homo sapiens
tggtcctgctgttgg

SEQ ID NO: 1865094 - DNA, 15 bp, Homo sapiens
ggtcctgctgttggg

SEQ ID NO: 1865095 - DNA, 15 bp, Homo sapiens
gtcctgctgttgggc

SEQ ID NO: 1865096 - DNA, 15 bp, Homo sapiens
tcctgctgttgggcc

SEQ ID NO: 1865097 - DNA, 15 bp, Homo sapiens
cctgctgttgggccc

SEQ ID NO: 1865098 - DNA, 15 bp, Homo sapiens
ctgctgttgggccct

SEQ ID NO: 1865099 - DNA, 15 bp, Homo sapiens
tgctgttgggcccta

SEQ ID NO: 1865100 - DNA, 15 bp, Homo sapiens
gctgttgggccctaa

SEQ ID NO: 1865101 - DNA, 15 bp, Homo sapiens
ctgttgggccctaat

SEQ ID NO: 1865102 - DNA, 15 bp, Homo sapiens
tgttgggccctaatg

SEQ ID NO: 1865103 - DNA, 15 bp, Homo sapiens
gttgggccctaatgg

SEQ ID NO: 1865104 - DNA, 15 bp, Homo sapiens
ttgggccctaatggg

SEQ ID NO: 1865105 - DNA, 15 bp, Homo sapiens
tgggccctaatgggg

SEQ ID NO: 1865106 - DNA, 15 bp, Homo sapiens
gggccctaatgggga

SEQ ID NO: 1865107 - DNA, 15 bp, Homo sapiens
ggccctaatggggac

SEQ ID NO: 1865108 - DNA, 15 bp, Homo sapiens
gccctaatggggact

SEQ ID NO: 1865109 - DNA, 15 bp, Homo sapiens
ccctaatggggactc

SEQ ID NO: 1865110 - DNA, 15 bp, Homo sapiens
cctaatggggactca

SEQ ID NO: 1865111 - DNA, 15 bp, Homo sapiens
ctaatggggactcag

SEQ ID NO: 1865112 - DNA, 15 bp, Homo sapiens
taatggggactcagg

SEQ ID NO: 1865113 - DNA, 15 bp, Homo sapiens
aatggggactcaggg

SEQ ID NO: 1865114 - DNA, 15 bp, Homo sapiens
atggggactcaggga

SEQ ID NO: 1865115 - DNA, 15 bp, Homo sapiens
tggggactcagggac

SEQ ID NO: 1865116 - DNA, 15 bp, Homo sapiens
ggggactcagggacc

SEQ ID NO: 1865117 - DNA, 15 bp, Homo sapiens
gggactcagggacca

SEQ ID NO: 1865118 - DNA, 15 bp, Homo sapiens
ggactcagggaccac

SEQ ID NO: 1865119 - DNA, 15 bp, Homo sapiens
gactcagggaccacc

SEQ ID NO: 1865120 - DNA, 15 bp, Homo sapiens
actcagggaccacca

SEQ ID NO: 1865121 - DNA, 15 bp, Homo sapiens
ctcagggaccaccac

SEQ ID NO: 1865122 - DNA, 15 bp, Homo sapiens
tcagggaccaccact

SEQ ID NO: 1865123 - DNA, 15 bp, Homo sapiens
cagggaccaccactg

SEQ ID NO: 1865124 - DNA, 15 bp, Homo sapiens
agggaccaccactgt

SEQ ID NO: 1865125 - DNA, 15 bp, Homo sapiens
gggaccaccactgta

SEQ ID NO: 1865126 - DNA, 15 bp, Homo sapiens
ggaccaccactgtat

SEQ ID NO: 1865127 - DNA, 15 bp, Homo sapiens
gaccaccactgtatt

SEQ ID NO: 1865128 - DNA, 15 bp, Homo sapiens
accaccactgtattt

SEQ ID NO: 1865129 - DNA, 15 bp, Homo sapiens
ccaccactgtatttg

SEQ ID NO: 1865130 - DNA, 15 bp, Homo sapiens
caccactgtatttgc

SEQ ID NO: 1865131 - DNA, 15 bp, Homo sapiens
accactgtatttgcc

SEQ ID NO: 1865132 - DNA, 15 bp, Homo sapiens
ccactgtatttgcca

SEQ ID NO: 1865133 - DNA, 15 bp, Homo sapiens
cactgtatttgccag

SEQ ID NO: 1865134 - DNA, 15 bp, Homo sapiens
actgtatttgccagg

SEQ ID NO: 1865135 - DNA, 15 bp, Homo sapiens
ctgtatttgccaggg

SEQ ID NO: 1865136 - DNA, 15 bp, Homo sapiens
tgtatttgccagggg

SEQ ID NO: 1865137 - DNA, 15 bp, Homo sapiens
gtatttgccagggga

SEQ ID NO: 1865138 - DNA, 15 bp, Homo sapiens
tatttgccaggggag

SEQ ID NO: 1865139 - DNA, 15 bp, Homo sapiens
atttgccaggggaga

SEQ ID NO: 1865140 - DNA, 15 bp, Homo sapiens
tttgccaggggagaa

SEQ ID NO: 1865141 - DNA, 15 bp, Homo sapiens
ttgccaggggagaaa

SEQ ID NO: 1865142 - DNA, 15 bp, Homo sapiens
tgccaggggagaaag

SEQ ID NO: 1865143 - DNA, 15 bp, Homo sapiens
gccaggggagaaagc

SEQ ID NO: 1865144 - DNA, 15 bp, Homo sapiens
ccaggggagaaagct

SEQ ID NO: 1865145 - DNA, 15 bp, Homo sapiens
caggggagaaagctg

SEQ ID NO: 1865146 - DNA, 15 bp, Homo sapiens
aggggagaaagctgg

SEQ ID NO: 1865147 - DNA, 15 bp, Homo sapiens
ggggagaaagctgga

SEQ ID NO: 1865148 - DNA, 15 bp, Homo sapiens
gggagaaagctggag

SEQ ID NO: 1865149 - DNA, 15 bp, Homo sapiens
ggagaaagctggagg

SEQ ID NO: 1865150 - DNA, 15 bp, Homo sapiens
gagaaagctggagga

SEQ ID NO: 1865151 - DNA, 15 bp, Homo sapiens
agaaagctggaggag

SEQ ID NO: 1865152 - DNA, 15 bp, Homo sapiens
gaaagctggaggagc

SEQ ID NO: 1865153 - DNA, 15 bp, Homo sapiens
aaagctggaggagca

SEQ ID NO: 1865154 - DNA, 15 bp, Homo sapiens
aagctggaggagcag

SEQ ID NO: 1865155 - DNA, 15 bp, Homo sapiens
agctggaggagcagc

SEQ ID NO: 1865156 - DNA, 15 bp, Homo sapiens
gctggaggagcagca

SEQ ID NO: 1865157 - DNA, 15 bp, Homo sapiens
ctggaggagcagcag

SEQ ID NO: 1865158 - DNA, 15 bp, Homo sapiens
tggaggagcagcaga

SEQ ID NO: 1865159 - DNA, 15 bp, Homo sapiens
ggaggagcagcagac

SEQ ID NO: 1865160 - DNA, 15 bp, Homo sapiens
gaggagcagcagaca

SEQ ID NO: 1865161 - DNA, 15 bp, Homo sapiens
aggagcagcagacat

SEQ ID NO: 1865162 - DNA, 15 bp, Homo sapiens
ggagcagcagacatc

SEQ ID NO: 1865163 - DNA, 15 bp, Homo sapiens
gagcagcagacatcc

SEQ ID NO: 1865164 - DNA, 15 bp, Homo sapiens
agcagcagacatccc

SEQ ID NO: 1865165 - DNA, 15 bp, Homo sapiens
gcagcagacatcccc

SEQ ID NO: 1865166 - DNA, 15 bp, Homo sapiens
cagcagacatcccct

SEQ ID NO: 1865167 - DNA, 15 bp, Homo sapiens
agcagacatccccta

SEQ ID NO: 1865168 - DNA, 15 bp, Homo sapiens
gcagacatcccctaa

SEQ ID NO: 1865169 - DNA, 15 bp, Homo sapiens
cagacatcccctaac

SEQ ID NO: 1865170 - DNA, 15 bp, Homo sapiens
agacatcccctaaca

SEQ ID NO: 1865171 - DNA, 15 bp, Homo sapiens
gacatcccctaacat

SEQ ID NO: 1865172 - DNA, 15 bp, Homo sapiens
acatcccctaacatg

SEQ ID NO: 1865173 - DNA, 15 bp, Homo sapiens
catcccctaacatga

SEQ ID NO: 1865174 - DNA, 15 bp, Homo sapiens
atcccctaacatgag

SEQ ID NO: 1865175 - DNA, 15 bp, Homo sapiens
tcccctaacatgagt

SEQ ID NO: 1865176 - DNA, 15 bp, Homo sapiens
cccctaacatgagtt

SEQ ID NO: 1865177 - DNA, 15 bp, Homo sapiens
ccctaacatgagttg

SEQ ID NO: 1865178 - DNA, 15 bp, Homo sapiens
cctaacatgagttgt

SEQ ID NO: 1865179 - DNA, 15 bp, Homo sapiens
ctaacatgagttgtg

SEQ ID NO: 1865180 - DNA, 15 bp, Homo sapiens
taacatgagttgtgc

SEQ ID NO: 1865181 - DNA, 15 bp, Homo sapiens
aacatgagttgtgca

SEQ ID NO: 1865182 - DNA, 15 bp, Homo sapiens
acatgagttgtgcag

SEQ ID NO: 1865183 - DNA, 15 bp, Homo sapiens
catgagttgtgcagg

SEQ ID NO: 1865184 - DNA, 15 bp, Homo sapiens
atgagttgtgcaggc

SEQ ID NO: 1865185 - DNA, 15 bp, Homo sapiens
tgagttgtgcaggct

SEQ ID NO: 1865186 - DNA, 15 bp, Homo sapiens
gagttgtgcaggctt

SEQ ID NO: 1865187 - DNA, 15 bp, Homo sapiens
agttgtgcaggcttg

SEQ ID NO: 1865188 - DNA, 15 bp, Homo sapiens
gttgtgcaggcttgg

SEQ ID NO: 1865189 - DNA, 15 bp, Homo sapiens
ttgtgcaggcttggt

SEQ ID NO: 1865190 - DNA, 15 bp, Homo sapiens
tgtgcaggcttggta

SEQ ID NO: 1865191 - DNA, 15 bp, Homo sapiens
gtgcaggcttggtaa

SEQ ID NO: 1865192 - DNA, 15 bp, Homo sapiens
tgcaggcttggtaat

SEQ ID NO: 1865193 - DNA, 15 bp, Homo sapiens
gcaggcttggtaatg

SEQ ID NO: 1865194 - DNA, 15 bp, Homo sapiens
caggcttggtaatgt

SEQ ID NO: 1865195 - DNA, 15 bp, Homo sapiens
aggcttggtaatgtg

SEQ ID NO: 1865196 - DNA, 15 bp, Homo sapiens
ggcttggtaatgtgg

SEQ ID NO: 1865197 - DNA, 15 bp, Homo sapiens
gcttggtaatgtgga

SEQ ID NO: 1865198 - DNA, 15 bp, Homo sapiens
cttggtaatgtggag

SEQ ID NO: 1865199 - DNA, 15 bp, Homo sapiens
ttggtaatgtggagt

SEQ ID NO: 1865200 - DNA, 15 bp, Homo sapiens
tggtaatgtggagtg

SEQ ID NO: 1865201 - DNA, 15 bp, Homo sapiens
ggtaatgtggagtgg

SEQ ID NO: 1865202 - DNA, 15 bp, Homo sapiens
gtaatgtggagtggg

SEQ ID NO: 1865203 - DNA, 15 bp, Homo sapiens
taatgtggagtgggc

SEQ ID NO: 1865204 - DNA, 15 bp, Homo sapiens
aatgtggagtgggca

SEQ ID NO: 1865205 - DNA, 15 bp, Homo sapiens
atgtggagtgggcat

SEQ ID NO: 1865206 - DNA, 15 bp, Homo sapiens
tgtggagtgggcatg

SEQ ID NO: 1865207 - DNA, 15 bp, Homo sapiens
gtggagtgggcatgc

SEQ ID NO: 1865208 - DNA, 15 bp, Homo sapiens
tggagtgggcatgca

SEQ ID NO: 1865209 - DNA, 15 bp, Homo sapiens
ggagtgggcatgcat

SEQ ID NO: 1865210 - DNA, 15 bp, Homo sapiens
gagtgggcatgcatt

SEQ ID NO: 1865211 - DNA, 15 bp, Homo sapiens
agtgggcatgcattg

SEQ ID NO: 1865212 - DNA, 15 bp, Homo sapiens
gtgggcatgcattgt

SEQ ID NO: 1865213 - DNA, 15 bp, Homo sapiens
tgggcatgcattgtg

SEQ ID NO: 1865214 - DNA, 15 bp, Homo sapiens
gggcatgcattgtgg

SEQ ID NO: 1865215 - DNA, 15 bp, Homo sapiens
ggcatgcattgtggt

SEQ ID NO: 1865216 - DNA, 15 bp, Homo sapiens
gcatgcattgtggtg

SEQ ID NO: 1865217 - DNA, 15 bp, Homo sapiens
catgcattgtggtga

SEQ ID NO: 1865218 - DNA, 15 bp, Homo sapiens
atgcattgtggtgat

SEQ ID NO: 1865219 - DNA, 15 bp, Homo sapiens
tgcattgtggtgatt

SEQ ID NO: 1865220 - DNA, 15 bp, Homo sapiens
gcattgtggtgattc

SEQ ID NO: 1865221 - DNA, 15 bp, Homo sapiens
cattgtggtgattct

SEQ ID NO: 1865222 - DNA, 15 bp, Homo sapiens
attgtggtgattctt

SEQ ID NO: 1865223 - DNA, 15 bp, Homo sapiens
ttgtggtgattcttc

SEQ ID NO: 1865224 - DNA, 15 bp, Homo sapiens
tgtggtgattcttct

SEQ ID NO: 1865225 - DNA, 15 bp, Homo sapiens
gtggtgattcttctt

SEQ ID NO: 1865226 - DNA, 15 bp, Homo sapiens
tggtgattcttcttg

SEQ ID NO: 1865227 - DNA, 15 bp, Homo sapiens
ggtgattcttcttgc

SEQ ID NO: 1865228 - DNA, 15 bp, Homo sapiens
gtgattcttcttgct

SEQ ID NO: 1865229 - DNA, 15 bp, Homo sapiens
tgattcttcttgctt

SEQ ID NO: 1865230 - DNA, 15 bp, Homo sapiens
gattcttcttgcttt

SEQ ID NO: 1865231 - DNA, 15 bp, Homo sapiens
attcttcttgctttt

SEQ ID NO: 1865232 - DNA, 15 bp, Homo sapiens
ttcttcttgcttttt

SEQ ID NO: 1865233 - DNA, 15 bp, Homo sapiens
tcttcttgctttttt

SEQ ID NO: 1865234 - DNA, 15 bp, Homo sapiens
cttcttgctttttta

SEQ ID NO: 1865235 - DNA, 15 bp, Homo sapiens
ttcttgcttttttaa

SEQ ID NO: 1865236 - DNA, 15 bp, Homo sapiens
tcttgcttttttaaa

SEQ ID NO: 1865237 - DNA, 15 bp, Homo sapiens
cttgcttttttaaac

SEQ ID NO: 1865238 - DNA, 15 bp, Homo sapiens
ttgcttttttaaacc

SEQ ID NO: 1865239 - DNA, 15 bp, Homo sapiens
tgcttttttaaacca

SEQ ID NO: 1865240 - DNA, 15 bp, Homo sapiens
gcttttttaaaccaa

SEQ ID NO: 1865241 - DNA, 15 bp, Homo sapiens
cttttttaaaccaat

SEQ ID NO: 1865242 - DNA, 15 bp, Homo sapiens
ttttttaaaccaatt

SEQ ID NO: 1865243 - DNA, 15 bp, Homo sapiens
tttttaaaccaattt

SEQ ID NO: 1865244 - DNA, 15 bp, Homo sapiens
ttttaaaccaatttc

SEQ ID NO: 1865245 - DNA, 15 bp, Homo sapiens
tttaaaccaatttct

SEQ ID NO: 1865246 - DNA, 15 bp, Homo sapiens
ttaaaccaatttctc

SEQ ID NO: 1865247 - DNA, 15 bp, Homo sapiens
taaaccaatttctcc

SEQ ID NO: 1865248 - DNA, 15 bp, Homo sapiens
aaaccaatttctcct

SEQ ID NO: 1865249 - DNA, 15 bp, Homo sapiens
aaccaatttctcctc

SEQ ID NO: 1865250 - DNA, 15 bp, Homo sapiens
accaatttctcctct

SEQ ID NO: 1865251 - DNA, 15 bp, Homo sapiens
ccaatttctcctctg

SEQ ID NO: 1865252 - DNA, 15 bp, Homo sapiens
caatttctcctctgc

SEQ ID NO: 1865253 - DNA, 15 bp, Homo sapiens
aatttctcctctgct

SEQ ID NO: 1865254 - DNA, 15 bp, Homo sapiens
atttctcctctgctg

SEQ ID NO: 1865255 - DNA, 15 bp, Homo sapiens
tttctcctctgctgg

SEQ ID NO: 1865256 - DNA, 15 bp, Homo sapiens
ttctcctctgctgga

SEQ ID NO: 1865257 - DNA, 15 bp, Homo sapiens
tctcctctgctggag

SEQ ID NO: 1865258 - DNA, 15 bp, Homo sapiens
ctcctctgctggaga

SEQ ID NO: 1865259 - DNA, 15 bp, Homo sapiens
tcctctgctggagac

SEQ ID NO: 1865260 - DNA, 15 bp, Homo sapiens
cctctgctggagact

SEQ ID NO: 1865261 - DNA, 15 bp, Homo sapiens
ctctgctggagactc

SEQ ID NO: 1865262 - DNA, 15 bp, Homo sapiens
tctgctggagactct

SEQ ID NO: 1865263 - DNA, 15 bp, Homo sapiens
ctgctggagactctt

SEQ ID NO: 1865264 - DNA, 15 bp, Homo sapiens
tgctggagactcttc

SEQ ID NO: 1865265 - DNA, 15 bp, Homo sapiens
gctggagactcttca

SEQ ID NO: 1865266 - DNA, 15 bp, Homo sapiens
ctggagactcttcac

SEQ ID NO: 1865267 - DNA, 15 bp, Homo sapiens
tggagactcttcaca

SEQ ID NO: 1865268 - DNA, 15 bp, Homo sapiens
ggagactcttcacag

SEQ ID NO: 1865269 - DNA, 15 bp, Homo sapiens
gagactcttcacaga

SEQ ID NO: 1865270 - DNA, 15 bp, Homo sapiens
agactcttcacagaa

SEQ ID NO: 1865271 - DNA, 15 bp, Homo sapiens
gactcttcacagaat

SEQ ID NO: 1865272 - DNA, 15 bp, Homo sapiens
actcttcacagaatt

SEQ ID NO: 1865273 - DNA, 15 bp, Homo sapiens
ctcttcacagaattt

SEQ ID NO: 1865274 - DNA, 15 bp, Homo sapiens
tcttcacagaattta

SEQ ID NO: 1865275 - DNA, 15 bp, Homo sapiens
cttcacagaatttaa

SEQ ID NO: 1865276 - DNA, 15 bp, Homo sapiens
ttcacagaatttaag

SEQ ID NO: 1865277 - DNA, 15 bp, Homo sapiens
tcacagaatttaaga

SEQ ID NO: 1865278 - DNA, 15 bp, Homo sapiens
cacagaatttaagag

SEQ ID NO: 1865279 - DNA, 15 bp, Homo sapiens
acagaatttaagagt

SEQ ID NO: 1865280 - DNA, 15 bp, Homo sapiens
cagaatttaagagtc

SEQ ID NO: 1865281 - DNA, 15 bp, Homo sapiens
agaatttaagagtct

SEQ ID NO: 1865282 - DNA, 15 bp, Homo sapiens
gaatttaagagtctt

SEQ ID NO: 1865283 - DNA, 15 bp, Homo sapiens
aatttaagagtcttt

SEQ ID NO: 1865284 - DNA, 15 bp, Homo sapiens
atttaagagtctttc

SEQ ID NO: 1865285 - DNA, 15 bp, Homo sapiens
tttaagagtctttct

SEQ ID NO: 1865286 - DNA, 15 bp, Homo sapiens
ttaagagtctttctc

SEQ ID NO: 1865287 - DNA, 15 bp, Homo sapiens
taagagtctttctca

SEQ ID NO: 1865288 - DNA, 15 bp, Homo sapiens
aagagtctttctcag

SEQ ID NO: 1865289 - DNA, 15 bp, Homo sapiens
agagtctttctcaga

SEQ ID NO: 1865290 - DNA, 15 bp, Homo sapiens
gagtctttctcagaa

SEQ ID NO: 1865291 - DNA, 15 bp, Homo sapiens
agtctttctcagaag

SEQ ID NO: 1865292 - DNA, 15 bp, Homo sapiens
gtctttctcagaagg

SEQ ID NO: 1865293 - DNA, 15 bp, Homo sapiens
tctttctcagaaggt

SEQ ID NO: 1865294 - DNA, 15 bp, Homo sapiens
ctttctcagaaggtg

SEQ ID NO: 1865295 - DNA, 15 bp, Homo sapiens
tttctcagaaggtga

SEQ ID NO: 1865296 - DNA, 15 bp, Homo sapiens
ttctcagaaggtgat

SEQ ID NO: 1865297 - DNA, 15 bp, Homo sapiens
tctcagaaggtgatc

SEQ ID NO: 1865298 - DNA, 15 bp, Homo sapiens
ctcagaaggtgatca

SEQ ID NO: 1865299 - DNA, 15 bp, Homo sapiens
tcagaaggtgatcag

SEQ ID NO: 1865300 - DNA, 15 bp, Homo sapiens
cagaaggtgatcagc

SEQ ID NO: 1865301 - DNA, 15 bp, Homo sapiens
agaaggtgatcagcc

SEQ ID NO: 1865302 - DNA, 15 bp, Homo sapiens
gaaggtgatcagcct

SEQ ID NO: 1865303 - DNA, 15 bp, Homo sapiens
aaggtgatcagcctt

SEQ ID NO: 1865304 - DNA, 15 bp, Homo sapiens
aggtgatcagccttg

SEQ ID NO: 1865305 - DNA, 15 bp, Homo sapiens
ggtgatcagccttgg

SEQ ID NO: 1865306 - DNA, 15 bp, Homo sapiens
gtgatcagccttgga

SEQ ID NO: 1865307 - DNA, 15 bp, Homo sapiens
tgatcagccttggac

SEQ ID NO: 1865308 - DNA, 15 bp, Homo sapiens
gatcagccttggaca

SEQ ID NO: 1865309 - DNA, 15 bp, Homo sapiens
atcagccttggacag

SEQ ID NO: 1865310 - DNA, 15 bp, Homo sapiens
tcagccttggacaga

SEQ ID NO: 1865311 - DNA, 15 bp, Homo sapiens
cagccttggacagac

SEQ ID NO: 1865312 - DNA, 15 bp, Homo sapiens
agccttggacagact

SEQ ID NO: 1865313 - DNA, 15 bp, Homo sapiens
gccttggacagactt

SEQ ID NO: 1865314 - DNA, 15 bp, Homo sapiens
ccttggacagacttt

SEQ ID NO: 1865315 - DNA, 15 bp, Homo sapiens
cttggacagactttg

SEQ ID NO: 1865316 - DNA, 15 bp, Homo sapiens
ttggacagactttgg

SEQ ID NO: 1865317 - DNA, 15 bp, Homo sapiens
tggacagactttggt

SEQ ID NO: 1865318 - DNA, 15 bp, Homo sapiens
ggacagactttggtc

SEQ ID NO: 1865319 - DNA, 15 bp, Homo sapiens
gacagactttggtct

SEQ ID NO: 1865320 - DNA, 15 bp, Homo sapiens
acagactttggtctt

SEQ ID NO: 1865321 - DNA, 15 bp, Homo sapiens
cagactttggtcttc

SEQ ID NO: 1865322 - DNA, 15 bp, Homo sapiens
agactttggtcttca

SEQ ID NO: 1865323 - DNA, 15 bp, Homo sapiens
gactttggtcttcag

SEQ ID NO: 1865324 - DNA, 15 bp, Homo sapiens
actttggtcttcaga

SEQ ID NO: 1865325 - DNA, 15 bp, Homo sapiens
ctttggtcttcagac

SEQ ID NO: 1865326 - DNA, 15 bp, Homo sapiens
tttggtcttcagacc

SEQ ID NO: 1865327 - DNA, 15 bp, Homo sapiens
ttggtcttcagaccc

SEQ ID NO: 1865328 - DNA, 15 bp, Homo sapiens
tggtcttcagacccc

SEQ ID NO: 1865329 - DNA, 15 bp, Homo sapiens
ggtcttcagacccca

SEQ ID NO: 1865330 - DNA, 15 bp, Homo sapiens
gtcttcagaccccag

SEQ ID NO: 1865331 - DNA, 15 bp, Homo sapiens
tcttcagaccccaga

SEQ ID NO: 1865332 - DNA, 15 bp, Homo sapiens
cttcagaccccagag

SEQ ID NO: 1865333 - DNA, 15 bp, Homo sapiens
ttcagaccccagagc

SEQ ID NO: 1865334 - DNA, 15 bp, Homo sapiens
tcagaccccagagcc

SEQ ID NO: 1865335 - DNA, 15 bp, Homo sapiens
cagaccccagagcca

SEQ ID NO: 1865336 - DNA, 15 bp, Homo sapiens
agaccccagagccaa

SEQ ID NO: 1865337 - DNA, 15 bp, Homo sapiens
gaccccagagccaaa

SEQ ID NO: 1865338 - DNA, 15 bp, Homo sapiens
accccagagccaaac

SEQ ID NO: 1865339 - DNA, 15 bp, Homo sapiens
ccccagagccaaact

SEQ ID NO: 1865340 - DNA, 15 bp, Homo sapiens
cccagagccaaactt

SEQ ID NO: 1865341 - DNA, 15 bp, Homo sapiens
ccagagccaaacttt

SEQ ID NO: 1865342 - DNA, 15 bp, Homo sapiens
cagagccaaactttt

SEQ ID NO: 1865343 - DNA, 15 bp, Homo sapiens
agagccaaacttttg

SEQ ID NO: 1865344 - DNA, 15 bp, Homo sapiens
gagccaaacttttga

SEQ ID NO: 1865345 - DNA, 15 bp, Homo sapiens
agccaaacttttgaa

SEQ ID NO: 1865346 - DNA, 15 bp, Homo sapiens
gccaaacttttgaac

SEQ ID NO: 1865347 - DNA, 15 bp, Homo sapiens
ccaaacttttgaact

SEQ ID NO: 1865348 - DNA, 15 bp, Homo sapiens
caaacttttgaactg

SEQ ID NO: 1865349 - DNA, 15 bp, Homo sapiens
aaacttttgaactga

SEQ ID NO: 1865350 - DNA, 15 bp, Homo sapiens
aacttttgaactgac

SEQ ID NO: 1865351 - DNA, 15 bp, Homo sapiens
acttttgaactgaca

SEQ ID NO: 1865352 - DNA, 15 bp, Homo sapiens
cttttgaactgacag

SEQ ID NO: 1865353 - DNA, 15 bp, Homo sapiens
ttttgaactgacagc

SEQ ID NO: 1865354 - DNA, 15 bp, Homo sapiens
tttgaactgacagca

SEQ ID NO: 1865355 - DNA, 15 bp, Homo sapiens
ttgaactgacagcag

SEQ ID NO: 1865356 - DNA, 15 bp, Homo sapiens
tgaactgacagcagc

SEQ ID NO: 1865357 - DNA, 15 bp, Homo sapiens
gaactgacagcagct

SEQ ID NO: 1865358 - DNA, 15 bp, Homo sapiens
aactgacagcagctg

SEQ ID NO: 1865359 - DNA, 15 bp, Homo sapiens
actgacagcagctgt

SEQ ID NO: 1865360 - DNA, 15 bp, Homo sapiens
ctgacagcagctgtg

SEQ ID NO: 1865361 - DNA, 15 bp, Homo sapiens
tgacagcagctgtgg

SEQ ID NO: 1865362 - DNA, 15 bp, Homo sapiens
gacagcagctgtggc

SEQ ID NO: 1865363 - DNA, 15 bp, Homo sapiens
acagcagctgtggcc

SEQ ID NO: 1865364 - DNA, 15 bp, Homo sapiens
cagcagctgtggcca

SEQ ID NO: 1865365 - DNA, 15 bp, Homo sapiens
agcagctgtggccaa

SEQ ID NO: 1865366 - DNA, 15 bp, Homo sapiens
gcagctgtggccaaa

SEQ ID NO: 1865367 - DNA, 15 bp, Homo sapiens
cagctgtggccaaaa

SEQ ID NO: 1865368 - DNA, 15 bp, Homo sapiens
agctgtggccaaaaa

SEQ ID NO: 1865369 - DNA, 15 bp, Homo sapiens
gctgtggccaaaaat

SEQ ID NO: 1865370 - DNA, 15 bp, Homo sapiens
ctgtggccaaaaatg

SEQ ID NO: 1865371 - DNA, 15 bp, Homo sapiens
tgtggccaaaaatgg

SEQ ID NO: 1865372 - DNA, 15 bp, Homo sapiens
gtggccaaaaatggt

SEQ ID NO: 1865373 - DNA, 15 bp, Homo sapiens
tggccaaaaatggtg

SEQ ID NO: 1865374 - DNA, 15 bp, Homo sapiens
ggccaaaaatggtgt

SEQ ID NO: 1865375 - DNA, 15 bp, Homo sapiens
gccaaaaatggtgtt

SEQ ID NO: 1865376 - DNA, 15 bp, Homo sapiens
ccaaaaatggtgttt

SEQ ID NO: 1865377 - DNA, 15 bp, Homo sapiens
caaaaatggtgtttg

SEQ ID NO: 1865378 - DNA, 15 bp, Homo sapiens
aaaaatggtgtttgt

SEQ ID NO: 1865379 - DNA, 15 bp, Homo sapiens
aaaatggtgtttgtc

SEQ ID NO: 1865380 - DNA, 15 bp, Homo sapiens
aaatggtgtttgtca

SEQ ID NO: 1865381 - DNA, 15 bp, Homo sapiens
aatggtgtttgtcag

SEQ ID NO: 1865382 - DNA, 15 bp, Homo sapiens
atggtgtttgtcaga

SEQ ID NO: 1865383 - DNA, 15 bp, Homo sapiens
tggtgtttgtcagac

SEQ ID NO: 1865384 - DNA, 15 bp, Homo sapiens
ggtgtttgtcagacc

SEQ ID NO: 1865385 - DNA, 15 bp, Homo sapiens
gtgtttgtcagacct

SEQ ID NO: 1865386 - DNA, 15 bp, Homo sapiens
tgtttgtcagacctg

SEQ ID NO: 1865387 - DNA, 15 bp, Homo sapiens
gtttgtcagacctgc

SEQ ID NO: 1865388 - DNA, 15 bp, Homo sapiens
tttgtcagacctgca

SEQ ID NO: 1865389 - DNA, 15 bp, Homo sapiens
ttgtcagacctgcag

SEQ ID NO: 1865390 - DNA, 15 bp, Homo sapiens
tgtcagacctgcagg

SEQ ID NO: 1865391 - DNA, 15 bp, Homo sapiens
gtcagacctgcagga

SEQ ID NO: 1865392 - DNA, 15 bp, Homo sapiens
tcagacctgcaggaa

SEQ ID NO: 1865393 - DNA, 15 bp, Homo sapiens
cagacctgcaggaag

SEQ ID NO: 1865394 - DNA, 15 bp, Homo sapiens
agacctgcaggaaga

SEQ ID NO: 1865395 - DNA, 15 bp, Homo sapiens
gacctgcaggaagaa

SEQ ID NO: 1865396 - DNA, 15 bp, Homo sapiens
acctgcaggaagaaa

SEQ ID NO: 1865397 - DNA, 15 bp, Homo sapiens
cctgcaggaagaaaa

SEQ ID NO: 1865398 - DNA, 15 bp, Homo sapiens
ctgcaggaagaaaat

SEQ ID NO: 1865399 - DNA, 15 bp, Homo sapiens
tgcaggaagaaaatc

SEQ ID NO: 1865400 - DNA, 15 bp, Homo sapiens
gcaggaagaaaatct

SEQ ID NO: 1865401 - DNA, 15 bp, Homo sapiens
caggaagaaaatctg

SEQ ID NO: 1865402 - DNA, 15 bp, Homo sapiens
aggaagaaaatctgc

SEQ ID NO: 1865403 - DNA, 15 bp, Homo sapiens
ggaagaaaatctgca

SEQ ID NO: 1865404 - DNA, 15 bp, Homo sapiens
gaagaaaatctgcaa

SEQ ID NO: 1865405 - DNA, 15 bp, Homo sapiens
aagaaaatctgcaat

SEQ ID NO: 1865406 - DNA, 15 bp, Homo sapiens
agaaaatctgcaatg

SEQ ID NO: 1865407 - DNA, 15 bp, Homo sapiens
gaaaatctgcaatga

SEQ ID NO: 1865408 - DNA, 15 bp, Homo sapiens
aaaatctgcaatgaa

SEQ ID NO: 1865409 - DNA, 15 bp, Homo sapiens
aaatctgcaatgaag

SEQ ID NO: 1865410 - DNA, 15 bp, Homo sapiens
aatctgcaatgaaga

SEQ ID NO: 1865411 - DNA, 15 bp, Homo sapiens
atctgcaatgaagag

SEQ ID NO: 1865412 - DNA, 15 bp, Homo sapiens
tctgcaatgaagagt

SEQ ID NO: 1865413 - DNA, 15 bp, Homo sapiens
ctgcaatgaagagtt

SEQ ID NO: 1865414 - DNA, 15 bp, Homo sapiens
tgcaatgaagagttg

SEQ ID NO: 1865415 - DNA, 15 bp, Homo sapiens
gcaatgaagagttgg

SEQ ID NO: 1865416 - DNA, 15 bp, Homo sapiens
caatgaagagttgga

SEQ ID NO: 1865417 - DNA, 15 bp, Homo sapiens
aatgaagagttggag

SEQ ID NO: 1865418 - DNA, 15 bp, Homo sapiens
atgaagagttggagt

SEQ ID NO: 1865419 - DNA, 15 bp, Homo sapiens
tgaagagttggagtg

SEQ ID NO: 1865420 - DNA, 15 bp, Homo sapiens
gaagagttggagtgg

SEQ ID NO: 1865421 - DNA, 15 bp, Homo sapiens
aagagttggagtggt

SEQ ID NO: 1865422 - DNA, 15 bp, Homo sapiens
agagttggagtggta

SEQ ID NO: 1865423 - DNA, 15 bp, Homo sapiens
gagttggagtggtag

SEQ ID NO: 1865424 - DNA, 15 bp, Homo sapiens
agttggagtggtagg

SEQ ID NO: 1865425 - DNA, 15 bp, Homo sapiens
gttggagtggtagga

SEQ ID NO: 1865426 - DNA, 15 bp, Homo sapiens
ttggagtggtaggaa

SEQ ID NO: 1865427 - DNA, 15 bp, Homo sapiens
tggagtggtaggaaa

SEQ ID NO: 1865428 - DNA, 15 bp, Homo sapiens
ggagtggtaggaaaa

SEQ ID NO: 1865429 - DNA, 15 bp, Homo sapiens
gagtggtaggaaaag

SEQ ID NO: 1865430 - DNA, 15 bp, Homo sapiens
agtggtaggaaaaga

SEQ ID NO: 1865431 - DNA, 15 bp, Homo sapiens
gtggtaggaaaagag

SEQ ID NO: 1865432 - DNA, 15 bp, Homo sapiens
tggtaggaaaagagg

SEQ ID NO: 1865433 - DNA, 15 bp, Homo sapiens
ggtaggaaaagagga

SEQ ID NO: 1865434 - DNA, 15 bp, Homo sapiens
gtaggaaaagaggaa

SEQ ID NO: 1865435 - DNA, 15 bp, Homo sapiens
taggaaaagaggaaa

SEQ ID NO: 1865436 - DNA, 15 bp, Homo sapiens
aggaaaagaggaaaa

SEQ ID NO: 1865437 - DNA, 15 bp, Homo sapiens
ggaaaagaggaaaaa

SEQ ID NO: 1865438 - DNA, 15 bp, Homo sapiens
gaaaagaggaaaaag

SEQ ID NO: 1865439 - DNA, 15 bp, Homo sapiens
aaaagaggaaaaaga

SEQ ID NO: 1865440 - DNA, 15 bp, Homo sapiens
aaagaggaaaaagag

SEQ ID NO: 1865441 - DNA, 15 bp, Homo sapiens
aagaggaaaaagagg

SEQ ID NO: 1865442 - DNA, 15 bp, Homo sapiens
agaggaaaaagaggg

SEQ ID NO: 1865443 - DNA, 15 bp, Homo sapiens
gaggaaaaagaggga

SEQ ID NO: 1865444 - DNA, 15 bp, Homo sapiens
aggaaaaagagggaa

SEQ ID NO: 1865445 - DNA, 15 bp, Homo sapiens
ggaaaaagagggaac

SEQ ID NO: 1865446 - DNA, 15 bp, Homo sapiens
gaaaaagagggaact

SEQ ID NO: 1865447 - DNA, 15 bp, Homo sapiens
aaaaagagggaactt

SEQ ID NO: 1865448 - DNA, 15 bp, Homo sapiens
aaaagagggaacttg

SEQ ID NO: 1865449 - DNA, 15 bp, Homo sapiens
aaagagggaacttgt

SEQ ID NO: 1865450 - DNA, 15 bp, Homo sapiens
aagagggaacttgtt

SEQ ID NO: 1865451 - DNA, 15 bp, Homo sapiens
agagggaacttgttt

SEQ ID NO: 1865452 - DNA, 15 bp, Homo sapiens
gagggaacttgtttt

SEQ ID NO: 1865453 - DNA, 15 bp, Homo sapiens
agggaacttgttttg

SEQ ID NO: 1865454 - DNA, 15 bp, Homo sapiens
gggaacttgttttgc

SEQ ID NO: 1865455 - DNA, 15 bp, Homo sapiens
ggaacttgttttgcc

SEQ ID NO: 1865456 - DNA, 15 bp, Homo sapiens
gaacttgttttgcct

SEQ ID NO: 1865457 - DNA, 15 bp, Homo sapiens
aacttgttttgcctt

SEQ ID NO: 1865458 - DNA, 15 bp, Homo sapiens
acttgttttgccttc

SEQ ID NO: 1865459 - DNA, 15 bp, Homo sapiens
cttgttttgccttca

SEQ ID NO: 1865460 - DNA, 15 bp, Homo sapiens
ttgttttgccttcag

SEQ ID NO: 1865461 - DNA, 15 bp, Homo sapiens
tgttttgccttcaga

SEQ ID NO: 1865462 - DNA, 15 bp, Homo sapiens
gttttgccttcagac

SEQ ID NO: 1865463 - DNA, 15 bp, Homo sapiens
ttttgccttcagaca

SEQ ID NO: 1865464 - DNA, 15 bp, Homo sapiens
tttgccttcagacat

SEQ ID NO: 1865465 - DNA, 15 bp, Homo sapiens
ttgccttcagacata

SEQ ID NO: 1865466 - DNA, 15 bp, Homo sapiens
tgccttcagacatat

SEQ ID NO: 1865467 - DNA, 15 bp, Homo sapiens
gccttcagacatatt

SEQ ID NO: 1865468 - DNA, 15 bp, Homo sapiens
ccttcagacatattt

SEQ ID NO: 1865469 - DNA, 15 bp, Homo sapiens
cttcagacatattta

SEQ ID NO: 1865470 - DNA, 15 bp, Homo sapiens
ttcagacatatttaa

SEQ ID NO: 1865471 - DNA, 15 bp, Homo sapiens
tcagacatatttaag

SEQ ID NO: 1865472 - DNA, 15 bp, Homo sapiens
cagacatatttaagt

SEQ ID NO: 1865473 - DNA, 15 bp, Homo sapiens
agacatatttaagtc

SEQ ID NO: 1865474 - DNA, 15 bp, Homo sapiens
gacatatttaagtct

SEQ ID NO: 1865475 - DNA, 15 bp, Homo sapiens
acatatttaagtctc

SEQ ID NO: 1865476 - DNA, 15 bp, Homo sapiens
catatttaagtctcc

SEQ ID NO: 1865477 - DNA, 15 bp, Homo sapiens
atatttaagtctcct

SEQ ID NO: 1865478 - DNA, 15 bp, Homo sapiens
tatttaagtctccta

SEQ ID NO: 1865479 - DNA, 15 bp, Homo sapiens
atttaagtctcctaa

SEQ ID NO: 1865480 - DNA, 15 bp, Homo sapiens
tttaagtctcctaag

SEQ ID NO: 1865481 - DNA, 15 bp, Homo sapiens
ttaagtctcctaagt

SEQ ID NO: 1865482 - DNA, 15 bp, Homo sapiens
taagtctcctaagta

SEQ ID NO: 1865483 - DNA, 15 bp, Homo sapiens
aagtctcctaagtac

SEQ ID NO: 1865484 - DNA, 15 bp, Homo sapiens
agtctcctaagtact

SEQ ID NO: 1865485 - DNA, 15 bp, Homo sapiens
gtctcctaagtactt

SEQ ID NO: 1865486 - DNA, 15 bp, Homo sapiens
tctcctaagtacttc

SEQ ID NO: 1865487 - DNA, 15 bp, Homo sapiens
ctcctaagtacttca

SEQ ID NO: 1865488 - DNA, 15 bp, Homo sapiens
tcctaagtacttcag

SEQ ID NO: 1865489 - DNA, 15 bp, Homo sapiens
cctaagtacttcagg

SEQ ID NO: 1865490 - DNA, 15 bp, Homo sapiens
ctaagtacttcagga

SEQ ID NO: 1865491 - DNA, 15 bp, Homo sapiens
taagtacttcaggag

SEQ ID NO: 1865492 - DNA, 15 bp, Homo sapiens
aagtacttcaggagt

SEQ ID NO: 1865493 - DNA, 15 bp, Homo sapiens
agtacttcaggagtt

SEQ ID NO: 1865494 - DNA, 15 bp, Homo sapiens
gtacttcaggagtta

SEQ ID NO: 1865495 - DNA, 15 bp, Homo sapiens
tacttcaggagttaa

SEQ ID NO: 1865496 - DNA, 15 bp, Homo sapiens
acttcaggagttaaa

SEQ ID NO: 1865497 - DNA, 15 bp, Homo sapiens
cttcaggagttaaaa

SEQ ID NO: 1865498 - DNA, 15 bp, Homo sapiens
ttcaggagttaaaat

SEQ ID NO: 1865499 - DNA, 15 bp, Homo sapiens
tcaggagttaaaatg

SEQ ID NO: 1865500 - DNA, 15 bp, Homo sapiens
caggagttaaaatgg

SEQ ID NO: 1865501 - DNA, 15 bp, Homo sapiens
aggagttaaaatggg

SEQ ID NO: 1865502 - DNA, 15 bp, Homo sapiens
ggagttaaaatgggg

SEQ ID NO: 1865503 - DNA, 15 bp, Homo sapiens
gagttaaaatggggc

SEQ ID NO: 1865504 - DNA, 15 bp, Homo sapiens
agttaaaatggggct

SEQ ID NO: 1865505 - DNA, 15 bp, Homo sapiens
gttaaaatggggctt

SEQ ID NO: 1865506 - DNA, 15 bp, Homo sapiens
ttaaaatggggcttt

SEQ ID NO: 1865507 - DNA, 15 bp, Homo sapiens
taaaatggggctttg

SEQ ID NO: 1865508 - DNA, 15 bp, Homo sapiens
aaaatggggctttga

SEQ ID NO: 1865509 - DNA, 15 bp, Homo sapiens
aaatggggctttgaa

SEQ ID NO: 1865510 - DNA, 15 bp, Homo sapiens
aatggggctttgaaa

SEQ ID NO: 1865511 - DNA, 15 bp, Homo sapiens
atggggctttgaaaa

SEQ ID NO: 1865512 - DNA, 15 bp, Homo sapiens
tggggctttgaaaat

SEQ ID NO: 1865513 - DNA, 15 bp, Homo sapiens
ggggctttgaaaata

SEQ ID NO: 1865514 - DNA, 15 bp, Homo sapiens
gggctttgaaaataa

SEQ ID NO: 1865515 - DNA, 15 bp, Homo sapiens
ggctttgaaaataaa

SEQ ID NO: 1865516 - DNA, 15 bp, Homo sapiens
gctttgaaaataaat

SEQ ID NO: 1865517 - DNA, 15 bp, Homo sapiens
ctttgaaaataaata

SEQ ID NO: 1865518 - DNA, 15 bp, Homo sapiens
tttgaaaataaatag

SEQ ID NO: 1865519 - DNA, 15 bp, Homo sapiens
ttgaaaataaataga

SEQ ID NO: 1865520 - DNA, 15 bp, Homo sapiens
tgaaaataaatagac

SEQ ID NO: 1865521 - DNA, 15 bp, Homo sapiens
gaaaataaatagact

SEQ ID NO: 1865522 - DNA, 15 bp, Homo sapiens
aaaataaatagactt

SEQ ID NO: 1865523 - DNA, 15 bp, Homo sapiens
aaataaatagacttt

SEQ ID NO: 1865524 - DNA, 15 bp, Homo sapiens
aataaatagactttt

SEQ ID NO: 1865525 - DNA, 15 bp, Homo sapiens
ataaatagacttttc

SEQ ID NO: 1865526 - DNA, 15 bp, Homo sapiens
taaatagacttttct

SEQ ID NO: 1865527 - DNA, 15 bp, Homo sapiens
aaatagacttttctg

SEQ ID NO: 1865528 - DNA, 15 bp, Homo sapiens
aatagacttttctgt

SEQ ID NO: 1865529 - DNA, 15 bp, Homo sapiens
atagacttttctgtt

SEQ ID NO: 1865530 - DNA, 15 bp, Homo sapiens
tagacttttctgttc

SEQ ID NO: 1865531 - DNA, 15 bp, Homo sapiens
agacttttctgttca

SEQ ID NO: 1865532 - DNA, 15 bp, Homo sapiens
gacttttctgttcat

SEQ ID NO: 1865533 - DNA, 15 bp, Homo sapiens
acttttctgttcatg

SEQ ID NO: 1865534 - DNA, 15 bp, Homo sapiens
cttttctgttcatgt

SEQ ID NO: 1865535 - DNA, 15 bp, Homo sapiens
ttttctgttcatgtg

SEQ ID NO: 1865536 - DNA, 15 bp, Homo sapiens
tttctgttcatgtgg

SEQ ID NO: 1865537 - DNA, 15 bp, Homo sapiens
ttctgttcatgtggg

SEQ ID NO: 1865538 - DNA, 15 bp, Homo sapiens
tctgttcatgtgggg

SEQ ID NO: 1865539 - DNA, 15 bp, Homo sapiens
ctgttcatgtggggc

SEQ ID NO: 1865540 - DNA, 15 bp, Homo sapiens
tgttcatgtggggct

SEQ ID NO: 1865541 - DNA, 15 bp, Homo sapiens
gttcatgtggggctg

SEQ ID NO: 1865542 - DNA, 15 bp, Homo sapiens
ttcatgtggggctga

SEQ ID NO: 1865543 - DNA, 15 bp, Homo sapiens
tcatgtggggctgaa

SEQ ID NO: 1865544 - DNA, 15 bp, Homo sapiens
catgtggggctgaag

SEQ ID NO: 1865545 - DNA, 15 bp, Homo sapiens
atgtggggctgaagt

SEQ ID NO: 1865546 - DNA, 15 bp, Homo sapiens
tgtggggctgaagtg

SEQ ID NO: 1865547 - DNA, 15 bp, Homo sapiens
gtggggctgaagtgt

SEQ ID NO: 1865548 - DNA, 15 bp, Homo sapiens
tggggctgaagtgtt

SEQ ID NO: 1865549 - DNA, 15 bp, Homo sapiens
ggggctgaagtgttc

SEQ ID NO: 1865550 - DNA, 15 bp, Homo sapiens
gggctgaagtgttcc

SEQ ID NO: 1865551 - DNA, 15 bp, Homo sapiens
ggctgaagtgttcca

SEQ ID NO: 1865552 - DNA, 15 bp, Homo sapiens
gctgaagtgttccag

SEQ ID NO: 1865553 - DNA, 15 bp, Homo sapiens
ctgaagtgttccagg

SEQ ID NO: 1865554 - DNA, 15 bp, Homo sapiens
tgaagtgttccaggg

SEQ ID NO: 1865555 - DNA, 15 bp, Homo sapiens
gaagtgttccagggt

SEQ ID NO: 1865556 - DNA, 15 bp, Homo sapiens
aagtgttccagggtt

SEQ ID NO: 1865557 - DNA, 15 bp, Homo sapiens
agtgttccagggttg

SEQ ID NO: 1865558 - DNA, 15 bp, Homo sapiens
gtgttccagggttgg

SEQ ID NO: 1865559 - DNA, 15 bp, Homo sapiens
tgttccagggttgga

SEQ ID NO: 1865560 - DNA, 15 bp, Homo sapiens
gttccagggttggaa

SEQ ID NO: 1865561 - DNA, 15 bp, Homo sapiens
ttccagggttggaaa

SEQ ID NO: 1865562 - DNA, 15 bp, Homo sapiens
tccagggttggaaag

SEQ ID NO: 1865563 - DNA, 15 bp, Homo sapiens
ccagggttggaaagg

SEQ ID NO: 1865564 - DNA, 15 bp, Homo sapiens
cagggttggaaaggg

SEQ ID NO: 1865565 - DNA, 15 bp, Homo sapiens
agggttggaaagggt

SEQ ID NO: 1865566 - DNA, 15 bp, Homo sapiens
gggttggaaagggtt

SEQ ID NO: 1865567 - DNA, 15 bp, Homo sapiens
ggttggaaagggttt

SEQ ID NO: 1865568 - DNA, 15 bp, Homo sapiens
gttggaaagggtttt

SEQ ID NO: 1865569 - DNA, 15 bp, Homo sapiens
ttggaaagggtttta

SEQ ID NO: 1865570 - DNA, 15 bp, Homo sapiens
tggaaagggttttat

SEQ ID NO: 1865571 - DNA, 15 bp, Homo sapiens
ggaaagggttttatt

SEQ ID NO: 1865572 - DNA, 15 bp, Homo sapiens
gaaagggttttatta

SEQ ID NO: 1865573 - DNA, 15 bp, Homo sapiens
aaagggttttattag

SEQ ID NO: 1865574 - DNA, 15 bp, Homo sapiens
aagggttttattagg

SEQ ID NO: 1865575 - DNA, 15 bp, Homo sapiens
agggttttattaggt

SEQ ID NO: 1865576 - DNA, 15 bp, Homo sapiens
gggttttattaggtc

SEQ ID NO: 1865577 - DNA, 15 bp, Homo sapiens
ggttttattaggtca

SEQ ID NO: 1865578 - DNA, 15 bp, Homo sapiens
gttttattaggtcat

SEQ ID NO: 1865579 - DNA, 15 bp, Homo sapiens
ttttattaggtcatt

SEQ ID NO: 1865580 - DNA, 15 bp, Homo sapiens
tttattaggtcattt

SEQ ID NO: 1865581 - DNA, 15 bp, Homo sapiens
ttattaggtcatttc

SEQ ID NO: 1865582 - DNA, 15 bp, Homo sapiens
tattaggtcatttca

SEQ ID NO: 1865583 - DNA, 15 bp, Homo sapiens
attaggtcatttcat

SEQ ID NO: 1865584 - DNA, 15 bp, Homo sapiens
ttaggtcatttcatc

SEQ ID NO: 1865585 - DNA, 15 bp, Homo sapiens
taggtcatttcatct

SEQ ID NO: 1865586 - DNA, 15 bp, Homo sapiens
aggtcatttcatctc

SEQ ID NO: 1865587 - DNA, 15 bp, Homo sapiens
ggtcatttcatctct

SEQ ID NO: 1865588 - DNA, 15 bp, Homo sapiens
gtcatttcatctctc

SEQ ID NO: 1865589 - DNA, 15 bp, Homo sapiens
tcatttcatctctcc

SEQ ID NO: 1865590 - DNA, 15 bp, Homo sapiens
catttcatctctccc

SEQ ID NO: 1865591 - DNA, 15 bp, Homo sapiens
atttcatctctccct

SEQ ID NO: 1865592 - DNA, 15 bp, Homo sapiens
tttcatctctccctc

SEQ ID NO: 1865593 - DNA, 15 bp, Homo sapiens
ttcatctctccctct

SEQ ID NO: 1865594 - DNA, 15 bp, Homo sapiens
tcatctctccctctg

SEQ ID NO: 1865595 - DNA, 15 bp, Homo sapiens
catctctccctctgt

SEQ ID NO: 1865596 - DNA, 15 bp, Homo sapiens
atctctccctctgtc

SEQ ID NO: 1865597 - DNA, 15 bp, Homo sapiens
tctctccctctgtct

SEQ ID NO: 1865598 - DNA, 15 bp, Homo sapiens
ctctccctctgtctc

SEQ ID NO: 1865599 - DNA, 15 bp, Homo sapiens
tctccctctgtctct

SEQ ID NO: 1865600 - DNA, 15 bp, Homo sapiens
ctccctctgtctctg

SEQ ID NO: 1865601 - DNA, 15 bp, Homo sapiens
tccctctgtctctgg

SEQ ID NO: 1865602 - DNA, 15 bp, Homo sapiens
ccctctgtctctggg

SEQ ID NO: 1865603 - DNA, 15 bp, Homo sapiens
cctctgtctctgggc

SEQ ID NO: 1865604 - DNA, 15 bp, Homo sapiens
ctctgtctctgggcc

SEQ ID NO: 1865605 - DNA, 15 bp, Homo sapiens
tctgtctctgggcct

SEQ ID NO: 1865606 - DNA, 15 bp, Homo sapiens
ctgtctctgggccta

SEQ ID NO: 1865607 - DNA, 15 bp, Homo sapiens
tgtctctgggcctat

SEQ ID NO: 1865608 - DNA, 15 bp, Homo sapiens
gtctctgggcctatt

SEQ ID NO: 1865609 - DNA, 15 bp, Homo sapiens
tctctgggcctattc

SEQ ID NO: 1865610 - DNA, 15 bp, Homo sapiens
ctctgggcctattct

SEQ ID NO: 1865611 - DNA, 15 bp, Homo sapiens
tctgggcctattcta

SEQ ID NO: 1865612 - DNA, 15 bp, Homo sapiens
ctgggcctattctaa

SEQ ID NO: 1865613 - DNA, 15 bp, Homo sapiens
tgggcctattctaac

SEQ ID NO: 1865614 - DNA, 15 bp, Homo sapiens
gggcctattctaacc

SEQ ID NO: 1865615 - DNA, 15 bp, Homo sapiens
ggcctattctaaccc

SEQ ID NO: 1865616 - DNA, 15 bp, Homo sapiens
gcctattctaacccc

SEQ ID NO: 1865617 - DNA, 15 bp, Homo sapiens
cctattctaacccct

SEQ ID NO: 1865618 - DNA, 15 bp, Homo sapiens
ctattctaacccctc

SEQ ID NO: 1865619 - DNA, 15 bp, Homo sapiens
tattctaacccctct

SEQ ID NO: 1865620 - DNA, 15 bp, Homo sapiens
attctaacccctctt

SEQ ID NO: 1865621 - DNA, 15 bp, Homo sapiens
ttctaacccctctta

SEQ ID NO: 1865622 - DNA, 15 bp, Homo sapiens
tctaacccctcttac

SEQ ID NO: 1865623 - DNA, 15 bp, Homo sapiens
ctaacccctcttact

SEQ ID NO: 1865624 - DNA, 15 bp, Homo sapiens
taacccctcttactt

SEQ ID NO: 1865625 - DNA, 15 bp, Homo sapiens
aacccctcttactta

SEQ ID NO: 1865626 - DNA, 15 bp, Homo sapiens
acccctcttacttat

SEQ ID NO: 1865627 - DNA, 15 bp, Homo sapiens
cccctcttacttata

SEQ ID NO: 1865628 - DNA, 15 bp, Homo sapiens
ccctcttacttataa

SEQ ID NO: 1865629 - DNA, 15 bp, Homo sapiens
cctcttacttataaa

SEQ ID NO: 1865630 - DNA, 15 bp, Homo sapiens
ctcttacttataaaa

SEQ ID NO: 1865631 - DNA, 15 bp, Homo sapiens
tcttacttataaaaa

SEQ ID NO: 1865632 - DNA, 15 bp, Homo sapiens
cttacttataaaaat

SEQ ID NO: 1865633 - DNA, 15 bp, Homo sapiens
ttacttataaaaatc

SEQ ID NO: 1865634 - DNA, 15 bp, Homo sapiens
tacttataaaaatcg

SEQ ID NO: 1865635 - DNA, 15 bp, Homo sapiens
acttataaaaatcgc

SEQ ID NO: 1865636 - DNA, 15 bp, Homo sapiens
cttataaaaatcgca

SEQ ID NO: 1865637 - DNA, 15 bp, Homo sapiens
ttataaaaatcgcag

SEQ ID NO: 1865638 - DNA, 15 bp, Homo sapiens
tataaaaatcgcaga

SEQ ID NO: 1865639 - DNA, 15 bp, Homo sapiens
ataaaaatcgcagaa

SEQ ID NO: 1865640 - DNA, 15 bp, Homo sapiens
taaaaatcgcagaag

SEQ ID NO: 1865641 - DNA, 15 bp, Homo sapiens
aaaaatcgcagaaga

SEQ ID NO: 1865642 - DNA, 15 bp, Homo sapiens
aaaatcgcagaagag

SEQ ID NO: 1865643 - DNA, 15 bp, Homo sapiens
aaatcgcagaagagg

SEQ ID NO: 1865644 - DNA, 15 bp, Homo sapiens
aatcgcagaagaggg

SEQ ID NO: 1865645 - DNA, 15 bp, Homo sapiens
atcgcagaagagggt

SEQ ID NO: 1865646 - DNA, 15 bp, Homo sapiens
tcgcagaagagggtg

SEQ ID NO: 1865647 - DNA, 15 bp, Homo sapiens
cgcagaagagggtga

SEQ ID NO: 1865648 - DNA, 15 bp, Homo sapiens
gcagaagagggtgat

SEQ ID NO: 1865649 - DNA, 15 bp, Homo sapiens
cagaagagggtgatt

SEQ ID NO: 1865650 - DNA, 15 bp, Homo sapiens
agaagagggtgattt

SEQ ID NO: 1865651 - DNA, 15 bp, Homo sapiens
gaagagggtgatttc

SEQ ID NO: 1865652 - DNA, 15 bp, Homo sapiens
aagagggtgatttca

SEQ ID NO: 1865653 - DNA, 15 bp, Homo sapiens
agagggtgatttcat

SEQ ID NO: 1865654 - DNA, 15 bp, Homo sapiens
gagggtgatttcata

SEQ ID NO: 1865655 - DNA, 15 bp, Homo sapiens
agggtgatttcataa

SEQ ID NO: 1865656 - DNA, 15 bp, Homo sapiens
gggtgatttcataag

SEQ ID NO: 1865657 - DNA, 15 bp, Homo sapiens
ggtgatttcataagc

SEQ ID NO: 1865658 - DNA, 15 bp, Homo sapiens
gtgatttcataagct

SEQ ID NO: 1865659 - DNA, 15 bp, Homo sapiens
tgatttcataagctg

SEQ ID NO: 1865660 - DNA, 15 bp, Homo sapiens
gatttcataagctgc

SEQ ID NO: 1865661 - DNA, 15 bp, Homo sapiens
atttcataagctgcc

SEQ ID NO: 1865662 - DNA, 15 bp, Homo sapiens
tttcataagctgcca

SEQ ID NO: 1865663 - DNA, 15 bp, Homo sapiens
ttcataagctgccac

SEQ ID NO: 1865664 - DNA, 15 bp, Homo sapiens
tcataagctgccacg

SEQ ID NO: 1865665 - DNA, 15 bp, Homo sapiens
cataagctgccacga

SEQ ID NO: 1865666 - DNA, 15 bp, Homo sapiens
ataagctgccacgac

SEQ ID NO: 1865667 - DNA, 15 bp, Homo sapiens
taagctgccacgaca

SEQ ID NO: 1865668 - DNA, 15 bp, Homo sapiens
aagctgccacgacaa

SEQ ID NO: 1865669 - DNA, 15 bp, Homo sapiens
agctgccacgacaac

SEQ ID NO: 1865670 - DNA, 15 bp, Homo sapiens
gctgccacgacaact

SEQ ID NO: 1865671 - DNA, 15 bp, Homo sapiens
ctgccacgacaactt

SEQ ID NO: 1865672 - DNA, 15 bp, Homo sapiens
tgccacgacaacttg

SEQ ID NO: 1865673 - DNA, 15 bp, Homo sapiens
gccacgacaacttgt

SEQ ID NO: 1865674 - DNA, 15 bp, Homo sapiens
ccacgacaacttgtt

SEQ ID NO: 1865675 - DNA, 15 bp, Homo sapiens
cacgacaacttgttc

SEQ ID NO: 1865676 - DNA, 15 bp, Homo sapiens
acgacaacttgttcc

SEQ ID NO: 1865677 - DNA, 15 bp, Homo sapiens
cgacaacttgttccg

SEQ ID NO: 1865678 - DNA, 15 bp, Homo sapiens
gacaacttgttccgc

SEQ ID NO: 1865679 - DNA, 15 bp, Homo sapiens
acaacttgttccgct

SEQ ID NO: 1865680 - DNA, 15 bp, Homo sapiens
caacttgttccgcta

SEQ ID NO: 1865681 - DNA, 15 bp, Homo sapiens
aacttgttccgctaa

SEQ ID NO: 1865682 - DNA, 15 bp, Homo sapiens
acttgttccgctaac

SEQ ID NO: 1865683 - DNA, 15 bp, Homo sapiens
cttgttccgctaaca

SEQ ID NO: 1865684 - DNA, 15 bp, Homo sapiens
ttgttccgctaacaa

SEQ ID NO: 1865685 - DNA, 15 bp, Homo sapiens
tgttccgctaacaat

SEQ ID NO: 1865686 - DNA, 15 bp, Homo sapiens
gttccgctaacaatt

SEQ ID NO: 1865687 - DNA, 15 bp, Homo sapiens
ttccgctaacaattc

SEQ ID NO: 1865688 - DNA, 15 bp, Homo sapiens
tccgctaacaattca

SEQ ID NO: 1865689 - DNA, 15 bp, Homo sapiens
ccgctaacaattcat

SEQ ID NO: 1865690 - DNA, 15 bp, Homo sapiens
cgctaacaattcatg

SEQ ID NO: 1865691 - DNA, 15 bp, Homo sapiens
gctaacaattcatga

SEQ ID NO: 1865692 - DNA, 15 bp, Homo sapiens
ctaacaattcatgat

SEQ ID NO: 1865693 - DNA, 15 bp, Homo sapiens
taacaattcatgatc

SEQ ID NO: 1865694 - DNA, 15 bp, Homo sapiens
aacaattcatgatct

SEQ ID NO: 1865695 - DNA, 15 bp, Homo sapiens
acaattcatgatctt

SEQ ID NO: 1865696 - DNA, 15 bp, Homo sapiens
caattcatgatctta

SEQ ID NO: 1865697 - DNA, 15 bp, Homo sapiens
aattcatgatcttaa

SEQ ID NO: 1865698 - DNA, 15 bp, Homo sapiens
attcatgatcttaaa

SEQ ID NO: 1865699 - DNA, 15 bp, Homo sapiens
ttcatgatcttaaaa

SEQ ID NO: 1865700 - DNA, 15 bp, Homo sapiens
tcatgatcttaaaac

SEQ ID NO: 1865701 - DNA, 15 bp, Homo sapiens
catgatcttaaaaca

SEQ ID NO: 1865702 - DNA, 15 bp, Homo sapiens
atgatcttaaaacaa

SEQ ID NO: 1865703 - DNA, 15 bp, Homo sapiens
tgatcttaaaacaat

SEQ ID NO: 1865704 - DNA, 15 bp, Homo sapiens
gatcttaaaacaatc

SEQ ID NO: 1865705 - DNA, 15 bp, Homo sapiens
atcttaaaacaatct

SEQ ID NO: 1865706 - DNA, 15 bp, Homo sapiens
tcttaaaacaatctc

SEQ ID NO: 1865707 - DNA, 15 bp, Homo sapiens
cttaaaacaatctcc

SEQ ID NO: 1865708 - DNA, 15 bp, Homo sapiens
ttaaaacaatctcca

SEQ ID NO: 1865709 - DNA, 15 bp, Homo sapiens
taaaacaatctccat

SEQ ID NO: 1865710 - DNA, 15 bp, Homo sapiens
aaaacaatctccata

SEQ ID NO: 1865711 - DNA, 15 bp, Homo sapiens
aaacaatctccatag

SEQ ID NO: 1865712 - DNA, 15 bp, Homo sapiens
aacaatctccatagc

SEQ ID NO: 1865713 - DNA, 15 bp, Homo sapiens
acaatctccatagca

SEQ ID NO: 1865714 - DNA, 15 bp, Homo sapiens
caatctccatagcag

SEQ ID NO: 1865715 - DNA, 15 bp, Homo sapiens
aatctccatagcagg

SEQ ID NO: 1865716 - DNA, 15 bp, Homo sapiens
atctccatagcaggg

SEQ ID NO: 1865717 - DNA, 15 bp, Homo sapiens
tctccatagcaggga

SEQ ID NO: 1865718 - DNA, 15 bp, Homo sapiens
ctccatagcagggag

SEQ ID NO: 1865719 - DNA, 15 bp, Homo sapiens
tccatagcagggaga

SEQ ID NO: 1865720 - DNA, 15 bp, Homo sapiens
ccatagcagggagaa

SEQ ID NO: 1865721 - DNA, 15 bp, Homo sapiens
catagcagggagaaa

SEQ ID NO: 1865722 - DNA, 15 bp, Homo sapiens
atagcagggagaaat

SEQ ID NO: 1865723 - DNA, 15 bp, Homo sapiens
tagcagggagaaatt

SEQ ID NO: 1865724 - DNA, 15 bp, Homo sapiens
agcagggagaaattc

SEQ ID NO: 1865725 - DNA, 15 bp, Homo sapiens
gcagggagaaattcc

SEQ ID NO: 1865726 - DNA, 15 bp, Homo sapiens
cagggagaaattcct

SEQ ID NO: 1865727 - DNA, 15 bp, Homo sapiens
agggagaaattcctc

SEQ ID NO: 1865728 - DNA, 15 bp, Homo sapiens
gggagaaattcctcc

SEQ ID NO: 1865729 - DNA, 15 bp, Homo sapiens
ggagaaattcctcct

SEQ ID NO: 1865730 - DNA, 15 bp, Homo sapiens
gagaaattcctccta

SEQ ID NO: 1865731 - DNA, 15 bp, Homo sapiens
agaaattcctcctat

SEQ ID NO: 1865732 - DNA, 15 bp, Homo sapiens
gaaattcctcctatt

SEQ ID NO: 1865733 - DNA, 15 bp, Homo sapiens
aaattcctcctattt

SEQ ID NO: 1865734 - DNA, 15 bp, Homo sapiens
aattcctcctatttc

SEQ ID NO: 1865735 - DNA, 15 bp, Homo sapiens
attcctcctatttcc

SEQ ID NO: 1865736 - DNA, 15 bp, Homo sapiens
ttcctcctatttcct

SEQ ID NO: 1865737 - DNA, 15 bp, Homo sapiens
tcctcctatttcctc

SEQ ID NO: 1865738 - DNA, 15 bp, Homo sapiens
cctcctatttcctcc

SEQ ID NO: 1865739 - DNA, 15 bp, Homo sapiens
ctcctatttcctcca

SEQ ID NO: 1865740 - DNA, 15 bp, Homo sapiens
tcctatttcctccaa

SEQ ID NO: 1865741 - DNA, 15 bp, Homo sapiens
cctatttcctccaaa

SEQ ID NO: 1865742 - DNA, 15 bp, Homo sapiens
ctatttcctccaaag

SEQ ID NO: 1865743 - DNA, 15 bp, Homo sapiens
tatttcctccaaagc

SEQ ID NO: 1865744 - DNA, 15 bp, Homo sapiens
atttcctccaaagct

SEQ ID NO: 1865745 - DNA, 15 bp, Homo sapiens
tttcctccaaagctc

SEQ ID NO: 1865746 - DNA, 15 bp, Homo sapiens
ttcctccaaagctcg

SEQ ID NO: 1865747 - DNA, 15 bp, Homo sapiens
tcctccaaagctcgt

SEQ ID NO: 1865748 - DNA, 15 bp, Homo sapiens
cctccaaagctcgtc

SEQ ID NO: 1865749 - DNA, 15 bp, Homo sapiens
ctccaaagctcgtct

SEQ ID NO: 1865750 - DNA, 15 bp, Homo sapiens
tccaaagctcgtctg

SEQ ID NO: 1865751 - DNA, 15 bp, Homo sapiens
ccaaagctcgtctgt

SEQ ID NO: 1865752 - DNA, 15 bp, Homo sapiens
caaagctcgtctgtc

SEQ ID NO: 1865753 - DNA, 15 bp, Homo sapiens
aaagctcgtctgtct

SEQ ID NO: 1865754 - DNA, 15 bp, Homo sapiens
aagctcgtctgtctg

SEQ ID NO: 1865755 - DNA, 15 bp, Homo sapiens
agctcgtctgtctgc

SEQ ID NO: 1865756 - DNA, 15 bp, Homo sapiens
gctcgtctgtctgcg

SEQ ID NO: 1865757 - DNA, 15 bp, Homo sapiens
ctcgtctgtctgcgg

SEQ ID NO: 1865758 - DNA, 15 bp, Homo sapiens
tcgtctgtctgcggg

SEQ ID NO: 1865759 - DNA, 15 bp, Homo sapiens
cgtctgtctgcgggc

SEQ ID NO: 1865760 - DNA, 15 bp, Homo sapiens
gtctgtctgcgggcc

SEQ ID NO: 1865761 - DNA, 15 bp, Homo sapiens
tctgtctgcgggcca

SEQ ID NO: 1865762 - DNA, 15 bp, Homo sapiens
ctgtctgcgggccaa

SEQ ID NO: 1865763 - DNA, 15 bp, Homo sapiens
tgtctgcgggccaag

SEQ ID NO: 1865764 - DNA, 15 bp, Homo sapiens
gtctgcgggccaagg

SEQ ID NO: 1865765 - DNA, 15 bp, Homo sapiens
tctgcgggccaaggc

SEQ ID NO: 1865766 - DNA, 15 bp, Homo sapiens
ctgcgggccaaggct

SEQ ID NO: 1865767 - DNA, 15 bp, Homo sapiens
tgcgggccaaggctg

SEQ ID NO: 1865768 - DNA, 15 bp, Homo sapiens
gcgggccaaggctgc

SEQ ID NO: 1865769 - DNA, 15 bp, Homo sapiens
cgggccaaggctgct

SEQ ID NO: 1865770 - DNA, 15 bp, Homo sapiens
gggccaaggctgctc

SEQ ID NO: 1865771 - DNA, 15 bp, Homo sapiens
ggccaaggctgctca

SEQ ID NO: 1865772 - DNA, 15 bp, Homo sapiens
gccaaggctgctcag

SEQ ID NO: 1865773 - DNA, 15 bp, Homo sapiens
ccaaggctgctcaga

SEQ ID NO: 1865774 - DNA, 15 bp, Homo sapiens
caaggctgctcagag

SEQ ID NO: 1865775 - DNA, 15 bp, Homo sapiens
aaggctgctcagagg

SEQ ID NO: 1865776 - DNA, 15 bp, Homo sapiens
aggctgctcagaggc

SEQ ID NO: 1865777 - DNA, 15 bp, Homo sapiens
ggctgctcagaggca

SEQ ID NO: 1865778 - DNA, 15 bp, Homo sapiens
gctgctcagaggcag

SEQ ID NO: 1865779 - DNA, 15 bp, Homo sapiens
ctgctcagaggcagc

SEQ ID NO: 1865780 - DNA, 15 bp, Homo sapiens
tgctcagaggcagct

SEQ ID NO: 1865781 - DNA, 15 bp, Homo sapiens
gctcagaggcagctg

SEQ ID NO: 1865782 - DNA, 15 bp, Homo sapiens
ctcagaggcagctgg

SEQ ID NO: 1865783 - DNA, 15 bp, Homo sapiens
tcagaggcagctggg

SEQ ID NO: 1865784 - DNA, 15 bp, Homo sapiens
cagaggcagctgggg

SEQ ID NO: 1865785 - DNA, 15 bp, Homo sapiens
agaggcagctggggt

SEQ ID NO: 1865786 - DNA, 15 bp, Homo sapiens
gaggcagctggggtt

SEQ ID NO: 1865787 - DNA, 15 bp, Homo sapiens
aggcagctggggttt

SEQ ID NO: 1865788 - DNA, 15 bp, Homo sapiens
ggcagctggggtttt

SEQ ID NO: 1865789 - DNA, 15 bp, Homo sapiens
gcagctggggtttta

SEQ ID NO: 1865790 - DNA, 15 bp, Homo sapiens
cagctggggttttaa

SEQ ID NO: 1865791 - DNA, 15 bp, Homo sapiens
agctggggttttaag

SEQ ID NO: 1865792 - DNA, 15 bp, Homo sapiens
gctggggttttaaga

SEQ ID NO: 1865793 - DNA, 15 bp, Homo sapiens
ctggggttttaagaa

SEQ ID NO: 1865794 - DNA, 15 bp, Homo sapiens
tggggttttaagaag

SEQ ID NO: 1865795 - DNA, 15 bp, Homo sapiens
ggggttttaagaagt

SEQ ID NO: 1865796 - DNA, 15 bp, Homo sapiens
gggttttaagaagtg

SEQ ID NO: 1865797 - DNA, 15 bp, Homo sapiens
ggttttaagaagtga

SEQ ID NO: 1865798 - DNA, 15 bp, Homo sapiens
gttttaagaagtgag

SEQ ID NO: 1865799 - DNA, 15 bp, Homo sapiens
ttttaagaagtgagc

SEQ ID NO: 1865800 - DNA, 15 bp, Homo sapiens
tttaagaagtgagct

SEQ ID NO: 1865801 - DNA, 15 bp, Homo sapiens
ttaagaagtgagctc

SEQ ID NO: 1865802 - DNA, 15 bp, Homo sapiens
taagaagtgagctct

SEQ ID NO: 1865803 - DNA, 15 bp, Homo sapiens
aagaagtgagctctg

SEQ ID NO: 1865804 - DNA, 15 bp, Homo sapiens
agaagtgagctctgg

SEQ ID NO: 1865805 - DNA, 15 bp, Homo sapiens
gaagtgagctctgga

SEQ ID NO: 1865806 - DNA, 15 bp, Homo sapiens
aagtgagctctggac

SEQ ID NO: 1865807 - DNA, 15 bp, Homo sapiens
agtgagctctggact

SEQ ID NO: 1865808 - DNA, 15 bp, Homo sapiens
gtgagctctggactt

SEQ ID NO: 1865809 - DNA, 15 bp, Homo sapiens
tgagctctggacttg

SEQ ID NO: 1865810 - DNA, 15 bp, Homo sapiens
gagctctggacttgg

SEQ ID NO: 1865811 - DNA, 15 bp, Homo sapiens
agctctggacttgga

SEQ ID NO: 1865812 - DNA, 15 bp, Homo sapiens
gctctggacttggat

SEQ ID NO: 1865813 - DNA, 15 bp, Homo sapiens
ctctggacttggatt

SEQ ID NO: 1865814 - DNA, 15 bp, Homo sapiens
tctggacttggattt

SEQ ID NO: 1865815 - DNA, 15 bp, Homo sapiens
ctggacttggattta

SEQ ID NO: 1865816 - DNA, 15 bp, Homo sapiens
tggacttggatttaa

SEQ ID NO: 1865817 - DNA, 15 bp, Homo sapiens
ggacttggatttaat

SEQ ID NO: 1865818 - DNA, 15 bp, Homo sapiens
gacttggatttaatg

SEQ ID NO: 1865819 - DNA, 15 bp, Homo sapiens
acttggatttaatgg

SEQ ID NO: 1865820 - DNA, 15 bp, Homo sapiens
cttggatttaatggt

SEQ ID NO: 1865821 - DNA, 15 bp, Homo sapiens
ttggatttaatggtc

SEQ ID NO: 1865822 - DNA, 15 bp, Homo sapiens
tggatttaatggtct

SEQ ID NO: 1865823 - DNA, 15 bp, Homo sapiens
ggatttaatggtctt

SEQ ID NO: 1865824 - DNA, 15 bp, Homo sapiens
gatttaatggtcttt

SEQ ID NO: 1865825 - DNA, 15 bp, Homo sapiens
atttaatggtctttg

SEQ ID NO: 1865826 - DNA, 15 bp, Homo sapiens
tttaatggtctttgt

SEQ ID NO: 1865827 - DNA, 15 bp, Homo sapiens
ttaatggtctttgtt

SEQ ID NO: 1865828 - DNA, 15 bp, Homo sapiens
taatggtctttgttc

SEQ ID NO: 1865829 - DNA, 15 bp, Homo sapiens
aatggtctttgttca

SEQ ID NO: 1865830 - DNA, 15 bp, Homo sapiens
atggtctttgttcaa

SEQ ID NO: 1865831 - DNA, 15 bp, Homo sapiens
tggtctttgttcaaa

SEQ ID NO: 1865832 - DNA, 15 bp, Homo sapiens
ggtctttgttcaaat

SEQ ID NO: 1865833 - DNA, 15 bp, Homo sapiens
gtctttgttcaaata

SEQ ID NO: 1865834 - DNA, 15 bp, Homo sapiens
tctttgttcaaatac

SEQ ID NO: 1865835 - DNA, 15 bp, Homo sapiens
ctttgttcaaatact

SEQ ID NO: 1865836 - DNA, 15 bp, Homo sapiens
tttgttcaaatactg

SEQ ID NO: 1865837 - DNA, 15 bp, Homo sapiens
ttgttcaaatactgt

SEQ ID NO: 1865838 - DNA, 15 bp, Homo sapiens
tgttcaaatactgtt

SEQ ID NO: 1865839 - DNA, 15 bp, Homo sapiens
gttcaaatactgtta

SEQ ID NO: 1865840 - DNA, 15 bp, Homo sapiens
ttcaaatactgttat

SEQ ID NO: 1865841 - DNA, 15 bp, Homo sapiens
tcaaatactgttatt

SEQ ID NO: 1865842 - DNA, 15 bp, Homo sapiens
caaatactgttattg

SEQ ID NO: 1865843 - DNA, 15 bp, Homo sapiens
aaatactgttattgc

SEQ ID NO: 1865844 - DNA, 15 bp, Homo sapiens
aatactgttattgca

SEQ ID NO: 1865845 - DNA, 15 bp, Homo sapiens
atactgttattgcat

SEQ ID NO: 1865846 - DNA, 15 bp, Homo sapiens
tactgttattgcatc

SEQ ID NO: 1865847 - DNA, 15 bp, Homo sapiens
actgttattgcatcc

SEQ ID NO: 1865848 - DNA, 15 bp, Homo sapiens
ctgttattgcatcct

SEQ ID NO: 1865849 - DNA, 15 bp, Homo sapiens
tgttattgcatcctt

SEQ ID NO: 1865850 - DNA, 15 bp, Homo sapiens
gttattgcatccttg

SEQ ID NO: 1865851 - DNA, 15 bp, Homo sapiens
ttattgcatccttga

SEQ ID NO: 1865852 - DNA, 15 bp, Homo sapiens
tattgcatccttgaa

SEQ ID NO: 1865853 - DNA, 15 bp, Homo sapiens
attgcatccttgaac

SEQ ID NO: 1865854 - DNA, 15 bp, Homo sapiens
ttgcatccttgaaca

SEQ ID NO: 1865855 - DNA, 15 bp, Homo sapiens
tgcatccttgaacaa

SEQ ID NO: 1865856 - DNA, 15 bp, Homo sapiens
gcatccttgaacaag

SEQ ID NO: 1865857 - DNA, 15 bp, Homo sapiens
catccttgaacaagt

SEQ ID NO: 1865858 - DNA, 15 bp, Homo sapiens
atccttgaacaagtc

SEQ ID NO: 1865859 - DNA, 15 bp, Homo sapiens
tccttgaacaagtca

SEQ ID NO: 1865860 - DNA, 15 bp, Homo sapiens
ccttgaacaagtcac

SEQ ID NO: 1865861 - DNA, 15 bp, Homo sapiens
cttgaacaagtcaca

SEQ ID NO: 1865862 - DNA, 15 bp, Homo sapiens
ttgaacaagtcacat

SEQ ID NO: 1865863 - DNA, 15 bp, Homo sapiens
tgaacaagtcacata

SEQ ID NO: 1865864 - DNA, 15 bp, Homo sapiens
gaacaagtcacataa

SEQ ID NO: 1865865 - DNA, 15 bp, Homo sapiens
aacaagtcacataac

SEQ ID NO: 1865866 - DNA, 15 bp, Homo sapiens
acaagtcacataact

SEQ ID NO: 1865867 - DNA, 15 bp, Homo sapiens
caagtcacataactg

SEQ ID NO: 1865868 - DNA, 15 bp, Homo sapiens
aagtcacataactgc

SEQ ID NO: 1865869 - DNA, 15 bp, Homo sapiens
agtcacataactgct

SEQ ID NO: 1865870 - DNA, 15 bp, Homo sapiens
gtcacataactgctc

SEQ ID NO: 1865871 - DNA, 15 bp, Homo sapiens
tcacataactgctcc

SEQ ID NO: 1865872 - DNA, 15 bp, Homo sapiens
cacataactgctcca

SEQ ID NO: 1865873 - DNA, 15 bp, Homo sapiens
acataactgctccaa

SEQ ID NO: 1865874 - DNA, 15 bp, Homo sapiens
cataactgctccaag

SEQ ID NO: 1865875 - DNA, 15 bp, Homo sapiens
ataactgctccaagc

SEQ ID NO: 1865876 - DNA, 15 bp, Homo sapiens
taactgctccaagcc

SEQ ID NO: 1865877 - DNA, 15 bp, Homo sapiens
aactgctccaagcct

SEQ ID NO: 1865878 - DNA, 15 bp, Homo sapiens
actgctccaagcctc

SEQ ID NO: 1865879 - DNA, 15 bp, Homo sapiens
ctgctccaagcctca

SEQ ID NO: 1865880 - DNA, 15 bp, Homo sapiens
tgctccaagcctcag

SEQ ID NO: 1865881 - DNA, 15 bp, Homo sapiens
gctccaagcctcagt

SEQ ID NO: 1865882 - DNA, 15 bp, Homo sapiens
ctccaagcctcagtt

SEQ ID NO: 1865883 - DNA, 15 bp, Homo sapiens
tccaagcctcagttc

SEQ ID NO: 1865884 - DNA, 15 bp, Homo sapiens
ccaagcctcagttcc

SEQ ID NO: 1865885 - DNA, 15 bp, Homo sapiens
caagcctcagttcct

SEQ ID NO: 1865886 - DNA, 15 bp, Homo sapiens
aagcctcagttcctt

SEQ ID NO: 1865887 - DNA, 15 bp, Homo sapiens
agcctcagttcctta

SEQ ID NO: 1865888 - DNA, 15 bp, Homo sapiens
gcctcagttccttaa

SEQ ID NO: 1865889 - DNA, 15 bp, Homo sapiens
cctcagttccttaat

SEQ ID NO: 1865890 - DNA, 15 bp, Homo sapiens
ctcagttccttaatc

SEQ ID NO: 1865891 - DNA, 15 bp, Homo sapiens
tcagttccttaatct

SEQ ID NO: 1865892 - DNA, 15 bp, Homo sapiens
cagttccttaatctg

SEQ ID NO: 1865893 - DNA, 15 bp, Homo sapiens
agttccttaatctga

SEQ ID NO: 1865894 - DNA, 15 bp, Homo sapiens
gttccttaatctgaa

SEQ ID NO: 1865895 - DNA, 15 bp, Homo sapiens
ttccttaatctgaag

SEQ ID NO: 1865896 - DNA, 15 bp, Homo sapiens
tccttaatctgaaga

SEQ ID NO: 1865897 - DNA, 15 bp, Homo sapiens
ccttaatctgaagag

SEQ ID NO: 1865898 - DNA, 15 bp, Homo sapiens
cttaatctgaagagg

SEQ ID NO: 1865899 - DNA, 15 bp, Homo sapiens
ttaatctgaagaggt

SEQ ID NO: 1865900 - DNA, 15 bp, Homo sapiens
taatctgaagaggtt

SEQ ID NO: 1865901 - DNA, 15 bp, Homo sapiens
aatctgaagaggtta

SEQ ID NO: 1865902 - DNA, 15 bp, Homo sapiens
atctgaagaggttag

SEQ ID NO: 1865903 - DNA, 15 bp, Homo sapiens
tctgaagaggttagt

SEQ ID NO: 1865904 - DNA, 15 bp, Homo sapiens
ctgaagaggttagtg

SEQ ID NO: 1865905 - DNA, 15 bp, Homo sapiens
tgaagaggttagtgt

SEQ ID NO: 1865906 - DNA, 15 bp, Homo sapiens
gaagaggttagtgtg

SEQ ID NO: 1865907 - DNA, 15 bp, Homo sapiens
aagaggttagtgtga

SEQ ID NO: 1865908 - DNA, 15 bp, Homo sapiens
agaggttagtgtgaa

SEQ ID NO: 1865909 - DNA, 15 bp, Homo sapiens
gaggttagtgtgaag

SEQ ID NO: 1865910 - DNA, 15 bp, Homo sapiens
aggttagtgtgaagg

SEQ ID NO: 1865911 - DNA, 15 bp, Homo sapiens
ggttagtgtgaaggg

SEQ ID NO: 1865912 - DNA, 15 bp, Homo sapiens
gttagtgtgaagggg

SEQ ID NO: 1865913 - DNA, 15 bp, Homo sapiens
ttagtgtgaagggga

SEQ ID NO: 1865914 - DNA, 15 bp, Homo sapiens
tagtgtgaaggggag

SEQ ID NO: 1865915 - DNA, 15 bp, Homo sapiens
agtgtgaaggggaga

SEQ ID NO: 1865916 - DNA, 15 bp, Homo sapiens
gtgtgaaggggagaa

SEQ ID NO: 1865917 - DNA, 15 bp, Homo sapiens
tgtgaaggggagaaa

SEQ ID NO: 1865918 - DNA, 15 bp, Homo sapiens
gtgaaggggagaaaa

SEQ ID NO: 1865919 - DNA, 15 bp, Homo sapiens
tgaaggggagaaaaa

SEQ ID NO: 1865920 - DNA, 15 bp, Homo sapiens
gaaggggagaaaaag

SEQ ID NO: 1865921 - DNA, 15 bp, Homo sapiens
aaggggagaaaaagt

SEQ ID NO: 1865922 - DNA, 15 bp, Homo sapiens
aggggagaaaaagta

SEQ ID NO: 1865923 - DNA, 15 bp, Homo sapiens
ggggagaaaaagtaa

SEQ ID NO: 1865924 - DNA, 15 bp, Homo sapiens
gggagaaaaagtaac

SEQ ID NO: 1865925 - DNA, 15 bp, Homo sapiens
ggagaaaaagtaaca

SEQ ID NO: 1865926 - DNA, 15 bp, Homo sapiens
gagaaaaagtaacat

SEQ ID NO: 1865927 - DNA, 15 bp, Homo sapiens
agaaaaagtaacata

SEQ ID NO: 1865928 - DNA, 15 bp, Homo sapiens
gaaaaagtaacatat

SEQ ID NO: 1865929 - DNA, 15 bp, Homo sapiens
aaaaagtaacatatg

SEQ ID NO: 1865930 - DNA, 15 bp, Homo sapiens
aaaagtaacatatgt

SEQ ID NO: 1865931 - DNA, 15 bp, Homo sapiens
aaagtaacatatgtt

SEQ ID NO: 1865932 - DNA, 15 bp, Homo sapiens
aagtaacatatgtta

SEQ ID NO: 1865933 - DNA, 15 bp, Homo sapiens
agtaacatatgttaa

SEQ ID NO: 1865934 - DNA, 15 bp, Homo sapiens
gtaacatatgttaat

SEQ ID NO: 1865935 - DNA, 15 bp, Homo sapiens
taacatatgttaatg

SEQ ID NO: 1865936 - DNA, 15 bp, Homo sapiens
aacatatgttaatgt

SEQ ID NO: 1865937 - DNA, 15 bp, Homo sapiens
acatatgttaatgtg

SEQ ID NO: 1865938 - DNA, 15 bp, Homo sapiens
catatgttaatgtgc

SEQ ID NO: 1865939 - DNA, 15 bp, Homo sapiens
atatgttaatgtgcc

SEQ ID NO: 1865940 - DNA, 15 bp, Homo sapiens
tatgttaatgtgcct

SEQ ID NO: 1865941 - DNA, 15 bp, Homo sapiens
atgttaatgtgccta

SEQ ID NO: 1865942 - DNA, 15 bp, Homo sapiens
gttaatgtgcctaag

SEQ ID NO: 1865943 - DNA, 15 bp, Homo sapiens
ttaatgtgcctaaga

SEQ ID NO: 1865944 - DNA, 15 bp, Homo sapiens
taatgtgcctaagat

SEQ ID NO: 1865945 - DNA, 15 bp, Homo sapiens
aatgtgcctaagatg

SEQ ID NO: 1865946 - DNA, 15 bp, Homo sapiens
atgtgcctaagatgg

SEQ ID NO: 1865947 - DNA, 15 bp, Homo sapiens
tgtgcctaagatggt

SEQ ID NO: 1865948 - DNA, 15 bp, Homo sapiens
gtgcctaagatggta

SEQ ID NO: 1865949 - DNA, 15 bp, Homo sapiens
tgcctaagatggtat

SEQ ID NO: 1865950 - DNA, 15 bp, Homo sapiens
gcctaagatggtatc

SEQ ID NO: 1865951 - DNA, 15 bp, Homo sapiens
cctaagatggtatct

SEQ ID NO: 1865952 - DNA, 15 bp, Homo sapiens
ctaagatggtatctg

SEQ ID NO: 1865953 - DNA, 15 bp, Homo sapiens
taagatggtatctgg

SEQ ID NO: 1865954 - DNA, 15 bp, Homo sapiens
aagatggtatctggc

SEQ ID NO: 1865955 - DNA, 15 bp, Homo sapiens
agatggtatctggca

SEQ ID NO: 1865956 - DNA, 15 bp, Homo sapiens
gatggtatctggcac

SEQ ID NO: 1865957 - DNA, 15 bp, Homo sapiens
atggtatctggcaca

SEQ ID NO: 1865958 - DNA, 15 bp, Homo sapiens
tggtatctggcacac

SEQ ID NO: 1865959 - DNA, 15 bp, Homo sapiens
ggtatctggcacaca

SEQ ID NO: 1865960 - DNA, 15 bp, Homo sapiens
gtatctggcacacag

SEQ ID NO: 1865961 - DNA, 15 bp, Homo sapiens
tatctggcacacagg

SEQ ID NO: 1865962 - DNA, 15 bp, Homo sapiens
atctggcacacagga

SEQ ID NO: 1865963 - DNA, 15 bp, Homo sapiens
tctggcacacaggaa

SEQ ID NO: 1865964 - DNA, 15 bp, Homo sapiens
ctggcacacaggaat

SEQ ID NO: 1865965 - DNA, 15 bp, Homo sapiens
tggcacacaggaatg

SEQ ID NO: 1865966 - DNA, 15 bp, Homo sapiens
ggcacacaggaatgc

SEQ ID NO: 1865967 - DNA, 15 bp, Homo sapiens
gcacacaggaatgct

SEQ ID NO: 1865968 - DNA, 15 bp, Homo sapiens
cacacaggaatgctt

SEQ ID NO: 1865969 - DNA, 15 bp, Homo sapiens
acacaggaatgcttg

SEQ ID NO: 1865970 - DNA, 15 bp, Homo sapiens
cacaggaatgcttgt

SEQ ID NO: 1865971 - DNA, 15 bp, Homo sapiens
acaggaatgcttgtt

SEQ ID NO: 1865972 - DNA, 15 bp, Homo sapiens
caggaatgcttgtta

SEQ ID NO: 1865973 - DNA, 15 bp, Homo sapiens
aggaatgcttgttag

SEQ ID NO: 1865974 - DNA, 15 bp, Homo sapiens
ggaatgcttgttaga

SEQ ID NO: 1865975 - DNA, 15 bp, Homo sapiens
gaatgcttgttagat

SEQ ID NO: 1865976 - DNA, 15 bp, Homo sapiens
aatgcttgttagatg

SEQ ID NO: 1865977 - DNA, 15 bp, Homo sapiens
atgcttgttagatgt

SEQ ID NO: 1865978 - DNA, 15 bp, Homo sapiens
tgcttgttagatgtg

SEQ ID NO: 1865979 - DNA, 15 bp, Homo sapiens
gcttgttagatgtgt

SEQ ID NO: 1865980 - DNA, 15 bp, Homo sapiens
cttgttagatgtgtg

SEQ ID NO: 1865981 - DNA, 15 bp, Homo sapiens
ttgttagatgtgtgg

SEQ ID NO: 1865982 - DNA, 15 bp, Homo sapiens
tgttagatgtgtggt

SEQ ID NO: 1865983 - DNA, 15 bp, Homo sapiens
gttagatgtgtggtg

SEQ ID NO: 1865984 - DNA, 15 bp, Homo sapiens
ttagatgtgtggtgt

SEQ ID NO: 1865985 - DNA, 15 bp, Homo sapiens
tagatgtgtggtgtg

SEQ ID NO: 1865986 - DNA, 15 bp, Homo sapiens
agatgtgtggtgtgg

SEQ ID NO: 1865987 - DNA, 15 bp, Homo sapiens
gatgtgtggtgtggc

SEQ ID NO: 1865988 - DNA, 15 bp, Homo sapiens
atgtgtggtgtggct

SEQ ID NO: 1865989 - DNA, 15 bp, Homo sapiens
tgtgtggtgtggctt

SEQ ID NO: 1865990 - DNA, 15 bp, Homo sapiens
gtgtggtgtggcttt

SEQ ID NO: 1865991 - DNA, 15 bp, Homo sapiens
tgtggtgtggctttg

SEQ ID NO: 1865992 - DNA, 15 bp, Homo sapiens
gtggtgtggctttgg

SEQ ID NO: 1865993 - DNA, 15 bp, Homo sapiens
tggtgtggctttggg

SEQ ID NO: 1865994 - DNA, 15 bp, Homo sapiens
ggtgtggctttgggc

SEQ ID NO: 1865995 - DNA, 15 bp, Homo sapiens
gtgtggctttgggct

SEQ ID NO: 1865996 - DNA, 15 bp, Homo sapiens
tgtggctttgggctg

SEQ ID NO: 1865997 - DNA, 15 bp, Homo sapiens
gtggctttgggctga

SEQ ID NO: 1865998 - DNA, 15 bp, Homo sapiens
tggctttgggctgac

SEQ ID NO: 1865999 - DNA, 15 bp, Homo sapiens
ggctttgggctgact

SEQ ID NO: 1866000 - DNA, 15 bp, Homo sapiens
gctttgggctgacta

SEQ ID NO: 1866001 - DNA, 15 bp, Homo sapiens
ctttgggctgactag

SEQ ID NO: 1866002 - DNA, 15 bp, Homo sapiens
tttgggctgactagg

SEQ ID NO: 1866003 - DNA, 15 bp, Homo sapiens
ttgggctgactagga

SEQ ID NO: 1866004 - DNA, 15 bp, Homo sapiens
tgggctgactaggat

SEQ ID NO: 1866005 - DNA, 15 bp, Homo sapiens
gggctgactaggatc

SEQ ID NO: 1866006 - DNA, 15 bp, Homo sapiens
ggctgactaggatca

SEQ ID NO: 1866007 - DNA, 15 bp, Homo sapiens
gctgactaggatcac

SEQ ID NO: 1866008 - DNA, 15 bp, Homo sapiens
ctgactaggatcacc

SEQ ID NO: 1866009 - DNA, 15 bp, Homo sapiens
tgactaggatcacca

SEQ ID NO: 1866010 - DNA, 15 bp, Homo sapiens
gactaggatcaccat

SEQ ID NO: 1866011 - DNA, 15 bp, Homo sapiens
actaggatcaccatg

SEQ ID NO: 1866012 - DNA, 15 bp, Homo sapiens
ctaggatcaccatgg

SEQ ID NO: 1866013 - DNA, 15 bp, Homo sapiens
taggatcaccatggt

SEQ ID NO: 1866014 - DNA, 15 bp, Homo sapiens
aggatcaccatggta

SEQ ID NO: 1866015 - DNA, 15 bp, Homo sapiens
ggatcaccatggtat

SEQ ID NO: 1866016 - DNA, 15 bp, Homo sapiens
gatcaccatggtatg

SEQ ID NO: 1866017 - DNA, 15 bp, Homo sapiens
atcaccatggtatgg

SEQ ID NO: 1866018 - DNA, 15 bp, Homo sapiens
tcaccatggtatggg

SEQ ID NO: 1866019 - DNA, 15 bp, Homo sapiens
caccatggtatgggc

SEQ ID NO: 1866020 - DNA, 15 bp, Homo sapiens
accatggtatgggca

SEQ ID NO: 1866021 - DNA, 15 bp, Homo sapiens
ccatggtatgggcac

SEQ ID NO: 1866022 - DNA, 15 bp, Homo sapiens
catggtatgggcacc

SEQ ID NO: 1866023 - DNA, 15 bp, Homo sapiens
atggtatgggcacct

SEQ ID NO: 1866024 - DNA, 15 bp, Homo sapiens
tggtatgggcacctt

SEQ ID NO: 1866025 - DNA, 15 bp, Homo sapiens
ggtatgggcaccttt

SEQ ID NO: 1866026 - DNA, 15 bp, Homo sapiens
gtatgggcacctttt

SEQ ID NO: 1866027 - DNA, 15 bp, Homo sapiens
tatgggcaccttttg

SEQ ID NO: 1866028 - DNA, 15 bp, Homo sapiens
atgggcaccttttgg

SEQ ID NO: 1866029 - DNA, 15 bp, Homo sapiens
tgggcaccttttgga

SEQ ID NO: 1866030 - DNA, 15 bp, Homo sapiens
gggcaccttttggat

SEQ ID NO: 1866031 - DNA, 15 bp, Homo sapiens
ggcaccttttggatc

SEQ ID NO: 1866032 - DNA, 15 bp, Homo sapiens
gcaccttttggatcg

SEQ ID NO: 1866033 - DNA, 15 bp, Homo sapiens
caccttttggatcga

SEQ ID NO: 1866034 - DNA, 15 bp, Homo sapiens
accttttggatcgag

SEQ ID NO: 1866035 - DNA, 15 bp, Homo sapiens
ccttttggatcgaga

SEQ ID NO: 1866036 - DNA, 15 bp, Homo sapiens
cttttggatcgagat

SEQ ID NO: 1866037 - DNA, 15 bp, Homo sapiens
ttttggatcgagatc

SEQ ID NO: 1866038 - DNA, 15 bp, Homo sapiens
tttggatcgagatct

SEQ ID NO: 1866039 - DNA, 15 bp, Homo sapiens
ttggatcgagatctc

SEQ ID NO: 1866040 - DNA, 15 bp, Homo sapiens
tggatcgagatctca

SEQ ID NO: 1866041 - DNA, 15 bp, Homo sapiens
ggatcgagatctcag

SEQ ID NO: 1866042 - DNA, 15 bp, Homo sapiens
gatcgagatctcaga

SEQ ID NO: 1866043 - DNA, 15 bp, Homo sapiens
atcgagatctcagaa

SEQ ID NO: 1866044 - DNA, 15 bp, Homo sapiens
tcgagatctcagaaa

SEQ ID NO: 1866045 - DNA, 15 bp, Homo sapiens
cgagatctcagaaat

SEQ ID NO: 1866046 - DNA, 15 bp, Homo sapiens
gagatctcagaaatt

SEQ ID NO: 1866047 - DNA, 15 bp, Homo sapiens
agatctcagaaatta

SEQ ID NO: 1866048 - DNA, 15 bp, Homo sapiens
gatctcagaaattaa

SEQ ID NO: 1866049 - DNA, 15 bp, Homo sapiens
atctcagaaattaac

SEQ ID NO: 1866050 - DNA, 15 bp, Homo sapiens
tctcagaaattaacc

SEQ ID NO: 1866051 - DNA, 15 bp, Homo sapiens
ctcagaaattaaccc

SEQ ID NO: 1866052 - DNA, 15 bp, Homo sapiens
tcagaaattaaccct

SEQ ID NO: 1866053 - DNA, 15 bp, Homo sapiens
cagaaattaaccctt

SEQ ID NO: 1866054 - DNA, 15 bp, Homo sapiens
agaaattaacccttt

SEQ ID NO: 1866055 - DNA, 15 bp, Homo sapiens
gaaattaaccctttg

SEQ ID NO: 1866056 - DNA, 15 bp, Homo sapiens
aaattaaccctttgg

SEQ ID NO: 1866057 - DNA, 15 bp, Homo sapiens
aattaaccctttggt

SEQ ID NO: 1866058 - DNA, 15 bp, Homo sapiens
attaaccctttggtt

SEQ ID NO: 1866059 - DNA, 15 bp, Homo sapiens
ttaaccctttggttg

SEQ ID NO: 1866060 - DNA, 15 bp, Homo sapiens
taaccctttggttgt

SEQ ID NO: 1866061 - DNA, 15 bp, Homo sapiens
aaccctttggttgtt

SEQ ID NO: 1866062 - DNA, 15 bp, Homo sapiens
accctttggttgttg

SEQ ID NO: 1866063 - DNA, 15 bp, Homo sapiens
ccctttggttgttgg

SEQ ID NO: 1866064 - DNA, 15 bp, Homo sapiens
cctttggttgttgga

SEQ ID NO: 1866065 - DNA, 15 bp, Homo sapiens
ctttggttgttggat

SEQ ID NO: 1866066 - DNA, 15 bp, Homo sapiens
tttggttgttggatc

SEQ ID NO: 1866067 - DNA, 15 bp, Homo sapiens
ttggttgttggatca

SEQ ID NO: 1866068 - DNA, 15 bp, Homo sapiens
tggttgttggatcat

SEQ ID NO: 1866069 - DNA, 15 bp, Homo sapiens
ggttgttggatcatg

SEQ ID NO: 1866070 - DNA, 15 bp, Homo sapiens
gttgttggatcatgg

SEQ ID NO: 1866071 - DNA, 15 bp, Homo sapiens
ttgttggatcatggg

SEQ ID NO: 1866072 - DNA, 15 bp, Homo sapiens
tgttggatcatgggg

SEQ ID NO: 1866073 - DNA, 15 bp, Homo sapiens
gttggatcatggggt

SEQ ID NO: 1866074 - DNA, 15 bp, Homo sapiens
ttggatcatggggtt

SEQ ID NO: 1866075 - DNA, 15 bp, Homo sapiens
tggatcatggggttg

SEQ ID NO: 1866076 - DNA, 15 bp, Homo sapiens
ggatcatggggttgg

SEQ ID NO: 1866077 - DNA, 15 bp, Homo sapiens
gatcatggggttggg

SEQ ID NO: 1866078 - DNA, 15 bp, Homo sapiens
atcatggggttggga

SEQ ID NO: 1866079 - DNA, 15 bp, Homo sapiens
tcatggggttgggat

SEQ ID NO: 1866080 - DNA, 15 bp, Homo sapiens
catggggttgggatg

SEQ ID NO: 1866081 - DNA, 15 bp, Homo sapiens
atggggttgggatgg

SEQ ID NO: 1866082 - DNA, 15 bp, Homo sapiens
tggggttgggatggg

SEQ ID NO: 1866083 - DNA, 15 bp, Homo sapiens
ggggttgggatgggg

SEQ ID NO: 1866084 - DNA, 15 bp, Homo sapiens
gggttgggatggggg

SEQ ID NO: 1866085 - DNA, 15 bp, Homo sapiens
ggttgggatggggga

SEQ ID NO: 1866086 - DNA, 15 bp, Homo sapiens
gttgggatgggggat

SEQ ID NO: 1866087 - DNA, 15 bp, Homo sapiens
ttgggatgggggata

SEQ ID NO: 1866088 - DNA, 15 bp, Homo sapiens
tgggatgggggatag

SEQ ID NO: 1866089 - DNA, 15 bp, Homo sapiens
gggatgggggatagg

SEQ ID NO: 1866090 - DNA, 15 bp, Homo sapiens
ggatgggggataggc

SEQ ID NO: 1866091 - DNA, 15 bp, Homo sapiens
gatgggggataggca

SEQ ID NO: 1866092 - DNA, 15 bp, Homo sapiens
atgggggataggcac

SEQ ID NO: 1866093 - DNA, 15 bp, Homo sapiens
tgggggataggcact

SEQ ID NO: 1866094 - DNA, 15 bp, Homo sapiens
gggggataggcactg

SEQ ID NO: 1866095 - DNA, 15 bp, Homo sapiens
ggggataggcactgc

SEQ ID NO: 1866096 - DNA, 15 bp, Homo sapiens
gggataggcactgca

SEQ ID NO: 1866097 - DNA, 15 bp, Homo sapiens
ggataggcactgcag

SEQ ID NO: 1866098 - DNA, 15 bp, Homo sapiens
gataggcactgcagc

SEQ ID NO: 1866099 - DNA, 15 bp, Homo sapiens
ataggcactgcagca

SEQ ID NO: 1866100 - DNA, 15 bp, Homo sapiens
taggcactgcagcag

SEQ ID NO: 1866101 - DNA, 15 bp, Homo sapiens
aggcactgcagcagc

SEQ ID NO: 1866102 - DNA, 15 bp, Homo sapiens
actgctcaagaccta

SEQ ID NO: 1866103 - DNA, 15 bp, Homo sapiens
ctgctcaagacctag

SEQ ID NO: 1866104 - DNA, 15 bp, Homo sapiens
tgctcaagacctagc

SEQ ID NO: 1866105 - DNA, 15 bp, Homo sapiens
gctcaagacctagca

SEQ ID NO: 1866106 - DNA, 15 bp, Homo sapiens
ctcaagacctagcac

SEQ ID NO: 1866107 - DNA, 15 bp, Homo sapiens
tcaagacctagcaca

SEQ ID NO: 1866108 - DNA, 15 bp, Homo sapiens
caagacctagcacag

SEQ ID NO: 1866109 - DNA, 15 bp, Homo sapiens
aagacctagcacaga

SEQ ID NO: 1866110 - DNA, 15 bp, Homo sapiens
agacctagcacagaa

SEQ ID NO: 1866111 - DNA, 15 bp, Homo sapiens
gacctagcacagaag

SEQ ID NO: 1866112 - DNA, 15 bp, Homo sapiens
acctagcacagaagc

SEQ ID NO: 1866113 - DNA, 15 bp, Homo sapiens
cctagcacagaagcc

SEQ ID NO: 1866114 - DNA, 15 bp, Homo sapiens
ctagcacagaagcct

SEQ ID NO: 1866115 - DNA, 15 bp, Homo sapiens
tagcacagaagcctg

SEQ ID NO: 1866116 - DNA, 15 bp, Homo sapiens
agcacagaagcctgc

SEQ ID NO: 1866117 - DNA, 15 bp, Homo sapiens
gcacagaagcctgca

SEQ ID NO: 1866118 - DNA, 15 bp, Homo sapiens
cacagaagcctgcag

SEQ ID NO: 1866119 - DNA, 15 bp, Homo sapiens
acagaagcctgcagc

SEQ ID NO: 1866120 - DNA, 15 bp, Homo sapiens
cagaagcctgcagct

SEQ ID NO: 1866121 - DNA, 15 bp, Homo sapiens
agaagcctgcagctc

SEQ ID NO: 1866122 - DNA, 15 bp, Homo sapiens
gaagcctgcagctca

SEQ ID NO: 1866123 - DNA, 15 bp, Homo sapiens
aagcctgcagctcag

SEQ ID NO: 1866124 - DNA, 15 bp, Homo sapiens
agcctgcagctcagc

SEQ ID NO: 1866125 - DNA, 15 bp, Homo sapiens
gcctgcagctcagca

SEQ ID NO: 1866126 - DNA, 15 bp, Homo sapiens
cctgcagctcagcag

SEQ ID NO: 1866127 - DNA, 15 bp, Homo sapiens
ctgcagctcagcagg

SEQ ID NO: 1866128 - DNA, 15 bp, Homo sapiens
tgcagctcagcaggc

SEQ ID NO: 1866129 - DNA, 15 bp, Homo sapiens
gcagctcagcaggct

SEQ ID NO: 1866130 - DNA, 15 bp, Homo sapiens
cagctcagcaggctc

SEQ ID NO: 1866131 - DNA, 15 bp, Homo sapiens
agctcagcaggctct

SEQ ID NO: 1866132 - DNA, 15 bp, Homo sapiens
gctcagcaggctctc

SEQ ID NO: 1866133 - DNA, 15 bp, Homo sapiens
ctcagcaggctctca

SEQ ID NO: 1866134 - DNA, 15 bp, Homo sapiens
tcagcaggctctcag

SEQ ID NO: 1866135 - DNA, 15 bp, Homo sapiens
cagcaggctctcagg

SEQ ID NO: 1866136 - DNA, 15 bp, Homo sapiens
agcaggctctcaggg

SEQ ID NO: 1866137 - DNA, 15 bp, Homo sapiens
gcaggctctcagggc

SEQ ID NO: 1866138 - DNA, 15 bp, Homo sapiens
caggctctcagggca

SEQ ID NO: 1866139 - DNA, 15 bp, Homo sapiens
aggctctcagggcat

SEQ ID NO: 1866140 - DNA, 15 bp, Homo sapiens
ggctctcagggcatg

SEQ ID NO: 1866141 - DNA, 15 bp, Homo sapiens
gctctcagggcatgt

SEQ ID NO: 1866142 - DNA, 15 bp, Homo sapiens
ctctcagggcatgtt

SEQ ID NO: 1866143 - DNA, 15 bp, Homo sapiens
tctcagggcatgttt

SEQ ID NO: 1866144 - DNA, 15 bp, Homo sapiens
ctcagggcatgtttg

SEQ ID NO: 1866145 - DNA, 15 bp, Homo sapiens
tcagggcatgtttgt

SEQ ID NO: 1866146 - DNA, 15 bp, Homo sapiens
cagggcatgtttgta

SEQ ID NO: 1866147 - DNA, 15 bp, Homo sapiens
agggcatgtttgtag

SEQ ID NO: 1866148 - DNA, 15 bp, Homo sapiens
gggcatgtttgtaga

SEQ ID NO: 1866149 - DNA, 15 bp, Homo sapiens
ggcatgtttgtagag

SEQ ID NO: 1866150 - DNA, 15 bp, Homo sapiens
gcatgtttgtagagg

SEQ ID NO: 1866151 - DNA, 15 bp, Homo sapiens
catgtttgtagaggc

SEQ ID NO: 1866152 - DNA, 15 bp, Homo sapiens
atgtttgtagaggca

SEQ ID NO: 1866153 - DNA, 15 bp, Homo sapiens
tgtttgtagaggcag

SEQ ID NO: 1866154 - DNA, 15 bp, Homo sapiens
gtttgtagaggcagt

SEQ ID NO: 1866155 - DNA, 15 bp, Homo sapiens
tttgtagaggcagtg

SEQ ID NO: 1866156 - DNA, 15 bp, Homo sapiens
ttgtagaggcagtgg

SEQ ID NO: 1866157 - DNA, 15 bp, Homo sapiens
tgtagaggcagtggc

SEQ ID NO: 1866158 - DNA, 15 bp, Homo sapiens
gtagaggcagtggct

SEQ ID NO: 1866159 - DNA, 15 bp, Homo sapiens
tagaggcagtggctg

SEQ ID NO: 1866160 - DNA, 15 bp, Homo sapiens
agaggcagtggctgc

SEQ ID NO: 1866161 - DNA, 15 bp, Homo sapiens
gaggcagtggctgct

SEQ ID NO: 1866162 - DNA, 15 bp, Homo sapiens
aggcagtggctgctt

SEQ ID NO: 1866163 - DNA, 15 bp, Homo sapiens
ggcagtggctgcttt

SEQ ID NO: 1866164 - DNA, 15 bp, Homo sapiens
gcagtggctgctttg

SEQ ID NO: 1866165 - DNA, 15 bp, Homo sapiens
cagtggctgctttgg

SEQ ID NO: 1866166 - DNA, 15 bp, Homo sapiens
agtggctgctttggg

SEQ ID NO: 1866167 - DNA, 15 bp, Homo sapiens
gtggctgctttgggg

SEQ ID NO: 1866168 - DNA, 15 bp, Homo sapiens
tggctgctttggggt

SEQ ID NO: 1866169 - DNA, 15 bp, Homo sapiens
ggctgctttggggtt

SEQ ID NO: 1866170 - DNA, 15 bp, Homo sapiens
gctgctttggggttt

SEQ ID NO: 1866171 - DNA, 15 bp, Homo sapiens
ctgctttggggtttc

SEQ ID NO: 1866172 - DNA, 15 bp, Homo sapiens
tgctttggggtttcc

SEQ ID NO: 1866173 - DNA, 15 bp, Homo sapiens
gctttggggtttcca

SEQ ID NO: 1866174 - DNA, 15 bp, Homo sapiens
ctttggggtttccag

SEQ ID NO: 1866175 - DNA, 15 bp, Homo sapiens
tttggggtttccaga

SEQ ID NO: 1866176 - DNA, 15 bp, Homo sapiens
ttggggtttccagag

SEQ ID NO: 1866177 - DNA, 15 bp, Homo sapiens
tggggtttccagagc

SEQ ID NO: 1866178 - DNA, 15 bp, Homo sapiens
ggggtttccagagct

SEQ ID NO: 1866179 - DNA, 15 bp, Homo sapiens
gggtttccagagctt

SEQ ID NO: 1866180 - DNA, 15 bp, Homo sapiens
ggtttccagagcttc

SEQ ID NO: 1866181 - DNA, 15 bp, Homo sapiens
gtttccagagcttcc

SEQ ID NO: 1866182 - DNA, 15 bp, Homo sapiens
tttccagagcttcct

SEQ ID NO: 1866183 - DNA, 15 bp, Homo sapiens
ttccagagcttcctt

SEQ ID NO: 1866184 - DNA, 15 bp, Homo sapiens
tccagagcttccttg

SEQ ID NO: 1866185 - DNA, 15 bp, Homo sapiens
ccagagcttccttgg

SEQ ID NO: 1866186 - DNA, 15 bp, Homo sapiens
cagagcttccttggg

SEQ ID NO: 1866187 - DNA, 15 bp, Homo sapiens
agagcttccttggga

SEQ ID NO: 1866188 - DNA, 15 bp, Homo sapiens
gagcttccttgggag

SEQ ID NO: 1866189 - DNA, 15 bp, Homo sapiens
agcttccttgggagg

SEQ ID NO: 1866190 - DNA, 15 bp, Homo sapiens
gcttccttgggaggt

SEQ ID NO: 1866191 - DNA, 15 bp, Homo sapiens
cttccttgggaggtt

SEQ ID NO: 1866192 - DNA, 15 bp, Homo sapiens
ttccttgggaggttt

SEQ ID NO: 1866193 - DNA, 15 bp, Homo sapiens
tccttgggaggtttc

SEQ ID NO: 1866194 - DNA, 15 bp, Homo sapiens
ccttgggaggtttct

SEQ ID NO: 1866195 - DNA, 15 bp, Homo sapiens
cttgggaggtttctt

SEQ ID NO: 1866196 - DNA, 15 bp, Homo sapiens
ttgggaggtttcttc

SEQ ID NO: 1866197 - DNA, 15 bp, Homo sapiens
tgggaggtttcttct

SEQ ID NO: 1866198 - DNA, 15 bp, Homo sapiens
gggaggtttcttctg

SEQ ID NO: 1866199 - DNA, 15 bp, Homo sapiens
ggaggtttcttctgt

SEQ ID NO: 1866200 - DNA, 15 bp, Homo sapiens
gaggtttcttctgtg

SEQ ID NO: 1866201 - DNA, 15 bp, Homo sapiens
aggtttcttctgtgt

SEQ ID NO: 1866202 - DNA, 15 bp, Homo sapiens
ggtttcttctgtgtg

SEQ ID NO: 1866203 - DNA, 15 bp, Homo sapiens
gtttcttctgtgtgt

SEQ ID NO: 1866204 - DNA, 15 bp, Homo sapiens
tttcttctgtgtgtc

SEQ ID NO: 1866205 - DNA, 15 bp, Homo sapiens
ttcttctgtgtgtcc

SEQ ID NO: 1866206 - DNA, 15 bp, Homo sapiens
tcttctgtgtgtccc

SEQ ID NO: 1866207 - DNA, 15 bp, Homo sapiens
cttctgtgtgtccca

SEQ ID NO: 1866208 - DNA, 15 bp, Homo sapiens
ttctgtgtgtcccat

SEQ ID NO: 1866209 - DNA, 15 bp, Homo sapiens
tctgtgtgtcccatt

SEQ ID NO: 1866210 - DNA, 15 bp, Homo sapiens
ctgtgtgtcccattg

SEQ ID NO: 1866211 - DNA, 15 bp, Homo sapiens
tgtgtgtcccattga

SEQ ID NO: 1866212 - DNA, 15 bp, Homo sapiens
gtgtgtcccattgac

SEQ ID NO: 1866213 - DNA, 15 bp, Homo sapiens
tgtgtcccattgacc

SEQ ID NO: 1866214 - DNA, 15 bp, Homo sapiens
gtgtcccattgacca

SEQ ID NO: 1866215 - DNA, 15 bp, Homo sapiens
tgtcccattgaccag

SEQ ID NO: 1866216 - DNA, 15 bp, Homo sapiens
gtcccattgaccaga

SEQ ID NO: 1866217 - DNA, 15 bp, Homo sapiens
tcccattgaccagag

SEQ ID NO: 1866218 - DNA, 15 bp, Homo sapiens
cccattgaccagagc

SEQ ID NO: 1866219 - DNA, 15 bp, Homo sapiens
ccattgaccagagca

SEQ ID NO: 1866220 - DNA, 15 bp, Homo sapiens
cattgaccagagcac

SEQ ID NO: 1866221 - DNA, 15 bp, Homo sapiens
attgaccagagcacc

SEQ ID NO: 1866222 - DNA, 15 bp, Homo sapiens
ttgaccagagcacca

SEQ ID NO: 1866223 - DNA, 15 bp, Homo sapiens
tgaccagagcaccac

SEQ ID NO: 1866224 - DNA, 15 bp, Homo sapiens
gaccagagcaccact

SEQ ID NO: 1866225 - DNA, 15 bp, Homo sapiens
accagagcaccactg

SEQ ID NO: 1866226 - DNA, 15 bp, Homo sapiens
ccagagcaccactgg

SEQ ID NO: 1866227 - DNA, 15 bp, Homo sapiens
cagagcaccactggg

SEQ ID NO: 1866228 - DNA, 15 bp, Homo sapiens
agagcaccactgggg

SEQ ID NO: 1866229 - DNA, 15 bp, Homo sapiens
gagcaccactggggg

SEQ ID NO: 1866230 - DNA, 15 bp, Homo sapiens
agcaccactgggggt

SEQ ID NO: 1866231 - DNA, 15 bp, Homo sapiens
gcaccactgggggtg

SEQ ID NO: 1866232 - DNA, 15 bp, Homo sapiens
caccactgggggtga

SEQ ID NO: 1866233 - DNA, 15 bp, Homo sapiens
accactgggggtgaa

SEQ ID NO: 1866234 - DNA, 15 bp, Homo sapiens
ccactgggggtgaag

SEQ ID NO: 1866235 - DNA, 15 bp, Homo sapiens
cactgggggtgaagt

SEQ ID NO: 1866236 - DNA, 15 bp, Homo sapiens
actgggggtgaagtg

SEQ ID NO: 1866237 - DNA, 15 bp, Homo sapiens
ctgggggtgaagtga

SEQ ID NO: 1866238 - DNA, 15 bp, Homo sapiens
tgggggtgaagtgag

SEQ ID NO: 1866239 - DNA, 15 bp, Homo sapiens
gggggtgaagtgagc

SEQ ID NO: 1866240 - DNA, 15 bp, Homo sapiens
ggggtgaagtgagcc

SEQ ID NO: 1866241 - DNA, 15 bp, Homo sapiens
gggtgaagtgagccc

SEQ ID NO: 1866242 - DNA, 15 bp, Homo sapiens
ggtgaagtgagcccc

SEQ ID NO: 1866243 - DNA, 15 bp, Homo sapiens
gtgaagtgagcccca

SEQ ID NO: 1866244 - DNA, 15 bp, Homo sapiens
tgaagtgagccccag

SEQ ID NO: 1866245 - DNA, 15 bp, Homo sapiens
gaagtgagccccaga

SEQ ID NO: 1866246 - DNA, 15 bp, Homo sapiens
aagtgagccccagac

SEQ ID NO: 1866247 - DNA, 15 bp, Homo sapiens
agtgagccccagaca

SEQ ID NO: 1866248 - DNA, 15 bp, Homo sapiens
gtgagccccagacat

SEQ ID NO: 1866249 - DNA, 15 bp, Homo sapiens
tgagccccagacatc

SEQ ID NO: 1866250 - DNA, 15 bp, Homo sapiens
gagccccagacatct

SEQ ID NO: 1866251 - DNA, 15 bp, Homo sapiens
agccccagacatctt

SEQ ID NO: 1866252 - DNA, 15 bp, Homo sapiens
gccccagacatcttt

SEQ ID NO: 1866253 - DNA, 15 bp, Homo sapiens
ccccagacatcttta

SEQ ID NO: 1866254 - DNA, 15 bp, Homo sapiens
cccagacatctttag

SEQ ID NO: 1866255 - DNA, 15 bp, Homo sapiens
ccagacatctttagg

SEQ ID NO: 1866256 - DNA, 15 bp, Homo sapiens
cagacatctttaggt

SEQ ID NO: 1866257 - DNA, 15 bp, Homo sapiens
agacatctttaggtt

SEQ ID NO: 1866258 - DNA, 15 bp, Homo sapiens
gacatctttaggttt

SEQ ID NO: 1866259 - DNA, 15 bp, Homo sapiens
acatctttaggtttc

SEQ ID NO: 1866260 - DNA, 15 bp, Homo sapiens
catctttaggtttcc

SEQ ID NO: 1866261 - DNA, 15 bp, Homo sapiens
atctttaggtttcca

SEQ ID NO: 1866262 - DNA, 15 bp, Homo sapiens
tctttaggtttccat

SEQ ID NO: 1866263 - DNA, 15 bp, Homo sapiens
ctttaggtttccatc

SEQ ID NO: 1866264 - DNA, 15 bp, Homo sapiens
tttaggtttccatct

SEQ ID NO: 1866265 - DNA, 15 bp, Homo sapiens
ttaggtttccatctt

SEQ ID NO: 1866266 - DNA, 15 bp, Homo sapiens
taggtttccatcttt

SEQ ID NO: 1866267 - DNA, 15 bp, Homo sapiens
aggtttccatcttta

SEQ ID NO: 1866268 - DNA, 15 bp, Homo sapiens
ggtttccatctttag

SEQ ID NO: 1866269 - DNA, 15 bp, Homo sapiens
gtttccatctttagg

SEQ ID NO: 1866270 - DNA, 15 bp, Homo sapiens
tttccatctttaggt

SEQ ID NO: 1866271 - DNA, 15 bp, Homo sapiens
ttccatctttaggtg

SEQ ID NO: 1866272 - DNA, 15 bp, Homo sapiens
tccatctttaggtga

SEQ ID NO: 1866273 - DNA, 15 bp, Homo sapiens
ccatctttaggtgag

SEQ ID NO: 1866274 - DNA, 15 bp, Homo sapiens
catctttaggtgagc

SEQ ID NO: 1866275 - DNA, 15 bp, Homo sapiens
atctttaggtgagct

SEQ ID NO: 1866276 - DNA, 15 bp, Homo sapiens
tctttaggtgagctt

SEQ ID NO: 1866277 - DNA, 15 bp, Homo sapiens
ctttaggtgagcttt

SEQ ID NO: 1866278 - DNA, 15 bp, Homo sapiens
tttaggtgagcttta

SEQ ID NO: 1866279 - DNA, 15 bp, Homo sapiens
ttaggtgagctttat

SEQ ID NO: 1866280 - DNA, 15 bp, Homo sapiens
taggtgagctttatg

SEQ ID NO: 1866281 - DNA, 15 bp, Homo sapiens
aggtgagctttatgc

SEQ ID NO: 1866282 - DNA, 15 bp, Homo sapiens
ggtgagctttatgcc

SEQ ID NO: 1866283 - DNA, 15 bp, Homo sapiens
gtgagctttatgccc

SEQ ID NO: 1866284 - DNA, 15 bp, Homo sapiens
tgagctttatgccca

SEQ ID NO: 1866285 - DNA, 15 bp, Homo sapiens
gagctttatgcccag

SEQ ID NO: 1866286 - DNA, 15 bp, Homo sapiens
agctttatgcccagg

SEQ ID NO: 1866287 - DNA, 15 bp, Homo sapiens
gctttatgcccaggc

SEQ ID NO: 1866288 - DNA, 15 bp, Homo sapiens
ctttatgcccaggca

SEQ ID NO: 1866289 - DNA, 15 bp, Homo sapiens
tttatgcccaggcac

SEQ ID NO: 1866290 - DNA, 15 bp, Homo sapiens
ttatgcccaggcacg

SEQ ID NO: 1866291 - DNA, 15 bp, Homo sapiens
tatgcccaggcacgt

SEQ ID NO: 1866292 - DNA, 15 bp, Homo sapiens
atgcccaggcacgta

SEQ ID NO: 1866293 - DNA, 15 bp, Homo sapiens
tgcccaggcacgtag

SEQ ID NO: 1866294 - DNA, 15 bp, Homo sapiens
gcccaggcacgtagc

SEQ ID NO: 1866295 - DNA, 15 bp, Homo sapiens
cccaggcacgtagca

SEQ ID NO: 1866296 - DNA, 15 bp, Homo sapiens
ccaggcacgtagcag

SEQ ID NO: 1866297 - DNA, 15 bp, Homo sapiens
caggcacgtagcaga

SEQ ID NO: 1866298 - DNA, 15 bp, Homo sapiens
aggcacgtagcagaa

SEQ ID NO: 1866299 - DNA, 15 bp, Homo sapiens
ggcacgtagcagaag

SEQ ID NO: 1866300 - DNA, 15 bp, Homo sapiens
gcacgtagcagaaga

SEQ ID NO: 1866301 - DNA, 15 bp, Homo sapiens
cacgtagcagaagaa

SEQ ID NO: 1866302 - DNA, 15 bp, Homo sapiens
acgtagcagaagaaa

SEQ ID NO: 1866303 - DNA, 15 bp, Homo sapiens
cgtagcagaagaaac

SEQ ID NO: 1866304 - DNA, 15 bp, Homo sapiens
gtagcagaagaaact

SEQ ID NO: 1866305 - DNA, 15 bp, Homo sapiens
tagcagaagaaactg

SEQ ID NO: 1866306 - DNA, 15 bp, Homo sapiens
agcagaagaaactgt

SEQ ID NO: 1866307 - DNA, 15 bp, Homo sapiens
gcagaagaaactgtt

SEQ ID NO: 1866308 - DNA, 15 bp, Homo sapiens
cagaagaaactgttt

SEQ ID NO: 1866309 - DNA, 15 bp, Homo sapiens
agaagaaactgtttc

SEQ ID NO: 1866310 - DNA, 15 bp, Homo sapiens
gaagaaactgtttct

SEQ ID NO: 1866311 - DNA, 15 bp, Homo sapiens
aagaaactgtttcta

SEQ ID NO: 1866312 - DNA, 15 bp, Homo sapiens
agaaactgtttctac

SEQ ID NO: 1866313 - DNA, 15 bp, Homo sapiens
gaaactgtttctact

SEQ ID NO: 1866314 - DNA, 15 bp, Homo sapiens
aaactgtttctactc

SEQ ID NO: 1866315 - DNA, 15 bp, Homo sapiens
aactgtttctactca

SEQ ID NO: 1866316 - DNA, 15 bp, Homo sapiens
actgtttctactcat

SEQ ID NO: 1866317 - DNA, 15 bp, Homo sapiens
ctgtttctactcata

SEQ ID NO: 1866318 - DNA, 15 bp, Homo sapiens
tgtttctactcataa

SEQ ID NO: 1866319 - DNA, 15 bp, Homo sapiens
gtttctactcataaa

SEQ ID NO: 1866320 - DNA, 15 bp, Homo sapiens
tttctactcataaac

SEQ ID NO: 1866321 - DNA, 15 bp, Homo sapiens
ttctactcataaacc

SEQ ID NO: 1866322 - DNA, 15 bp, Homo sapiens
tctactcataaacca

SEQ ID NO: 1866323 - DNA, 15 bp, Homo sapiens
ctactcataaaccaa

SEQ ID NO: 1866324 - DNA, 15 bp, Homo sapiens
tactcataaaccaag

SEQ ID NO: 1866325 - DNA, 15 bp, Homo sapiens
actcataaaccaagc

SEQ ID NO: 1866326 - DNA, 15 bp, Homo sapiens
ctcataaaccaagca

SEQ ID NO: 1866327 - DNA, 15 bp, Homo sapiens
tcataaaccaagcaa

SEQ ID NO: 1866328 - DNA, 15 bp, Homo sapiens
cataaaccaagcaaa

SEQ ID NO: 1866329 - DNA, 15 bp, Homo sapiens
ataaaccaagcaaat

SEQ ID NO: 1866330 - DNA, 15 bp, Homo sapiens
taaaccaagcaaatt

SEQ ID NO: 1866331 - DNA, 15 bp, Homo sapiens
aaaccaagcaaattt

SEQ ID NO: 1866332 - DNA, 15 bp, Homo sapiens
aaccaagcaaattta

SEQ ID NO: 1866333 - DNA, 15 bp, Homo sapiens
accaagcaaatttat

SEQ ID NO: 1866334 - DNA, 15 bp, Homo sapiens
ccaagcaaatttata

SEQ ID NO: 1866335 - DNA, 15 bp, Homo sapiens
caagcaaatttatag

SEQ ID NO: 1866336 - DNA, 15 bp, Homo sapiens
aagcaaatttatagt

SEQ ID NO: 1866337 - DNA, 15 bp, Homo sapiens
agcaaatttatagtg

SEQ ID NO: 1866338 - DNA, 15 bp, Homo sapiens
gcaaatttatagtgg

SEQ ID NO: 1866339 - DNA, 15 bp, Homo sapiens
caaatttatagtgga

SEQ ID NO: 1866340 - DNA, 15 bp, Homo sapiens
aaatttatagtggaa

SEQ ID NO: 1866341 - DNA, 15 bp, Homo sapiens
aatttatagtggaaa

SEQ ID NO: 1866342 - DNA, 15 bp, Homo sapiens
atttatagtggaaat

SEQ ID NO: 1866343 - DNA, 15 bp, Homo sapiens
tttatagtggaaatc

SEQ ID NO: 1866344 - DNA, 15 bp, Homo sapiens
ttatagtggaaatca

SEQ ID NO: 1866345 - DNA, 15 bp, Homo sapiens
tatagtggaaatcag

SEQ ID NO: 1866346 - DNA, 15 bp, Homo sapiens
atagtggaaatcagt

SEQ ID NO: 1866347 - DNA, 15 bp, Homo sapiens
tagtggaaatcagtg

SEQ ID NO: 1866348 - DNA, 15 bp, Homo sapiens
agtggaaatcagtgg

SEQ ID NO: 1866349 - DNA, 15 bp, Homo sapiens
gtggaaatcagtggg

SEQ ID NO: 1866350 - DNA, 15 bp, Homo sapiens
tggaaatcagtggga

SEQ ID NO: 1866351 - DNA, 15 bp, Homo sapiens
ggaaatcagtgggag

SEQ ID NO: 1866352 - DNA, 15 bp, Homo sapiens
gaaatcagtgggaga

SEQ ID NO: 1866353 - DNA, 15 bp, Homo sapiens
aaatcagtgggagaa

SEQ ID NO: 1866354 - DNA, 15 bp, Homo sapiens
aatcagtgggagaaa

SEQ ID NO: 1866355 - DNA, 15 bp, Homo sapiens
atcagtgggagaaaa

SEQ ID NO: 1866356 - DNA, 15 bp, Homo sapiens
tcagtgggagaaaat

SEQ ID NO: 1866357 - DNA, 15 bp, Homo sapiens
cagtgggagaaaata

SEQ ID NO: 1866358 - DNA, 15 bp, Homo sapiens
agtgggagaaaataa

SEQ ID NO: 1866359 - DNA, 15 bp, Homo sapiens
gtgggagaaaataaa

SEQ ID NO: 1866360 - DNA, 15 bp, Homo sapiens
tgggagaaaataaat

SEQ ID NO: 1866361 - DNA, 15 bp, Homo sapiens
gggagaaaataaata

SEQ ID NO: 1866362 - DNA, 15 bp, Homo sapiens
ggagaaaataaatat

SEQ ID NO: 1866363 - DNA, 15 bp, Homo sapiens
gagaaaataaatatg

SEQ ID NO: 1866364 - DNA, 15 bp, Homo sapiens
aaaataaatatgaat

SEQ ID NO: 1866365 - DNA, 15 bp, Homo sapiens
aaataaatatgaatc

SEQ ID NO: 1866366 - DNA, 15 bp, Homo sapiens
aataaatatgaatcc

SEQ ID NO: 1866367 - DNA, 15 bp, Homo sapiens
ataaatatgaatccc

SEQ ID NO: 1866368 - DNA, 15 bp, Homo sapiens
taaatatgaatcccc

SEQ ID NO: 1866369 - DNA, 15 bp, Homo sapiens
aaatatgaatcccca

SEQ ID NO: 1866370 - DNA, 15 bp, Homo sapiens
aatatgaatccccat

SEQ ID NO: 1866371 - DNA, 15 bp, Homo sapiens
atatgaatccccatg

SEQ ID NO: 1866372 - DNA, 15 bp, Homo sapiens
tatgaatccccatga

SEQ ID NO: 1866373 - DNA, 15 bp, Homo sapiens
atgaatccccatgat

SEQ ID NO: 1866374 - DNA, 15 bp, Homo sapiens
tgaatccccatgatg

SEQ ID NO: 1866375 - DNA, 15 bp, Homo sapiens
gaatccccatgatgt

SEQ ID NO: 1866376 - DNA, 15 bp, Homo sapiens
aatccccatgatgtc

SEQ ID NO: 1866377 - DNA, 15 bp, Homo sapiens
atccccatgatgtca

SEQ ID NO: 1866378 - DNA, 15 bp, Homo sapiens
tccccatgatgtcat

SEQ ID NO: 1866379 - DNA, 15 bp, Homo sapiens
ccccatgatgtcatt

SEQ ID NO: 1866380 - DNA, 15 bp, Homo sapiens
cccatgatgtcattt

SEQ ID NO: 1866381 - DNA, 15 bp, Homo sapiens
ccatgatgtcatttt

SEQ ID NO: 1866382 - DNA, 15 bp, Homo sapiens
catgatgtcatttta

SEQ ID NO: 1866383 - DNA, 15 bp, Homo sapiens
atgatgtcattttat

SEQ ID NO: 1866384 - DNA, 15 bp, Homo sapiens
tgatgtcattttatg

SEQ ID NO: 1866385 - DNA, 15 bp, Homo sapiens
gatgtcattttatgg

SEQ ID NO: 1866386 - DNA, 15 bp, Homo sapiens
atgtcattttatggg

SEQ ID NO: 1866387 - DNA, 15 bp, Homo sapiens
tgtcattttatgggc

SEQ ID NO: 1866388 - DNA, 15 bp, Homo sapiens
gtcattttatgggct

SEQ ID NO: 1866389 - DNA, 15 bp, Homo sapiens
tcattttatgggctg

SEQ ID NO: 1866390 - DNA, 15 bp, Homo sapiens
cattttatgggctgc

SEQ ID NO: 1866391 - DNA, 15 bp, Homo sapiens
attttatgggctgct

SEQ ID NO: 1866392 - DNA, 15 bp, Homo sapiens
ttttatgggctgctt

SEQ ID NO: 1866393 - DNA, 15 bp, Homo sapiens
tttatgggctgcttt

SEQ ID NO: 1866394 - DNA, 15 bp, Homo sapiens
ttatgggctgcttta

SEQ ID NO: 1866395 - DNA, 15 bp, Homo sapiens
tatgggctgctttat

SEQ ID NO: 1866396 - DNA, 15 bp, Homo sapiens
atgggctgctttata

SEQ ID NO: 1866397 - DNA, 15 bp, Homo sapiens
tgggctgctttatag

SEQ ID NO: 1866398 - DNA, 15 bp, Homo sapiens
gggctgctttataga

SEQ ID NO: 1866399 - DNA, 15 bp, Homo sapiens
ggctgctttatagat

SEQ ID NO: 1866400 - DNA, 15 bp, Homo sapiens
gctgctttatagatt

SEQ ID NO: 1866401 - DNA, 15 bp, Homo sapiens
ctgctttatagattg

SEQ ID NO: 1866402 - DNA, 15 bp, Homo sapiens
tgctttatagattgt

SEQ ID NO: 1866403 - DNA, 15 bp, Homo sapiens
gctttatagattgta

SEQ ID NO: 1866404 - DNA, 15 bp, Homo sapiens
ctttatagattgtaa

SEQ ID NO: 1866405 - DNA, 15 bp, Homo sapiens
tttatagattgtaat

SEQ ID NO: 1866406 - DNA, 15 bp, Homo sapiens
ttatagattgtaatc

SEQ ID NO: 1866407 - DNA, 15 bp, Homo sapiens
tatagattgtaatca

SEQ ID NO: 1866408 - DNA, 15 bp, Homo sapiens
atagattgtaatcac

SEQ ID NO: 1866409 - DNA, 15 bp, Homo sapiens
tagattgtaatcacc

SEQ ID NO: 1866410 - DNA, 15 bp, Homo sapiens
agattgtaatcaccc

SEQ ID NO: 1866411 - DNA, 15 bp, Homo sapiens
gattgtaatcaccca

SEQ ID NO: 1866412 - DNA, 15 bp, Homo sapiens
attgtaatcacccat

SEQ ID NO: 1866413 - DNA, 15 bp, Homo sapiens
ttgtaatcacccatt

SEQ ID NO: 1866414 - DNA, 15 bp, Homo sapiens
tgtaatcacccattt

SEQ ID NO: 1866415 - DNA, 15 bp, Homo sapiens
gtaatcacccattta

SEQ ID NO: 1866416 - DNA, 15 bp, Homo sapiens
taatcacccatttag

SEQ ID NO: 1866417 - DNA, 15 bp, Homo sapiens
aatcacccatttaga

SEQ ID NO: 1866418 - DNA, 15 bp, Homo sapiens
atcacccatttagag

SEQ ID NO: 1866419 - DNA, 15 bp, Homo sapiens
tcacccatttagagt

SEQ ID NO: 1866420 - DNA, 15 bp, Homo sapiens
cacccatttagagtt

SEQ ID NO: 1866421 - DNA, 15 bp, Homo sapiens
acccatttagagttt

SEQ ID NO: 1866422 - DNA, 15 bp, Homo sapiens
cccatttagagtttg

SEQ ID NO: 1866423 - DNA, 15 bp, Homo sapiens
ccatttagagtttgc

SEQ ID NO: 1866424 - DNA, 15 bp, Homo sapiens
catttagagtttgca

SEQ ID NO: 1866425 - DNA, 15 bp, Homo sapiens
atttagagtttgcag

SEQ ID NO: 1866426 - DNA, 15 bp, Homo sapiens
tttagagtttgcagg

SEQ ID NO: 1866427 - DNA, 15 bp, Homo sapiens
ttagagtttgcaggc

SEQ ID NO: 1866428 - DNA, 15 bp, Homo sapiens
tagagtttgcaggct

SEQ ID NO: 1866429 - DNA, 15 bp, Homo sapiens
agagtttgcaggcta

SEQ ID NO: 1866430 - DNA, 15 bp, Homo sapiens
gagtttgcaggctat

SEQ ID NO: 1866431 - DNA, 15 bp, Homo sapiens
agtttgcaggctatt

SEQ ID NO: 1866432 - DNA, 15 bp, Homo sapiens
gtttgcaggctatta

SEQ ID NO: 1866433 - DNA, 15 bp, Homo sapiens
tttgcaggctattaa

SEQ ID NO: 1866434 - DNA, 15 bp, Homo sapiens
ttgcaggctattaat

SEQ ID NO: 1866435 - DNA, 15 bp, Homo sapiens
tgcaggctattaatt

SEQ ID NO: 1866436 - DNA, 15 bp, Homo sapiens
gcaggctattaattt

SEQ ID NO: 1866437 - DNA, 15 bp, Homo sapiens
caggctattaatttt

SEQ ID NO: 1866438 - DNA, 15 bp, Homo sapiens
aggctattaattttg

SEQ ID NO: 1866439 - DNA, 15 bp, Homo sapiens
ggctattaattttgt

SEQ ID NO: 1866440 - DNA, 15 bp, Homo sapiens
gctattaattttgtt

SEQ ID NO: 1866441 - DNA, 15 bp, Homo sapiens
ctattaattttgttt

SEQ ID NO: 1866442 - DNA, 15 bp, Homo sapiens
tattaattttgtttg

SEQ ID NO: 1866443 - DNA, 15 bp, Homo sapiens
attaattttgtttgc

SEQ ID NO: 1866444 - DNA, 15 bp, Homo sapiens
ttaattttgtttgcg

SEQ ID NO: 1866445 - DNA, 15 bp, Homo sapiens
taattttgtttgcgc

SEQ ID NO: 1866446 - DNA, 15 bp, Homo sapiens
aattttgtttgcgca

SEQ ID NO: 1866447 - DNA, 15 bp, Homo sapiens
attttgtttgcgcag

SEQ ID NO: 1866448 - DNA, 15 bp, Homo sapiens
ttttgtttgcgcaga

SEQ ID NO: 1866449 - DNA, 15 bp, Homo sapiens
tttgtttgcgcagag

SEQ ID NO: 1866450 - DNA, 15 bp, Homo sapiens
ttgtttgcgcagagc

SEQ ID NO: 1866451 - DNA, 15 bp, Homo sapiens
tgtttgcgcagagcc

SEQ ID NO: 1866452 - DNA, 15 bp, Homo sapiens
gtttgcgcagagcct

SEQ ID NO: 1866453 - DNA, 15 bp, Homo sapiens
tttgcgcagagcctc

SEQ ID NO: 1866454 - DNA, 15 bp, Homo sapiens
ttgcgcagagcctca

SEQ ID NO: 1866455 - DNA, 15 bp, Homo sapiens
tgcgcagagcctcag

SEQ ID NO: 1866456 - DNA, 15 bp, Homo sapiens
gcgcagagcctcagg

SEQ ID NO: 1866457 - DNA, 15 bp, Homo sapiens
cgcagagcctcagga

SEQ ID NO: 1866458 - DNA, 15 bp, Homo sapiens
gcagagcctcaggac

SEQ ID NO: 1866459 - DNA, 15 bp, Homo sapiens
cagagcctcaggact

SEQ ID NO: 1866460 - DNA, 15 bp, Homo sapiens
agagcctcaggactc

SEQ ID NO: 1866461 - DNA, 15 bp, Homo sapiens
gagcctcaggactct

SEQ ID NO: 1866462 - DNA, 15 bp, Homo sapiens
agcctcaggactctt

SEQ ID NO: 1866463 - DNA, 15 bp, Homo sapiens
gcctcaggactcttg

SEQ ID NO: 1866464 - DNA, 15 bp, Homo sapiens
cctcaggactcttgg

SEQ ID NO: 1866465 - DNA, 15 bp, Homo sapiens
ctcaggactcttggg

SEQ ID NO: 1866466 - DNA, 15 bp, Homo sapiens
tcaggactcttgggg

SEQ ID NO: 1866467 - DNA, 15 bp, Homo sapiens
caggactcttgggga

SEQ ID NO: 1866468 - DNA, 15 bp, Homo sapiens
aggactcttggggac

SEQ ID NO: 1866469 - DNA, 15 bp, Homo sapiens
ggactcttggggaca

SEQ ID NO: 1866470 - DNA, 15 bp, Homo sapiens
gactcttggggacag

SEQ ID NO: 1866471 - DNA, 15 bp, Homo sapiens
actcttggggacaga

SEQ ID NO: 1866472 - DNA, 15 bp, Homo sapiens
ctcttggggacagaa

SEQ ID NO: 1866473 - DNA, 15 bp, Homo sapiens
tcttggggacagaat

SEQ ID NO: 1866474 - DNA, 15 bp, Homo sapiens
cttggggacagaatt

SEQ ID NO: 1866475 - DNA, 15 bp, Homo sapiens
ttggggacagaattt

SEQ ID NO: 1866476 - DNA, 15 bp, Homo sapiens
tggggacagaattta

SEQ ID NO: 1866477 - DNA, 15 bp, Homo sapiens
ggggacagaatttac

SEQ ID NO: 1866478 - DNA, 15 bp, Homo sapiens
gggacagaatttaca

SEQ ID NO: 1866479 - DNA, 15 bp, Homo sapiens
ggacagaatttacag

SEQ ID NO: 1866480 - DNA, 15 bp, Homo sapiens
gacagaatttacagg

SEQ ID NO: 1866481 - DNA, 15 bp, Homo sapiens
acagaatttacaggg

SEQ ID NO: 1866482 - DNA, 15 bp, Homo sapiens
cagaatttacagggc

SEQ ID NO: 1866483 - DNA, 15 bp, Homo sapiens
agaatttacagggct

SEQ ID NO: 1866484 - DNA, 15 bp, Homo sapiens
gaatttacagggctg

SEQ ID NO: 1866485 - DNA, 15 bp, Homo sapiens
aatttacagggctgt

SEQ ID NO: 1866486 - DNA, 15 bp, Homo sapiens
atttacagggctgtg

SEQ ID NO: 1866487 - DNA, 15 bp, Homo sapiens
tttacagggctgtgg

SEQ ID NO: 1866488 - DNA, 15 bp, Homo sapiens
ttacagggctgtggt

SEQ ID NO: 1866489 - DNA, 15 bp, Homo sapiens
tacagggctgtggtg

SEQ ID NO: 1866490 - DNA, 15 bp, Homo sapiens
acagggctgtggtgt

SEQ ID NO: 1866491 - DNA, 15 bp, Homo sapiens
cagggctgtggtgtc

SEQ ID NO: 1866492 - DNA, 15 bp, Homo sapiens
agggctgtggtgtca

SEQ ID NO: 1866493 - DNA, 15 bp, Homo sapiens
gggctgtggtgtcag

SEQ ID NO: 1866494 - DNA, 15 bp, Homo sapiens
ggctgtggtgtcaga

SEQ ID NO: 1866495 - DNA, 15 bp, Homo sapiens
gctgtggtgtcagac

SEQ ID NO: 1866496 - DNA, 15 bp, Homo sapiens
ctgtggtgtcagaca

SEQ ID NO: 1866497 - DNA, 15 bp, Homo sapiens
tgtggtgtcagacac

SEQ ID NO: 1866498 - DNA, 15 bp, Homo sapiens
gtggtgtcagacacg

SEQ ID NO: 1866499 - DNA, 15 bp, Homo sapiens
tggtgtcagacacgt

SEQ ID NO: 1866500 - DNA, 15 bp, Homo sapiens
ggtgtcagacacgtg

SEQ ID NO: 1866501 - DNA, 15 bp, Homo sapiens
gtgtcagacacgtgg

SEQ ID NO: 1866502 - DNA, 15 bp, Homo sapiens
tgtcagacacgtggt

SEQ ID NO: 1866503 - DNA, 15 bp, Homo sapiens
gtcagacacgtggtt

SEQ ID NO: 1866504 - DNA, 15 bp, Homo sapiens
tcagacacgtggttc

SEQ ID NO: 1866505 - DNA, 15 bp, Homo sapiens
cagacacgtggttct

SEQ ID NO: 1866506 - DNA, 15 bp, Homo sapiens
agacacgtggttcta

SEQ ID NO: 1866507 - DNA, 15 bp, Homo sapiens
gacacgtggttctag

SEQ ID NO: 1866508 - DNA, 15 bp, Homo sapiens
acacgtggttctagg

SEQ ID NO: 1866509 - DNA, 15 bp, Homo sapiens
cacgtggttctaggt

SEQ ID NO: 1866510 - DNA, 15 bp, Homo sapiens
acgtggttctaggtc

SEQ ID NO: 1866511 - DNA, 15 bp, Homo sapiens
cgtggttctaggtct

SEQ ID NO: 1866512 - DNA, 15 bp, Homo sapiens
gtggttctaggtctt

SEQ ID NO: 1866513 - DNA, 15 bp, Homo sapiens
tggttctaggtctta

SEQ ID NO: 1866514 - DNA, 15 bp, Homo sapiens
ggttctaggtcttaa

SEQ ID NO: 1866515 - DNA, 15 bp, Homo sapiens
gttctaggtcttaaa

SEQ ID NO: 1866516 - DNA, 15 bp, Homo sapiens
ttctaggtcttaaac

SEQ ID NO: 1866517 - DNA, 15 bp, Homo sapiens
tctaggtcttaaacc

SEQ ID NO: 1866518 - DNA, 15 bp, Homo sapiens
ctaggtcttaaaccc

SEQ ID NO: 1866519 - DNA, 15 bp, Homo sapiens
taggtcttaaacccc

SEQ ID NO: 1866520 - DNA, 15 bp, Homo sapiens
aggtcttaaacccct

SEQ ID NO: 1866521 - DNA, 15 bp, Homo sapiens
ggtcttaaacccctg

SEQ ID NO: 1866522 - DNA, 15 bp, Homo sapiens
gtcttaaacccctga

SEQ ID NO: 1866523 - DNA, 15 bp, Homo sapiens
tcttaaacccctgaa

SEQ ID NO: 1866524 - DNA, 15 bp, Homo sapiens
cttaaacccctgaaa

SEQ ID NO: 1866525 - DNA, 15 bp, Homo sapiens
ttaaacccctgaaag

SEQ ID NO: 1866526 - DNA, 15 bp, Homo sapiens
taaacccctgaaagg

SEQ ID NO: 1866527 - DNA, 15 bp, Homo sapiens
aaacccctgaaaggt

SEQ ID NO: 1866528 - DNA, 15 bp, Homo sapiens
aacccctgaaaggtt

SEQ ID NO: 1866529 - DNA, 15 bp, Homo sapiens
acccctgaaaggttt

SEQ ID NO: 1866530 - DNA, 15 bp, Homo sapiens
cccctgaaaggtttt

SEQ ID NO: 1866531 - DNA, 15 bp, Homo sapiens
ccctgaaaggttttg

SEQ ID NO: 1866532 - DNA, 15 bp, Homo sapiens
cctgaaaggttttgg

SEQ ID NO: 1866533 - DNA, 15 bp, Homo sapiens
ctgaaaggttttgga

SEQ ID NO: 1866534 - DNA, 15 bp, Homo sapiens
tgaaaggttttggaa

SEQ ID NO: 1866535 - DNA, 15 bp, Homo sapiens
gaaaggttttggaaa

SEQ ID NO: 1866536 - DNA, 15 bp, Homo sapiens
aaggttttggaaaga

SEQ ID NO: 1866537 - DNA, 15 bp, Homo sapiens
aggttttggaaagag

SEQ ID NO: 1866538 - DNA, 15 bp, Homo sapiens
ggttttggaaagaga

SEQ ID NO: 1866539 - DNA, 15 bp, Homo sapiens
gttttggaaagagaa

SEQ ID NO: 1866540 - DNA, 15 bp, Homo sapiens
ttttggaaagagaat

SEQ ID NO: 1866541 - DNA, 15 bp, Homo sapiens
tttggaaagagaatg

SEQ ID NO: 1866542 - DNA, 15 bp, Homo sapiens
ttggaaagagaatga

SEQ ID NO: 1866543 - DNA, 15 bp, Homo sapiens
tggaaagagaatgac

SEQ ID NO: 1866544 - DNA, 15 bp, Homo sapiens
ggaaagagaatgaca

SEQ ID NO: 1866545 - DNA, 15 bp, Homo sapiens
gaaagagaatgacag

SEQ ID NO: 1866546 - DNA, 15 bp, Homo sapiens
aaagagaatgacagg

SEQ ID NO: 1866547 - DNA, 15 bp, Homo sapiens
aagagaatgacaggt

SEQ ID NO: 1866548 - DNA, 15 bp, Homo sapiens
agagaatgacaggta

SEQ ID NO: 1866549 - DNA, 15 bp, Homo sapiens
gagaatgacaggtag

SEQ ID NO: 1866550 - DNA, 15 bp, Homo sapiens
agaatgacaggtagc

SEQ ID NO: 1866551 - DNA, 15 bp, Homo sapiens
gaatgacaggtagcc

SEQ ID NO: 1866552 - DNA, 15 bp, Homo sapiens
aatgacaggtagcct

SEQ ID NO: 1866553 - DNA, 15 bp, Homo sapiens
atgacaggtagccta

SEQ ID NO: 1866554 - DNA, 15 bp, Homo sapiens
tgacaggtagcctat

SEQ ID NO: 1866555 - DNA, 15 bp, Homo sapiens
gacaggtagcctatg

SEQ ID NO: 1866556 - DNA, 15 bp, Homo sapiens
acaggtagcctatgg

SEQ ID NO: 1866557 - DNA, 15 bp, Homo sapiens
caggtagcctatgga

SEQ ID NO: 1866558 - DNA, 15 bp, Homo sapiens
aggtagcctatggag

SEQ ID NO: 1866559 - DNA, 15 bp, Homo sapiens
ggtagcctatggagc

SEQ ID NO: 1866560 - DNA, 15 bp, Homo sapiens
gtagcctatggagca

SEQ ID NO: 1866561 - DNA, 15 bp, Homo sapiens
tagcctatggagcag

SEQ ID NO: 1866562 - DNA, 15 bp, Homo sapiens
agcctatggagcagc

SEQ ID NO: 1866563 - DNA, 15 bp, Homo sapiens
gcctatggagcagct

SEQ ID NO: 1866564 - DNA, 15 bp, Homo sapiens
cctatggagcagctg

SEQ ID NO: 1866565 - DNA, 15 bp, Homo sapiens
ctatggagcagctgg

SEQ ID NO: 1866566 - DNA, 15 bp, Homo sapiens
tatggagcagctggg

SEQ ID NO: 1866567 - DNA, 15 bp, Homo sapiens
atggagcagctgggg

SEQ ID NO: 1866568 - DNA, 15 bp, Homo sapiens
tggagcagctggggc

SEQ ID NO: 1866569 - DNA, 15 bp, Homo sapiens
ggagcagctggggct

SEQ ID NO: 1866570 - DNA, 15 bp, Homo sapiens
gagcagctggggctt

SEQ ID NO: 1866571 - DNA, 15 bp, Homo sapiens
agcagctggggctta

SEQ ID NO: 1866572 - DNA, 15 bp, Homo sapiens
gcagctggggcttag

SEQ ID NO: 1866573 - DNA, 15 bp, Homo sapiens
cagctggggcttagg

SEQ ID NO: 1866574 - DNA, 15 bp, Homo sapiens
agctggggcttaggg

SEQ ID NO: 1866575 - DNA, 15 bp, Homo sapiens
gctggggcttagggc

SEQ ID NO: 1866576 - DNA, 15 bp, Homo sapiens
ctggggcttagggct

SEQ ID NO: 1866577 - DNA, 15 bp, Homo sapiens
tggggcttagggctc

SEQ ID NO: 1866578 - DNA, 15 bp, Homo sapiens
ggggcttagggctct

SEQ ID NO: 1866579 - DNA, 15 bp, Homo sapiens
gggcttagggctctt

SEQ ID NO: 1866580 - DNA, 15 bp, Homo sapiens
ggcttagggctcttt

SEQ ID NO: 1866581 - DNA, 15 bp, Homo sapiens
gcttagggctctttc

SEQ ID NO: 1866582 - DNA, 15 bp, Homo sapiens
cttagggctctttcc

SEQ ID NO: 1866583 - DNA, 15 bp, Homo sapiens
ttagggctctttcct

SEQ ID NO: 1866584 - DNA, 15 bp, Homo sapiens
tagggctctttcctc

SEQ ID NO: 1866585 - DNA, 15 bp, Homo sapiens
agggctctttcctct

SEQ ID NO: 1866586 - DNA, 15 bp, Homo sapiens
gggctctttcctcta

SEQ ID NO: 1866587 - DNA, 15 bp, Homo sapiens
ggctctttcctctag

SEQ ID NO: 1866588 - DNA, 15 bp, Homo sapiens
gctctttcctctagc

SEQ ID NO: 1866589 - DNA, 15 bp, Homo sapiens
ctctttcctctagct

SEQ ID NO: 1866590 - DNA, 15 bp, Homo sapiens
tctttcctctagctt

SEQ ID NO: 1866591 - DNA, 15 bp, Homo sapiens
ctttcctctagcttt

SEQ ID NO: 1866592 - DNA, 15 bp, Homo sapiens
tttcctctagctttc

SEQ ID NO: 1866593 - DNA, 15 bp, Homo sapiens
ttcctctagctttcc

SEQ ID NO: 1866594 - DNA, 15 bp, Homo sapiens
tcctctagctttcct

SEQ ID NO: 1866595 - DNA, 15 bp, Homo sapiens
cctctagctttcctc

SEQ ID NO: 1866596 - DNA, 15 bp, Homo sapiens
ctctagctttcctcc

SEQ ID NO: 1866597 - DNA, 15 bp, Homo sapiens
tctagctttcctcct

SEQ ID NO: 1866598 - DNA, 15 bp, Homo sapiens
ctagctttcctcctg

SEQ ID NO: 1866599 - DNA, 15 bp, Homo sapiens
tagctttcctcctgg

SEQ ID NO: 1866600 - DNA, 15 bp, Homo sapiens
agctttcctcctgga

SEQ ID NO: 1866601 - DNA, 15 bp, Homo sapiens
gctttcctcctggac

SEQ ID NO: 1866602 - DNA, 15 bp, Homo sapiens
ctttcctcctggaca

SEQ ID NO: 1866603 - DNA, 15 bp, Homo sapiens
tttcctcctggacat

SEQ ID NO: 1866604 - DNA, 15 bp, Homo sapiens
ttcctcctggacata

SEQ ID NO: 1866605 - DNA, 15 bp, Homo sapiens
tcctcctggacatag

SEQ ID NO: 1866606 - DNA, 15 bp, Homo sapiens
cctcctggacatagt

SEQ ID NO: 1866607 - DNA, 15 bp, Homo sapiens
ctcctggacatagtt

SEQ ID NO: 1866608 - DNA, 15 bp, Homo sapiens
tcctggacatagttt

SEQ ID NO: 1866609 - DNA, 15 bp, Homo sapiens
cctggacatagtttt

SEQ ID NO: 1866610 - DNA, 15 bp, Homo sapiens
ctggacatagtttta

SEQ ID NO: 1866611 - DNA, 15 bp, Homo sapiens
tggacatagttttaa

SEQ ID NO: 1866612 - DNA, 15 bp, Homo sapiens
ggacatagttttaaa

SEQ ID NO: 1866613 - DNA, 15 bp, Homo sapiens
gacatagttttaaaa

SEQ ID NO: 1866614 - DNA, 15 bp, Homo sapiens
acatagttttaaaat

SEQ ID NO: 1866615 - DNA, 15 bp, Homo sapiens
catagttttaaaata

SEQ ID NO: 1866616 - DNA, 15 bp, Homo sapiens
atagttttaaaatat

SEQ ID NO: 1866617 - DNA, 15 bp, Homo sapiens
tagttttaaaatatt

SEQ ID NO: 1866618 - DNA, 15 bp, Homo sapiens
agttttaaaatattt

SEQ ID NO: 1866619 - DNA, 15 bp, Homo sapiens
gttttaaaatatttg

SEQ ID NO: 1866620 - DNA, 15 bp, Homo sapiens
ttttaaaatatttgt

SEQ ID NO: 1866621 - DNA, 15 bp, Homo sapiens
tttaaaatatttgtt

SEQ ID NO: 1866622 - DNA, 15 bp, Homo sapiens
ttaaaatatttgttc

SEQ ID NO: 1866623 - DNA, 15 bp, Homo sapiens
taaaatatttgttca

SEQ ID NO: 1866624 - DNA, 15 bp, Homo sapiens
aaaatatttgttcac

SEQ ID NO: 1866625 - DNA, 15 bp, Homo sapiens
aaatatttgttcact

SEQ ID NO: 1866626 - DNA, 15 bp, Homo sapiens
aatatttgttcactg

SEQ ID NO: 1866627 - DNA, 15 bp, Homo sapiens
atatttgttcactgt

SEQ ID NO: 1866628 - DNA, 15 bp, Homo sapiens
tatttgttcactgtt

SEQ ID NO: 1866629 - DNA, 15 bp, Homo sapiens
atttgttcactgttt

SEQ ID NO: 1866630 - DNA, 15 bp, Homo sapiens
tttgttcactgtttt

SEQ ID NO: 1866631 - DNA, 15 bp, Homo sapiens
ttgttcactgtttta

SEQ ID NO: 1866632 - DNA, 15 bp, Homo sapiens
tgttcactgttttat

SEQ ID NO: 1866633 - DNA, 15 bp, Homo sapiens
gttcactgttttatc

SEQ ID NO: 1866634 - DNA, 15 bp, Homo sapiens
ttcactgttttatca

SEQ ID NO: 1866635 - DNA, 15 bp, Homo sapiens
tcactgttttatcat

SEQ ID NO: 1866636 - DNA, 15 bp, Homo sapiens
cactgttttatcatc

SEQ ID NO: 1866637 - DNA, 15 bp, Homo sapiens
actgttttatcatct

SEQ ID NO: 1866638 - DNA, 15 bp, Homo sapiens
ctgttttatcatctt

SEQ ID NO: 1866639 - DNA, 15 bp, Homo sapiens
tgttttatcatctta

SEQ ID NO: 1866640 - DNA, 15 bp, Homo sapiens
gttttatcatcttaa

SEQ ID NO: 1866641 - DNA, 15 bp, Homo sapiens
ttttatcatcttaat

SEQ ID NO: 1866642 - DNA, 15 bp, Homo sapiens
tttatcatcttaatt

SEQ ID NO: 1866643 - DNA, 15 bp, Homo sapiens
ttatcatcttaattt

SEQ ID NO: 1866644 - DNA, 15 bp, Homo sapiens
tatcatcttaatttt

SEQ ID NO: 1866645 - DNA, 15 bp, Homo sapiens
atcatcttaatttta

SEQ ID NO: 1866646 - DNA, 15 bp, Homo sapiens
tcatcttaattttac

SEQ ID NO: 1866647 - DNA, 15 bp, Homo sapiens
catcttaattttacc

SEQ ID NO: 1866648 - DNA, 15 bp, Homo sapiens
atcttaattttaccc

SEQ ID NO: 1866649 - DNA, 15 bp, Homo sapiens
tcttaattttaccct

SEQ ID NO: 1866650 - DNA, 15 bp, Homo sapiens
cttaattttacccta

SEQ ID NO: 1866651 - DNA, 15 bp, Homo sapiens
ttaattttaccctag

SEQ ID NO: 1866652 - DNA, 15 bp, Homo sapiens
taattttaccctagt

SEQ ID NO: 1866653 - DNA, 15 bp, Homo sapiens
aattttaccctagtc

SEQ ID NO: 1866654 - DNA, 15 bp, Homo sapiens
attttaccctagtct

SEQ ID NO: 1866655 - DNA, 15 bp, Homo sapiens
ttttaccctagtctt

SEQ ID NO: 1866656 - DNA, 15 bp, Homo sapiens
tttaccctagtcttc

SEQ ID NO: 1866657 - DNA, 15 bp, Homo sapiens
ttaccctagtcttca

SEQ ID NO: 1866658 - DNA, 15 bp, Homo sapiens
taccctagtcttcag

SEQ ID NO: 1866659 - DNA, 15 bp, Homo sapiens
accctagtcttcagg

SEQ ID NO: 1866660 - DNA, 15 bp, Homo sapiens
ccctagtcttcaggc

SEQ ID NO: 1866661 - DNA, 15 bp, Homo sapiens
cctagtcttcaggcc

SEQ ID NO: 1866662 - DNA, 15 bp, Homo sapiens
ctagtcttcaggcct

SEQ ID NO: 1866663 - DNA, 15 bp, Homo sapiens
tagtcttcaggcctg

SEQ ID NO: 1866664 - DNA, 15 bp, Homo sapiens
agtcttcaggcctgt

SEQ ID NO: 1866665 - DNA, 15 bp, Homo sapiens
gtcttcaggcctgtc

SEQ ID NO: 1866666 - DNA, 15 bp, Homo sapiens
tcttcaggcctgtcc

SEQ ID NO: 1866667 - DNA, 15 bp, Homo sapiens
cttcaggcctgtcct

SEQ ID NO: 1866668 - DNA, 15 bp, Homo sapiens
ttcaggcctgtcctt

SEQ ID NO: 1866669 - DNA, 15 bp, Homo sapiens
tcaggcctgtccttt

SEQ ID NO: 1866670 - DNA, 15 bp, Homo sapiens
caggcctgtcctttc

SEQ ID NO: 1866671 - DNA, 15 bp, Homo sapiens
aggcctgtcctttcc

SEQ ID NO: 1866672 - DNA, 15 bp, Homo sapiens
ggcctgtcctttccg

SEQ ID NO: 1866673 - DNA, 15 bp, Homo sapiens
gcctgtcctttccgt

SEQ ID NO: 1866674 - DNA, 15 bp, Homo sapiens
cctgtcctttccgta

SEQ ID NO: 1866675 - DNA, 15 bp, Homo sapiens
ctgtcctttccgtaa

SEQ ID NO: 1866676 - DNA, 15 bp, Homo sapiens
tgtcctttccgtaag

SEQ ID NO: 1866677 - DNA, 15 bp, Homo sapiens
gtcctttccgtaagc

SEQ ID NO: 1866678 - DNA, 15 bp, Homo sapiens
tcctttccgtaagct

SEQ ID NO: 1866679 - DNA, 15 bp, Homo sapiens
cctttccgtaagcta

SEQ ID NO: 1866680 - DNA, 15 bp, Homo sapiens
ctttccgtaagctag

SEQ ID NO: 1866681 - DNA, 15 bp, Homo sapiens
tttccgtaagctagg

SEQ ID NO: 1866682 - DNA, 15 bp, Homo sapiens
ttccgtaagctaggt

SEQ ID NO: 1866683 - DNA, 15 bp, Homo sapiens
tccgtaagctaggtg

SEQ ID NO: 1866684 - DNA, 15 bp, Homo sapiens
ccgtaagctaggtga

SEQ ID NO: 1866685 - DNA, 15 bp, Homo sapiens
cgtaagctaggtgac

SEQ ID NO: 1866686 - DNA, 15 bp, Homo sapiens
gtaagctaggtgact

SEQ ID NO: 1866687 - DNA, 15 bp, Homo sapiens
taagctaggtgacta

SEQ ID NO: 1866688 - DNA, 15 bp, Homo sapiens
aagctaggtgactat

SEQ ID NO: 1866689 - DNA, 15 bp, Homo sapiens
agctaggtgactatg

SEQ ID NO: 1866690 - DNA, 15 bp, Homo sapiens
gctaggtgactatgt

SEQ ID NO: 1866691 - DNA, 15 bp, Homo sapiens
ctaggtgactatgtg

SEQ ID NO: 1866692 - DNA, 15 bp, Homo sapiens
taggtgactatgtgg

SEQ ID NO: 1866693 - DNA, 15 bp, Homo sapiens
aggtgactatgtggg

SEQ ID NO: 1866694 - DNA, 15 bp, Homo sapiens
ggtgactatgtgggt

SEQ ID NO: 1866695 - DNA, 15 bp, Homo sapiens
gtgactatgtgggtc

SEQ ID NO: 1866696 - DNA, 15 bp, Homo sapiens
tgactatgtgggtct

SEQ ID NO: 1866697 - DNA, 15 bp, Homo sapiens
gactatgtgggtctt

SEQ ID NO: 1866698 - DNA, 15 bp, Homo sapiens
actatgtgggtcttg

SEQ ID NO: 1866699 - DNA, 15 bp, Homo sapiens
ctatgtgggtcttgc

SEQ ID NO: 1866700 - DNA, 15 bp, Homo sapiens
tatgtgggtcttgca

SEQ ID NO: 1866701 - DNA, 15 bp, Homo sapiens
atgtgggtcttgcat

SEQ ID NO: 1866702 - DNA, 15 bp, Homo sapiens
tgtgggtcttgcatt

SEQ ID NO: 1866703 - DNA, 15 bp, Homo sapiens
gtgggtcttgcatta

SEQ ID NO: 1866704 - DNA, 15 bp, Homo sapiens
tgggtcttgcattaa

SEQ ID NO: 1866705 - DNA, 15 bp, Homo sapiens
gggtcttgcattaaa

SEQ ID NO: 1866706 - DNA, 15 bp, Homo sapiens
ggtcttgcattaaac

SEQ ID NO: 1866707 - DNA, 15 bp, Homo sapiens
gtcttgcattaaacc

SEQ ID NO: 1866708 - DNA, 15 bp, Homo sapiens
tcttgcattaaacct

SEQ ID NO: 1866709 - DNA, 15 bp, Homo sapiens
cttgcattaaacctt

SEQ ID NO: 1866710 - DNA, 15 bp, Homo sapiens
ttgcattaaaccttt

SEQ ID NO: 1866711 - DNA, 15 bp, Homo sapiens
tgcattaaacctttg

SEQ ID NO: 1866712 - DNA, 15 bp, Homo sapiens
gcattaaacctttgg

SEQ ID NO: 1866713 - DNA, 15 bp, Homo sapiens
cattaaacctttggt

SEQ ID NO: 1866714 - DNA, 15 bp, Homo sapiens
attaaacctttggta

SEQ ID NO: 1866715 - DNA, 15 bp, Homo sapiens
ttaaacctttggtag

SEQ ID NO: 1866716 - DNA, 15 bp, Homo sapiens
taaacctttggtaga

SEQ ID NO: 1866717 - DNA, 15 bp, Homo sapiens
aaacctttggtagag

SEQ ID NO: 1866718 - DNA, 15 bp, Homo sapiens
aacctttggtagaga

SEQ ID NO: 1866719 - DNA, 15 bp, Homo sapiens
acctttggtagagag

SEQ ID NO: 1866720 - DNA, 15 bp, Homo sapiens
cctttggtagagaga

SEQ ID NO: 1866721 - DNA, 15 bp, Homo sapiens
ctttggtagagagag

SEQ ID NO: 1866722 - DNA, 15 bp, Homo sapiens
tttggtagagagagc

SEQ ID NO: 1866723 - DNA, 15 bp, Homo sapiens
ttggtagagagagct

SEQ ID NO: 1866724 - DNA, 15 bp, Homo sapiens
tggtagagagagctc

SEQ ID NO: 1866725 - DNA, 15 bp, Homo sapiens
ggtagagagagctcc

SEQ ID NO: 1866726 - DNA, 15 bp, Homo sapiens
gtagagagagctccc

SEQ ID NO: 1866727 - DNA, 15 bp, Homo sapiens
tagagagagctcccc

SEQ ID NO: 1866728 - DNA, 15 bp, Homo sapiens
agagagagctcccct

SEQ ID NO: 1866729 - DNA, 15 bp, Homo sapiens
gagagagctcccctc

SEQ ID NO: 1866730 - DNA, 15 bp, Homo sapiens
agagagctcccctct

SEQ ID NO: 1866731 - DNA, 15 bp, Homo sapiens
gagagctcccctctg

SEQ ID NO: 1866732 - DNA, 15 bp, Homo sapiens
agagctcccctctga

SEQ ID NO: 1866733 - DNA, 15 bp, Homo sapiens
gagctcccctctgag

SEQ ID NO: 1866734 - DNA, 15 bp, Homo sapiens
gctcccctctgagaa

SEQ ID NO: 1866735 - DNA, 15 bp, Homo sapiens
ctcccctctgagaac

SEQ ID NO: 1866736 - DNA, 15 bp, Homo sapiens
tcccctctgagaacc

SEQ ID NO: 1866737 - DNA, 15 bp, Homo sapiens
cccctctgagaacct

SEQ ID NO: 1866738 - DNA, 15 bp, Homo sapiens
ccctctgagaacctg

SEQ ID NO: 1866739 - DNA, 15 bp, Homo sapiens
cctctgagaacctga

SEQ ID NO: 1866740 - DNA, 15 bp, Homo sapiens
ctctgagaacctgaa

SEQ ID NO: 1866741 - DNA, 15 bp, Homo sapiens
tctgagaacctgaag

SEQ ID NO: 1866742 - DNA, 15 bp, Homo sapiens
ctgagaacctgaaga

SEQ ID NO: 1866743 - DNA, 15 bp, Homo sapiens
tgagaacctgaagag

SEQ ID NO: 1866744 - DNA, 15 bp, Homo sapiens
gagaacctgaagaga

SEQ ID NO: 1866745 - DNA, 15 bp, Homo sapiens
agaacctgaagagat

SEQ ID NO: 1866746 - DNA, 15 bp, Homo sapiens
gaacctgaagagatg

SEQ ID NO: 1866747 - DNA, 15 bp, Homo sapiens
aacctgaagagatgt

SEQ ID NO: 1866748 - DNA, 15 bp, Homo sapiens
acctgaagagatgta

SEQ ID NO: 1866749 - DNA, 15 bp, Homo sapiens
cctgaagagatgtaa

SEQ ID NO: 1866750 - DNA, 15 bp, Homo sapiens
ctgaagagatgtaaa

SEQ ID NO: 1866751 - DNA, 15 bp, Homo sapiens
tgaagagatgtaaag

SEQ ID NO: 1866752 - DNA, 15 bp, Homo sapiens
gaagagatgtaaaga

SEQ ID NO: 1866753 - DNA, 15 bp, Homo sapiens
aagagatgtaaagag

SEQ ID NO: 1866754 - DNA, 15 bp, Homo sapiens
agagatgtaaagagg

SEQ ID NO: 1866755 - DNA, 15 bp, Homo sapiens
gagatgtaaagagga

SEQ ID NO: 1866756 - DNA, 15 bp, Homo sapiens
agatgtaaagaggaa

SEQ ID NO: 1866757 - DNA, 15 bp, Homo sapiens
gatgtaaagaggaac

SEQ ID NO: 1866758 - DNA, 15 bp, Homo sapiens
atgtaaagaggaaca

SEQ ID NO: 1866759 - DNA, 15 bp, Homo sapiens
tgtaaagaggaacag

SEQ ID NO: 1866760 - DNA, 15 bp, Homo sapiens
gtaaagaggaacagc

SEQ ID NO: 1866761 - DNA, 15 bp, Homo sapiens
taaagaggaacagca

SEQ ID NO: 1866762 - DNA, 15 bp, Homo sapiens
aaagaggaacagcac

SEQ ID NO: 1866763 - DNA, 15 bp, Homo sapiens
aagaggaacagcaca

SEQ ID NO: 1866764 - DNA, 15 bp, Homo sapiens
agaggaacagcacaa

SEQ ID NO: 1866765 - DNA, 15 bp, Homo sapiens
gaggaacagcacaag

SEQ ID NO: 1866766 - DNA, 15 bp, Homo sapiens
aggaacagcacaagg

SEQ ID NO: 1866767 - DNA, 15 bp, Homo sapiens
ggaacagcacaaggt

SEQ ID NO: 1866768 - DNA, 15 bp, Homo sapiens
gaacagcacaaggtc

SEQ ID NO: 1866769 - DNA, 15 bp, Homo sapiens
aacagcacaaggtca

SEQ ID NO: 1866770 - DNA, 15 bp, Homo sapiens
acagcacaaggtcag

SEQ ID NO: 1866771 - DNA, 15 bp, Homo sapiens
cagcacaaggtcaga

SEQ ID NO: 1866772 - DNA, 15 bp, Homo sapiens
agcacaaggtcagag

SEQ ID NO: 1866773 - DNA, 15 bp, Homo sapiens
gcacaaggtcagaga

SEQ ID NO: 1866774 - DNA, 15 bp, Homo sapiens
cacaaggtcagagag

SEQ ID NO: 1866775 - DNA, 15 bp, Homo sapiens
acaaggtcagagaga

SEQ ID NO: 1866776 - DNA, 15 bp, Homo sapiens
caaggtcagagagaa

SEQ ID NO: 1866777 - DNA, 15 bp, Homo sapiens
aaggtcagagagaac

SEQ ID NO: 1866778 - DNA, 15 bp, Homo sapiens
aggtcagagagaact

SEQ ID NO: 1866779 - DNA, 15 bp, Homo sapiens
ggtcagagagaactg

SEQ ID NO: 1866780 - DNA, 15 bp, Homo sapiens
gtcagagagaactgg

SEQ ID NO: 1866781 - DNA, 15 bp, Homo sapiens
tcagagagaactggg

SEQ ID NO: 1866782 - DNA, 15 bp, Homo sapiens
cagagagaactgggt

SEQ ID NO: 1866783 - DNA, 15 bp, Homo sapiens
agagagaactgggta

SEQ ID NO: 1866784 - DNA, 15 bp, Homo sapiens
gagagaactgggtag

SEQ ID NO: 1866785 - DNA, 15 bp, Homo sapiens
agagaactgggtaga

SEQ ID NO: 1866786 - DNA, 15 bp, Homo sapiens
gagaactgggtagaa

SEQ ID NO: 1866787 - DNA, 15 bp, Homo sapiens
agaactgggtagaat

SEQ ID NO: 1866788 - DNA, 15 bp, Homo sapiens
gaactgggtagaatc

SEQ ID NO: 1866789 - DNA, 15 bp, Homo sapiens
aactgggtagaatcc

SEQ ID NO: 1866790 - DNA, 15 bp, Homo sapiens
actgggtagaatcca

SEQ ID NO: 1866791 - DNA, 15 bp, Homo sapiens
ctgggtagaatccag

SEQ ID NO: 1866792 - DNA, 15 bp, Homo sapiens
tgggtagaatccagc

SEQ ID NO: 1866793 - DNA, 15 bp, Homo sapiens
gggtagaatccagct

SEQ ID NO: 1866794 - DNA, 15 bp, Homo sapiens
ggtagaatccagctc

SEQ ID NO: 1866795 - DNA, 15 bp, Homo sapiens
gtagaatccagctct

SEQ ID NO: 1866796 - DNA, 15 bp, Homo sapiens
tagaatccagctcta

SEQ ID NO: 1866797 - DNA, 15 bp, Homo sapiens
agaatccagctctac

SEQ ID NO: 1866798 - DNA, 15 bp, Homo sapiens
gaatccagctctact

SEQ ID NO: 1866799 - DNA, 15 bp, Homo sapiens
aatccagctctactc

SEQ ID NO: 1866800 - DNA, 15 bp, Homo sapiens
atccagctctactcc

SEQ ID NO: 1866801 - DNA, 15 bp, Homo sapiens
tccagctctactcct

SEQ ID NO: 1866802 - DNA, 15 bp, Homo sapiens
ccagctctactcctt

SEQ ID NO: 1866803 - DNA, 15 bp, Homo sapiens
cagctctactccttg

SEQ ID NO: 1866804 - DNA, 15 bp, Homo sapiens
agctctactccttgg

SEQ ID NO: 1866805 - DNA, 15 bp, Homo sapiens
gctctactccttggc

SEQ ID NO: 1866806 - DNA, 15 bp, Homo sapiens
ctctactccttggct

SEQ ID NO: 1866807 - DNA, 15 bp, Homo sapiens
tctactccttggctt

SEQ ID NO: 1866808 - DNA, 15 bp, Homo sapiens
ctactccttggcttg

SEQ ID NO: 1866809 - DNA, 15 bp, Homo sapiens
tactccttggcttgt

SEQ ID NO: 1866810 - DNA, 15 bp, Homo sapiens
actccttggcttgtg

SEQ ID NO: 1866811 - DNA, 15 bp, Homo sapiens
ctccttggcttgtga

SEQ ID NO: 1866812 - DNA, 15 bp, Homo sapiens
tccttggcttgtgat

SEQ ID NO: 1866813 - DNA, 15 bp, Homo sapiens
ccttggcttgtgatc

SEQ ID NO: 1866814 - DNA, 15 bp, Homo sapiens
cttggcttgtgatct

SEQ ID NO: 1866815 - DNA, 15 bp, Homo sapiens
ttggcttgtgatcta

SEQ ID NO: 1866816 - DNA, 15 bp, Homo sapiens
tggcttgtgatctag

SEQ ID NO: 1866817 - DNA, 15 bp, Homo sapiens
ggcttgtgatctaga

SEQ ID NO: 1866818 - DNA, 15 bp, Homo sapiens
gcttgtgatctagag

SEQ ID NO: 1866819 - DNA, 15 bp, Homo sapiens
cttgtgatctagagc

SEQ ID NO: 1866820 - DNA, 15 bp, Homo sapiens
ttgtgatctagagcc

SEQ ID NO: 1866821 - DNA, 15 bp, Homo sapiens
tgtgatctagagcca

SEQ ID NO: 1866822 - DNA, 15 bp, Homo sapiens
gtgatctagagccaa

SEQ ID NO: 1866823 - DNA, 15 bp, Homo sapiens
tgatctagagccaat

SEQ ID NO: 1866824 - DNA, 15 bp, Homo sapiens
gatctagagccaatt

SEQ ID NO: 1866825 - DNA, 15 bp, Homo sapiens
atctagagccaattt

SEQ ID NO: 1866826 - DNA, 15 bp, Homo sapiens
tctagagccaatttt

SEQ ID NO: 1866827 - DNA, 15 bp, Homo sapiens
ctagagccaattttc

SEQ ID NO: 1866828 - DNA, 15 bp, Homo sapiens
tagagccaattttca

SEQ ID NO: 1866829 - DNA, 15 bp, Homo sapiens
agagccaattttcat

SEQ ID NO: 1866830 - DNA, 15 bp, Homo sapiens
gagccaattttcatt

SEQ ID NO: 1866831 - DNA, 15 bp, Homo sapiens
agccaattttcattg

SEQ ID NO: 1866832 - DNA, 15 bp, Homo sapiens
gccaattttcattgt

SEQ ID NO: 1866833 - DNA, 15 bp, Homo sapiens
ccaattttcattgtt

SEQ ID NO: 1866834 - DNA, 15 bp, Homo sapiens
caattttcattgttg

SEQ ID NO: 1866835 - DNA, 15 bp, Homo sapiens
aattttcattgttgt

SEQ ID NO: 1866836 - DNA, 15 bp, Homo sapiens
attttcattgttgtt

SEQ ID NO: 1866837 - DNA, 15 bp, Homo sapiens
ttttcattgttgttg

SEQ ID NO: 1866838 - DNA, 15 bp, Homo sapiens
tttcattgttgttgt

SEQ ID NO: 1866839 - DNA, 15 bp, Homo sapiens
ttcattgttgttgtt

SEQ ID NO: 1866840 - DNA, 15 bp, Homo sapiens
tcattgttgttgtta

SEQ ID NO: 1866841 - DNA, 15 bp, Homo sapiens
cattgttgttgttac

SEQ ID NO: 1866842 - DNA, 15 bp, Homo sapiens
attgttgttgttact

SEQ ID NO: 1866843 - DNA, 15 bp, Homo sapiens
ttgttgttgttactt

SEQ ID NO: 1866844 - DNA, 15 bp, Homo sapiens
tgttgttgttacttt

SEQ ID NO: 1866845 - DNA, 15 bp, Homo sapiens
gttgttgttactttt

SEQ ID NO: 1866846 - DNA, 15 bp, Homo sapiens
ttgttgttacttttt

SEQ ID NO: 1866847 - DNA, 15 bp, Homo sapiens
tgttgttactttttt

SEQ ID NO: 1866848 - DNA, 15 bp, Homo sapiens
gttgttacttttttc

SEQ ID NO: 1866849 - DNA, 15 bp, Homo sapiens
ttgttacttttttca

SEQ ID NO: 1866850 - DNA, 15 bp, Homo sapiens
tgttacttttttcaa

SEQ ID NO: 1866851 - DNA, 15 bp, Homo sapiens
gttacttttttcaac

SEQ ID NO: 1866852 - DNA, 15 bp, Homo sapiens
ttacttttttcaacc

SEQ ID NO: 1866853 - DNA, 15 bp, Homo sapiens
tacttttttcaacct

SEQ ID NO: 1866854 - DNA, 15 bp, Homo sapiens
acttttttcaacctt

SEQ ID NO: 1866855 - DNA, 15 bp, Homo sapiens
cttttttcaaccttc

SEQ ID NO: 1866856 - DNA, 15 bp, Homo sapiens
ttttttcaaccttcg

SEQ ID NO: 1866857 - DNA, 15 bp, Homo sapiens
tttttcaaccttcgt

SEQ ID NO: 1866858 - DNA, 15 bp, Homo sapiens
ttttcaaccttcgtt

SEQ ID NO: 1866859 - DNA, 15 bp, Homo sapiens
tttcaaccttcgttt

SEQ ID NO: 1866860 - DNA, 15 bp, Homo sapiens
ttcaaccttcgtttc

SEQ ID NO: 1866861 - DNA, 15 bp, Homo sapiens
tcaaccttcgtttct

SEQ ID NO: 1866862 - DNA, 15 bp, Homo sapiens
caaccttcgtttctt

SEQ ID NO: 1866863 - DNA, 15 bp, Homo sapiens
aaccttcgtttcttt

SEQ ID NO: 1866864 - DNA, 15 bp, Homo sapiens
accttcgtttctttc

SEQ ID NO: 1866865 - DNA, 15 bp, Homo sapiens
ccttcgtttctttct

SEQ ID NO: 1866866 - DNA, 15 bp, Homo sapiens
cttcgtttctttctc

SEQ ID NO: 1866867 - DNA, 15 bp, Homo sapiens
ttcgtttctttctct

SEQ ID NO: 1866868 - DNA, 15 bp, Homo sapiens
tcgtttctttctcta

SEQ ID NO: 1866869 - DNA, 15 bp, Homo sapiens
cgtttctttctctat

SEQ ID NO: 1866870 - DNA, 15 bp, Homo sapiens
gtttctttctctata

SEQ ID NO: 1866871 - DNA, 15 bp, Homo sapiens
tttctttctctataa

SEQ ID NO: 1866872 - DNA, 15 bp, Homo sapiens
ttctttctctataag

SEQ ID NO: 1866873 - DNA, 15 bp, Homo sapiens
tctttctctataagt

SEQ ID NO: 1866874 - DNA, 15 bp, Homo sapiens
ctttctctataagtt

SEQ ID NO: 1866875 - DNA, 15 bp, Homo sapiens
tttctctataagttg

SEQ ID NO: 1866876 - DNA, 15 bp, Homo sapiens
ttctctataagttga

SEQ ID NO: 1866877 - DNA, 15 bp, Homo sapiens
tctctataagttgag

SEQ ID NO: 1866878 - DNA, 15 bp, Homo sapiens
ctctataagttgaga

SEQ ID NO: 1866879 - DNA, 15 bp, Homo sapiens
tctataagttgagac

SEQ ID NO: 1866880 - DNA, 15 bp, Homo sapiens
ctataagttgagacc

SEQ ID NO: 1866881 - DNA, 15 bp, Homo sapiens
tataagttgagaccc

SEQ ID NO: 1866882 - DNA, 15 bp, Homo sapiens
ataagttgagaccca

SEQ ID NO: 1866883 - DNA, 15 bp, Homo sapiens
taagttgagacccat

SEQ ID NO: 1866884 - DNA, 15 bp, Homo sapiens
aagttgagacccatg

SEQ ID NO: 1866885 - DNA, 15 bp, Homo sapiens
agttgagacccatgc

SEQ ID NO: 1866886 - DNA, 15 bp, Homo sapiens
gttgagacccatgcc

SEQ ID NO: 1866887 - DNA, 15 bp, Homo sapiens
ttgagacccatgccc

SEQ ID NO: 1866888 - DNA, 15 bp, Homo sapiens
tgagacccatgccct

SEQ ID NO: 1866889 - DNA, 15 bp, Homo sapiens
gagacccatgccctc

SEQ ID NO: 1866890 - DNA, 15 bp, Homo sapiens
agacccatgccctca

SEQ ID NO: 1866891 - DNA, 15 bp, Homo sapiens
gacccatgccctcaa

SEQ ID NO: 1866892 - DNA, 15 bp, Homo sapiens
acccatgccctcaac

SEQ ID NO: 1866893 - DNA, 15 bp, Homo sapiens
cccatgccctcaacc

SEQ ID NO: 1866894 - DNA, 15 bp, Homo sapiens
ccatgccctcaacct

SEQ ID NO: 1866895 - DNA, 15 bp, Homo sapiens
catgccctcaacctc

SEQ ID NO: 1866896 - DNA, 15 bp, Homo sapiens
atgccctcaacctca

SEQ ID NO: 1866897 - DNA, 15 bp, Homo sapiens
tgccctcaacctcaa

SEQ ID NO: 1866898 - DNA, 15 bp, Homo sapiens
gccctcaacctcaaa

SEQ ID NO: 1866899 - DNA, 15 bp, Homo sapiens
ccctcaacctcaaag

SEQ ID NO: 1866900 - DNA, 15 bp, Homo sapiens
cctcaacctcaaagg

SEQ ID NO: 1866901 - DNA, 15 bp, Homo sapiens
ctcaacctcaaaggg

SEQ ID NO: 1866902 - DNA, 15 bp, Homo sapiens
tcaacctcaaagggt

SEQ ID NO: 1866903 - DNA, 15 bp, Homo sapiens
caacctcaaagggtg

SEQ ID NO: 1866904 - DNA, 15 bp, Homo sapiens
aacctcaaagggtga

SEQ ID NO: 1866905 - DNA, 15 bp, Homo sapiens
acctcaaagggtgat

SEQ ID NO: 1866906 - DNA, 15 bp, Homo sapiens
cctcaaagggtgatt

SEQ ID NO: 1866907 - DNA, 15 bp, Homo sapiens
ctcaaagggtgatta

SEQ ID NO: 1866908 - DNA, 15 bp, Homo sapiens
tcaaagggtgattat

SEQ ID NO: 1866909 - DNA, 15 bp, Homo sapiens
caaagggtgattata

SEQ ID NO: 1866910 - DNA, 15 bp, Homo sapiens
aaagggtgattataa

SEQ ID NO: 1866911 - DNA, 15 bp, Homo sapiens
aagggtgattataaa

SEQ ID NO: 1866912 - DNA, 15 bp, Homo sapiens
agggtgattataaag

SEQ ID NO: 1866913 - DNA, 15 bp, Homo sapiens
gggtgattataaaga

SEQ ID NO: 1866914 - DNA, 15 bp, Homo sapiens
ggtgattataaagat

SEQ ID NO: 1866915 - DNA, 15 bp, Homo sapiens
gtgattataaagata

SEQ ID NO: 1866916 - DNA, 15 bp, Homo sapiens
tgattataaagataa

SEQ ID NO: 1866917 - DNA, 15 bp, Homo sapiens
gattataaagataaa

SEQ ID NO: 1866918 - DNA, 15 bp, Homo sapiens
attataaagataaag

SEQ ID NO: 1866919 - DNA, 15 bp, Homo sapiens
ttataaagataaaga

SEQ ID NO: 1866920 - DNA, 15 bp, Homo sapiens
tataaagataaagaa

SEQ ID NO: 1866921 - DNA, 15 bp, Homo sapiens
ataaagataaagaag

SEQ ID NO: 1866922 - DNA, 15 bp, Homo sapiens
taaagataaagaaga

SEQ ID NO: 1866923 - DNA, 15 bp, Homo sapiens
aaagataaagaagag

SEQ ID NO: 1866924 - DNA, 15 bp, Homo sapiens
aagataaagaagagg

SEQ ID NO: 1866925 - DNA, 15 bp, Homo sapiens
agataaagaagagga

SEQ ID NO: 1866926 - DNA, 15 bp, Homo sapiens
gataaagaagaggaa

SEQ ID NO: 1866927 - DNA, 15 bp, Homo sapiens
ataaagaagaggaaa

SEQ ID NO: 1866928 - DNA, 15 bp, Homo sapiens
taaagaagaggaaat

SEQ ID NO: 1866929 - DNA, 15 bp, Homo sapiens
aaagaagaggaaata

SEQ ID NO: 1866930 - DNA, 15 bp, Homo sapiens
aagaagaggaaatag

SEQ ID NO: 1866931 - DNA, 15 bp, Homo sapiens
agaagaggaaatagg

SEQ ID NO: 1866932 - DNA, 15 bp, Homo sapiens
gaagaggaaatagga

SEQ ID NO: 1866933 - DNA, 15 bp, Homo sapiens
aagaggaaataggaa

SEQ ID NO: 1866934 - DNA, 15 bp, Homo sapiens
agaggaaataggaaa

SEQ ID NO: 1866935 - DNA, 15 bp, Homo sapiens
aggaaataggaaaag

SEQ ID NO: 1866936 - DNA, 15 bp, Homo sapiens
ggaaataggaaaagc

SEQ ID NO: 1866937 - DNA, 15 bp, Homo sapiens
gaaataggaaaagca

SEQ ID NO: 1866938 - DNA, 15 bp, Homo sapiens
aaataggaaaagcat

SEQ ID NO: 1866939 - DNA, 15 bp, Homo sapiens
aataggaaaagcatt

SEQ ID NO: 1866940 - DNA, 15 bp, Homo sapiens
ataggaaaagcattt

SEQ ID NO: 1866941 - DNA, 15 bp, Homo sapiens
taggaaaagcatttg

SEQ ID NO: 1866942 - DNA, 15 bp, Homo sapiens
aggaaaagcatttgg

SEQ ID NO: 1866943 - DNA, 15 bp, Homo sapiens
ggaaaagcatttggt

SEQ ID NO: 1866944 - DNA, 15 bp, Homo sapiens
gaaaagcatttggta

SEQ ID NO: 1866945 - DNA, 15 bp, Homo sapiens
aaaagcatttggtac

SEQ ID NO: 1866946 - DNA, 15 bp, Homo sapiens
aaagcatttggtact

SEQ ID NO: 1866947 - DNA, 15 bp, Homo sapiens
aagcatttggtactc

SEQ ID NO: 1866948 - DNA, 15 bp, Homo sapiens
agcatttggtactca

SEQ ID NO: 1866949 - DNA, 15 bp, Homo sapiens
gcatttggtactcaa

SEQ ID NO: 1866950 - DNA, 15 bp, Homo sapiens
catttggtactcaaa

SEQ ID NO: 1866951 - DNA, 15 bp, Homo sapiens
atttggtactcaaaa

SEQ ID NO: 1866952 - DNA, 15 bp, Homo sapiens
tttggtactcaaaat

SEQ ID NO: 1866953 - DNA, 15 bp, Homo sapiens
ttggtactcaaaatg

SEQ ID NO: 1866954 - DNA, 15 bp, Homo sapiens
tggtactcaaaatga

SEQ ID NO: 1866955 - DNA, 15 bp, Homo sapiens
ggtactcaaaatgag

SEQ ID NO: 1866956 - DNA, 15 bp, Homo sapiens
gtactcaaaatgagt

SEQ ID NO: 1866957 - DNA, 15 bp, Homo sapiens
tactcaaaatgagtt

SEQ ID NO: 1866958 - DNA, 15 bp, Homo sapiens
actcaaaatgagtta

SEQ ID NO: 1866959 - DNA, 15 bp, Homo sapiens
ctcaaaatgagttat

SEQ ID NO: 1866960 - DNA, 15 bp, Homo sapiens
tcaaaatgagttata

SEQ ID NO: 1866961 - DNA, 15 bp, Homo sapiens
caaaatgagttatag

SEQ ID NO: 1866962 - DNA, 15 bp, Homo sapiens
aaaatgagttatagt

SEQ ID NO: 1866963 - DNA, 15 bp, Homo sapiens
aaatgagttatagtt

SEQ ID NO: 1866964 - DNA, 15 bp, Homo sapiens
aatgagttatagttc

SEQ ID NO: 1866965 - DNA, 15 bp, Homo sapiens
atgagttatagttca

SEQ ID NO: 1866966 - DNA, 15 bp, Homo sapiens
tgagttatagttcat

SEQ ID NO: 1866967 - DNA, 15 bp, Homo sapiens
gagttatagttcata

SEQ ID NO: 1866968 - DNA, 15 bp, Homo sapiens
agttatagttcataa

SEQ ID NO: 1866969 - DNA, 15 bp, Homo sapiens
gttatagttcataaa

SEQ ID NO: 1866970 - DNA, 15 bp, Homo sapiens
ttatagttcataaaa

SEQ ID NO: 1866971 - DNA, 15 bp, Homo sapiens
tatagttcataaaat

SEQ ID NO: 1866972 - DNA, 15 bp, Homo sapiens
atagttcataaaatg

SEQ ID NO: 1866973 - DNA, 15 bp, Homo sapiens
tagttcataaaatga

SEQ ID NO: 1866974 - DNA, 15 bp, Homo sapiens
agttcataaaatgac

SEQ ID NO: 1866975 - DNA, 15 bp, Homo sapiens
gttcataaaatgact

SEQ ID NO: 1866976 - DNA, 15 bp, Homo sapiens
ttcataaaatgacta

SEQ ID NO: 1866977 - DNA, 15 bp, Homo sapiens
tcataaaatgactat

SEQ ID NO: 1866978 - DNA, 15 bp, Homo sapiens
cataaaatgactatg

SEQ ID NO: 1866979 - DNA, 15 bp, Homo sapiens
ataaaatgactatga

SEQ ID NO: 1866980 - DNA, 15 bp, Homo sapiens
taaaatgactatgac

SEQ ID NO: 1866981 - DNA, 15 bp, Homo sapiens
aaaatgactatgacg

SEQ ID NO: 1866982 - DNA, 15 bp, Homo sapiens
aaatgactatgacga

SEQ ID NO: 1866983 - DNA, 15 bp, Homo sapiens
aatgactatgacgat

SEQ ID NO: 1866984 - DNA, 15 bp, Homo sapiens
atgactatgacgatt

SEQ ID NO: 1866985 - DNA, 15 bp, Homo sapiens
tgactatgacgattg

SEQ ID NO: 1866986 - DNA, 15 bp, Homo sapiens
gactatgacgattgc

SEQ ID NO: 1866987 - DNA, 15 bp, Homo sapiens
actatgacgattgct

SEQ ID NO: 1866988 - DNA, 15 bp, Homo sapiens
ctatgacgattgctg

SEQ ID NO: 1866989 - DNA, 15 bp, Homo sapiens
tatgacgattgctgt

SEQ ID NO: 1866990 - DNA, 15 bp, Homo sapiens
atgacgattgctgtt

SEQ ID NO: 1866991 - DNA, 15 bp, Homo sapiens
tgacgattgctgttt

SEQ ID NO: 1866992 - DNA, 15 bp, Homo sapiens
gacgattgctgtttt

SEQ ID NO: 1866993 - DNA, 15 bp, Homo sapiens
acgattgctgtttta

SEQ ID NO: 1866994 - DNA, 15 bp, Homo sapiens
cgattgctgttttaa

SEQ ID NO: 1866995 - DNA, 15 bp, Homo sapiens
gattgctgttttaag

SEQ ID NO: 1866996 - DNA, 15 bp, Homo sapiens
attgctgttttaagg

SEQ ID NO: 1866997 - DNA, 15 bp, Homo sapiens
ttgctgttttaaggt

SEQ ID NO: 1866998 - DNA, 15 bp, Homo sapiens
tgctgttttaaggta

SEQ ID NO: 1866999 - DNA, 15 bp, Homo sapiens
gctgttttaaggtaa

SEQ ID NO: 1867000 - DNA, 15 bp, Homo sapiens
ctgttttaaggtaag

SEQ ID NO: 1867001 - DNA, 15 bp, Homo sapiens
tgttttaaggtaagc

SEQ ID NO: 1867002 - DNA, 15 bp, Homo sapiens
gttttaaggtaagct

SEQ ID NO: 1867003 - DNA, 15 bp, Homo sapiens
ttttaaggtaagctg

SEQ ID NO: 1867004 - DNA, 15 bp, Homo sapiens
tttaaggtaagctga

SEQ ID NO: 1867005 - DNA, 15 bp, Homo sapiens
ttaaggtaagctgat

SEQ ID NO: 1867006 - DNA, 15 bp, Homo sapiens
taaggtaagctgata

SEQ ID NO: 1867007 - DNA, 15 bp, Homo sapiens
aaggtaagctgatag

SEQ ID NO: 1867008 - DNA, 15 bp, Homo sapiens
aggtaagctgataga

SEQ ID NO: 1867009 - DNA, 15 bp, Homo sapiens
ggtaagctgatagag

SEQ ID NO: 1867010 - DNA, 15 bp, Homo sapiens
gtaagctgatagagt

SEQ ID NO: 1867011 - DNA, 15 bp, Homo sapiens
taagctgatagagtg

SEQ ID NO: 1867012 - DNA, 15 bp, Homo sapiens
aagctgatagagtgg

SEQ ID NO: 1867013 - DNA, 15 bp, Homo sapiens
agctgatagagtggg

SEQ ID NO: 1867014 - DNA, 15 bp, Homo sapiens
gctgatagagtggga

SEQ ID NO: 1867015 - DNA, 15 bp, Homo sapiens
ctgatagagtgggaa

SEQ ID NO: 1867016 - DNA, 15 bp, Homo sapiens
tgatagagtgggaac

SEQ ID NO: 1867017 - DNA, 15 bp, Homo sapiens
gatagagtgggaaca

SEQ ID NO: 1867018 - DNA, 15 bp, Homo sapiens
atagagtgggaacac

SEQ ID NO: 1867019 - DNA, 15 bp, Homo sapiens
tagagtgggaacaca

SEQ ID NO: 1867020 - DNA, 15 bp, Homo sapiens
agagtgggaacacag

SEQ ID NO: 1867021 - DNA, 15 bp, Homo sapiens
gagtgggaacacagt

SEQ ID NO: 1867022 - DNA, 15 bp, Homo sapiens
agtgggaacacagtg

SEQ ID NO: 1867023 - DNA, 15 bp, Homo sapiens
gtgggaacacagtgg

SEQ ID NO: 1867024 - DNA, 15 bp, Homo sapiens
tgggaacacagtgga

SEQ ID NO: 1867025 - DNA, 15 bp, Homo sapiens
gggaacacagtggaa

SEQ ID NO: 1867026 - DNA, 15 bp, Homo sapiens
ggaacacagtggaaa

SEQ ID NO: 1867027 - DNA, 15 bp, Homo sapiens
gaacacagtggaaac

SEQ ID NO: 1867028 - DNA, 15 bp, Homo sapiens
aacacagtggaaact

SEQ ID NO: 1867029 - DNA, 15 bp, Homo sapiens
acacagtggaaacta

SEQ ID NO: 1867030 - DNA, 15 bp, Homo sapiens
cacagtggaaactag

SEQ ID NO: 1867031 - DNA, 15 bp, Homo sapiens
acagtggaaactagg

SEQ ID NO: 1867032 - DNA, 15 bp, Homo sapiens
cagtggaaactagga

SEQ ID NO: 1867033 - DNA, 15 bp, Homo sapiens
agtggaaactaggag

SEQ ID NO: 1867034 - DNA, 15 bp, Homo sapiens
gtggaaactaggagt

SEQ ID NO: 1867035 - DNA, 15 bp, Homo sapiens
tggaaactaggagtc

SEQ ID NO: 1867036 - DNA, 15 bp, Homo sapiens
ggaaactaggagtca

SEQ ID NO: 1867037 - DNA, 15 bp, Homo sapiens
gaaactaggagtcag

SEQ ID NO: 1867038 - DNA, 15 bp, Homo sapiens
aaactaggagtcagg

SEQ ID NO: 1867039 - DNA, 15 bp, Homo sapiens
aactaggagtcaggg

SEQ ID NO: 1867040 - DNA, 15 bp, Homo sapiens
actaggagtcagggc

SEQ ID NO: 1867041 - DNA, 15 bp, Homo sapiens
ctaggagtcagggca

SEQ ID NO: 1867042 - DNA, 15 bp, Homo sapiens
taggagtcagggcac

SEQ ID NO: 1867043 - DNA, 15 bp, Homo sapiens
aggagtcagggcacc

SEQ ID NO: 1867044 - DNA, 15 bp, Homo sapiens
ggagtcagggcacct

SEQ ID NO: 1867045 - DNA, 15 bp, Homo sapiens
gagtcagggcacctg

SEQ ID NO: 1867046 - DNA, 15 bp, Homo sapiens
agtcagggcacctgg

SEQ ID NO: 1867047 - DNA, 15 bp, Homo sapiens
gtcagggcacctggt

SEQ ID NO: 1867048 - DNA, 15 bp, Homo sapiens
tcagggcacctggtc

SEQ ID NO: 1867049 - DNA, 15 bp, Homo sapiens
cagggcacctggtcc

SEQ ID NO: 1867050 - DNA, 15 bp, Homo sapiens
agggcacctggtccc

SEQ ID NO: 1867051 - DNA, 15 bp, Homo sapiens
gggcacctggtccca

SEQ ID NO: 1867052 - DNA, 15 bp, Homo sapiens
ggcacctggtcccaa

SEQ ID NO: 1867053 - DNA, 15 bp, Homo sapiens
gcacctggtcccaac

SEQ ID NO: 1867054 - DNA, 15 bp, Homo sapiens
cacctggtcccaacc

SEQ ID NO: 1867055 - DNA, 15 bp, Homo sapiens
acctggtcccaaccc

SEQ ID NO: 1867056 - DNA, 15 bp, Homo sapiens
cctggtcccaaccct

SEQ ID NO: 1867057 - DNA, 15 bp, Homo sapiens
ctggtcccaaccctg

SEQ ID NO: 1867058 - DNA, 15 bp, Homo sapiens
tggtcccaaccctgt

SEQ ID NO: 1867059 - DNA, 15 bp, Homo sapiens
ggtcccaaccctgtc

SEQ ID NO: 1867060 - DNA, 15 bp, Homo sapiens
gtcccaaccctgtca

SEQ ID NO: 1867061 - DNA, 15 bp, Homo sapiens
tcccaaccctgtcac

SEQ ID NO: 1867062 - DNA, 15 bp, Homo sapiens
cccaaccctgtcact

SEQ ID NO: 1867063 - DNA, 15 bp, Homo sapiens
ccaaccctgtcactg

SEQ ID NO: 1867064 - DNA, 15 bp, Homo sapiens
caaccctgtcactga

SEQ ID NO: 1867065 - DNA, 15 bp, Homo sapiens
aaccctgtcactgat

SEQ ID NO: 1867066 - DNA, 15 bp, Homo sapiens
accctgtcactgatg

SEQ ID NO: 1867067 - DNA, 15 bp, Homo sapiens
ccctgtcactgatgt

SEQ ID NO: 1867068 - DNA, 15 bp, Homo sapiens
cctgtcactgatgtg

SEQ ID NO: 1867069 - DNA, 15 bp, Homo sapiens
ctgtcactgatgtgc

SEQ ID NO: 1867070 - DNA, 15 bp, Homo sapiens
tgtcactgatgtgct

SEQ ID NO: 1867071 - DNA, 15 bp, Homo sapiens
gtcactgatgtgctg

SEQ ID NO: 1867072 - DNA, 15 bp, Homo sapiens
tcactgatgtgctgg

SEQ ID NO: 1867073 - DNA, 15 bp, Homo sapiens
cactgatgtgctggg

SEQ ID NO: 1867074 - DNA, 15 bp, Homo sapiens
actgatgtgctgggt

SEQ ID NO: 1867075 - DNA, 15 bp, Homo sapiens
ctgatgtgctgggtg

SEQ ID NO: 1867076 - DNA, 15 bp, Homo sapiens
tgatgtgctgggtga

SEQ ID NO: 1867077 - DNA, 15 bp, Homo sapiens
gatgtgctgggtgat

SEQ ID NO: 1867078 - DNA, 15 bp, Homo sapiens
atgtgctgggtgatt

SEQ ID NO: 1867079 - DNA, 15 bp, Homo sapiens
tgtgctgggtgattt

SEQ ID NO: 1867080 - DNA, 15 bp, Homo sapiens
gtgctgggtgatttt

SEQ ID NO: 1867081 - DNA, 15 bp, Homo sapiens
tgctgggtgattttg

SEQ ID NO: 1867082 - DNA, 15 bp, Homo sapiens
gctgggtgattttgg

SEQ ID NO: 1867083 - DNA, 15 bp, Homo sapiens
ctgggtgattttgga

SEQ ID NO: 1867084 - DNA, 15 bp, Homo sapiens
tgggtgattttggac

SEQ ID NO: 1867085 - DNA, 15 bp, Homo sapiens
gggtgattttggaca

SEQ ID NO: 1867086 - DNA, 15 bp, Homo sapiens
ggtgattttggacat

SEQ ID NO: 1867087 - DNA, 15 bp, Homo sapiens
gtgattttggacata

SEQ ID NO: 1867088 - DNA, 15 bp, Homo sapiens
tgattttggacatac

SEQ ID NO: 1867089 - DNA, 15 bp, Homo sapiens
gattttggacatact

SEQ ID NO: 1867090 - DNA, 15 bp, Homo sapiens
attttggacatacta

SEQ ID NO: 1867091 - DNA, 15 bp, Homo sapiens
ttttggacatactag

SEQ ID NO: 1867092 - DNA, 15 bp, Homo sapiens
tttggacatactagt

SEQ ID NO: 1867093 - DNA, 15 bp, Homo sapiens
ttggacatactagtt

SEQ ID NO: 1867094 - DNA, 15 bp, Homo sapiens
tggacatactagtta

SEQ ID NO: 1867095 - DNA, 15 bp, Homo sapiens
ggacatactagttag

SEQ ID NO: 1867096 - DNA, 15 bp, Homo sapiens
gacatactagttagc

SEQ ID NO: 1867097 - DNA, 15 bp, Homo sapiens
acatactagttagcc

SEQ ID NO: 1867098 - DNA, 15 bp, Homo sapiens
catactagttagcct

SEQ ID NO: 1867099 - DNA, 15 bp, Homo sapiens
atactagttagcctc

SEQ ID NO: 1867100 - DNA, 15 bp, Homo sapiens
tactagttagcctct

SEQ ID NO: 1867101 - DNA, 15 bp, Homo sapiens
actagttagcctctc

SEQ ID NO: 1867102 - DNA, 15 bp, Homo sapiens
ctagttagcctctct

SEQ ID NO: 1867103 - DNA, 15 bp, Homo sapiens
tagttagcctctctg

SEQ ID NO: 1867104 - DNA, 15 bp, Homo sapiens
agttagcctctctgg

SEQ ID NO: 1867105 - DNA, 15 bp, Homo sapiens
gttagcctctctggt

SEQ ID NO: 1867106 - DNA, 15 bp, Homo sapiens
ttagcctctctggtc

SEQ ID NO: 1867107 - DNA, 15 bp, Homo sapiens
tagcctctctggtcc

SEQ ID NO: 1867108 - DNA, 15 bp, Homo sapiens
agcctctctggtccc

SEQ ID NO: 1867109 - DNA, 15 bp, Homo sapiens
gcctctctggtccca

SEQ ID NO: 1867110 - DNA, 15 bp, Homo sapiens
cctctctggtcccaa

SEQ ID NO: 1867111 - DNA, 15 bp, Homo sapiens
ctctctggtcccaaa

SEQ ID NO: 1867112 - DNA, 15 bp, Homo sapiens
tctctggtcccaaat

SEQ ID NO: 1867113 - DNA, 15 bp, Homo sapiens
ctctggtcccaaatt

SEQ ID NO: 1867114 - DNA, 15 bp, Homo sapiens
tctggtcccaaattc

SEQ ID NO: 1867115 - DNA, 15 bp, Homo sapiens
ctggtcccaaattct

SEQ ID NO: 1867116 - DNA, 15 bp, Homo sapiens
tggtcccaaattctt

SEQ ID NO: 1867117 - DNA, 15 bp, Homo sapiens
ggtcccaaattcttc

SEQ ID NO: 1867118 - DNA, 15 bp, Homo sapiens
gtcccaaattcttca

SEQ ID NO: 1867119 - DNA, 15 bp, Homo sapiens
tcccaaattcttcat

SEQ ID NO: 1867120 - DNA, 15 bp, Homo sapiens
cccaaattcttcatt

SEQ ID NO: 1867121 - DNA, 15 bp, Homo sapiens
ccaaattcttcattg

SEQ ID NO: 1867122 - DNA, 15 bp, Homo sapiens
caaattcttcattgg

SEQ ID NO: 1867123 - DNA, 15 bp, Homo sapiens
aaattcttcattggt

SEQ ID NO: 1867124 - DNA, 15 bp, Homo sapiens
aattcttcattggtg

SEQ ID NO: 1867125 - DNA, 15 bp, Homo sapiens
attcttcattggtga

SEQ ID NO: 1867126 - DNA, 15 bp, Homo sapiens
ttcttcattggtgaa

SEQ ID NO: 1867127 - DNA, 15 bp, Homo sapiens
tcttcattggtgaaa

SEQ ID NO: 1867128 - DNA, 15 bp, Homo sapiens
cttcattggtgaaat

SEQ ID NO: 1867129 - DNA, 15 bp, Homo sapiens
ttcattggtgaaata

SEQ ID NO: 1867130 - DNA, 15 bp, Homo sapiens
tcattggtgaaataa

SEQ ID NO: 1867131 - DNA, 15 bp, Homo sapiens
cattggtgaaataaa

SEQ ID NO: 1867132 - DNA, 15 bp, Homo sapiens
attggtgaaataaaa

SEQ ID NO: 1867133 - DNA, 15 bp, Homo sapiens
ttggtgaaataaaat

SEQ ID NO: 1867134 - DNA, 15 bp, Homo sapiens
tggtgaaataaaatg

SEQ ID NO: 1867135 - DNA, 15 bp, Homo sapiens
ggtgaaataaaatgt

SEQ ID NO: 1867136 - DNA, 15 bp, Homo sapiens
gtgaaataaaatgtt

SEQ ID NO: 1867137 - DNA, 15 bp, Homo sapiens
tgaaataaaatgttt

SEQ ID NO: 1867138 - DNA, 15 bp, Homo sapiens
gaaataaaatgtttg

SEQ ID NO: 1867139 - DNA, 15 bp, Homo sapiens
aaataaaatgtttgg

SEQ ID NO: 1867140 - DNA, 15 bp, Homo sapiens
aataaaatgtttggc

SEQ ID NO: 1867141 - DNA, 15 bp, Homo sapiens
ataaaatgtttggct

SEQ ID NO: 1867142 - DNA, 15 bp, Homo sapiens
taaaatgtttggctc

SEQ ID NO: 1867143 - DNA, 15 bp, Homo sapiens
aaaatgtttggctca

SEQ ID NO: 1867144 - DNA, 15 bp, Homo sapiens
aaatgtttggctcaa

SEQ ID NO: 1867145 - DNA, 15 bp, Homo sapiens
aatgtttggctcaaa

SEQ ID NO: 1867146 - DNA, 15 bp, Homo sapiens
atgtttggctcaaaa

SEQ ID NO: 1867147 - DNA, 15 bp, Homo sapiens
tgtttggctcaaaag

SEQ ID NO: 1867148 - DNA, 15 bp, Homo sapiens
gtttggctcaaaaga

SEQ ID NO: 1867149 - DNA, 15 bp, Homo sapiens
tttggctcaaaagat

SEQ ID NO: 1867150 - DNA, 15 bp, Homo sapiens
ttggctcaaaagatt

SEQ ID NO: 1867151 - DNA, 15 bp, Homo sapiens
tggctcaaaagattt

SEQ ID NO: 1867152 - DNA, 15 bp, Homo sapiens
ggctcaaaagatttt

SEQ ID NO: 1867153 - DNA, 15 bp, Homo sapiens
gctcaaaagattttc

SEQ ID NO: 1867154 - DNA, 15 bp, Homo sapiens
ctcaaaagattttca

SEQ ID NO: 1867155 - DNA, 15 bp, Homo sapiens
tcaaaagattttcag

SEQ ID NO: 1867156 - DNA, 15 bp, Homo sapiens
caaaagattttcaga

SEQ ID NO: 1867157 - DNA, 15 bp, Homo sapiens
aaaagattttcagac

SEQ ID NO: 1867158 - DNA, 15 bp, Homo sapiens
aaagattttcagaca

SEQ ID NO: 1867159 - DNA, 15 bp, Homo sapiens
aagattttcagacat

SEQ ID NO: 1867160 - DNA, 15 bp, Homo sapiens
agattttcagacatg

SEQ ID NO: 1867161 - DNA, 15 bp, Homo sapiens
gattttcagacatgg

SEQ ID NO: 1867162 - DNA, 15 bp, Homo sapiens
attttcagacatggt

SEQ ID NO: 1867163 - DNA, 15 bp, Homo sapiens
ttttcagacatggtg

SEQ ID NO: 1867164 - DNA, 15 bp, Homo sapiens
tttcagacatggtgc

SEQ ID NO: 1867165 - DNA, 15 bp, Homo sapiens
ttcagacatggtgct

SEQ ID NO: 1867166 - DNA, 15 bp, Homo sapiens
tcagacatggtgctt

SEQ ID NO: 1867167 - DNA, 15 bp, Homo sapiens
cagacatggtgcttc

SEQ ID NO: 1867168 - DNA, 15 bp, Homo sapiens
agacatggtgcttct

SEQ ID NO: 1867169 - DNA, 15 bp, Homo sapiens
gacatggtgcttctc

SEQ ID NO: 1867170 - DNA, 15 bp, Homo sapiens
acatggtgcttctca

SEQ ID NO: 1867171 - DNA, 15 bp, Homo sapiens
catggtgcttctcag

SEQ ID NO: 1867172 - DNA, 15 bp, Homo sapiens
atggtgcttctcagt

SEQ ID NO: 1867173 - DNA, 15 bp, Homo sapiens
tggtgcttctcagtg

SEQ ID NO: 1867174 - DNA, 15 bp, Homo sapiens
ggtgcttctcagtgt

SEQ ID NO: 1867175 - DNA, 15 bp, Homo sapiens
gtgcttctcagtgtg

SEQ ID NO: 1867176 - DNA, 15 bp, Homo sapiens
tgcttctcagtgtgg

SEQ ID NO: 1867177 - DNA, 15 bp, Homo sapiens
gcttctcagtgtggt

SEQ ID NO: 1867178 - DNA, 15 bp, Homo sapiens
cttctcagtgtggtc

SEQ ID NO: 1867179 - DNA, 15 bp, Homo sapiens
ttctcagtgtggtcc

SEQ ID NO: 1867180 - DNA, 15 bp, Homo sapiens
tctcagtgtggtcca

SEQ ID NO: 1867181 - DNA, 15 bp, Homo sapiens
ctcagtgtggtccat

SEQ ID NO: 1867182 - DNA, 15 bp, Homo sapiens
tcagtgtggtccatc

SEQ ID NO: 1867183 - DNA, 15 bp, Homo sapiens
cagtgtggtccatcg

SEQ ID NO: 1867184 - DNA, 15 bp, Homo sapiens
agtgtggtccatcga

SEQ ID NO: 1867185 - DNA, 15 bp, Homo sapiens
gtgtggtccatcgac

SEQ ID NO: 1867186 - DNA, 15 bp, Homo sapiens
tgtggtccatcgacc

SEQ ID NO: 1867187 - DNA, 15 bp, Homo sapiens
gtggtccatcgacca

SEQ ID NO: 1867188 - DNA, 15 bp, Homo sapiens
tggtccatcgaccac

SEQ ID NO: 1867189 - DNA, 15 bp, Homo sapiens
ggtccatcgaccacc

SEQ ID NO: 1867190 - DNA, 15 bp, Homo sapiens
gtccatcgaccacca

SEQ ID NO: 1867191 - DNA, 15 bp, Homo sapiens
tccatcgaccaccat

SEQ ID NO: 1867192 - DNA, 15 bp, Homo sapiens
ccatcgaccaccatc

SEQ ID NO: 1867193 - DNA, 15 bp, Homo sapiens
catcgaccaccatcc

SEQ ID NO: 1867194 - DNA, 15 bp, Homo sapiens
atcgaccaccatccc

SEQ ID NO: 1867195 - DNA, 15 bp, Homo sapiens
tcgaccaccatcccc

SEQ ID NO: 1867196 - DNA, 15 bp, Homo sapiens
cgaccaccatcccct

SEQ ID NO: 1867197 - DNA, 15 bp, Homo sapiens
gaccaccatcccctg

SEQ ID NO: 1867198 - DNA, 15 bp, Homo sapiens
catcccctggagact

SEQ ID NO: 1867199 - DNA, 15 bp, Homo sapiens
atcccctggagactt

SEQ ID NO: 1867200 - DNA, 15 bp, Homo sapiens
tcccctggagacttg

SEQ ID NO: 1867201 - DNA, 15 bp, Homo sapiens
cccctggagacttgt

SEQ ID NO: 1867202 - DNA, 15 bp, Homo sapiens
ccctggagacttgtt

SEQ ID NO: 1867203 - DNA, 15 bp, Homo sapiens
cctggagacttgtta

SEQ ID NO: 1867204 - DNA, 15 bp, Homo sapiens
ctggagacttgttag

SEQ ID NO: 1867205 - DNA, 15 bp, Homo sapiens
tggagacttgttaga

SEQ ID NO: 1867206 - DNA, 15 bp, Homo sapiens
ggagacttgttagaa

SEQ ID NO: 1867207 - DNA, 15 bp, Homo sapiens
gagacttgttagaaa

SEQ ID NO: 1867208 - DNA, 15 bp, Homo sapiens
agacttgttagaaat

SEQ ID NO: 1867209 - DNA, 15 bp, Homo sapiens
gacttgttagaaatg

SEQ ID NO: 1867210 - DNA, 15 bp, Homo sapiens
acttgttagaaatgt

SEQ ID NO: 1867211 - DNA, 15 bp, Homo sapiens
cttgttagaaatgta

SEQ ID NO: 1867212 - DNA, 15 bp, Homo sapiens
ttgttagaaatgtag

SEQ ID NO: 1867213 - DNA, 15 bp, Homo sapiens
tgttagaaatgtaga

SEQ ID NO: 1867214 - DNA, 15 bp, Homo sapiens
gttagaaatgtagat

SEQ ID NO: 1867215 - DNA, 15 bp, Homo sapiens
ttagaaatgtagatt

SEQ ID NO: 1867216 - DNA, 15 bp, Homo sapiens
tagaaatgtagattc

SEQ ID NO: 1867217 - DNA, 15 bp, Homo sapiens
agaaatgtagattct

SEQ ID NO: 1867218 - DNA, 15 bp, Homo sapiens
gaaatgtagattctc

SEQ ID NO: 1867219 - DNA, 15 bp, Homo sapiens
aaatgtagattctca

SEQ ID NO: 1867220 - DNA, 15 bp, Homo sapiens
aatgtagattctcag

SEQ ID NO: 1867221 - DNA, 15 bp, Homo sapiens
atgtagattctcagg

SEQ ID NO: 1867222 - DNA, 15 bp, Homo sapiens
tgtagattctcaggt

SEQ ID NO: 1867223 - DNA, 15 bp, Homo sapiens
gtagattctcaggtt

SEQ ID NO: 1867224 - DNA, 15 bp, Homo sapiens
tagattctcaggttc

SEQ ID NO: 1867225 - DNA, 15 bp, Homo sapiens
agattctcaggttca

SEQ ID NO: 1867226 - DNA, 15 bp, Homo sapiens
gattctcaggttcag

SEQ ID NO: 1867227 - DNA, 15 bp, Homo sapiens
attctcaggttcagc

SEQ ID NO: 1867228 - DNA, 15 bp, Homo sapiens
ttctcaggttcagcc

SEQ ID NO: 1867229 - DNA, 15 bp, Homo sapiens
tctcaggttcagccc

SEQ ID NO: 1867230 - DNA, 15 bp, Homo sapiens
ctcaggttcagcccc

SEQ ID NO: 1867231 - DNA, 15 bp, Homo sapiens
tcaggttcagcccca

SEQ ID NO: 1867232 - DNA, 15 bp, Homo sapiens
caggttcagccccag

SEQ ID NO: 1867233 - DNA, 15 bp, Homo sapiens
aggttcagccccagc

SEQ ID NO: 1867234 - DNA, 15 bp, Homo sapiens
ggttcagccccagct

SEQ ID NO: 1867235 - DNA, 15 bp, Homo sapiens
gttcagccccagctc

SEQ ID NO: 1867236 - DNA, 15 bp, Homo sapiens
ttcagccccagctct

SEQ ID NO: 1867237 - DNA, 15 bp, Homo sapiens
tcagccccagctctc

SEQ ID NO: 1867238 - DNA, 15 bp, Homo sapiens
cagccccagctctct

SEQ ID NO: 1867239 - DNA, 15 bp, Homo sapiens
agccccagctctctt

SEQ ID NO: 1867240 - DNA, 15 bp, Homo sapiens
gccccagctctcttg

SEQ ID NO: 1867241 - DNA, 15 bp, Homo sapiens
ccccagctctcttgg

SEQ ID NO: 1867242 - DNA, 15 bp, Homo sapiens
cccagctctcttggc

SEQ ID NO: 1867243 - DNA, 15 bp, Homo sapiens
ccagctctcttggcc

SEQ ID NO: 1867244 - DNA, 15 bp, Homo sapiens
cagctctcttggccc

SEQ ID NO: 1867245 - DNA, 15 bp, Homo sapiens
agctctcttggccca

SEQ ID NO: 1867246 - DNA, 15 bp, Homo sapiens
gctctcttggcccag

SEQ ID NO: 1867247 - DNA, 15 bp, Homo sapiens
ctctcttggcccagc

SEQ ID NO: 1867248 - DNA, 15 bp, Homo sapiens
tctcttggcccagca

SEQ ID NO: 1867249 - DNA, 15 bp, Homo sapiens
ctcttggcccagcag

SEQ ID NO: 1867250 - DNA, 15 bp, Homo sapiens
tcttggcccagcagt

SEQ ID NO: 1867251 - DNA, 15 bp, Homo sapiens
cttggcccagcagtc

SEQ ID NO: 1867252 - DNA, 15 bp, Homo sapiens
ttggcccagcagtca

SEQ ID NO: 1867253 - DNA, 15 bp, Homo sapiens
tggcccagcagtcaa

SEQ ID NO: 1867254 - DNA, 15 bp, Homo sapiens
ggcccagcagtcaaa

SEQ ID NO: 1867255 - DNA, 15 bp, Homo sapiens
gcccagcagtcaaaa

SEQ ID NO: 1867256 - DNA, 15 bp, Homo sapiens
cccagcagtcaaaat

SEQ ID NO: 1867257 - DNA, 15 bp, Homo sapiens
ccagcagtcaaaatt

SEQ ID NO: 1867258 - DNA, 15 bp, Homo sapiens
cagcagtcaaaattt

SEQ ID NO: 1867259 - DNA, 15 bp, Homo sapiens
agcagtcaaaatttt

SEQ ID NO: 1867260 - DNA, 15 bp, Homo sapiens
gcagtcaaaatttta

SEQ ID NO: 1867261 - DNA, 15 bp, Homo sapiens
cagtcaaaattttaa

SEQ ID NO: 1867262 - DNA, 15 bp, Homo sapiens
agtcaaaattttaac

SEQ ID NO: 1867263 - DNA, 15 bp, Homo sapiens
gtcaaaattttaaca

SEQ ID NO: 1867264 - DNA, 15 bp, Homo sapiens
tcaaaattttaacaa

SEQ ID NO: 1867265 - DNA, 15 bp, Homo sapiens
caaaattttaacaag

SEQ ID NO: 1867266 - DNA, 15 bp, Homo sapiens
aaaattttaacaagc

SEQ ID NO: 1867267 - DNA, 15 bp, Homo sapiens
aaattttaacaagct

SEQ ID NO: 1867268 - DNA, 15 bp, Homo sapiens
aattttaacaagctc

SEQ ID NO: 1867269 - DNA, 15 bp, Homo sapiens
attttaacaagctct

SEQ ID NO: 1867270 - DNA, 15 bp, Homo sapiens
ttttaacaagctctc

SEQ ID NO: 1867271 - DNA, 15 bp, Homo sapiens
tttaacaagctctcc

SEQ ID NO: 1867272 - DNA, 15 bp, Homo sapiens
ttaacaagctctcca

SEQ ID NO: 1867273 - DNA, 15 bp, Homo sapiens
taacaagctctccag

SEQ ID NO: 1867274 - DNA, 15 bp, Homo sapiens
aacaagctctccagg

SEQ ID NO: 1867275 - DNA, 15 bp, Homo sapiens
acaagctctccaggt

SEQ ID NO: 1867276 - DNA, 15 bp, Homo sapiens
caagctctccaggtc

SEQ ID NO: 1867277 - DNA, 15 bp, Homo sapiens
aagctctccaggtct

SEQ ID NO: 1867278 - DNA, 15 bp, Homo sapiens
agctctccaggtctc

SEQ ID NO: 1867279 - DNA, 15 bp, Homo sapiens
gctctccaggtctct

SEQ ID NO: 1867280 - DNA, 15 bp, Homo sapiens
ctctccaggtctctg

SEQ ID NO: 1867281 - DNA, 15 bp, Homo sapiens
tctccaggtctctgg

SEQ ID NO: 1867282 - DNA, 15 bp, Homo sapiens
ctccaggtctctggt

SEQ ID NO: 1867283 - DNA, 15 bp, Homo sapiens
tccaggtctctggtg

SEQ ID NO: 1867284 - DNA, 15 bp, Homo sapiens
ccaggtctctggtgg

SEQ ID NO: 1867285 - DNA, 15 bp, Homo sapiens
caggtctctggtggg

SEQ ID NO: 1867286 - DNA, 15 bp, Homo sapiens
aggtctctggtgggc

SEQ ID NO: 1867287 - DNA, 15 bp, Homo sapiens
ggtctctggtgggca

SEQ ID NO: 1867288 - DNA, 15 bp, Homo sapiens
tctctggtgggcata

SEQ ID NO: 1867289 - DNA, 15 bp, Homo sapiens
ctctggtgggcatag

SEQ ID NO: 1867290 - DNA, 15 bp, Homo sapiens
tctggtgggcatagt

SEQ ID NO: 1867291 - DNA, 15 bp, Homo sapiens
ctggtgggcatagtg

SEQ ID NO: 1867292 - DNA, 15 bp, Homo sapiens
tggtgggcatagtga

SEQ ID NO: 1867293 - DNA, 15 bp, Homo sapiens
ggtgggcatagtgaa

SEQ ID NO: 1867294 - DNA, 15 bp, Homo sapiens
gtgggcatagtgaag

SEQ ID NO: 1867295 - DNA, 15 bp, Homo sapiens
tgggcatagtgaagt

SEQ ID NO: 1867296 - DNA, 15 bp, Homo sapiens
gggcatagtgaagtc

SEQ ID NO: 1867297 - DNA, 15 bp, Homo sapiens
ggcatagtgaagtct

SEQ ID NO: 1867298 - DNA, 15 bp, Homo sapiens
gcatagtgaagtctg

SEQ ID NO: 1867299 - DNA, 15 bp, Homo sapiens
catagtgaagtctgg

SEQ ID NO: 1867300 - DNA, 15 bp, Homo sapiens
atagtgaagtctggg

SEQ ID NO: 1867301 - DNA, 15 bp, Homo sapiens
tagtgaagtctggga

SEQ ID NO: 1867302 - DNA, 15 bp, Homo sapiens
agtgaagtctgggaa

SEQ ID NO: 1867303 - DNA, 15 bp, Homo sapiens
gtgaagtctgggaag

SEQ ID NO: 1867304 - DNA, 15 bp, Homo sapiens
tgaagtctgggaagc

SEQ ID NO: 1867305 - DNA, 15 bp, Homo sapiens
gaagtctgggaagca

SEQ ID NO: 1867306 - DNA, 15 bp, Homo sapiens
aagtctgggaagcat

SEQ ID NO: 1867307 - DNA, 15 bp, Homo sapiens
agtctgggaagcatt

SEQ ID NO: 1867308 - DNA, 15 bp, Homo sapiens
gtctgggaagcatta

SEQ ID NO: 1867309 - DNA, 15 bp, Homo sapiens
tctgggaagcattac

SEQ ID NO: 1867310 - DNA, 15 bp, Homo sapiens
ctgggaagcattacc

SEQ ID NO: 1867311 - DNA, 15 bp, Homo sapiens
tgggaagcattacct

SEQ ID NO: 1867312 - DNA, 15 bp, Homo sapiens
gggaagcattacctt

SEQ ID NO: 1867313 - DNA, 15 bp, Homo sapiens
ggaagcattaccttg

SEQ ID NO: 1867314 - DNA, 15 bp, Homo sapiens
gaagcattaccttgg

SEQ ID NO: 1867315 - DNA, 15 bp, Homo sapiens
aagcattaccttggt

SEQ ID NO: 1867316 - DNA, 15 bp, Homo sapiens
agcattaccttggtt

SEQ ID NO: 1867317 - DNA, 15 bp, Homo sapiens
gcattaccttggttc

SEQ ID NO: 1867318 - DNA, 15 bp, Homo sapiens
cattaccttggttct

SEQ ID NO: 1867319 - DNA, 15 bp, Homo sapiens
attaccttggttcta

SEQ ID NO: 1867320 - DNA, 15 bp, Homo sapiens
ttaccttggttctag

SEQ ID NO: 1867321 - DNA, 15 bp, Homo sapiens
taccttggttctagc

SEQ ID NO: 1867322 - DNA, 15 bp, Homo sapiens
accttggttctagca

SEQ ID NO: 1867323 - DNA, 15 bp, Homo sapiens
ccttggttctagcac

SEQ ID NO: 1867324 - DNA, 15 bp, Homo sapiens
cttggttctagcact

SEQ ID NO: 1867325 - DNA, 15 bp, Homo sapiens
ttggttctagcactc

SEQ ID NO: 1867326 - DNA, 15 bp, Homo sapiens
tggttctagcactca

SEQ ID NO: 1867327 - DNA, 15 bp, Homo sapiens
ggttctagcactcat

SEQ ID NO: 1867328 - DNA, 15 bp, Homo sapiens
gttctagcactcatg

SEQ ID NO: 1867329 - DNA, 15 bp, Homo sapiens
ttctagcactcatgt

SEQ ID NO: 1867330 - DNA, 15 bp, Homo sapiens
tctagcactcatgtc

SEQ ID NO: 1867331 - DNA, 15 bp, Homo sapiens
ctagcactcatgtcc

SEQ ID NO: 1867332 - DNA, 15 bp, Homo sapiens
tagcactcatgtccg

SEQ ID NO: 1867333 - DNA, 15 bp, Homo sapiens
agcactcatgtccga

SEQ ID NO: 1867334 - DNA, 15 bp, Homo sapiens
gcactcatgtccgat

SEQ ID NO: 1867335 - DNA, 15 bp, Homo sapiens
cactcatgtccgata

SEQ ID NO: 1867336 - DNA, 15 bp, Homo sapiens
actcatgtccgatat

SEQ ID NO: 1867337 - DNA, 15 bp, Homo sapiens
ctcatgtccgatatt

SEQ ID NO: 1867338 - DNA, 15 bp, Homo sapiens
tcatgtccgatattg

SEQ ID NO: 1867339 - DNA, 15 bp, Homo sapiens
catgtccgatattga

SEQ ID NO: 1867340 - DNA, 15 bp, Homo sapiens
atgtccgatattgac

SEQ ID NO: 1867341 - DNA, 15 bp, Homo sapiens
tgtccgatattgact

SEQ ID NO: 1867342 - DNA, 15 bp, Homo sapiens
gtccgatattgactt

SEQ ID NO: 1867343 - DNA, 15 bp, Homo sapiens
tccgatattgacttc

SEQ ID NO: 1867344 - DNA, 15 bp, Homo sapiens
ccgatattgacttcc

SEQ ID NO: 1867345 - DNA, 15 bp, Homo sapiens
cgatattgacttccc

SEQ ID NO: 1867346 - DNA, 15 bp, Homo sapiens
gatattgacttccca

SEQ ID NO: 1867347 - DNA, 15 bp, Homo sapiens
atattgacttcccaa

SEQ ID NO: 1867348 - DNA, 15 bp, Homo sapiens
tattgacttcccaag

SEQ ID NO: 1867349 - DNA, 15 bp, Homo sapiens
attgacttcccaagc

SEQ ID NO: 1867350 - DNA, 15 bp, Homo sapiens
ttgacttcccaagca

SEQ ID NO: 1867351 - DNA, 15 bp, Homo sapiens
tgacttcccaagcag

SEQ ID NO: 1867352 - DNA, 15 bp, Homo sapiens
gacttcccaagcagc

SEQ ID NO: 1867353 - DNA, 15 bp, Homo sapiens
acttcccaagcagca

SEQ ID NO: 1867354 - DNA, 15 bp, Homo sapiens
cttcccaagcagcag

SEQ ID NO: 1867355 - DNA, 15 bp, Homo sapiens
ttcccaagcagcagt

SEQ ID NO: 1867356 - DNA, 15 bp, Homo sapiens
tcccaagcagcagtc

SEQ ID NO: 1867357 - DNA, 15 bp, Homo sapiens
cccaagcagcagtca

SEQ ID NO: 1867358 - DNA, 15 bp, Homo sapiens
ccaagcagcagtcac

SEQ ID NO: 1867359 - DNA, 15 bp, Homo sapiens
caagcagcagtcacc

SEQ ID NO: 1867360 - DNA, 15 bp, Homo sapiens
aagcagcagtcacct

SEQ ID NO: 1867361 - DNA, 15 bp, Homo sapiens
agcagcagtcacctc

SEQ ID NO: 1867362 - DNA, 15 bp, Homo sapiens
gcagcagtcacctct

SEQ ID NO: 1867363 - DNA, 15 bp, Homo sapiens
cagcagtcacctctg

SEQ ID NO: 1867364 - DNA, 15 bp, Homo sapiens
agcagtcacctctgg

SEQ ID NO: 1867365 - DNA, 15 bp, Homo sapiens
gcagtcacctctgga

SEQ ID NO: 1867366 - DNA, 15 bp, Homo sapiens
cagtcacctctggag

SEQ ID NO: 1867367 - DNA, 15 bp, Homo sapiens
agtcacctctggagc

SEQ ID NO: 1867368 - DNA, 15 bp, Homo sapiens
gtcacctctggagcc

SEQ ID NO: 1867369 - DNA, 15 bp, Homo sapiens
tcacctctggagcct

SEQ ID NO: 1867370 - DNA, 15 bp, Homo sapiens
cacctctggagcctt

SEQ ID NO: 1867371 - DNA, 15 bp, Homo sapiens
acctctggagccttc

SEQ ID NO: 1867372 - DNA, 15 bp, Homo sapiens
cctctggagccttcc

SEQ ID NO: 1867373 - DNA, 15 bp, Homo sapiens
ctctggagccttcct

SEQ ID NO: 1867374 - DNA, 15 bp, Homo sapiens
tctggagccttcctc

SEQ ID NO: 1867375 - DNA, 15 bp, Homo sapiens
ctggagccttcctct

SEQ ID NO: 1867376 - DNA, 15 bp, Homo sapiens
tggagccttcctctt

SEQ ID NO: 1867377 - DNA, 15 bp, Homo sapiens
ggagccttcctcttt

SEQ ID NO: 1867378 - DNA, 15 bp, Homo sapiens
gagccttcctctttg

SEQ ID NO: 1867379 - DNA, 15 bp, Homo sapiens
agccttcctctttgg

SEQ ID NO: 1867380 - DNA, 15 bp, Homo sapiens
gccttcctctttggg

SEQ ID NO: 1867381 - DNA, 15 bp, Homo sapiens
ccttcctctttgggg

SEQ ID NO: 1867382 - DNA, 15 bp, Homo sapiens
cttcctctttggggt

SEQ ID NO: 1867383 - DNA, 15 bp, Homo sapiens
ttcctctttggggtc

SEQ ID NO: 1867384 - DNA, 15 bp, Homo sapiens
tcctctttggggtct

SEQ ID NO: 1867385 - DNA, 15 bp, Homo sapiens
cctctttggggtctt

SEQ ID NO: 1867386 - DNA, 15 bp, Homo sapiens
ctctttggggtcttg

SEQ ID NO: 1867387 - DNA, 15 bp, Homo sapiens
tctttggggtcttgg

SEQ ID NO: 1867388 - DNA, 15 bp, Homo sapiens
ctttggggtcttgga

SEQ ID NO: 1867389 - DNA, 15 bp, Homo sapiens
tttggggtcttggac

SEQ ID NO: 1867390 - DNA, 15 bp, Homo sapiens
ttggggtcttggacc

SEQ ID NO: 1867391 - DNA, 15 bp, Homo sapiens
tggggtcttggaccg

SEQ ID NO: 1867392 - DNA, 15 bp, Homo sapiens
ggggtcttggaccgc

SEQ ID NO: 1867393 - DNA, 15 bp, Homo sapiens
gggtcttggaccgca

SEQ ID NO: 1867394 - DNA, 15 bp, Homo sapiens
ggtcttggaccgcaa

SEQ ID NO: 1867395 - DNA, 15 bp, Homo sapiens
gtcttggaccgcaat

SEQ ID NO: 1867396 - DNA, 15 bp, Homo sapiens
tcttggaccgcaatg

SEQ ID NO: 1867397 - DNA, 15 bp, Homo sapiens
cttggaccgcaatgg

SEQ ID NO: 1867398 - DNA, 15 bp, Homo sapiens
ttggaccgcaatggc

SEQ ID NO: 1867399 - DNA, 15 bp, Homo sapiens
tggaccgcaatggcc

SEQ ID NO: 1867400 - DNA, 15 bp, Homo sapiens
ggaccgcaatggcct

SEQ ID NO: 1867401 - DNA, 15 bp, Homo sapiens
gaccgcaatggcctt

SEQ ID NO: 1867402 - DNA, 15 bp, Homo sapiens
accgcaatggccttt

SEQ ID NO: 1867403 - DNA, 15 bp, Homo sapiens
ccgcaatggcctttg

SEQ ID NO: 1867404 - DNA, 15 bp, Homo sapiens
cgcaatggcctttgg

SEQ ID NO: 1867405 - DNA, 15 bp, Homo sapiens
gcaatggcctttggc

SEQ ID NO: 1867406 - DNA, 15 bp, Homo sapiens
caatggcctttggca

SEQ ID NO: 1867407 - DNA, 15 bp, Homo sapiens
aatggcctttggcaa

SEQ ID NO: 1867408 - DNA, 15 bp, Homo sapiens
atggcctttggcaag

SEQ ID NO: 1867409 - DNA, 15 bp, Homo sapiens
tggcctttggcaagg

SEQ ID NO: 1867410 - DNA, 15 bp, Homo sapiens
ggcctttggcaagga

SEQ ID NO: 1867411 - DNA, 15 bp, Homo sapiens
gcctttggcaaggag

SEQ ID NO: 1867412 - DNA, 15 bp, Homo sapiens
cctttggcaaggagt

SEQ ID NO: 1867413 - DNA, 15 bp, Homo sapiens
ctttggcaaggagtc

SEQ ID NO: 1867414 - DNA, 15 bp, Homo sapiens
tttggcaaggagtct

SEQ ID NO: 1867415 - DNA, 15 bp, Homo sapiens
ttggcaaggagtctc

SEQ ID NO: 1867416 - DNA, 15 bp, Homo sapiens
tggcaaggagtctct

SEQ ID NO: 1867417 - DNA, 15 bp, Homo sapiens
ggcaaggagtctctg

SEQ ID NO: 1867418 - DNA, 15 bp, Homo sapiens
gcaaggagtctctgc

SEQ ID NO: 1867419 - DNA, 15 bp, Homo sapiens
caaggagtctctgct

SEQ ID NO: 1867420 - DNA, 15 bp, Homo sapiens
aaggagtctctgctg

SEQ ID NO: 1867421 - DNA, 15 bp, Homo sapiens
aggagtctctgctgg

SEQ ID NO: 1867422 - DNA, 15 bp, Homo sapiens
ggagtctctgctgga

SEQ ID NO: 1867423 - DNA, 15 bp, Homo sapiens
gagtctctgctggat

SEQ ID NO: 1867424 - DNA, 15 bp, Homo sapiens
agtctctgctggatc

SEQ ID NO: 1867425 - DNA, 15 bp, Homo sapiens
gtctctgctggatct

SEQ ID NO: 1867426 - DNA, 15 bp, Homo sapiens
taatataagtaatac

SEQ ID NO: 1867427 - DNA, 15 bp, Homo sapiens
aatataagtaatact

SEQ ID NO: 1867428 - DNA, 15 bp, Homo sapiens
atataagtaatactt

SEQ ID NO: 1867429 - DNA, 15 bp, Homo sapiens
tataagtaatacttt

SEQ ID NO: 1867430 - DNA, 15 bp, Homo sapiens
ataagtaatactttg

SEQ ID NO: 1867431 - DNA, 15 bp, Homo sapiens
taagtaatactttga

SEQ ID NO: 1867432 - DNA, 15 bp, Homo sapiens
aagtaatactttgag

SEQ ID NO: 1867433 - DNA, 15 bp, Homo sapiens
agtaatactttgaga

SEQ ID NO: 1867434 - DNA, 15 bp, Homo sapiens
gtaatactttgagat

SEQ ID NO: 1867435 - DNA, 15 bp, Homo sapiens
taatactttgagata

SEQ ID NO: 1867436 - DNA, 15 bp, Homo sapiens
aatactttgagatac

SEQ ID NO: 1867437 - DNA, 15 bp, Homo sapiens
atactttgagatacc

SEQ ID NO: 1867438 - DNA, 15 bp, Homo sapiens
tactttgagatacct

SEQ ID NO: 1867439 - DNA, 15 bp, Homo sapiens
actttgagatacctg

SEQ ID NO: 1867440 - DNA, 15 bp, Homo sapiens
ctttgagatacctgt

SEQ ID NO: 1867441 - DNA, 15 bp, Homo sapiens
tttgagatacctgta

SEQ ID NO: 1867442 - DNA, 15 bp, Homo sapiens
ttgagatacctgtaa

SEQ ID NO: 1867443 - DNA, 15 bp, Homo sapiens
tgagatacctgtaac

SEQ ID NO: 1867444 - DNA, 15 bp, Homo sapiens
gagatacctgtaaca

SEQ ID NO: 1867445 - DNA, 15 bp, Homo sapiens
agatacctgtaacaa

SEQ ID NO: 1867446 - DNA, 15 bp, Homo sapiens
gatacctgtaacaat

SEQ ID NO: 1867447 - DNA, 15 bp, Homo sapiens
atacctgtaacaatt

SEQ ID NO: 1867448 - DNA, 15 bp, Homo sapiens
tacctgtaacaattg

SEQ ID NO: 1867449 - DNA, 15 bp, Homo sapiens
acctgtaacaattgt

SEQ ID NO: 1867450 - DNA, 15 bp, Homo sapiens
cctgtaacaattgta

SEQ ID NO: 1867451 - DNA, 15 bp, Homo sapiens
ctgtaacaattgtaa

SEQ ID NO: 1867452 - DNA, 15 bp, Homo sapiens
tgtaacaattgtaat

SEQ ID NO: 1867453 - DNA, 15 bp, Homo sapiens
gtaacaattgtaatc

SEQ ID NO: 1867454 - DNA, 15 bp, Homo sapiens
taacaattgtaatct

SEQ ID NO: 1867455 - DNA, 15 bp, Homo sapiens
aacaattgtaatctt

SEQ ID NO: 1867456 - DNA, 15 bp, Homo sapiens
acaattgtaatctta

SEQ ID NO: 1867457 - DNA, 15 bp, Homo sapiens
caattgtaatcttat

SEQ ID NO: 1867458 - DNA, 15 bp, Homo sapiens
aattgtaatcttata

SEQ ID NO: 1867459 - DNA, 15 bp, Homo sapiens
attgtaatcttatat

SEQ ID NO: 1867460 - DNA, 15 bp, Homo sapiens
ttgtaatcttatatg

SEQ ID NO: 1867461 - DNA, 15 bp, Homo sapiens
tgtaatcttatatgt

SEQ ID NO: 1867462 - DNA, 15 bp, Homo sapiens
gtaatcttatatgta

SEQ ID NO: 1867463 - DNA, 15 bp, Homo sapiens
taatcttatatgtaa

SEQ ID NO: 1867464 - DNA, 15 bp, Homo sapiens
aatcttatatgtaaa

SEQ ID NO: 1867465 - DNA, 15 bp, Homo sapiens
atcttatatgtaaat

SEQ ID NO: 1867466 - DNA, 15 bp, Homo sapiens
tcttatatgtaaata

SEQ ID NO: 1867467 - DNA, 15 bp, Homo sapiens
cttatatgtaaatat

SEQ ID NO: 1867468 - DNA, 15 bp, Homo sapiens
ttatatgtaaatatc

SEQ ID NO: 1867469 - DNA, 15 bp, Homo sapiens
tatatgtaaatatct

SEQ ID NO: 1867470 - DNA, 15 bp, Homo sapiens
atatgtaaatatctg

SEQ ID NO: 1867471 - DNA, 15 bp, Homo sapiens
tatgtaaatatctga

SEQ ID NO: 1867472 - DNA, 15 bp, Homo sapiens
atgtaaatatctgag

SEQ ID NO: 1867473 - DNA, 15 bp, Homo sapiens
tgtaaatatctgaga

SEQ ID NO: 1867474 - DNA, 15 bp, Homo sapiens
gtaaatatctgagat

SEQ ID NO: 1867475 - DNA, 15 bp, Homo sapiens
taaatatctgagatt

SEQ ID NO: 1867476 - DNA, 15 bp, Homo sapiens
aaatatctgagattt

SEQ ID NO: 1867477 - DNA, 15 bp, Homo sapiens
aatatctgagatttc

SEQ ID NO: 1867478 - DNA, 15 bp, Homo sapiens
atatctgagatttct

SEQ ID NO: 1867479 - DNA, 15 bp, Homo sapiens
tatctgagatttctg

SEQ ID NO: 1867480 - DNA, 15 bp, Homo sapiens
atctgagatttctgt

SEQ ID NO: 1867481 - DNA, 15 bp, Homo sapiens
tctgagatttctgtt

SEQ ID NO: 1867482 - DNA, 15 bp, Homo sapiens
ctgagatttctgttg

SEQ ID NO: 1867483 - DNA, 15 bp, Homo sapiens
tgagatttctgttgc

SEQ ID NO: 1867484 - DNA, 15 bp, Homo sapiens
gagatttctgttgct

SEQ ID NO: 1867485 - DNA, 15 bp, Homo sapiens
agatttctgttgcta

SEQ ID NO: 1867486 - DNA, 15 bp, Homo sapiens
gatttctgttgctaa

SEQ ID NO: 1867487 - DNA, 15 bp, Homo sapiens
atttctgttgctaaa

SEQ ID NO: 1867488 - DNA, 15 bp, Homo sapiens
tttctgttgctaaaa

SEQ ID NO: 1867489 - DNA, 15 bp, Homo sapiens
ttctgttgctaaaaa

SEQ ID NO: 1867490 - DNA, 15 bp, Homo sapiens
tctgttgctaaaaaa

SEQ ID NO: 1867491 - DNA, 15 bp, Homo sapiens
ctgttgctaaaaaaa

SEQ ID NO: 1867492 - DNA, 15 bp, Homo sapiens
tgttgctaaaaaaag

SEQ ID NO: 1867493 - DNA, 15 bp, Homo sapiens
gttgctaaaaaaagt

SEQ ID NO: 1867494 - DNA, 15 bp, Homo sapiens
ttgctaaaaaaagtt

SEQ ID NO: 1867495 - DNA, 15 bp, Homo sapiens
tgctaaaaaaagtta

SEQ ID NO: 1867496 - DNA, 15 bp, Homo sapiens
gctaaaaaaagttac

SEQ ID NO: 1867497 - DNA, 15 bp, Homo sapiens
ctaaaaaaagttaca

SEQ ID NO: 1867498 - DNA, 15 bp, Homo sapiens
taaaaaaagttacaa

SEQ ID NO: 1867499 - DNA, 15 bp, Homo sapiens
aaaaaaagttacaag

SEQ ID NO: 1867500 - DNA, 15 bp, Homo sapiens
aaaaaagttacaagt

SEQ ID NO: 1867501 - DNA, 15 bp, Homo sapiens
aaaaagttacaagtg

SEQ ID NO: 1867502 - DNA, 15 bp, Homo sapiens
aaaagttacaagtgt

SEQ ID NO: 1867503 - DNA, 15 bp, Homo sapiens
aaagttacaagtgtc

SEQ ID NO: 1867504 - DNA, 15 bp, Homo sapiens
aagttacaagtgtca

SEQ ID NO: 1867505 - DNA, 15 bp, Homo sapiens
agttacaagtgtcat

SEQ ID NO: 1867506 - DNA, 15 bp, Homo sapiens
gttacaagtgtcatt

SEQ ID NO: 1867507 - DNA, 15 bp, Homo sapiens
ttacaagtgtcatta

SEQ ID NO: 1867508 - DNA, 15 bp, Homo sapiens
tacaagtgtcattaa

SEQ ID NO: 1867509 - DNA, 15 bp, Homo sapiens
acaagtgtcattaat

SEQ ID NO: 1867510 - DNA, 15 bp, Homo sapiens
caagtgtcattaata

SEQ ID NO: 1867511 - DNA, 15 bp, Homo sapiens
aagtgtcattaatac

SEQ ID NO: 1867512 - DNA, 15 bp, Homo sapiens
agtgtcattaatact

SEQ ID NO: 1867513 - DNA, 15 bp, Homo sapiens
gtgtcattaatactg

SEQ ID NO: 1867514 - DNA, 15 bp, Homo sapiens
tgtcattaatactgt

SEQ ID NO: 1867515 - DNA, 15 bp, Homo sapiens
gtcattaatactgtt

SEQ ID NO: 1867516 - DNA, 15 bp, Homo sapiens
tcattaatactgttc

SEQ ID NO: 1867517 - DNA, 15 bp, Homo sapiens
cattaatactgttct

SEQ ID NO: 1867518 - DNA, 15 bp, Homo sapiens
attaatactgttcta

SEQ ID NO: 1867519 - DNA, 15 bp, Homo sapiens
ttaatactgttctaa

SEQ ID NO: 1867520 - DNA, 15 bp, Homo sapiens
taatactgttctaat

SEQ ID NO: 1867521 - DNA, 15 bp, Homo sapiens
aatactgttctaatt

SEQ ID NO: 1867522 - DNA, 15 bp, Homo sapiens
atactgttctaattt

SEQ ID NO: 1867523 - DNA, 15 bp, Homo sapiens
tactgttctaattta

SEQ ID NO: 1867524 - DNA, 15 bp, Homo sapiens
actgttctaatttat

SEQ ID NO: 1867525 - DNA, 15 bp, Homo sapiens
ctgttctaatttatt

SEQ ID NO: 1867526 - DNA, 15 bp, Homo sapiens
tgttctaatttattg

SEQ ID NO: 1867527 - DNA, 15 bp, Homo sapiens
gttctaatttattgt

SEQ ID NO: 1867528 - DNA, 15 bp, Homo sapiens
ttctaatttattgta

SEQ ID NO: 1867529 - DNA, 15 bp, Homo sapiens
tctaatttattgtag

SEQ ID NO: 1867530 - DNA, 15 bp, Homo sapiens
ctaatttattgtaga

SEQ ID NO: 1867531 - DNA, 15 bp, Homo sapiens
taatttattgtagaa

SEQ ID NO: 1867532 - DNA, 15 bp, Homo sapiens
aatttattgtagaac

SEQ ID NO: 1867533 - DNA, 15 bp, Homo sapiens
atttattgtagaaca

SEQ ID NO: 1867534 - DNA, 15 bp, Homo sapiens
tttattgtagaacac

SEQ ID NO: 1867535 - DNA, 15 bp, Homo sapiens
ttattgtagaacacc

SEQ ID NO: 1867536 - DNA, 15 bp, Homo sapiens
tattgtagaacacct

SEQ ID NO: 1867537 - DNA, 15 bp, Homo sapiens
attgtagaacacctg

SEQ ID NO: 1867538 - DNA, 15 bp, Homo sapiens
ttgtagaacacctga

SEQ ID NO: 1867539 - DNA, 15 bp, Homo sapiens
tgtagaacacctgat

SEQ ID NO: 1867540 - DNA, 15 bp, Homo sapiens
gtagaacacctgatt

SEQ ID NO: 1867541 - DNA, 15 bp, Homo sapiens
tagaacacctgattc

SEQ ID NO: 1867542 - DNA, 15 bp, Homo sapiens
agaacacctgattct

SEQ ID NO: 1867543 - DNA, 15 bp, Homo sapiens
gaacacctgattctg

SEQ ID NO: 1867544 - DNA, 15 bp, Homo sapiens
aacacctgattctgt

SEQ ID NO: 1867545 - DNA, 15 bp, Homo sapiens
acacctgattctgtc

SEQ ID NO: 1867546 - DNA, 15 bp, Homo sapiens
cacctgattctgtca

SEQ ID NO: 1867547 - DNA, 15 bp, Homo sapiens
acctgattctgtcac

SEQ ID NO: 1867548 - DNA, 15 bp, Homo sapiens
cctgattctgtcact

SEQ ID NO: 1867549 - DNA, 15 bp, Homo sapiens
ctgattctgtcactg

SEQ ID NO: 1867550 - DNA, 15 bp, Homo sapiens
tgattctgtcactgt

SEQ ID NO: 1867551 - DNA, 15 bp, Homo sapiens
gattctgtcactgtt

SEQ ID NO: 1867552 - DNA, 15 bp, Homo sapiens
attctgtcactgttc

SEQ ID NO: 1867553 - DNA, 15 bp, Homo sapiens
ttctgtcactgttcg

SEQ ID NO: 1867554 - DNA, 15 bp, Homo sapiens
tctgtcactgttcgg

SEQ ID NO: 1867555 - DNA, 15 bp, Homo sapiens
ctgtcactgttcggg

SEQ ID NO: 1867556 - DNA, 15 bp, Homo sapiens
tgtcactgttcgggg

SEQ ID NO: 1867557 - DNA, 15 bp, Homo sapiens
gtcactgttcggggt

SEQ ID NO: 1867558 - DNA, 15 bp, Homo sapiens
tcactgttcggggtg

SEQ ID NO: 1867559 - DNA, 15 bp, Homo sapiens
cactgttcggggtgc

SEQ ID NO: 1867560 - DNA, 15 bp, Homo sapiens
actgttcggggtgcc

SEQ ID NO: 1867561 - DNA, 15 bp, Homo sapiens
ctgttcggggtgcca

SEQ ID NO: 1867562 - DNA, 15 bp, Homo sapiens
tgttcggggtgccac

SEQ ID NO: 1867563 - DNA, 15 bp, Homo sapiens
gttcggggtgccact

SEQ ID NO: 1867564 - DNA, 15 bp, Homo sapiens
ttcggggtgccactt

SEQ ID NO: 1867565 - DNA, 15 bp, Homo sapiens
tcggggtgccacttg

SEQ ID NO: 1867566 - DNA, 15 bp, Homo sapiens
cggggtgccacttgt

SEQ ID NO: 1867567 - DNA, 15 bp, Homo sapiens
ggggtgccacttgta

SEQ ID NO: 1867568 - DNA, 15 bp, Homo sapiens
gggtgccacttgtaa

SEQ ID NO: 1867569 - DNA, 15 bp, Homo sapiens
ggtgccacttgtaac

SEQ ID NO: 1867570 - DNA, 15 bp, Homo sapiens
gtgccacttgtaacc

SEQ ID NO: 1867571 - DNA, 15 bp, Homo sapiens
tgccacttgtaacct

SEQ ID NO: 1867572 - DNA, 15 bp, Homo sapiens
gccacttgtaacctg

SEQ ID NO: 1867573 - DNA, 15 bp, Homo sapiens
ccacttgtaacctgc

SEQ ID NO: 1867574 - DNA, 15 bp, Homo sapiens
cacttgtaacctgcc

SEQ ID NO: 1867575 - DNA, 15 bp, Homo sapiens
acttgtaacctgcca

SEQ ID NO: 1867576 - DNA, 15 bp, Homo sapiens
cttgtaacctgccat

SEQ ID NO: 1867577 - DNA, 15 bp, Homo sapiens
ttgtaacctgccatg

SEQ ID NO: 1867578 - DNA, 15 bp, Homo sapiens
tgtaacctgccatga

SEQ ID NO: 1867579 - DNA, 15 bp, Homo sapiens
gtaacctgccatgat

SEQ ID NO: 1867580 - DNA, 15 bp, Homo sapiens
taacctgccatgatc

SEQ ID NO: 1867581 - DNA, 15 bp, Homo sapiens
aacctgccatgatcc

SEQ ID NO: 1867582 - DNA, 15 bp, Homo sapiens
acctgccatgatccc

SEQ ID NO: 1867583 - DNA, 15 bp, Homo sapiens
cctgccatgatccct

SEQ ID NO: 1867584 - DNA, 15 bp, Homo sapiens
ctgccatgatccctg

SEQ ID NO: 1867585 - DNA, 15 bp, Homo sapiens
tgccatgatccctgg

SEQ ID NO: 1867586 - DNA, 15 bp, Homo sapiens
gccatgatccctggt

SEQ ID NO: 1867587 - DNA, 15 bp, Homo sapiens
ccatgatccctggtg

SEQ ID NO: 1867588 - DNA, 15 bp, Homo sapiens
catgatccctggtgg

SEQ ID NO: 1867589 - DNA, 15 bp, Homo sapiens
atgatccctggtgga

SEQ ID NO: 1867590 - DNA, 15 bp, Homo sapiens
tgatccctggtggac

SEQ ID NO: 1867591 - DNA, 15 bp, Homo sapiens
gatccctggtggact

SEQ ID NO: 1867592 - DNA, 15 bp, Homo sapiens
atccctggtggactg

SEQ ID NO: 1867593 - DNA, 15 bp, Homo sapiens
tccctggtggactga

SEQ ID NO: 1867594 - DNA, 15 bp, Homo sapiens
ccctggtggactgaa

SEQ ID NO: 1867595 - DNA, 15 bp, Homo sapiens
cctggtggactgaac

SEQ ID NO: 1867596 - DNA, 15 bp, Homo sapiens
ctggtggactgaaca

SEQ ID NO: 1867597 - DNA, 15 bp, Homo sapiens
tggtggactgaacaa

SEQ ID NO: 1867598 - DNA, 15 bp, Homo sapiens
ggtggactgaacaaa

SEQ ID NO: 1867599 - DNA, 15 bp, Homo sapiens
gtggactgaacaaag

SEQ ID NO: 1867600 - DNA, 15 bp, Homo sapiens
tggactgaacaaagt

SEQ ID NO: 1867601 - DNA, 15 bp, Homo sapiens
ggactgaacaaagtg

SEQ ID NO: 1867602 - DNA, 15 bp, Homo sapiens
gactgaacaaagtgg

SEQ ID NO: 1867603 - DNA, 15 bp, Homo sapiens
actgaacaaagtggg

SEQ ID NO: 1867604 - DNA, 15 bp, Homo sapiens
ctgaacaaagtgggg

SEQ ID NO: 1867605 - DNA, 15 bp, Homo sapiens
tgaacaaagtggggc

SEQ ID NO: 1867606 - DNA, 15 bp, Homo sapiens
gaacaaagtggggct

SEQ ID NO: 1867607 - DNA, 15 bp, Homo sapiens
aacaaagtggggcta

SEQ ID NO: 1867608 - DNA, 15 bp, Homo sapiens
acaaagtggggctaa

SEQ ID NO: 1867609 - DNA, 15 bp, Homo sapiens
caaagtggggctaac

SEQ ID NO: 1867610 - DNA, 15 bp, Homo sapiens
aaagtggggctaact

SEQ ID NO: 1867611 - DNA, 15 bp, Homo sapiens
aagtggggctaactg

SEQ ID NO: 1867612 - DNA, 15 bp, Homo sapiens
agtggggctaactgg

SEQ ID NO: 1867613 - DNA, 15 bp, Homo sapiens
gtggggctaactggg

SEQ ID NO: 1867614 - DNA, 15 bp, Homo sapiens
tggggctaactgggg

SEQ ID NO: 1867615 - DNA, 15 bp, Homo sapiens
ggggctaactgggga

SEQ ID NO: 1867616 - DNA, 15 bp, Homo sapiens
gggctaactggggaa

SEQ ID NO: 1867617 - DNA, 15 bp, Homo sapiens
ggctaactggggaat

SEQ ID NO: 1867618 - DNA, 15 bp, Homo sapiens
gctaactggggaata

SEQ ID NO: 1867619 - DNA, 15 bp, Homo sapiens
ctaactggggaataa

SEQ ID NO: 1867620 - DNA, 15 bp, Homo sapiens
taactggggaataaa

SEQ ID NO: 1867621 - DNA, 15 bp, Homo sapiens
aactggggaataaaa

SEQ ID NO: 1867622 - DNA, 15 bp, Homo sapiens
actggggaataaaag

SEQ ID NO: 1867623 - DNA, 15 bp, Homo sapiens
ctggggaataaaagt

SEQ ID NO: 1867624 - DNA, 15 bp, Homo sapiens
tggggaataaaagtc

SEQ ID NO: 1867625 - DNA, 15 bp, Homo sapiens
ggggaataaaagtca

SEQ ID NO: 1867626 - DNA, 15 bp, Homo sapiens
gggaataaaagtcaa

SEQ ID NO: 1867627 - DNA, 15 bp, Homo sapiens
ggaataaaagtcaaa

SEQ ID NO: 1867628 - DNA, 15 bp, Homo sapiens
gaataaaagtcaaag

SEQ ID NO: 1867629 - DNA, 15 bp, Homo sapiens
aataaaagtcaaaga

SEQ ID NO: 1867630 - DNA, 15 bp, Homo sapiens
ataaaagtcaaagac

SEQ ID NO: 1867631 - DNA, 15 bp, Homo sapiens
taaaagtcaaagaca

SEQ ID NO: 1867632 - DNA, 15 bp, Homo sapiens
aaaagtcaaagacaa

SEQ ID NO: 1867633 - DNA, 15 bp, Homo sapiens
aaagtcaaagacaag

SEQ ID NO: 1867634 - DNA, 15 bp, Homo sapiens
aagtcaaagacaaga

SEQ ID NO: 1867635 - DNA, 15 bp, Homo sapiens
agtcaaagacaagag

SEQ ID NO: 1867636 - DNA, 15 bp, Homo sapiens
gtcaaagacaagaga

SEQ ID NO: 1867637 - DNA, 15 bp, Homo sapiens
tcaaagacaagagag

SEQ ID NO: 1867638 - DNA, 15 bp, Homo sapiens
caaagacaagagagt

SEQ ID NO: 1867639 - DNA, 15 bp, Homo sapiens
aaagacaagagagta

SEQ ID NO: 1867640 - DNA, 15 bp, Homo sapiens
aagacaagagagtat

SEQ ID NO: 1867641 - DNA, 15 bp, Homo sapiens
agacaagagagtata

SEQ ID NO: 1867642 - DNA, 15 bp, Homo sapiens
gacaagagagtatat

SEQ ID NO: 1867643 - DNA, 15 bp, Homo sapiens
acaagagagtatatt

SEQ ID NO: 1867644 - DNA, 15 bp, Homo sapiens
aagagagtatatttg

SEQ ID NO: 1867645 - DNA, 15 bp, Homo sapiens
agagagtatatttgg

SEQ ID NO: 1867646 - DNA, 15 bp, Homo sapiens
gagagtatatttgga

SEQ ID NO: 1867647 - DNA, 15 bp, Homo sapiens
agagtatatttggaa

SEQ ID NO: 1867648 - DNA, 15 bp, Homo sapiens
gagtatatttggaag

SEQ ID NO: 1867649 - DNA, 15 bp, Homo sapiens
agtatatttggaaga

SEQ ID NO: 1867650 - DNA, 15 bp, Homo sapiens
gtatatttggaagaa

SEQ ID NO: 1867651 - DNA, 15 bp, Homo sapiens
tatatttggaagaag

SEQ ID NO: 1867652 - DNA, 15 bp, Homo sapiens
atatttggaagaagg

SEQ ID NO: 1867653 - DNA, 15 bp, Homo sapiens
tatttggaagaaggg

SEQ ID NO: 1867654 - DNA, 15 bp, Homo sapiens
atttggaagaagggg

SEQ ID NO: 1867655 - DNA, 15 bp, Homo sapiens
tttggaagaaggggt

SEQ ID NO: 1867656 - DNA, 15 bp, Homo sapiens
ttggaagaaggggtt

SEQ ID NO: 1867657 - DNA, 15 bp, Homo sapiens
tggaagaaggggttg

SEQ ID NO: 1867658 - DNA, 15 bp, Homo sapiens
ggaagaaggggttgg

SEQ ID NO: 1867659 - DNA, 15 bp, Homo sapiens
gaagaaggggttggg

SEQ ID NO: 1867660 - DNA, 15 bp, Homo sapiens
aagaaggggttgggg

SEQ ID NO: 1867661 - DNA, 15 bp, Homo sapiens
agaaggggttggggg

SEQ ID NO: 1867662 - DNA, 15 bp, Homo sapiens
gaaggggttgggggc

SEQ ID NO: 1867663 - DNA, 15 bp, Homo sapiens
aaggggttgggggca

SEQ ID NO: 1867664 - DNA, 15 bp, Homo sapiens
aggggttgggggcac

SEQ ID NO: 1867665 - DNA, 15 bp, Homo sapiens
ggggttgggggcacc

SEQ ID NO: 1867666 - DNA, 15 bp, Homo sapiens
gggttgggggcacct

SEQ ID NO: 1867667 - DNA, 15 bp, Homo sapiens
ggttgggggcacctc

SEQ ID NO: 1867668 - DNA, 15 bp, Homo sapiens
gttgggggcacctcg

SEQ ID NO: 1867669 - DNA, 15 bp, Homo sapiens
ttgggggcacctcgc

SEQ ID NO: 1867670 - DNA, 15 bp, Homo sapiens
tgggggcacctcgcc

SEQ ID NO: 1867671 - DNA, 15 bp, Homo sapiens
gggggcacctcgcct

SEQ ID NO: 1867672 - DNA, 15 bp, Homo sapiens
ggggcacctcgcctc

SEQ ID NO: 1867673 - DNA, 15 bp, Homo sapiens
gggcacctcgcctct

SEQ ID NO: 1867674 - DNA, 15 bp, Homo sapiens
ggcacctcgcctcta

SEQ ID NO: 1867675 - DNA, 15 bp, Homo sapiens
gcacctcgcctctag

SEQ ID NO: 1867676 - DNA, 15 bp, Homo sapiens
cacctcgcctctagt

SEQ ID NO: 1867677 - DNA, 15 bp, Homo sapiens
acctcgcctctagtg

SEQ ID NO: 1867678 - DNA, 15 bp, Homo sapiens
cctcgcctctagtgg

SEQ ID NO: 1867679 - DNA, 15 bp, Homo sapiens
ctcgcctctagtgga

SEQ ID NO: 1867680 - DNA, 15 bp, Homo sapiens
tcgcctctagtggac

SEQ ID NO: 1867681 - DNA, 15 bp, Homo sapiens
cgcctctagtggaca

SEQ ID NO: 1867682 - DNA, 15 bp, Homo sapiens
gcctctagtggacaa

SEQ ID NO: 1867683 - DNA, 15 bp, Homo sapiens
cctctagtggacaag

SEQ ID NO: 1867684 - DNA, 15 bp, Homo sapiens
ctctagtggacaagg

SEQ ID NO: 1867685 - DNA, 15 bp, Homo sapiens
tctagtggacaaggg

SEQ ID NO: 1867686 - DNA, 15 bp, Homo sapiens
ctagtggacaagggc

SEQ ID NO: 1867687 - DNA, 15 bp, Homo sapiens
tagtggacaagggcc

SEQ ID NO: 1867688 - DNA, 15 bp, Homo sapiens
agtggacaagggccc

SEQ ID NO: 1867689 - DNA, 15 bp, Homo sapiens
gtggacaagggccct

SEQ ID NO: 1867690 - DNA, 15 bp, Homo sapiens
tggacaagggccctg

SEQ ID NO: 1867691 - DNA, 15 bp, Homo sapiens
ggacaagggccctga

SEQ ID NO: 1867692 - DNA, 15 bp, Homo sapiens
gacaagggccctgag

SEQ ID NO: 1867693 - DNA, 15 bp, Homo sapiens
acaagggccctgagc

SEQ ID NO: 1867694 - DNA, 15 bp, Homo sapiens
caagggccctgagct

SEQ ID NO: 1867695 - DNA, 15 bp, Homo sapiens
aagggccctgagctg

SEQ ID NO: 1867696 - DNA, 15 bp, Homo sapiens
agggccctgagctgt

SEQ ID NO: 1867697 - DNA, 15 bp, Homo sapiens
gggccctgagctgtt

SEQ ID NO: 1867698 - DNA, 15 bp, Homo sapiens
ggccctgagctgttt

SEQ ID NO: 1867699 - DNA, 15 bp, Homo sapiens
gccctgagctgtttc

SEQ ID NO: 1867700 - DNA, 15 bp, Homo sapiens
ccctgagctgtttcg

SEQ ID NO: 1867701 - DNA, 15 bp, Homo sapiens
cctgagctgtttcgg

SEQ ID NO: 1867702 - DNA, 15 bp, Homo sapiens
ctgagctgtttcggt

SEQ ID NO: 1867703 - DNA, 15 bp, Homo sapiens
tgagctgtttcggtc

SEQ ID NO: 1867704 - DNA, 15 bp, Homo sapiens
gagctgtttcggtcc

SEQ ID NO: 1867705 - DNA, 15 bp, Homo sapiens
agctgtttcggtcct

SEQ ID NO: 1867706 - DNA, 15 bp, Homo sapiens
gctgtttcggtcctc

SEQ ID NO: 1867707 - DNA, 15 bp, Homo sapiens
ctgtttcggtcctcc

SEQ ID NO: 1867708 - DNA, 15 bp, Homo sapiens
tgtttcggtcctccg

SEQ ID NO: 1867709 - DNA, 15 bp, Homo sapiens
gtttcggtcctccga

SEQ ID NO: 1867710 - DNA, 15 bp, Homo sapiens
tttcggtcctccgaa

SEQ ID NO: 1867711 - DNA, 15 bp, Homo sapiens
ttcggtcctccgaat

SEQ ID NO: 1867712 - DNA, 15 bp, Homo sapiens
tcggtcctccgaatt

SEQ ID NO: 1867713 - DNA, 15 bp, Homo sapiens
cggtcctccgaattt

SEQ ID NO: 1867714 - DNA, 15 bp, Homo sapiens
ggtcctccgaattta

SEQ ID NO: 1867715 - DNA, 15 bp, Homo sapiens
gtcctccgaatttat

SEQ ID NO: 1867716 - DNA, 15 bp, Homo sapiens
tcctccgaatttatt

SEQ ID NO: 1867717 - DNA, 15 bp, Homo sapiens
cctccgaatttatta

SEQ ID NO: 1867718 - DNA, 15 bp, Homo sapiens
ctccgaatttattag

SEQ ID NO: 1867719 - DNA, 15 bp, Homo sapiens
tccgaatttattagg

SEQ ID NO: 1867720 - DNA, 15 bp, Homo sapiens
ccgaatttattaggt

SEQ ID NO: 1867721 - DNA, 15 bp, Homo sapiens
cgaatttattaggta

SEQ ID NO: 1867722 - DNA, 15 bp, Homo sapiens
gaatttattaggtaa

SEQ ID NO: 1867723 - DNA, 15 bp, Homo sapiens
aatttattaggtaaa

SEQ ID NO: 1867724 - DNA, 15 bp, Homo sapiens
atttattaggtaaaa

SEQ ID NO: 1867725 - DNA, 15 bp, Homo sapiens
tttattaggtaaaag

SEQ ID NO: 1867726 - DNA, 15 bp, Homo sapiens
ttattaggtaaaaga

SEQ ID NO: 1867727 - DNA, 15 bp, Homo sapiens
tattaggtaaaagag

SEQ ID NO: 1867728 - DNA, 15 bp, Homo sapiens
attaggtaaaagaga

SEQ ID NO: 1867729 - DNA, 15 bp, Homo sapiens
ttaggtaaaagagat

SEQ ID NO: 1867730 - DNA, 15 bp, Homo sapiens
taggtaaaagagata

SEQ ID NO: 1867731 - DNA, 15 bp, Homo sapiens
aggtaaaagagataa

SEQ ID NO: 1867732 - DNA, 15 bp, Homo sapiens
ggtaaaagagataac

SEQ ID NO: 1867733 - DNA, 15 bp, Homo sapiens
gtaaaagagataacg

SEQ ID NO: 1867734 - DNA, 15 bp, Homo sapiens
taaaagagataacga

SEQ ID NO: 1867735 - DNA, 15 bp, Homo sapiens
aaaagagataacgag

SEQ ID NO: 1867736 - DNA, 15 bp, Homo sapiens
aaagagataacgaga

SEQ ID NO: 1867737 - DNA, 15 bp, Homo sapiens
aagagataacgagaa

SEQ ID NO: 1867738 - DNA, 15 bp, Homo sapiens
agagataacgagaaa

SEQ ID NO: 1867739 - DNA, 15 bp, Homo sapiens
gagataacgagaaag

SEQ ID NO: 1867740 - DNA, 15 bp, Homo sapiens
agataacgagaaagg

SEQ ID NO: 1867741 - DNA, 15 bp, Homo sapiens
gataacgagaaaggg

SEQ ID NO: 1867742 - DNA, 15 bp, Homo sapiens
ataacgagaaagggg

SEQ ID NO: 1867743 - DNA, 15 bp, Homo sapiens
taacgagaaaggggc

SEQ ID NO: 1867744 - DNA, 15 bp, Homo sapiens
aacgagaaaggggca

SEQ ID NO: 1867745 - DNA, 15 bp, Homo sapiens
acgagaaaggggcag

SEQ ID NO: 1867746 - DNA, 15 bp, Homo sapiens
cgagaaaggggcagg

SEQ ID NO: 1867747 - DNA, 15 bp, Homo sapiens
gagaaaggggcaggt

SEQ ID NO: 1867748 - DNA, 15 bp, Homo sapiens
agaaaggggcaggtg

SEQ ID NO: 1867749 - DNA, 15 bp, Homo sapiens
gaaaggggcaggtgg

SEQ ID NO: 1867750 - DNA, 15 bp, Homo sapiens
aaaggggcaggtggt

SEQ ID NO: 1867751 - DNA, 15 bp, Homo sapiens
aaggggcaggtggtt

SEQ ID NO: 1867752 - DNA, 15 bp, Homo sapiens
aggggcaggtggttg

SEQ ID NO: 1867753 - DNA, 15 bp, Homo sapiens
ggggcaggtggttgt

SEQ ID NO: 1867754 - DNA, 15 bp, Homo sapiens
gggcaggtggttgtc

SEQ ID NO: 1867755 - DNA, 15 bp, Homo sapiens
ggcaggtggttgtcg

SEQ ID NO: 1867756 - DNA, 15 bp, Homo sapiens
gcaggtggttgtcgg

SEQ ID NO: 1867757 - DNA, 15 bp, Homo sapiens
caggtggttgtcggc

SEQ ID NO: 1867758 - DNA, 15 bp, Homo sapiens
aggtggttgtcggcc

SEQ ID NO: 1867759 - DNA, 15 bp, Homo sapiens
ggtggttgtcggcca

SEQ ID NO: 1867760 - DNA, 15 bp, Homo sapiens
gtggttgtcggccag

SEQ ID NO: 1867761 - DNA, 15 bp, Homo sapiens
tggttgtcggccagc

SEQ ID NO: 1867762 - DNA, 15 bp, Homo sapiens
ggttgtcggccagca

SEQ ID NO: 1867763 - DNA, 15 bp, Homo sapiens
gttgtcggccagcag

SEQ ID NO: 1867764 - DNA, 15 bp, Homo sapiens
ttgtcggccagcagt

SEQ ID NO: 1867765 - DNA, 15 bp, Homo sapiens
tgtcggccagcagtt

SEQ ID NO: 1867766 - DNA, 15 bp, Homo sapiens
gtcggccagcagttt

SEQ ID NO: 1867767 - DNA, 15 bp, Homo sapiens
tcggccagcagtttg

SEQ ID NO: 1867768 - DNA, 15 bp, Homo sapiens
cggccagcagtttga

SEQ ID NO: 1867769 - DNA, 15 bp, Homo sapiens
ggccagcagtttgaa

SEQ ID NO: 1867770 - DNA, 15 bp, Homo sapiens
gccagcagtttgaat

SEQ ID NO: 1867771 - DNA, 15 bp, Homo sapiens
ccagcagtttgaatc

SEQ ID NO: 1867772 - DNA, 15 bp, Homo sapiens
cagcagtttgaatca

SEQ ID NO: 1867773 - DNA, 15 bp, Homo sapiens
agcagtttgaatcac

SEQ ID NO: 1867774 - DNA, 15 bp, Homo sapiens
gcagtttgaatcaca

SEQ ID NO: 1867775 - DNA, 15 bp, Homo sapiens
cagtttgaatcacag

SEQ ID NO: 1867776 - DNA, 15 bp, Homo sapiens
agtttgaatcacagc

SEQ ID NO: 1867777 - DNA, 15 bp, Homo sapiens
gtttgaatcacagca

SEQ ID NO: 1867778 - DNA, 15 bp, Homo sapiens
tttgaatcacagcag

SEQ ID NO: 1867779 - DNA, 15 bp, Homo sapiens
ttgaatcacagcagg

SEQ ID NO: 1867780 - DNA, 15 bp, Homo sapiens
tgaatcacagcaggc

SEQ ID NO: 1867781 - DNA, 15 bp, Homo sapiens
gaatcacagcaggct

SEQ ID NO: 1867782 - DNA, 15 bp, Homo sapiens
aatcacagcaggctt

SEQ ID NO: 1867783 - DNA, 15 bp, Homo sapiens
atcacagcaggcttg

SEQ ID NO: 1867784 - DNA, 15 bp, Homo sapiens
tcacagcaggcttgc

SEQ ID NO: 1867785 - DNA, 15 bp, Homo sapiens
cacagcaggcttgca

SEQ ID NO: 1867786 - DNA, 15 bp, Homo sapiens
acagcaggcttgcaa

SEQ ID NO: 1867787 - DNA, 15 bp, Homo sapiens
cagcaggcttgcaag

SEQ ID NO: 1867788 - DNA, 15 bp, Homo sapiens
agcaggcttgcaaga

SEQ ID NO: 1867789 - DNA, 15 bp, Homo sapiens
gcaggcttgcaagac

SEQ ID NO: 1867790 - DNA, 15 bp, Homo sapiens
caggcttgcaagact

SEQ ID NO: 1867791 - DNA, 15 bp, Homo sapiens
aggcttgcaagactg

SEQ ID NO: 1867792 - DNA, 15 bp, Homo sapiens
ggcttgcaagactgc

SEQ ID NO: 1867793 - DNA, 15 bp, Homo sapiens
gcttgcaagactgca

SEQ ID NO: 1867794 - DNA, 15 bp, Homo sapiens
cttgcaagactgcat

SEQ ID NO: 1867795 - DNA, 15 bp, Homo sapiens
ttgcaagactgcatt

SEQ ID NO: 1867796 - DNA, 15 bp, Homo sapiens
tgcaagactgcattc

SEQ ID NO: 1867797 - DNA, 15 bp, Homo sapiens
gcaagactgcattct

SEQ ID NO: 1867798 - DNA, 15 bp, Homo sapiens
caagactgcattctt

SEQ ID NO: 1867799 - DNA, 15 bp, Homo sapiens
aagactgcattcttc

SEQ ID NO: 1867800 - DNA, 15 bp, Homo sapiens
agactgcattcttca

SEQ ID NO: 1867801 - DNA, 15 bp, Homo sapiens
gactgcattcttcaa

SEQ ID NO: 1867802 - DNA, 15 bp, Homo sapiens
actgcattcttcaaa

SEQ ID NO: 1867803 - DNA, 15 bp, Homo sapiens
ctgcattcttcaaac

SEQ ID NO: 1867804 - DNA, 15 bp, Homo sapiens
tgcattcttcaaaca

SEQ ID NO: 1867805 - DNA, 15 bp, Homo sapiens
gcattcttcaaacaa

SEQ ID NO: 1867806 - DNA, 15 bp, Homo sapiens
cattcttcaaacaat

SEQ ID NO: 1867807 - DNA, 15 bp, Homo sapiens
attcttcaaacaata

SEQ ID NO: 1867808 - DNA, 15 bp, Homo sapiens
ttcttcaaacaatag

SEQ ID NO: 1867809 - DNA, 15 bp, Homo sapiens
tcttcaaacaatagg

SEQ ID NO: 1867810 - DNA, 15 bp, Homo sapiens
cttcaaacaataggc

SEQ ID NO: 1867811 - DNA, 15 bp, Homo sapiens
ttcaaacaataggca

SEQ ID NO: 1867812 - DNA, 15 bp, Homo sapiens
tcaaacaataggcac

SEQ ID NO: 1867813 - DNA, 15 bp, Homo sapiens
caaacaataggcact

SEQ ID NO: 1867814 - DNA, 15 bp, Homo sapiens
aaacaataggcacta

SEQ ID NO: 1867815 - DNA, 15 bp, Homo sapiens
aacaataggcactag

SEQ ID NO: 1867816 - DNA, 15 bp, Homo sapiens
acaataggcactaga

SEQ ID NO: 1867817 - DNA, 15 bp, Homo sapiens
caataggcactagat

SEQ ID NO: 1867818 - DNA, 15 bp, Homo sapiens
aataggcactagatt

SEQ ID NO: 1867819 - DNA, 15 bp, Homo sapiens
ataggcactagattt

SEQ ID NO: 1867820 - DNA, 15 bp, Homo sapiens
taggcactagatttc

SEQ ID NO: 1867821 - DNA, 15 bp, Homo sapiens
aggcactagatttcc

SEQ ID NO: 1867822 - DNA, 15 bp, Homo sapiens
ggcactagatttccc

SEQ ID NO: 1867823 - DNA, 15 bp, Homo sapiens
gcactagatttccca

SEQ ID NO: 1867824 - DNA, 15 bp, Homo sapiens
cactagatttcccag

SEQ ID NO: 1867825 - DNA, 15 bp, Homo sapiens
actagatttcccagt

SEQ ID NO: 1867826 - DNA, 15 bp, Homo sapiens
ctagatttcccagta

SEQ ID NO: 1867827 - DNA, 15 bp, Homo sapiens
tagatttcccagtag

SEQ ID NO: 1867828 - DNA, 15 bp, Homo sapiens
agatttcccagtaga

SEQ ID NO: 1867829 - DNA, 15 bp, Homo sapiens
gatttcccagtagat

SEQ ID NO: 1867830 - DNA, 15 bp, Homo sapiens
atttcccagtagata

SEQ ID NO: 1867831 - DNA, 15 bp, Homo sapiens
tttcccagtagataa

SEQ ID NO: 1867832 - DNA, 15 bp, Homo sapiens
ttcccagtagataac

SEQ ID NO: 1867833 - DNA, 15 bp, Homo sapiens
tcccagtagataact

SEQ ID NO: 1867834 - DNA, 15 bp, Homo sapiens
cccagtagataactt

SEQ ID NO: 1867835 - DNA, 15 bp, Homo sapiens
ccagtagataacttt

SEQ ID NO: 1867836 - DNA, 15 bp, Homo sapiens
cagtagataacttta

SEQ ID NO: 1867837 - DNA, 15 bp, Homo sapiens
agtagataactttaa

SEQ ID NO: 1867838 - DNA, 15 bp, Homo sapiens
gtagataactttaag

SEQ ID NO: 1867839 - DNA, 15 bp, Homo sapiens
tagataactttaagg

SEQ ID NO: 1867840 - DNA, 15 bp, Homo sapiens
agataactttaagga

SEQ ID NO: 1867841 - DNA, 15 bp, Homo sapiens
gataactttaaggag

SEQ ID NO: 1867842 - DNA, 15 bp, Homo sapiens
ataactttaaggagc

SEQ ID NO: 1867843 - DNA, 15 bp, Homo sapiens
taactttaaggagcc

SEQ ID NO: 1867844 - DNA, 15 bp, Homo sapiens
aactttaaggagccc

SEQ ID NO: 1867845 - DNA, 15 bp, Homo sapiens
actttaaggagccca

SEQ ID NO: 1867846 - DNA, 15 bp, Homo sapiens
ctttaaggagcccag

SEQ ID NO: 1867847 - DNA, 15 bp, Homo sapiens
tttaaggagcccagc

SEQ ID NO: 1867848 - DNA, 15 bp, Homo sapiens
ttaaggagcccagca

SEQ ID NO: 1867849 - DNA, 15 bp, Homo sapiens
taaggagcccagcaa

SEQ ID NO: 1867850 - DNA, 15 bp, Homo sapiens
aaggagcccagcaaa

SEQ ID NO: 1867851 - DNA, 15 bp, Homo sapiens
aggagcccagcaaac

SEQ ID NO: 1867852 - DNA, 15 bp, Homo sapiens
ggagcccagcaaacc

SEQ ID NO: 1867853 - DNA, 15 bp, Homo sapiens
gagcccagcaaacct

SEQ ID NO: 1867854 - DNA, 15 bp, Homo sapiens
agcccagcaaacctc

SEQ ID NO: 1867855 - DNA, 15 bp, Homo sapiens
gcccagcaaacctcc

SEQ ID NO: 1867856 - DNA, 15 bp, Homo sapiens
cccagcaaacctcct

SEQ ID NO: 1867857 - DNA, 15 bp, Homo sapiens
ccagcaaacctcctg

SEQ ID NO: 1867858 - DNA, 15 bp, Homo sapiens
cagcaaacctcctgg

SEQ ID NO: 1867859 - DNA, 15 bp, Homo sapiens
agcaaacctcctggc

SEQ ID NO: 1867860 - DNA, 15 bp, Homo sapiens
gcaaacctcctggcc

SEQ ID NO: 1867861 - DNA, 15 bp, Homo sapiens
caaacctcctggccc

SEQ ID NO: 1867862 - DNA, 15 bp, Homo sapiens
aaacctcctggccct

SEQ ID NO: 1867863 - DNA, 15 bp, Homo sapiens
aacctcctggccctt

SEQ ID NO: 1867864 - DNA, 15 bp, Homo sapiens
acctcctggccctta

SEQ ID NO: 1867865 - DNA, 15 bp, Homo sapiens
cctcctggcccttag

SEQ ID NO: 1867866 - DNA, 15 bp, Homo sapiens
ctcctggcccttagc

SEQ ID NO: 1867867 - DNA, 15 bp, Homo sapiens
tcctggcccttagca

SEQ ID NO: 1867868 - DNA, 15 bp, Homo sapiens
cctggcccttagcaa

SEQ ID NO: 1867869 - DNA, 15 bp, Homo sapiens
ctggcccttagcaaa

SEQ ID NO: 1867870 - DNA, 15 bp, Homo sapiens
tggcccttagcaaac

SEQ ID NO: 1867871 - DNA, 15 bp, Homo sapiens
ggcccttagcaaacc

SEQ ID NO: 1867872 - DNA, 15 bp, Homo sapiens
gcccttagcaaacct

SEQ ID NO: 1867873 - DNA, 15 bp, Homo sapiens
cccttagcaaacctc

SEQ ID NO: 1867874 - DNA, 15 bp, Homo sapiens
ccttagcaaacctcc

SEQ ID NO: 1867875 - DNA, 15 bp, Homo sapiens
cttagcaaacctcct

SEQ ID NO: 1867876 - DNA, 15 bp, Homo sapiens
ttagcaaacctcctg

SEQ ID NO: 1867877 - DNA, 15 bp, Homo sapiens
tagcaaacctcctgg

SEQ ID NO: 1867878 - DNA, 15 bp, Homo sapiens
agcaaacctcctgga

SEQ ID NO: 1867879 - DNA, 15 bp, Homo sapiens
gcaaacctcctggag

SEQ ID NO: 1867880 - DNA, 15 bp, Homo sapiens
caaacctcctggagg

SEQ ID NO: 1867881 - DNA, 15 bp, Homo sapiens
aaacctcctggaggc

SEQ ID NO: 1867882 - DNA, 15 bp, Homo sapiens
aacctcctggaggca

SEQ ID NO: 1867883 - DNA, 15 bp, Homo sapiens
acctcctggaggcat

SEQ ID NO: 1867884 - DNA, 15 bp, Homo sapiens
cctcctggaggcatg

SEQ ID NO: 1867885 - DNA, 15 bp, Homo sapiens
ctcctggaggcatgc

SEQ ID NO: 1867886 - DNA, 15 bp, Homo sapiens
tcctggaggcatgcg

SEQ ID NO: 1867887 - DNA, 15 bp, Homo sapiens
cctggaggcatgcgc

SEQ ID NO: 1867888 - DNA, 15 bp, Homo sapiens
ctggaggcatgcgca

SEQ ID NO: 1867889 - DNA, 15 bp, Homo sapiens
tggaggcatgcgcag

SEQ ID NO: 1867890 - DNA, 15 bp, Homo sapiens
ggaggcatgcgcagt

SEQ ID NO: 1867891 - DNA, 15 bp, Homo sapiens
gaggcatgcgcagtc

SEQ ID NO: 1867892 - DNA, 15 bp, Homo sapiens
aggcatgcgcagtcc

SEQ ID NO: 1867893 - DNA, 15 bp, Homo sapiens
ggcatgcgcagtcct

SEQ ID NO: 1867894 - DNA, 15 bp, Homo sapiens
gcatgcgcagtcctg

SEQ ID NO: 1867895 - DNA, 15 bp, Homo sapiens
catgcgcagtcctga

SEQ ID NO: 1867896 - DNA, 15 bp, Homo sapiens
atgcgcagtcctgag

SEQ ID NO: 1867897 - DNA, 15 bp, Homo sapiens
tgcgcagtcctgagt

SEQ ID NO: 1867898 - DNA, 15 bp, Homo sapiens
gcgcagtcctgagtt

SEQ ID NO: 1867899 - DNA, 15 bp, Homo sapiens
cgcagtcctgagttt

SEQ ID NO: 1867900 - DNA, 15 bp, Homo sapiens
gcagtcctgagtttg

SEQ ID NO: 1867901 - DNA, 15 bp, Homo sapiens
cagtcctgagtttgc

SEQ ID NO: 1867902 - DNA, 15 bp, Homo sapiens
agtcctgagtttgct

SEQ ID NO: 1867903 - DNA, 15 bp, Homo sapiens
gtcctgagtttgctc

SEQ ID NO: 1867904 - DNA, 15 bp, Homo sapiens
tcctgagtttgctca

SEQ ID NO: 1867905 - DNA, 15 bp, Homo sapiens
cctgagtttgctcac

SEQ ID NO: 1867906 - DNA, 15 bp, Homo sapiens
ctgagtttgctcaca

SEQ ID NO: 1867907 - DNA, 15 bp, Homo sapiens
tgagtttgctcacat

SEQ ID NO: 1867908 - DNA, 15 bp, Homo sapiens
gagtttgctcacatt

SEQ ID NO: 1867909 - DNA, 15 bp, Homo sapiens
agtttgctcacattc

SEQ ID NO: 1867910 - DNA, 15 bp, Homo sapiens
gtttgctcacattct

SEQ ID NO: 1867911 - DNA, 15 bp, Homo sapiens
tttgctcacattctg

SEQ ID NO: 1867912 - DNA, 15 bp, Homo sapiens
ttgctcacattctgc

SEQ ID NO: 1867913 - DNA, 15 bp, Homo sapiens
tgctcacattctgca

SEQ ID NO: 1867914 - DNA, 15 bp, Homo sapiens
gctcacattctgcat

SEQ ID NO: 1867915 - DNA, 15 bp, Homo sapiens
ctcacattctgcatt

SEQ ID NO: 1867916 - DNA, 15 bp, Homo sapiens
tcacattctgcattc

SEQ ID NO: 1867917 - DNA, 15 bp, Homo sapiens
cacattctgcattca

SEQ ID NO: 1867918 - DNA, 15 bp, Homo sapiens
acattctgcattcac

SEQ ID NO: 1867919 - DNA, 15 bp, Homo sapiens
cattctgcattcacg

SEQ ID NO: 1867920 - DNA, 15 bp, Homo sapiens
attctgcattcacga

SEQ ID NO: 1867921 - DNA, 15 bp, Homo sapiens
ttctgcattcacgat

SEQ ID NO: 1867922 - DNA, 15 bp, Homo sapiens
tctgcattcacgata

SEQ ID NO: 1867923 - DNA, 15 bp, Homo sapiens
ctgcattcacgataa

SEQ ID NO: 1867924 - DNA, 15 bp, Homo sapiens
tgcattcacgataaa

SEQ ID NO: 1867925 - DNA, 15 bp, Homo sapiens
gcattcacgataaac

SEQ ID NO: 1867926 - DNA, 15 bp, Homo sapiens
cattcacgataaaca

SEQ ID NO: 1867927 - DNA, 15 bp, Homo sapiens
attcacgataaacag

SEQ ID NO: 1867928 - DNA, 15 bp, Homo sapiens
ttcacgataaacagt

SEQ ID NO: 1867929 - DNA, 15 bp, Homo sapiens
tcacgataaacagtt

SEQ ID NO: 1867930 - DNA, 15 bp, Homo sapiens
cacgataaacagttt

SEQ ID NO: 1867931 - DNA, 15 bp, Homo sapiens
acgataaacagtttg

SEQ ID NO: 1867932 - DNA, 15 bp, Homo sapiens
cgataaacagtttgc

SEQ ID NO: 1867933 - DNA, 15 bp, Homo sapiens
gataaacagtttgct

SEQ ID NO: 1867934 - DNA, 15 bp, Homo sapiens
ataaacagtttgctg

SEQ ID NO: 1867935 - DNA, 15 bp, Homo sapiens
taaacagtttgctgt

SEQ ID NO: 1867936 - DNA, 15 bp, Homo sapiens
aaacagtttgctgtt

SEQ ID NO: 1867937 - DNA, 15 bp, Homo sapiens
aacagtttgctgttt

SEQ ID NO: 1867938 - DNA, 15 bp, Homo sapiens
acagtttgctgtttg

SEQ ID NO: 1867939 - DNA, 15 bp, Homo sapiens
cagtttgctgtttga

SEQ ID NO: 1867940 - DNA, 15 bp, Homo sapiens
agtttgctgtttgat

SEQ ID NO: 1867941 - DNA, 15 bp, Homo sapiens
gtttgctgtttgatc

SEQ ID NO: 1867942 - DNA, 15 bp, Homo sapiens
tttgctgtttgatca

SEQ ID NO: 1867943 - DNA, 15 bp, Homo sapiens
ttgctgtttgatcat

SEQ ID NO: 1867944 - DNA, 15 bp, Homo sapiens
tgctgtttgatcata

SEQ ID NO: 1867945 - DNA, 15 bp, Homo sapiens
gctgtttgatcatat

SEQ ID NO: 1867946 - DNA, 15 bp, Homo sapiens
ctgtttgatcatata

SEQ ID NO: 1867947 - DNA, 15 bp, Homo sapiens
tgtttgatcatatag

SEQ ID NO: 1867948 - DNA, 15 bp, Homo sapiens
gtttgatcatatagc

SEQ ID NO: 1867949 - DNA, 15 bp, Homo sapiens
tttgatcatatagcc

SEQ ID NO: 1867950 - DNA, 15 bp, Homo sapiens
ttgatcatatagcct

SEQ ID NO: 1867951 - DNA, 15 bp, Homo sapiens
tgatcatatagcctc

SEQ ID NO: 1867952 - DNA, 15 bp, Homo sapiens
gatcatatagcctcc

SEQ ID NO: 1867953 - DNA, 15 bp, Homo sapiens
atcatatagcctcca

SEQ ID NO: 1867954 - DNA, 15 bp, Homo sapiens
tcatatagcctccag

SEQ ID NO: 1867955 - DNA, 15 bp, Homo sapiens
catatagcctccagt

SEQ ID NO: 1867956 - DNA, 15 bp, Homo sapiens
atatagcctccagtg

SEQ ID NO: 1867957 - DNA, 15 bp, Homo sapiens
tatagcctccagtgg

SEQ ID NO: 1867958 - DNA, 15 bp, Homo sapiens
atagcctccagtgga

SEQ ID NO: 1867959 - DNA, 15 bp, Homo sapiens
tagcctccagtggaa

SEQ ID NO: 1867960 - DNA, 15 bp, Homo sapiens
agcctccagtggaat

SEQ ID NO: 1867961 - DNA, 15 bp, Homo sapiens
gcctccagtggaatg

SEQ ID NO: 1867962 - DNA, 15 bp, Homo sapiens
cctccagtggaatgc

SEQ ID NO: 1867963 - DNA, 15 bp, Homo sapiens
ctccagtggaatgct

SEQ ID NO: 1867964 - DNA, 15 bp, Homo sapiens
tccagtggaatgctg

SEQ ID NO: 1867965 - DNA, 15 bp, Homo sapiens
ccagtggaatgctga

SEQ ID NO: 1867966 - DNA, 15 bp, Homo sapiens
cagtggaatgctgag

SEQ ID NO: 1867967 - DNA, 15 bp, Homo sapiens
agtggaatgctgagt

SEQ ID NO: 1867968 - DNA, 15 bp, Homo sapiens
gtggaatgctgagtt

SEQ ID NO: 1867969 - DNA, 15 bp, Homo sapiens
tggaatgctgagttg

SEQ ID NO: 1867970 - DNA, 15 bp, Homo sapiens
ggaatgctgagttgg

SEQ ID NO: 1867971 - DNA, 15 bp, Homo sapiens
gaatgctgagttggt

SEQ ID NO: 1867972 - DNA, 15 bp, Homo sapiens
aatgctgagttggtc

SEQ ID NO: 1867973 - DNA, 15 bp, Homo sapiens
atgctgagttggtca

SEQ ID NO: 1867974 - DNA, 15 bp, Homo sapiens
tgctgagttggtcat

SEQ ID NO: 1867975 - DNA, 15 bp, Homo sapiens
gctgagttggtcatg

SEQ ID NO: 1867976 - DNA, 15 bp, Homo sapiens
ctgagttggtcatgt

SEQ ID NO: 1867977 - DNA, 15 bp, Homo sapiens
tgagttggtcatgtc

SEQ ID NO: 1867978 - DNA, 15 bp, Homo sapiens
gagttggtcatgtcc

SEQ ID NO: 1867979 - DNA, 15 bp, Homo sapiens
agttggtcatgtccc

SEQ ID NO: 1867980 - DNA, 15 bp, Homo sapiens
gttggtcatgtccca

SEQ ID NO: 1867981 - DNA, 15 bp, Homo sapiens
ttggtcatgtcccat

SEQ ID NO: 1867982 - DNA, 15 bp, Homo sapiens
tggtcatgtcccatg

SEQ ID NO: 1867983 - DNA, 15 bp, Homo sapiens
ggtcatgtcccatgg

SEQ ID NO: 1867984 - DNA, 15 bp, Homo sapiens
gtcatgtcccatggg

SEQ ID NO: 1867985 - DNA, 15 bp, Homo sapiens
tcatgtcccatgggc

SEQ ID NO: 1867986 - DNA, 15 bp, Homo sapiens
catgtcccatgggcc

SEQ ID NO: 1867987 - DNA, 15 bp, Homo sapiens
atgtcccatgggcct

SEQ ID NO: 1867988 - DNA, 15 bp, Homo sapiens
tgtcccatgggcctt

SEQ ID NO: 1867989 - DNA, 15 bp, Homo sapiens
gtcccatgggccttt

SEQ ID NO: 1867990 - DNA, 15 bp, Homo sapiens
tcccatgggcctttg

SEQ ID NO: 1867991 - DNA, 15 bp, Homo sapiens
cccatgggcctttgg

SEQ ID NO: 1867992 - DNA, 15 bp, Homo sapiens
ccatgggcctttggc

SEQ ID NO: 1867993 - DNA, 15 bp, Homo sapiens
catgggcctttggct

SEQ ID NO: 1867994 - DNA, 15 bp, Homo sapiens
atgggcctttggctc

SEQ ID NO: 1867995 - DNA, 15 bp, Homo sapiens
tgggcctttggctcc

SEQ ID NO: 1867996 - DNA, 15 bp, Homo sapiens
gggcctttggctccc

SEQ ID NO: 1867997 - DNA, 15 bp, Homo sapiens
ggcctttggctccct

SEQ ID NO: 1867998 - DNA, 15 bp, Homo sapiens
gcctttggctcccta

SEQ ID NO: 1867999 - DNA, 15 bp, Homo sapiens
cctttggctccctac

SEQ ID NO: 1868000 - DNA, 15 bp, Homo sapiens
ctttggctccctaca

SEQ ID NO: 1868001 - DNA, 15 bp, Homo sapiens
tttggctccctacag

SEQ ID NO: 1868002 - DNA, 15 bp, Homo sapiens
ttggctccctacagt

SEQ ID NO: 1868003 - DNA, 15 bp, Homo sapiens
tggctccctacagtt

SEQ ID NO: 1868004 - DNA, 15 bp, Homo sapiens
ggctccctacagttt

SEQ ID NO: 1868005 - DNA, 15 bp, Homo sapiens
gctccctacagttta

SEQ ID NO: 1868006 - DNA, 15 bp, Homo sapiens
ctccctacagtttat

SEQ ID NO: 1868007 - DNA, 15 bp, Homo sapiens
tccctacagtttatt

SEQ ID NO: 1868008 - DNA, 15 bp, Homo sapiens
ccctacagtttattg

SEQ ID NO: 1868009 - DNA, 15 bp, Homo sapiens
cctacagtttattgc

SEQ ID NO: 1868010 - DNA, 15 bp, Homo sapiens
ctacagtttattgct

SEQ ID NO: 1868011 - DNA, 15 bp, Homo sapiens
tacagtttattgcta

SEQ ID NO: 1868012 - DNA, 15 bp, Homo sapiens
acagtttattgctat

SEQ ID NO: 1868013 - DNA, 15 bp, Homo sapiens
cagtttattgctata

SEQ ID NO: 1868014 - DNA, 15 bp, Homo sapiens
agtttattgctatat

SEQ ID NO: 1868015 - DNA, 15 bp, Homo sapiens
gtttattgctatatt

SEQ ID NO: 1868016 - DNA, 15 bp, Homo sapiens
tttattgctatattc

SEQ ID NO: 1868017 - DNA, 15 bp, Homo sapiens
ttattgctatattca

SEQ ID NO: 1868018 - DNA, 15 bp, Homo sapiens
tattgctatattcat

SEQ ID NO: 1868019 - DNA, 15 bp, Homo sapiens
attgctatattcata

SEQ ID NO: 1868020 - DNA, 15 bp, Homo sapiens
ttgctatattcataa

SEQ ID NO: 1868021 - DNA, 15 bp, Homo sapiens
tgctatattcataat

SEQ ID NO: 1868022 - DNA, 15 bp, Homo sapiens
gctatattcataatt

SEQ ID NO: 1868023 - DNA, 15 bp, Homo sapiens
ctatattcataatta

SEQ ID NO: 1868024 - DNA, 15 bp, Homo sapiens
tatattcataattaa

SEQ ID NO: 1868025 - DNA, 15 bp, Homo sapiens
atattcataattaaa

SEQ ID NO: 1868026 - DNA, 15 bp, Homo sapiens
tattcataattaaag

SEQ ID NO: 1868027 - DNA, 15 bp, Homo sapiens
attcataattaaagg

SEQ ID NO: 1868028 - DNA, 15 bp, Homo sapiens
ttcataattaaagga

SEQ ID NO: 1868029 - DNA, 15 bp, Homo sapiens
tcataattaaaggaa

SEQ ID NO: 1868030 - DNA, 15 bp, Homo sapiens
cataattaaaggaaa

SEQ ID NO: 1868031 - DNA, 15 bp, Homo sapiens
ataattaaaggaaat

SEQ ID NO: 1868032 - DNA, 15 bp, Homo sapiens
taattaaaggaaatg

SEQ ID NO: 1868033 - DNA, 15 bp, Homo sapiens
aattaaaggaaatgc

SEQ ID NO: 1868034 - DNA, 15 bp, Homo sapiens
attaaaggaaatgcc

SEQ ID NO: 1868035 - DNA, 15 bp, Homo sapiens
ttaaaggaaatgcca

SEQ ID NO: 1868036 - DNA, 15 bp, Homo sapiens
taaaggaaatgccaa

SEQ ID NO: 1868037 - DNA, 15 bp, Homo sapiens
aaaggaaatgccaaa

SEQ ID NO: 1868038 - DNA, 15 bp, Homo sapiens
aaggaaatgccaaat

SEQ ID NO: 1868039 - DNA, 15 bp, Homo sapiens
aggaaatgccaaatt

SEQ ID NO: 1868040 - DNA, 15 bp, Homo sapiens
ggaaatgccaaattt

SEQ ID NO: 1868041 - DNA, 15 bp, Homo sapiens
gaaatgccaaatttg

SEQ ID NO: 1868042 - DNA, 15 bp, Homo sapiens
aaatgccaaatttga

SEQ ID NO: 1868043 - DNA, 15 bp, Homo sapiens
aatgccaaatttgaa

SEQ ID NO: 1868044 - DNA, 15 bp, Homo sapiens
atgccaaatttgaat

SEQ ID NO: 1868045 - DNA, 15 bp, Homo sapiens
tgccaaatttgaatt

SEQ ID NO: 1868046 - DNA, 15 bp, Homo sapiens
gccaaatttgaatta

SEQ ID NO: 1868047 - DNA, 15 bp, Homo sapiens
ccaaatttgaattag

SEQ ID NO: 1868048 - DNA, 15 bp, Homo sapiens
caaatttgaattaga

SEQ ID NO: 1868049 - DNA, 15 bp, Homo sapiens
aaatttgaattagag

SEQ ID NO: 1868050 - DNA, 15 bp, Homo sapiens
aatttgaattagagg

SEQ ID NO: 1868051 - DNA, 15 bp, Homo sapiens
atttgaattagaggt

SEQ ID NO: 1868052 - DNA, 15 bp, Homo sapiens
tttgaattagaggtt

SEQ ID NO: 1868053 - DNA, 15 bp, Homo sapiens
ttgaattagaggtta

SEQ ID NO: 1868054 - DNA, 15 bp, Homo sapiens
tgaattagaggttaa

SEQ ID NO: 1868055 - DNA, 15 bp, Homo sapiens
gaattagaggttaat

SEQ ID NO: 1868056 - DNA, 15 bp, Homo sapiens
aattagaggttaata

SEQ ID NO: 1868057 - DNA, 15 bp, Homo sapiens
attagaggttaataa

SEQ ID NO: 1868058 - DNA, 15 bp, Homo sapiens
ttagaggttaataaa

SEQ ID NO: 1868059 - DNA, 15 bp, Homo sapiens
tagaggttaataaaa

SEQ ID NO: 1868060 - DNA, 15 bp, Homo sapiens
agaggttaataaaaa

SEQ ID NO: 1868061 - DNA, 15 bp, Homo sapiens
gaggttaataaaaat

SEQ ID NO: 1868062 - DNA, 15 bp, Homo sapiens
aggttaataaaaata

SEQ ID NO: 1868063 - DNA, 15 bp, Homo sapiens
ggttaataaaaataa

SEQ ID NO: 1868064 - DNA, 15 bp, Homo sapiens
gttaataaaaataaa

SEQ ID NO: 1868065 - DNA, 15 bp, Homo sapiens
ttaataaaaataaag

SEQ ID NO: 1868066 - DNA, 15 bp, Homo sapiens
taataaaaataaaga

SEQ ID NO: 1868067 - DNA, 15 bp, Homo sapiens
aataaaaataaagat

SEQ ID NO: 1868068 - DNA, 15 bp, Homo sapiens
ataaaaataaagatg

SEQ ID NO: 1868069 - DNA, 15 bp, Homo sapiens
taaaaataaagatgt

SEQ ID NO: 1868070 - DNA, 15 bp, Homo sapiens
aaaaataaagatgta

SEQ ID NO: 1868071 - DNA, 15 bp, Homo sapiens
aaaataaagatgtaa

SEQ ID NO: 1868072 - DNA, 15 bp, Homo sapiens
aaataaagatgtaat

SEQ ID NO: 1868073 - DNA, 15 bp, Homo sapiens
aataaagatgtaatt

SEQ ID NO: 1868074 - DNA, 15 bp, Homo sapiens
ataaagatgtaattt

SEQ ID NO: 1868075 - DNA, 15 bp, Homo sapiens
taaagatgtaatttt

SEQ ID NO: 1868076 - DNA, 15 bp, Homo sapiens
aaagatgtaattttt

SEQ ID NO: 1868077 - DNA, 15 bp, Homo sapiens
aagatgtaatttttt

SEQ ID NO: 1868078 - DNA, 15 bp, Homo sapiens
agatgtaattttttt

SEQ ID NO: 1868079 - DNA, 15 bp, Homo sapiens
gatgtaatttttttg

SEQ ID NO: 1868080 - DNA, 15 bp, Homo sapiens
atgtaatttttttgg

SEQ ID NO: 1868081 - DNA, 15 bp, Homo sapiens
tgtaatttttttggt

SEQ ID NO: 1868082 - DNA, 15 bp, Homo sapiens
gtaatttttttggtc

SEQ ID NO: 1868083 - DNA, 15 bp, Homo sapiens
taatttttttggtcc

SEQ ID NO: 1868084 - DNA, 15 bp, Homo sapiens
aatttttttggtcca

SEQ ID NO: 1868085 - DNA, 15 bp, Homo sapiens
atttttttggtccaa

SEQ ID NO: 1868086 - DNA, 15 bp, Homo sapiens
tttttttggtccaaa

SEQ ID NO: 1868087 - DNA, 15 bp, Homo sapiens
ttttttggtccaaat

SEQ ID NO: 1868088 - DNA, 15 bp, Homo sapiens
tttttggtccaaatc

SEQ ID NO: 1868089 - DNA, 15 bp, Homo sapiens
ttttggtccaaatca

SEQ ID NO: 1868090 - DNA, 15 bp, Homo sapiens
tttggtccaaatcat

SEQ ID NO: 1868091 - DNA, 15 bp, Homo sapiens
ttggtccaaatcatg

SEQ ID NO: 1868092 - DNA, 15 bp, Homo sapiens
tggtccaaatcatgg

SEQ ID NO: 1868093 - DNA, 15 bp, Homo sapiens
ggtccaaatcatgga

SEQ ID NO: 1868094 - DNA, 15 bp, Homo sapiens
gtccaaatcatggac

SEQ ID NO: 1868095 - DNA, 15 bp, Homo sapiens
tccaaatcatggact

SEQ ID NO: 1868096 - DNA, 15 bp, Homo sapiens
ccaaatcatggactc

SEQ ID NO: 1868097 - DNA, 15 bp, Homo sapiens
caaatcatggactcc

SEQ ID NO: 1868098 - DNA, 15 bp, Homo sapiens
aaatcatggactccc

SEQ ID NO: 1868099 - DNA, 15 bp, Homo sapiens
aatcatggactccct

SEQ ID NO: 1868100 - DNA, 15 bp, Homo sapiens
atcatggactccctg

SEQ ID NO: 1868101 - DNA, 15 bp, Homo sapiens
tcatggactccctga

SEQ ID NO: 1868102 - DNA, 15 bp, Homo sapiens
catggactccctgag

SEQ ID NO: 1868103 - DNA, 15 bp, Homo sapiens
atggactccctgagt

SEQ ID NO: 1868104 - DNA, 15 bp, Homo sapiens
tggactccctgagta

SEQ ID NO: 1868105 - DNA, 15 bp, Homo sapiens
ggactccctgagtac

SEQ ID NO: 1868106 - DNA, 15 bp, Homo sapiens
gactccctgagtact

SEQ ID NO: 1868107 - DNA, 15 bp, Homo sapiens
actccctgagtactg

SEQ ID NO: 1868108 - DNA, 15 bp, Homo sapiens
ctccctgagtactgc

SEQ ID NO: 1868109 - DNA, 15 bp, Homo sapiens
tccctgagtactgca

SEQ ID NO: 1868110 - DNA, 15 bp, Homo sapiens
ccctgagtactgcac

SEQ ID NO: 1868111 - DNA, 15 bp, Homo sapiens
cctgagtactgcaca

SEQ ID NO: 1868112 - DNA, 15 bp, Homo sapiens
ctgagtactgcacaa

SEQ ID NO: 1868113 - DNA, 15 bp, Homo sapiens
tgagtactgcacaag

SEQ ID NO: 1868114 - DNA, 15 bp, Homo sapiens
gagtactgcacaagg

SEQ ID NO: 1868115 - DNA, 15 bp, Homo sapiens
agtactgcacaagga

SEQ ID NO: 1868116 - DNA, 15 bp, Homo sapiens
gtactgcacaaggac

SEQ ID NO: 1868117 - DNA, 15 bp, Homo sapiens
tactgcacaaggacc

SEQ ID NO: 1868118 - DNA, 15 bp, Homo sapiens
actgcacaaggacct

SEQ ID NO: 1868119 - DNA, 15 bp, Homo sapiens
ctgcacaaggacctc

SEQ ID NO: 1868120 - DNA, 15 bp, Homo sapiens
tgcacaaggacctct

SEQ ID NO: 1868121 - DNA, 15 bp, Homo sapiens
gcacaaggacctctt

SEQ ID NO: 1868122 - DNA, 15 bp, Homo sapiens
cacaaggacctcttg

SEQ ID NO: 1868123 - DNA, 15 bp, Homo sapiens
acaaggacctcttgg

SEQ ID NO: 1868124 - DNA, 15 bp, Homo sapiens
caaggacctcttgga

SEQ ID NO: 1868125 - DNA, 15 bp, Homo sapiens
aaggacctcttggaa

SEQ ID NO: 1868126 - DNA, 15 bp, Homo sapiens
aggacctcttggaag

SEQ ID NO: 1868127 - DNA, 15 bp, Homo sapiens
ggacctcttggaagt

SEQ ID NO: 1868128 - DNA, 15 bp, Homo sapiens
gacctcttggaagta

SEQ ID NO: 1868129 - DNA, 15 bp, Homo sapiens
acctcttggaagtat

SEQ ID NO: 1868130 - DNA, 15 bp, Homo sapiens
cctcttggaagtata

SEQ ID NO: 1868131 - DNA, 15 bp, Homo sapiens
ctcttggaagtatat

SEQ ID NO: 1868132 - DNA, 15 bp, Homo sapiens
tcttggaagtatatg

SEQ ID NO: 1868133 - DNA, 15 bp, Homo sapiens
cttggaagtatatgg

SEQ ID NO: 1868134 - DNA, 15 bp, Homo sapiens
ttggaagtatatggc

SEQ ID NO: 1868135 - DNA, 15 bp, Homo sapiens
tggaagtatatggcc

SEQ ID NO: 1868136 - DNA, 15 bp, Homo sapiens
ggaagtatatggccc

SEQ ID NO: 1868137 - DNA, 15 bp, Homo sapiens
gaagtatatggcccc

SEQ ID NO: 1868138 - DNA, 15 bp, Homo sapiens
aagtatatggcccca

SEQ ID NO: 1868139 - DNA, 15 bp, Homo sapiens
agtatatggccccaa

SEQ ID NO: 1868140 - DNA, 15 bp, Homo sapiens
gtatatggccccaag

SEQ ID NO: 1868141 - DNA, 15 bp, Homo sapiens
tatatggccccaagt

SEQ ID NO: 1868142 - DNA, 15 bp, Homo sapiens
atatggccccaagtg

SEQ ID NO: 1868143 - DNA, 15 bp, Homo sapiens
tatggccccaagtga

SEQ ID NO: 1868144 - DNA, 15 bp, Homo sapiens
atggccccaagtgaa

SEQ ID NO: 1868145 - DNA, 15 bp, Homo sapiens
tggccccaagtgaag

SEQ ID NO: 1868146 - DNA, 15 bp, Homo sapiens
ggccccaagtgaaga

SEQ ID NO: 1868147 - DNA, 15 bp, Homo sapiens
gccccaagtgaagaa

SEQ ID NO: 1868148 - DNA, 15 bp, Homo sapiens
ccccaagtgaagaat

SEQ ID NO: 1868149 - DNA, 15 bp, Homo sapiens
cccaagtgaagaatc

SEQ ID NO: 1868150 - DNA, 15 bp, Homo sapiens
ccaagtgaagaatcc

SEQ ID NO: 1868151 - DNA, 15 bp, Homo sapiens
caagtgaagaatcct

SEQ ID NO: 1868152 - DNA, 15 bp, Homo sapiens
aagtgaagaatcctt

SEQ ID NO: 1868153 - DNA, 15 bp, Homo sapiens
agtgaagaatccttg

SEQ ID NO: 1868154 - DNA, 15 bp, Homo sapiens
gtgaagaatccttgg

SEQ ID NO: 1868155 - DNA, 15 bp, Homo sapiens
tgaagaatccttggg

SEQ ID NO: 1868156 - DNA, 15 bp, Homo sapiens
gaagaatccttggga

SEQ ID NO: 1868157 - DNA, 15 bp, Homo sapiens
aagaatccttgggat

SEQ ID NO: 1868158 - DNA, 15 bp, Homo sapiens
agaatccttgggata

SEQ ID NO: 1868159 - DNA, 15 bp, Homo sapiens
gaatccttgggatag

SEQ ID NO: 1868160 - DNA, 15 bp, Homo sapiens
aatccttgggataga

SEQ ID NO: 1868161 - DNA, 15 bp, Homo sapiens
atccttgggatagag

SEQ ID NO: 1868162 - DNA, 15 bp, Homo sapiens
tccttgggatagaga

SEQ ID NO: 1868163 - DNA, 15 bp, Homo sapiens
ccttgggatagagaa

SEQ ID NO: 1868164 - DNA, 15 bp, Homo sapiens
cttgggatagagaat

SEQ ID NO: 1868165 - DNA, 15 bp, Homo sapiens
ttgggatagagaatg

SEQ ID NO: 1868166 - DNA, 15 bp, Homo sapiens
tgggatagagaatga

SEQ ID NO: 1868167 - DNA, 15 bp, Homo sapiens
gggatagagaatgac

SEQ ID NO: 1868168 - DNA, 15 bp, Homo sapiens
ggatagagaatgact

SEQ ID NO: 1868169 - DNA, 15 bp, Homo sapiens
gatagagaatgactt

SEQ ID NO: 1868170 - DNA, 15 bp, Homo sapiens
atagagaatgacttg

SEQ ID NO: 1868171 - DNA, 15 bp, Homo sapiens
tagagaatgacttgt

SEQ ID NO: 1868172 - DNA, 15 bp, Homo sapiens
agagaatgacttgta

SEQ ID NO: 1868173 - DNA, 15 bp, Homo sapiens
gagaatgacttgtat

SEQ ID NO: 1868174 - DNA, 15 bp, Homo sapiens
agaatgacttgtatt

SEQ ID NO: 1868175 - DNA, 15 bp, Homo sapiens
gaatgacttgtattg

SEQ ID NO: 1868176 - DNA, 15 bp, Homo sapiens
aatgacttgtattgg

SEQ ID NO: 1868177 - DNA, 15 bp, Homo sapiens
atgacttgtattggg

SEQ ID NO: 1868178 - DNA, 15 bp, Homo sapiens
tgacttgtattgggc

SEQ ID NO: 1868179 - DNA, 15 bp, Homo sapiens
gacttgtattgggca

SEQ ID NO: 1868180 - DNA, 15 bp, Homo sapiens
acttgtattgggcat

SEQ ID NO: 1868181 - DNA, 15 bp, Homo sapiens
cttgtattgggcatt

SEQ ID NO: 1868182 - DNA, 15 bp, Homo sapiens
ttgtattgggcatta

SEQ ID NO: 1868183 - DNA, 15 bp, Homo sapiens
tgtattgggcattag

SEQ ID NO: 1868184 - DNA, 15 bp, Homo sapiens
gtattgggcattagg

SEQ ID NO: 1868185 - DNA, 15 bp, Homo sapiens
tattgggcattaggc

SEQ ID NO: 1868186 - DNA, 15 bp, Homo sapiens
attgggcattaggct

SEQ ID NO: 1868187 - DNA, 15 bp, Homo sapiens
ttgggcattaggcta

SEQ ID NO: 1868188 - DNA, 15 bp, Homo sapiens
tgggcattaggctat

SEQ ID NO: 1868189 - DNA, 15 bp, Homo sapiens
gggcattaggctatt

SEQ ID NO: 1868190 - DNA, 15 bp, Homo sapiens
ggcattaggctatta

SEQ ID NO: 1868191 - DNA, 15 bp, Homo sapiens
gcattaggctattac

SEQ ID NO: 1868192 - DNA, 15 bp, Homo sapiens
cattaggctattact

SEQ ID NO: 1868193 - DNA, 15 bp, Homo sapiens
attaggctattactt

SEQ ID NO: 1868194 - DNA, 15 bp, Homo sapiens
ttaggctattacttt

SEQ ID NO: 1868195 - DNA, 15 bp, Homo sapiens
taggctattacttta

SEQ ID NO: 1868196 - DNA, 15 bp, Homo sapiens
aggctattactttag

SEQ ID NO: 1868197 - DNA, 15 bp, Homo sapiens
ggctattactttaga

SEQ ID NO: 1868198 - DNA, 15 bp, Homo sapiens
gctattactttagaa

SEQ ID NO: 1868199 - DNA, 15 bp, Homo sapiens
ctattactttagaaa

SEQ ID NO: 1868200 - DNA, 15 bp, Homo sapiens
tattactttagaaag

SEQ ID NO: 1868201 - DNA, 15 bp, Homo sapiens
attactttagaaaga

SEQ ID NO: 1868202 - DNA, 15 bp, Homo sapiens
ttactttagaaagag

SEQ ID NO: 1868203 - DNA, 15 bp, Homo sapiens
tactttagaaagagt

SEQ ID NO: 1868204 - DNA, 15 bp, Homo sapiens
actttagaaagagta

SEQ ID NO: 1868205 - DNA, 15 bp, Homo sapiens
ctttagaaagagtaa

SEQ ID NO: 1868206 - DNA, 15 bp, Homo sapiens
tttagaaagagtaat

SEQ ID NO: 1868207 - DNA, 15 bp, Homo sapiens
ttagaaagagtaata

SEQ ID NO: 1868208 - DNA, 15 bp, Homo sapiens
tagaaagagtaataa

SEQ ID NO: 1868209 - DNA, 15 bp, Homo sapiens
agaaagagtaataat

SEQ ID NO: 1868210 - DNA, 15 bp, Homo sapiens
gaaagagtaataatg

SEQ ID NO: 1868211 - DNA, 15 bp, Homo sapiens
aaagagtaataatgc

SEQ ID NO: 1868212 - DNA, 15 bp, Homo sapiens
aagagtaataatgca

SEQ ID NO: 1868213 - DNA, 15 bp, Homo sapiens
agagtaataatgcaa

SEQ ID NO: 1868214 - DNA, 15 bp, Homo sapiens
gagtaataatgcaat

SEQ ID NO: 1868215 - DNA, 15 bp, Homo sapiens
agtaataatgcaatt

SEQ ID NO: 1868216 - DNA, 15 bp, Homo sapiens
gtaataatgcaattt

SEQ ID NO: 1868217 - DNA, 15 bp, Homo sapiens
taataatgcaatttc

SEQ ID NO: 1868218 - DNA, 15 bp, Homo sapiens
aataatgcaatttcc

SEQ ID NO: 1868219 - DNA, 15 bp, Homo sapiens
ataatgcaatttcca

SEQ ID NO: 1868220 - DNA, 15 bp, Homo sapiens
taatgcaatttccac

SEQ ID NO: 1868221 - DNA, 15 bp, Homo sapiens
aatgcaatttccact

SEQ ID NO: 1868222 - DNA, 15 bp, Homo sapiens
atgcaatttccactt

SEQ ID NO: 1868223 - DNA, 15 bp, Homo sapiens
tgcaatttccacttt

SEQ ID NO: 1868224 - DNA, 15 bp, Homo sapiens
gcaatttccactttt

SEQ ID NO: 1868225 - DNA, 15 bp, Homo sapiens
caatttccactttta

SEQ ID NO: 1868226 - DNA, 15 bp, Homo sapiens
aatttccacttttaa

SEQ ID NO: 1868227 - DNA, 15 bp, Homo sapiens
atttccacttttaaa

SEQ ID NO: 1868228 - DNA, 15 bp, Homo sapiens
tttccacttttaaac

SEQ ID NO: 1868229 - DNA, 15 bp, Homo sapiens
ttccacttttaaaca

SEQ ID NO: 1868230 - DNA, 15 bp, Homo sapiens
tccacttttaaacag

SEQ ID NO: 1868231 - DNA, 15 bp, Homo sapiens
ccacttttaaacagt

SEQ ID NO: 1868232 - DNA, 15 bp, Homo sapiens
cacttttaaacagtc

SEQ ID NO: 1868233 - DNA, 15 bp, Homo sapiens
acttttaaacagtca

SEQ ID NO: 1868234 - DNA, 15 bp, Homo sapiens
cttttaaacagtcat

SEQ ID NO: 1868235 - DNA, 15 bp, Homo sapiens
ttttaaacagtcatt

SEQ ID NO: 1868236 - DNA, 15 bp, Homo sapiens
tttaaacagtcattc

SEQ ID NO: 1868237 - DNA, 15 bp, Homo sapiens
ttaaacagtcattct

SEQ ID NO: 1868238 - DNA, 15 bp, Homo sapiens
taaacagtcattctg

SEQ ID NO: 1868239 - DNA, 15 bp, Homo sapiens
aaacagtcattctgg

SEQ ID NO: 1868240 - DNA, 15 bp, Homo sapiens
aacagtcattctgga

SEQ ID NO: 1868241 - DNA, 15 bp, Homo sapiens
acagtcattctggac

SEQ ID NO: 1868242 - DNA, 15 bp, Homo sapiens
cagtcattctggaca

SEQ ID NO: 1868243 - DNA, 15 bp, Homo sapiens
agtcattctggacat

SEQ ID NO: 1868244 - DNA, 15 bp, Homo sapiens
gtcattctggacata

SEQ ID NO: 1868245 - DNA, 15 bp, Homo sapiens
tcattctggacatat

SEQ ID NO: 1868246 - DNA, 15 bp, Homo sapiens
cattctggacatata

SEQ ID NO: 1868247 - DNA, 15 bp, Homo sapiens
attctggacatatag

SEQ ID NO: 1868248 - DNA, 15 bp, Homo sapiens
ttctggacatataga

SEQ ID NO: 1868249 - DNA, 15 bp, Homo sapiens
tctggacatatagat

SEQ ID NO: 1868250 - DNA, 15 bp, Homo sapiens
ctggacatatagatc

SEQ ID NO: 1868251 - DNA, 15 bp, Homo sapiens
tggacatatagatca

SEQ ID NO: 1868252 - DNA, 15 bp, Homo sapiens
ggacatatagatcag

SEQ ID NO: 1868253 - DNA, 15 bp, Homo sapiens
gacatatagatcagt

SEQ ID NO: 1868254 - DNA, 15 bp, Homo sapiens
acatatagatcagtg

SEQ ID NO: 1868255 - DNA, 15 bp, Homo sapiens
catatagatcagtgg

SEQ ID NO: 1868256 - DNA, 15 bp, Homo sapiens
atagatcagtggaat

SEQ ID NO: 1868257 - DNA, 15 bp, Homo sapiens
tagatcagtggaata

SEQ ID NO: 1868258 - DNA, 15 bp, Homo sapiens
agatcagtggaatag

SEQ ID NO: 1868259 - DNA, 15 bp, Homo sapiens
gatcagtggaataga

SEQ ID NO: 1868260 - DNA, 15 bp, Homo sapiens
atcagtggaatagaa

SEQ ID NO: 1868261 - DNA, 15 bp, Homo sapiens
tcagtggaatagaat

SEQ ID NO: 1868262 - DNA, 15 bp, Homo sapiens
cagtggaatagaatt

SEQ ID NO: 1868263 - DNA, 15 bp, Homo sapiens
agtggaatagaattg

SEQ ID NO: 1868264 - DNA, 15 bp, Homo sapiens
gtggaatagaattga

SEQ ID NO: 1868265 - DNA, 15 bp, Homo sapiens
tggaatagaattgag

SEQ ID NO: 1868266 - DNA, 15 bp, Homo sapiens
ggaatagaattgaga

SEQ ID NO: 1868267 - DNA, 15 bp, Homo sapiens
gaatagaattgagag

SEQ ID NO: 1868268 - DNA, 15 bp, Homo sapiens
aatagaattgagagt

SEQ ID NO: 1868269 - DNA, 15 bp, Homo sapiens
atagaattgagagtc

SEQ ID NO: 1868270 - DNA, 15 bp, Homo sapiens
tagaattgagagtcc

SEQ ID NO: 1868271 - DNA, 15 bp, Homo sapiens
aattgagagtccaga

SEQ ID NO: 1868272 - DNA, 15 bp, Homo sapiens
attgagagtccagaa

SEQ ID NO: 1868273 - DNA, 15 bp, Homo sapiens
ttgagagtccagaaa

SEQ ID NO: 1868274 - DNA, 15 bp, Homo sapiens
tgagagtccagaaat

SEQ ID NO: 1868275 - DNA, 15 bp, Homo sapiens
gagagtccagaaata

SEQ ID NO: 1868276 - DNA, 15 bp, Homo sapiens
agagtccagaaatac

SEQ ID NO: 1868277 - DNA, 15 bp, Homo sapiens
gagtccagaaataca

SEQ ID NO: 1868278 - DNA, 15 bp, Homo sapiens
agtccagaaatacat

SEQ ID NO: 1868279 - DNA, 15 bp, Homo sapiens
gtccagaaatacatc

SEQ ID NO: 1868280 - DNA, 15 bp, Homo sapiens
tccagaaatacatcc

SEQ ID NO: 1868281 - DNA, 15 bp, Homo sapiens
ccagaaatacatcca

SEQ ID NO: 1868282 - DNA, 15 bp, Homo sapiens
cagaaatacatccag

SEQ ID NO: 1868283 - DNA, 15 bp, Homo sapiens
agaaatacatccagt

SEQ ID NO: 1868284 - DNA, 15 bp, Homo sapiens
gaaatacatccagtt

SEQ ID NO: 1868285 - DNA, 15 bp, Homo sapiens
aaatacatccagttt

SEQ ID NO: 1868286 - DNA, 15 bp, Homo sapiens
aatacatccagtttt

SEQ ID NO: 1868287 - DNA, 15 bp, Homo sapiens
atacatccagttttt

SEQ ID NO: 1868288 - DNA, 15 bp, Homo sapiens
tacatccagttttta

SEQ ID NO: 1868289 - DNA, 15 bp, Homo sapiens
acatccagtttttat

SEQ ID NO: 1868290 - DNA, 15 bp, Homo sapiens
catccagtttttata

SEQ ID NO: 1868291 - DNA, 15 bp, Homo sapiens
atccagtttttatag

SEQ ID NO: 1868292 - DNA, 15 bp, Homo sapiens
tccagtttttatagt

SEQ ID NO: 1868293 - DNA, 15 bp, Homo sapiens
ccagtttttatagtc

SEQ ID NO: 1868294 - DNA, 15 bp, Homo sapiens
cagtttttatagtca

SEQ ID NO: 1868295 - DNA, 15 bp, Homo sapiens
agtttttatagtcaa

SEQ ID NO: 1868296 - DNA, 15 bp, Homo sapiens
gtttttatagtcaac

SEQ ID NO: 1868297 - DNA, 15 bp, Homo sapiens
tttttatagtcaact

SEQ ID NO: 1868298 - DNA, 15 bp, Homo sapiens
ttttatagtcaacta

SEQ ID NO: 1868299 - DNA, 15 bp, Homo sapiens
tttatagtcaactaa

SEQ ID NO: 1868300 - DNA, 15 bp, Homo sapiens
ttatagtcaactaat

SEQ ID NO: 1868301 - DNA, 15 bp, Homo sapiens
tatagtcaactaatt

SEQ ID NO: 1868302 - DNA, 15 bp, Homo sapiens
atagtcaactaattt

SEQ ID NO: 1868303 - DNA, 15 bp, Homo sapiens
tagtcaactaatttt

SEQ ID NO: 1868304 - DNA, 15 bp, Homo sapiens
agtcaactaattttt

SEQ ID NO: 1868305 - DNA, 15 bp, Homo sapiens
gtcaactaatttttg

SEQ ID NO: 1868306 - DNA, 15 bp, Homo sapiens
tcaactaatttttga

SEQ ID NO: 1868307 - DNA, 15 bp, Homo sapiens
caactaatttttgag

SEQ ID NO: 1868308 - DNA, 15 bp, Homo sapiens
aactaatttttgaga

SEQ ID NO: 1868309 - DNA, 15 bp, Homo sapiens
actaatttttgagaa

SEQ ID NO: 1868310 - DNA, 15 bp, Homo sapiens
ctaatttttgagaat

SEQ ID NO: 1868311 - DNA, 15 bp, Homo sapiens
taatttttgagaata

SEQ ID NO: 1868312 - DNA, 15 bp, Homo sapiens
aatttttgagaataa

SEQ ID NO: 1868313 - DNA, 15 bp, Homo sapiens
atttttgagaataat

SEQ ID NO: 1868314 - DNA, 15 bp, Homo sapiens
tttttgagaataata

SEQ ID NO: 1868315 - DNA, 15 bp, Homo sapiens
ttttgagaataatac

SEQ ID NO: 1868316 - DNA, 15 bp, Homo sapiens
tttgagaataatacc

SEQ ID NO: 1868317 - DNA, 15 bp, Homo sapiens
ttgagaataatacca

SEQ ID NO: 1868318 - DNA, 15 bp, Homo sapiens
tgagaataataccaa

SEQ ID NO: 1868319 - DNA, 15 bp, Homo sapiens
gagaataataccaag

SEQ ID NO: 1868320 - DNA, 15 bp, Homo sapiens
agaataataccaaga

SEQ ID NO: 1868321 - DNA, 15 bp, Homo sapiens
gaataataccaagac

SEQ ID NO: 1868322 - DNA, 15 bp, Homo sapiens
aataataccaagacc

SEQ ID NO: 1868323 - DNA, 15 bp, Homo sapiens
ataataccaagacca

SEQ ID NO: 1868324 - DNA, 15 bp, Homo sapiens
taataccaagaccat

SEQ ID NO: 1868325 - DNA, 15 bp, Homo sapiens
aataccaagaccatt

SEQ ID NO: 1868326 - DNA, 15 bp, Homo sapiens
ataccaagaccattt

SEQ ID NO: 1868327 - DNA, 15 bp, Homo sapiens
taccaagaccattta

SEQ ID NO: 1868328 - DNA, 15 bp, Homo sapiens
accaagaccatttaa

SEQ ID NO: 1868329 - DNA, 15 bp, Homo sapiens
ccaagaccatttaat

SEQ ID NO: 1868330 - DNA, 15 bp, Homo sapiens
caagaccatttaatg

SEQ ID NO: 1868331 - DNA, 15 bp, Homo sapiens
aagaccatttaatga

SEQ ID NO: 1868332 - DNA, 15 bp, Homo sapiens
agaccatttaatgag

SEQ ID NO: 1868333 - DNA, 15 bp, Homo sapiens
gaccatttaatgagg

SEQ ID NO: 1868334 - DNA, 15 bp, Homo sapiens
accatttaatgagga

SEQ ID NO: 1868335 - DNA, 15 bp, Homo sapiens
ccatttaatgaggaa

SEQ ID NO: 1868336 - DNA, 15 bp, Homo sapiens
catttaatgaggaaa

SEQ ID NO: 1868337 - DNA, 15 bp, Homo sapiens
atttaatgaggaaag

SEQ ID NO: 1868338 - DNA, 15 bp, Homo sapiens
tttaatgaggaaaga

SEQ ID NO: 1868339 - DNA, 15 bp, Homo sapiens
ttaatgaggaaagaa

SEQ ID NO: 1868340 - DNA, 15 bp, Homo sapiens
taatgaggaaagaat

SEQ ID NO: 1868341 - DNA, 15 bp, Homo sapiens
aatgaggaaagaata

SEQ ID NO: 1868342 - DNA, 15 bp, Homo sapiens
atgaggaaagaatag

SEQ ID NO: 1868343 - DNA, 15 bp, Homo sapiens
tgaggaaagaatagt

SEQ ID NO: 1868344 - DNA, 15 bp, Homo sapiens
gaggaaagaatagtt

SEQ ID NO: 1868345 - DNA, 15 bp, Homo sapiens
aggaaagaatagttt

SEQ ID NO: 1868346 - DNA, 15 bp, Homo sapiens
ggaaagaatagtttt

SEQ ID NO: 1868347 - DNA, 15 bp, Homo sapiens
gaaagaatagttttt

SEQ ID NO: 1868348 - DNA, 15 bp, Homo sapiens
aaagaatagtttttc

SEQ ID NO: 1868349 - DNA, 15 bp, Homo sapiens
aagaatagtttttcc

SEQ ID NO: 1868350 - DNA, 15 bp, Homo sapiens
agaatagtttttcca

SEQ ID NO: 1868351 - DNA, 15 bp, Homo sapiens
gaatagtttttccaa

SEQ ID NO: 1868352 - DNA, 15 bp, Homo sapiens
aatagtttttccaat

SEQ ID NO: 1868353 - DNA, 15 bp, Homo sapiens
atagtttttccaatt

SEQ ID NO: 1868354 - DNA, 15 bp, Homo sapiens
tagtttttccaatta

SEQ ID NO: 1868355 - DNA, 15 bp, Homo sapiens
agtttttccaattaa

SEQ ID NO: 1868356 - DNA, 15 bp, Homo sapiens
gtttttccaattaat

SEQ ID NO: 1868357 - DNA, 15 bp, Homo sapiens
tttttccaattaatg

SEQ ID NO: 1868358 - DNA, 15 bp, Homo sapiens
ttttccaattaatga

SEQ ID NO: 1868359 - DNA, 15 bp, Homo sapiens
tttccaattaatgat

SEQ ID NO: 1868360 - DNA, 15 bp, Homo sapiens
ttccaattaatgatg

SEQ ID NO: 1868361 - DNA, 15 bp, Homo sapiens
tccaattaatgatgc

SEQ ID NO: 1868362 - DNA, 15 bp, Homo sapiens
ccaattaatgatgct

SEQ ID NO: 1868363 - DNA, 15 bp, Homo sapiens
caattaatgatgctg

SEQ ID NO: 1868364 - DNA, 15 bp, Homo sapiens
aattaatgatgctgt

SEQ ID NO: 1868365 - DNA, 15 bp, Homo sapiens
attaatgatgctgtc

SEQ ID NO: 1868366 - DNA, 15 bp, Homo sapiens
ttaatgatgctgtcc

SEQ ID NO: 1868367 - DNA, 15 bp, Homo sapiens
taatgatgctgtcca

SEQ ID NO: 1868368 - DNA, 15 bp, Homo sapiens
aatgatgctgtccag

SEQ ID NO: 1868369 - DNA, 15 bp, Homo sapiens
atgatgctgtccagt

SEQ ID NO: 1868370 - DNA, 15 bp, Homo sapiens
tgatgctgtccagtg

SEQ ID NO: 1868371 - DNA, 15 bp, Homo sapiens
gatgctgtccagtgt

SEQ ID NO: 1868372 - DNA, 15 bp, Homo sapiens
atgctgtccagtgtg

SEQ ID NO: 1868373 - DNA, 15 bp, Homo sapiens
tgctgtccagtgtgg

SEQ ID NO: 1868374 - DNA, 15 bp, Homo sapiens
gctgtccagtgtggg

SEQ ID NO: 1868375 - DNA, 15 bp, Homo sapiens
ctgtccagtgtgggc

SEQ ID NO: 1868376 - DNA, 15 bp, Homo sapiens
tgtccagtgtgggca

SEQ ID NO: 1868377 - DNA, 15 bp, Homo sapiens
gtccagtgtgggcaa

SEQ ID NO: 1868378 - DNA, 15 bp, Homo sapiens
tccagtgtgggcaac

SEQ ID NO: 1868379 - DNA, 15 bp, Homo sapiens
ccagtgtgggcaaca

SEQ ID NO: 1868380 - DNA, 15 bp, Homo sapiens
cagtgtgggcaacat

SEQ ID NO: 1868381 - DNA, 15 bp, Homo sapiens
agtgtgggcaacata

SEQ ID NO: 1868382 - DNA, 15 bp, Homo sapiens
gtgtgggcaacatag

SEQ ID NO: 1868383 - DNA, 15 bp, Homo sapiens
tgtgggcaacatagt

SEQ ID NO: 1868384 - DNA, 15 bp, Homo sapiens
gtgggcaacatagtg

SEQ ID NO: 1868385 - DNA, 15 bp, Homo sapiens
caacatagtgagact

SEQ ID NO: 1868386 - DNA, 15 bp, Homo sapiens
aacatagtgagactc

SEQ ID NO: 1868387 - DNA, 15 bp, Homo sapiens
acatagtgagactct

SEQ ID NO: 1868388 - DNA, 15 bp, Homo sapiens
catagtgagactctg

SEQ ID NO: 1868389 - DNA, 15 bp, Homo sapiens
atagtgagactctgt

SEQ ID NO: 1868390 - DNA, 15 bp, Homo sapiens
tagtgagactctgtc

SEQ ID NO: 1868391 - DNA, 15 bp, Homo sapiens
tgagactctgtctct

SEQ ID NO: 1868392 - DNA, 15 bp, Homo sapiens
gagactctgtctcta

SEQ ID NO: 1868393 - DNA, 15 bp, Homo sapiens
agactctgtctctac

SEQ ID NO: 1868394 - DNA, 15 bp, Homo sapiens
gactctgtctctaca

SEQ ID NO: 1868395 - DNA, 15 bp, Homo sapiens
actctgtctctacaa

SEQ ID NO: 1868396 - DNA, 15 bp, Homo sapiens
ctctgtctctacaaa

SEQ ID NO: 1868397 - DNA, 15 bp, Homo sapiens
tctgtctctacaaat

SEQ ID NO: 1868398 - DNA, 15 bp, Homo sapiens
ctgtctctacaaatt

SEQ ID NO: 1868399 - DNA, 15 bp, Homo sapiens
tgtctctacaaattt

SEQ ID NO: 1868400 - DNA, 15 bp, Homo sapiens
gtctctacaaatttc

SEQ ID NO: 1868401 - DNA, 15 bp, Homo sapiens
tctctacaaatttct

SEQ ID NO: 1868402 - DNA, 15 bp, Homo sapiens
ctctacaaatttctt

SEQ ID NO: 1868403 - DNA, 15 bp, Homo sapiens
tctacaaatttcttt

SEQ ID NO: 1868404 - DNA, 15 bp, Homo sapiens
ctacaaatttctttt

SEQ ID NO: 1868405 - DNA, 15 bp, Homo sapiens
tacaaatttcttttt

SEQ ID NO: 1868406 - DNA, 15 bp, Homo sapiens
acaaatttctttttt

SEQ ID NO: 1868407 - DNA, 15 bp, Homo sapiens
caaatttctttttta

SEQ ID NO: 1868408 - DNA, 15 bp, Homo sapiens
aaatttcttttttaa

SEQ ID NO: 1868409 - DNA, 15 bp, Homo sapiens
aatttcttttttaaa

SEQ ID NO: 1868410 - DNA, 15 bp, Homo sapiens
atttcttttttaaac

SEQ ID NO: 1868411 - DNA, 15 bp, Homo sapiens
tttcttttttaaaca

SEQ ID NO: 1868412 - DNA, 15 bp, Homo sapiens
ttcttttttaaacat

SEQ ID NO: 1868413 - DNA, 15 bp, Homo sapiens
tcttttttaaacatt

SEQ ID NO: 1868414 - DNA, 15 bp, Homo sapiens
cttttttaaacatta

SEQ ID NO: 1868415 - DNA, 15 bp, Homo sapiens
ttttttaaacattag

SEQ ID NO: 1868416 - DNA, 15 bp, Homo sapiens
tttttaaacattagc

SEQ ID NO: 1868417 - DNA, 15 bp, Homo sapiens
ttttaaacattagcc

SEQ ID NO: 1868418 - DNA, 15 bp, Homo sapiens
tttaaacattagcca

SEQ ID NO: 1868419 - DNA, 15 bp, Homo sapiens
ttaaacattagccag

SEQ ID NO: 1868420 - DNA, 15 bp, Homo sapiens
taaacattagccagg

SEQ ID NO: 1868421 - DNA, 15 bp, Homo sapiens
aaacattagccaggt

SEQ ID NO: 1868422 - DNA, 15 bp, Homo sapiens
aacattagccaggta

SEQ ID NO: 1868423 - DNA, 15 bp, Homo sapiens
acattagccaggtat

SEQ ID NO: 1868424 - DNA, 15 bp, Homo sapiens
cattagccaggtatg

SEQ ID NO: 1868425 - DNA, 15 bp, Homo sapiens
ccaggtatggtggca

SEQ ID NO: 1868426 - DNA, 15 bp, Homo sapiens
caggtatggtggcac

SEQ ID NO: 1868427 - DNA, 15 bp, Homo sapiens
aggtatggtggcaca

SEQ ID NO: 1868428 - DNA, 15 bp, Homo sapiens
ggtatggtggcacac

SEQ ID NO: 1868429 - DNA, 15 bp, Homo sapiens
gtatggtggcacacg

SEQ ID NO: 1868430 - DNA, 15 bp, Homo sapiens
tatggtggcacacgc

SEQ ID NO: 1868431 - DNA, 15 bp, Homo sapiens
atggtggcacacgct

SEQ ID NO: 1868432 - DNA, 15 bp, Homo sapiens
tggtggcacacgctt

SEQ ID NO: 1868433 - DNA, 15 bp, Homo sapiens
ggtggcacacgcttg

SEQ ID NO: 1868434 - DNA, 15 bp, Homo sapiens
gtggcacacgcttgt

SEQ ID NO: 1868435 - DNA, 15 bp, Homo sapiens
tggcacacgcttgtg

SEQ ID NO: 1868436 - DNA, 15 bp, Homo sapiens
ggcacacgcttgtga

SEQ ID NO: 1868437 - DNA, 15 bp, Homo sapiens
gcacacgcttgtgaa

SEQ ID NO: 1868438 - DNA, 15 bp, Homo sapiens
cacacgcttgtgaac

SEQ ID NO: 1868439 - DNA, 15 bp, Homo sapiens
acacgcttgtgaacc

SEQ ID NO: 1868440 - DNA, 15 bp, Homo sapiens
cacgcttgtgaaccc

SEQ ID NO: 1868441 - DNA, 15 bp, Homo sapiens
acgcttgtgaaccca

SEQ ID NO: 1868442 - DNA, 15 bp, Homo sapiens
cgcttgtgaacccag

SEQ ID NO: 1868443 - DNA, 15 bp, Homo sapiens
gcttgtgaacccagc

SEQ ID NO: 1868444 - DNA, 15 bp, Homo sapiens
cttgtgaacccagct

SEQ ID NO: 1868445 - DNA, 15 bp, Homo sapiens
ttgtgaacccagcta

SEQ ID NO: 1868446 - DNA, 15 bp, Homo sapiens
tgtgaacccagctac

SEQ ID NO: 1868447 - DNA, 15 bp, Homo sapiens
gtgaacccagctact

SEQ ID NO: 1868448 - DNA, 15 bp, Homo sapiens
tgaacccagctactt

SEQ ID NO: 1868449 - DNA, 15 bp, Homo sapiens
gaacccagctacttg

SEQ ID NO: 1868450 - DNA, 15 bp, Homo sapiens
aacccagctacttga

SEQ ID NO: 1868451 - DNA, 15 bp, Homo sapiens
acccagctacttgag

SEQ ID NO: 1868452 - DNA, 15 bp, Homo sapiens
gagaggctgagatga

SEQ ID NO: 1868453 - DNA, 15 bp, Homo sapiens
agaggctgagatgag

SEQ ID NO: 1868454 - DNA, 15 bp, Homo sapiens
gaggctgagatgaga

SEQ ID NO: 1868455 - DNA, 15 bp, Homo sapiens
aggctgagatgagag

SEQ ID NO: 1868456 - DNA, 15 bp, Homo sapiens
ggctgagatgagagg

SEQ ID NO: 1868457 - DNA, 15 bp, Homo sapiens
gctgagatgagagga

SEQ ID NO: 1868458 - DNA, 15 bp, Homo sapiens
ctgagatgagaggat

SEQ ID NO: 1868459 - DNA, 15 bp, Homo sapiens
tgagatgagaggatc

SEQ ID NO: 1868460 - DNA, 15 bp, Homo sapiens
gagatgagaggatca

SEQ ID NO: 1868461 - DNA, 15 bp, Homo sapiens
agatgagaggatcac

SEQ ID NO: 1868462 - DNA, 15 bp, Homo sapiens
gatgagaggatcact

SEQ ID NO: 1868463 - DNA, 15 bp, Homo sapiens
atgagaggatcactt

SEQ ID NO: 1868464 - DNA, 15 bp, Homo sapiens
atcacttgagcctga

SEQ ID NO: 1868465 - DNA, 15 bp, Homo sapiens
tcacttgagcctgag

SEQ ID NO: 1868466 - DNA, 15 bp, Homo sapiens
cacttgagcctgaga

SEQ ID NO: 1868467 - DNA, 15 bp, Homo sapiens
acttgagcctgagag

SEQ ID NO: 1868468 - DNA, 15 bp, Homo sapiens
cttgagcctgagagg

SEQ ID NO: 1868469 - DNA, 15 bp, Homo sapiens
ttgagcctgagaggt

SEQ ID NO: 1868470 - DNA, 15 bp, Homo sapiens
tgagcctgagaggtg

SEQ ID NO: 1868471 - DNA, 15 bp, Homo sapiens
gagcctgagaggtgg

SEQ ID NO: 1868472 - DNA, 15 bp, Homo sapiens
agcctgagaggtgga

SEQ ID NO: 1868473 - DNA, 15 bp, Homo sapiens
gcctgagaggtggag

SEQ ID NO: 1868474 - DNA, 15 bp, Homo sapiens
cctgagaggtggagg

SEQ ID NO: 1868475 - DNA, 15 bp, Homo sapiens
ctgagaggtggaggc

SEQ ID NO: 1868476 - DNA, 15 bp, Homo sapiens
tgagaggtggaggct

SEQ ID NO: 1868477 - DNA, 15 bp, Homo sapiens
gagaggtggaggctg

SEQ ID NO: 1868478 - DNA, 15 bp, Homo sapiens
agaggtggaggctgc

SEQ ID NO: 1868479 - DNA, 15 bp, Homo sapiens
gaggctgcagtgagt

SEQ ID NO: 1868480 - DNA, 15 bp, Homo sapiens
aggctgcagtgagtt

SEQ ID NO: 1868481 - DNA, 15 bp, Homo sapiens
ggctgcagtgagttg

SEQ ID NO: 1868482 - DNA, 15 bp, Homo sapiens
gctgcagtgagttgt

SEQ ID NO: 1868483 - DNA, 15 bp, Homo sapiens
ctgcagtgagttgtg

SEQ ID NO: 1868484 - DNA, 15 bp, Homo sapiens
tgcagtgagttgtga

SEQ ID NO: 1868485 - DNA, 15 bp, Homo sapiens
gcagtgagttgtgat

SEQ ID NO: 1868486 - DNA, 15 bp, Homo sapiens
cagtgagttgtgatt

SEQ ID NO: 1868487 - DNA, 15 bp, Homo sapiens
agtgagttgtgattg

SEQ ID NO: 1868488 - DNA, 15 bp, Homo sapiens
gtgagttgtgattgt

SEQ ID NO: 1868489 - DNA, 15 bp, Homo sapiens
tgagttgtgattgtg

SEQ ID NO: 1868490 - DNA, 15 bp, Homo sapiens
gagttgtgattgtgc

SEQ ID NO: 1868491 - DNA, 15 bp, Homo sapiens
agttgtgattgtgcc

SEQ ID NO: 1868492 - DNA, 15 bp, Homo sapiens
gttgtgattgtgcca

SEQ ID NO: 1868493 - DNA, 15 bp, Homo sapiens
ttgtgattgtgccac

SEQ ID NO: 1868494 - DNA, 15 bp, Homo sapiens
tgtgattgtgccact

SEQ ID NO: 1868495 - DNA, 15 bp, Homo sapiens
aaaaaaaaaaaatgg

SEQ ID NO: 1868496 - DNA, 15 bp, Homo sapiens
aaaaaaaaaaatggt

SEQ ID NO: 1868497 - DNA, 15 bp, Homo sapiens
aaaaaaaaaatggtg

SEQ ID NO: 1868498 - DNA, 15 bp, Homo sapiens
aaaaaaaaatggtgc

SEQ ID NO: 1868499 - DNA, 15 bp, Homo sapiens
aaaaaaaatggtgct

SEQ ID NO: 1868500 - DNA, 15 bp, Homo sapiens
aaaaaaatggtgctg

SEQ ID NO: 1868501 - DNA, 15 bp, Homo sapiens
aaaaaatggtgctgg

SEQ ID NO: 1868502 - DNA, 15 bp, Homo sapiens
aaaaatggtgctggg

SEQ ID NO: 1868503 - DNA, 15 bp, Homo sapiens
aaaatggtgctggga

SEQ ID NO: 1868504 - DNA, 15 bp, Homo sapiens
aaatggtgctgggat

SEQ ID NO: 1868505 - DNA, 15 bp, Homo sapiens
aatggtgctgggata

SEQ ID NO: 1868506 - DNA, 15 bp, Homo sapiens
atggtgctgggataa

SEQ ID NO: 1868507 - DNA, 15 bp, Homo sapiens
tggtgctgggataac

SEQ ID NO: 1868508 - DNA, 15 bp, Homo sapiens
ggtgctgggataact

SEQ ID NO: 1868509 - DNA, 15 bp, Homo sapiens
gtgctgggataacta

SEQ ID NO: 1868510 - DNA, 15 bp, Homo sapiens
tgctgggataactag

SEQ ID NO: 1868511 - DNA, 15 bp, Homo sapiens
gctgggataactaga

SEQ ID NO: 1868512 - DNA, 15 bp, Homo sapiens
ctgggataactagat

SEQ ID NO: 1868513 - DNA, 15 bp, Homo sapiens
tgggataactagata

SEQ ID NO: 1868514 - DNA, 15 bp, Homo sapiens
gggataactagatag

SEQ ID NO: 1868515 - DNA, 15 bp, Homo sapiens
ggataactagatagg

SEQ ID NO: 1868516 - DNA, 15 bp, Homo sapiens
gataactagataggc

SEQ ID NO: 1868517 - DNA, 15 bp, Homo sapiens
ataactagataggca

SEQ ID NO: 1868518 - DNA, 15 bp, Homo sapiens
taactagataggcac

SEQ ID NO: 1868519 - DNA, 15 bp, Homo sapiens
aactagataggcaca

SEQ ID NO: 1868520 - DNA, 15 bp, Homo sapiens
actagataggcacat

SEQ ID NO: 1868521 - DNA, 15 bp, Homo sapiens
ctagataggcacatg

SEQ ID NO: 1868522 - DNA, 15 bp, Homo sapiens
tagataggcacatgc

SEQ ID NO: 1868523 - DNA, 15 bp, Homo sapiens
agataggcacatgca

SEQ ID NO: 1868524 - DNA, 15 bp, Homo sapiens
gataggcacatgcaa

SEQ ID NO: 1868525 - DNA, 15 bp, Homo sapiens
ataggcacatgcaaa

SEQ ID NO: 1868526 - DNA, 15 bp, Homo sapiens
taggcacatgcaaaa

SEQ ID NO: 1868527 - DNA, 15 bp, Homo sapiens
aggcacatgcaaaat

SEQ ID NO: 1868528 - DNA, 15 bp, Homo sapiens
ggcacatgcaaaata

SEQ ID NO: 1868529 - DNA, 15 bp, Homo sapiens
gcacatgcaaaataa

SEQ ID NO: 1868530 - DNA, 15 bp, Homo sapiens
cacatgcaaaataat

SEQ ID NO: 1868531 - DNA, 15 bp, Homo sapiens
acatgcaaaataata

SEQ ID NO: 1868532 - DNA, 15 bp, Homo sapiens
catgcaaaataataa

SEQ ID NO: 1868533 - DNA, 15 bp, Homo sapiens
atgcaaaataataaa

SEQ ID NO: 1868534 - DNA, 15 bp, Homo sapiens
tgcaaaataataaaa

SEQ ID NO: 1868535 - DNA, 15 bp, Homo sapiens
gcaaaataataaaat

SEQ ID NO: 1868536 - DNA, 15 bp, Homo sapiens
caaaataataaaatt

SEQ ID NO: 1868537 - DNA, 15 bp, Homo sapiens
aaaataataaaattg

SEQ ID NO: 1868538 - DNA, 15 bp, Homo sapiens
aaataataaaattgg

SEQ ID NO: 1868539 - DNA, 15 bp, Homo sapiens
aataataaaattgga

SEQ ID NO: 1868540 - DNA, 15 bp, Homo sapiens
ataataaaattggac

SEQ ID NO: 1868541 - DNA, 15 bp, Homo sapiens
taataaaattggact

SEQ ID NO: 1868542 - DNA, 15 bp, Homo sapiens
aataaaattggactc

SEQ ID NO: 1868543 - DNA, 15 bp, Homo sapiens
ataaaattggactct

SEQ ID NO: 1868544 - DNA, 15 bp, Homo sapiens
taaaattggactctt

SEQ ID NO: 1868545 - DNA, 15 bp, Homo sapiens
aaaattggactcttc

SEQ ID NO: 1868546 - DNA, 15 bp, Homo sapiens
aaattggactcttca

SEQ ID NO: 1868547 - DNA, 15 bp, Homo sapiens
aattggactcttcac

SEQ ID NO: 1868548 - DNA, 15 bp, Homo sapiens
attggactcttcaca

SEQ ID NO: 1868549 - DNA, 15 bp, Homo sapiens
ttggactcttcacat

SEQ ID NO: 1868550 - DNA, 15 bp, Homo sapiens
tggactcttcacatc

SEQ ID NO: 1868551 - DNA, 15 bp, Homo sapiens
ggactcttcacatca

SEQ ID NO: 1868552 - DNA, 15 bp, Homo sapiens
gactcttcacatcaa

SEQ ID NO: 1868553 - DNA, 15 bp, Homo sapiens
actcttcacatcaat

SEQ ID NO: 1868554 - DNA, 15 bp, Homo sapiens
ctcttcacatcaatt

SEQ ID NO: 1868555 - DNA, 15 bp, Homo sapiens
tcttcacatcaatta

SEQ ID NO: 1868556 - DNA, 15 bp, Homo sapiens
cttcacatcaattaa

SEQ ID NO: 1868557 - DNA, 15 bp, Homo sapiens
ttcacatcaattaac

SEQ ID NO: 1868558 - DNA, 15 bp, Homo sapiens
tcacatcaattaact

SEQ ID NO: 1868559 - DNA, 15 bp, Homo sapiens
cacatcaattaactc

SEQ ID NO: 1868560 - DNA, 15 bp, Homo sapiens
acatcaattaactca

SEQ ID NO: 1868561 - DNA, 15 bp, Homo sapiens
catcaattaactcaa

SEQ ID NO: 1868562 - DNA, 15 bp, Homo sapiens
atcaattaactcaaa

SEQ ID NO: 1868563 - DNA, 15 bp, Homo sapiens
tcaattaactcaaaa

SEQ ID NO: 1868564 - DNA, 15 bp, Homo sapiens
caattaactcaaaat

SEQ ID NO: 1868565 - DNA, 15 bp, Homo sapiens
aattaactcaaaata

SEQ ID NO: 1868566 - DNA, 15 bp, Homo sapiens
attaactcaaaatag

SEQ ID NO: 1868567 - DNA, 15 bp, Homo sapiens
ttaactcaaaataga

SEQ ID NO: 1868568 - DNA, 15 bp, Homo sapiens
taactcaaaatagat

SEQ ID NO: 1868569 - DNA, 15 bp, Homo sapiens
aactcaaaatagatc

SEQ ID NO: 1868570 - DNA, 15 bp, Homo sapiens
actcaaaatagatca

SEQ ID NO: 1868571 - DNA, 15 bp, Homo sapiens
ctcaaaatagatcaa

SEQ ID NO: 1868572 - DNA, 15 bp, Homo sapiens
tcaaaatagatcaaa

SEQ ID NO: 1868573 - DNA, 15 bp, Homo sapiens
caaaatagatcaaag

SEQ ID NO: 1868574 - DNA, 15 bp, Homo sapiens
aaaatagatcaaaga

SEQ ID NO: 1868575 - DNA, 15 bp, Homo sapiens
aaatagatcaaagat

SEQ ID NO: 1868576 - DNA, 15 bp, Homo sapiens
aatagatcaaagatc

SEQ ID NO: 1868577 - DNA, 15 bp, Homo sapiens
atagatcaaagatct

SEQ ID NO: 1868578 - DNA, 15 bp, Homo sapiens
tagatcaaagatcta

SEQ ID NO: 1868579 - DNA, 15 bp, Homo sapiens
agatcaaagatctac

SEQ ID NO: 1868580 - DNA, 15 bp, Homo sapiens
gatcaaagatctaca

SEQ ID NO: 1868581 - DNA, 15 bp, Homo sapiens
atcaaagatctacat

SEQ ID NO: 1868582 - DNA, 15 bp, Homo sapiens
tcaaagatctacatg

SEQ ID NO: 1868583 - DNA, 15 bp, Homo sapiens
caaagatctacatgt

SEQ ID NO: 1868584 - DNA, 15 bp, Homo sapiens
aaagatctacatgtg

SEQ ID NO: 1868585 - DNA, 15 bp, Homo sapiens
aagatctacatgtga

SEQ ID NO: 1868586 - DNA, 15 bp, Homo sapiens
agatctacatgtgag

SEQ ID NO: 1868587 - DNA, 15 bp, Homo sapiens
gatctacatgtgaga

SEQ ID NO: 1868588 - DNA, 15 bp, Homo sapiens
atctacatgtgagag

SEQ ID NO: 1868589 - DNA, 15 bp, Homo sapiens
tctacatgtgagagc

SEQ ID NO: 1868590 - DNA, 15 bp, Homo sapiens
ctacatgtgagagca

SEQ ID NO: 1868591 - DNA, 15 bp, Homo sapiens
tacatgtgagagcaa

SEQ ID NO: 1868592 - DNA, 15 bp, Homo sapiens
acatgtgagagcaaa

SEQ ID NO: 1868593 - DNA, 15 bp, Homo sapiens
catgtgagagcaaaa

SEQ ID NO: 1868594 - DNA, 15 bp, Homo sapiens
atgtgagagcaaaaa

SEQ ID NO: 1868595 - DNA, 15 bp, Homo sapiens
tgtgagagcaaaaac

SEQ ID NO: 1868596 - DNA, 15 bp, Homo sapiens
gtgagagcaaaaaca

SEQ ID NO: 1868597 - DNA, 15 bp, Homo sapiens
tgagagcaaaaacat

SEQ ID NO: 1868598 - DNA, 15 bp, Homo sapiens
gagagcaaaaacatt

SEQ ID NO: 1868599 - DNA, 15 bp, Homo sapiens
agagcaaaaacattt

SEQ ID NO: 1868600 - DNA, 15 bp, Homo sapiens
gagcaaaaacattta

SEQ ID NO: 1868601 - DNA, 15 bp, Homo sapiens
agcaaaaacatttaa

SEQ ID NO: 1868602 - DNA, 15 bp, Homo sapiens
gcaaaaacatttaaa

SEQ ID NO: 1868603 - DNA, 15 bp, Homo sapiens
caaaaacatttaaac

SEQ ID NO: 1868604 - DNA, 15 bp, Homo sapiens
aaaaacatttaaact

SEQ ID NO: 1868605 - DNA, 15 bp, Homo sapiens
aaaacatttaaactt

SEQ ID NO: 1868606 - DNA, 15 bp, Homo sapiens
aaacatttaaacttt

SEQ ID NO: 1868607 - DNA, 15 bp, Homo sapiens
aacatttaaactttt

SEQ ID NO: 1868608 - DNA, 15 bp, Homo sapiens
acatttaaactttta

SEQ ID NO: 1868609 - DNA, 15 bp, Homo sapiens
catttaaacttttag

SEQ ID NO: 1868610 - DNA, 15 bp, Homo sapiens
atttaaacttttagg

SEQ ID NO: 1868611 - DNA, 15 bp, Homo sapiens
tttaaacttttagga

SEQ ID NO: 1868612 - DNA, 15 bp, Homo sapiens
ttaaacttttaggag

SEQ ID NO: 1868613 - DNA, 15 bp, Homo sapiens
taaacttttaggaga

SEQ ID NO: 1868614 - DNA, 15 bp, Homo sapiens
aaacttttaggagag

SEQ ID NO: 1868615 - DNA, 15 bp, Homo sapiens
aacttttaggagaga

SEQ ID NO: 1868616 - DNA, 15 bp, Homo sapiens
acttttaggagagaa

SEQ ID NO: 1868617 - DNA, 15 bp, Homo sapiens
cttttaggagagaag

SEQ ID NO: 1868618 - DNA, 15 bp, Homo sapiens
ttttaggagagaaga

SEQ ID NO: 1868619 - DNA, 15 bp, Homo sapiens
tttaggagagaagac

SEQ ID NO: 1868620 - DNA, 15 bp, Homo sapiens
ttaggagagaagacg

SEQ ID NO: 1868621 - DNA, 15 bp, Homo sapiens
taggagagaagacgg

SEQ ID NO: 1868622 - DNA, 15 bp, Homo sapiens
aggagagaagacggg

SEQ ID NO: 1868623 - DNA, 15 bp, Homo sapiens
ggagagaagacgggg

SEQ ID NO: 1868624 - DNA, 15 bp, Homo sapiens
gagagaagacggggt

SEQ ID NO: 1868625 - DNA, 15 bp, Homo sapiens
agagaagacggggta

SEQ ID NO: 1868626 - DNA, 15 bp, Homo sapiens
gagaagacggggtag

SEQ ID NO: 1868627 - DNA, 15 bp, Homo sapiens
agaagacggggtaga

SEQ ID NO: 1868628 - DNA, 15 bp, Homo sapiens
gaagacggggtagac

SEQ ID NO: 1868629 - DNA, 15 bp, Homo sapiens
aagacggggtagacc

SEQ ID NO: 1868630 - DNA, 15 bp, Homo sapiens
agacggggtagacct

SEQ ID NO: 1868631 - DNA, 15 bp, Homo sapiens
gacggggtagacctt

SEQ ID NO: 1868632 - DNA, 15 bp, Homo sapiens
acggggtagaccttt

SEQ ID NO: 1868633 - DNA, 15 bp, Homo sapiens
cggggtagacctttg

SEQ ID NO: 1868634 - DNA, 15 bp, Homo sapiens
ggggtagacctttgt

SEQ ID NO: 1868635 - DNA, 15 bp, Homo sapiens
gggtagacctttgtg

SEQ ID NO: 1868636 - DNA, 15 bp, Homo sapiens
ggtagacctttgtga

SEQ ID NO: 1868637 - DNA, 15 bp, Homo sapiens
gtagacctttgtgac

SEQ ID NO: 1868638 - DNA, 15 bp, Homo sapiens
tagacctttgtgaca

SEQ ID NO: 1868639 - DNA, 15 bp, Homo sapiens
agacctttgtgacat

SEQ ID NO: 1868640 - DNA, 15 bp, Homo sapiens
gacctttgtgacatt

SEQ ID NO: 1868641 - DNA, 15 bp, Homo sapiens
acctttgtgacattg

SEQ ID NO: 1868642 - DNA, 15 bp, Homo sapiens
cctttgtgacattgg

SEQ ID NO: 1868643 - DNA, 15 bp, Homo sapiens
ctttgtgacattgga

SEQ ID NO: 1868644 - DNA, 15 bp, Homo sapiens
tttgtgacattggat

SEQ ID NO: 1868645 - DNA, 15 bp, Homo sapiens
ttgtgacattggatt

SEQ ID NO: 1868646 - DNA, 15 bp, Homo sapiens
tgtgacattggattt

SEQ ID NO: 1868647 - DNA, 15 bp, Homo sapiens
gtgacattggattta

SEQ ID NO: 1868648 - DNA, 15 bp, Homo sapiens
tgacattggatttag

SEQ ID NO: 1868649 - DNA, 15 bp, Homo sapiens
gacattggatttagc

SEQ ID NO: 1868650 - DNA, 15 bp, Homo sapiens
acattggatttagcc

SEQ ID NO: 1868651 - DNA, 15 bp, Homo sapiens
cattggatttagcca

SEQ ID NO: 1868652 - DNA, 15 bp, Homo sapiens
attggatttagccat

SEQ ID NO: 1868653 - DNA, 15 bp, Homo sapiens
ttggatttagccatg

SEQ ID NO: 1868654 - DNA, 15 bp, Homo sapiens
tggatttagccatga

SEQ ID NO: 1868655 - DNA, 15 bp, Homo sapiens
ggatttagccatgaa

SEQ ID NO: 1868656 - DNA, 15 bp, Homo sapiens
gatttagccatgaat

SEQ ID NO: 1868657 - DNA, 15 bp, Homo sapiens
atttagccatgaatt

SEQ ID NO: 1868658 - DNA, 15 bp, Homo sapiens
tttagccatgaattc

SEQ ID NO: 1868659 - DNA, 15 bp, Homo sapiens
ttagccatgaattct

SEQ ID NO: 1868660 - DNA, 15 bp, Homo sapiens
tagccatgaattctt

SEQ ID NO: 1868661 - DNA, 15 bp, Homo sapiens
agccatgaattctta

SEQ ID NO: 1868662 - DNA, 15 bp, Homo sapiens
gccatgaattcttaa

SEQ ID NO: 1868663 - DNA, 15 bp, Homo sapiens
ccatgaattcttaaa

SEQ ID NO: 1868664 - DNA, 15 bp, Homo sapiens
catgaattcttaaat

SEQ ID NO: 1868665 - DNA, 15 bp, Homo sapiens
atgaattcttaaata

SEQ ID NO: 1868666 - DNA, 15 bp, Homo sapiens
tgaattcttaaatat

SEQ ID NO: 1868667 - DNA, 15 bp, Homo sapiens
gaattcttaaatatg

SEQ ID NO: 1868668 - DNA, 15 bp, Homo sapiens
aattcttaaatatga

SEQ ID NO: 1868669 - DNA, 15 bp, Homo sapiens
attcttaaatatgat

SEQ ID NO: 1868670 - DNA, 15 bp, Homo sapiens
ttcttaaatatgata

SEQ ID NO: 1868671 - DNA, 15 bp, Homo sapiens
tcttaaatatgatac

SEQ ID NO: 1868672 - DNA, 15 bp, Homo sapiens
cttaaatatgatacc

SEQ ID NO: 1868673 - DNA, 15 bp, Homo sapiens
ttaaatatgatacca

SEQ ID NO: 1868674 - DNA, 15 bp, Homo sapiens
taaatatgataccaa

SEQ ID NO: 1868675 - DNA, 15 bp, Homo sapiens
aaatatgataccaaa

SEQ ID NO: 1868676 - DNA, 15 bp, Homo sapiens
aatatgataccaaac

SEQ ID NO: 1868677 - DNA, 15 bp, Homo sapiens
atatgataccaaaca

SEQ ID NO: 1868678 - DNA, 15 bp, Homo sapiens
tatgataccaaacac

SEQ ID NO: 1868679 - DNA, 15 bp, Homo sapiens
atgataccaaacaca

SEQ ID NO: 1868680 - DNA, 15 bp, Homo sapiens
tgataccaaacacaa

SEQ ID NO: 1868681 - DNA, 15 bp, Homo sapiens
gataccaaacacaaa

SEQ ID NO: 1868682 - DNA, 15 bp, Homo sapiens
ataccaaacacaaaa

SEQ ID NO: 1868683 - DNA, 15 bp, Homo sapiens
taccaaacacaaaag

SEQ ID NO: 1868684 - DNA, 15 bp, Homo sapiens
accaaacacaaaagc

SEQ ID NO: 1868685 - DNA, 15 bp, Homo sapiens
ccaaacacaaaagca

SEQ ID NO: 1868686 - DNA, 15 bp, Homo sapiens
caaacacaaaagcaa

SEQ ID NO: 1868687 - DNA, 15 bp, Homo sapiens
aaacacaaaagcaac

SEQ ID NO: 1868688 - DNA, 15 bp, Homo sapiens
aacacaaaagcaaca

SEQ ID NO: 1868689 - DNA, 15 bp, Homo sapiens
acacaaaagcaacaa

SEQ ID NO: 1868690 - DNA, 15 bp, Homo sapiens
cacaaaagcaacaaa

SEQ ID NO: 1868691 - DNA, 15 bp, Homo sapiens
acaaaagcaacaaaa

SEQ ID NO: 1868692 - DNA, 15 bp, Homo sapiens
caaaagcaacaaaag

SEQ ID NO: 1868693 - DNA, 15 bp, Homo sapiens
aaaagcaacaaaaga

SEQ ID NO: 1868694 - DNA, 15 bp, Homo sapiens
aaagcaacaaaagaa

SEQ ID NO: 1868695 - DNA, 15 bp, Homo sapiens
aagcaacaaaagaaa

SEQ ID NO: 1868696 - DNA, 15 bp, Homo sapiens
agcaacaaaagaaaa

SEQ ID NO: 1868697 - DNA, 15 bp, Homo sapiens
gcaacaaaagaaaaa

SEQ ID NO: 1868698 - DNA, 15 bp, Homo sapiens
caacaaaagaaaaag

SEQ ID NO: 1868699 - DNA, 15 bp, Homo sapiens
aacaaaagaaaaagt

SEQ ID NO: 1868700 - DNA, 15 bp, Homo sapiens
acaaaagaaaaagta

SEQ ID NO: 1868701 - DNA, 15 bp, Homo sapiens
caaaagaaaaagtag

SEQ ID NO: 1868702 - DNA, 15 bp, Homo sapiens
aaaagaaaaagtaga

SEQ ID NO: 1868703 - DNA, 15 bp, Homo sapiens
aaagaaaaagtagat

SEQ ID NO: 1868704 - DNA, 15 bp, Homo sapiens
aagaaaaagtagata

SEQ ID NO: 1868705 - DNA, 15 bp, Homo sapiens
agaaaaagtagataa

SEQ ID NO: 1868706 - DNA, 15 bp, Homo sapiens
gaaaaagtagataaa

SEQ ID NO: 1868707 - DNA, 15 bp, Homo sapiens
aaaaagtagataaat

SEQ ID NO: 1868708 - DNA, 15 bp, Homo sapiens
aaaagtagataaatt

SEQ ID NO: 1868709 - DNA, 15 bp, Homo sapiens
aaagtagataaattg

SEQ ID NO: 1868710 - DNA, 15 bp, Homo sapiens
aagtagataaattgg

SEQ ID NO: 1868711 - DNA, 15 bp, Homo sapiens
agtagataaattgga

SEQ ID NO: 1868712 - DNA, 15 bp, Homo sapiens
gtagataaattggac

SEQ ID NO: 1868713 - DNA, 15 bp, Homo sapiens
tagataaattggacc

SEQ ID NO: 1868714 - DNA, 15 bp, Homo sapiens
agataaattggacct

SEQ ID NO: 1868715 - DNA, 15 bp, Homo sapiens
gataaattggacctc

SEQ ID NO: 1868716 - DNA, 15 bp, Homo sapiens
ataaattggacctca

SEQ ID NO: 1868717 - DNA, 15 bp, Homo sapiens
ggacctcatcaaaat

SEQ ID NO: 1868718 - DNA, 15 bp, Homo sapiens
gacctcatcaaaatt

SEQ ID NO: 1868719 - DNA, 15 bp, Homo sapiens
acctcatcaaaatta

SEQ ID NO: 1868720 - DNA, 15 bp, Homo sapiens
cctcatcaaaattaa

SEQ ID NO: 1868721 - DNA, 15 bp, Homo sapiens
ctcatcaaaattaaa

SEQ ID NO: 1868722 - DNA, 15 bp, Homo sapiens
tcatcaaaattaaaa

SEQ ID NO: 1868723 - DNA, 15 bp, Homo sapiens
catcaaaattaaaaa

SEQ ID NO: 1868724 - DNA, 15 bp, Homo sapiens
atcaaaattaaaaac

SEQ ID NO: 1868725 - DNA, 15 bp, Homo sapiens
tcaaaattaaaaaca

SEQ ID NO: 1868726 - DNA, 15 bp, Homo sapiens
caaaattaaaaacat

SEQ ID NO: 1868727 - DNA, 15 bp, Homo sapiens
aaaattaaaaacatt

SEQ ID NO: 1868728 - DNA, 15 bp, Homo sapiens
aattaaaaacatttg

SEQ ID NO: 1868729 - DNA, 15 bp, Homo sapiens
attaaaaacatttgt

SEQ ID NO: 1868730 - DNA, 15 bp, Homo sapiens
ttaaaaacatttgtg

SEQ ID NO: 1868731 - DNA, 15 bp, Homo sapiens
taaaaacatttgtgt

SEQ ID NO: 1868732 - DNA, 15 bp, Homo sapiens
aaaaacatttgtgtt

SEQ ID NO: 1868733 - DNA, 15 bp, Homo sapiens
aaaacatttgtgttt

SEQ ID NO: 1868734 - DNA, 15 bp, Homo sapiens
aaacatttgtgtttc

SEQ ID NO: 1868735 - DNA, 15 bp, Homo sapiens
aacatttgtgtttca

SEQ ID NO: 1868736 - DNA, 15 bp, Homo sapiens
acatttgtgtttcaa

SEQ ID NO: 1868737 - DNA, 15 bp, Homo sapiens
catttgtgtttcaat

SEQ ID NO: 1868738 - DNA, 15 bp, Homo sapiens
atttgtgtttcaatg

SEQ ID NO: 1868739 - DNA, 15 bp, Homo sapiens
tttgtgtttcaatgg

SEQ ID NO: 1868740 - DNA, 15 bp, Homo sapiens
ttgtgtttcaatgga

SEQ ID NO: 1868741 - DNA, 15 bp, Homo sapiens
tgtgtttcaatggaa

SEQ ID NO: 1868742 - DNA, 15 bp, Homo sapiens
gtgtttcaatggaag

SEQ ID NO: 1868743 - DNA, 15 bp, Homo sapiens
tgtttcaatggaagg

SEQ ID NO: 1868744 - DNA, 15 bp, Homo sapiens
gtttcaatggaagga

SEQ ID NO: 1868745 - DNA, 15 bp, Homo sapiens
tttcaatggaaggac

SEQ ID NO: 1868746 - DNA, 15 bp, Homo sapiens
ttcaatggaaggaca

SEQ ID NO: 1868747 - DNA, 15 bp, Homo sapiens
tcaatggaaggacat

SEQ ID NO: 1868748 - DNA, 15 bp, Homo sapiens
caatggaaggacatt

SEQ ID NO: 1868749 - DNA, 15 bp, Homo sapiens
aatggaaggacatta

SEQ ID NO: 1868750 - DNA, 15 bp, Homo sapiens
atggaaggacattac

SEQ ID NO: 1868751 - DNA, 15 bp, Homo sapiens
tggaaggacattaca

SEQ ID NO: 1868752 - DNA, 15 bp, Homo sapiens
ggaaggacattacaa

SEQ ID NO: 1868753 - DNA, 15 bp, Homo sapiens
gaaggacattacaaa

SEQ ID NO: 1868754 - DNA, 15 bp, Homo sapiens
aaggacattacaaag

SEQ ID NO: 1868755 - DNA, 15 bp, Homo sapiens
aggacattacaaaga

SEQ ID NO: 1868756 - DNA, 15 bp, Homo sapiens
ggacattacaaagaa

SEQ ID NO: 1868757 - DNA, 15 bp, Homo sapiens
gacattacaaagaaa

SEQ ID NO: 1868758 - DNA, 15 bp, Homo sapiens
acattacaaagaaag

SEQ ID NO: 1868759 - DNA, 15 bp, Homo sapiens
cattacaaagaaagt

SEQ ID NO: 1868760 - DNA, 15 bp, Homo sapiens
attacaaagaaagtg

SEQ ID NO: 1868761 - DNA, 15 bp, Homo sapiens
ttacaaagaaagtga

SEQ ID NO: 1868762 - DNA, 15 bp, Homo sapiens
tacaaagaaagtgaa

SEQ ID NO: 1868763 - DNA, 15 bp, Homo sapiens
acaaagaaagtgaaa

SEQ ID NO: 1868764 - DNA, 15 bp, Homo sapiens
caaagaaagtgaaat

SEQ ID NO: 1868765 - DNA, 15 bp, Homo sapiens
aaagaaagtgaaatg

SEQ ID NO: 1868766 - DNA, 15 bp, Homo sapiens
aagaaagtgaaatga

SEQ ID NO: 1868767 - DNA, 15 bp, Homo sapiens
agaaagtgaaatgac

SEQ ID NO: 1868768 - DNA, 15 bp, Homo sapiens
gaaagtgaaatgaca

SEQ ID NO: 1868769 - DNA, 15 bp, Homo sapiens
aaagtgaaatgacag

SEQ ID NO: 1868770 - DNA, 15 bp, Homo sapiens
aagtgaaatgacagc

SEQ ID NO: 1868771 - DNA, 15 bp, Homo sapiens
agtgaaatgacagcc

SEQ ID NO: 1868772 - DNA, 15 bp, Homo sapiens
gtgaaatgacagccc

SEQ ID NO: 1868773 - DNA, 15 bp, Homo sapiens
tgaaatgacagccca

SEQ ID NO: 1868774 - DNA, 15 bp, Homo sapiens
gaaatgacagcccag

SEQ ID NO: 1868775 - DNA, 15 bp, Homo sapiens
aaatgacagcccagt

SEQ ID NO: 1868776 - DNA, 15 bp, Homo sapiens
aatgacagcccagtt

SEQ ID NO: 1868777 - DNA, 15 bp, Homo sapiens
atgacagcccagttt

SEQ ID NO: 1868778 - DNA, 15 bp, Homo sapiens
tgacagcccagttta

SEQ ID NO: 1868779 - DNA, 15 bp, Homo sapiens
gacagcccagtttaa

SEQ ID NO: 1868780 - DNA, 15 bp, Homo sapiens
acagcccagtttaaa

SEQ ID NO: 1868781 - DNA, 15 bp, Homo sapiens
cagcccagtttaaaa

SEQ ID NO: 1868782 - DNA, 15 bp, Homo sapiens
agcccagtttaaaaa

SEQ ID NO: 1868783 - DNA, 15 bp, Homo sapiens
gcccagtttaaaaat

SEQ ID NO: 1868784 - DNA, 15 bp, Homo sapiens
cccagtttaaaaatg

SEQ ID NO: 1868785 - DNA, 15 bp, Homo sapiens
ccagtttaaaaatgg

SEQ ID NO: 1868786 - DNA, 15 bp, Homo sapiens
cagtttaaaaatggt

SEQ ID NO: 1868787 - DNA, 15 bp, Homo sapiens
agtttaaaaatggtc

SEQ ID NO: 1868788 - DNA, 15 bp, Homo sapiens
gtttaaaaatggtca

SEQ ID NO: 1868789 - DNA, 15 bp, Homo sapiens
tttaaaaatggtcag

SEQ ID NO: 1868790 - DNA, 15 bp, Homo sapiens
ttaaaaatggtcagt

SEQ ID NO: 1868791 - DNA, 15 bp, Homo sapiens
taaaaatggtcagtt

SEQ ID NO: 1868792 - DNA, 15 bp, Homo sapiens
aaaaatggtcagttt

SEQ ID NO: 1868793 - DNA, 15 bp, Homo sapiens
aaaatggtcagttta

SEQ ID NO: 1868794 - DNA, 15 bp, Homo sapiens
aaatggtcagtttat

SEQ ID NO: 1868795 - DNA, 15 bp, Homo sapiens
aatggtcagtttatg

SEQ ID NO: 1868796 - DNA, 15 bp, Homo sapiens
atggtcagtttatga

SEQ ID NO: 1868797 - DNA, 15 bp, Homo sapiens
tggtcagtttatgaa

SEQ ID NO: 1868798 - DNA, 15 bp, Homo sapiens
ggtcagtttatgaat

SEQ ID NO: 1868799 - DNA, 15 bp, Homo sapiens
gtcagtttatgaata

SEQ ID NO: 1868800 - DNA, 15 bp, Homo sapiens
tcagtttatgaatac

SEQ ID NO: 1868801 - DNA, 15 bp, Homo sapiens
cagtttatgaataca

SEQ ID NO: 1868802 - DNA, 15 bp, Homo sapiens
agtttatgaatacat

SEQ ID NO: 1868803 - DNA, 15 bp, Homo sapiens
gtttatgaatacatc

SEQ ID NO: 1868804 - DNA, 15 bp, Homo sapiens
tttatgaatacatct

SEQ ID NO: 1868805 - DNA, 15 bp, Homo sapiens
ttatgaatacatctc

SEQ ID NO: 1868806 - DNA, 15 bp, Homo sapiens
tatgaatacatctct

SEQ ID NO: 1868807 - DNA, 15 bp, Homo sapiens
atgaatacatctctc

SEQ ID NO: 1868808 - DNA, 15 bp, Homo sapiens
tgaatacatctctct

SEQ ID NO: 1868809 - DNA, 15 bp, Homo sapiens
gaatacatctctctc

SEQ ID NO: 1868810 - DNA, 15 bp, Homo sapiens
aatacatctctctct

SEQ ID NO: 1868811 - DNA, 15 bp, Homo sapiens
atacatctctctcta

SEQ ID NO: 1868812 - DNA, 15 bp, Homo sapiens
tacatctctctctaa

SEQ ID NO: 1868813 - DNA, 15 bp, Homo sapiens
acatctctctctaaa

SEQ ID NO: 1868814 - DNA, 15 bp, Homo sapiens
catctctctctaaag

SEQ ID NO: 1868815 - DNA, 15 bp, Homo sapiens
atctctctctaaaga

SEQ ID NO: 1868816 - DNA, 15 bp, Homo sapiens
tctctctctaaagaa

SEQ ID NO: 1868817 - DNA, 15 bp, Homo sapiens
ctctctctaaagaag

SEQ ID NO: 1868818 - DNA, 15 bp, Homo sapiens
tctctctaaagaaga

SEQ ID NO: 1868819 - DNA, 15 bp, Homo sapiens
ctctctaaagaagat

SEQ ID NO: 1868820 - DNA, 15 bp, Homo sapiens
tctctaaagaagata

SEQ ID NO: 1868821 - DNA, 15 bp, Homo sapiens
ctctaaagaagatat

SEQ ID NO: 1868822 - DNA, 15 bp, Homo sapiens
tctaaagaagatata

SEQ ID NO: 1868823 - DNA, 15 bp, Homo sapiens
ctaaagaagatatac

SEQ ID NO: 1868824 - DNA, 15 bp, Homo sapiens
taaagaagatataca

SEQ ID NO: 1868825 - DNA, 15 bp, Homo sapiens
aaagaagatatacaa

SEQ ID NO: 1868826 - DNA, 15 bp, Homo sapiens
aagaagatatacaaa

SEQ ID NO: 1868827 - DNA, 15 bp, Homo sapiens
agaagatatacaaat

SEQ ID NO: 1868828 - DNA, 15 bp, Homo sapiens
gaagatatacaaata

SEQ ID NO: 1868829 - DNA, 15 bp, Homo sapiens
aagatatacaaatag

SEQ ID NO: 1868830 - DNA, 15 bp, Homo sapiens
agatatacaaatagt

SEQ ID NO: 1868831 - DNA, 15 bp, Homo sapiens
gatatacaaatagtc

SEQ ID NO: 1868832 - DNA, 15 bp, Homo sapiens
atatacaaatagtca

SEQ ID NO: 1868833 - DNA, 15 bp, Homo sapiens
tatacaaatagtcaa

SEQ ID NO: 1868834 - DNA, 15 bp, Homo sapiens
atacaaatagtcaag

SEQ ID NO: 1868835 - DNA, 15 bp, Homo sapiens
tacaaatagtcaaga

SEQ ID NO: 1868836 - DNA, 15 bp, Homo sapiens
acaaatagtcaagaa

SEQ ID NO: 1868837 - DNA, 15 bp, Homo sapiens
caaatagtcaagaag

SEQ ID NO: 1868838 - DNA, 15 bp, Homo sapiens
aaatagtcaagaagc

SEQ ID NO: 1868839 - DNA, 15 bp, Homo sapiens
aatagtcaagaagca

SEQ ID NO: 1868840 - DNA, 15 bp, Homo sapiens
atagtcaagaagcac

SEQ ID NO: 1868841 - DNA, 15 bp, Homo sapiens
tagtcaagaagcaca

SEQ ID NO: 1868842 - DNA, 15 bp, Homo sapiens
agtcaagaagcacat

SEQ ID NO: 1868843 - DNA, 15 bp, Homo sapiens
gtcaagaagcacatg

SEQ ID NO: 1868844 - DNA, 15 bp, Homo sapiens
tcaagaagcacatga

SEQ ID NO: 1868845 - DNA, 15 bp, Homo sapiens
caagaagcacatgaa

SEQ ID NO: 1868846 - DNA, 15 bp, Homo sapiens
aagaagcacatgaaa

SEQ ID NO: 1868847 - DNA, 15 bp, Homo sapiens
agaagcacatgaaaa

SEQ ID NO: 1868848 - DNA, 15 bp, Homo sapiens
gaagcacatgaaaag

SEQ ID NO: 1868849 - DNA, 15 bp, Homo sapiens
aagcacatgaaaaga

SEQ ID NO: 1868850 - DNA, 15 bp, Homo sapiens
agcacatgaaaagat

SEQ ID NO: 1868851 - DNA, 15 bp, Homo sapiens
gcacatgaaaagatg

SEQ ID NO: 1868852 - DNA, 15 bp, Homo sapiens
cacatgaaaagatgt

SEQ ID NO: 1868853 - DNA, 15 bp, Homo sapiens
acatgaaaagatgtt

SEQ ID NO: 1868854 - DNA, 15 bp, Homo sapiens
catgaaaagatgttc

SEQ ID NO: 1868855 - DNA, 15 bp, Homo sapiens
atgaaaagatgttca

SEQ ID NO: 1868856 - DNA, 15 bp, Homo sapiens
tgaaaagatgttcaa

SEQ ID NO: 1868857 - DNA, 15 bp, Homo sapiens
gaaaagatgttcaac

SEQ ID NO: 1868858 - DNA, 15 bp, Homo sapiens
aaaagatgttcaaca

SEQ ID NO: 1868859 - DNA, 15 bp, Homo sapiens
aaagatgttcaacac

SEQ ID NO: 1868860 - DNA, 15 bp, Homo sapiens
aagatgttcaacacc

SEQ ID NO: 1868861 - DNA, 15 bp, Homo sapiens
agatgttcaacacct

SEQ ID NO: 1868862 - DNA, 15 bp, Homo sapiens
gatgttcaacacctt

SEQ ID NO: 1868863 - DNA, 15 bp, Homo sapiens
atgttcaacacctta

SEQ ID NO: 1868864 - DNA, 15 bp, Homo sapiens
tgttcaacaccttag

SEQ ID NO: 1868865 - DNA, 15 bp, Homo sapiens
gttcaacaccttagt

SEQ ID NO: 1868866 - DNA, 15 bp, Homo sapiens
ttcaacaccttagtc

SEQ ID NO: 1868867 - DNA, 15 bp, Homo sapiens
tcaacaccttagtca

SEQ ID NO: 1868868 - DNA, 15 bp, Homo sapiens
caacaccttagtcat

SEQ ID NO: 1868869 - DNA, 15 bp, Homo sapiens
aacaccttagtcatc

SEQ ID NO: 1868870 - DNA, 15 bp, Homo sapiens
acaccttagtcatca

SEQ ID NO: 1868871 - DNA, 15 bp, Homo sapiens
caccttagtcatcag

SEQ ID NO: 1868872 - DNA, 15 bp, Homo sapiens
accttagtcatcaga

SEQ ID NO: 1868873 - DNA, 15 bp, Homo sapiens
ccttagtcatcagag

SEQ ID NO: 1868874 - DNA, 15 bp, Homo sapiens
gcaaatcaaaaccat

SEQ ID NO: 1868875 - DNA, 15 bp, Homo sapiens
caaatcaaaaccatg

SEQ ID NO: 1868876 - DNA, 15 bp, Homo sapiens
aatcaaaaccatggt

SEQ ID NO: 1868877 - DNA, 15 bp, Homo sapiens
atcaaaaccatggtg

SEQ ID NO: 1868878 - DNA, 15 bp, Homo sapiens
tcaaaaccatggtga

SEQ ID NO: 1868879 - DNA, 15 bp, Homo sapiens
caaaaccatggtgag

SEQ ID NO: 1868880 - DNA, 15 bp, Homo sapiens
aaaaccatggtgaga

SEQ ID NO: 1868881 - DNA, 15 bp, Homo sapiens
aaaccatggtgagat

SEQ ID NO: 1868882 - DNA, 15 bp, Homo sapiens
aaccatggtgagata

SEQ ID NO: 1868883 - DNA, 15 bp, Homo sapiens
accatggtgagatac

SEQ ID NO: 1868884 - DNA, 15 bp, Homo sapiens
ccatggtgagatacc

SEQ ID NO: 1868885 - DNA, 15 bp, Homo sapiens
catggtgagatacca

SEQ ID NO: 1868886 - DNA, 15 bp, Homo sapiens
atggtgagataccac

SEQ ID NO: 1868887 - DNA, 15 bp, Homo sapiens
tggtgagataccact

SEQ ID NO: 1868888 - DNA, 15 bp, Homo sapiens
ggtgagataccactt

SEQ ID NO: 1868889 - DNA, 15 bp, Homo sapiens
gtgagataccacttt

SEQ ID NO: 1868890 - DNA, 15 bp, Homo sapiens
tgagataccacttta

SEQ ID NO: 1868891 - DNA, 15 bp, Homo sapiens
gagataccactttac

SEQ ID NO: 1868892 - DNA, 15 bp, Homo sapiens
agataccactttaca

SEQ ID NO: 1868893 - DNA, 15 bp, Homo sapiens
gataccactttacac

SEQ ID NO: 1868894 - DNA, 15 bp, Homo sapiens
ataccactttacacc

SEQ ID NO: 1868895 - DNA, 15 bp, Homo sapiens
taccactttacaccc

SEQ ID NO: 1868896 - DNA, 15 bp, Homo sapiens
accactttacaccca

SEQ ID NO: 1868897 - DNA, 15 bp, Homo sapiens
ccactttacacccat

SEQ ID NO: 1868898 - DNA, 15 bp, Homo sapiens
cactttacacccatt

SEQ ID NO: 1868899 - DNA, 15 bp, Homo sapiens
actttacacccattt

SEQ ID NO: 1868900 - DNA, 15 bp, Homo sapiens
ctttacacccatttg

SEQ ID NO: 1868901 - DNA, 15 bp, Homo sapiens
tttacacccatttgg

SEQ ID NO: 1868902 - DNA, 15 bp, Homo sapiens
ttacacccatttgga

SEQ ID NO: 1868903 - DNA, 15 bp, Homo sapiens
tacacccatttggat

SEQ ID NO: 1868904 - DNA, 15 bp, Homo sapiens
acacccatttggatg

SEQ ID NO: 1868905 - DNA, 15 bp, Homo sapiens
cacccatttggatgg

SEQ ID NO: 1868906 - DNA, 15 bp, Homo sapiens
acccatttggatggc

SEQ ID NO: 1868907 - DNA, 15 bp, Homo sapiens
cccatttggatggct

SEQ ID NO: 1868908 - DNA, 15 bp, Homo sapiens
ccatttggatggcta

SEQ ID NO: 1868909 - DNA, 15 bp, Homo sapiens
catttggatggctat

SEQ ID NO: 1868910 - DNA, 15 bp, Homo sapiens
atttggatggctata

SEQ ID NO: 1868911 - DNA, 15 bp, Homo sapiens
tttggatggctatac

SEQ ID NO: 1868912 - DNA, 15 bp, Homo sapiens
ttggatggctatact

SEQ ID NO: 1868913 - DNA, 15 bp, Homo sapiens
tggatggctatactt

SEQ ID NO: 1868914 - DNA, 15 bp, Homo sapiens
ggatggctatacttg

SEQ ID NO: 1868915 - DNA, 15 bp, Homo sapiens
gatggctatacttga

SEQ ID NO: 1868916 - DNA, 15 bp, Homo sapiens
atggctatacttgaa

SEQ ID NO: 1868917 - DNA, 15 bp, Homo sapiens
tggctatacttgaaa

SEQ ID NO: 1868918 - DNA, 15 bp, Homo sapiens
ggctatacttgaaaa

SEQ ID NO: 1868919 - DNA, 15 bp, Homo sapiens
gctatacttgaaaag

SEQ ID NO: 1868920 - DNA, 15 bp, Homo sapiens
ctatacttgaaaaga

SEQ ID NO: 1868921 - DNA, 15 bp, Homo sapiens
tatacttgaaaagac

SEQ ID NO: 1868922 - DNA, 15 bp, Homo sapiens
atacttgaaaagaca

SEQ ID NO: 1868923 - DNA, 15 bp, Homo sapiens
tacttgaaaagacag

SEQ ID NO: 1868924 - DNA, 15 bp, Homo sapiens
acttgaaaagacaga

SEQ ID NO: 1868925 - DNA, 15 bp, Homo sapiens
cttgaaaagacagat

SEQ ID NO: 1868926 - DNA, 15 bp, Homo sapiens
ttgaaaagacagatc

SEQ ID NO: 1868927 - DNA, 15 bp, Homo sapiens
tgaaaagacagatca

SEQ ID NO: 1868928 - DNA, 15 bp, Homo sapiens
gaaaagacagatcat

SEQ ID NO: 1868929 - DNA, 15 bp, Homo sapiens
aaaagacagatcata

SEQ ID NO: 1868930 - DNA, 15 bp, Homo sapiens
aaagacagatcataa

SEQ ID NO: 1868931 - DNA, 15 bp, Homo sapiens
aagacagatcataac

SEQ ID NO: 1868932 - DNA, 15 bp, Homo sapiens
agacagatcataaca

SEQ ID NO: 1868933 - DNA, 15 bp, Homo sapiens
gacagatcataacaa

SEQ ID NO: 1868934 - DNA, 15 bp, Homo sapiens
acagatcataacaag

SEQ ID NO: 1868935 - DNA, 15 bp, Homo sapiens
cagatcataacaagt

SEQ ID NO: 1868936 - DNA, 15 bp, Homo sapiens
agatcataacaagtg

SEQ ID NO: 1868937 - DNA, 15 bp, Homo sapiens
gatcataacaagtgt

SEQ ID NO: 1868938 - DNA, 15 bp, Homo sapiens
atcataacaagtgtt

SEQ ID NO: 1868939 - DNA, 15 bp, Homo sapiens
tcataacaagtgttg

SEQ ID NO: 1868940 - DNA, 15 bp, Homo sapiens
cataacaagtgttga

SEQ ID NO: 1868941 - DNA, 15 bp, Homo sapiens
ataacaagtgttgac

SEQ ID NO: 1868942 - DNA, 15 bp, Homo sapiens
taacaagtgttgaca

SEQ ID NO: 1868943 - DNA, 15 bp, Homo sapiens
aacaagtgttgacaa

SEQ ID NO: 1868944 - DNA, 15 bp, Homo sapiens
acaagtgttgacaag

SEQ ID NO: 1868945 - DNA, 15 bp, Homo sapiens
caagtgttgacaagg

SEQ ID NO: 1868946 - DNA, 15 bp, Homo sapiens
aagtgttgacaagga

SEQ ID NO: 1868947 - DNA, 15 bp, Homo sapiens
agtgttgacaaggat

SEQ ID NO: 1868948 - DNA, 15 bp, Homo sapiens
gtgttgacaaggata

SEQ ID NO: 1868949 - DNA, 15 bp, Homo sapiens
tgttgacaaggatat

SEQ ID NO: 1868950 - DNA, 15 bp, Homo sapiens
gttgacaaggatatg

SEQ ID NO: 1868951 - DNA, 15 bp, Homo sapiens
ttgacaaggatatgg

SEQ ID NO: 1868952 - DNA, 15 bp, Homo sapiens
tgacaaggatatgga

SEQ ID NO: 1868953 - DNA, 15 bp, Homo sapiens
gacaaggatatggat

SEQ ID NO: 1868954 - DNA, 15 bp, Homo sapiens
acaaggatatggata

SEQ ID NO: 1868955 - DNA, 15 bp, Homo sapiens
caaggatatggataa

SEQ ID NO: 1868956 - DNA, 15 bp, Homo sapiens
aaggatatggataaa

SEQ ID NO: 1868957 - DNA, 15 bp, Homo sapiens
aggatatggataaat

SEQ ID NO: 1868958 - DNA, 15 bp, Homo sapiens
ggatatggataaatt

SEQ ID NO: 1868959 - DNA, 15 bp, Homo sapiens
gatatggataaattg

SEQ ID NO: 1868960 - DNA, 15 bp, Homo sapiens
atatggataaattgc

SEQ ID NO: 1868961 - DNA, 15 bp, Homo sapiens
tatggataaattgca

SEQ ID NO: 1868962 - DNA, 15 bp, Homo sapiens
atggataaattgcaa

SEQ ID NO: 1868963 - DNA, 15 bp, Homo sapiens
tggataaattgcaac

SEQ ID NO: 1868964 - DNA, 15 bp, Homo sapiens
ggataaattgcaacc

SEQ ID NO: 1868965 - DNA, 15 bp, Homo sapiens
gataaattgcaaccc

SEQ ID NO: 1868966 - DNA, 15 bp, Homo sapiens
ataaattgcaaccct

SEQ ID NO: 1868967 - DNA, 15 bp, Homo sapiens
taaattgcaaccctt

SEQ ID NO: 1868968 - DNA, 15 bp, Homo sapiens
aaattgcaacccttg

SEQ ID NO: 1868969 - DNA, 15 bp, Homo sapiens
aattgcaacccttgt

SEQ ID NO: 1868970 - DNA, 15 bp, Homo sapiens
attgcaacccttgtg

SEQ ID NO: 1868971 - DNA, 15 bp, Homo sapiens
ttgcaacccttgtgg

SEQ ID NO: 1868972 - DNA, 15 bp, Homo sapiens
tgcaacccttgtggc

SEQ ID NO: 1868973 - DNA, 15 bp, Homo sapiens
gcaacccttgtggct

SEQ ID NO: 1868974 - DNA, 15 bp, Homo sapiens
caacccttgtggctg

SEQ ID NO: 1868975 - DNA, 15 bp, Homo sapiens
aacccttgtggctgc

SEQ ID NO: 1868976 - DNA, 15 bp, Homo sapiens
acccttgtggctgct

SEQ ID NO: 1868977 - DNA, 15 bp, Homo sapiens
cccttgtggctgctc

SEQ ID NO: 1868978 - DNA, 15 bp, Homo sapiens
ccttgtggctgctcg

SEQ ID NO: 1868979 - DNA, 15 bp, Homo sapiens
cttgtggctgctcgt

SEQ ID NO: 1868980 - DNA, 15 bp, Homo sapiens
ttgtggctgctcgtg

SEQ ID NO: 1868981 - DNA, 15 bp, Homo sapiens
tgtggctgctcgtgg

SEQ ID NO: 1868982 - DNA, 15 bp, Homo sapiens
gtggctgctcgtggg

SEQ ID NO: 1868983 - DNA, 15 bp, Homo sapiens
tggctgctcgtgggg

SEQ ID NO: 1868984 - DNA, 15 bp, Homo sapiens
ggctgctcgtgggga

SEQ ID NO: 1868985 - DNA, 15 bp, Homo sapiens
gctgctcgtggggat

SEQ ID NO: 1868986 - DNA, 15 bp, Homo sapiens
ctgctcgtggggatg

SEQ ID NO: 1868987 - DNA, 15 bp, Homo sapiens
tgctcgtggggatga

SEQ ID NO: 1868988 - DNA, 15 bp, Homo sapiens
gctcgtggggatgat

SEQ ID NO: 1868989 - DNA, 15 bp, Homo sapiens
ctcgtggggatgatg

SEQ ID NO: 1868990 - DNA, 15 bp, Homo sapiens
tcgtggggatgatgt

SEQ ID NO: 1868991 - DNA, 15 bp, Homo sapiens
cgtggggatgatgta

SEQ ID NO: 1868992 - DNA, 15 bp, Homo sapiens
gtggggatgatgtag

SEQ ID NO: 1868993 - DNA, 15 bp, Homo sapiens
tggggatgatgtaga

SEQ ID NO: 1868994 - DNA, 15 bp, Homo sapiens
ggggatgatgtagaa

SEQ ID NO: 1868995 - DNA, 15 bp, Homo sapiens
gggatgatgtagaat

SEQ ID NO: 1868996 - DNA, 15 bp, Homo sapiens
ggatgatgtagaatg

SEQ ID NO: 1868997 - DNA, 15 bp, Homo sapiens
gatgatgtagaatgg

SEQ ID NO: 1868998 - DNA, 15 bp, Homo sapiens
atgatgtagaatggt

SEQ ID NO: 1868999 - DNA, 15 bp, Homo sapiens
tgatgtagaatggtg

SEQ ID NO: 1869000 - DNA, 15 bp, Homo sapiens
gatgtagaatggtgc

SEQ ID NO: 1869001 - DNA, 15 bp, Homo sapiens
atgtagaatggtgct

SEQ ID NO: 1869002 - DNA, 15 bp, Homo sapiens
tgtagaatggtgctg

SEQ ID NO: 1869003 - DNA, 15 bp, Homo sapiens
gtagaatggtgctgt

SEQ ID NO: 1869004 - DNA, 15 bp, Homo sapiens
tagaatggtgctgta

SEQ ID NO: 1869005 - DNA, 15 bp, Homo sapiens
agaatggtgctgtag

SEQ ID NO: 1869006 - DNA, 15 bp, Homo sapiens
gaatggtgctgtagc

SEQ ID NO: 1869007 - DNA, 15 bp, Homo sapiens
aatggtgctgtagct

SEQ ID NO: 1869008 - DNA, 15 bp, Homo sapiens
atggtgctgtagctt

SEQ ID NO: 1869009 - DNA, 15 bp, Homo sapiens
tggtgctgtagcttt

SEQ ID NO: 1869010 - DNA, 15 bp, Homo sapiens
ggtgctgtagctttg

SEQ ID NO: 1869011 - DNA, 15 bp, Homo sapiens
gtgctgtagctttgg

SEQ ID NO: 1869012 - DNA, 15 bp, Homo sapiens
tgctgtagctttgga

SEQ ID NO: 1869013 - DNA, 15 bp, Homo sapiens
gctgtagctttggaa

SEQ ID NO: 1869014 - DNA, 15 bp, Homo sapiens
ctgtagctttggaaa

SEQ ID NO: 1869015 - DNA, 15 bp, Homo sapiens
tgtagctttggaaaa

SEQ ID NO: 1869016 - DNA, 15 bp, Homo sapiens
gtagctttggaaaac

SEQ ID NO: 1869017 - DNA, 15 bp, Homo sapiens
tagctttggaaaaca

SEQ ID NO: 1869018 - DNA, 15 bp, Homo sapiens
agctttggaaaacag

SEQ ID NO: 1869019 - DNA, 15 bp, Homo sapiens
gctttggaaaacagc

SEQ ID NO: 1869020 - DNA, 15 bp, Homo sapiens
ctttggaaaacagcc

SEQ ID NO: 1869021 - DNA, 15 bp, Homo sapiens
tttggaaaacagcct

SEQ ID NO: 1869022 - DNA, 15 bp, Homo sapiens
ttggaaaacagcctg

SEQ ID NO: 1869023 - DNA, 15 bp, Homo sapiens
tggaaaacagcctgg

SEQ ID NO: 1869024 - DNA, 15 bp, Homo sapiens
ggaaaacagcctggc

SEQ ID NO: 1869025 - DNA, 15 bp, Homo sapiens
gaaaacagcctggca

SEQ ID NO: 1869026 - DNA, 15 bp, Homo sapiens
aaaacagcctggcaa

SEQ ID NO: 1869027 - DNA, 15 bp, Homo sapiens
aaacagcctggcaat

SEQ ID NO: 1869028 - DNA, 15 bp, Homo sapiens
aacagcctggcaatt

SEQ ID NO: 1869029 - DNA, 15 bp, Homo sapiens
acagcctggcaattc

SEQ ID NO: 1869030 - DNA, 15 bp, Homo sapiens
cagcctggcaattcc

SEQ ID NO: 1869031 - DNA, 15 bp, Homo sapiens
agcctggcaattcct

SEQ ID NO: 1869032 - DNA, 15 bp, Homo sapiens
gcctggcaattcctg

SEQ ID NO: 1869033 - DNA, 15 bp, Homo sapiens
cctggcaattcctga

SEQ ID NO: 1869034 - DNA, 15 bp, Homo sapiens
ctggcaattcctgaa

SEQ ID NO: 1869035 - DNA, 15 bp, Homo sapiens
tggcaattcctgaaa

SEQ ID NO: 1869036 - DNA, 15 bp, Homo sapiens
ggcaattcctgaaaa

SEQ ID NO: 1869037 - DNA, 15 bp, Homo sapiens
gcaattcctgaaaaa

SEQ ID NO: 1869038 - DNA, 15 bp, Homo sapiens
caattcctgaaaaac

SEQ ID NO: 1869039 - DNA, 15 bp, Homo sapiens
aattcctgaaaaact

SEQ ID NO: 1869040 - DNA, 15 bp, Homo sapiens
attcctgaaaaactg

SEQ ID NO: 1869041 - DNA, 15 bp, Homo sapiens
ttcctgaaaaactga

SEQ ID NO: 1869042 - DNA, 15 bp, Homo sapiens
tcctgaaaaactgaa

SEQ ID NO: 1869043 - DNA, 15 bp, Homo sapiens
cctgaaaaactgaaa

SEQ ID NO: 1869044 - DNA, 15 bp, Homo sapiens
ctgaaaaactgaaag

SEQ ID NO: 1869045 - DNA, 15 bp, Homo sapiens
tgaaaaactgaaaga

SEQ ID NO: 1869046 - DNA, 15 bp, Homo sapiens
gaaaaactgaaagac

SEQ ID NO: 1869047 - DNA, 15 bp, Homo sapiens
aaaaactgaaagaca

SEQ ID NO: 1869048 - DNA, 15 bp, Homo sapiens
aaaactgaaagacag

SEQ ID NO: 1869049 - DNA, 15 bp, Homo sapiens
aaactgaaagacaga

SEQ ID NO: 1869050 - DNA, 15 bp, Homo sapiens
aactgaaagacagag

SEQ ID NO: 1869051 - DNA, 15 bp, Homo sapiens
actgaaagacagagc

SEQ ID NO: 1869052 - DNA, 15 bp, Homo sapiens
ctgaaagacagagct

SEQ ID NO: 1869053 - DNA, 15 bp, Homo sapiens
tgaaagacagagcta

SEQ ID NO: 1869054 - DNA, 15 bp, Homo sapiens
gaaagacagagctac

SEQ ID NO: 1869055 - DNA, 15 bp, Homo sapiens
aaagacagagctacc

SEQ ID NO: 1869056 - DNA, 15 bp, Homo sapiens
aagacagagctacca

SEQ ID NO: 1869057 - DNA, 15 bp, Homo sapiens
agacagagctaccat

SEQ ID NO: 1869058 - DNA, 15 bp, Homo sapiens
gacagagctaccatg

SEQ ID NO: 1869059 - DNA, 15 bp, Homo sapiens
acagagctaccatga

SEQ ID NO: 1869060 - DNA, 15 bp, Homo sapiens
cagagctaccatgac

SEQ ID NO: 1869061 - DNA, 15 bp, Homo sapiens
agagctaccatgaca

SEQ ID NO: 1869062 - DNA, 15 bp, Homo sapiens
gagctaccatgacat

SEQ ID NO: 1869063 - DNA, 15 bp, Homo sapiens
agctaccatgacatg

SEQ ID NO: 1869064 - DNA, 15 bp, Homo sapiens
gctaccatgacatgt

SEQ ID NO: 1869065 - DNA, 15 bp, Homo sapiens
ctaccatgacatgta

SEQ ID NO: 1869066 - DNA, 15 bp, Homo sapiens
taccatgacatgtac

SEQ ID NO: 1869067 - DNA, 15 bp, Homo sapiens
accatgacatgtaca

SEQ ID NO: 1869068 - DNA, 15 bp, Homo sapiens
ccatgacatgtacat

SEQ ID NO: 1869069 - DNA, 15 bp, Homo sapiens
catgacatgtacatt

SEQ ID NO: 1869070 - DNA, 15 bp, Homo sapiens
atgacatgtacattc

SEQ ID NO: 1869071 - DNA, 15 bp, Homo sapiens
tgacatgtacattcc

SEQ ID NO: 1869072 - DNA, 15 bp, Homo sapiens
gacatgtacattcca

SEQ ID NO: 1869073 - DNA, 15 bp, Homo sapiens
acatgtacattccac

SEQ ID NO: 1869074 - DNA, 15 bp, Homo sapiens
catgtacattccact

SEQ ID NO: 1869075 - DNA, 15 bp, Homo sapiens
atgtacattccactc

SEQ ID NO: 1869076 - DNA, 15 bp, Homo sapiens
tgtacattccactcc

SEQ ID NO: 1869077 - DNA, 15 bp, Homo sapiens
gtacattccactcct

SEQ ID NO: 1869078 - DNA, 15 bp, Homo sapiens
tacattccactccta

SEQ ID NO: 1869079 - DNA, 15 bp, Homo sapiens
acattccactcctag

SEQ ID NO: 1869080 - DNA, 15 bp, Homo sapiens
cattccactcctagg

SEQ ID NO: 1869081 - DNA, 15 bp, Homo sapiens
ttccactcctaggta

SEQ ID NO: 1869082 - DNA, 15 bp, Homo sapiens
tccactcctaggtat

SEQ ID NO: 1869083 - DNA, 15 bp, Homo sapiens
ccactcctaggtatt

SEQ ID NO: 1869084 - DNA, 15 bp, Homo sapiens
cactcctaggtattt

SEQ ID NO: 1869085 - DNA, 15 bp, Homo sapiens
actcctaggtattta

SEQ ID NO: 1869086 - DNA, 15 bp, Homo sapiens
ctcctaggtatttac

SEQ ID NO: 1869087 - DNA, 15 bp, Homo sapiens
tcctaggtatttacc

SEQ ID NO: 1869088 - DNA, 15 bp, Homo sapiens
cctaggtatttaccc

SEQ ID NO: 1869089 - DNA, 15 bp, Homo sapiens
ctaggtatttaccca

SEQ ID NO: 1869090 - DNA, 15 bp, Homo sapiens
taggtatttacccaa

SEQ ID NO: 1869091 - DNA, 15 bp, Homo sapiens
aggtatttacccaac

SEQ ID NO: 1869092 - DNA, 15 bp, Homo sapiens
ggtatttacccaaca

SEQ ID NO: 1869093 - DNA, 15 bp, Homo sapiens
gtatttacccaacag

SEQ ID NO: 1869094 - DNA, 15 bp, Homo sapiens
tatttacccaacaga

SEQ ID NO: 1869095 - DNA, 15 bp, Homo sapiens
atttacccaacagaa

SEQ ID NO: 1869096 - DNA, 15 bp, Homo sapiens
tttacccaacagaaa

SEQ ID NO: 1869097 - DNA, 15 bp, Homo sapiens
ttacccaacagaaat

SEQ ID NO: 1869098 - DNA, 15 bp, Homo sapiens
tacccaacagaaatg

SEQ ID NO: 1869099 - DNA, 15 bp, Homo sapiens
acccaacagaaatga

SEQ ID NO: 1869100 - DNA, 15 bp, Homo sapiens
cccaacagaaatgaa

SEQ ID NO: 1869101 - DNA, 15 bp, Homo sapiens
ccaacagaaatgaaa

SEQ ID NO: 1869102 - DNA, 15 bp, Homo sapiens
caacagaaatgaaaa

SEQ ID NO: 1869103 - DNA, 15 bp, Homo sapiens
aacagaaatgaaaat

SEQ ID NO: 1869104 - DNA, 15 bp, Homo sapiens
acagaaatgaaaata

SEQ ID NO: 1869105 - DNA, 15 bp, Homo sapiens
cagaaatgaaaatac

SEQ ID NO: 1869106 - DNA, 15 bp, Homo sapiens
agaaatgaaaataca

SEQ ID NO: 1869107 - DNA, 15 bp, Homo sapiens
gaaatgaaaatacat

SEQ ID NO: 1869108 - DNA, 15 bp, Homo sapiens
aaatgaaaatacatg

SEQ ID NO: 1869109 - DNA, 15 bp, Homo sapiens
aatgaaaatacatgt

SEQ ID NO: 1869110 - DNA, 15 bp, Homo sapiens
atgaaaatacatgtc

SEQ ID NO: 1869111 - DNA, 15 bp, Homo sapiens
tgaaaatacatgtcc

SEQ ID NO: 1869112 - DNA, 15 bp, Homo sapiens
gaaaatacatgtcca

SEQ ID NO: 1869113 - DNA, 15 bp, Homo sapiens
aaaatacatgtccac

SEQ ID NO: 1869114 - DNA, 15 bp, Homo sapiens
aaatacatgtccaca

SEQ ID NO: 1869115 - DNA, 15 bp, Homo sapiens
aatacatgtccacac

SEQ ID NO: 1869116 - DNA, 15 bp, Homo sapiens
atacatgtccacaca

SEQ ID NO: 1869117 - DNA, 15 bp, Homo sapiens
tacatgtccacacaa

SEQ ID NO: 1869118 - DNA, 15 bp, Homo sapiens
atgtccacacaaaac

SEQ ID NO: 1869119 - DNA, 15 bp, Homo sapiens
tgtccacacaaaact

SEQ ID NO: 1869120 - DNA, 15 bp, Homo sapiens
gtccacacaaaactt

SEQ ID NO: 1869121 - DNA, 15 bp, Homo sapiens
tccacacaaaacttg

SEQ ID NO: 1869122 - DNA, 15 bp, Homo sapiens
ccacacaaaacttgc

SEQ ID NO: 1869123 - DNA, 15 bp, Homo sapiens
cacacaaaacttgcg

SEQ ID NO: 1869124 - DNA, 15 bp, Homo sapiens
acacaaaacttgcgc

SEQ ID NO: 1869125 - DNA, 15 bp, Homo sapiens
cacaaaacttgcgct

SEQ ID NO: 1869126 - DNA, 15 bp, Homo sapiens
acaaaacttgcgctt

SEQ ID NO: 1869127 - DNA, 15 bp, Homo sapiens
caaaacttgcgcttg

SEQ ID NO: 1869128 - DNA, 15 bp, Homo sapiens
aaaacttgcgcttga

SEQ ID NO: 1869129 - DNA, 15 bp, Homo sapiens
aaacttgcgcttgaa

SEQ ID NO: 1869130 - DNA, 15 bp, Homo sapiens
aacttgcgcttgaac

SEQ ID NO: 1869131 - DNA, 15 bp, Homo sapiens
acttgcgcttgaaca

SEQ ID NO: 1869132 - DNA, 15 bp, Homo sapiens
cttgcgcttgaacat

SEQ ID NO: 1869133 - DNA, 15 bp, Homo sapiens
ttgcgcttgaacatt

SEQ ID NO: 1869134 - DNA, 15 bp, Homo sapiens
tgcgcttgaacattc

SEQ ID NO: 1869135 - DNA, 15 bp, Homo sapiens
gcgcttgaacattca

SEQ ID NO: 1869136 - DNA, 15 bp, Homo sapiens
cgcttgaacattcat

SEQ ID NO: 1869137 - DNA, 15 bp, Homo sapiens
gcttgaacattcata

SEQ ID NO: 1869138 - DNA, 15 bp, Homo sapiens
cttgaacattcataa

SEQ ID NO: 1869139 - DNA, 15 bp, Homo sapiens
ttgaacattcataac

SEQ ID NO: 1869140 - DNA, 15 bp, Homo sapiens
tgaacattcataaca

SEQ ID NO: 1869141 - DNA, 15 bp, Homo sapiens
gaacattcataacag

SEQ ID NO: 1869142 - DNA, 15 bp, Homo sapiens
aacattcataacagc

SEQ ID NO: 1869143 - DNA, 15 bp, Homo sapiens
acattcataacagcg

SEQ ID NO: 1869144 - DNA, 15 bp, Homo sapiens
cattcataacagcga

SEQ ID NO: 1869145 - DNA, 15 bp, Homo sapiens
attcataacagcgaa

SEQ ID NO: 1869146 - DNA, 15 bp, Homo sapiens
ttcataacagcgaaa

SEQ ID NO: 1869147 - DNA, 15 bp, Homo sapiens
tcataacagcgaaac

SEQ ID NO: 1869148 - DNA, 15 bp, Homo sapiens
cataacagcgaaaca

SEQ ID NO: 1869149 - DNA, 15 bp, Homo sapiens
ataacagcgaaacaa

SEQ ID NO: 1869150 - DNA, 15 bp, Homo sapiens
taacagcgaaacaat

SEQ ID NO: 1869151 - DNA, 15 bp, Homo sapiens
aacagcgaaacaatc

SEQ ID NO: 1869152 - DNA, 15 bp, Homo sapiens
acagcgaaacaatct

SEQ ID NO: 1869153 - DNA, 15 bp, Homo sapiens
cagcgaaacaatcta

SEQ ID NO: 1869154 - DNA, 15 bp, Homo sapiens
agcgaaacaatctaa

SEQ ID NO: 1869155 - DNA, 15 bp, Homo sapiens
gcgaaacaatctaaa

SEQ ID NO: 1869156 - DNA, 15 bp, Homo sapiens
cgaaacaatctaaat

SEQ ID NO: 1869157 - DNA, 15 bp, Homo sapiens
gaaacaatctaaatg

SEQ ID NO: 1869158 - DNA, 15 bp, Homo sapiens
aaacaatctaaatgc

SEQ ID NO: 1869159 - DNA, 15 bp, Homo sapiens
aacaatctaaatgcc

SEQ ID NO: 1869160 - DNA, 15 bp, Homo sapiens
acaatctaaatgccc

SEQ ID NO: 1869161 - DNA, 15 bp, Homo sapiens
caatctaaatgccca

SEQ ID NO: 1869162 - DNA, 15 bp, Homo sapiens
aatctaaatgcccat

SEQ ID NO: 1869163 - DNA, 15 bp, Homo sapiens
atctaaatgcccatc

SEQ ID NO: 1869164 - DNA, 15 bp, Homo sapiens
tctaaatgcccatca

SEQ ID NO: 1869165 - DNA, 15 bp, Homo sapiens
atgcccatcaacaga

SEQ ID NO: 1869166 - DNA, 15 bp, Homo sapiens
tgcccatcaacagat

SEQ ID NO: 1869167 - DNA, 15 bp, Homo sapiens
gcccatcaacagatg

SEQ ID NO: 1869168 - DNA, 15 bp, Homo sapiens
cccatcaacagatga

SEQ ID NO: 1869169 - DNA, 15 bp, Homo sapiens
ccatcaacagatgac

SEQ ID NO: 1869170 - DNA, 15 bp, Homo sapiens
catcaacagatgact

SEQ ID NO: 1869171 - DNA, 15 bp, Homo sapiens
atcaacagatgactg

SEQ ID NO: 1869172 - DNA, 15 bp, Homo sapiens
tcaacagatgactgg

SEQ ID NO: 1869173 - DNA, 15 bp, Homo sapiens
caacagatgactgga

SEQ ID NO: 1869174 - DNA, 15 bp, Homo sapiens
aacagatgactggat

SEQ ID NO: 1869175 - DNA, 15 bp, Homo sapiens
acagatgactggatt

SEQ ID NO: 1869176 - DNA, 15 bp, Homo sapiens
cagatgactggatta

SEQ ID NO: 1869177 - DNA, 15 bp, Homo sapiens
agatgactggattaa

SEQ ID NO: 1869178 - DNA, 15 bp, Homo sapiens
gatgactggattaac

SEQ ID NO: 1869179 - DNA, 15 bp, Homo sapiens
atgactggattaaca

SEQ ID NO: 1869180 - DNA, 15 bp, Homo sapiens
tgactggattaacaa

SEQ ID NO: 1869181 - DNA, 15 bp, Homo sapiens
gactggattaacaaa

SEQ ID NO: 1869182 - DNA, 15 bp, Homo sapiens
actggattaacaaaa

SEQ ID NO: 1869183 - DNA, 15 bp, Homo sapiens
ctggattaacaaaat

SEQ ID NO: 1869184 - DNA, 15 bp, Homo sapiens
tggattaacaaaatg

SEQ ID NO: 1869185 - DNA, 15 bp, Homo sapiens
ggattaacaaaatgt

SEQ ID NO: 1869186 - DNA, 15 bp, Homo sapiens
gattaacaaaatgtg

SEQ ID NO: 1869187 - DNA, 15 bp, Homo sapiens
attaacaaaatgtga

SEQ ID NO: 1869188 - DNA, 15 bp, Homo sapiens
ttaacaaaatgtgat

SEQ ID NO: 1869189 - DNA, 15 bp, Homo sapiens
taacaaaatgtgatg

SEQ ID NO: 1869190 - DNA, 15 bp, Homo sapiens
aacaaaatgtgatgt

SEQ ID NO: 1869191 - DNA, 15 bp, Homo sapiens
acaaaatgtgatgtg

SEQ ID NO: 1869192 - DNA, 15 bp, Homo sapiens
caaaatgtgatgtgc

SEQ ID NO: 1869193 - DNA, 15 bp, Homo sapiens
aaaatgtgatgtgct

SEQ ID NO: 1869194 - DNA, 15 bp, Homo sapiens
aaatgtgatgtgctt

SEQ ID NO: 1869195 - DNA, 15 bp, Homo sapiens
aatgtgatgtgctta

SEQ ID NO: 1869196 - DNA, 15 bp, Homo sapiens
atgtgatgtgcttat

SEQ ID NO: 1869197 - DNA, 15 bp, Homo sapiens
tgtgatgtgcttatg

SEQ ID NO: 1869198 - DNA, 15 bp, Homo sapiens
gtgatgtgcttatgc

SEQ ID NO: 1869199 - DNA, 15 bp, Homo sapiens
tgatgtgcttatgca

SEQ ID NO: 1869200 - DNA, 15 bp, Homo sapiens
gatgtgcttatgcag

SEQ ID NO: 1869201 - DNA, 15 bp, Homo sapiens
atgtgcttatgcagt

SEQ ID NO: 1869202 - DNA, 15 bp, Homo sapiens
tgtgcttatgcagtg

SEQ ID NO: 1869203 - DNA, 15 bp, Homo sapiens
gtgcttatgcagtgg

SEQ ID NO: 1869204 - DNA, 15 bp, Homo sapiens
tgcttatgcagtgga

SEQ ID NO: 1869205 - DNA, 15 bp, Homo sapiens
gcttatgcagtggaa

SEQ ID NO: 1869206 - DNA, 15 bp, Homo sapiens
cttatgcagtggaat

SEQ ID NO: 1869207 - DNA, 15 bp, Homo sapiens
ttatgcagtggaata

SEQ ID NO: 1869208 - DNA, 15 bp, Homo sapiens
tatgcagtggaatac

SEQ ID NO: 1869209 - DNA, 15 bp, Homo sapiens
atgcagtggaatacc

SEQ ID NO: 1869210 - DNA, 15 bp, Homo sapiens
tgcagtggaatacca

SEQ ID NO: 1869211 - DNA, 15 bp, Homo sapiens
gcagtggaataccat

SEQ ID NO: 1869212 - DNA, 15 bp, Homo sapiens
cagtggaataccatt

SEQ ID NO: 1869213 - DNA, 15 bp, Homo sapiens
agtggaataccattt

SEQ ID NO: 1869214 - DNA, 15 bp, Homo sapiens
gtggaataccatttg

SEQ ID NO: 1869215 - DNA, 15 bp, Homo sapiens
tggaataccatttgg

SEQ ID NO: 1869216 - DNA, 15 bp, Homo sapiens
ggaataccatttggc

SEQ ID NO: 1869217 - DNA, 15 bp, Homo sapiens
gaataccatttggct

SEQ ID NO: 1869218 - DNA, 15 bp, Homo sapiens
aataccatttggcta

SEQ ID NO: 1869219 - DNA, 15 bp, Homo sapiens
ataccatttggctat

SEQ ID NO: 1869220 - DNA, 15 bp, Homo sapiens
taccatttggctata

SEQ ID NO: 1869221 - DNA, 15 bp, Homo sapiens
accatttggctataa

SEQ ID NO: 1869222 - DNA, 15 bp, Homo sapiens
ccatttggctataaa

SEQ ID NO: 1869223 - DNA, 15 bp, Homo sapiens
catttggctataaaa

SEQ ID NO: 1869224 - DNA, 15 bp, Homo sapiens
atttggctataaaaa

SEQ ID NO: 1869225 - DNA, 15 bp, Homo sapiens
tttggctataaaaag

SEQ ID NO: 1869226 - DNA, 15 bp, Homo sapiens
ttggctataaaaagg

SEQ ID NO: 1869227 - DNA, 15 bp, Homo sapiens
tggctataaaaagga

SEQ ID NO: 1869228 - DNA, 15 bp, Homo sapiens
ggctataaaaaggaa

SEQ ID NO: 1869229 - DNA, 15 bp, Homo sapiens
gctataaaaaggaat

SEQ ID NO: 1869230 - DNA, 15 bp, Homo sapiens
ctataaaaaggaatg

SEQ ID NO: 1869231 - DNA, 15 bp, Homo sapiens
tataaaaaggaatgg

SEQ ID NO: 1869232 - DNA, 15 bp, Homo sapiens
ataaaaaggaatgga

SEQ ID NO: 1869233 - DNA, 15 bp, Homo sapiens
taaaaaggaatggag

SEQ ID NO: 1869234 - DNA, 15 bp, Homo sapiens
aaaaaggaatggaga

SEQ ID NO: 1869235 - DNA, 15 bp, Homo sapiens
aaaaggaatggagaa

SEQ ID NO: 1869236 - DNA, 15 bp, Homo sapiens
aaaggaatggagaac

SEQ ID NO: 1869237 - DNA, 15 bp, Homo sapiens
aaggaatggagaact

SEQ ID NO: 1869238 - DNA, 15 bp, Homo sapiens
aggaatggagaactg

SEQ ID NO: 1869239 - DNA, 15 bp, Homo sapiens
ggaatggagaactga

SEQ ID NO: 1869240 - DNA, 15 bp, Homo sapiens
gaatggagaactgaa

SEQ ID NO: 1869241 - DNA, 15 bp, Homo sapiens
aatggagaactgaaa

SEQ ID NO: 1869242 - DNA, 15 bp, Homo sapiens
atggagaactgaaac

SEQ ID NO: 1869243 - DNA, 15 bp, Homo sapiens
tggagaactgaaaca

SEQ ID NO: 1869244 - DNA, 15 bp, Homo sapiens
ggagaactgaaacat

SEQ ID NO: 1869245 - DNA, 15 bp, Homo sapiens
gagaactgaaacatg

SEQ ID NO: 1869246 - DNA, 15 bp, Homo sapiens
agaactgaaacatgc

SEQ ID NO: 1869247 - DNA, 15 bp, Homo sapiens
gaactgaaacatgcc

SEQ ID NO: 1869248 - DNA, 15 bp, Homo sapiens
aactgaaacatgcca

SEQ ID NO: 1869249 - DNA, 15 bp, Homo sapiens
cctaatttaagttct

SEQ ID NO: 1869250 - DNA, 15 bp, Homo sapiens
ctaatttaagttctg

SEQ ID NO: 1869251 - DNA, 15 bp, Homo sapiens
taatttaagttctga

SEQ ID NO: 1869252 - DNA, 15 bp, Homo sapiens
aatttaagttctgaa

SEQ ID NO: 1869253 - DNA, 15 bp, Homo sapiens
atttaagttctgaat

SEQ ID NO: 1869254 - DNA, 15 bp, Homo sapiens
tttaagttctgaatt

SEQ ID NO: 1869255 - DNA, 15 bp, Homo sapiens
ttaagttctgaattg

SEQ ID NO: 1869256 - DNA, 15 bp, Homo sapiens
taagttctgaattgg

SEQ ID NO: 1869257 - DNA, 15 bp, Homo sapiens
aagttctgaattggt

SEQ ID NO: 1869258 - DNA, 15 bp, Homo sapiens
agttctgaattggta

SEQ ID NO: 1869259 - DNA, 15 bp, Homo sapiens
gttctgaattggtat

SEQ ID NO: 1869260 - DNA, 15 bp, Homo sapiens
ttctgaattggtatg

SEQ ID NO: 1869261 - DNA, 15 bp, Homo sapiens
tctgaattggtatgg

SEQ ID NO: 1869262 - DNA, 15 bp, Homo sapiens
ctgaattggtatggg

SEQ ID NO: 1869263 - DNA, 15 bp, Homo sapiens
tgaattggtatggga

SEQ ID NO: 1869264 - DNA, 15 bp, Homo sapiens
gaattggtatgggac

SEQ ID NO: 1869265 - DNA, 15 bp, Homo sapiens
aattggtatgggact

SEQ ID NO: 1869266 - DNA, 15 bp, Homo sapiens
attggtatgggacta

SEQ ID NO: 1869267 - DNA, 15 bp, Homo sapiens
ttggtatgggactat

SEQ ID NO: 1869268 - DNA, 15 bp, Homo sapiens
tggtatgggactatg

SEQ ID NO: 1869269 - DNA, 15 bp, Homo sapiens
ggtatgggactatgg

SEQ ID NO: 1869270 - DNA, 15 bp, Homo sapiens
gtatgggactatggg

SEQ ID NO: 1869271 - DNA, 15 bp, Homo sapiens
tatgggactatgggg

SEQ ID NO: 1869272 - DNA, 15 bp, Homo sapiens
atgggactatggggc

SEQ ID NO: 1869273 - DNA, 15 bp, Homo sapiens
tgggactatggggcc

SEQ ID NO: 1869274 - DNA, 15 bp, Homo sapiens
gggactatggggcca

SEQ ID NO: 1869275 - DNA, 15 bp, Homo sapiens
ggactatggggccat

SEQ ID NO: 1869276 - DNA, 15 bp, Homo sapiens
gactatggggccatt

SEQ ID NO: 1869277 - DNA, 15 bp, Homo sapiens
actatggggccattt

SEQ ID NO: 1869278 - DNA, 15 bp, Homo sapiens
ctatggggccatttg

SEQ ID NO: 1869279 - DNA, 15 bp, Homo sapiens
tatggggccatttga

SEQ ID NO: 1869280 - DNA, 15 bp, Homo sapiens
atggggccatttgaa

SEQ ID NO: 1869281 - DNA, 15 bp, Homo sapiens
tggggccatttgaaa

SEQ ID NO: 1869282 - DNA, 15 bp, Homo sapiens
ggggccatttgaaac

SEQ ID NO: 1869283 - DNA, 15 bp, Homo sapiens
gggccatttgaaacc

SEQ ID NO: 1869284 - DNA, 15 bp, Homo sapiens
ggccatttgaaacca

SEQ ID NO: 1869285 - DNA, 15 bp, Homo sapiens
gccatttgaaaccat

SEQ ID NO: 1869286 - DNA, 15 bp, Homo sapiens
ccatttgaaaccatg

SEQ ID NO: 1869287 - DNA, 15 bp, Homo sapiens
catttgaaaccatgt

SEQ ID NO: 1869288 - DNA, 15 bp, Homo sapiens
atttgaaaccatgtt

SEQ ID NO: 1869289 - DNA, 15 bp, Homo sapiens
tttgaaaccatgttg

SEQ ID NO: 1869290 - DNA, 15 bp, Homo sapiens
ttgaaaccatgttgg

SEQ ID NO: 1869291 - DNA, 15 bp, Homo sapiens
tgaaaccatgttggg

SEQ ID NO: 1869292 - DNA, 15 bp, Homo sapiens
gaaaccatgttggga

SEQ ID NO: 1869293 - DNA, 15 bp, Homo sapiens
aaaccatgttgggag

SEQ ID NO: 1869294 - DNA, 15 bp, Homo sapiens
aaccatgttgggaga

SEQ ID NO: 1869295 - DNA, 15 bp, Homo sapiens
accatgttgggagat

SEQ ID NO: 1869296 - DNA, 15 bp, Homo sapiens
ccatgttgggagatg

SEQ ID NO: 1869297 - DNA, 15 bp, Homo sapiens
catgttgggagatgg

SEQ ID NO: 1869298 - DNA, 15 bp, Homo sapiens
atgttgggagatggg

SEQ ID NO: 1869299 - DNA, 15 bp, Homo sapiens
tgttgggagatggga

SEQ ID NO: 1869300 - DNA, 15 bp, Homo sapiens
gttgggagatgggac

SEQ ID NO: 1869301 - DNA, 15 bp, Homo sapiens
ttgggagatgggact

SEQ ID NO: 1869302 - DNA, 15 bp, Homo sapiens
tgggagatgggactt

SEQ ID NO: 1869303 - DNA, 15 bp, Homo sapiens
gggagatgggacttc

SEQ ID NO: 1869304 - DNA, 15 bp, Homo sapiens
ggagatgggacttcc

SEQ ID NO: 1869305 - DNA, 15 bp, Homo sapiens
gagatgggacttccc

SEQ ID NO: 1869306 - DNA, 15 bp, Homo sapiens
agatgggacttccct

SEQ ID NO: 1869307 - DNA, 15 bp, Homo sapiens
gatgggacttcccta

SEQ ID NO: 1869308 - DNA, 15 bp, Homo sapiens
atgggacttccctag

SEQ ID NO: 1869309 - DNA, 15 bp, Homo sapiens
tgggacttccctagt

SEQ ID NO: 1869310 - DNA, 15 bp, Homo sapiens
gggacttccctagta

SEQ ID NO: 1869311 - DNA, 15 bp, Homo sapiens
ggacttccctagtat

SEQ ID NO: 1869312 - DNA, 15 bp, Homo sapiens
gacttccctagtatc

SEQ ID NO: 1869313 - DNA, 15 bp, Homo sapiens
acttccctagtatct

SEQ ID NO: 1869314 - DNA, 15 bp, Homo sapiens
cttccctagtatctt

SEQ ID NO: 1869315 - DNA, 15 bp, Homo sapiens
ttccctagtatcttg

SEQ ID NO: 1869316 - DNA, 15 bp, Homo sapiens
tccctagtatcttgg

SEQ ID NO: 1869317 - DNA, 15 bp, Homo sapiens
ccctagtatcttggt

SEQ ID NO: 1869318 - DNA, 15 bp, Homo sapiens
cctagtatcttggta

SEQ ID NO: 1869319 - DNA, 15 bp, Homo sapiens
ctagtatcttggtac

SEQ ID NO: 1869320 - DNA, 15 bp, Homo sapiens
tagtatcttggtact

SEQ ID NO: 1869321 - DNA, 15 bp, Homo sapiens
agtatcttggtactg

SEQ ID NO: 1869322 - DNA, 15 bp, Homo sapiens
gtatcttggtactgt

SEQ ID NO: 1869323 - DNA, 15 bp, Homo sapiens
tatcttggtactgtt

SEQ ID NO: 1869324 - DNA, 15 bp, Homo sapiens
atcttggtactgttg

SEQ ID NO: 1869325 - DNA, 15 bp, Homo sapiens
tcttggtactgttga

SEQ ID NO: 1869326 - DNA, 15 bp, Homo sapiens
cttggtactgttgaa

SEQ ID NO: 1869327 - DNA, 15 bp, Homo sapiens
ttggtactgttgaat

SEQ ID NO: 1869328 - DNA, 15 bp, Homo sapiens
tggtactgttgaatt

SEQ ID NO: 1869329 - DNA, 15 bp, Homo sapiens
ggtactgttgaatta

SEQ ID NO: 1869330 - DNA, 15 bp, Homo sapiens
gtactgttgaattat

SEQ ID NO: 1869331 - DNA, 15 bp, Homo sapiens
tactgttgaattata

SEQ ID NO: 1869332 - DNA, 15 bp, Homo sapiens
actgttgaattataa

SEQ ID NO: 1869333 - DNA, 15 bp, Homo sapiens
ctgttgaattataat

SEQ ID NO: 1869334 - DNA, 15 bp, Homo sapiens
tgttgaattataatc

SEQ ID NO: 1869335 - DNA, 15 bp, Homo sapiens
gttgaattataatca

SEQ ID NO: 1869336 - DNA, 15 bp, Homo sapiens
ttgaattataatcag

SEQ ID NO: 1869337 - DNA, 15 bp, Homo sapiens
tgaattataatcagt

SEQ ID NO: 1869338 - DNA, 15 bp, Homo sapiens
gaattataatcagtt

SEQ ID NO: 1869339 - DNA, 15 bp, Homo sapiens
aattataatcagttt

SEQ ID NO: 1869340 - DNA, 15 bp, Homo sapiens
attataatcagtttc

SEQ ID NO: 1869341 - DNA, 15 bp, Homo sapiens
ttataatcagtttcc

SEQ ID NO: 1869342 - DNA, 15 bp, Homo sapiens
tataatcagtttcct

SEQ ID NO: 1869343 - DNA, 15 bp, Homo sapiens
ataatcagtttcctc

SEQ ID NO: 1869344 - DNA, 15 bp, Homo sapiens
taatcagtttcctcc

SEQ ID NO: 1869345 - DNA, 15 bp, Homo sapiens
aatcagtttcctcca

SEQ ID NO: 1869346 - DNA, 15 bp, Homo sapiens
atcagtttcctccag

SEQ ID NO: 1869347 - DNA, 15 bp, Homo sapiens
tcagtttcctccagg

SEQ ID NO: 1869348 - DNA, 15 bp, Homo sapiens
cagtttcctccaggt

SEQ ID NO: 1869349 - DNA, 15 bp, Homo sapiens
agtttcctccaggtt

SEQ ID NO: 1869350 - DNA, 15 bp, Homo sapiens
gtttcctccaggttt

SEQ ID NO: 1869351 - DNA, 15 bp, Homo sapiens
tttcctccaggtttg

SEQ ID NO: 1869352 - DNA, 15 bp, Homo sapiens
ttcctccaggtttgt

SEQ ID NO: 1869353 - DNA, 15 bp, Homo sapiens
tcctccaggtttgtc

SEQ ID NO: 1869354 - DNA, 15 bp, Homo sapiens
cctccaggtttgtct

SEQ ID NO: 1869355 - DNA, 15 bp, Homo sapiens
ctccaggtttgtcta

SEQ ID NO: 1869356 - DNA, 15 bp, Homo sapiens
tccaggtttgtctat

SEQ ID NO: 1869357 - DNA, 15 bp, Homo sapiens
ccaggtttgtctatt

SEQ ID NO: 1869358 - DNA, 15 bp, Homo sapiens
caggtttgtctattt

SEQ ID NO: 1869359 - DNA, 15 bp, Homo sapiens
gtttgtctattttct

SEQ ID NO: 1869360 - DNA, 15 bp, Homo sapiens
tttgtctattttctc

SEQ ID NO: 1869361 - DNA, 15 bp, Homo sapiens
ttgtctattttctcc

SEQ ID NO: 1869362 - DNA, 15 bp, Homo sapiens
tgtctattttctccc

SEQ ID NO: 1869363 - DNA, 15 bp, Homo sapiens
gtctattttctccct

SEQ ID NO: 1869364 - DNA, 15 bp, Homo sapiens
tctattttctccctc

SEQ ID NO: 1869365 - DNA, 15 bp, Homo sapiens
ctattttctccctca

SEQ ID NO: 1869366 - DNA, 15 bp, Homo sapiens
tattttctccctcaa

SEQ ID NO: 1869367 - DNA, 15 bp, Homo sapiens
attttctccctcaat

SEQ ID NO: 1869368 - DNA, 15 bp, Homo sapiens
ttttctccctcaatt

SEQ ID NO: 1869369 - DNA, 15 bp, Homo sapiens
tttctccctcaattc

SEQ ID NO: 1869370 - DNA, 15 bp, Homo sapiens
ttctccctcaattca

SEQ ID NO: 1869371 - DNA, 15 bp, Homo sapiens
tctccctcaattcat

SEQ ID NO: 1869372 - DNA, 15 bp, Homo sapiens
ctccctcaattcatt

SEQ ID NO: 1869373 - DNA, 15 bp, Homo sapiens
tccctcaattcattt

SEQ ID NO: 1869374 - DNA, 15 bp, Homo sapiens
ccctcaattcattta

SEQ ID NO: 1869375 - DNA, 15 bp, Homo sapiens
cctcaattcatttat

SEQ ID NO: 1869376 - DNA, 15 bp, Homo sapiens
ctcaattcatttatt

SEQ ID NO: 1869377 - DNA, 15 bp, Homo sapiens
caattcatttatttt

SEQ ID NO: 1869378 - DNA, 15 bp, Homo sapiens
aattcatttattttt

SEQ ID NO: 1869379 - DNA, 15 bp, Homo sapiens
attcatttatttttc

SEQ ID NO: 1869380 - DNA, 15 bp, Homo sapiens
ttcatttatttttct

SEQ ID NO: 1869381 - DNA, 15 bp, Homo sapiens
tcatttatttttctc

SEQ ID NO: 1869382 - DNA, 15 bp, Homo sapiens
catttatttttctcc

SEQ ID NO: 1869383 - DNA, 15 bp, Homo sapiens
atttatttttctcct

SEQ ID NO: 1869384 - DNA, 15 bp, Homo sapiens
tttatttttctcctc

SEQ ID NO: 1869385 - DNA, 15 bp, Homo sapiens
ttatttttctcctcc

SEQ ID NO: 1869386 - DNA, 15 bp, Homo sapiens
tatttttctcctcct

SEQ ID NO: 1869387 - DNA, 15 bp, Homo sapiens
atttttctcctcctc

SEQ ID NO: 1869388 - DNA, 15 bp, Homo sapiens
tttttctcctcctcc

SEQ ID NO: 1869389 - DNA, 15 bp, Homo sapiens
ttttctcctcctcct

SEQ ID NO: 1869390 - DNA, 15 bp, Homo sapiens
tttctcctcctcctt

SEQ ID NO: 1869391 - DNA, 15 bp, Homo sapiens
ttctcctcctcctta

SEQ ID NO: 1869392 - DNA, 15 bp, Homo sapiens
tctcctcctccttaa

SEQ ID NO: 1869393 - DNA, 15 bp, Homo sapiens
ctcctcctccttaaa

SEQ ID NO: 1869394 - DNA, 15 bp, Homo sapiens
tcctcctccttaaac

SEQ ID NO: 1869395 - DNA, 15 bp, Homo sapiens
cctcctccttaaaca

SEQ ID NO: 1869396 - DNA, 15 bp, Homo sapiens
ctcctccttaaacat

SEQ ID NO: 1869397 - DNA, 15 bp, Homo sapiens
tcctccttaaacatg

SEQ ID NO: 1869398 - DNA, 15 bp, Homo sapiens
cctccttaaacatgt

SEQ ID NO: 1869399 - DNA, 15 bp, Homo sapiens
ctccttaaacatgta

SEQ ID NO: 1869400 - DNA, 15 bp, Homo sapiens
tccttaaacatgtat

SEQ ID NO: 1869401 - DNA, 15 bp, Homo sapiens
ccttaaacatgtatt

SEQ ID NO: 1869402 - DNA, 15 bp, Homo sapiens
cttaaacatgtattg

SEQ ID NO: 1869403 - DNA, 15 bp, Homo sapiens
ttaaacatgtattga

SEQ ID NO: 1869404 - DNA, 15 bp, Homo sapiens
taaacatgtattgag

SEQ ID NO: 1869405 - DNA, 15 bp, Homo sapiens
aaacatgtattgagg

SEQ ID NO: 1869406 - DNA, 15 bp, Homo sapiens
aacatgtattgaggg

SEQ ID NO: 1869407 - DNA, 15 bp, Homo sapiens
acatgtattgagggc

SEQ ID NO: 1869408 - DNA, 15 bp, Homo sapiens
catgtattgagggcc

SEQ ID NO: 1869409 - DNA, 15 bp, Homo sapiens
atgtattgagggcct

SEQ ID NO: 1869410 - DNA, 15 bp, Homo sapiens
tgtattgagggccta

SEQ ID NO: 1869411 - DNA, 15 bp, Homo sapiens
gtattgagggcctat

SEQ ID NO: 1869412 - DNA, 15 bp, Homo sapiens
tattgagggcctatt

SEQ ID NO: 1869413 - DNA, 15 bp, Homo sapiens
attgagggcctattt

SEQ ID NO: 1869414 - DNA, 15 bp, Homo sapiens
ttgagggcctatttt

SEQ ID NO: 1869415 - DNA, 15 bp, Homo sapiens
tgagggcctattttg

SEQ ID NO: 1869416 - DNA, 15 bp, Homo sapiens
gagggcctattttgc

SEQ ID NO: 1869417 - DNA, 15 bp, Homo sapiens
agggcctattttgcg

SEQ ID NO: 1869418 - DNA, 15 bp, Homo sapiens
gggcctattttgcgg

SEQ ID NO: 1869419 - DNA, 15 bp, Homo sapiens
ggcctattttgcggg

SEQ ID NO: 1869420 - DNA, 15 bp, Homo sapiens
gcctattttgcgggt

SEQ ID NO: 1869421 - DNA, 15 bp, Homo sapiens
cctattttgcgggta

SEQ ID NO: 1869422 - DNA, 15 bp, Homo sapiens
ctattttgcgggtac

SEQ ID NO: 1869423 - DNA, 15 bp, Homo sapiens
tattttgcgggtacc

SEQ ID NO: 1869424 - DNA, 15 bp, Homo sapiens
attttgcgggtacca

SEQ ID NO: 1869425 - DNA, 15 bp, Homo sapiens
ttttgcgggtaccat

SEQ ID NO: 1869426 - DNA, 15 bp, Homo sapiens
tttgcgggtaccatg

SEQ ID NO: 1869427 - DNA, 15 bp, Homo sapiens
ttgcgggtaccatga

SEQ ID NO: 1869428 - DNA, 15 bp, Homo sapiens
tgcgggtaccatgat

SEQ ID NO: 1869429 - DNA, 15 bp, Homo sapiens
gcgggtaccatgatg

SEQ ID NO: 1869430 - DNA, 15 bp, Homo sapiens
cgggtaccatgatga

SEQ ID NO: 1869431 - DNA, 15 bp, Homo sapiens
gggtaccatgatgat

SEQ ID NO: 1869432 - DNA, 15 bp, Homo sapiens
ggtaccatgatgatg

SEQ ID NO: 1869433 - DNA, 15 bp, Homo sapiens
gtaccatgatgatgg

SEQ ID NO: 1869434 - DNA, 15 bp, Homo sapiens
taccatgatgatggg

SEQ ID NO: 1869435 - DNA, 15 bp, Homo sapiens
accatgatgatggga

SEQ ID NO: 1869436 - DNA, 15 bp, Homo sapiens
ccatgatgatgggaa

SEQ ID NO: 1869437 - DNA, 15 bp, Homo sapiens
catgatgatgggaac

SEQ ID NO: 1869438 - DNA, 15 bp, Homo sapiens
atgatgatgggaacc

SEQ ID NO: 1869439 - DNA, 15 bp, Homo sapiens
tgatgatgggaaccc

SEQ ID NO: 1869440 - DNA, 15 bp, Homo sapiens
gatgatgggaaccca

SEQ ID NO: 1869441 - DNA, 15 bp, Homo sapiens
atgatgggaacccag

SEQ ID NO: 1869442 - DNA, 15 bp, Homo sapiens
tgatgggaacccaga

SEQ ID NO: 1869443 - DNA, 15 bp, Homo sapiens
gatgggaacccagac

SEQ ID NO: 1869444 - DNA, 15 bp, Homo sapiens
atgggaacccagaca

SEQ ID NO: 1869445 - DNA, 15 bp, Homo sapiens
tgggaacccagacac

SEQ ID NO: 1869446 - DNA, 15 bp, Homo sapiens
gggaacccagacaca

SEQ ID NO: 1869447 - DNA, 15 bp, Homo sapiens
ggaacccagacacaa

SEQ ID NO: 1869448 - DNA, 15 bp, Homo sapiens
gaacccagacacaaa

SEQ ID NO: 1869449 - DNA, 15 bp, Homo sapiens
aacccagacacaaaa

SEQ ID NO: 1869450 - DNA, 15 bp, Homo sapiens
acccagacacaaaac

SEQ ID NO: 1869451 - DNA, 15 bp, Homo sapiens
cccagacacaaaaca

SEQ ID NO: 1869452 - DNA, 15 bp, Homo sapiens
ccagacacaaaacac

SEQ ID NO: 1869453 - DNA, 15 bp, Homo sapiens
cagacacaaaacacc

SEQ ID NO: 1869454 - DNA, 15 bp, Homo sapiens
agacacaaaacacca

SEQ ID NO: 1869455 - DNA, 15 bp, Homo sapiens
gacacaaaacaccaa

SEQ ID NO: 1869456 - DNA, 15 bp, Homo sapiens
acacaaaacaccaag

SEQ ID NO: 1869457 - DNA, 15 bp, Homo sapiens
cacaaaacaccaagg

SEQ ID NO: 1869458 - DNA, 15 bp, Homo sapiens
acaaaacaccaaggc

SEQ ID NO: 1869459 - DNA, 15 bp, Homo sapiens
caaaacaccaaggct

SEQ ID NO: 1869460 - DNA, 15 bp, Homo sapiens
aaaacaccaaggctc

SEQ ID NO: 1869461 - DNA, 15 bp, Homo sapiens
aaacaccaaggctct

SEQ ID NO: 1869462 - DNA, 15 bp, Homo sapiens
aacaccaaggctctc

SEQ ID NO: 1869463 - DNA, 15 bp, Homo sapiens
acaccaaggctctcc

SEQ ID NO: 1869464 - DNA, 15 bp, Homo sapiens
caccaaggctctccc

SEQ ID NO: 1869465 - DNA, 15 bp, Homo sapiens
accaaggctctcccc

SEQ ID NO: 1869466 - DNA, 15 bp, Homo sapiens
ccaaggctctcccct

SEQ ID NO: 1869467 - DNA, 15 bp, Homo sapiens
caaggctctcccctc

SEQ ID NO: 1869468 - DNA, 15 bp, Homo sapiens
aaggctctcccctca

SEQ ID NO: 1869469 - DNA, 15 bp, Homo sapiens
aggctctcccctcag

SEQ ID NO: 1869470 - DNA, 15 bp, Homo sapiens
ggctctcccctcagg

SEQ ID NO: 1869471 - DNA, 15 bp, Homo sapiens
gctctcccctcagga

SEQ ID NO: 1869472 - DNA, 15 bp, Homo sapiens
ctctcccctcaggag

SEQ ID NO: 1869473 - DNA, 15 bp, Homo sapiens
tctcccctcaggagc

SEQ ID NO: 1869474 - DNA, 15 bp, Homo sapiens
ctcccctcaggagct

SEQ ID NO: 1869475 - DNA, 15 bp, Homo sapiens
tcccctcaggagctc

SEQ ID NO: 1869476 - DNA, 15 bp, Homo sapiens
cccctcaggagctca

SEQ ID NO: 1869477 - DNA, 15 bp, Homo sapiens
ccctcaggagctcac

SEQ ID NO: 1869478 - DNA, 15 bp, Homo sapiens
cctcaggagctcaca

SEQ ID NO: 1869479 - DNA, 15 bp, Homo sapiens
ctcaggagctcacag

SEQ ID NO: 1869480 - DNA, 15 bp, Homo sapiens
tcaggagctcacagt

SEQ ID NO: 1869481 - DNA, 15 bp, Homo sapiens
caggagctcacagtc

SEQ ID NO: 1869482 - DNA, 15 bp, Homo sapiens
aggagctcacagtct

SEQ ID NO: 1869483 - DNA, 15 bp, Homo sapiens
ggagctcacagtcta

SEQ ID NO: 1869484 - DNA, 15 bp, Homo sapiens
gagctcacagtctag

SEQ ID NO: 1869485 - DNA, 15 bp, Homo sapiens
agctcacagtctagc

SEQ ID NO: 1869486 - DNA, 15 bp, Homo sapiens
gctcacagtctagca

SEQ ID NO: 1869487 - DNA, 15 bp, Homo sapiens
ctcacagtctagcag

SEQ ID NO: 1869488 - DNA, 15 bp, Homo sapiens
tcacagtctagcagg

SEQ ID NO: 1869489 - DNA, 15 bp, Homo sapiens
cacagtctagcaggg

SEQ ID NO: 1869490 - DNA, 15 bp, Homo sapiens
acagtctagcaggga

SEQ ID NO: 1869491 - DNA, 15 bp, Homo sapiens
cagtctagcagggaa

SEQ ID NO: 1869492 - DNA, 15 bp, Homo sapiens
agtctagcagggaag

SEQ ID NO: 1869493 - DNA, 15 bp, Homo sapiens
gtctagcagggaagg

SEQ ID NO: 1869494 - DNA, 15 bp, Homo sapiens
tctagcagggaaggg

SEQ ID NO: 1869495 - DNA, 15 bp, Homo sapiens
ctagcagggaaggga

SEQ ID NO: 1869496 - DNA, 15 bp, Homo sapiens
tagcagggaagggag

SEQ ID NO: 1869497 - DNA, 15 bp, Homo sapiens
agcagggaagggaga

SEQ ID NO: 1869498 - DNA, 15 bp, Homo sapiens
gcagggaagggagac

SEQ ID NO: 1869499 - DNA, 15 bp, Homo sapiens
cagggaagggagaca

SEQ ID NO: 1869500 - DNA, 15 bp, Homo sapiens
agggaagggagacag

SEQ ID NO: 1869501 - DNA, 15 bp, Homo sapiens
gggaagggagacaga

SEQ ID NO: 1869502 - DNA, 15 bp, Homo sapiens
ggaagggagacagat

SEQ ID NO: 1869503 - DNA, 15 bp, Homo sapiens
gaagggagacagata

SEQ ID NO: 1869504 - DNA, 15 bp, Homo sapiens
aagggagacagatac

SEQ ID NO: 1869505 - DNA, 15 bp, Homo sapiens
agggagacagataca

SEQ ID NO: 1869506 - DNA, 15 bp, Homo sapiens
gggagacagatacac

SEQ ID NO: 1869507 - DNA, 15 bp, Homo sapiens
ggagacagatacaca

SEQ ID NO: 1869508 - DNA, 15 bp, Homo sapiens
gagacagatacacaa

SEQ ID NO: 1869509 - DNA, 15 bp, Homo sapiens
agacagatacacaaa

SEQ ID NO: 1869510 - DNA, 15 bp, Homo sapiens
gacagatacacaaac

SEQ ID NO: 1869511 - DNA, 15 bp, Homo sapiens
acagatacacaaaca

SEQ ID NO: 1869512 - DNA, 15 bp, Homo sapiens
cagatacacaaacaa

SEQ ID NO: 1869513 - DNA, 15 bp, Homo sapiens
agatacacaaacaaa

SEQ ID NO: 1869514 - DNA, 15 bp, Homo sapiens
gatacacaaacaaat

SEQ ID NO: 1869515 - DNA, 15 bp, Homo sapiens
atacacaaacaaata

SEQ ID NO: 1869516 - DNA, 15 bp, Homo sapiens
tacacaaacaaataa

SEQ ID NO: 1869517 - DNA, 15 bp, Homo sapiens
acacaaacaaataaa

SEQ ID NO: 1869518 - DNA, 15 bp, Homo sapiens
cacaaacaaataaat

SEQ ID NO: 1869519 - DNA, 15 bp, Homo sapiens
acaaacaaataaatt

SEQ ID NO: 1869520 - DNA, 15 bp, Homo sapiens
caaacaaataaatta

SEQ ID NO: 1869521 - DNA, 15 bp, Homo sapiens
aaacaaataaattac

SEQ ID NO: 1869522 - DNA, 15 bp, Homo sapiens
aacaaataaattacc

SEQ ID NO: 1869523 - DNA, 15 bp, Homo sapiens
acaaataaattacca

SEQ ID NO: 1869524 - DNA, 15 bp, Homo sapiens
caaataaattaccac

SEQ ID NO: 1869525 - DNA, 15 bp, Homo sapiens
aaataaattaccact

SEQ ID NO: 1869526 - DNA, 15 bp, Homo sapiens
aataaattaccactt

SEQ ID NO: 1869527 - DNA, 15 bp, Homo sapiens
ataaattaccacttc

SEQ ID NO: 1869528 - DNA, 15 bp, Homo sapiens
taaattaccacttca

SEQ ID NO: 1869529 - DNA, 15 bp, Homo sapiens
aaattaccacttcat

SEQ ID NO: 1869530 - DNA, 15 bp, Homo sapiens
aattaccacttcatg

SEQ ID NO: 1869531 - DNA, 15 bp, Homo sapiens
attaccacttcatga

SEQ ID NO: 1869532 - DNA, 15 bp, Homo sapiens
ttaccacttcatgag

SEQ ID NO: 1869533 - DNA, 15 bp, Homo sapiens
taccacttcatgagt

SEQ ID NO: 1869534 - DNA, 15 bp, Homo sapiens
accacttcatgagtg

SEQ ID NO: 1869535 - DNA, 15 bp, Homo sapiens
ccacttcatgagtga

SEQ ID NO: 1869536 - DNA, 15 bp, Homo sapiens
cacttcatgagtgat

SEQ ID NO: 1869537 - DNA, 15 bp, Homo sapiens
acttcatgagtgatg

SEQ ID NO: 1869538 - DNA, 15 bp, Homo sapiens
cttcatgagtgatga

SEQ ID NO: 1869539 - DNA, 15 bp, Homo sapiens
ttcatgagtgatgag

SEQ ID NO: 1869540 - DNA, 15 bp, Homo sapiens
tcatgagtgatgagc

SEQ ID NO: 1869541 - DNA, 15 bp, Homo sapiens
catgagtgatgagcg

SEQ ID NO: 1869542 - DNA, 15 bp, Homo sapiens
atgagtgatgagcgc

SEQ ID NO: 1869543 - DNA, 15 bp, Homo sapiens
tgagtgatgagcgcc

SEQ ID NO: 1869544 - DNA, 15 bp, Homo sapiens
gagtgatgagcgcca

SEQ ID NO: 1869545 - DNA, 15 bp, Homo sapiens
agtgatgagcgccac

SEQ ID NO: 1869546 - DNA, 15 bp, Homo sapiens
gtgatgagcgccaca

SEQ ID NO: 1869547 - DNA, 15 bp, Homo sapiens
tgatgagcgccacaa

SEQ ID NO: 1869548 - DNA, 15 bp, Homo sapiens
gatgagcgccacaac

SEQ ID NO: 1869549 - DNA, 15 bp, Homo sapiens
atgagcgccacaaca

SEQ ID NO: 1869550 - DNA, 15 bp, Homo sapiens
tgagcgccacaacag

SEQ ID NO: 1869551 - DNA, 15 bp, Homo sapiens
gagcgccacaacaga

SEQ ID NO: 1869552 - DNA, 15 bp, Homo sapiens
agcgccacaacagaa

SEQ ID NO: 1869553 - DNA, 15 bp, Homo sapiens
gcgccacaacagaag

SEQ ID NO: 1869554 - DNA, 15 bp, Homo sapiens
cgccacaacagaagc

SEQ ID NO: 1869555 - DNA, 15 bp, Homo sapiens
gccacaacagaagca

SEQ ID NO: 1869556 - DNA, 15 bp, Homo sapiens
ccacaacagaagcac

SEQ ID NO: 1869557 - DNA, 15 bp, Homo sapiens
cacaacagaagcacc

SEQ ID NO: 1869558 - DNA, 15 bp, Homo sapiens
acaacagaagcaccc

SEQ ID NO: 1869559 - DNA, 15 bp, Homo sapiens
caacagaagcaccca

SEQ ID NO: 1869560 - DNA, 15 bp, Homo sapiens
aacagaagcacccag

SEQ ID NO: 1869561 - DNA, 15 bp, Homo sapiens
acagaagcacccagg

SEQ ID NO: 1869562 - DNA, 15 bp, Homo sapiens
cagaagcacccagga

SEQ ID NO: 1869563 - DNA, 15 bp, Homo sapiens
agaagcacccaggaa

SEQ ID NO: 1869564 - DNA, 15 bp, Homo sapiens
gaagcacccaggaag

SEQ ID NO: 1869565 - DNA, 15 bp, Homo sapiens
aagcacccaggaaga

SEQ ID NO: 1869566 - DNA, 15 bp, Homo sapiens
agcacccaggaagaa

SEQ ID NO: 1869567 - DNA, 15 bp, Homo sapiens
gcacccaggaagaaa

SEQ ID NO: 1869568 - DNA, 15 bp, Homo sapiens
cacccaggaagaaaa

SEQ ID NO: 1869569 - DNA, 15 bp, Homo sapiens
acccaggaagaaaag

SEQ ID NO: 1869570 - DNA, 15 bp, Homo sapiens
cccaggaagaaaagc

SEQ ID NO: 1869571 - DNA, 15 bp, Homo sapiens
ccaggaagaaaagcc

SEQ ID NO: 1869572 - DNA, 15 bp, Homo sapiens
caggaagaaaagcct

SEQ ID NO: 1869573 - DNA, 15 bp, Homo sapiens
aggaagaaaagccta

SEQ ID NO: 1869574 - DNA, 15 bp, Homo sapiens
ggaagaaaagcctag

SEQ ID NO: 1869575 - DNA, 15 bp, Homo sapiens
gaagaaaagcctaga

SEQ ID NO: 1869576 - DNA, 15 bp, Homo sapiens
aagaaaagcctagaa

SEQ ID NO: 1869577 - DNA, 15 bp, Homo sapiens
agaaaagcctagaaa

SEQ ID NO: 1869578 - DNA, 15 bp, Homo sapiens
gaaaagcctagaaaa

SEQ ID NO: 1869579 - DNA, 15 bp, Homo sapiens
aaaagcctagaaaaa

SEQ ID NO: 1869580 - DNA, 15 bp, Homo sapiens
aaagcctagaaaaag

SEQ ID NO: 1869581 - DNA, 15 bp, Homo sapiens
aagcctagaaaaagg

SEQ ID NO: 1869582 - DNA, 15 bp, Homo sapiens
agcctagaaaaaggt

SEQ ID NO: 1869583 - DNA, 15 bp, Homo sapiens
gcctagaaaaaggtt

SEQ ID NO: 1869584 - DNA, 15 bp, Homo sapiens
cctagaaaaaggttc

SEQ ID NO: 1869585 - DNA, 15 bp, Homo sapiens
ctagaaaaaggttca

SEQ ID NO: 1869586 - DNA, 15 bp, Homo sapiens
tagaaaaaggttcag

SEQ ID NO: 1869587 - DNA, 15 bp, Homo sapiens
agaaaaaggttcagt

SEQ ID NO: 1869588 - DNA, 15 bp, Homo sapiens
gaaaaaggttcagtt

SEQ ID NO: 1869589 - DNA, 15 bp, Homo sapiens
aaaaaggttcagtta

SEQ ID NO: 1869590 - DNA, 15 bp, Homo sapiens
aaaaggttcagttac

SEQ ID NO: 1869591 - DNA, 15 bp, Homo sapiens
aaaggttcagttacc

SEQ ID NO: 1869592 - DNA, 15 bp, Homo sapiens
aaggttcagttacct

SEQ ID NO: 1869593 - DNA, 15 bp, Homo sapiens
aggttcagttacctc

SEQ ID NO: 1869594 - DNA, 15 bp, Homo sapiens
ggttcagttacctct

SEQ ID NO: 1869595 - DNA, 15 bp, Homo sapiens
gttcagttacctctg

SEQ ID NO: 1869596 - DNA, 15 bp, Homo sapiens
ttcagttacctctgg

SEQ ID NO: 1869597 - DNA, 15 bp, Homo sapiens
tcagttacctctggg

SEQ ID NO: 1869598 - DNA, 15 bp, Homo sapiens
cagttacctctgggt

SEQ ID NO: 1869599 - DNA, 15 bp, Homo sapiens
agttacctctgggtg

SEQ ID NO: 1869600 - DNA, 15 bp, Homo sapiens
gttacctctgggtgg

SEQ ID NO: 1869601 - DNA, 15 bp, Homo sapiens
ttacctctgggtggg

SEQ ID NO: 1869602 - DNA, 15 bp, Homo sapiens
tacctctgggtggga

SEQ ID NO: 1869603 - DNA, 15 bp, Homo sapiens
acctctgggtgggag

SEQ ID NO: 1869604 - DNA, 15 bp, Homo sapiens
cctctgggtgggagg

SEQ ID NO: 1869605 - DNA, 15 bp, Homo sapiens
ctctgggtgggagga

SEQ ID NO: 1869606 - DNA, 15 bp, Homo sapiens
tctgggtgggaggag

SEQ ID NO: 1869607 - DNA, 15 bp, Homo sapiens
ctgggtgggaggagg

SEQ ID NO: 1869608 - DNA, 15 bp, Homo sapiens
tgggtgggaggagga

SEQ ID NO: 1869609 - DNA, 15 bp, Homo sapiens
gggtgggaggaggat

SEQ ID NO: 1869610 - DNA, 15 bp, Homo sapiens
ggtgggaggaggatc

SEQ ID NO: 1869611 - DNA, 15 bp, Homo sapiens
gtgggaggaggatca

SEQ ID NO: 1869612 - DNA, 15 bp, Homo sapiens
tgggaggaggatcag

SEQ ID NO: 1869613 - DNA, 15 bp, Homo sapiens
gggaggaggatcagg

SEQ ID NO: 1869614 - DNA, 15 bp, Homo sapiens
ggaggaggatcaggg

SEQ ID NO: 1869615 - DNA, 15 bp, Homo sapiens
gaggaggatcagggg

SEQ ID NO: 1869616 - DNA, 15 bp, Homo sapiens
aggaggatcagggga

SEQ ID NO: 1869617 - DNA, 15 bp, Homo sapiens
ggaggatcaggggag

SEQ ID NO: 1869618 - DNA, 15 bp, Homo sapiens
gaggatcaggggagg

SEQ ID NO: 1869619 - DNA, 15 bp, Homo sapiens
aggatcaggggaggc

SEQ ID NO: 1869620 - DNA, 15 bp, Homo sapiens
ggatcaggggaggct

SEQ ID NO: 1869621 - DNA, 15 bp, Homo sapiens
gatcaggggaggctt

SEQ ID NO: 1869622 - DNA, 15 bp, Homo sapiens
atcaggggaggcttt

SEQ ID NO: 1869623 - DNA, 15 bp, Homo sapiens
tcaggggaggctttc

SEQ ID NO: 1869624 - DNA, 15 bp, Homo sapiens
caggggaggctttct

SEQ ID NO: 1869625 - DNA, 15 bp, Homo sapiens
aggggaggctttctg

SEQ ID NO: 1869626 - DNA, 15 bp, Homo sapiens
ggggaggctttctgg

SEQ ID NO: 1869627 - DNA, 15 bp, Homo sapiens
gggaggctttctgga

SEQ ID NO: 1869628 - DNA, 15 bp, Homo sapiens
ggaggctttctggag

SEQ ID NO: 1869629 - DNA, 15 bp, Homo sapiens
gaggctttctggagg

SEQ ID NO: 1869630 - DNA, 15 bp, Homo sapiens
aggctttctggagga

SEQ ID NO: 1869631 - DNA, 15 bp, Homo sapiens
ggctttctggaggag

SEQ ID NO: 1869632 - DNA, 15 bp, Homo sapiens
gctttctggaggagg

SEQ ID NO: 1869633 - DNA, 15 bp, Homo sapiens
ctttctggaggaggc

SEQ ID NO: 1869634 - DNA, 15 bp, Homo sapiens
tttctggaggaggca

SEQ ID NO: 1869635 - DNA, 15 bp, Homo sapiens
ttctggaggaggcag

SEQ ID NO: 1869636 - DNA, 15 bp, Homo sapiens
tctggaggaggcagc

SEQ ID NO: 1869637 - DNA, 15 bp, Homo sapiens
ctggaggaggcagcc

SEQ ID NO: 1869638 - DNA, 15 bp, Homo sapiens
tggaggaggcagcca

SEQ ID NO: 1869639 - DNA, 15 bp, Homo sapiens
ggaggaggcagccac

SEQ ID NO: 1869640 - DNA, 15 bp, Homo sapiens
gaggaggcagccact

SEQ ID NO: 1869641 - DNA, 15 bp, Homo sapiens
aggaggcagccactg

SEQ ID NO: 1869642 - DNA, 15 bp, Homo sapiens
ggaggcagccactga

SEQ ID NO: 1869643 - DNA, 15 bp, Homo sapiens
gaggcagccactgag

SEQ ID NO: 1869644 - DNA, 15 bp, Homo sapiens
aggcagccactgagt

SEQ ID NO: 1869645 - DNA, 15 bp, Homo sapiens
ggcagccactgagtt

SEQ ID NO: 1869646 - DNA, 15 bp, Homo sapiens
gcagccactgagttg

SEQ ID NO: 1869647 - DNA, 15 bp, Homo sapiens
cagccactgagttga

SEQ ID NO: 1869648 - DNA, 15 bp, Homo sapiens
agccactgagttgag

SEQ ID NO: 1869649 - DNA, 15 bp, Homo sapiens
gccactgagttgagt

SEQ ID NO: 1869650 - DNA, 15 bp, Homo sapiens
ccactgagttgagtg

SEQ ID NO: 1869651 - DNA, 15 bp, Homo sapiens
cactgagttgagtgt

SEQ ID NO: 1869652 - DNA, 15 bp, Homo sapiens
actgagttgagtgtt

SEQ ID NO: 1869653 - DNA, 15 bp, Homo sapiens
ctgagttgagtgttc

SEQ ID NO: 1869654 - DNA, 15 bp, Homo sapiens
tgagttgagtgttca

SEQ ID NO: 1869655 - DNA, 15 bp, Homo sapiens
gagttgagtgttcaa

SEQ ID NO: 1869656 - DNA, 15 bp, Homo sapiens
agttgagtgttcaaa

SEQ ID NO: 1869657 - DNA, 15 bp, Homo sapiens
gttgagtgttcaaag

SEQ ID NO: 1869658 - DNA, 15 bp, Homo sapiens
ttgagtgttcaaagg

SEQ ID NO: 1869659 - DNA, 15 bp, Homo sapiens
tgagtgttcaaaggt

SEQ ID NO: 1869660 - DNA, 15 bp, Homo sapiens
gagtgttcaaaggtg

SEQ ID NO: 1869661 - DNA, 15 bp, Homo sapiens
agtgttcaaaggtgg

SEQ ID NO: 1869662 - DNA, 15 bp, Homo sapiens
gtgttcaaaggtgga

SEQ ID NO: 1869663 - DNA, 15 bp, Homo sapiens
tgttcaaaggtggat

SEQ ID NO: 1869664 - DNA, 15 bp, Homo sapiens
gttcaaaggtggatg

SEQ ID NO: 1869665 - DNA, 15 bp, Homo sapiens
ttcaaaggtggatga

SEQ ID NO: 1869666 - DNA, 15 bp, Homo sapiens
tcaaaggtggatgag

SEQ ID NO: 1869667 - DNA, 15 bp, Homo sapiens
caaaggtggatgagt

SEQ ID NO: 1869668 - DNA, 15 bp, Homo sapiens
aaaggtggatgagta

SEQ ID NO: 1869669 - DNA, 15 bp, Homo sapiens
aaggtggatgagtaa

SEQ ID NO: 1869670 - DNA, 15 bp, Homo sapiens
aggtggatgagtaag

SEQ ID NO: 1869671 - DNA, 15 bp, Homo sapiens
ggtggatgagtaaga

SEQ ID NO: 1869672 - DNA, 15 bp, Homo sapiens
gtggatgagtaagag

SEQ ID NO: 1869673 - DNA, 15 bp, Homo sapiens
tggatgagtaagagc

SEQ ID NO: 1869674 - DNA, 15 bp, Homo sapiens
ggatgagtaagagct

SEQ ID NO: 1869675 - DNA, 15 bp, Homo sapiens
gatgagtaagagctt

SEQ ID NO: 1869676 - DNA, 15 bp, Homo sapiens
atgagtaagagcttg

SEQ ID NO: 1869677 - DNA, 15 bp, Homo sapiens
tgagtaagagcttgc

SEQ ID NO: 1869678 - DNA, 15 bp, Homo sapiens
gagtaagagcttgca

SEQ ID NO: 1869679 - DNA, 15 bp, Homo sapiens
agtaagagcttgcaa

SEQ ID NO: 1869680 - DNA, 15 bp, Homo sapiens
gtaagagcttgcaag

SEQ ID NO: 1869681 - DNA, 15 bp, Homo sapiens
taagagcttgcaagg

SEQ ID NO: 1869682 - DNA, 15 bp, Homo sapiens
aagagcttgcaaggg

SEQ ID NO: 1869683 - DNA, 15 bp, Homo sapiens
agagcttgcaaggga

SEQ ID NO: 1869684 - DNA, 15 bp, Homo sapiens
gagcttgcaagggaa

SEQ ID NO: 1869685 - DNA, 15 bp, Homo sapiens
agcttgcaagggaat

SEQ ID NO: 1869686 - DNA, 15 bp, Homo sapiens
gcttgcaagggaata

SEQ ID NO: 1869687 - DNA, 15 bp, Homo sapiens
cttgcaagggaatag

SEQ ID NO: 1869688 - DNA, 15 bp, Homo sapiens
ttgcaagggaatagc

SEQ ID NO: 1869689 - DNA, 15 bp, Homo sapiens
tgcaagggaatagca

SEQ ID NO: 1869690 - DNA, 15 bp, Homo sapiens
gcaagggaatagcat

SEQ ID NO: 1869691 - DNA, 15 bp, Homo sapiens
caagggaatagcatg

SEQ ID NO: 1869692 - DNA, 15 bp, Homo sapiens
agggaatagcatggg

SEQ ID NO: 1869693 - DNA, 15 bp, Homo sapiens
gggaatagcatgggt

SEQ ID NO: 1869694 - DNA, 15 bp, Homo sapiens
ggaatagcatgggtg

SEQ ID NO: 1869695 - DNA, 15 bp, Homo sapiens
gaatagcatgggtgt

SEQ ID NO: 1869696 - DNA, 15 bp, Homo sapiens
aatagcatgggtgtg

SEQ ID NO: 1869697 - DNA, 15 bp, Homo sapiens
atagcatgggtgtga

SEQ ID NO: 1869698 - DNA, 15 bp, Homo sapiens
tagcatgggtgtgaa

SEQ ID NO: 1869699 - DNA, 15 bp, Homo sapiens
agcatgggtgtgaaa

SEQ ID NO: 1869700 - DNA, 15 bp, Homo sapiens
gcatgggtgtgaaac

SEQ ID NO: 1869701 - DNA, 15 bp, Homo sapiens
catgggtgtgaaaca

SEQ ID NO: 1869702 - DNA, 15 bp, Homo sapiens
atgggtgtgaaacag

SEQ ID NO: 1869703 - DNA, 15 bp, Homo sapiens
tgggtgtgaaacaga

SEQ ID NO: 1869704 - DNA, 15 bp, Homo sapiens
gggtgtgaaacagag

SEQ ID NO: 1869705 - DNA, 15 bp, Homo sapiens
ggtgtgaaacagagg

SEQ ID NO: 1869706 - DNA, 15 bp, Homo sapiens
gtgtgaaacagagga

SEQ ID NO: 1869707 - DNA, 15 bp, Homo sapiens
tgtgaaacagaggag

SEQ ID NO: 1869708 - DNA, 15 bp, Homo sapiens
gtgaaacagaggagt

SEQ ID NO: 1869709 - DNA, 15 bp, Homo sapiens
tgaaacagaggagtg

SEQ ID NO: 1869710 - DNA, 15 bp, Homo sapiens
gaaacagaggagtga

SEQ ID NO: 1869711 - DNA, 15 bp, Homo sapiens
aaacagaggagtgaa

SEQ ID NO: 1869712 - DNA, 15 bp, Homo sapiens
aacagaggagtgaat

SEQ ID NO: 1869713 - DNA, 15 bp, Homo sapiens
acagaggagtgaatg

SEQ ID NO: 1869714 - DNA, 15 bp, Homo sapiens
cagaggagtgaatgc

SEQ ID NO: 1869715 - DNA, 15 bp, Homo sapiens
agaggagtgaatgca

SEQ ID NO: 1869716 - DNA, 15 bp, Homo sapiens
gaggagtgaatgcag

SEQ ID NO: 1869717 - DNA, 15 bp, Homo sapiens
aggagtgaatgcagc

SEQ ID NO: 1869718 - DNA, 15 bp, Homo sapiens
ggagtgaatgcagca

SEQ ID NO: 1869719 - DNA, 15 bp, Homo sapiens
gagtgaatgcagcag

SEQ ID NO: 1869720 - DNA, 15 bp, Homo sapiens
agtgaatgcagcagc

SEQ ID NO: 1869721 - DNA, 15 bp, Homo sapiens
gtgaatgcagcagcc

SEQ ID NO: 1869722 - DNA, 15 bp, Homo sapiens
tgaatgcagcagccc

SEQ ID NO: 1869723 - DNA, 15 bp, Homo sapiens
gaatgcagcagcccg

SEQ ID NO: 1869724 - DNA, 15 bp, Homo sapiens
aatgcagcagcccgt

SEQ ID NO: 1869725 - DNA, 15 bp, Homo sapiens
atgcagcagcccgtc

SEQ ID NO: 1869726 - DNA, 15 bp, Homo sapiens
tgcagcagcccgtcc

SEQ ID NO: 1869727 - DNA, 15 bp, Homo sapiens
gcagcagcccgtcca

SEQ ID NO: 1869728 - DNA, 15 bp, Homo sapiens
cagcagcccgtccat

SEQ ID NO: 1869729 - DNA, 15 bp, Homo sapiens
agcagcccgtccatt

SEQ ID NO: 1869730 - DNA, 15 bp, Homo sapiens
gcagcccgtccattc

SEQ ID NO: 1869731 - DNA, 15 bp, Homo sapiens
cagcccgtccattct

SEQ ID NO: 1869732 - DNA, 15 bp, Homo sapiens
agcccgtccattctt

SEQ ID NO: 1869733 - DNA, 15 bp, Homo sapiens
gcccgtccattctta

SEQ ID NO: 1869734 - DNA, 15 bp, Homo sapiens
cccgtccattcttag

SEQ ID NO: 1869735 - DNA, 15 bp, Homo sapiens
ccgtccattcttagc

SEQ ID NO: 1869736 - DNA, 15 bp, Homo sapiens
cgtccattcttagct

SEQ ID NO: 1869737 - DNA, 15 bp, Homo sapiens
gtccattcttagctg

SEQ ID NO: 1869738 - DNA, 15 bp, Homo sapiens
tccattcttagctgc

SEQ ID NO: 1869739 - DNA, 15 bp, Homo sapiens
ccattcttagctgct

SEQ ID NO: 1869740 - DNA, 15 bp, Homo sapiens
cattcttagctgctg

SEQ ID NO: 1869741 - DNA, 15 bp, Homo sapiens
attcttagctgctgt

SEQ ID NO: 1869742 - DNA, 15 bp, Homo sapiens
ttcttagctgctgtt

SEQ ID NO: 1869743 - DNA, 15 bp, Homo sapiens
tcttagctgctgttc

SEQ ID NO: 1869744 - DNA, 15 bp, Homo sapiens
cttagctgctgttca

SEQ ID NO: 1869745 - DNA, 15 bp, Homo sapiens
ttagctgctgttcat

SEQ ID NO: 1869746 - DNA, 15 bp, Homo sapiens
tagctgctgttcatt

SEQ ID NO: 1869747 - DNA, 15 bp, Homo sapiens
agctgctgttcattc

SEQ ID NO: 1869748 - DNA, 15 bp, Homo sapiens
gctgctgttcattct

SEQ ID NO: 1869749 - DNA, 15 bp, Homo sapiens
ctgctgttcattctt

SEQ ID NO: 1869750 - DNA, 15 bp, Homo sapiens
tgctgttcattctta

SEQ ID NO: 1869751 - DNA, 15 bp, Homo sapiens
gctgttcattcttac

SEQ ID NO: 1869752 - DNA, 15 bp, Homo sapiens
ctgttcattcttaca

SEQ ID NO: 1869753 - DNA, 15 bp, Homo sapiens
tgttcattcttacag

SEQ ID NO: 1869754 - DNA, 15 bp, Homo sapiens
gttcattcttacaga

SEQ ID NO: 1869755 - DNA, 15 bp, Homo sapiens
ttcattcttacagat

SEQ ID NO: 1869756 - DNA, 15 bp, Homo sapiens
tcattcttacagatg

SEQ ID NO: 1869757 - DNA, 15 bp, Homo sapiens
cattcttacagatgt

SEQ ID NO: 1869758 - DNA, 15 bp, Homo sapiens
attcttacagatgtc

SEQ ID NO: 1869759 - DNA, 15 bp, Homo sapiens
ttcttacagatgtca

SEQ ID NO: 1869760 - DNA, 15 bp, Homo sapiens
tcttacagatgtcaa

SEQ ID NO: 1869761 - DNA, 15 bp, Homo sapiens
cttacagatgtcaaa

SEQ ID NO: 1869762 - DNA, 15 bp, Homo sapiens
ttacagatgtcaaat

SEQ ID NO: 1869763 - DNA, 15 bp, Homo sapiens
tacagatgtcaaata

SEQ ID NO: 1869764 - DNA, 15 bp, Homo sapiens
acagatgtcaaatat

SEQ ID NO: 1869765 - DNA, 15 bp, Homo sapiens
cagatgtcaaatatt

SEQ ID NO: 1869766 - DNA, 15 bp, Homo sapiens
agatgtcaaatattt

SEQ ID NO: 1869767 - DNA, 15 bp, Homo sapiens
gatgtcaaatatttc

SEQ ID NO: 1869768 - DNA, 15 bp, Homo sapiens
atgtcaaatatttct

SEQ ID NO: 1869769 - DNA, 15 bp, Homo sapiens
tgtcaaatatttctg

SEQ ID NO: 1869770 - DNA, 15 bp, Homo sapiens
gtcaaatatttctgg

SEQ ID NO: 1869771 - DNA, 15 bp, Homo sapiens
tcaaatatttctggg

SEQ ID NO: 1869772 - DNA, 15 bp, Homo sapiens
caaatatttctggga

SEQ ID NO: 1869773 - DNA, 15 bp, Homo sapiens
aaatatttctgggag

SEQ ID NO: 1869774 - DNA, 15 bp, Homo sapiens
aatatttctgggagt

SEQ ID NO: 1869775 - DNA, 15 bp, Homo sapiens
atatttctgggagtc

SEQ ID NO: 1869776 - DNA, 15 bp, Homo sapiens
tatttctgggagtct

SEQ ID NO: 1869777 - DNA, 15 bp, Homo sapiens
atttctgggagtctt

SEQ ID NO: 1869778 - DNA, 15 bp, Homo sapiens
tttctgggagtcttc

SEQ ID NO: 1869779 - DNA, 15 bp, Homo sapiens
ttctgggagtcttct

SEQ ID NO: 1869780 - DNA, 15 bp, Homo sapiens
tctgggagtcttctg

SEQ ID NO: 1869781 - DNA, 15 bp, Homo sapiens
ctgggagtcttctgt

SEQ ID NO: 1869782 - DNA, 15 bp, Homo sapiens
tgggagtcttctgtc

SEQ ID NO: 1869783 - DNA, 15 bp, Homo sapiens
gggagtcttctgtct

SEQ ID NO: 1869784 - DNA, 15 bp, Homo sapiens
ggagtcttctgtctt

SEQ ID NO: 1869785 - DNA, 15 bp, Homo sapiens
gagtcttctgtcttc

SEQ ID NO: 1869786 - DNA, 15 bp, Homo sapiens
agtcttctgtcttcc

SEQ ID NO: 1869787 - DNA, 15 bp, Homo sapiens
gtcttctgtcttcca

SEQ ID NO: 1869788 - DNA, 15 bp, Homo sapiens
tcttctgtcttccac

SEQ ID NO: 1869789 - DNA, 15 bp, Homo sapiens
cttctgtcttccact

SEQ ID NO: 1869790 - DNA, 15 bp, Homo sapiens
ttctgtcttccactg

SEQ ID NO: 1869791 - DNA, 15 bp, Homo sapiens
tctgtcttccactgt

SEQ ID NO: 1869792 - DNA, 15 bp, Homo sapiens
ctgtcttccactgtt

SEQ ID NO: 1869793 - DNA, 15 bp, Homo sapiens
tgtcttccactgtta

SEQ ID NO: 1869794 - DNA, 15 bp, Homo sapiens
gtcttccactgttac

SEQ ID NO: 1869795 - DNA, 15 bp, Homo sapiens
tcttccactgttaca

SEQ ID NO: 1869796 - DNA, 15 bp, Homo sapiens
cttccactgttacaa

SEQ ID NO: 1869797 - DNA, 15 bp, Homo sapiens
ttccactgttacaaa

SEQ ID NO: 1869798 - DNA, 15 bp, Homo sapiens
tccactgttacaaaa

SEQ ID NO: 1869799 - DNA, 15 bp, Homo sapiens
ccactgttacaaaac

SEQ ID NO: 1869800 - DNA, 15 bp, Homo sapiens
cactgttacaaaact

SEQ ID NO: 1869801 - DNA, 15 bp, Homo sapiens
actgttacaaaactt

SEQ ID NO: 1869802 - DNA, 15 bp, Homo sapiens
ctgttacaaaacttc

SEQ ID NO: 1869803 - DNA, 15 bp, Homo sapiens
tgttacaaaacttct

SEQ ID NO: 1869804 - DNA, 15 bp, Homo sapiens
gttacaaaacttctt

SEQ ID NO: 1869805 - DNA, 15 bp, Homo sapiens
ttacaaaacttcttt

SEQ ID NO: 1869806 - DNA, 15 bp, Homo sapiens
tacaaaacttcttta

SEQ ID NO: 1869807 - DNA, 15 bp, Homo sapiens
acaaaacttctttaa

SEQ ID NO: 1869808 - DNA, 15 bp, Homo sapiens
caaaacttctttaaa

SEQ ID NO: 1869809 - DNA, 15 bp, Homo sapiens
aaaacttctttaaaa

SEQ ID NO: 1869810 - DNA, 15 bp, Homo sapiens
aaacttctttaaaaa

SEQ ID NO: 1869811 - DNA, 15 bp, Homo sapiens
aacttctttaaaaat

SEQ ID NO: 1869812 - DNA, 15 bp, Homo sapiens
acttctttaaaaatt

SEQ ID NO: 1869813 - DNA, 15 bp, Homo sapiens
cttctttaaaaattg

SEQ ID NO: 1869814 - DNA, 15 bp, Homo sapiens
ttctttaaaaattgt

SEQ ID NO: 1869815 - DNA, 15 bp, Homo sapiens
tctttaaaaattgtt

SEQ ID NO: 1869816 - DNA, 15 bp, Homo sapiens
ctttaaaaattgttg

SEQ ID NO: 1869817 - DNA, 15 bp, Homo sapiens
tttaaaaattgttgt

SEQ ID NO: 1869818 - DNA, 15 bp, Homo sapiens
ttaaaaattgttgtg

SEQ ID NO: 1869819 - DNA, 15 bp, Homo sapiens
taaaaattgttgtga

SEQ ID NO: 1869820 - DNA, 15 bp, Homo sapiens
aaaaattgttgtgat

SEQ ID NO: 1869821 - DNA, 15 bp, Homo sapiens
aaaattgttgtgatt

SEQ ID NO: 1869822 - DNA, 15 bp, Homo sapiens
aaattgttgtgatta

SEQ ID NO: 1869823 - DNA, 15 bp, Homo sapiens
aattgttgtgattag

SEQ ID NO: 1869824 - DNA, 15 bp, Homo sapiens
attgttgtgattagg

SEQ ID NO: 1869825 - DNA, 15 bp, Homo sapiens
ttgttgtgattagga

SEQ ID NO: 1869826 - DNA, 15 bp, Homo sapiens
tgttgtgattaggat

SEQ ID NO: 1869827 - DNA, 15 bp, Homo sapiens
gttgtgattaggata

SEQ ID NO: 1869828 - DNA, 15 bp, Homo sapiens
ttgtgattaggatag

SEQ ID NO: 1869829 - DNA, 15 bp, Homo sapiens
tgtgattaggatagg

SEQ ID NO: 1869830 - DNA, 15 bp, Homo sapiens
gtgattaggatagga

SEQ ID NO: 1869831 - DNA, 15 bp, Homo sapiens
tgattaggataggac

SEQ ID NO: 1869832 - DNA, 15 bp, Homo sapiens
gattaggataggacc

SEQ ID NO: 1869833 - DNA, 15 bp, Homo sapiens
attaggataggaccc

SEQ ID NO: 1869834 - DNA, 15 bp, Homo sapiens
ttaggataggaccct

SEQ ID NO: 1869835 - DNA, 15 bp, Homo sapiens
taggataggaccctt

SEQ ID NO: 1869836 - DNA, 15 bp, Homo sapiens
aggataggacccttc

SEQ ID NO: 1869837 - DNA, 15 bp, Homo sapiens
ggataggacccttct

SEQ ID NO: 1869838 - DNA, 15 bp, Homo sapiens
gataggacccttctt

SEQ ID NO: 1869839 - DNA, 15 bp, Homo sapiens
ataggacccttcttc

SEQ ID NO: 1869840 - DNA, 15 bp, Homo sapiens
taggacccttcttca

SEQ ID NO: 1869841 - DNA, 15 bp, Homo sapiens
aggacccttcttcat

SEQ ID NO: 1869842 - DNA, 15 bp, Homo sapiens
ggacccttcttcata

SEQ ID NO: 1869843 - DNA, 15 bp, Homo sapiens
gacccttcttcatag

SEQ ID NO: 1869844 - DNA, 15 bp, Homo sapiens
acccttcttcatagc

SEQ ID NO: 1869845 - DNA, 15 bp, Homo sapiens
cccttcttcatagca

SEQ ID NO: 1869846 - DNA, 15 bp, Homo sapiens
ccttcttcatagcag

SEQ ID NO: 1869847 - DNA, 15 bp, Homo sapiens
cttcttcatagcagg

SEQ ID NO: 1869848 - DNA, 15 bp, Homo sapiens
ttcttcatagcagga

SEQ ID NO: 1869849 - DNA, 15 bp, Homo sapiens
tcttcatagcaggag

SEQ ID NO: 1869850 - DNA, 15 bp, Homo sapiens
cttcatagcaggagt

SEQ ID NO: 1869851 - DNA, 15 bp, Homo sapiens
ttcatagcaggagtt

SEQ ID NO: 1869852 - DNA, 15 bp, Homo sapiens
tcatagcaggagttt

SEQ ID NO: 1869853 - DNA, 15 bp, Homo sapiens
catagcaggagtttc

SEQ ID NO: 1869854 - DNA, 15 bp, Homo sapiens
atagcaggagtttcc

SEQ ID NO: 1869855 - DNA, 15 bp, Homo sapiens
tagcaggagtttccc

SEQ ID NO: 1869856 - DNA, 15 bp, Homo sapiens
agcaggagtttccca

SEQ ID NO: 1869857 - DNA, 15 bp, Homo sapiens
gcaggagtttcccag

SEQ ID NO: 1869858 - DNA, 15 bp, Homo sapiens
caggagtttcccagt

SEQ ID NO: 1869859 - DNA, 15 bp, Homo sapiens
aggagtttcccagtt

SEQ ID NO: 1869860 - DNA, 15 bp, Homo sapiens
ggagtttcccagttc

SEQ ID NO: 1869861 - DNA, 15 bp, Homo sapiens
gagtttcccagttct

SEQ ID NO: 1869862 - DNA, 15 bp, Homo sapiens
agtttcccagttctt

SEQ ID NO: 1869863 - DNA, 15 bp, Homo sapiens
gtttcccagttcttt

SEQ ID NO: 1869864 - DNA, 15 bp, Homo sapiens
tttcccagttctttg

SEQ ID NO: 1869865 - DNA, 15 bp, Homo sapiens
ttcccagttctttgg

SEQ ID NO: 1869866 - DNA, 15 bp, Homo sapiens
tcccagttctttggg

SEQ ID NO: 1869867 - DNA, 15 bp, Homo sapiens
cccagttctttgggg

SEQ ID NO: 1869868 - DNA, 15 bp, Homo sapiens
ccagttctttgggga

SEQ ID NO: 1869869 - DNA, 15 bp, Homo sapiens
cagttctttggggaa

SEQ ID NO: 1869870 - DNA, 15 bp, Homo sapiens
agttctttggggaat

SEQ ID NO: 1869871 - DNA, 15 bp, Homo sapiens
gttctttggggaatg

SEQ ID NO: 1869872 - DNA, 15 bp, Homo sapiens
ttctttggggaatgc

SEQ ID NO: 1869873 - DNA, 15 bp, Homo sapiens
tctttggggaatgct

SEQ ID NO: 1869874 - DNA, 15 bp, Homo sapiens
ctttggggaatgctt

SEQ ID NO: 1869875 - DNA, 15 bp, Homo sapiens
tttggggaatgcttt

SEQ ID NO: 1869876 - DNA, 15 bp, Homo sapiens
ttggggaatgctttg

SEQ ID NO: 1869877 - DNA, 15 bp, Homo sapiens
tggggaatgctttga

SEQ ID NO: 1869878 - DNA, 15 bp, Homo sapiens
ggggaatgctttgaa

SEQ ID NO: 1869879 - DNA, 15 bp, Homo sapiens
gggaatgctttgaaa

SEQ ID NO: 1869880 - DNA, 15 bp, Homo sapiens
ggaatgctttgaaaa

SEQ ID NO: 1869881 - DNA, 15 bp, Homo sapiens
gaatgctttgaaaaa

SEQ ID NO: 1869882 - DNA, 15 bp, Homo sapiens
aatgctttgaaaaat

SEQ ID NO: 1869883 - DNA, 15 bp, Homo sapiens
atgctttgaaaaatt

SEQ ID NO: 1869884 - DNA, 15 bp, Homo sapiens
tgctttgaaaaattc

SEQ ID NO: 1869885 - DNA, 15 bp, Homo sapiens
gctttgaaaaattca

SEQ ID NO: 1869886 - DNA, 15 bp, Homo sapiens
ctttgaaaaattcat

SEQ ID NO: 1869887 - DNA, 15 bp, Homo sapiens
tttgaaaaattcatt

SEQ ID NO: 1869888 - DNA, 15 bp, Homo sapiens
ttgaaaaattcattt

SEQ ID NO: 1869889 - DNA, 15 bp, Homo sapiens
tgaaaaattcatttg

SEQ ID NO: 1869890 - DNA, 15 bp, Homo sapiens
gaaaaattcatttgt

SEQ ID NO: 1869891 - DNA, 15 bp, Homo sapiens
aaaaattcatttgtt

SEQ ID NO: 1869892 - DNA, 15 bp, Homo sapiens
aaaattcatttgttc

SEQ ID NO: 1869893 - DNA, 15 bp, Homo sapiens
aaattcatttgttcc

SEQ ID NO: 1869894 - DNA, 15 bp, Homo sapiens
aattcatttgttccc

SEQ ID NO: 1869895 - DNA, 15 bp, Homo sapiens
attcatttgttcccg

SEQ ID NO: 1869896 - DNA, 15 bp, Homo sapiens
ttcatttgttcccgg

SEQ ID NO: 1869897 - DNA, 15 bp, Homo sapiens
tcatttgttcccgga

SEQ ID NO: 1869898 - DNA, 15 bp, Homo sapiens
catttgttcccggat

SEQ ID NO: 1869899 - DNA, 15 bp, Homo sapiens
atttgttcccggatt

SEQ ID NO: 1869900 - DNA, 15 bp, Homo sapiens
tttgttcccggattg

SEQ ID NO: 1869901 - DNA, 15 bp, Homo sapiens
ttgttcccggattga

SEQ ID NO: 1869902 - DNA, 15 bp, Homo sapiens
tgttcccggattgag

SEQ ID NO: 1869903 - DNA, 15 bp, Homo sapiens
gttcccggattgagc

SEQ ID NO: 1869904 - DNA, 15 bp, Homo sapiens
ttcccggattgagct

SEQ ID NO: 1869905 - DNA, 15 bp, Homo sapiens
tcccggattgagctg

SEQ ID NO: 1869906 - DNA, 15 bp, Homo sapiens
cccggattgagctgt

SEQ ID NO: 1869907 - DNA, 15 bp, Homo sapiens
ccggattgagctgtt

SEQ ID NO: 1869908 - DNA, 15 bp, Homo sapiens
cggattgagctgttc

SEQ ID NO: 1869909 - DNA, 15 bp, Homo sapiens
ggattgagctgttct

SEQ ID NO: 1869910 - DNA, 15 bp, Homo sapiens
gattgagctgttcta

SEQ ID NO: 1869911 - DNA, 15 bp, Homo sapiens
attgagctgttctag

SEQ ID NO: 1869912 - DNA, 15 bp, Homo sapiens
ttgagctgttctagt

SEQ ID NO: 1869913 - DNA, 15 bp, Homo sapiens
tgagctgttctagtt

SEQ ID NO: 1869914 - DNA, 15 bp, Homo sapiens
gagctgttctagttg

SEQ ID NO: 1869915 - DNA, 15 bp, Homo sapiens
agctgttctagttgt

SEQ ID NO: 1869916 - DNA, 15 bp, Homo sapiens
gctgttctagttgtt

SEQ ID NO: 1869917 - DNA, 15 bp, Homo sapiens
ctgttctagttgttt

SEQ ID NO: 1869918 - DNA, 15 bp, Homo sapiens
tgttctagttgttta

SEQ ID NO: 1869919 - DNA, 15 bp, Homo sapiens
gttctagttgtttat

SEQ ID NO: 1869920 - DNA, 15 bp, Homo sapiens
ttctagttgtttatc

SEQ ID NO: 1869921 - DNA, 15 bp, Homo sapiens
tctagttgtttatcc

SEQ ID NO: 1869922 - DNA, 15 bp, Homo sapiens
ctagttgtttatcct

SEQ ID NO: 1869923 - DNA, 15 bp, Homo sapiens
tagttgtttatcctt

SEQ ID NO: 1869924 - DNA, 15 bp, Homo sapiens
agttgtttatccttt

SEQ ID NO: 1869925 - DNA, 15 bp, Homo sapiens
gttgtttatccttta

SEQ ID NO: 1869926 - DNA, 15 bp, Homo sapiens
ttgtttatcctttaa

SEQ ID NO: 1869927 - DNA, 15 bp, Homo sapiens
tgtttatcctttaaa

SEQ ID NO: 1869928 - DNA, 15 bp, Homo sapiens
gtttatcctttaaac

SEQ ID NO: 1869929 - DNA, 15 bp, Homo sapiens
tttatcctttaaaca

SEQ ID NO: 1869930 - DNA, 15 bp, Homo sapiens
ttatcctttaaacag

SEQ ID NO: 1869931 - DNA, 15 bp, Homo sapiens
tatcctttaaacagc

SEQ ID NO: 1869932 - DNA, 15 bp, Homo sapiens
atcctttaaacagca

SEQ ID NO: 1869933 - DNA, 15 bp, Homo sapiens
tcctttaaacagcaa

SEQ ID NO: 1869934 - DNA, 15 bp, Homo sapiens
cctttaaacagcaag

SEQ ID NO: 1869935 - DNA, 15 bp, Homo sapiens
ctttaaacagcaaga

SEQ ID NO: 1869936 - DNA, 15 bp, Homo sapiens
tttaaacagcaagaa

SEQ ID NO: 1869937 - DNA, 15 bp, Homo sapiens
ttaaacagcaagaaa

SEQ ID NO: 1869938 - DNA, 15 bp, Homo sapiens
taaacagcaagaaaa

SEQ ID NO: 1869939 - DNA, 15 bp, Homo sapiens
aaacagcaagaaaaa

SEQ ID NO: 1869940 - DNA, 15 bp, Homo sapiens
aacagcaagaaaaag

SEQ ID NO: 1869941 - DNA, 15 bp, Homo sapiens
acagcaagaaaaaga

SEQ ID NO: 1869942 - DNA, 15 bp, Homo sapiens
cagcaagaaaaagat

SEQ ID NO: 1869943 - DNA, 15 bp, Homo sapiens
agcaagaaaaagatg

SEQ ID NO: 1869944 - DNA, 15 bp, Homo sapiens
gcaagaaaaagatgg

SEQ ID NO: 1869945 - DNA, 15 bp, Homo sapiens
caagaaaaagatggt

SEQ ID NO: 1869946 - DNA, 15 bp, Homo sapiens
aagaaaaagatggta

SEQ ID NO: 1869947 - DNA, 15 bp, Homo sapiens
agaaaaagatggtac

SEQ ID NO: 1869948 - DNA, 15 bp, Homo sapiens
gaaaaagatggtact

SEQ ID NO: 1869949 - DNA, 15 bp, Homo sapiens
aaaaagatggtactt

SEQ ID NO: 1869950 - DNA, 15 bp, Homo sapiens
aaaagatggtacttc

SEQ ID NO: 1869951 - DNA, 15 bp, Homo sapiens
aaagatggtacttcc

SEQ ID NO: 1869952 - DNA, 15 bp, Homo sapiens
aagatggtacttcca

SEQ ID NO: 1869953 - DNA, 15 bp, Homo sapiens
agatggtacttccag

SEQ ID NO: 1869954 - DNA, 15 bp, Homo sapiens
gatggtacttccaga

SEQ ID NO: 1869955 - DNA, 15 bp, Homo sapiens
atggtacttccagac

SEQ ID NO: 1869956 - DNA, 15 bp, Homo sapiens
tggtacttccagact

SEQ ID NO: 1869957 - DNA, 15 bp, Homo sapiens
ggtacttccagactt

SEQ ID NO: 1869958 - DNA, 15 bp, Homo sapiens
gtacttccagacttc

SEQ ID NO: 1869959 - DNA, 15 bp, Homo sapiens
tacttccagacttct

SEQ ID NO: 1869960 - DNA, 15 bp, Homo sapiens
acttccagacttctt

SEQ ID NO: 1869961 - DNA, 15 bp, Homo sapiens
cttccagacttctta

SEQ ID NO: 1869962 - DNA, 15 bp, Homo sapiens
ttccagacttcttaa

SEQ ID NO: 1869963 - DNA, 15 bp, Homo sapiens
tccagacttcttaaa

SEQ ID NO: 1869964 - DNA, 15 bp, Homo sapiens
ccagacttcttaaaa

SEQ ID NO: 1869965 - DNA, 15 bp, Homo sapiens
cagacttcttaaaag

SEQ ID NO: 1869966 - DNA, 15 bp, Homo sapiens
agacttcttaaaagc

SEQ ID NO: 1869967 - DNA, 15 bp, Homo sapiens
gacttcttaaaagcc

SEQ ID NO: 1869968 - DNA, 15 bp, Homo sapiens
acttcttaaaagccc

SEQ ID NO: 1869969 - DNA, 15 bp, Homo sapiens
cttcttaaaagccca

SEQ ID NO: 1869970 - DNA, 15 bp, Homo sapiens
ttcttaaaagcccaa

SEQ ID NO: 1869971 - DNA, 15 bp, Homo sapiens
tcttaaaagcccaag

SEQ ID NO: 1869972 - DNA, 15 bp, Homo sapiens
cttaaaagcccaagc

SEQ ID NO: 1869973 - DNA, 15 bp, Homo sapiens
ttaaaagcccaagcc

SEQ ID NO: 1869974 - DNA, 15 bp, Homo sapiens
taaaagcccaagcca

SEQ ID NO: 1869975 - DNA, 15 bp, Homo sapiens
aaaagcccaagccac

SEQ ID NO: 1869976 - DNA, 15 bp, Homo sapiens
aaagcccaagccact

SEQ ID NO: 1869977 - DNA, 15 bp, Homo sapiens
aagcccaagccactt

SEQ ID NO: 1869978 - DNA, 15 bp, Homo sapiens
agcccaagccacttg

SEQ ID NO: 1869979 - DNA, 15 bp, Homo sapiens
gcccaagccacttgc

SEQ ID NO: 1869980 - DNA, 15 bp, Homo sapiens
cccaagccacttgca

SEQ ID NO: 1869981 - DNA, 15 bp, Homo sapiens
ccaagccacttgcag

SEQ ID NO: 1869982 - DNA, 15 bp, Homo sapiens
caagccacttgcagg

SEQ ID NO: 1869983 - DNA, 15 bp, Homo sapiens
aagccacttgcaggt

SEQ ID NO: 1869984 - DNA, 15 bp, Homo sapiens
agccacttgcaggta

SEQ ID NO: 1869985 - DNA, 15 bp, Homo sapiens
gccacttgcaggtaa

SEQ ID NO: 1869986 - DNA, 15 bp, Homo sapiens
ccacttgcaggtaat

SEQ ID NO: 1869987 - DNA, 15 bp, Homo sapiens
tgataaataaatgat

SEQ ID NO: 1869988 - DNA, 15 bp, Homo sapiens
gataaataaatgatt

SEQ ID NO: 1869989 - DNA, 15 bp, Homo sapiens
ataaataaatgattt

SEQ ID NO: 1869990 - DNA, 15 bp, Homo sapiens
taaataaatgatttt

SEQ ID NO: 1869991 - DNA, 15 bp, Homo sapiens
aaataaatgattttc

SEQ ID NO: 1869992 - DNA, 15 bp, Homo sapiens
aataaatgattttca

SEQ ID NO: 1869993 - DNA, 15 bp, Homo sapiens
ataaatgattttcaa

SEQ ID NO: 1869994 - DNA, 15 bp, Homo sapiens
taaatgattttcaat

SEQ ID NO: 1869995 - DNA, 15 bp, Homo sapiens
aaatgattttcaatg

SEQ ID NO: 1869996 - DNA, 15 bp, Homo sapiens
aatgattttcaatgt

SEQ ID NO: 1869997 - DNA, 15 bp, Homo sapiens
atgattttcaatgtt

SEQ ID NO: 1869998 - DNA, 15 bp, Homo sapiens
tgattttcaatgtta

SEQ ID NO: 1869999 - DNA, 15 bp, Homo sapiens
gattttcaatgttaa

SEQ ID NO: 1870000 - DNA, 15 bp, Homo sapiens
attttcaatgttaat

SEQ ID NO: 1870001 - DNA, 15 bp, Homo sapiens
ttttcaatgttaatt

SEQ ID NO: 1870002 - DNA, 15 bp, Homo sapiens
tttcaatgttaatta

SEQ ID NO: 1870003 - DNA, 15 bp, Homo sapiens
ttcaatgttaattag

SEQ ID NO: 1870004 - DNA, 15 bp, Homo sapiens
tcaatgttaattaga

SEQ ID NO: 1870005 - DNA, 15 bp, Homo sapiens
caatgttaattagaa

SEQ ID NO: 1870006 - DNA, 15 bp, Homo sapiens
aatgttaattagaag

SEQ ID NO: 1870007 - DNA, 15 bp, Homo sapiens
atgttaattagaagc

SEQ ID NO: 1870008 - DNA, 15 bp, Homo sapiens
tgttaattagaagca

SEQ ID NO: 1870009 - DNA, 15 bp, Homo sapiens
gttaattagaagcaa

SEQ ID NO: 1870010 - DNA, 15 bp, Homo sapiens
ttaattagaagcaag

SEQ ID NO: 1870011 - DNA, 15 bp, Homo sapiens
taattagaagcaaga

SEQ ID NO: 1870012 - DNA, 15 bp, Homo sapiens
aattagaagcaagaa

SEQ ID NO: 1870013 - DNA, 15 bp, Homo sapiens
attagaagcaagaag

SEQ ID NO: 1870014 - DNA, 15 bp, Homo sapiens
ttagaagcaagaagg

SEQ ID NO: 1870015 - DNA, 15 bp, Homo sapiens
tagaagcaagaagga

SEQ ID NO: 1870016 - DNA, 15 bp, Homo sapiens
agaagcaagaaggaa

SEQ ID NO: 1870017 - DNA, 15 bp, Homo sapiens
gaagcaagaaggaaa

SEQ ID NO: 1870018 - DNA, 15 bp, Homo sapiens
aagcaagaaggaaag

SEQ ID NO: 1870019 - DNA, 15 bp, Homo sapiens
agcaagaaggaaaga

SEQ ID NO: 1870020 - DNA, 15 bp, Homo sapiens
gcaagaaggaaagaa

SEQ ID NO: 1870021 - DNA, 15 bp, Homo sapiens
caagaaggaaagaaa

SEQ ID NO: 1870022 - DNA, 15 bp, Homo sapiens
aaggaaagaaaaaaa

SEQ ID NO: 1870023 - DNA, 15 bp, Homo sapiens
aaaaaggaaaagaaa

SEQ ID NO: 1870024 - DNA, 15 bp, Homo sapiens
aaaaggaaaagaaat

SEQ ID NO: 1870025 - DNA, 15 bp, Homo sapiens
aaaggaaaagaaatg

SEQ ID NO: 1870026 - DNA, 15 bp, Homo sapiens
aaggaaaagaaatgt

SEQ ID NO: 1870027 - DNA, 15 bp, Homo sapiens
aggaaaagaaatgtt

SEQ ID NO: 1870028 - DNA, 15 bp, Homo sapiens
ggaaaagaaatgttc

SEQ ID NO: 1870029 - DNA, 15 bp, Homo sapiens
gaaaagaaatgttcc

SEQ ID NO: 1870030 - DNA, 15 bp, Homo sapiens
aaaagaaatgttcca

SEQ ID NO: 1870031 - DNA, 15 bp, Homo sapiens
aaagaaatgttccag

SEQ ID NO: 1870032 - DNA, 15 bp, Homo sapiens
aagaaatgttccagg

SEQ ID NO: 1870033 - DNA, 15 bp, Homo sapiens
agaaatgttccagga

SEQ ID NO: 1870034 - DNA, 15 bp, Homo sapiens
gaaatgttccaggag

SEQ ID NO: 1870035 - DNA, 15 bp, Homo sapiens
aaatgttccaggaga

SEQ ID NO: 1870036 - DNA, 15 bp, Homo sapiens
aatgttccaggagat

SEQ ID NO: 1870037 - DNA, 15 bp, Homo sapiens
atgttccaggagatg

SEQ ID NO: 1870038 - DNA, 15 bp, Homo sapiens
tgttccaggagatga

SEQ ID NO: 1870039 - DNA, 15 bp, Homo sapiens
gttccaggagatgag

SEQ ID NO: 1870040 - DNA, 15 bp, Homo sapiens
ttccaggagatgaga

SEQ ID NO: 1870041 - DNA, 15 bp, Homo sapiens
tccaggagatgagac

SEQ ID NO: 1870042 - DNA, 15 bp, Homo sapiens
ccaggagatgagaca

SEQ ID NO: 1870043 - DNA, 15 bp, Homo sapiens
caggagatgagacat

SEQ ID NO: 1870044 - DNA, 15 bp, Homo sapiens
aggagatgagacatt

SEQ ID NO: 1870045 - DNA, 15 bp, Homo sapiens
ggagatgagacatta

SEQ ID NO: 1870046 - DNA, 15 bp, Homo sapiens
gagatgagacattac

SEQ ID NO: 1870047 - DNA, 15 bp, Homo sapiens
agatgagacattact

SEQ ID NO: 1870048 - DNA, 15 bp, Homo sapiens
gatgagacattactt

SEQ ID NO: 1870049 - DNA, 15 bp, Homo sapiens
atgagacattacttt

SEQ ID NO: 1870050 - DNA, 15 bp, Homo sapiens
tgagacattactttc

SEQ ID NO: 1870051 - DNA, 15 bp, Homo sapiens
gagacattactttca

SEQ ID NO: 1870052 - DNA, 15 bp, Homo sapiens
agacattactttcat

SEQ ID NO: 1870053 - DNA, 15 bp, Homo sapiens
gacattactttcatg

SEQ ID NO: 1870054 - DNA, 15 bp, Homo sapiens
acattactttcatga

SEQ ID NO: 1870055 - DNA, 15 bp, Homo sapiens
cattactttcatgaa

SEQ ID NO: 1870056 - DNA, 15 bp, Homo sapiens
attactttcatgaag

SEQ ID NO: 1870057 - DNA, 15 bp, Homo sapiens
ttactttcatgaagt

SEQ ID NO: 1870058 - DNA, 15 bp, Homo sapiens
tactttcatgaagtt

SEQ ID NO: 1870059 - DNA, 15 bp, Homo sapiens
actttcatgaagttg

SEQ ID NO: 1870060 - DNA, 15 bp, Homo sapiens
ctttcatgaagttgt

SEQ ID NO: 1870061 - DNA, 15 bp, Homo sapiens
tttcatgaagttgtc

SEQ ID NO: 1870062 - DNA, 15 bp, Homo sapiens
ttcatgaagttgtca

SEQ ID NO: 1870063 - DNA, 15 bp, Homo sapiens
tcatgaagttgtcaa

SEQ ID NO: 1870064 - DNA, 15 bp, Homo sapiens
catgaagttgtcaag

SEQ ID NO: 1870065 - DNA, 15 bp, Homo sapiens
atgaagttgtcaaga

SEQ ID NO: 1870066 - DNA, 15 bp, Homo sapiens
gaagttgtcaagaag

SEQ ID NO: 1870067 - DNA, 15 bp, Homo sapiens
aagttgtcaagaagg

SEQ ID NO: 1870068 - DNA, 15 bp, Homo sapiens
agttgtcaagaagga

SEQ ID NO: 1870069 - DNA, 15 bp, Homo sapiens
gttgtcaagaaggaa

SEQ ID NO: 1870070 - DNA, 15 bp, Homo sapiens
ttgtcaagaaggaaa

SEQ ID NO: 1870071 - DNA, 15 bp, Homo sapiens
tgtcaagaaggaaat

SEQ ID NO: 1870072 - DNA, 15 bp, Homo sapiens
gtcaagaaggaaatg

SEQ ID NO: 1870073 - DNA, 15 bp, Homo sapiens
tcaagaaggaaatga

SEQ ID NO: 1870074 - DNA, 15 bp, Homo sapiens
caagaaggaaatgaa

SEQ ID NO: 1870075 - DNA, 15 bp, Homo sapiens
aagaaggaaatgaaa

SEQ ID NO: 1870076 - DNA, 15 bp, Homo sapiens
agaaggaaatgaaaa

SEQ ID NO: 1870077 - DNA, 15 bp, Homo sapiens
gaaggaaatgaaaag

SEQ ID NO: 1870078 - DNA, 15 bp, Homo sapiens
aaggaaatgaaaagt

SEQ ID NO: 1870079 - DNA, 15 bp, Homo sapiens
aggaaatgaaaagtg

SEQ ID NO: 1870080 - DNA, 15 bp, Homo sapiens
ggaaatgaaaagtgt

SEQ ID NO: 1870081 - DNA, 15 bp, Homo sapiens
gaaatgaaaagtgtg

SEQ ID NO: 1870082 - DNA, 15 bp, Homo sapiens
aaatgaaaagtgtgc

SEQ ID NO: 1870083 - DNA, 15 bp, Homo sapiens
aatgaaaagtgtgca

SEQ ID NO: 1870084 - DNA, 15 bp, Homo sapiens
atgaaaagtgtgcat

SEQ ID NO: 1870085 - DNA, 15 bp, Homo sapiens
tgaaaagtgtgcata

SEQ ID NO: 1870086 - DNA, 15 bp, Homo sapiens
gaaaagtgtgcatac

SEQ ID NO: 1870087 - DNA, 15 bp, Homo sapiens
aaaagtgtgcatact

SEQ ID NO: 1870088 - DNA, 15 bp, Homo sapiens
aaagtgtgcatactt

SEQ ID NO: 1870089 - DNA, 15 bp, Homo sapiens
aagtgtgcatacttg

SEQ ID NO: 1870090 - DNA, 15 bp, Homo sapiens
agtgtgcatacttga

SEQ ID NO: 1870091 - DNA, 15 bp, Homo sapiens
gtgtgcatacttgaa

SEQ ID NO: 1870092 - DNA, 15 bp, Homo sapiens
tgtgcatacttgaag

SEQ ID NO: 1870093 - DNA, 15 bp, Homo sapiens
gtgcatacttgaaga

SEQ ID NO: 1870094 - DNA, 15 bp, Homo sapiens
tgcatacttgaagat

SEQ ID NO: 1870095 - DNA, 15 bp, Homo sapiens
gcatacttgaagata

SEQ ID NO: 1870096 - DNA, 15 bp, Homo sapiens
catacttgaagatat

SEQ ID NO: 1870097 - DNA, 15 bp, Homo sapiens
atacttgaagatatg

SEQ ID NO: 1870098 - DNA, 15 bp, Homo sapiens
tacttgaagatatga

SEQ ID NO: 1870099 - DNA, 15 bp, Homo sapiens
acttgaagatatgat

SEQ ID NO: 1870100 - DNA, 15 bp, Homo sapiens
cttgaagatatgatt

SEQ ID NO: 1870101 - DNA, 15 bp, Homo sapiens
ttgaagatatgattg

SEQ ID NO: 1870102 - DNA, 15 bp, Homo sapiens
tgaagatatgattgt

SEQ ID NO: 1870103 - DNA, 15 bp, Homo sapiens
gaagatatgattgta

SEQ ID NO: 1870104 - DNA, 15 bp, Homo sapiens
aagatatgattgtat

SEQ ID NO: 1870105 - DNA, 15 bp, Homo sapiens
agatatgattgtata

SEQ ID NO: 1870106 - DNA, 15 bp, Homo sapiens
gatatgattgtataa

SEQ ID NO: 1870107 - DNA, 15 bp, Homo sapiens
atatgattgtataat

SEQ ID NO: 1870108 - DNA, 15 bp, Homo sapiens
tatgattgtataatc

SEQ ID NO: 1870109 - DNA, 15 bp, Homo sapiens
atgattgtataatca

SEQ ID NO: 1870110 - DNA, 15 bp, Homo sapiens
tgattgtataatcat

SEQ ID NO: 1870111 - DNA, 15 bp, Homo sapiens
gattgtataatcata

SEQ ID NO: 1870112 - DNA, 15 bp, Homo sapiens
attgtataatcatag

SEQ ID NO: 1870113 - DNA, 15 bp, Homo sapiens
ttgtataatcatagg

SEQ ID NO: 1870114 - DNA, 15 bp, Homo sapiens
tgtataatcataggg

SEQ ID NO: 1870115 - DNA, 15 bp, Homo sapiens
gtataatcatagggg

SEQ ID NO: 1870116 - DNA, 15 bp, Homo sapiens
tataatcataggggt

SEQ ID NO: 1870117 - DNA, 15 bp, Homo sapiens
ataatcataggggtt

SEQ ID NO: 1870118 - DNA, 15 bp, Homo sapiens
taatcataggggtta

SEQ ID NO: 1870119 - DNA, 15 bp, Homo sapiens
aatcataggggttaa

SEQ ID NO: 1870120 - DNA, 15 bp, Homo sapiens
atcataggggttaat

SEQ ID NO: 1870121 - DNA, 15 bp, Homo sapiens
tcataggggttaata

SEQ ID NO: 1870122 - DNA, 15 bp, Homo sapiens
cataggggttaataa

SEQ ID NO: 1870123 - DNA, 15 bp, Homo sapiens
ataggggttaataag

SEQ ID NO: 1870124 - DNA, 15 bp, Homo sapiens
taggggttaataagt

SEQ ID NO: 1870125 - DNA, 15 bp, Homo sapiens
aggggttaataagtc

SEQ ID NO: 1870126 - DNA, 15 bp, Homo sapiens
ggggttaataagtca

SEQ ID NO: 1870127 - DNA, 15 bp, Homo sapiens
gggttaataagtcat

SEQ ID NO: 1870128 - DNA, 15 bp, Homo sapiens
ggttaataagtcatt

SEQ ID NO: 1870129 - DNA, 15 bp, Homo sapiens
gttaataagtcattg

SEQ ID NO: 1870130 - DNA, 15 bp, Homo sapiens
ttaataagtcattgc

SEQ ID NO: 1870131 - DNA, 15 bp, Homo sapiens
taataagtcattgcc

SEQ ID NO: 1870132 - DNA, 15 bp, Homo sapiens
aataagtcattgcca

SEQ ID NO: 1870133 - DNA, 15 bp, Homo sapiens
ataagtcattgccat

SEQ ID NO: 1870134 - DNA, 15 bp, Homo sapiens
taagtcattgccatt

SEQ ID NO: 1870135 - DNA, 15 bp, Homo sapiens
aagtcattgccattt

SEQ ID NO: 1870136 - DNA, 15 bp, Homo sapiens
agtcattgccatttt

SEQ ID NO: 1870137 - DNA, 15 bp, Homo sapiens
gtcattgccattttc

SEQ ID NO: 1870138 - DNA, 15 bp, Homo sapiens
tcattgccattttcc

SEQ ID NO: 1870139 - DNA, 15 bp, Homo sapiens
cattgccattttccc

SEQ ID NO: 1870140 - DNA, 15 bp, Homo sapiens
attgccattttccct

SEQ ID NO: 1870141 - DNA, 15 bp, Homo sapiens
ttgccattttcccta

SEQ ID NO: 1870142 - DNA, 15 bp, Homo sapiens
tgccattttccctat

SEQ ID NO: 1870143 - DNA, 15 bp, Homo sapiens
gccattttccctatt

SEQ ID NO: 1870144 - DNA, 15 bp, Homo sapiens
ccattttccctatta

SEQ ID NO: 1870145 - DNA, 15 bp, Homo sapiens
cattttccctattaa

SEQ ID NO: 1870146 - DNA, 15 bp, Homo sapiens
attttccctattaat

SEQ ID NO: 1870147 - DNA, 15 bp, Homo sapiens
ttttccctattaatg

SEQ ID NO: 1870148 - DNA, 15 bp, Homo sapiens
tttccctattaatga

SEQ ID NO: 1870149 - DNA, 15 bp, Homo sapiens
ttccctattaatgat

SEQ ID NO: 1870150 - DNA, 15 bp, Homo sapiens
tccctattaatgatg

SEQ ID NO: 1870151 - DNA, 15 bp, Homo sapiens
ccctattaatgatga

SEQ ID NO: 1870152 - DNA, 15 bp, Homo sapiens
cctattaatgatgac

SEQ ID NO: 1870153 - DNA, 15 bp, Homo sapiens
ctattaatgatgaca

SEQ ID NO: 1870154 - DNA, 15 bp, Homo sapiens
tattaatgatgacag

SEQ ID NO: 1870155 - DNA, 15 bp, Homo sapiens
attaatgatgacagt

SEQ ID NO: 1870156 - DNA, 15 bp, Homo sapiens
ttaatgatgacagtt

SEQ ID NO: 1870157 - DNA, 15 bp, Homo sapiens
taatgatgacagttt

SEQ ID NO: 1870158 - DNA, 15 bp, Homo sapiens
aatgatgacagtttg

SEQ ID NO: 1870159 - DNA, 15 bp, Homo sapiens
atgatgacagtttgt

SEQ ID NO: 1870160 - DNA, 15 bp, Homo sapiens
tgatgacagtttgtt

SEQ ID NO: 1870161 - DNA, 15 bp, Homo sapiens
gatgacagtttgttt

SEQ ID NO: 1870162 - DNA, 15 bp, Homo sapiens
atgacagtttgtttt

SEQ ID NO: 1870163 - DNA, 15 bp, Homo sapiens
tgacagtttgtttta

SEQ ID NO: 1870164 - DNA, 15 bp, Homo sapiens
gacagtttgttttaa

SEQ ID NO: 1870165 - DNA, 15 bp, Homo sapiens
acagtttgttttaaa

SEQ ID NO: 1870166 - DNA, 15 bp, Homo sapiens
cagtttgttttaaag

SEQ ID NO: 1870167 - DNA, 15 bp, Homo sapiens
agtttgttttaaagg

SEQ ID NO: 1870168 - DNA, 15 bp, Homo sapiens
gtttgttttaaaggt

SEQ ID NO: 1870169 - DNA, 15 bp, Homo sapiens
tttgttttaaaggta

SEQ ID NO: 1870170 - DNA, 15 bp, Homo sapiens
ttgttttaaaggtaa

SEQ ID NO: 1870171 - DNA, 15 bp, Homo sapiens
tgttttaaaggtaac

SEQ ID NO: 1870172 - DNA, 15 bp, Homo sapiens
gttttaaaggtaact

SEQ ID NO: 1870173 - DNA, 15 bp, Homo sapiens
ttttaaaggtaactc

SEQ ID NO: 1870174 - DNA, 15 bp, Homo sapiens
tttaaaggtaactca

SEQ ID NO: 1870175 - DNA, 15 bp, Homo sapiens
ttaaaggtaactcat

SEQ ID NO: 1870176 - DNA, 15 bp, Homo sapiens
taaaggtaactcatc

SEQ ID NO: 1870177 - DNA, 15 bp, Homo sapiens
aaaggtaactcatcc

SEQ ID NO: 1870178 - DNA, 15 bp, Homo sapiens
aaggtaactcatcct

SEQ ID NO: 1870179 - DNA, 15 bp, Homo sapiens
aggtaactcatcctg

SEQ ID NO: 1870180 - DNA, 15 bp, Homo sapiens
ggtaactcatcctgt

SEQ ID NO: 1870181 - DNA, 15 bp, Homo sapiens
gtaactcatcctgtc

SEQ ID NO: 1870182 - DNA, 15 bp, Homo sapiens
taactcatcctgtct

SEQ ID NO: 1870183 - DNA, 15 bp, Homo sapiens
aactcatcctgtctg

SEQ ID NO: 1870184 - DNA, 15 bp, Homo sapiens
actcatcctgtctga

SEQ ID NO: 1870185 - DNA, 15 bp, Homo sapiens
ctcatcctgtctgat

SEQ ID NO: 1870186 - DNA, 15 bp, Homo sapiens
tcatcctgtctgatt

SEQ ID NO: 1870187 - DNA, 15 bp, Homo sapiens
catcctgtctgattt

SEQ ID NO: 1870188 - DNA, 15 bp, Homo sapiens
atcctgtctgatttt

SEQ ID NO: 1870189 - DNA, 15 bp, Homo sapiens
tcctgtctgattttc

SEQ ID NO: 1870190 - DNA, 15 bp, Homo sapiens
cctgtctgattttcc

SEQ ID NO: 1870191 - DNA, 15 bp, Homo sapiens
ctgtctgattttcca

SEQ ID NO: 1870192 - DNA, 15 bp, Homo sapiens
tgtctgattttccat

SEQ ID NO: 1870193 - DNA, 15 bp, Homo sapiens
gtctgattttccatg

SEQ ID NO: 1870194 - DNA, 15 bp, Homo sapiens
tctgattttccatgg

SEQ ID NO: 1870195 - DNA, 15 bp, Homo sapiens
ctgattttccatggt

SEQ ID NO: 1870196 - DNA, 15 bp, Homo sapiens
tgattttccatggtg

SEQ ID NO: 1870197 - DNA, 15 bp, Homo sapiens
gattttccatggtgg

SEQ ID NO: 1870198 - DNA, 15 bp, Homo sapiens
attttccatggtggt

SEQ ID NO: 1870199 - DNA, 15 bp, Homo sapiens
ttttccatggtggtg

SEQ ID NO: 1870200 - DNA, 15 bp, Homo sapiens
tttccatggtggtgt

SEQ ID NO: 1870201 - DNA, 15 bp, Homo sapiens
ttccatggtggtgtt

SEQ ID NO: 1870202 - DNA, 15 bp, Homo sapiens
tccatggtggtgttg

SEQ ID NO: 1870203 - DNA, 15 bp, Homo sapiens
ccatggtggtgttgg

SEQ ID NO: 1870204 - DNA, 15 bp, Homo sapiens
catggtggtgttggt

SEQ ID NO: 1870205 - DNA, 15 bp, Homo sapiens
atggtggtgttggtt

SEQ ID NO: 1870206 - DNA, 15 bp, Homo sapiens
tggtggtgttggttt

SEQ ID NO: 1870207 - DNA, 15 bp, Homo sapiens
ggtggtgttggtttc

SEQ ID NO: 1870208 - DNA, 15 bp, Homo sapiens
gtggtgttggtttct

SEQ ID NO: 1870209 - DNA, 15 bp, Homo sapiens
tggtgttggtttcta

SEQ ID NO: 1870210 - DNA, 15 bp, Homo sapiens
ggtgttggtttctac

SEQ ID NO: 1870211 - DNA, 15 bp, Homo sapiens
gtgttggtttctact

SEQ ID NO: 1870212 - DNA, 15 bp, Homo sapiens
tgttggtttctactg

SEQ ID NO: 1870213 - DNA, 15 bp, Homo sapiens
gttggtttctactgc

SEQ ID NO: 1870214 - DNA, 15 bp, Homo sapiens
ttggtttctactgcc

SEQ ID NO: 1870215 - DNA, 15 bp, Homo sapiens
tggtttctactgccc

SEQ ID NO: 1870216 - DNA, 15 bp, Homo sapiens
ggtttctactgccca

SEQ ID NO: 1870217 - DNA, 15 bp, Homo sapiens
gtttctactgcccag

SEQ ID NO: 1870218 - DNA, 15 bp, Homo sapiens
tttctactgcccagg

SEQ ID NO: 1870219 - DNA, 15 bp, Homo sapiens
ttctactgcccaggt

SEQ ID NO: 1870220 - DNA, 15 bp, Homo sapiens
tctactgcccaggtc

SEQ ID NO: 1870221 - DNA, 15 bp, Homo sapiens
ctactgcccaggtcc

SEQ ID NO: 1870222 - DNA, 15 bp, Homo sapiens
tactgcccaggtcct

SEQ ID NO: 1870223 - DNA, 15 bp, Homo sapiens
actgcccaggtcctt

SEQ ID NO: 1870224 - DNA, 15 bp, Homo sapiens
ctgcccaggtccttt

SEQ ID NO: 1870225 - DNA, 15 bp, Homo sapiens
tgcccaggtccttta

SEQ ID NO: 1870226 - DNA, 15 bp, Homo sapiens
gcccaggtcctttat

SEQ ID NO: 1870227 - DNA, 15 bp, Homo sapiens
cccaggtcctttatg

SEQ ID NO: 1870228 - DNA, 15 bp, Homo sapiens
ccaggtcctttatga

SEQ ID NO: 1870229 - DNA, 15 bp, Homo sapiens
caggtcctttatgac

SEQ ID NO: 1870230 - DNA, 15 bp, Homo sapiens
aggtcctttatgaca

SEQ ID NO: 1870231 - DNA, 15 bp, Homo sapiens
ggtcctttatgacat

SEQ ID NO: 1870232 - DNA, 15 bp, Homo sapiens
gtcctttatgacatt

SEQ ID NO: 1870233 - DNA, 15 bp, Homo sapiens
tcctttatgacattc

SEQ ID NO: 1870234 - DNA, 15 bp, Homo sapiens
cctttatgacattcc

SEQ ID NO: 1870235 - DNA, 15 bp, Homo sapiens
ctttatgacattcct

SEQ ID NO: 1870236 - DNA, 15 bp, Homo sapiens
tttatgacattccta

SEQ ID NO: 1870237 - DNA, 15 bp, Homo sapiens
ttatgacattcctaa

SEQ ID NO: 1870238 - DNA, 15 bp, Homo sapiens
tatgacattcctaag

SEQ ID NO: 1870239 - DNA, 15 bp, Homo sapiens
atgacattcctaagg

SEQ ID NO: 1870240 - DNA, 15 bp, Homo sapiens
tgacattcctaagga

SEQ ID NO: 1870241 - DNA, 15 bp, Homo sapiens
gacattcctaaggag

SEQ ID NO: 1870242 - DNA, 15 bp, Homo sapiens
acattcctaaggagt

SEQ ID NO: 1870243 - DNA, 15 bp, Homo sapiens
cattcctaaggagtg

SEQ ID NO: 1870244 - DNA, 15 bp, Homo sapiens
attcctaaggagtga

SEQ ID NO: 1870245 - DNA, 15 bp, Homo sapiens
ttcctaaggagtgac

SEQ ID NO: 1870246 - DNA, 15 bp, Homo sapiens
tcctaaggagtgact

SEQ ID NO: 1870247 - DNA, 15 bp, Homo sapiens
cctaaggagtgactc

SEQ ID NO: 1870248 - DNA, 15 bp, Homo sapiens
ctaaggagtgactct

SEQ ID NO: 1870249 - DNA, 15 bp, Homo sapiens
taaggagtgactcta

SEQ ID NO: 1870250 - DNA, 15 bp, Homo sapiens
aaggagtgactctag

SEQ ID NO: 1870251 - DNA, 15 bp, Homo sapiens
aggagtgactctagc

SEQ ID NO: 1870252 - DNA, 15 bp, Homo sapiens
ggagtgactctagcc

SEQ ID NO: 1870253 - DNA, 15 bp, Homo sapiens
gagtgactctagcct

SEQ ID NO: 1870254 - DNA, 15 bp, Homo sapiens
agtgactctagcctt

SEQ ID NO: 1870255 - DNA, 15 bp, Homo sapiens
gtgactctagccttg

SEQ ID NO: 1870256 - DNA, 15 bp, Homo sapiens
tgactctagccttgt

SEQ ID NO: 1870257 - DNA, 15 bp, Homo sapiens
gactctagccttgta

SEQ ID NO: 1870258 - DNA, 15 bp, Homo sapiens
actctagccttgtac

SEQ ID NO: 1870259 - DNA, 15 bp, Homo sapiens
ctctagccttgtact

SEQ ID NO: 1870260 - DNA, 15 bp, Homo sapiens
tctagccttgtactc

SEQ ID NO: 1870261 - DNA, 15 bp, Homo sapiens
ctagccttgtactca

SEQ ID NO: 1870262 - DNA, 15 bp, Homo sapiens
tagccttgtactcag

SEQ ID NO: 1870263 - DNA, 15 bp, Homo sapiens
agccttgtactcagc

SEQ ID NO: 1870264 - DNA, 15 bp, Homo sapiens
cttgtactcagcaga

SEQ ID NO: 1870265 - DNA, 15 bp, Homo sapiens
ttgtactcagcagac

SEQ ID NO: 1870266 - DNA, 15 bp, Homo sapiens
tgtactcagcagacc

SEQ ID NO: 1870267 - DNA, 15 bp, Homo sapiens
gtactcagcagaccc

SEQ ID NO: 1870268 - DNA, 15 bp, Homo sapiens
tactcagcagaccca

SEQ ID NO: 1870269 - DNA, 15 bp, Homo sapiens
actcagcagacccat

SEQ ID NO: 1870270 - DNA, 15 bp, Homo sapiens
ctcagcagacccatg

SEQ ID NO: 1870271 - DNA, 15 bp, Homo sapiens
tcagcagacccatga

SEQ ID NO: 1870272 - DNA, 15 bp, Homo sapiens
cagcagacccatgac

SEQ ID NO: 1870273 - DNA, 15 bp, Homo sapiens
agcagacccatgact

SEQ ID NO: 1870274 - DNA, 15 bp, Homo sapiens
gcagacccatgactt

SEQ ID NO: 1870275 - DNA, 15 bp, Homo sapiens
cagacccatgacttc

SEQ ID NO: 1870276 - DNA, 15 bp, Homo sapiens
agacccatgacttct

SEQ ID NO: 1870277 - DNA, 15 bp, Homo sapiens
gacccatgacttcta

SEQ ID NO: 1870278 - DNA, 15 bp, Homo sapiens
acccatgacttctaa

SEQ ID NO: 1870279 - DNA, 15 bp, Homo sapiens
cccatgacttctaat

SEQ ID NO: 1870280 - DNA, 15 bp, Homo sapiens
ccatgacttctaatc

SEQ ID NO: 1870281 - DNA, 15 bp, Homo sapiens
catgacttctaatca

SEQ ID NO: 1870282 - DNA, 15 bp, Homo sapiens
atgacttctaatcag

SEQ ID NO: 1870283 - DNA, 15 bp, Homo sapiens
tgacttctaatcagc

SEQ ID NO: 1870284 - DNA, 15 bp, Homo sapiens
gacttctaatcagca

SEQ ID NO: 1870285 - DNA, 15 bp, Homo sapiens
acttctaatcagcag

SEQ ID NO: 1870286 - DNA, 15 bp, Homo sapiens
cttctaatcagcagc

SEQ ID NO: 1870287 - DNA, 15 bp, Homo sapiens
ttctaatcagcagca

SEQ ID NO: 1870288 - DNA, 15 bp, Homo sapiens
tctaatcagcagcat

SEQ ID NO: 1870289 - DNA, 15 bp, Homo sapiens
ctaatcagcagcatc

SEQ ID NO: 1870290 - DNA, 15 bp, Homo sapiens
taatcagcagcatct

SEQ ID NO: 1870291 - DNA, 15 bp, Homo sapiens
aatcagcagcatctc

SEQ ID NO: 1870292 - DNA, 15 bp, Homo sapiens
atcagcagcatctca

SEQ ID NO: 1870293 - DNA, 15 bp, Homo sapiens
tcagcagcatctcag

SEQ ID NO: 1870294 - DNA, 15 bp, Homo sapiens
cagcagcatctcaga

SEQ ID NO: 1870295 - DNA, 15 bp, Homo sapiens
agcagcatctcagac

SEQ ID NO: 1870296 - DNA, 15 bp, Homo sapiens
gcagcatctcagaca

SEQ ID NO: 1870297 - DNA, 15 bp, Homo sapiens
cagcatctcagacac

SEQ ID NO: 1870298 - DNA, 15 bp, Homo sapiens
agcatctcagacact

SEQ ID NO: 1870299 - DNA, 15 bp, Homo sapiens
gcatctcagacactc

SEQ ID NO: 1870300 - DNA, 15 bp, Homo sapiens
catctcagacactcc

SEQ ID NO: 1870301 - DNA, 15 bp, Homo sapiens
atctcagacactccg

SEQ ID NO: 1870302 - DNA, 15 bp, Homo sapiens
tctcagacactccgt

SEQ ID NO: 1870303 - DNA, 15 bp, Homo sapiens
ctcagacactccgtt

SEQ ID NO: 1870304 - DNA, 15 bp, Homo sapiens
tcagacactccgttt

SEQ ID NO: 1870305 - DNA, 15 bp, Homo sapiens
cagacactccgtttt

SEQ ID NO: 1870306 - DNA, 15 bp, Homo sapiens
agacactccgttttg

SEQ ID NO: 1870307 - DNA, 15 bp, Homo sapiens
gacactccgttttgg

SEQ ID NO: 1870308 - DNA, 15 bp, Homo sapiens
acactccgttttggc

SEQ ID NO: 1870309 - DNA, 15 bp, Homo sapiens
cactccgttttggct

SEQ ID NO: 1870310 - DNA, 15 bp, Homo sapiens
actccgttttggctg

SEQ ID NO: 1870311 - DNA, 15 bp, Homo sapiens
ctccgttttggctgt

SEQ ID NO: 1870312 - DNA, 15 bp, Homo sapiens
tccgttttggctgtg

SEQ ID NO: 1870313 - DNA, 15 bp, Homo sapiens
ccgttttggctgtga

SEQ ID NO: 1870314 - DNA, 15 bp, Homo sapiens
cgttttggctgtgag

SEQ ID NO: 1870315 - DNA, 15 bp, Homo sapiens
gttttggctgtgagg

SEQ ID NO: 1870316 - DNA, 15 bp, Homo sapiens
ttttggctgtgaggc

SEQ ID NO: 1870317 - DNA, 15 bp, Homo sapiens
tttggctgtgaggct

SEQ ID NO: 1870318 - DNA, 15 bp, Homo sapiens
ttggctgtgaggctg

SEQ ID NO: 1870319 - DNA, 15 bp, Homo sapiens
tggctgtgaggctgc

SEQ ID NO: 1870320 - DNA, 15 bp, Homo sapiens
ggctgtgaggctgct

SEQ ID NO: 1870321 - DNA, 15 bp, Homo sapiens
gctgtgaggctgcta

SEQ ID NO: 1870322 - DNA, 15 bp, Homo sapiens
ctgtgaggctgctag

SEQ ID NO: 1870323 - DNA, 15 bp, Homo sapiens
tgtgaggctgctagg

SEQ ID NO: 1870324 - DNA, 15 bp, Homo sapiens
gtgaggctgctaggc

SEQ ID NO: 1870325 - DNA, 15 bp, Homo sapiens
tgaggctgctaggct

SEQ ID NO: 1870326 - DNA, 15 bp, Homo sapiens
gaggctgctaggctc

SEQ ID NO: 1870327 - DNA, 15 bp, Homo sapiens
aggctgctaggctct

SEQ ID NO: 1870328 - DNA, 15 bp, Homo sapiens
ggctgctaggctctc

SEQ ID NO: 1870329 - DNA, 15 bp, Homo sapiens
gctgctaggctctca

SEQ ID NO: 1870330 - DNA, 15 bp, Homo sapiens
ctgctaggctctcaa

SEQ ID NO: 1870331 - DNA, 15 bp, Homo sapiens
tgctaggctctcaac

SEQ ID NO: 1870332 - DNA, 15 bp, Homo sapiens
gctaggctctcaaca

SEQ ID NO: 1870333 - DNA, 15 bp, Homo sapiens
ctaggctctcaacaa

SEQ ID NO: 1870334 - DNA, 15 bp, Homo sapiens
taggctctcaacaaa

SEQ ID NO: 1870335 - DNA, 15 bp, Homo sapiens
aggctctcaacaaaa

SEQ ID NO: 1870336 - DNA, 15 bp, Homo sapiens
ggctctcaacaaaac

SEQ ID NO: 1870337 - DNA, 15 bp, Homo sapiens
gctctcaacaaaact

SEQ ID NO: 1870338 - DNA, 15 bp, Homo sapiens
ctctcaacaaaactc

SEQ ID NO: 1870339 - DNA, 15 bp, Homo sapiens
tctcaacaaaactcc

SEQ ID NO: 1870340 - DNA, 15 bp, Homo sapiens
ctcaacaaaactcct

SEQ ID NO: 1870341 - DNA, 15 bp, Homo sapiens
tcaacaaaactccta

SEQ ID NO: 1870342 - DNA, 15 bp, Homo sapiens
caacaaaactcctaa

SEQ ID NO: 1870343 - DNA, 15 bp, Homo sapiens
aacaaaactcctaaa

SEQ ID NO: 1870344 - DNA, 15 bp, Homo sapiens
acaaaactcctaaat

SEQ ID NO: 1870345 - DNA, 15 bp, Homo sapiens
caaaactcctaaata

SEQ ID NO: 1870346 - DNA, 15 bp, Homo sapiens
aaaactcctaaatag

SEQ ID NO: 1870347 - DNA, 15 bp, Homo sapiens
aaactcctaaatagg

SEQ ID NO: 1870348 - DNA, 15 bp, Homo sapiens
aactcctaaatagga

SEQ ID NO: 1870349 - DNA, 15 bp, Homo sapiens
actcctaaataggaa

SEQ ID NO: 1870350 - DNA, 15 bp, Homo sapiens
ctcctaaataggaaa

SEQ ID NO: 1870351 - DNA, 15 bp, Homo sapiens
tcctaaataggaaaa

SEQ ID NO: 1870352 - DNA, 15 bp, Homo sapiens
cctaaataggaaaac

SEQ ID NO: 1870353 - DNA, 15 bp, Homo sapiens
ctaaataggaaaact

SEQ ID NO: 1870354 - DNA, 15 bp, Homo sapiens
taaataggaaaactt

SEQ ID NO: 1870355 - DNA, 15 bp, Homo sapiens
aaataggaaaactta

SEQ ID NO: 1870356 - DNA, 15 bp, Homo sapiens
aataggaaaacttac

SEQ ID NO: 1870357 - DNA, 15 bp, Homo sapiens
ataggaaaacttaca

SEQ ID NO: 1870358 - DNA, 15 bp, Homo sapiens
taggaaaacttacaa

SEQ ID NO: 1870359 - DNA, 15 bp, Homo sapiens
aggaaaacttacaaa

SEQ ID NO: 1870360 - DNA, 15 bp, Homo sapiens
ggaaaacttacaaaa

SEQ ID NO: 1870361 - DNA, 15 bp, Homo sapiens
gaaaacttacaaaac

SEQ ID NO: 1870362 - DNA, 15 bp, Homo sapiens
aaaacttacaaaact

SEQ ID NO: 1870363 - DNA, 15 bp, Homo sapiens
aaacttacaaaactt

SEQ ID NO: 1870364 - DNA, 15 bp, Homo sapiens
aacttacaaaacttc

SEQ ID NO: 1870365 - DNA, 15 bp, Homo sapiens
acttacaaaacttcc

SEQ ID NO: 1870366 - DNA, 15 bp, Homo sapiens
cttacaaaacttcca

SEQ ID NO: 1870367 - DNA, 15 bp, Homo sapiens
ttacaaaacttccag

SEQ ID NO: 1870368 - DNA, 15 bp, Homo sapiens
tacaaaacttccagg

SEQ ID NO: 1870369 - DNA, 15 bp, Homo sapiens
acaaaacttccaggc

SEQ ID NO: 1870370 - DNA, 15 bp, Homo sapiens
caaaacttccaggcc

SEQ ID NO: 1870371 - DNA, 15 bp, Homo sapiens
aaaacttccaggcct

SEQ ID NO: 1870372 - DNA, 15 bp, Homo sapiens
aaacttccaggcctt

SEQ ID NO: 1870373 - DNA, 15 bp, Homo sapiens
aacttccaggcctta

SEQ ID NO: 1870374 - DNA, 15 bp, Homo sapiens
acttccaggccttag

SEQ ID NO: 1870375 - DNA, 15 bp, Homo sapiens
cttccaggccttagc

SEQ ID NO: 1870376 - DNA, 15 bp, Homo sapiens
ttccaggccttagct

SEQ ID NO: 1870377 - DNA, 15 bp, Homo sapiens
tccaggccttagctg

SEQ ID NO: 1870378 - DNA, 15 bp, Homo sapiens
ccaggccttagctgt

SEQ ID NO: 1870379 - DNA, 15 bp, Homo sapiens
caggccttagctgtc

SEQ ID NO: 1870380 - DNA, 15 bp, Homo sapiens
aggccttagctgtca

SEQ ID NO: 1870381 - DNA, 15 bp, Homo sapiens
ggccttagctgtcag

SEQ ID NO: 1870382 - DNA, 15 bp, Homo sapiens
gccttagctgtcagc

SEQ ID NO: 1870383 - DNA, 15 bp, Homo sapiens
ccttagctgtcagcc

SEQ ID NO: 1870384 - DNA, 15 bp, Homo sapiens
cttagctgtcagcca

SEQ ID NO: 1870385 - DNA, 15 bp, Homo sapiens
ttagctgtcagccaa

SEQ ID NO: 1870386 - DNA, 15 bp, Homo sapiens
tagctgtcagccaaa

SEQ ID NO: 1870387 - DNA, 15 bp, Homo sapiens
agctgtcagccaaag

SEQ ID NO: 1870388 - DNA, 15 bp, Homo sapiens
gctgtcagccaaaga

SEQ ID NO: 1870389 - DNA, 15 bp, Homo sapiens
ctgtcagccaaagac

SEQ ID NO: 1870390 - DNA, 15 bp, Homo sapiens
tgtcagccaaagacg

SEQ ID NO: 1870391 - DNA, 15 bp, Homo sapiens
gtcagccaaagacgg

SEQ ID NO: 1870392 - DNA, 15 bp, Homo sapiens
tcagccaaagacgga

SEQ ID NO: 1870393 - DNA, 15 bp, Homo sapiens
cagccaaagacggag

SEQ ID NO: 1870394 - DNA, 15 bp, Homo sapiens
agccaaagacggagc

SEQ ID NO: 1870395 - DNA, 15 bp, Homo sapiens
gccaaagacggagct

SEQ ID NO: 1870396 - DNA, 15 bp, Homo sapiens
ccaaagacggagcta

SEQ ID NO: 1870397 - DNA, 15 bp, Homo sapiens
caaagacggagctaa

SEQ ID NO: 1870398 - DNA, 15 bp, Homo sapiens
aaagacggagctaag

SEQ ID NO: 1870399 - DNA, 15 bp, Homo sapiens
aagacggagctaaga

SEQ ID NO: 1870400 - DNA, 15 bp, Homo sapiens
agacggagctaagac

SEQ ID NO: 1870401 - DNA, 15 bp, Homo sapiens
gacggagctaagaca

SEQ ID NO: 1870402 - DNA, 15 bp, Homo sapiens
acggagctaagacac

SEQ ID NO: 1870403 - DNA, 15 bp, Homo sapiens
cggagctaagacaca

SEQ ID NO: 1870404 - DNA, 15 bp, Homo sapiens
ggagctaagacacag

SEQ ID NO: 1870405 - DNA, 15 bp, Homo sapiens
gagctaagacacagc

SEQ ID NO: 1870406 - DNA, 15 bp, Homo sapiens
agctaagacacagct

SEQ ID NO: 1870407 - DNA, 15 bp, Homo sapiens
gctaagacacagcta

SEQ ID NO: 1870408 - DNA, 15 bp, Homo sapiens
ctaagacacagctat

SEQ ID NO: 1870409 - DNA, 15 bp, Homo sapiens
taagacacagctatt

SEQ ID NO: 1870410 - DNA, 15 bp, Homo sapiens
aagacacagctattt

SEQ ID NO: 1870411 - DNA, 15 bp, Homo sapiens
agacacagctatttt

SEQ ID NO: 1870412 - DNA, 15 bp, Homo sapiens
gacacagctatttta

SEQ ID NO: 1870413 - DNA, 15 bp, Homo sapiens
acacagctattttat

SEQ ID NO: 1870414 - DNA, 15 bp, Homo sapiens
cacagctattttatt

SEQ ID NO: 1870415 - DNA, 15 bp, Homo sapiens
acagctattttattt

SEQ ID NO: 1870416 - DNA, 15 bp, Homo sapiens
cagctattttatttc

SEQ ID NO: 1870417 - DNA, 15 bp, Homo sapiens
agctattttatttcc

SEQ ID NO: 1870418 - DNA, 15 bp, Homo sapiens
gctattttatttcct

SEQ ID NO: 1870419 - DNA, 15 bp, Homo sapiens
tattttatttccttg

SEQ ID NO: 1870420 - DNA, 15 bp, Homo sapiens
attttatttccttgt

SEQ ID NO: 1870421 - DNA, 15 bp, Homo sapiens
ttttatttccttgtg

SEQ ID NO: 1870422 - DNA, 15 bp, Homo sapiens
tttatttccttgtgc

SEQ ID NO: 1870423 - DNA, 15 bp, Homo sapiens
ttatttccttgtgca

SEQ ID NO: 1870424 - DNA, 15 bp, Homo sapiens
tatttccttgtgcaa

SEQ ID NO: 1870425 - DNA, 15 bp, Homo sapiens
atttccttgtgcaat

SEQ ID NO: 1870426 - DNA, 15 bp, Homo sapiens
tttccttgtgcaata

SEQ ID NO: 1870427 - DNA, 15 bp, Homo sapiens
ttccttgtgcaataa

SEQ ID NO: 1870428 - DNA, 15 bp, Homo sapiens
tccttgtgcaataaa

SEQ ID NO: 1870429 - DNA, 15 bp, Homo sapiens
ccttgtgcaataaag

SEQ ID NO: 1870430 - DNA, 15 bp, Homo sapiens
cttgtgcaataaagg

SEQ ID NO: 1870431 - DNA, 15 bp, Homo sapiens
ttgtgcaataaaggt

SEQ ID NO: 1870432 - DNA, 15 bp, Homo sapiens
tgtgcaataaaggta

SEQ ID NO: 1870433 - DNA, 15 bp, Homo sapiens
gtgcaataaaggtat

SEQ ID NO: 1870434 - DNA, 15 bp, Homo sapiens
tgcaataaaggtata

SEQ ID NO: 1870435 - DNA, 15 bp, Homo sapiens
gcaataaaggtataa

SEQ ID NO: 1870436 - DNA, 15 bp, Homo sapiens
caataaaggtataat

SEQ ID NO: 1870437 - DNA, 15 bp, Homo sapiens
aataaaggtataatt

SEQ ID NO: 1870438 - DNA, 15 bp, Homo sapiens
ataaaggtataattg

SEQ ID NO: 1870439 - DNA, 15 bp, Homo sapiens
taaaggtataattgt

SEQ ID NO: 1870440 - DNA, 15 bp, Homo sapiens
aaaggtataattgtc

SEQ ID NO: 1870441 - DNA, 15 bp, Homo sapiens
aaggtataattgtct

SEQ ID NO: 1870442 - DNA, 15 bp, Homo sapiens
aggtataattgtctt

SEQ ID NO: 1870443 - DNA, 15 bp, Homo sapiens
ggtataattgtcttc

SEQ ID NO: 1870444 - DNA, 15 bp, Homo sapiens
gtataattgtcttct

SEQ ID NO: 1870445 - DNA, 15 bp, Homo sapiens
tataattgtcttcta

SEQ ID NO: 1870446 - DNA, 15 bp, Homo sapiens
ataattgtcttctat

SEQ ID NO: 1870447 - DNA, 15 bp, Homo sapiens
taattgtcttctatg

SEQ ID NO: 1870448 - DNA, 15 bp, Homo sapiens
aattgtcttctatgc

SEQ ID NO: 1870449 - DNA, 15 bp, Homo sapiens
attgtcttctatgcc

SEQ ID NO: 1870450 - DNA, 15 bp, Homo sapiens
ttgtcttctatgcca

SEQ ID NO: 1870451 - DNA, 15 bp, Homo sapiens
tgtcttctatgccag

SEQ ID NO: 1870452 - DNA, 15 bp, Homo sapiens
gtcttctatgccaga

SEQ ID NO: 1870453 - DNA, 15 bp, Homo sapiens
tcttctatgccagat

SEQ ID NO: 1870454 - DNA, 15 bp, Homo sapiens
cttctatgccagatg

SEQ ID NO: 1870455 - DNA, 15 bp, Homo sapiens
ttctatgccagatgt

SEQ ID NO: 1870456 - DNA, 15 bp, Homo sapiens
tctatgccagatgtc

SEQ ID NO: 1870457 - DNA, 15 bp, Homo sapiens
ctatgccagatgtca

SEQ ID NO: 1870458 - DNA, 15 bp, Homo sapiens
tatgccagatgtcag

SEQ ID NO: 1870459 - DNA, 15 bp, Homo sapiens
atgccagatgtcaga

SEQ ID NO: 1870460 - DNA, 15 bp, Homo sapiens
tgccagatgtcagaa

SEQ ID NO: 1870461 - DNA, 15 bp, Homo sapiens
gccagatgtcagaaa

SEQ ID NO: 1870462 - DNA, 15 bp, Homo sapiens
ccagatgtcagaaag

SEQ ID NO: 1870463 - DNA, 15 bp, Homo sapiens
cagatgtcagaaaga

SEQ ID NO: 1870464 - DNA, 15 bp, Homo sapiens
agatgtcagaaagac

SEQ ID NO: 1870465 - DNA, 15 bp, Homo sapiens
gatgtcagaaagact

SEQ ID NO: 1870466 - DNA, 15 bp, Homo sapiens
atgtcagaaagactt

SEQ ID NO: 1870467 - DNA, 15 bp, Homo sapiens
tgtcagaaagacttc

SEQ ID NO: 1870468 - DNA, 15 bp, Homo sapiens
gtcagaaagacttct

SEQ ID NO: 1870469 - DNA, 15 bp, Homo sapiens
tcagaaagacttcta

SEQ ID NO: 1870470 - DNA, 15 bp, Homo sapiens
cagaaagacttctac

SEQ ID NO: 1870471 - DNA, 15 bp, Homo sapiens
agaaagacttctacc

SEQ ID NO: 1870472 - DNA, 15 bp, Homo sapiens
gaaagacttctacca

SEQ ID NO: 1870473 - DNA, 15 bp, Homo sapiens
aaagacttctaccag

SEQ ID NO: 1870474 - DNA, 15 bp, Homo sapiens
aagacttctaccagg

SEQ ID NO: 1870475 - DNA, 15 bp, Homo sapiens
agacttctaccaggt

SEQ ID NO: 1870476 - DNA, 15 bp, Homo sapiens
gacttctaccaggtc

SEQ ID NO: 1870477 - DNA, 15 bp, Homo sapiens
acttctaccaggtct

SEQ ID NO: 1870478 - DNA, 15 bp, Homo sapiens
cttctaccaggtctt

SEQ ID NO: 1870479 - DNA, 15 bp, Homo sapiens
tctaccaggtctttc

SEQ ID NO: 1870480 - DNA, 15 bp, Homo sapiens
ctaccaggtctttct

SEQ ID NO: 1870481 - DNA, 15 bp, Homo sapiens
taccaggtctttctc

SEQ ID NO: 1870482 - DNA, 15 bp, Homo sapiens
accaggtctttctct

SEQ ID NO: 1870483 - DNA, 15 bp, Homo sapiens
ccaggtctttctctg

SEQ ID NO: 1870484 - DNA, 15 bp, Homo sapiens
caggtctttctctgt

SEQ ID NO: 1870485 - DNA, 15 bp, Homo sapiens
aggtctttctctgtg

SEQ ID NO: 1870486 - DNA, 15 bp, Homo sapiens
ggtctttctctgtgt

SEQ ID NO: 1870487 - DNA, 15 bp, Homo sapiens
gtctttctctgtgtg

SEQ ID NO: 1870488 - DNA, 15 bp, Homo sapiens
tctttctctgtgtgt

SEQ ID NO: 1870489 - DNA, 15 bp, Homo sapiens
ctttctctgtgtgtt

SEQ ID NO: 1870490 - DNA, 15 bp, Homo sapiens
tttctctgtgtgttc

SEQ ID NO: 1870491 - DNA, 15 bp, Homo sapiens
ttctctgtgtgttct

SEQ ID NO: 1870492 - DNA, 15 bp, Homo sapiens
tctctgtgtgttctt

SEQ ID NO: 1870493 - DNA, 15 bp, Homo sapiens
ctctgtgtgttctta

SEQ ID NO: 1870494 - DNA, 15 bp, Homo sapiens
tctgtgtgttcttaa

SEQ ID NO: 1870495 - DNA, 15 bp, Homo sapiens
ctgtgtgttcttaaa

SEQ ID NO: 1870496 - DNA, 15 bp, Homo sapiens
tgtgtgttcttaaaa

SEQ ID NO: 1870497 - DNA, 15 bp, Homo sapiens
gtgtgttcttaaaaa

SEQ ID NO: 1870498 - DNA, 15 bp, Homo sapiens
tgtgttcttaaaaaa

SEQ ID NO: 1870499 - DNA, 15 bp, Homo sapiens
gtgttcttaaaaaaa

SEQ ID NO: 1870500 - DNA, 15 bp, Homo sapiens
tgttcttaaaaaaaa

SEQ ID NO: 1870501 - DNA, 15 bp, Homo sapiens
gttcttaaaaaaaat

SEQ ID NO: 1870502 - DNA, 15 bp, Homo sapiens
ttcttaaaaaaaatc

SEQ ID NO: 1870503 - DNA, 15 bp, Homo sapiens
tcttaaaaaaaatcc

SEQ ID NO: 1870504 - DNA, 15 bp, Homo sapiens
cttaaaaaaaatcct

SEQ ID NO: 1870505 - DNA, 15 bp, Homo sapiens
ttaaaaaaaatcctc

SEQ ID NO: 1870506 - DNA, 15 bp, Homo sapiens
taaaaaaaatcctca

SEQ ID NO: 1870507 - DNA, 15 bp, Homo sapiens
aaaaaaaatcctcaa

SEQ ID NO: 1870508 - DNA, 15 bp, Homo sapiens
aaaaaaatcctcaac

SEQ ID NO: 1870509 - DNA, 15 bp, Homo sapiens
aaaaaatcctcaaca

SEQ ID NO: 1870510 - DNA, 15 bp, Homo sapiens
aaaaatcctcaacaa

SEQ ID NO: 1870511 - DNA, 15 bp, Homo sapiens
aaaatcctcaacaac

SEQ ID NO: 1870512 - DNA, 15 bp, Homo sapiens
aaatcctcaacaaca

SEQ ID NO: 1870513 - DNA, 15 bp, Homo sapiens
aatcctcaacaacaa

SEQ ID NO: 1870514 - DNA, 15 bp, Homo sapiens
atcctcaacaacaac

SEQ ID NO: 1870515 - DNA, 15 bp, Homo sapiens
tcctcaacaacaaca

SEQ ID NO: 1870516 - DNA, 15 bp, Homo sapiens
cctcaacaacaacaa

SEQ ID NO: 1870517 - DNA, 15 bp, Homo sapiens
ctcaacaacaacaac

SEQ ID NO: 1870518 - DNA, 15 bp, Homo sapiens
tcaacaacaacaaca

SEQ ID NO: 1870519 - DNA, 15 bp, Homo sapiens
aacaacaacaaaact

SEQ ID NO: 1870520 - DNA, 15 bp, Homo sapiens
acaacaacaaaactt

SEQ ID NO: 1870521 - DNA, 15 bp, Homo sapiens
caacaacaaaacttc

SEQ ID NO: 1870522 - DNA, 15 bp, Homo sapiens
aacaacaaaacttca

SEQ ID NO: 1870523 - DNA, 15 bp, Homo sapiens
acaacaaaacttcaa

SEQ ID NO: 1870524 - DNA, 15 bp, Homo sapiens
caacaaaacttcaag

SEQ ID NO: 1870525 - DNA, 15 bp, Homo sapiens
aacaaaacttcaaga

SEQ ID NO: 1870526 - DNA, 15 bp, Homo sapiens
acaaaacttcaagat

SEQ ID NO: 1870527 - DNA, 15 bp, Homo sapiens
caaaacttcaagatg

SEQ ID NO: 1870528 - DNA, 15 bp, Homo sapiens
aaaacttcaagatgt

SEQ ID NO: 1870529 - DNA, 15 bp, Homo sapiens
aaacttcaagatgtt

SEQ ID NO: 1870530 - DNA, 15 bp, Homo sapiens
aacttcaagatgtta

SEQ ID NO: 1870531 - DNA, 15 bp, Homo sapiens
acttcaagatgttag

SEQ ID NO: 1870532 - DNA, 15 bp, Homo sapiens
cttcaagatgttaga

SEQ ID NO: 1870533 - DNA, 15 bp, Homo sapiens
ttcaagatgttagaa

SEQ ID NO: 1870534 - DNA, 15 bp, Homo sapiens
tcaagatgttagaaa

SEQ ID NO: 1870535 - DNA, 15 bp, Homo sapiens
caagatgttagaaat

SEQ ID NO: 1870536 - DNA, 15 bp, Homo sapiens
aagatgttagaaata

SEQ ID NO: 1870537 - DNA, 15 bp, Homo sapiens
tgttagaaatagata

SEQ ID NO: 1870538 - DNA, 15 bp, Homo sapiens
gttagaaatagatat

SEQ ID NO: 1870539 - DNA, 15 bp, Homo sapiens
ttagaaatagatata

SEQ ID NO: 1870540 - DNA, 15 bp, Homo sapiens
tagaaatagatataa

SEQ ID NO: 1870541 - DNA, 15 bp, Homo sapiens
agaaatagatataag

SEQ ID NO: 1870542 - DNA, 15 bp, Homo sapiens
gaaatagatataagc

SEQ ID NO: 1870543 - DNA, 15 bp, Homo sapiens
aaatagatataagcc

SEQ ID NO: 1870544 - DNA, 15 bp, Homo sapiens
aatagatataagcca

SEQ ID NO: 1870545 - DNA, 15 bp, Homo sapiens
atagatataagccat

SEQ ID NO: 1870546 - DNA, 15 bp, Homo sapiens
tagatataagccatt

SEQ ID NO: 1870547 - DNA, 15 bp, Homo sapiens
agatataagccatta

SEQ ID NO: 1870548 - DNA, 15 bp, Homo sapiens
gatataagccattat

SEQ ID NO: 1870549 - DNA, 15 bp, Homo sapiens
atataagccattata

SEQ ID NO: 1870550 - DNA, 15 bp, Homo sapiens
tataagccattataa

SEQ ID NO: 1870551 - DNA, 15 bp, Homo sapiens
ataagccattataat

SEQ ID NO: 1870552 - DNA, 15 bp, Homo sapiens
taagccattataatt

SEQ ID NO: 1870553 - DNA, 15 bp, Homo sapiens
aagccattataatta

SEQ ID NO: 1870554 - DNA, 15 bp, Homo sapiens
agccattataattat

SEQ ID NO: 1870555 - DNA, 15 bp, Homo sapiens
gccattataattatc

SEQ ID NO: 1870556 - DNA, 15 bp, Homo sapiens
ccattataattatcc

SEQ ID NO: 1870557 - DNA, 15 bp, Homo sapiens
cattataattatcct

SEQ ID NO: 1870558 - DNA, 15 bp, Homo sapiens
attataattatcctt

SEQ ID NO: 1870559 - DNA, 15 bp, Homo sapiens
ttataattatccttc

SEQ ID NO: 1870560 - DNA, 15 bp, Homo sapiens
tataattatccttca

SEQ ID NO: 1870561 - DNA, 15 bp, Homo sapiens
ataattatccttcag

SEQ ID NO: 1870562 - DNA, 15 bp, Homo sapiens
taattatccttcagc

SEQ ID NO: 1870563 - DNA, 15 bp, Homo sapiens
aattatccttcagca

SEQ ID NO: 1870564 - DNA, 15 bp, Homo sapiens
attatccttcagcat

SEQ ID NO: 1870565 - DNA, 15 bp, Homo sapiens
ttatccttcagcatc

SEQ ID NO: 1870566 - DNA, 15 bp, Homo sapiens
tatccttcagcatca

SEQ ID NO: 1870567 - DNA, 15 bp, Homo sapiens
atccttcagcatcac

SEQ ID NO: 1870568 - DNA, 15 bp, Homo sapiens
tccttcagcatcaca

SEQ ID NO: 1870569 - DNA, 15 bp, Homo sapiens
ccttcagcatcacat

SEQ ID NO: 1870570 - DNA, 15 bp, Homo sapiens
cttcagcatcacata

SEQ ID NO: 1870571 - DNA, 15 bp, Homo sapiens
ttcagcatcacatat

SEQ ID NO: 1870572 - DNA, 15 bp, Homo sapiens
tcagcatcacatata

SEQ ID NO: 1870573 - DNA, 15 bp, Homo sapiens
cagcatcacatataa

SEQ ID NO: 1870574 - DNA, 15 bp, Homo sapiens
agcatcacatataaa

SEQ ID NO: 1870575 - DNA, 15 bp, Homo sapiens
gcatcacatataaat

SEQ ID NO: 1870576 - DNA, 15 bp, Homo sapiens
catcacatataaatt

SEQ ID NO: 1870577 - DNA, 15 bp, Homo sapiens
atcacatataaattc

SEQ ID NO: 1870578 - DNA, 15 bp, Homo sapiens
tcacatataaattca

SEQ ID NO: 1870579 - DNA, 15 bp, Homo sapiens
cacatataaattcat

SEQ ID NO: 1870580 - DNA, 15 bp, Homo sapiens
acatataaattcatg

SEQ ID NO: 1870581 - DNA, 15 bp, Homo sapiens
catataaattcatgt

SEQ ID NO: 1870582 - DNA, 15 bp, Homo sapiens
atataaattcatgtg

SEQ ID NO: 1870583 - DNA, 15 bp, Homo sapiens
tataaattcatgtgt

SEQ ID NO: 1870584 - DNA, 15 bp, Homo sapiens
ataaattcatgtgta

SEQ ID NO: 1870585 - DNA, 15 bp, Homo sapiens
taaattcatgtgtaa

SEQ ID NO: 1870586 - DNA, 15 bp, Homo sapiens
aaattcatgtgtaac

SEQ ID NO: 1870587 - DNA, 15 bp, Homo sapiens
aattcatgtgtaact

SEQ ID NO: 1870588 - DNA, 15 bp, Homo sapiens
attcatgtgtaactt

SEQ ID NO: 1870589 - DNA, 15 bp, Homo sapiens
ttcatgtgtaacttt

SEQ ID NO: 1870590 - DNA, 15 bp, Homo sapiens
tcatgtgtaacttta

SEQ ID NO: 1870591 - DNA, 15 bp, Homo sapiens
catgtgtaactttaa

SEQ ID NO: 1870592 - DNA, 15 bp, Homo sapiens
atgtgtaactttaaa

SEQ ID NO: 1870593 - DNA, 15 bp, Homo sapiens
tgtgtaactttaaac

SEQ ID NO: 1870594 - DNA, 15 bp, Homo sapiens
gtgtaactttaaaca

SEQ ID NO: 1870595 - DNA, 15 bp, Homo sapiens
tgtaactttaaacaa

SEQ ID NO: 1870596 - DNA, 15 bp, Homo sapiens
gtaactttaaacaag

SEQ ID NO: 1870597 - DNA, 15 bp, Homo sapiens
taactttaaacaagc

SEQ ID NO: 1870598 - DNA, 15 bp, Homo sapiens
aactttaaacaagct

SEQ ID NO: 1870599 - DNA, 15 bp, Homo sapiens
actttaaacaagctg

SEQ ID NO: 1870600 - DNA, 15 bp, Homo sapiens
ctttaaacaagctgg

SEQ ID NO: 1870601 - DNA, 15 bp, Homo sapiens
tttaaacaagctggt

SEQ ID NO: 1870602 - DNA, 15 bp, Homo sapiens
ttaaacaagctggtg

SEQ ID NO: 1870603 - DNA, 15 bp, Homo sapiens
taaacaagctggtgt

SEQ ID NO: 1870604 - DNA, 15 bp, Homo sapiens
aaacaagctggtgtc

SEQ ID NO: 1870605 - DNA, 15 bp, Homo sapiens
aacaagctggtgtcc

SEQ ID NO: 1870606 - DNA, 15 bp, Homo sapiens
acaagctggtgtcct

SEQ ID NO: 1870607 - DNA, 15 bp, Homo sapiens
caagctggtgtcctt

SEQ ID NO: 1870608 - DNA, 15 bp, Homo sapiens
aagctggtgtccttg

SEQ ID NO: 1870609 - DNA, 15 bp, Homo sapiens
agctggtgtccttgt

SEQ ID NO: 1870610 - DNA, 15 bp, Homo sapiens
gctggtgtccttgtg

SEQ ID NO: 1870611 - DNA, 15 bp, Homo sapiens
ctggtgtccttgtgg

SEQ ID NO: 1870612 - DNA, 15 bp, Homo sapiens
tggtgtccttgtggt

SEQ ID NO: 1870613 - DNA, 15 bp, Homo sapiens
ggtgtccttgtggtg

SEQ ID NO: 1870614 - DNA, 15 bp, Homo sapiens
gtgtccttgtggtga

SEQ ID NO: 1870615 - DNA, 15 bp, Homo sapiens
tgtccttgtggtgac

SEQ ID NO: 1870616 - DNA, 15 bp, Homo sapiens
gtccttgtggtgact

SEQ ID NO: 1870617 - DNA, 15 bp, Homo sapiens
tccttgtggtgacta

SEQ ID NO: 1870618 - DNA, 15 bp, Homo sapiens
ccttgtggtgactat

SEQ ID NO: 1870619 - DNA, 15 bp, Homo sapiens
cttgtggtgactatc

SEQ ID NO: 1870620 - DNA, 15 bp, Homo sapiens
ttgtggtgactatct

SEQ ID NO: 1870621 - DNA, 15 bp, Homo sapiens
tgtggtgactatcta

SEQ ID NO: 1870622 - DNA, 15 bp, Homo sapiens
gtggtgactatctat

SEQ ID NO: 1870623 - DNA, 15 bp, Homo sapiens
tggtgactatctatg

SEQ ID NO: 1870624 - DNA, 15 bp, Homo sapiens
ggtgactatctatgt

SEQ ID NO: 1870625 - DNA, 15 bp, Homo sapiens
gtgactatctatgtt

SEQ ID NO: 1870626 - DNA, 15 bp, Homo sapiens
tgactatctatgtta

SEQ ID NO: 1870627 - DNA, 15 bp, Homo sapiens
gactatctatgttat

SEQ ID NO: 1870628 - DNA, 15 bp, Homo sapiens
actatctatgttatg

SEQ ID NO: 1870629 - DNA, 15 bp, Homo sapiens
ctatctatgttatgt

SEQ ID NO: 1870630 - DNA, 15 bp, Homo sapiens
tatctatgttatgtg

SEQ ID NO: 1870631 - DNA, 15 bp, Homo sapiens
atctatgttatgtga

SEQ ID NO: 1870632 - DNA, 15 bp, Homo sapiens
tctatgttatgtgac

SEQ ID NO: 1870633 - DNA, 15 bp, Homo sapiens
ctatgttatgtgaca

SEQ ID NO: 1870634 - DNA, 15 bp, Homo sapiens
tatgttatgtgacat

SEQ ID NO: 1870635 - DNA, 15 bp, Homo sapiens
atgttatgtgacatt

SEQ ID NO: 1870636 - DNA, 15 bp, Homo sapiens
tgttatgtgacattg

SEQ ID NO: 1870637 - DNA, 15 bp, Homo sapiens
gttatgtgacattgt

SEQ ID NO: 1870638 - DNA, 15 bp, Homo sapiens
ttatgtgacattgtt

SEQ ID NO: 1870639 - DNA, 15 bp, Homo sapiens
tatgtgacattgttt

SEQ ID NO: 1870640 - DNA, 15 bp, Homo sapiens
atgtgacattgtttt

SEQ ID NO: 1870641 - DNA, 15 bp, Homo sapiens
tgtgacattgttttc

SEQ ID NO: 1870642 - DNA, 15 bp, Homo sapiens
gtgacattgttttct

SEQ ID NO: 1870643 - DNA, 15 bp, Homo sapiens
tgacattgttttctg

SEQ ID NO: 1870644 - DNA, 15 bp, Homo sapiens
gacattgttttctgt

SEQ ID NO: 1870645 - DNA, 15 bp, Homo sapiens
acattgttttctgtt

SEQ ID NO: 1870646 - DNA, 15 bp, Homo sapiens
cattgttttctgttc

SEQ ID NO: 1870647 - DNA, 15 bp, Homo sapiens
attgttttctgttcg

SEQ ID NO: 1870648 - DNA, 15 bp, Homo sapiens
ttgttttctgttcgt

SEQ ID NO: 1870649 - DNA, 15 bp, Homo sapiens
tgttttctgttcgtc

SEQ ID NO: 1870650 - DNA, 15 bp, Homo sapiens
gttttctgttcgtca

SEQ ID NO: 1870651 - DNA, 15 bp, Homo sapiens
ttttctgttcgtcaa

SEQ ID NO: 1870652 - DNA, 15 bp, Homo sapiens
tttctgttcgtcaaa

SEQ ID NO: 1870653 - DNA, 15 bp, Homo sapiens
ttctgttcgtcaaag

SEQ ID NO: 1870654 - DNA, 15 bp, Homo sapiens
tctgttcgtcaaagt

SEQ ID NO: 1870655 - DNA, 15 bp, Homo sapiens
ctgttcgtcaaagtg

SEQ ID NO: 1870656 - DNA, 15 bp, Homo sapiens
tgttcgtcaaagtga

SEQ ID NO: 1870657 - DNA, 15 bp, Homo sapiens
gttcgtcaaagtgaa

SEQ ID NO: 1870658 - DNA, 15 bp, Homo sapiens
ttcgtcaaagtgaag

SEQ ID NO: 1870659 - DNA, 15 bp, Homo sapiens
tcgtcaaagtgaagc

SEQ ID NO: 1870660 - DNA, 15 bp, Homo sapiens
cgtcaaagtgaagca

SEQ ID NO: 1870661 - DNA, 15 bp, Homo sapiens
gtcaaagtgaagcag

SEQ ID NO: 1870662 - DNA, 15 bp, Homo sapiens
tcaaagtgaagcagc

SEQ ID NO: 1870663 - DNA, 15 bp, Homo sapiens
caaagtgaagcagca

SEQ ID NO: 1870664 - DNA, 15 bp, Homo sapiens
aaagtgaagcagcag

SEQ ID NO: 1870665 - DNA, 15 bp, Homo sapiens
aagtgaagcagcaga

SEQ ID NO: 1870666 - DNA, 15 bp, Homo sapiens
agtgaagcagcagat

SEQ ID NO: 1870667 - DNA, 15 bp, Homo sapiens
gtgaagcagcagata

SEQ ID NO: 1870668 - DNA, 15 bp, Homo sapiens
tgaagcagcagataa

SEQ ID NO: 1870669 - DNA, 15 bp, Homo sapiens
gaagcagcagataaa

SEQ ID NO: 1870670 - DNA, 15 bp, Homo sapiens
aagcagcagataaat

SEQ ID NO: 1870671 - DNA, 15 bp, Homo sapiens
agcagcagataaatg

SEQ ID NO: 1870672 - DNA, 15 bp, Homo sapiens
gcagcagataaatgg

SEQ ID NO: 1870673 - DNA, 15 bp, Homo sapiens
cagcagataaatgga

SEQ ID NO: 1870674 - DNA, 15 bp, Homo sapiens
agcagataaatggaa

SEQ ID NO: 1870675 - DNA, 15 bp, Homo sapiens
gcagataaatggaac

SEQ ID NO: 1870676 - DNA, 15 bp, Homo sapiens
cagataaatggaaca

SEQ ID NO: 1870677 - DNA, 15 bp, Homo sapiens
agataaatggaacaa

SEQ ID NO: 1870678 - DNA, 15 bp, Homo sapiens
gataaatggaacaac

SEQ ID NO: 1870679 - DNA, 15 bp, Homo sapiens
ataaatggaacaact

SEQ ID NO: 1870680 - DNA, 15 bp, Homo sapiens
taaatggaacaactg

SEQ ID NO: 1870681 - DNA, 15 bp, Homo sapiens
aaatggaacaactgt

SEQ ID NO: 1870682 - DNA, 15 bp, Homo sapiens
aatggaacaactgtt

SEQ ID NO: 1870683 - DNA, 15 bp, Homo sapiens
atggaacaactgttt

SEQ ID NO: 1870684 - DNA, 15 bp, Homo sapiens
tggaacaactgtttt

SEQ ID NO: 1870685 - DNA, 15 bp, Homo sapiens
ggaacaactgttttt

SEQ ID NO: 1870686 - DNA, 15 bp, Homo sapiens
gaacaactgtttttt

SEQ ID NO: 1870687 - DNA, 15 bp, Homo sapiens
aacaactgtttttta

SEQ ID NO: 1870688 - DNA, 15 bp, Homo sapiens
acaactgttttttaa

SEQ ID NO: 1870689 - DNA, 15 bp, Homo sapiens
caactgttttttaaa

SEQ ID NO: 1870690 - DNA, 15 bp, Homo sapiens
aactgttttttaaac

SEQ ID NO: 1870691 - DNA, 15 bp, Homo sapiens
actgttttttaaaca

SEQ ID NO: 1870692 - DNA, 15 bp, Homo sapiens
ctgttttttaaacat

SEQ ID NO: 1870693 - DNA, 15 bp, Homo sapiens
tgttttttaaacata

SEQ ID NO: 1870694 - DNA, 15 bp, Homo sapiens
gttttttaaacataa

SEQ ID NO: 1870695 - DNA, 15 bp, Homo sapiens
ttttttaaacataat

SEQ ID NO: 1870696 - DNA, 15 bp, Homo sapiens
tttttaaacataatt

SEQ ID NO: 1870697 - DNA, 15 bp, Homo sapiens
ttttaaacataatta

SEQ ID NO: 1870698 - DNA, 15 bp, Homo sapiens
tttaaacataattat

SEQ ID NO: 1870699 - DNA, 15 bp, Homo sapiens
ttaaacataattatt

SEQ ID NO: 1870700 - DNA, 15 bp, Homo sapiens
taaacataattattt

SEQ ID NO: 1870701 - DNA, 15 bp, Homo sapiens
aaacataattatttt

SEQ ID NO: 1870702 - DNA, 15 bp, Homo sapiens
aacataattattttt

SEQ ID NO: 1870703 - DNA, 15 bp, Homo sapiens
acataattatttttt

SEQ ID NO: 1870704 - DNA, 15 bp, Homo sapiens
cataattattttttt

SEQ ID NO: 1870705 - DNA, 15 bp, Homo sapiens
ataattatttttttt

SEQ ID NO: 1870706 - DNA, 15 bp, Homo sapiens
taattattttttttt

SEQ ID NO: 1870707 - DNA, 15 bp, Homo sapiens
aattatttttttttc

SEQ ID NO: 1870708 - DNA, 15 bp, Homo sapiens
attatttttttttcc

SEQ ID NO: 1870709 - DNA, 15 bp, Homo sapiens
ttatttttttttcca

SEQ ID NO: 1870710 - DNA, 15 bp, Homo sapiens
tatttttttttccag

SEQ ID NO: 1870711 - DNA, 15 bp, Homo sapiens
atttttttttccaga

SEQ ID NO: 1870712 - DNA, 15 bp, Homo sapiens
tttttttttccagat

SEQ ID NO: 1870713 - DNA, 15 bp, Homo sapiens
ttttttttccagatg

SEQ ID NO: 1870714 - DNA, 15 bp, Homo sapiens
tttttttccagatgt

SEQ ID NO: 1870715 - DNA, 15 bp, Homo sapiens
ttttttccagatgtt

SEQ ID NO: 1870716 - DNA, 15 bp, Homo sapiens
tttttccagatgttc

SEQ ID NO: 1870717 - DNA, 15 bp, Homo sapiens
ttttccagatgttct

SEQ ID NO: 1870718 - DNA, 15 bp, Homo sapiens
tttccagatgttctc

SEQ ID NO: 1870719 - DNA, 15 bp, Homo sapiens
ttccagatgttctca

SEQ ID NO: 1870720 - DNA, 15 bp, Homo sapiens
tccagatgttctcag

SEQ ID NO: 1870721 - DNA, 15 bp, Homo sapiens
ccagatgttctcagg

SEQ ID NO: 1870722 - DNA, 15 bp, Homo sapiens
cagatgttctcaggc

SEQ ID NO: 1870723 - DNA, 15 bp, Homo sapiens
agatgttctcaggct

SEQ ID NO: 1870724 - DNA, 15 bp, Homo sapiens
gatgttctcaggctt

SEQ ID NO: 1870725 - DNA, 15 bp, Homo sapiens
atgttctcaggcttc

SEQ ID NO: 1870726 - DNA, 15 bp, Homo sapiens
tgttctcaggcttcc

SEQ ID NO: 1870727 - DNA, 15 bp, Homo sapiens
gttctcaggcttcct

SEQ ID NO: 1870728 - DNA, 15 bp, Homo sapiens
ttctcaggcttccta

SEQ ID NO: 1870729 - DNA, 15 bp, Homo sapiens
tctcaggcttcctac

SEQ ID NO: 1870730 - DNA, 15 bp, Homo sapiens
ctcaggcttcctaca

SEQ ID NO: 1870731 - DNA, 15 bp, Homo sapiens
tcaggcttcctacat

SEQ ID NO: 1870732 - DNA, 15 bp, Homo sapiens
caggcttcctacatt

SEQ ID NO: 1870733 - DNA, 15 bp, Homo sapiens
aggcttcctacattc

SEQ ID NO: 1870734 - DNA, 15 bp, Homo sapiens
ggcttcctacattca

SEQ ID NO: 1870735 - DNA, 15 bp, Homo sapiens
gcttcctacattcag

SEQ ID NO: 1870736 - DNA, 15 bp, Homo sapiens
cttcctacattcagg

SEQ ID NO: 1870737 - DNA, 15 bp, Homo sapiens
ttcctacattcagga

SEQ ID NO: 1870738 - DNA, 15 bp, Homo sapiens
tcctacattcaggat

SEQ ID NO: 1870739 - DNA, 15 bp, Homo sapiens
cctacattcaggatc

SEQ ID NO: 1870740 - DNA, 15 bp, Homo sapiens
ctacattcaggatca

SEQ ID NO: 1870741 - DNA, 15 bp, Homo sapiens
tacattcaggatcag

SEQ ID NO: 1870742 - DNA, 15 bp, Homo sapiens
acattcaggatcagc

SEQ ID NO: 1870743 - DNA, 15 bp, Homo sapiens
cattcaggatcagca

SEQ ID NO: 1870744 - DNA, 15 bp, Homo sapiens
attcaggatcagcaa

SEQ ID NO: 1870745 - DNA, 15 bp, Homo sapiens
ttcaggatcagcaag

SEQ ID NO: 1870746 - DNA, 15 bp, Homo sapiens
tcaggatcagcaagt

SEQ ID NO: 1870747 - DNA, 15 bp, Homo sapiens
caggatcagcaagtc

SEQ ID NO: 1870748 - DNA, 15 bp, Homo sapiens
aggatcagcaagtct

SEQ ID NO: 1870749 - DNA, 15 bp, Homo sapiens
ggatcagcaagtctt

SEQ ID NO: 1870750 - DNA, 15 bp, Homo sapiens
gatcagcaagtcttc

SEQ ID NO: 1870751 - DNA, 15 bp, Homo sapiens
atcagcaagtcttca

SEQ ID NO: 1870752 - DNA, 15 bp, Homo sapiens
tcagcaagtcttcag

SEQ ID NO: 1870753 - DNA, 15 bp, Homo sapiens
cagcaagtcttcagc

SEQ ID NO: 1870754 - DNA, 15 bp, Homo sapiens
agcaagtcttcagca

SEQ ID NO: 1870755 - DNA, 15 bp, Homo sapiens
gcaagtcttcagcat

SEQ ID NO: 1870756 - DNA, 15 bp, Homo sapiens
caagtcttcagcatt

SEQ ID NO: 1870757 - DNA, 15 bp, Homo sapiens
aagtcttcagcattg

SEQ ID NO: 1870758 - DNA, 15 bp, Homo sapiens
agtcttcagcattgg

SEQ ID NO: 1870759 - DNA, 15 bp, Homo sapiens
gtcttcagcattggt

SEQ ID NO: 1870760 - DNA, 15 bp, Homo sapiens
tcttcagcattggta

SEQ ID NO: 1870761 - DNA, 15 bp, Homo sapiens
cttcagcattggtac

SEQ ID NO: 1870762 - DNA, 15 bp, Homo sapiens
ttcagcattggtact

SEQ ID NO: 1870763 - DNA, 15 bp, Homo sapiens
tcagcattggtactc

SEQ ID NO: 1870764 - DNA, 15 bp, Homo sapiens
cagcattggtactct

SEQ ID NO: 1870765 - DNA, 15 bp, Homo sapiens
agcattggtactctt

SEQ ID NO: 1870766 - DNA, 15 bp, Homo sapiens
gcattggtactcttt

SEQ ID NO: 1870767 - DNA, 15 bp, Homo sapiens
cattggtactctttg

SEQ ID NO: 1870768 - DNA, 15 bp, Homo sapiens
attggtactctttgt

SEQ ID NO: 1870769 - DNA, 15 bp, Homo sapiens
ttggtactctttgtt

SEQ ID NO: 1870770 - DNA, 15 bp, Homo sapiens
tggtactctttgtta

SEQ ID NO: 1870771 - DNA, 15 bp, Homo sapiens
ggtactctttgttag

SEQ ID NO: 1870772 - DNA, 15 bp, Homo sapiens
gtactctttgttagt

SEQ ID NO: 1870773 - DNA, 15 bp, Homo sapiens
tactctttgttagtg

SEQ ID NO: 1870774 - DNA, 15 bp, Homo sapiens
actctttgttagtgt

SEQ ID NO: 1870775 - DNA, 15 bp, Homo sapiens
ctctttgttagtgta

SEQ ID NO: 1870776 - DNA, 15 bp, Homo sapiens
tctttgttagtgtag

SEQ ID NO: 1870777 - DNA, 15 bp, Homo sapiens
ctttgttagtgtaga

SEQ ID NO: 1870778 - DNA, 15 bp, Homo sapiens
tttgttagtgtagac

SEQ ID NO: 1870779 - DNA, 15 bp, Homo sapiens
ttgttagtgtagacc

SEQ ID NO: 1870780 - DNA, 15 bp, Homo sapiens
tgttagtgtagacct

SEQ ID NO: 1870781 - DNA, 15 bp, Homo sapiens
gttagtgtagacctt

SEQ ID NO: 1870782 - DNA, 15 bp, Homo sapiens
ttagtgtagaccttg

SEQ ID NO: 1870783 - DNA, 15 bp, Homo sapiens
tagtgtagaccttga

SEQ ID NO: 1870784 - DNA, 15 bp, Homo sapiens
agtgtagaccttgag

SEQ ID NO: 1870785 - DNA, 15 bp, Homo sapiens
gtgtagaccttgagt

SEQ ID NO: 1870786 - DNA, 15 bp, Homo sapiens
tgtagaccttgagtg

SEQ ID NO: 1870787 - DNA, 15 bp, Homo sapiens
gtagaccttgagtgc

SEQ ID NO: 1870788 - DNA, 15 bp, Homo sapiens
tagaccttgagtgcc

SEQ ID NO: 1870789 - DNA, 15 bp, Homo sapiens
agaccttgagtgccc

SEQ ID NO: 1870790 - DNA, 15 bp, Homo sapiens
gaccttgagtgccct

SEQ ID NO: 1870791 - DNA, 15 bp, Homo sapiens
accttgagtgccctg

SEQ ID NO: 1870792 - DNA, 15 bp, Homo sapiens
ccttgagtgccctgc

SEQ ID NO: 1870793 - DNA, 15 bp, Homo sapiens
cttgagtgccctgct

SEQ ID NO: 1870794 - DNA, 15 bp, Homo sapiens
ttgagtgccctgctg

SEQ ID NO: 1870795 - DNA, 15 bp, Homo sapiens
tgagtgccctgctga

SEQ ID NO: 1870796 - DNA, 15 bp, Homo sapiens
gagtgccctgctgag

SEQ ID NO: 1870797 - DNA, 15 bp, Homo sapiens
agtgccctgctgagg

SEQ ID NO: 1870798 - DNA, 15 bp, Homo sapiens
gtgccctgctgaggg

SEQ ID NO: 1870799 - DNA, 15 bp, Homo sapiens
tgccctgctgagggg

SEQ ID NO: 1870800 - DNA, 15 bp, Homo sapiens
gccctgctgaggggc

SEQ ID NO: 1870801 - DNA, 15 bp, Homo sapiens
ccctgctgaggggct

SEQ ID NO: 1870802 - DNA, 15 bp, Homo sapiens
cctgctgaggggctt

SEQ ID NO: 1870803 - DNA, 15 bp, Homo sapiens
ctgctgaggggcttg

SEQ ID NO: 1870804 - DNA, 15 bp, Homo sapiens
tgctgaggggcttgt

SEQ ID NO: 1870805 - DNA, 15 bp, Homo sapiens
gctgaggggcttgtg

SEQ ID NO: 1870806 - DNA, 15 bp, Homo sapiens
ctgaggggcttgtgt

SEQ ID NO: 1870807 - DNA, 15 bp, Homo sapiens
tgaggggcttgtgtg

SEQ ID NO: 1870808 - DNA, 15 bp, Homo sapiens
gaggggcttgtgtgc

SEQ ID NO: 1870809 - DNA, 15 bp, Homo sapiens
aggggcttgtgtgcc

SEQ ID NO: 1870810 - DNA, 15 bp, Homo sapiens
ggggcttgtgtgcca

SEQ ID NO: 1870811 - DNA, 15 bp, Homo sapiens
gggcttgtgtgccat

SEQ ID NO: 1870812 - DNA, 15 bp, Homo sapiens
ggcttgtgtgccatt

SEQ ID NO: 1870813 - DNA, 15 bp, Homo sapiens
gcttgtgtgccattc

SEQ ID NO: 1870814 - DNA, 15 bp, Homo sapiens
cttgtgtgccattct

SEQ ID NO: 1870815 - DNA, 15 bp, Homo sapiens
ttgtgtgccattctg

SEQ ID NO: 1870816 - DNA, 15 bp, Homo sapiens
tgtgtgccattctgc

SEQ ID NO: 1870817 - DNA, 15 bp, Homo sapiens
gtgtgccattctgct

SEQ ID NO: 1870818 - DNA, 15 bp, Homo sapiens
tgtgccattctgctt

SEQ ID NO: 1870819 - DNA, 15 bp, Homo sapiens
gtgccattctgcttg

SEQ ID NO: 1870820 - DNA, 15 bp, Homo sapiens
tgccattctgcttga

SEQ ID NO: 1870821 - DNA, 15 bp, Homo sapiens
gccattctgcttgag

SEQ ID NO: 1870822 - DNA, 15 bp, Homo sapiens
ccattctgcttgagt

SEQ ID NO: 1870823 - DNA, 15 bp, Homo sapiens
cattctgcttgagtg

SEQ ID NO: 1870824 - DNA, 15 bp, Homo sapiens
attctgcttgagtgc

SEQ ID NO: 1870825 - DNA, 15 bp, Homo sapiens
ttctgcttgagtgca

SEQ ID NO: 1870826 - DNA, 15 bp, Homo sapiens
tctgcttgagtgcag

SEQ ID NO: 1870827 - DNA, 15 bp, Homo sapiens
ctgcttgagtgcaga

SEQ ID NO: 1870828 - DNA, 15 bp, Homo sapiens
tgcttgagtgcagat

SEQ ID NO: 1870829 - DNA, 15 bp, Homo sapiens
gcttgagtgcagatg

SEQ ID NO: 1870830 - DNA, 15 bp, Homo sapiens
cttgagtgcagatgt

SEQ ID NO: 1870831 - DNA, 15 bp, Homo sapiens
ttgagtgcagatgtg

SEQ ID NO: 1870832 - DNA, 15 bp, Homo sapiens
tgagtgcagatgtgc

SEQ ID NO: 1870833 - DNA, 15 bp, Homo sapiens
gagtgcagatgtgcc

SEQ ID NO: 1870834 - DNA, 15 bp, Homo sapiens
agtgcagatgtgcca

SEQ ID NO: 1870835 - DNA, 15 bp, Homo sapiens
gtgcagatgtgccaa

SEQ ID NO: 1870836 - DNA, 15 bp, Homo sapiens
tgcagatgtgccaag

SEQ ID NO: 1870837 - DNA, 15 bp, Homo sapiens
gcagatgtgccaaga

SEQ ID NO: 1870838 - DNA, 15 bp, Homo sapiens
cagatgtgccaagag

SEQ ID NO: 1870839 - DNA, 15 bp, Homo sapiens
agatgtgccaagagg

SEQ ID NO: 1870840 - DNA, 15 bp, Homo sapiens
gatgtgccaagaggt

SEQ ID NO: 1870841 - DNA, 15 bp, Homo sapiens
atgtgccaagaggta

SEQ ID NO: 1870842 - DNA, 15 bp, Homo sapiens
tgtgccaagaggtac

SEQ ID NO: 1870843 - DNA, 15 bp, Homo sapiens
gtgccaagaggtaca

SEQ ID NO: 1870844 - DNA, 15 bp, Homo sapiens
tgccaagaggtacaa

SEQ ID NO: 1870845 - DNA, 15 bp, Homo sapiens
gccaagaggtacaag

SEQ ID NO: 1870846 - DNA, 15 bp, Homo sapiens
ccaagaggtacaaga

SEQ ID NO: 1870847 - DNA, 15 bp, Homo sapiens
caagaggtacaagag

SEQ ID NO: 1870848 - DNA, 15 bp, Homo sapiens
aagaggtacaagagt

SEQ ID NO: 1870849 - DNA, 15 bp, Homo sapiens
agaggtacaagagtt

SEQ ID NO: 1870850 - DNA, 15 bp, Homo sapiens
gaggtacaagagttg

SEQ ID NO: 1870851 - DNA, 15 bp, Homo sapiens
aggtacaagagttgg

SEQ ID NO: 1870852 - DNA, 15 bp, Homo sapiens
ggtacaagagttgga

SEQ ID NO: 1870853 - DNA, 15 bp, Homo sapiens
gtacaagagttggaa

SEQ ID NO: 1870854 - DNA, 15 bp, Homo sapiens
tacaagagttggaac

SEQ ID NO: 1870855 - DNA, 15 bp, Homo sapiens
acaagagttggaact

SEQ ID NO: 1870856 - DNA, 15 bp, Homo sapiens
caagagttggaactg

SEQ ID NO: 1870857 - DNA, 15 bp, Homo sapiens
aagagttggaactgt

SEQ ID NO: 1870858 - DNA, 15 bp, Homo sapiens
agagttggaactgta

SEQ ID NO: 1870859 - DNA, 15 bp, Homo sapiens
gagttggaactgtaa

SEQ ID NO: 1870860 - DNA, 15 bp, Homo sapiens
agttggaactgtaat

SEQ ID NO: 1870861 - DNA, 15 bp, Homo sapiens
gttggaactgtaata

SEQ ID NO: 1870862 - DNA, 15 bp, Homo sapiens
ttggaactgtaatag

SEQ ID NO: 1870863 - DNA, 15 bp, Homo sapiens
tggaactgtaataga

SEQ ID NO: 1870864 - DNA, 15 bp, Homo sapiens
ggaactgtaatagac

SEQ ID NO: 1870865 - DNA, 15 bp, Homo sapiens
gaactgtaatagacc

SEQ ID NO: 1870866 - DNA, 15 bp, Homo sapiens
aactgtaatagacct

SEQ ID NO: 1870867 - DNA, 15 bp, Homo sapiens
actgtaatagacctc

SEQ ID NO: 1870868 - DNA, 15 bp, Homo sapiens
ctgtaatagacctct

SEQ ID NO: 1870869 - DNA, 15 bp, Homo sapiens
tgtaatagacctctt

SEQ ID NO: 1870870 - DNA, 15 bp, Homo sapiens
gtaatagacctctta

SEQ ID NO: 1870871 - DNA, 15 bp, Homo sapiens
taatagacctcttag

SEQ ID NO: 1870872 - DNA, 15 bp, Homo sapiens
aatagacctcttagg

SEQ ID NO: 1870873 - DNA, 15 bp, Homo sapiens
atagacctcttaggc

SEQ ID NO: 1870874 - DNA, 15 bp, Homo sapiens
tagacctcttaggct

SEQ ID NO: 1870875 - DNA, 15 bp, Homo sapiens
agacctcttaggcta

SEQ ID NO: 1870876 - DNA, 15 bp, Homo sapiens
gacctcttaggctac

SEQ ID NO: 1870877 - DNA, 15 bp, Homo sapiens
acctcttaggctact

SEQ ID NO: 1870878 - DNA, 15 bp, Homo sapiens
cctcttaggctactg

SEQ ID NO: 1870879 - DNA, 15 bp, Homo sapiens
ctcttaggctactgg

SEQ ID NO: 1870880 - DNA, 15 bp, Homo sapiens
tcttaggctactggc

SEQ ID NO: 1870881 - DNA, 15 bp, Homo sapiens
cttaggctactggct

SEQ ID NO: 1870882 - DNA, 15 bp, Homo sapiens
ttaggctactggctg

SEQ ID NO: 1870883 - DNA, 15 bp, Homo sapiens
taggctactggctga

SEQ ID NO: 1870884 - DNA, 15 bp, Homo sapiens
aggctactggctgaa

SEQ ID NO: 1870885 - DNA, 15 bp, Homo sapiens
ggctactggctgaaa

SEQ ID NO: 1870886 - DNA, 15 bp, Homo sapiens
gctactggctgaaat

SEQ ID NO: 1870887 - DNA, 15 bp, Homo sapiens
ctactggctgaaata

SEQ ID NO: 1870888 - DNA, 15 bp, Homo sapiens
tactggctgaaatac

SEQ ID NO: 1870889 - DNA, 15 bp, Homo sapiens
actggctgaaatact

SEQ ID NO: 1870890 - DNA, 15 bp, Homo sapiens
ctggctgaaatacta

SEQ ID NO: 1870891 - DNA, 15 bp, Homo sapiens
tggctgaaatactaa

SEQ ID NO: 1870892 - DNA, 15 bp, Homo sapiens
ggctgaaatactaag

SEQ ID NO: 1870893 - DNA, 15 bp, Homo sapiens
gctgaaatactaagg

SEQ ID NO: 1870894 - DNA, 15 bp, Homo sapiens
ctgaaatactaaggt

SEQ ID NO: 1870895 - DNA, 15 bp, Homo sapiens
tgaaatactaaggtt

SEQ ID NO: 1870896 - DNA, 15 bp, Homo sapiens
gaaatactaaggttc

SEQ ID NO: 1870897 - DNA, 15 bp, Homo sapiens
aaatactaaggttca

SEQ ID NO: 1870898 - DNA, 15 bp, Homo sapiens
aatactaaggttcag

SEQ ID NO: 1870899 - DNA, 15 bp, Homo sapiens
atactaaggttcaga

SEQ ID NO: 1870900 - DNA, 15 bp, Homo sapiens
tactaaggttcagaa

SEQ ID NO: 1870901 - DNA, 15 bp, Homo sapiens
actaaggttcagaat

SEQ ID NO: 1870902 - DNA, 15 bp, Homo sapiens
ctaaggttcagaata

SEQ ID NO: 1870903 - DNA, 15 bp, Homo sapiens
taaggttcagaataa

SEQ ID NO: 1870904 - DNA, 15 bp, Homo sapiens
aaggttcagaataag

SEQ ID NO: 1870905 - DNA, 15 bp, Homo sapiens
aggttcagaataaga

SEQ ID NO: 1870906 - DNA, 15 bp, Homo sapiens
ggttcagaataagaa

SEQ ID NO: 1870907 - DNA, 15 bp, Homo sapiens
gttcagaataagaaa

SEQ ID NO: 1870908 - DNA, 15 bp, Homo sapiens
ttcagaataagaaag

SEQ ID NO: 1870909 - DNA, 15 bp, Homo sapiens
tcagaataagaaaga

SEQ ID NO: 1870910 - DNA, 15 bp, Homo sapiens
cagaataagaaagag

SEQ ID NO: 1870911 - DNA, 15 bp, Homo sapiens
agaataagaaagaga

SEQ ID NO: 1870912 - DNA, 15 bp, Homo sapiens
gaataagaaagagat

SEQ ID NO: 1870913 - DNA, 15 bp, Homo sapiens
aataagaaagagata

SEQ ID NO: 1870914 - DNA, 15 bp, Homo sapiens
ataagaaagagatac

SEQ ID NO: 1870915 - DNA, 15 bp, Homo sapiens
taagaaagagatacg

SEQ ID NO: 1870916 - DNA, 15 bp, Homo sapiens
aagaaagagatacgt

SEQ ID NO: 1870917 - DNA, 15 bp, Homo sapiens
agaaagagatacgtc

SEQ ID NO: 1870918 - DNA, 15 bp, Homo sapiens
gaaagagatacgtct

SEQ ID NO: 1870919 - DNA, 15 bp, Homo sapiens
aaagagatacgtctc

SEQ ID NO: 1870920 - DNA, 15 bp, Homo sapiens
aagagatacgtctca

SEQ ID NO: 1870921 - DNA, 15 bp, Homo sapiens
agagatacgtctcag

SEQ ID NO: 1870922 - DNA, 15 bp, Homo sapiens
gagatacgtctcagg

SEQ ID NO: 1870923 - DNA, 15 bp, Homo sapiens
agatacgtctcaggc

SEQ ID NO: 1870924 - DNA, 15 bp, Homo sapiens
gatacgtctcaggca

SEQ ID NO: 1870925 - DNA, 15 bp, Homo sapiens
atacgtctcaggcat

SEQ ID NO: 1870926 - DNA, 15 bp, Homo sapiens
tacgtctcaggcatc

SEQ ID NO: 1870927 - DNA, 15 bp, Homo sapiens
acgtctcaggcatct

SEQ ID NO: 1870928 - DNA, 15 bp, Homo sapiens
cgtctcaggcatctc

SEQ ID NO: 1870929 - DNA, 15 bp, Homo sapiens
gtctcaggcatctca

SEQ ID NO: 1870930 - DNA, 15 bp, Homo sapiens
tctcaggcatctcat

SEQ ID NO: 1870931 - DNA, 15 bp, Homo sapiens
ctcaggcatctcatt

SEQ ID NO: 1870932 - DNA, 15 bp, Homo sapiens
gcatatagactgaca

SEQ ID NO: 1870933 - DNA, 15 bp, Homo sapiens
catatagactgacat

SEQ ID NO: 1870934 - DNA, 15 bp, Homo sapiens
atatagactgacatg

SEQ ID NO: 1870935 - DNA, 15 bp, Homo sapiens
tatagactgacatgg

SEQ ID NO: 1870936 - DNA, 15 bp, Homo sapiens
atagactgacatggg

SEQ ID NO: 1870937 - DNA, 15 bp, Homo sapiens
tagactgacatgggg

SEQ ID NO: 1870938 - DNA, 15 bp, Homo sapiens
agactgacatggggc

SEQ ID NO: 1870939 - DNA, 15 bp, Homo sapiens
gactgacatggggct

SEQ ID NO: 1870940 - DNA, 15 bp, Homo sapiens
actgacatggggctc

SEQ ID NO: 1870941 - DNA, 15 bp, Homo sapiens
ctgacatggggctct

SEQ ID NO: 1870942 - DNA, 15 bp, Homo sapiens
tgacatggggctcta

SEQ ID NO: 1870943 - DNA, 15 bp, Homo sapiens
gacatggggctctac

SEQ ID NO: 1870944 - DNA, 15 bp, Homo sapiens
acatggggctctact

SEQ ID NO: 1870945 - DNA, 15 bp, Homo sapiens
catggggctctactc

SEQ ID NO: 1870946 - DNA, 15 bp, Homo sapiens
atggggctctactct

SEQ ID NO: 1870947 - DNA, 15 bp, Homo sapiens
tggggctctactctt

SEQ ID NO: 1870948 - DNA, 15 bp, Homo sapiens
ggggctctactcttg

SEQ ID NO: 1870949 - DNA, 15 bp, Homo sapiens
gggctctactcttgg

SEQ ID NO: 1870950 - DNA, 15 bp, Homo sapiens
ggctctactcttggc

SEQ ID NO: 1870951 - DNA, 15 bp, Homo sapiens
gctctactcttggct

SEQ ID NO: 1870952 - DNA, 15 bp, Homo sapiens
ctctactcttggctt

SEQ ID NO: 1870953 - DNA, 15 bp, Homo sapiens
tctactcttggcttg

SEQ ID NO: 1870954 - DNA, 15 bp, Homo sapiens
ctactcttggcttga

SEQ ID NO: 1870955 - DNA, 15 bp, Homo sapiens
tactcttggcttgag

SEQ ID NO: 1870956 - DNA, 15 bp, Homo sapiens
actcttggcttgagc

SEQ ID NO: 1870957 - DNA, 15 bp, Homo sapiens
ctcttggcttgagct

SEQ ID NO: 1870958 - DNA, 15 bp, Homo sapiens
tcttggcttgagctt

SEQ ID NO: 1870959 - DNA, 15 bp, Homo sapiens
cttggcttgagcttt

SEQ ID NO: 1870960 - DNA, 15 bp, Homo sapiens
ttggcttgagctttt

SEQ ID NO: 1870961 - DNA, 15 bp, Homo sapiens
tggcttgagcttttt

SEQ ID NO: 1870962 - DNA, 15 bp, Homo sapiens
ggcttgagctttttt

SEQ ID NO: 1870963 - DNA, 15 bp, Homo sapiens
gcttgagcttttttt

SEQ ID NO: 1870964 - DNA, 15 bp, Homo sapiens
cttgagctttttttt

SEQ ID NO: 1870965 - DNA, 15 bp, Homo sapiens
ttgagcttttttttt

SEQ ID NO: 1870966 - DNA, 15 bp, Homo sapiens
tgagctttttttttt

SEQ ID NO: 1870967 - DNA, 15 bp, Homo sapiens
gagcttttttttttt

SEQ ID NO: 1870968 - DNA, 15 bp, Homo sapiens
gcttttttttttttg

SEQ ID NO: 1870969 - DNA, 15 bp, Homo sapiens
ttttttttttttgtt

SEQ ID NO: 1870970 - DNA, 15 bp, Homo sapiens
tttttttttttgttt

SEQ ID NO: 1870971 - DNA, 15 bp, Homo sapiens
ttttttttttgtttt

SEQ ID NO: 1870972 - DNA, 15 bp, Homo sapiens
ttgtttttttttgag

SEQ ID NO: 1870973 - DNA, 15 bp, Homo sapiens
tgtttttttttgaga

SEQ ID NO: 1870974 - DNA, 15 bp, Homo sapiens
gtttttttttgagaa

SEQ ID NO: 1870975 - DNA, 15 bp, Homo sapiens
ttttttgagaaagaa

SEQ ID NO: 1870976 - DNA, 15 bp, Homo sapiens
tttttgagaaagaat

SEQ ID NO: 1870977 - DNA, 15 bp, Homo sapiens
ttttgagaaagaatt

SEQ ID NO: 1870978 - DNA, 15 bp, Homo sapiens
tttgagaaagaattc

SEQ ID NO: 1870979 - DNA, 15 bp, Homo sapiens
ttgagaaagaattca

SEQ ID NO: 1870980 - DNA, 15 bp, Homo sapiens
tgagaaagaattcaa

SEQ ID NO: 1870981 - DNA, 15 bp, Homo sapiens
gagaaagaattcaat

SEQ ID NO: 1870982 - DNA, 15 bp, Homo sapiens
agaaagaattcaatg

SEQ ID NO: 1870983 - DNA, 15 bp, Homo sapiens
gaaagaattcaatgg

SEQ ID NO: 1870984 - DNA, 15 bp, Homo sapiens
aaagaattcaatggc

SEQ ID NO: 1870985 - DNA, 15 bp, Homo sapiens
aagaattcaatggca

SEQ ID NO: 1870986 - DNA, 15 bp, Homo sapiens
agaattcaatggcaa

SEQ ID NO: 1870987 - DNA, 15 bp, Homo sapiens
gaattcaatggcaac

SEQ ID NO: 1870988 - DNA, 15 bp, Homo sapiens
aattcaatggcaaca

SEQ ID NO: 1870989 - DNA, 15 bp, Homo sapiens
attcaatggcaacat

SEQ ID NO: 1870990 - DNA, 15 bp, Homo sapiens
ttcaatggcaacata

SEQ ID NO: 1870991 - DNA, 15 bp, Homo sapiens
tcaatggcaacatac

SEQ ID NO: 1870992 - DNA, 15 bp, Homo sapiens
caatggcaacataca

SEQ ID NO: 1870993 - DNA, 15 bp, Homo sapiens
aatggcaacatacac

SEQ ID NO: 1870994 - DNA, 15 bp, Homo sapiens
atggcaacatacacc

SEQ ID NO: 1870995 - DNA, 15 bp, Homo sapiens
tggcaacatacacct

SEQ ID NO: 1870996 - DNA, 15 bp, Homo sapiens
ggcaacatacacctt

SEQ ID NO: 1870997 - DNA, 15 bp, Homo sapiens
gcaacatacacctta

SEQ ID NO: 1870998 - DNA, 15 bp, Homo sapiens
caacatacaccttat

SEQ ID NO: 1870999 - DNA, 15 bp, Homo sapiens
aacatacaccttatg

SEQ ID NO: 1871000 - DNA, 15 bp, Homo sapiens
acatacaccttatga

SEQ ID NO: 1871001 - DNA, 15 bp, Homo sapiens
catacaccttatgaa

SEQ ID NO: 1871002 - DNA, 15 bp, Homo sapiens
atacaccttatgaat

SEQ ID NO: 1871003 - DNA, 15 bp, Homo sapiens
tacaccttatgaata

SEQ ID NO: 1871004 - DNA, 15 bp, Homo sapiens
acaccttatgaatag

SEQ ID NO: 1871005 - DNA, 15 bp, Homo sapiens
caccttatgaatagc

SEQ ID NO: 1871006 - DNA, 15 bp, Homo sapiens
accttatgaatagca

SEQ ID NO: 1871007 - DNA, 15 bp, Homo sapiens
ccttatgaatagcat

SEQ ID NO: 1871008 - DNA, 15 bp, Homo sapiens
cttatgaatagcatt

SEQ ID NO: 1871009 - DNA, 15 bp, Homo sapiens
ttatgaatagcattg

SEQ ID NO: 1871010 - DNA, 15 bp, Homo sapiens
tatgaatagcattgc

SEQ ID NO: 1871011 - DNA, 15 bp, Homo sapiens
atgaatagcattgca

SEQ ID NO: 1871012 - DNA, 15 bp, Homo sapiens
tgaatagcattgcaa

SEQ ID NO: 1871013 - DNA, 15 bp, Homo sapiens
gaatagcattgcaac

SEQ ID NO: 1871014 - DNA, 15 bp, Homo sapiens
aatagcattgcaact

SEQ ID NO: 1871015 - DNA, 15 bp, Homo sapiens
atagcattgcaactg

SEQ ID NO: 1871016 - DNA, 15 bp, Homo sapiens
tagcattgcaactga

SEQ ID NO: 1871017 - DNA, 15 bp, Homo sapiens
agcattgcaactgaa

SEQ ID NO: 1871018 - DNA, 15 bp, Homo sapiens
gcattgcaactgaat

SEQ ID NO: 1871019 - DNA, 15 bp, Homo sapiens
cattgcaactgaatt

SEQ ID NO: 1871020 - DNA, 15 bp, Homo sapiens
attgcaactgaattg

SEQ ID NO: 1871021 - DNA, 15 bp, Homo sapiens
ttgcaactgaattgc

SEQ ID NO: 1871022 - DNA, 15 bp, Homo sapiens
tgcaactgaattgct

SEQ ID NO: 1871023 - DNA, 15 bp, Homo sapiens
gcaactgaattgctc

SEQ ID NO: 1871024 - DNA, 15 bp, Homo sapiens
caactgaattgctct

SEQ ID NO: 1871025 - DNA, 15 bp, Homo sapiens
aactgaattgctcta

SEQ ID NO: 1871026 - DNA, 15 bp, Homo sapiens
actgaattgctctag

SEQ ID NO: 1871027 - DNA, 15 bp, Homo sapiens
ctgaattgctctagt

SEQ ID NO: 1871028 - DNA, 15 bp, Homo sapiens
tgaattgctctagtg

SEQ ID NO: 1871029 - DNA, 15 bp, Homo sapiens
gaattgctctagtgt

SEQ ID NO: 1871030 - DNA, 15 bp, Homo sapiens
aattgctctagtgtg

SEQ ID NO: 1871031 - DNA, 15 bp, Homo sapiens
attgctctagtgtga

SEQ ID NO: 1871032 - DNA, 15 bp, Homo sapiens
ttgctctagtgtgac

SEQ ID NO: 1871033 - DNA, 15 bp, Homo sapiens
tgctctagtgtgaca

SEQ ID NO: 1871034 - DNA, 15 bp, Homo sapiens
gctctagtgtgacaa

SEQ ID NO: 1871035 - DNA, 15 bp, Homo sapiens
ctctagtgtgacaag

SEQ ID NO: 1871036 - DNA, 15 bp, Homo sapiens
tctagtgtgacaaga

SEQ ID NO: 1871037 - DNA, 15 bp, Homo sapiens
ctagtgtgacaagaa

SEQ ID NO: 1871038 - DNA, 15 bp, Homo sapiens
tagtgtgacaagaaa

SEQ ID NO: 1871039 - DNA, 15 bp, Homo sapiens
agtgtgacaagaaaa

SEQ ID NO: 1871040 - DNA, 15 bp, Homo sapiens
gtgtgacaagaaaaa

SEQ ID NO: 1871041 - DNA, 15 bp, Homo sapiens
tgtgacaagaaaaat

SEQ ID NO: 1871042 - DNA, 15 bp, Homo sapiens
gtgacaagaaaaatg

SEQ ID NO: 1871043 - DNA, 15 bp, Homo sapiens
tgacaagaaaaatga

SEQ ID NO: 1871044 - DNA, 15 bp, Homo sapiens
gacaagaaaaatgaa

SEQ ID NO: 1871045 - DNA, 15 bp, Homo sapiens
acaagaaaaatgaac

SEQ ID NO: 1871046 - DNA, 15 bp, Homo sapiens
caagaaaaatgaact

SEQ ID NO: 1871047 - DNA, 15 bp, Homo sapiens
aagaaaaatgaactc

SEQ ID NO: 1871048 - DNA, 15 bp, Homo sapiens
agaaaaatgaactca

SEQ ID NO: 1871049 - DNA, 15 bp, Homo sapiens
gaaaaatgaactcat

SEQ ID NO: 1871050 - DNA, 15 bp, Homo sapiens
aaaaatgaactcatt

SEQ ID NO: 1871051 - DNA, 15 bp, Homo sapiens
aaaatgaactcatta

SEQ ID NO: 1871052 - DNA, 15 bp, Homo sapiens
aaatgaactcattat

SEQ ID NO: 1871053 - DNA, 15 bp, Homo sapiens
aatgaactcattatt

SEQ ID NO: 1871054 - DNA, 15 bp, Homo sapiens
atgaactcattatta

SEQ ID NO: 1871055 - DNA, 15 bp, Homo sapiens
tgaactcattattaa

SEQ ID NO: 1871056 - DNA, 15 bp, Homo sapiens
gaactcattattaag

SEQ ID NO: 1871057 - DNA, 15 bp, Homo sapiens
aactcattattaagt

SEQ ID NO: 1871058 - DNA, 15 bp, Homo sapiens
actcattattaagtt

SEQ ID NO: 1871059 - DNA, 15 bp, Homo sapiens
ctcattattaagttc

SEQ ID NO: 1871060 - DNA, 15 bp, Homo sapiens
tcattattaagttct

SEQ ID NO: 1871061 - DNA, 15 bp, Homo sapiens
cattattaagttctg

SEQ ID NO: 1871062 - DNA, 15 bp, Homo sapiens
attattaagttctgt

SEQ ID NO: 1871063 - DNA, 15 bp, Homo sapiens
ttattaagttctgtc

SEQ ID NO: 1871064 - DNA, 15 bp, Homo sapiens
tattaagttctgtcc

SEQ ID NO: 1871065 - DNA, 15 bp, Homo sapiens
attaagttctgtccc

SEQ ID NO: 1871066 - DNA, 15 bp, Homo sapiens
ttaagttctgtccct

SEQ ID NO: 1871067 - DNA, 15 bp, Homo sapiens
taagttctgtcccta

SEQ ID NO: 1871068 - DNA, 15 bp, Homo sapiens
aagttctgtccctat

SEQ ID NO: 1871069 - DNA, 15 bp, Homo sapiens
agttctgtccctatg

SEQ ID NO: 1871070 - DNA, 15 bp, Homo sapiens
gttctgtccctatga

SEQ ID NO: 1871071 - DNA, 15 bp, Homo sapiens
ttctgtccctatgat

SEQ ID NO: 1871072 - DNA, 15 bp, Homo sapiens
tctgtccctatgatt

SEQ ID NO: 1871073 - DNA, 15 bp, Homo sapiens
ctgtccctatgattg

SEQ ID NO: 1871074 - DNA, 15 bp, Homo sapiens
tgtccctatgattgg

SEQ ID NO: 1871075 - DNA, 15 bp, Homo sapiens
gtccctatgattggg

SEQ ID NO: 1871076 - DNA, 15 bp, Homo sapiens
tccctatgattgggc

SEQ ID NO: 1871077 - DNA, 15 bp, Homo sapiens
ccctatgattgggct

SEQ ID NO: 1871078 - DNA, 15 bp, Homo sapiens
cctatgattgggctc

SEQ ID NO: 1871079 - DNA, 15 bp, Homo sapiens
ctatgattgggctct

SEQ ID NO: 1871080 - DNA, 15 bp, Homo sapiens
tatgattgggctctg

SEQ ID NO: 1871081 - DNA, 15 bp, Homo sapiens
atgattgggctctga

SEQ ID NO: 1871082 - DNA, 15 bp, Homo sapiens
tgattgggctctgaa

SEQ ID NO: 1871083 - DNA, 15 bp, Homo sapiens
gattgggctctgaag

SEQ ID NO: 1871084 - DNA, 15 bp, Homo sapiens
attgggctctgaaga

SEQ ID NO: 1871085 - DNA, 15 bp, Homo sapiens
ttgggctctgaagaa

SEQ ID NO: 1871086 - DNA, 15 bp, Homo sapiens
tgggctctgaagaag

SEQ ID NO: 1871087 - DNA, 15 bp, Homo sapiens
gggctctgaagaagg

SEQ ID NO: 1871088 - DNA, 15 bp, Homo sapiens
ggctctgaagaaggc

SEQ ID NO: 1871089 - DNA, 15 bp, Homo sapiens
gctctgaagaaggca

SEQ ID NO: 1871090 - DNA, 15 bp, Homo sapiens
ctctgaagaaggcag

SEQ ID NO: 1871091 - DNA, 15 bp, Homo sapiens
tctgaagaaggcagc

SEQ ID NO: 1871092 - DNA, 15 bp, Homo sapiens
ctgaagaaggcagcc

SEQ ID NO: 1871093 - DNA, 15 bp, Homo sapiens
tgaagaaggcagccc

SEQ ID NO: 1871094 - DNA, 15 bp, Homo sapiens
gaagaaggcagccca

SEQ ID NO: 1871095 - DNA, 15 bp, Homo sapiens
aagaaggcagcccag

SEQ ID NO: 1871096 - DNA, 15 bp, Homo sapiens
agaaggcagcccagc

SEQ ID NO: 1871097 - DNA, 15 bp, Homo sapiens
gaaggcagcccagcc

SEQ ID NO: 1871098 - DNA, 15 bp, Homo sapiens
aaggcagcccagcca

SEQ ID NO: 1871099 - DNA, 15 bp, Homo sapiens
aggcagcccagccaa

SEQ ID NO: 1871100 - DNA, 15 bp, Homo sapiens
ggcagcccagccaag

SEQ ID NO: 1871101 - DNA, 15 bp, Homo sapiens
gcagcccagccaagt

SEQ ID NO: 1871102 - DNA, 15 bp, Homo sapiens
cagcccagccaagtg

SEQ ID NO: 1871103 - DNA, 15 bp, Homo sapiens
agcccagccaagtgg

SEQ ID NO: 1871104 - DNA, 15 bp, Homo sapiens
gcccagccaagtgga

SEQ ID NO: 1871105 - DNA, 15 bp, Homo sapiens
cccagccaagtggaa

SEQ ID NO: 1871106 - DNA, 15 bp, Homo sapiens
ccagccaagtggaat

SEQ ID NO: 1871107 - DNA, 15 bp, Homo sapiens
cagccaagtggaata

SEQ ID NO: 1871108 - DNA, 15 bp, Homo sapiens
agccaagtggaatac

SEQ ID NO: 1871109 - DNA, 15 bp, Homo sapiens
gccaagtggaatact

SEQ ID NO: 1871110 - DNA, 15 bp, Homo sapiens
ccaagtggaatacta

SEQ ID NO: 1871111 - DNA, 15 bp, Homo sapiens
caagtggaatactaa

SEQ ID NO: 1871112 - DNA, 15 bp, Homo sapiens
aagtggaatactaaa

SEQ ID NO: 1871113 - DNA, 15 bp, Homo sapiens
agtggaatactaaaa

SEQ ID NO: 1871114 - DNA, 15 bp, Homo sapiens
gtggaatactaaaaa

SEQ ID NO: 1871115 - DNA, 15 bp, Homo sapiens
tggaatactaaaaat

SEQ ID NO: 1871116 - DNA, 15 bp, Homo sapiens
ggaatactaaaaatt

SEQ ID NO: 1871117 - DNA, 15 bp, Homo sapiens
gaatactaaaaattt

SEQ ID NO: 1871118 - DNA, 15 bp, Homo sapiens
aatactaaaaatttg

SEQ ID NO: 1871119 - DNA, 15 bp, Homo sapiens
atactaaaaatttgg

SEQ ID NO: 1871120 - DNA, 15 bp, Homo sapiens
tactaaaaatttgga

SEQ ID NO: 1871121 - DNA, 15 bp, Homo sapiens
actaaaaatttggat

SEQ ID NO: 1871122 - DNA, 15 bp, Homo sapiens
ctaaaaatttggatg

SEQ ID NO: 1871123 - DNA, 15 bp, Homo sapiens
taaaaatttggatgt

SEQ ID NO: 1871124 - DNA, 15 bp, Homo sapiens
aaaaatttggatgta

SEQ ID NO: 1871125 - DNA, 15 bp, Homo sapiens
aaaatttggatgtat

SEQ ID NO: 1871126 - DNA, 15 bp, Homo sapiens
aaatttggatgtatt

SEQ ID NO: 1871127 - DNA, 15 bp, Homo sapiens
aatttggatgtattt

SEQ ID NO: 1871128 - DNA, 15 bp, Homo sapiens
atttggatgtatttc

SEQ ID NO: 1871129 - DNA, 15 bp, Homo sapiens
tttggatgtatttca

SEQ ID NO: 1871130 - DNA, 15 bp, Homo sapiens
ttggatgtatttcag

SEQ ID NO: 1871131 - DNA, 15 bp, Homo sapiens
tggatgtatttcagg

SEQ ID NO: 1871132 - DNA, 15 bp, Homo sapiens
ggatgtatttcaggg

SEQ ID NO: 1871133 - DNA, 15 bp, Homo sapiens
gatgtatttcaggga

SEQ ID NO: 1871134 - DNA, 15 bp, Homo sapiens
atgtatttcagggag

SEQ ID NO: 1871135 - DNA, 15 bp, Homo sapiens
tgtatttcagggagc

SEQ ID NO: 1871136 - DNA, 15 bp, Homo sapiens
gtatttcagggagct

SEQ ID NO: 1871137 - DNA, 15 bp, Homo sapiens
tatttcagggagctc

SEQ ID NO: 1871138 - DNA, 15 bp, Homo sapiens
atttcagggagctca

SEQ ID NO: 1871139 - DNA, 15 bp, Homo sapiens
tttcagggagctcat

SEQ ID NO: 1871140 - DNA, 15 bp, Homo sapiens
ttcagggagctcatt

SEQ ID NO: 1871141 - DNA, 15 bp, Homo sapiens
tcagggagctcattg

SEQ ID NO: 1871142 - DNA, 15 bp, Homo sapiens
cagggagctcattgc

SEQ ID NO: 1871143 - DNA, 15 bp, Homo sapiens
agggagctcattgct

SEQ ID NO: 1871144 - DNA, 15 bp, Homo sapiens
gggagctcattgctg

SEQ ID NO: 1871145 - DNA, 15 bp, Homo sapiens
ggagctcattgctgt

SEQ ID NO: 1871146 - DNA, 15 bp, Homo sapiens
gagctcattgctgtt

SEQ ID NO: 1871147 - DNA, 15 bp, Homo sapiens
agctcattgctgttc

SEQ ID NO: 1871148 - DNA, 15 bp, Homo sapiens
gctcattgctgttcc

SEQ ID NO: 1871149 - DNA, 15 bp, Homo sapiens
ctcattgctgttccg

SEQ ID NO: 1871150 - DNA, 15 bp, Homo sapiens
tcattgctgttccgg

SEQ ID NO: 1871151 - DNA, 15 bp, Homo sapiens
cattgctgttccggt

SEQ ID NO: 1871152 - DNA, 15 bp, Homo sapiens
attgctgttccggtc

SEQ ID NO: 1871153 - DNA, 15 bp, Homo sapiens
ttgctgttccggtcg

SEQ ID NO: 1871154 - DNA, 15 bp, Homo sapiens
tgctgttccggtcgc

SEQ ID NO: 1871155 - DNA, 15 bp, Homo sapiens
gctgttccggtcgct

SEQ ID NO: 1871156 - DNA, 15 bp, Homo sapiens
ctgttccggtcgctg

SEQ ID NO: 1871157 - DNA, 15 bp, Homo sapiens
tgttccggtcgctgc

SEQ ID NO: 1871158 - DNA, 15 bp, Homo sapiens
gttccggtcgctgct

SEQ ID NO: 1871159 - DNA, 15 bp, Homo sapiens
ttccggtcgctgcta

SEQ ID NO: 1871160 - DNA, 15 bp, Homo sapiens
tccggtcgctgctat

SEQ ID NO: 1871161 - DNA, 15 bp, Homo sapiens
ccggtcgctgctata

SEQ ID NO: 1871162 - DNA, 15 bp, Homo sapiens
cggtcgctgctatag

SEQ ID NO: 1871163 - DNA, 15 bp, Homo sapiens
ggtcgctgctatagc

SEQ ID NO: 1871164 - DNA, 15 bp, Homo sapiens
gtcgctgctatagct

SEQ ID NO: 1871165 - DNA, 15 bp, Homo sapiens
tcgctgctatagcta

SEQ ID NO: 1871166 - DNA, 15 bp, Homo sapiens
cgctgctatagctaa

SEQ ID NO: 1871167 - DNA, 15 bp, Homo sapiens
gctgctatagctaaa

SEQ ID NO: 1871168 - DNA, 15 bp, Homo sapiens
ctgctatagctaaaa

SEQ ID NO: 1871169 - DNA, 15 bp, Homo sapiens
tgctatagctaaaac

SEQ ID NO: 1871170 - DNA, 15 bp, Homo sapiens
gctatagctaaaact

SEQ ID NO: 1871171 - DNA, 15 bp, Homo sapiens
ctatagctaaaactg

SEQ ID NO: 1871172 - DNA, 15 bp, Homo sapiens
tatagctaaaactgc

SEQ ID NO: 1871173 - DNA, 15 bp, Homo sapiens
atagctaaaactgct

SEQ ID NO: 1871174 - DNA, 15 bp, Homo sapiens
tagctaaaactgctt

SEQ ID NO: 1871175 - DNA, 15 bp, Homo sapiens
agctaaaactgcttc

SEQ ID NO: 1871176 - DNA, 15 bp, Homo sapiens
gctaaaactgcttct

SEQ ID NO: 1871177 - DNA, 15 bp, Homo sapiens
ctaaaactgcttcta

SEQ ID NO: 1871178 - DNA, 15 bp, Homo sapiens
taaaactgcttctag

SEQ ID NO: 1871179 - DNA, 15 bp, Homo sapiens
aaaactgcttctaga

SEQ ID NO: 1871180 - DNA, 15 bp, Homo sapiens
aaactgcttctagag

SEQ ID NO: 1871181 - DNA, 15 bp, Homo sapiens
aactgcttctagaga

SEQ ID NO: 1871182 - DNA, 15 bp, Homo sapiens
actgcttctagagaa

SEQ ID NO: 1871183 - DNA, 15 bp, Homo sapiens
ctgcttctagagaaa

SEQ ID NO: 1871184 - DNA, 15 bp, Homo sapiens
tgcttctagagaaat

SEQ ID NO: 1871185 - DNA, 15 bp, Homo sapiens
gcttctagagaaatt

SEQ ID NO: 1871186 - DNA, 15 bp, Homo sapiens
cttctagagaaatta

SEQ ID NO: 1871187 - DNA, 15 bp, Homo sapiens
ttctagagaaattac

SEQ ID NO: 1871188 - DNA, 15 bp, Homo sapiens
tctagagaaattact

SEQ ID NO: 1871189 - DNA, 15 bp, Homo sapiens
ctagagaaattactc

SEQ ID NO: 1871190 - DNA, 15 bp, Homo sapiens
tagagaaattactcc

SEQ ID NO: 1871191 - DNA, 15 bp, Homo sapiens
agagaaattactcct

SEQ ID NO: 1871192 - DNA, 15 bp, Homo sapiens
gagaaattactcctc

SEQ ID NO: 1871193 - DNA, 15 bp, Homo sapiens
agaaattactcctct

SEQ ID NO: 1871194 - DNA, 15 bp, Homo sapiens
gaaattactcctctc

SEQ ID NO: 1871195 - DNA, 15 bp, Homo sapiens
aaattactcctctcc

SEQ ID NO: 1871196 - DNA, 15 bp, Homo sapiens
aattactcctctcca

SEQ ID NO: 1871197 - DNA, 15 bp, Homo sapiens
attactcctctccaa

SEQ ID NO: 1871198 - DNA, 15 bp, Homo sapiens
ttactcctctccaag

SEQ ID NO: 1871199 - DNA, 15 bp, Homo sapiens
tactcctctccaaga

SEQ ID NO: 1871200 - DNA, 15 bp, Homo sapiens
actcctctccaagag

SEQ ID NO: 1871201 - DNA, 15 bp, Homo sapiens
ctcctctccaagaga

SEQ ID NO: 1871202 - DNA, 15 bp, Homo sapiens
tcctctccaagagat

SEQ ID NO: 1871203 - DNA, 15 bp, Homo sapiens
cctctccaagagatt

SEQ ID NO: 1871204 - DNA, 15 bp, Homo sapiens
ctctccaagagattt

SEQ ID NO: 1871205 - DNA, 15 bp, Homo sapiens
tctccaagagatttc

SEQ ID NO: 1871206 - DNA, 15 bp, Homo sapiens
ctccaagagatttcc

SEQ ID NO: 1871207 - DNA, 15 bp, Homo sapiens
tccaagagatttcca

SEQ ID NO: 1871208 - DNA, 15 bp, Homo sapiens
ccaagagatttccaa

SEQ ID NO: 1871209 - DNA, 15 bp, Homo sapiens
caagagatttccaat

SEQ ID NO: 1871210 - DNA, 15 bp, Homo sapiens
aagagatttccaatt

SEQ ID NO: 1871211 - DNA, 15 bp, Homo sapiens
agagatttccaattg

SEQ ID NO: 1871212 - DNA, 15 bp, Homo sapiens
gagatttccaattgt

SEQ ID NO: 1871213 - DNA, 15 bp, Homo sapiens
agatttccaattgtg

SEQ ID NO: 1871214 - DNA, 15 bp, Homo sapiens
gatttccaattgtgt

SEQ ID NO: 1871215 - DNA, 15 bp, Homo sapiens
atttccaattgtgtt

SEQ ID NO: 1871216 - DNA, 15 bp, Homo sapiens
tttccaattgtgttc

SEQ ID NO: 1871217 - DNA, 15 bp, Homo sapiens
ttccaattgtgttcc

SEQ ID NO: 1871218 - DNA, 15 bp, Homo sapiens
tccaattgtgttccc

SEQ ID NO: 1871219 - DNA, 15 bp, Homo sapiens
ccaattgtgttccct

SEQ ID NO: 1871220 - DNA, 15 bp, Homo sapiens
caattgtgttccctt

SEQ ID NO: 1871221 - DNA, 15 bp, Homo sapiens
aattgtgttcccttg

SEQ ID NO: 1871222 - DNA, 15 bp, Homo sapiens
attgtgttcccttga

SEQ ID NO: 1871223 - DNA, 15 bp, Homo sapiens
ttgtgttcccttgat

SEQ ID NO: 1871224 - DNA, 15 bp, Homo sapiens
tgtgttcccttgata

SEQ ID NO: 1871225 - DNA, 15 bp, Homo sapiens
gtgttcccttgatat

SEQ ID NO: 1871226 - DNA, 15 bp, Homo sapiens
tgttcccttgatatt

SEQ ID NO: 1871227 - DNA, 15 bp, Homo sapiens
gttcccttgatattg

SEQ ID NO: 1871228 - DNA, 15 bp, Homo sapiens
ttcccttgatattgc

SEQ ID NO: 1871229 - DNA, 15 bp, Homo sapiens
tcccttgatattgct

SEQ ID NO: 1871230 - DNA, 15 bp, Homo sapiens
cccttgatattgctt

SEQ ID NO: 1871231 - DNA, 15 bp, Homo sapiens
ccttgatattgcttt

SEQ ID NO: 1871232 - DNA, 15 bp, Homo sapiens
cttgatattgctttg

SEQ ID NO: 1871233 - DNA, 15 bp, Homo sapiens
ttgatattgctttgt

SEQ ID NO: 1871234 - DNA, 15 bp, Homo sapiens
tgatattgctttgtc

SEQ ID NO: 1871235 - DNA, 15 bp, Homo sapiens
gatattgctttgtca

SEQ ID NO: 1871236 - DNA, 15 bp, Homo sapiens
atattgctttgtcag

SEQ ID NO: 1871237 - DNA, 15 bp, Homo sapiens
tattgctttgtcagg

SEQ ID NO: 1871238 - DNA, 15 bp, Homo sapiens
attgctttgtcaggg

SEQ ID NO: 1871239 - DNA, 15 bp, Homo sapiens
ttgctttgtcaggga

SEQ ID NO: 1871240 - DNA, 15 bp, Homo sapiens
tgctttgtcagggac

SEQ ID NO: 1871241 - DNA, 15 bp, Homo sapiens
gctttgtcagggaca

SEQ ID NO: 1871242 - DNA, 15 bp, Homo sapiens
ctttgtcagggacac

SEQ ID NO: 1871243 - DNA, 15 bp, Homo sapiens
tttgtcagggacacg

SEQ ID NO: 1871244 - DNA, 15 bp, Homo sapiens
ttgtcagggacacgc

SEQ ID NO: 1871245 - DNA, 15 bp, Homo sapiens
tgtcagggacacgct

SEQ ID NO: 1871246 - DNA, 15 bp, Homo sapiens
gtcagggacacgctt

SEQ ID NO: 1871247 - DNA, 15 bp, Homo sapiens
tcagggacacgcttt

SEQ ID NO: 1871248 - DNA, 15 bp, Homo sapiens
cagggacacgcttta

SEQ ID NO: 1871249 - DNA, 15 bp, Homo sapiens
agggacacgctttaa

SEQ ID NO: 1871250 - DNA, 15 bp, Homo sapiens
gggacacgctttaaa

SEQ ID NO: 1871251 - DNA, 15 bp, Homo sapiens
ggacacgctttaaat

SEQ ID NO: 1871252 - DNA, 15 bp, Homo sapiens
gacacgctttaaata

SEQ ID NO: 1871253 - DNA, 15 bp, Homo sapiens
acacgctttaaataa

SEQ ID NO: 1871254 - DNA, 15 bp, Homo sapiens
cacgctttaaataag

SEQ ID NO: 1871255 - DNA, 15 bp, Homo sapiens
acgctttaaataaga

SEQ ID NO: 1871256 - DNA, 15 bp, Homo sapiens
cgctttaaataagat

SEQ ID NO: 1871257 - DNA, 15 bp, Homo sapiens
gctttaaataagatg

SEQ ID NO: 1871258 - DNA, 15 bp, Homo sapiens
ctttaaataagatgc

SEQ ID NO: 1871259 - DNA, 15 bp, Homo sapiens
tttaaataagatgcc

SEQ ID NO: 1871260 - DNA, 15 bp, Homo sapiens
ttaaataagatgccc

SEQ ID NO: 1871261 - DNA, 15 bp, Homo sapiens
taaataagatgccct

SEQ ID NO: 1871262 - DNA, 15 bp, Homo sapiens
aaataagatgccctc

SEQ ID NO: 1871263 - DNA, 15 bp, Homo sapiens
aataagatgccctcc

SEQ ID NO: 1871264 - DNA, 15 bp, Homo sapiens
ataagatgccctccg

SEQ ID NO: 1871265 - DNA, 15 bp, Homo sapiens
taagatgccctccgt

SEQ ID NO: 1871266 - DNA, 15 bp, Homo sapiens
aagatgccctccgta

SEQ ID NO: 1871267 - DNA, 15 bp, Homo sapiens
agatgccctccgtaa

SEQ ID NO: 1871268 - DNA, 15 bp, Homo sapiens
gatgccctccgtaag

SEQ ID NO: 1871269 - DNA, 15 bp, Homo sapiens
atgccctccgtaagt

SEQ ID NO: 1871270 - DNA, 15 bp, Homo sapiens
tgccctccgtaagta

SEQ ID NO: 1871271 - DNA, 15 bp, Homo sapiens
gccctccgtaagtag

SEQ ID NO: 1871272 - DNA, 15 bp, Homo sapiens
ccctccgtaagtaga

SEQ ID NO: 1871273 - DNA, 15 bp, Homo sapiens
cctccgtaagtagag

SEQ ID NO: 1871274 - DNA, 15 bp, Homo sapiens
ctccgtaagtagaga

SEQ ID NO: 1871275 - DNA, 15 bp, Homo sapiens
tccgtaagtagagat

SEQ ID NO: 1871276 - DNA, 15 bp, Homo sapiens
ccgtaagtagagatt

SEQ ID NO: 1871277 - DNA, 15 bp, Homo sapiens
cgtaagtagagattc

SEQ ID NO: 1871278 - DNA, 15 bp, Homo sapiens
gtaagtagagattct

SEQ ID NO: 1871279 - DNA, 15 bp, Homo sapiens
taagtagagattcta

SEQ ID NO: 1871280 - DNA, 15 bp, Homo sapiens
aagtagagattctaa

SEQ ID NO: 1871281 - DNA, 15 bp, Homo sapiens
agtagagattctaaa

SEQ ID NO: 1871282 - DNA, 15 bp, Homo sapiens
gtagagattctaaat

SEQ ID NO: 1871283 - DNA, 15 bp, Homo sapiens
tagagattctaaatc

SEQ ID NO: 1871284 - DNA, 15 bp, Homo sapiens
agagattctaaatcc

SEQ ID NO: 1871285 - DNA, 15 bp, Homo sapiens
gagattctaaatcct

SEQ ID NO: 1871286 - DNA, 15 bp, Homo sapiens
agattctaaatcctc

SEQ ID NO: 1871287 - DNA, 15 bp, Homo sapiens
gattctaaatcctca

SEQ ID NO: 1871288 - DNA, 15 bp, Homo sapiens
attctaaatcctcat

SEQ ID NO: 1871289 - DNA, 15 bp, Homo sapiens
ttctaaatcctcatt

SEQ ID NO: 1871290 - DNA, 15 bp, Homo sapiens
tctaaatcctcattg

SEQ ID NO: 1871291 - DNA, 15 bp, Homo sapiens
ctaaatcctcattga

SEQ ID NO: 1871292 - DNA, 15 bp, Homo sapiens
taaatcctcattgat

SEQ ID NO: 1871293 - DNA, 15 bp, Homo sapiens
aaatcctcattgatt

SEQ ID NO: 1871294 - DNA, 15 bp, Homo sapiens
aatcctcattgattt

SEQ ID NO: 1871295 - DNA, 15 bp, Homo sapiens
atcctcattgatttg

SEQ ID NO: 1871296 - DNA, 15 bp, Homo sapiens
tcctcattgatttgc

SEQ ID NO: 1871297 - DNA, 15 bp, Homo sapiens
cctcattgatttgca

SEQ ID NO: 1871298 - DNA, 15 bp, Homo sapiens
ctcattgatttgcat

SEQ ID NO: 1871299 - DNA, 15 bp, Homo sapiens
tcattgatttgcatg

SEQ ID NO: 1871300 - DNA, 15 bp, Homo sapiens
cattgatttgcatgg

SEQ ID NO: 1871301 - DNA, 15 bp, Homo sapiens
attgatttgcatggc

SEQ ID NO: 1871302 - DNA, 15 bp, Homo sapiens
ttgatttgcatggct

SEQ ID NO: 1871303 - DNA, 15 bp, Homo sapiens
tgatttgcatggctc

SEQ ID NO: 1871304 - DNA, 15 bp, Homo sapiens
gatttgcatggctct

SEQ ID NO: 1871305 - DNA, 15 bp, Homo sapiens
atttgcatggctctg

SEQ ID NO: 1871306 - DNA, 15 bp, Homo sapiens
tttgcatggctctgt

SEQ ID NO: 1871307 - DNA, 15 bp, Homo sapiens
ttgcatggctctgtt

SEQ ID NO: 1871308 - DNA, 15 bp, Homo sapiens
tgcatggctctgtta

SEQ ID NO: 1871309 - DNA, 15 bp, Homo sapiens
gcatggctctgttat

SEQ ID NO: 1871310 - DNA, 15 bp, Homo sapiens
catggctctgttata

SEQ ID NO: 1871311 - DNA, 15 bp, Homo sapiens
atggctctgttatat

SEQ ID NO: 1871312 - DNA, 15 bp, Homo sapiens
tggctctgttatatg

SEQ ID NO: 1871313 - DNA, 15 bp, Homo sapiens
ggctctgttatatgc

SEQ ID NO: 1871314 - DNA, 15 bp, Homo sapiens
gctctgttatatgcc

SEQ ID NO: 1871315 - DNA, 15 bp, Homo sapiens
ctctgttatatgcca

SEQ ID NO: 1871316 - DNA, 15 bp, Homo sapiens
tctgttatatgccaa

SEQ ID NO: 1871317 - DNA, 15 bp, Homo sapiens
ctgttatatgccaaa

SEQ ID NO: 1871318 - DNA, 15 bp, Homo sapiens
tgttatatgccaaat

SEQ ID NO: 1871319 - DNA, 15 bp, Homo sapiens
gttatatgccaaatt

SEQ ID NO: 1871320 - DNA, 15 bp, Homo sapiens
ttatatgccaaattg

SEQ ID NO: 1871321 - DNA, 15 bp, Homo sapiens
tatatgccaaattgg

SEQ ID NO: 1871322 - DNA, 15 bp, Homo sapiens
atatgccaaattgga

SEQ ID NO: 1871323 - DNA, 15 bp, Homo sapiens
tatgccaaattggaa

SEQ ID NO: 1871324 - DNA, 15 bp, Homo sapiens
atgccaaattggaaa

SEQ ID NO: 1871325 - DNA, 15 bp, Homo sapiens
tgccaaattggaaat

SEQ ID NO: 1871326 - DNA, 15 bp, Homo sapiens
gccaaattggaaata

SEQ ID NO: 1871327 - DNA, 15 bp, Homo sapiens
ccaaattggaaatac

SEQ ID NO: 1871328 - DNA, 15 bp, Homo sapiens
caaattggaaatacc

SEQ ID NO: 1871329 - DNA, 15 bp, Homo sapiens
aaattggaaatacca

SEQ ID NO: 1871330 - DNA, 15 bp, Homo sapiens
aattggaaataccat

SEQ ID NO: 1871331 - DNA, 15 bp, Homo sapiens
ttggaaataccatcc

SEQ ID NO: 1871332 - DNA, 15 bp, Homo sapiens
tggaaataccatcct

SEQ ID NO: 1871333 - DNA, 15 bp, Homo sapiens
ggaaataccatccta

SEQ ID NO: 1871334 - DNA, 15 bp, Homo sapiens
gaaataccatcctaa

SEQ ID NO: 1871335 - DNA, 15 bp, Homo sapiens
aaataccatcctaaa

SEQ ID NO: 1871336 - DNA, 15 bp, Homo sapiens
aataccatcctaaaa

SEQ ID NO: 1871337 - DNA, 15 bp, Homo sapiens
ataccatcctaaaat

SEQ ID NO: 1871338 - DNA, 15 bp, Homo sapiens
taccatcctaaaatg

SEQ ID NO: 1871339 - DNA, 15 bp, Homo sapiens
accatcctaaaatga

SEQ ID NO: 1871340 - DNA, 15 bp, Homo sapiens
ccatcctaaaatgaa

SEQ ID NO: 1871341 - DNA, 15 bp, Homo sapiens
catcctaaaatgaat

SEQ ID NO: 1871342 - DNA, 15 bp, Homo sapiens
atcctaaaatgaatg

SEQ ID NO: 1871343 - DNA, 15 bp, Homo sapiens
tcctaaaatgaatgt

SEQ ID NO: 1871344 - DNA, 15 bp, Homo sapiens
cctaaaatgaatgtc

SEQ ID NO: 1871345 - DNA, 15 bp, Homo sapiens
ctaaaatgaatgtct

SEQ ID NO: 1871346 - DNA, 15 bp, Homo sapiens
taaaatgaatgtctt

SEQ ID NO: 1871347 - DNA, 15 bp, Homo sapiens
aaaatgaatgtcttc

SEQ ID NO: 1871348 - DNA, 15 bp, Homo sapiens
aaatgaatgtcttca

SEQ ID NO: 1871349 - DNA, 15 bp, Homo sapiens
aatgaatgtcttcaa

SEQ ID NO: 1871350 - DNA, 15 bp, Homo sapiens
atgaatgtcttcaag

SEQ ID NO: 1871351 - DNA, 15 bp, Homo sapiens
tgaatgtcttcaagg

SEQ ID NO: 1871352 - DNA, 15 bp, Homo sapiens
gaatgtcttcaagga

SEQ ID NO: 1871353 - DNA, 15 bp, Homo sapiens
aatgtcttcaaggaa

SEQ ID NO: 1871354 - DNA, 15 bp, Homo sapiens
atgtcttcaaggaac

SEQ ID NO: 1871355 - DNA, 15 bp, Homo sapiens
tgtcttcaaggaacg

SEQ ID NO: 1871356 - DNA, 15 bp, Homo sapiens
gtcttcaaggaacga

SEQ ID NO: 1871357 - DNA, 15 bp, Homo sapiens
tcttcaaggaacgaa

SEQ ID NO: 1871358 - DNA, 15 bp, Homo sapiens
cttcaaggaacgaat

SEQ ID NO: 1871359 - DNA, 15 bp, Homo sapiens
ttcaaggaacgaatt

SEQ ID NO: 1871360 - DNA, 15 bp, Homo sapiens
tcaaggaacgaattc

SEQ ID NO: 1871361 - DNA, 15 bp, Homo sapiens
caaggaacgaattca

SEQ ID NO: 1871362 - DNA, 15 bp, Homo sapiens
aaggaacgaattcag

SEQ ID NO: 1871363 - DNA, 15 bp, Homo sapiens
aggaacgaattcagc

SEQ ID NO: 1871364 - DNA, 15 bp, Homo sapiens
ggaacgaattcagca

SEQ ID NO: 1871365 - DNA, 15 bp, Homo sapiens
gaacgaattcagcag

SEQ ID NO: 1871366 - DNA, 15 bp, Homo sapiens
aacgaattcagcagt

SEQ ID NO: 1871367 - DNA, 15 bp, Homo sapiens
acgaattcagcagta

SEQ ID NO: 1871368 - DNA, 15 bp, Homo sapiens
cgaattcagcagtag

SEQ ID NO: 1871369 - DNA, 15 bp, Homo sapiens
gaattcagcagtagg

SEQ ID NO: 1871370 - DNA, 15 bp, Homo sapiens
aattcagcagtaggt

SEQ ID NO: 1871371 - DNA, 15 bp, Homo sapiens
attcagcagtaggtt

SEQ ID NO: 1871372 - DNA, 15 bp, Homo sapiens
ttcagcagtaggttt

SEQ ID NO: 1871373 - DNA, 15 bp, Homo sapiens
tcagcagtaggtttg

SEQ ID NO: 1871374 - DNA, 15 bp, Homo sapiens
cagcagtaggtttgc

SEQ ID NO: 1871375 - DNA, 15 bp, Homo sapiens
agcagtaggtttgca

SEQ ID NO: 1871376 - DNA, 15 bp, Homo sapiens
gcagtaggtttgcat

SEQ ID NO: 1871377 - DNA, 15 bp, Homo sapiens
cagtaggtttgcatg

SEQ ID NO: 1871378 - DNA, 15 bp, Homo sapiens
agtaggtttgcatgg

SEQ ID NO: 1871379 - DNA, 15 bp, Homo sapiens
gtaggtttgcatgga

SEQ ID NO: 1871380 - DNA, 15 bp, Homo sapiens
taggtttgcatggat

SEQ ID NO: 1871381 - DNA, 15 bp, Homo sapiens
aggtttgcatggatg

SEQ ID NO: 1871382 - DNA, 15 bp, Homo sapiens
ggtttgcatggatgc

SEQ ID NO: 1871383 - DNA, 15 bp, Homo sapiens
gtttgcatggatgcc

SEQ ID NO: 1871384 - DNA, 15 bp, Homo sapiens
tttgcatggatgcca

SEQ ID NO: 1871385 - DNA, 15 bp, Homo sapiens
ttgcatggatgccaa

SEQ ID NO: 1871386 - DNA, 15 bp, Homo sapiens
tgcatggatgccaaa

SEQ ID NO: 1871387 - DNA, 15 bp, Homo sapiens
gcatggatgccaaaa

SEQ ID NO: 1871388 - DNA, 15 bp, Homo sapiens
catggatgccaaaac

SEQ ID NO: 1871389 - DNA, 15 bp, Homo sapiens
atggatgccaaaacc

SEQ ID NO: 1871390 - DNA, 15 bp, Homo sapiens
tggatgccaaaacct

SEQ ID NO: 1871391 - DNA, 15 bp, Homo sapiens
ggatgccaaaacctc

SEQ ID NO: 1871392 - DNA, 15 bp, Homo sapiens
gatgccaaaacctct

SEQ ID NO: 1871393 - DNA, 15 bp, Homo sapiens
atgccaaaacctctc

SEQ ID NO: 1871394 - DNA, 15 bp, Homo sapiens
tgccaaaacctctcc

SEQ ID NO: 1871395 - DNA, 15 bp, Homo sapiens
gccaaaacctctcca

SEQ ID NO: 1871396 - DNA, 15 bp, Homo sapiens
ccaaaacctctccag

SEQ ID NO: 1871397 - DNA, 15 bp, Homo sapiens
caaaacctctccaga

SEQ ID NO: 1871398 - DNA, 15 bp, Homo sapiens
aaaacctctccagat

SEQ ID NO: 1871399 - DNA, 15 bp, Homo sapiens
aaacctctccagatg

SEQ ID NO: 1871400 - DNA, 15 bp, Homo sapiens
aacctctccagatgg

SEQ ID NO: 1871401 - DNA, 15 bp, Homo sapiens
acctctccagatggc

SEQ ID NO: 1871402 - DNA, 15 bp, Homo sapiens
cctctccagatggct

SEQ ID NO: 1871403 - DNA, 15 bp, Homo sapiens
ctctccagatggctg

SEQ ID NO: 1871404 - DNA, 15 bp, Homo sapiens
tctccagatggctgt

SEQ ID NO: 1871405 - DNA, 15 bp, Homo sapiens
ctccagatggctgta

SEQ ID NO: 1871406 - DNA, 15 bp, Homo sapiens
tccagatggctgtac

SEQ ID NO: 1871407 - DNA, 15 bp, Homo sapiens
ccagatggctgtact

SEQ ID NO: 1871408 - DNA, 15 bp, Homo sapiens
cagatggctgtactt

SEQ ID NO: 1871409 - DNA, 15 bp, Homo sapiens
agatggctgtacttc

SEQ ID NO: 1871410 - DNA, 15 bp, Homo sapiens
gatggctgtacttca

SEQ ID NO: 1871411 - DNA, 15 bp, Homo sapiens
atggctgtacttcat

SEQ ID NO: 1871412 - DNA, 15 bp, Homo sapiens
tggctgtacttcatc

SEQ ID NO: 1871413 - DNA, 15 bp, Homo sapiens
ggctgtacttcatct

SEQ ID NO: 1871414 - DNA, 15 bp, Homo sapiens
gctgtacttcatctg

SEQ ID NO: 1871415 - DNA, 15 bp, Homo sapiens
ctgtacttcatctgg

SEQ ID NO: 1871416 - DNA, 15 bp, Homo sapiens
tgtacttcatctggg

SEQ ID NO: 1871417 - DNA, 15 bp, Homo sapiens
gtacttcatctgggg

SEQ ID NO: 1871418 - DNA, 15 bp, Homo sapiens
tacttcatctggggt

SEQ ID NO: 1871419 - DNA, 15 bp, Homo sapiens
acttcatctggggta

SEQ ID NO: 1871420 - DNA, 15 bp, Homo sapiens
cttcatctggggtat

SEQ ID NO: 1871421 - DNA, 15 bp, Homo sapiens
ttcatctggggtatt

SEQ ID NO: 1871422 - DNA, 15 bp, Homo sapiens
tcatctggggtatta

SEQ ID NO: 1871423 - DNA, 15 bp, Homo sapiens
catctggggtattat

SEQ ID NO: 1871424 - DNA, 15 bp, Homo sapiens
atctggggtattatt

SEQ ID NO: 1871425 - DNA, 15 bp, Homo sapiens
tctggggtattattg

SEQ ID NO: 1871426 - DNA, 15 bp, Homo sapiens
ctggggtattattgg

SEQ ID NO: 1871427 - DNA, 15 bp, Homo sapiens
tggggtattattgga

SEQ ID NO: 1871428 - DNA, 15 bp, Homo sapiens
ggggtattattggaa

SEQ ID NO: 1871429 - DNA, 15 bp, Homo sapiens
gggtattattggaac

SEQ ID NO: 1871430 - DNA, 15 bp, Homo sapiens
ggtattattggaaca

SEQ ID NO: 1871431 - DNA, 15 bp, Homo sapiens
gtattattggaacag

SEQ ID NO: 1871432 - DNA, 15 bp, Homo sapiens
tattattggaacagc

SEQ ID NO: 1871433 - DNA, 15 bp, Homo sapiens
attattggaacagcc

SEQ ID NO: 1871434 - DNA, 15 bp, Homo sapiens
ttattggaacagcct

SEQ ID NO: 1871435 - DNA, 15 bp, Homo sapiens
tattggaacagcctc

SEQ ID NO: 1871436 - DNA, 15 bp, Homo sapiens
attggaacagcctcc

SEQ ID NO: 1871437 - DNA, 15 bp, Homo sapiens
ttggaacagcctcct

SEQ ID NO: 1871438 - DNA, 15 bp, Homo sapiens
tggaacagcctcctc

SEQ ID NO: 1871439 - DNA, 15 bp, Homo sapiens
ggaacagcctcctca

SEQ ID NO: 1871440 - DNA, 15 bp, Homo sapiens
gaacagcctcctcag

SEQ ID NO: 1871441 - DNA, 15 bp, Homo sapiens
aacagcctcctcagc

SEQ ID NO: 1871442 - DNA, 15 bp, Homo sapiens
acagcctcctcagca

SEQ ID NO: 1871443 - DNA, 15 bp, Homo sapiens
cagcctcctcagcaa

SEQ ID NO: 1871444 - DNA, 15 bp, Homo sapiens
agcctcctcagcaac

SEQ ID NO: 1871445 - DNA, 15 bp, Homo sapiens
gcctcctcagcaacc

SEQ ID NO: 1871446 - DNA, 15 bp, Homo sapiens
cctcctcagcaacct

SEQ ID NO: 1871447 - DNA, 15 bp, Homo sapiens
ctcctcagcaaccta

SEQ ID NO: 1871448 - DNA, 15 bp, Homo sapiens
tcctcagcaacctaa

SEQ ID NO: 1871449 - DNA, 15 bp, Homo sapiens
cctcagcaacctaaa

SEQ ID NO: 1871450 - DNA, 15 bp, Homo sapiens
ctcagcaacctaaat

SEQ ID NO: 1871451 - DNA, 15 bp, Homo sapiens
tcagcaacctaaatc

SEQ ID NO: 1871452 - DNA, 15 bp, Homo sapiens
cagcaacctaaatct

SEQ ID NO: 1871453 - DNA, 15 bp, Homo sapiens
agcaacctaaatctc

SEQ ID NO: 1871454 - DNA, 15 bp, Homo sapiens
gcaacctaaatctct

SEQ ID NO: 1871455 - DNA, 15 bp, Homo sapiens
caacctaaatctcta

SEQ ID NO: 1871456 - DNA, 15 bp, Homo sapiens
aacctaaatctctag

SEQ ID NO: 1871457 - DNA, 15 bp, Homo sapiens
acctaaatctctagg

SEQ ID NO: 1871458 - DNA, 15 bp, Homo sapiens
cctaaatctctagga

SEQ ID NO: 1871459 - DNA, 15 bp, Homo sapiens
ctaaatctctaggac

SEQ ID NO: 1871460 - DNA, 15 bp, Homo sapiens
taaatctctaggact

SEQ ID NO: 1871461 - DNA, 15 bp, Homo sapiens
aaatctctaggactg

SEQ ID NO: 1871462 - DNA, 15 bp, Homo sapiens
aatctctaggactgg

SEQ ID NO: 1871463 - DNA, 15 bp, Homo sapiens
atctctaggactgga

SEQ ID NO: 1871464 - DNA, 15 bp, Homo sapiens
tctctaggactggac

SEQ ID NO: 1871465 - DNA, 15 bp, Homo sapiens
ctctaggactggacg

SEQ ID NO: 1871466 - DNA, 15 bp, Homo sapiens
tctaggactggacgt

SEQ ID NO: 1871467 - DNA, 15 bp, Homo sapiens
ctaggactggacgta

SEQ ID NO: 1871468 - DNA, 15 bp, Homo sapiens
taggactggacgtat

SEQ ID NO: 1871469 - DNA, 15 bp, Homo sapiens
aggactggacgtata

SEQ ID NO: 1871470 - DNA, 15 bp, Homo sapiens
ggactggacgtatat

SEQ ID NO: 1871471 - DNA, 15 bp, Homo sapiens
gactggacgtatatt

SEQ ID NO: 1871472 - DNA, 15 bp, Homo sapiens
actggacgtatattt

SEQ ID NO: 1871473 - DNA, 15 bp, Homo sapiens
ctggacgtatattta

SEQ ID NO: 1871474 - DNA, 15 bp, Homo sapiens
tggacgtatatttac

SEQ ID NO: 1871475 - DNA, 15 bp, Homo sapiens
ggacgtatatttacc

SEQ ID NO: 1871476 - DNA, 15 bp, Homo sapiens
gacgtatatttacct

SEQ ID NO: 1871477 - DNA, 15 bp, Homo sapiens
acgtatatttacctt

SEQ ID NO: 1871478 - DNA, 15 bp, Homo sapiens
cgtatatttaccttc

SEQ ID NO: 1871479 - DNA, 15 bp, Homo sapiens
gtatatttaccttca

SEQ ID NO: 1871480 - DNA, 15 bp, Homo sapiens
tatatttaccttcac

SEQ ID NO: 1871481 - DNA, 15 bp, Homo sapiens
atatttaccttcaca

SEQ ID NO: 1871482 - DNA, 15 bp, Homo sapiens
tatttaccttcacat

SEQ ID NO: 1871483 - DNA, 15 bp, Homo sapiens
atttaccttcacatc

SEQ ID NO: 1871484 - DNA, 15 bp, Homo sapiens
tttaccttcacatca

SEQ ID NO: 1871485 - DNA, 15 bp, Homo sapiens
ttaccttcacatcat

SEQ ID NO: 1871486 - DNA, 15 bp, Homo sapiens
taccttcacatcatc

SEQ ID NO: 1871487 - DNA, 15 bp, Homo sapiens
accttcacatcatct

SEQ ID NO: 1871488 - DNA, 15 bp, Homo sapiens
ccttcacatcatctt

SEQ ID NO: 1871489 - DNA, 15 bp, Homo sapiens
cttcacatcatcttc

SEQ ID NO: 1871490 - DNA, 15 bp, Homo sapiens
ttcacatcatcttca

SEQ ID NO: 1871491 - DNA, 15 bp, Homo sapiens
tcacatcatcttcaa

SEQ ID NO: 1871492 - DNA, 15 bp, Homo sapiens
cacatcatcttcaaa

SEQ ID NO: 1871493 - DNA, 15 bp, Homo sapiens
acatcatcttcaaaa

SEQ ID NO: 1871494 - DNA, 15 bp, Homo sapiens
catcatcttcaaaaa

SEQ ID NO: 1871495 - DNA, 15 bp, Homo sapiens
atcatcttcaaaaaa

SEQ ID NO: 1871496 - DNA, 15 bp, Homo sapiens
tcatcttcaaaaaat

SEQ ID NO: 1871497 - DNA, 15 bp, Homo sapiens
catcttcaaaaaata

SEQ ID NO: 1871498 - DNA, 15 bp, Homo sapiens
atcttcaaaaaatag

SEQ ID NO: 1871499 - DNA, 15 bp, Homo sapiens
tcttcaaaaaataga

SEQ ID NO: 1871500 - DNA, 15 bp, Homo sapiens
cttcaaaaaatagat

SEQ ID NO: 1871501 - DNA, 15 bp, Homo sapiens
ttcaaaaaatagatg

SEQ ID NO: 1871502 - DNA, 15 bp, Homo sapiens
tcaaaaaatagatgc

SEQ ID NO: 1871503 - DNA, 15 bp, Homo sapiens
caaaaaatagatgcc

SEQ ID NO: 1871504 - DNA, 15 bp, Homo sapiens
aaaaaatagatgcct

SEQ ID NO: 1871505 - DNA, 15 bp, Homo sapiens
aaaaatagatgcctt

SEQ ID NO: 1871506 - DNA, 15 bp, Homo sapiens
aaaatagatgccttg

SEQ ID NO: 1871507 - DNA, 15 bp, Homo sapiens
aaatagatgccttga

SEQ ID NO: 1871508 - DNA, 15 bp, Homo sapiens
aatagatgccttgat

SEQ ID NO: 1871509 - DNA, 15 bp, Homo sapiens
atagatgccttgatt

SEQ ID NO: 1871510 - DNA, 15 bp, Homo sapiens
tagatgccttgattc

SEQ ID NO: 1871511 - DNA, 15 bp, Homo sapiens
agatgccttgattct

SEQ ID NO: 1871512 - DNA, 15 bp, Homo sapiens
gatgccttgattctt

SEQ ID NO: 1871513 - DNA, 15 bp, Homo sapiens
atgccttgattcttt

SEQ ID NO: 1871514 - DNA, 15 bp, Homo sapiens
tgccttgattctttt

SEQ ID NO: 1871515 - DNA, 15 bp, Homo sapiens
gccttgattcttttc

SEQ ID NO: 1871516 - DNA, 15 bp, Homo sapiens
ccttgattcttttcc

SEQ ID NO: 1871517 - DNA, 15 bp, Homo sapiens
cttgattcttttcca

SEQ ID NO: 1871518 - DNA, 15 bp, Homo sapiens
ttgattcttttccat

SEQ ID NO: 1871519 - DNA, 15 bp, Homo sapiens
tgattcttttccatg

SEQ ID NO: 1871520 - DNA, 15 bp, Homo sapiens
gattcttttccatga

SEQ ID NO: 1871521 - DNA, 15 bp, Homo sapiens
attcttttccatgag

SEQ ID NO: 1871522 - DNA, 15 bp, Homo sapiens
ttcttttccatgaga

SEQ ID NO: 1871523 - DNA, 15 bp, Homo sapiens
tcttttccatgagac

SEQ ID NO: 1871524 - DNA, 15 bp, Homo sapiens
cttttccatgagacc

SEQ ID NO: 1871525 - DNA, 15 bp, Homo sapiens
ttttccatgagacca

SEQ ID NO: 1871526 - DNA, 15 bp, Homo sapiens
tttccatgagaccag

SEQ ID NO: 1871527 - DNA, 15 bp, Homo sapiens
ttccatgagaccagg

SEQ ID NO: 1871528 - DNA, 15 bp, Homo sapiens
tccatgagaccaggg

SEQ ID NO: 1871529 - DNA, 15 bp, Homo sapiens
ccatgagaccagggc

SEQ ID NO: 1871530 - DNA, 15 bp, Homo sapiens
catgagaccagggcc

SEQ ID NO: 1871531 - DNA, 15 bp, Homo sapiens
atgagaccagggcca

SEQ ID NO: 1871532 - DNA, 15 bp, Homo sapiens
tgagaccagggccat

SEQ ID NO: 1871533 - DNA, 15 bp, Homo sapiens
gagaccagggccata

SEQ ID NO: 1871534 - DNA, 15 bp, Homo sapiens
agaccagggccataa

SEQ ID NO: 1871535 - DNA, 15 bp, Homo sapiens
gaccagggccataat

SEQ ID NO: 1871536 - DNA, 15 bp, Homo sapiens
accagggccataatg

SEQ ID NO: 1871537 - DNA, 15 bp, Homo sapiens
ccagggccataatgg

SEQ ID NO: 1871538 - DNA, 15 bp, Homo sapiens
cagggccataatgga

SEQ ID NO: 1871539 - DNA, 15 bp, Homo sapiens
agggccataatggat

SEQ ID NO: 1871540 - DNA, 15 bp, Homo sapiens
gggccataatggatt

SEQ ID NO: 1871541 - DNA, 15 bp, Homo sapiens
ggccataatggattg

SEQ ID NO: 1871542 - DNA, 15 bp, Homo sapiens
gccataatggattga

SEQ ID NO: 1871543 - DNA, 15 bp, Homo sapiens
ccataatggattgac

SEQ ID NO: 1871544 - DNA, 15 bp, Homo sapiens
cataatggattgacc

SEQ ID NO: 1871545 - DNA, 15 bp, Homo sapiens
ataatggattgacct

SEQ ID NO: 1871546 - DNA, 15 bp, Homo sapiens
taatggattgacctg

SEQ ID NO: 1871547 - DNA, 15 bp, Homo sapiens
aatggattgacctgg

SEQ ID NO: 1871548 - DNA, 15 bp, Homo sapiens
atggattgacctggc

SEQ ID NO: 1871549 - DNA, 15 bp, Homo sapiens
tggattgacctggct

SEQ ID NO: 1871550 - DNA, 15 bp, Homo sapiens
ggattgacctggcta

SEQ ID NO: 1871551 - DNA, 15 bp, Homo sapiens
gattgacctggctag

SEQ ID NO: 1871552 - DNA, 15 bp, Homo sapiens
attgacctggctagc

SEQ ID NO: 1871553 - DNA, 15 bp, Homo sapiens
ttgacctggctagca

SEQ ID NO: 1871554 - DNA, 15 bp, Homo sapiens
tgacctggctagcag

SEQ ID NO: 1871555 - DNA, 15 bp, Homo sapiens
gacctggctagcaga

SEQ ID NO: 1871556 - DNA, 15 bp, Homo sapiens
acctggctagcagat

SEQ ID NO: 1871557 - DNA, 15 bp, Homo sapiens
cctggctagcagatc

SEQ ID NO: 1871558 - DNA, 15 bp, Homo sapiens
ctggctagcagatca

SEQ ID NO: 1871559 - DNA, 15 bp, Homo sapiens
tggctagcagatcag

SEQ ID NO: 1871560 - DNA, 15 bp, Homo sapiens
ggctagcagatcaga

SEQ ID NO: 1871561 - DNA, 15 bp, Homo sapiens
gctagcagatcagat

SEQ ID NO: 1871562 - DNA, 15 bp, Homo sapiens
ctagcagatcagata

SEQ ID NO: 1871563 - DNA, 15 bp, Homo sapiens
tagcagatcagatag

SEQ ID NO: 1871564 - DNA, 15 bp, Homo sapiens
agcagatcagatagg

SEQ ID NO: 1871565 - DNA, 15 bp, Homo sapiens
gcagatcagataggg

SEQ ID NO: 1871566 - DNA, 15 bp, Homo sapiens
cagatcagataggga

SEQ ID NO: 1871567 - DNA, 15 bp, Homo sapiens
agatcagatagggag

SEQ ID NO: 1871568 - DNA, 15 bp, Homo sapiens
gatcagatagggaga

SEQ ID NO: 1871569 - DNA, 15 bp, Homo sapiens
atcagatagggagaa

SEQ ID NO: 1871570 - DNA, 15 bp, Homo sapiens
tcagatagggagaaa

SEQ ID NO: 1871571 - DNA, 15 bp, Homo sapiens
cagatagggagaaaa

SEQ ID NO: 1871572 - DNA, 15 bp, Homo sapiens
agatagggagaaaat

SEQ ID NO: 1871573 - DNA, 15 bp, Homo sapiens
gatagggagaaaatg

SEQ ID NO: 1871574 - DNA, 15 bp, Homo sapiens
atagggagaaaatga

SEQ ID NO: 1871575 - DNA, 15 bp, Homo sapiens
tagggagaaaatgaa

SEQ ID NO: 1871576 - DNA, 15 bp, Homo sapiens
agggagaaaatgaac

SEQ ID NO: 1871577 - DNA, 15 bp, Homo sapiens
gggagaaaatgaaca

SEQ ID NO: 1871578 - DNA, 15 bp, Homo sapiens
ggagaaaatgaacac

SEQ ID NO: 1871579 - DNA, 15 bp, Homo sapiens
gagaaaatgaacacc

SEQ ID NO: 1871580 - DNA, 15 bp, Homo sapiens
agaaaatgaacacct

SEQ ID NO: 1871581 - DNA, 15 bp, Homo sapiens
gaaaatgaacacctg

SEQ ID NO: 1871582 - DNA, 15 bp, Homo sapiens
aaaatgaacacctga

SEQ ID NO: 1871583 - DNA, 15 bp, Homo sapiens
aaatgaacacctgaa

SEQ ID NO: 1871584 - DNA, 15 bp, Homo sapiens
aatgaacacctgaaa

SEQ ID NO: 1871585 - DNA, 15 bp, Homo sapiens
atgaacacctgaaac

SEQ ID NO: 1871586 - DNA, 15 bp, Homo sapiens
tgaacacctgaaacc

SEQ ID NO: 1871587 - DNA, 15 bp, Homo sapiens
gaacacctgaaacca

SEQ ID NO: 1871588 - DNA, 15 bp, Homo sapiens
aacacctgaaaccag

SEQ ID NO: 1871589 - DNA, 15 bp, Homo sapiens
acacctgaaaccagc

SEQ ID NO: 1871590 - DNA, 15 bp, Homo sapiens
cacctgaaaccagct

SEQ ID NO: 1871591 - DNA, 15 bp, Homo sapiens
acctgaaaccagctc

SEQ ID NO: 1871592 - DNA, 15 bp, Homo sapiens
cctgaaaccagctca

SEQ ID NO: 1871593 - DNA, 15 bp, Homo sapiens
ctgaaaccagctcag

SEQ ID NO: 1871594 - DNA, 15 bp, Homo sapiens
tgaaaccagctcagg

SEQ ID NO: 1871595 - DNA, 15 bp, Homo sapiens
gaaaccagctcaggg

SEQ ID NO: 1871596 - DNA, 15 bp, Homo sapiens
aaaccagctcaggga

SEQ ID NO: 1871597 - DNA, 15 bp, Homo sapiens
aaccagctcagggat

SEQ ID NO: 1871598 - DNA, 15 bp, Homo sapiens
accagctcagggatt

SEQ ID NO: 1871599 - DNA, 15 bp, Homo sapiens
ccagctcagggattc

SEQ ID NO: 1871600 - DNA, 15 bp, Homo sapiens
cagctcagggattcg

SEQ ID NO: 1871601 - DNA, 15 bp, Homo sapiens
agctcagggattcga

SEQ ID NO: 1871602 - DNA, 15 bp, Homo sapiens
gctcagggattcgac

SEQ ID NO: 1871603 - DNA, 15 bp, Homo sapiens
ctcagggattcgact

SEQ ID NO: 1871604 - DNA, 15 bp, Homo sapiens
tcagggattcgactg

SEQ ID NO: 1871605 - DNA, 15 bp, Homo sapiens
cagggattcgactgc

SEQ ID NO: 1871606 - DNA, 15 bp, Homo sapiens
agggattcgactgca

SEQ ID NO: 1871607 - DNA, 15 bp, Homo sapiens
gggattcgactgcat

SEQ ID NO: 1871608 - DNA, 15 bp, Homo sapiens
ggattcgactgcatt

SEQ ID NO: 1871609 - DNA, 15 bp, Homo sapiens
gattcgactgcatta

SEQ ID NO: 1871610 - DNA, 15 bp, Homo sapiens
attcgactgcattat

SEQ ID NO: 1871611 - DNA, 15 bp, Homo sapiens
ttcgactgcattatt

SEQ ID NO: 1871612 - DNA, 15 bp, Homo sapiens
tcgactgcattattc

SEQ ID NO: 1871613 - DNA, 15 bp, Homo sapiens
cgactgcattattca

SEQ ID NO: 1871614 - DNA, 15 bp, Homo sapiens
gactgcattattcag

SEQ ID NO: 1871615 - DNA, 15 bp, Homo sapiens
actgcattattcagc

SEQ ID NO: 1871616 - DNA, 15 bp, Homo sapiens
ctgcattattcagct

SEQ ID NO: 1871617 - DNA, 15 bp, Homo sapiens
tgcattattcagctg

SEQ ID NO: 1871618 - DNA, 15 bp, Homo sapiens
gcattattcagctga

SEQ ID NO: 1871619 - DNA, 15 bp, Homo sapiens
cattattcagctgaa

SEQ ID NO: 1871620 - DNA, 15 bp, Homo sapiens
attattcagctgaac

SEQ ID NO: 1871621 - DNA, 15 bp, Homo sapiens
ttattcagctgaaca

SEQ ID NO: 1871622 - DNA, 15 bp, Homo sapiens
tattcagctgaacac

SEQ ID NO: 1871623 - DNA, 15 bp, Homo sapiens
attcagctgaacacc

SEQ ID NO: 1871624 - DNA, 15 bp, Homo sapiens
ttcagctgaacacct

SEQ ID NO: 1871625 - DNA, 15 bp, Homo sapiens
tcagctgaacaccta

SEQ ID NO: 1871626 - DNA, 15 bp, Homo sapiens
cagctgaacacctac

SEQ ID NO: 1871627 - DNA, 15 bp, Homo sapiens
agctgaacacctact

SEQ ID NO: 1871628 - DNA, 15 bp, Homo sapiens
gctgaacacctactg

SEQ ID NO: 1871629 - DNA, 15 bp, Homo sapiens
ctgaacacctactgt

SEQ ID NO: 1871630 - DNA, 15 bp, Homo sapiens
tgaacacctactgtg

SEQ ID NO: 1871631 - DNA, 15 bp, Homo sapiens
gaacacctactgtgt

SEQ ID NO: 1871632 - DNA, 15 bp, Homo sapiens
aacacctactgtgtg

SEQ ID NO: 1871633 - DNA, 15 bp, Homo sapiens
acacctactgtgtgc

SEQ ID NO: 1871634 - DNA, 15 bp, Homo sapiens
cacctactgtgtgca

SEQ ID NO: 1871635 - DNA, 15 bp, Homo sapiens
acctactgtgtgcaa

SEQ ID NO: 1871636 - DNA, 15 bp, Homo sapiens
cctactgtgtgcaaa

SEQ ID NO: 1871637 - DNA, 15 bp, Homo sapiens
ctactgtgtgcaaat

SEQ ID NO: 1871638 - DNA, 15 bp, Homo sapiens
tactgtgtgcaaatc

SEQ ID NO: 1871639 - DNA, 15 bp, Homo sapiens
actgtgtgcaaatcc

SEQ ID NO: 1871640 - DNA, 15 bp, Homo sapiens
ctgtgtgcaaatccc

SEQ ID NO: 1871641 - DNA, 15 bp, Homo sapiens
tgtgtgcaaatccct

SEQ ID NO: 1871642 - DNA, 15 bp, Homo sapiens
gtgtgcaaatcccta

SEQ ID NO: 1871643 - DNA, 15 bp, Homo sapiens
tgtgcaaatccctag

SEQ ID NO: 1871644 - DNA, 15 bp, Homo sapiens
gtgcaaatccctagg

SEQ ID NO: 1871645 - DNA, 15 bp, Homo sapiens
tgcaaatccctaggt

SEQ ID NO: 1871646 - DNA, 15 bp, Homo sapiens
gcaaatccctaggtg

SEQ ID NO: 1871647 - DNA, 15 bp, Homo sapiens
caaatccctaggtgc

SEQ ID NO: 1871648 - DNA, 15 bp, Homo sapiens
aaatccctaggtgct

SEQ ID NO: 1871649 - DNA, 15 bp, Homo sapiens
aatccctaggtgcta

SEQ ID NO: 1871650 - DNA, 15 bp, Homo sapiens
atccctaggtgctag

SEQ ID NO: 1871651 - DNA, 15 bp, Homo sapiens
tccctaggtgctagg

SEQ ID NO: 1871652 - DNA, 15 bp, Homo sapiens
ccctaggtgctagga

SEQ ID NO: 1871653 - DNA, 15 bp, Homo sapiens
cctaggtgctaggag

SEQ ID NO: 1871654 - DNA, 15 bp, Homo sapiens
ctaggtgctaggagt

SEQ ID NO: 1871655 - DNA, 15 bp, Homo sapiens
taggtgctaggagtg

SEQ ID NO: 1871656 - DNA, 15 bp, Homo sapiens
aggtgctaggagtga

SEQ ID NO: 1871657 - DNA, 15 bp, Homo sapiens
ggtgctaggagtgac

SEQ ID NO: 1871658 - DNA, 15 bp, Homo sapiens
gtgctaggagtgacc

SEQ ID NO: 1871659 - DNA, 15 bp, Homo sapiens
tgctaggagtgaccc

SEQ ID NO: 1871660 - DNA, 15 bp, Homo sapiens
gctaggagtgaccca

SEQ ID NO: 1871661 - DNA, 15 bp, Homo sapiens
ctaggagtgacccaa

SEQ ID NO: 1871662 - DNA, 15 bp, Homo sapiens
taggagtgacccaaa

SEQ ID NO: 1871663 - DNA, 15 bp, Homo sapiens
aggagtgacccaaag

SEQ ID NO: 1871664 - DNA, 15 bp, Homo sapiens
ggagtgacccaaaga

SEQ ID NO: 1871665 - DNA, 15 bp, Homo sapiens
gagtgacccaaagat

SEQ ID NO: 1871666 - DNA, 15 bp, Homo sapiens
agtgacccaaagatg

SEQ ID NO: 1871667 - DNA, 15 bp, Homo sapiens
gtgacccaaagatgg

SEQ ID NO: 1871668 - DNA, 15 bp, Homo sapiens
tgacccaaagatggg

SEQ ID NO: 1871669 - DNA, 15 bp, Homo sapiens
gacccaaagatgggg

SEQ ID NO: 1871670 - DNA, 15 bp, Homo sapiens
acccaaagatgggga

SEQ ID NO: 1871671 - DNA, 15 bp, Homo sapiens
cccaaagatggggaa

SEQ ID NO: 1871672 - DNA, 15 bp, Homo sapiens
ccaaagatggggaaa

SEQ ID NO: 1871673 - DNA, 15 bp, Homo sapiens
caaagatggggaaaa

SEQ ID NO: 1871674 - DNA, 15 bp, Homo sapiens
aaagatggggaaaac

SEQ ID NO: 1871675 - DNA, 15 bp, Homo sapiens
aagatggggaaaaca

SEQ ID NO: 1871676 - DNA, 15 bp, Homo sapiens
agatggggaaaacat

SEQ ID NO: 1871677 - DNA, 15 bp, Homo sapiens
gatggggaaaacata

SEQ ID NO: 1871678 - DNA, 15 bp, Homo sapiens
atggggaaaacatag

SEQ ID NO: 1871679 - DNA, 15 bp, Homo sapiens
tggggaaaacataga

SEQ ID NO: 1871680 - DNA, 15 bp, Homo sapiens
ggggaaaacatagat

SEQ ID NO: 1871681 - DNA, 15 bp, Homo sapiens
gggaaaacatagatc

SEQ ID NO: 1871682 - DNA, 15 bp, Homo sapiens
ggaaaacatagatct

SEQ ID NO: 1871683 - DNA, 15 bp, Homo sapiens
gaaaacatagatctt

SEQ ID NO: 1871684 - DNA, 15 bp, Homo sapiens
aaaacatagatcttg

SEQ ID NO: 1871685 - DNA, 15 bp, Homo sapiens
aaacatagatcttgc

SEQ ID NO: 1871686 - DNA, 15 bp, Homo sapiens
aacatagatcttgcc

SEQ ID NO: 1871687 - DNA, 15 bp, Homo sapiens
acatagatcttgcct

SEQ ID NO: 1871688 - DNA, 15 bp, Homo sapiens
catagatcttgcctc

SEQ ID NO: 1871689 - DNA, 15 bp, Homo sapiens
atagatcttgcctct

SEQ ID NO: 1871690 - DNA, 15 bp, Homo sapiens
tagatcttgcctcta

SEQ ID NO: 1871691 - DNA, 15 bp, Homo sapiens
agatcttgcctctat

SEQ ID NO: 1871692 - DNA, 15 bp, Homo sapiens
gatcttgcctctata

SEQ ID NO: 1871693 - DNA, 15 bp, Homo sapiens
atcttgcctctataa

SEQ ID NO: 1871694 - DNA, 15 bp, Homo sapiens
tcttgcctctataag

SEQ ID NO: 1871695 - DNA, 15 bp, Homo sapiens
cttgcctctataaga

SEQ ID NO: 1871696 - DNA, 15 bp, Homo sapiens
ttgcctctataagat

SEQ ID NO: 1871697 - DNA, 15 bp, Homo sapiens
tgcctctataagatg

SEQ ID NO: 1871698 - DNA, 15 bp, Homo sapiens
gcctctataagatgt

SEQ ID NO: 1871699 - DNA, 15 bp, Homo sapiens
cctctataagatgtt

SEQ ID NO: 1871700 - DNA, 15 bp, Homo sapiens
ctctataagatgtta

SEQ ID NO: 1871701 - DNA, 15 bp, Homo sapiens
tctataagatgttaa

SEQ ID NO: 1871702 - DNA, 15 bp, Homo sapiens
ctataagatgttaat

SEQ ID NO: 1871703 - DNA, 15 bp, Homo sapiens
tataagatgttaata

SEQ ID NO: 1871704 - DNA, 15 bp, Homo sapiens
aagatgttaataact

SEQ ID NO: 1871705 - DNA, 15 bp, Homo sapiens
agatgttaataactt

SEQ ID NO: 1871706 - DNA, 15 bp, Homo sapiens
gatgttaataactta

SEQ ID NO: 1871707 - DNA, 15 bp, Homo sapiens
atgttaataacttaa

SEQ ID NO: 1871708 - DNA, 15 bp, Homo sapiens
tgttaataacttaat

SEQ ID NO: 1871709 - DNA, 15 bp, Homo sapiens
gttaataacttaatt

SEQ ID NO: 1871710 - DNA, 15 bp, Homo sapiens
ttaataacttaattg

SEQ ID NO: 1871711 - DNA, 15 bp, Homo sapiens
taataacttaattgg

SEQ ID NO: 1871712 - DNA, 15 bp, Homo sapiens
aataacttaattgga

SEQ ID NO: 1871713 - DNA, 15 bp, Homo sapiens
ataacttaattggag

SEQ ID NO: 1871714 - DNA, 15 bp, Homo sapiens
taacttaattggagt

SEQ ID NO: 1871715 - DNA, 15 bp, Homo sapiens
aacttaattggagtg

SEQ ID NO: 1871716 - DNA, 15 bp, Homo sapiens
acttaattggagtgt

SEQ ID NO: 1871717 - DNA, 15 bp, Homo sapiens
cttaattggagtgtc

SEQ ID NO: 1871718 - DNA, 15 bp, Homo sapiens
ttaattggagtgtcc

SEQ ID NO: 1871719 - DNA, 15 bp, Homo sapiens
taattggagtgtcct

SEQ ID NO: 1871720 - DNA, 15 bp, Homo sapiens
aattggagtgtcctc

SEQ ID NO: 1871721 - DNA, 15 bp, Homo sapiens
attggagtgtcctct

SEQ ID NO: 1871722 - DNA, 15 bp, Homo sapiens
ttggagtgtcctcta

SEQ ID NO: 1871723 - DNA, 15 bp, Homo sapiens
tggagtgtcctctag

SEQ ID NO: 1871724 - DNA, 15 bp, Homo sapiens
ggagtgtcctctaga

SEQ ID NO: 1871725 - DNA, 15 bp, Homo sapiens
gagtgtcctctagaa

SEQ ID NO: 1871726 - DNA, 15 bp, Homo sapiens
agtgtcctctagaaa

SEQ ID NO: 1871727 - DNA, 15 bp, Homo sapiens
gtgtcctctagaaag

SEQ ID NO: 1871728 - DNA, 15 bp, Homo sapiens
tgtcctctagaaaga

SEQ ID NO: 1871729 - DNA, 15 bp, Homo sapiens
gtcctctagaaagaa

SEQ ID NO: 1871730 - DNA, 15 bp, Homo sapiens
tcctctagaaagaac

SEQ ID NO: 1871731 - DNA, 15 bp, Homo sapiens
cctctagaaagaaca

SEQ ID NO: 1871732 - DNA, 15 bp, Homo sapiens
ctctagaaagaacag

SEQ ID NO: 1871733 - DNA, 15 bp, Homo sapiens
tctagaaagaacagt

SEQ ID NO: 1871734 - DNA, 15 bp, Homo sapiens
ctagaaagaacagta

SEQ ID NO: 1871735 - DNA, 15 bp, Homo sapiens
tagaaagaacagtaa

SEQ ID NO: 1871736 - DNA, 15 bp, Homo sapiens
agaaagaacagtaag

SEQ ID NO: 1871737 - DNA, 15 bp, Homo sapiens
gaaagaacagtaagt

SEQ ID NO: 1871738 - DNA, 15 bp, Homo sapiens
aaagaacagtaagtt

SEQ ID NO: 1871739 - DNA, 15 bp, Homo sapiens
aagaacagtaagttt

SEQ ID NO: 1871740 - DNA, 15 bp, Homo sapiens
agaacagtaagttta

SEQ ID NO: 1871741 - DNA, 15 bp, Homo sapiens
gaacagtaagtttat

SEQ ID NO: 1871742 - DNA, 15 bp, Homo sapiens
aacagtaagtttata

SEQ ID NO: 1871743 - DNA, 15 bp, Homo sapiens
acagtaagtttatag

SEQ ID NO: 1871744 - DNA, 15 bp, Homo sapiens
cagtaagtttatagg

SEQ ID NO: 1871745 - DNA, 15 bp, Homo sapiens
agtaagtttatagga

SEQ ID NO: 1871746 - DNA, 15 bp, Homo sapiens
gtaagtttataggaa

SEQ ID NO: 1871747 - DNA, 15 bp, Homo sapiens
taagtttataggaat

SEQ ID NO: 1871748 - DNA, 15 bp, Homo sapiens
aagtttataggaatt

SEQ ID NO: 1871749 - DNA, 15 bp, Homo sapiens
agtttataggaattt

SEQ ID NO: 1871750 - DNA, 15 bp, Homo sapiens
gtttataggaattta

SEQ ID NO: 1871751 - DNA, 15 bp, Homo sapiens
tttataggaatttag

SEQ ID NO: 1871752 - DNA, 15 bp, Homo sapiens
ttataggaatttaga

SEQ ID NO: 1871753 - DNA, 15 bp, Homo sapiens
tataggaatttagag

SEQ ID NO: 1871754 - DNA, 15 bp, Homo sapiens
ataggaatttagagg

SEQ ID NO: 1871755 - DNA, 15 bp, Homo sapiens
taggaatttagagga

SEQ ID NO: 1871756 - DNA, 15 bp, Homo sapiens
aggaatttagaggag

SEQ ID NO: 1871757 - DNA, 15 bp, Homo sapiens
ggaatttagaggagg

SEQ ID NO: 1871758 - DNA, 15 bp, Homo sapiens
gaatttagaggagga

SEQ ID NO: 1871759 - DNA, 15 bp, Homo sapiens
aatttagaggaggaa

SEQ ID NO: 1871760 - DNA, 15 bp, Homo sapiens
atttagaggaggaac

SEQ ID NO: 1871761 - DNA, 15 bp, Homo sapiens
tttagaggaggaaca

SEQ ID NO: 1871762 - DNA, 15 bp, Homo sapiens
ttagaggaggaacag

SEQ ID NO: 1871763 - DNA, 15 bp, Homo sapiens
tagaggaggaacaga

SEQ ID NO: 1871764 - DNA, 15 bp, Homo sapiens
agaggaggaacagat

SEQ ID NO: 1871765 - DNA, 15 bp, Homo sapiens
gaggaggaacagatg

SEQ ID NO: 1871766 - DNA, 15 bp, Homo sapiens
aggaggaacagatgg

SEQ ID NO: 1871767 - DNA, 15 bp, Homo sapiens
ggaggaacagatgga

SEQ ID NO: 1871768 - DNA, 15 bp, Homo sapiens
gaggaacagatggag

SEQ ID NO: 1871769 - DNA, 15 bp, Homo sapiens
aggaacagatggagg

SEQ ID NO: 1871770 - DNA, 15 bp, Homo sapiens
ggaacagatggagga

SEQ ID NO: 1871771 - DNA, 15 bp, Homo sapiens
gaacagatggaggaa

SEQ ID NO: 1871772 - DNA, 15 bp, Homo sapiens
aacagatggaggaaa

SEQ ID NO: 1871773 - DNA, 15 bp, Homo sapiens
acagatggaggaaag

SEQ ID NO: 1871774 - DNA, 15 bp, Homo sapiens
cagatggaggaaagt

SEQ ID NO: 1871775 - DNA, 15 bp, Homo sapiens
agatggaggaaagtt

SEQ ID NO: 1871776 - DNA, 15 bp, Homo sapiens
gatggaggaaagttg

SEQ ID NO: 1871777 - DNA, 15 bp, Homo sapiens
atggaggaaagttgg

SEQ ID NO: 1871778 - DNA, 15 bp, Homo sapiens
tggaggaaagttggc

SEQ ID NO: 1871779 - DNA, 15 bp, Homo sapiens
ggaggaaagttggcc

SEQ ID NO: 1871780 - DNA, 15 bp, Homo sapiens
gaggaaagttggcca

SEQ ID NO: 1871781 - DNA, 15 bp, Homo sapiens
aggaaagttggccat

SEQ ID NO: 1871782 - DNA, 15 bp, Homo sapiens
ggaaagttggccatc

SEQ ID NO: 1871783 - DNA, 15 bp, Homo sapiens
gaaagttggccatcc

SEQ ID NO: 1871784 - DNA, 15 bp, Homo sapiens
aaagttggccatccc

SEQ ID NO: 1871785 - DNA, 15 bp, Homo sapiens
aagttggccatccca

SEQ ID NO: 1871786 - DNA, 15 bp, Homo sapiens
agttggccatcccag

SEQ ID NO: 1871787 - DNA, 15 bp, Homo sapiens
gttggccatcccagc

SEQ ID NO: 1871788 - DNA, 15 bp, Homo sapiens
ttggccatcccagcc

SEQ ID NO: 1871789 - DNA, 15 bp, Homo sapiens
tggccatcccagccc

SEQ ID NO: 1871790 - DNA, 15 bp, Homo sapiens
ggccatcccagccca

SEQ ID NO: 1871791 - DNA, 15 bp, Homo sapiens
gccatcccagcccaa

SEQ ID NO: 1871792 - DNA, 15 bp, Homo sapiens
ccatcccagcccaaa

SEQ ID NO: 1871793 - DNA, 15 bp, Homo sapiens
catcccagcccaaag

SEQ ID NO: 1871794 - DNA, 15 bp, Homo sapiens
atcccagcccaaaga

SEQ ID NO: 1871795 - DNA, 15 bp, Homo sapiens
tcccagcccaaagaa

SEQ ID NO: 1871796 - DNA, 15 bp, Homo sapiens
cccagcccaaagaag

SEQ ID NO: 1871797 - DNA, 15 bp, Homo sapiens
ccagcccaaagaaga

SEQ ID NO: 1871798 - DNA, 15 bp, Homo sapiens
cagcccaaagaagat

SEQ ID NO: 1871799 - DNA, 15 bp, Homo sapiens
agcccaaagaagatt

SEQ ID NO: 1871800 - DNA, 15 bp, Homo sapiens
gcccaaagaagattt

SEQ ID NO: 1871801 - DNA, 15 bp, Homo sapiens
cccaaagaagatttc

SEQ ID NO: 1871802 - DNA, 15 bp, Homo sapiens
ccaaagaagatttca

SEQ ID NO: 1871803 - DNA, 15 bp, Homo sapiens
caaagaagatttcag

SEQ ID NO: 1871804 - DNA, 15 bp, Homo sapiens
aaagaagatttcagg

SEQ ID NO: 1871805 - DNA, 15 bp, Homo sapiens
aagaagatttcaggt

SEQ ID NO: 1871806 - DNA, 15 bp, Homo sapiens
agaagatttcaggta

SEQ ID NO: 1871807 - DNA, 15 bp, Homo sapiens
gaagatttcaggtat

SEQ ID NO: 1871808 - DNA, 15 bp, Homo sapiens
aagatttcaggtatc

SEQ ID NO: 1871809 - DNA, 15 bp, Homo sapiens
agatttcaggtatct

SEQ ID NO: 1871810 - DNA, 15 bp, Homo sapiens
gatttcaggtatcta

SEQ ID NO: 1871811 - DNA, 15 bp, Homo sapiens
atttcaggtatctaa

SEQ ID NO: 1871812 - DNA, 15 bp, Homo sapiens
tttcaggtatctaaa

SEQ ID NO: 1871813 - DNA, 15 bp, Homo sapiens
ttcaggtatctaaaa

SEQ ID NO: 1871814 - DNA, 15 bp, Homo sapiens
tcaggtatctaaaat

SEQ ID NO: 1871815 - DNA, 15 bp, Homo sapiens
caggtatctaaaata

SEQ ID NO: 1871816 - DNA, 15 bp, Homo sapiens
aggtatctaaaatat

SEQ ID NO: 1871817 - DNA, 15 bp, Homo sapiens
ggtatctaaaatata

SEQ ID NO: 1871818 - DNA, 15 bp, Homo sapiens
gtatctaaaatataa

SEQ ID NO: 1871819 - DNA, 15 bp, Homo sapiens
tatctaaaatataaa

SEQ ID NO: 1871820 - DNA, 15 bp, Homo sapiens
atctaaaatataaac

SEQ ID NO: 1871821 - DNA, 15 bp, Homo sapiens
tctaaaatataaaca

SEQ ID NO: 1871822 - DNA, 15 bp, Homo sapiens
ctaaaatataaacat

SEQ ID NO: 1871823 - DNA, 15 bp, Homo sapiens
taaaatataaacatg

SEQ ID NO: 1871824 - DNA, 15 bp, Homo sapiens
aaaatataaacatgt

SEQ ID NO: 1871825 - DNA, 15 bp, Homo sapiens
aaatataaacatgtt

SEQ ID NO: 1871826 - DNA, 15 bp, Homo sapiens
aatataaacatgttt

SEQ ID NO: 1871827 - DNA, 15 bp, Homo sapiens
atataaacatgtttc

SEQ ID NO: 1871828 - DNA, 15 bp, Homo sapiens
tataaacatgtttct

SEQ ID NO: 1871829 - DNA, 15 bp, Homo sapiens
ataaacatgtttctc

SEQ ID NO: 1871830 - DNA, 15 bp, Homo sapiens
taaacatgtttctcc

SEQ ID NO: 1871831 - DNA, 15 bp, Homo sapiens
aaacatgtttctcct

SEQ ID NO: 1871832 - DNA, 15 bp, Homo sapiens
aacatgtttctccta

SEQ ID NO: 1871833 - DNA, 15 bp, Homo sapiens
acatgtttctcctag

SEQ ID NO: 1871834 - DNA, 15 bp, Homo sapiens
catgtttctcctaga

SEQ ID NO: 1871835 - DNA, 15 bp, Homo sapiens
atgtttctcctagag

SEQ ID NO: 1871836 - DNA, 15 bp, Homo sapiens
tgtttctcctagagc

SEQ ID NO: 1871837 - DNA, 15 bp, Homo sapiens
gtttctcctagagca

SEQ ID NO: 1871838 - DNA, 15 bp, Homo sapiens
tttctcctagagcag

SEQ ID NO: 1871839 - DNA, 15 bp, Homo sapiens
ttctcctagagcagg

SEQ ID NO: 1871840 - DNA, 15 bp, Homo sapiens
tctcctagagcagga

SEQ ID NO: 1871841 - DNA, 15 bp, Homo sapiens
ctcctagagcaggac

SEQ ID NO: 1871842 - DNA, 15 bp, Homo sapiens
tcctagagcaggact

SEQ ID NO: 1871843 - DNA, 15 bp, Homo sapiens
cctagagcaggacta

SEQ ID NO: 1871844 - DNA, 15 bp, Homo sapiens
ctagagcaggactac

SEQ ID NO: 1871845 - DNA, 15 bp, Homo sapiens
tagagcaggactact

SEQ ID NO: 1871846 - DNA, 15 bp, Homo sapiens
agagcaggactactc

SEQ ID NO: 1871847 - DNA, 15 bp, Homo sapiens
gagcaggactactcg

SEQ ID NO: 1871848 - DNA, 15 bp, Homo sapiens
agcaggactactcga

SEQ ID NO: 1871849 - DNA, 15 bp, Homo sapiens
gcaggactactcgag

SEQ ID NO: 1871850 - DNA, 15 bp, Homo sapiens
caggactactcgagg

SEQ ID NO: 1871851 - DNA, 15 bp, Homo sapiens
aggactactcgaggt

SEQ ID NO: 1871852 - DNA, 15 bp, Homo sapiens
ggactactcgaggtg

SEQ ID NO: 1871853 - DNA, 15 bp, Homo sapiens
gactactcgaggtgc

SEQ ID NO: 1871854 - DNA, 15 bp, Homo sapiens
actactcgaggtgcg

SEQ ID NO: 1871855 - DNA, 15 bp, Homo sapiens
ctactcgaggtgcgg

SEQ ID NO: 1871856 - DNA, 15 bp, Homo sapiens
tactcgaggtgcggt

SEQ ID NO: 1871857 - DNA, 15 bp, Homo sapiens
actcgaggtgcggtc

SEQ ID NO: 1871858 - DNA, 15 bp, Homo sapiens
ctcgaggtgcggtct

SEQ ID NO: 1871859 - DNA, 15 bp, Homo sapiens
tcgaggtgcggtctg

SEQ ID NO: 1871860 - DNA, 15 bp, Homo sapiens
cgaggtgcggtctgc

SEQ ID NO: 1871861 - DNA, 15 bp, Homo sapiens
gaggtgcggtctgca

SEQ ID NO: 1871862 - DNA, 15 bp, Homo sapiens
aggtgcggtctgcaa

SEQ ID NO: 1871863 - DNA, 15 bp, Homo sapiens
ggtgcggtctgcaag

SEQ ID NO: 1871864 - DNA, 15 bp, Homo sapiens
gtgcggtctgcaagc

SEQ ID NO: 1871865 - DNA, 15 bp, Homo sapiens
tgcggtctgcaagcc

SEQ ID NO: 1871866 - DNA, 15 bp, Homo sapiens
gcggtctgcaagcca

SEQ ID NO: 1871867 - DNA, 15 bp, Homo sapiens
cggtctgcaagccag

SEQ ID NO: 1871868 - DNA, 15 bp, Homo sapiens
ggtctgcaagccagc

SEQ ID NO: 1871869 - DNA, 15 bp, Homo sapiens
gtctgcaagccagca

SEQ ID NO: 1871870 - DNA, 15 bp, Homo sapiens
tctgcaagccagcac

SEQ ID NO: 1871871 - DNA, 15 bp, Homo sapiens
ctgcaagccagcaca

SEQ ID NO: 1871872 - DNA, 15 bp, Homo sapiens
tgcaagccagcacat

SEQ ID NO: 1871873 - DNA, 15 bp, Homo sapiens
gcaagccagcacatg

SEQ ID NO: 1871874 - DNA, 15 bp, Homo sapiens
caagccagcacatgg

SEQ ID NO: 1871875 - DNA, 15 bp, Homo sapiens
aagccagcacatggc

SEQ ID NO: 1871876 - DNA, 15 bp, Homo sapiens
agccagcacatggcc

SEQ ID NO: 1871877 - DNA, 15 bp, Homo sapiens
gccagcacatggcct

SEQ ID NO: 1871878 - DNA, 15 bp, Homo sapiens
ccagcacatggcctg

SEQ ID NO: 1871879 - DNA, 15 bp, Homo sapiens
cagcacatggcctgg

SEQ ID NO: 1871880 - DNA, 15 bp, Homo sapiens
agcacatggcctggg

SEQ ID NO: 1871881 - DNA, 15 bp, Homo sapiens
gcacatggcctggga

SEQ ID NO: 1871882 - DNA, 15 bp, Homo sapiens
cacatggcctgggag

SEQ ID NO: 1871883 - DNA, 15 bp, Homo sapiens
acatggcctgggagc

SEQ ID NO: 1871884 - DNA, 15 bp, Homo sapiens
catggcctgggagct

SEQ ID NO: 1871885 - DNA, 15 bp, Homo sapiens
atggcctgggagctt

SEQ ID NO: 1871886 - DNA, 15 bp, Homo sapiens
tggcctgggagctta

SEQ ID NO: 1871887 - DNA, 15 bp, Homo sapiens
ggcctgggagcttaa

SEQ ID NO: 1871888 - DNA, 15 bp, Homo sapiens
gcctgggagcttaat

SEQ ID NO: 1871889 - DNA, 15 bp, Homo sapiens
cctgggagcttaata

SEQ ID NO: 1871890 - DNA, 15 bp, Homo sapiens
ctgggagcttaatag

SEQ ID NO: 1871891 - DNA, 15 bp, Homo sapiens
tgggagcttaataga

SEQ ID NO: 1871892 - DNA, 15 bp, Homo sapiens
gggagcttaatagaa

SEQ ID NO: 1871893 - DNA, 15 bp, Homo sapiens
ggagcttaatagaaa

SEQ ID NO: 1871894 - DNA, 15 bp, Homo sapiens
gagcttaatagaaat

SEQ ID NO: 1871895 - DNA, 15 bp, Homo sapiens
agcttaatagaaata

SEQ ID NO: 1871896 - DNA, 15 bp, Homo sapiens
gcttaatagaaataa

SEQ ID NO: 1871897 - DNA, 15 bp, Homo sapiens
cttaatagaaataaa

SEQ ID NO: 1871898 - DNA, 15 bp, Homo sapiens
ttaatagaaataaaa

SEQ ID NO: 1871899 - DNA, 15 bp, Homo sapiens
taatagaaataaaaa

SEQ ID NO: 1871900 - DNA, 15 bp, Homo sapiens
aatagaaataaaaat

SEQ ID NO: 1871901 - DNA, 15 bp, Homo sapiens
atagaaataaaaatg

SEQ ID NO: 1871902 - DNA, 15 bp, Homo sapiens
tagaaataaaaatgt

SEQ ID NO: 1871903 - DNA, 15 bp, Homo sapiens
agaaataaaaatgtt

SEQ ID NO: 1871904 - DNA, 15 bp, Homo sapiens
gaaataaaaatgttg

SEQ ID NO: 1871905 - DNA, 15 bp, Homo sapiens
aaataaaaatgttgg

SEQ ID NO: 1871906 - DNA, 15 bp, Homo sapiens
aataaaaatgttgga

SEQ ID NO: 1871907 - DNA, 15 bp, Homo sapiens
ataaaaatgttggag

SEQ ID NO: 1871908 - DNA, 15 bp, Homo sapiens
taaaaatgttggagt

SEQ ID NO: 1871909 - DNA, 15 bp, Homo sapiens
aaaaatgttggagtt

SEQ ID NO: 1871910 - DNA, 15 bp, Homo sapiens
aaaatgttggagttc

SEQ ID NO: 1871911 - DNA, 15 bp, Homo sapiens
aaatgttggagttca

SEQ ID NO: 1871912 - DNA, 15 bp, Homo sapiens
aatgttggagttcaa

SEQ ID NO: 1871913 - DNA, 15 bp, Homo sapiens
atgttggagttcaac

SEQ ID NO: 1871914 - DNA, 15 bp, Homo sapiens
tgttggagttcaacc

SEQ ID NO: 1871915 - DNA, 15 bp, Homo sapiens
gttggagttcaaccc

SEQ ID NO: 1871916 - DNA, 15 bp, Homo sapiens
ttggagttcaaccct

SEQ ID NO: 1871917 - DNA, 15 bp, Homo sapiens
tggagttcaacccta

SEQ ID NO: 1871918 - DNA, 15 bp, Homo sapiens
ggagttcaaccctaa

SEQ ID NO: 1871919 - DNA, 15 bp, Homo sapiens
gagttcaaccctaaa

SEQ ID NO: 1871920 - DNA, 15 bp, Homo sapiens
agttcaaccctaaac

SEQ ID NO: 1871921 - DNA, 15 bp, Homo sapiens
gttcaaccctaaacc

SEQ ID NO: 1871922 - DNA, 15 bp, Homo sapiens
ttcaaccctaaacct

SEQ ID NO: 1871923 - DNA, 15 bp, Homo sapiens
tcaaccctaaacctg

SEQ ID NO: 1871924 - DNA, 15 bp, Homo sapiens
caaccctaaacctgg

SEQ ID NO: 1871925 - DNA, 15 bp, Homo sapiens
aaccctaaacctgga

SEQ ID NO: 1871926 - DNA, 15 bp, Homo sapiens
accctaaacctggag

SEQ ID NO: 1871927 - DNA, 15 bp, Homo sapiens
ccctaaacctggaga

SEQ ID NO: 1871928 - DNA, 15 bp, Homo sapiens
cctaaacctggagaa

SEQ ID NO: 1871929 - DNA, 15 bp, Homo sapiens
ctaaacctggagaat

SEQ ID NO: 1871930 - DNA, 15 bp, Homo sapiens
taaacctggagaatc

SEQ ID NO: 1871931 - DNA, 15 bp, Homo sapiens
aaacctggagaatct

SEQ ID NO: 1871932 - DNA, 15 bp, Homo sapiens
aacctggagaatctc

SEQ ID NO: 1871933 - DNA, 15 bp, Homo sapiens
acctggagaatctct

SEQ ID NO: 1871934 - DNA, 15 bp, Homo sapiens
cctggagaatctctg

SEQ ID NO: 1871935 - DNA, 15 bp, Homo sapiens
ctggagaatctctga

SEQ ID NO: 1871936 - DNA, 15 bp, Homo sapiens
tggagaatctctgaa

SEQ ID NO: 1871937 - DNA, 15 bp, Homo sapiens
ggagaatctctgaaa

SEQ ID NO: 1871938 - DNA, 15 bp, Homo sapiens
gagaatctctgaaag

SEQ ID NO: 1871939 - DNA, 15 bp, Homo sapiens
agaatctctgaaagg

SEQ ID NO: 1871940 - DNA, 15 bp, Homo sapiens
gaatctctgaaaggt

SEQ ID NO: 1871941 - DNA, 15 bp, Homo sapiens
aatctctgaaaggta

SEQ ID NO: 1871942 - DNA, 15 bp, Homo sapiens
atctctgaaaggtag

SEQ ID NO: 1871943 - DNA, 15 bp, Homo sapiens
tctctgaaaggtagg

SEQ ID NO: 1871944 - DNA, 15 bp, Homo sapiens
ctctgaaaggtaggg

SEQ ID NO: 1871945 - DNA, 15 bp, Homo sapiens
tctgaaaggtagggc

SEQ ID NO: 1871946 - DNA, 15 bp, Homo sapiens
ctgaaaggtagggct

SEQ ID NO: 1871947 - DNA, 15 bp, Homo sapiens
tgaaaggtagggctg

SEQ ID NO: 1871948 - DNA, 15 bp, Homo sapiens
gaaaggtagggctga

SEQ ID NO: 1871949 - DNA, 15 bp, Homo sapiens
aaaggtagggctgag

SEQ ID NO: 1871950 - DNA, 15 bp, Homo sapiens
aaggtagggctgagg

SEQ ID NO: 1871951 - DNA, 15 bp, Homo sapiens
aggtagggctgagga

SEQ ID NO: 1871952 - DNA, 15 bp, Homo sapiens
ggtagggctgaggaa

SEQ ID NO: 1871953 - DNA, 15 bp, Homo sapiens
gtagggctgaggaat

SEQ ID NO: 1871954 - DNA, 15 bp, Homo sapiens
tagggctgaggaatc

SEQ ID NO: 1871955 - DNA, 15 bp, Homo sapiens
agggctgaggaatct

SEQ ID NO: 1871956 - DNA, 15 bp, Homo sapiens
gggctgaggaatctg

SEQ ID NO: 1871957 - DNA, 15 bp, Homo sapiens
ggctgaggaatctgt

SEQ ID NO: 1871958 - DNA, 15 bp, Homo sapiens
ctccaaaaaacaaaa

SEQ ID NO: 1871959 - DNA, 15 bp, Homo sapiens
tccaaaaaacaaaac

SEQ ID NO: 1871960 - DNA, 15 bp, Homo sapiens
ccaaaaaacaaaaca

SEQ ID NO: 1871961 - DNA, 15 bp, Homo sapiens
acaaaacaaaaactg

SEQ ID NO: 1871962 - DNA, 15 bp, Homo sapiens
caaaacaaaaactgg

SEQ ID NO: 1871963 - DNA, 15 bp, Homo sapiens
aaaacaaaaactggc

SEQ ID NO: 1871964 - DNA, 15 bp, Homo sapiens
aaacaaaaactggct

SEQ ID NO: 1871965 - DNA, 15 bp, Homo sapiens
aacaaaaactggctg

SEQ ID NO: 1871966 - DNA, 15 bp, Homo sapiens
acaaaaactggctgc

SEQ ID NO: 1871967 - DNA, 15 bp, Homo sapiens
caaaaactggctgct

SEQ ID NO: 1871968 - DNA, 15 bp, Homo sapiens
aaaaactggctgctc

SEQ ID NO: 1871969 - DNA, 15 bp, Homo sapiens
aaaactggctgctca

SEQ ID NO: 1871970 - DNA, 15 bp, Homo sapiens
aaactggctgctcat

SEQ ID NO: 1871971 - DNA, 15 bp, Homo sapiens
aactggctgctcatg

SEQ ID NO: 1871972 - DNA, 15 bp, Homo sapiens
actggctgctcatgc

SEQ ID NO: 1871973 - DNA, 15 bp, Homo sapiens
ctggctgctcatgct

SEQ ID NO: 1871974 - DNA, 15 bp, Homo sapiens
tggctgctcatgctt

SEQ ID NO: 1871975 - DNA, 15 bp, Homo sapiens
ggctgctcatgcttc

SEQ ID NO: 1871976 - DNA, 15 bp, Homo sapiens
gctgctcatgcttcc

SEQ ID NO: 1871977 - DNA, 15 bp, Homo sapiens
ctgctcatgcttcca

SEQ ID NO: 1871978 - DNA, 15 bp, Homo sapiens
tgctcatgcttccat

SEQ ID NO: 1871979 - DNA, 15 bp, Homo sapiens
gctcatgcttccatt

SEQ ID NO: 1871980 - DNA, 15 bp, Homo sapiens
ctcatgcttccattg

SEQ ID NO: 1871981 - DNA, 15 bp, Homo sapiens
tcatgcttccattgc

SEQ ID NO: 1871982 - DNA, 15 bp, Homo sapiens
catgcttccattgct

SEQ ID NO: 1871983 - DNA, 15 bp, Homo sapiens
atgcttccattgcta

SEQ ID NO: 1871984 - DNA, 15 bp, Homo sapiens
tgcttccattgctag

SEQ ID NO: 1871985 - DNA, 15 bp, Homo sapiens
gcttccattgctagg

SEQ ID NO: 1871986 - DNA, 15 bp, Homo sapiens
cttccattgctagga

SEQ ID NO: 1871987 - DNA, 15 bp, Homo sapiens
ttccattgctaggat

SEQ ID NO: 1871988 - DNA, 15 bp, Homo sapiens
tccattgctaggatt

SEQ ID NO: 1871989 - DNA, 15 bp, Homo sapiens
ccattgctaggattc

SEQ ID NO: 1871990 - DNA, 15 bp, Homo sapiens
cattgctaggattca

SEQ ID NO: 1871991 - DNA, 15 bp, Homo sapiens
attgctaggattcac

SEQ ID NO: 1871992 - DNA, 15 bp, Homo sapiens
ttgctaggattcacc

SEQ ID NO: 1871993 - DNA, 15 bp, Homo sapiens
tgctaggattcacct

SEQ ID NO: 1871994 - DNA, 15 bp, Homo sapiens
gctaggattcacctt

SEQ ID NO: 1871995 - DNA, 15 bp, Homo sapiens
ctaggattcaccttt

SEQ ID NO: 1871996 - DNA, 15 bp, Homo sapiens
taggattcacctttg

SEQ ID NO: 1871997 - DNA, 15 bp, Homo sapiens
aggattcacctttgt

SEQ ID NO: 1871998 - DNA, 15 bp, Homo sapiens
ggattcacctttgta

SEQ ID NO: 1871999 - DNA, 15 bp, Homo sapiens
gattcacctttgtat

SEQ ID NO: 1872000 - DNA, 15 bp, Homo sapiens
attcacctttgtatc

SEQ ID NO: 1872001 - DNA, 15 bp, Homo sapiens
ttcacctttgtatcc

SEQ ID NO: 1872002 - DNA, 15 bp, Homo sapiens
tcacctttgtatccc

SEQ ID NO: 1872003 - DNA, 15 bp, Homo sapiens
cacctttgtatccct

SEQ ID NO: 1872004 - DNA, 15 bp, Homo sapiens
acctttgtatcccta

SEQ ID NO: 1872005 - DNA, 15 bp, Homo sapiens
cctttgtatccctaa

SEQ ID NO: 1872006 - DNA, 15 bp, Homo sapiens
ctttgtatccctaac

SEQ ID NO: 1872007 - DNA, 15 bp, Homo sapiens
tttgtatccctaaca

SEQ ID NO: 1872008 - DNA, 15 bp, Homo sapiens
ttgtatccctaacat

SEQ ID NO: 1872009 - DNA, 15 bp, Homo sapiens
tgtatccctaacatc

SEQ ID NO: 1872010 - DNA, 15 bp, Homo sapiens
gtatccctaacatcc

SEQ ID NO: 1872011 - DNA, 15 bp, Homo sapiens
tatccctaacatcca

SEQ ID NO: 1872012 - DNA, 15 bp, Homo sapiens
atccctaacatccat

SEQ ID NO: 1872013 - DNA, 15 bp, Homo sapiens
tccctaacatccatc

SEQ ID NO: 1872014 - DNA, 15 bp, Homo sapiens
ccctaacatccatca

SEQ ID NO: 1872015 - DNA, 15 bp, Homo sapiens
cctaacatccatcaa

SEQ ID NO: 1872016 - DNA, 15 bp, Homo sapiens
ctaacatccatcaat

SEQ ID NO: 1872017 - DNA, 15 bp, Homo sapiens
taacatccatcaatg

SEQ ID NO: 1872018 - DNA, 15 bp, Homo sapiens
aacatccatcaatgt

SEQ ID NO: 1872019 - DNA, 15 bp, Homo sapiens
acatccatcaatgtc

SEQ ID NO: 1872020 - DNA, 15 bp, Homo sapiens
catccatcaatgtca

SEQ ID NO: 1872021 - DNA, 15 bp, Homo sapiens
atccatcaatgtcat

SEQ ID NO: 1872022 - DNA, 15 bp, Homo sapiens
tccatcaatgtcata

SEQ ID NO: 1872023 - DNA, 15 bp, Homo sapiens
ccatcaatgtcatac

SEQ ID NO: 1872024 - DNA, 15 bp, Homo sapiens
catcaatgtcatact

SEQ ID NO: 1872025 - DNA, 15 bp, Homo sapiens
atcaatgtcatactt

SEQ ID NO: 1872026 - DNA, 15 bp, Homo sapiens
tcaatgtcatactta

SEQ ID NO: 1872027 - DNA, 15 bp, Homo sapiens
caatgtcatacttat

SEQ ID NO: 1872028 - DNA, 15 bp, Homo sapiens
aatgtcatacttata

SEQ ID NO: 1872029 - DNA, 15 bp, Homo sapiens
atgtcatacttatag

SEQ ID NO: 1872030 - DNA, 15 bp, Homo sapiens
tgtcatacttatagt

SEQ ID NO: 1872031 - DNA, 15 bp, Homo sapiens
gtcatacttatagta

SEQ ID NO: 1872032 - DNA, 15 bp, Homo sapiens
tcatacttatagtag

SEQ ID NO: 1872033 - DNA, 15 bp, Homo sapiens
catacttatagtaga

SEQ ID NO: 1872034 - DNA, 15 bp, Homo sapiens
atacttatagtagat

SEQ ID NO: 1872035 - DNA, 15 bp, Homo sapiens
tacttatagtagatg

SEQ ID NO: 1872036 - DNA, 15 bp, Homo sapiens
acttatagtagatgg

SEQ ID NO: 1872037 - DNA, 15 bp, Homo sapiens
cttatagtagatggc

SEQ ID NO: 1872038 - DNA, 15 bp, Homo sapiens
ttatagtagatggcc

SEQ ID NO: 1872039 - DNA, 15 bp, Homo sapiens
tatagtagatggccc

SEQ ID NO: 1872040 - DNA, 15 bp, Homo sapiens
gctctgacttctatt

SEQ ID NO: 1872041 - DNA, 15 bp, Homo sapiens
ctctgacttctatta

SEQ ID NO: 1872042 - DNA, 15 bp, Homo sapiens
tctgacttctattat

SEQ ID NO: 1872043 - DNA, 15 bp, Homo sapiens
ctgacttctattatt

SEQ ID NO: 1872044 - DNA, 15 bp, Homo sapiens
tgacttctattattt

SEQ ID NO: 1872045 - DNA, 15 bp, Homo sapiens
gacttctattattta

SEQ ID NO: 1872046 - DNA, 15 bp, Homo sapiens
acttctattatttac

SEQ ID NO: 1872047 - DNA, 15 bp, Homo sapiens
cttctattatttaca

SEQ ID NO: 1872048 - DNA, 15 bp, Homo sapiens
ttctattatttacat

SEQ ID NO: 1872049 - DNA, 15 bp, Homo sapiens
tctattatttacatc

SEQ ID NO: 1872050 - DNA, 15 bp, Homo sapiens
ctattatttacatct

SEQ ID NO: 1872051 - DNA, 15 bp, Homo sapiens
tattatttacatctg

SEQ ID NO: 1872052 - DNA, 15 bp, Homo sapiens
attatttacatctga

SEQ ID NO: 1872053 - DNA, 15 bp, Homo sapiens
ttatttacatctgaa

SEQ ID NO: 1872054 - DNA, 15 bp, Homo sapiens
tatttacatctgaaa

SEQ ID NO: 1872055 - DNA, 15 bp, Homo sapiens
atttacatctgaaag

SEQ ID NO: 1872056 - DNA, 15 bp, Homo sapiens
tttacatctgaaaga

SEQ ID NO: 1872057 - DNA, 15 bp, Homo sapiens
ttacatctgaaagaa

SEQ ID NO: 1872058 - DNA, 15 bp, Homo sapiens
tacatctgaaagaaa

SEQ ID NO: 1872059 - DNA, 15 bp, Homo sapiens
acatctgaaagaaac

SEQ ID NO: 1872060 - DNA, 15 bp, Homo sapiens
catctgaaagaaaca

SEQ ID NO: 1872061 - DNA, 15 bp, Homo sapiens
atctgaaagaaacat

SEQ ID NO: 1872062 - DNA, 15 bp, Homo sapiens
tctgaaagaaacatt

SEQ ID NO: 1872063 - DNA, 15 bp, Homo sapiens
ctgaaagaaacatta

SEQ ID NO: 1872064 - DNA, 15 bp, Homo sapiens
tgaaagaaacattag

SEQ ID NO: 1872065 - DNA, 15 bp, Homo sapiens
gaaagaaacattagg

SEQ ID NO: 1872066 - DNA, 15 bp, Homo sapiens
aaagaaacattaggc

SEQ ID NO: 1872067 - DNA, 15 bp, Homo sapiens
aagaaacattaggct

SEQ ID NO: 1872068 - DNA, 15 bp, Homo sapiens
agaaacattaggcta

SEQ ID NO: 1872069 - DNA, 15 bp, Homo sapiens
gaaacattaggctaa

SEQ ID NO: 1872070 - DNA, 15 bp, Homo sapiens
aaacattaggctaaa

SEQ ID NO: 1872071 - DNA, 15 bp, Homo sapiens
aacattaggctaaaa

SEQ ID NO: 1872072 - DNA, 15 bp, Homo sapiens
acattaggctaaaat

SEQ ID NO: 1872073 - DNA, 15 bp, Homo sapiens
cattaggctaaaata

SEQ ID NO: 1872074 - DNA, 15 bp, Homo sapiens
attaggctaaaatat

SEQ ID NO: 1872075 - DNA, 15 bp, Homo sapiens
ttaggctaaaatata

SEQ ID NO: 1872076 - DNA, 15 bp, Homo sapiens
taggctaaaatataa

SEQ ID NO: 1872077 - DNA, 15 bp, Homo sapiens
aggctaaaatataaa

SEQ ID NO: 1872078 - DNA, 15 bp, Homo sapiens
ggctaaaatataaaa

SEQ ID NO: 1872079 - DNA, 15 bp, Homo sapiens
gctaaaatataaaat

SEQ ID NO: 1872080 - DNA, 15 bp, Homo sapiens
ctaaaatataaaata

SEQ ID NO: 1872081 - DNA, 15 bp, Homo sapiens
taaaatataaaataa

SEQ ID NO: 1872082 - DNA, 15 bp, Homo sapiens
aaaatataaaataaa

SEQ ID NO: 1872083 - DNA, 15 bp, Homo sapiens
aaatataaaataaaa

SEQ ID NO: 1872084 - DNA, 15 bp, Homo sapiens
atataaaataaaatt

SEQ ID NO: 1872085 - DNA, 15 bp, Homo sapiens
tataaaataaaattt

SEQ ID NO: 1872086 - DNA, 15 bp, Homo sapiens
ataaaataaaatttt

SEQ ID NO: 1872087 - DNA, 15 bp, Homo sapiens
taaaataaaatttta

SEQ ID NO: 1872088 - DNA, 15 bp, Homo sapiens
aaaataaaattttac

SEQ ID NO: 1872089 - DNA, 15 bp, Homo sapiens
aaataaaattttact

SEQ ID NO: 1872090 - DNA, 15 bp, Homo sapiens
aataaaattttacta

SEQ ID NO: 1872091 - DNA, 15 bp, Homo sapiens
ataaaattttactaa

SEQ ID NO: 1872092 - DNA, 15 bp, Homo sapiens
taaaattttactaag

SEQ ID NO: 1872093 - DNA, 15 bp, Homo sapiens
aaaattttactaagc

SEQ ID NO: 1872094 - DNA, 15 bp, Homo sapiens
aaattttactaagcg

SEQ ID NO: 1872095 - DNA, 15 bp, Homo sapiens
aattttactaagcga

SEQ ID NO: 1872096 - DNA, 15 bp, Homo sapiens
attttactaagcgat

SEQ ID NO: 1872097 - DNA, 15 bp, Homo sapiens
ttttactaagcgata

SEQ ID NO: 1872098 - DNA, 15 bp, Homo sapiens
tttactaagcgataa

SEQ ID NO: 1872099 - DNA, 15 bp, Homo sapiens
ttactaagcgataaa

SEQ ID NO: 1872100 - DNA, 15 bp, Homo sapiens
tactaagcgataaaa

SEQ ID NO: 1872101 - DNA, 15 bp, Homo sapiens
actaagcgataaaac

SEQ ID NO: 1872102 - DNA, 15 bp, Homo sapiens
ctaagcgataaaaca

SEQ ID NO: 1872103 - DNA, 15 bp, Homo sapiens
taagcgataaaacat

SEQ ID NO: 1872104 - DNA, 15 bp, Homo sapiens
aagcgataaaacatt

SEQ ID NO: 1872105 - DNA, 15 bp, Homo sapiens
agcgataaaacattt

SEQ ID NO: 1872106 - DNA, 15 bp, Homo sapiens
gcgataaaacatttg

SEQ ID NO: 1872107 - DNA, 15 bp, Homo sapiens
cgataaaacatttga

SEQ ID NO: 1872108 - DNA, 15 bp, Homo sapiens
gataaaacatttgag

SEQ ID NO: 1872109 - DNA, 15 bp, Homo sapiens
ataaaacatttgagc

SEQ ID NO: 1872110 - DNA, 15 bp, Homo sapiens
taaaacatttgagct

SEQ ID NO: 1872111 - DNA, 15 bp, Homo sapiens
aaaacatttgagctt

SEQ ID NO: 1872112 - DNA, 15 bp, Homo sapiens
aaacatttgagcttt

SEQ ID NO: 1872113 - DNA, 15 bp, Homo sapiens
aacatttgagctttc

SEQ ID NO: 1872114 - DNA, 15 bp, Homo sapiens
acatttgagctttct

SEQ ID NO: 1872115 - DNA, 15 bp, Homo sapiens
catttgagctttctt

SEQ ID NO: 1872116 - DNA, 15 bp, Homo sapiens
atttgagctttcttt

SEQ ID NO: 1872117 - DNA, 15 bp, Homo sapiens
tttgagctttctttt

SEQ ID NO: 1872118 - DNA, 15 bp, Homo sapiens
ttgagctttcttttt

SEQ ID NO: 1872119 - DNA, 15 bp, Homo sapiens
tgagctttctttttt

SEQ ID NO: 1872120 - DNA, 15 bp, Homo sapiens
gagctttcttttttc

SEQ ID NO: 1872121 - DNA, 15 bp, Homo sapiens
agctttcttttttcc

SEQ ID NO: 1872122 - DNA, 15 bp, Homo sapiens
gctttcttttttccc

SEQ ID NO: 1872123 - DNA, 15 bp, Homo sapiens
ctttcttttttcccc

SEQ ID NO: 1872124 - DNA, 15 bp, Homo sapiens
tttcttttttcccca

SEQ ID NO: 1872125 - DNA, 15 bp, Homo sapiens
ttcttttttccccat

SEQ ID NO: 1872126 - DNA, 15 bp, Homo sapiens
tcttttttccccatc

SEQ ID NO: 1872127 - DNA, 15 bp, Homo sapiens
cttttttccccatct

SEQ ID NO: 1872128 - DNA, 15 bp, Homo sapiens
ttttttccccatcta

SEQ ID NO: 1872129 - DNA, 15 bp, Homo sapiens
tttttccccatctaa

SEQ ID NO: 1872130 - DNA, 15 bp, Homo sapiens
ttttccccatctaag

SEQ ID NO: 1872131 - DNA, 15 bp, Homo sapiens
tttccccatctaaga

SEQ ID NO: 1872132 - DNA, 15 bp, Homo sapiens
ttccccatctaagac

SEQ ID NO: 1872133 - DNA, 15 bp, Homo sapiens
tccccatctaagacg

SEQ ID NO: 1872134 - DNA, 15 bp, Homo sapiens
ccccatctaagacgc

SEQ ID NO: 1872135 - DNA, 15 bp, Homo sapiens
cccatctaagacgca

SEQ ID NO: 1872136 - DNA, 15 bp, Homo sapiens
ccatctaagacgcag

SEQ ID NO: 1872137 - DNA, 15 bp, Homo sapiens
catctaagacgcagg

SEQ ID NO: 1872138 - DNA, 15 bp, Homo sapiens
atctaagacgcaggg

SEQ ID NO: 1872139 - DNA, 15 bp, Homo sapiens
tctaagacgcagggt

SEQ ID NO: 1872140 - DNA, 15 bp, Homo sapiens
ctaagacgcagggtg

SEQ ID NO: 1872141 - DNA, 15 bp, Homo sapiens
taagacgcagggtgt

SEQ ID NO: 1872142 - DNA, 15 bp, Homo sapiens
aagacgcagggtgta

SEQ ID NO: 1872143 - DNA, 15 bp, Homo sapiens
agacgcagggtgtaa

SEQ ID NO: 1872144 - DNA, 15 bp, Homo sapiens
gacgcagggtgtaaa

SEQ ID NO: 1872145 - DNA, 15 bp, Homo sapiens
acgcagggtgtaaaa

SEQ ID NO: 1872146 - DNA, 15 bp, Homo sapiens
cgcagggtgtaaaac

SEQ ID NO: 1872147 - DNA, 15 bp, Homo sapiens
gcagggtgtaaaact

SEQ ID NO: 1872148 - DNA, 15 bp, Homo sapiens
cagggtgtaaaacta

SEQ ID NO: 1872149 - DNA, 15 bp, Homo sapiens
agggtgtaaaactaa

SEQ ID NO: 1872150 - DNA, 15 bp, Homo sapiens
gggtgtaaaactaaa

SEQ ID NO: 1872151 - DNA, 15 bp, Homo sapiens
ggtgtaaaactaaac

SEQ ID NO: 1872152 - DNA, 15 bp, Homo sapiens
gtgtaaaactaaaca

SEQ ID NO: 1872153 - DNA, 15 bp, Homo sapiens
tgtaaaactaaacat

SEQ ID NO: 1872154 - DNA, 15 bp, Homo sapiens
gtaaaactaaacatg

SEQ ID NO: 1872155 - DNA, 15 bp, Homo sapiens
taaaactaaacatgc

SEQ ID NO: 1872156 - DNA, 15 bp, Homo sapiens
aaaactaaacatgca

SEQ ID NO: 1872157 - DNA, 15 bp, Homo sapiens
aaactaaacatgcag

SEQ ID NO: 1872158 - DNA, 15 bp, Homo sapiens
aactaaacatgcagt

SEQ ID NO: 1872159 - DNA, 15 bp, Homo sapiens
actaaacatgcagtt

SEQ ID NO: 1872160 - DNA, 15 bp, Homo sapiens
ctaaacatgcagtta

SEQ ID NO: 1872161 - DNA, 15 bp, Homo sapiens
taaacatgcagttat

SEQ ID NO: 1872162 - DNA, 15 bp, Homo sapiens
aaacatgcagttatc

SEQ ID NO: 1872163 - DNA, 15 bp, Homo sapiens
aacatgcagttatct

SEQ ID NO: 1872164 - DNA, 15 bp, Homo sapiens
acatgcagttatctg

SEQ ID NO: 1872165 - DNA, 15 bp, Homo sapiens
catgcagttatctga

SEQ ID NO: 1872166 - DNA, 15 bp, Homo sapiens
atgcagttatctgat

SEQ ID NO: 1872167 - DNA, 15 bp, Homo sapiens
tgcagttatctgata

SEQ ID NO: 1872168 - DNA, 15 bp, Homo sapiens
gcagttatctgatat

SEQ ID NO: 1872169 - DNA, 15 bp, Homo sapiens
cagttatctgatatc

SEQ ID NO: 1872170 - DNA, 15 bp, Homo sapiens
agttatctgatatca

SEQ ID NO: 1872171 - DNA, 15 bp, Homo sapiens
gttatctgatatcat

SEQ ID NO: 1872172 - DNA, 15 bp, Homo sapiens
ttatctgatatcatt

SEQ ID NO: 1872173 - DNA, 15 bp, Homo sapiens
tatctgatatcattg

SEQ ID NO: 1872174 - DNA, 15 bp, Homo sapiens
atctgatatcattga

SEQ ID NO: 1872175 - DNA, 15 bp, Homo sapiens
tctgatatcattgat

SEQ ID NO: 1872176 - DNA, 15 bp, Homo sapiens
ctgatatcattgata

SEQ ID NO: 1872177 - DNA, 15 bp, Homo sapiens
tgatatcattgataa

SEQ ID NO: 1872178 - DNA, 15 bp, Homo sapiens
gatatcattgataat

SEQ ID NO: 1872179 - DNA, 15 bp, Homo sapiens
atatcattgataatg

SEQ ID NO: 1872180 - DNA, 15 bp, Homo sapiens
tatcattgataatgg

SEQ ID NO: 1872181 - DNA, 15 bp, Homo sapiens
atcattgataatggg

SEQ ID NO: 1872182 - DNA, 15 bp, Homo sapiens
tcattgataatgggc

SEQ ID NO: 1872183 - DNA, 15 bp, Homo sapiens
cattgataatgggcg

SEQ ID NO: 1872184 - DNA, 15 bp, Homo sapiens
attgataatgggcga

SEQ ID NO: 1872185 - DNA, 15 bp, Homo sapiens
ttgataatgggcgaa

SEQ ID NO: 1872186 - DNA, 15 bp, Homo sapiens
tgataatgggcgaat

SEQ ID NO: 1872187 - DNA, 15 bp, Homo sapiens
gataatgggcgaatc

SEQ ID NO: 1872188 - DNA, 15 bp, Homo sapiens
ataatgggcgaatct

SEQ ID NO: 1872189 - DNA, 15 bp, Homo sapiens
taatgggcgaatctt

SEQ ID NO: 1872190 - DNA, 15 bp, Homo sapiens
aatgggcgaatcttt

SEQ ID NO: 1872191 - DNA, 15 bp, Homo sapiens
atgggcgaatctttt

SEQ ID NO: 1872192 - DNA, 15 bp, Homo sapiens
tgggcgaatcttttt

SEQ ID NO: 1872193 - DNA, 15 bp, Homo sapiens
gggcgaatctttttt

SEQ ID NO: 1872194 - DNA, 15 bp, Homo sapiens
ggcgaatcttttttt

SEQ ID NO: 1872195 - DNA, 15 bp, Homo sapiens
gcgaatctttttttc

SEQ ID NO: 1872196 - DNA, 15 bp, Homo sapiens
cgaatctttttttcc

SEQ ID NO: 1872197 - DNA, 15 bp, Homo sapiens
gaatctttttttcca

SEQ ID NO: 1872198 - DNA, 15 bp, Homo sapiens
aatctttttttccag

SEQ ID NO: 1872199 - DNA, 15 bp, Homo sapiens
atctttttttccaga

SEQ ID NO: 1872200 - DNA, 15 bp, Homo sapiens
tctttttttccagaa

SEQ ID NO: 1872201 - DNA, 15 bp, Homo sapiens
ctttttttccagaaa

SEQ ID NO: 1872202 - DNA, 15 bp, Homo sapiens
tttttttccagaaac

SEQ ID NO: 1872203 - DNA, 15 bp, Homo sapiens
ttttttccagaaact

SEQ ID NO: 1872204 - DNA, 15 bp, Homo sapiens
tttttccagaaactg

SEQ ID NO: 1872205 - DNA, 15 bp, Homo sapiens
ttttccagaaactgg

SEQ ID NO: 1872206 - DNA, 15 bp, Homo sapiens
tttccagaaactggt

SEQ ID NO: 1872207 - DNA, 15 bp, Homo sapiens
ttccagaaactggta

SEQ ID NO: 1872208 - DNA, 15 bp, Homo sapiens
tccagaaactggtaa

SEQ ID NO: 1872209 - DNA, 15 bp, Homo sapiens
ccagaaactggtaat

SEQ ID NO: 1872210 - DNA, 15 bp, Homo sapiens
cagaaactggtaatt

SEQ ID NO: 1872211 - DNA, 15 bp, Homo sapiens
agaaactggtaattt

SEQ ID NO: 1872212 - DNA, 15 bp, Homo sapiens
gaaactggtaattta

SEQ ID NO: 1872213 - DNA, 15 bp, Homo sapiens
aaactggtaatttag

SEQ ID NO: 1872214 - DNA, 15 bp, Homo sapiens
aactggtaatttaga

SEQ ID NO: 1872215 - DNA, 15 bp, Homo sapiens
actggtaatttagaa

SEQ ID NO: 1872216 - DNA, 15 bp, Homo sapiens
ctggtaatttagaat

SEQ ID NO: 1872217 - DNA, 15 bp, Homo sapiens
tggtaatttagaatc

SEQ ID NO: 1872218 - DNA, 15 bp, Homo sapiens
ggtaatttagaatct

SEQ ID NO: 1872219 - DNA, 15 bp, Homo sapiens
gtaatttagaatctt

SEQ ID NO: 1872220 - DNA, 15 bp, Homo sapiens
taatttagaatcttc

SEQ ID NO: 1872221 - DNA, 15 bp, Homo sapiens
aatttagaatcttct

SEQ ID NO: 1872222 - DNA, 15 bp, Homo sapiens
atttagaatcttctc

SEQ ID NO: 1872223 - DNA, 15 bp, Homo sapiens
tttagaatcttctca

SEQ ID NO: 1872224 - DNA, 15 bp, Homo sapiens
ttagaatcttctcat

SEQ ID NO: 1872225 - DNA, 15 bp, Homo sapiens
tagaatcttctcata

SEQ ID NO: 1872226 - DNA, 15 bp, Homo sapiens
agaatcttctcataa

SEQ ID NO: 1872227 - DNA, 15 bp, Homo sapiens
gaatcttctcataaa

SEQ ID NO: 1872228 - DNA, 15 bp, Homo sapiens
aatcttctcataaag

SEQ ID NO: 1872229 - DNA, 15 bp, Homo sapiens
atcttctcataaagc

SEQ ID NO: 1872230 - DNA, 15 bp, Homo sapiens
tcttctcataaagca

SEQ ID NO: 1872231 - DNA, 15 bp, Homo sapiens
cttctcataaagcac

SEQ ID NO: 1872232 - DNA, 15 bp, Homo sapiens
ttctcataaagcaca

SEQ ID NO: 1872233 - DNA, 15 bp, Homo sapiens
tctcataaagcacac

SEQ ID NO: 1872234 - DNA, 15 bp, Homo sapiens
ctcataaagcacacc

SEQ ID NO: 1872235 - DNA, 15 bp, Homo sapiens
tcataaagcacacct

SEQ ID NO: 1872236 - DNA, 15 bp, Homo sapiens
cataaagcacacctg

SEQ ID NO: 1872237 - DNA, 15 bp, Homo sapiens
ataaagcacacctga

SEQ ID NO: 1872238 - DNA, 15 bp, Homo sapiens
taaagcacacctgag

SEQ ID NO: 1872239 - DNA, 15 bp, Homo sapiens
aaagcacacctgagg

SEQ ID NO: 1872240 - DNA, 15 bp, Homo sapiens
aagcacacctgaggc

SEQ ID NO: 1872241 - DNA, 15 bp, Homo sapiens
agcacacctgaggct

SEQ ID NO: 1872242 - DNA, 15 bp, Homo sapiens
gcacacctgaggctt

SEQ ID NO: 1872243 - DNA, 15 bp, Homo sapiens
cacacctgaggctta

SEQ ID NO: 1872244 - DNA, 15 bp, Homo sapiens
acacctgaggcttag

SEQ ID NO: 1872245 - DNA, 15 bp, Homo sapiens
cacctgaggcttaga

SEQ ID NO: 1872246 - DNA, 15 bp, Homo sapiens
acctgaggcttagaa

SEQ ID NO: 1872247 - DNA, 15 bp, Homo sapiens
cctgaggcttagaag

SEQ ID NO: 1872248 - DNA, 15 bp, Homo sapiens
ctgaggcttagaagg

SEQ ID NO: 1872249 - DNA, 15 bp, Homo sapiens
tgaggcttagaaggg

SEQ ID NO: 1872250 - DNA, 15 bp, Homo sapiens
gaggcttagaaggga

SEQ ID NO: 1872251 - DNA, 15 bp, Homo sapiens
aggcttagaagggaa

SEQ ID NO: 1872252 - DNA, 15 bp, Homo sapiens
ggcttagaagggaaa

SEQ ID NO: 1872253 - DNA, 15 bp, Homo sapiens
gcttagaagggaaag

SEQ ID NO: 1872254 - DNA, 15 bp, Homo sapiens
cttagaagggaaagg

SEQ ID NO: 1872255 - DNA, 15 bp, Homo sapiens
ttagaagggaaaggt

SEQ ID NO: 1872256 - DNA, 15 bp, Homo sapiens
tagaagggaaaggta

SEQ ID NO: 1872257 - DNA, 15 bp, Homo sapiens
agaagggaaaggtac

SEQ ID NO: 1872258 - DNA, 15 bp, Homo sapiens
gaagggaaaggtaca

SEQ ID NO: 1872259 - DNA, 15 bp, Homo sapiens
aagggaaaggtacaa

SEQ ID NO: 1872260 - DNA, 15 bp, Homo sapiens
agggaaaggtacaag

SEQ ID NO: 1872261 - DNA, 15 bp, Homo sapiens
gggaaaggtacaagg

SEQ ID NO: 1872262 - DNA, 15 bp, Homo sapiens
ggaaaggtacaaggc

SEQ ID NO: 1872263 - DNA, 15 bp, Homo sapiens
gaaaggtacaaggca

SEQ ID NO: 1872264 - DNA, 15 bp, Homo sapiens
aaaggtacaaggcaa

SEQ ID NO: 1872265 - DNA, 15 bp, Homo sapiens
aaggtacaaggcaaa

SEQ ID NO: 1872266 - DNA, 15 bp, Homo sapiens
aggtacaaggcaaaa

SEQ ID NO: 1872267 - DNA, 15 bp, Homo sapiens
ggtacaaggcaaaat

SEQ ID NO: 1872268 - DNA, 15 bp, Homo sapiens
gtacaaggcaaaatg

SEQ ID NO: 1872269 - DNA, 15 bp, Homo sapiens
tacaaggcaaaatgg

SEQ ID NO: 1872270 - DNA, 15 bp, Homo sapiens
acaaggcaaaatggc

SEQ ID NO: 1872271 - DNA, 15 bp, Homo sapiens
caaggcaaaatggca

SEQ ID NO: 1872272 - DNA, 15 bp, Homo sapiens
aaggcaaaatggcat

SEQ ID NO: 1872273 - DNA, 15 bp, Homo sapiens
aggcaaaatggcatc

SEQ ID NO: 1872274 - DNA, 15 bp, Homo sapiens
ggcaaaatggcatct

SEQ ID NO: 1872275 - DNA, 15 bp, Homo sapiens
gcaaaatggcatctg

SEQ ID NO: 1872276 - DNA, 15 bp, Homo sapiens
caaaatggcatctgc

SEQ ID NO: 1872277 - DNA, 15 bp, Homo sapiens
aaaatggcatctgct

SEQ ID NO: 1872278 - DNA, 15 bp, Homo sapiens
aaatggcatctgcta

SEQ ID NO: 1872279 - DNA, 15 bp, Homo sapiens
aatggcatctgctac

SEQ ID NO: 1872280 - DNA, 15 bp, Homo sapiens
atggcatctgctact

SEQ ID NO: 1872281 - DNA, 15 bp, Homo sapiens
tggcatctgctactt

SEQ ID NO: 1872282 - DNA, 15 bp, Homo sapiens
ggcatctgctacttt

SEQ ID NO: 1872283 - DNA, 15 bp, Homo sapiens
gcatctgctacttta

SEQ ID NO: 1872284 - DNA, 15 bp, Homo sapiens
catctgctactttac

SEQ ID NO: 1872285 - DNA, 15 bp, Homo sapiens
atctgctactttacc

SEQ ID NO: 1872286 - DNA, 15 bp, Homo sapiens
tctgctactttacct

SEQ ID NO: 1872287 - DNA, 15 bp, Homo sapiens
ctgctactttaccta

SEQ ID NO: 1872288 - DNA, 15 bp, Homo sapiens
tgctactttacctat

SEQ ID NO: 1872289 - DNA, 15 bp, Homo sapiens
gctactttacctatg

SEQ ID NO: 1872290 - DNA, 15 bp, Homo sapiens
ctactttacctatgt

SEQ ID NO: 1872291 - DNA, 15 bp, Homo sapiens
tactttacctatgta

SEQ ID NO: 1872292 - DNA, 15 bp, Homo sapiens
actttacctatgtaa

SEQ ID NO: 1872293 - DNA, 15 bp, Homo sapiens
ctttacctatgtaat

SEQ ID NO: 1872294 - DNA, 15 bp, Homo sapiens
tttacctatgtaata

SEQ ID NO: 1872295 - DNA, 15 bp, Homo sapiens
ttacctatgtaatat

SEQ ID NO: 1872296 - DNA, 15 bp, Homo sapiens
tacctatgtaatata

SEQ ID NO: 1872297 - DNA, 15 bp, Homo sapiens
acctatgtaatatag

SEQ ID NO: 1872298 - DNA, 15 bp, Homo sapiens
cctatgtaatataga

SEQ ID NO: 1872299 - DNA, 15 bp, Homo sapiens
ctatgtaatatagat

SEQ ID NO: 1872300 - DNA, 15 bp, Homo sapiens
tatgtaatatagatt

SEQ ID NO: 1872301 - DNA, 15 bp, Homo sapiens
atgtaatatagattt

SEQ ID NO: 1872302 - DNA, 15 bp, Homo sapiens
tgtaatatagatttt

SEQ ID NO: 1872303 - DNA, 15 bp, Homo sapiens
gtaatatagattttg

SEQ ID NO: 1872304 - DNA, 15 bp, Homo sapiens
taatatagattttgt

SEQ ID NO: 1872305 - DNA, 15 bp, Homo sapiens
aatatagattttgta

SEQ ID NO: 1872306 - DNA, 15 bp, Homo sapiens
atatagattttgtaa

SEQ ID NO: 1872307 - DNA, 15 bp, Homo sapiens
tatagattttgtaag

SEQ ID NO: 1872308 - DNA, 15 bp, Homo sapiens
atagattttgtaagc

SEQ ID NO: 1872309 - DNA, 15 bp, Homo sapiens
tagattttgtaagca

SEQ ID NO: 1872310 - DNA, 15 bp, Homo sapiens
agattttgtaagcat

SEQ ID NO: 1872311 - DNA, 15 bp, Homo sapiens
gattttgtaagcatg

SEQ ID NO: 1872312 - DNA, 15 bp, Homo sapiens
attttgtaagcatgt

SEQ ID NO: 1872313 - DNA, 15 bp, Homo sapiens
ttttgtaagcatgtt

SEQ ID NO: 1872314 - DNA, 15 bp, Homo sapiens
tttgtaagcatgttc

SEQ ID NO: 1872315 - DNA, 15 bp, Homo sapiens
ttgtaagcatgttca

SEQ ID NO: 1872316 - DNA, 15 bp, Homo sapiens
tgtaagcatgttcaa

SEQ ID NO: 1872317 - DNA, 15 bp, Homo sapiens
gtaagcatgttcaat

SEQ ID NO: 1872318 - DNA, 15 bp, Homo sapiens
taagcatgttcaata

SEQ ID NO: 1872319 - DNA, 15 bp, Homo sapiens
aagcatgttcaatat

SEQ ID NO: 1872320 - DNA, 15 bp, Homo sapiens
agcatgttcaatatt

SEQ ID NO: 1872321 - DNA, 15 bp, Homo sapiens
gcatgttcaatattt

SEQ ID NO: 1872322 - DNA, 15 bp, Homo sapiens
catgttcaatatttg

SEQ ID NO: 1872323 - DNA, 15 bp, Homo sapiens
atgttcaatatttgc

SEQ ID NO: 1872324 - DNA, 15 bp, Homo sapiens
tgttcaatatttgca

SEQ ID NO: 1872325 - DNA, 15 bp, Homo sapiens
gttcaatatttgcat

SEQ ID NO: 1872326 - DNA, 15 bp, Homo sapiens
ttcaatatttgcatg

SEQ ID NO: 1872327 - DNA, 15 bp, Homo sapiens
tcaatatttgcatgc

SEQ ID NO: 1872328 - DNA, 15 bp, Homo sapiens
caatatttgcatgcc

SEQ ID NO: 1872329 - DNA, 15 bp, Homo sapiens
aatatttgcatgcca

SEQ ID NO: 1872330 - DNA, 15 bp, Homo sapiens
atatttgcatgccag

SEQ ID NO: 1872331 - DNA, 15 bp, Homo sapiens
tatttgcatgccagg

SEQ ID NO: 1872332 - DNA, 15 bp, Homo sapiens
atttgcatgccaggg

SEQ ID NO: 1872333 - DNA, 15 bp, Homo sapiens
tttgcatgccagggg

SEQ ID NO: 1872334 - DNA, 15 bp, Homo sapiens
ttgcatgccaggggg

SEQ ID NO: 1872335 - DNA, 15 bp, Homo sapiens
tgcatgccagggggt

SEQ ID NO: 1872336 - DNA, 15 bp, Homo sapiens
gcatgccagggggtg

SEQ ID NO: 1872337 - DNA, 15 bp, Homo sapiens
catgccagggggtgt

SEQ ID NO: 1872338 - DNA, 15 bp, Homo sapiens
atgccagggggtgta

SEQ ID NO: 1872339 - DNA, 15 bp, Homo sapiens
tgccagggggtgtac

SEQ ID NO: 1872340 - DNA, 15 bp, Homo sapiens
gccagggggtgtaca

SEQ ID NO: 1872341 - DNA, 15 bp, Homo sapiens
ccagggggtgtacat

SEQ ID NO: 1872342 - DNA, 15 bp, Homo sapiens
cagggggtgtacatt

SEQ ID NO: 1872343 - DNA, 15 bp, Homo sapiens
agggggtgtacatta

SEQ ID NO: 1872344 - DNA, 15 bp, Homo sapiens
gggggtgtacattaa

SEQ ID NO: 1872345 - DNA, 15 bp, Homo sapiens
ggggtgtacattaat

SEQ ID NO: 1872346 - DNA, 15 bp, Homo sapiens
gggtgtacattaata

SEQ ID NO: 1872347 - DNA, 15 bp, Homo sapiens
ggtgtacattaatat

SEQ ID NO: 1872348 - DNA, 15 bp, Homo sapiens
gtgtacattaatata

SEQ ID NO: 1872349 - DNA, 15 bp, Homo sapiens
tgtacattaatataa

SEQ ID NO: 1872350 - DNA, 15 bp, Homo sapiens
gtacattaatataat

SEQ ID NO: 1872351 - DNA, 15 bp, Homo sapiens
tacattaatataatg

SEQ ID NO: 1872352 - DNA, 15 bp, Homo sapiens
acattaatataatga

SEQ ID NO: 1872353 - DNA, 15 bp, Homo sapiens
cattaatataatgaa

SEQ ID NO: 1872354 - DNA, 15 bp, Homo sapiens
attaatataatgaat

SEQ ID NO: 1872355 - DNA, 15 bp, Homo sapiens
ttaatataatgaatt

SEQ ID NO: 1872356 - DNA, 15 bp, Homo sapiens
taatataatgaattc

SEQ ID NO: 1872357 - DNA, 15 bp, Homo sapiens
aatataatgaattca

SEQ ID NO: 1872358 - DNA, 15 bp, Homo sapiens
atataatgaattcac

SEQ ID NO: 1872359 - DNA, 15 bp, Homo sapiens
tataatgaattcact

SEQ ID NO: 1872360 - DNA, 15 bp, Homo sapiens
ataatgaattcactg

SEQ ID NO: 1872361 - DNA, 15 bp, Homo sapiens
taatgaattcactga

SEQ ID NO: 1872362 - DNA, 15 bp, Homo sapiens
aatgaattcactgaa

SEQ ID NO: 1872363 - DNA, 15 bp, Homo sapiens
atgaattcactgaag

SEQ ID NO: 1872364 - DNA, 15 bp, Homo sapiens
tgaattcactgaagt

SEQ ID NO: 1872365 - DNA, 15 bp, Homo sapiens
gaattcactgaagtc

SEQ ID NO: 1872366 - DNA, 15 bp, Homo sapiens
aattcactgaagtct

SEQ ID NO: 1872367 - DNA, 15 bp, Homo sapiens
attcactgaagtcta

SEQ ID NO: 1872368 - DNA, 15 bp, Homo sapiens
ttcactgaagtctaa

SEQ ID NO: 1872369 - DNA, 15 bp, Homo sapiens
tcactgaagtctaaa

SEQ ID NO: 1872370 - DNA, 15 bp, Homo sapiens
cactgaagtctaaat

SEQ ID NO: 1872371 - DNA, 15 bp, Homo sapiens
actgaagtctaaatg

SEQ ID NO: 1872372 - DNA, 15 bp, Homo sapiens
ctgaagtctaaatgc

SEQ ID NO: 1872373 - DNA, 15 bp, Homo sapiens
tgaagtctaaatgct

SEQ ID NO: 1872374 - DNA, 15 bp, Homo sapiens
gaagtctaaatgcta

SEQ ID NO: 1872375 - DNA, 15 bp, Homo sapiens
aagtctaaatgctaa

SEQ ID NO: 1872376 - DNA, 15 bp, Homo sapiens
agtctaaatgctaac

SEQ ID NO: 1872377 - DNA, 15 bp, Homo sapiens
gtctaaatgctaact

SEQ ID NO: 1872378 - DNA, 15 bp, Homo sapiens
tctaaatgctaactg

SEQ ID NO: 1872379 - DNA, 15 bp, Homo sapiens
ctaaatgctaactgt

SEQ ID NO: 1872380 - DNA, 15 bp, Homo sapiens
taaatgctaactgtg

SEQ ID NO: 1872381 - DNA, 15 bp, Homo sapiens
aaatgctaactgtgg

SEQ ID NO: 1872382 - DNA, 15 bp, Homo sapiens
aatgctaactgtggt

SEQ ID NO: 1872383 - DNA, 15 bp, Homo sapiens
atgctaactgtggtc

SEQ ID NO: 1872384 - DNA, 15 bp, Homo sapiens
tgctaactgtggtca

SEQ ID NO: 1872385 - DNA, 15 bp, Homo sapiens
gctaactgtggtcac

SEQ ID NO: 1872386 - DNA, 15 bp, Homo sapiens
ctaactgtggtcacc

SEQ ID NO: 1872387 - DNA, 15 bp, Homo sapiens
taactgtggtcaccg

SEQ ID NO: 1872388 - DNA, 15 bp, Homo sapiens
aactgtggtcaccgc

SEQ ID NO: 1872389 - DNA, 15 bp, Homo sapiens
actgtggtcaccgca

SEQ ID NO: 1872390 - DNA, 15 bp, Homo sapiens
ctgtggtcaccgcat

SEQ ID NO: 1872391 - DNA, 15 bp, Homo sapiens
tgtggtcaccgcata

SEQ ID NO: 1872392 - DNA, 15 bp, Homo sapiens
gtggtcaccgcataa

SEQ ID NO: 1872393 - DNA, 15 bp, Homo sapiens
tggtcaccgcataat

SEQ ID NO: 1872394 - DNA, 15 bp, Homo sapiens
ggtcaccgcataatt

SEQ ID NO: 1872395 - DNA, 15 bp, Homo sapiens
gtcaccgcataattt

SEQ ID NO: 1872396 - DNA, 15 bp, Homo sapiens
tcaccgcataatttt

SEQ ID NO: 1872397 - DNA, 15 bp, Homo sapiens
caccgcataattttg

SEQ ID NO: 1872398 - DNA, 15 bp, Homo sapiens
accgcataattttgt

SEQ ID NO: 1872399 - DNA, 15 bp, Homo sapiens
ccgcataattttgta

SEQ ID NO: 1872400 - DNA, 15 bp, Homo sapiens
cgcataattttgtaa

SEQ ID NO: 1872401 - DNA, 15 bp, Homo sapiens
gcataattttgtaaa

SEQ ID NO: 1872402 - DNA, 15 bp, Homo sapiens
cataattttgtaaat

SEQ ID NO: 1872403 - DNA, 15 bp, Homo sapiens
ataattttgtaaata

SEQ ID NO: 1872404 - DNA, 15 bp, Homo sapiens
taattttgtaaataa

SEQ ID NO: 1872405 - DNA, 15 bp, Homo sapiens
aattttgtaaataat

SEQ ID NO: 1872406 - DNA, 15 bp, Homo sapiens
attttgtaaataata

SEQ ID NO: 1872407 - DNA, 15 bp, Homo sapiens
ttttgtaaataatat

SEQ ID NO: 1872408 - DNA, 15 bp, Homo sapiens
tttgtaaataatata

SEQ ID NO: 1872409 - DNA, 15 bp, Homo sapiens
ttgtaaataatataa

SEQ ID NO: 1872410 - DNA, 15 bp, Homo sapiens
tgtaaataatataat

SEQ ID NO: 1872411 - DNA, 15 bp, Homo sapiens
gtaaataatataatt

SEQ ID NO: 1872412 - DNA, 15 bp, Homo sapiens
taaataatataattg

SEQ ID NO: 1872413 - DNA, 15 bp, Homo sapiens
aaataatataattgg

SEQ ID NO: 1872414 - DNA, 15 bp, Homo sapiens
aataatataattggc

SEQ ID NO: 1872415 - DNA, 15 bp, Homo sapiens
ataatataattggcc

SEQ ID NO: 1872416 - DNA, 15 bp, Homo sapiens
taatataattggcca

SEQ ID NO: 1872417 - DNA, 15 bp, Homo sapiens
aatataattggccaa

SEQ ID NO: 1872418 - DNA, 15 bp, Homo sapiens
atataattggccaag

SEQ ID NO: 1872419 - DNA, 15 bp, Homo sapiens
tataattggccaaga

SEQ ID NO: 1872420 - DNA, 15 bp, Homo sapiens
ataattggccaagat

SEQ ID NO: 1872421 - DNA, 15 bp, Homo sapiens
taattggccaagatg

SEQ ID NO: 1872422 - DNA, 15 bp, Homo sapiens
aattggccaagatga

SEQ ID NO: 1872423 - DNA, 15 bp, Homo sapiens
attggccaagatgaa

SEQ ID NO: 1872424 - DNA, 15 bp, Homo sapiens
ttggccaagatgaat

SEQ ID NO: 1872425 - DNA, 15 bp, Homo sapiens
tggccaagatgaata

SEQ ID NO: 1872426 - DNA, 15 bp, Homo sapiens
ggccaagatgaataa

SEQ ID NO: 1872427 - DNA, 15 bp, Homo sapiens
gccaagatgaataat

SEQ ID NO: 1872428 - DNA, 15 bp, Homo sapiens
ccaagatgaataatc

SEQ ID NO: 1872429 - DNA, 15 bp, Homo sapiens
caagatgaataatcc

SEQ ID NO: 1872430 - DNA, 15 bp, Homo sapiens
aagatgaataatcca

SEQ ID NO: 1872431 - DNA, 15 bp, Homo sapiens
agatgaataatccaa

SEQ ID NO: 1872432 - DNA, 15 bp, Homo sapiens
gatgaataatccaaa

SEQ ID NO: 1872433 - DNA, 15 bp, Homo sapiens
atgaataatccaaaa

SEQ ID NO: 1872434 - DNA, 15 bp, Homo sapiens
tgaataatccaaaag

SEQ ID NO: 1872435 - DNA, 15 bp, Homo sapiens
gaataatccaaaagg

SEQ ID NO: 1872436 - DNA, 15 bp, Homo sapiens
aataatccaaaagga

SEQ ID NO: 1872437 - DNA, 15 bp, Homo sapiens
ataatccaaaaggat

SEQ ID NO: 1872438 - DNA, 15 bp, Homo sapiens
taatccaaaaggatt

SEQ ID NO: 1872439 - DNA, 15 bp, Homo sapiens
aatccaaaaggattt

SEQ ID NO: 1872440 - DNA, 15 bp, Homo sapiens
atccaaaaggatttg

SEQ ID NO: 1872441 - DNA, 15 bp, Homo sapiens
tccaaaaggatttgg

SEQ ID NO: 1872442 - DNA, 15 bp, Homo sapiens
ccaaaaggatttgga

SEQ ID NO: 1872443 - DNA, 15 bp, Homo sapiens
caaaaggatttggat

SEQ ID NO: 1872444 - DNA, 15 bp, Homo sapiens
aaaaggatttggata

SEQ ID NO: 1872445 - DNA, 15 bp, Homo sapiens
aaaggatttggataa

SEQ ID NO: 1872446 - DNA, 15 bp, Homo sapiens
aaggatttggataaa

SEQ ID NO: 1872447 - DNA, 15 bp, Homo sapiens
aggatttggataaat

SEQ ID NO: 1872448 - DNA, 15 bp, Homo sapiens
ggatttggataaatt

SEQ ID NO: 1872449 - DNA, 15 bp, Homo sapiens
gatttggataaattc

SEQ ID NO: 1872450 - DNA, 15 bp, Homo sapiens
atttggataaattct

SEQ ID NO: 1872451 - DNA, 15 bp, Homo sapiens
tttggataaattctt

SEQ ID NO: 1872452 - DNA, 15 bp, Homo sapiens
ttggataaattcttt

SEQ ID NO: 1872453 - DNA, 15 bp, Homo sapiens
tggataaattctttc

SEQ ID NO: 1872454 - DNA, 15 bp, Homo sapiens
ggataaattctttct

SEQ ID NO: 1872455 - DNA, 15 bp, Homo sapiens
gataaattctttctt

SEQ ID NO: 1872456 - DNA, 15 bp, Homo sapiens
ataaattctttcttt

SEQ ID NO: 1872457 - DNA, 15 bp, Homo sapiens
taaattctttcttta

SEQ ID NO: 1872458 - DNA, 15 bp, Homo sapiens
aaattctttctttat

SEQ ID NO: 1872459 - DNA, 15 bp, Homo sapiens
aattctttctttata

SEQ ID NO: 1872460 - DNA, 15 bp, Homo sapiens
attctttctttatat

SEQ ID NO: 1872461 - DNA, 15 bp, Homo sapiens
ttctttctttatatt

SEQ ID NO: 1872462 - DNA, 15 bp, Homo sapiens
tctttctttatatta

SEQ ID NO: 1872463 - DNA, 15 bp, Homo sapiens
ctttctttatattat

SEQ ID NO: 1872464 - DNA, 15 bp, Homo sapiens
tttctttatattatt

SEQ ID NO: 1872465 - DNA, 15 bp, Homo sapiens
ttctttatattatta

SEQ ID NO: 1872466 - DNA, 15 bp, Homo sapiens
tctttatattattaa

SEQ ID NO: 1872467 - DNA, 15 bp, Homo sapiens
ctttatattattaaa

SEQ ID NO: 1872468 - DNA, 15 bp, Homo sapiens
tttatattattaaag

SEQ ID NO: 1872469 - DNA, 15 bp, Homo sapiens
ttatattattaaaga

SEQ ID NO: 1872470 - DNA, 15 bp, Homo sapiens
tatattattaaagaa

SEQ ID NO: 1872471 - DNA, 15 bp, Homo sapiens
atattattaaagaaa

SEQ ID NO: 1872472 - DNA, 15 bp, Homo sapiens
tattattaaagaaat

SEQ ID NO: 1872473 - DNA, 15 bp, Homo sapiens
attattaaagaaatc

SEQ ID NO: 1872474 - DNA, 15 bp, Homo sapiens
ttattaaagaaatca

SEQ ID NO: 1872475 - DNA, 15 bp, Homo sapiens
tattaaagaaatcag

SEQ ID NO: 1872476 - DNA, 15 bp, Homo sapiens
attaaagaaatcaga

SEQ ID NO: 1872477 - DNA, 15 bp, Homo sapiens
ttaaagaaatcagag

SEQ ID NO: 1872478 - DNA, 15 bp, Homo sapiens
taaagaaatcagaga

SEQ ID NO: 1872479 - DNA, 15 bp, Homo sapiens
aaagaaatcagagat

SEQ ID NO: 1872480 - DNA, 15 bp, Homo sapiens
aagaaatcagagatg

SEQ ID NO: 1872481 - DNA, 15 bp, Homo sapiens
agaaatcagagatga

SEQ ID NO: 1872482 - DNA, 15 bp, Homo sapiens
gaaatcagagatgat

SEQ ID NO: 1872483 - DNA, 15 bp, Homo sapiens
aaatcagagatgatt

SEQ ID NO: 1872484 - DNA, 15 bp, Homo sapiens
aatcagagatgattt

SEQ ID NO: 1872485 - DNA, 15 bp, Homo sapiens
atcagagatgatttg

SEQ ID NO: 1872486 - DNA, 15 bp, Homo sapiens
tcagagatgatttgt

SEQ ID NO: 1872487 - DNA, 15 bp, Homo sapiens
cagagatgatttgtg

SEQ ID NO: 1872488 - DNA, 15 bp, Homo sapiens
agagatgatttgtga

SEQ ID NO: 1872489 - DNA, 15 bp, Homo sapiens
gagatgatttgtgac

SEQ ID NO: 1872490 - DNA, 15 bp, Homo sapiens
agatgatttgtgaca

SEQ ID NO: 1872491 - DNA, 15 bp, Homo sapiens
gatgatttgtgacat

SEQ ID NO: 1872492 - DNA, 15 bp, Homo sapiens
atgatttgtgacata

SEQ ID NO: 1872493 - DNA, 15 bp, Homo sapiens
tgatttgtgacatac

SEQ ID NO: 1872494 - DNA, 15 bp, Homo sapiens
gatttgtgacatacc

SEQ ID NO: 1872495 - DNA, 15 bp, Homo sapiens
atttgtgacatacca

SEQ ID NO: 1872496 - DNA, 15 bp, Homo sapiens
tttgtgacataccac

SEQ ID NO: 1872497 - DNA, 15 bp, Homo sapiens
ttgtgacataccacg

SEQ ID NO: 1872498 - DNA, 15 bp, Homo sapiens
tgtgacataccacgg

SEQ ID NO: 1872499 - DNA, 15 bp, Homo sapiens
gtgacataccacgga

SEQ ID NO: 1872500 - DNA, 15 bp, Homo sapiens
tgacataccacggag

SEQ ID NO: 1872501 - DNA, 15 bp, Homo sapiens
gacataccacggagg

SEQ ID NO: 1872502 - DNA, 15 bp, Homo sapiens
acataccacggagga

SEQ ID NO: 1872503 - DNA, 15 bp, Homo sapiens
cataccacggaggat

SEQ ID NO: 1872504 - DNA, 15 bp, Homo sapiens
ataccacggaggata

SEQ ID NO: 1872505 - DNA, 15 bp, Homo sapiens
taccacggaggatat

SEQ ID NO: 1872506 - DNA, 15 bp, Homo sapiens
accacggaggatatt

SEQ ID NO: 1872507 - DNA, 15 bp, Homo sapiens
ccacggaggatatta

SEQ ID NO: 1872508 - DNA, 15 bp, Homo sapiens
cacggaggatattat

SEQ ID NO: 1872509 - DNA, 15 bp, Homo sapiens
acggaggatattatg

SEQ ID NO: 1872510 - DNA, 15 bp, Homo sapiens
cggaggatattatgg

SEQ ID NO: 1872511 - DNA, 15 bp, Homo sapiens
ggaggatattatggc

SEQ ID NO: 1872512 - DNA, 15 bp, Homo sapiens
gaggatattatggcc

SEQ ID NO: 1872513 - DNA, 15 bp, Homo sapiens
aggatattatggcct

SEQ ID NO: 1872514 - DNA, 15 bp, Homo sapiens
ggatattatggcctc

SEQ ID NO: 1872515 - DNA, 15 bp, Homo sapiens
gatattatggcctcc

SEQ ID NO: 1872516 - DNA, 15 bp, Homo sapiens
atattatggcctccc

SEQ ID NO: 1872517 - DNA, 15 bp, Homo sapiens
tattatggcctccct

SEQ ID NO: 1872518 - DNA, 15 bp, Homo sapiens
attatggcctccctc

SEQ ID NO: 1872519 - DNA, 15 bp, Homo sapiens
ttatggcctccctca

SEQ ID NO: 1872520 - DNA, 15 bp, Homo sapiens
tatggcctccctcaa

SEQ ID NO: 1872521 - DNA, 15 bp, Homo sapiens
atggcctccctcaaa

SEQ ID NO: 1872522 - DNA, 15 bp, Homo sapiens
tggcctccctcaaaa

SEQ ID NO: 1872523 - DNA, 15 bp, Homo sapiens
ggcctccctcaaaat

SEQ ID NO: 1872524 - DNA, 15 bp, Homo sapiens
gcctccctcaaaatc

SEQ ID NO: 1872525 - DNA, 15 bp, Homo sapiens
cctccctcaaaatcc

SEQ ID NO: 1872526 - DNA, 15 bp, Homo sapiens
ctccctcaaaatcca

SEQ ID NO: 1872527 - DNA, 15 bp, Homo sapiens
tccctcaaaatccag

SEQ ID NO: 1872528 - DNA, 15 bp, Homo sapiens
ccctcaaaatccagg

SEQ ID NO: 1872529 - DNA, 15 bp, Homo sapiens
cctcaaaatccagga

SEQ ID NO: 1872530 - DNA, 15 bp, Homo sapiens
ctcaaaatccaggaa

SEQ ID NO: 1872531 - DNA, 15 bp, Homo sapiens
tcaaaatccaggaat

SEQ ID NO: 1872532 - DNA, 15 bp, Homo sapiens
caaaatccaggaatg

SEQ ID NO: 1872533 - DNA, 15 bp, Homo sapiens
aaaatccaggaatga

SEQ ID NO: 1872534 - DNA, 15 bp, Homo sapiens
aaatccaggaatgat

SEQ ID NO: 1872535 - DNA, 15 bp, Homo sapiens
aatccaggaatgatc

SEQ ID NO: 1872536 - DNA, 15 bp, Homo sapiens
atccaggaatgatct

SEQ ID NO: 1872537 - DNA, 15 bp, Homo sapiens
tccaggaatgatcta

SEQ ID NO: 1872538 - DNA, 15 bp, Homo sapiens
ccaggaatgatctat

SEQ ID NO: 1872539 - DNA, 15 bp, Homo sapiens
caggaatgatctatt

SEQ ID NO: 1872540 - DNA, 15 bp, Homo sapiens
aggaatgatctatta

SEQ ID NO: 1872541 - DNA, 15 bp, Homo sapiens
ggaatgatctattaa

SEQ ID NO: 1872542 - DNA, 15 bp, Homo sapiens
gaatgatctattaag

SEQ ID NO: 1872543 - DNA, 15 bp, Homo sapiens
aatgatctattaagt

SEQ ID NO: 1872544 - DNA, 15 bp, Homo sapiens
atgatctattaagta

SEQ ID NO: 1872545 - DNA, 15 bp, Homo sapiens
tgatctattaagtat

SEQ ID NO: 1872546 - DNA, 15 bp, Homo sapiens
gatctattaagtata

SEQ ID NO: 1872547 - DNA, 15 bp, Homo sapiens
atctattaagtataa

SEQ ID NO: 1872548 - DNA, 15 bp, Homo sapiens
tctattaagtataac

SEQ ID NO: 1872549 - DNA, 15 bp, Homo sapiens
ctattaagtataaca

SEQ ID NO: 1872550 - DNA, 15 bp, Homo sapiens
tattaagtataacat

SEQ ID NO: 1872551 - DNA, 15 bp, Homo sapiens
attaagtataacata

SEQ ID NO: 1872552 - DNA, 15 bp, Homo sapiens
ttaagtataacatac

SEQ ID NO: 1872553 - DNA, 15 bp, Homo sapiens
taagtataacatacc

SEQ ID NO: 1872554 - DNA, 15 bp, Homo sapiens
aagtataacatacca

SEQ ID NO: 1872555 - DNA, 15 bp, Homo sapiens
agtataacataccaa

SEQ ID NO: 1872556 - DNA, 15 bp, Homo sapiens
gtataacataccaag

SEQ ID NO: 1872557 - DNA, 15 bp, Homo sapiens
tataacataccaagt

SEQ ID NO: 1872558 - DNA, 15 bp, Homo sapiens
ataacataccaagta

SEQ ID NO: 1872559 - DNA, 15 bp, Homo sapiens
taacataccaagtag

SEQ ID NO: 1872560 - DNA, 15 bp, Homo sapiens
aacataccaagtagg

SEQ ID NO: 1872561 - DNA, 15 bp, Homo sapiens
acataccaagtagga

SEQ ID NO: 1872562 - DNA, 15 bp, Homo sapiens
cataccaagtaggac

SEQ ID NO: 1872563 - DNA, 15 bp, Homo sapiens
ataccaagtaggaca

SEQ ID NO: 1872564 - DNA, 15 bp, Homo sapiens
taccaagtaggacag

SEQ ID NO: 1872565 - DNA, 15 bp, Homo sapiens
accaagtaggacaga

SEQ ID NO: 1872566 - DNA, 15 bp, Homo sapiens
ccaagtaggacagat

SEQ ID NO: 1872567 - DNA, 15 bp, Homo sapiens
caagtaggacagatt

SEQ ID NO: 1872568 - DNA, 15 bp, Homo sapiens
aagtaggacagattg

SEQ ID NO: 1872569 - DNA, 15 bp, Homo sapiens
agtaggacagattgc

SEQ ID NO: 1872570 - DNA, 15 bp, Homo sapiens
gtaggacagattgca

SEQ ID NO: 1872571 - DNA, 15 bp, Homo sapiens
taggacagattgcag

SEQ ID NO: 1872572 - DNA, 15 bp, Homo sapiens
aggacagattgcaga

SEQ ID NO: 1872573 - DNA, 15 bp, Homo sapiens
ggacagattgcagac

SEQ ID NO: 1872574 - DNA, 15 bp, Homo sapiens
gacagattgcagacc

SEQ ID NO: 1872575 - DNA, 15 bp, Homo sapiens
acagattgcagacct

SEQ ID NO: 1872576 - DNA, 15 bp, Homo sapiens
cagattgcagacctg

SEQ ID NO: 1872577 - DNA, 15 bp, Homo sapiens
agattgcagacctga

SEQ ID NO: 1872578 - DNA, 15 bp, Homo sapiens
gattgcagacctgag

SEQ ID NO: 1872579 - DNA, 15 bp, Homo sapiens
attgcagacctgagc

SEQ ID NO: 1872580 - DNA, 15 bp, Homo sapiens
ttgcagacctgagcc

SEQ ID NO: 1872581 - DNA, 15 bp, Homo sapiens
tgcagacctgagcca

SEQ ID NO: 1872582 - DNA, 15 bp, Homo sapiens
gcagacctgagccag

SEQ ID NO: 1872583 - DNA, 15 bp, Homo sapiens
cagacctgagccagc

SEQ ID NO: 1872584 - DNA, 15 bp, Homo sapiens
agacctgagccagca

SEQ ID NO: 1872585 - DNA, 15 bp, Homo sapiens
gacctgagccagcat

SEQ ID NO: 1872586 - DNA, 15 bp, Homo sapiens
acctgagccagcata

SEQ ID NO: 1872587 - DNA, 15 bp, Homo sapiens
cctgagccagcataa

SEQ ID NO: 1872588 - DNA, 15 bp, Homo sapiens
ctgagccagcataag

SEQ ID NO: 1872589 - DNA, 15 bp, Homo sapiens
tgagccagcataaga

SEQ ID NO: 1872590 - DNA, 15 bp, Homo sapiens
gagccagcataagaa

SEQ ID NO: 1872591 - DNA, 15 bp, Homo sapiens
agccagcataagaat

SEQ ID NO: 1872592 - DNA, 15 bp, Homo sapiens
gccagcataagaatt

SEQ ID NO: 1872593 - DNA, 15 bp, Homo sapiens
ccagcataagaattc

SEQ ID NO: 1872594 - DNA, 15 bp, Homo sapiens
cagcataagaattct

SEQ ID NO: 1872595 - DNA, 15 bp, Homo sapiens
agaattcttatgctc

SEQ ID NO: 1872596 - DNA, 15 bp, Homo sapiens
gaattcttatgctca

SEQ ID NO: 1872597 - DNA, 15 bp, Homo sapiens
aattcttatgctcat

SEQ ID NO: 1872598 - DNA, 15 bp, Homo sapiens
attcttatgctcata

SEQ ID NO: 1872599 - DNA, 15 bp, Homo sapiens
ttcttatgctcatag

SEQ ID NO: 1872600 - DNA, 15 bp, Homo sapiens
tcttatgctcataga

SEQ ID NO: 1872601 - DNA, 15 bp, Homo sapiens
cttatgctcatagag

SEQ ID NO: 1872602 - DNA, 15 bp, Homo sapiens
ttatgctcatagagt

SEQ ID NO: 1872603 - DNA, 15 bp, Homo sapiens
tatgctcatagagtc

SEQ ID NO: 1872604 - DNA, 15 bp, Homo sapiens
atgctcatagagtcc

SEQ ID NO: 1872605 - DNA, 15 bp, Homo sapiens
tgctcatagagtcca

SEQ ID NO: 1872606 - DNA, 15 bp, Homo sapiens
gctcatagagtccag

SEQ ID NO: 1872607 - DNA, 15 bp, Homo sapiens
ctcatagagtccagt

SEQ ID NO: 1872608 - DNA, 15 bp, Homo sapiens
tcatagagtccagtt

SEQ ID NO: 1872609 - DNA, 15 bp, Homo sapiens
catagagtccagtta

SEQ ID NO: 1872610 - DNA, 15 bp, Homo sapiens
atagagtccagttaa

SEQ ID NO: 1872611 - DNA, 15 bp, Homo sapiens
tagagtccagttaat

SEQ ID NO: 1872612 - DNA, 15 bp, Homo sapiens
agagtccagttaatc

SEQ ID NO: 1872613 - DNA, 15 bp, Homo sapiens
gagtccagttaatct

SEQ ID NO: 1872614 - DNA, 15 bp, Homo sapiens
agtccagttaatctt

SEQ ID NO: 1872615 - DNA, 15 bp, Homo sapiens
gtccagttaatcttg

SEQ ID NO: 1872616 - DNA, 15 bp, Homo sapiens
tccagttaatcttga

SEQ ID NO: 1872617 - DNA, 15 bp, Homo sapiens
ccagttaatcttgat

SEQ ID NO: 1872618 - DNA, 15 bp, Homo sapiens
cagttaatcttgata

SEQ ID NO: 1872619 - DNA, 15 bp, Homo sapiens
agttaatcttgatat

SEQ ID NO: 1872620 - DNA, 15 bp, Homo sapiens
gttaatcttgatatt

SEQ ID NO: 1872621 - DNA, 15 bp, Homo sapiens
ttaatcttgatatta

SEQ ID NO: 1872622 - DNA, 15 bp, Homo sapiens
taatcttgatattat

SEQ ID NO: 1872623 - DNA, 15 bp, Homo sapiens
aatcttgatattatc

SEQ ID NO: 1872624 - DNA, 15 bp, Homo sapiens
atcttgatattatcc

SEQ ID NO: 1872625 - DNA, 15 bp, Homo sapiens
tcttgatattatcca

SEQ ID NO: 1872626 - DNA, 15 bp, Homo sapiens
cttgatattatccag

SEQ ID NO: 1872627 - DNA, 15 bp, Homo sapiens
ttgatattatccaga

SEQ ID NO: 1872628 - DNA, 15 bp, Homo sapiens
tgatattatccagac

SEQ ID NO: 1872629 - DNA, 15 bp, Homo sapiens
gatattatccagaca

SEQ ID NO: 1872630 - DNA, 15 bp, Homo sapiens
atattatccagacat

SEQ ID NO: 1872631 - DNA, 15 bp, Homo sapiens
tattatccagacata

SEQ ID NO: 1872632 - DNA, 15 bp, Homo sapiens
attatccagacataa

SEQ ID NO: 1872633 - DNA, 15 bp, Homo sapiens
ttatccagacataac

SEQ ID NO: 1872634 - DNA, 15 bp, Homo sapiens
tatccagacataact

SEQ ID NO: 1872635 - DNA, 15 bp, Homo sapiens
atccagacataactc

SEQ ID NO: 1872636 - DNA, 15 bp, Homo sapiens
tccagacataactca

SEQ ID NO: 1872637 - DNA, 15 bp, Homo sapiens
ccagacataactcaa

SEQ ID NO: 1872638 - DNA, 15 bp, Homo sapiens
cagacataactcaag

SEQ ID NO: 1872639 - DNA, 15 bp, Homo sapiens
agacataactcaagt

SEQ ID NO: 1872640 - DNA, 15 bp, Homo sapiens
gacataactcaagtt

SEQ ID NO: 1872641 - DNA, 15 bp, Homo sapiens
acataactcaagtta

SEQ ID NO: 1872642 - DNA, 15 bp, Homo sapiens
cataactcaagttat

SEQ ID NO: 1872643 - DNA, 15 bp, Homo sapiens
ataactcaagttatt

SEQ ID NO: 1872644 - DNA, 15 bp, Homo sapiens
taactcaagttattg

SEQ ID NO: 1872645 - DNA, 15 bp, Homo sapiens
aactcaagttattgc

SEQ ID NO: 1872646 - DNA, 15 bp, Homo sapiens
actcaagttattgct

SEQ ID NO: 1872647 - DNA, 15 bp, Homo sapiens
ctcaagttattgctt

SEQ ID NO: 1872648 - DNA, 15 bp, Homo sapiens
tcaagttattgctta

SEQ ID NO: 1872649 - DNA, 15 bp, Homo sapiens
caagttattgcttat

SEQ ID NO: 1872650 - DNA, 15 bp, Homo sapiens
aagttattgcttatg

SEQ ID NO: 1872651 - DNA, 15 bp, Homo sapiens
agttattgcttatgt

SEQ ID NO: 1872652 - DNA, 15 bp, Homo sapiens
gttattgcttatgta

SEQ ID NO: 1872653 - DNA, 15 bp, Homo sapiens
tattgcttatgtaaa

SEQ ID NO: 1872654 - DNA, 15 bp, Homo sapiens
attgcttatgtaaaa

SEQ ID NO: 1872655 - DNA, 15 bp, Homo sapiens
ttgcttatgtaaaat

SEQ ID NO: 1872656 - DNA, 15 bp, Homo sapiens
tgcttatgtaaaatc

SEQ ID NO: 1872657 - DNA, 15 bp, Homo sapiens
gcttatgtaaaatct

SEQ ID NO: 1872658 - DNA, 15 bp, Homo sapiens
cttatgtaaaatctt

SEQ ID NO: 1872659 - DNA, 15 bp, Homo sapiens
ttatgtaaaatctta

SEQ ID NO: 1872660 - DNA, 15 bp, Homo sapiens
tatgtaaaatcttat

SEQ ID NO: 1872661 - DNA, 15 bp, Homo sapiens
atgtaaaatcttatg

SEQ ID NO: 1872662 - DNA, 15 bp, Homo sapiens
tgtaaaatcttatga

SEQ ID NO: 1872663 - DNA, 15 bp, Homo sapiens
gtaaaatcttatgag

SEQ ID NO: 1872664 - DNA, 15 bp, Homo sapiens
taaaatcttatgaga

SEQ ID NO: 1872665 - DNA, 15 bp, Homo sapiens
aaaatcttatgagaa

SEQ ID NO: 1872666 - DNA, 15 bp, Homo sapiens
aaatcttatgagaac

SEQ ID NO: 1872667 - DNA, 15 bp, Homo sapiens
aatcttatgagaacg

SEQ ID NO: 1872668 - DNA, 15 bp, Homo sapiens
atcttatgagaacgt

SEQ ID NO: 1872669 - DNA, 15 bp, Homo sapiens
tcttatgagaacgta

SEQ ID NO: 1872670 - DNA, 15 bp, Homo sapiens
cttatgagaacgtag

SEQ ID NO: 1872671 - DNA, 15 bp, Homo sapiens
ttatgagaacgtagg

SEQ ID NO: 1872672 - DNA, 15 bp, Homo sapiens
tatgagaacgtaggg

SEQ ID NO: 1872673 - DNA, 15 bp, Homo sapiens
atgagaacgtaggga

SEQ ID NO: 1872674 - DNA, 15 bp, Homo sapiens
tgagaacgtagggac

SEQ ID NO: 1872675 - DNA, 15 bp, Homo sapiens
gagaacgtagggaca

SEQ ID NO: 1872676 - DNA, 15 bp, Homo sapiens
agaacgtagggacaa

SEQ ID NO: 1872677 - DNA, 15 bp, Homo sapiens
gaacgtagggacaat

SEQ ID NO: 1872678 - DNA, 15 bp, Homo sapiens
aacgtagggacaatt

SEQ ID NO: 1872679 - DNA, 15 bp, Homo sapiens
acgtagggacaattg

SEQ ID NO: 1872680 - DNA, 15 bp, Homo sapiens
cgtagggacaattgt

SEQ ID NO: 1872681 - DNA, 15 bp, Homo sapiens
gtagggacaattgtt

SEQ ID NO: 1872682 - DNA, 15 bp, Homo sapiens
tagggacaattgtta

SEQ ID NO: 1872683 - DNA, 15 bp, Homo sapiens
agggacaattgttat

SEQ ID NO: 1872684 - DNA, 15 bp, Homo sapiens
gggacaattgttatt

SEQ ID NO: 1872685 - DNA, 15 bp, Homo sapiens
ggacaattgttattg

SEQ ID NO: 1872686 - DNA, 15 bp, Homo sapiens
gacaattgttattgt

SEQ ID NO: 1872687 - DNA, 15 bp, Homo sapiens
acaattgttattgtt

SEQ ID NO: 1872688 - DNA, 15 bp, Homo sapiens
caattgttattgttc

SEQ ID NO: 1872689 - DNA, 15 bp, Homo sapiens
aattgttattgttcg

SEQ ID NO: 1872690 - DNA, 15 bp, Homo sapiens
attgttattgttcgt

SEQ ID NO: 1872691 - DNA, 15 bp, Homo sapiens
ttgttattgttcgtg

SEQ ID NO: 1872692 - DNA, 15 bp, Homo sapiens
tgttattgttcgtgg

SEQ ID NO: 1872693 - DNA, 15 bp, Homo sapiens
gttattgttcgtgga

SEQ ID NO: 1872694 - DNA, 15 bp, Homo sapiens
ttattgttcgtggac

SEQ ID NO: 1872695 - DNA, 15 bp, Homo sapiens
tattgttcgtggacc

SEQ ID NO: 1872696 - DNA, 15 bp, Homo sapiens
attgttcgtggacct

SEQ ID NO: 1872697 - DNA, 15 bp, Homo sapiens
ttgttcgtggaccta

SEQ ID NO: 1872698 - DNA, 15 bp, Homo sapiens
tgttcgtggacctaa

SEQ ID NO: 1872699 - DNA, 15 bp, Homo sapiens
gttcgtggacctaat

SEQ ID NO: 1872700 - DNA, 15 bp, Homo sapiens
ttcgtggacctaatt

SEQ ID NO: 1872701 - DNA, 15 bp, Homo sapiens
tcgtggacctaattt

SEQ ID NO: 1872702 - DNA, 15 bp, Homo sapiens
cgtggacctaattta

SEQ ID NO: 1872703 - DNA, 15 bp, Homo sapiens
gtggacctaatttaa

SEQ ID NO: 1872704 - DNA, 15 bp, Homo sapiens
tggacctaatttaaa

SEQ ID NO: 1872705 - DNA, 15 bp, Homo sapiens
ggacctaatttaaat

SEQ ID NO: 1872706 - DNA, 15 bp, Homo sapiens
gacctaatttaaatg

SEQ ID NO: 1872707 - DNA, 15 bp, Homo sapiens
acctaatttaaatgc

SEQ ID NO: 1872708 - DNA, 15 bp, Homo sapiens
cctaatttaaatgca

SEQ ID NO: 1872709 - DNA, 15 bp, Homo sapiens
ctaatttaaatgcaa

SEQ ID NO: 1872710 - DNA, 15 bp, Homo sapiens
taatttaaatgcaag

SEQ ID NO: 1872711 - DNA, 15 bp, Homo sapiens
aatttaaatgcaagc

SEQ ID NO: 1872712 - DNA, 15 bp, Homo sapiens
atttaaatgcaagca

SEQ ID NO: 1872713 - DNA, 15 bp, Homo sapiens
tttaaatgcaagcaa

SEQ ID NO: 1872714 - DNA, 15 bp, Homo sapiens
ttaaatgcaagcaat

SEQ ID NO: 1872715 - DNA, 15 bp, Homo sapiens
taaatgcaagcaatc

SEQ ID NO: 1872716 - DNA, 15 bp, Homo sapiens
aaatgcaagcaatca

SEQ ID NO: 1872717 - DNA, 15 bp, Homo sapiens
aatgcaagcaatcat

SEQ ID NO: 1872718 - DNA, 15 bp, Homo sapiens
atgcaagcaatcatt

SEQ ID NO: 1872719 - DNA, 15 bp, Homo sapiens
tgcaagcaatcatta

SEQ ID NO: 1872720 - DNA, 15 bp, Homo sapiens
gcaagcaatcattag

SEQ ID NO: 1872721 - DNA, 15 bp, Homo sapiens
caagcaatcattagc

SEQ ID NO: 1872722 - DNA, 15 bp, Homo sapiens
aagcaatcattagca

SEQ ID NO: 1872723 - DNA, 15 bp, Homo sapiens
agcaatcattagcac

SEQ ID NO: 1872724 - DNA, 15 bp, Homo sapiens
gcaatcattagcaca

SEQ ID NO: 1872725 - DNA, 15 bp, Homo sapiens
caatcattagcacat

SEQ ID NO: 1872726 - DNA, 15 bp, Homo sapiens
aatcattagcacatc

SEQ ID NO: 1872727 - DNA, 15 bp, Homo sapiens
atcattagcacatca

SEQ ID NO: 1872728 - DNA, 15 bp, Homo sapiens
tcattagcacatcaa

SEQ ID NO: 1872729 - DNA, 15 bp, Homo sapiens
cattagcacatcaaa

SEQ ID NO: 1872730 - DNA, 15 bp, Homo sapiens
attagcacatcaaac

SEQ ID NO: 1872731 - DNA, 15 bp, Homo sapiens
ttagcacatcaaact

SEQ ID NO: 1872732 - DNA, 15 bp, Homo sapiens
tagcacatcaaactc

SEQ ID NO: 1872733 - DNA, 15 bp, Homo sapiens
agcacatcaaactca

SEQ ID NO: 1872734 - DNA, 15 bp, Homo sapiens
gcacatcaaactcat

SEQ ID NO: 1872735 - DNA, 15 bp, Homo sapiens
cacatcaaactcatg

SEQ ID NO: 1872736 - DNA, 15 bp, Homo sapiens
acatcaaactcatgg

SEQ ID NO: 1872737 - DNA, 15 bp, Homo sapiens
catcaaactcatggt

SEQ ID NO: 1872738 - DNA, 15 bp, Homo sapiens
atcaaactcatggtc

SEQ ID NO: 1872739 - DNA, 15 bp, Homo sapiens
tcaaactcatggtcc

SEQ ID NO: 1872740 - DNA, 15 bp, Homo sapiens
caaactcatggtccc

SEQ ID NO: 1872741 - DNA, 15 bp, Homo sapiens
aaactcatggtcccc

SEQ ID NO: 1872742 - DNA, 15 bp, Homo sapiens
aactcatggtcccct

SEQ ID NO: 1872743 - DNA, 15 bp, Homo sapiens
actcatggtcccctc

SEQ ID NO: 1872744 - DNA, 15 bp, Homo sapiens
ctcatggtcccctct

SEQ ID NO: 1872745 - DNA, 15 bp, Homo sapiens
tcatggtcccctcta

SEQ ID NO: 1872746 - DNA, 15 bp, Homo sapiens
catggtcccctctaa

SEQ ID NO: 1872747 - DNA, 15 bp, Homo sapiens
atggtcccctctaag

SEQ ID NO: 1872748 - DNA, 15 bp, Homo sapiens
tggtcccctctaagg

SEQ ID NO: 1872749 - DNA, 15 bp, Homo sapiens
ggtcccctctaagga

SEQ ID NO: 1872750 - DNA, 15 bp, Homo sapiens
gtcccctctaaggaa

SEQ ID NO: 1872751 - DNA, 15 bp, Homo sapiens
tcccctctaaggaat

SEQ ID NO: 1872752 - DNA, 15 bp, Homo sapiens
cccctctaaggaata

SEQ ID NO: 1872753 - DNA, 15 bp, Homo sapiens
ccctctaaggaataa

SEQ ID NO: 1872754 - DNA, 15 bp, Homo sapiens
cctctaaggaataaa

SEQ ID NO: 1872755 - DNA, 15 bp, Homo sapiens
ctctaaggaataaac

SEQ ID NO: 1872756 - DNA, 15 bp, Homo sapiens
tctaaggaataaacc

SEQ ID NO: 1872757 - DNA, 15 bp, Homo sapiens
ctaaggaataaaccc

SEQ ID NO: 1872758 - DNA, 15 bp, Homo sapiens
taaggaataaacccc

SEQ ID NO: 1872759 - DNA, 15 bp, Homo sapiens
aaggaataaacccct

SEQ ID NO: 1872760 - DNA, 15 bp, Homo sapiens
aggaataaacccctg

SEQ ID NO: 1872761 - DNA, 15 bp, Homo sapiens
ggaataaacccctgt

SEQ ID NO: 1872762 - DNA, 15 bp, Homo sapiens
gaataaacccctgtg

SEQ ID NO: 1872763 - DNA, 15 bp, Homo sapiens
aataaacccctgtgg

SEQ ID NO: 1872764 - DNA, 15 bp, Homo sapiens
ataaacccctgtggg

SEQ ID NO: 1872765 - DNA, 15 bp, Homo sapiens
taaacccctgtgggc

SEQ ID NO: 1872766 - DNA, 15 bp, Homo sapiens
aaacccctgtgggct

SEQ ID NO: 1872767 - DNA, 15 bp, Homo sapiens
aacccctgtgggctc

SEQ ID NO: 1872768 - DNA, 15 bp, Homo sapiens
acccctgtgggctcg

SEQ ID NO: 1872769 - DNA, 15 bp, Homo sapiens
cccctgtgggctcgt

SEQ ID NO: 1872770 - DNA, 15 bp, Homo sapiens
ccctgtgggctcgtg

SEQ ID NO: 1872771 - DNA, 15 bp, Homo sapiens
cctgtgggctcgtgt

SEQ ID NO: 1872772 - DNA, 15 bp, Homo sapiens
ctgtgggctcgtgtt

SEQ ID NO: 1872773 - DNA, 15 bp, Homo sapiens
tgtgggctcgtgttt

SEQ ID NO: 1872774 - DNA, 15 bp, Homo sapiens
gtgggctcgtgtttg

SEQ ID NO: 1872775 - DNA, 15 bp, Homo sapiens
tgggctcgtgtttgg

SEQ ID NO: 1872776 - DNA, 15 bp, Homo sapiens
gggctcgtgtttgga

SEQ ID NO: 1872777 - DNA, 15 bp, Homo sapiens
ggctcgtgtttggat

SEQ ID NO: 1872778 - DNA, 15 bp, Homo sapiens
gctcgtgtttggata

SEQ ID NO: 1872779 - DNA, 15 bp, Homo sapiens
ctcgtgtttggataa

SEQ ID NO: 1872780 - DNA, 15 bp, Homo sapiens
tcgtgtttggataag

SEQ ID NO: 1872781 - DNA, 15 bp, Homo sapiens
cgtgtttggataagt

SEQ ID NO: 1872782 - DNA, 15 bp, Homo sapiens
gtgtttggataagtc

SEQ ID NO: 1872783 - DNA, 15 bp, Homo sapiens
tgtttggataagtca

SEQ ID NO: 1872784 - DNA, 15 bp, Homo sapiens
gtttggataagtcag

SEQ ID NO: 1872785 - DNA, 15 bp, Homo sapiens
tttggataagtcagt

SEQ ID NO: 1872786 - DNA, 15 bp, Homo sapiens
ttggataagtcagta

SEQ ID NO: 1872787 - DNA, 15 bp, Homo sapiens
tggataagtcagtag

SEQ ID NO: 1872788 - DNA, 15 bp, Homo sapiens
ggataagtcagtagg

SEQ ID NO: 1872789 - DNA, 15 bp, Homo sapiens
gataagtcagtaggt

SEQ ID NO: 1872790 - DNA, 15 bp, Homo sapiens
ataagtcagtaggta

SEQ ID NO: 1872791 - DNA, 15 bp, Homo sapiens
taagtcagtaggtat

SEQ ID NO: 1872792 - DNA, 15 bp, Homo sapiens
aagtcagtaggtata

SEQ ID NO: 1872793 - DNA, 15 bp, Homo sapiens
agtcagtaggtatat

SEQ ID NO: 1872794 - DNA, 15 bp, Homo sapiens
gtcagtaggtatatt

SEQ ID NO: 1872795 - DNA, 15 bp, Homo sapiens
tcagtaggtatattt

SEQ ID NO: 1872796 - DNA, 15 bp, Homo sapiens
cagtaggtatatttt

SEQ ID NO: 1872797 - DNA, 15 bp, Homo sapiens
agtaggtatattttg

SEQ ID NO: 1872798 - DNA, 15 bp, Homo sapiens
gtaggtatattttga

SEQ ID NO: 1872799 - DNA, 15 bp, Homo sapiens
taggtatattttgag

SEQ ID NO: 1872800 - DNA, 15 bp, Homo sapiens
aggtatattttgagt

SEQ ID NO: 1872801 - DNA, 15 bp, Homo sapiens
ggtatattttgagtt

SEQ ID NO: 1872802 - DNA, 15 bp, Homo sapiens
gtatattttgagttc

SEQ ID NO: 1872803 - DNA, 15 bp, Homo sapiens
tatattttgagttca

SEQ ID NO: 1872804 - DNA, 15 bp, Homo sapiens
atattttgagttcaa

SEQ ID NO: 1872805 - DNA, 15 bp, Homo sapiens
tattttgagttcaac

SEQ ID NO: 1872806 - DNA, 15 bp, Homo sapiens
attttgagttcaact

SEQ ID NO: 1872807 - DNA, 15 bp, Homo sapiens
ttttgagttcaactg

SEQ ID NO: 1872808 - DNA, 15 bp, Homo sapiens
tttgagttcaactgt

SEQ ID NO: 1872809 - DNA, 15 bp, Homo sapiens
ttgagttcaactgta

SEQ ID NO: 1872810 - DNA, 15 bp, Homo sapiens
tgagttcaactgtaa

SEQ ID NO: 1872811 - DNA, 15 bp, Homo sapiens
gagttcaactgtaac

SEQ ID NO: 1872812 - DNA, 15 bp, Homo sapiens
agttcaactgtaaca

SEQ ID NO: 1872813 - DNA, 15 bp, Homo sapiens
gttcaactgtaacac

SEQ ID NO: 1872814 - DNA, 15 bp, Homo sapiens
ttcaactgtaacaca

SEQ ID NO: 1872815 - DNA, 15 bp, Homo sapiens
tcaactgtaacacat

SEQ ID NO: 1872816 - DNA, 15 bp, Homo sapiens
caactgtaacacatt

SEQ ID NO: 1872817 - DNA, 15 bp, Homo sapiens
aactgtaacacatta

SEQ ID NO: 1872818 - DNA, 15 bp, Homo sapiens
actgtaacacattat

SEQ ID NO: 1872819 - DNA, 15 bp, Homo sapiens
ctgtaacacattatt

SEQ ID NO: 1872820 - DNA, 15 bp, Homo sapiens
tgtaacacattattt

SEQ ID NO: 1872821 - DNA, 15 bp, Homo sapiens
gtaacacattatttc

SEQ ID NO: 1872822 - DNA, 15 bp, Homo sapiens
taacacattatttca

SEQ ID NO: 1872823 - DNA, 15 bp, Homo sapiens
aacacattatttcat

SEQ ID NO: 1872824 - DNA, 15 bp, Homo sapiens
acacattatttcata

SEQ ID NO: 1872825 - DNA, 15 bp, Homo sapiens
cacattatttcatac

SEQ ID NO: 1872826 - DNA, 15 bp, Homo sapiens
acattatttcataca

SEQ ID NO: 1872827 - DNA, 15 bp, Homo sapiens
cattatttcatacat

SEQ ID NO: 1872828 - DNA, 15 bp, Homo sapiens
ttatttcatacatag

SEQ ID NO: 1872829 - DNA, 15 bp, Homo sapiens
tatttcatacataga

SEQ ID NO: 1872830 - DNA, 15 bp, Homo sapiens
atttcatacatagat

SEQ ID NO: 1872831 - DNA, 15 bp, Homo sapiens
tttcatacatagatt

SEQ ID NO: 1872832 - DNA, 15 bp, Homo sapiens
ttcatacatagattt

SEQ ID NO: 1872833 - DNA, 15 bp, Homo sapiens
tcatacatagatttg

SEQ ID NO: 1872834 - DNA, 15 bp, Homo sapiens
catacatagatttgt

SEQ ID NO: 1872835 - DNA, 15 bp, Homo sapiens
atacatagatttgtt

SEQ ID NO: 1872836 - DNA, 15 bp, Homo sapiens
tacatagatttgttg

SEQ ID NO: 1872837 - DNA, 15 bp, Homo sapiens
acatagatttgttgt

SEQ ID NO: 1872838 - DNA, 15 bp, Homo sapiens
catagatttgttgtc

SEQ ID NO: 1872839 - DNA, 15 bp, Homo sapiens
atagatttgttgtct

SEQ ID NO: 1872840 - DNA, 15 bp, Homo sapiens
tagatttgttgtctt

SEQ ID NO: 1872841 - DNA, 15 bp, Homo sapiens
agatttgttgtcttc

SEQ ID NO: 1872842 - DNA, 15 bp, Homo sapiens
gatttgttgtcttct

SEQ ID NO: 1872843 - DNA, 15 bp, Homo sapiens
atttgttgtcttctg

SEQ ID NO: 1872844 - DNA, 15 bp, Homo sapiens
tttgttgtcttctga

SEQ ID NO: 1872845 - DNA, 15 bp, Homo sapiens
ttgttgtcttctgaa

SEQ ID NO: 1872846 - DNA, 15 bp, Homo sapiens
tgttgtcttctgaat

SEQ ID NO: 1872847 - DNA, 15 bp, Homo sapiens
gttgtcttctgaata

SEQ ID NO: 1872848 - DNA, 15 bp, Homo sapiens
ttgtcttctgaatat

SEQ ID NO: 1872849 - DNA, 15 bp, Homo sapiens
tgtcttctgaatatc

SEQ ID NO: 1872850 - DNA, 15 bp, Homo sapiens
gtcttctgaatatct

SEQ ID NO: 1872851 - DNA, 15 bp, Homo sapiens
tcttctgaatatctg

SEQ ID NO: 1872852 - DNA, 15 bp, Homo sapiens
cttctgaatatctga

SEQ ID NO: 1872853 - DNA, 15 bp, Homo sapiens
ttctgaatatctgaa

SEQ ID NO: 1872854 - DNA, 15 bp, Homo sapiens
tctgaatatctgaat

SEQ ID NO: 1872855 - DNA, 15 bp, Homo sapiens
ctgaatatctgaata

SEQ ID NO: 1872856 - DNA, 15 bp, Homo sapiens
tgaatatctgaatac

SEQ ID NO: 1872857 - DNA, 15 bp, Homo sapiens
gaatatctgaatact

SEQ ID NO: 1872858 - DNA, 15 bp, Homo sapiens
aatatctgaatacta

SEQ ID NO: 1872859 - DNA, 15 bp, Homo sapiens
atatctgaatactaa

SEQ ID NO: 1872860 - DNA, 15 bp, Homo sapiens
tatctgaatactaat

SEQ ID NO: 1872861 - DNA, 15 bp, Homo sapiens
atctgaatactaatc

SEQ ID NO: 1872862 - DNA, 15 bp, Homo sapiens
tctgaatactaatcg

SEQ ID NO: 1872863 - DNA, 15 bp, Homo sapiens
ctgaatactaatcgg

SEQ ID NO: 1872864 - DNA, 15 bp, Homo sapiens
tgaatactaatcgga

SEQ ID NO: 1872865 - DNA, 15 bp, Homo sapiens
gaatactaatcggat

SEQ ID NO: 1872866 - DNA, 15 bp, Homo sapiens
aatactaatcggata

SEQ ID NO: 1872867 - DNA, 15 bp, Homo sapiens
atactaatcggatac

SEQ ID NO: 1872868 - DNA, 15 bp, Homo sapiens
tactaatcggatact

SEQ ID NO: 1872869 - DNA, 15 bp, Homo sapiens
actaatcggatacta

SEQ ID NO: 1872870 - DNA, 15 bp, Homo sapiens
ctaatcggatactaa

SEQ ID NO: 1872871 - DNA, 15 bp, Homo sapiens
taatcggatactaag

SEQ ID NO: 1872872 - DNA, 15 bp, Homo sapiens
aatcggatactaagc

SEQ ID NO: 1872873 - DNA, 15 bp, Homo sapiens
atcggatactaagca

SEQ ID NO: 1872874 - DNA, 15 bp, Homo sapiens
tcggatactaagcaa

SEQ ID NO: 1872875 - DNA, 15 bp, Homo sapiens
cggatactaagcaat

SEQ ID NO: 1872876 - DNA, 15 bp, Homo sapiens
ggatactaagcaata

SEQ ID NO: 1872877 - DNA, 15 bp, Homo sapiens
gatactaagcaatat

SEQ ID NO: 1872878 - DNA, 15 bp, Homo sapiens
atactaagcaatatg

SEQ ID NO: 1872879 - DNA, 15 bp, Homo sapiens
tactaagcaatatgg

SEQ ID NO: 1872880 - DNA, 15 bp, Homo sapiens
actaagcaatatggt

SEQ ID NO: 1872881 - DNA, 15 bp, Homo sapiens
ctaagcaatatggtg

SEQ ID NO: 1872882 - DNA, 15 bp, Homo sapiens
taagcaatatggtga

SEQ ID NO: 1872883 - DNA, 15 bp, Homo sapiens
aagcaatatggtgat

SEQ ID NO: 1872884 - DNA, 15 bp, Homo sapiens
agcaatatggtgatg

SEQ ID NO: 1872885 - DNA, 15 bp, Homo sapiens
gcaatatggtgatgt

SEQ ID NO: 1872886 - DNA, 15 bp, Homo sapiens
caatatggtgatgtt

SEQ ID NO: 1872887 - DNA, 15 bp, Homo sapiens
aatatggtgatgtta

SEQ ID NO: 1872888 - DNA, 15 bp, Homo sapiens
atatggtgatgttat

SEQ ID NO: 1872889 - DNA, 15 bp, Homo sapiens
tatggtgatgttatc

SEQ ID NO: 1872890 - DNA, 15 bp, Homo sapiens
atggtgatgttatct

SEQ ID NO: 1872891 - DNA, 15 bp, Homo sapiens
tggtgatgttatctg

SEQ ID NO: 1872892 - DNA, 15 bp, Homo sapiens
ggtgatgttatctga

SEQ ID NO: 1872893 - DNA, 15 bp, Homo sapiens
gtgatgttatctgat

SEQ ID NO: 1872894 - DNA, 15 bp, Homo sapiens
tgatgttatctgatt

SEQ ID NO: 1872895 - DNA, 15 bp, Homo sapiens
gatgttatctgattt

SEQ ID NO: 1872896 - DNA, 15 bp, Homo sapiens
atgttatctgattta

SEQ ID NO: 1872897 - DNA, 15 bp, Homo sapiens
tgttatctgatttag

SEQ ID NO: 1872898 - DNA, 15 bp, Homo sapiens
gttatctgatttaga

SEQ ID NO: 1872899 - DNA, 15 bp, Homo sapiens
ttatctgatttagag

SEQ ID NO: 1872900 - DNA, 15 bp, Homo sapiens
tatctgatttagagc

SEQ ID NO: 1872901 - DNA, 15 bp, Homo sapiens
atctgatttagagct

SEQ ID NO: 1872902 - DNA, 15 bp, Homo sapiens
tctgatttagagctc

SEQ ID NO: 1872903 - DNA, 15 bp, Homo sapiens
ctgatttagagctct

SEQ ID NO: 1872904 - DNA, 15 bp, Homo sapiens
tgatttagagctctg

SEQ ID NO: 1872905 - DNA, 15 bp, Homo sapiens
gatttagagctctga

SEQ ID NO: 1872906 - DNA, 15 bp, Homo sapiens
atttagagctctgat

SEQ ID NO: 1872907 - DNA, 15 bp, Homo sapiens
agagctctgatctct

SEQ ID NO: 1872908 - DNA, 15 bp, Homo sapiens
gagctctgatctctt

SEQ ID NO: 1872909 - DNA, 15 bp, Homo sapiens
agctctgatctcttc

SEQ ID NO: 1872910 - DNA, 15 bp, Homo sapiens
gctctgatctcttcc

SEQ ID NO: 1872911 - DNA, 15 bp, Homo sapiens
ctctgatctcttccc

SEQ ID NO: 1872912 - DNA, 15 bp, Homo sapiens
tctgatctcttccca

SEQ ID NO: 1872913 - DNA, 15 bp, Homo sapiens
ctgatctcttcccag

SEQ ID NO: 1872914 - DNA, 15 bp, Homo sapiens
tgatctcttcccagc

SEQ ID NO: 1872915 - DNA, 15 bp, Homo sapiens
gatctcttcccagcc

SEQ ID NO: 1872916 - DNA, 15 bp, Homo sapiens
atctcttcccagcct

SEQ ID NO: 1872917 - DNA, 15 bp, Homo sapiens
tctcttcccagccta

SEQ ID NO: 1872918 - DNA, 15 bp, Homo sapiens
ctcttcccagcctat

SEQ ID NO: 1872919 - DNA, 15 bp, Homo sapiens
tcttcccagcctata

SEQ ID NO: 1872920 - DNA, 15 bp, Homo sapiens
cttcccagcctatag

SEQ ID NO: 1872921 - DNA, 15 bp, Homo sapiens
ttcccagcctataga

SEQ ID NO: 1872922 - DNA, 15 bp, Homo sapiens
tcccagcctatagaa

SEQ ID NO: 1872923 - DNA, 15 bp, Homo sapiens
cccagcctatagaaa

SEQ ID NO: 1872924 - DNA, 15 bp, Homo sapiens
ccagcctatagaaaa

SEQ ID NO: 1872925 - DNA, 15 bp, Homo sapiens
cagcctatagaaaat

SEQ ID NO: 1872926 - DNA, 15 bp, Homo sapiens
agcctatagaaaatg

SEQ ID NO: 1872927 - DNA, 15 bp, Homo sapiens
gcctatagaaaatga

SEQ ID NO: 1872928 - DNA, 15 bp, Homo sapiens
cctatagaaaatgaa

SEQ ID NO: 1872929 - DNA, 15 bp, Homo sapiens
ctatagaaaatgaag

SEQ ID NO: 1872930 - DNA, 15 bp, Homo sapiens
tatagaaaatgaaga

SEQ ID NO: 1872931 - DNA, 15 bp, Homo sapiens
atagaaaatgaagat

SEQ ID NO: 1872932 - DNA, 15 bp, Homo sapiens
tagaaaatgaagatg

SEQ ID NO: 1872933 - DNA, 15 bp, Homo sapiens
agaaaatgaagatgt

SEQ ID NO: 1872934 - DNA, 15 bp, Homo sapiens
gaaaatgaagatgtg

SEQ ID NO: 1872935 - DNA, 15 bp, Homo sapiens
aaaatgaagatgtga

SEQ ID NO: 1872936 - DNA, 15 bp, Homo sapiens
aaatgaagatgtgaa

SEQ ID NO: 1872937 - DNA, 15 bp, Homo sapiens
aatgaagatgtgaaa

SEQ ID NO: 1872938 - DNA, 15 bp, Homo sapiens
atgaagatgtgaaaa

SEQ ID NO: 1872939 - DNA, 15 bp, Homo sapiens
tgaagatgtgaaaaa

SEQ ID NO: 1872940 - DNA, 15 bp, Homo sapiens
gaagatgtgaaaaag

SEQ ID NO: 1872941 - DNA, 15 bp, Homo sapiens
aagatgtgaaaaagg

SEQ ID NO: 1872942 - DNA, 15 bp, Homo sapiens
agatgtgaaaaaggt

SEQ ID NO: 1872943 - DNA, 15 bp, Homo sapiens
gatgtgaaaaaggtc

SEQ ID NO: 1872944 - DNA, 15 bp, Homo sapiens
atgtgaaaaaggtca

SEQ ID NO: 1872945 - DNA, 15 bp, Homo sapiens
tgtgaaaaaggtcag

SEQ ID NO: 1872946 - DNA, 15 bp, Homo sapiens
gtgaaaaaggtcaga

SEQ ID NO: 1872947 - DNA, 15 bp, Homo sapiens
tgaaaaaggtcagat

SEQ ID NO: 1872948 - DNA, 15 bp, Homo sapiens
gaaaaaggtcagatg

SEQ ID NO: 1872949 - DNA, 15 bp, Homo sapiens
aaaaaggtcagatga

SEQ ID NO: 1872950 - DNA, 15 bp, Homo sapiens
aaaaggtcagatgaa

SEQ ID NO: 1872951 - DNA, 15 bp, Homo sapiens
aaaggtcagatgaag

SEQ ID NO: 1872952 - DNA, 15 bp, Homo sapiens
aaggtcagatgaagg

SEQ ID NO: 1872953 - DNA, 15 bp, Homo sapiens
aggtcagatgaagga

SEQ ID NO: 1872954 - DNA, 15 bp, Homo sapiens
ggtcagatgaaggac

SEQ ID NO: 1872955 - DNA, 15 bp, Homo sapiens
gtcagatgaaggact

SEQ ID NO: 1872956 - DNA, 15 bp, Homo sapiens
tcagatgaaggactt

SEQ ID NO: 1872957 - DNA, 15 bp, Homo sapiens
cagatgaaggacttc

SEQ ID NO: 1872958 - DNA, 15 bp, Homo sapiens
agatgaaggacttca

SEQ ID NO: 1872959 - DNA, 15 bp, Homo sapiens
gatgaaggacttcag

SEQ ID NO: 1872960 - DNA, 15 bp, Homo sapiens
atgaaggacttcaga

SEQ ID NO: 1872961 - DNA, 15 bp, Homo sapiens
tgaaggacttcagag

SEQ ID NO: 1872962 - DNA, 15 bp, Homo sapiens
gaaggacttcagagt

SEQ ID NO: 1872963 - DNA, 15 bp, Homo sapiens
aaggacttcagagtg

SEQ ID NO: 1872964 - DNA, 15 bp, Homo sapiens
aggacttcagagtgt

SEQ ID NO: 1872965 - DNA, 15 bp, Homo sapiens
ggacttcagagtgta

SEQ ID NO: 1872966 - DNA, 15 bp, Homo sapiens
gacttcagagtgtac

SEQ ID NO: 1872967 - DNA, 15 bp, Homo sapiens
acttcagagtgtaca

SEQ ID NO: 1872968 - DNA, 15 bp, Homo sapiens
cttcagagtgtacat

SEQ ID NO: 1872969 - DNA, 15 bp, Homo sapiens
ttcagagtgtacatt

SEQ ID NO: 1872970 - DNA, 15 bp, Homo sapiens
tcagagtgtacattt

SEQ ID NO: 1872971 - DNA, 15 bp, Homo sapiens
cagagtgtacatttc

SEQ ID NO: 1872972 - DNA, 15 bp, Homo sapiens
agagtgtacatttct

SEQ ID NO: 1872973 - DNA, 15 bp, Homo sapiens
gagtgtacatttctg

SEQ ID NO: 1872974 - DNA, 15 bp, Homo sapiens
agtgtacatttctga

SEQ ID NO: 1872975 - DNA, 15 bp, Homo sapiens
gtgtacatttctgaa

SEQ ID NO: 1872976 - DNA, 15 bp, Homo sapiens
tgtacatttctgaat

SEQ ID NO: 1872977 - DNA, 15 bp, Homo sapiens
gtacatttctgaatc

SEQ ID NO: 1872978 - DNA, 15 bp, Homo sapiens
tacatttctgaatcc

SEQ ID NO: 1872979 - DNA, 15 bp, Homo sapiens
acatttctgaatccc

SEQ ID NO: 1872980 - DNA, 15 bp, Homo sapiens
catttctgaatcccc

SEQ ID NO: 1872981 - DNA, 15 bp, Homo sapiens
atttctgaatcccca

SEQ ID NO: 1872982 - DNA, 15 bp, Homo sapiens
tttctgaatccccaa

SEQ ID NO: 1872983 - DNA, 15 bp, Homo sapiens
ttctgaatccccaat

SEQ ID NO: 1872984 - DNA, 15 bp, Homo sapiens
tctgaatccccaata

SEQ ID NO: 1872985 - DNA, 15 bp, Homo sapiens
ctgaatccccaatac

SEQ ID NO: 1872986 - DNA, 15 bp, Homo sapiens
tgaatccccaatact

SEQ ID NO: 1872987 - DNA, 15 bp, Homo sapiens
gaatccccaatactc

SEQ ID NO: 1872988 - DNA, 15 bp, Homo sapiens
aatccccaatactca

SEQ ID NO: 1872989 - DNA, 15 bp, Homo sapiens
atccccaatactcag

SEQ ID NO: 1872990 - DNA, 15 bp, Homo sapiens
tccccaatactcagt

SEQ ID NO: 1872991 - DNA, 15 bp, Homo sapiens
ccccaatactcagtt

SEQ ID NO: 1872992 - DNA, 15 bp, Homo sapiens
cccaatactcagtta

SEQ ID NO: 1872993 - DNA, 15 bp, Homo sapiens
ccaatactcagttac

SEQ ID NO: 1872994 - DNA, 15 bp, Homo sapiens
caatactcagttacc

SEQ ID NO: 1872995 - DNA, 15 bp, Homo sapiens
aatactcagttacct

SEQ ID NO: 1872996 - DNA, 15 bp, Homo sapiens
atactcagttacctt

SEQ ID NO: 1872997 - DNA, 15 bp, Homo sapiens
tactcagttaccttg

SEQ ID NO: 1872998 - DNA, 15 bp, Homo sapiens
actcagttaccttgc

SEQ ID NO: 1872999 - DNA, 15 bp, Homo sapiens
ctcagttaccttgct

SEQ ID NO: 1873000 - DNA, 15 bp, Homo sapiens
tcagttaccttgcta

SEQ ID NO: 1873001 - DNA, 15 bp, Homo sapiens
cagttaccttgctaa

SEQ ID NO: 1873002 - DNA, 15 bp, Homo sapiens
agttaccttgctaac

SEQ ID NO: 1873003 - DNA, 15 bp, Homo sapiens
gttaccttgctaact

SEQ ID NO: 1873004 - DNA, 15 bp, Homo sapiens
ttaccttgctaactg

SEQ ID NO: 1873005 - DNA, 15 bp, Homo sapiens
taccttgctaactgg

SEQ ID NO: 1873006 - DNA, 15 bp, Homo sapiens
accttgctaactgga

SEQ ID NO: 1873007 - DNA, 15 bp, Homo sapiens
ccttgctaactggag

SEQ ID NO: 1873008 - DNA, 15 bp, Homo sapiens
cttgctaactggaga

SEQ ID NO: 1873009 - DNA, 15 bp, Homo sapiens
ttgctaactggagag

SEQ ID NO: 1873010 - DNA, 15 bp, Homo sapiens
tgctaactggagaga

SEQ ID NO: 1873011 - DNA, 15 bp, Homo sapiens
gctaactggagagaa

SEQ ID NO: 1873012 - DNA, 15 bp, Homo sapiens
ctaactggagagaag

SEQ ID NO: 1873013 - DNA, 15 bp, Homo sapiens
taactggagagaagg

SEQ ID NO: 1873014 - DNA, 15 bp, Homo sapiens
aactggagagaaggg

SEQ ID NO: 1873015 - DNA, 15 bp, Homo sapiens
actggagagaaggga

SEQ ID NO: 1873016 - DNA, 15 bp, Homo sapiens
ctggagagaagggat

SEQ ID NO: 1873017 - DNA, 15 bp, Homo sapiens
tggagagaagggatt

SEQ ID NO: 1873018 - DNA, 15 bp, Homo sapiens
ggagagaagggattt

SEQ ID NO: 1873019 - DNA, 15 bp, Homo sapiens
gagagaagggattta

SEQ ID NO: 1873020 - DNA, 15 bp, Homo sapiens
agagaagggatttaa

SEQ ID NO: 1873021 - DNA, 15 bp, Homo sapiens
gagaagggatttaac

SEQ ID NO: 1873022 - DNA, 15 bp, Homo sapiens
agaagggatttaacc

SEQ ID NO: 1873023 - DNA, 15 bp, Homo sapiens
gaagggatttaaccc

SEQ ID NO: 1873024 - DNA, 15 bp, Homo sapiens
aagggatttaaccca

SEQ ID NO: 1873025 - DNA, 15 bp, Homo sapiens
agggatttaacccac

SEQ ID NO: 1873026 - DNA, 15 bp, Homo sapiens
gggatttaacccacc

SEQ ID NO: 1873027 - DNA, 15 bp, Homo sapiens
ggatttaacccaccc

SEQ ID NO: 1873028 - DNA, 15 bp, Homo sapiens
gatttaacccaccca

SEQ ID NO: 1873029 - DNA, 15 bp, Homo sapiens
atttaacccacccac

SEQ ID NO: 1873030 - DNA, 15 bp, Homo sapiens
tttaacccacccacc

SEQ ID NO: 1873031 - DNA, 15 bp, Homo sapiens
ttaacccacccacct

SEQ ID NO: 1873032 - DNA, 15 bp, Homo sapiens
taacccacccacctc

SEQ ID NO: 1873033 - DNA, 15 bp, Homo sapiens
aacccacccacctcc

SEQ ID NO: 1873034 - DNA, 15 bp, Homo sapiens
acccacccacctcca

SEQ ID NO: 1873035 - DNA, 15 bp, Homo sapiens
cccacccacctccaa

SEQ ID NO: 1873036 - DNA, 15 bp, Homo sapiens
ccacccacctccaac

SEQ ID NO: 1873037 - DNA, 15 bp, Homo sapiens
cacccacctccaact

SEQ ID NO: 1873038 - DNA, 15 bp, Homo sapiens
acccacctccaactc

SEQ ID NO: 1873039 - DNA, 15 bp, Homo sapiens
cccacctccaactcc

SEQ ID NO: 1873040 - DNA, 15 bp, Homo sapiens
ccacctccaactcct

SEQ ID NO: 1873041 - DNA, 15 bp, Homo sapiens
cacctccaactcctg

SEQ ID NO: 1873042 - DNA, 15 bp, Homo sapiens
acctccaactcctga

SEQ ID NO: 1873043 - DNA, 15 bp, Homo sapiens
cctccaactcctgat

SEQ ID NO: 1873044 - DNA, 15 bp, Homo sapiens
ctccaactcctgata

SEQ ID NO: 1873045 - DNA, 15 bp, Homo sapiens
tccaactcctgatag

SEQ ID NO: 1873046 - DNA, 15 bp, Homo sapiens
ccaactcctgatagg

SEQ ID NO: 1873047 - DNA, 15 bp, Homo sapiens
caactcctgatagga

SEQ ID NO: 1873048 - DNA, 15 bp, Homo sapiens
aactcctgataggaa

SEQ ID NO: 1873049 - DNA, 15 bp, Homo sapiens
actcctgataggaag

SEQ ID NO: 1873050 - DNA, 15 bp, Homo sapiens
ctcctgataggaaga

SEQ ID NO: 1873051 - DNA, 15 bp, Homo sapiens
tcctgataggaagaa

SEQ ID NO: 1873052 - DNA, 15 bp, Homo sapiens
cctgataggaagaat

SEQ ID NO: 1873053 - DNA, 15 bp, Homo sapiens
ctgataggaagaatt

SEQ ID NO: 1873054 - DNA, 15 bp, Homo sapiens
tgataggaagaatta

SEQ ID NO: 1873055 - DNA, 15 bp, Homo sapiens
gataggaagaattag

SEQ ID NO: 1873056 - DNA, 15 bp, Homo sapiens
ataggaagaattagg

SEQ ID NO: 1873057 - DNA, 15 bp, Homo sapiens
taggaagaattagga

SEQ ID NO: 1873058 - DNA, 15 bp, Homo sapiens
aggaagaattaggat

SEQ ID NO: 1873059 - DNA, 15 bp, Homo sapiens
ggaagaattaggatg

SEQ ID NO: 1873060 - DNA, 15 bp, Homo sapiens
gaagaattaggatga

SEQ ID NO: 1873061 - DNA, 15 bp, Homo sapiens
aagaattaggatgat

SEQ ID NO: 1873062 - DNA, 15 bp, Homo sapiens
agaattaggatgatg

SEQ ID NO: 1873063 - DNA, 15 bp, Homo sapiens
gaattaggatgatgg

SEQ ID NO: 1873064 - DNA, 15 bp, Homo sapiens
aattaggatgatggt

SEQ ID NO: 1873065 - DNA, 15 bp, Homo sapiens
attaggatgatggtg

SEQ ID NO: 1873066 - DNA, 15 bp, Homo sapiens
ttaggatgatggtgc

SEQ ID NO: 1873067 - DNA, 15 bp, Homo sapiens
taggatgatggtgca

SEQ ID NO: 1873068 - DNA, 15 bp, Homo sapiens
aggatgatggtgcag

SEQ ID NO: 1873069 - DNA, 15 bp, Homo sapiens
ggatgatggtgcaga

SEQ ID NO: 1873070 - DNA, 15 bp, Homo sapiens
gatgatggtgcagat

SEQ ID NO: 1873071 - DNA, 15 bp, Homo sapiens
atgatggtgcagatg

SEQ ID NO: 1873072 - DNA, 15 bp, Homo sapiens
tgatggtgcagatgg

SEQ ID NO: 1873073 - DNA, 15 bp, Homo sapiens
gatggtgcagatggt

SEQ ID NO: 1873074 - DNA, 15 bp, Homo sapiens
atggtgcagatggtt

SEQ ID NO: 1873075 - DNA, 15 bp, Homo sapiens
tggtgcagatggttg

SEQ ID NO: 1873076 - DNA, 15 bp, Homo sapiens
ggtgcagatggttga

SEQ ID NO: 1873077 - DNA, 15 bp, Homo sapiens
gtgcagatggttgag

SEQ ID NO: 1873078 - DNA, 15 bp, Homo sapiens
tgcagatggttgaga

SEQ ID NO: 1873079 - DNA, 15 bp, Homo sapiens
gcagatggttgagaa

SEQ ID NO: 1873080 - DNA, 15 bp, Homo sapiens
cagatggttgagaaa

SEQ ID NO: 1873081 - DNA, 15 bp, Homo sapiens
agatggttgagaaag

SEQ ID NO: 1873082 - DNA, 15 bp, Homo sapiens
gatggttgagaaagg

SEQ ID NO: 1873083 - DNA, 15 bp, Homo sapiens
atggttgagaaagga

SEQ ID NO: 1873084 - DNA, 15 bp, Homo sapiens
tggttgagaaaggag

SEQ ID NO: 1873085 - DNA, 15 bp, Homo sapiens
ggttgagaaaggagg

SEQ ID NO: 1873086 - DNA, 15 bp, Homo sapiens
gttgagaaaggaggt

SEQ ID NO: 1873087 - DNA, 15 bp, Homo sapiens
ttgagaaaggaggtg

SEQ ID NO: 1873088 - DNA, 15 bp, Homo sapiens
tgagaaaggaggtgg

SEQ ID NO: 1873089 - DNA, 15 bp, Homo sapiens
gagaaaggaggtggg

SEQ ID NO: 1873090 - DNA, 15 bp, Homo sapiens
agaaaggaggtgggg

SEQ ID NO: 1873091 - DNA, 15 bp, Homo sapiens
gaaaggaggtgggga

SEQ ID NO: 1873092 - DNA, 15 bp, Homo sapiens
aaaggaggtggggag

SEQ ID NO: 1873093 - DNA, 15 bp, Homo sapiens
aaggaggtggggagg

SEQ ID NO: 1873094 - DNA, 15 bp, Homo sapiens
aggaggtggggagga

SEQ ID NO: 1873095 - DNA, 15 bp, Homo sapiens
ggaggtggggaggag

SEQ ID NO: 1873096 - DNA, 15 bp, Homo sapiens
gaggtggggaggaga

SEQ ID NO: 1873097 - DNA, 15 bp, Homo sapiens
aggtggggaggagac

SEQ ID NO: 1873098 - DNA, 15 bp, Homo sapiens
ggtggggaggagact

SEQ ID NO: 1873099 - DNA, 15 bp, Homo sapiens
gtggggaggagactg

SEQ ID NO: 1873100 - DNA, 15 bp, Homo sapiens
tggggaggagactga

SEQ ID NO: 1873101 - DNA, 15 bp, Homo sapiens
ggggaggagactgaa

SEQ ID NO: 1873102 - DNA, 15 bp, Homo sapiens
gggaggagactgaaa

SEQ ID NO: 1873103 - DNA, 15 bp, Homo sapiens
ggaggagactgaaag

SEQ ID NO: 1873104 - DNA, 15 bp, Homo sapiens
gaggagactgaaagg

SEQ ID NO: 1873105 - DNA, 15 bp, Homo sapiens
aggagactgaaaggc

SEQ ID NO: 1873106 - DNA, 15 bp, Homo sapiens
ggagactgaaaggct

SEQ ID NO: 1873107 - DNA, 15 bp, Homo sapiens
gagactgaaaggctt

SEQ ID NO: 1873108 - DNA, 15 bp, Homo sapiens
agactgaaaggctta

SEQ ID NO: 1873109 - DNA, 15 bp, Homo sapiens
gactgaaaggcttaa

SEQ ID NO: 1873110 - DNA, 15 bp, Homo sapiens
actgaaaggcttaat

SEQ ID NO: 1873111 - DNA, 15 bp, Homo sapiens
ctgaaaggcttaatt

SEQ ID NO: 1873112 - DNA, 15 bp, Homo sapiens
tgaaaggcttaatta

SEQ ID NO: 1873113 - DNA, 15 bp, Homo sapiens
gaaaggcttaattaa

SEQ ID NO: 1873114 - DNA, 15 bp, Homo sapiens
aaaggcttaattaat

SEQ ID NO: 1873115 - DNA, 15 bp, Homo sapiens
aaggcttaattaatt

SEQ ID NO: 1873116 - DNA, 15 bp, Homo sapiens
aggcttaattaattg

SEQ ID NO: 1873117 - DNA, 15 bp, Homo sapiens
ggcttaattaattgt

SEQ ID NO: 1873118 - DNA, 15 bp, Homo sapiens
gcttaattaattgtt

SEQ ID NO: 1873119 - DNA, 15 bp, Homo sapiens
cttaattaattgtta

SEQ ID NO: 1873120 - DNA, 15 bp, Homo sapiens
ttaattaattgttat

SEQ ID NO: 1873121 - DNA, 15 bp, Homo sapiens
taattaattgttatt

SEQ ID NO: 1873122 - DNA, 15 bp, Homo sapiens
aattaattgttattt

SEQ ID NO: 1873123 - DNA, 15 bp, Homo sapiens
attaattgttattta

SEQ ID NO: 1873124 - DNA, 15 bp, Homo sapiens
ttaattgttatttaa

SEQ ID NO: 1873125 - DNA, 15 bp, Homo sapiens
taattgttatttaaa

SEQ ID NO: 1873126 - DNA, 15 bp, Homo sapiens
aattgttatttaaag

SEQ ID NO: 1873127 - DNA, 15 bp, Homo sapiens
attgttatttaaaga

SEQ ID NO: 1873128 - DNA, 15 bp, Homo sapiens
ttgttatttaaagaa

SEQ ID NO: 1873129 - DNA, 15 bp, Homo sapiens
tgttatttaaagaaa

SEQ ID NO: 1873130 - DNA, 15 bp, Homo sapiens
gttatttaaagaaat

SEQ ID NO: 1873131 - DNA, 15 bp, Homo sapiens
ttatttaaagaaatc

SEQ ID NO: 1873132 - DNA, 15 bp, Homo sapiens
tatttaaagaaatct

SEQ ID NO: 1873133 - DNA, 15 bp, Homo sapiens
atttaaagaaatctg

SEQ ID NO: 1873134 - DNA, 15 bp, Homo sapiens
tttaaagaaatctgg

SEQ ID NO: 1873135 - DNA, 15 bp, Homo sapiens
ttaaagaaatctgga

SEQ ID NO: 1873136 - DNA, 15 bp, Homo sapiens
taaagaaatctggaa

SEQ ID NO: 1873137 - DNA, 15 bp, Homo sapiens
aaagaaatctggaaa

SEQ ID NO: 1873138 - DNA, 15 bp, Homo sapiens
aagaaatctggaaat

SEQ ID NO: 1873139 - DNA, 15 bp, Homo sapiens
agaaatctggaaatc

SEQ ID NO: 1873140 - DNA, 15 bp, Homo sapiens
gaaatctggaaatcc

SEQ ID NO: 1873141 - DNA, 15 bp, Homo sapiens
aaatctggaaatcct

SEQ ID NO: 1873142 - DNA, 15 bp, Homo sapiens
aatctggaaatccta

SEQ ID NO: 1873143 - DNA, 15 bp, Homo sapiens
atctggaaatcctac

SEQ ID NO: 1873144 - DNA, 15 bp, Homo sapiens
tctggaaatcctaca

SEQ ID NO: 1873145 - DNA, 15 bp, Homo sapiens
ctggaaatcctacaa

SEQ ID NO: 1873146 - DNA, 15 bp, Homo sapiens
tggaaatcctacaag

SEQ ID NO: 1873147 - DNA, 15 bp, Homo sapiens
ggaaatcctacaagt

SEQ ID NO: 1873148 - DNA, 15 bp, Homo sapiens
gaaatcctacaagta

SEQ ID NO: 1873149 - DNA, 15 bp, Homo sapiens
aaatcctacaagtaa

SEQ ID NO: 1873150 - DNA, 15 bp, Homo sapiens
aatcctacaagtaag

SEQ ID NO: 1873151 - DNA, 15 bp, Homo sapiens
atcctacaagtaagc

SEQ ID NO: 1873152 - DNA, 15 bp, Homo sapiens
tcctacaagtaagca

SEQ ID NO: 1873153 - DNA, 15 bp, Homo sapiens
cctacaagtaagcaa

SEQ ID NO: 1873154 - DNA, 15 bp, Homo sapiens
ctacaagtaagcaac

SEQ ID NO: 1873155 - DNA, 15 bp, Homo sapiens
tacaagtaagcaacg

SEQ ID NO: 1873156 - DNA, 15 bp, Homo sapiens
acaagtaagcaacga

SEQ ID NO: 1873157 - DNA, 15 bp, Homo sapiens
caagtaagcaacgat

SEQ ID NO: 1873158 - DNA, 15 bp, Homo sapiens
aagtaagcaacgatg

SEQ ID NO: 1873159 - DNA, 15 bp, Homo sapiens
agtaagcaacgatgc

SEQ ID NO: 1873160 - DNA, 15 bp, Homo sapiens
gtaagcaacgatgcc

SEQ ID NO: 1873161 - DNA, 15 bp, Homo sapiens
taagcaacgatgcca

SEQ ID NO: 1873162 - DNA, 15 bp, Homo sapiens
aagcaacgatgccaa

SEQ ID NO: 1873163 - DNA, 15 bp, Homo sapiens
agcaacgatgccaaa

SEQ ID NO: 1873164 - DNA, 15 bp, Homo sapiens
gcaacgatgccaaat

SEQ ID NO: 1873165 - DNA, 15 bp, Homo sapiens
caacgatgccaaatg

SEQ ID NO: 1873166 - DNA, 15 bp, Homo sapiens
aacgatgccaaatga

SEQ ID NO: 1873167 - DNA, 15 bp, Homo sapiens
acgatgccaaatgaa

SEQ ID NO: 1873168 - DNA, 15 bp, Homo sapiens
cgatgccaaatgaaa

SEQ ID NO: 1873169 - DNA, 15 bp, Homo sapiens
gatgccaaatgaaaa

SEQ ID NO: 1873170 - DNA, 15 bp, Homo sapiens
atgccaaatgaaaag

SEQ ID NO: 1873171 - DNA, 15 bp, Homo sapiens
tgccaaatgaaaagt

SEQ ID NO: 1873172 - DNA, 15 bp, Homo sapiens
gccaaatgaaaagta

SEQ ID NO: 1873173 - DNA, 15 bp, Homo sapiens
ccaaatgaaaagtat

SEQ ID NO: 1873174 - DNA, 15 bp, Homo sapiens
caaatgaaaagtata

SEQ ID NO: 1873175 - DNA, 15 bp, Homo sapiens
aaatgaaaagtataa

SEQ ID NO: 1873176 - DNA, 15 bp, Homo sapiens
aatgaaaagtataat

SEQ ID NO: 1873177 - DNA, 15 bp, Homo sapiens
atgaaaagtataatt

SEQ ID NO: 1873178 - DNA, 15 bp, Homo sapiens
tgaaaagtataatta

SEQ ID NO: 1873179 - DNA, 15 bp, Homo sapiens
gaaaagtataattac

SEQ ID NO: 1873180 - DNA, 15 bp, Homo sapiens
aaaagtataattacc

SEQ ID NO: 1873181 - DNA, 15 bp, Homo sapiens
aaagtataattacca

SEQ ID NO: 1873182 - DNA, 15 bp, Homo sapiens
aagtataattaccaa

SEQ ID NO: 1873183 - DNA, 15 bp, Homo sapiens
agtataattaccaag

SEQ ID NO: 1873184 - DNA, 15 bp, Homo sapiens
gtataattaccaagg

SEQ ID NO: 1873185 - DNA, 15 bp, Homo sapiens
tataattaccaaggt

SEQ ID NO: 1873186 - DNA, 15 bp, Homo sapiens
ataattaccaaggta

SEQ ID NO: 1873187 - DNA, 15 bp, Homo sapiens
taattaccaaggtac

SEQ ID NO: 1873188 - DNA, 15 bp, Homo sapiens
aattaccaaggtaca

SEQ ID NO: 1873189 - DNA, 15 bp, Homo sapiens
attaccaaggtacat

SEQ ID NO: 1873190 - DNA, 15 bp, Homo sapiens
ttaccaaggtacatg

SEQ ID NO: 1873191 - DNA, 15 bp, Homo sapiens
taccaaggtacatgt

SEQ ID NO: 1873192 - DNA, 15 bp, Homo sapiens
accaaggtacatgtt

SEQ ID NO: 1873193 - DNA, 15 bp, Homo sapiens
ccaaggtacatgttg

SEQ ID NO: 1873194 - DNA, 15 bp, Homo sapiens
caaggtacatgttgt

SEQ ID NO: 1873195 - DNA, 15 bp, Homo sapiens
aaggtacatgttgta

SEQ ID NO: 1873196 - DNA, 15 bp, Homo sapiens
aggtacatgttgtac

SEQ ID NO: 1873197 - DNA, 15 bp, Homo sapiens
ggtacatgttgtacc

SEQ ID NO: 1873198 - DNA, 15 bp, Homo sapiens
gtacatgttgtaccc

SEQ ID NO: 1873199 - DNA, 15 bp, Homo sapiens
tacatgttgtaccct

SEQ ID NO: 1873200 - DNA, 15 bp, Homo sapiens
acatgttgtaccctc

SEQ ID NO: 1873201 - DNA, 15 bp, Homo sapiens
catgttgtaccctcc

SEQ ID NO: 1873202 - DNA, 15 bp, Homo sapiens
atgttgtaccctcca

SEQ ID NO: 1873203 - DNA, 15 bp, Homo sapiens
tgttgtaccctccaa

SEQ ID NO: 1873204 - DNA, 15 bp, Homo sapiens
gttgtaccctccaac

SEQ ID NO: 1873205 - DNA, 15 bp, Homo sapiens
ttgtaccctccaaca

SEQ ID NO: 1873206 - DNA, 15 bp, Homo sapiens
tgtaccctccaacag

SEQ ID NO: 1873207 - DNA, 15 bp, Homo sapiens
gtaccctccaacagc

SEQ ID NO: 1873208 - DNA, 15 bp, Homo sapiens
taccctccaacagca

SEQ ID NO: 1873209 - DNA, 15 bp, Homo sapiens
accctccaacagcaa

SEQ ID NO: 1873210 - DNA, 15 bp, Homo sapiens
ccctccaacagcaac

SEQ ID NO: 1873211 - DNA, 15 bp, Homo sapiens
cctccaacagcaaca

SEQ ID NO: 1873212 - DNA, 15 bp, Homo sapiens
ctccaacagcaacaa

SEQ ID NO: 1873213 - DNA, 15 bp, Homo sapiens
tccaacagcaacaag

SEQ ID NO: 1873214 - DNA, 15 bp, Homo sapiens
ccaacagcaacaaga

SEQ ID NO: 1873215 - DNA, 15 bp, Homo sapiens
caacagcaacaagat

SEQ ID NO: 1873216 - DNA, 15 bp, Homo sapiens
aacagcaacaagatg

SEQ ID NO: 1873217 - DNA, 15 bp, Homo sapiens
acagcaacaagatga

SEQ ID NO: 1873218 - DNA, 15 bp, Homo sapiens
cagcaacaagatgaa

SEQ ID NO: 1873219 - DNA, 15 bp, Homo sapiens
agcaacaagatgaaa

SEQ ID NO: 1873220 - DNA, 15 bp, Homo sapiens
gcaacaagatgaaat

SEQ ID NO: 1873221 - DNA, 15 bp, Homo sapiens
caacaagatgaaatg

SEQ ID NO: 1873222 - DNA, 15 bp, Homo sapiens
aacaagatgaaatgt

SEQ ID NO: 1873223 - DNA, 15 bp, Homo sapiens
acaagatgaaatgtt

SEQ ID NO: 1873224 - DNA, 15 bp, Homo sapiens
caagatgaaatgttt

SEQ ID NO: 1873225 - DNA, 15 bp, Homo sapiens
aagatgaaatgttta

SEQ ID NO: 1873226 - DNA, 15 bp, Homo sapiens
agatgaaatgtttat

SEQ ID NO: 1873227 - DNA, 15 bp, Homo sapiens
gatgaaatgtttata

SEQ ID NO: 1873228 - DNA, 15 bp, Homo sapiens
atgaaatgtttatac

SEQ ID NO: 1873229 - DNA, 15 bp, Homo sapiens
tgaaatgtttatacc

SEQ ID NO: 1873230 - DNA, 15 bp, Homo sapiens
gaaatgtttatacca

SEQ ID NO: 1873231 - DNA, 15 bp, Homo sapiens
aaatgtttataccat

SEQ ID NO: 1873232 - DNA, 15 bp, Homo sapiens
aatgtttataccata

SEQ ID NO: 1873233 - DNA, 15 bp, Homo sapiens
atgtttataccataa

SEQ ID NO: 1873234 - DNA, 15 bp, Homo sapiens
tgtttataccataac

SEQ ID NO: 1873235 - DNA, 15 bp, Homo sapiens
gtttataccataaca

SEQ ID NO: 1873236 - DNA, 15 bp, Homo sapiens
tttataccataacaa

SEQ ID NO: 1873237 - DNA, 15 bp, Homo sapiens
ttataccataacaag

SEQ ID NO: 1873238 - DNA, 15 bp, Homo sapiens
tataccataacaaga

SEQ ID NO: 1873239 - DNA, 15 bp, Homo sapiens
ataccataacaagaa

SEQ ID NO: 1873240 - DNA, 15 bp, Homo sapiens
taccataacaagaac

SEQ ID NO: 1873241 - DNA, 15 bp, Homo sapiens
accataacaagaact

SEQ ID NO: 1873242 - DNA, 15 bp, Homo sapiens
ccataacaagaactt

SEQ ID NO: 1873243 - DNA, 15 bp, Homo sapiens
cataacaagaacttg

SEQ ID NO: 1873244 - DNA, 15 bp, Homo sapiens
ataacaagaacttgg

SEQ ID NO: 1873245 - DNA, 15 bp, Homo sapiens
taacaagaacttgga

SEQ ID NO: 1873246 - DNA, 15 bp, Homo sapiens
aacaagaacttggaa

SEQ ID NO: 1873247 - DNA, 15 bp, Homo sapiens
acaagaacttggaac

SEQ ID NO: 1873248 - DNA, 15 bp, Homo sapiens
caagaacttggaacc

SEQ ID NO: 1873249 - DNA, 15 bp, Homo sapiens
aagaacttggaacct

SEQ ID NO: 1873250 - DNA, 15 bp, Homo sapiens
agaacttggaaccta

SEQ ID NO: 1873251 - DNA, 15 bp, Homo sapiens
gaacttggaacctac

SEQ ID NO: 1873252 - DNA, 15 bp, Homo sapiens
aacttggaacctaca

SEQ ID NO: 1873253 - DNA, 15 bp, Homo sapiens
acttggaacctacac

SEQ ID NO: 1873254 - DNA, 15 bp, Homo sapiens
cttggaacctacact

SEQ ID NO: 1873255 - DNA, 15 bp, Homo sapiens
ttggaacctacactt

SEQ ID NO: 1873256 - DNA, 15 bp, Homo sapiens
tggaacctacacttt

SEQ ID NO: 1873257 - DNA, 15 bp, Homo sapiens
ggaacctacactttt

SEQ ID NO: 1873258 - DNA, 15 bp, Homo sapiens
gaacctacacttttg

SEQ ID NO: 1873259 - DNA, 15 bp, Homo sapiens
aacctacacttttga

SEQ ID NO: 1873260 - DNA, 15 bp, Homo sapiens
acctacacttttgac

SEQ ID NO: 1873261 - DNA, 15 bp, Homo sapiens
cctacacttttgaca

SEQ ID NO: 1873262 - DNA, 15 bp, Homo sapiens
ctacacttttgacaa

SEQ ID NO: 1873263 - DNA, 15 bp, Homo sapiens
tacacttttgacaaa

SEQ ID NO: 1873264 - DNA, 15 bp, Homo sapiens
acacttttgacaaaa

SEQ ID NO: 1873265 - DNA, 15 bp, Homo sapiens
cacttttgacaaaaa

SEQ ID NO: 1873266 - DNA, 15 bp, Homo sapiens
acttttgacaaaaac

SEQ ID NO: 1873267 - DNA, 15 bp, Homo sapiens
cttttgacaaaaact

SEQ ID NO: 1873268 - DNA, 15 bp, Homo sapiens
ttttgacaaaaacta

SEQ ID NO: 1873269 - DNA, 15 bp, Homo sapiens
tttgacaaaaactat

SEQ ID NO: 1873270 - DNA, 15 bp, Homo sapiens
ttgacaaaaactata

SEQ ID NO: 1873271 - DNA, 15 bp, Homo sapiens
tgacaaaaactataa

SEQ ID NO: 1873272 - DNA, 15 bp, Homo sapiens
gacaaaaactataat

SEQ ID NO: 1873273 - DNA, 15 bp, Homo sapiens
acaaaaactataatc

SEQ ID NO: 1873274 - DNA, 15 bp, Homo sapiens
caaaaactataatct

SEQ ID NO: 1873275 - DNA, 15 bp, Homo sapiens
aaaaactataatctc

SEQ ID NO: 1873276 - DNA, 15 bp, Homo sapiens
aaaactataatctct

SEQ ID NO: 1873277 - DNA, 15 bp, Homo sapiens
aaactataatctctc

SEQ ID NO: 1873278 - DNA, 15 bp, Homo sapiens
aactataatctctca

SEQ ID NO: 1873279 - DNA, 15 bp, Homo sapiens
actataatctctcag

SEQ ID NO: 1873280 - DNA, 15 bp, Homo sapiens
ctataatctctcagg

SEQ ID NO: 1873281 - DNA, 15 bp, Homo sapiens
tataatctctcaggc

SEQ ID NO: 1873282 - DNA, 15 bp, Homo sapiens
ataatctctcaggct

SEQ ID NO: 1873283 - DNA, 15 bp, Homo sapiens
taatctctcaggctc

SEQ ID NO: 1873284 - DNA, 15 bp, Homo sapiens
aatctctcaggctct

SEQ ID NO: 1873285 - DNA, 15 bp, Homo sapiens
atctctcaggctctc

SEQ ID NO: 1873286 - DNA, 15 bp, Homo sapiens
tctctcaggctctca

SEQ ID NO: 1873287 - DNA, 15 bp, Homo sapiens
ctctcaggctctcag

SEQ ID NO: 1873288 - DNA, 15 bp, Homo sapiens
tctcaggctctcagg

SEQ ID NO: 1873289 - DNA, 15 bp, Homo sapiens
ctcaggctctcagga

SEQ ID NO: 1873290 - DNA, 15 bp, Homo sapiens
tcaggctctcaggat

SEQ ID NO: 1873291 - DNA, 15 bp, Homo sapiens
caggctctcaggatt

SEQ ID NO: 1873292 - DNA, 15 bp, Homo sapiens
aggctctcaggattg

SEQ ID NO: 1873293 - DNA, 15 bp, Homo sapiens
ggctctcaggattgt

SEQ ID NO: 1873294 - DNA, 15 bp, Homo sapiens
gctctcaggattgtt

SEQ ID NO: 1873295 - DNA, 15 bp, Homo sapiens
ctctcaggattgttt

SEQ ID NO: 1873296 - DNA, 15 bp, Homo sapiens
tctcaggattgtttt

SEQ ID NO: 1873297 - DNA, 15 bp, Homo sapiens
ctcaggattgttttt

SEQ ID NO: 1873298 - DNA, 15 bp, Homo sapiens
tcaggattgtttttt

SEQ ID NO: 1873299 - DNA, 15 bp, Homo sapiens
caggattgttttttt

SEQ ID NO: 1873300 - DNA, 15 bp, Homo sapiens
aggattgtttttttt

SEQ ID NO: 1873301 - DNA, 15 bp, Homo sapiens
ggattgttttttttt

SEQ ID NO: 1873302 - DNA, 15 bp, Homo sapiens
gattgtttttttttt

SEQ ID NO: 1873303 - DNA, 15 bp, Homo sapiens
attgttttttttttt

SEQ ID NO: 1873304 - DNA, 15 bp, Homo sapiens
tgttttttttttttc

SEQ ID NO: 1873305 - DNA, 15 bp, Homo sapiens
gttttttttttttct

SEQ ID NO: 1873306 - DNA, 15 bp, Homo sapiens
tttttttttctttgc

SEQ ID NO: 1873307 - DNA, 15 bp, Homo sapiens
ttttttttctttgca

SEQ ID NO: 1873308 - DNA, 15 bp, Homo sapiens
tttttttctttgcaa

SEQ ID NO: 1873309 - DNA, 15 bp, Homo sapiens
ttttttctttgcaaa

SEQ ID NO: 1873310 - DNA, 15 bp, Homo sapiens
tttttctttgcaaag

SEQ ID NO: 1873311 - DNA, 15 bp, Homo sapiens
ttttctttgcaaagc

SEQ ID NO: 1873312 - DNA, 15 bp, Homo sapiens
tttctttgcaaagct

SEQ ID NO: 1873313 - DNA, 15 bp, Homo sapiens
ttctttgcaaagctt

SEQ ID NO: 1873314 - DNA, 15 bp, Homo sapiens
tctttgcaaagcttc

SEQ ID NO: 1873315 - DNA, 15 bp, Homo sapiens
ctttgcaaagcttcc

SEQ ID NO: 1873316 - DNA, 15 bp, Homo sapiens
tttgcaaagcttccc

SEQ ID NO: 1873317 - DNA, 15 bp, Homo sapiens
ttgcaaagcttcccc

SEQ ID NO: 1873318 - DNA, 15 bp, Homo sapiens
tgcaaagcttcccca

SEQ ID NO: 1873319 - DNA, 15 bp, Homo sapiens
gcaaagcttccccaa

SEQ ID NO: 1873320 - DNA, 15 bp, Homo sapiens
caaagcttccccaag

SEQ ID NO: 1873321 - DNA, 15 bp, Homo sapiens
aaagcttccccaaga

SEQ ID NO: 1873322 - DNA, 15 bp, Homo sapiens
aagcttccccaagaa

SEQ ID NO: 1873323 - DNA, 15 bp, Homo sapiens
agcttccccaagaag

SEQ ID NO: 1873324 - DNA, 15 bp, Homo sapiens
gcttccccaagaagc

SEQ ID NO: 1873325 - DNA, 15 bp, Homo sapiens
cttccccaagaagct

SEQ ID NO: 1873326 - DNA, 15 bp, Homo sapiens
ttccccaagaagctg

SEQ ID NO: 1873327 - DNA, 15 bp, Homo sapiens
tccccaagaagctgt

SEQ ID NO: 1873328 - DNA, 15 bp, Homo sapiens
ccccaagaagctgtc

SEQ ID NO: 1873329 - DNA, 15 bp, Homo sapiens
cccaagaagctgtca

SEQ ID NO: 1873330 - DNA, 15 bp, Homo sapiens
ccaagaagctgtcaa

SEQ ID NO: 1873331 - DNA, 15 bp, Homo sapiens
caagaagctgtcaac

SEQ ID NO: 1873332 - DNA, 15 bp, Homo sapiens
aagaagctgtcaaca

SEQ ID NO: 1873333 - DNA, 15 bp, Homo sapiens
agaagctgtcaacag

SEQ ID NO: 1873334 - DNA, 15 bp, Homo sapiens
gaagctgtcaacaga

SEQ ID NO: 1873335 - DNA, 15 bp, Homo sapiens
aagctgtcaacagag

SEQ ID NO: 1873336 - DNA, 15 bp, Homo sapiens
agctgtcaacagaga

SEQ ID NO: 1873337 - DNA, 15 bp, Homo sapiens
gctgtcaacagagag

SEQ ID NO: 1873338 - DNA, 15 bp, Homo sapiens
ctgtcaacagagaga

SEQ ID NO: 1873339 - DNA, 15 bp, Homo sapiens
tgtcaacagagagag

SEQ ID NO: 1873340 - DNA, 15 bp, Homo sapiens
gtcaacagagagaga

SEQ ID NO: 1873341 - DNA, 15 bp, Homo sapiens
tcaacagagagagac

SEQ ID NO: 1873342 - DNA, 15 bp, Homo sapiens
aacagagagagacta

SEQ ID NO: 1873343 - DNA, 15 bp, Homo sapiens
acagagagagactac

SEQ ID NO: 1873344 - DNA, 15 bp, Homo sapiens
cagagagagactaca

SEQ ID NO: 1873345 - DNA, 15 bp, Homo sapiens
agagagagactacac

SEQ ID NO: 1873346 - DNA, 15 bp, Homo sapiens
gagagagactacact

SEQ ID NO: 1873347 - DNA, 15 bp, Homo sapiens
agagagactacactc

SEQ ID NO: 1873348 - DNA, 15 bp, Homo sapiens
gagagactacactcg

SEQ ID NO: 1873349 - DNA, 15 bp, Homo sapiens
agagactacactcga

SEQ ID NO: 1873350 - DNA, 15 bp, Homo sapiens
gagactacactcgag

SEQ ID NO: 1873351 - DNA, 15 bp, Homo sapiens
agactacactcgagc

SEQ ID NO: 1873352 - DNA, 15 bp, Homo sapiens
gactacactcgagca

SEQ ID NO: 1873353 - DNA, 15 bp, Homo sapiens
actacactcgagcat

SEQ ID NO: 1873354 - DNA, 15 bp, Homo sapiens
ctacactcgagcatg

SEQ ID NO: 1873355 - DNA, 15 bp, Homo sapiens
tacactcgagcatgg

SEQ ID NO: 1873356 - DNA, 15 bp, Homo sapiens
acactcgagcatggc

SEQ ID NO: 1873357 - DNA, 15 bp, Homo sapiens
cactcgagcatggct

SEQ ID NO: 1873358 - DNA, 15 bp, Homo sapiens
actcgagcatggcta

SEQ ID NO: 1873359 - DNA, 15 bp, Homo sapiens
ctcgagcatggctat

SEQ ID NO: 1873360 - DNA, 15 bp, Homo sapiens
tcgagcatggctatt

SEQ ID NO: 1873361 - DNA, 15 bp, Homo sapiens
cgagcatggctattt

SEQ ID NO: 1873362 - DNA, 15 bp, Homo sapiens
gagcatggctattta

SEQ ID NO: 1873363 - DNA, 15 bp, Homo sapiens
agcatggctatttat

SEQ ID NO: 1873364 - DNA, 15 bp, Homo sapiens
gcatggctatttata

SEQ ID NO: 1873365 - DNA, 15 bp, Homo sapiens
catggctatttatat

SEQ ID NO: 1873366 - DNA, 15 bp, Homo sapiens
atggctatttatatg

SEQ ID NO: 1873367 - DNA, 15 bp, Homo sapiens
tggctatttatatgt

SEQ ID NO: 1873368 - DNA, 15 bp, Homo sapiens
ggctatttatatgtt

SEQ ID NO: 1873369 - DNA, 15 bp, Homo sapiens
gctatttatatgttt

SEQ ID NO: 1873370 - DNA, 15 bp, Homo sapiens
ctatttatatgtttg

SEQ ID NO: 1873371 - DNA, 15 bp, Homo sapiens
tatttatatgtttgt

SEQ ID NO: 1873372 - DNA, 15 bp, Homo sapiens
atttatatgtttgtg

SEQ ID NO: 1873373 - DNA, 15 bp, Homo sapiens
tttatatgtttgtgt

SEQ ID NO: 1873374 - DNA, 15 bp, Homo sapiens
ttatatgtttgtgtt

SEQ ID NO: 1873375 - DNA, 15 bp, Homo sapiens
tatatgtttgtgttc

SEQ ID NO: 1873376 - DNA, 15 bp, Homo sapiens
atatgtttgtgttct

SEQ ID NO: 1873377 - DNA, 15 bp, Homo sapiens
tatgtttgtgttctg

SEQ ID NO: 1873378 - DNA, 15 bp, Homo sapiens
atgtttgtgttctgt

SEQ ID NO: 1873379 - DNA, 15 bp, Homo sapiens
tgtttgtgttctgtg

SEQ ID NO: 1873380 - DNA, 15 bp, Homo sapiens
gtttgtgttctgtga

SEQ ID NO: 1873381 - DNA, 15 bp, Homo sapiens
tttgtgttctgtgaa

SEQ ID NO: 1873382 - DNA, 15 bp, Homo sapiens
ttgtgttctgtgaat

SEQ ID NO: 1873383 - DNA, 15 bp, Homo sapiens
tgtgttctgtgaatt

SEQ ID NO: 1873384 - DNA, 15 bp, Homo sapiens
gtgttctgtgaattt

SEQ ID NO: 1873385 - DNA, 15 bp, Homo sapiens
tgttctgtgaatttt

SEQ ID NO: 1873386 - DNA, 15 bp, Homo sapiens
gttctgtgaattttc

SEQ ID NO: 1873387 - DNA, 15 bp, Homo sapiens
gtgaattttcctttc

SEQ ID NO: 1873388 - DNA, 15 bp, Homo sapiens
tgaattttcctttcg

SEQ ID NO: 1873389 - DNA, 15 bp, Homo sapiens
gaattttcctttcgg

SEQ ID NO: 1873390 - DNA, 15 bp, Homo sapiens
aattttcctttcggt

SEQ ID NO: 1873391 - DNA, 15 bp, Homo sapiens
attttcctttcggtg

SEQ ID NO: 1873392 - DNA, 15 bp, Homo sapiens
ttttcctttcggtgt

SEQ ID NO: 1873393 - DNA, 15 bp, Homo sapiens
tttcctttcggtgtc

SEQ ID NO: 1873394 - DNA, 15 bp, Homo sapiens
ttcctttcggtgtct

SEQ ID NO: 1873395 - DNA, 15 bp, Homo sapiens
tcctttcggtgtctt

SEQ ID NO: 1873396 - DNA, 15 bp, Homo sapiens
cctttcggtgtctta

SEQ ID NO: 1873397 - DNA, 15 bp, Homo sapiens
ctttcggtgtcttag

SEQ ID NO: 1873398 - DNA, 15 bp, Homo sapiens
tttcggtgtcttaga

SEQ ID NO: 1873399 - DNA, 15 bp, Homo sapiens
ttcggtgtcttagat

SEQ ID NO: 1873400 - DNA, 15 bp, Homo sapiens
tcggtgtcttagata

SEQ ID NO: 1873401 - DNA, 15 bp, Homo sapiens
cggtgtcttagatag

SEQ ID NO: 1873402 - DNA, 15 bp, Homo sapiens
ggtgtcttagataga

SEQ ID NO: 1873403 - DNA, 15 bp, Homo sapiens
gtgtcttagatagag

SEQ ID NO: 1873404 - DNA, 15 bp, Homo sapiens
tgtcttagatagagt

SEQ ID NO: 1873405 - DNA, 15 bp, Homo sapiens
gtcttagatagagtc

SEQ ID NO: 1873406 - DNA, 15 bp, Homo sapiens
tcttagatagagtca

SEQ ID NO: 1873407 - DNA, 15 bp, Homo sapiens
cttagatagagtcag

SEQ ID NO: 1873408 - DNA, 15 bp, Homo sapiens
ttagatagagtcagc

SEQ ID NO: 1873409 - DNA, 15 bp, Homo sapiens
tagatagagtcagca

SEQ ID NO: 1873410 - DNA, 15 bp, Homo sapiens
agatagagtcagcag

SEQ ID NO: 1873411 - DNA, 15 bp, Homo sapiens
gatagagtcagcaga

SEQ ID NO: 1873412 - DNA, 15 bp, Homo sapiens
atagagtcagcagat

SEQ ID NO: 1873413 - DNA, 15 bp, Homo sapiens
tagagtcagcagatg

SEQ ID NO: 1873414 - DNA, 15 bp, Homo sapiens
agagtcagcagatgc

SEQ ID NO: 1873415 - DNA, 15 bp, Homo sapiens
gagtcagcagatgca

SEQ ID NO: 1873416 - DNA, 15 bp, Homo sapiens
agtcagcagatgcat

SEQ ID NO: 1873417 - DNA, 15 bp, Homo sapiens
gtcagcagatgcatg

SEQ ID NO: 1873418 - DNA, 15 bp, Homo sapiens
tcagcagatgcatgc

SEQ ID NO: 1873419 - DNA, 15 bp, Homo sapiens
cagcagatgcatgcc

SEQ ID NO: 1873420 - DNA, 15 bp, Homo sapiens
agcagatgcatgcct

SEQ ID NO: 1873421 - DNA, 15 bp, Homo sapiens
gcagatgcatgcctg

SEQ ID NO: 1873422 - DNA, 15 bp, Homo sapiens
cagatgcatgcctga

SEQ ID NO: 1873423 - DNA, 15 bp, Homo sapiens
agatgcatgcctgat

SEQ ID NO: 1873424 - DNA, 15 bp, Homo sapiens
gatgcatgcctgatc

SEQ ID NO: 1873425 - DNA, 15 bp, Homo sapiens
atgcatgcctgatcc

SEQ ID NO: 1873426 - DNA, 15 bp, Homo sapiens
tgcatgcctgatcct

SEQ ID NO: 1873427 - DNA, 15 bp, Homo sapiens
gcatgcctgatcctt

SEQ ID NO: 1873428 - DNA, 15 bp, Homo sapiens
catgcctgatccttg

SEQ ID NO: 1873429 - DNA, 15 bp, Homo sapiens
atgcctgatccttgc

SEQ ID NO: 1873430 - DNA, 15 bp, Homo sapiens
tgcctgatccttgcc

SEQ ID NO: 1873431 - DNA, 15 bp, Homo sapiens
gcctgatccttgcca

SEQ ID NO: 1873432 - DNA, 15 bp, Homo sapiens
cctgatccttgccaa

SEQ ID NO: 1873433 - DNA, 15 bp, Homo sapiens
ctgatccttgccaac

SEQ ID NO: 1873434 - DNA, 15 bp, Homo sapiens
tgatccttgccaaca

SEQ ID NO: 1873435 - DNA, 15 bp, Homo sapiens
gatccttgccaacaa

SEQ ID NO: 1873436 - DNA, 15 bp, Homo sapiens
atccttgccaacaag

SEQ ID NO: 1873437 - DNA, 15 bp, Homo sapiens
tccttgccaacaagt

SEQ ID NO: 1873438 - DNA, 15 bp, Homo sapiens
ccttgccaacaagta

SEQ ID NO: 1873439 - DNA, 15 bp, Homo sapiens
cttgccaacaagtac

SEQ ID NO: 1873440 - DNA, 15 bp, Homo sapiens
ttgccaacaagtact

SEQ ID NO: 1873441 - DNA, 15 bp, Homo sapiens
tgccaacaagtactg

SEQ ID NO: 1873442 - DNA, 15 bp, Homo sapiens
gccaacaagtactgc

SEQ ID NO: 1873443 - DNA, 15 bp, Homo sapiens
ccaacaagtactgcg

SEQ ID NO: 1873444 - DNA, 15 bp, Homo sapiens
caacaagtactgcgc

SEQ ID NO: 1873445 - DNA, 15 bp, Homo sapiens
aacaagtactgcgct

SEQ ID NO: 1873446 - DNA, 15 bp, Homo sapiens
acaagtactgcgctg

SEQ ID NO: 1873447 - DNA, 15 bp, Homo sapiens
caagtactgcgctga

SEQ ID NO: 1873448 - DNA, 15 bp, Homo sapiens
aagtactgcgctgac

SEQ ID NO: 1873449 - DNA, 15 bp, Homo sapiens
agtactgcgctgacc

SEQ ID NO: 1873450 - DNA, 15 bp, Homo sapiens
gtactgcgctgaccc

SEQ ID NO: 1873451 - DNA, 15 bp, Homo sapiens
tactgcgctgacccg

SEQ ID NO: 1873452 - DNA, 15 bp, Homo sapiens
actgcgctgacccgg

SEQ ID NO: 1873453 - DNA, 15 bp, Homo sapiens
ctgcgctgacccgga

SEQ ID NO: 1873454 - DNA, 15 bp, Homo sapiens
tgcgctgacccggat

SEQ ID NO: 1873455 - DNA, 15 bp, Homo sapiens
gcgctgacccggatg

SEQ ID NO: 1873456 - DNA, 15 bp, Homo sapiens
cgctgacccggatgc

SEQ ID NO: 1873457 - DNA, 15 bp, Homo sapiens
gctgacccggatgcg

SEQ ID NO: 1873458 - DNA, 15 bp, Homo sapiens
ctgacccggatgcgg

SEQ ID NO: 1873459 - DNA, 15 bp, Homo sapiens
tgacccggatgcgga

SEQ ID NO: 1873460 - DNA, 15 bp, Homo sapiens
gacccggatgcggag

SEQ ID NO: 1873461 - DNA, 15 bp, Homo sapiens
acccggatgcggagg

SEQ ID NO: 1873462 - DNA, 15 bp, Homo sapiens
cccggatgcggagga

SEQ ID NO: 1873463 - DNA, 15 bp, Homo sapiens
ccggatgcggaggat

SEQ ID NO: 1873464 - DNA, 15 bp, Homo sapiens
cggatgcggaggatg

SEQ ID NO: 1873465 - DNA, 15 bp, Homo sapiens
ggatgcggaggatgc

SEQ ID NO: 1873466 - DNA, 15 bp, Homo sapiens
gatgcggaggatgcc

SEQ ID NO: 1873467 - DNA, 15 bp, Homo sapiens
atgcggaggatgcct

SEQ ID NO: 1873468 - DNA, 15 bp, Homo sapiens
tgcggaggatgcctc

SEQ ID NO: 1873469 - DNA, 15 bp, Homo sapiens
gcggaggatgcctcg

SEQ ID NO: 1873470 - DNA, 15 bp, Homo sapiens
cggaggatgcctcga

SEQ ID NO: 1873471 - DNA, 15 bp, Homo sapiens
ggaggatgcctcgaa

SEQ ID NO: 1873472 - DNA, 15 bp, Homo sapiens
gaggatgcctcgaat

SEQ ID NO: 1873473 - DNA, 15 bp, Homo sapiens
aggatgcctcgaata

SEQ ID NO: 1873474 - DNA, 15 bp, Homo sapiens
ggatgcctcgaatat

SEQ ID NO: 1873475 - DNA, 15 bp, Homo sapiens
gatgcctcgaatatc

SEQ ID NO: 1873476 - DNA, 15 bp, Homo sapiens
tatatccaactgctg

SEQ ID NO: 1873477 - DNA, 15 bp, Homo sapiens
atatccaactgctga

SEQ ID NO: 1873478 - DNA, 15 bp, Homo sapiens
tatccaactgctgac

SEQ ID NO: 1873479 - DNA, 15 bp, Homo sapiens
atccaactgctgact

SEQ ID NO: 1873480 - DNA, 15 bp, Homo sapiens
tccaactgctgactt

SEQ ID NO: 1873481 - DNA, 15 bp, Homo sapiens
ccaactgctgactta

SEQ ID NO: 1873482 - DNA, 15 bp, Homo sapiens
caactgctgacttaa

SEQ ID NO: 1873483 - DNA, 15 bp, Homo sapiens
aactgctgacttaaa

SEQ ID NO: 1873484 - DNA, 15 bp, Homo sapiens
actgctgacttaaaa

SEQ ID NO: 1873485 - DNA, 15 bp, Homo sapiens
ctgctgacttaaaaa

SEQ ID NO: 1873486 - DNA, 15 bp, Homo sapiens
tgctgacttaaaaaa

SEQ ID NO: 1873487 - DNA, 15 bp, Homo sapiens
gctgacttaaaaaaa

SEQ ID NO: 1873488 - DNA, 15 bp, Homo sapiens
ctgacttaaaaaaaa

SEQ ID NO: 1873489 - DNA, 15 bp, Homo sapiens
tgacttaaaaaaaaa

SEQ ID NO: 1873490 - DNA, 15 bp, Homo sapiens
gacttaaaaaaaaaa

SEQ ID NO: 1873491 - DNA, 15 bp, Homo sapiens
cttaaaaaaaaaaac

SEQ ID NO: 1873492 - DNA, 15 bp, Homo sapiens
ttaaaaaaaaaaact

SEQ ID NO: 1873493 - DNA, 15 bp, Homo sapiens
taaaaaaaaaaactg

SEQ ID NO: 1873494 - DNA, 15 bp, Homo sapiens
aaaaaaaaaaactgt

SEQ ID NO: 1873495 - DNA, 15 bp, Homo sapiens
aaaaaaaaaactgtt

SEQ ID NO: 1873496 - DNA, 15 bp, Homo sapiens
aaaaaaaaactgttt

SEQ ID NO: 1873497 - DNA, 15 bp, Homo sapiens
aaaaaaaactgtttg

SEQ ID NO: 1873498 - DNA, 15 bp, Homo sapiens
aaaaaaactgtttgg

SEQ ID NO: 1873499 - DNA, 15 bp, Homo sapiens
aaaaaactgtttggg

SEQ ID NO: 1873500 - DNA, 15 bp, Homo sapiens
aaaaactgtttgggt

SEQ ID NO: 1873501 - DNA, 15 bp, Homo sapiens
aaaactgtttgggta

SEQ ID NO: 1873502 - DNA, 15 bp, Homo sapiens
aaactgtttgggtaa

SEQ ID NO: 1873503 - DNA, 15 bp, Homo sapiens
aactgtttgggtaaa

SEQ ID NO: 1873504 - DNA, 15 bp, Homo sapiens
actgtttgggtaaat

SEQ ID NO: 1873505 - DNA, 15 bp, Homo sapiens
ctgtttgggtaaatc

SEQ ID NO: 1873506 - DNA, 15 bp, Homo sapiens
tgtttgggtaaatcc

SEQ ID NO: 1873507 - DNA, 15 bp, Homo sapiens
gtttgggtaaatcca

SEQ ID NO: 1873508 - DNA, 15 bp, Homo sapiens
tttgggtaaatccaa

SEQ ID NO: 1873509 - DNA, 15 bp, Homo sapiens
ttgggtaaatccaat

SEQ ID NO: 1873510 - DNA, 15 bp, Homo sapiens
tgggtaaatccaatt

SEQ ID NO: 1873511 - DNA, 15 bp, Homo sapiens
gggtaaatccaattc

SEQ ID NO: 1873512 - DNA, 15 bp, Homo sapiens
ggtaaatccaattct

SEQ ID NO: 1873513 - DNA, 15 bp, Homo sapiens
gtaaatccaattctt

SEQ ID NO: 1873514 - DNA, 15 bp, Homo sapiens
taaatccaattcttc

SEQ ID NO: 1873515 - DNA, 15 bp, Homo sapiens
aaatccaattcttcc

SEQ ID NO: 1873516 - DNA, 15 bp, Homo sapiens
aatccaattcttcct

SEQ ID NO: 1873517 - DNA, 15 bp, Homo sapiens
atccaattcttccta

SEQ ID NO: 1873518 - DNA, 15 bp, Homo sapiens
tccaattcttcctat

SEQ ID NO: 1873519 - DNA, 15 bp, Homo sapiens
ccaattcttcctata

SEQ ID NO: 1873520 - DNA, 15 bp, Homo sapiens
caattcttcctataa

SEQ ID NO: 1873521 - DNA, 15 bp, Homo sapiens
aattcttcctataaa

SEQ ID NO: 1873522 - DNA, 15 bp, Homo sapiens
attcttcctataaag

SEQ ID NO: 1873523 - DNA, 15 bp, Homo sapiens
ttcttcctataaagg

SEQ ID NO: 1873524 - DNA, 15 bp, Homo sapiens
tcttcctataaaggc

SEQ ID NO: 1873525 - DNA, 15 bp, Homo sapiens
cttcctataaaggct

SEQ ID NO: 1873526 - DNA, 15 bp, Homo sapiens
ttcctataaaggctg

SEQ ID NO: 1873527 - DNA, 15 bp, Homo sapiens
tcctataaaggctgt

SEQ ID NO: 1873528 - DNA, 15 bp, Homo sapiens
cctataaaggctgta

SEQ ID NO: 1873529 - DNA, 15 bp, Homo sapiens
ctataaaggctgtac

SEQ ID NO: 1873530 - DNA, 15 bp, Homo sapiens
tataaaggctgtaca

SEQ ID NO: 1873531 - DNA, 15 bp, Homo sapiens
ataaaggctgtacat

SEQ ID NO: 1873532 - DNA, 15 bp, Homo sapiens
taaaggctgtacatg

SEQ ID NO: 1873533 - DNA, 15 bp, Homo sapiens
aaaggctgtacatgg

SEQ ID NO: 1873534 - DNA, 15 bp, Homo sapiens
aaggctgtacatgga

SEQ ID NO: 1873535 - DNA, 15 bp, Homo sapiens
aggctgtacatggaa

SEQ ID NO: 1873536 - DNA, 15 bp, Homo sapiens
ggctgtacatggaat

SEQ ID NO: 1873537 - DNA, 15 bp, Homo sapiens
gctgtacatggaatc

SEQ ID NO: 1873538 - DNA, 15 bp, Homo sapiens
ctgtacatggaatca

SEQ ID NO: 1873539 - DNA, 15 bp, Homo sapiens
tgtacatggaatcaa

SEQ ID NO: 1873540 - DNA, 15 bp, Homo sapiens
gtacatggaatcaat

SEQ ID NO: 1873541 - DNA, 15 bp, Homo sapiens
tacatggaatcaatt

SEQ ID NO: 1873542 - DNA, 15 bp, Homo sapiens
acatggaatcaattt

SEQ ID NO: 1873543 - DNA, 15 bp, Homo sapiens
catggaatcaatttc

SEQ ID NO: 1873544 - DNA, 15 bp, Homo sapiens
atggaatcaatttcc

SEQ ID NO: 1873545 - DNA, 15 bp, Homo sapiens
tggaatcaatttcca

SEQ ID NO: 1873546 - DNA, 15 bp, Homo sapiens
ggaatcaatttccat

SEQ ID NO: 1873547 - DNA, 15 bp, Homo sapiens
gaatcaatttccatg

SEQ ID NO: 1873548 - DNA, 15 bp, Homo sapiens
aatcaatttccatgt

SEQ ID NO: 1873549 - DNA, 15 bp, Homo sapiens
atcaatttccatgtc

SEQ ID NO: 1873550 - DNA, 15 bp, Homo sapiens
tcaatttccatgtcc

SEQ ID NO: 1873551 - DNA, 15 bp, Homo sapiens
caatttccatgtcct

SEQ ID NO: 1873552 - DNA, 15 bp, Homo sapiens
aatttccatgtcctt

SEQ ID NO: 1873553 - DNA, 15 bp, Homo sapiens
atttccatgtcctta

SEQ ID NO: 1873554 - DNA, 15 bp, Homo sapiens
tttccatgtccttat

SEQ ID NO: 1873555 - DNA, 15 bp, Homo sapiens
ttccatgtccttatc

SEQ ID NO: 1873556 - DNA, 15 bp, Homo sapiens
tccatgtccttatca

SEQ ID NO: 1873557 - DNA, 15 bp, Homo sapiens
ccatgtccttatcaa

SEQ ID NO: 1873558 - DNA, 15 bp, Homo sapiens
catgtccttatcaat

SEQ ID NO: 1873559 - DNA, 15 bp, Homo sapiens
atgtccttatcaatg

SEQ ID NO: 1873560 - DNA, 15 bp, Homo sapiens
tgtccttatcaatgt

SEQ ID NO: 1873561 - DNA, 15 bp, Homo sapiens
gtccttatcaatgtc

SEQ ID NO: 1873562 - DNA, 15 bp, Homo sapiens
ccttatcaatgtcat

SEQ ID NO: 1873563 - DNA, 15 bp, Homo sapiens
cttatcaatgtcatg

SEQ ID NO: 1873564 - DNA, 15 bp, Homo sapiens
ttatcaatgtcatga

SEQ ID NO: 1873565 - DNA, 15 bp, Homo sapiens
tatcaatgtcatgaa

SEQ ID NO: 1873566 - DNA, 15 bp, Homo sapiens
atcaatgtcatgaag

SEQ ID NO: 1873567 - DNA, 15 bp, Homo sapiens
tcaatgtcatgaaga

SEQ ID NO: 1873568 - DNA, 15 bp, Homo sapiens
caatgtcatgaagac

SEQ ID NO: 1873569 - DNA, 15 bp, Homo sapiens
aatgtcatgaagacg

SEQ ID NO: 1873570 - DNA, 15 bp, Homo sapiens
atgtcatgaagacgt

SEQ ID NO: 1873571 - DNA, 15 bp, Homo sapiens
tgtcatgaagacgtt

SEQ ID NO: 1873572 - DNA, 15 bp, Homo sapiens
gtcatgaagacgttc

SEQ ID NO: 1873573 - DNA, 15 bp, Homo sapiens
tcatgaagacgttca

SEQ ID NO: 1873574 - DNA, 15 bp, Homo sapiens
catgaagacgttcag

SEQ ID NO: 1873575 - DNA, 15 bp, Homo sapiens
atgaagacgttcagc

SEQ ID NO: 1873576 - DNA, 15 bp, Homo sapiens
tgaagacgttcagct

SEQ ID NO: 1873577 - DNA, 15 bp, Homo sapiens
gaagacgttcagctt

SEQ ID NO: 1873578 - DNA, 15 bp, Homo sapiens
aagacgttcagcttg

SEQ ID NO: 1873579 - DNA, 15 bp, Homo sapiens
agacgttcagcttgc

SEQ ID NO: 1873580 - DNA, 15 bp, Homo sapiens
gacgttcagcttgct

SEQ ID NO: 1873581 - DNA, 15 bp, Homo sapiens
acgttcagcttgctt

SEQ ID NO: 1873582 - DNA, 15 bp, Homo sapiens
cgttcagcttgcttc

SEQ ID NO: 1873583 - DNA, 15 bp, Homo sapiens
gttcagcttgcttcc

SEQ ID NO: 1873584 - DNA, 15 bp, Homo sapiens
ttcagcttgcttccg

SEQ ID NO: 1873585 - DNA, 15 bp, Homo sapiens
tcagcttgcttccgc

SEQ ID NO: 1873586 - DNA, 15 bp, Homo sapiens
cagcttgcttccgca

SEQ ID NO: 1873587 - DNA, 15 bp, Homo sapiens
agcttgcttccgcat

SEQ ID NO: 1873588 - DNA, 15 bp, Homo sapiens
gcttgcttccgcatt

SEQ ID NO: 1873589 - DNA, 15 bp, Homo sapiens
cttgcttccgcattg

SEQ ID NO: 1873590 - DNA, 15 bp, Homo sapiens
ttgcttccgcattgg

SEQ ID NO: 1873591 - DNA, 15 bp, Homo sapiens
tgcttccgcattggt

SEQ ID NO: 1873592 - DNA, 15 bp, Homo sapiens
gcttccgcattggtt

SEQ ID NO: 1873593 - DNA, 15 bp, Homo sapiens
cttccgcattggtta

SEQ ID NO: 1873594 - DNA, 15 bp, Homo sapiens
ttccgcattggttac

SEQ ID NO: 1873595 - DNA, 15 bp, Homo sapiens
tccgcattggttacg

SEQ ID NO: 1873596 - DNA, 15 bp, Homo sapiens
ccgcattggttacgg

SEQ ID NO: 1873597 - DNA, 15 bp, Homo sapiens
cgcattggttacggg

SEQ ID NO: 1873598 - DNA, 15 bp, Homo sapiens
gcattggttacgggt

SEQ ID NO: 1873599 - DNA, 15 bp, Homo sapiens
cattggttacgggtg

SEQ ID NO: 1873600 - DNA, 15 bp, Homo sapiens
attggttacgggtgt

SEQ ID NO: 1873601 - DNA, 15 bp, Homo sapiens
ttggttacgggtgtc

SEQ ID NO: 1873602 - DNA, 15 bp, Homo sapiens
tggttacgggtgtct

SEQ ID NO: 1873603 - DNA, 15 bp, Homo sapiens
ggttacgggtgtctt

SEQ ID NO: 1873604 - DNA, 15 bp, Homo sapiens
gttacgggtgtcttg

SEQ ID NO: 1873605 - DNA, 15 bp, Homo sapiens
ttacgggtgtcttgt

SEQ ID NO: 1873606 - DNA, 15 bp, Homo sapiens
tacgggtgtcttgta

SEQ ID NO: 1873607 - DNA, 15 bp, Homo sapiens
acgggtgtcttgtac

SEQ ID NO: 1873608 - DNA, 15 bp, Homo sapiens
cgggtgtcttgtacc

SEQ ID NO: 1873609 - DNA, 15 bp, Homo sapiens
gggtgtcttgtacca

SEQ ID NO: 1873610 - DNA, 15 bp, Homo sapiens
ggtgtcttgtaccat

SEQ ID NO: 1873611 - DNA, 15 bp, Homo sapiens
gtgtcttgtaccatt

SEQ ID NO: 1873612 - DNA, 15 bp, Homo sapiens
tgtcttgtaccattc

SEQ ID NO: 1873613 - DNA, 15 bp, Homo sapiens
gtcttgtaccattcc

SEQ ID NO: 1873614 - DNA, 15 bp, Homo sapiens
tcttgtaccattccc

SEQ ID NO: 1873615 - DNA, 15 bp, Homo sapiens
cttgtaccattccct

SEQ ID NO: 1873616 - DNA, 15 bp, Homo sapiens
ttgtaccattccctg

SEQ ID NO: 1873617 - DNA, 15 bp, Homo sapiens
tgtaccattccctgc

SEQ ID NO: 1873618 - DNA, 15 bp, Homo sapiens
gtaccattccctgcg

SEQ ID NO: 1873619 - DNA, 15 bp, Homo sapiens
taccattccctgcgg

SEQ ID NO: 1873620 - DNA, 15 bp, Homo sapiens
accattccctgcggt

SEQ ID NO: 1873621 - DNA, 15 bp, Homo sapiens
ccattccctgcggta

SEQ ID NO: 1873622 - DNA, 15 bp, Homo sapiens
cattccctgcggtaa

SEQ ID NO: 1873623 - DNA, 15 bp, Homo sapiens
attccctgcggtaat

SEQ ID NO: 1873624 - DNA, 15 bp, Homo sapiens
ttccctgcggtaata

SEQ ID NO: 1873625 - DNA, 15 bp, Homo sapiens
tccctgcggtaatat

SEQ ID NO: 1873626 - DNA, 15 bp, Homo sapiens
ccctgcggtaatatg

SEQ ID NO: 1873627 - DNA, 15 bp, Homo sapiens
cctgcggtaatatgt

SEQ ID NO: 1873628 - DNA, 15 bp, Homo sapiens
ctgcggtaatatgtg

SEQ ID NO: 1873629 - DNA, 15 bp, Homo sapiens
tgcggtaatatgtgg

SEQ ID NO: 1873630 - DNA, 15 bp, Homo sapiens
gcggtaatatgtggt

SEQ ID NO: 1873631 - DNA, 15 bp, Homo sapiens
cggtaatatgtggtg

SEQ ID NO: 1873632 - DNA, 15 bp, Homo sapiens
ggtaatatgtggtgt

SEQ ID NO: 1873633 - DNA, 15 bp, Homo sapiens
gtaatatgtggtgtg

SEQ ID NO: 1873634 - DNA, 15 bp, Homo sapiens
taatatgtggtgtgt

SEQ ID NO: 1873635 - DNA, 15 bp, Homo sapiens
aatatgtggtgtgtg

SEQ ID NO: 1873636 - DNA, 15 bp, Homo sapiens
atatgtggtgtgtgt

SEQ ID NO: 1873637 - DNA, 15 bp, Homo sapiens
tatgtggtgtgtgta

SEQ ID NO: 1873638 - DNA, 15 bp, Homo sapiens
atgtggtgtgtgtac

SEQ ID NO: 1873639 - DNA, 15 bp, Homo sapiens
tgtggtgtgtgtaca

SEQ ID NO: 1873640 - DNA, 15 bp, Homo sapiens
gtggtgtgtgtacat

SEQ ID NO: 1873641 - DNA, 15 bp, Homo sapiens
tggtgtgtgtacatg

SEQ ID NO: 1873642 - DNA, 15 bp, Homo sapiens
ggtgtgtgtacatga

SEQ ID NO: 1873643 - DNA, 15 bp, Homo sapiens
gtgtgtgtacatgat

SEQ ID NO: 1873644 - DNA, 15 bp, Homo sapiens
tgtgtgtacatgatg

SEQ ID NO: 1873645 - DNA, 15 bp, Homo sapiens
gtgtgtacatgatgt

SEQ ID NO: 1873646 - DNA, 15 bp, Homo sapiens
tgtgtacatgatgtt

SEQ ID NO: 1873647 - DNA, 15 bp, Homo sapiens
tgtacatgatgttta

SEQ ID NO: 1873648 - DNA, 15 bp, Homo sapiens
gtacatgatgtttat

SEQ ID NO: 1873649 - DNA, 15 bp, Homo sapiens
tacatgatgtttatg

SEQ ID NO: 1873650 - DNA, 15 bp, Homo sapiens
acatgatgtttatgt

SEQ ID NO: 1873651 - DNA, 15 bp, Homo sapiens
catgatgtttatgta

SEQ ID NO: 1873652 - DNA, 15 bp, Homo sapiens
atgatgtttatgtat

SEQ ID NO: 1873653 - DNA, 15 bp, Homo sapiens
tgatgtttatgtata

SEQ ID NO: 1873654 - DNA, 15 bp, Homo sapiens
gatgtttatgtatat

SEQ ID NO: 1873655 - DNA, 15 bp, Homo sapiens
atgtttatgtatatc

SEQ ID NO: 1873656 - DNA, 15 bp, Homo sapiens
tgtttatgtatatct

SEQ ID NO: 1873657 - DNA, 15 bp, Homo sapiens
gtttatgtatatcta

SEQ ID NO: 1873658 - DNA, 15 bp, Homo sapiens
tttatgtatatctat

SEQ ID NO: 1873659 - DNA, 15 bp, Homo sapiens
ttatgtatatctata

SEQ ID NO: 1873660 - DNA, 15 bp, Homo sapiens
tatgtatatctatag

SEQ ID NO: 1873661 - DNA, 15 bp, Homo sapiens
atgtatatctatagg

SEQ ID NO: 1873662 - DNA, 15 bp, Homo sapiens
tgtatatctataggg

SEQ ID NO: 1873663 - DNA, 15 bp, Homo sapiens
gtatatctatagggg

SEQ ID NO: 1873664 - DNA, 15 bp, Homo sapiens
tatatctataggggt

SEQ ID NO: 1873665 - DNA, 15 bp, Homo sapiens
atatctataggggtc

SEQ ID NO: 1873666 - DNA, 15 bp, Homo sapiens
tatctataggggtcc

SEQ ID NO: 1873667 - DNA, 15 bp, Homo sapiens
atctataggggtccc

SEQ ID NO: 1873668 - DNA, 15 bp, Homo sapiens
tctataggggtccca

SEQ ID NO: 1873669 - DNA, 15 bp, Homo sapiens
ctataggggtcccat

SEQ ID NO: 1873670 - DNA, 15 bp, Homo sapiens
tataggggtcccatt

SEQ ID NO: 1873671 - DNA, 15 bp, Homo sapiens
ataggggtcccatta

SEQ ID NO: 1873672 - DNA, 15 bp, Homo sapiens
taggggtcccattaa

SEQ ID NO: 1873673 - DNA, 15 bp, Homo sapiens
aggggtcccattaat

SEQ ID NO: 1873674 - DNA, 15 bp, Homo sapiens
ggggtcccattaatg

SEQ ID NO: 1873675 - DNA, 15 bp, Homo sapiens
gggtcccattaatgc

SEQ ID NO: 1873676 - DNA, 15 bp, Homo sapiens
ggtcccattaatgct

SEQ ID NO: 1873677 - DNA, 15 bp, Homo sapiens
gtcccattaatgctc

SEQ ID NO: 1873678 - DNA, 15 bp, Homo sapiens
tcccattaatgctct

SEQ ID NO: 1873679 - DNA, 15 bp, Homo sapiens
cccattaatgctctg

SEQ ID NO: 1873680 - DNA, 15 bp, Homo sapiens
ccattaatgctctgt

SEQ ID NO: 1873681 - DNA, 15 bp, Homo sapiens
cattaatgctctgtc

SEQ ID NO: 1873682 - DNA, 15 bp, Homo sapiens
attaatgctctgtca

SEQ ID NO: 1873683 - DNA, 15 bp, Homo sapiens
ttaatgctctgtcat

SEQ ID NO: 1873684 - DNA, 15 bp, Homo sapiens
taatgctctgtcatt

SEQ ID NO: 1873685 - DNA, 15 bp, Homo sapiens
atgctctgtcattta

SEQ ID NO: 1873686 - DNA, 15 bp, Homo sapiens
tgctctgtcatttaa

SEQ ID NO: 1873687 - DNA, 15 bp, Homo sapiens
gctctgtcatttaat

SEQ ID NO: 1873688 - DNA, 15 bp, Homo sapiens
ctctgtcatttaatg

SEQ ID NO: 1873689 - DNA, 15 bp, Homo sapiens
tctgtcatttaatgg

SEQ ID NO: 1873690 - DNA, 15 bp, Homo sapiens
ctgtcatttaatgga

SEQ ID NO: 1873691 - DNA, 15 bp, Homo sapiens
tgtcatttaatggaa

SEQ ID NO: 1873692 - DNA, 15 bp, Homo sapiens
gtcatttaatggaaa

SEQ ID NO: 1873693 - DNA, 15 bp, Homo sapiens
tcatttaatggaaaa

SEQ ID NO: 1873694 - DNA, 15 bp, Homo sapiens
catttaatggaaaat

SEQ ID NO: 1873695 - DNA, 15 bp, Homo sapiens
atttaatggaaaatt

SEQ ID NO: 1873696 - DNA, 15 bp, Homo sapiens
tttaatggaaaattg

SEQ ID NO: 1873697 - DNA, 15 bp, Homo sapiens
ttaatggaaaattgt

SEQ ID NO: 1873698 - DNA, 15 bp, Homo sapiens
taatggaaaattgtt

SEQ ID NO: 1873699 - DNA, 15 bp, Homo sapiens
aatggaaaattgttg

SEQ ID NO: 1873700 - DNA, 15 bp, Homo sapiens
atggaaaattgttgt

SEQ ID NO: 1873701 - DNA, 15 bp, Homo sapiens
tggaaaattgttgta

SEQ ID NO: 1873702 - DNA, 15 bp, Homo sapiens
ggaaaattgttgtag

SEQ ID NO: 1873703 - DNA, 15 bp, Homo sapiens
gaaaattgttgtagc

SEQ ID NO: 1873704 - DNA, 15 bp, Homo sapiens
aaaattgttgtagca

SEQ ID NO: 1873705 - DNA, 15 bp, Homo sapiens
aaattgttgtagcaa

SEQ ID NO: 1873706 - DNA, 15 bp, Homo sapiens
aattgttgtagcaat

SEQ ID NO: 1873707 - DNA, 15 bp, Homo sapiens
attgttgtagcaata

SEQ ID NO: 1873708 - DNA, 15 bp, Homo sapiens
ttgttgtagcaatag

SEQ ID NO: 1873709 - DNA, 15 bp, Homo sapiens
tgttgtagcaatagc

SEQ ID NO: 1873710 - DNA, 15 bp, Homo sapiens
gttgtagcaatagct

SEQ ID NO: 1873711 - DNA, 15 bp, Homo sapiens
ttgtagcaatagctt

SEQ ID NO: 1873712 - DNA, 15 bp, Homo sapiens
tgtagcaatagcttc

SEQ ID NO: 1873713 - DNA, 15 bp, Homo sapiens
gtagcaatagcttca

SEQ ID NO: 1873714 - DNA, 15 bp, Homo sapiens
tagcaatagcttcat

SEQ ID NO: 1873715 - DNA, 15 bp, Homo sapiens
agcaatagcttcatc

SEQ ID NO: 1873716 - DNA, 15 bp, Homo sapiens
gcaatagcttcatca

SEQ ID NO: 1873717 - DNA, 15 bp, Homo sapiens
caatagcttcatcag

SEQ ID NO: 1873718 - DNA, 15 bp, Homo sapiens
aatagcttcatcagg

SEQ ID NO: 1873719 - DNA, 15 bp, Homo sapiens
atagcttcatcaggc

SEQ ID NO: 1873720 - DNA, 15 bp, Homo sapiens
tagcttcatcaggcc

SEQ ID NO: 1873721 - DNA, 15 bp, Homo sapiens
agcttcatcaggcca

SEQ ID NO: 1873722 - DNA, 15 bp, Homo sapiens
gcttcatcaggccaa

SEQ ID NO: 1873723 - DNA, 15 bp, Homo sapiens
cttcatcaggccaat

SEQ ID NO: 1873724 - DNA, 15 bp, Homo sapiens
ttcatcaggccaata

SEQ ID NO: 1873725 - DNA, 15 bp, Homo sapiens
tcatcaggccaataa

SEQ ID NO: 1873726 - DNA, 15 bp, Homo sapiens
catcaggccaataat

SEQ ID NO: 1873727 - DNA, 15 bp, Homo sapiens
atcaggccaataatg

SEQ ID NO: 1873728 - DNA, 15 bp, Homo sapiens
tcaggccaataatgc

SEQ ID NO: 1873729 - DNA, 15 bp, Homo sapiens
caggccaataatgct

SEQ ID NO: 1873730 - DNA, 15 bp, Homo sapiens
aggccaataatgctt

SEQ ID NO: 1873731 - DNA, 15 bp, Homo sapiens
ggccaataatgcttc

SEQ ID NO: 1873732 - DNA, 15 bp, Homo sapiens
gccaataatgcttcc

SEQ ID NO: 1873733 - DNA, 15 bp, Homo sapiens
ccaataatgcttccg

SEQ ID NO: 1873734 - DNA, 15 bp, Homo sapiens
caataatgcttccgt

SEQ ID NO: 1873735 - DNA, 15 bp, Homo sapiens
aataatgcttccgtg

SEQ ID NO: 1873736 - DNA, 15 bp, Homo sapiens
ataatgcttccgtgt

SEQ ID NO: 1873737 - DNA, 15 bp, Homo sapiens
taatgcttccgtgtt

SEQ ID NO: 1873738 - DNA, 15 bp, Homo sapiens
aatgcttccgtgttg

SEQ ID NO: 1873739 - DNA, 15 bp, Homo sapiens
atgcttccgtgttga

SEQ ID NO: 1873740 - DNA, 15 bp, Homo sapiens
tgcttccgtgttgac

SEQ ID NO: 1873741 - DNA, 15 bp, Homo sapiens
gcttccgtgttgacc

SEQ ID NO: 1873742 - DNA, 15 bp, Homo sapiens
cttccgtgttgacca

SEQ ID NO: 1873743 - DNA, 15 bp, Homo sapiens
ttccgtgttgaccac

SEQ ID NO: 1873744 - DNA, 15 bp, Homo sapiens
tccgtgttgaccacc

SEQ ID NO: 1873745 - DNA, 15 bp, Homo sapiens
ccgtgttgaccacca

SEQ ID NO: 1873746 - DNA, 15 bp, Homo sapiens
cgtgttgaccaccaa

SEQ ID NO: 1873747 - DNA, 15 bp, Homo sapiens
gtgttgaccaccaat

SEQ ID NO: 1873748 - DNA, 15 bp, Homo sapiens
tgttgaccaccaata

SEQ ID NO: 1873749 - DNA, 15 bp, Homo sapiens
gttgaccaccaatag

SEQ ID NO: 1873750 - DNA, 15 bp, Homo sapiens
ttgaccaccaatagc

SEQ ID NO: 1873751 - DNA, 15 bp, Homo sapiens
tgaccaccaatagca

SEQ ID NO: 1873752 - DNA, 15 bp, Homo sapiens
gaccaccaatagcag

SEQ ID NO: 1873753 - DNA, 15 bp, Homo sapiens
accaccaatagcagt

SEQ ID NO: 1873754 - DNA, 15 bp, Homo sapiens
ccaccaatagcagtt

SEQ ID NO: 1873755 - DNA, 15 bp, Homo sapiens
caccaatagcagttt

SEQ ID NO: 1873756 - DNA, 15 bp, Homo sapiens
accaatagcagtttc

SEQ ID NO: 1873757 - DNA, 15 bp, Homo sapiens
ccaatagcagtttca

SEQ ID NO: 1873758 - DNA, 15 bp, Homo sapiens
caatagcagtttcaa

SEQ ID NO: 1873759 - DNA, 15 bp, Homo sapiens
aatagcagtttcaaa

SEQ ID NO: 1873760 - DNA, 15 bp, Homo sapiens
atagcagtttcaaaa

SEQ ID NO: 1873761 - DNA, 15 bp, Homo sapiens
tagcagtttcaaaag

SEQ ID NO: 1873762 - DNA, 15 bp, Homo sapiens
agcagtttcaaaagg

SEQ ID NO: 1873763 - DNA, 15 bp, Homo sapiens
gcagtttcaaaagga

SEQ ID NO: 1873764 - DNA, 15 bp, Homo sapiens
cagtttcaaaaggaa

SEQ ID NO: 1873765 - DNA, 15 bp, Homo sapiens
agtttcaaaaggaat

SEQ ID NO: 1873766 - DNA, 15 bp, Homo sapiens
gtttcaaaaggaatt

SEQ ID NO: 1873767 - DNA, 15 bp, Homo sapiens
tttcaaaaggaattt

SEQ ID NO: 1873768 - DNA, 15 bp, Homo sapiens
ttcaaaaggaattta

SEQ ID NO: 1873769 - DNA, 15 bp, Homo sapiens
tcaaaaggaatttat

SEQ ID NO: 1873770 - DNA, 15 bp, Homo sapiens
caaaaggaatttatt

SEQ ID NO: 1873771 - DNA, 15 bp, Homo sapiens
aaaaggaatttattc

SEQ ID NO: 1873772 - DNA, 15 bp, Homo sapiens
aaaggaatttattct

SEQ ID NO: 1873773 - DNA, 15 bp, Homo sapiens
aaggaatttattctg

SEQ ID NO: 1873774 - DNA, 15 bp, Homo sapiens
aggaatttattctga

SEQ ID NO: 1873775 - DNA, 15 bp, Homo sapiens
ggaatttattctgat

SEQ ID NO: 1873776 - DNA, 15 bp, Homo sapiens
gaatttattctgatg

SEQ ID NO: 1873777 - DNA, 15 bp, Homo sapiens
aatttattctgatgg

SEQ ID NO: 1873778 - DNA, 15 bp, Homo sapiens
atttattctgatgga

SEQ ID NO: 1873779 - DNA, 15 bp, Homo sapiens
tttattctgatggac

SEQ ID NO: 1873780 - DNA, 15 bp, Homo sapiens
ttattctgatggact

SEQ ID NO: 1873781 - DNA, 15 bp, Homo sapiens
tattctgatggactt

SEQ ID NO: 1873782 - DNA, 15 bp, Homo sapiens
attctgatggacttt

SEQ ID NO: 1873783 - DNA, 15 bp, Homo sapiens
ttctgatggactttg

SEQ ID NO: 1873784 - DNA, 15 bp, Homo sapiens
tctgatggactttgc

SEQ ID NO: 1873785 - DNA, 15 bp, Homo sapiens
ctgatggactttgct

SEQ ID NO: 1873786 - DNA, 15 bp, Homo sapiens
tgatggactttgctt

SEQ ID NO: 1873787 - DNA, 15 bp, Homo sapiens
gatggactttgcttc

SEQ ID NO: 1873788 - DNA, 15 bp, Homo sapiens
atggactttgcttca

SEQ ID NO: 1873789 - DNA, 15 bp, Homo sapiens
tggactttgcttcaa

SEQ ID NO: 1873790 - DNA, 15 bp, Homo sapiens
ggactttgcttcaaa

SEQ ID NO: 1873791 - DNA, 15 bp, Homo sapiens
gactttgcttcaaat

SEQ ID NO: 1873792 - DNA, 15 bp, Homo sapiens
actttgcttcaaatc

SEQ ID NO: 1873793 - DNA, 15 bp, Homo sapiens
ctttgcttcaaatca

SEQ ID NO: 1873794 - DNA, 15 bp, Homo sapiens
tttgcttcaaatcat

SEQ ID NO: 1873795 - DNA, 15 bp, Homo sapiens
ttgcttcaaatcatg

SEQ ID NO: 1873796 - DNA, 15 bp, Homo sapiens
tgcttcaaatcatgt

SEQ ID NO: 1873797 - DNA, 15 bp, Homo sapiens
gcttcaaatcatgtg

SEQ ID NO: 1873798 - DNA, 15 bp, Homo sapiens
cttcaaatcatgtgc

SEQ ID NO: 1873799 - DNA, 15 bp, Homo sapiens
ttcaaatcatgtgcc

SEQ ID NO: 1873800 - DNA, 15 bp, Homo sapiens
tcaaatcatgtgccc

SEQ ID NO: 1873801 - DNA, 15 bp, Homo sapiens
caaatcatgtgccca

SEQ ID NO: 1873802 - DNA, 15 bp, Homo sapiens
aaatcatgtgcccat

SEQ ID NO: 1873803 - DNA, 15 bp, Homo sapiens
aatcatgtgcccatg

SEQ ID NO: 1873804 - DNA, 15 bp, Homo sapiens
atcatgtgcccatga

SEQ ID NO: 1873805 - DNA, 15 bp, Homo sapiens
tcatgtgcccatgat

SEQ ID NO: 1873806 - DNA, 15 bp, Homo sapiens
catgtgcccatgatg

SEQ ID NO: 1873807 - DNA, 15 bp, Homo sapiens
atgtgcccatgatgg

SEQ ID NO: 1873808 - DNA, 15 bp, Homo sapiens
tgtgcccatgatggc

SEQ ID NO: 1873809 - DNA, 15 bp, Homo sapiens
gtgcccatgatggca

SEQ ID NO: 1873810 - DNA, 15 bp, Homo sapiens
tgcccatgatggcag

SEQ ID NO: 1873811 - DNA, 15 bp, Homo sapiens
gcccatgatggcagc

SEQ ID NO: 1873812 - DNA, 15 bp, Homo sapiens
cccatgatggcagct

SEQ ID NO: 1873813 - DNA, 15 bp, Homo sapiens
ccatgatggcagcta

SEQ ID NO: 1873814 - DNA, 15 bp, Homo sapiens
catgatggcagctag

SEQ ID NO: 1873815 - DNA, 15 bp, Homo sapiens
atgatggcagctaga

SEQ ID NO: 1873816 - DNA, 15 bp, Homo sapiens
tgatggcagctagac

SEQ ID NO: 1873817 - DNA, 15 bp, Homo sapiens
gatggcagctagact

SEQ ID NO: 1873818 - DNA, 15 bp, Homo sapiens
atggcagctagactg

SEQ ID NO: 1873819 - DNA, 15 bp, Homo sapiens
tggcagctagactgc

SEQ ID NO: 1873820 - DNA, 15 bp, Homo sapiens
ggcagctagactgct

SEQ ID NO: 1873821 - DNA, 15 bp, Homo sapiens
gcagctagactgctc

SEQ ID NO: 1873822 - DNA, 15 bp, Homo sapiens
cagctagactgctcc

SEQ ID NO: 1873823 - DNA, 15 bp, Homo sapiens
agctagactgctcca

SEQ ID NO: 1873824 - DNA, 15 bp, Homo sapiens
gctagactgctccat

SEQ ID NO: 1873825 - DNA, 15 bp, Homo sapiens
ctagactgctccatt

SEQ ID NO: 1873826 - DNA, 15 bp, Homo sapiens
tagactgctccatta

SEQ ID NO: 1873827 - DNA, 15 bp, Homo sapiens
agactgctccattat

SEQ ID NO: 1873828 - DNA, 15 bp, Homo sapiens
gactgctccattata

SEQ ID NO: 1873829 - DNA, 15 bp, Homo sapiens
actgctccattatat

SEQ ID NO: 1873830 - DNA, 15 bp, Homo sapiens
ctgctccattatata

SEQ ID NO: 1873831 - DNA, 15 bp, Homo sapiens
tgctccattatataa

SEQ ID NO: 1873832 - DNA, 15 bp, Homo sapiens
gctccattatataaa

SEQ ID NO: 1873833 - DNA, 15 bp, Homo sapiens
ctccattatataaac

SEQ ID NO: 1873834 - DNA, 15 bp, Homo sapiens
tccattatataaacc

SEQ ID NO: 1873835 - DNA, 15 bp, Homo sapiens
ccattatataaaccc

SEQ ID NO: 1873836 - DNA, 15 bp, Homo sapiens
cattatataaaccca

SEQ ID NO: 1873837 - DNA, 15 bp, Homo sapiens
attatataaacccag

SEQ ID NO: 1873838 - DNA, 15 bp, Homo sapiens
ttatataaacccagg

SEQ ID NO: 1873839 - DNA, 15 bp, Homo sapiens
tatataaacccaggc

SEQ ID NO: 1873840 - DNA, 15 bp, Homo sapiens
atataaacccaggcc

SEQ ID NO: 1873841 - DNA, 15 bp, Homo sapiens
tataaacccaggccc

SEQ ID NO: 1873842 - DNA, 15 bp, Homo sapiens
ataaacccaggccct

SEQ ID NO: 1873843 - DNA, 15 bp, Homo sapiens
taaacccaggcccta

SEQ ID NO: 1873844 - DNA, 15 bp, Homo sapiens
aaacccaggccctaa

SEQ ID NO: 1873845 - DNA, 15 bp, Homo sapiens
aacccaggccctaat

SEQ ID NO: 1873846 - DNA, 15 bp, Homo sapiens
acccaggccctaata

SEQ ID NO: 1873847 - DNA, 15 bp, Homo sapiens
cccaggccctaatac

SEQ ID NO: 1873848 - DNA, 15 bp, Homo sapiens
ccaggccctaatacc

SEQ ID NO: 1873849 - DNA, 15 bp, Homo sapiens
caggccctaatacct

SEQ ID NO: 1873850 - DNA, 15 bp, Homo sapiens
aggccctaatacctt

SEQ ID NO: 1873851 - DNA, 15 bp, Homo sapiens
ggccctaataccttg

SEQ ID NO: 1873852 - DNA, 15 bp, Homo sapiens
gccctaataccttga

SEQ ID NO: 1873853 - DNA, 15 bp, Homo sapiens
ccctaataccttgat

SEQ ID NO: 1873854 - DNA, 15 bp, Homo sapiens
cctaataccttgatt

SEQ ID NO: 1873855 - DNA, 15 bp, Homo sapiens
ctaataccttgattt

SEQ ID NO: 1873856 - DNA, 15 bp, Homo sapiens
taataccttgatttg

SEQ ID NO: 1873857 - DNA, 15 bp, Homo sapiens
aataccttgatttgc

SEQ ID NO: 1873858 - DNA, 15 bp, Homo sapiens
ataccttgatttgct

SEQ ID NO: 1873859 - DNA, 15 bp, Homo sapiens
taccttgatttgctt

SEQ ID NO: 1873860 - DNA, 15 bp, Homo sapiens
accttgatttgcttt

SEQ ID NO: 1873861 - DNA, 15 bp, Homo sapiens
ccttgatttgctttg

SEQ ID NO: 1873862 - DNA, 15 bp, Homo sapiens
cttgatttgctttga

SEQ ID NO: 1873863 - DNA, 15 bp, Homo sapiens
ttgatttgctttgat

SEQ ID NO: 1873864 - DNA, 15 bp, Homo sapiens
tgatttgctttgatt

SEQ ID NO: 1873865 - DNA, 15 bp, Homo sapiens
gatttgctttgattt

SEQ ID NO: 1873866 - DNA, 15 bp, Homo sapiens
atttgctttgatttc

SEQ ID NO: 1873867 - DNA, 15 bp, Homo sapiens
tttgctttgatttcc

SEQ ID NO: 1873868 - DNA, 15 bp, Homo sapiens
ttgctttgatttcct

SEQ ID NO: 1873869 - DNA, 15 bp, Homo sapiens
tgctttgatttcctc

SEQ ID NO: 1873870 - DNA, 15 bp, Homo sapiens
gctttgatttcctca

SEQ ID NO: 1873871 - DNA, 15 bp, Homo sapiens
ctttgatttcctcaa

SEQ ID NO: 1873872 - DNA, 15 bp, Homo sapiens
tttgatttcctcaac

SEQ ID NO: 1873873 - DNA, 15 bp, Homo sapiens
ttgatttcctcaact

SEQ ID NO: 1873874 - DNA, 15 bp, Homo sapiens
tgatttcctcaactg

SEQ ID NO: 1873875 - DNA, 15 bp, Homo sapiens
gatttcctcaactgg

SEQ ID NO: 1873876 - DNA, 15 bp, Homo sapiens
atttcctcaactggg

SEQ ID NO: 1873877 - DNA, 15 bp, Homo sapiens
tttcctcaactggga

SEQ ID NO: 1873878 - DNA, 15 bp, Homo sapiens
ttcctcaactgggag

SEQ ID NO: 1873879 - DNA, 15 bp, Homo sapiens
tcctcaactgggagc

SEQ ID NO: 1873880 - DNA, 15 bp, Homo sapiens
cctcaactgggagca

SEQ ID NO: 1873881 - DNA, 15 bp, Homo sapiens
ctcaactgggagcat

SEQ ID NO: 1873882 - DNA, 15 bp, Homo sapiens
tcaactgggagcatg

SEQ ID NO: 1873883 - DNA, 15 bp, Homo sapiens
caactgggagcatgc

SEQ ID NO: 1873884 - DNA, 15 bp, Homo sapiens
aactgggagcatgcc

SEQ ID NO: 1873885 - DNA, 15 bp, Homo sapiens
actgggagcatgcca

SEQ ID NO: 1873886 - DNA, 15 bp, Homo sapiens
ctgggagcatgccag

SEQ ID NO: 1873887 - DNA, 15 bp, Homo sapiens
tgggagcatgccagc

SEQ ID NO: 1873888 - DNA, 15 bp, Homo sapiens
gggagcatgccagcc

SEQ ID NO: 1873889 - DNA, 15 bp, Homo sapiens
ggagcatgccagcct

SEQ ID NO: 1873890 - DNA, 15 bp, Homo sapiens
gagcatgccagcctg

SEQ ID NO: 1873891 - DNA, 15 bp, Homo sapiens
agcatgccagcctgg

SEQ ID NO: 1873892 - DNA, 15 bp, Homo sapiens
gcatgccagcctggg

SEQ ID NO: 1873893 - DNA, 15 bp, Homo sapiens
catgccagcctggga

SEQ ID NO: 1873894 - DNA, 15 bp, Homo sapiens
atgccagcctgggaa

SEQ ID NO: 1873895 - DNA, 15 bp, Homo sapiens
tgccagcctgggaag

SEQ ID NO: 1873896 - DNA, 15 bp, Homo sapiens
gccagcctgggaagt

SEQ ID NO: 1873897 - DNA, 15 bp, Homo sapiens
ccagcctgggaagta

SEQ ID NO: 1873898 - DNA, 15 bp, Homo sapiens
cagcctgggaagtaa

SEQ ID NO: 1873899 - DNA, 15 bp, Homo sapiens
agcctgggaagtaag

SEQ ID NO: 1873900 - DNA, 15 bp, Homo sapiens
gcctgggaagtaagc

SEQ ID NO: 1873901 - DNA, 15 bp, Homo sapiens
cctgggaagtaagca

SEQ ID NO: 1873902 - DNA, 15 bp, Homo sapiens
ctgggaagtaagcag

SEQ ID NO: 1873903 - DNA, 15 bp, Homo sapiens
tgggaagtaagcagt

SEQ ID NO: 1873904 - DNA, 15 bp, Homo sapiens
gggaagtaagcagta

SEQ ID NO: 1873905 - DNA, 15 bp, Homo sapiens
ggaagtaagcagtag

SEQ ID NO: 1873906 - DNA, 15 bp, Homo sapiens
gaagtaagcagtagt

SEQ ID NO: 1873907 - DNA, 15 bp, Homo sapiens
aagtaagcagtagtg

SEQ ID NO: 1873908 - DNA, 15 bp, Homo sapiens
agtaagcagtagtgc

SEQ ID NO: 1873909 - DNA, 15 bp, Homo sapiens
gtaagcagtagtgct

SEQ ID NO: 1873910 - DNA, 15 bp, Homo sapiens
taagcagtagtgctt

SEQ ID NO: 1873911 - DNA, 15 bp, Homo sapiens
aagcagtagtgctta

SEQ ID NO: 1873912 - DNA, 15 bp, Homo sapiens
agcagtagtgcttaa

SEQ ID NO: 1873913 - DNA, 15 bp, Homo sapiens
gcagtagtgcttaat

SEQ ID NO: 1873914 - DNA, 15 bp, Homo sapiens
cagtagtgcttaatg

SEQ ID NO: 1873915 - DNA, 15 bp, Homo sapiens
agtagtgcttaatga

SEQ ID NO: 1873916 - DNA, 15 bp, Homo sapiens
gtagtgcttaatgat

SEQ ID NO: 1873917 - DNA, 15 bp, Homo sapiens
tagtgcttaatgatg

SEQ ID NO: 1873918 - DNA, 15 bp, Homo sapiens
agtgcttaatgatgg

SEQ ID NO: 1873919 - DNA, 15 bp, Homo sapiens
gtgcttaatgatggc

SEQ ID NO: 1873920 - DNA, 15 bp, Homo sapiens
tgcttaatgatggca

SEQ ID NO: 1873921 - DNA, 15 bp, Homo sapiens
gcttaatgatggcat

SEQ ID NO: 1873922 - DNA, 15 bp, Homo sapiens
cttaatgatggcatt

SEQ ID NO: 1873923 - DNA, 15 bp, Homo sapiens
ttaatgatggcatta

SEQ ID NO: 1873924 - DNA, 15 bp, Homo sapiens
taatgatggcattat

SEQ ID NO: 1873925 - DNA, 15 bp, Homo sapiens
aatgatggcattatc

SEQ ID NO: 1873926 - DNA, 15 bp, Homo sapiens
atgatggcattatcc

SEQ ID NO: 1873927 - DNA, 15 bp, Homo sapiens
tgatggcattatcca

SEQ ID NO: 1873928 - DNA, 15 bp, Homo sapiens
gatggcattatccaa

SEQ ID NO: 1873929 - DNA, 15 bp, Homo sapiens
atggcattatccaac

SEQ ID NO: 1873930 - DNA, 15 bp, Homo sapiens
tggcattatccaact

SEQ ID NO: 1873931 - DNA, 15 bp, Homo sapiens
ggcattatccaacta

SEQ ID NO: 1873932 - DNA, 15 bp, Homo sapiens
gcattatccaactaa

SEQ ID NO: 1873933 - DNA, 15 bp, Homo sapiens
cattatccaactaaa

SEQ ID NO: 1873934 - DNA, 15 bp, Homo sapiens
attatccaactaaat

SEQ ID NO: 1873935 - DNA, 15 bp, Homo sapiens
ttatccaactaaatg

SEQ ID NO: 1873936 - DNA, 15 bp, Homo sapiens
tatccaactaaatgt

SEQ ID NO: 1873937 - DNA, 15 bp, Homo sapiens
atccaactaaatgta

SEQ ID NO: 1873938 - DNA, 15 bp, Homo sapiens
tccaactaaatgtat

SEQ ID NO: 1873939 - DNA, 15 bp, Homo sapiens
ccaactaaatgtatg

SEQ ID NO: 1873940 - DNA, 15 bp, Homo sapiens
caactaaatgtatgg

SEQ ID NO: 1873941 - DNA, 15 bp, Homo sapiens
aactaaatgtatggg

SEQ ID NO: 1873942 - DNA, 15 bp, Homo sapiens
actaaatgtatgggg

SEQ ID NO: 1873943 - DNA, 15 bp, Homo sapiens
ctaaatgtatggggc

SEQ ID NO: 1873944 - DNA, 15 bp, Homo sapiens
taaatgtatggggca

SEQ ID NO: 1873945 - DNA, 15 bp, Homo sapiens
aaatgtatggggcag

SEQ ID NO: 1873946 - DNA, 15 bp, Homo sapiens
aatgtatggggcagt

SEQ ID NO: 1873947 - DNA, 15 bp, Homo sapiens
atgtatggggcagtg

SEQ ID NO: 1873948 - DNA, 15 bp, Homo sapiens
tgtatggggcagtgg

SEQ ID NO: 1873949 - DNA, 15 bp, Homo sapiens
gtatggggcagtgga

SEQ ID NO: 1873950 - DNA, 15 bp, Homo sapiens
tatggggcagtggac

SEQ ID NO: 1873951 - DNA, 15 bp, Homo sapiens
atggggcagtggaca

SEQ ID NO: 1873952 - DNA, 15 bp, Homo sapiens
tggggcagtggacat

SEQ ID NO: 1873953 - DNA, 15 bp, Homo sapiens
ggggcagtggacatt

SEQ ID NO: 1873954 - DNA, 15 bp, Homo sapiens
gggcagtggacattg

SEQ ID NO: 1873955 - DNA, 15 bp, Homo sapiens
ggcagtggacattgg

SEQ ID NO: 1873956 - DNA, 15 bp, Homo sapiens
gcagtggacattgga

SEQ ID NO: 1873957 - DNA, 15 bp, Homo sapiens
cagtggacattggac

SEQ ID NO: 1873958 - DNA, 15 bp, Homo sapiens
agtggacattggact

SEQ ID NO: 1873959 - DNA, 15 bp, Homo sapiens
gtggacattggactc

SEQ ID NO: 1873960 - DNA, 15 bp, Homo sapiens
tggacattggactct

SEQ ID NO: 1873961 - DNA, 15 bp, Homo sapiens
ggacattggactctg

SEQ ID NO: 1873962 - DNA, 15 bp, Homo sapiens
gacattggactctgg

SEQ ID NO: 1873963 - DNA, 15 bp, Homo sapiens
acattggactctgga

SEQ ID NO: 1873964 - DNA, 15 bp, Homo sapiens
cattggactctggac

SEQ ID NO: 1873965 - DNA, 15 bp, Homo sapiens
attggactctggaca

SEQ ID NO: 1873966 - DNA, 15 bp, Homo sapiens
ttggactctggacaa

SEQ ID NO: 1873967 - DNA, 15 bp, Homo sapiens
tggactctggacaaa

SEQ ID NO: 1873968 - DNA, 15 bp, Homo sapiens
ggactctggacaaaa

SEQ ID NO: 1873969 - DNA, 15 bp, Homo sapiens
gactctggacaaaat

SEQ ID NO: 1873970 - DNA, 15 bp, Homo sapiens
actctggacaaaatc

SEQ ID NO: 1873971 - DNA, 15 bp, Homo sapiens
ctctggacaaaatct

SEQ ID NO: 1873972 - DNA, 15 bp, Homo sapiens
tctggacaaaatctt

SEQ ID NO: 1873973 - DNA, 15 bp, Homo sapiens
ctggacaaaatcttt

SEQ ID NO: 1873974 - DNA, 15 bp, Homo sapiens
tggacaaaatctttg

SEQ ID NO: 1873975 - DNA, 15 bp, Homo sapiens
ggacaaaatctttgg

SEQ ID NO: 1873976 - DNA, 15 bp, Homo sapiens
gacaaaatctttggg

SEQ ID NO: 1873977 - DNA, 15 bp, Homo sapiens
acaaaatctttgggg

SEQ ID NO: 1873978 - DNA, 15 bp, Homo sapiens
caaaatctttgggga

SEQ ID NO: 1873979 - DNA, 15 bp, Homo sapiens
aaaatctttggggaa

SEQ ID NO: 1873980 - DNA, 15 bp, Homo sapiens
aaatctttggggaaa

SEQ ID NO: 1873981 - DNA, 15 bp, Homo sapiens
aatctttggggaaag

SEQ ID NO: 1873982 - DNA, 15 bp, Homo sapiens
atctttggggaaagc

SEQ ID NO: 1873983 - DNA, 15 bp, Homo sapiens
tctttggggaaagct

SEQ ID NO: 1873984 - DNA, 15 bp, Homo sapiens
ctttggggaaagctt

SEQ ID NO: 1873985 - DNA, 15 bp, Homo sapiens
tttggggaaagcttt

SEQ ID NO: 1873986 - DNA, 15 bp, Homo sapiens
ttggggaaagcttta

SEQ ID NO: 1873987 - DNA, 15 bp, Homo sapiens
tggggaaagctttag

SEQ ID NO: 1873988 - DNA, 15 bp, Homo sapiens
ggggaaagctttaga

SEQ ID NO: 1873989 - DNA, 15 bp, Homo sapiens
gggaaagctttagac

SEQ ID NO: 1873990 - DNA, 15 bp, Homo sapiens
ggaaagctttagact

SEQ ID NO: 1873991 - DNA, 15 bp, Homo sapiens
gaaagctttagacta

SEQ ID NO: 1873992 - DNA, 15 bp, Homo sapiens
aaagctttagactag

SEQ ID NO: 1873993 - DNA, 15 bp, Homo sapiens
aagctttagactagt

SEQ ID NO: 1873994 - DNA, 15 bp, Homo sapiens
agctttagactagtg

SEQ ID NO: 1873995 - DNA, 15 bp, Homo sapiens
gctttagactagtgg

SEQ ID NO: 1873996 - DNA, 15 bp, Homo sapiens
ctttagactagtggg

SEQ ID NO: 1873997 - DNA, 15 bp, Homo sapiens
tttagactagtgggc

SEQ ID NO: 1873998 - DNA, 15 bp, Homo sapiens
ttagactagtgggcc

SEQ ID NO: 1873999 - DNA, 15 bp, Homo sapiens
tagactagtgggccc

SEQ ID NO: 1874000 - DNA, 15 bp, Homo sapiens
agactagtgggcccc

SEQ ID NO: 1874001 - DNA, 15 bp, Homo sapiens
gactagtgggccccc

SEQ ID NO: 1874002 - DNA, 15 bp, Homo sapiens
actagtgggccccct

SEQ ID NO: 1874003 - DNA, 15 bp, Homo sapiens
ctagtgggcccccta

SEQ ID NO: 1874004 - DNA, 15 bp, Homo sapiens
tagtgggccccctat

SEQ ID NO: 1874005 - DNA, 15 bp, Homo sapiens
agtgggccccctata

SEQ ID NO: 1874006 - DNA, 15 bp, Homo sapiens
gtgggccccctataa

SEQ ID NO: 1874007 - DNA, 15 bp, Homo sapiens
tgggccccctataaa

SEQ ID NO: 1874008 - DNA, 15 bp, Homo sapiens
gggccccctataaac

SEQ ID NO: 1874009 - DNA, 15 bp, Homo sapiens
ggccccctataaaca

SEQ ID NO: 1874010 - DNA, 15 bp, Homo sapiens
gccccctataaacac

SEQ ID NO: 1874011 - DNA, 15 bp, Homo sapiens
ccccctataaacaca

SEQ ID NO: 1874012 - DNA, 15 bp, Homo sapiens
cccctataaacacaa

SEQ ID NO: 1874013 - DNA, 15 bp, Homo sapiens
ccctataaacacaac

SEQ ID NO: 1874014 - DNA, 15 bp, Homo sapiens
cctataaacacaaca

SEQ ID NO: 1874015 - DNA, 15 bp, Homo sapiens
ctataaacacaacag

SEQ ID NO: 1874016 - DNA, 15 bp, Homo sapiens
tataaacacaacagt

SEQ ID NO: 1874017 - DNA, 15 bp, Homo sapiens
ataaacacaacagta

SEQ ID NO: 1874018 - DNA, 15 bp, Homo sapiens
taaacacaacagtat

SEQ ID NO: 1874019 - DNA, 15 bp, Homo sapiens
aaacacaacagtatg

SEQ ID NO: 1874020 - DNA, 15 bp, Homo sapiens
aacacaacagtatgg

SEQ ID NO: 1874021 - DNA, 15 bp, Homo sapiens
acacaacagtatggt

SEQ ID NO: 1874022 - DNA, 15 bp, Homo sapiens
cacaacagtatggtg

SEQ ID NO: 1874023 - DNA, 15 bp, Homo sapiens
acaacagtatggtgt

SEQ ID NO: 1874024 - DNA, 15 bp, Homo sapiens
caacagtatggtgta

SEQ ID NO: 1874025 - DNA, 15 bp, Homo sapiens
aacagtatggtgtag

SEQ ID NO: 1874026 - DNA, 15 bp, Homo sapiens
acagtatggtgtagc

SEQ ID NO: 1874027 - DNA, 15 bp, Homo sapiens
cagtatggtgtagcc

SEQ ID NO: 1874028 - DNA, 15 bp, Homo sapiens
agtatggtgtagcct

SEQ ID NO: 1874029 - DNA, 15 bp, Homo sapiens
gtatggtgtagcctt

SEQ ID NO: 1874030 - DNA, 15 bp, Homo sapiens
tatggtgtagccttc

SEQ ID NO: 1874031 - DNA, 15 bp, Homo sapiens
atggtgtagccttca

SEQ ID NO: 1874032 - DNA, 15 bp, Homo sapiens
tggtgtagccttcaa

SEQ ID NO: 1874033 - DNA, 15 bp, Homo sapiens
ggtgtagccttcaag

SEQ ID NO: 1874034 - DNA, 15 bp, Homo sapiens
gtgtagccttcaagg

SEQ ID NO: 1874035 - DNA, 15 bp, Homo sapiens
tgtagccttcaaggt

SEQ ID NO: 1874036 - DNA, 15 bp, Homo sapiens
gtagccttcaaggtt

SEQ ID NO: 1874037 - DNA, 15 bp, Homo sapiens
tagccttcaaggttt

SEQ ID NO: 1874038 - DNA, 15 bp, Homo sapiens
agccttcaaggtttt

SEQ ID NO: 1874039 - DNA, 15 bp, Homo sapiens
gccttcaaggtttta

SEQ ID NO: 1874040 - DNA, 15 bp, Homo sapiens
ccttcaaggttttat

SEQ ID NO: 1874041 - DNA, 15 bp, Homo sapiens
cttcaaggttttatt

SEQ ID NO: 1874042 - DNA, 15 bp, Homo sapiens
ttcaaggttttattc

SEQ ID NO: 1874043 - DNA, 15 bp, Homo sapiens
tcaaggttttattca

SEQ ID NO: 1874044 - DNA, 15 bp, Homo sapiens
caaggttttattcag

SEQ ID NO: 1874045 - DNA, 15 bp, Homo sapiens
aaggttttattcaga

SEQ ID NO: 1874046 - DNA, 15 bp, Homo sapiens
aggttttattcagaa

SEQ ID NO: 1874047 - DNA, 15 bp, Homo sapiens
ggttttattcagaac

SEQ ID NO: 1874048 - DNA, 15 bp, Homo sapiens
gttttattcagaaca

SEQ ID NO: 1874049 - DNA, 15 bp, Homo sapiens
ttttattcagaacat

SEQ ID NO: 1874050 - DNA, 15 bp, Homo sapiens
tttattcagaacatg

SEQ ID NO: 1874051 - DNA, 15 bp, Homo sapiens
ttattcagaacatga

SEQ ID NO: 1874052 - DNA, 15 bp, Homo sapiens
tattcagaacatgac

SEQ ID NO: 1874053 - DNA, 15 bp, Homo sapiens
attcagaacatgacc

SEQ ID NO: 1874054 - DNA, 15 bp, Homo sapiens
ttcagaacatgacct

SEQ ID NO: 1874055 - DNA, 15 bp, Homo sapiens
tcagaacatgacctc

SEQ ID NO: 1874056 - DNA, 15 bp, Homo sapiens
cagaacatgacctca

SEQ ID NO: 1874057 - DNA, 15 bp, Homo sapiens
agaacatgacctcac

SEQ ID NO: 1874058 - DNA, 15 bp, Homo sapiens
gaacatgacctcaca

SEQ ID NO: 1874059 - DNA, 15 bp, Homo sapiens
aacatgacctcacaa

SEQ ID NO: 1874060 - DNA, 15 bp, Homo sapiens
acatgacctcacaaa

SEQ ID NO: 1874061 - DNA, 15 bp, Homo sapiens
catgacctcacaaat

SEQ ID NO: 1874062 - DNA, 15 bp, Homo sapiens
atgacctcacaaatg

SEQ ID NO: 1874063 - DNA, 15 bp, Homo sapiens
tgacctcacaaatgt

SEQ ID NO: 1874064 - DNA, 15 bp, Homo sapiens
gacctcacaaatgta

SEQ ID NO: 1874065 - DNA, 15 bp, Homo sapiens
acctcacaaatgtat

SEQ ID NO: 1874066 - DNA, 15 bp, Homo sapiens
cctcacaaatgtatc

SEQ ID NO: 1874067 - DNA, 15 bp, Homo sapiens
ctcacaaatgtatct

SEQ ID NO: 1874068 - DNA, 15 bp, Homo sapiens
tcacaaatgtatctt

SEQ ID NO: 1874069 - DNA, 15 bp, Homo sapiens
cacaaatgtatcttc

SEQ ID NO: 1874070 - DNA, 15 bp, Homo sapiens
acaaatgtatcttct

SEQ ID NO: 1874071 - DNA, 15 bp, Homo sapiens
caaatgtatcttctc

SEQ ID NO: 1874072 - DNA, 15 bp, Homo sapiens
aaatgtatcttctct

SEQ ID NO: 1874073 - DNA, 15 bp, Homo sapiens
aatgtatcttctctg

SEQ ID NO: 1874074 - DNA, 15 bp, Homo sapiens
atgtatcttctctgt

SEQ ID NO: 1874075 - DNA, 15 bp, Homo sapiens
tgtatcttctctgtt

SEQ ID NO: 1874076 - DNA, 15 bp, Homo sapiens
gtatcttctctgttt

SEQ ID NO: 1874077 - DNA, 15 bp, Homo sapiens
tatcttctctgtttg

SEQ ID NO: 1874078 - DNA, 15 bp, Homo sapiens
atcttctctgtttgt

SEQ ID NO: 1874079 - DNA, 15 bp, Homo sapiens
tcttctctgtttgtt

SEQ ID NO: 1874080 - DNA, 15 bp, Homo sapiens
cttctctgtttgttt

SEQ ID NO: 1874081 - DNA, 15 bp, Homo sapiens
ttctctgtttgtttt

SEQ ID NO: 1874082 - DNA, 15 bp, Homo sapiens
tctctgtttgttttt

SEQ ID NO: 1874083 - DNA, 15 bp, Homo sapiens
ctctgtttgtttttg

SEQ ID NO: 1874084 - DNA, 15 bp, Homo sapiens
tctgtttgtttttgt

SEQ ID NO: 1874085 - DNA, 15 bp, Homo sapiens
ctgtttgtttttgtt

SEQ ID NO: 1874086 - DNA, 15 bp, Homo sapiens
tgtttgtttttgttc

SEQ ID NO: 1874087 - DNA, 15 bp, Homo sapiens
gtttgtttttgttca

SEQ ID NO: 1874088 - DNA, 15 bp, Homo sapiens
tttgtttttgttcac

SEQ ID NO: 1874089 - DNA, 15 bp, Homo sapiens
ttgtttttgttcact

SEQ ID NO: 1874090 - DNA, 15 bp, Homo sapiens
tgtttttgttcactg

SEQ ID NO: 1874091 - DNA, 15 bp, Homo sapiens
gtttttgttcactga

SEQ ID NO: 1874092 - DNA, 15 bp, Homo sapiens
tttttgttcactgag

SEQ ID NO: 1874093 - DNA, 15 bp, Homo sapiens
ttttgttcactgagc

SEQ ID NO: 1874094 - DNA, 15 bp, Homo sapiens
tttgttcactgagca

SEQ ID NO: 1874095 - DNA, 15 bp, Homo sapiens
ttgttcactgagcag

SEQ ID NO: 1874096 - DNA, 15 bp, Homo sapiens
tgttcactgagcagt

SEQ ID NO: 1874097 - DNA, 15 bp, Homo sapiens
gttcactgagcagta

SEQ ID NO: 1874098 - DNA, 15 bp, Homo sapiens
ttcactgagcagtat

SEQ ID NO: 1874099 - DNA, 15 bp, Homo sapiens
tcactgagcagtata

SEQ ID NO: 1874100 - DNA, 15 bp, Homo sapiens
cactgagcagtatat

SEQ ID NO: 1874101 - DNA, 15 bp, Homo sapiens
actgagcagtatatt

SEQ ID NO: 1874102 - DNA, 15 bp, Homo sapiens
ctgagcagtatatta

SEQ ID NO: 1874103 - DNA, 15 bp, Homo sapiens
tgagcagtatattaa

SEQ ID NO: 1874104 - DNA, 15 bp, Homo sapiens
gagcagtatattaat

SEQ ID NO: 1874105 - DNA, 15 bp, Homo sapiens
agcagtatattaatt

SEQ ID NO: 1874106 - DNA, 15 bp, Homo sapiens
gcagtatattaatta

SEQ ID NO: 1874107 - DNA, 15 bp, Homo sapiens
cagtatattaattaa

SEQ ID NO: 1874108 - DNA, 15 bp, Homo sapiens
agtatattaattaat

SEQ ID NO: 1874109 - DNA, 15 bp, Homo sapiens
gtatattaattaatc

SEQ ID NO: 1874110 - DNA, 15 bp, Homo sapiens
tatattaattaatcc

SEQ ID NO: 1874111 - DNA, 15 bp, Homo sapiens
atattaattaatcct

SEQ ID NO: 1874112 - DNA, 15 bp, Homo sapiens
tattaattaatcctg

SEQ ID NO: 1874113 - DNA, 15 bp, Homo sapiens
attaattaatcctgg

SEQ ID NO: 1874114 - DNA, 15 bp, Homo sapiens
ttaattaatcctgga

SEQ ID NO: 1874115 - DNA, 15 bp, Homo sapiens
taattaatcctggaa

SEQ ID NO: 1874116 - DNA, 15 bp, Homo sapiens
aattaatcctggaaa

SEQ ID NO: 1874117 - DNA, 15 bp, Homo sapiens
attaatcctggaaac

SEQ ID NO: 1874118 - DNA, 15 bp, Homo sapiens
ttaatcctggaaacc

SEQ ID NO: 1874119 - DNA, 15 bp, Homo sapiens
taatcctggaaacca

SEQ ID NO: 1874120 - DNA, 15 bp, Homo sapiens
aatcctggaaaccat

SEQ ID NO: 1874121 - DNA, 15 bp, Homo sapiens
atcctggaaaccatc

SEQ ID NO: 1874122 - DNA, 15 bp, Homo sapiens
tcctggaaaccatct

SEQ ID NO: 1874123 - DNA, 15 bp, Homo sapiens
cctggaaaccatctt

SEQ ID NO: 1874124 - DNA, 15 bp, Homo sapiens
ctggaaaccatctta

SEQ ID NO: 1874125 - DNA, 15 bp, Homo sapiens
tggaaaccatcttaa

SEQ ID NO: 1874126 - DNA, 15 bp, Homo sapiens
ggaaaccatcttaag

SEQ ID NO: 1874127 - DNA, 15 bp, Homo sapiens
gaaaccatcttaaga

SEQ ID NO: 1874128 - DNA, 15 bp, Homo sapiens
aaaccatcttaagat

SEQ ID NO: 1874129 - DNA, 15 bp, Homo sapiens
aaccatcttaagatc

SEQ ID NO: 1874130 - DNA, 15 bp, Homo sapiens
accatcttaagatcc

SEQ ID NO: 1874131 - DNA, 15 bp, Homo sapiens
ccatcttaagatcca

SEQ ID NO: 1874132 - DNA, 15 bp, Homo sapiens
catcttaagatccaa

SEQ ID NO: 1874133 - DNA, 15 bp, Homo sapiens
atcttaagatccaag

SEQ ID NO: 1874134 - DNA, 15 bp, Homo sapiens
tcttaagatccaaga

SEQ ID NO: 1874135 - DNA, 15 bp, Homo sapiens
cttaagatccaagaa

SEQ ID NO: 1874136 - DNA, 15 bp, Homo sapiens
ttaagatccaagaag

SEQ ID NO: 1874137 - DNA, 15 bp, Homo sapiens
taagatccaagaagg

SEQ ID NO: 1874138 - DNA, 15 bp, Homo sapiens
aagatccaagaaggt

SEQ ID NO: 1874139 - DNA, 15 bp, Homo sapiens
agatccaagaaggta

SEQ ID NO: 1874140 - DNA, 15 bp, Homo sapiens
gatccaagaaggtac

SEQ ID NO: 1874141 - DNA, 15 bp, Homo sapiens
atccaagaaggtact

SEQ ID NO: 1874142 - DNA, 15 bp, Homo sapiens
tccaagaaggtactt

SEQ ID NO: 1874143 - DNA, 15 bp, Homo sapiens
ccaagaaggtacttt

SEQ ID NO: 1874144 - DNA, 15 bp, Homo sapiens
caagaaggtacttta

SEQ ID NO: 1874145 - DNA, 15 bp, Homo sapiens
aagaaggtactttag

SEQ ID NO: 1874146 - DNA, 15 bp, Homo sapiens
agaaggtactttagg

SEQ ID NO: 1874147 - DNA, 15 bp, Homo sapiens
gaaggtactttagga

SEQ ID NO: 1874148 - DNA, 15 bp, Homo sapiens
aaggtactttaggat

SEQ ID NO: 1874149 - DNA, 15 bp, Homo sapiens
aggtactttaggatt

SEQ ID NO: 1874150 - DNA, 15 bp, Homo sapiens
ggtactttaggattt

SEQ ID NO: 1874151 - DNA, 15 bp, Homo sapiens
gtactttaggatttt

SEQ ID NO: 1874152 - DNA, 15 bp, Homo sapiens
tactttaggattttt

SEQ ID NO: 1874153 - DNA, 15 bp, Homo sapiens
actttaggatttttc

SEQ ID NO: 1874154 - DNA, 15 bp, Homo sapiens
ctttaggatttttca

SEQ ID NO: 1874155 - DNA, 15 bp, Homo sapiens
tttaggatttttcat

SEQ ID NO: 1874156 - DNA, 15 bp, Homo sapiens
ttaggatttttcatc

SEQ ID NO: 1874157 - DNA, 15 bp, Homo sapiens
taggatttttcatcg

SEQ ID NO: 1874158 - DNA, 15 bp, Homo sapiens
aggatttttcatcgc

SEQ ID NO: 1874159 - DNA, 15 bp, Homo sapiens
ggatttttcatcgca

SEQ ID NO: 1874160 - DNA, 15 bp, Homo sapiens
gatttttcatcgcaa

SEQ ID NO: 1874161 - DNA, 15 bp, Homo sapiens
atttttcatcgcaag

SEQ ID NO: 1874162 - DNA, 15 bp, Homo sapiens
tttttcatcgcaagt

SEQ ID NO: 1874163 - DNA, 15 bp, Homo sapiens
ttttcatcgcaagtg

SEQ ID NO: 1874164 - DNA, 15 bp, Homo sapiens
tttcatcgcaagtga

SEQ ID NO: 1874165 - DNA, 15 bp, Homo sapiens
ttcatcgcaagtgat

SEQ ID NO: 1874166 - DNA, 15 bp, Homo sapiens
tcatcgcaagtgatg

SEQ ID NO: 1874167 - DNA, 15 bp, Homo sapiens
catcgcaagtgatgc

SEQ ID NO: 1874168 - DNA, 15 bp, Homo sapiens
atcgcaagtgatgcc

SEQ ID NO: 1874169 - DNA, 15 bp, Homo sapiens
tcgcaagtgatgcca

SEQ ID NO: 1874170 - DNA, 15 bp, Homo sapiens
cgcaagtgatgccaa

SEQ ID NO: 1874171 - DNA, 15 bp, Homo sapiens
gcaagtgatgccaaa

SEQ ID NO: 1874172 - DNA, 15 bp, Homo sapiens
caagtgatgccaaag

SEQ ID NO: 1874173 - DNA, 15 bp, Homo sapiens
aagtgatgccaaaga

SEQ ID NO: 1874174 - DNA, 15 bp, Homo sapiens
agtgatgccaaagaa

SEQ ID NO: 1874175 - DNA, 15 bp, Homo sapiens
gtgatgccaaagaag

SEQ ID NO: 1874176 - DNA, 15 bp, Homo sapiens
tgatgccaaagaagt

SEQ ID NO: 1874177 - DNA, 15 bp, Homo sapiens
gatgccaaagaagtt

SEQ ID NO: 1874178 - DNA, 15 bp, Homo sapiens
atgccaaagaagtta

SEQ ID NO: 1874179 - DNA, 15 bp, Homo sapiens
tgccaaagaagttaa

SEQ ID NO: 1874180 - DNA, 15 bp, Homo sapiens
gccaaagaagttaaa

SEQ ID NO: 1874181 - DNA, 15 bp, Homo sapiens
ccaaagaagttaaaa

SEQ ID NO: 1874182 - DNA, 15 bp, Homo sapiens
caaagaagttaaaag

SEQ ID NO: 1874183 - DNA, 15 bp, Homo sapiens
aaagaagttaaaagg

SEQ ID NO: 1874184 - DNA, 15 bp, Homo sapiens
aagaagttaaaaggt

SEQ ID NO: 1874185 - DNA, 15 bp, Homo sapiens
agaagttaaaaggta

SEQ ID NO: 1874186 - DNA, 15 bp, Homo sapiens
gaagttaaaaggtaa

SEQ ID NO: 1874187 - DNA, 15 bp, Homo sapiens
aagttaaaaggtaag

SEQ ID NO: 1874188 - DNA, 15 bp, Homo sapiens
agttaaaaggtaaga

SEQ ID NO: 1874189 - DNA, 15 bp, Homo sapiens
gttaaaaggtaagag

SEQ ID NO: 1874190 - DNA, 15 bp, Homo sapiens
ttaaaaggtaagagt

SEQ ID NO: 1874191 - DNA, 15 bp, Homo sapiens
taaaaggtaagagtt

SEQ ID NO: 1874192 - DNA, 15 bp, Homo sapiens
aaaaggtaagagttt

SEQ ID NO: 1874193 - DNA, 15 bp, Homo sapiens
aaaggtaagagttta

SEQ ID NO: 1874194 - DNA, 15 bp, Homo sapiens
aaggtaagagtttat

SEQ ID NO: 1874195 - DNA, 15 bp, Homo sapiens
aggtaagagtttatt

SEQ ID NO: 1874196 - DNA, 15 bp, Homo sapiens
ggtaagagtttattt

SEQ ID NO: 1874197 - DNA, 15 bp, Homo sapiens
gtaagagtttatttt

SEQ ID NO: 1874198 - DNA, 15 bp, Homo sapiens
taagagtttattttc

SEQ ID NO: 1874199 - DNA, 15 bp, Homo sapiens
aagagtttattttca

SEQ ID NO: 1874200 - DNA, 15 bp, Homo sapiens
agagtttattttcaa

SEQ ID NO: 1874201 - DNA, 15 bp, Homo sapiens
gagtttattttcaac

SEQ ID NO: 1874202 - DNA, 15 bp, Homo sapiens
agtttattttcaact

SEQ ID NO: 1874203 - DNA, 15 bp, Homo sapiens
gtttattttcaactg

SEQ ID NO: 1874204 - DNA, 15 bp, Homo sapiens
tttattttcaactgg

SEQ ID NO: 1874205 - DNA, 15 bp, Homo sapiens
ttattttcaactggc

SEQ ID NO: 1874206 - DNA, 15 bp, Homo sapiens
tattttcaactggct

SEQ ID NO: 1874207 - DNA, 15 bp, Homo sapiens
attttcaactggctt

SEQ ID NO: 1874208 - DNA, 15 bp, Homo sapiens
ttttcaactggcttt

SEQ ID NO: 1874209 - DNA, 15 bp, Homo sapiens
tttcaactggctttc

SEQ ID NO: 1874210 - DNA, 15 bp, Homo sapiens
ttcaactggctttct

SEQ ID NO: 1874211 - DNA, 15 bp, Homo sapiens
tcaactggctttctt

SEQ ID NO: 1874212 - DNA, 15 bp, Homo sapiens
caactggctttcttt

SEQ ID NO: 1874213 - DNA, 15 bp, Homo sapiens
aactggctttctttc

SEQ ID NO: 1874214 - DNA, 15 bp, Homo sapiens
actggctttctttct

SEQ ID NO: 1874215 - DNA, 15 bp, Homo sapiens
ctggctttctttctg

SEQ ID NO: 1874216 - DNA, 15 bp, Homo sapiens
tggctttctttctgg

SEQ ID NO: 1874217 - DNA, 15 bp, Homo sapiens
ggctttctttctggc

SEQ ID NO: 1874218 - DNA, 15 bp, Homo sapiens
gctttctttctggcc

SEQ ID NO: 1874219 - DNA, 15 bp, Homo sapiens
ctttctttctggccc

SEQ ID NO: 1874220 - DNA, 15 bp, Homo sapiens
tttctttctggcccg

SEQ ID NO: 1874221 - DNA, 15 bp, Homo sapiens
ttctttctggcccgg

SEQ ID NO: 1874222 - DNA, 15 bp, Homo sapiens
tctttctggcccggc

SEQ ID NO: 1874223 - DNA, 15 bp, Homo sapiens
ctttctggcccggct

SEQ ID NO: 1874224 - DNA, 15 bp, Homo sapiens
tttctggcccggctg

SEQ ID NO: 1874225 - DNA, 15 bp, Homo sapiens
ttctggcccggctgt

SEQ ID NO: 1874226 - DNA, 15 bp, Homo sapiens
tctggcccggctgta

SEQ ID NO: 1874227 - DNA, 15 bp, Homo sapiens
ctggcccggctgtag

SEQ ID NO: 1874228 - DNA, 15 bp, Homo sapiens
tggcccggctgtaga

SEQ ID NO: 1874229 - DNA, 15 bp, Homo sapiens
ggcccggctgtagac

SEQ ID NO: 1874230 - DNA, 15 bp, Homo sapiens
gcccggctgtagaca

SEQ ID NO: 1874231 - DNA, 15 bp, Homo sapiens
cccggctgtagacac

SEQ ID NO: 1874232 - DNA, 15 bp, Homo sapiens
ccggctgtagacacc

SEQ ID NO: 1874233 - DNA, 15 bp, Homo sapiens
cggctgtagacacct

SEQ ID NO: 1874234 - DNA, 15 bp, Homo sapiens
ggctgtagacacctt

SEQ ID NO: 1874235 - DNA, 15 bp, Homo sapiens
gctgtagacaccttg

SEQ ID NO: 1874236 - DNA, 15 bp, Homo sapiens
ctgtagacaccttga

SEQ ID NO: 1874237 - DNA, 15 bp, Homo sapiens
tgtagacaccttgac

SEQ ID NO: 1874238 - DNA, 15 bp, Homo sapiens
gtagacaccttgacc

SEQ ID NO: 1874239 - DNA, 15 bp, Homo sapiens
tagacaccttgaccc

SEQ ID NO: 1874240 - DNA, 15 bp, Homo sapiens
agacaccttgaccca

SEQ ID NO: 1874241 - DNA, 15 bp, Homo sapiens
gacaccttgacccac

SEQ ID NO: 1874242 - DNA, 15 bp, Homo sapiens
acaccttgacccacg

SEQ ID NO: 1874243 - DNA, 15 bp, Homo sapiens
caccttgacccacgg

SEQ ID NO: 1874244 - DNA, 15 bp, Homo sapiens
accttgacccacgga

SEQ ID NO: 1874245 - DNA, 15 bp, Homo sapiens
ccttgacccacggaa

SEQ ID NO: 1874246 - DNA, 15 bp, Homo sapiens
cttgacccacggaag

SEQ ID NO: 1874247 - DNA, 15 bp, Homo sapiens
ttgacccacggaagt

SEQ ID NO: 1874248 - DNA, 15 bp, Homo sapiens
tgacccacggaagta

SEQ ID NO: 1874249 - DNA, 15 bp, Homo sapiens
gacccacggaagtag

SEQ ID NO: 1874250 - DNA, 15 bp, Homo sapiens
acccacggaagtagg

SEQ ID NO: 1874251 - DNA, 15 bp, Homo sapiens
cccacggaagtaggc

SEQ ID NO: 1874252 - DNA, 15 bp, Homo sapiens
ccacggaagtaggca

SEQ ID NO: 1874253 - DNA, 15 bp, Homo sapiens
cacggaagtaggcag

SEQ ID NO: 1874254 - DNA, 15 bp, Homo sapiens
acggaagtaggcagg

SEQ ID NO: 1874255 - DNA, 15 bp, Homo sapiens
cggaagtaggcaggc

SEQ ID NO: 1874256 - DNA, 15 bp, Homo sapiens
ggaagtaggcaggct

SEQ ID NO: 1874257 - DNA, 15 bp, Homo sapiens
gaagtaggcaggctt

SEQ ID NO: 1874258 - DNA, 15 bp, Homo sapiens
aagtaggcaggcttc

SEQ ID NO: 1874259 - DNA, 15 bp, Homo sapiens
agtaggcaggcttcc

SEQ ID NO: 1874260 - DNA, 15 bp, Homo sapiens
gtaggcaggcttcca

SEQ ID NO: 1874261 - DNA, 15 bp, Homo sapiens
taggcaggcttccat

SEQ ID NO: 1874262 - DNA, 15 bp, Homo sapiens
aggcaggcttccata

SEQ ID NO: 1874263 - DNA, 15 bp, Homo sapiens
ggcaggcttccataa

SEQ ID NO: 1874264 - DNA, 15 bp, Homo sapiens
gcaggcttccataac

SEQ ID NO: 1874265 - DNA, 15 bp, Homo sapiens
caggcttccataacc

SEQ ID NO: 1874266 - DNA, 15 bp, Homo sapiens
aggcttccataaccc

SEQ ID NO: 1874267 - DNA, 15 bp, Homo sapiens
ggcttccataacccc

SEQ ID NO: 1874268 - DNA, 15 bp, Homo sapiens
gcttccataacccca

SEQ ID NO: 1874269 - DNA, 15 bp, Homo sapiens
cttccataaccccaa

SEQ ID NO: 1874270 - DNA, 15 bp, Homo sapiens
ttccataaccccaaa

SEQ ID NO: 1874271 - DNA, 15 bp, Homo sapiens
tccataaccccaaaa

SEQ ID NO: 1874272 - DNA, 15 bp, Homo sapiens
ccataaccccaaaac

SEQ ID NO: 1874273 - DNA, 15 bp, Homo sapiens
cataaccccaaaact

SEQ ID NO: 1874274 - DNA, 15 bp, Homo sapiens
ataaccccaaaactc

SEQ ID NO: 1874275 - DNA, 15 bp, Homo sapiens
taaccccaaaactcc

SEQ ID NO: 1874276 - DNA, 15 bp, Homo sapiens
aaccccaaaactcct

SEQ ID NO: 1874277 - DNA, 15 bp, Homo sapiens
accccaaaactcctt

SEQ ID NO: 1874278 - DNA, 15 bp, Homo sapiens
ccccaaaactcctta

SEQ ID NO: 1874279 - DNA, 15 bp, Homo sapiens
cccaaaactccttaa

SEQ ID NO: 1874280 - DNA, 15 bp, Homo sapiens
ccaaaactccttaac

SEQ ID NO: 1874281 - DNA, 15 bp, Homo sapiens
caaaactccttaaca

SEQ ID NO: 1874282 - DNA, 15 bp, Homo sapiens
aaaactccttaacat

SEQ ID NO: 1874283 - DNA, 15 bp, Homo sapiens
aaactccttaacatg

SEQ ID NO: 1874284 - DNA, 15 bp, Homo sapiens
aactccttaacatgt

SEQ ID NO: 1874285 - DNA, 15 bp, Homo sapiens
actccttaacatgtc

SEQ ID NO: 1874286 - DNA, 15 bp, Homo sapiens
ctccttaacatgtct

SEQ ID NO: 1874287 - DNA, 15 bp, Homo sapiens
tccttaacatgtcta

SEQ ID NO: 1874288 - DNA, 15 bp, Homo sapiens
ccttaacatgtctat

SEQ ID NO: 1874289 - DNA, 15 bp, Homo sapiens
cttaacatgtctatg

SEQ ID NO: 1874290 - DNA, 15 bp, Homo sapiens
ttaacatgtctatgg

SEQ ID NO: 1874291 - DNA, 15 bp, Homo sapiens
taacatgtctatggc

SEQ ID NO: 1874292 - DNA, 15 bp, Homo sapiens
aacatgtctatggcc

SEQ ID NO: 1874293 - DNA, 15 bp, Homo sapiens
acatgtctatggcca

SEQ ID NO: 1874294 - DNA, 15 bp, Homo sapiens
catgtctatggccat

SEQ ID NO: 1874295 - DNA, 15 bp, Homo sapiens
atgtctatggccatc

SEQ ID NO: 1874296 - DNA, 15 bp, Homo sapiens
tgtctatggccatca

SEQ ID NO: 1874297 - DNA, 15 bp, Homo sapiens
gtctatggccatcaa

SEQ ID NO: 1874298 - DNA, 15 bp, Homo sapiens
tctatggccatcaac

SEQ ID NO: 1874299 - DNA, 15 bp, Homo sapiens
ctatggccatcaact

SEQ ID NO: 1874300 - DNA, 15 bp, Homo sapiens
tatggccatcaactg

SEQ ID NO: 1874301 - DNA, 15 bp, Homo sapiens
atggccatcaactgg

SEQ ID NO: 1874302 - DNA, 15 bp, Homo sapiens
tggccatcaactggt

SEQ ID NO: 1874303 - DNA, 15 bp, Homo sapiens
ggccatcaactggtg

SEQ ID NO: 1874304 - DNA, 15 bp, Homo sapiens
gccatcaactggtgt

SEQ ID NO: 1874305 - DNA, 15 bp, Homo sapiens
ccatcaactggtgta

SEQ ID NO: 1874306 - DNA, 15 bp, Homo sapiens
catcaactggtgtaa

SEQ ID NO: 1874307 - DNA, 15 bp, Homo sapiens
atcaactggtgtaag

SEQ ID NO: 1874308 - DNA, 15 bp, Homo sapiens
tcaactggtgtaaga

SEQ ID NO: 1874309 - DNA, 15 bp, Homo sapiens
caactggtgtaagaa

SEQ ID NO: 1874310 - DNA, 15 bp, Homo sapiens
aactggtgtaagaaa

SEQ ID NO: 1874311 - DNA, 15 bp, Homo sapiens
actggtgtaagaaaa

SEQ ID NO: 1874312 - DNA, 15 bp, Homo sapiens
ctggtgtaagaaaaa

SEQ ID NO: 1874313 - DNA, 15 bp, Homo sapiens
tggtgtaagaaaaac

SEQ ID NO: 1874314 - DNA, 15 bp, Homo sapiens
ggtgtaagaaaaact

SEQ ID NO: 1874315 - DNA, 15 bp, Homo sapiens
gtgtaagaaaaactt

SEQ ID NO: 1874316 - DNA, 15 bp, Homo sapiens
tgtaagaaaaacttc

SEQ ID NO: 1874317 - DNA, 15 bp, Homo sapiens
gtaagaaaaacttcc

SEQ ID NO: 1874318 - DNA, 15 bp, Homo sapiens
taagaaaaacttcca

SEQ ID NO: 1874319 - DNA, 15 bp, Homo sapiens
aagaaaaacttccac

SEQ ID NO: 1874320 - DNA, 15 bp, Homo sapiens
agaaaaacttccacg

SEQ ID NO: 1874321 - DNA, 15 bp, Homo sapiens
gaaaaacttccacgg

SEQ ID NO: 1874322 - DNA, 15 bp, Homo sapiens
aaaaacttccacgga

SEQ ID NO: 1874323 - DNA, 15 bp, Homo sapiens
aaaacttccacggac

SEQ ID NO: 1874324 - DNA, 15 bp, Homo sapiens
aaacttccacggact

SEQ ID NO: 1874325 - DNA, 15 bp, Homo sapiens
aacttccacggactc

SEQ ID NO: 1874326 - DNA, 15 bp, Homo sapiens
acttccacggactcc

SEQ ID NO: 1874327 - DNA, 15 bp, Homo sapiens
cttccacggactcca

SEQ ID NO: 1874328 - DNA, 15 bp, Homo sapiens
ttccacggactccag

SEQ ID NO: 1874329 - DNA, 15 bp, Homo sapiens
tccacggactccagt

SEQ ID NO: 1874330 - DNA, 15 bp, Homo sapiens
ccacggactccagtt

SEQ ID NO: 1874331 - DNA, 15 bp, Homo sapiens
cacggactccagttc

SEQ ID NO: 1874332 - DNA, 15 bp, Homo sapiens
acggactccagttca

SEQ ID NO: 1874333 - DNA, 15 bp, Homo sapiens
cggactccagttcat

SEQ ID NO: 1874334 - DNA, 15 bp, Homo sapiens
ggactccagttcatg

SEQ ID NO: 1874335 - DNA, 15 bp, Homo sapiens
gactccagttcatgt

SEQ ID NO: 1874336 - DNA, 15 bp, Homo sapiens
actccagttcatgta

SEQ ID NO: 1874337 - DNA, 15 bp, Homo sapiens
ctccagttcatgtag

SEQ ID NO: 1874338 - DNA, 15 bp, Homo sapiens
tccagttcatgtagt

SEQ ID NO: 1874339 - DNA, 15 bp, Homo sapiens
ccagttcatgtagtg

SEQ ID NO: 1874340 - DNA, 15 bp, Homo sapiens
cagttcatgtagtga

SEQ ID NO: 1874341 - DNA, 15 bp, Homo sapiens
agttcatgtagtgaa

SEQ ID NO: 1874342 - DNA, 15 bp, Homo sapiens
gttcatgtagtgaat

SEQ ID NO: 1874343 - DNA, 15 bp, Homo sapiens
ttcatgtagtgaatt

SEQ ID NO: 1874344 - DNA, 15 bp, Homo sapiens
tcatgtagtgaattc

SEQ ID NO: 1874345 - DNA, 15 bp, Homo sapiens
catgtagtgaattcc

SEQ ID NO: 1874346 - DNA, 15 bp, Homo sapiens
atgtagtgaattcca

SEQ ID NO: 1874347 - DNA, 15 bp, Homo sapiens
tgtagtgaattccac

SEQ ID NO: 1874348 - DNA, 15 bp, Homo sapiens
gtagtgaattccaca

SEQ ID NO: 1874349 - DNA, 15 bp, Homo sapiens
tagtgaattccacat

SEQ ID NO: 1874350 - DNA, 15 bp, Homo sapiens
agtgaattccacatc

SEQ ID NO: 1874351 - DNA, 15 bp, Homo sapiens
gtgaattccacatct

SEQ ID NO: 1874352 - DNA, 15 bp, Homo sapiens
tgaattccacatctt

SEQ ID NO: 1874353 - DNA, 15 bp, Homo sapiens
gaattccacatcttt

SEQ ID NO: 1874354 - DNA, 15 bp, Homo sapiens
aattccacatctttg

SEQ ID NO: 1874355 - DNA, 15 bp, Homo sapiens
attccacatctttga

SEQ ID NO: 1874356 - DNA, 15 bp, Homo sapiens
ttccacatctttgaa

SEQ ID NO: 1874357 - DNA, 15 bp, Homo sapiens
tccacatctttgaat

SEQ ID NO: 1874358 - DNA, 15 bp, Homo sapiens
ccacatctttgaatg

SEQ ID NO: 1874359 - DNA, 15 bp, Homo sapiens
cacatctttgaatga

SEQ ID NO: 1874360 - DNA, 15 bp, Homo sapiens
acatctttgaatgag

SEQ ID NO: 1874361 - DNA, 15 bp, Homo sapiens
catctttgaatgaga

SEQ ID NO: 1874362 - DNA, 15 bp, Homo sapiens
atctttgaatgagaa

SEQ ID NO: 1874363 - DNA, 15 bp, Homo sapiens
tctttgaatgagaat

SEQ ID NO: 1874364 - DNA, 15 bp, Homo sapiens
ctttgaatgagaata

SEQ ID NO: 1874365 - DNA, 15 bp, Homo sapiens
tttgaatgagaataa

SEQ ID NO: 1874366 - DNA, 15 bp, Homo sapiens
ttgaatgagaataat

SEQ ID NO: 1874367 - DNA, 15 bp, Homo sapiens
tgaatgagaataata

SEQ ID NO: 1874368 - DNA, 15 bp, Homo sapiens
gaatgagaataataa

SEQ ID NO: 1874369 - DNA, 15 bp, Homo sapiens
aatgagaataataaa

SEQ ID NO: 1874370 - DNA, 15 bp, Homo sapiens
atgagaataataaaa

SEQ ID NO: 1874371 - DNA, 15 bp, Homo sapiens
tgagaataataaaat

SEQ ID NO: 1874372 - DNA, 15 bp, Homo sapiens
gagaataataaaatt

SEQ ID NO: 1874373 - DNA, 15 bp, Homo sapiens
agaataataaaattt

SEQ ID NO: 1874374 - DNA, 15 bp, Homo sapiens
gaataataaaatttt

SEQ ID NO: 1874375 - DNA, 15 bp, Homo sapiens
aataataaaatttta

SEQ ID NO: 1874376 - DNA, 15 bp, Homo sapiens
ataataaaattttag

SEQ ID NO: 1874377 - DNA, 15 bp, Homo sapiens
taataaaattttaga

SEQ ID NO: 1874378 - DNA, 15 bp, Homo sapiens
aataaaattttagaa

SEQ ID NO: 1874379 - DNA, 15 bp, Homo sapiens
ataaaattttagaac

SEQ ID NO: 1874380 - DNA, 15 bp, Homo sapiens
taaaattttagaact

SEQ ID NO: 1874381 - DNA, 15 bp, Homo sapiens
aaaattttagaacta

SEQ ID NO: 1874382 - DNA, 15 bp, Homo sapiens
aaattttagaactag

SEQ ID NO: 1874383 - DNA, 15 bp, Homo sapiens
aattttagaactagg

SEQ ID NO: 1874384 - DNA, 15 bp, Homo sapiens
attttagaactagga

SEQ ID NO: 1874385 - DNA, 15 bp, Homo sapiens
ttttagaactaggaa

SEQ ID NO: 1874386 - DNA, 15 bp, Homo sapiens
tttagaactaggaag

SEQ ID NO: 1874387 - DNA, 15 bp, Homo sapiens
ttagaactaggaagc

SEQ ID NO: 1874388 - DNA, 15 bp, Homo sapiens
tagaactaggaagcc

SEQ ID NO: 1874389 - DNA, 15 bp, Homo sapiens
agaactaggaagcct

SEQ ID NO: 1874390 - DNA, 15 bp, Homo sapiens
gaactaggaagccta

SEQ ID NO: 1874391 - DNA, 15 bp, Homo sapiens
aactaggaagcctag

SEQ ID NO: 1874392 - DNA, 15 bp, Homo sapiens
actaggaagcctagt

SEQ ID NO: 1874393 - DNA, 15 bp, Homo sapiens
ctaggaagcctagtt

SEQ ID NO: 1874394 - DNA, 15 bp, Homo sapiens
taggaagcctagtta

SEQ ID NO: 1874395 - DNA, 15 bp, Homo sapiens
aggaagcctagttac

SEQ ID NO: 1874396 - DNA, 15 bp, Homo sapiens
ggaagcctagttacc

SEQ ID NO: 1874397 - DNA, 15 bp, Homo sapiens
gaagcctagttacct

SEQ ID NO: 1874398 - DNA, 15 bp, Homo sapiens
aagcctagttacctg

SEQ ID NO: 1874399 - DNA, 15 bp, Homo sapiens
agcctagttacctgc

SEQ ID NO: 1874400 - DNA, 15 bp, Homo sapiens
gcctagttacctgct

SEQ ID NO: 1874401 - DNA, 15 bp, Homo sapiens
cctagttacctgctc

SEQ ID NO: 1874402 - DNA, 15 bp, Homo sapiens
ctagttacctgctca

SEQ ID NO: 1874403 - DNA, 15 bp, Homo sapiens
tagttacctgctcat

SEQ ID NO: 1874404 - DNA, 15 bp, Homo sapiens
agttacctgctcatt

SEQ ID NO: 1874405 - DNA, 15 bp, Homo sapiens
gttacctgctcattt

SEQ ID NO: 1874406 - DNA, 15 bp, Homo sapiens
ttacctgctcattta

SEQ ID NO: 1874407 - DNA, 15 bp, Homo sapiens
tacctgctcatttat

SEQ ID NO: 1874408 - DNA, 15 bp, Homo sapiens
acctgctcatttatt

SEQ ID NO: 1874409 - DNA, 15 bp, Homo sapiens
cctgctcatttattt

SEQ ID NO: 1874410 - DNA, 15 bp, Homo sapiens
ctgctcatttatttt

SEQ ID NO: 1874411 - DNA, 15 bp, Homo sapiens
tgctcatttattttg

SEQ ID NO: 1874412 - DNA, 15 bp, Homo sapiens
gctcatttattttgt

SEQ ID NO: 1874413 - DNA, 15 bp, Homo sapiens
ctcatttattttgtg

SEQ ID NO: 1874414 - DNA, 15 bp, Homo sapiens
tcatttattttgtga

SEQ ID NO: 1874415 - DNA, 15 bp, Homo sapiens
catttattttgtgag

SEQ ID NO: 1874416 - DNA, 15 bp, Homo sapiens
atttattttgtgagg

SEQ ID NO: 1874417 - DNA, 15 bp, Homo sapiens
tttattttgtgaggg

SEQ ID NO: 1874418 - DNA, 15 bp, Homo sapiens
ttattttgtgaggga

SEQ ID NO: 1874419 - DNA, 15 bp, Homo sapiens
tattttgtgagggag

SEQ ID NO: 1874420 - DNA, 15 bp, Homo sapiens
attttgtgagggaga

SEQ ID NO: 1874421 - DNA, 15 bp, Homo sapiens
ttttgtgagggagaa

SEQ ID NO: 1874422 - DNA, 15 bp, Homo sapiens
tttgtgagggagaaa

SEQ ID NO: 1874423 - DNA, 15 bp, Homo sapiens
ttgtgagggagaaaa

SEQ ID NO: 1874424 - DNA, 15 bp, Homo sapiens
tgtgagggagaaaat

SEQ ID NO: 1874425 - DNA, 15 bp, Homo sapiens
gtgagggagaaaatg

SEQ ID NO: 1874426 - DNA, 15 bp, Homo sapiens
tgagggagaaaatgg

SEQ ID NO: 1874427 - DNA, 15 bp, Homo sapiens
gagggagaaaatggg

SEQ ID NO: 1874428 - DNA, 15 bp, Homo sapiens
agggagaaaatgggg

SEQ ID NO: 1874429 - DNA, 15 bp, Homo sapiens
gggagaaaatggggg

SEQ ID NO: 1874430 - DNA, 15 bp, Homo sapiens
ggagaaaatgggggc

SEQ ID NO: 1874431 - DNA, 15 bp, Homo sapiens
gagaaaatgggggct

SEQ ID NO: 1874432 - DNA, 15 bp, Homo sapiens
agaaaatgggggctc

SEQ ID NO: 1874433 - DNA, 15 bp, Homo sapiens
gaaaatgggggctca

SEQ ID NO: 1874434 - DNA, 15 bp, Homo sapiens
aaaatgggggctcag

SEQ ID NO: 1874435 - DNA, 15 bp, Homo sapiens
aaatgggggctcaga

SEQ ID NO: 1874436 - DNA, 15 bp, Homo sapiens
aatgggggctcagag

SEQ ID NO: 1874437 - DNA, 15 bp, Homo sapiens
atgggggctcagaga

SEQ ID NO: 1874438 - DNA, 15 bp, Homo sapiens
tgggggctcagagag

SEQ ID NO: 1874439 - DNA, 15 bp, Homo sapiens
gggggctcagagagc

SEQ ID NO: 1874440 - DNA, 15 bp, Homo sapiens
ggggctcagagagct

SEQ ID NO: 1874441 - DNA, 15 bp, Homo sapiens
gggctcagagagctg

SEQ ID NO: 1874442 - DNA, 15 bp, Homo sapiens
ggctcagagagctga

SEQ ID NO: 1874443 - DNA, 15 bp, Homo sapiens
gctcagagagctgaa

SEQ ID NO: 1874444 - DNA, 15 bp, Homo sapiens
ctcagagagctgaat

SEQ ID NO: 1874445 - DNA, 15 bp, Homo sapiens
tcagagagctgaatg

SEQ ID NO: 1874446 - DNA, 15 bp, Homo sapiens
cagagagctgaatga

SEQ ID NO: 1874447 - DNA, 15 bp, Homo sapiens
agagagctgaatgac

SEQ ID NO: 1874448 - DNA, 15 bp, Homo sapiens
gagagctgaatgact

SEQ ID NO: 1874449 - DNA, 15 bp, Homo sapiens
agagctgaatgactg

SEQ ID NO: 1874450 - DNA, 15 bp, Homo sapiens
gagctgaatgactgc

SEQ ID NO: 1874451 - DNA, 15 bp, Homo sapiens
agctgaatgactgct

SEQ ID NO: 1874452 - DNA, 15 bp, Homo sapiens
gctgaatgactgctc

SEQ ID NO: 1874453 - DNA, 15 bp, Homo sapiens
ctgaatgactgctcg

SEQ ID NO: 1874454 - DNA, 15 bp, Homo sapiens
tgaatgactgctcga

SEQ ID NO: 1874455 - DNA, 15 bp, Homo sapiens
gaatgactgctcgag

SEQ ID NO: 1874456 - DNA, 15 bp, Homo sapiens
aatgactgctcgagg

SEQ ID NO: 1874457 - DNA, 15 bp, Homo sapiens
atgactgctcgaggt

SEQ ID NO: 1874458 - DNA, 15 bp, Homo sapiens
tgactgctcgaggtc

SEQ ID NO: 1874459 - DNA, 15 bp, Homo sapiens
gactgctcgaggtca

SEQ ID NO: 1874460 - DNA, 15 bp, Homo sapiens
actgctcgaggtcat

SEQ ID NO: 1874461 - DNA, 15 bp, Homo sapiens
ctgctcgaggtcatc

SEQ ID NO: 1874462 - DNA, 15 bp, Homo sapiens
tgctcgaggtcatcc

SEQ ID NO: 1874463 - DNA, 15 bp, Homo sapiens
gctcgaggtcatcct

SEQ ID NO: 1874464 - DNA, 15 bp, Homo sapiens
ctcgaggtcatcctg

SEQ ID NO: 1874465 - DNA, 15 bp, Homo sapiens
tcgaggtcatcctga

SEQ ID NO: 1874466 - DNA, 15 bp, Homo sapiens
cgaggtcatcctgat

SEQ ID NO: 1874467 - DNA, 15 bp, Homo sapiens
gaggtcatcctgatt

SEQ ID NO: 1874468 - DNA, 15 bp, Homo sapiens
aggtcatcctgattc

SEQ ID NO: 1874469 - DNA, 15 bp, Homo sapiens
ggtcatcctgattcc

SEQ ID NO: 1874470 - DNA, 15 bp, Homo sapiens
gtcatcctgattcct

SEQ ID NO: 1874471 - DNA, 15 bp, Homo sapiens
tcatcctgattcctg

SEQ ID NO: 1874472 - DNA, 15 bp, Homo sapiens
catcctgattcctga

SEQ ID NO: 1874473 - DNA, 15 bp, Homo sapiens
atcctgattcctgat

SEQ ID NO: 1874474 - DNA, 15 bp, Homo sapiens
tcctgattcctgatg

SEQ ID NO: 1874475 - DNA, 15 bp, Homo sapiens
cctgattcctgatga

SEQ ID NO: 1874476 - DNA, 15 bp, Homo sapiens
ctgattcctgatgat

SEQ ID NO: 1874477 - DNA, 15 bp, Homo sapiens
tgattcctgatgatt

SEQ ID NO: 1874478 - DNA, 15 bp, Homo sapiens
gattcctgatgattc

SEQ ID NO: 1874479 - DNA, 15 bp, Homo sapiens
attcctgatgattca

SEQ ID NO: 1874480 - DNA, 15 bp, Homo sapiens
ttcctgatgattcag

SEQ ID NO: 1874481 - DNA, 15 bp, Homo sapiens
tcctgatgattcaga

SEQ ID NO: 1874482 - DNA, 15 bp, Homo sapiens
cctgatgattcagaa

SEQ ID NO: 1874483 - DNA, 15 bp, Homo sapiens
ctgatgattcagaac

SEQ ID NO: 1874484 - DNA, 15 bp, Homo sapiens
tgatgattcagaaca

SEQ ID NO: 1874485 - DNA, 15 bp, Homo sapiens
gatgattcagaacaa

SEQ ID NO: 1874486 - DNA, 15 bp, Homo sapiens
atgattcagaacaac

SEQ ID NO: 1874487 - DNA, 15 bp, Homo sapiens
tgattcagaacaaca

SEQ ID NO: 1874488 - DNA, 15 bp, Homo sapiens
gattcagaacaacat

SEQ ID NO: 1874489 - DNA, 15 bp, Homo sapiens
attcagaacaacata

SEQ ID NO: 1874490 - DNA, 15 bp, Homo sapiens
ttcagaacaacataa

SEQ ID NO: 1874491 - DNA, 15 bp, Homo sapiens
tcagaacaacataac

SEQ ID NO: 1874492 - DNA, 15 bp, Homo sapiens
cagaacaacataaca

SEQ ID NO: 1874493 - DNA, 15 bp, Homo sapiens
agaacaacataacaa

SEQ ID NO: 1874494 - DNA, 15 bp, Homo sapiens
gaacaacataacaag

SEQ ID NO: 1874495 - DNA, 15 bp, Homo sapiens
aacaacataacaaga

SEQ ID NO: 1874496 - DNA, 15 bp, Homo sapiens
acaacataacaagac

SEQ ID NO: 1874497 - DNA, 15 bp, Homo sapiens
caacataacaagaca

SEQ ID NO: 1874498 - DNA, 15 bp, Homo sapiens
aacataacaagacaa

SEQ ID NO: 1874499 - DNA, 15 bp, Homo sapiens
acataacaagacaac

SEQ ID NO: 1874500 - DNA, 15 bp, Homo sapiens
cataacaagacaact

SEQ ID NO: 1874501 - DNA, 15 bp, Homo sapiens
ataacaagacaactg

SEQ ID NO: 1874502 - DNA, 15 bp, Homo sapiens
taacaagacaactgg

SEQ ID NO: 1874503 - DNA, 15 bp, Homo sapiens
aacaagacaactggc

SEQ ID NO: 1874504 - DNA, 15 bp, Homo sapiens
acaagacaactggct

SEQ ID NO: 1874505 - DNA, 15 bp, Homo sapiens
caagacaactggctc

SEQ ID NO: 1874506 - DNA, 15 bp, Homo sapiens
aagacaactggctcc

SEQ ID NO: 1874507 - DNA, 15 bp, Homo sapiens
agacaactggctcct

SEQ ID NO: 1874508 - DNA, 15 bp, Homo sapiens
gacaactggctcctt

SEQ ID NO: 1874509 - DNA, 15 bp, Homo sapiens
acaactggctcctta

SEQ ID NO: 1874510 - DNA, 15 bp, Homo sapiens
caactggctccttat

SEQ ID NO: 1874511 - DNA, 15 bp, Homo sapiens
aactggctccttatc

SEQ ID NO: 1874512 - DNA, 15 bp, Homo sapiens
actggctccttatct

SEQ ID NO: 1874513 - DNA, 15 bp, Homo sapiens
ctggctccttatcta

SEQ ID NO: 1874514 - DNA, 15 bp, Homo sapiens
tggctccttatctag

SEQ ID NO: 1874515 - DNA, 15 bp, Homo sapiens
ggctccttatctagt

SEQ ID NO: 1874516 - DNA, 15 bp, Homo sapiens
gctccttatctagtg

SEQ ID NO: 1874517 - DNA, 15 bp, Homo sapiens
ctccttatctagtgc

SEQ ID NO: 1874518 - DNA, 15 bp, Homo sapiens
tccttatctagtgct

SEQ ID NO: 1874519 - DNA, 15 bp, Homo sapiens
ccttatctagtgctc

SEQ ID NO: 1874520 - DNA, 15 bp, Homo sapiens
cttatctagtgctct

SEQ ID NO: 1874521 - DNA, 15 bp, Homo sapiens
ttatctagtgctctt

SEQ ID NO: 1874522 - DNA, 15 bp, Homo sapiens
tatctagtgctcttt

SEQ ID NO: 1874523 - DNA, 15 bp, Homo sapiens
atctagtgctcttta

SEQ ID NO: 1874524 - DNA, 15 bp, Homo sapiens
tctagtgctctttac

SEQ ID NO: 1874525 - DNA, 15 bp, Homo sapiens
ctagtgctctttact

SEQ ID NO: 1874526 - DNA, 15 bp, Homo sapiens
tagtgctctttactt

SEQ ID NO: 1874527 - DNA, 15 bp, Homo sapiens
agtgctctttactta

SEQ ID NO: 1874528 - DNA, 15 bp, Homo sapiens
gtgctctttacttaa

SEQ ID NO: 1874529 - DNA, 15 bp, Homo sapiens
tgctctttacttaat

SEQ ID NO: 1874530 - DNA, 15 bp, Homo sapiens
gctctttacttaata

SEQ ID NO: 1874531 - DNA, 15 bp, Homo sapiens
ctctttacttaatat

SEQ ID NO: 1874532 - DNA, 15 bp, Homo sapiens
tctttacttaatatt

SEQ ID NO: 1874533 - DNA, 15 bp, Homo sapiens
ctttacttaatatta

SEQ ID NO: 1874534 - DNA, 15 bp, Homo sapiens
tttacttaatattat

SEQ ID NO: 1874535 - DNA, 15 bp, Homo sapiens
ttacttaatattatc

SEQ ID NO: 1874536 - DNA, 15 bp, Homo sapiens
tacttaatattatct

SEQ ID NO: 1874537 - DNA, 15 bp, Homo sapiens
acttaatattatctg

SEQ ID NO: 1874538 - DNA, 15 bp, Homo sapiens
cttaatattatctgg

SEQ ID NO: 1874539 - DNA, 15 bp, Homo sapiens
ttaatattatctggg

SEQ ID NO: 1874540 - DNA, 15 bp, Homo sapiens
taatattatctggga

SEQ ID NO: 1874541 - DNA, 15 bp, Homo sapiens
aatattatctgggaa

SEQ ID NO: 1874542 - DNA, 15 bp, Homo sapiens
atattatctgggaaa

SEQ ID NO: 1874543 - DNA, 15 bp, Homo sapiens
tattatctgggaaat

SEQ ID NO: 1874544 - DNA, 15 bp, Homo sapiens
ttatctgggaaattt

SEQ ID NO: 1874545 - DNA, 15 bp, Homo sapiens
tatctgggaaattta

SEQ ID NO: 1874546 - DNA, 15 bp, Homo sapiens
atctgggaaatttac

SEQ ID NO: 1874547 - DNA, 15 bp, Homo sapiens
tctgggaaatttact

SEQ ID NO: 1874548 - DNA, 15 bp, Homo sapiens
ctgggaaatttactt

SEQ ID NO: 1874549 - DNA, 15 bp, Homo sapiens
tgggaaatttacttg

SEQ ID NO: 1874550 - DNA, 15 bp, Homo sapiens
gggaaatttacttga

SEQ ID NO: 1874551 - DNA, 15 bp, Homo sapiens
ggaaatttacttgag

SEQ ID NO: 1874552 - DNA, 15 bp, Homo sapiens
gaaatttacttgaga

SEQ ID NO: 1874553 - DNA, 15 bp, Homo sapiens
aaatttacttgagaa

SEQ ID NO: 1874554 - DNA, 15 bp, Homo sapiens
aatttacttgagaat

SEQ ID NO: 1874555 - DNA, 15 bp, Homo sapiens
atttacttgagaatt

SEQ ID NO: 1874556 - DNA, 15 bp, Homo sapiens
tttacttgagaatta

SEQ ID NO: 1874557 - DNA, 15 bp, Homo sapiens
ttacttgagaattat

SEQ ID NO: 1874558 - DNA, 15 bp, Homo sapiens
tacttgagaattatc

SEQ ID NO: 1874559 - DNA, 15 bp, Homo sapiens
acttgagaattatca

SEQ ID NO: 1874560 - DNA, 15 bp, Homo sapiens
cttgagaattatcag

SEQ ID NO: 1874561 - DNA, 15 bp, Homo sapiens
ttgagaattatcagt

SEQ ID NO: 1874562 - DNA, 15 bp, Homo sapiens
tgagaattatcagtt

SEQ ID NO: 1874563 - DNA, 15 bp, Homo sapiens
gagaattatcagttt

SEQ ID NO: 1874564 - DNA, 15 bp, Homo sapiens
agaattatcagtttt

SEQ ID NO: 1874565 - DNA, 15 bp, Homo sapiens
gaattatcagttttc

SEQ ID NO: 1874566 - DNA, 15 bp, Homo sapiens
aattatcagttttct

SEQ ID NO: 1874567 - DNA, 15 bp, Homo sapiens
attatcagttttcta

SEQ ID NO: 1874568 - DNA, 15 bp, Homo sapiens
ttatcagttttctac

SEQ ID NO: 1874569 - DNA, 15 bp, Homo sapiens
tatcagttttctact

SEQ ID NO: 1874570 - DNA, 15 bp, Homo sapiens
atcagttttctacta

SEQ ID NO: 1874571 - DNA, 15 bp, Homo sapiens
cagttttctactact

SEQ ID NO: 1874572 - DNA, 15 bp, Homo sapiens
agttttctactactc

SEQ ID NO: 1874573 - DNA, 15 bp, Homo sapiens
gttttctactactct

SEQ ID NO: 1874574 - DNA, 15 bp, Homo sapiens
ttttctactactctc

SEQ ID NO: 1874575 - DNA, 15 bp, Homo sapiens
tttctactactctcc

SEQ ID NO: 1874576 - DNA, 15 bp, Homo sapiens
ttctactactctccc

SEQ ID NO: 1874577 - DNA, 15 bp, Homo sapiens
tctactactctccct

SEQ ID NO: 1874578 - DNA, 15 bp, Homo sapiens
ctactactctccctg

SEQ ID NO: 1874579 - DNA, 15 bp, Homo sapiens
tactactctccctgc

SEQ ID NO: 1874580 - DNA, 15 bp, Homo sapiens
actactctccctgcc

SEQ ID NO: 1874581 - DNA, 15 bp, Homo sapiens
ctactctccctgcca

SEQ ID NO: 1874582 - DNA, 15 bp, Homo sapiens
tactctccctgccaa

SEQ ID NO: 1874583 - DNA, 15 bp, Homo sapiens
actctccctgccaaa

SEQ ID NO: 1874584 - DNA, 15 bp, Homo sapiens
ctctccctgccaaat

SEQ ID NO: 1874585 - DNA, 15 bp, Homo sapiens
tctccctgccaaata

SEQ ID NO: 1874586 - DNA, 15 bp, Homo sapiens
ctccctgccaaatag

SEQ ID NO: 1874587 - DNA, 15 bp, Homo sapiens
tccctgccaaataga

SEQ ID NO: 1874588 - DNA, 15 bp, Homo sapiens
ccctgccaaatagaa

SEQ ID NO: 1874589 - DNA, 15 bp, Homo sapiens
cctgccaaatagaat

SEQ ID NO: 1874590 - DNA, 15 bp, Homo sapiens
ctgccaaatagaatt

SEQ ID NO: 1874591 - DNA, 15 bp, Homo sapiens
tgccaaatagaattt

SEQ ID NO: 1874592 - DNA, 15 bp, Homo sapiens
gccaaatagaatttc

SEQ ID NO: 1874593 - DNA, 15 bp, Homo sapiens
ccaaatagaatttca

SEQ ID NO: 1874594 - DNA, 15 bp, Homo sapiens
caaatagaatttcaa

SEQ ID NO: 1874595 - DNA, 15 bp, Homo sapiens
aaatagaatttcaaa

SEQ ID NO: 1874596 - DNA, 15 bp, Homo sapiens
aatagaatttcaaaa

SEQ ID NO: 1874597 - DNA, 15 bp, Homo sapiens
atagaatttcaaaag

SEQ ID NO: 1874598 - DNA, 15 bp, Homo sapiens
tagaatttcaaaagg

SEQ ID NO: 1874599 - DNA, 15 bp, Homo sapiens
agaatttcaaaaggt

SEQ ID NO: 1874600 - DNA, 15 bp, Homo sapiens
gaatttcaaaaggtt

SEQ ID NO: 1874601 - DNA, 15 bp, Homo sapiens
aatttcaaaaggttg

SEQ ID NO: 1874602 - DNA, 15 bp, Homo sapiens
atttcaaaaggttgg

SEQ ID NO: 1874603 - DNA, 15 bp, Homo sapiens
tttcaaaaggttggg

SEQ ID NO: 1874604 - DNA, 15 bp, Homo sapiens
ttcaaaaggttggga

SEQ ID NO: 1874605 - DNA, 15 bp, Homo sapiens
tcaaaaggttgggat

SEQ ID NO: 1874606 - DNA, 15 bp, Homo sapiens
caaaaggttgggatt

SEQ ID NO: 1874607 - DNA, 15 bp, Homo sapiens
aaaaggttgggatta

SEQ ID NO: 1874608 - DNA, 15 bp, Homo sapiens
aaaggttgggattaa

SEQ ID NO: 1874609 - DNA, 15 bp, Homo sapiens
aaggttgggattaat

SEQ ID NO: 1874610 - DNA, 15 bp, Homo sapiens
aggttgggattaatt

SEQ ID NO: 1874611 - DNA, 15 bp, Homo sapiens
ggttgggattaattt

SEQ ID NO: 1874612 - DNA, 15 bp, Homo sapiens
gttgggattaatttc

SEQ ID NO: 1874613 - DNA, 15 bp, Homo sapiens
ttgggattaatttca

SEQ ID NO: 1874614 - DNA, 15 bp, Homo sapiens
tgggattaatttcag

SEQ ID NO: 1874615 - DNA, 15 bp, Homo sapiens
gggattaatttcaga

SEQ ID NO: 1874616 - DNA, 15 bp, Homo sapiens
ggattaatttcagat

SEQ ID NO: 1874617 - DNA, 15 bp, Homo sapiens
gattaatttcagatg

SEQ ID NO: 1874618 - DNA, 15 bp, Homo sapiens
attaatttcagatgg

SEQ ID NO: 1874619 - DNA, 15 bp, Homo sapiens
ttaatttcagatgga

SEQ ID NO: 1874620 - DNA, 15 bp, Homo sapiens
taatttcagatggaa

SEQ ID NO: 1874621 - DNA, 15 bp, Homo sapiens
aatttcagatggaat

SEQ ID NO: 1874622 - DNA, 15 bp, Homo sapiens
atttcagatggaata

SEQ ID NO: 1874623 - DNA, 15 bp, Homo sapiens
tttcagatggaatat

SEQ ID NO: 1874624 - DNA, 15 bp, Homo sapiens
ttcagatggaatatg

SEQ ID NO: 1874625 - DNA, 15 bp, Homo sapiens
tcagatggaatatga

SEQ ID NO: 1874626 - DNA, 15 bp, Homo sapiens
cagatggaatatgaa

SEQ ID NO: 1874627 - DNA, 15 bp, Homo sapiens
agatggaatatgaaa

SEQ ID NO: 1874628 - DNA, 15 bp, Homo sapiens
gatggaatatgaaac

SEQ ID NO: 1874629 - DNA, 15 bp, Homo sapiens
atggaatatgaaact

SEQ ID NO: 1874630 - DNA, 15 bp, Homo sapiens
tggaatatgaaactg

SEQ ID NO: 1874631 - DNA, 15 bp, Homo sapiens
ggaatatgaaactgg

SEQ ID NO: 1874632 - DNA, 15 bp, Homo sapiens
gaatatgaaactggc

SEQ ID NO: 1874633 - DNA, 15 bp, Homo sapiens
aatatgaaactggct

SEQ ID NO: 1874634 - DNA, 15 bp, Homo sapiens
atatgaaactggctc

SEQ ID NO: 1874635 - DNA, 15 bp, Homo sapiens
tatgaaactggctct

SEQ ID NO: 1874636 - DNA, 15 bp, Homo sapiens
atgaaactggctcta

SEQ ID NO: 1874637 - DNA, 15 bp, Homo sapiens
tgaaactggctctat

SEQ ID NO: 1874638 - DNA, 15 bp, Homo sapiens
gaaactggctctatt

SEQ ID NO: 1874639 - DNA, 15 bp, Homo sapiens
aaactggctctattt

SEQ ID NO: 1874640 - DNA, 15 bp, Homo sapiens
aactggctctatttc

SEQ ID NO: 1874641 - DNA, 15 bp, Homo sapiens
actggctctatttct

SEQ ID NO: 1874642 - DNA, 15 bp, Homo sapiens
ctggctctatttcta

SEQ ID NO: 1874643 - DNA, 15 bp, Homo sapiens
tggctctatttctat

SEQ ID NO: 1874644 - DNA, 15 bp, Homo sapiens
ggctctatttctatt

SEQ ID NO: 1874645 - DNA, 15 bp, Homo sapiens
gctctatttctattt

SEQ ID NO: 1874646 - DNA, 15 bp, Homo sapiens
ctctatttctatttg

SEQ ID NO: 1874647 - DNA, 15 bp, Homo sapiens
tctatttctatttgt

SEQ ID NO: 1874648 - DNA, 15 bp, Homo sapiens
ctatttctatttgtg

SEQ ID NO: 1874649 - DNA, 15 bp, Homo sapiens
tatttctatttgtgg

SEQ ID NO: 1874650 - DNA, 15 bp, Homo sapiens
atttctatttgtggc

SEQ ID NO: 1874651 - DNA, 15 bp, Homo sapiens
tttctatttgtggcc

SEQ ID NO: 1874652 - DNA, 15 bp, Homo sapiens
ttctatttgtggcct

SEQ ID NO: 1874653 - DNA, 15 bp, Homo sapiens
tctatttgtggcctc

SEQ ID NO: 1874654 - DNA, 15 bp, Homo sapiens
ctatttgtggcctcc

SEQ ID NO: 1874655 - DNA, 15 bp, Homo sapiens
tatttgtggcctcct

SEQ ID NO: 1874656 - DNA, 15 bp, Homo sapiens
atttgtggcctccta

SEQ ID NO: 1874657 - DNA, 15 bp, Homo sapiens
tttgtggcctcctag

SEQ ID NO: 1874658 - DNA, 15 bp, Homo sapiens
ttgtggcctcctagg

SEQ ID NO: 1874659 - DNA, 15 bp, Homo sapiens
tgtggcctcctaggt

SEQ ID NO: 1874660 - DNA, 15 bp, Homo sapiens
gtggcctcctaggta

SEQ ID NO: 1874661 - DNA, 15 bp, Homo sapiens
tggcctcctaggtaa

SEQ ID NO: 1874662 - DNA, 15 bp, Homo sapiens
ggcctcctaggtaag

SEQ ID NO: 1874663 - DNA, 15 bp, Homo sapiens
gcctcctaggtaagt

SEQ ID NO: 1874664 - DNA, 15 bp, Homo sapiens
cctcctaggtaagtg

SEQ ID NO: 1874665 - DNA, 15 bp, Homo sapiens
ctcctaggtaagtgg

SEQ ID NO: 1874666 - DNA, 15 bp, Homo sapiens
tcctaggtaagtggc

SEQ ID NO: 1874667 - DNA, 15 bp, Homo sapiens
cctaggtaagtggct

SEQ ID NO: 1874668 - DNA, 15 bp, Homo sapiens
ctaggtaagtggctg

SEQ ID NO: 1874669 - DNA, 15 bp, Homo sapiens
taggtaagtggctga

SEQ ID NO: 1874670 - DNA, 15 bp, Homo sapiens
aggtaagtggctgaa

SEQ ID NO: 1874671 - DNA, 15 bp, Homo sapiens
ggtaagtggctgaag

SEQ ID NO: 1874672 - DNA, 15 bp, Homo sapiens
gtaagtggctgaagt

SEQ ID NO: 1874673 - DNA, 15 bp, Homo sapiens
taagtggctgaagtt

SEQ ID NO: 1874674 - DNA, 15 bp, Homo sapiens
aagtggctgaagttg

SEQ ID NO: 1874675 - DNA, 15 bp, Homo sapiens
agtggctgaagttgt

SEQ ID NO: 1874676 - DNA, 15 bp, Homo sapiens
gtggctgaagttgtc

SEQ ID NO: 1874677 - DNA, 15 bp, Homo sapiens
tggctgaagttgtca

SEQ ID NO: 1874678 - DNA, 15 bp, Homo sapiens
ggctgaagttgtcag

SEQ ID NO: 1874679 - DNA, 15 bp, Homo sapiens
gctgaagttgtcagc

SEQ ID NO: 1874680 - DNA, 15 bp, Homo sapiens
ctgaagttgtcagct

SEQ ID NO: 1874681 - DNA, 15 bp, Homo sapiens
tgaagttgtcagctt

SEQ ID NO: 1874682 - DNA, 15 bp, Homo sapiens
gaagttgtcagcttc

SEQ ID NO: 1874683 - DNA, 15 bp, Homo sapiens
aagttgtcagcttca

SEQ ID NO: 1874684 - DNA, 15 bp, Homo sapiens
agttgtcagcttcaa

SEQ ID NO: 1874685 - DNA, 15 bp, Homo sapiens
gttgtcagcttcaat

SEQ ID NO: 1874686 - DNA, 15 bp, Homo sapiens
ttgtcagcttcaatt

SEQ ID NO: 1874687 - DNA, 15 bp, Homo sapiens
tgtcagcttcaattg

SEQ ID NO: 1874688 - DNA, 15 bp, Homo sapiens
gtcagcttcaattgt

SEQ ID NO: 1874689 - DNA, 15 bp, Homo sapiens
tcagcttcaattgtt

SEQ ID NO: 1874690 - DNA, 15 bp, Homo sapiens
cagcttcaattgtta

SEQ ID NO: 1874691 - DNA, 15 bp, Homo sapiens
agcttcaattgttaa

SEQ ID NO: 1874692 - DNA, 15 bp, Homo sapiens
gcttcaattgttaag

SEQ ID NO: 1874693 - DNA, 15 bp, Homo sapiens
cttcaattgttaagc

SEQ ID NO: 1874694 - DNA, 15 bp, Homo sapiens
ttcaattgttaagcc

SEQ ID NO: 1874695 - DNA, 15 bp, Homo sapiens
tcaattgttaagcca

SEQ ID NO: 1874696 - DNA, 15 bp, Homo sapiens
caattgttaagccac

SEQ ID NO: 1874697 - DNA, 15 bp, Homo sapiens
aattgttaagccact

SEQ ID NO: 1874698 - DNA, 15 bp, Homo sapiens
attgttaagccactg

SEQ ID NO: 1874699 - DNA, 15 bp, Homo sapiens
ttgttaagccactgt

SEQ ID NO: 1874700 - DNA, 15 bp, Homo sapiens
tgttaagccactgta

SEQ ID NO: 1874701 - DNA, 15 bp, Homo sapiens
gttaagccactgtaa

SEQ ID NO: 1874702 - DNA, 15 bp, Homo sapiens
ttaagccactgtaag

SEQ ID NO: 1874703 - DNA, 15 bp, Homo sapiens
taagccactgtaagt

SEQ ID NO: 1874704 - DNA, 15 bp, Homo sapiens
aagccactgtaagtg

SEQ ID NO: 1874705 - DNA, 15 bp, Homo sapiens
agccactgtaagtgc

SEQ ID NO: 1874706 - DNA, 15 bp, Homo sapiens
gccactgtaagtgca

SEQ ID NO: 1874707 - DNA, 15 bp, Homo sapiens
ccactgtaagtgcag

SEQ ID NO: 1874708 - DNA, 15 bp, Homo sapiens
cactgtaagtgcagc

SEQ ID NO: 1874709 - DNA, 15 bp, Homo sapiens
actgtaagtgcagca

SEQ ID NO: 1874710 - DNA, 15 bp, Homo sapiens
ctgtaagtgcagcac

SEQ ID NO: 1874711 - DNA, 15 bp, Homo sapiens
tgtaagtgcagcaca

SEQ ID NO: 1874712 - DNA, 15 bp, Homo sapiens
gtaagtgcagcacag

SEQ ID NO: 1874713 - DNA, 15 bp, Homo sapiens
taagtgcagcacagg

SEQ ID NO: 1874714 - DNA, 15 bp, Homo sapiens
aagtgcagcacagga

SEQ ID NO: 1874715 - DNA, 15 bp, Homo sapiens
agtgcagcacaggat

SEQ ID NO: 1874716 - DNA, 15 bp, Homo sapiens
gtgcagcacaggatt

SEQ ID NO: 1874717 - DNA, 15 bp, Homo sapiens
tgcagcacaggattt

SEQ ID NO: 1874718 - DNA, 15 bp, Homo sapiens
gcagcacaggatttc

SEQ ID NO: 1874719 - DNA, 15 bp, Homo sapiens
cagcacaggatttca

SEQ ID NO: 1874720 - DNA, 15 bp, Homo sapiens
agcacaggatttcac

SEQ ID NO: 1874721 - DNA, 15 bp, Homo sapiens
gcacaggatttcact

SEQ ID NO: 1874722 - DNA, 15 bp, Homo sapiens
cacaggatttcactg

SEQ ID NO: 1874723 - DNA, 15 bp, Homo sapiens
acaggatttcactgg

SEQ ID NO: 1874724 - DNA, 15 bp, Homo sapiens
caggatttcactggc

SEQ ID NO: 1874725 - DNA, 15 bp, Homo sapiens
aggatttcactggcc

SEQ ID NO: 1874726 - DNA, 15 bp, Homo sapiens
ggatttcactggcct

SEQ ID NO: 1874727 - DNA, 15 bp, Homo sapiens
gatttcactggccta

SEQ ID NO: 1874728 - DNA, 15 bp, Homo sapiens
atttcactggcctac

SEQ ID NO: 1874729 - DNA, 15 bp, Homo sapiens
tttcactggcctaca

SEQ ID NO: 1874730 - DNA, 15 bp, Homo sapiens
ttcactggcctacat

SEQ ID NO: 1874731 - DNA, 15 bp, Homo sapiens
tcactggcctacatg

SEQ ID NO: 1874732 - DNA, 15 bp, Homo sapiens
cactggcctacatgt

SEQ ID NO: 1874733 - DNA, 15 bp, Homo sapiens
actggcctacatgtt

SEQ ID NO: 1874734 - DNA, 15 bp, Homo sapiens
tggcctacatgtttc

SEQ ID NO: 1874735 - DNA, 15 bp, Homo sapiens
ggcctacatgtttca

SEQ ID NO: 1874736 - DNA, 15 bp, Homo sapiens
gcctacatgtttcat

SEQ ID NO: 1874737 - DNA, 15 bp, Homo sapiens
cctacatgtttcatg

SEQ ID NO: 1874738 - DNA, 15 bp, Homo sapiens
ctacatgtttcatga

SEQ ID NO: 1874739 - DNA, 15 bp, Homo sapiens
tacatgtttcatgac

SEQ ID NO: 1874740 - DNA, 15 bp, Homo sapiens
acatgtttcatgaca

SEQ ID NO: 1874741 - DNA, 15 bp, Homo sapiens
catgtttcatgacat

SEQ ID NO: 1874742 - DNA, 15 bp, Homo sapiens
atgtttcatgacatt

SEQ ID NO: 1874743 - DNA, 15 bp, Homo sapiens
tgtttcatgacattt

SEQ ID NO: 1874744 - DNA, 15 bp, Homo sapiens
gtttcatgacatttt

SEQ ID NO: 1874745 - DNA, 15 bp, Homo sapiens
tttcatgacattttt

SEQ ID NO: 1874746 - DNA, 15 bp, Homo sapiens
ttcatgacattttta

SEQ ID NO: 1874747 - DNA, 15 bp, Homo sapiens
tcatgacatttttat

SEQ ID NO: 1874748 - DNA, 15 bp, Homo sapiens
catgacatttttatt

SEQ ID NO: 1874749 - DNA, 15 bp, Homo sapiens
atgacatttttattc

SEQ ID NO: 1874750 - DNA, 15 bp, Homo sapiens
tgacatttttattcg

SEQ ID NO: 1874751 - DNA, 15 bp, Homo sapiens
gacatttttattcgt

SEQ ID NO: 1874752 - DNA, 15 bp, Homo sapiens
acatttttattcgta

SEQ ID NO: 1874753 - DNA, 15 bp, Homo sapiens
catttttattcgtat

SEQ ID NO: 1874754 - DNA, 15 bp, Homo sapiens
atttttattcgtatc

SEQ ID NO: 1874755 - DNA, 15 bp, Homo sapiens
tttttattcgtatcc

SEQ ID NO: 1874756 - DNA, 15 bp, Homo sapiens
ttttattcgtatcct

SEQ ID NO: 1874757 - DNA, 15 bp, Homo sapiens
tttattcgtatcctt

SEQ ID NO: 1874758 - DNA, 15 bp, Homo sapiens
ttattcgtatcctta

SEQ ID NO: 1874759 - DNA, 15 bp, Homo sapiens
tattcgtatccttaa

SEQ ID NO: 1874760 - DNA, 15 bp, Homo sapiens
attcgtatccttaaa

SEQ ID NO: 1874761 - DNA, 15 bp, Homo sapiens
ttcgtatccttaaac

SEQ ID NO: 1874762 - DNA, 15 bp, Homo sapiens
tcgtatccttaaacc

SEQ ID NO: 1874763 - DNA, 15 bp, Homo sapiens
cgtatccttaaacct

SEQ ID NO: 1874764 - DNA, 15 bp, Homo sapiens
gtatccttaaacctg

SEQ ID NO: 1874765 - DNA, 15 bp, Homo sapiens
tatccttaaacctgt

SEQ ID NO: 1874766 - DNA, 15 bp, Homo sapiens
atccttaaacctgtt

SEQ ID NO: 1874767 - DNA, 15 bp, Homo sapiens
tccttaaacctgttt

SEQ ID NO: 1874768 - DNA, 15 bp, Homo sapiens
ccttaaacctgttta

SEQ ID NO: 1874769 - DNA, 15 bp, Homo sapiens
cttaaacctgtttaa

SEQ ID NO: 1874770 - DNA, 15 bp, Homo sapiens
ttaaacctgtttaag

SEQ ID NO: 1874771 - DNA, 15 bp, Homo sapiens
taaacctgtttaagc

SEQ ID NO: 1874772 - DNA, 15 bp, Homo sapiens
aaacctgtttaagca

SEQ ID NO: 1874773 - DNA, 15 bp, Homo sapiens
aacctgtttaagcag

SEQ ID NO: 1874774 - DNA, 15 bp, Homo sapiens
acctgtttaagcagc

SEQ ID NO: 1874775 - DNA, 15 bp, Homo sapiens
cctgtttaagcagcc

SEQ ID NO: 1874776 - DNA, 15 bp, Homo sapiens
ctgtttaagcagcct

SEQ ID NO: 1874777 - DNA, 15 bp, Homo sapiens
tgtttaagcagccta

SEQ ID NO: 1874778 - DNA, 15 bp, Homo sapiens
gtttaagcagcctag

SEQ ID NO: 1874779 - DNA, 15 bp, Homo sapiens
tttaagcagcctagg

SEQ ID NO: 1874780 - DNA, 15 bp, Homo sapiens
ttaagcagcctagga

SEQ ID NO: 1874781 - DNA, 15 bp, Homo sapiens
taagcagcctaggaa

SEQ ID NO: 1874782 - DNA, 15 bp, Homo sapiens
aagcagcctaggaat

SEQ ID NO: 1874783 - DNA, 15 bp, Homo sapiens
agcagcctaggaatt

SEQ ID NO: 1874784 - DNA, 15 bp, Homo sapiens
gcagcctaggaattc

SEQ ID NO: 1874785 - DNA, 15 bp, Homo sapiens
cagcctaggaattca

SEQ ID NO: 1874786 - DNA, 15 bp, Homo sapiens
agcctaggaattcac

SEQ ID NO: 1874787 - DNA, 15 bp, Homo sapiens
gcctaggaattcaca

SEQ ID NO: 1874788 - DNA, 15 bp, Homo sapiens
cctaggaattcacag

SEQ ID NO: 1874789 - DNA, 15 bp, Homo sapiens
ctaggaattcacagg

SEQ ID NO: 1874790 - DNA, 15 bp, Homo sapiens
taggaattcacaggg

SEQ ID NO: 1874791 - DNA, 15 bp, Homo sapiens
aggaattcacagggc

SEQ ID NO: 1874792 - DNA, 15 bp, Homo sapiens
ggaattcacagggcc

SEQ ID NO: 1874793 - DNA, 15 bp, Homo sapiens
gaattcacagggccc

SEQ ID NO: 1874794 - DNA, 15 bp, Homo sapiens
aattcacagggccct

SEQ ID NO: 1874795 - DNA, 15 bp, Homo sapiens
attcacagggccctt

SEQ ID NO: 1874796 - DNA, 15 bp, Homo sapiens
ttcacagggcccttt

SEQ ID NO: 1874797 - DNA, 15 bp, Homo sapiens
tcacagggccctttg

SEQ ID NO: 1874798 - DNA, 15 bp, Homo sapiens
cacagggccctttgc

SEQ ID NO: 1874799 - DNA, 15 bp, Homo sapiens
acagggccctttgca

SEQ ID NO: 1874800 - DNA, 15 bp, Homo sapiens
cagggccctttgcag

SEQ ID NO: 1874801 - DNA, 15 bp, Homo sapiens
agggccctttgcagc

SEQ ID NO: 1874802 - DNA, 15 bp, Homo sapiens
gggccctttgcagca

SEQ ID NO: 1874803 - DNA, 15 bp, Homo sapiens
ggccctttgcagcac

SEQ ID NO: 1874804 - DNA, 15 bp, Homo sapiens
gccctttgcagcaca

SEQ ID NO: 1874805 - DNA, 15 bp, Homo sapiens
ccctttgcagcacaa

SEQ ID NO: 1874806 - DNA, 15 bp, Homo sapiens
cctttgcagcacaac

SEQ ID NO: 1874807 - DNA, 15 bp, Homo sapiens
ctttgcagcacaaca

SEQ ID NO: 1874808 - DNA, 15 bp, Homo sapiens
tttgcagcacaacat

SEQ ID NO: 1874809 - DNA, 15 bp, Homo sapiens
ttgcagcacaacatg

SEQ ID NO: 1874810 - DNA, 15 bp, Homo sapiens
tgcagcacaacatgg

SEQ ID NO: 1874811 - DNA, 15 bp, Homo sapiens
gcagcacaacatgga

SEQ ID NO: 1874812 - DNA, 15 bp, Homo sapiens
cagcacaacatggaa

SEQ ID NO: 1874813 - DNA, 15 bp, Homo sapiens
agcacaacatggaat

SEQ ID NO: 1874814 - DNA, 15 bp, Homo sapiens
gcacaacatggaata

SEQ ID NO: 1874815 - DNA, 15 bp, Homo sapiens
cacaacatggaatat

SEQ ID NO: 1874816 - DNA, 15 bp, Homo sapiens
acaacatggaatatt

SEQ ID NO: 1874817 - DNA, 15 bp, Homo sapiens
caacatggaatatta

SEQ ID NO: 1874818 - DNA, 15 bp, Homo sapiens
aacatggaatattat

SEQ ID NO: 1874819 - DNA, 15 bp, Homo sapiens
acatggaatattatt

SEQ ID NO: 1874820 - DNA, 15 bp, Homo sapiens
catggaatattattg

SEQ ID NO: 1874821 - DNA, 15 bp, Homo sapiens
atggaatattattgt

SEQ ID NO: 1874822 - DNA, 15 bp, Homo sapiens
tggaatattattgta

SEQ ID NO: 1874823 - DNA, 15 bp, Homo sapiens
ggaatattattgtat

SEQ ID NO: 1874824 - DNA, 15 bp, Homo sapiens
gaatattattgtatt

SEQ ID NO: 1874825 - DNA, 15 bp, Homo sapiens
aatattattgtattt

SEQ ID NO: 1874826 - DNA, 15 bp, Homo sapiens
atattattgtatttg

SEQ ID NO: 1874827 - DNA, 15 bp, Homo sapiens
tattattgtatttga

SEQ ID NO: 1874828 - DNA, 15 bp, Homo sapiens
attattgtatttgat

SEQ ID NO: 1874829 - DNA, 15 bp, Homo sapiens
ttattgtatttgatt

SEQ ID NO: 1874830 - DNA, 15 bp, Homo sapiens
tattgtatttgattc

SEQ ID NO: 1874831 - DNA, 15 bp, Homo sapiens
attgtatttgattct

SEQ ID NO: 1874832 - DNA, 15 bp, Homo sapiens
ttgtatttgattcta

SEQ ID NO: 1874833 - DNA, 15 bp, Homo sapiens
tgtatttgattctat

SEQ ID NO: 1874834 - DNA, 15 bp, Homo sapiens
gtatttgattctatc

SEQ ID NO: 1874835 - DNA, 15 bp, Homo sapiens
tatttgattctatct

SEQ ID NO: 1874836 - DNA, 15 bp, Homo sapiens
atttgattctatctt

SEQ ID NO: 1874837 - DNA, 15 bp, Homo sapiens
tttgattctatctta

SEQ ID NO: 1874838 - DNA, 15 bp, Homo sapiens
ttgattctatcttat

SEQ ID NO: 1874839 - DNA, 15 bp, Homo sapiens
tgattctatcttatg

SEQ ID NO: 1874840 - DNA, 15 bp, Homo sapiens
gattctatcttatga

SEQ ID NO: 1874841 - DNA, 15 bp, Homo sapiens
attctatcttatgaa

SEQ ID NO: 1874842 - DNA, 15 bp, Homo sapiens
ttctatcttatgaac

SEQ ID NO: 1874843 - DNA, 15 bp, Homo sapiens
tctatcttatgaact

SEQ ID NO: 1874844 - DNA, 15 bp, Homo sapiens
ctatcttatgaactt

SEQ ID NO: 1874845 - DNA, 15 bp, Homo sapiens
tatcttatgaacttg

SEQ ID NO: 1874846 - DNA, 15 bp, Homo sapiens
atcttatgaacttgg

SEQ ID NO: 1874847 - DNA, 15 bp, Homo sapiens
tcttatgaacttgga

SEQ ID NO: 1874848 - DNA, 15 bp, Homo sapiens
cttatgaacttggag

SEQ ID NO: 1874849 - DNA, 15 bp, Homo sapiens
ttatgaacttggaga

SEQ ID NO: 1874850 - DNA, 15 bp, Homo sapiens
tatgaacttggagaa

SEQ ID NO: 1874851 - DNA, 15 bp, Homo sapiens
atgaacttggagaaa

SEQ ID NO: 1874852 - DNA, 15 bp, Homo sapiens
tgaacttggagaaat

SEQ ID NO: 1874853 - DNA, 15 bp, Homo sapiens
gaacttggagaaatt

SEQ ID NO: 1874854 - DNA, 15 bp, Homo sapiens
aacttggagaaattt

SEQ ID NO: 1874855 - DNA, 15 bp, Homo sapiens
acttggagaaattta

SEQ ID NO: 1874856 - DNA, 15 bp, Homo sapiens
cttggagaaatttac

SEQ ID NO: 1874857 - DNA, 15 bp, Homo sapiens
ttggagaaatttact

SEQ ID NO: 1874858 - DNA, 15 bp, Homo sapiens
tggagaaatttacta

SEQ ID NO: 1874859 - DNA, 15 bp, Homo sapiens
ggagaaatttactag

SEQ ID NO: 1874860 - DNA, 15 bp, Homo sapiens
gagaaatttactagc

SEQ ID NO: 1874861 - DNA, 15 bp, Homo sapiens
agaaatttactagca

SEQ ID NO: 1874862 - DNA, 15 bp, Homo sapiens
gaaatttactagcag

SEQ ID NO: 1874863 - DNA, 15 bp, Homo sapiens
aaatttactagcaga

SEQ ID NO: 1874864 - DNA, 15 bp, Homo sapiens
aatttactagcagaa

SEQ ID NO: 1874865 - DNA, 15 bp, Homo sapiens
atttactagcagaaa

SEQ ID NO: 1874866 - DNA, 15 bp, Homo sapiens
tttactagcagaaaa

SEQ ID NO: 1874867 - DNA, 15 bp, Homo sapiens
ttactagcagaaaat

SEQ ID NO: 1874868 - DNA, 15 bp, Homo sapiens
tactagcagaaaatg

SEQ ID NO: 1874869 - DNA, 15 bp, Homo sapiens
actagcagaaaatgt

SEQ ID NO: 1874870 - DNA, 15 bp, Homo sapiens
ctagcagaaaatgtg

SEQ ID NO: 1874871 - DNA, 15 bp, Homo sapiens
tagcagaaaatgtga

SEQ ID NO: 1874872 - DNA, 15 bp, Homo sapiens
agcagaaaatgtgat

SEQ ID NO: 1874873 - DNA, 15 bp, Homo sapiens
gcagaaaatgtgatg

SEQ ID NO: 1874874 - DNA, 15 bp, Homo sapiens
cagaaaatgtgatgc

SEQ ID NO: 1874875 - DNA, 15 bp, Homo sapiens
agaaaatgtgatgca

SEQ ID NO: 1874876 - DNA, 15 bp, Homo sapiens
gaaaatgtgatgcaa

SEQ ID NO: 1874877 - DNA, 15 bp, Homo sapiens
aaaatgtgatgcaaa

SEQ ID NO: 1874878 - DNA, 15 bp, Homo sapiens
aaatgtgatgcaaat

SEQ ID NO: 1874879 - DNA, 15 bp, Homo sapiens
aatgtgatgcaaatg

SEQ ID NO: 1874880 - DNA, 15 bp, Homo sapiens
atgtgatgcaaatgt

SEQ ID NO: 1874881 - DNA, 15 bp, Homo sapiens
tgtgatgcaaatgtt

SEQ ID NO: 1874882 - DNA, 15 bp, Homo sapiens
gtgatgcaaatgttc

SEQ ID NO: 1874883 - DNA, 15 bp, Homo sapiens
tgatgcaaatgttca

SEQ ID NO: 1874884 - DNA, 15 bp, Homo sapiens
gatgcaaatgttcag

SEQ ID NO: 1874885 - DNA, 15 bp, Homo sapiens
atgcaaatgttcaga

SEQ ID NO: 1874886 - DNA, 15 bp, Homo sapiens
tgcaaatgttcagac

SEQ ID NO: 1874887 - DNA, 15 bp, Homo sapiens
gcaaatgttcagaca

SEQ ID NO: 1874888 - DNA, 15 bp, Homo sapiens
caaatgttcagacag

SEQ ID NO: 1874889 - DNA, 15 bp, Homo sapiens
aaatgttcagacagg

SEQ ID NO: 1874890 - DNA, 15 bp, Homo sapiens
aatgttcagacaggt

SEQ ID NO: 1874891 - DNA, 15 bp, Homo sapiens
atgttcagacaggtc

SEQ ID NO: 1874892 - DNA, 15 bp, Homo sapiens
tgttcagacaggtca

SEQ ID NO: 1874893 - DNA, 15 bp, Homo sapiens
gttcagacaggtcat

SEQ ID NO: 1874894 - DNA, 15 bp, Homo sapiens
ttcagacaggtcatt

SEQ ID NO: 1874895 - DNA, 15 bp, Homo sapiens
tcagacaggtcattc

SEQ ID NO: 1874896 - DNA, 15 bp, Homo sapiens
cagacaggtcattca

SEQ ID NO: 1874897 - DNA, 15 bp, Homo sapiens
agacaggtcattcag

SEQ ID NO: 1874898 - DNA, 15 bp, Homo sapiens
gacaggtcattcagc

SEQ ID NO: 1874899 - DNA, 15 bp, Homo sapiens
acaggtcattcagct

SEQ ID NO: 1874900 - DNA, 15 bp, Homo sapiens
caggtcattcagctc

SEQ ID NO: 1874901 - DNA, 15 bp, Homo sapiens
aggtcattcagctca

SEQ ID NO: 1874902 - DNA, 15 bp, Homo sapiens
ggtcattcagctcaa

SEQ ID NO: 1874903 - DNA, 15 bp, Homo sapiens
gtcattcagctcaac

SEQ ID NO: 1874904 - DNA, 15 bp, Homo sapiens
tcattcagctcaaca

SEQ ID NO: 1874905 - DNA, 15 bp, Homo sapiens
cattcagctcaacag

SEQ ID NO: 1874906 - DNA, 15 bp, Homo sapiens
attcagctcaacagt

SEQ ID NO: 1874907 - DNA, 15 bp, Homo sapiens
ttcagctcaacagta

SEQ ID NO: 1874908 - DNA, 15 bp, Homo sapiens
tcagctcaacagtaa

SEQ ID NO: 1874909 - DNA, 15 bp, Homo sapiens
cagctcaacagtaat

SEQ ID NO: 1874910 - DNA, 15 bp, Homo sapiens
agctcaacagtaata

SEQ ID NO: 1874911 - DNA, 15 bp, Homo sapiens
gctcaacagtaatat

SEQ ID NO: 1874912 - DNA, 15 bp, Homo sapiens
ctcaacagtaatatt

SEQ ID NO: 1874913 - DNA, 15 bp, Homo sapiens
tcaacagtaatattg

SEQ ID NO: 1874914 - DNA, 15 bp, Homo sapiens
caacagtaatattgc

SEQ ID NO: 1874915 - DNA, 15 bp, Homo sapiens
aacagtaatattgca

SEQ ID NO: 1874916 - DNA, 15 bp, Homo sapiens
acagtaatattgcat

SEQ ID NO: 1874917 - DNA, 15 bp, Homo sapiens
cagtaatattgcata

SEQ ID NO: 1874918 - DNA, 15 bp, Homo sapiens
agtaatattgcataa

SEQ ID NO: 1874919 - DNA, 15 bp, Homo sapiens
gtaatattgcataaa

SEQ ID NO: 1874920 - DNA, 15 bp, Homo sapiens
taatattgcataaaa

SEQ ID NO: 1874921 - DNA, 15 bp, Homo sapiens
aatattgcataaaat

SEQ ID NO: 1874922 - DNA, 15 bp, Homo sapiens
atattgcataaaata

SEQ ID NO: 1874923 - DNA, 15 bp, Homo sapiens
tattgcataaaatat

SEQ ID NO: 1874924 - DNA, 15 bp, Homo sapiens
attgcataaaatatt

SEQ ID NO: 1874925 - DNA, 15 bp, Homo sapiens
ttgcataaaatattt

SEQ ID NO: 1874926 - DNA, 15 bp, Homo sapiens
tgcataaaatatttt

SEQ ID NO: 1874927 - DNA, 15 bp, Homo sapiens
gcataaaatatttta

SEQ ID NO: 1874928 - DNA, 15 bp, Homo sapiens
cataaaatattttaa

SEQ ID NO: 1874929 - DNA, 15 bp, Homo sapiens
ataaaatattttaag

SEQ ID NO: 1874930 - DNA, 15 bp, Homo sapiens
taaaatattttaagt

SEQ ID NO: 1874931 - DNA, 15 bp, Homo sapiens
aaaatattttaagta

SEQ ID NO: 1874932 - DNA, 15 bp, Homo sapiens
aaatattttaagtac

SEQ ID NO: 1874933 - DNA, 15 bp, Homo sapiens
aatattttaagtaca

SEQ ID NO: 1874934 - DNA, 15 bp, Homo sapiens
atattttaagtacat

SEQ ID NO: 1874935 - DNA, 15 bp, Homo sapiens
tattttaagtacatt

SEQ ID NO: 1874936 - DNA, 15 bp, Homo sapiens
attttaagtacatta

SEQ ID NO: 1874937 - DNA, 15 bp, Homo sapiens
ttttaagtacattat

SEQ ID NO: 1874938 - DNA, 15 bp, Homo sapiens
tttaagtacattatt

SEQ ID NO: 1874939 - DNA, 15 bp, Homo sapiens
ttaagtacattatta

SEQ ID NO: 1874940 - DNA, 15 bp, Homo sapiens
taagtacattattaa

SEQ ID NO: 1874941 - DNA, 15 bp, Homo sapiens
aagtacattattaat

SEQ ID NO: 1874942 - DNA, 15 bp, Homo sapiens
agtacattattaatt

SEQ ID NO: 1874943 - DNA, 15 bp, Homo sapiens
gtacattattaattg

SEQ ID NO: 1874944 - DNA, 15 bp, Homo sapiens
tacattattaattgt

SEQ ID NO: 1874945 - DNA, 15 bp, Homo sapiens
acattattaattgtg

SEQ ID NO: 1874946 - DNA, 15 bp, Homo sapiens
cattattaattgtga

SEQ ID NO: 1874947 - DNA, 15 bp, Homo sapiens
attattaattgtgaa

SEQ ID NO: 1874948 - DNA, 15 bp, Homo sapiens
ttattaattgtgaag

SEQ ID NO: 1874949 - DNA, 15 bp, Homo sapiens
tattaattgtgaagg

SEQ ID NO: 1874950 - DNA, 15 bp, Homo sapiens
attaattgtgaaggt

SEQ ID NO: 1874951 - DNA, 15 bp, Homo sapiens
ttaattgtgaaggtc

SEQ ID NO: 1874952 - DNA, 15 bp, Homo sapiens
taattgtgaaggtct

SEQ ID NO: 1874953 - DNA, 15 bp, Homo sapiens
aattgtgaaggtcta

SEQ ID NO: 1874954 - DNA, 15 bp, Homo sapiens
attgtgaaggtctat

SEQ ID NO: 1874955 - DNA, 15 bp, Homo sapiens
ttgtgaaggtctatc

SEQ ID NO: 1874956 - DNA, 15 bp, Homo sapiens
tgtgaaggtctatca

SEQ ID NO: 1874957 - DNA, 15 bp, Homo sapiens
gtgaaggtctatcat

SEQ ID NO: 1874958 - DNA, 15 bp, Homo sapiens
tgaaggtctatcatt

SEQ ID NO: 1874959 - DNA, 15 bp, Homo sapiens
gaaggtctatcatta

SEQ ID NO: 1874960 - DNA, 15 bp, Homo sapiens
aaggtctatcattag

SEQ ID NO: 1874961 - DNA, 15 bp, Homo sapiens
aggtctatcattagt

SEQ ID NO: 1874962 - DNA, 15 bp, Homo sapiens
ggtctatcattagtt

SEQ ID NO: 1874963 - DNA, 15 bp, Homo sapiens
gtctatcattagtta

SEQ ID NO: 1874964 - DNA, 15 bp, Homo sapiens
tctatcattagttat

SEQ ID NO: 1874965 - DNA, 15 bp, Homo sapiens
ctatcattagttata

SEQ ID NO: 1874966 - DNA, 15 bp, Homo sapiens
tatcattagttatat

SEQ ID NO: 1874967 - DNA, 15 bp, Homo sapiens
atcattagttatata

SEQ ID NO: 1874968 - DNA, 15 bp, Homo sapiens
tcattagttatataa

SEQ ID NO: 1874969 - DNA, 15 bp, Homo sapiens
cattagttatataag

SEQ ID NO: 1874970 - DNA, 15 bp, Homo sapiens
attagttatataagc

SEQ ID NO: 1874971 - DNA, 15 bp, Homo sapiens
ttagttatataagcc

SEQ ID NO: 1874972 - DNA, 15 bp, Homo sapiens
tagttatataagcct

SEQ ID NO: 1874973 - DNA, 15 bp, Homo sapiens
agttatataagccta

SEQ ID NO: 1874974 - DNA, 15 bp, Homo sapiens
gttatataagcctat

SEQ ID NO: 1874975 - DNA, 15 bp, Homo sapiens
ttatataagcctatt

SEQ ID NO: 1874976 - DNA, 15 bp, Homo sapiens
tatataagcctattg

SEQ ID NO: 1874977 - DNA, 15 bp, Homo sapiens
atataagcctattgt

SEQ ID NO: 1874978 - DNA, 15 bp, Homo sapiens
tataagcctattgtc

SEQ ID NO: 1874979 - DNA, 15 bp, Homo sapiens
ataagcctattgtct

SEQ ID NO: 1874980 - DNA, 15 bp, Homo sapiens
taagcctattgtctt

SEQ ID NO: 1874981 - DNA, 15 bp, Homo sapiens
aagcctattgtcttc

SEQ ID NO: 1874982 - DNA, 15 bp, Homo sapiens
agcctattgtcttca

SEQ ID NO: 1874983 - DNA, 15 bp, Homo sapiens
gcctattgtcttcat

SEQ ID NO: 1874984 - DNA, 15 bp, Homo sapiens
cctattgtcttcatt

SEQ ID NO: 1874985 - DNA, 15 bp, Homo sapiens
ctattgtcttcattg

SEQ ID NO: 1874986 - DNA, 15 bp, Homo sapiens
tattgtcttcattga

SEQ ID NO: 1874987 - DNA, 15 bp, Homo sapiens
attgtcttcattgaa

SEQ ID NO: 1874988 - DNA, 15 bp, Homo sapiens
ttgtcttcattgaat

SEQ ID NO: 1874989 - DNA, 15 bp, Homo sapiens
tgtcttcattgaatg

SEQ ID NO: 1874990 - DNA, 15 bp, Homo sapiens
gtcttcattgaatga

SEQ ID NO: 1874991 - DNA, 15 bp, Homo sapiens
tcttcattgaatgag

SEQ ID NO: 1874992 - DNA, 15 bp, Homo sapiens
cttcattgaatgagt

SEQ ID NO: 1874993 - DNA, 15 bp, Homo sapiens
ttcattgaatgagtt

SEQ ID NO: 1874994 - DNA, 15 bp, Homo sapiens
tcattgaatgagttc

SEQ ID NO: 1874995 - DNA, 15 bp, Homo sapiens
cattgaatgagttcc

SEQ ID NO: 1874996 - DNA, 15 bp, Homo sapiens
attgaatgagttcct

SEQ ID NO: 1874997 - DNA, 15 bp, Homo sapiens
ttgaatgagttccta

SEQ ID NO: 1874998 - DNA, 15 bp, Homo sapiens
tgaatgagttcctag

SEQ ID NO: 1874999 - DNA, 15 bp, Homo sapiens
gaatgagttcctagt

SEQ ID NO: 1875000 - DNA, 15 bp, Homo sapiens
aatgagttcctagtc

SEQ ID NO: 1875001 - DNA, 15 bp, Homo sapiens
atgagttcctagtca

SEQ ID NO: 1875002 - DNA, 15 bp, Homo sapiens
tgagttcctagtcaa

SEQ ID NO: 1875003 - DNA, 15 bp, Homo sapiens
gagttcctagtcaaa

SEQ ID NO: 1875004 - DNA, 15 bp, Homo sapiens
agttcctagtcaaag

SEQ ID NO: 1875005 - DNA, 15 bp, Homo sapiens
gttcctagtcaaagc

SEQ ID NO: 1875006 - DNA, 15 bp, Homo sapiens
ttcctagtcaaagcc

SEQ ID NO: 1875007 - DNA, 15 bp, Homo sapiens
tcctagtcaaagcca

SEQ ID NO: 1875008 - DNA, 15 bp, Homo sapiens
cctagtcaaagccag

SEQ ID NO: 1875009 - DNA, 15 bp, Homo sapiens
ctagtcaaagccagg

SEQ ID NO: 1875010 - DNA, 15 bp, Homo sapiens
tagtcaaagccaggc

SEQ ID NO: 1875011 - DNA, 15 bp, Homo sapiens
agtcaaagccaggcc

SEQ ID NO: 1875012 - DNA, 15 bp, Homo sapiens
gtcaaagccaggcct

SEQ ID NO: 1875013 - DNA, 15 bp, Homo sapiens
tcaaagccaggcctg

SEQ ID NO: 1875014 - DNA, 15 bp, Homo sapiens
caaagccaggcctgt

SEQ ID NO: 1875015 - DNA, 15 bp, Homo sapiens
aaagccaggcctgtt

SEQ ID NO: 1875016 - DNA, 15 bp, Homo sapiens
aagccaggcctgttc

SEQ ID NO: 1875017 - DNA, 15 bp, Homo sapiens
agccaggcctgttct

SEQ ID NO: 1875018 - DNA, 15 bp, Homo sapiens
gccaggcctgttcta

SEQ ID NO: 1875019 - DNA, 15 bp, Homo sapiens
ccaggcctgttctag

SEQ ID NO: 1875020 - DNA, 15 bp, Homo sapiens
caggcctgttctagg

SEQ ID NO: 1875021 - DNA, 15 bp, Homo sapiens
aggcctgttctaggt

SEQ ID NO: 1875022 - DNA, 15 bp, Homo sapiens
ggcctgttctaggtg

SEQ ID NO: 1875023 - DNA, 15 bp, Homo sapiens
gcctgttctaggtgt

SEQ ID NO: 1875024 - DNA, 15 bp, Homo sapiens
cctgttctaggtgtg

SEQ ID NO: 1875025 - DNA, 15 bp, Homo sapiens
ctgttctaggtgtgc

SEQ ID NO: 1875026 - DNA, 15 bp, Homo sapiens
tgttctaggtgtgct

SEQ ID NO: 1875027 - DNA, 15 bp, Homo sapiens
gttctaggtgtgcta

SEQ ID NO: 1875028 - DNA, 15 bp, Homo sapiens
ttctaggtgtgctac

SEQ ID NO: 1875029 - DNA, 15 bp, Homo sapiens
tctaggtgtgctaca

SEQ ID NO: 1875030 - DNA, 15 bp, Homo sapiens
ctaggtgtgctacat

SEQ ID NO: 1875031 - DNA, 15 bp, Homo sapiens
taggtgtgctacatt

SEQ ID NO: 1875032 - DNA, 15 bp, Homo sapiens
aggtgtgctacattc

SEQ ID NO: 1875033 - DNA, 15 bp, Homo sapiens
ggtgtgctacattct

SEQ ID NO: 1875034 - DNA, 15 bp, Homo sapiens
gtgtgctacattctt

SEQ ID NO: 1875035 - DNA, 15 bp, Homo sapiens
tgtgctacattcttt

SEQ ID NO: 1875036 - DNA, 15 bp, Homo sapiens
gtgctacattcttta

SEQ ID NO: 1875037 - DNA, 15 bp, Homo sapiens
tgctacattctttat

SEQ ID NO: 1875038 - DNA, 15 bp, Homo sapiens
gctacattctttatt

SEQ ID NO: 1875039 - DNA, 15 bp, Homo sapiens
ctacattctttattg

SEQ ID NO: 1875040 - DNA, 15 bp, Homo sapiens
tacattctttattgc

SEQ ID NO: 1875041 - DNA, 15 bp, Homo sapiens
acattctttattgct

SEQ ID NO: 1875042 - DNA, 15 bp, Homo sapiens
cattctttattgctg

SEQ ID NO: 1875043 - DNA, 15 bp, Homo sapiens
attctttattgctgc

SEQ ID NO: 1875044 - DNA, 15 bp, Homo sapiens
ttctttattgctgct

SEQ ID NO: 1875045 - DNA, 15 bp, Homo sapiens
tctttattgctgctc

SEQ ID NO: 1875046 - DNA, 15 bp, Homo sapiens
ctttattgctgctct

SEQ ID NO: 1875047 - DNA, 15 bp, Homo sapiens
tttattgctgctctt

SEQ ID NO: 1875048 - DNA, 15 bp, Homo sapiens
ttattgctgctcttc

SEQ ID NO: 1875049 - DNA, 15 bp, Homo sapiens
tattgctgctcttca

SEQ ID NO: 1875050 - DNA, 15 bp, Homo sapiens
attgctgctcttcaa

SEQ ID NO: 1875051 - DNA, 15 bp, Homo sapiens
ttgctgctcttcaaa

SEQ ID NO: 1875052 - DNA, 15 bp, Homo sapiens
tgctgctcttcaaaa

SEQ ID NO: 1875053 - DNA, 15 bp, Homo sapiens
gctgctcttcaaaat

SEQ ID NO: 1875054 - DNA, 15 bp, Homo sapiens
ctgctcttcaaaata

SEQ ID NO: 1875055 - DNA, 15 bp, Homo sapiens
tgctcttcaaaataa

SEQ ID NO: 1875056 - DNA, 15 bp, Homo sapiens
gctcttcaaaataac

SEQ ID NO: 1875057 - DNA, 15 bp, Homo sapiens
ctcttcaaaataacc

SEQ ID NO: 1875058 - DNA, 15 bp, Homo sapiens
tcttcaaaataaccc

SEQ ID NO: 1875059 - DNA, 15 bp, Homo sapiens
cttcaaaataaccct

SEQ ID NO: 1875060 - DNA, 15 bp, Homo sapiens
ttcaaaataaccctg

SEQ ID NO: 1875061 - DNA, 15 bp, Homo sapiens
tcaaaataaccctgg

SEQ ID NO: 1875062 - DNA, 15 bp, Homo sapiens
caaaataaccctgga

SEQ ID NO: 1875063 - DNA, 15 bp, Homo sapiens
aaaataaccctggaa

SEQ ID NO: 1875064 - DNA, 15 bp, Homo sapiens
aaataaccctggaag

SEQ ID NO: 1875065 - DNA, 15 bp, Homo sapiens
aataaccctggaagg

SEQ ID NO: 1875066 - DNA, 15 bp, Homo sapiens
ataaccctggaaggt

SEQ ID NO: 1875067 - DNA, 15 bp, Homo sapiens
taaccctggaaggta

SEQ ID NO: 1875068 - DNA, 15 bp, Homo sapiens
aaccctggaaggtaa

SEQ ID NO: 1875069 - DNA, 15 bp, Homo sapiens
accctggaaggtaag

SEQ ID NO: 1875070 - DNA, 15 bp, Homo sapiens
ccctggaaggtaagt

SEQ ID NO: 1875071 - DNA, 15 bp, Homo sapiens
cctggaaggtaagtc

SEQ ID NO: 1875072 - DNA, 15 bp, Homo sapiens
ctggaaggtaagtct

SEQ ID NO: 1875073 - DNA, 15 bp, Homo sapiens
tggaaggtaagtctt

SEQ ID NO: 1875074 - DNA, 15 bp, Homo sapiens
ggaaggtaagtcttc

SEQ ID NO: 1875075 - DNA, 15 bp, Homo sapiens
gaaggtaagtcttct

SEQ ID NO: 1875076 - DNA, 15 bp, Homo sapiens
aaggtaagtcttctc

SEQ ID NO: 1875077 - DNA, 15 bp, Homo sapiens
aggtaagtcttctca

SEQ ID NO: 1875078 - DNA, 15 bp, Homo sapiens
ggtaagtcttctcaa

SEQ ID NO: 1875079 - DNA, 15 bp, Homo sapiens
gtaagtcttctcaaa

SEQ ID NO: 1875080 - DNA, 15 bp, Homo sapiens
taagtcttctcaaac

SEQ ID NO: 1875081 - DNA, 15 bp, Homo sapiens
aagtcttctcaaaca

SEQ ID NO: 1875082 - DNA, 15 bp, Homo sapiens
agtcttctcaaacac

SEQ ID NO: 1875083 - DNA, 15 bp, Homo sapiens
gtcttctcaaacact

SEQ ID NO: 1875084 - DNA, 15 bp, Homo sapiens
tcttctcaaacactc

SEQ ID NO: 1875085 - DNA, 15 bp, Homo sapiens
cttctcaaacactca

SEQ ID NO: 1875086 - DNA, 15 bp, Homo sapiens
ttctcaaacactcag

SEQ ID NO: 1875087 - DNA, 15 bp, Homo sapiens
tctcaaacactcaga

SEQ ID NO: 1875088 - DNA, 15 bp, Homo sapiens
aaacactcagagctt

SEQ ID NO: 1875089 - DNA, 15 bp, Homo sapiens
aacactcagagcttt

SEQ ID NO: 1875090 - DNA, 15 bp, Homo sapiens
acactcagagctttg

SEQ ID NO: 1875091 - DNA, 15 bp, Homo sapiens
cactcagagctttgg

SEQ ID NO: 1875092 - DNA, 15 bp, Homo sapiens
actcagagctttggt

SEQ ID NO: 1875093 - DNA, 15 bp, Homo sapiens
ctcagagctttggtt

SEQ ID NO: 1875094 - DNA, 15 bp, Homo sapiens
tcagagctttggttt

SEQ ID NO: 1875095 - DNA, 15 bp, Homo sapiens
cagagctttggtttc

SEQ ID NO: 1875096 - DNA, 15 bp, Homo sapiens
agagctttggtttcc

SEQ ID NO: 1875097 - DNA, 15 bp, Homo sapiens
gagctttggtttcct

SEQ ID NO: 1875098 - DNA, 15 bp, Homo sapiens
agctttggtttcctc

SEQ ID NO: 1875099 - DNA, 15 bp, Homo sapiens
gctttggtttcctca

SEQ ID NO: 1875100 - DNA, 15 bp, Homo sapiens
ctttggtttcctcat

SEQ ID NO: 1875101 - DNA, 15 bp, Homo sapiens
tttggtttcctcatc

SEQ ID NO: 1875102 - DNA, 15 bp, Homo sapiens
ttggtttcctcatct

SEQ ID NO: 1875103 - DNA, 15 bp, Homo sapiens
tggtttcctcatctg

SEQ ID NO: 1875104 - DNA, 15 bp, Homo sapiens
ggtttcctcatctgt

SEQ ID NO: 1875105 - DNA, 15 bp, Homo sapiens
cctcatctgtaaaat

SEQ ID NO: 1875106 - DNA, 15 bp, Homo sapiens
ctcatctgtaaaatc

SEQ ID NO: 1875107 - DNA, 15 bp, Homo sapiens
tcatctgtaaaatcg

SEQ ID NO: 1875108 - DNA, 15 bp, Homo sapiens
catctgtaaaatcga

SEQ ID NO: 1875109 - DNA, 15 bp, Homo sapiens
atctgtaaaatcgag

SEQ ID NO: 1875110 - DNA, 15 bp, Homo sapiens
tctgtaaaatcgaga

SEQ ID NO: 1875111 - DNA, 15 bp, Homo sapiens
ctgtaaaatcgagat

SEQ ID NO: 1875112 - DNA, 15 bp, Homo sapiens
tgtaaaatcgagata

SEQ ID NO: 1875113 - DNA, 15 bp, Homo sapiens
gtaaaatcgagataa

SEQ ID NO: 1875114 - DNA, 15 bp, Homo sapiens
taaaatcgagataag

SEQ ID NO: 1875115 - DNA, 15 bp, Homo sapiens
aaaatcgagataagt

SEQ ID NO: 1875116 - DNA, 15 bp, Homo sapiens
aaatcgagataagtg

SEQ ID NO: 1875117 - DNA, 15 bp, Homo sapiens
aatcgagataagtga

SEQ ID NO: 1875118 - DNA, 15 bp, Homo sapiens
atcgagataagtgat

SEQ ID NO: 1875119 - DNA, 15 bp, Homo sapiens
tcgagataagtgatt

SEQ ID NO: 1875120 - DNA, 15 bp, Homo sapiens
cgagataagtgattt

SEQ ID NO: 1875121 - DNA, 15 bp, Homo sapiens
gagataagtgatttg

SEQ ID NO: 1875122 - DNA, 15 bp, Homo sapiens
agataagtgatttgt

SEQ ID NO: 1875123 - DNA, 15 bp, Homo sapiens
ttcttcctctccttg

SEQ ID NO: 1875124 - DNA, 15 bp, Homo sapiens
tcttcctctccttgg

SEQ ID NO: 1875125 - DNA, 15 bp, Homo sapiens
cttcctctccttggg

SEQ ID NO: 1875126 - DNA, 15 bp, Homo sapiens
ttcctctccttgggg

SEQ ID NO: 1875127 - DNA, 15 bp, Homo sapiens
tcctctccttggggg

SEQ ID NO: 1875128 - DNA, 15 bp, Homo sapiens
cctctccttgggggt

SEQ ID NO: 1875129 - DNA, 15 bp, Homo sapiens
ctctccttgggggtt

SEQ ID NO: 1875130 - DNA, 15 bp, Homo sapiens
tctccttgggggtta

SEQ ID NO: 1875131 - DNA, 15 bp, Homo sapiens
ctccttgggggttac

SEQ ID NO: 1875132 - DNA, 15 bp, Homo sapiens
tccttgggggttact

SEQ ID NO: 1875133 - DNA, 15 bp, Homo sapiens
ccttgggggttactg

SEQ ID NO: 1875134 - DNA, 15 bp, Homo sapiens
cttgggggttactgt

SEQ ID NO: 1875135 - DNA, 15 bp, Homo sapiens
ttgggggttactgta

SEQ ID NO: 1875136 - DNA, 15 bp, Homo sapiens
tgggggttactgtaa

SEQ ID NO: 1875137 - DNA, 15 bp, Homo sapiens
gggggttactgtaat

SEQ ID NO: 1875138 - DNA, 15 bp, Homo sapiens
ggggttactgtaata

SEQ ID NO: 1875139 - DNA, 15 bp, Homo sapiens
gggttactgtaataa

SEQ ID NO: 1875140 - DNA, 15 bp, Homo sapiens
ggttactgtaataac

SEQ ID NO: 1875141 - DNA, 15 bp, Homo sapiens
gttactgtaataacc

SEQ ID NO: 1875142 - DNA, 15 bp, Homo sapiens
ttactgtaataaccc

SEQ ID NO: 1875143 - DNA, 15 bp, Homo sapiens
tactgtaataaccct

SEQ ID NO: 1875144 - DNA, 15 bp, Homo sapiens
actgtaataaccctg

SEQ ID NO: 1875145 - DNA, 15 bp, Homo sapiens
ctgtaataaccctga

SEQ ID NO: 1875146 - DNA, 15 bp, Homo sapiens
tgtaataaccctgac

SEQ ID NO: 1875147 - DNA, 15 bp, Homo sapiens
gtaataaccctgaca

SEQ ID NO: 1875148 - DNA, 15 bp, Homo sapiens
taataaccctgacat

SEQ ID NO: 1875149 - DNA, 15 bp, Homo sapiens
aataaccctgacatt

SEQ ID NO: 1875150 - DNA, 15 bp, Homo sapiens
ataaccctgacattg

SEQ ID NO: 1875151 - DNA, 15 bp, Homo sapiens
taaccctgacattgt

SEQ ID NO: 1875152 - DNA, 15 bp, Homo sapiens
aaccctgacattgtt

SEQ ID NO: 1875153 - DNA, 15 bp, Homo sapiens
accctgacattgttg

SEQ ID NO: 1875154 - DNA, 15 bp, Homo sapiens
ccctgacattgttgt

SEQ ID NO: 1875155 - DNA, 15 bp, Homo sapiens
cctgacattgttgtg

SEQ ID NO: 1875156 - DNA, 15 bp, Homo sapiens
ctgacattgttgtga

SEQ ID NO: 1875157 - DNA, 15 bp, Homo sapiens
tgacattgttgtgaa

SEQ ID NO: 1875158 - DNA, 15 bp, Homo sapiens
gacattgttgtgaat

SEQ ID NO: 1875159 - DNA, 15 bp, Homo sapiens
acattgttgtgaatt

SEQ ID NO: 1875160 - DNA, 15 bp, Homo sapiens
cattgttgtgaattg

SEQ ID NO: 1875161 - DNA, 15 bp, Homo sapiens
attgttgtgaattgc

SEQ ID NO: 1875162 - DNA, 15 bp, Homo sapiens
ttgttgtgaattgca

SEQ ID NO: 1875163 - DNA, 15 bp, Homo sapiens
tgttgtgaattgcaa

SEQ ID NO: 1875164 - DNA, 15 bp, Homo sapiens
gttgtgaattgcaac

SEQ ID NO: 1875165 - DNA, 15 bp, Homo sapiens
ttgtgaattgcaaca

SEQ ID NO: 1875166 - DNA, 15 bp, Homo sapiens
tgtgaattgcaacat

SEQ ID NO: 1875167 - DNA, 15 bp, Homo sapiens
gtgaattgcaacatt

SEQ ID NO: 1875168 - DNA, 15 bp, Homo sapiens
tgaattgcaacattg

SEQ ID NO: 1875169 - DNA, 15 bp, Homo sapiens
gaattgcaacattgg

SEQ ID NO: 1875170 - DNA, 15 bp, Homo sapiens
aattgcaacattggc

SEQ ID NO: 1875171 - DNA, 15 bp, Homo sapiens
attgcaacattggca

SEQ ID NO: 1875172 - DNA, 15 bp, Homo sapiens
ttgcaacattggcat

SEQ ID NO: 1875173 - DNA, 15 bp, Homo sapiens
tgcaacattggcatt

SEQ ID NO: 1875174 - DNA, 15 bp, Homo sapiens
gcaacattggcattt

SEQ ID NO: 1875175 - DNA, 15 bp, Homo sapiens
caacattggcattta

SEQ ID NO: 1875176 - DNA, 15 bp, Homo sapiens
aacattggcatttat

SEQ ID NO: 1875177 - DNA, 15 bp, Homo sapiens
acattggcatttata

SEQ ID NO: 1875178 - DNA, 15 bp, Homo sapiens
cattggcatttatac

SEQ ID NO: 1875179 - DNA, 15 bp, Homo sapiens
attggcatttataca

SEQ ID NO: 1875180 - DNA, 15 bp, Homo sapiens
ttggcatttatacaa

SEQ ID NO: 1875181 - DNA, 15 bp, Homo sapiens
tggcatttatacaat

SEQ ID NO: 1875182 - DNA, 15 bp, Homo sapiens
ggcatttatacaatc

SEQ ID NO: 1875183 - DNA, 15 bp, Homo sapiens
gcatttatacaatca

SEQ ID NO: 1875184 - DNA, 15 bp, Homo sapiens
catttatacaatcaa

SEQ ID NO: 1875185 - DNA, 15 bp, Homo sapiens
atttatacaatcaat

SEQ ID NO: 1875186 - DNA, 15 bp, Homo sapiens
tttatacaatcaatg

SEQ ID NO: 1875187 - DNA, 15 bp, Homo sapiens
ttatacaatcaatgc

SEQ ID NO: 1875188 - DNA, 15 bp, Homo sapiens
tatacaatcaatgca

SEQ ID NO: 1875189 - DNA, 15 bp, Homo sapiens
atacaatcaatgcag

SEQ ID NO: 1875190 - DNA, 15 bp, Homo sapiens
tacaatcaatgcagt

SEQ ID NO: 1875191 - DNA, 15 bp, Homo sapiens
acaatcaatgcagtg

SEQ ID NO: 1875192 - DNA, 15 bp, Homo sapiens
caatcaatgcagtgg

SEQ ID NO: 1875193 - DNA, 15 bp, Homo sapiens
aatcaatgcagtggt

SEQ ID NO: 1875194 - DNA, 15 bp, Homo sapiens
atcaatgcagtggtc

SEQ ID NO: 1875195 - DNA, 15 bp, Homo sapiens
tcaatgcagtggtca

SEQ ID NO: 1875196 - DNA, 15 bp, Homo sapiens
caatgcagtggtcaa

SEQ ID NO: 1875197 - DNA, 15 bp, Homo sapiens
aatgcagtggtcaat

SEQ ID NO: 1875198 - DNA, 15 bp, Homo sapiens
atgcagtggtcaatt

SEQ ID NO: 1875199 - DNA, 15 bp, Homo sapiens
tgcagtggtcaattc

SEQ ID NO: 1875200 - DNA, 15 bp, Homo sapiens
gcagtggtcaattct

SEQ ID NO: 1875201 - DNA, 15 bp, Homo sapiens
cagtggtcaattcta

SEQ ID NO: 1875202 - DNA, 15 bp, Homo sapiens
agtggtcaattctag

SEQ ID NO: 1875203 - DNA, 15 bp, Homo sapiens
gtggtcaattctaga

SEQ ID NO: 1875204 - DNA, 15 bp, Homo sapiens
tggtcaattctagag

SEQ ID NO: 1875205 - DNA, 15 bp, Homo sapiens
ggtcaattctagaga

SEQ ID NO: 1875206 - DNA, 15 bp, Homo sapiens
gtcaattctagagat

SEQ ID NO: 1875207 - DNA, 15 bp, Homo sapiens
tcaattctagagatt

SEQ ID NO: 1875208 - DNA, 15 bp, Homo sapiens
caattctagagatta

SEQ ID NO: 1875209 - DNA, 15 bp, Homo sapiens
aattctagagattaa

SEQ ID NO: 1875210 - DNA, 15 bp, Homo sapiens
attctagagattaaa

SEQ ID NO: 1875211 - DNA, 15 bp, Homo sapiens
ttctagagattaaat

SEQ ID NO: 1875212 - DNA, 15 bp, Homo sapiens
tctagagattaaatc

SEQ ID NO: 1875213 - DNA, 15 bp, Homo sapiens
ctagagattaaatca

SEQ ID NO: 1875214 - DNA, 15 bp, Homo sapiens
tagagattaaatcaa

SEQ ID NO: 1875215 - DNA, 15 bp, Homo sapiens
agagattaaatcaag

SEQ ID NO: 1875216 - DNA, 15 bp, Homo sapiens
gagattaaatcaagc

SEQ ID NO: 1875217 - DNA, 15 bp, Homo sapiens
agattaaatcaagca

SEQ ID NO: 1875218 - DNA, 15 bp, Homo sapiens
gattaaatcaagcag

SEQ ID NO: 1875219 - DNA, 15 bp, Homo sapiens
attaaatcaagcaga

SEQ ID NO: 1875220 - DNA, 15 bp, Homo sapiens
ttaaatcaagcagag

SEQ ID NO: 1875221 - DNA, 15 bp, Homo sapiens
taaatcaagcagagt

SEQ ID NO: 1875222 - DNA, 15 bp, Homo sapiens
aaatcaagcagagtt

SEQ ID NO: 1875223 - DNA, 15 bp, Homo sapiens
aatcaagcagagttt

SEQ ID NO: 1875224 - DNA, 15 bp, Homo sapiens
atcaagcagagtttg

SEQ ID NO: 1875225 - DNA, 15 bp, Homo sapiens
tcaagcagagtttga

SEQ ID NO: 1875226 - DNA, 15 bp, Homo sapiens
caagcagagtttgat

SEQ ID NO: 1875227 - DNA, 15 bp, Homo sapiens
aagcagagtttgata

SEQ ID NO: 1875228 - DNA, 15 bp, Homo sapiens
agcagagtttgatat

SEQ ID NO: 1875229 - DNA, 15 bp, Homo sapiens
gcagagtttgatatg

SEQ ID NO: 1875230 - DNA, 15 bp, Homo sapiens
cagagtttgatatgt

SEQ ID NO: 1875231 - DNA, 15 bp, Homo sapiens
agagtttgatatgta

SEQ ID NO: 1875232 - DNA, 15 bp, Homo sapiens
gagtttgatatgtac

SEQ ID NO: 1875233 - DNA, 15 bp, Homo sapiens
agtttgatatgtaca

SEQ ID NO: 1875234 - DNA, 15 bp, Homo sapiens
gtttgatatgtacag

SEQ ID NO: 1875235 - DNA, 15 bp, Homo sapiens
tttgatatgtacagt

SEQ ID NO: 1875236 - DNA, 15 bp, Homo sapiens
ttgatatgtacagtg

SEQ ID NO: 1875237 - DNA, 15 bp, Homo sapiens
tgatatgtacagtgg

SEQ ID NO: 1875238 - DNA, 15 bp, Homo sapiens
gatatgtacagtgga

SEQ ID NO: 1875239 - DNA, 15 bp, Homo sapiens
atatgtacagtggac

SEQ ID NO: 1875240 - DNA, 15 bp, Homo sapiens
tatgtacagtggaca

SEQ ID NO: 1875241 - DNA, 15 bp, Homo sapiens
atgtacagtggacat

SEQ ID NO: 1875242 - DNA, 15 bp, Homo sapiens
tgtacagtggacatt

SEQ ID NO: 1875243 - DNA, 15 bp, Homo sapiens
gtacagtggacatta

SEQ ID NO: 1875244 - DNA, 15 bp, Homo sapiens
tacagtggacattaa

SEQ ID NO: 1875245 - DNA, 15 bp, Homo sapiens
acagtggacattaat

SEQ ID NO: 1875246 - DNA, 15 bp, Homo sapiens
cagtggacattaata

SEQ ID NO: 1875247 - DNA, 15 bp, Homo sapiens
agtggacattaatat

SEQ ID NO: 1875248 - DNA, 15 bp, Homo sapiens
gtggacattaatatg

SEQ ID NO: 1875249 - DNA, 15 bp, Homo sapiens
tggacattaatatgc

SEQ ID NO: 1875250 - DNA, 15 bp, Homo sapiens
ggacattaatatgcc

SEQ ID NO: 1875251 - DNA, 15 bp, Homo sapiens
gacattaatatgcct

SEQ ID NO: 1875252 - DNA, 15 bp, Homo sapiens
acattaatatgcctc

SEQ ID NO: 1875253 - DNA, 15 bp, Homo sapiens
cattaatatgcctcc

SEQ ID NO: 1875254 - DNA, 15 bp, Homo sapiens
attaatatgcctccc

SEQ ID NO: 1875255 - DNA, 15 bp, Homo sapiens
ttaatatgcctcccc

SEQ ID NO: 1875256 - DNA, 15 bp, Homo sapiens
taatatgcctccccc

SEQ ID NO: 1875257 - DNA, 15 bp, Homo sapiens
aatatgcctccccca

SEQ ID NO: 1875258 - DNA, 15 bp, Homo sapiens
atatgcctcccccaa

SEQ ID NO: 1875259 - DNA, 15 bp, Homo sapiens
tatgcctcccccaaa

SEQ ID NO: 1875260 - DNA, 15 bp, Homo sapiens
atgcctcccccaaag

SEQ ID NO: 1875261 - DNA, 15 bp, Homo sapiens
tgcctcccccaaagc

SEQ ID NO: 1875262 - DNA, 15 bp, Homo sapiens
gcctcccccaaagca

SEQ ID NO: 1875263 - DNA, 15 bp, Homo sapiens
cctcccccaaagcat

SEQ ID NO: 1875264 - DNA, 15 bp, Homo sapiens
ctcccccaaagcatt

SEQ ID NO: 1875265 - DNA, 15 bp, Homo sapiens
tcccccaaagcattg

SEQ ID NO: 1875266 - DNA, 15 bp, Homo sapiens
cccccaaagcattgt

SEQ ID NO: 1875267 - DNA, 15 bp, Homo sapiens
ccccaaagcattgta

SEQ ID NO: 1875268 - DNA, 15 bp, Homo sapiens
cccaaagcattgtaa

SEQ ID NO: 1875269 - DNA, 15 bp, Homo sapiens
ccaaagcattgtaag

SEQ ID NO: 1875270 - DNA, 15 bp, Homo sapiens
caaagcattgtaagc

SEQ ID NO: 1875271 - DNA, 15 bp, Homo sapiens
aaagcattgtaagcc

SEQ ID NO: 1875272 - DNA, 15 bp, Homo sapiens
aagcattgtaagcca

SEQ ID NO: 1875273 - DNA, 15 bp, Homo sapiens
agcattgtaagccac

SEQ ID NO: 1875274 - DNA, 15 bp, Homo sapiens
gcattgtaagccaca

SEQ ID NO: 1875275 - DNA, 15 bp, Homo sapiens
cattgtaagccacat

SEQ ID NO: 1875276 - DNA, 15 bp, Homo sapiens
attgtaagccacatg

SEQ ID NO: 1875277 - DNA, 15 bp, Homo sapiens
ttgtaagccacatgg

SEQ ID NO: 1875278 - DNA, 15 bp, Homo sapiens
tgtaagccacatggg

SEQ ID NO: 1875279 - DNA, 15 bp, Homo sapiens
gtaagccacatgggg

SEQ ID NO: 1875280 - DNA, 15 bp, Homo sapiens
taagccacatggggc

SEQ ID NO: 1875281 - DNA, 15 bp, Homo sapiens
aagccacatggggcc

SEQ ID NO: 1875282 - DNA, 15 bp, Homo sapiens
agccacatggggcca

SEQ ID NO: 1875283 - DNA, 15 bp, Homo sapiens
gccacatggggccat

SEQ ID NO: 1875284 - DNA, 15 bp, Homo sapiens
ccacatggggccatc

SEQ ID NO: 1875285 - DNA, 15 bp, Homo sapiens
cacatggggccatcc

SEQ ID NO: 1875286 - DNA, 15 bp, Homo sapiens
acatggggccatcca

SEQ ID NO: 1875287 - DNA, 15 bp, Homo sapiens
catggggccatccag

SEQ ID NO: 1875288 - DNA, 15 bp, Homo sapiens
atggggccatccagg

SEQ ID NO: 1875289 - DNA, 15 bp, Homo sapiens
tggggccatccaggc

SEQ ID NO: 1875290 - DNA, 15 bp, Homo sapiens
ggggccatccaggca

SEQ ID NO: 1875291 - DNA, 15 bp, Homo sapiens
gggccatccaggcat

SEQ ID NO: 1875292 - DNA, 15 bp, Homo sapiens
ggccatccaggcatg

SEQ ID NO: 1875293 - DNA, 15 bp, Homo sapiens
gccatccaggcatgc

SEQ ID NO: 1875294 - DNA, 15 bp, Homo sapiens
ccatccaggcatgca

SEQ ID NO: 1875295 - DNA, 15 bp, Homo sapiens
catccaggcatgcag

SEQ ID NO: 1875296 - DNA, 15 bp, Homo sapiens
atccaggcatgcagt

SEQ ID NO: 1875297 - DNA, 15 bp, Homo sapiens
tccaggcatgcagtg

SEQ ID NO: 1875298 - DNA, 15 bp, Homo sapiens
ccaggcatgcagtgg

SEQ ID NO: 1875299 - DNA, 15 bp, Homo sapiens
caggcatgcagtggg

SEQ ID NO: 1875300 - DNA, 15 bp, Homo sapiens
aggcatgcagtgggt

SEQ ID NO: 1875301 - DNA, 15 bp, Homo sapiens
ggcatgcagtgggtg

SEQ ID NO: 1875302 - DNA, 15 bp, Homo sapiens
gcatgcagtgggtgg

SEQ ID NO: 1875303 - DNA, 15 bp, Homo sapiens
catgcagtgggtgga

SEQ ID NO: 1875304 - DNA, 15 bp, Homo sapiens
atgcagtgggtggac

SEQ ID NO: 1875305 - DNA, 15 bp, Homo sapiens
tgcagtgggtggaca

SEQ ID NO: 1875306 - DNA, 15 bp, Homo sapiens
gcagtgggtggacag

SEQ ID NO: 1875307 - DNA, 15 bp, Homo sapiens
cagtgggtggacagg

SEQ ID NO: 1875308 - DNA, 15 bp, Homo sapiens
agtgggtggacagga

SEQ ID NO: 1875309 - DNA, 15 bp, Homo sapiens
gtgggtggacaggaa

SEQ ID NO: 1875310 - DNA, 15 bp, Homo sapiens
tgggtggacaggaat

SEQ ID NO: 1875311 - DNA, 15 bp, Homo sapiens
gggtggacaggaatg

SEQ ID NO: 1875312 - DNA, 15 bp, Homo sapiens
ggtggacaggaatgg

SEQ ID NO: 1875313 - DNA, 15 bp, Homo sapiens
gtggacaggaatggg

SEQ ID NO: 1875314 - DNA, 15 bp, Homo sapiens
tggacaggaatggga

SEQ ID NO: 1875315 - DNA, 15 bp, Homo sapiens
ggacaggaatgggag

SEQ ID NO: 1875316 - DNA, 15 bp, Homo sapiens
gacaggaatgggagg

SEQ ID NO: 1875317 - DNA, 15 bp, Homo sapiens
acaggaatgggaggc

SEQ ID NO: 1875318 - DNA, 15 bp, Homo sapiens
caggaatgggaggca

SEQ ID NO: 1875319 - DNA, 15 bp, Homo sapiens
aggaatgggaggcat

SEQ ID NO: 1875320 - DNA, 15 bp, Homo sapiens
ggaatgggaggcatt

SEQ ID NO: 1875321 - DNA, 15 bp, Homo sapiens
gaatgggaggcattg

SEQ ID NO: 1875322 - DNA, 15 bp, Homo sapiens
aatgggaggcattga

SEQ ID NO: 1875323 - DNA, 15 bp, Homo sapiens
atgggaggcattgaa

SEQ ID NO: 1875324 - DNA, 15 bp, Homo sapiens
tgggaggcattgaac

SEQ ID NO: 1875325 - DNA, 15 bp, Homo sapiens
gggaggcattgaacc

SEQ ID NO: 1875326 - DNA, 15 bp, Homo sapiens
ggaggcattgaacca

SEQ ID NO: 1875327 - DNA, 15 bp, Homo sapiens
gaggcattgaaccag

SEQ ID NO: 1875328 - DNA, 15 bp, Homo sapiens
aggcattgaaccaga

SEQ ID NO: 1875329 - DNA, 15 bp, Homo sapiens
ggcattgaaccagaa

SEQ ID NO: 1875330 - DNA, 15 bp, Homo sapiens
gcattgaaccagaag

SEQ ID NO: 1875331 - DNA, 15 bp, Homo sapiens
cattgaaccagaagg

SEQ ID NO: 1875332 - DNA, 15 bp, Homo sapiens
attgaaccagaagga

SEQ ID NO: 1875333 - DNA, 15 bp, Homo sapiens
ttgaaccagaaggag

SEQ ID NO: 1875334 - DNA, 15 bp, Homo sapiens
tgaaccagaaggaga

SEQ ID NO: 1875335 - DNA, 15 bp, Homo sapiens
gaaccagaaggagag

SEQ ID NO: 1875336 - DNA, 15 bp, Homo sapiens
aaccagaaggagagg

SEQ ID NO: 1875337 - DNA, 15 bp, Homo sapiens
accagaaggagaggc

SEQ ID NO: 1875338 - DNA, 15 bp, Homo sapiens
ccagaaggagaggca

SEQ ID NO: 1875339 - DNA, 15 bp, Homo sapiens
cagaaggagaggcag

SEQ ID NO: 1875340 - DNA, 15 bp, Homo sapiens
agaaggagaggcaga

SEQ ID NO: 1875341 - DNA, 15 bp, Homo sapiens
gaaggagaggcagag

SEQ ID NO: 1875342 - DNA, 15 bp, Homo sapiens
aaggagaggcagaga

SEQ ID NO: 1875343 - DNA, 15 bp, Homo sapiens
aggagaggcagagaa

SEQ ID NO: 1875344 - DNA, 15 bp, Homo sapiens
ggagaggcagagaaa

SEQ ID NO: 1875345 - DNA, 15 bp, Homo sapiens
gagaggcagagaaag

SEQ ID NO: 1875346 - DNA, 15 bp, Homo sapiens
agaggcagagaaagg

SEQ ID NO: 1875347 - DNA, 15 bp, Homo sapiens
gaggcagagaaaggt

SEQ ID NO: 1875348 - DNA, 15 bp, Homo sapiens
aggcagagaaaggtc

SEQ ID NO: 1875349 - DNA, 15 bp, Homo sapiens
ggcagagaaaggtcc

SEQ ID NO: 1875350 - DNA, 15 bp, Homo sapiens
gcagagaaaggtcca

SEQ ID NO: 1875351 - DNA, 15 bp, Homo sapiens
cagagaaaggtccac

SEQ ID NO: 1875352 - DNA, 15 bp, Homo sapiens
agagaaaggtccacg

SEQ ID NO: 1875353 - DNA, 15 bp, Homo sapiens
gagaaaggtccacgg

SEQ ID NO: 1875354 - DNA, 15 bp, Homo sapiens
agaaaggtccacggc

SEQ ID NO: 1875355 - DNA, 15 bp, Homo sapiens
gaaaggtccacggct

SEQ ID NO: 1875356 - DNA, 15 bp, Homo sapiens
aaaggtccacggctg

SEQ ID NO: 1875357 - DNA, 15 bp, Homo sapiens
aaggtccacggctgg

SEQ ID NO: 1875358 - DNA, 15 bp, Homo sapiens
aggtccacggctggc

SEQ ID NO: 1875359 - DNA, 15 bp, Homo sapiens
ggtccacggctggcc

SEQ ID NO: 1875360 - DNA, 15 bp, Homo sapiens
gtccacggctggcct

SEQ ID NO: 1875361 - DNA, 15 bp, Homo sapiens
tccacggctggcctc

SEQ ID NO: 1875362 - DNA, 15 bp, Homo sapiens
ccacggctggcctcc

SEQ ID NO: 1875363 - DNA, 15 bp, Homo sapiens
cacggctggcctcct

SEQ ID NO: 1875364 - DNA, 15 bp, Homo sapiens
acggctggcctcctg

SEQ ID NO: 1875365 - DNA, 15 bp, Homo sapiens
cggctggcctcctgg

SEQ ID NO: 1875366 - DNA, 15 bp, Homo sapiens
ggctggcctcctggc

SEQ ID NO: 1875367 - DNA, 15 bp, Homo sapiens
gctggcctcctggct

SEQ ID NO: 1875368 - DNA, 15 bp, Homo sapiens
ctggcctcctggctt

SEQ ID NO: 1875369 - DNA, 15 bp, Homo sapiens
tggcctcctggcttc

SEQ ID NO: 1875370 - DNA, 15 bp, Homo sapiens
ggcctcctggcttca

SEQ ID NO: 1875371 - DNA, 15 bp, Homo sapiens
gcctcctggcttcac

SEQ ID NO: 1875372 - DNA, 15 bp, Homo sapiens
cctcctggcttcact

SEQ ID NO: 1875373 - DNA, 15 bp, Homo sapiens
ctcctggcttcacta

SEQ ID NO: 1875374 - DNA, 15 bp, Homo sapiens
tcctggcttcactag

SEQ ID NO: 1875375 - DNA, 15 bp, Homo sapiens
cctggcttcactagc

SEQ ID NO: 1875376 - DNA, 15 bp, Homo sapiens
ctggcttcactagct

SEQ ID NO: 1875377 - DNA, 15 bp, Homo sapiens
tggcttcactagctc

SEQ ID NO: 1875378 - DNA, 15 bp, Homo sapiens
ggcttcactagctca

SEQ ID NO: 1875379 - DNA, 15 bp, Homo sapiens
gcttcactagctcag

SEQ ID NO: 1875380 - DNA, 15 bp, Homo sapiens
cttcactagctcagt

SEQ ID NO: 1875381 - DNA, 15 bp, Homo sapiens
ttcactagctcagtg

SEQ ID NO: 1875382 - DNA, 15 bp, Homo sapiens
tcactagctcagtga

SEQ ID NO: 1875383 - DNA, 15 bp, Homo sapiens
cactagctcagtgaa

SEQ ID NO: 1875384 - DNA, 15 bp, Homo sapiens
actagctcagtgaat

SEQ ID NO: 1875385 - DNA, 15 bp, Homo sapiens
ctagctcagtgaatc

SEQ ID NO: 1875386 - DNA, 15 bp, Homo sapiens
tagctcagtgaatca

SEQ ID NO: 1875387 - DNA, 15 bp, Homo sapiens
agctcagtgaatcaa

SEQ ID NO: 1875388 - DNA, 15 bp, Homo sapiens
gctcagtgaatcaaa

SEQ ID NO: 1875389 - DNA, 15 bp, Homo sapiens
ctcagtgaatcaaag

SEQ ID NO: 1875390 - DNA, 15 bp, Homo sapiens
tcagtgaatcaaagg

SEQ ID NO: 1875391 - DNA, 15 bp, Homo sapiens
cagtgaatcaaaggg

SEQ ID NO: 1875392 - DNA, 15 bp, Homo sapiens
agtgaatcaaagggc

SEQ ID NO: 1875393 - DNA, 15 bp, Homo sapiens
gtgaatcaaagggcc

SEQ ID NO: 1875394 - DNA, 15 bp, Homo sapiens
tgaatcaaagggcca

SEQ ID NO: 1875395 - DNA, 15 bp, Homo sapiens
gaatcaaagggccag

SEQ ID NO: 1875396 - DNA, 15 bp, Homo sapiens
aatcaaagggccagc

SEQ ID NO: 1875397 - DNA, 15 bp, Homo sapiens
atcaaagggccagca

SEQ ID NO: 1875398 - DNA, 15 bp, Homo sapiens
tcaaagggccagcag

SEQ ID NO: 1875399 - DNA, 15 bp, Homo sapiens
caaagggccagcagt

SEQ ID NO: 1875400 - DNA, 15 bp, Homo sapiens
aaagggccagcagtg

SEQ ID NO: 1875401 - DNA, 15 bp, Homo sapiens
aagggccagcagtga

SEQ ID NO: 1875402 - DNA, 15 bp, Homo sapiens
agggccagcagtgac

SEQ ID NO: 1875403 - DNA, 15 bp, Homo sapiens
gggccagcagtgact

SEQ ID NO: 1875404 - DNA, 15 bp, Homo sapiens
ggccagcagtgacta

SEQ ID NO: 1875405 - DNA, 15 bp, Homo sapiens
gccagcagtgactaa

SEQ ID NO: 1875406 - DNA, 15 bp, Homo sapiens
ccagcagtgactaaa

SEQ ID NO: 1875407 - DNA, 15 bp, Homo sapiens
cagcagtgactaaac

SEQ ID NO: 1875408 - DNA, 15 bp, Homo sapiens
agcagtgactaaaca

SEQ ID NO: 1875409 - DNA, 15 bp, Homo sapiens
gcagtgactaaacat

SEQ ID NO: 1875410 - DNA, 15 bp, Homo sapiens
cagtgactaaacatt

SEQ ID NO: 1875411 - DNA, 15 bp, Homo sapiens
agtgactaaacattt

SEQ ID NO: 1875412 - DNA, 15 bp, Homo sapiens
gtgactaaacatttg

SEQ ID NO: 1875413 - DNA, 15 bp, Homo sapiens
tgactaaacatttgt

SEQ ID NO: 1875414 - DNA, 15 bp, Homo sapiens
gactaaacatttgta

SEQ ID NO: 1875415 - DNA, 15 bp, Homo sapiens
actaaacatttgtat

SEQ ID NO: 1875416 - DNA, 15 bp, Homo sapiens
ctaaacatttgtatt

SEQ ID NO: 1875417 - DNA, 15 bp, Homo sapiens
taaacatttgtattt

SEQ ID NO: 1875418 - DNA, 15 bp, Homo sapiens
aacatttgtatttcc

SEQ ID NO: 1875419 - DNA, 15 bp, Homo sapiens
acatttgtatttcct

SEQ ID NO: 1875420 - DNA, 15 bp, Homo sapiens
catttgtatttcctg

SEQ ID NO: 1875421 - DNA, 15 bp, Homo sapiens
atttgtatttcctgg

SEQ ID NO: 1875422 - DNA, 15 bp, Homo sapiens
tttgtatttcctggg

SEQ ID NO: 1875423 - DNA, 15 bp, Homo sapiens
ttgtatttcctggga

SEQ ID NO: 1875424 - DNA, 15 bp, Homo sapiens
tgtatttcctgggaa

SEQ ID NO: 1875425 - DNA, 15 bp, Homo sapiens
gtatttcctgggaag

SEQ ID NO: 1875426 - DNA, 15 bp, Homo sapiens
tatttcctgggaagt

SEQ ID NO: 1875427 - DNA, 15 bp, Homo sapiens
atttcctgggaagtt

SEQ ID NO: 1875428 - DNA, 15 bp, Homo sapiens
tttcctgggaagttg

SEQ ID NO: 1875429 - DNA, 15 bp, Homo sapiens
ttcctgggaagttgg

SEQ ID NO: 1875430 - DNA, 15 bp, Homo sapiens
tcctgggaagttggg

SEQ ID NO: 1875431 - DNA, 15 bp, Homo sapiens
cctgggaagttgggg

SEQ ID NO: 1875432 - DNA, 15 bp, Homo sapiens
ctgggaagttggggt

SEQ ID NO: 1875433 - DNA, 15 bp, Homo sapiens
tgggaagttggggtt

SEQ ID NO: 1875434 - DNA, 15 bp, Homo sapiens
gggaagttggggttc

SEQ ID NO: 1875435 - DNA, 15 bp, Homo sapiens
ggaagttggggttct

SEQ ID NO: 1875436 - DNA, 15 bp, Homo sapiens
gaagttggggttctc

SEQ ID NO: 1875437 - DNA, 15 bp, Homo sapiens
aagttggggttctcc

SEQ ID NO: 1875438 - DNA, 15 bp, Homo sapiens
agttggggttctcct

SEQ ID NO: 1875439 - DNA, 15 bp, Homo sapiens
gttggggttctcctc

SEQ ID NO: 1875440 - DNA, 15 bp, Homo sapiens
ttggggttctcctct

SEQ ID NO: 1875441 - DNA, 15 bp, Homo sapiens
tggggttctcctcta

SEQ ID NO: 1875442 - DNA, 15 bp, Homo sapiens
ggggttctcctctaa

SEQ ID NO: 1875443 - DNA, 15 bp, Homo sapiens
gggttctcctctaat

SEQ ID NO: 1875444 - DNA, 15 bp, Homo sapiens
ggttctcctctaata

SEQ ID NO: 1875445 - DNA, 15 bp, Homo sapiens
gttctcctctaatag

SEQ ID NO: 1875446 - DNA, 15 bp, Homo sapiens
ttctcctctaataga

SEQ ID NO: 1875447 - DNA, 15 bp, Homo sapiens
tctcctctaatagag

SEQ ID NO: 1875448 - DNA, 15 bp, Homo sapiens
ctcctctaatagagt

SEQ ID NO: 1875449 - DNA, 15 bp, Homo sapiens
tcctctaatagagtg

SEQ ID NO: 1875450 - DNA, 15 bp, Homo sapiens
cctctaatagagtga

SEQ ID NO: 1875451 - DNA, 15 bp, Homo sapiens
ctctaatagagtgac

SEQ ID NO: 1875452 - DNA, 15 bp, Homo sapiens
tctaatagagtgact

SEQ ID NO: 1875453 - DNA, 15 bp, Homo sapiens
ctaatagagtgactg

SEQ ID NO: 1875454 - DNA, 15 bp, Homo sapiens
taatagagtgactgt

SEQ ID NO: 1875455 - DNA, 15 bp, Homo sapiens
aatagagtgactgtg

SEQ ID NO: 1875456 - DNA, 15 bp, Homo sapiens
atagagtgactgtgt

SEQ ID NO: 1875457 - DNA, 15 bp, Homo sapiens
tagagtgactgtgtt

SEQ ID NO: 1875458 - DNA, 15 bp, Homo sapiens
agagtgactgtgttc

SEQ ID NO: 1875459 - DNA, 15 bp, Homo sapiens
gagtgactgtgttct

SEQ ID NO: 1875460 - DNA, 15 bp, Homo sapiens
agtgactgtgttctt

SEQ ID NO: 1875461 - DNA, 15 bp, Homo sapiens
gtgactgtgttcttt

SEQ ID NO: 1875462 - DNA, 15 bp, Homo sapiens
tgactgtgttctttc

SEQ ID NO: 1875463 - DNA, 15 bp, Homo sapiens
gactgtgttctttca

SEQ ID NO: 1875464 - DNA, 15 bp, Homo sapiens
actgtgttctttcat

SEQ ID NO: 1875465 - DNA, 15 bp, Homo sapiens
ctgtgttctttcatt

SEQ ID NO: 1875466 - DNA, 15 bp, Homo sapiens
tgtgttctttcattt

SEQ ID NO: 1875467 - DNA, 15 bp, Homo sapiens
gtgttctttcatttg

SEQ ID NO: 1875468 - DNA, 15 bp, Homo sapiens
tgttctttcatttgt

SEQ ID NO: 1875469 - DNA, 15 bp, Homo sapiens
gttctttcatttgtc

SEQ ID NO: 1875470 - DNA, 15 bp, Homo sapiens
ttctttcatttgtct

SEQ ID NO: 1875471 - DNA, 15 bp, Homo sapiens
tctttcatttgtctc

SEQ ID NO: 1875472 - DNA, 15 bp, Homo sapiens
ctttcatttgtctcc

SEQ ID NO: 1875473 - DNA, 15 bp, Homo sapiens
tttcatttgtctcct

SEQ ID NO: 1875474 - DNA, 15 bp, Homo sapiens
ttcatttgtctcctt

SEQ ID NO: 1875475 - DNA, 15 bp, Homo sapiens
tcatttgtctccttt

SEQ ID NO: 1875476 - DNA, 15 bp, Homo sapiens
catttgtctcctttg

SEQ ID NO: 1875477 - DNA, 15 bp, Homo sapiens
atttgtctcctttgt

SEQ ID NO: 1875478 - DNA, 15 bp, Homo sapiens
tttgtctcctttgta

SEQ ID NO: 1875479 - DNA, 15 bp, Homo sapiens
ttgtctcctttgtag

SEQ ID NO: 1875480 - DNA, 15 bp, Homo sapiens
tgtctcctttgtaga

SEQ ID NO: 1875481 - DNA, 15 bp, Homo sapiens
gtctcctttgtagat

SEQ ID NO: 1875482 - DNA, 15 bp, Homo sapiens
tctcctttgtagata

SEQ ID NO: 1875483 - DNA, 15 bp, Homo sapiens
ctcctttgtagatag

SEQ ID NO: 1875484 - DNA, 15 bp, Homo sapiens
tcctttgtagataga

SEQ ID NO: 1875485 - DNA, 15 bp, Homo sapiens
cctttgtagatagag

SEQ ID NO: 1875486 - DNA, 15 bp, Homo sapiens
ctttgtagatagagg

SEQ ID NO: 1875487 - DNA, 15 bp, Homo sapiens
tttgtagatagaggt

SEQ ID NO: 1875488 - DNA, 15 bp, Homo sapiens
ttgtagatagaggtt

SEQ ID NO: 1875489 - DNA, 15 bp, Homo sapiens
tgtagatagaggttt

SEQ ID NO: 1875490 - DNA, 15 bp, Homo sapiens
gtagatagaggtttg

SEQ ID NO: 1875491 - DNA, 15 bp, Homo sapiens
tagatagaggtttgg

SEQ ID NO: 1875492 - DNA, 15 bp, Homo sapiens
agatagaggtttgga

SEQ ID NO: 1875493 - DNA, 15 bp, Homo sapiens
gatagaggtttggag

SEQ ID NO: 1875494 - DNA, 15 bp, Homo sapiens
atagaggtttggagt

SEQ ID NO: 1875495 - DNA, 15 bp, Homo sapiens
tagaggtttggagtt

SEQ ID NO: 1875496 - DNA, 15 bp, Homo sapiens
agaggtttggagttg

SEQ ID NO: 1875497 - DNA, 15 bp, Homo sapiens
gaggtttggagttgg

SEQ ID NO: 1875498 - DNA, 15 bp, Homo sapiens
aggtttggagttgga

SEQ ID NO: 1875499 - DNA, 15 bp, Homo sapiens
ggtttggagttggag

SEQ ID NO: 1875500 - DNA, 15 bp, Homo sapiens
gtttggagttggagg

SEQ ID NO: 1875501 - DNA, 15 bp, Homo sapiens
tctttcttcatgtat

SEQ ID NO: 1875502 - DNA, 15 bp, Homo sapiens
ctttcttcatgtata

SEQ ID NO: 1875503 - DNA, 15 bp, Homo sapiens
tttcttcatgtatat

SEQ ID NO: 1875504 - DNA, 15 bp, Homo sapiens
ttcttcatgtatatg

SEQ ID NO: 1875505 - DNA, 15 bp, Homo sapiens
tcttcatgtatatga

SEQ ID NO: 1875506 - DNA, 15 bp, Homo sapiens
cttcatgtatatgaa

SEQ ID NO: 1875507 - DNA, 15 bp, Homo sapiens
ttcatgtatatgaat

SEQ ID NO: 1875508 - DNA, 15 bp, Homo sapiens
tcatgtatatgaatg

SEQ ID NO: 1875509 - DNA, 15 bp, Homo sapiens
catgtatatgaatga

SEQ ID NO: 1875510 - DNA, 15 bp, Homo sapiens
atgtatatgaatgag

SEQ ID NO: 1875511 - DNA, 15 bp, Homo sapiens
tgtatatgaatgagc

SEQ ID NO: 1875512 - DNA, 15 bp, Homo sapiens
gtatatgaatgagct

SEQ ID NO: 1875513 - DNA, 15 bp, Homo sapiens
tatatgaatgagctg

SEQ ID NO: 1875514 - DNA, 15 bp, Homo sapiens
atatgaatgagctgt

SEQ ID NO: 1875515 - DNA, 15 bp, Homo sapiens
tatgaatgagctgtc

SEQ ID NO: 1875516 - DNA, 15 bp, Homo sapiens
atgaatgagctgtca

SEQ ID NO: 1875517 - DNA, 15 bp, Homo sapiens
tgaatgagctgtcat

SEQ ID NO: 1875518 - DNA, 15 bp, Homo sapiens
gaatgagctgtcatc

SEQ ID NO: 1875519 - DNA, 15 bp, Homo sapiens
aatgagctgtcatct

SEQ ID NO: 1875520 - DNA, 15 bp, Homo sapiens
atgagctgtcatctt

SEQ ID NO: 1875521 - DNA, 15 bp, Homo sapiens
tgagctgtcatcttt

SEQ ID NO: 1875522 - DNA, 15 bp, Homo sapiens
gagctgtcatctttg

SEQ ID NO: 1875523 - DNA, 15 bp, Homo sapiens
agctgtcatctttgc

SEQ ID NO: 1875524 - DNA, 15 bp, Homo sapiens
gctgtcatctttgca

SEQ ID NO: 1875525 - DNA, 15 bp, Homo sapiens
ctgtcatctttgcag

SEQ ID NO: 1875526 - DNA, 15 bp, Homo sapiens
tgtcatctttgcagg

SEQ ID NO: 1875527 - DNA, 15 bp, Homo sapiens
gtcatctttgcaggt

SEQ ID NO: 1875528 - DNA, 15 bp, Homo sapiens
tcatctttgcaggtc

SEQ ID NO: 1875529 - DNA, 15 bp, Homo sapiens
catctttgcaggtca

SEQ ID NO: 1875530 - DNA, 15 bp, Homo sapiens
atctttgcaggtcat

SEQ ID NO: 1875531 - DNA, 15 bp, Homo sapiens
tctttgcaggtcatt

SEQ ID NO: 1875532 - DNA, 15 bp, Homo sapiens
ctttgcaggtcattt

SEQ ID NO: 1875533 - DNA, 15 bp, Homo sapiens
tttgcaggtcatttc

SEQ ID NO: 1875534 - DNA, 15 bp, Homo sapiens
ttgcaggtcatttca

SEQ ID NO: 1875535 - DNA, 15 bp, Homo sapiens
tgcaggtcatttcaa

SEQ ID NO: 1875536 - DNA, 15 bp, Homo sapiens
gcaggtcatttcaaa

SEQ ID NO: 1875537 - DNA, 15 bp, Homo sapiens
caggtcatttcaaac

SEQ ID NO: 1875538 - DNA, 15 bp, Homo sapiens
aggtcatttcaaacc

SEQ ID NO: 1875539 - DNA, 15 bp, Homo sapiens
ggtcatttcaaaccc

SEQ ID NO: 1875540 - DNA, 15 bp, Homo sapiens
gtcatttcaaaccct

SEQ ID NO: 1875541 - DNA, 15 bp, Homo sapiens
tcatttcaaaccctc

SEQ ID NO: 1875542 - DNA, 15 bp, Homo sapiens
catttcaaaccctcc

SEQ ID NO: 1875543 - DNA, 15 bp, Homo sapiens
atttcaaaccctcca

SEQ ID NO: 1875544 - DNA, 15 bp, Homo sapiens
tttcaaaccctccaa

SEQ ID NO: 1875545 - DNA, 15 bp, Homo sapiens
ttcaaaccctccaaa

SEQ ID NO: 1875546 - DNA, 15 bp, Homo sapiens
tcaaaccctccaaaa

SEQ ID NO: 1875547 - DNA, 15 bp, Homo sapiens
caaaccctccaaaat

SEQ ID NO: 1875548 - DNA, 15 bp, Homo sapiens
aaaccctccaaaatt

SEQ ID NO: 1875549 - DNA, 15 bp, Homo sapiens
aaccctccaaaattt

SEQ ID NO: 1875550 - DNA, 15 bp, Homo sapiens
accctccaaaattta

SEQ ID NO: 1875551 - DNA, 15 bp, Homo sapiens
ccctccaaaatttaa

SEQ ID NO: 1875552 - DNA, 15 bp, Homo sapiens
cctccaaaatttaac

SEQ ID NO: 1875553 - DNA, 15 bp, Homo sapiens
ctccaaaatttaaca

SEQ ID NO: 1875554 - DNA, 15 bp, Homo sapiens
tccaaaatttaacat

SEQ ID NO: 1875555 - DNA, 15 bp, Homo sapiens
ccaaaatttaacata

SEQ ID NO: 1875556 - DNA, 15 bp, Homo sapiens
caaaatttaacatac

SEQ ID NO: 1875557 - DNA, 15 bp, Homo sapiens
aaaatttaacatact

SEQ ID NO: 1875558 - DNA, 15 bp, Homo sapiens
aaatttaacatactc

SEQ ID NO: 1875559 - DNA, 15 bp, Homo sapiens
aatttaacatactca

SEQ ID NO: 1875560 - DNA, 15 bp, Homo sapiens
atttaacatactcaa

SEQ ID NO: 1875561 - DNA, 15 bp, Homo sapiens
tttaacatactcaag

SEQ ID NO: 1875562 - DNA, 15 bp, Homo sapiens
ttaacatactcaagc

SEQ ID NO: 1875563 - DNA, 15 bp, Homo sapiens
taacatactcaagca

SEQ ID NO: 1875564 - DNA, 15 bp, Homo sapiens
aacatactcaagcac

SEQ ID NO: 1875565 - DNA, 15 bp, Homo sapiens
acatactcaagcaca

SEQ ID NO: 1875566 - DNA, 15 bp, Homo sapiens
catactcaagcacaa

SEQ ID NO: 1875567 - DNA, 15 bp, Homo sapiens
atactcaagcacaat

SEQ ID NO: 1875568 - DNA, 15 bp, Homo sapiens
tactcaagcacaata

SEQ ID NO: 1875569 - DNA, 15 bp, Homo sapiens
actcaagcacaatag

SEQ ID NO: 1875570 - DNA, 15 bp, Homo sapiens
ctcaagcacaataga

SEQ ID NO: 1875571 - DNA, 15 bp, Homo sapiens
tcaagcacaatagat

SEQ ID NO: 1875572 - DNA, 15 bp, Homo sapiens
caagcacaatagatt

SEQ ID NO: 1875573 - DNA, 15 bp, Homo sapiens
aagcacaatagattt

SEQ ID NO: 1875574 - DNA, 15 bp, Homo sapiens
agcacaatagatttt

SEQ ID NO: 1875575 - DNA, 15 bp, Homo sapiens
gcacaatagattttc

SEQ ID NO: 1875576 - DNA, 15 bp, Homo sapiens
cacaatagattttca

SEQ ID NO: 1875577 - DNA, 15 bp, Homo sapiens
acaatagattttcac

SEQ ID NO: 1875578 - DNA, 15 bp, Homo sapiens
caatagattttcaca

SEQ ID NO: 1875579 - DNA, 15 bp, Homo sapiens
aatagattttcacaa

SEQ ID NO: 1875580 - DNA, 15 bp, Homo sapiens
atagattttcacaaa

SEQ ID NO: 1875581 - DNA, 15 bp, Homo sapiens
tagattttcacaaaa

SEQ ID NO: 1875582 - DNA, 15 bp, Homo sapiens
agattttcacaaaat

SEQ ID NO: 1875583 - DNA, 15 bp, Homo sapiens
gattttcacaaaatg

SEQ ID NO: 1875584 - DNA, 15 bp, Homo sapiens
attttcacaaaatgg

SEQ ID NO: 1875585 - DNA, 15 bp, Homo sapiens
ttttcacaaaatggg

SEQ ID NO: 1875586 - DNA, 15 bp, Homo sapiens
tttcacaaaatgggc

SEQ ID NO: 1875587 - DNA, 15 bp, Homo sapiens
ttcacaaaatgggcc

SEQ ID NO: 1875588 - DNA, 15 bp, Homo sapiens
tcacaaaatgggcct

SEQ ID NO: 1875589 - DNA, 15 bp, Homo sapiens
cacaaaatgggcctt

SEQ ID NO: 1875590 - DNA, 15 bp, Homo sapiens
acaaaatgggccttc

SEQ ID NO: 1875591 - DNA, 15 bp, Homo sapiens
caaaatgggccttca

SEQ ID NO: 1875592 - DNA, 15 bp, Homo sapiens
aaaatgggccttcac

SEQ ID NO: 1875593 - DNA, 15 bp, Homo sapiens
aaatgggccttcacc

SEQ ID NO: 1875594 - DNA, 15 bp, Homo sapiens
aatgggccttcacct

SEQ ID NO: 1875595 - DNA, 15 bp, Homo sapiens
atgggccttcaccta

SEQ ID NO: 1875596 - DNA, 15 bp, Homo sapiens
tgggccttcacctat

SEQ ID NO: 1875597 - DNA, 15 bp, Homo sapiens
gggccttcacctatg

SEQ ID NO: 1875598 - DNA, 15 bp, Homo sapiens
ggccttcacctatgt

SEQ ID NO: 1875599 - DNA, 15 bp, Homo sapiens
gccttcacctatgtc

SEQ ID NO: 1875600 - DNA, 15 bp, Homo sapiens
ccttcacctatgtct

SEQ ID NO: 1875601 - DNA, 15 bp, Homo sapiens
cttcacctatgtctt

SEQ ID NO: 1875602 - DNA, 15 bp, Homo sapiens
ttcacctatgtcttc

SEQ ID NO: 1875603 - DNA, 15 bp, Homo sapiens
tcacctatgtcttca

SEQ ID NO: 1875604 - DNA, 15 bp, Homo sapiens
cacctatgtcttcac

SEQ ID NO: 1875605 - DNA, 15 bp, Homo sapiens
acctatgtcttcaca

SEQ ID NO: 1875606 - DNA, 15 bp, Homo sapiens
cctatgtcttcacag

SEQ ID NO: 1875607 - DNA, 15 bp, Homo sapiens
ctatgtcttcacaga

SEQ ID NO: 1875608 - DNA, 15 bp, Homo sapiens
tatgtcttcacagag

SEQ ID NO: 1875609 - DNA, 15 bp, Homo sapiens
atgtcttcacagagt

SEQ ID NO: 1875610 - DNA, 15 bp, Homo sapiens
tgtcttcacagagtt

SEQ ID NO: 1875611 - DNA, 15 bp, Homo sapiens
gtcttcacagagttt

SEQ ID NO: 1875612 - DNA, 15 bp, Homo sapiens
tcttcacagagttta

SEQ ID NO: 1875613 - DNA, 15 bp, Homo sapiens
cttcacagagtttat

SEQ ID NO: 1875614 - DNA, 15 bp, Homo sapiens
ttcacagagtttatt

SEQ ID NO: 1875615 - DNA, 15 bp, Homo sapiens
tcacagagtttattg

SEQ ID NO: 1875616 - DNA, 15 bp, Homo sapiens
cacagagtttattgg

SEQ ID NO: 1875617 - DNA, 15 bp, Homo sapiens
acagagtttattggt

SEQ ID NO: 1875618 - DNA, 15 bp, Homo sapiens
cagagtttattggtt

SEQ ID NO: 1875619 - DNA, 15 bp, Homo sapiens
agagtttattggtta

SEQ ID NO: 1875620 - DNA, 15 bp, Homo sapiens
gagtttattggttaa

SEQ ID NO: 1875621 - DNA, 15 bp, Homo sapiens
agtttattggttaaa

SEQ ID NO: 1875622 - DNA, 15 bp, Homo sapiens
gtttattggttaaac

SEQ ID NO: 1875623 - DNA, 15 bp, Homo sapiens
tttattggttaaaca

SEQ ID NO: 1875624 - DNA, 15 bp, Homo sapiens
ttattggttaaacag

SEQ ID NO: 1875625 - DNA, 15 bp, Homo sapiens
tattggttaaacagt

SEQ ID NO: 1875626 - DNA, 15 bp, Homo sapiens
attggttaaacagta

SEQ ID NO: 1875627 - DNA, 15 bp, Homo sapiens
ttggttaaacagtac

SEQ ID NO: 1875628 - DNA, 15 bp, Homo sapiens
tggttaaacagtacc

SEQ ID NO: 1875629 - DNA, 15 bp, Homo sapiens
ggttaaacagtaccc

SEQ ID NO: 1875630 - DNA, 15 bp, Homo sapiens
gttaaacagtaccct

SEQ ID NO: 1875631 - DNA, 15 bp, Homo sapiens
ttaaacagtaccctg

SEQ ID NO: 1875632 - DNA, 15 bp, Homo sapiens
taaacagtaccctgc

SEQ ID NO: 1875633 - DNA, 15 bp, Homo sapiens
aaacagtaccctgcc

SEQ ID NO: 1875634 - DNA, 15 bp, Homo sapiens
aacagtaccctgcct

SEQ ID NO: 1875635 - DNA, 15 bp, Homo sapiens
acagtaccctgccta

SEQ ID NO: 1875636 - DNA, 15 bp, Homo sapiens
cagtaccctgcctat

SEQ ID NO: 1875637 - DNA, 15 bp, Homo sapiens
agtaccctgcctata

SEQ ID NO: 1875638 - DNA, 15 bp, Homo sapiens
gtaccctgcctatag

SEQ ID NO: 1875639 - DNA, 15 bp, Homo sapiens
taccctgcctatagg

SEQ ID NO: 1875640 - DNA, 15 bp, Homo sapiens
accctgcctataggg

SEQ ID NO: 1875641 - DNA, 15 bp, Homo sapiens
ccctgcctatagggc

SEQ ID NO: 1875642 - DNA, 15 bp, Homo sapiens
cctgcctatagggcc

SEQ ID NO: 1875643 - DNA, 15 bp, Homo sapiens
ctgcctatagggcca

SEQ ID NO: 1875644 - DNA, 15 bp, Homo sapiens
tgcctatagggccag

SEQ ID NO: 1875645 - DNA, 15 bp, Homo sapiens
gcctatagggccagc

SEQ ID NO: 1875646 - DNA, 15 bp, Homo sapiens
cctatagggccagcc

SEQ ID NO: 1875647 - DNA, 15 bp, Homo sapiens
ctatagggccagccc

SEQ ID NO: 1875648 - DNA, 15 bp, Homo sapiens
tatagggccagccca

SEQ ID NO: 1875649 - DNA, 15 bp, Homo sapiens
atagggccagcccag

SEQ ID NO: 1875650 - DNA, 15 bp, Homo sapiens
tagggccagcccaga

SEQ ID NO: 1875651 - DNA, 15 bp, Homo sapiens
agggccagcccagag

SEQ ID NO: 1875652 - DNA, 15 bp, Homo sapiens
gggccagcccagaga

SEQ ID NO: 1875653 - DNA, 15 bp, Homo sapiens
ggccagcccagagaa

SEQ ID NO: 1875654 - DNA, 15 bp, Homo sapiens
gccagcccagagaaa

SEQ ID NO: 1875655 - DNA, 15 bp, Homo sapiens
ccagcccagagaaac

SEQ ID NO: 1875656 - DNA, 15 bp, Homo sapiens
cagcccagagaaaca

SEQ ID NO: 1875657 - DNA, 15 bp, Homo sapiens
agcccagagaaacat

SEQ ID NO: 1875658 - DNA, 15 bp, Homo sapiens
gcccagagaaacata

SEQ ID NO: 1875659 - DNA, 15 bp, Homo sapiens
cccagagaaacataa

SEQ ID NO: 1875660 - DNA, 15 bp, Homo sapiens
ccagagaaacataag

SEQ ID NO: 1875661 - DNA, 15 bp, Homo sapiens
cagagaaacataagc

SEQ ID NO: 1875662 - DNA, 15 bp, Homo sapiens
agagaaacataagcg

SEQ ID NO: 1875663 - DNA, 15 bp, Homo sapiens
gagaaacataagcga

SEQ ID NO: 1875664 - DNA, 15 bp, Homo sapiens
agaaacataagcgat

SEQ ID NO: 1875665 - DNA, 15 bp, Homo sapiens
gaaacataagcgatt

SEQ ID NO: 1875666 - DNA, 15 bp, Homo sapiens
aaacataagcgattt

SEQ ID NO: 1875667 - DNA, 15 bp, Homo sapiens
aacataagcgatttc

SEQ ID NO: 1875668 - DNA, 15 bp, Homo sapiens
acataagcgatttct

SEQ ID NO: 1875669 - DNA, 15 bp, Homo sapiens
cataagcgatttcta

SEQ ID NO: 1875670 - DNA, 15 bp, Homo sapiens
ataagcgatttctat

SEQ ID NO: 1875671 - DNA, 15 bp, Homo sapiens
taagcgatttctatg

SEQ ID NO: 1875672 - DNA, 15 bp, Homo sapiens
aagcgatttctatgt

SEQ ID NO: 1875673 - DNA, 15 bp, Homo sapiens
agcgatttctatgta

SEQ ID NO: 1875674 - DNA, 15 bp, Homo sapiens
gcgatttctatgtat

SEQ ID NO: 1875675 - DNA, 15 bp, Homo sapiens
cgatttctatgtatg

SEQ ID NO: 1875676 - DNA, 15 bp, Homo sapiens
gatttctatgtatgt

SEQ ID NO: 1875677 - DNA, 15 bp, Homo sapiens
atttctatgtatgtc

SEQ ID NO: 1875678 - DNA, 15 bp, Homo sapiens
tttctatgtatgtca

SEQ ID NO: 1875679 - DNA, 15 bp, Homo sapiens
ttctatgtatgtcat

SEQ ID NO: 1875680 - DNA, 15 bp, Homo sapiens
tctatgtatgtcatt

SEQ ID NO: 1875681 - DNA, 15 bp, Homo sapiens
ctatgtatgtcattt

SEQ ID NO: 1875682 - DNA, 15 bp, Homo sapiens
tatgtatgtcatttg

SEQ ID NO: 1875683 - DNA, 15 bp, Homo sapiens
atgtatgtcatttgt

SEQ ID NO: 1875684 - DNA, 15 bp, Homo sapiens
tgtatgtcatttgta

SEQ ID NO: 1875685 - DNA, 15 bp, Homo sapiens
gtatgtcatttgtat

SEQ ID NO: 1875686 - DNA, 15 bp, Homo sapiens
tatgtcatttgtatt

SEQ ID NO: 1875687 - DNA, 15 bp, Homo sapiens
atgtcatttgtattt

SEQ ID NO: 1875688 - DNA, 15 bp, Homo sapiens
tgtcatttgtatttc

SEQ ID NO: 1875689 - DNA, 15 bp, Homo sapiens
gtcatttgtatttct

SEQ ID NO: 1875690 - DNA, 15 bp, Homo sapiens
tcatttgtatttctt

SEQ ID NO: 1875691 - DNA, 15 bp, Homo sapiens
catttgtatttcttg

SEQ ID NO: 1875692 - DNA, 15 bp, Homo sapiens
atttgtatttcttgt

SEQ ID NO: 1875693 - DNA, 15 bp, Homo sapiens
tttgtatttcttgta

SEQ ID NO: 1875694 - DNA, 15 bp, Homo sapiens
ttgtatttcttgtag

SEQ ID NO: 1875695 - DNA, 15 bp, Homo sapiens
tgtatttcttgtagt

SEQ ID NO: 1875696 - DNA, 15 bp, Homo sapiens
gtatttcttgtagtt

SEQ ID NO: 1875697 - DNA, 15 bp, Homo sapiens
tatttcttgtagttt

SEQ ID NO: 1875698 - DNA, 15 bp, Homo sapiens
atttcttgtagtttg

SEQ ID NO: 1875699 - DNA, 15 bp, Homo sapiens
tttcttgtagtttga

SEQ ID NO: 1875700 - DNA, 15 bp, Homo sapiens
ttcttgtagtttgaa

SEQ ID NO: 1875701 - DNA, 15 bp, Homo sapiens
tcttgtagtttgaaa

SEQ ID NO: 1875702 - DNA, 15 bp, Homo sapiens
cttgtagtttgaaat

SEQ ID NO: 1875703 - DNA, 15 bp, Homo sapiens
ttgtagtttgaaatc

SEQ ID NO: 1875704 - DNA, 15 bp, Homo sapiens
tgtagtttgaaatca

SEQ ID NO: 1875705 - DNA, 15 bp, Homo sapiens
gtagtttgaaatcac

SEQ ID NO: 1875706 - DNA, 15 bp, Homo sapiens
tagtttgaaatcacg

SEQ ID NO: 1875707 - DNA, 15 bp, Homo sapiens
agtttgaaatcacgt

SEQ ID NO: 1875708 - DNA, 15 bp, Homo sapiens
gtttgaaatcacgtg

SEQ ID NO: 1875709 - DNA, 15 bp, Homo sapiens
tttgaaatcacgtgt

SEQ ID NO: 1875710 - DNA, 15 bp, Homo sapiens
ttgaaatcacgtgtg

SEQ ID NO: 1875711 - DNA, 15 bp, Homo sapiens
tgaaatcacgtgtgt

SEQ ID NO: 1875712 - DNA, 15 bp, Homo sapiens
gaaatcacgtgtgta

SEQ ID NO: 1875713 - DNA, 15 bp, Homo sapiens
aaatcacgtgtgtac

SEQ ID NO: 1875714 - DNA, 15 bp, Homo sapiens
aatcacgtgtgtaca

SEQ ID NO: 1875715 - DNA, 15 bp, Homo sapiens
atcacgtgtgtacaa

SEQ ID NO: 1875716 - DNA, 15 bp, Homo sapiens
tcacgtgtgtacaac

SEQ ID NO: 1875717 - DNA, 15 bp, Homo sapiens
cacgtgtgtacaact

SEQ ID NO: 1875718 - DNA, 15 bp, Homo sapiens
acgtgtgtacaactg

SEQ ID NO: 1875719 - DNA, 15 bp, Homo sapiens
cgtgtgtacaactgc

SEQ ID NO: 1875720 - DNA, 15 bp, Homo sapiens
gtgtgtacaactgca

SEQ ID NO: 1875721 - DNA, 15 bp, Homo sapiens
tgtgtacaactgcac

SEQ ID NO: 1875722 - DNA, 15 bp, Homo sapiens
gtgtacaactgcaca

SEQ ID NO: 1875723 - DNA, 15 bp, Homo sapiens
tgtacaactgcacag

SEQ ID NO: 1875724 - DNA, 15 bp, Homo sapiens
gtacaactgcacagg

SEQ ID NO: 1875725 - DNA, 15 bp, Homo sapiens
tacaactgcacaggg

SEQ ID NO: 1875726 - DNA, 15 bp, Homo sapiens
acaactgcacaggga

SEQ ID NO: 1875727 - DNA, 15 bp, Homo sapiens
caactgcacagggat

SEQ ID NO: 1875728 - DNA, 15 bp, Homo sapiens
aactgcacagggatc

SEQ ID NO: 1875729 - DNA, 15 bp, Homo sapiens
actgcacagggatca

SEQ ID NO: 1875730 - DNA, 15 bp, Homo sapiens
ctgcacagggatcat

SEQ ID NO: 1875731 - DNA, 15 bp, Homo sapiens
tgcacagggatcatc

SEQ ID NO: 1875732 - DNA, 15 bp, Homo sapiens
gcacagggatcatct

SEQ ID NO: 1875733 - DNA, 15 bp, Homo sapiens
cacagggatcatctt

SEQ ID NO: 1875734 - DNA, 15 bp, Homo sapiens
acagggatcatctta

SEQ ID NO: 1875735 - DNA, 15 bp, Homo sapiens
cagggatcatcttat

SEQ ID NO: 1875736 - DNA, 15 bp, Homo sapiens
agggatcatcttata

SEQ ID NO: 1875737 - DNA, 15 bp, Homo sapiens
gggatcatcttatat

SEQ ID NO: 1875738 - DNA, 15 bp, Homo sapiens
ggatcatcttatatc

SEQ ID NO: 1875739 - DNA, 15 bp, Homo sapiens
gatcatcttatatca

SEQ ID NO: 1875740 - DNA, 15 bp, Homo sapiens
atcatcttatatcac

SEQ ID NO: 1875741 - DNA, 15 bp, Homo sapiens
tcatcttatatcaca

SEQ ID NO: 1875742 - DNA, 15 bp, Homo sapiens
catcttatatcacaa

SEQ ID NO: 1875743 - DNA, 15 bp, Homo sapiens
atcttatatcacaat

SEQ ID NO: 1875744 - DNA, 15 bp, Homo sapiens
tcttatatcacaatt

SEQ ID NO: 1875745 - DNA, 15 bp, Homo sapiens
cttatatcacaatta

SEQ ID NO: 1875746 - DNA, 15 bp, Homo sapiens
ttatatcacaattac

SEQ ID NO: 1875747 - DNA, 15 bp, Homo sapiens
tatatcacaattacg

SEQ ID NO: 1875748 - DNA, 15 bp, Homo sapiens
atatcacaattacgg

SEQ ID NO: 1875749 - DNA, 15 bp, Homo sapiens
tatcacaattacggc

SEQ ID NO: 1875750 - DNA, 15 bp, Homo sapiens
atcacaattacggct

SEQ ID NO: 1875751 - DNA, 15 bp, Homo sapiens
tcacaattacggctg

SEQ ID NO: 1875752 - DNA, 15 bp, Homo sapiens
cacaattacggctgg

SEQ ID NO: 1875753 - DNA, 15 bp, Homo sapiens
acaattacggctggc

SEQ ID NO: 1875754 - DNA, 15 bp, Homo sapiens
caattacggctggct

SEQ ID NO: 1875755 - DNA, 15 bp, Homo sapiens
aattacggctggctt

SEQ ID NO: 1875756 - DNA, 15 bp, Homo sapiens
attacggctggcttc

SEQ ID NO: 1875757 - DNA, 15 bp, Homo sapiens
ttacggctggcttcc

SEQ ID NO: 1875758 - DNA, 15 bp, Homo sapiens
tacggctggcttccc

SEQ ID NO: 1875759 - DNA, 15 bp, Homo sapiens
acggctggcttccct

SEQ ID NO: 1875760 - DNA, 15 bp, Homo sapiens
cggctggcttcccta

SEQ ID NO: 1875761 - DNA, 15 bp, Homo sapiens
ggctggcttccctac

SEQ ID NO: 1875762 - DNA, 15 bp, Homo sapiens
gctggcttccctaca

SEQ ID NO: 1875763 - DNA, 15 bp, Homo sapiens
ctggcttccctacaa

SEQ ID NO: 1875764 - DNA, 15 bp, Homo sapiens
tggcttccctacaag

SEQ ID NO: 1875765 - DNA, 15 bp, Homo sapiens
ggcttccctacaaga

SEQ ID NO: 1875766 - DNA, 15 bp, Homo sapiens
gcttccctacaagat

SEQ ID NO: 1875767 - DNA, 15 bp, Homo sapiens
cttccctacaagatg

SEQ ID NO: 1875768 - DNA, 15 bp, Homo sapiens
ttccctacaagatga

SEQ ID NO: 1875769 - DNA, 15 bp, Homo sapiens
tccctacaagatgaa

SEQ ID NO: 1875770 - DNA, 15 bp, Homo sapiens
ccctacaagatgaaa

SEQ ID NO: 1875771 - DNA, 15 bp, Homo sapiens
cctacaagatgaaaa

SEQ ID NO: 1875772 - DNA, 15 bp, Homo sapiens
ctacaagatgaaaat

SEQ ID NO: 1875773 - DNA, 15 bp, Homo sapiens
tacaagatgaaaatt

SEQ ID NO: 1875774 - DNA, 15 bp, Homo sapiens
acaagatgaaaatta

SEQ ID NO: 1875775 - DNA, 15 bp, Homo sapiens
caagatgaaaattaa

SEQ ID NO: 1875776 - DNA, 15 bp, Homo sapiens
aagatgaaaattaaa

SEQ ID NO: 1875777 - DNA, 15 bp, Homo sapiens
agatgaaaattaaaa

SEQ ID NO: 1875778 - DNA, 15 bp, Homo sapiens
gatgaaaattaaaag

SEQ ID NO: 1875779 - DNA, 15 bp, Homo sapiens
atgaaaattaaaaga

SEQ ID NO: 1875780 - DNA, 15 bp, Homo sapiens
tgaaaattaaaagaa

SEQ ID NO: 1875781 - DNA, 15 bp, Homo sapiens
gaaaattaaaagaat

SEQ ID NO: 1875782 - DNA, 15 bp, Homo sapiens
aaaattaaaagaata

SEQ ID NO: 1875783 - DNA, 15 bp, Homo sapiens
aaattaaaagaatat

SEQ ID NO: 1875784 - DNA, 15 bp, Homo sapiens
aattaaaagaatatg

SEQ ID NO: 1875785 - DNA, 15 bp, Homo sapiens
attaaaagaatatgg

SEQ ID NO: 1875786 - DNA, 15 bp, Homo sapiens
ttaaaagaatatgga

SEQ ID NO: 1875787 - DNA, 15 bp, Homo sapiens
taaaagaatatggat

SEQ ID NO: 1875788 - DNA, 15 bp, Homo sapiens
aaaagaatatggatg

SEQ ID NO: 1875789 - DNA, 15 bp, Homo sapiens
aaagaatatggatgc

SEQ ID NO: 1875790 - DNA, 15 bp, Homo sapiens
aagaatatggatgca

SEQ ID NO: 1875791 - DNA, 15 bp, Homo sapiens
agaatatggatgcag

SEQ ID NO: 1875792 - DNA, 15 bp, Homo sapiens
gaatatggatgcagg

SEQ ID NO: 1875793 - DNA, 15 bp, Homo sapiens
aatatggatgcaggc

SEQ ID NO: 1875794 - DNA, 15 bp, Homo sapiens
atatggatgcaggca

SEQ ID NO: 1875795 - DNA, 15 bp, Homo sapiens
tatggatgcaggcaa

SEQ ID NO: 1875796 - DNA, 15 bp, Homo sapiens
atggatgcaggcaat

SEQ ID NO: 1875797 - DNA, 15 bp, Homo sapiens
tggatgcaggcaatt

SEQ ID NO: 1875798 - DNA, 15 bp, Homo sapiens
ggatgcaggcaattg

SEQ ID NO: 1875799 - DNA, 15 bp, Homo sapiens
gatgcaggcaattga

SEQ ID NO: 1875800 - DNA, 15 bp, Homo sapiens
atgcaggcaattgaa

SEQ ID NO: 1875801 - DNA, 15 bp, Homo sapiens
tgcaggcaattgaag

SEQ ID NO: 1875802 - DNA, 15 bp, Homo sapiens
gcaggcaattgaagc

SEQ ID NO: 1875803 - DNA, 15 bp, Homo sapiens
caggcaattgaagct

SEQ ID NO: 1875804 - DNA, 15 bp, Homo sapiens
aggcaattgaagctt

SEQ ID NO: 1875805 - DNA, 15 bp, Homo sapiens
ggcaattgaagctta

SEQ ID NO: 1875806 - DNA, 15 bp, Homo sapiens
gcaattgaagcttat

SEQ ID NO: 1875807 - DNA, 15 bp, Homo sapiens
caattgaagcttatg

SEQ ID NO: 1875808 - DNA, 15 bp, Homo sapiens
aattgaagcttatgc

SEQ ID NO: 1875809 - DNA, 15 bp, Homo sapiens
attgaagcttatgca

SEQ ID NO: 1875810 - DNA, 15 bp, Homo sapiens
ttgaagcttatgcac

SEQ ID NO: 1875811 - DNA, 15 bp, Homo sapiens
tgaagcttatgcact

SEQ ID NO: 1875812 - DNA, 15 bp, Homo sapiens
gaagcttatgcactg

SEQ ID NO: 1875813 - DNA, 15 bp, Homo sapiens
aagcttatgcactgg

SEQ ID NO: 1875814 - DNA, 15 bp, Homo sapiens
agcttatgcactggc

SEQ ID NO: 1875815 - DNA, 15 bp, Homo sapiens
gcttatgcactggca

SEQ ID NO: 1875816 - DNA, 15 bp, Homo sapiens
cttatgcactggcaa

SEQ ID NO: 1875817 - DNA, 15 bp, Homo sapiens
ttatgcactggcaaa

SEQ ID NO: 1875818 - DNA, 15 bp, Homo sapiens
tatgcactggcaaaa

SEQ ID NO: 1875819 - DNA, 15 bp, Homo sapiens
atgcactggcaaaat

SEQ ID NO: 1875820 - DNA, 15 bp, Homo sapiens
tgcactggcaaaatg

SEQ ID NO: 1875821 - DNA, 15 bp, Homo sapiens
agaggattttcaagg

SEQ ID NO: 1875822 - DNA, 15 bp, Homo sapiens
gaggattttcaaggt

SEQ ID NO: 1875823 - DNA, 15 bp, Homo sapiens
aggattttcaaggtg

SEQ ID NO: 1875824 - DNA, 15 bp, Homo sapiens
ggattttcaaggtgc

SEQ ID NO: 1875825 - DNA, 15 bp, Homo sapiens
gattttcaaggtgct

SEQ ID NO: 1875826 - DNA, 15 bp, Homo sapiens
attttcaaggtgctt

SEQ ID NO: 1875827 - DNA, 15 bp, Homo sapiens
ttttcaaggtgctta

SEQ ID NO: 1875828 - DNA, 15 bp, Homo sapiens
tttcaaggtgcttac

SEQ ID NO: 1875829 - DNA, 15 bp, Homo sapiens
ttcaaggtgcttaca

SEQ ID NO: 1875830 - DNA, 15 bp, Homo sapiens
tcaaggtgcttacaa

SEQ ID NO: 1875831 - DNA, 15 bp, Homo sapiens
caaggtgcttacaat

SEQ ID NO: 1875832 - DNA, 15 bp, Homo sapiens
aaggtgcttacaatt

SEQ ID NO: 1875833 - DNA, 15 bp, Homo sapiens
aggtgcttacaatta

SEQ ID NO: 1875834 - DNA, 15 bp, Homo sapiens
ggtgcttacaattat

SEQ ID NO: 1875835 - DNA, 15 bp, Homo sapiens
gtgcttacaattatg

SEQ ID NO: 1875836 - DNA, 15 bp, Homo sapiens
tgcttacaattatgt

SEQ ID NO: 1875837 - DNA, 15 bp, Homo sapiens
gcttacaattatgtt

SEQ ID NO: 1875838 - DNA, 15 bp, Homo sapiens
cttacaattatgtta

SEQ ID NO: 1875839 - DNA, 15 bp, Homo sapiens
ttacaattatgttaa

SEQ ID NO: 1875840 - DNA, 15 bp, Homo sapiens
tacaattatgttaac

SEQ ID NO: 1875841 - DNA, 15 bp, Homo sapiens
acaattatgttaaca

SEQ ID NO: 1875842 - DNA, 15 bp, Homo sapiens
caattatgttaacag

SEQ ID NO: 1875843 - DNA, 15 bp, Homo sapiens
aattatgttaacagc

SEQ ID NO: 1875844 - DNA, 15 bp, Homo sapiens
attatgttaacagca

SEQ ID NO: 1875845 - DNA, 15 bp, Homo sapiens
ttatgttaacagcat

SEQ ID NO: 1875846 - DNA, 15 bp, Homo sapiens
tatgttaacagcatg

SEQ ID NO: 1875847 - DNA, 15 bp, Homo sapiens
atgttaacagcatgg

SEQ ID NO: 1875848 - DNA, 15 bp, Homo sapiens
tgttaacagcatggc

SEQ ID NO: 1875849 - DNA, 15 bp, Homo sapiens
gttaacagcatggca

SEQ ID NO: 1875850 - DNA, 15 bp, Homo sapiens
ttaacagcatggcag

SEQ ID NO: 1875851 - DNA, 15 bp, Homo sapiens
taacagcatggcagg

SEQ ID NO: 1875852 - DNA, 15 bp, Homo sapiens
aacagcatggcagga

SEQ ID NO: 1875853 - DNA, 15 bp, Homo sapiens
acagcatggcaggat

SEQ ID NO: 1875854 - DNA, 15 bp, Homo sapiens
cagcatggcaggata

SEQ ID NO: 1875855 - DNA, 15 bp, Homo sapiens
agcatggcaggataa

SEQ ID NO: 1875856 - DNA, 15 bp, Homo sapiens
gcatggcaggataaa

SEQ ID NO: 1875857 - DNA, 15 bp, Homo sapiens
catggcaggataaag

SEQ ID NO: 1875858 - DNA, 15 bp, Homo sapiens
atggcaggataaagg

SEQ ID NO: 1875859 - DNA, 15 bp, Homo sapiens
tggcaggataaagga

SEQ ID NO: 1875860 - DNA, 15 bp, Homo sapiens
ggcaggataaaggaa

SEQ ID NO: 1875861 - DNA, 15 bp, Homo sapiens
gcaggataaaggaag

SEQ ID NO: 1875862 - DNA, 15 bp, Homo sapiens
caggataaaggaaga

SEQ ID NO: 1875863 - DNA, 15 bp, Homo sapiens
aggataaaggaagaa

SEQ ID NO: 1875864 - DNA, 15 bp, Homo sapiens
ggataaaggaagaaa

SEQ ID NO: 1875865 - DNA, 15 bp, Homo sapiens
gataaaggaagaaaa

SEQ ID NO: 1875866 - DNA, 15 bp, Homo sapiens
ataaaggaagaaaaa

SEQ ID NO: 1875867 - DNA, 15 bp, Homo sapiens
taaaggaagaaaaat

SEQ ID NO: 1875868 - DNA, 15 bp, Homo sapiens
aaaggaagaaaaatc

SEQ ID NO: 1875869 - DNA, 15 bp, Homo sapiens
aaggaagaaaaatca

SEQ ID NO: 1875870 - DNA, 15 bp, Homo sapiens
aggaagaaaaatcag

SEQ ID NO: 1875871 - DNA, 15 bp, Homo sapiens
ggaagaaaaatcagg

SEQ ID NO: 1875872 - DNA, 15 bp, Homo sapiens
gaagaaaaatcaggc

SEQ ID NO: 1875873 - DNA, 15 bp, Homo sapiens
aagaaaaatcaggcc

SEQ ID NO: 1875874 - DNA, 15 bp, Homo sapiens
agaaaaatcaggcca

SEQ ID NO: 1875875 - DNA, 15 bp, Homo sapiens
gaaaaatcaggccaa

SEQ ID NO: 1875876 - DNA, 15 bp, Homo sapiens
aaaaatcaggccaag

SEQ ID NO: 1875877 - DNA, 15 bp, Homo sapiens
aaaatcaggccaagg

SEQ ID NO: 1875878 - DNA, 15 bp, Homo sapiens
aaatcaggccaaggg

SEQ ID NO: 1875879 - DNA, 15 bp, Homo sapiens
aatcaggccaaggga

SEQ ID NO: 1875880 - DNA, 15 bp, Homo sapiens
atcaggccaagggaa

SEQ ID NO: 1875881 - DNA, 15 bp, Homo sapiens
tcaggccaagggaaa

SEQ ID NO: 1875882 - DNA, 15 bp, Homo sapiens
caggccaagggaaaa

SEQ ID NO: 1875883 - DNA, 15 bp, Homo sapiens
aggccaagggaaaat

SEQ ID NO: 1875884 - DNA, 15 bp, Homo sapiens
ggccaagggaaaata

SEQ ID NO: 1875885 - DNA, 15 bp, Homo sapiens
gccaagggaaaatat

SEQ ID NO: 1875886 - DNA, 15 bp, Homo sapiens
ccaagggaaaatatg

SEQ ID NO: 1875887 - DNA, 15 bp, Homo sapiens
caagggaaaatatgg

SEQ ID NO: 1875888 - DNA, 15 bp, Homo sapiens
aagggaaaatatggt

SEQ ID NO: 1875889 - DNA, 15 bp, Homo sapiens
agggaaaatatggtg

SEQ ID NO: 1875890 - DNA, 15 bp, Homo sapiens
gggaaaatatggtga

SEQ ID NO: 1875891 - DNA, 15 bp, Homo sapiens
ggaaaatatggtgaa

SEQ ID NO: 1875892 - DNA, 15 bp, Homo sapiens
gaaaatatggtgaaa

SEQ ID NO: 1875893 - DNA, 15 bp, Homo sapiens
aaaatatggtgaaaa

SEQ ID NO: 1875894 - DNA, 15 bp, Homo sapiens
aaatatggtgaaaag

SEQ ID NO: 1875895 - DNA, 15 bp, Homo sapiens
aatatggtgaaaaga

SEQ ID NO: 1875896 - DNA, 15 bp, Homo sapiens
atatggtgaaaagag

SEQ ID NO: 1875897 - DNA, 15 bp, Homo sapiens
tatggtgaaaagagt

SEQ ID NO: 1875898 - DNA, 15 bp, Homo sapiens
atggtgaaaagagtc

SEQ ID NO: 1875899 - DNA, 15 bp, Homo sapiens
tggtgaaaagagtca

SEQ ID NO: 1875900 - DNA, 15 bp, Homo sapiens
ggtgaaaagagtcag

SEQ ID NO: 1875901 - DNA, 15 bp, Homo sapiens
gtgaaaagagtcaga

SEQ ID NO: 1875902 - DNA, 15 bp, Homo sapiens
tgaaaagagtcagag

SEQ ID NO: 1875903 - DNA, 15 bp, Homo sapiens
gaaaagagtcagagg

SEQ ID NO: 1875904 - DNA, 15 bp, Homo sapiens
aaaagagtcagagga

SEQ ID NO: 1875905 - DNA, 15 bp, Homo sapiens
aaagagtcagaggaa

SEQ ID NO: 1875906 - DNA, 15 bp, Homo sapiens
aagagtcagaggaaa

SEQ ID NO: 1875907 - DNA, 15 bp, Homo sapiens
agagtcagaggaaaa

SEQ ID NO: 1875908 - DNA, 15 bp, Homo sapiens
gagtcagaggaaaaa

SEQ ID NO: 1875909 - DNA, 15 bp, Homo sapiens
agtcagaggaaaaag

SEQ ID NO: 1875910 - DNA, 15 bp, Homo sapiens
gtcagaggaaaaagg

SEQ ID NO: 1875911 - DNA, 15 bp, Homo sapiens
tcagaggaaaaagga

SEQ ID NO: 1875912 - DNA, 15 bp, Homo sapiens
cagaggaaaaaggag

SEQ ID NO: 1875913 - DNA, 15 bp, Homo sapiens
agaggaaaaaggagt

SEQ ID NO: 1875914 - DNA, 15 bp, Homo sapiens
gaggaaaaaggagtg

SEQ ID NO: 1875915 - DNA, 15 bp, Homo sapiens
aggaaaaaggagtga

SEQ ID NO: 1875916 - DNA, 15 bp, Homo sapiens
ggaaaaaggagtgag

SEQ ID NO: 1875917 - DNA, 15 bp, Homo sapiens
gaaaaaggagtgagt

SEQ ID NO: 1875918 - DNA, 15 bp, Homo sapiens
aaaaaggagtgagta

SEQ ID NO: 1875919 - DNA, 15 bp, Homo sapiens
aaaaggagtgagtat

SEQ ID NO: 1875920 - DNA, 15 bp, Homo sapiens
aaaggagtgagtatc

SEQ ID NO: 1875921 - DNA, 15 bp, Homo sapiens
aaggagtgagtatca

SEQ ID NO: 1875922 - DNA, 15 bp, Homo sapiens
aggagtgagtatcac

SEQ ID NO: 1875923 - DNA, 15 bp, Homo sapiens
ggagtgagtatcacc

SEQ ID NO: 1875924 - DNA, 15 bp, Homo sapiens
gagtgagtatcaccc

SEQ ID NO: 1875925 - DNA, 15 bp, Homo sapiens
agtgagtatcaccct

SEQ ID NO: 1875926 - DNA, 15 bp, Homo sapiens
gtgagtatcacccta

SEQ ID NO: 1875927 - DNA, 15 bp, Homo sapiens
tgagtatcaccctac

SEQ ID NO: 1875928 - DNA, 15 bp, Homo sapiens
gagtatcaccctaca

SEQ ID NO: 1875929 - DNA, 15 bp, Homo sapiens
agtatcaccctacac

SEQ ID NO: 1875930 - DNA, 15 bp, Homo sapiens
gtatcaccctacaca

SEQ ID NO: 1875931 - DNA, 15 bp, Homo sapiens
tatcaccctacacag

SEQ ID NO: 1875932 - DNA, 15 bp, Homo sapiens
atcaccctacacagc

SEQ ID NO: 1875933 - DNA, 15 bp, Homo sapiens
tcaccctacacagca

SEQ ID NO: 1875934 - DNA, 15 bp, Homo sapiens
caccctacacagcag

SEQ ID NO: 1875935 - DNA, 15 bp, Homo sapiens
accctacacagcagg

SEQ ID NO: 1875936 - DNA, 15 bp, Homo sapiens
ccctacacagcaggg

SEQ ID NO: 1875937 - DNA, 15 bp, Homo sapiens
cctacacagcaggga

SEQ ID NO: 1875938 - DNA, 15 bp, Homo sapiens
ctacacagcagggaa

SEQ ID NO: 1875939 - DNA, 15 bp, Homo sapiens
tacacagcagggaac

SEQ ID NO: 1875940 - DNA, 15 bp, Homo sapiens
acacagcagggaaca

SEQ ID NO: 1875941 - DNA, 15 bp, Homo sapiens
cacagcagggaacaa

SEQ ID NO: 1875942 - DNA, 15 bp, Homo sapiens
acagcagggaacaac

SEQ ID NO: 1875943 - DNA, 15 bp, Homo sapiens
cagcagggaacaact

SEQ ID NO: 1875944 - DNA, 15 bp, Homo sapiens
agcagggaacaactt

SEQ ID NO: 1875945 - DNA, 15 bp, Homo sapiens
gcagggaacaacttt

SEQ ID NO: 1875946 - DNA, 15 bp, Homo sapiens
cagggaacaacttta

SEQ ID NO: 1875947 - DNA, 15 bp, Homo sapiens
agggaacaactttac

SEQ ID NO: 1875948 - DNA, 15 bp, Homo sapiens
gggaacaactttacc

SEQ ID NO: 1875949 - DNA, 15 bp, Homo sapiens
ggaacaactttacca

SEQ ID NO: 1875950 - DNA, 15 bp, Homo sapiens
gaacaactttaccat

SEQ ID NO: 1875951 - DNA, 15 bp, Homo sapiens
aacaactttaccatg

SEQ ID NO: 1875952 - DNA, 15 bp, Homo sapiens
acaactttaccatgt

SEQ ID NO: 1875953 - DNA, 15 bp, Homo sapiens
caactttaccatgtt

SEQ ID NO: 1875954 - DNA, 15 bp, Homo sapiens
aactttaccatgttt

SEQ ID NO: 1875955 - DNA, 15 bp, Homo sapiens
actttaccatgtttt

SEQ ID NO: 1875956 - DNA, 15 bp, Homo sapiens
ctttaccatgttttt

SEQ ID NO: 1875957 - DNA, 15 bp, Homo sapiens
tttaccatgtttttt

SEQ ID NO: 1875958 - DNA, 15 bp, Homo sapiens
ttaccatgttttttg

SEQ ID NO: 1875959 - DNA, 15 bp, Homo sapiens
taccatgttttttgt

SEQ ID NO: 1875960 - DNA, 15 bp, Homo sapiens
accatgttttttgtc

SEQ ID NO: 1875961 - DNA, 15 bp, Homo sapiens
ccatgttttttgtcg

SEQ ID NO: 1875962 - DNA, 15 bp, Homo sapiens
catgttttttgtcgt

SEQ ID NO: 1875963 - DNA, 15 bp, Homo sapiens
atgttttttgtcgtg

SEQ ID NO: 1875964 - DNA, 15 bp, Homo sapiens
tgttttttgtcgtgt

SEQ ID NO: 1875965 - DNA, 15 bp, Homo sapiens
gttttttgtcgtgtc

SEQ ID NO: 1875966 - DNA, 15 bp, Homo sapiens
ttttttgtcgtgtct

SEQ ID NO: 1875967 - DNA, 15 bp, Homo sapiens
tttttgtcgtgtctt

SEQ ID NO: 1875968 - DNA, 15 bp, Homo sapiens
ttttgtcgtgtcttg

SEQ ID NO: 1875969 - DNA, 15 bp, Homo sapiens
tttgtcgtgtcttgt

SEQ ID NO: 1875970 - DNA, 15 bp, Homo sapiens
ttgtcgtgtcttgtt

SEQ ID NO: 1875971 - DNA, 15 bp, Homo sapiens
tgtcgtgtcttgttg

SEQ ID NO: 1875972 - DNA, 15 bp, Homo sapiens
gtcgtgtcttgttgt

SEQ ID NO: 1875973 - DNA, 15 bp, Homo sapiens
tcgtgtcttgttgtg

SEQ ID NO: 1875974 - DNA, 15 bp, Homo sapiens
cgtgtcttgttgtgt

SEQ ID NO: 1875975 - DNA, 15 bp, Homo sapiens
gtgtcttgttgtgtg

SEQ ID NO: 1875976 - DNA, 15 bp, Homo sapiens
tgtcttgttgtgtga

SEQ ID NO: 1875977 - DNA, 15 bp, Homo sapiens
gtcttgttgtgtgac

SEQ ID NO: 1875978 - DNA, 15 bp, Homo sapiens
tcttgttgtgtgacc

SEQ ID NO: 1875979 - DNA, 15 bp, Homo sapiens
cttgttgtgtgacca

SEQ ID NO: 1875980 - DNA, 15 bp, Homo sapiens
ttgttgtgtgaccat

SEQ ID NO: 1875981 - DNA, 15 bp, Homo sapiens
tgttgtgtgaccatt

SEQ ID NO: 1875982 - DNA, 15 bp, Homo sapiens
gttgtgtgaccattt

SEQ ID NO: 1875983 - DNA, 15 bp, Homo sapiens
ttgtgtgaccattta

SEQ ID NO: 1875984 - DNA, 15 bp, Homo sapiens
tgtgtgaccatttaa

SEQ ID NO: 1875985 - DNA, 15 bp, Homo sapiens
gtgtgaccatttaat

SEQ ID NO: 1875986 - DNA, 15 bp, Homo sapiens
tgtgaccatttaatt

SEQ ID NO: 1875987 - DNA, 15 bp, Homo sapiens
gtgaccatttaattg

SEQ ID NO: 1875988 - DNA, 15 bp, Homo sapiens
tgaccatttaattgt

SEQ ID NO: 1875989 - DNA, 15 bp, Homo sapiens
gaccatttaattgta

SEQ ID NO: 1875990 - DNA, 15 bp, Homo sapiens
accatttaattgtaa

SEQ ID NO: 1875991 - DNA, 15 bp, Homo sapiens
ccatttaattgtaat

SEQ ID NO: 1875992 - DNA, 15 bp, Homo sapiens
catttaattgtaata

SEQ ID NO: 1875993 - DNA, 15 bp, Homo sapiens
atttaattgtaatat

SEQ ID NO: 1875994 - DNA, 15 bp, Homo sapiens
tttaattgtaatatc

SEQ ID NO: 1875995 - DNA, 15 bp, Homo sapiens
ttaattgtaatatcg

SEQ ID NO: 1875996 - DNA, 15 bp, Homo sapiens
taattgtaatatcgg

SEQ ID NO: 1875997 - DNA, 15 bp, Homo sapiens
aattgtaatatcggc

SEQ ID NO: 1875998 - DNA, 15 bp, Homo sapiens
attgtaatatcggca

SEQ ID NO: 1875999 - DNA, 15 bp, Homo sapiens
ttgtaatatcggcat

SEQ ID NO: 1876000 - DNA, 15 bp, Homo sapiens
tgtaatatcggcatt

SEQ ID NO: 1876001 - DNA, 15 bp, Homo sapiens
gtaatatcggcattt

SEQ ID NO: 1876002 - DNA, 15 bp, Homo sapiens
taatatcggcattta

SEQ ID NO: 1876003 - DNA, 15 bp, Homo sapiens
aatatcggcatttac

SEQ ID NO: 1876004 - DNA, 15 bp, Homo sapiens
atatcggcatttact

SEQ ID NO: 1876005 - DNA, 15 bp, Homo sapiens
tatcggcatttactt

SEQ ID NO: 1876006 - DNA, 15 bp, Homo sapiens
atcggcatttacttt

SEQ ID NO: 1876007 - DNA, 15 bp, Homo sapiens
tcggcatttactttt

SEQ ID NO: 1876008 - DNA, 15 bp, Homo sapiens
cggcatttacttttg

SEQ ID NO: 1876009 - DNA, 15 bp, Homo sapiens
ggcatttacttttgc

SEQ ID NO: 1876010 - DNA, 15 bp, Homo sapiens
gcatttacttttgct

SEQ ID NO: 1876011 - DNA, 15 bp, Homo sapiens
catttacttttgctg

SEQ ID NO: 1876012 - DNA, 15 bp, Homo sapiens
atttacttttgctgt

SEQ ID NO: 1876013 - DNA, 15 bp, Homo sapiens
tttacttttgctgtt

SEQ ID NO: 1876014 - DNA, 15 bp, Homo sapiens
ttacttttgctgttg

SEQ ID NO: 1876015 - DNA, 15 bp, Homo sapiens
tacttttgctgttgt

SEQ ID NO: 1876016 - DNA, 15 bp, Homo sapiens
acttttgctgttgtt

SEQ ID NO: 1876017 - DNA, 15 bp, Homo sapiens
cttttgctgttgtta

SEQ ID NO: 1876018 - DNA, 15 bp, Homo sapiens
ttttgctgttgttat

SEQ ID NO: 1876019 - DNA, 15 bp, Homo sapiens
tttgctgttgttata

SEQ ID NO: 1876020 - DNA, 15 bp, Homo sapiens
ttgctgttgttatac

SEQ ID NO: 1876021 - DNA, 15 bp, Homo sapiens
tgctgttgttatact

SEQ ID NO: 1876022 - DNA, 15 bp, Homo sapiens
gctgttgttatactt

SEQ ID NO: 1876023 - DNA, 15 bp, Homo sapiens
ctgttgttatacttt

SEQ ID NO: 1876024 - DNA, 15 bp, Homo sapiens
tgttgttatactttg

SEQ ID NO: 1876025 - DNA, 15 bp, Homo sapiens
gttgttatactttgt

SEQ ID NO: 1876026 - DNA, 15 bp, Homo sapiens
ttgttatactttgtc

SEQ ID NO: 1876027 - DNA, 15 bp, Homo sapiens
tgttatactttgtca

SEQ ID NO: 1876028 - DNA, 15 bp, Homo sapiens
gttatactttgtcat

SEQ ID NO: 1876029 - DNA, 15 bp, Homo sapiens
ttatactttgtcatc

SEQ ID NO: 1876030 - DNA, 15 bp, Homo sapiens
tatactttgtcatct

SEQ ID NO: 1876031 - DNA, 15 bp, Homo sapiens
atactttgtcatctc

SEQ ID NO: 1876032 - DNA, 15 bp, Homo sapiens
tactttgtcatctca

SEQ ID NO: 1876033 - DNA, 15 bp, Homo sapiens
actttgtcatctcaa

SEQ ID NO: 1876034 - DNA, 15 bp, Homo sapiens
ctttgtcatctcaac

SEQ ID NO: 1876035 - DNA, 15 bp, Homo sapiens
tttgtcatctcaact

SEQ ID NO: 1876036 - DNA, 15 bp, Homo sapiens
ttgtcatctcaactc

SEQ ID NO: 1876037 - DNA, 15 bp, Homo sapiens
tgtcatctcaactct

SEQ ID NO: 1876038 - DNA, 15 bp, Homo sapiens
gtcatctcaactcta

SEQ ID NO: 1876039 - DNA, 15 bp, Homo sapiens
tcatctcaactctac

SEQ ID NO: 1876040 - DNA, 15 bp, Homo sapiens
catctcaactctact

SEQ ID NO: 1876041 - DNA, 15 bp, Homo sapiens
atctcaactctacta

SEQ ID NO: 1876042 - DNA, 15 bp, Homo sapiens
tctcaactctactaa

SEQ ID NO: 1876043 - DNA, 15 bp, Homo sapiens
ctcaactctactaaa

SEQ ID NO: 1876044 - DNA, 15 bp, Homo sapiens
tcaactctactaaaa

SEQ ID NO: 1876045 - DNA, 15 bp, Homo sapiens
aactctactaaaaaa

SEQ ID NO: 1876046 - DNA, 15 bp, Homo sapiens
actctactaaaaaac

SEQ ID NO: 1876047 - DNA, 15 bp, Homo sapiens
ctctactaaaaaacc

SEQ ID NO: 1876048 - DNA, 15 bp, Homo sapiens
tctactaaaaaacct

SEQ ID NO: 1876049 - DNA, 15 bp, Homo sapiens
ctactaaaaaacctc

SEQ ID NO: 1876050 - DNA, 15 bp, Homo sapiens
tactaaaaaacctcc

SEQ ID NO: 1876051 - DNA, 15 bp, Homo sapiens
actaaaaaacctccc

SEQ ID NO: 1876052 - DNA, 15 bp, Homo sapiens
ctaaaaaacctccca

SEQ ID NO: 1876053 - DNA, 15 bp, Homo sapiens
taaaaaacctcccac

SEQ ID NO: 1876054 - DNA, 15 bp, Homo sapiens
aaaaaacctcccacc

SEQ ID NO: 1876055 - DNA, 15 bp, Homo sapiens
aaaaacctcccaccg

SEQ ID NO: 1876056 - DNA, 15 bp, Homo sapiens
aaaacctcccaccgt

SEQ ID NO: 1876057 - DNA, 15 bp, Homo sapiens
aaacctcccaccgtt

SEQ ID NO: 1876058 - DNA, 15 bp, Homo sapiens
aacctcccaccgtta

SEQ ID NO: 1876059 - DNA, 15 bp, Homo sapiens
acctcccaccgttat

SEQ ID NO: 1876060 - DNA, 15 bp, Homo sapiens
cctcccaccgttatt

SEQ ID NO: 1876061 - DNA, 15 bp, Homo sapiens
ctcccaccgttattt

SEQ ID NO: 1876062 - DNA, 15 bp, Homo sapiens
tcccaccgttatttc

SEQ ID NO: 1876063 - DNA, 15 bp, Homo sapiens
cccaccgttatttcc

SEQ ID NO: 1876064 - DNA, 15 bp, Homo sapiens
ccaccgttatttcct

SEQ ID NO: 1876065 - DNA, 15 bp, Homo sapiens
caccgttatttcctc

SEQ ID NO: 1876066 - DNA, 15 bp, Homo sapiens
accgttatttcctct

SEQ ID NO: 1876067 - DNA, 15 bp, Homo sapiens
ccgttatttcctctg

SEQ ID NO: 1876068 - DNA, 15 bp, Homo sapiens
cgttatttcctctgc

SEQ ID NO: 1876069 - DNA, 15 bp, Homo sapiens
gttatttcctctgcc

SEQ ID NO: 1876070 - DNA, 15 bp, Homo sapiens
ttatttcctctgcct

SEQ ID NO: 1876071 - DNA, 15 bp, Homo sapiens
tatttcctctgcctt

SEQ ID NO: 1876072 - DNA, 15 bp, Homo sapiens
atttcctctgccttt

SEQ ID NO: 1876073 - DNA, 15 bp, Homo sapiens
tttcctctgcctttt

SEQ ID NO: 1876074 - DNA, 15 bp, Homo sapiens
ttcctctgcctttta

SEQ ID NO: 1876075 - DNA, 15 bp, Homo sapiens
tcctctgccttttat

SEQ ID NO: 1876076 - DNA, 15 bp, Homo sapiens
cctctgccttttatt

SEQ ID NO: 1876077 - DNA, 15 bp, Homo sapiens
ctctgccttttatta

SEQ ID NO: 1876078 - DNA, 15 bp, Homo sapiens
tctgccttttattac

SEQ ID NO: 1876079 - DNA, 15 bp, Homo sapiens
ctgccttttattact

SEQ ID NO: 1876080 - DNA, 15 bp, Homo sapiens
tgccttttattactg

SEQ ID NO: 1876081 - DNA, 15 bp, Homo sapiens
gccttttattactgt

SEQ ID NO: 1876082 - DNA, 15 bp, Homo sapiens
ccttttattactgtc

SEQ ID NO: 1876083 - DNA, 15 bp, Homo sapiens
cttttattactgtct

SEQ ID NO: 1876084 - DNA, 15 bp, Homo sapiens
ttttattactgtctc

SEQ ID NO: 1876085 - DNA, 15 bp, Homo sapiens
tttattactgtctct

SEQ ID NO: 1876086 - DNA, 15 bp, Homo sapiens
ttattactgtctctc

SEQ ID NO: 1876087 - DNA, 15 bp, Homo sapiens
tattactgtctctca

SEQ ID NO: 1876088 - DNA, 15 bp, Homo sapiens
attactgtctctcat

SEQ ID NO: 1876089 - DNA, 15 bp, Homo sapiens
ttactgtctctcatt

SEQ ID NO: 1876090 - DNA, 15 bp, Homo sapiens
tactgtctctcattt

SEQ ID NO: 1876091 - DNA, 15 bp, Homo sapiens
actgtctctcattta

SEQ ID NO: 1876092 - DNA, 15 bp, Homo sapiens
ctgtctctcatttaa

SEQ ID NO: 1876093 - DNA, 15 bp, Homo sapiens
tgtctctcatttaaa

SEQ ID NO: 1876094 - DNA, 15 bp, Homo sapiens
gtctctcatttaaaa

SEQ ID NO: 1876095 - DNA, 15 bp, Homo sapiens
tctctcatttaaaac

SEQ ID NO: 1876096 - DNA, 15 bp, Homo sapiens
ctctcatttaaaaca

SEQ ID NO: 1876097 - DNA, 15 bp, Homo sapiens
tctcatttaaaacac

SEQ ID NO: 1876098 - DNA, 15 bp, Homo sapiens
ctcatttaaaacaca

SEQ ID NO: 1876099 - DNA, 15 bp, Homo sapiens
tcatttaaaacacat

SEQ ID NO: 1876100 - DNA, 15 bp, Homo sapiens
catttaaaacacatc

SEQ ID NO: 1876101 - DNA, 15 bp, Homo sapiens
atttaaaacacatct

SEQ ID NO: 1876102 - DNA, 15 bp, Homo sapiens
tttaaaacacatctt

SEQ ID NO: 1876103 - DNA, 15 bp, Homo sapiens
ttaaaacacatcttt

SEQ ID NO: 1876104 - DNA, 15 bp, Homo sapiens
taaaacacatctttc

SEQ ID NO: 1876105 - DNA, 15 bp, Homo sapiens
aaaacacatctttca

SEQ ID NO: 1876106 - DNA, 15 bp, Homo sapiens
aaacacatctttcac

SEQ ID NO: 1876107 - DNA, 15 bp, Homo sapiens
aacacatctttcact

SEQ ID NO: 1876108 - DNA, 15 bp, Homo sapiens
acacatctttcactt

SEQ ID NO: 1876109 - DNA, 15 bp, Homo sapiens
cacatctttcacttt

SEQ ID NO: 1876110 - DNA, 15 bp, Homo sapiens
acatctttcactttc

SEQ ID NO: 1876111 - DNA, 15 bp, Homo sapiens
catctttcactttct

SEQ ID NO: 1876112 - DNA, 15 bp, Homo sapiens
atctttcactttctg

SEQ ID NO: 1876113 - DNA, 15 bp, Homo sapiens
tctttcactttctgt

SEQ ID NO: 1876114 - DNA, 15 bp, Homo sapiens
ctttcactttctgtt

SEQ ID NO: 1876115 - DNA, 15 bp, Homo sapiens
tttcactttctgttc

SEQ ID NO: 1876116 - DNA, 15 bp, Homo sapiens
ttcactttctgttct

SEQ ID NO: 1876117 - DNA, 15 bp, Homo sapiens
tcactttctgttctg

SEQ ID NO: 1876118 - DNA, 15 bp, Homo sapiens
cactttctgttctgt

SEQ ID NO: 1876119 - DNA, 15 bp, Homo sapiens
actttctgttctgta

SEQ ID NO: 1876120 - DNA, 15 bp, Homo sapiens
ctttctgttctgtat

SEQ ID NO: 1876121 - DNA, 15 bp, Homo sapiens
tttctgttctgtatt

SEQ ID NO: 1876122 - DNA, 15 bp, Homo sapiens
ttctgttctgtattt

SEQ ID NO: 1876123 - DNA, 15 bp, Homo sapiens
tctgttctgtatttt

SEQ ID NO: 1876124 - DNA, 15 bp, Homo sapiens
ctgttctgtattttt

SEQ ID NO: 1876125 - DNA, 15 bp, Homo sapiens
tgttctgtatttttg

SEQ ID NO: 1876126 - DNA, 15 bp, Homo sapiens
gttctgtatttttgt

SEQ ID NO: 1876127 - DNA, 15 bp, Homo sapiens
ttctgtatttttgta

SEQ ID NO: 1876128 - DNA, 15 bp, Homo sapiens
tctgtatttttgtag

SEQ ID NO: 1876129 - DNA, 15 bp, Homo sapiens
ctgtatttttgtagt

SEQ ID NO: 1876130 - DNA, 15 bp, Homo sapiens
tgtatttttgtagtt

SEQ ID NO: 1876131 - DNA, 15 bp, Homo sapiens
gtatttttgtagttg

SEQ ID NO: 1876132 - DNA, 15 bp, Homo sapiens
tatttttgtagttga

SEQ ID NO: 1876133 - DNA, 15 bp, Homo sapiens
atttttgtagttgag

SEQ ID NO: 1876134 - DNA, 15 bp, Homo sapiens
tttttgtagttgagg

SEQ ID NO: 1876135 - DNA, 15 bp, Homo sapiens
ttttgtagttgagga

SEQ ID NO: 1876136 - DNA, 15 bp, Homo sapiens
tttgtagttgaggaa

SEQ ID NO: 1876137 - DNA, 15 bp, Homo sapiens
ttgtagttgaggaaa

SEQ ID NO: 1876138 - DNA, 15 bp, Homo sapiens
tgtagttgaggaaat

SEQ ID NO: 1876139 - DNA, 15 bp, Homo sapiens
gtagttgaggaaatc

SEQ ID NO: 1876140 - DNA, 15 bp, Homo sapiens
tagttgaggaaatct

SEQ ID NO: 1876141 - DNA, 15 bp, Homo sapiens
agttgaggaaatctg

SEQ ID NO: 1876142 - DNA, 15 bp, Homo sapiens
gttgaggaaatctgg

SEQ ID NO: 1876143 - DNA, 15 bp, Homo sapiens
ttgaggaaatctggc

SEQ ID NO: 1876144 - DNA, 15 bp, Homo sapiens
tgaggaaatctggca

SEQ ID NO: 1876145 - DNA, 15 bp, Homo sapiens
gaggaaatctggcat

SEQ ID NO: 1876146 - DNA, 15 bp, Homo sapiens
aggaaatctggcatc

SEQ ID NO: 1876147 - DNA, 15 bp, Homo sapiens
ggaaatctggcatcg

SEQ ID NO: 1876148 - DNA, 15 bp, Homo sapiens
gaaatctggcatcgc

SEQ ID NO: 1876149 - DNA, 15 bp, Homo sapiens
aaatctggcatcgct

SEQ ID NO: 1876150 - DNA, 15 bp, Homo sapiens
aatctggcatcgctt

SEQ ID NO: 1876151 - DNA, 15 bp, Homo sapiens
atctggcatcgcttt

SEQ ID NO: 1876152 - DNA, 15 bp, Homo sapiens
tctggcatcgctttt

SEQ ID NO: 1876153 - DNA, 15 bp, Homo sapiens
ctggcatcgcttttc

SEQ ID NO: 1876154 - DNA, 15 bp, Homo sapiens
tggcatcgcttttct

SEQ ID NO: 1876155 - DNA, 15 bp, Homo sapiens
ggcatcgcttttctg

SEQ ID NO: 1876156 - DNA, 15 bp, Homo sapiens
gcatcgcttttctgc

SEQ ID NO: 1876157 - DNA, 15 bp, Homo sapiens
catcgcttttctgca

SEQ ID NO: 1876158 - DNA, 15 bp, Homo sapiens
atcgcttttctgcag

SEQ ID NO: 1876159 - DNA, 15 bp, Homo sapiens
tcgcttttctgcagt

SEQ ID NO: 1876160 - DNA, 15 bp, Homo sapiens
cgcttttctgcagtg

SEQ ID NO: 1876161 - DNA, 15 bp, Homo sapiens
gcttttctgcagtga

SEQ ID NO: 1876162 - DNA, 15 bp, Homo sapiens
cttttctgcagtgaa

SEQ ID NO: 1876163 - DNA, 15 bp, Homo sapiens
ttttctgcagtgaag

SEQ ID NO: 1876164 - DNA, 15 bp, Homo sapiens
tttctgcagtgaagg

SEQ ID NO: 1876165 - DNA, 15 bp, Homo sapiens
ttctgcagtgaaggg

SEQ ID NO: 1876166 - DNA, 15 bp, Homo sapiens
tctgcagtgaaggga

SEQ ID NO: 1876167 - DNA, 15 bp, Homo sapiens
ctgcagtgaagggac

SEQ ID NO: 1876168 - DNA, 15 bp, Homo sapiens
tgcagtgaagggacc

SEQ ID NO: 1876169 - DNA, 15 bp, Homo sapiens
gcagtgaagggaccg

SEQ ID NO: 1876170 - DNA, 15 bp, Homo sapiens
cagtgaagggaccgt

SEQ ID NO: 1876171 - DNA, 15 bp, Homo sapiens
agtgaagggaccgtg

SEQ ID NO: 1876172 - DNA, 15 bp, Homo sapiens
gtgaagggaccgtgt

SEQ ID NO: 1876173 - DNA, 15 bp, Homo sapiens
tgaagggaccgtgtc

SEQ ID NO: 1876174 - DNA, 15 bp, Homo sapiens
gaagggaccgtgtct

SEQ ID NO: 1876175 - DNA, 15 bp, Homo sapiens
gttccagcagctgac

SEQ ID NO: 1876176 - DNA, 15 bp, Homo sapiens
ttccagcagctgaca

SEQ ID NO: 1876177 - DNA, 15 bp, Homo sapiens
tccagcagctgacag

SEQ ID NO: 1876178 - DNA, 15 bp, Homo sapiens
ccagcagctgacagc

SEQ ID NO: 1876179 - DNA, 15 bp, Homo sapiens
cagcagctgacagcc

SEQ ID NO: 1876180 - DNA, 15 bp, Homo sapiens
agcagctgacagccc

SEQ ID NO: 1876181 - DNA, 15 bp, Homo sapiens
gcagctgacagcccc

SEQ ID NO: 1876182 - DNA, 15 bp, Homo sapiens
cagctgacagccccc

SEQ ID NO: 1876183 - DNA, 15 bp, Homo sapiens
agctgacagccccct

SEQ ID NO: 1876184 - DNA, 15 bp, Homo sapiens
gctgacagccccctt

SEQ ID NO: 1876185 - DNA, 15 bp, Homo sapiens
ctgacagcccccttc

SEQ ID NO: 1876186 - DNA, 15 bp, Homo sapiens
tgacagcccccttct

SEQ ID NO: 1876187 - DNA, 15 bp, Homo sapiens
gacagcccccttctg

SEQ ID NO: 1876188 - DNA, 15 bp, Homo sapiens
acagcccccttctga

SEQ ID NO: 1876189 - DNA, 15 bp, Homo sapiens
cagcccccttctgac

SEQ ID NO: 1876190 - DNA, 15 bp, Homo sapiens
agcccccttctgact

SEQ ID NO: 1876191 - DNA, 15 bp, Homo sapiens
gcccccttctgactg

SEQ ID NO: 1876192 - DNA, 15 bp, Homo sapiens
cccccttctgactgg

SEQ ID NO: 1876193 - DNA, 15 bp, Homo sapiens
ccccttctgactggc

SEQ ID NO: 1876194 - DNA, 15 bp, Homo sapiens
cccttctgactggca

SEQ ID NO: 1876195 - DNA, 15 bp, Homo sapiens
ccttctgactggcaa

SEQ ID NO: 1876196 - DNA, 15 bp, Homo sapiens
cttctgactggcaat

SEQ ID NO: 1876197 - DNA, 15 bp, Homo sapiens
ttctgactggcaatg

SEQ ID NO: 1876198 - DNA, 15 bp, Homo sapiens
tctgactggcaatgg

SEQ ID NO: 1876199 - DNA, 15 bp, Homo sapiens
ctgactggcaatggg

SEQ ID NO: 1876200 - DNA, 15 bp, Homo sapiens
tgactggcaatgggt

SEQ ID NO: 1876201 - DNA, 15 bp, Homo sapiens
gactggcaatgggtc

SEQ ID NO: 1876202 - DNA, 15 bp, Homo sapiens
actggcaatgggtct

SEQ ID NO: 1876203 - DNA, 15 bp, Homo sapiens
ctggcaatgggtctc

SEQ ID NO: 1876204 - DNA, 15 bp, Homo sapiens
tggcaatgggtctcc

SEQ ID NO: 1876205 - DNA, 15 bp, Homo sapiens
ggcaatgggtctccc

SEQ ID NO: 1876206 - DNA, 15 bp, Homo sapiens
gcaatgggtctccca

SEQ ID NO: 1876207 - DNA, 15 bp, Homo sapiens
caatgggtctcccac

SEQ ID NO: 1876208 - DNA, 15 bp, Homo sapiens
aatgggtctcccaca

SEQ ID NO: 1876209 - DNA, 15 bp, Homo sapiens
atgggtctcccacag

SEQ ID NO: 1876210 - DNA, 15 bp, Homo sapiens
tgggtctcccacagg

SEQ ID NO: 1876211 - DNA, 15 bp, Homo sapiens
gggtctcccacagga

SEQ ID NO: 1876212 - DNA, 15 bp, Homo sapiens
ggtctcccacaggat

SEQ ID NO: 1876213 - DNA, 15 bp, Homo sapiens
gtctcccacaggata

SEQ ID NO: 1876214 - DNA, 15 bp, Homo sapiens
tctcccacaggatac

SEQ ID NO: 1876215 - DNA, 15 bp, Homo sapiens
ctcccacaggatact

SEQ ID NO: 1876216 - DNA, 15 bp, Homo sapiens
tcccacaggatactt

SEQ ID NO: 1876217 - DNA, 15 bp, Homo sapiens
cccacaggatacttg

SEQ ID NO: 1876218 - DNA, 15 bp, Homo sapiens
ccacaggatacttgg

SEQ ID NO: 1876219 - DNA, 15 bp, Homo sapiens
cacaggatacttggg

SEQ ID NO: 1876220 - DNA, 15 bp, Homo sapiens
acaggatacttggga

SEQ ID NO: 1876221 - DNA, 15 bp, Homo sapiens
caggatacttgggag

SEQ ID NO: 1876222 - DNA, 15 bp, Homo sapiens
aggatacttgggagt

SEQ ID NO: 1876223 - DNA, 15 bp, Homo sapiens
ggatacttgggagtt

SEQ ID NO: 1876224 - DNA, 15 bp, Homo sapiens
gatacttgggagttg

SEQ ID NO: 1876225 - DNA, 15 bp, Homo sapiens
atacttgggagttga

SEQ ID NO: 1876226 - DNA, 15 bp, Homo sapiens
tacttgggagttgaa

SEQ ID NO: 1876227 - DNA, 15 bp, Homo sapiens
acttgggagttgaag

SEQ ID NO: 1876228 - DNA, 15 bp, Homo sapiens
cttgggagttgaagc

SEQ ID NO: 1876229 - DNA, 15 bp, Homo sapiens
ttgggagttgaagca

SEQ ID NO: 1876230 - DNA, 15 bp, Homo sapiens
tgggagttgaagcac

SEQ ID NO: 1876231 - DNA, 15 bp, Homo sapiens
gggagttgaagcaca

SEQ ID NO: 1876232 - DNA, 15 bp, Homo sapiens
ggagttgaagcacaa

SEQ ID NO: 1876233 - DNA, 15 bp, Homo sapiens
gagttgaagcacaac

SEQ ID NO: 1876234 - DNA, 15 bp, Homo sapiens
agttgaagcacaact

SEQ ID NO: 1876235 - DNA, 15 bp, Homo sapiens
gttgaagcacaactg

SEQ ID NO: 1876236 - DNA, 15 bp, Homo sapiens
ttgaagcacaactga

SEQ ID NO: 1876237 - DNA, 15 bp, Homo sapiens
tgaagcacaactgat

SEQ ID NO: 1876238 - DNA, 15 bp, Homo sapiens
gaagcacaactgatt

SEQ ID NO: 1876239 - DNA, 15 bp, Homo sapiens
aagcacaactgattt

SEQ ID NO: 1876240 - DNA, 15 bp, Homo sapiens
agcacaactgattta

SEQ ID NO: 1876241 - DNA, 15 bp, Homo sapiens
gcacaactgatttac

SEQ ID NO: 1876242 - DNA, 15 bp, Homo sapiens
cacaactgatttact

SEQ ID NO: 1876243 - DNA, 15 bp, Homo sapiens
acaactgatttacta

SEQ ID NO: 1876244 - DNA, 15 bp, Homo sapiens
caactgatttactaa

SEQ ID NO: 1876245 - DNA, 15 bp, Homo sapiens
aactgatttactaat

SEQ ID NO: 1876246 - DNA, 15 bp, Homo sapiens
actgatttactaata

SEQ ID NO: 1876247 - DNA, 15 bp, Homo sapiens
ctgatttactaatat

SEQ ID NO: 1876248 - DNA, 15 bp, Homo sapiens
tgatttactaatatg

SEQ ID NO: 1876249 - DNA, 15 bp, Homo sapiens
gatttactaatatgt

SEQ ID NO: 1876250 - DNA, 15 bp, Homo sapiens
atttactaatatgtt

SEQ ID NO: 1876251 - DNA, 15 bp, Homo sapiens
tttactaatatgttg

SEQ ID NO: 1876252 - DNA, 15 bp, Homo sapiens
ttactaatatgttga

SEQ ID NO: 1876253 - DNA, 15 bp, Homo sapiens
tactaatatgttgat

SEQ ID NO: 1876254 - DNA, 15 bp, Homo sapiens
actaatatgttgatg

SEQ ID NO: 1876255 - DNA, 15 bp, Homo sapiens
ctaatatgttgatga

SEQ ID NO: 1876256 - DNA, 15 bp, Homo sapiens
taatatgttgatgaa

SEQ ID NO: 1876257 - DNA, 15 bp, Homo sapiens
aatatgttgatgaac

SEQ ID NO: 1876258 - DNA, 15 bp, Homo sapiens
atatgttgatgaacc

SEQ ID NO: 1876259 - DNA, 15 bp, Homo sapiens
tatgttgatgaacct

SEQ ID NO: 1876260 - DNA, 15 bp, Homo sapiens
atgttgatgaacctg

SEQ ID NO: 1876261 - DNA, 15 bp, Homo sapiens
tgttgatgaacctgt

SEQ ID NO: 1876262 - DNA, 15 bp, Homo sapiens
gttgatgaacctgtt

SEQ ID NO: 1876263 - DNA, 15 bp, Homo sapiens
ttgatgaacctgtta

SEQ ID NO: 1876264 - DNA, 15 bp, Homo sapiens
tgatgaacctgttag

SEQ ID NO: 1876265 - DNA, 15 bp, Homo sapiens
gatgaacctgttagc

SEQ ID NO: 1876266 - DNA, 15 bp, Homo sapiens
atgaacctgttagcc

SEQ ID NO: 1876267 - DNA, 15 bp, Homo sapiens
tgaacctgttagcct

SEQ ID NO: 1876268 - DNA, 15 bp, Homo sapiens
gaacctgttagcctc

SEQ ID NO: 1876269 - DNA, 15 bp, Homo sapiens
aacctgttagcctct

SEQ ID NO: 1876270 - DNA, 15 bp, Homo sapiens
acctgttagcctctc

SEQ ID NO: 1876271 - DNA, 15 bp, Homo sapiens
cctgttagcctctcc

SEQ ID NO: 1876272 - DNA, 15 bp, Homo sapiens
ctgttagcctctccc

SEQ ID NO: 1876273 - DNA, 15 bp, Homo sapiens
tgttagcctctcccg

SEQ ID NO: 1876274 - DNA, 15 bp, Homo sapiens
gttagcctctcccgg

SEQ ID NO: 1876275 - DNA, 15 bp, Homo sapiens
ttagcctctcccggg

SEQ ID NO: 1876276 - DNA, 15 bp, Homo sapiens
tagcctctcccgggc

SEQ ID NO: 1876277 - DNA, 15 bp, Homo sapiens
agcctctcccgggcc

SEQ ID NO: 1876278 - DNA, 15 bp, Homo sapiens
gcctctcccgggcct

SEQ ID NO: 1876279 - DNA, 15 bp, Homo sapiens
cctctcccgggcctg

SEQ ID NO: 1876280 - DNA, 15 bp, Homo sapiens
ctctcccgggcctgc

SEQ ID NO: 1876281 - DNA, 15 bp, Homo sapiens
tctcccgggcctgct

SEQ ID NO: 1876282 - DNA, 15 bp, Homo sapiens
ctcccgggcctgctg

SEQ ID NO: 1876283 - DNA, 15 bp, Homo sapiens
tcccgggcctgctgc

SEQ ID NO: 1876284 - DNA, 15 bp, Homo sapiens
cccgggcctgctgca

SEQ ID NO: 1876285 - DNA, 15 bp, Homo sapiens
ccgggcctgctgcag

SEQ ID NO: 1876286 - DNA, 15 bp, Homo sapiens
cgggcctgctgcagc

SEQ ID NO: 1876287 - DNA, 15 bp, Homo sapiens
gggcctgctgcagcc

SEQ ID NO: 1876288 - DNA, 15 bp, Homo sapiens
ggcctgctgcagcct

SEQ ID NO: 1876289 - DNA, 15 bp, Homo sapiens
gcctgctgcagcctc

SEQ ID NO: 1876290 - DNA, 15 bp, Homo sapiens
cctgctgcagcctca

SEQ ID NO: 1876291 - DNA, 15 bp, Homo sapiens
ctgctgcagcctcac

SEQ ID NO: 1876292 - DNA, 15 bp, Homo sapiens
tgctgcagcctcact

SEQ ID NO: 1876293 - DNA, 15 bp, Homo sapiens
gctgcagcctcactc

SEQ ID NO: 1876294 - DNA, 15 bp, Homo sapiens
ctgcagcctcactct

SEQ ID NO: 1876295 - DNA, 15 bp, Homo sapiens
tgcagcctcactctt

SEQ ID NO: 1876296 - DNA, 15 bp, Homo sapiens
gcagcctcactcttc

SEQ ID NO: 1876297 - DNA, 15 bp, Homo sapiens
cagcctcactcttca

SEQ ID NO: 1876298 - DNA, 15 bp, Homo sapiens
agcctcactcttcac

SEQ ID NO: 1876299 - DNA, 15 bp, Homo sapiens
gcctcactcttcaca

SEQ ID NO: 1876300 - DNA, 15 bp, Homo sapiens
cctcactcttcacaa

SEQ ID NO: 1876301 - DNA, 15 bp, Homo sapiens
ctcactcttcacaac

SEQ ID NO: 1876302 - DNA, 15 bp, Homo sapiens
tcactcttcacaacg

SEQ ID NO: 1876303 - DNA, 15 bp, Homo sapiens
cactcttcacaacgc

SEQ ID NO: 1876304 - DNA, 15 bp, Homo sapiens
actcttcacaacgct

SEQ ID NO: 1876305 - DNA, 15 bp, Homo sapiens
ctcttcacaacgctg

SEQ ID NO: 1876306 - DNA, 15 bp, Homo sapiens
tcttcacaacgctga

SEQ ID NO: 1876307 - DNA, 15 bp, Homo sapiens
cttcacaacgctgaa

SEQ ID NO: 1876308 - DNA, 15 bp, Homo sapiens
ttcacaacgctgaag

SEQ ID NO: 1876309 - DNA, 15 bp, Homo sapiens
tcacaacgctgaagc

SEQ ID NO: 1876310 - DNA, 15 bp, Homo sapiens
cacaacgctgaagcg

SEQ ID NO: 1876311 - DNA, 15 bp, Homo sapiens
acaacgctgaagcga

SEQ ID NO: 1876312 - DNA, 15 bp, Homo sapiens
caacgctgaagcgat

SEQ ID NO: 1876313 - DNA, 15 bp, Homo sapiens
aacgctgaagcgatt

SEQ ID NO: 1876314 - DNA, 15 bp, Homo sapiens
acgctgaagcgattc

SEQ ID NO: 1876315 - DNA, 15 bp, Homo sapiens
cgctgaagcgattcc

SEQ ID NO: 1876316 - DNA, 15 bp, Homo sapiens
gctgaagcgattcca

SEQ ID NO: 1876317 - DNA, 15 bp, Homo sapiens
ctgaagcgattccag

SEQ ID NO: 1876318 - DNA, 15 bp, Homo sapiens
tgaagcgattccagg

SEQ ID NO: 1876319 - DNA, 15 bp, Homo sapiens
gaagcgattccaggc

SEQ ID NO: 1876320 - DNA, 15 bp, Homo sapiens
aagcgattccaggct

SEQ ID NO: 1876321 - DNA, 15 bp, Homo sapiens
agcgattccaggctg

SEQ ID NO: 1876322 - DNA, 15 bp, Homo sapiens
gcgattccaggctgg

SEQ ID NO: 1876323 - DNA, 15 bp, Homo sapiens
cgattccaggctgga

SEQ ID NO: 1876324 - DNA, 15 bp, Homo sapiens
gattccaggctggac

SEQ ID NO: 1876325 - DNA, 15 bp, Homo sapiens
attccaggctggact

SEQ ID NO: 1876326 - DNA, 15 bp, Homo sapiens
ttccaggctggactc

SEQ ID NO: 1876327 - DNA, 15 bp, Homo sapiens
tccaggctggactct

SEQ ID NO: 1876328 - DNA, 15 bp, Homo sapiens
ccaggctggactctt

SEQ ID NO: 1876329 - DNA, 15 bp, Homo sapiens
caggctggactctta

SEQ ID NO: 1876330 - DNA, 15 bp, Homo sapiens
aggctggactcttaa

SEQ ID NO: 1876331 - DNA, 15 bp, Homo sapiens
ggctggactcttaat

SEQ ID NO: 1876332 - DNA, 15 bp, Homo sapiens
gctggactcttaatc

SEQ ID NO: 1876333 - DNA, 15 bp, Homo sapiens
ctggactcttaatct

SEQ ID NO: 1876334 - DNA, 15 bp, Homo sapiens
tggactcttaatctg

SEQ ID NO: 1876335 - DNA, 15 bp, Homo sapiens
ggactcttaatctgg

SEQ ID NO: 1876336 - DNA, 15 bp, Homo sapiens
gactcttaatctggt

SEQ ID NO: 1876337 - DNA, 15 bp, Homo sapiens
actcttaatctggtg

SEQ ID NO: 1876338 - DNA, 15 bp, Homo sapiens
ctcttaatctggtga

SEQ ID NO: 1876339 - DNA, 15 bp, Homo sapiens
tcttaatctggtgaa

SEQ ID NO: 1876340 - DNA, 15 bp, Homo sapiens
cttaatctggtgaag

SEQ ID NO: 1876341 - DNA, 15 bp, Homo sapiens
ttaatctggtgaagc

SEQ ID NO: 1876342 - DNA, 15 bp, Homo sapiens
taatctggtgaagca

SEQ ID NO: 1876343 - DNA, 15 bp, Homo sapiens
aatctggtgaagcac

SEQ ID NO: 1876344 - DNA, 15 bp, Homo sapiens
atctggtgaagcacc

SEQ ID NO: 1876345 - DNA, 15 bp, Homo sapiens
tctggtgaagcacca

SEQ ID NO: 1876346 - DNA, 15 bp, Homo sapiens
ctggtgaagcaccat

SEQ ID NO: 1876347 - DNA, 15 bp, Homo sapiens
tggtgaagcaccatc

SEQ ID NO: 1876348 - DNA, 15 bp, Homo sapiens
ggtgaagcaccatct

SEQ ID NO: 1876349 - DNA, 15 bp, Homo sapiens
gtgaagcaccatcta

SEQ ID NO: 1876350 - DNA, 15 bp, Homo sapiens
tgaagcaccatctag

SEQ ID NO: 1876351 - DNA, 15 bp, Homo sapiens
gaagcaccatctaga

SEQ ID NO: 1876352 - DNA, 15 bp, Homo sapiens
aagcaccatctagag

SEQ ID NO: 1876353 - DNA, 15 bp, Homo sapiens
agcaccatctagaga

SEQ ID NO: 1876354 - DNA, 15 bp, Homo sapiens
gcaccatctagagac

SEQ ID NO: 1876355 - DNA, 15 bp, Homo sapiens
caccatctagagact

SEQ ID NO: 1876356 - DNA, 15 bp, Homo sapiens
accatctagagactg

SEQ ID NO: 1876357 - DNA, 15 bp, Homo sapiens
ccatctagagactgt

SEQ ID NO: 1876358 - DNA, 15 bp, Homo sapiens
catctagagactgtc

SEQ ID NO: 1876359 - DNA, 15 bp, Homo sapiens
atctagagactgtcc

SEQ ID NO: 1876360 - DNA, 15 bp, Homo sapiens
tctagagactgtccc

SEQ ID NO: 1876361 - DNA, 15 bp, Homo sapiens
ctagagactgtcccc

SEQ ID NO: 1876362 - DNA, 15 bp, Homo sapiens
tagagactgtcccca

SEQ ID NO: 1876363 - DNA, 15 bp, Homo sapiens
agagactgtccccac

SEQ ID NO: 1876364 - DNA, 15 bp, Homo sapiens
gagactgtccccacc

SEQ ID NO: 1876365 - DNA, 15 bp, Homo sapiens
agactgtccccacca

SEQ ID NO: 1876366 - DNA, 15 bp, Homo sapiens
gactgtccccaccat

SEQ ID NO: 1876367 - DNA, 15 bp, Homo sapiens
actgtccccaccatc

SEQ ID NO: 1876368 - DNA, 15 bp, Homo sapiens
ctgtccccaccatct

SEQ ID NO: 1876369 - DNA, 15 bp, Homo sapiens
tgtccccaccatctt

SEQ ID NO: 1876370 - DNA, 15 bp, Homo sapiens
gtccccaccatcttt

SEQ ID NO: 1876371 - DNA, 15 bp, Homo sapiens
tccccaccatctttc

SEQ ID NO: 1876372 - DNA, 15 bp, Homo sapiens
ccccaccatctttcc

SEQ ID NO: 1876373 - DNA, 15 bp, Homo sapiens
cccaccatctttccc

SEQ ID NO: 1876374 - DNA, 15 bp, Homo sapiens
ccaccatctttccca

SEQ ID NO: 1876375 - DNA, 15 bp, Homo sapiens
caccatctttcccat

SEQ ID NO: 1876376 - DNA, 15 bp, Homo sapiens
accatctttcccatc

SEQ ID NO: 1876377 - DNA, 15 bp, Homo sapiens
ccatctttcccatcc

SEQ ID NO: 1876378 - DNA, 15 bp, Homo sapiens
catctttcccatcct

SEQ ID NO: 1876379 - DNA, 15 bp, Homo sapiens
atctttcccatcctg

SEQ ID NO: 1876380 - DNA, 15 bp, Homo sapiens
tctttcccatcctgg

SEQ ID NO: 1876381 - DNA, 15 bp, Homo sapiens
ctttcccatcctggc

SEQ ID NO: 1876382 - DNA, 15 bp, Homo sapiens
tttcccatcctggct

SEQ ID NO: 1876383 - DNA, 15 bp, Homo sapiens
ttcccatcctggctc

SEQ ID NO: 1876384 - DNA, 15 bp, Homo sapiens
tcccatcctggctca

SEQ ID NO: 1876385 - DNA, 15 bp, Homo sapiens
cccatcctggctcaa

SEQ ID NO: 1876386 - DNA, 15 bp, Homo sapiens
ccatcctggctcaac

SEQ ID NO: 1876387 - DNA, 15 bp, Homo sapiens
catcctggctcaact

SEQ ID NO: 1876388 - DNA, 15 bp, Homo sapiens
atcctggctcaactc

SEQ ID NO: 1876389 - DNA, 15 bp, Homo sapiens
tcctggctcaactca

SEQ ID NO: 1876390 - DNA, 15 bp, Homo sapiens
cctggctcaactcaa

SEQ ID NO: 1876391 - DNA, 15 bp, Homo sapiens
ctggctcaactcaaa

SEQ ID NO: 1876392 - DNA, 15 bp, Homo sapiens
tggctcaactcaaac

SEQ ID NO: 1876393 - DNA, 15 bp, Homo sapiens
ggctcaactcaaacc

SEQ ID NO: 1876394 - DNA, 15 bp, Homo sapiens
gctcaactcaaaccc

SEQ ID NO: 1876395 - DNA, 15 bp, Homo sapiens
ctcaactcaaacccc

SEQ ID NO: 1876396 - DNA, 15 bp, Homo sapiens
tcaactcaaacccct

SEQ ID NO: 1876397 - DNA, 15 bp, Homo sapiens
caactcaaacccctt

SEQ ID NO: 1876398 - DNA, 15 bp, Homo sapiens
aactcaaaccccttc

SEQ ID NO: 1876399 - DNA, 15 bp, Homo sapiens
actcaaaccccttct

SEQ ID NO: 1876400 - DNA, 15 bp, Homo sapiens
ctcaaaccccttcta

SEQ ID NO: 1876401 - DNA, 15 bp, Homo sapiens
tcaaaccccttctac

SEQ ID NO: 1876402 - DNA, 15 bp, Homo sapiens
caaaccccttctaca

SEQ ID NO: 1876403 - DNA, 15 bp, Homo sapiens
aaaccccttctacat

SEQ ID NO: 1876404 - DNA, 15 bp, Homo sapiens
aaccccttctacatc

SEQ ID NO: 1876405 - DNA, 15 bp, Homo sapiens
accccttctacatct

SEQ ID NO: 1876406 - DNA, 15 bp, Homo sapiens
ccccttctacatctg

SEQ ID NO: 1876407 - DNA, 15 bp, Homo sapiens
cccttctacatctgc

SEQ ID NO: 1876408 - DNA, 15 bp, Homo sapiens
ccttctacatctgct

SEQ ID NO: 1876409 - DNA, 15 bp, Homo sapiens
cttctacatctgctc

SEQ ID NO: 1876410 - DNA, 15 bp, Homo sapiens
ttctacatctgctcc

SEQ ID NO: 1876411 - DNA, 15 bp, Homo sapiens
tctacatctgctcct

SEQ ID NO: 1876412 - DNA, 15 bp, Homo sapiens
ctacatctgctcctt

SEQ ID NO: 1876413 - DNA, 15 bp, Homo sapiens
tacatctgctccttt

SEQ ID NO: 1876414 - DNA, 15 bp, Homo sapiens
acatctgctcctttt

SEQ ID NO: 1876415 - DNA, 15 bp, Homo sapiens
catctgctcctttta

SEQ ID NO: 1876416 - DNA, 15 bp, Homo sapiens
atctgctccttttag

SEQ ID NO: 1876417 - DNA, 15 bp, Homo sapiens
tctgctccttttagg

SEQ ID NO: 1876418 - DNA, 15 bp, Homo sapiens
ctgctccttttaggg

SEQ ID NO: 1876419 - DNA, 15 bp, Homo sapiens
tgctccttttagggg

SEQ ID NO: 1876420 - DNA, 15 bp, Homo sapiens
gctccttttagggga

SEQ ID NO: 1876421 - DNA, 15 bp, Homo sapiens
ctccttttaggggaa

SEQ ID NO: 1876422 - DNA, 15 bp, Homo sapiens
tccttttaggggaaa

SEQ ID NO: 1876423 - DNA, 15 bp, Homo sapiens
ccttttaggggaaag

SEQ ID NO: 1876424 - DNA, 15 bp, Homo sapiens
cttttaggggaaaga

SEQ ID NO: 1876425 - DNA, 15 bp, Homo sapiens
ttttaggggaaagaa

SEQ ID NO: 1876426 - DNA, 15 bp, Homo sapiens
tttaggggaaagaac

SEQ ID NO: 1876427 - DNA, 15 bp, Homo sapiens
ttaggggaaagaaca

SEQ ID NO: 1876428 - DNA, 15 bp, Homo sapiens
taggggaaagaacac

SEQ ID NO: 1876429 - DNA, 15 bp, Homo sapiens
aggggaaagaacaca

SEQ ID NO: 1876430 - DNA, 15 bp, Homo sapiens
ggggaaagaacacag

SEQ ID NO: 1876431 - DNA, 15 bp, Homo sapiens
gggaaagaacacagc

SEQ ID NO: 1876432 - DNA, 15 bp, Homo sapiens
ggaaagaacacagct

SEQ ID NO: 1876433 - DNA, 15 bp, Homo sapiens
gaaagaacacagctc

SEQ ID NO: 1876434 - DNA, 15 bp, Homo sapiens
aaagaacacagctct

SEQ ID NO: 1876435 - DNA, 15 bp, Homo sapiens
aagaacacagctctc

SEQ ID NO: 1876436 - DNA, 15 bp, Homo sapiens
agaacacagctctcc

SEQ ID NO: 1876437 - DNA, 15 bp, Homo sapiens
gaacacagctctcca

SEQ ID NO: 1876438 - DNA, 15 bp, Homo sapiens
aacacagctctccaa

SEQ ID NO: 1876439 - DNA, 15 bp, Homo sapiens
acacagctctccaac

SEQ ID NO: 1876440 - DNA, 15 bp, Homo sapiens
cacagctctccaacc

SEQ ID NO: 1876441 - DNA, 15 bp, Homo sapiens
acagctctccaaccc

SEQ ID NO: 1876442 - DNA, 15 bp, Homo sapiens
cagctctccaaccca

SEQ ID NO: 1876443 - DNA, 15 bp, Homo sapiens
agctctccaacccac

SEQ ID NO: 1876444 - DNA, 15 bp, Homo sapiens
gctctccaacccact

SEQ ID NO: 1876445 - DNA, 15 bp, Homo sapiens
ctctccaacccactc

SEQ ID NO: 1876446 - DNA, 15 bp, Homo sapiens
tctccaacccactca

SEQ ID NO: 1876447 - DNA, 15 bp, Homo sapiens
ctccaacccactcag

SEQ ID NO: 1876448 - DNA, 15 bp, Homo sapiens
tccaacccactcaga

SEQ ID NO: 1876449 - DNA, 15 bp, Homo sapiens
ccaacccactcagac

SEQ ID NO: 1876450 - DNA, 15 bp, Homo sapiens
caacccactcagacc

SEQ ID NO: 1876451 - DNA, 15 bp, Homo sapiens
aacccactcagacct

SEQ ID NO: 1876452 - DNA, 15 bp, Homo sapiens
acccactcagaccta

SEQ ID NO: 1876453 - DNA, 15 bp, Homo sapiens
cccactcagacctag

SEQ ID NO: 1876454 - DNA, 15 bp, Homo sapiens
ccactcagacctagc

SEQ ID NO: 1876455 - DNA, 15 bp, Homo sapiens
cactcagacctagct

SEQ ID NO: 1876456 - DNA, 15 bp, Homo sapiens
actcagacctagctt

SEQ ID NO: 1876457 - DNA, 15 bp, Homo sapiens
ctcagacctagcttc

SEQ ID NO: 1876458 - DNA, 15 bp, Homo sapiens
tcagacctagcttca

SEQ ID NO: 1876459 - DNA, 15 bp, Homo sapiens
cagacctagcttcag

SEQ ID NO: 1876460 - DNA, 15 bp, Homo sapiens
agacctagcttcagg

SEQ ID NO: 1876461 - DNA, 15 bp, Homo sapiens
gacctagcttcaggt

SEQ ID NO: 1876462 - DNA, 15 bp, Homo sapiens
acctagcttcaggtc

SEQ ID NO: 1876463 - DNA, 15 bp, Homo sapiens
cctagcttcaggtcc

SEQ ID NO: 1876464 - DNA, 15 bp, Homo sapiens
ctagcttcaggtcct

SEQ ID NO: 1876465 - DNA, 15 bp, Homo sapiens
tagcttcaggtcctg

SEQ ID NO: 1876466 - DNA, 15 bp, Homo sapiens
agcttcaggtcctgc

SEQ ID NO: 1876467 - DNA, 15 bp, Homo sapiens
gcttcaggtcctgca

SEQ ID NO: 1876468 - DNA, 15 bp, Homo sapiens
cttcaggtcctgcaa

SEQ ID NO: 1876469 - DNA, 15 bp, Homo sapiens
ttcaggtcctgcaag

SEQ ID NO: 1876470 - DNA, 15 bp, Homo sapiens
tcaggtcctgcaagg

SEQ ID NO: 1876471 - DNA, 15 bp, Homo sapiens
caggtcctgcaaggt

SEQ ID NO: 1876472 - DNA, 15 bp, Homo sapiens
aggtcctgcaaggtc

SEQ ID NO: 1876473 - DNA, 15 bp, Homo sapiens
ggtcctgcaaggtct

SEQ ID NO: 1876474 - DNA, 15 bp, Homo sapiens
gtcctgcaaggtctc

SEQ ID NO: 1876475 - DNA, 15 bp, Homo sapiens
tcctgcaaggtctca

SEQ ID NO: 1876476 - DNA, 15 bp, Homo sapiens
cctgcaaggtctcag

SEQ ID NO: 1876477 - DNA, 15 bp, Homo sapiens
ctgcaaggtctcagc

SEQ ID NO: 1876478 - DNA, 15 bp, Homo sapiens
tgcaaggtctcagca

SEQ ID NO: 1876479 - DNA, 15 bp, Homo sapiens
gcaaggtctcagcaa

SEQ ID NO: 1876480 - DNA, 15 bp, Homo sapiens
caaggtctcagcaaa

SEQ ID NO: 1876481 - DNA, 15 bp, Homo sapiens
aaggtctcagcaaag

SEQ ID NO: 1876482 - DNA, 15 bp, Homo sapiens
aggtctcagcaaagt

SEQ ID NO: 1876483 - DNA, 15 bp, Homo sapiens
ggtctcagcaaagtc

SEQ ID NO: 1876484 - DNA, 15 bp, Homo sapiens
gtctcagcaaagtca

SEQ ID NO: 1876485 - DNA, 15 bp, Homo sapiens
tctcagcaaagtcac

SEQ ID NO: 1876486 - DNA, 15 bp, Homo sapiens
ctcagcaaagtcact

SEQ ID NO: 1876487 - DNA, 15 bp, Homo sapiens
tcagcaaagtcactt

SEQ ID NO: 1876488 - DNA, 15 bp, Homo sapiens
cagcaaagtcacttg

SEQ ID NO: 1876489 - DNA, 15 bp, Homo sapiens
agcaaagtcacttga

SEQ ID NO: 1876490 - DNA, 15 bp, Homo sapiens
gcaaagtcacttgac

SEQ ID NO: 1876491 - DNA, 15 bp, Homo sapiens
caaagtcacttgacc

SEQ ID NO: 1876492 - DNA, 15 bp, Homo sapiens
aaagtcacttgacct

SEQ ID NO: 1876493 - DNA, 15 bp, Homo sapiens
aagtcacttgacctt

SEQ ID NO: 1876494 - DNA, 15 bp, Homo sapiens
agtcacttgaccttt

SEQ ID NO: 1876495 - DNA, 15 bp, Homo sapiens
gtcacttgacctttc

SEQ ID NO: 1876496 - DNA, 15 bp, Homo sapiens
tcacttgacctttct

SEQ ID NO: 1876497 - DNA, 15 bp, Homo sapiens
cacttgacctttctg

SEQ ID NO: 1876498 - DNA, 15 bp, Homo sapiens
acttgacctttctga

SEQ ID NO: 1876499 - DNA, 15 bp, Homo sapiens
cttgacctttctgag

SEQ ID NO: 1876500 - DNA, 15 bp, Homo sapiens
ttgacctttctgagt

SEQ ID NO: 1876501 - DNA, 15 bp, Homo sapiens
tgacctttctgagtt

SEQ ID NO: 1876502 - DNA, 15 bp, Homo sapiens
gacctttctgagttt

SEQ ID NO: 1876503 - DNA, 15 bp, Homo sapiens
acctttctgagtttc

SEQ ID NO: 1876504 - DNA, 15 bp, Homo sapiens
cctttctgagtttct

SEQ ID NO: 1876505 - DNA, 15 bp, Homo sapiens
ctttctgagtttctc

SEQ ID NO: 1876506 - DNA, 15 bp, Homo sapiens
tttctgagtttctct

SEQ ID NO: 1876507 - DNA, 15 bp, Homo sapiens
ttctgagtttctctt

SEQ ID NO: 1876508 - DNA, 15 bp, Homo sapiens
tctgagtttctcttc

SEQ ID NO: 1876509 - DNA, 15 bp, Homo sapiens
ctgagtttctcttct

SEQ ID NO: 1876510 - DNA, 15 bp, Homo sapiens
tgagtttctcttctg

SEQ ID NO: 1876511 - DNA, 15 bp, Homo sapiens
gagtttctcttctgc

SEQ ID NO: 1876512 - DNA, 15 bp, Homo sapiens
agtttctcttctgcc

SEQ ID NO: 1876513 - DNA, 15 bp, Homo sapiens
gtttctcttctgcct

SEQ ID NO: 1876514 - DNA, 15 bp, Homo sapiens
tttctcttctgcctc

SEQ ID NO: 1876515 - DNA, 15 bp, Homo sapiens
ttctcttctgcctct

SEQ ID NO: 1876516 - DNA, 15 bp, Homo sapiens
tctcttctgcctctg

SEQ ID NO: 1876517 - DNA, 15 bp, Homo sapiens
ctcttctgcctctgc

SEQ ID NO: 1876518 - DNA, 15 bp, Homo sapiens
tcttctgcctctgca

SEQ ID NO: 1876519 - DNA, 15 bp, Homo sapiens
cttctgcctctgcaa

SEQ ID NO: 1876520 - DNA, 15 bp, Homo sapiens
ttctgcctctgcaaa

SEQ ID NO: 1876521 - DNA, 15 bp, Homo sapiens
tctgcctctgcaaaa

SEQ ID NO: 1876522 - DNA, 15 bp, Homo sapiens
ctgcctctgcaaaat

SEQ ID NO: 1876523 - DNA, 15 bp, Homo sapiens
tgcctctgcaaaatg

SEQ ID NO: 1876524 - DNA, 15 bp, Homo sapiens
gcctctgcaaaatga

SEQ ID NO: 1876525 - DNA, 15 bp, Homo sapiens
cctctgcaaaatgaa

SEQ ID NO: 1876526 - DNA, 15 bp, Homo sapiens
ctctgcaaaatgaag

SEQ ID NO: 1876527 - DNA, 15 bp, Homo sapiens
tctgcaaaatgaaga

SEQ ID NO: 1876528 - DNA, 15 bp, Homo sapiens
ctgcaaaatgaagac

SEQ ID NO: 1876529 - DNA, 15 bp, Homo sapiens
tgcaaaatgaagacg

SEQ ID NO: 1876530 - DNA, 15 bp, Homo sapiens
gcaaaatgaagacga

SEQ ID NO: 1876531 - DNA, 15 bp, Homo sapiens
caaaatgaagacgat

SEQ ID NO: 1876532 - DNA, 15 bp, Homo sapiens
aaaatgaagacgata

SEQ ID NO: 1876533 - DNA, 15 bp, Homo sapiens
aaatgaagacgatat

SEQ ID NO: 1876534 - DNA, 15 bp, Homo sapiens
aatgaagacgatatg

SEQ ID NO: 1876535 - DNA, 15 bp, Homo sapiens
atgaagacgatatgg

SEQ ID NO: 1876536 - DNA, 15 bp, Homo sapiens
tgaagacgatatgga

SEQ ID NO: 1876537 - DNA, 15 bp, Homo sapiens
gaagacgatatggat

SEQ ID NO: 1876538 - DNA, 15 bp, Homo sapiens
aagacgatatggata

SEQ ID NO: 1876539 - DNA, 15 bp, Homo sapiens
agacgatatggataa

SEQ ID NO: 1876540 - DNA, 15 bp, Homo sapiens
gacgatatggataag

SEQ ID NO: 1876541 - DNA, 15 bp, Homo sapiens
acgatatggataaga

SEQ ID NO: 1876542 - DNA, 15 bp, Homo sapiens
cgatatggataagaa

SEQ ID NO: 1876543 - DNA, 15 bp, Homo sapiens
gatatggataagaaa

SEQ ID NO: 1876544 - DNA, 15 bp, Homo sapiens
atatggataagaaag

SEQ ID NO: 1876545 - DNA, 15 bp, Homo sapiens
tatggataagaaagt

SEQ ID NO: 1876546 - DNA, 15 bp, Homo sapiens
atggataagaaagtc

SEQ ID NO: 1876547 - DNA, 15 bp, Homo sapiens
tggataagaaagtct

SEQ ID NO: 1876548 - DNA, 15 bp, Homo sapiens
ggataagaaagtctc

SEQ ID NO: 1876549 - DNA, 15 bp, Homo sapiens
gataagaaagtctca

SEQ ID NO: 1876550 - DNA, 15 bp, Homo sapiens
ataagaaagtctcag

SEQ ID NO: 1876551 - DNA, 15 bp, Homo sapiens
taagaaagtctcagg

SEQ ID NO: 1876552 - DNA, 15 bp, Homo sapiens
aagaaagtctcaggt

SEQ ID NO: 1876553 - DNA, 15 bp, Homo sapiens
agaaagtctcaggtt

SEQ ID NO: 1876554 - DNA, 15 bp, Homo sapiens
gaaagtctcaggttt

SEQ ID NO: 1876555 - DNA, 15 bp, Homo sapiens
aaagtctcaggtttg

SEQ ID NO: 1876556 - DNA, 15 bp, Homo sapiens
aagtctcaggtttgg

SEQ ID NO: 1876557 - DNA, 15 bp, Homo sapiens
agtctcaggtttggc

SEQ ID NO: 1876558 - DNA, 15 bp, Homo sapiens
gtctcaggtttggct

SEQ ID NO: 1876559 - DNA, 15 bp, Homo sapiens
tctcaggtttggctg

SEQ ID NO: 1876560 - DNA, 15 bp, Homo sapiens
ctcaggtttggctgc

SEQ ID NO: 1876561 - DNA, 15 bp, Homo sapiens
tcaggtttggctgct

SEQ ID NO: 1876562 - DNA, 15 bp, Homo sapiens
caggtttggctgctc

SEQ ID NO: 1876563 - DNA, 15 bp, Homo sapiens
aggtttggctgctcg

SEQ ID NO: 1876564 - DNA, 15 bp, Homo sapiens
ggtttggctgctcgt

SEQ ID NO: 1876565 - DNA, 15 bp, Homo sapiens
gtttggctgctcgtc

SEQ ID NO: 1876566 - DNA, 15 bp, Homo sapiens
tttggctgctcgtca

SEQ ID NO: 1876567 - DNA, 15 bp, Homo sapiens
ttggctgctcgtcag

SEQ ID NO: 1876568 - DNA, 15 bp, Homo sapiens
tggctgctcgtcaga

SEQ ID NO: 1876569 - DNA, 15 bp, Homo sapiens
ggctgctcgtcagaa

SEQ ID NO: 1876570 - DNA, 15 bp, Homo sapiens
gctgctcgtcagaat

SEQ ID NO: 1876571 - DNA, 15 bp, Homo sapiens
ctgctcgtcagaatc

SEQ ID NO: 1876572 - DNA, 15 bp, Homo sapiens
tgctcgtcagaatca

SEQ ID NO: 1876573 - DNA, 15 bp, Homo sapiens
gctcgtcagaatcac

SEQ ID NO: 1876574 - DNA, 15 bp, Homo sapiens
ctcgtcagaatcaca

SEQ ID NO: 1876575 - DNA, 15 bp, Homo sapiens
tcgtcagaatcacat

SEQ ID NO: 1876576 - DNA, 15 bp, Homo sapiens
cgtcagaatcacatc

SEQ ID NO: 1876577 - DNA, 15 bp, Homo sapiens
gtcagaatcacatca

SEQ ID NO: 1876578 - DNA, 15 bp, Homo sapiens
tcagaatcacatcag

SEQ ID NO: 1876579 - DNA, 15 bp, Homo sapiens
cagaatcacatcagg

SEQ ID NO: 1876580 - DNA, 15 bp, Homo sapiens
agaatcacatcaggg

SEQ ID NO: 1876581 - DNA, 15 bp, Homo sapiens
gaatcacatcaggga

SEQ ID NO: 1876582 - DNA, 15 bp, Homo sapiens
aatcacatcagggag

SEQ ID NO: 1876583 - DNA, 15 bp, Homo sapiens
atcacatcagggagc

SEQ ID NO: 1876584 - DNA, 15 bp, Homo sapiens
tcacatcagggagct

SEQ ID NO: 1876585 - DNA, 15 bp, Homo sapiens
cacatcagggagctt

SEQ ID NO: 1876586 - DNA, 15 bp, Homo sapiens
acatcagggagcttt

SEQ ID NO: 1876587 - DNA, 15 bp, Homo sapiens
catcagggagctttg

SEQ ID NO: 1876588 - DNA, 15 bp, Homo sapiens
atcagggagctttga

SEQ ID NO: 1876589 - DNA, 15 bp, Homo sapiens
tcagggagctttgaa

SEQ ID NO: 1876590 - DNA, 15 bp, Homo sapiens
cagggagctttgaaa

SEQ ID NO: 1876591 - DNA, 15 bp, Homo sapiens
agggagctttgaaaa

SEQ ID NO: 1876592 - DNA, 15 bp, Homo sapiens
gggagctttgaaaaa

SEQ ID NO: 1876593 - DNA, 15 bp, Homo sapiens
ggagctttgaaaaaa

SEQ ID NO: 1876594 - DNA, 15 bp, Homo sapiens
gagctttgaaaaaac

SEQ ID NO: 1876595 - DNA, 15 bp, Homo sapiens
agctttgaaaaaaca

SEQ ID NO: 1876596 - DNA, 15 bp, Homo sapiens
gctttgaaaaaacac

SEQ ID NO: 1876597 - DNA, 15 bp, Homo sapiens
ctttgaaaaaacacc

SEQ ID NO: 1876598 - DNA, 15 bp, Homo sapiens
tttgaaaaaacaccc

SEQ ID NO: 1876599 - DNA, 15 bp, Homo sapiens
ttgaaaaaacaccca

SEQ ID NO: 1876600 - DNA, 15 bp, Homo sapiens
tgaaaaaacacccag

SEQ ID NO: 1876601 - DNA, 15 bp, Homo sapiens
gaaaaaacacccagg

SEQ ID NO: 1876602 - DNA, 15 bp, Homo sapiens
aaaaaacacccaggg

SEQ ID NO: 1876603 - DNA, 15 bp, Homo sapiens
aaaaacacccagggc

SEQ ID NO: 1876604 - DNA, 15 bp, Homo sapiens
aaaacacccagggcc

SEQ ID NO: 1876605 - DNA, 15 bp, Homo sapiens
aaacacccagggcct

SEQ ID NO: 1876606 - DNA, 15 bp, Homo sapiens
aacacccagggcctg

SEQ ID NO: 1876607 - DNA, 15 bp, Homo sapiens
acacccagggcctgg

SEQ ID NO: 1876608 - DNA, 15 bp, Homo sapiens
cccagggcctgggcc

SEQ ID NO: 1876609 - DNA, 15 bp, Homo sapiens
ccagggcctgggcca

SEQ ID NO: 1876610 - DNA, 15 bp, Homo sapiens
cagggcctgggccaa

SEQ ID NO: 1876611 - DNA, 15 bp, Homo sapiens
agggcctgggccaaa

SEQ ID NO: 1876612 - DNA, 15 bp, Homo sapiens
gggcctgggccaaac

SEQ ID NO: 1876613 - DNA, 15 bp, Homo sapiens
ggcctgggccaaacc

SEQ ID NO: 1876614 - DNA, 15 bp, Homo sapiens
gcctgggccaaacca

SEQ ID NO: 1876615 - DNA, 15 bp, Homo sapiens
cctgggccaaaccac

SEQ ID NO: 1876616 - DNA, 15 bp, Homo sapiens
ctgggccaaaccacc

SEQ ID NO: 1876617 - DNA, 15 bp, Homo sapiens
tgggccaaaccaccc

SEQ ID NO: 1876618 - DNA, 15 bp, Homo sapiens
gggccaaaccaccca

SEQ ID NO: 1876619 - DNA, 15 bp, Homo sapiens
ggccaaaccacccaa

SEQ ID NO: 1876620 - DNA, 15 bp, Homo sapiens
gccaaaccacccaag

SEQ ID NO: 1876621 - DNA, 15 bp, Homo sapiens
ccaaaccacccaaga

SEQ ID NO: 1876622 - DNA, 15 bp, Homo sapiens
caaaccacccaagaa

SEQ ID NO: 1876623 - DNA, 15 bp, Homo sapiens
aaaccacccaagaag

SEQ ID NO: 1876624 - DNA, 15 bp, Homo sapiens
aaccacccaagaagt

SEQ ID NO: 1876625 - DNA, 15 bp, Homo sapiens
accacccaagaagtt

SEQ ID NO: 1876626 - DNA, 15 bp, Homo sapiens
ccacccaagaagttc

SEQ ID NO: 1876627 - DNA, 15 bp, Homo sapiens
cacccaagaagttct

SEQ ID NO: 1876628 - DNA, 15 bp, Homo sapiens
acccaagaagttctg

SEQ ID NO: 1876629 - DNA, 15 bp, Homo sapiens
cccaagaagttctga

SEQ ID NO: 1876630 - DNA, 15 bp, Homo sapiens
ccaagaagttctgat

SEQ ID NO: 1876631 - DNA, 15 bp, Homo sapiens
caagaagttctgatt

SEQ ID NO: 1876632 - DNA, 15 bp, Homo sapiens
aagaagttctgattc

SEQ ID NO: 1876633 - DNA, 15 bp, Homo sapiens
agaagttctgattca

SEQ ID NO: 1876634 - DNA, 15 bp, Homo sapiens
gaagttctgattcac

SEQ ID NO: 1876635 - DNA, 15 bp, Homo sapiens
aagttctgattcact

SEQ ID NO: 1876636 - DNA, 15 bp, Homo sapiens
agttctgattcactt

SEQ ID NO: 1876637 - DNA, 15 bp, Homo sapiens
gttctgattcacttg

SEQ ID NO: 1876638 - DNA, 15 bp, Homo sapiens
ttctgattcacttgc

SEQ ID NO: 1876639 - DNA, 15 bp, Homo sapiens
tctgattcacttgct

SEQ ID NO: 1876640 - DNA, 15 bp, Homo sapiens
ctgattcacttgctc

SEQ ID NO: 1876641 - DNA, 15 bp, Homo sapiens
tgattcacttgctct

SEQ ID NO: 1876642 - DNA, 15 bp, Homo sapiens
gattcacttgctctg

SEQ ID NO: 1876643 - DNA, 15 bp, Homo sapiens
attcacttgctctgg

SEQ ID NO: 1876644 - DNA, 15 bp, Homo sapiens
ttcacttgctctggg

SEQ ID NO: 1876645 - DNA, 15 bp, Homo sapiens
tcacttgctctgggg

SEQ ID NO: 1876646 - DNA, 15 bp, Homo sapiens
cacttgctctggggt

SEQ ID NO: 1876647 - DNA, 15 bp, Homo sapiens
acttgctctggggtg

SEQ ID NO: 1876648 - DNA, 15 bp, Homo sapiens
cttgctctggggtgt

SEQ ID NO: 1876649 - DNA, 15 bp, Homo sapiens
ttgctctggggtgta

SEQ ID NO: 1876650 - DNA, 15 bp, Homo sapiens
tgctctggggtgtag

SEQ ID NO: 1876651 - DNA, 15 bp, Homo sapiens
gctctggggtgtagc

SEQ ID NO: 1876652 - DNA, 15 bp, Homo sapiens
ctctggggtgtagct

SEQ ID NO: 1876653 - DNA, 15 bp, Homo sapiens
tctggggtgtagctt

SEQ ID NO: 1876654 - DNA, 15 bp, Homo sapiens
ctggggtgtagcttg

SEQ ID NO: 1876655 - DNA, 15 bp, Homo sapiens
tggggtgtagcttgg

SEQ ID NO: 1876656 - DNA, 15 bp, Homo sapiens
ggggtgtagcttgga

SEQ ID NO: 1876657 - DNA, 15 bp, Homo sapiens
gggtgtagcttggac

SEQ ID NO: 1876658 - DNA, 15 bp, Homo sapiens
ggtgtagcttggaca

SEQ ID NO: 1876659 - DNA, 15 bp, Homo sapiens
gtgtagcttggacac

SEQ ID NO: 1876660 - DNA, 15 bp, Homo sapiens
tgtagcttggacacg

SEQ ID NO: 1876661 - DNA, 15 bp, Homo sapiens
gtagcttggacacgg

SEQ ID NO: 1876662 - DNA, 15 bp, Homo sapiens
tagcttggacacggg

SEQ ID NO: 1876663 - DNA, 15 bp, Homo sapiens
agcttggacacggga

SEQ ID NO: 1876664 - DNA, 15 bp, Homo sapiens
gcttggacacgggaa

SEQ ID NO: 1876665 - DNA, 15 bp, Homo sapiens
cttggacacgggaat

SEQ ID NO: 1876666 - DNA, 15 bp, Homo sapiens
ttggacacgggaatc

SEQ ID NO: 1876667 - DNA, 15 bp, Homo sapiens
tggacacgggaatct

SEQ ID NO: 1876668 - DNA, 15 bp, Homo sapiens
ggacacgggaatctt

SEQ ID NO: 1876669 - DNA, 15 bp, Homo sapiens
gacacgggaatcttt

SEQ ID NO: 1876670 - DNA, 15 bp, Homo sapiens
acacgggaatctttt

SEQ ID NO: 1876671 - DNA, 15 bp, Homo sapiens
cacgggaatcttttt

SEQ ID NO: 1876672 - DNA, 15 bp, Homo sapiens
acgggaatcttttta

SEQ ID NO: 1876673 - DNA, 15 bp, Homo sapiens
cgggaatctttttag

SEQ ID NO: 1876674 - DNA, 15 bp, Homo sapiens
gggaatctttttaga

SEQ ID NO: 1876675 - DNA, 15 bp, Homo sapiens
ggaatctttttagaa

SEQ ID NO: 1876676 - DNA, 15 bp, Homo sapiens
gaatctttttagaag

SEQ ID NO: 1876677 - DNA, 15 bp, Homo sapiens
aatctttttagaagc

SEQ ID NO: 1876678 - DNA, 15 bp, Homo sapiens
atctttttagaagct

SEQ ID NO: 1876679 - DNA, 15 bp, Homo sapiens
tctttttagaagctc

SEQ ID NO: 1876680 - DNA, 15 bp, Homo sapiens
ctttttagaagctcc

SEQ ID NO: 1876681 - DNA, 15 bp, Homo sapiens
tttttagaagctccc

SEQ ID NO: 1876682 - DNA, 15 bp, Homo sapiens
ttttagaagctcccc

SEQ ID NO: 1876683 - DNA, 15 bp, Homo sapiens
tttagaagctcccca

SEQ ID NO: 1876684 - DNA, 15 bp, Homo sapiens
ttagaagctccccag

SEQ ID NO: 1876685 - DNA, 15 bp, Homo sapiens
tagaagctccccagg

SEQ ID NO: 1876686 - DNA, 15 bp, Homo sapiens
agaagctccccaggt

SEQ ID NO: 1876687 - DNA, 15 bp, Homo sapiens
gaagctccccaggtt

SEQ ID NO: 1876688 - DNA, 15 bp, Homo sapiens
ctccccaggttgttg

SEQ ID NO: 1876689 - DNA, 15 bp, Homo sapiens
tccccaggttgttgc

SEQ ID NO: 1876690 - DNA, 15 bp, Homo sapiens
ccccaggttgttgca

SEQ ID NO: 1876691 - DNA, 15 bp, Homo sapiens
cccaggttgttgcaa

SEQ ID NO: 1876692 - DNA, 15 bp, Homo sapiens
ccaggttgttgcaag

SEQ ID NO: 1876693 - DNA, 15 bp, Homo sapiens
caggttgttgcaaga

SEQ ID NO: 1876694 - DNA, 15 bp, Homo sapiens
aggttgttgcaagag

SEQ ID NO: 1876695 - DNA, 15 bp, Homo sapiens
ggttgttgcaagagt

SEQ ID NO: 1876696 - DNA, 15 bp, Homo sapiens
gttgttgcaagagta

SEQ ID NO: 1876697 - DNA, 15 bp, Homo sapiens
ttgttgcaagagtag

SEQ ID NO: 1876698 - DNA, 15 bp, Homo sapiens
tgttgcaagagtagc

SEQ ID NO: 1876699 - DNA, 15 bp, Homo sapiens
gttgcaagagtagcc

SEQ ID NO: 1876700 - DNA, 15 bp, Homo sapiens
ttgcaagagtagcca

SEQ ID NO: 1876701 - DNA, 15 bp, Homo sapiens
tgcaagagtagccaa

SEQ ID NO: 1876702 - DNA, 15 bp, Homo sapiens
gcaagagtagccaag

SEQ ID NO: 1876703 - DNA, 15 bp, Homo sapiens
caagagtagccaagg

SEQ ID NO: 1876704 - DNA, 15 bp, Homo sapiens
aagagtagccaaggt

SEQ ID NO: 1876705 - DNA, 15 bp, Homo sapiens
agagtagccaaggtt

SEQ ID NO: 1876706 - DNA, 15 bp, Homo sapiens
gagtagccaaggttg

SEQ ID NO: 1876707 - DNA, 15 bp, Homo sapiens
agtagccaaggttga

SEQ ID NO: 1876708 - DNA, 15 bp, Homo sapiens
gtagccaaggttgag

SEQ ID NO: 1876709 - DNA, 15 bp, Homo sapiens
tagccaaggttgaga

SEQ ID NO: 1876710 - DNA, 15 bp, Homo sapiens
caaggttgagaacca

SEQ ID NO: 1876711 - DNA, 15 bp, Homo sapiens
aaggttgagaaccag

SEQ ID NO: 1876712 - DNA, 15 bp, Homo sapiens
aggttgagaaccagt

SEQ ID NO: 1876713 - DNA, 15 bp, Homo sapiens
ggttgagaaccagtc

SEQ ID NO: 1876714 - DNA, 15 bp, Homo sapiens
gttgagaaccagtca

SEQ ID NO: 1876715 - DNA, 15 bp, Homo sapiens
ttgagaaccagtcat

SEQ ID NO: 1876716 - DNA, 15 bp, Homo sapiens
tgagaaccagtcata

SEQ ID NO: 1876717 - DNA, 15 bp, Homo sapiens
gagaaccagtcatat

SEQ ID NO: 1876718 - DNA, 15 bp, Homo sapiens
agaaccagtcatata

SEQ ID NO: 1876719 - DNA, 15 bp, Homo sapiens
gaaccagtcatatag

SEQ ID NO: 1876720 - DNA, 15 bp, Homo sapiens
aaccagtcatataga

SEQ ID NO: 1876721 - DNA, 15 bp, Homo sapiens
accagtcatatagat

SEQ ID NO: 1876722 - DNA, 15 bp, Homo sapiens
ccagtcatatagata

SEQ ID NO: 1876723 - DNA, 15 bp, Homo sapiens
cagtcatatagataa

SEQ ID NO: 1876724 - DNA, 15 bp, Homo sapiens
agtcatatagataat

SEQ ID NO: 1876725 - DNA, 15 bp, Homo sapiens
gtcatatagataatg

SEQ ID NO: 1876726 - DNA, 15 bp, Homo sapiens
tcatatagataatgt

SEQ ID NO: 1876727 - DNA, 15 bp, Homo sapiens
catatagataatgtc

SEQ ID NO: 1876728 - DNA, 15 bp, Homo sapiens
atatagataatgtct

SEQ ID NO: 1876729 - DNA, 15 bp, Homo sapiens
tatagataatgtcta

SEQ ID NO: 1876730 - DNA, 15 bp, Homo sapiens
atagataatgtctaa

SEQ ID NO: 1876731 - DNA, 15 bp, Homo sapiens
tagataatgtctaag

SEQ ID NO: 1876732 - DNA, 15 bp, Homo sapiens
agataatgtctaaga

SEQ ID NO: 1876733 - DNA, 15 bp, Homo sapiens
gataatgtctaagac

SEQ ID NO: 1876734 - DNA, 15 bp, Homo sapiens
ataatgtctaagacc

SEQ ID NO: 1876735 - DNA, 15 bp, Homo sapiens
taatgtctaagaccc

SEQ ID NO: 1876736 - DNA, 15 bp, Homo sapiens
aatgtctaagacccc

SEQ ID NO: 1876737 - DNA, 15 bp, Homo sapiens
atgtctaagacccca

SEQ ID NO: 1876738 - DNA, 15 bp, Homo sapiens
tgtctaagaccccat

SEQ ID NO: 1876739 - DNA, 15 bp, Homo sapiens
gtctaagaccccatc

SEQ ID NO: 1876740 - DNA, 15 bp, Homo sapiens
tctaagaccccatcc

SEQ ID NO: 1876741 - DNA, 15 bp, Homo sapiens
ctaagaccccatcca

SEQ ID NO: 1876742 - DNA, 15 bp, Homo sapiens
taagaccccatccag

SEQ ID NO: 1876743 - DNA, 15 bp, Homo sapiens
aagaccccatccagc

SEQ ID NO: 1876744 - DNA, 15 bp, Homo sapiens
agaccccatccagct

SEQ ID NO: 1876745 - DNA, 15 bp, Homo sapiens
gaccccatccagctt

SEQ ID NO: 1876746 - DNA, 15 bp, Homo sapiens
accccatccagcttc

SEQ ID NO: 1876747 - DNA, 15 bp, Homo sapiens
ccccatccagcttct

SEQ ID NO: 1876748 - DNA, 15 bp, Homo sapiens
cccatccagcttcta

SEQ ID NO: 1876749 - DNA, 15 bp, Homo sapiens
ccatccagcttctac

SEQ ID NO: 1876750 - DNA, 15 bp, Homo sapiens
catccagcttctaca

SEQ ID NO: 1876751 - DNA, 15 bp, Homo sapiens
atccagcttctacaa

SEQ ID NO: 1876752 - DNA, 15 bp, Homo sapiens
tccagcttctacaat

SEQ ID NO: 1876753 - DNA, 15 bp, Homo sapiens
ccagcttctacaatt

SEQ ID NO: 1876754 - DNA, 15 bp, Homo sapiens
cagcttctacaattc

SEQ ID NO: 1876755 - DNA, 15 bp, Homo sapiens
agcttctacaattcc

SEQ ID NO: 1876756 - DNA, 15 bp, Homo sapiens
gcttctacaattcct

SEQ ID NO: 1876757 - DNA, 15 bp, Homo sapiens
cttctacaattcctc

SEQ ID NO: 1876758 - DNA, 15 bp, Homo sapiens
ttctacaattcctcc

SEQ ID NO: 1876759 - DNA, 15 bp, Homo sapiens
tctacaattcctccc

SEQ ID NO: 1876760 - DNA, 15 bp, Homo sapiens
ctacaattcctccct

SEQ ID NO: 1876761 - DNA, 15 bp, Homo sapiens
tacaattcctccctg

SEQ ID NO: 1876762 - DNA, 15 bp, Homo sapiens
acaattcctccctgt

SEQ ID NO: 1876763 - DNA, 15 bp, Homo sapiens
caattcctccctgtg

SEQ ID NO: 1876764 - DNA, 15 bp, Homo sapiens
aattcctccctgtgt

SEQ ID NO: 1876765 - DNA, 15 bp, Homo sapiens
attcctccctgtgtc

SEQ ID NO: 1876766 - DNA, 15 bp, Homo sapiens
ttcctccctgtgtcc

SEQ ID NO: 1876767 - DNA, 15 bp, Homo sapiens
tcctccctgtgtccg

SEQ ID NO: 1876768 - DNA, 15 bp, Homo sapiens
cctccctgtgtccgg

SEQ ID NO: 1876769 - DNA, 15 bp, Homo sapiens
ctccctgtgtccggg

SEQ ID NO: 1876770 - DNA, 15 bp, Homo sapiens
tccctgtgtccgggg

SEQ ID NO: 1876771 - DNA, 15 bp, Homo sapiens
ccctgtgtccgggga

SEQ ID NO: 1876772 - DNA, 15 bp, Homo sapiens
cctgtgtccggggac

SEQ ID NO: 1876773 - DNA, 15 bp, Homo sapiens
ctgtgtccggggact

SEQ ID NO: 1876774 - DNA, 15 bp, Homo sapiens
tgtgtccggggactg

SEQ ID NO: 1876775 - DNA, 15 bp, Homo sapiens
gtgtccggggactgt

SEQ ID NO: 1876776 - DNA, 15 bp, Homo sapiens
tgtccggggactgtg

SEQ ID NO: 1876777 - DNA, 15 bp, Homo sapiens
gtccggggactgtgg

SEQ ID NO: 1876778 - DNA, 15 bp, Homo sapiens
tccggggactgtggg

SEQ ID NO: 1876779 - DNA, 15 bp, Homo sapiens
ccggggactgtgggg

SEQ ID NO: 1876780 - DNA, 15 bp, Homo sapiens
cggggactgtggggt

SEQ ID NO: 1876781 - DNA, 15 bp, Homo sapiens
ggggactgtggggtc

SEQ ID NO: 1876782 - DNA, 15 bp, Homo sapiens
gggactgtggggtca

SEQ ID NO: 1876783 - DNA, 15 bp, Homo sapiens
ggactgtggggtcat

SEQ ID NO: 1876784 - DNA, 15 bp, Homo sapiens
gactgtggggtcatg

SEQ ID NO: 1876785 - DNA, 15 bp, Homo sapiens
actgtggggtcatgt

SEQ ID NO: 1876786 - DNA, 15 bp, Homo sapiens
ctgtggggtcatgtg

SEQ ID NO: 1876787 - DNA, 15 bp, Homo sapiens
tgtggggtcatgtgc

SEQ ID NO: 1876788 - DNA, 15 bp, Homo sapiens
gtggggtcatgtgcc

SEQ ID NO: 1876789 - DNA, 15 bp, Homo sapiens
tggggtcatgtgcct

SEQ ID NO: 1876790 - DNA, 15 bp, Homo sapiens
ggggtcatgtgcctt

SEQ ID NO: 1876791 - DNA, 15 bp, Homo sapiens
gggtcatgtgccttt

SEQ ID NO: 1876792 - DNA, 15 bp, Homo sapiens
ggtcatgtgccttta

SEQ ID NO: 1876793 - DNA, 15 bp, Homo sapiens
gtcatgtgcctttat

SEQ ID NO: 1876794 - DNA, 15 bp, Homo sapiens
tcatgtgcctttatt

SEQ ID NO: 1876795 - DNA, 15 bp, Homo sapiens
catgtgcctttattg

SEQ ID NO: 1876796 - DNA, 15 bp, Homo sapiens
atgtgcctttattgc

SEQ ID NO: 1876797 - DNA, 15 bp, Homo sapiens
tgtgcctttattgct

SEQ ID NO: 1876798 - DNA, 15 bp, Homo sapiens
gtgcctttattgctg

SEQ ID NO: 1876799 - DNA, 15 bp, Homo sapiens
tgcctttattgctgg

SEQ ID NO: 1876800 - DNA, 15 bp, Homo sapiens
gcctttattgctgga

SEQ ID NO: 1876801 - DNA, 15 bp, Homo sapiens
cctttattgctggat

SEQ ID NO: 1876802 - DNA, 15 bp, Homo sapiens
ctttattgctggatg

SEQ ID NO: 1876803 - DNA, 15 bp, Homo sapiens
tttattgctggatgc

SEQ ID NO: 1876804 - DNA, 15 bp, Homo sapiens
ttattgctggatgct

SEQ ID NO: 1876805 - DNA, 15 bp, Homo sapiens
tattgctggatgctg

SEQ ID NO: 1876806 - DNA, 15 bp, Homo sapiens
attgctggatgctga

SEQ ID NO: 1876807 - DNA, 15 bp, Homo sapiens
ttgctggatgctgaa

SEQ ID NO: 1876808 - DNA, 15 bp, Homo sapiens
tgctggatgctgaag

SEQ ID NO: 1876809 - DNA, 15 bp, Homo sapiens
gctggatgctgaaga

SEQ ID NO: 1876810 - DNA, 15 bp, Homo sapiens
ctggatgctgaagac

SEQ ID NO: 1876811 - DNA, 15 bp, Homo sapiens
tggatgctgaagaca

SEQ ID NO: 1876812 - DNA, 15 bp, Homo sapiens
ggatgctgaagacaa

SEQ ID NO: 1876813 - DNA, 15 bp, Homo sapiens
gatgctgaagacaag

SEQ ID NO: 1876814 - DNA, 15 bp, Homo sapiens
atgctgaagacaaga

SEQ ID NO: 1876815 - DNA, 15 bp, Homo sapiens
tgctgaagacaagat

SEQ ID NO: 1876816 - DNA, 15 bp, Homo sapiens
gctgaagacaagatg

SEQ ID NO: 1876817 - DNA, 15 bp, Homo sapiens
ctgaagacaagatga

SEQ ID NO: 1876818 - DNA, 15 bp, Homo sapiens
tgaagacaagatgag

SEQ ID NO: 1876819 - DNA, 15 bp, Homo sapiens
gaagacaagatgagg

SEQ ID NO: 1876820 - DNA, 15 bp, Homo sapiens
aagacaagatgagga

SEQ ID NO: 1876821 - DNA, 15 bp, Homo sapiens
agacaagatgaggat

SEQ ID NO: 1876822 - DNA, 15 bp, Homo sapiens
gacaagatgaggatc

SEQ ID NO: 1876823 - DNA, 15 bp, Homo sapiens
acaagatgaggatcc

SEQ ID NO: 1876824 - DNA, 15 bp, Homo sapiens
caagatgaggatccc

SEQ ID NO: 1876825 - DNA, 15 bp, Homo sapiens
aagatgaggatccca

SEQ ID NO: 1876826 - DNA, 15 bp, Homo sapiens
agatgaggatcccag

SEQ ID NO: 1876827 - DNA, 15 bp, Homo sapiens
gatgaggatcccagt

SEQ ID NO: 1876828 - DNA, 15 bp, Homo sapiens
atgaggatcccagtc

SEQ ID NO: 1876829 - DNA, 15 bp, Homo sapiens
tgaggatcccagtcc

SEQ ID NO: 1876830 - DNA, 15 bp, Homo sapiens
gaggatcccagtcct

SEQ ID NO: 1876831 - DNA, 15 bp, Homo sapiens
aggatcccagtcctg

SEQ ID NO: 1876832 - DNA, 15 bp, Homo sapiens
ggatcccagtcctgg

SEQ ID NO: 1876833 - DNA, 15 bp, Homo sapiens
gatcccagtcctgga

SEQ ID NO: 1876834 - DNA, 15 bp, Homo sapiens
atcccagtcctggat

SEQ ID NO: 1876835 - DNA, 15 bp, Homo sapiens
tcccagtcctggatc

SEQ ID NO: 1876836 - DNA, 15 bp, Homo sapiens
cccagtcctggatcc

SEQ ID NO: 1876837 - DNA, 15 bp, Homo sapiens
ccagtcctggatccc

SEQ ID NO: 1876838 - DNA, 15 bp, Homo sapiens
cagtcctggatccct

SEQ ID NO: 1876839 - DNA, 15 bp, Homo sapiens
agtcctggatccctc

SEQ ID NO: 1876840 - DNA, 15 bp, Homo sapiens
gtcctggatccctct

SEQ ID NO: 1876841 - DNA, 15 bp, Homo sapiens
tcctggatccctcta

SEQ ID NO: 1876842 - DNA, 15 bp, Homo sapiens
cctggatccctctag

SEQ ID NO: 1876843 - DNA, 15 bp, Homo sapiens
ctggatccctctaga

SEQ ID NO: 1876844 - DNA, 15 bp, Homo sapiens
tggatccctctagag

SEQ ID NO: 1876845 - DNA, 15 bp, Homo sapiens
ggatccctctagagg

SEQ ID NO: 1876846 - DNA, 15 bp, Homo sapiens
gatccctctagaggc

SEQ ID NO: 1876847 - DNA, 15 bp, Homo sapiens
atccctctagaggct

SEQ ID NO: 1876848 - DNA, 15 bp, Homo sapiens
tccctctagaggctc

SEQ ID NO: 1876849 - DNA, 15 bp, Homo sapiens
ccctctagaggctcc

SEQ ID NO: 1876850 - DNA, 15 bp, Homo sapiens
cctctagaggctccc

SEQ ID NO: 1876851 - DNA, 15 bp, Homo sapiens
ctctagaggctccca

SEQ ID NO: 1876852 - DNA, 15 bp, Homo sapiens
tctagaggctcccag

SEQ ID NO: 1876853 - DNA, 15 bp, Homo sapiens
ctagaggctcccagg

SEQ ID NO: 1876854 - DNA, 15 bp, Homo sapiens
tagaggctcccaggg

SEQ ID NO: 1876855 - DNA, 15 bp, Homo sapiens
agaggctcccagggg

SEQ ID NO: 1876856 - DNA, 15 bp, Homo sapiens
gaggctcccagggga

SEQ ID NO: 1876857 - DNA, 15 bp, Homo sapiens
aggctcccaggggat

SEQ ID NO: 1876858 - DNA, 15 bp, Homo sapiens
ggctcccaggggata

SEQ ID NO: 1876859 - DNA, 15 bp, Homo sapiens
gctcccaggggataa

SEQ ID NO: 1876860 - DNA, 15 bp, Homo sapiens
ctcccaggggataat

SEQ ID NO: 1876861 - DNA, 15 bp, Homo sapiens
tcccaggggataatg

SEQ ID NO: 1876862 - DNA, 15 bp, Homo sapiens
cccaggggataatgg

SEQ ID NO: 1876863 - DNA, 15 bp, Homo sapiens
ccaggggataatggg

SEQ ID NO: 1876864 - DNA, 15 bp, Homo sapiens
caggggataatgggt

SEQ ID NO: 1876865 - DNA, 15 bp, Homo sapiens
aggggataatgggtt

SEQ ID NO: 1876866 - DNA, 15 bp, Homo sapiens
ggggataatgggttc

SEQ ID NO: 1876867 - DNA, 15 bp, Homo sapiens
gggataatgggttca

SEQ ID NO: 1876868 - DNA, 15 bp, Homo sapiens
ggataatgggttcaa

SEQ ID NO: 1876869 - DNA, 15 bp, Homo sapiens
gataatgggttcaaa

SEQ ID NO: 1876870 - DNA, 15 bp, Homo sapiens
ataatgggttcaaat

SEQ ID NO: 1876871 - DNA, 15 bp, Homo sapiens
taatgggttcaaatg

SEQ ID NO: 1876872 - DNA, 15 bp, Homo sapiens
aatgggttcaaatgg

SEQ ID NO: 1876873 - DNA, 15 bp, Homo sapiens
atgggttcaaatggg

SEQ ID NO: 1876874 - DNA, 15 bp, Homo sapiens
tgggttcaaatgggt

SEQ ID NO: 1876875 - DNA, 15 bp, Homo sapiens
gggttcaaatgggtg

SEQ ID NO: 1876876 - DNA, 15 bp, Homo sapiens
ggttcaaatgggtgt

SEQ ID NO: 1876877 - DNA, 15 bp, Homo sapiens
gttcaaatgggtgtt

SEQ ID NO: 1876878 - DNA, 15 bp, Homo sapiens
ttcaaatgggtgttc

SEQ ID NO: 1876879 - DNA, 15 bp, Homo sapiens
tcaaatgggtgttct

SEQ ID NO: 1876880 - DNA, 15 bp, Homo sapiens
caaatgggtgttctg

SEQ ID NO: 1876881 - DNA, 15 bp, Homo sapiens
aaatgggtgttctgt

SEQ ID NO: 1876882 - DNA, 15 bp, Homo sapiens
aatgggtgttctgtg

SEQ ID NO: 1876883 - DNA, 15 bp, Homo sapiens
atgggtgttctgtgt

SEQ ID NO: 1876884 - DNA, 15 bp, Homo sapiens
tgggtgttctgtgtg

SEQ ID NO: 1876885 - DNA, 15 bp, Homo sapiens
gggtgttctgtgtgt

SEQ ID NO: 1876886 - DNA, 15 bp, Homo sapiens
ggtgttctgtgtgtc

SEQ ID NO: 1876887 - DNA, 15 bp, Homo sapiens
gtgttctgtgtgtca

SEQ ID NO: 1876888 - DNA, 15 bp, Homo sapiens
tgttctgtgtgtcac

SEQ ID NO: 1876889 - DNA, 15 bp, Homo sapiens
gttctgtgtgtcacc

SEQ ID NO: 1876890 - DNA, 15 bp, Homo sapiens
ttctgtgtgtcaccc

SEQ ID NO: 1876891 - DNA, 15 bp, Homo sapiens
tctgtgtgtcaccca

SEQ ID NO: 1876892 - DNA, 15 bp, Homo sapiens
ctgtgtgtcacccag

SEQ ID NO: 1876893 - DNA, 15 bp, Homo sapiens
tgtgtgtcacccagt

SEQ ID NO: 1876894 - DNA, 15 bp, Homo sapiens
gtgtgtcacccagtt

SEQ ID NO: 1876895 - DNA, 15 bp, Homo sapiens
tgtgtcacccagttc

SEQ ID NO: 1876896 - DNA, 15 bp, Homo sapiens
gtgtcacccagttct

SEQ ID NO: 1876897 - DNA, 15 bp, Homo sapiens
tgtcacccagttctg

SEQ ID NO: 1876898 - DNA, 15 bp, Homo sapiens
gtcacccagttctga

SEQ ID NO: 1876899 - DNA, 15 bp, Homo sapiens
tcacccagttctgag

SEQ ID NO: 1876900 - DNA, 15 bp, Homo sapiens
cacccagttctgaga

SEQ ID NO: 1876901 - DNA, 15 bp, Homo sapiens
acccagttctgagat

SEQ ID NO: 1876902 - DNA, 15 bp, Homo sapiens
cccagttctgagatg

SEQ ID NO: 1876903 - DNA, 15 bp, Homo sapiens
ccagttctgagatgt

SEQ ID NO: 1876904 - DNA, 15 bp, Homo sapiens
cagttctgagatgtg

SEQ ID NO: 1876905 - DNA, 15 bp, Homo sapiens
agttctgagatgtgt

SEQ ID NO: 1876906 - DNA, 15 bp, Homo sapiens
gttctgagatgtgta

SEQ ID NO: 1876907 - DNA, 15 bp, Homo sapiens
ttctgagatgtgtat

SEQ ID NO: 1876908 - DNA, 15 bp, Homo sapiens
tctgagatgtgtatg

SEQ ID NO: 1876909 - DNA, 15 bp, Homo sapiens
ctgagatgtgtatgt

SEQ ID NO: 1876910 - DNA, 15 bp, Homo sapiens
tgagatgtgtatgtg

SEQ ID NO: 1876911 - DNA, 15 bp, Homo sapiens
gagatgtgtatgtgt

SEQ ID NO: 1876912 - DNA, 15 bp, Homo sapiens
agatgtgtatgtgtg

SEQ ID NO: 1876913 - DNA, 15 bp, Homo sapiens
gatgtgtatgtgtgc

SEQ ID NO: 1876914 - DNA, 15 bp, Homo sapiens
atgtgtatgtgtgca

SEQ ID NO: 1876915 - DNA, 15 bp, Homo sapiens
tgtgtatgtgtgcat

SEQ ID NO: 1876916 - DNA, 15 bp, Homo sapiens
gtgtatgtgtgcatg

SEQ ID NO: 1876917 - DNA, 15 bp, Homo sapiens
tgtatgtgtgcatgt

SEQ ID NO: 1876918 - DNA, 15 bp, Homo sapiens
gtatgtgtgcatgtg

SEQ ID NO: 1876919 - DNA, 15 bp, Homo sapiens
tatgtgtgcatgtgt

SEQ ID NO: 1876920 - DNA, 15 bp, Homo sapiens
tgtgcatgtgtgtgg

SEQ ID NO: 1876921 - DNA, 15 bp, Homo sapiens
gtgcatgtgtgtggt

SEQ ID NO: 1876922 - DNA, 15 bp, Homo sapiens
tgcatgtgtgtggtc

SEQ ID NO: 1876923 - DNA, 15 bp, Homo sapiens
gcatgtgtgtggtct

SEQ ID NO: 1876924 - DNA, 15 bp, Homo sapiens
catgtgtgtggtctc

SEQ ID NO: 1876925 - DNA, 15 bp, Homo sapiens
atgtgtgtggtctcc

SEQ ID NO: 1876926 - DNA, 15 bp, Homo sapiens
tgtgtgtggtctcct

SEQ ID NO: 1876927 - DNA, 15 bp, Homo sapiens
gtgtgtggtctcctc

SEQ ID NO: 1876928 - DNA, 15 bp, Homo sapiens
tgtgtggtctcctca

SEQ ID NO: 1876929 - DNA, 15 bp, Homo sapiens
gtgtggtctcctcag

SEQ ID NO: 1876930 - DNA, 15 bp, Homo sapiens
tgtggtctcctcagc

SEQ ID NO: 1876931 - DNA, 15 bp, Homo sapiens
gtggtctcctcagcg

SEQ ID NO: 1876932 - DNA, 15 bp, Homo sapiens
tggtctcctcagcgt

SEQ ID NO: 1876933 - DNA, 15 bp, Homo sapiens
ggtctcctcagcgtg

SEQ ID NO: 1876934 - DNA, 15 bp, Homo sapiens
gtctcctcagcgtgt

SEQ ID NO: 1876935 - DNA, 15 bp, Homo sapiens
tctcctcagcgtgtg

SEQ ID NO: 1876936 - DNA, 15 bp, Homo sapiens
ctcctcagcgtgtgg

SEQ ID NO: 1876937 - DNA, 15 bp, Homo sapiens
tcctcagcgtgtgga

SEQ ID NO: 1876938 - DNA, 15 bp, Homo sapiens
cctcagcgtgtggac

SEQ ID NO: 1876939 - DNA, 15 bp, Homo sapiens
ctcagcgtgtggacc

SEQ ID NO: 1876940 - DNA, 15 bp, Homo sapiens
tcagcgtgtggaccc

SEQ ID NO: 1876941 - DNA, 15 bp, Homo sapiens
cagcgtgtggaccca

SEQ ID NO: 1876942 - DNA, 15 bp, Homo sapiens
agcgtgtggacccag

SEQ ID NO: 1876943 - DNA, 15 bp, Homo sapiens
gcgtgtggacccagg

SEQ ID NO: 1876944 - DNA, 15 bp, Homo sapiens
cgtgtggacccagga

SEQ ID NO: 1876945 - DNA, 15 bp, Homo sapiens
gtgtggacccaggaa

SEQ ID NO: 1876946 - DNA, 15 bp, Homo sapiens
tgtggacccaggaat

SEQ ID NO: 1876947 - DNA, 15 bp, Homo sapiens
gtggacccaggaatc

SEQ ID NO: 1876948 - DNA, 15 bp, Homo sapiens
tggacccaggaatcc

SEQ ID NO: 1876949 - DNA, 15 bp, Homo sapiens
ggacccaggaatcca

SEQ ID NO: 1876950 - DNA, 15 bp, Homo sapiens
gacccaggaatccaa

SEQ ID NO: 1876951 - DNA, 15 bp, Homo sapiens
acccaggaatccaag

SEQ ID NO: 1876952 - DNA, 15 bp, Homo sapiens
cccaggaatccaagt

SEQ ID NO: 1876953 - DNA, 15 bp, Homo sapiens
ccaggaatccaagtg

SEQ ID NO: 1876954 - DNA, 15 bp, Homo sapiens
caggaatccaagtgc

SEQ ID NO: 1876955 - DNA, 15 bp, Homo sapiens
aggaatccaagtgcc

SEQ ID NO: 1876956 - DNA, 15 bp, Homo sapiens
ggaatccaagtgcca

SEQ ID NO: 1876957 - DNA, 15 bp, Homo sapiens
gaatccaagtgccac

SEQ ID NO: 1876958 - DNA, 15 bp, Homo sapiens
aatccaagtgccacc

SEQ ID NO: 1876959 - DNA, 15 bp, Homo sapiens
atccaagtgccacct

SEQ ID NO: 1876960 - DNA, 15 bp, Homo sapiens
tccaagtgccacctg

SEQ ID NO: 1876961 - DNA, 15 bp, Homo sapiens
ccaagtgccacctga

SEQ ID NO: 1876962 - DNA, 15 bp, Homo sapiens
caagtgccacctgat

SEQ ID NO: 1876963 - DNA, 15 bp, Homo sapiens
aagtgccacctgatt

SEQ ID NO: 1876964 - DNA, 15 bp, Homo sapiens
agtgccacctgattg

SEQ ID NO: 1876965 - DNA, 15 bp, Homo sapiens
gtgccacctgattga

SEQ ID NO: 1876966 - DNA, 15 bp, Homo sapiens
tgccacctgattgag

SEQ ID NO: 1876967 - DNA, 15 bp, Homo sapiens
gccacctgattgaga

SEQ ID NO: 1876968 - DNA, 15 bp, Homo sapiens
ccacctgattgagac

SEQ ID NO: 1876969 - DNA, 15 bp, Homo sapiens
cacctgattgagacc

SEQ ID NO: 1876970 - DNA, 15 bp, Homo sapiens
acctgattgagacca

SEQ ID NO: 1876971 - DNA, 15 bp, Homo sapiens
cctgattgagaccaa

SEQ ID NO: 1876972 - DNA, 15 bp, Homo sapiens
ctgattgagaccaac

SEQ ID NO: 1876973 - DNA, 15 bp, Homo sapiens
tgattgagaccaaca

SEQ ID NO: 1876974 - DNA, 15 bp, Homo sapiens
gattgagaccaacat

SEQ ID NO: 1876975 - DNA, 15 bp, Homo sapiens
attgagaccaacatc

SEQ ID NO: 1876976 - DNA, 15 bp, Homo sapiens
ttgagaccaacatca

SEQ ID NO: 1876977 - DNA, 15 bp, Homo sapiens
tgagaccaacatcag

SEQ ID NO: 1876978 - DNA, 15 bp, Homo sapiens
gagaccaacatcagg

SEQ ID NO: 1876979 - DNA, 15 bp, Homo sapiens
agaccaacatcaggg

SEQ ID NO: 1876980 - DNA, 15 bp, Homo sapiens
gaccaacatcaggga

SEQ ID NO: 1876981 - DNA, 15 bp, Homo sapiens
accaacatcagggac

SEQ ID NO: 1876982 - DNA, 15 bp, Homo sapiens
ccaacatcagggacc

SEQ ID NO: 1876983 - DNA, 15 bp, Homo sapiens
caacatcagggacca

SEQ ID NO: 1876984 - DNA, 15 bp, Homo sapiens
aacatcagggaccag

SEQ ID NO: 1876985 - DNA, 15 bp, Homo sapiens
acatcagggaccagg

SEQ ID NO: 1876986 - DNA, 15 bp, Homo sapiens
catcagggaccagga

SEQ ID NO: 1876987 - DNA, 15 bp, Homo sapiens
atcagggaccaggag

SEQ ID NO: 1876988 - DNA, 15 bp, Homo sapiens
tcagggaccaggagg

SEQ ID NO: 1876989 - DNA, 15 bp, Homo sapiens
cagggaccaggagga

SEQ ID NO: 1876990 - DNA, 15 bp, Homo sapiens
agggaccaggaggag

SEQ ID NO: 1876991 - DNA, 15 bp, Homo sapiens
gggaccaggaggagc

SEQ ID NO: 1876992 - DNA, 15 bp, Homo sapiens
ggaccaggaggagct

SEQ ID NO: 1876993 - DNA, 15 bp, Homo sapiens
gaccaggaggagctg

SEQ ID NO: 1876994 - DNA, 15 bp, Homo sapiens
accaggaggagctga

SEQ ID NO: 1876995 - DNA, 15 bp, Homo sapiens
ccaggaggagctgaa

SEQ ID NO: 1876996 - DNA, 15 bp, Homo sapiens
caggaggagctgaag

SEQ ID NO: 1876997 - DNA, 15 bp, Homo sapiens
aggaggagctgaagg

SEQ ID NO: 1876998 - DNA, 15 bp, Homo sapiens
ggaggagctgaaggg

SEQ ID NO: 1876999 - DNA, 15 bp, Homo sapiens
gaggagctgaagggc

SEQ ID NO: 1877000 - DNA, 15 bp, Homo sapiens
aggagctgaagggca

SEQ ID NO: 1877001 - DNA, 15 bp, Homo sapiens
ggagctgaagggcaa

SEQ ID NO: 1877002 - DNA, 15 bp, Homo sapiens
gagctgaagggcaag

SEQ ID NO: 1877003 - DNA, 15 bp, Homo sapiens
agctgaagggcaaga

SEQ ID NO: 1877004 - DNA, 15 bp, Homo sapiens
gctgaagggcaagaa

SEQ ID NO: 1877005 - DNA, 15 bp, Homo sapiens
ctgaagggcaagaag

SEQ ID NO: 1877006 - DNA, 15 bp, Homo sapiens
tgaagggcaagaagg

SEQ ID NO: 1877007 - DNA, 15 bp, Homo sapiens
gaagggcaagaaggt

SEQ ID NO: 1877008 - DNA, 15 bp, Homo sapiens
aagggcaagaaggtg

SEQ ID NO: 1877009 - DNA, 15 bp, Homo sapiens
agggcaagaaggtgc

SEQ ID NO: 1877010 - DNA, 15 bp, Homo sapiens
gggcaagaaggtgcc

SEQ ID NO: 1877011 - DNA, 15 bp, Homo sapiens
ggcaagaaggtgccc

SEQ ID NO: 1877012 - DNA, 15 bp, Homo sapiens
gcaagaaggtgcccc

SEQ ID NO: 1877013 - DNA, 15 bp, Homo sapiens
caagaaggtgcccca

SEQ ID NO: 1877014 - DNA, 15 bp, Homo sapiens
aagaaggtgccccag

SEQ ID NO: 1877015 - DNA, 15 bp, Homo sapiens
agaaggtgccccagt

SEQ ID NO: 1877016 - DNA, 15 bp, Homo sapiens
gaaggtgccccagta

SEQ ID NO: 1877017 - DNA, 15 bp, Homo sapiens
aaggtgccccagtac

SEQ ID NO: 1877018 - DNA, 15 bp, Homo sapiens
aggtgccccagtacc

SEQ ID NO: 1877019 - DNA, 15 bp, Homo sapiens
ggtgccccagtaccc

SEQ ID NO: 1877020 - DNA, 15 bp, Homo sapiens
gtgccccagtaccca

SEQ ID NO: 1877021 - DNA, 15 bp, Homo sapiens
tgccccagtacccat

SEQ ID NO: 1877022 - DNA, 15 bp, Homo sapiens
gccccagtacccatg

SEQ ID NO: 1877023 - DNA, 15 bp, Homo sapiens
ccccagtacccatgc

SEQ ID NO: 1877024 - DNA, 15 bp, Homo sapiens
cccagtacccatgcc

SEQ ID NO: 1877025 - DNA, 15 bp, Homo sapiens
ccagtacccatgcct

SEQ ID NO: 1877026 - DNA, 15 bp, Homo sapiens
cagtacccatgcctg

SEQ ID NO: 1877027 - DNA, 15 bp, Homo sapiens
agtacccatgcctgt

SEQ ID NO: 1877028 - DNA, 15 bp, Homo sapiens
gtacccatgcctgtg

SEQ ID NO: 1877029 - DNA, 15 bp, Homo sapiens
tacccatgcctgtgg

SEQ ID NO: 1877030 - DNA, 15 bp, Homo sapiens
acccatgcctgtggg

SEQ ID NO: 1877031 - DNA, 15 bp, Homo sapiens
cccatgcctgtgggt

SEQ ID NO: 1877032 - DNA, 15 bp, Homo sapiens
ccatgcctgtgggtc

SEQ ID NO: 1877033 - DNA, 15 bp, Homo sapiens
catgcctgtgggtca

SEQ ID NO: 1877034 - DNA, 15 bp, Homo sapiens
atgcctgtgggtcaa

SEQ ID NO: 1877035 - DNA, 15 bp, Homo sapiens
tgcctgtgggtcaac

SEQ ID NO: 1877036 - DNA, 15 bp, Homo sapiens
gcctgtgggtcaacg

SEQ ID NO: 1877037 - DNA, 15 bp, Homo sapiens
cctgtgggtcaacgt

SEQ ID NO: 1877038 - DNA, 15 bp, Homo sapiens
ctgtgggtcaacgtg

SEQ ID NO: 1877039 - DNA, 15 bp, Homo sapiens
tgtgggtcaacgtgt

SEQ ID NO: 1877040 - DNA, 15 bp, Homo sapiens
gtgggtcaacgtgtc

SEQ ID NO: 1877041 - DNA, 15 bp, Homo sapiens
tgggtcaacgtgtca

SEQ ID NO: 1877042 - DNA, 15 bp, Homo sapiens
gggtcaacgtgtcag

SEQ ID NO: 1877043 - DNA, 15 bp, Homo sapiens
ggtcaacgtgtcagc

SEQ ID NO: 1877044 - DNA, 15 bp, Homo sapiens
gtcaacgtgtcagct

SEQ ID NO: 1877045 - DNA, 15 bp, Homo sapiens
tcaacgtgtcagctg

SEQ ID NO: 1877046 - DNA, 15 bp, Homo sapiens
caacgtgtcagctgc

SEQ ID NO: 1877047 - DNA, 15 bp, Homo sapiens
aacgtgtcagctgcc

SEQ ID NO: 1877048 - DNA, 15 bp, Homo sapiens
acgtgtcagctgccg

SEQ ID NO: 1877049 - DNA, 15 bp, Homo sapiens
cgtgtcagctgccgg

SEQ ID NO: 1877050 - DNA, 15 bp, Homo sapiens
gtgtcagctgccggc

SEQ ID NO: 1877051 - DNA, 15 bp, Homo sapiens
tgtcagctgccggca

SEQ ID NO: 1877052 - DNA, 15 bp, Homo sapiens
gtcagctgccggcag

SEQ ID NO: 1877053 - DNA, 15 bp, Homo sapiens
tcagctgccggcagg

SEQ ID NO: 1877054 - DNA, 15 bp, Homo sapiens
cagctgccggcaggt

SEQ ID NO: 1877055 - DNA, 15 bp, Homo sapiens
agctgccggcaggtg

SEQ ID NO: 1877056 - DNA, 15 bp, Homo sapiens
gctgccggcaggtgg

SEQ ID NO: 1877057 - DNA, 15 bp, Homo sapiens
ctgccggcaggtggg

SEQ ID NO: 1877058 - DNA, 15 bp, Homo sapiens
tgccggcaggtgggc

SEQ ID NO: 1877059 - DNA, 15 bp, Homo sapiens
gccggcaggtgggct

SEQ ID NO: 1877060 - DNA, 15 bp, Homo sapiens
ccggcaggtgggctg

SEQ ID NO: 1877061 - DNA, 15 bp, Homo sapiens
cggcaggtgggctgt

SEQ ID NO: 1877062 - DNA, 15 bp, Homo sapiens
gcaggtgggctgtgc

SEQ ID NO: 1877063 - DNA, 15 bp, Homo sapiens
caggtgggctgtgct

SEQ ID NO: 1877064 - DNA, 15 bp, Homo sapiens
aggtgggctgtgctg

SEQ ID NO: 1877065 - DNA, 15 bp, Homo sapiens
ggtgggctgtgctgt

SEQ ID NO: 1877066 - DNA, 15 bp, Homo sapiens
gtgggctgtgctgta

SEQ ID NO: 1877067 - DNA, 15 bp, Homo sapiens
tgggctgtgctgtac

SEQ ID NO: 1877068 - DNA, 15 bp, Homo sapiens
gggctgtgctgtacc

SEQ ID NO: 1877069 - DNA, 15 bp, Homo sapiens
ggctgtgctgtacca

SEQ ID NO: 1877070 - DNA, 15 bp, Homo sapiens
gctgtgctgtaccac

SEQ ID NO: 1877071 - DNA, 15 bp, Homo sapiens
ctgtgctgtaccaca

SEQ ID NO: 1877072 - DNA, 15 bp, Homo sapiens
tgtgctgtaccacac

SEQ ID NO: 1877073 - DNA, 15 bp, Homo sapiens
gtgctgtaccacacg

SEQ ID NO: 1877074 - DNA, 15 bp, Homo sapiens
tgctgtaccacacgg

SEQ ID NO: 1877075 - DNA, 15 bp, Homo sapiens
gctgtaccacacgga

SEQ ID NO: 1877076 - DNA, 15 bp, Homo sapiens
ctgtaccacacggag

SEQ ID NO: 1877077 - DNA, 15 bp, Homo sapiens
tgtaccacacggagg

SEQ ID NO: 1877078 - DNA, 15 bp, Homo sapiens
gtaccacacggagga

SEQ ID NO: 1877079 - DNA, 15 bp, Homo sapiens
taccacacggaggac

SEQ ID NO: 1877080 - DNA, 15 bp, Homo sapiens
accacacggaggaca

SEQ ID NO: 1877081 - DNA, 15 bp, Homo sapiens
ccacacggaggacac

SEQ ID NO: 1877082 - DNA, 15 bp, Homo sapiens
cacacggaggacact

SEQ ID NO: 1877083 - DNA, 15 bp, Homo sapiens
acacggaggacactc

SEQ ID NO: 1877084 - DNA, 15 bp, Homo sapiens
cacggaggacactcg

SEQ ID NO: 1877085 - DNA, 15 bp, Homo sapiens
acggaggacactcgg

SEQ ID NO: 1877086 - DNA, 15 bp, Homo sapiens
cggaggacactcggg

SEQ ID NO: 1877087 - DNA, 15 bp, Homo sapiens
ggaggacactcggga

SEQ ID NO: 1877088 - DNA, 15 bp, Homo sapiens
gaggacactcgggac

SEQ ID NO: 1877089 - DNA, 15 bp, Homo sapiens
aggacactcgggacc

SEQ ID NO: 1877090 - DNA, 15 bp, Homo sapiens
ggacactcgggacca

SEQ ID NO: 1877091 - DNA, 15 bp, Homo sapiens
gacactcgggaccag

SEQ ID NO: 1877092 - DNA, 15 bp, Homo sapiens
acactcgggaccaga

SEQ ID NO: 1877093 - DNA, 15 bp, Homo sapiens
cactcgggaccagaa

SEQ ID NO: 1877094 - DNA, 15 bp, Homo sapiens
actcgggaccagaac

SEQ ID NO: 1877095 - DNA, 15 bp, Homo sapiens
ctcgggaccagaacc

SEQ ID NO: 1877096 - DNA, 15 bp, Homo sapiens
tcgggaccagaacca

SEQ ID NO: 1877097 - DNA, 15 bp, Homo sapiens
cgggaccagaaccag

SEQ ID NO: 1877098 - DNA, 15 bp, Homo sapiens
gggaccagaaccagc

SEQ ID NO: 1877099 - DNA, 15 bp, Homo sapiens
ggaccagaaccagca

SEQ ID NO: 1877100 - DNA, 15 bp, Homo sapiens
gaccagaaccagcag

SEQ ID NO: 1877101 - DNA, 15 bp, Homo sapiens
accagaaccagcagg

SEQ ID NO: 1877102 - DNA, 15 bp, Homo sapiens
ccagaaccagcaggt

SEQ ID NO: 1877103 - DNA, 15 bp, Homo sapiens
cagaaccagcaggta

SEQ ID NO: 1877104 - DNA, 15 bp, Homo sapiens
agaaccagcaggtac

SEQ ID NO: 1877105 - DNA, 15 bp, Homo sapiens
gaaccagcaggtact

SEQ ID NO: 1877106 - DNA, 15 bp, Homo sapiens
aaccagcaggtactg

SEQ ID NO: 1877107 - DNA, 15 bp, Homo sapiens
accagcaggtactga

SEQ ID NO: 1877108 - DNA, 15 bp, Homo sapiens
ccagcaggtactgaa

SEQ ID NO: 1877109 - DNA, 15 bp, Homo sapiens
cagcaggtactgaac

SEQ ID NO: 1877110 - DNA, 15 bp, Homo sapiens
agcaggtactgaact

SEQ ID NO: 1877111 - DNA, 15 bp, Homo sapiens
gcaggtactgaactg

SEQ ID NO: 1877112 - DNA, 15 bp, Homo sapiens
caggtactgaactgg

SEQ ID NO: 1877113 - DNA, 15 bp, Homo sapiens
aggtactgaactgga

SEQ ID NO: 1877114 - DNA, 15 bp, Homo sapiens
ggtactgaactggag

SEQ ID NO: 1877115 - DNA, 15 bp, Homo sapiens
gtactgaactggagg

SEQ ID NO: 1877116 - DNA, 15 bp, Homo sapiens
tactgaactggaggg

SEQ ID NO: 1877117 - DNA, 15 bp, Homo sapiens
actgaactggaggga

SEQ ID NO: 1877118 - DNA, 15 bp, Homo sapiens
ctgaactggagggat

SEQ ID NO: 1877119 - DNA, 15 bp, Homo sapiens
tgaactggagggatg

SEQ ID NO: 1877120 - DNA, 15 bp, Homo sapiens
gaactggagggatgg

SEQ ID NO: 1877121 - DNA, 15 bp, Homo sapiens
aactggagggatggg

SEQ ID NO: 1877122 - DNA, 15 bp, Homo sapiens
actggagggatgggg

SEQ ID NO: 1877123 - DNA, 15 bp, Homo sapiens
ctggagggatgggga

SEQ ID NO: 1877124 - DNA, 15 bp, Homo sapiens
tggagggatggggac

SEQ ID NO: 1877125 - DNA, 15 bp, Homo sapiens
ggagggatggggaca

SEQ ID NO: 1877126 - DNA, 15 bp, Homo sapiens
gagggatggggacac

SEQ ID NO: 1877127 - DNA, 15 bp, Homo sapiens
agggatggggacaca

SEQ ID NO: 1877128 - DNA, 15 bp, Homo sapiens
gggatggggacacat

SEQ ID NO: 1877129 - DNA, 15 bp, Homo sapiens
ggatggggacacatc

SEQ ID NO: 1877130 - DNA, 15 bp, Homo sapiens
gatggggacacatcc

SEQ ID NO: 1877131 - DNA, 15 bp, Homo sapiens
atggggacacatccc

SEQ ID NO: 1877132 - DNA, 15 bp, Homo sapiens
tggggacacatccct

SEQ ID NO: 1877133 - DNA, 15 bp, Homo sapiens
ggggacacatccctt

SEQ ID NO: 1877134 - DNA, 15 bp, Homo sapiens
gggacacatcccttt

SEQ ID NO: 1877135 - DNA, 15 bp, Homo sapiens
ggacacatcccttta

SEQ ID NO: 1877136 - DNA, 15 bp, Homo sapiens
gacacatccctttat

SEQ ID NO: 1877137 - DNA, 15 bp, Homo sapiens
acacatccctttatc

SEQ ID NO: 1877138 - DNA, 15 bp, Homo sapiens
cacatccctttatcc

SEQ ID NO: 1877139 - DNA, 15 bp, Homo sapiens
acatccctttatccc

SEQ ID NO: 1877140 - DNA, 15 bp, Homo sapiens
catccctttatccct

SEQ ID NO: 1877141 - DNA, 15 bp, Homo sapiens
atccctttatccctg

SEQ ID NO: 1877142 - DNA, 15 bp, Homo sapiens
tccctttatccctgt

SEQ ID NO: 1877143 - DNA, 15 bp, Homo sapiens
ccctttatccctgtc

SEQ ID NO: 1877144 - DNA, 15 bp, Homo sapiens
cctttatccctgtca

SEQ ID NO: 1877145 - DNA, 15 bp, Homo sapiens
ctttatccctgtcag

SEQ ID NO: 1877146 - DNA, 15 bp, Homo sapiens
tttatccctgtcagg

SEQ ID NO: 1877147 - DNA, 15 bp, Homo sapiens
ttatccctgtcaggt

SEQ ID NO: 1877148 - DNA, 15 bp, Homo sapiens
tatccctgtcaggtg

SEQ ID NO: 1877149 - DNA, 15 bp, Homo sapiens
atccctgtcaggtgt

SEQ ID NO: 1877150 - DNA, 15 bp, Homo sapiens
tccctgtcaggtgtg

SEQ ID NO: 1877151 - DNA, 15 bp, Homo sapiens
ccctgtcaggtgtgt

SEQ ID NO: 1877152 - DNA, 15 bp, Homo sapiens
cctgtcaggtgtgtg

SEQ ID NO: 1877153 - DNA, 15 bp, Homo sapiens
ctgtcaggtgtgtga

SEQ ID NO: 1877154 - DNA, 15 bp, Homo sapiens
tgtcaggtgtgtgag

SEQ ID NO: 1877155 - DNA, 15 bp, Homo sapiens
gtcaggtgtgtgagc

SEQ ID NO: 1877156 - DNA, 15 bp, Homo sapiens
tcaggtgtgtgagcc

SEQ ID NO: 1877157 - DNA, 15 bp, Homo sapiens
caggtgtgtgagcct

SEQ ID NO: 1877158 - DNA, 15 bp, Homo sapiens
aggtgtgtgagcctg

SEQ ID NO: 1877159 - DNA, 15 bp, Homo sapiens
ggtgtgtgagcctgt

SEQ ID NO: 1877160 - DNA, 15 bp, Homo sapiens
gtgtgtgagcctgtt

SEQ ID NO: 1877161 - DNA, 15 bp, Homo sapiens
tgtgtgagcctgttc

SEQ ID NO: 1877162 - DNA, 15 bp, Homo sapiens
gtgtgagcctgttcc

SEQ ID NO: 1877163 - DNA, 15 bp, Homo sapiens
tgtgagcctgttcct

SEQ ID NO: 1877164 - DNA, 15 bp, Homo sapiens
gtgagcctgttccta

SEQ ID NO: 1877165 - DNA, 15 bp, Homo sapiens
tgagcctgttcctaa

SEQ ID NO: 1877166 - DNA, 15 bp, Homo sapiens
gagcctgttcctaac

SEQ ID NO: 1877167 - DNA, 15 bp, Homo sapiens
agcctgttcctaact

SEQ ID NO: 1877168 - DNA, 15 bp, Homo sapiens
gcctgttcctaactg

SEQ ID NO: 1877169 - DNA, 15 bp, Homo sapiens
cctgttcctaactgt

SEQ ID NO: 1877170 - DNA, 15 bp, Homo sapiens
ctgttcctaactgtc

SEQ ID NO: 1877171 - DNA, 15 bp, Homo sapiens
tgttcctaactgtcc

SEQ ID NO: 1877172 - DNA, 15 bp, Homo sapiens
gttcctaactgtccc

SEQ ID NO: 1877173 - DNA, 15 bp, Homo sapiens
ttcctaactgtccct

SEQ ID NO: 1877174 - DNA, 15 bp, Homo sapiens
tcctaactgtccctg

SEQ ID NO: 1877175 - DNA, 15 bp, Homo sapiens
cctaactgtccctgt

SEQ ID NO: 1877176 - DNA, 15 bp, Homo sapiens
ctaactgtccctgtc

SEQ ID NO: 1877177 - DNA, 15 bp, Homo sapiens
taactgtccctgtcc

SEQ ID NO: 1877178 - DNA, 15 bp, Homo sapiens
aactgtccctgtccc

SEQ ID NO: 1877179 - DNA, 15 bp, Homo sapiens
actgtccctgtcccc

SEQ ID NO: 1877180 - DNA, 15 bp, Homo sapiens
ctgtccctgtccccg

SEQ ID NO: 1877181 - DNA, 15 bp, Homo sapiens
tgtccctgtccccga

SEQ ID NO: 1877182 - DNA, 15 bp, Homo sapiens
gtccctgtccccgag

SEQ ID NO: 1877183 - DNA, 15 bp, Homo sapiens
tccctgtccccgagg

SEQ ID NO: 1877184 - DNA, 15 bp, Homo sapiens
ccctgtccccgaggc

SEQ ID NO: 1877185 - DNA, 15 bp, Homo sapiens
cctgtccccgaggct

SEQ ID NO: 1877186 - DNA, 15 bp, Homo sapiens
ctgtccccgaggctg

SEQ ID NO: 1877187 - DNA, 15 bp, Homo sapiens
tgtccccgaggctga

SEQ ID NO: 1877188 - DNA, 15 bp, Homo sapiens
gtccccgaggctgag

SEQ ID NO: 1877189 - DNA, 15 bp, Homo sapiens
tccccgaggctgaga

SEQ ID NO: 1877190 - DNA, 15 bp, Homo sapiens
ccccgaggctgagaa

SEQ ID NO: 1877191 - DNA, 15 bp, Homo sapiens
cccgaggctgagaaa

SEQ ID NO: 1877192 - DNA, 15 bp, Homo sapiens
ccgaggctgagaaag

SEQ ID NO: 1877193 - DNA, 15 bp, Homo sapiens
cgaggctgagaaaga

SEQ ID NO: 1877194 - DNA, 15 bp, Homo sapiens
gaggctgagaaagat

SEQ ID NO: 1877195 - DNA, 15 bp, Homo sapiens
aggctgagaaagatc

SEQ ID NO: 1877196 - DNA, 15 bp, Homo sapiens
ggctgagaaagatca

SEQ ID NO: 1877197 - DNA, 15 bp, Homo sapiens
gctgagaaagatcaa

SEQ ID NO: 1877198 - DNA, 15 bp, Homo sapiens
ctgagaaagatcaac

SEQ ID NO: 1877199 - DNA, 15 bp, Homo sapiens
tgagaaagatcaacc

SEQ ID NO: 1877200 - DNA, 15 bp, Homo sapiens
gagaaagatcaaccc

SEQ ID NO: 1877201 - DNA, 15 bp, Homo sapiens
agaaagatcaaccca

SEQ ID NO: 1877202 - DNA, 15 bp, Homo sapiens
gaaagatcaacccac

SEQ ID NO: 1877203 - DNA, 15 bp, Homo sapiens
aaagatcaacccact

SEQ ID NO: 1877204 - DNA, 15 bp, Homo sapiens
aagatcaacccactt

SEQ ID NO: 1877205 - DNA, 15 bp, Homo sapiens
agatcaacccacttg

SEQ ID NO: 1877206 - DNA, 15 bp, Homo sapiens
gatcaacccacttga

SEQ ID NO: 1877207 - DNA, 15 bp, Homo sapiens
atcaacccacttgac

SEQ ID NO: 1877208 - DNA, 15 bp, Homo sapiens
tcaacccacttgacc

SEQ ID NO: 1877209 - DNA, 15 bp, Homo sapiens
caacccacttgacca

SEQ ID NO: 1877210 - DNA, 15 bp, Homo sapiens
aacccacttgaccag

SEQ ID NO: 1877211 - DNA, 15 bp, Homo sapiens
acccacttgaccagg

SEQ ID NO: 1877212 - DNA, 15 bp, Homo sapiens
cccacttgaccaggt

SEQ ID NO: 1877213 - DNA, 15 bp, Homo sapiens
ccacttgaccaggtc

SEQ ID NO: 1877214 - DNA, 15 bp, Homo sapiens
cacttgaccaggtct

SEQ ID NO: 1877215 - DNA, 15 bp, Homo sapiens
acttgaccaggtctc

SEQ ID NO: 1877216 - DNA, 15 bp, Homo sapiens
cttgaccaggtctca

SEQ ID NO: 1877217 - DNA, 15 bp, Homo sapiens
ttgaccaggtctcac

SEQ ID NO: 1877218 - DNA, 15 bp, Homo sapiens
tgaccaggtctcaca

SEQ ID NO: 1877219 - DNA, 15 bp, Homo sapiens
gaccaggtctcacag

SEQ ID NO: 1877220 - DNA, 15 bp, Homo sapiens
accaggtctcacagc

SEQ ID NO: 1877221 - DNA, 15 bp, Homo sapiens
ccaggtctcacagct

SEQ ID NO: 1877222 - DNA, 15 bp, Homo sapiens
caggtctcacagctg

SEQ ID NO: 1877223 - DNA, 15 bp, Homo sapiens
aggtctcacagctgg

SEQ ID NO: 1877224 - DNA, 15 bp, Homo sapiens
ggtctcacagctgga

SEQ ID NO: 1877225 - DNA, 15 bp, Homo sapiens
gtctcacagctggaa

SEQ ID NO: 1877226 - DNA, 15 bp, Homo sapiens
tctcacagctggaat

SEQ ID NO: 1877227 - DNA, 15 bp, Homo sapiens
ctcacagctggaatg

SEQ ID NO: 1877228 - DNA, 15 bp, Homo sapiens
tcacagctggaatga

SEQ ID NO: 1877229 - DNA, 15 bp, Homo sapiens
cacagctggaatgag

SEQ ID NO: 1877230 - DNA, 15 bp, Homo sapiens
acagctggaatgaga

SEQ ID NO: 1877231 - DNA, 15 bp, Homo sapiens
cagctggaatgagac

SEQ ID NO: 1877232 - DNA, 15 bp, Homo sapiens
agctggaatgagact

SEQ ID NO: 1877233 - DNA, 15 bp, Homo sapiens
gctggaatgagactg

SEQ ID NO: 1877234 - DNA, 15 bp, Homo sapiens
ctggaatgagactga

SEQ ID NO: 1877235 - DNA, 15 bp, Homo sapiens
tggaatgagactgag

SEQ ID NO: 1877236 - DNA, 15 bp, Homo sapiens
ggaatgagactgagc

SEQ ID NO: 1877237 - DNA, 15 bp, Homo sapiens
gaatgagactgagcc

SEQ ID NO: 1877238 - DNA, 15 bp, Homo sapiens
aatgagactgagcca

SEQ ID NO: 1877239 - DNA, 15 bp, Homo sapiens
atgagactgagccag

SEQ ID NO: 1877240 - DNA, 15 bp, Homo sapiens
tgagactgagccagc

SEQ ID NO: 1877241 - DNA, 15 bp, Homo sapiens
gagactgagccagcc

SEQ ID NO: 1877242 - DNA, 15 bp, Homo sapiens
agactgagccagccc

SEQ ID NO: 1877243 - DNA, 15 bp, Homo sapiens
gactgagccagccct

SEQ ID NO: 1877244 - DNA, 15 bp, Homo sapiens
actgagccagcccta

SEQ ID NO: 1877245 - DNA, 15 bp, Homo sapiens
ctgagccagccctag

SEQ ID NO: 1877246 - DNA, 15 bp, Homo sapiens
tgagccagccctagc

SEQ ID NO: 1877247 - DNA, 15 bp, Homo sapiens
gagccagccctagct

SEQ ID NO: 1877248 - DNA, 15 bp, Homo sapiens
agccagccctagctc

SEQ ID NO: 1877249 - DNA, 15 bp, Homo sapiens
gccagccctagctct

SEQ ID NO: 1877250 - DNA, 15 bp, Homo sapiens
ccagccctagctctt

SEQ ID NO: 1877251 - DNA, 15 bp, Homo sapiens
cagccctagctcttc

SEQ ID NO: 1877252 - DNA, 15 bp, Homo sapiens
agccctagctcttct

SEQ ID NO: 1877253 - DNA, 15 bp, Homo sapiens
gccctagctcttctg

SEQ ID NO: 1877254 - DNA, 15 bp, Homo sapiens
ccctagctcttctgt

SEQ ID NO: 1877255 - DNA, 15 bp, Homo sapiens
cctagctcttctgtg

SEQ ID NO: 1877256 - DNA, 15 bp, Homo sapiens
ctagctcttctgtgt

SEQ ID NO: 1877257 - DNA, 15 bp, Homo sapiens
tagctcttctgtgtt

SEQ ID NO: 1877258 - DNA, 15 bp, Homo sapiens
agctcttctgtgttg

SEQ ID NO: 1877259 - DNA, 15 bp, Homo sapiens
gctcttctgtgttgg

SEQ ID NO: 1877260 - DNA, 15 bp, Homo sapiens
ctcttctgtgttgga

SEQ ID NO: 1877261 - DNA, 15 bp, Homo sapiens
tcttctgtgttggag

SEQ ID NO: 1877262 - DNA, 15 bp, Homo sapiens
cttctgtgttggagt

SEQ ID NO: 1877263 - DNA, 15 bp, Homo sapiens
ttctgtgttggagtc

SEQ ID NO: 1877264 - DNA, 15 bp, Homo sapiens
tctgtgttggagtca

SEQ ID NO: 1877265 - DNA, 15 bp, Homo sapiens
ctgtgttggagtcac

SEQ ID NO: 1877266 - DNA, 15 bp, Homo sapiens
tgtgttggagtcaca

SEQ ID NO: 1877267 - DNA, 15 bp, Homo sapiens
gtgttggagtcacac

SEQ ID NO: 1877268 - DNA, 15 bp, Homo sapiens
tgttggagtcacaca

SEQ ID NO: 1877269 - DNA, 15 bp, Homo sapiens
gttggagtcacacag

SEQ ID NO: 1877270 - DNA, 15 bp, Homo sapiens
ttggagtcacacaga

SEQ ID NO: 1877271 - DNA, 15 bp, Homo sapiens
tggagtcacacagac

SEQ ID NO: 1877272 - DNA, 15 bp, Homo sapiens
ggagtcacacagacc

SEQ ID NO: 1877273 - DNA, 15 bp, Homo sapiens
gagtcacacagacct

SEQ ID NO: 1877274 - DNA, 15 bp, Homo sapiens
agtcacacagacctg

SEQ ID NO: 1877275 - DNA, 15 bp, Homo sapiens
gtcacacagacctgg

SEQ ID NO: 1877276 - DNA, 15 bp, Homo sapiens
tcacacagacctggg

SEQ ID NO: 1877277 - DNA, 15 bp, Homo sapiens
cacacagacctgggt

SEQ ID NO: 1877278 - DNA, 15 bp, Homo sapiens
acacagacctgggtt

SEQ ID NO: 1877279 - DNA, 15 bp, Homo sapiens
cacagacctgggttt

SEQ ID NO: 1877280 - DNA, 15 bp, Homo sapiens
acagacctgggtttg

SEQ ID NO: 1877281 - DNA, 15 bp, Homo sapiens
cagacctgggtttga

SEQ ID NO: 1877282 - DNA, 15 bp, Homo sapiens
agacctgggtttgaa

SEQ ID NO: 1877283 - DNA, 15 bp, Homo sapiens
gacctgggtttgaat

SEQ ID NO: 1877284 - DNA, 15 bp, Homo sapiens
acctgggtttgaatc

SEQ ID NO: 1877285 - DNA, 15 bp, Homo sapiens
cctgggtttgaatct

SEQ ID NO: 1877286 - DNA, 15 bp, Homo sapiens
ctgggtttgaatctg

SEQ ID NO: 1877287 - DNA, 15 bp, Homo sapiens
tgggtttgaatctgc

SEQ ID NO: 1877288 - DNA, 15 bp, Homo sapiens
gggtttgaatctgcc

SEQ ID NO: 1877289 - DNA, 15 bp, Homo sapiens
ggtttgaatctgccg

SEQ ID NO: 1877290 - DNA, 15 bp, Homo sapiens
gtttgaatctgccgc

SEQ ID NO: 1877291 - DNA, 15 bp, Homo sapiens
tttgaatctgccgct

SEQ ID NO: 1877292 - DNA, 15 bp, Homo sapiens
ttgaatctgccgcta

SEQ ID NO: 1877293 - DNA, 15 bp, Homo sapiens
tgaatctgccgctaa

SEQ ID NO: 1877294 - DNA, 15 bp, Homo sapiens
gaatctgccgctaac

SEQ ID NO: 1877295 - DNA, 15 bp, Homo sapiens
aatctgccgctaact

SEQ ID NO: 1877296 - DNA, 15 bp, Homo sapiens
atctgccgctaactg

SEQ ID NO: 1877297 - DNA, 15 bp, Homo sapiens
tctgccgctaactgg

SEQ ID NO: 1877298 - DNA, 15 bp, Homo sapiens
ctgccgctaactggc

SEQ ID NO: 1877299 - DNA, 15 bp, Homo sapiens
tgccgctaactggct

SEQ ID NO: 1877300 - DNA, 15 bp, Homo sapiens
gccgctaactggctg

SEQ ID NO: 1877301 - DNA, 15 bp, Homo sapiens
ccgctaactggctgt

SEQ ID NO: 1877302 - DNA, 15 bp, Homo sapiens
cgctaactggctgtg

SEQ ID NO: 1877303 - DNA, 15 bp, Homo sapiens
gctaactggctgtgt

SEQ ID NO: 1877304 - DNA, 15 bp, Homo sapiens
ctaactggctgtgta

SEQ ID NO: 1877305 - DNA, 15 bp, Homo sapiens
taactggctgtgtaa

SEQ ID NO: 1877306 - DNA, 15 bp, Homo sapiens
aactggctgtgtaaa

SEQ ID NO: 1877307 - DNA, 15 bp, Homo sapiens
actggctgtgtaaac

SEQ ID NO: 1877308 - DNA, 15 bp, Homo sapiens
ctggctgtgtaaaca

SEQ ID NO: 1877309 - DNA, 15 bp, Homo sapiens
tggctgtgtaaacat

SEQ ID NO: 1877310 - DNA, 15 bp, Homo sapiens
ggctgtgtaaacata

SEQ ID NO: 1877311 - DNA, 15 bp, Homo sapiens
gctgtgtaaacatag

SEQ ID NO: 1877312 - DNA, 15 bp, Homo sapiens
ctgtgtaaacatagg

SEQ ID NO: 1877313 - DNA, 15 bp, Homo sapiens
tgtgtaaacataggc

SEQ ID NO: 1877314 - DNA, 15 bp, Homo sapiens
gtgtaaacataggca

SEQ ID NO: 1877315 - DNA, 15 bp, Homo sapiens
tgtaaacataggcag

SEQ ID NO: 1877316 - DNA, 15 bp, Homo sapiens
gtaaacataggcagg

SEQ ID NO: 1877317 - DNA, 15 bp, Homo sapiens
taaacataggcaggc

SEQ ID NO: 1877318 - DNA, 15 bp, Homo sapiens
aaacataggcaggcc

SEQ ID NO: 1877319 - DNA, 15 bp, Homo sapiens
aacataggcaggcca

SEQ ID NO: 1877320 - DNA, 15 bp, Homo sapiens
acataggcaggccac

SEQ ID NO: 1877321 - DNA, 15 bp, Homo sapiens
cataggcaggccact

SEQ ID NO: 1877322 - DNA, 15 bp, Homo sapiens
ataggcaggccactt

SEQ ID NO: 1877323 - DNA, 15 bp, Homo sapiens
taggcaggccactta

SEQ ID NO: 1877324 - DNA, 15 bp, Homo sapiens
aggcaggccacttag

SEQ ID NO: 1877325 - DNA, 15 bp, Homo sapiens
ggcaggccacttagc

SEQ ID NO: 1877326 - DNA, 15 bp, Homo sapiens
gcaggccacttagcc

SEQ ID NO: 1877327 - DNA, 15 bp, Homo sapiens
caggccacttagcct

SEQ ID NO: 1877328 - DNA, 15 bp, Homo sapiens
aggccacttagcctc

SEQ ID NO: 1877329 - DNA, 15 bp, Homo sapiens
ggccacttagcctct

SEQ ID NO: 1877330 - DNA, 15 bp, Homo sapiens
gccacttagcctctc

SEQ ID NO: 1877331 - DNA, 15 bp, Homo sapiens
ccacttagcctctca

SEQ ID NO: 1877332 - DNA, 15 bp, Homo sapiens
cacttagcctctcac

SEQ ID NO: 1877333 - DNA, 15 bp, Homo sapiens
acttagcctctcacc

SEQ ID NO: 1877334 - DNA, 15 bp, Homo sapiens
cttagcctctcacct

SEQ ID NO: 1877335 - DNA, 15 bp, Homo sapiens
ttagcctctcacctc

SEQ ID NO: 1877336 - DNA, 15 bp, Homo sapiens
tagcctctcacctcc

SEQ ID NO: 1877337 - DNA, 15 bp, Homo sapiens
agcctctcacctcct

SEQ ID NO: 1877338 - DNA, 15 bp, Homo sapiens
gcctctcacctcctc

SEQ ID NO: 1877339 - DNA, 15 bp, Homo sapiens
cctctcacctcctca

SEQ ID NO: 1877340 - DNA, 15 bp, Homo sapiens
ctctcacctcctcag

SEQ ID NO: 1877341 - DNA, 15 bp, Homo sapiens
tctcacctcctcagt

SEQ ID NO: 1877342 - DNA, 15 bp, Homo sapiens
cacctcctcagtttc

SEQ ID NO: 1877343 - DNA, 15 bp, Homo sapiens
acctcctcagtttcc

SEQ ID NO: 1877344 - DNA, 15 bp, Homo sapiens
cctcctcagtttcca

SEQ ID NO: 1877345 - DNA, 15 bp, Homo sapiens
ctcctcagtttccac

SEQ ID NO: 1877346 - DNA, 15 bp, Homo sapiens
tcctcagtttccacc

SEQ ID NO: 1877347 - DNA, 15 bp, Homo sapiens
cctcagtttccaccc

SEQ ID NO: 1877348 - DNA, 15 bp, Homo sapiens
ctcagtttccaccct

SEQ ID NO: 1877349 - DNA, 15 bp, Homo sapiens
tcagtttccaccctt

SEQ ID NO: 1877350 - DNA, 15 bp, Homo sapiens
cagtttccacccttg

SEQ ID NO: 1877351 - DNA, 15 bp, Homo sapiens
agtttccacccttgt

SEQ ID NO: 1877352 - DNA, 15 bp, Homo sapiens
gtttccacccttgta

SEQ ID NO: 1877353 - DNA, 15 bp, Homo sapiens
tttccacccttgtaa

SEQ ID NO: 1877354 - DNA, 15 bp, Homo sapiens
ttccacccttgtaaa

SEQ ID NO: 1877355 - DNA, 15 bp, Homo sapiens
tccacccttgtaaag

SEQ ID NO: 1877356 - DNA, 15 bp, Homo sapiens
ccacccttgtaaagt

SEQ ID NO: 1877357 - DNA, 15 bp, Homo sapiens
cacccttgtaaagtg

SEQ ID NO: 1877358 - DNA, 15 bp, Homo sapiens
acccttgtaaagtgg

SEQ ID NO: 1877359 - DNA, 15 bp, Homo sapiens
cccttgtaaagtgga

SEQ ID NO: 1877360 - DNA, 15 bp, Homo sapiens
ccttgtaaagtggaa

SEQ ID NO: 1877361 - DNA, 15 bp, Homo sapiens
cttgtaaagtggaat

SEQ ID NO: 1877362 - DNA, 15 bp, Homo sapiens
ttgtaaagtggaatg

SEQ ID NO: 1877363 - DNA, 15 bp, Homo sapiens
tgtaaagtggaatgc

SEQ ID NO: 1877364 - DNA, 15 bp, Homo sapiens
gtaaagtggaatgct

SEQ ID NO: 1877365 - DNA, 15 bp, Homo sapiens
taaagtggaatgcta

SEQ ID NO: 1877366 - DNA, 15 bp, Homo sapiens
aaagtggaatgctaa

SEQ ID NO: 1877367 - DNA, 15 bp, Homo sapiens
aagtggaatgctaat

SEQ ID NO: 1877368 - DNA, 15 bp, Homo sapiens
agtggaatgctaatg

SEQ ID NO: 1877369 - DNA, 15 bp, Homo sapiens
gtggaatgctaatgc

SEQ ID NO: 1877370 - DNA, 15 bp, Homo sapiens
tggaatgctaatgct

SEQ ID NO: 1877371 - DNA, 15 bp, Homo sapiens
ggaatgctaatgctg

SEQ ID NO: 1877372 - DNA, 15 bp, Homo sapiens
gaatgctaatgctgc

SEQ ID NO: 1877373 - DNA, 15 bp, Homo sapiens
aatgctaatgctgca

SEQ ID NO: 1877374 - DNA, 15 bp, Homo sapiens
atgctaatgctgcac

SEQ ID NO: 1877375 - DNA, 15 bp, Homo sapiens
tgctaatgctgcacc

SEQ ID NO: 1877376 - DNA, 15 bp, Homo sapiens
gctaatgctgcacct

SEQ ID NO: 1877377 - DNA, 15 bp, Homo sapiens
ctaatgctgcacctt

SEQ ID NO: 1877378 - DNA, 15 bp, Homo sapiens
taatgctgcaccttg

SEQ ID NO: 1877379 - DNA, 15 bp, Homo sapiens
aatgctgcaccttga

SEQ ID NO: 1877380 - DNA, 15 bp, Homo sapiens
atgctgcaccttgaa

SEQ ID NO: 1877381 - DNA, 15 bp, Homo sapiens
tgctgcaccttgaag

SEQ ID NO: 1877382 - DNA, 15 bp, Homo sapiens
gctgcaccttgaaga

SEQ ID NO: 1877383 - DNA, 15 bp, Homo sapiens
ctgcaccttgaagag

SEQ ID NO: 1877384 - DNA, 15 bp, Homo sapiens
tgcaccttgaagagc

SEQ ID NO: 1877385 - DNA, 15 bp, Homo sapiens
gcaccttgaagagct

SEQ ID NO: 1877386 - DNA, 15 bp, Homo sapiens
caccttgaagagctg

SEQ ID NO: 1877387 - DNA, 15 bp, Homo sapiens
accttgaagagctgt

SEQ ID NO: 1877388 - DNA, 15 bp, Homo sapiens
ccttgaagagctgtt

SEQ ID NO: 1877389 - DNA, 15 bp, Homo sapiens
cttgaagagctgtta

SEQ ID NO: 1877390 - DNA, 15 bp, Homo sapiens
ttgaagagctgttat

SEQ ID NO: 1877391 - DNA, 15 bp, Homo sapiens
tgaagagctgttatc

SEQ ID NO: 1877392 - DNA, 15 bp, Homo sapiens
gaagagctgttatca

SEQ ID NO: 1877393 - DNA, 15 bp, Homo sapiens
aagagctgttatcaa

SEQ ID NO: 1877394 - DNA, 15 bp, Homo sapiens
agagctgttatcaag

SEQ ID NO: 1877395 - DNA, 15 bp, Homo sapiens
gagctgttatcaagt

SEQ ID NO: 1877396 - DNA, 15 bp, Homo sapiens
agctgttatcaagtc

SEQ ID NO: 1877397 - DNA, 15 bp, Homo sapiens
gctgttatcaagtca

SEQ ID NO: 1877398 - DNA, 15 bp, Homo sapiens
ctgttatcaagtcag

SEQ ID NO: 1877399 - DNA, 15 bp, Homo sapiens
tgttatcaagtcaga

SEQ ID NO: 1877400 - DNA, 15 bp, Homo sapiens
gttatcaagtcagag

SEQ ID NO: 1877401 - DNA, 15 bp, Homo sapiens
ttatcaagtcagaga

SEQ ID NO: 1877402 - DNA, 15 bp, Homo sapiens
tatcaagtcagagac

SEQ ID NO: 1877403 - DNA, 15 bp, Homo sapiens
atcaagtcagagacg

SEQ ID NO: 1877404 - DNA, 15 bp, Homo sapiens
tcaagtcagagacgc

SEQ ID NO: 1877405 - DNA, 15 bp, Homo sapiens
caagtcagagacgct

SEQ ID NO: 1877406 - DNA, 15 bp, Homo sapiens
aagtcagagacgctg

SEQ ID NO: 1877407 - DNA, 15 bp, Homo sapiens
agtcagagacgctgt

SEQ ID NO: 1877408 - DNA, 15 bp, Homo sapiens
gtcagagacgctgta

SEQ ID NO: 1877409 - DNA, 15 bp, Homo sapiens
tcagagacgctgtat

SEQ ID NO: 1877410 - DNA, 15 bp, Homo sapiens
cagagacgctgtata

SEQ ID NO: 1877411 - DNA, 15 bp, Homo sapiens
agagacgctgtatat

SEQ ID NO: 1877412 - DNA, 15 bp, Homo sapiens
gagacgctgtatata

SEQ ID NO: 1877413 - DNA, 15 bp, Homo sapiens
agacgctgtatataa

SEQ ID NO: 1877414 - DNA, 15 bp, Homo sapiens
gacgctgtatataaa

SEQ ID NO: 1877415 - DNA, 15 bp, Homo sapiens
acgctgtatataaag

SEQ ID NO: 1877416 - DNA, 15 bp, Homo sapiens
cgctgtatataaagt

SEQ ID NO: 1877417 - DNA, 15 bp, Homo sapiens
gctgtatataaagtg

SEQ ID NO: 1877418 - DNA, 15 bp, Homo sapiens
ctgtatataaagtgc

SEQ ID NO: 1877419 - DNA, 15 bp, Homo sapiens
tgtatataaagtgcc

SEQ ID NO: 1877420 - DNA, 15 bp, Homo sapiens
gtatataaagtgcca

SEQ ID NO: 1877421 - DNA, 15 bp, Homo sapiens
tatataaagtgccac

SEQ ID NO: 1877422 - DNA, 15 bp, Homo sapiens
atataaagtgccacg

SEQ ID NO: 1877423 - DNA, 15 bp, Homo sapiens
tataaagtgccacgc

SEQ ID NO: 1877424 - DNA, 15 bp, Homo sapiens
ataaagtgccacgct

SEQ ID NO: 1877425 - DNA, 15 bp, Homo sapiens
taaagtgccacgctt

SEQ ID NO: 1877426 - DNA, 15 bp, Homo sapiens
aaagtgccacgcttg

SEQ ID NO: 1877427 - DNA, 15 bp, Homo sapiens
aagtgccacgcttga

SEQ ID NO: 1877428 - DNA, 15 bp, Homo sapiens
agtgccacgcttgat

SEQ ID NO: 1877429 - DNA, 15 bp, Homo sapiens
gtgccacgcttgatg

SEQ ID NO: 1877430 - DNA, 15 bp, Homo sapiens
tgccacgcttgatgc

SEQ ID NO: 1877431 - DNA, 15 bp, Homo sapiens
gccacgcttgatgct

SEQ ID NO: 1877432 - DNA, 15 bp, Homo sapiens
ccacgcttgatgctg

SEQ ID NO: 1877433 - DNA, 15 bp, Homo sapiens
cacgcttgatgctga

SEQ ID NO: 1877434 - DNA, 15 bp, Homo sapiens
acgcttgatgctgag

SEQ ID NO: 1877435 - DNA, 15 bp, Homo sapiens
cgcttgatgctgagt

SEQ ID NO: 1877436 - DNA, 15 bp, Homo sapiens
gcttgatgctgagtg

SEQ ID NO: 1877437 - DNA, 15 bp, Homo sapiens
cttgatgctgagtgg

SEQ ID NO: 1877438 - DNA, 15 bp, Homo sapiens
ttgatgctgagtgga

SEQ ID NO: 1877439 - DNA, 15 bp, Homo sapiens
tgatgctgagtggat

SEQ ID NO: 1877440 - DNA, 15 bp, Homo sapiens
gatgctgagtggata

SEQ ID NO: 1877441 - DNA, 15 bp, Homo sapiens
atgctgagtggatag

SEQ ID NO: 1877442 - DNA, 15 bp, Homo sapiens
tgctgagtggatagt

SEQ ID NO: 1877443 - DNA, 15 bp, Homo sapiens
gctgagtggatagtg

SEQ ID NO: 1877444 - DNA, 15 bp, Homo sapiens
ctgagtggatagtgg

SEQ ID NO: 1877445 - DNA, 15 bp, Homo sapiens
tgagtggatagtggg

SEQ ID NO: 1877446 - DNA, 15 bp, Homo sapiens
gagtggatagtgggc

SEQ ID NO: 1877447 - DNA, 15 bp, Homo sapiens
agtggatagtgggca

SEQ ID NO: 1877448 - DNA, 15 bp, Homo sapiens
gtggatagtgggcac

SEQ ID NO: 1877449 - DNA, 15 bp, Homo sapiens
tggatagtgggcact

SEQ ID NO: 1877450 - DNA, 15 bp, Homo sapiens
ggatagtgggcactc

SEQ ID NO: 1877451 - DNA, 15 bp, Homo sapiens
gatagtgggcactca

SEQ ID NO: 1877452 - DNA, 15 bp, Homo sapiens
atagtgggcactcaa

SEQ ID NO: 1877453 - DNA, 15 bp, Homo sapiens
tagtgggcactcaaa

SEQ ID NO: 1877454 - DNA, 15 bp, Homo sapiens
agtgggcactcaaac

SEQ ID NO: 1877455 - DNA, 15 bp, Homo sapiens
gtgggcactcaaaca

SEQ ID NO: 1877456 - DNA, 15 bp, Homo sapiens
tgggcactcaaacaa

SEQ ID NO: 1877457 - DNA, 15 bp, Homo sapiens
gggcactcaaacaaa

SEQ ID NO: 1877458 - DNA, 15 bp, Homo sapiens
ggcactcaaacaaaa

SEQ ID NO: 1877459 - DNA, 15 bp, Homo sapiens
gcactcaaacaaaag

SEQ ID NO: 1877460 - DNA, 15 bp, Homo sapiens
cactcaaacaaaagc

SEQ ID NO: 1877461 - DNA, 15 bp, Homo sapiens
actcaaacaaaagca

SEQ ID NO: 1877462 - DNA, 15 bp, Homo sapiens
ctcaaacaaaagcag

SEQ ID NO: 1877463 - DNA, 15 bp, Homo sapiens
tcaaacaaaagcagt

SEQ ID NO: 1877464 - DNA, 15 bp, Homo sapiens
caaacaaaagcagtg

SEQ ID NO: 1877465 - DNA, 15 bp, Homo sapiens
aaacaaaagcagtga

SEQ ID NO: 1877466 - DNA, 15 bp, Homo sapiens
aacaaaagcagtgat

SEQ ID NO: 1877467 - DNA, 15 bp, Homo sapiens
acaaaagcagtgatt

SEQ ID NO: 1877468 - DNA, 15 bp, Homo sapiens
caaaagcagtgatta

SEQ ID NO: 1877469 - DNA, 15 bp, Homo sapiens
aaaagcagtgattag

SEQ ID NO: 1877470 - DNA, 15 bp, Homo sapiens
aaagcagtgattagt

SEQ ID NO: 1877471 - DNA, 15 bp, Homo sapiens
aagcagtgattagtg

SEQ ID NO: 1877472 - DNA, 15 bp, Homo sapiens
agcagtgattagtgt

SEQ ID NO: 1877473 - DNA, 15 bp, Homo sapiens
gcagtgattagtgtt

SEQ ID NO: 1877474 - DNA, 15 bp, Homo sapiens
cagtgattagtgtta

SEQ ID NO: 1877475 - DNA, 15 bp, Homo sapiens
agtgattagtgttag

SEQ ID NO: 1877476 - DNA, 15 bp, Homo sapiens
gtgattagtgttagt

SEQ ID NO: 1877477 - DNA, 15 bp, Homo sapiens
tgattagtgttagta

SEQ ID NO: 1877478 - DNA, 15 bp, Homo sapiens
gattagtgttagtac

SEQ ID NO: 1877479 - DNA, 15 bp, Homo sapiens
attagtgttagtact

SEQ ID NO: 1877480 - DNA, 15 bp, Homo sapiens
ttagtgttagtactt

SEQ ID NO: 1877481 - DNA, 15 bp, Homo sapiens
tagtgttagtacttt

SEQ ID NO: 1877482 - DNA, 15 bp, Homo sapiens
agtgttagtactttc

SEQ ID NO: 1877483 - DNA, 15 bp, Homo sapiens
gtgttagtactttca

SEQ ID NO: 1877484 - DNA, 15 bp, Homo sapiens
tgttagtactttcat

SEQ ID NO: 1877485 - DNA, 15 bp, Homo sapiens
gttagtactttcatt

SEQ ID NO: 1877486 - DNA, 15 bp, Homo sapiens
ttagtactttcattc

SEQ ID NO: 1877487 - DNA, 15 bp, Homo sapiens
tagtactttcattct

SEQ ID NO: 1877488 - DNA, 15 bp, Homo sapiens
agtactttcattcta

SEQ ID NO: 1877489 - DNA, 15 bp, Homo sapiens
gtactttcattctac

SEQ ID NO: 1877490 - DNA, 15 bp, Homo sapiens
tactttcattctaca

SEQ ID NO: 1877491 - DNA, 15 bp, Homo sapiens
actttcattctacaa

SEQ ID NO: 1877492 - DNA, 15 bp, Homo sapiens
ctttcattctacaac

SEQ ID NO: 1877493 - DNA, 15 bp, Homo sapiens
tttcattctacaacc

SEQ ID NO: 1877494 - DNA, 15 bp, Homo sapiens
ttcattctacaacct

SEQ ID NO: 1877495 - DNA, 15 bp, Homo sapiens
tcattctacaacctc

SEQ ID NO: 1877496 - DNA, 15 bp, Homo sapiens
cattctacaacctca

SEQ ID NO: 1877497 - DNA, 15 bp, Homo sapiens
attctacaacctcag

SEQ ID NO: 1877498 - DNA, 15 bp, Homo sapiens
ttctacaacctcagt

SEQ ID NO: 1877499 - DNA, 15 bp, Homo sapiens
tctacaacctcagtc

SEQ ID NO: 1877500 - DNA, 15 bp, Homo sapiens
ctacaacctcagtca

SEQ ID NO: 1877501 - DNA, 15 bp, Homo sapiens
tacaacctcagtcaa

SEQ ID NO: 1877502 - DNA, 15 bp, Homo sapiens
acaacctcagtcaaa

SEQ ID NO: 1877503 - DNA, 15 bp, Homo sapiens
caacctcagtcaaat

SEQ ID NO: 1877504 - DNA, 15 bp, Homo sapiens
aacctcagtcaaatg

SEQ ID NO: 1877505 - DNA, 15 bp, Homo sapiens
acctcagtcaaatga

SEQ ID NO: 1877506 - DNA, 15 bp, Homo sapiens
cctcagtcaaatgag

SEQ ID NO: 1877507 - DNA, 15 bp, Homo sapiens
ctcagtcaaatgagg

SEQ ID NO: 1877508 - DNA, 15 bp, Homo sapiens
tcagtcaaatgaggg

SEQ ID NO: 1877509 - DNA, 15 bp, Homo sapiens
cagtcaaatgaggga

SEQ ID NO: 1877510 - DNA, 15 bp, Homo sapiens
agtcaaatgagggac

SEQ ID NO: 1877511 - DNA, 15 bp, Homo sapiens
gtcaaatgagggacc

SEQ ID NO: 1877512 - DNA, 15 bp, Homo sapiens
tcaaatgagggacca

SEQ ID NO: 1877513 - DNA, 15 bp, Homo sapiens
caaatgagggaccag

SEQ ID NO: 1877514 - DNA, 15 bp, Homo sapiens
aaatgagggaccagg

SEQ ID NO: 1877515 - DNA, 15 bp, Homo sapiens
aatgagggaccaggc

SEQ ID NO: 1877516 - DNA, 15 bp, Homo sapiens
atgagggaccaggcc

SEQ ID NO: 1877517 - DNA, 15 bp, Homo sapiens
tgagggaccaggccc

SEQ ID NO: 1877518 - DNA, 15 bp, Homo sapiens
gagggaccaggccca

SEQ ID NO: 1877519 - DNA, 15 bp, Homo sapiens
agggaccaggcccag

SEQ ID NO: 1877520 - DNA, 15 bp, Homo sapiens
gggaccaggcccagg

SEQ ID NO: 1877521 - DNA, 15 bp, Homo sapiens
ggaccaggcccaggg

SEQ ID NO: 1877522 - DNA, 15 bp, Homo sapiens
gaccaggcccagggc

SEQ ID NO: 1877523 - DNA, 15 bp, Homo sapiens
accaggcccagggcc

SEQ ID NO: 1877524 - DNA, 15 bp, Homo sapiens
ccaggcccagggcca

SEQ ID NO: 1877525 - DNA, 15 bp, Homo sapiens
caggcccagggccag

SEQ ID NO: 1877526 - DNA, 15 bp, Homo sapiens
aggcccagggccaga

SEQ ID NO: 1877527 - DNA, 15 bp, Homo sapiens
ggcccagggccagat

SEQ ID NO: 1877528 - DNA, 15 bp, Homo sapiens
gcccagggccagatc

SEQ ID NO: 1877529 - DNA, 15 bp, Homo sapiens
cccagggccagatcc

SEQ ID NO: 1877530 - DNA, 15 bp, Homo sapiens
ccagggccagatcct

SEQ ID NO: 1877531 - DNA, 15 bp, Homo sapiens
cagggccagatcctc

SEQ ID NO: 1877532 - DNA, 15 bp, Homo sapiens
agggccagatcctca

SEQ ID NO: 1877533 - DNA, 15 bp, Homo sapiens
gggccagatcctcaa

SEQ ID NO: 1877534 - DNA, 15 bp, Homo sapiens
ggccagatcctcaaa

SEQ ID NO: 1877535 - DNA, 15 bp, Homo sapiens
gccagatcctcaaag

SEQ ID NO: 1877536 - DNA, 15 bp, Homo sapiens
ccagatcctcaaagt

SEQ ID NO: 1877537 - DNA, 15 bp, Homo sapiens
cagatcctcaaagtg

SEQ ID NO: 1877538 - DNA, 15 bp, Homo sapiens
agatcctcaaagtgg

SEQ ID NO: 1877539 - DNA, 15 bp, Homo sapiens
gatcctcaaagtgga

SEQ ID NO: 1877540 - DNA, 15 bp, Homo sapiens
atcctcaaagtggaa

SEQ ID NO: 1877541 - DNA, 15 bp, Homo sapiens
tcctcaaagtggaat

SEQ ID NO: 1877542 - DNA, 15 bp, Homo sapiens
cctcaaagtggaatc

SEQ ID NO: 1877543 - DNA, 15 bp, Homo sapiens
ctcaaagtggaatcc

SEQ ID NO: 1877544 - DNA, 15 bp, Homo sapiens
tcaaagtggaatccc

SEQ ID NO: 1877545 - DNA, 15 bp, Homo sapiens
caaagtggaatcccg

SEQ ID NO: 1877546 - DNA, 15 bp, Homo sapiens
aaagtggaatcccgg

SEQ ID NO: 1877547 - DNA, 15 bp, Homo sapiens
aagtggaatcccggt

SEQ ID NO: 1877548 - DNA, 15 bp, Homo sapiens
agtggaatcccggtg

SEQ ID NO: 1877549 - DNA, 15 bp, Homo sapiens
gtggaatcccggtga

SEQ ID NO: 1877550 - DNA, 15 bp, Homo sapiens
tggaatcccggtgac

SEQ ID NO: 1877551 - DNA, 15 bp, Homo sapiens
ggaatcccggtgact

SEQ ID NO: 1877552 - DNA, 15 bp, Homo sapiens
gaatcccggtgactc

SEQ ID NO: 1877553 - DNA, 15 bp, Homo sapiens
aatcccggtgactcc

SEQ ID NO: 1877554 - DNA, 15 bp, Homo sapiens
atcccggtgactccc

SEQ ID NO: 1877555 - DNA, 15 bp, Homo sapiens
tcccggtgactcccc

SEQ ID NO: 1877556 - DNA, 15 bp, Homo sapiens
cccggtgactcccca

SEQ ID NO: 1877557 - DNA, 15 bp, Homo sapiens
ccggtgactccccag

SEQ ID NO: 1877558 - DNA, 15 bp, Homo sapiens
cggtgactccccagg

SEQ ID NO: 1877559 - DNA, 15 bp, Homo sapiens
ggtgactccccagga

SEQ ID NO: 1877560 - DNA, 15 bp, Homo sapiens
gtgactccccaggaa

SEQ ID NO: 1877561 - DNA, 15 bp, Homo sapiens
tgactccccaggaaa

SEQ ID NO: 1877562 - DNA, 15 bp, Homo sapiens
gactccccaggaaac

SEQ ID NO: 1877563 - DNA, 15 bp, Homo sapiens
actccccaggaaacc

SEQ ID NO: 1877564 - DNA, 15 bp, Homo sapiens
ctccccaggaaacca

SEQ ID NO: 1877565 - DNA, 15 bp, Homo sapiens
tccccaggaaaccag

SEQ ID NO: 1877566 - DNA, 15 bp, Homo sapiens
ccccaggaaaccagg

SEQ ID NO: 1877567 - DNA, 15 bp, Homo sapiens
cccaggaaaccaggg

SEQ ID NO: 1877568 - DNA, 15 bp, Homo sapiens
ccaggaaaccaggga

SEQ ID NO: 1877569 - DNA, 15 bp, Homo sapiens
caggaaaccagggac

SEQ ID NO: 1877570 - DNA, 15 bp, Homo sapiens
aggaaaccagggact

SEQ ID NO: 1877571 - DNA, 15 bp, Homo sapiens
ggaaaccagggactc

SEQ ID NO: 1877572 - DNA, 15 bp, Homo sapiens
gaaaccagggactca

SEQ ID NO: 1877573 - DNA, 15 bp, Homo sapiens
aaaccagggactcag

SEQ ID NO: 1877574 - DNA, 15 bp, Homo sapiens
aaccagggactcagg

SEQ ID NO: 1877575 - DNA, 15 bp, Homo sapiens
accagggactcaggg

SEQ ID NO: 1877576 - DNA, 15 bp, Homo sapiens
ccagggactcagggc

SEQ ID NO: 1877577 - DNA, 15 bp, Homo sapiens
cagggactcagggct

SEQ ID NO: 1877578 - DNA, 15 bp, Homo sapiens
agggactcagggctg

SEQ ID NO: 1877579 - DNA, 15 bp, Homo sapiens
gggactcagggctgg

SEQ ID NO: 1877580 - DNA, 15 bp, Homo sapiens
ggactcagggctgga

SEQ ID NO: 1877581 - DNA, 15 bp, Homo sapiens
gactcagggctggag

SEQ ID NO: 1877582 - DNA, 15 bp, Homo sapiens
actcagggctggagt

SEQ ID NO: 1877583 - DNA, 15 bp, Homo sapiens
ctcagggctggagta

SEQ ID NO: 1877584 - DNA, 15 bp, Homo sapiens
tcagggctggagtaa

SEQ ID NO: 1877585 - DNA, 15 bp, Homo sapiens
cagggctggagtaac

SEQ ID NO: 1877586 - DNA, 15 bp, Homo sapiens
agggctggagtaacc

SEQ ID NO: 1877587 - DNA, 15 bp, Homo sapiens
gggctggagtaacct

SEQ ID NO: 1877588 - DNA, 15 bp, Homo sapiens
ggctggagtaacctc

SEQ ID NO: 1877589 - DNA, 15 bp, Homo sapiens
gctggagtaacctcc

SEQ ID NO: 1877590 - DNA, 15 bp, Homo sapiens
ctggagtaacctcca

SEQ ID NO: 1877591 - DNA, 15 bp, Homo sapiens
tggagtaacctccat

SEQ ID NO: 1877592 - DNA, 15 bp, Homo sapiens
ggagtaacctccata

SEQ ID NO: 1877593 - DNA, 15 bp, Homo sapiens
gagtaacctccataa

SEQ ID NO: 1877594 - DNA, 15 bp, Homo sapiens
agtaacctccataaa

SEQ ID NO: 1877595 - DNA, 15 bp, Homo sapiens
gtaacctccataaac

SEQ ID NO: 1877596 - DNA, 15 bp, Homo sapiens
taacctccataaaca

SEQ ID NO: 1877597 - DNA, 15 bp, Homo sapiens
aacctccataaacaa

SEQ ID NO: 1877598 - DNA, 15 bp, Homo sapiens
acctccataaacaaa

SEQ ID NO: 1877599 - DNA, 15 bp, Homo sapiens
cctccataaacaaac

SEQ ID NO: 1877600 - DNA, 15 bp, Homo sapiens
ctccataaacaaaca

SEQ ID NO: 1877601 - DNA, 15 bp, Homo sapiens
tccataaacaaacat

SEQ ID NO: 1877602 - DNA, 15 bp, Homo sapiens
ccataaacaaacatt

SEQ ID NO: 1877603 - DNA, 15 bp, Homo sapiens
cataaacaaacattt

SEQ ID NO: 1877604 - DNA, 15 bp, Homo sapiens
ataaacaaacattta

SEQ ID NO: 1877605 - DNA, 15 bp, Homo sapiens
taaacaaacatttag

SEQ ID NO: 1877606 - DNA, 15 bp, Homo sapiens
aaacaaacatttaga

SEQ ID NO: 1877607 - DNA, 15 bp, Homo sapiens
aacaaacatttagat

SEQ ID NO: 1877608 - DNA, 15 bp, Homo sapiens
acaaacatttagatg

SEQ ID NO: 1877609 - DNA, 15 bp, Homo sapiens
caaacatttagatgg

SEQ ID NO: 1877610 - DNA, 15 bp, Homo sapiens
aaacatttagatggt

SEQ ID NO: 1877611 - DNA, 15 bp, Homo sapiens
aacatttagatggtt

SEQ ID NO: 1877612 - DNA, 15 bp, Homo sapiens
acatttagatggttt

SEQ ID NO: 1877613 - DNA, 15 bp, Homo sapiens
catttagatggtttt

SEQ ID NO: 1877614 - DNA, 15 bp, Homo sapiens
atttagatggttttt

SEQ ID NO: 1877615 - DNA, 15 bp, Homo sapiens
tttagatggtttttc

SEQ ID NO: 1877616 - DNA, 15 bp, Homo sapiens
ttagatggtttttcc

SEQ ID NO: 1877617 - DNA, 15 bp, Homo sapiens
tagatggtttttcca

SEQ ID NO: 1877618 - DNA, 15 bp, Homo sapiens
agatggtttttccat

SEQ ID NO: 1877619 - DNA, 15 bp, Homo sapiens
gatggtttttccatc

SEQ ID NO: 1877620 - DNA, 15 bp, Homo sapiens
atggtttttccatcc

SEQ ID NO: 1877621 - DNA, 15 bp, Homo sapiens
tggtttttccatcct

SEQ ID NO: 1877622 - DNA, 15 bp, Homo sapiens
ggtttttccatcctt

SEQ ID NO: 1877623 - DNA, 15 bp, Homo sapiens
gtttttccatccttg

SEQ ID NO: 1877624 - DNA, 15 bp, Homo sapiens
tttttccatccttgc

SEQ ID NO: 1877625 - DNA, 15 bp, Homo sapiens
ttttccatccttgca

SEQ ID NO: 1877626 - DNA, 15 bp, Homo sapiens
tttccatccttgcat

SEQ ID NO: 1877627 - DNA, 15 bp, Homo sapiens
ttccatccttgcatc

SEQ ID NO: 1877628 - DNA, 15 bp, Homo sapiens
tccatccttgcatcc

SEQ ID NO: 1877629 - DNA, 15 bp, Homo sapiens
ccatccttgcatccc

SEQ ID NO: 1877630 - DNA, 15 bp, Homo sapiens
catccttgcatccca

SEQ ID NO: 1877631 - DNA, 15 bp, Homo sapiens
atccttgcatcccaa

SEQ ID NO: 1877632 - DNA, 15 bp, Homo sapiens
tccttgcatcccaac

SEQ ID NO: 1877633 - DNA, 15 bp, Homo sapiens
ccttgcatcccaaca

SEQ ID NO: 1877634 - DNA, 15 bp, Homo sapiens
cttgcatcccaacat

SEQ ID NO: 1877635 - DNA, 15 bp, Homo sapiens
ttgcatcccaacatc

SEQ ID NO: 1877636 - DNA, 15 bp, Homo sapiens
tgcatcccaacatcc

SEQ ID NO: 1877637 - DNA, 15 bp, Homo sapiens
gcatcccaacatccc

SEQ ID NO: 1877638 - DNA, 15 bp, Homo sapiens
catcccaacatccca

SEQ ID NO: 1877639 - DNA, 15 bp, Homo sapiens
atcccaacatcccac

SEQ ID NO: 1877640 - DNA, 15 bp, Homo sapiens
tcccaacatcccacc

SEQ ID NO: 1877641 - DNA, 15 bp, Homo sapiens
cccaacatcccaccc

SEQ ID NO: 1877642 - DNA, 15 bp, Homo sapiens
ccaacatcccaccct

SEQ ID NO: 1877643 - DNA, 15 bp, Homo sapiens
caacatcccaccctc

SEQ ID NO: 1877644 - DNA, 15 bp, Homo sapiens
aacatcccaccctcc

SEQ ID NO: 1877645 - DNA, 15 bp, Homo sapiens
acatcccaccctccc

SEQ ID NO: 1877646 - DNA, 15 bp, Homo sapiens
catcccaccctcccc

SEQ ID NO: 1877647 - DNA, 15 bp, Homo sapiens
atcccaccctccccc

SEQ ID NO: 1877648 - DNA, 15 bp, Homo sapiens
ccaccctccccctcc

SEQ ID NO: 1877649 - DNA, 15 bp, Homo sapiens
caccctccccctcca

SEQ ID NO: 1877650 - DNA, 15 bp, Homo sapiens
accctccccctccaa

SEQ ID NO: 1877651 - DNA, 15 bp, Homo sapiens
ccctccccctccaaa

SEQ ID NO: 1877652 - DNA, 15 bp, Homo sapiens
cctccccctccaaaa

SEQ ID NO: 1877653 - DNA, 15 bp, Homo sapiens
ctccccctccaaaac

SEQ ID NO: 1877654 - DNA, 15 bp, Homo sapiens
tccccctccaaaaca

SEQ ID NO: 1877655 - DNA, 15 bp, Homo sapiens
ccccctccaaaacac

SEQ ID NO: 1877656 - DNA, 15 bp, Homo sapiens
cccctccaaaacaca

SEQ ID NO: 1877657 - DNA, 15 bp, Homo sapiens
ccctccaaaacacaa

SEQ ID NO: 1877658 - DNA, 15 bp, Homo sapiens
cctccaaaacacaaa

SEQ ID NO: 1877659 - DNA, 15 bp, Homo sapiens
tccaaaacacaaaac

SEQ ID NO: 1877660 - DNA, 15 bp, Homo sapiens
ccaaaacacaaaact

SEQ ID NO: 1877661 - DNA, 15 bp, Homo sapiens
caaaacacaaaactc

SEQ ID NO: 1877662 - DNA, 15 bp, Homo sapiens
aaaacacaaaactca

SEQ ID NO: 1877663 - DNA, 15 bp, Homo sapiens
aaacacaaaactcac

SEQ ID NO: 1877664 - DNA, 15 bp, Homo sapiens
aacacaaaactcacc

SEQ ID NO: 1877665 - DNA, 15 bp, Homo sapiens
cacaaaactcaccac

SEQ ID NO: 1877666 - DNA, 15 bp, Homo sapiens
acaaaactcaccacc

SEQ ID NO: 1877667 - DNA, 15 bp, Homo sapiens
caaaactcaccacca

SEQ ID NO: 1877668 - DNA, 15 bp, Homo sapiens
aaaactcaccaccat

SEQ ID NO: 1877669 - DNA, 15 bp, Homo sapiens
aaactcaccaccata

SEQ ID NO: 1877670 - DNA, 15 bp, Homo sapiens
aactcaccaccatat

SEQ ID NO: 1877671 - DNA, 15 bp, Homo sapiens
actcaccaccatatc

SEQ ID NO: 1877672 - DNA, 15 bp, Homo sapiens
ctcaccaccatatcc

SEQ ID NO: 1877673 - DNA, 15 bp, Homo sapiens
tcaccaccatatcct

SEQ ID NO: 1877674 - DNA, 15 bp, Homo sapiens
caccaccatatcctt

SEQ ID NO: 1877675 - DNA, 15 bp, Homo sapiens
accaccatatccttt

SEQ ID NO: 1877676 - DNA, 15 bp, Homo sapiens
ccaccatatcctttc

SEQ ID NO: 1877677 - DNA, 15 bp, Homo sapiens
caccatatcctttcc

SEQ ID NO: 1877678 - DNA, 15 bp, Homo sapiens
accatatcctttcct

SEQ ID NO: 1877679 - DNA, 15 bp, Homo sapiens
ccatatcctttccta

SEQ ID NO: 1877680 - DNA, 15 bp, Homo sapiens
catatcctttcctaa

SEQ ID NO: 1877681 - DNA, 15 bp, Homo sapiens
atatcctttcctaaa

SEQ ID NO: 1877682 - DNA, 15 bp, Homo sapiens
tatcctttcctaaag

SEQ ID NO: 1877683 - DNA, 15 bp, Homo sapiens
atcctttcctaaagc

SEQ ID NO: 1877684 - DNA, 15 bp, Homo sapiens
tcctttcctaaagcg

SEQ ID NO: 1877685 - DNA, 15 bp, Homo sapiens
cctttcctaaagcga

SEQ ID NO: 1877686 - DNA, 15 bp, Homo sapiens
ctttcctaaagcgat

SEQ ID NO: 1877687 - DNA, 15 bp, Homo sapiens
tttcctaaagcgatc

SEQ ID NO: 1877688 - DNA, 15 bp, Homo sapiens
ttcctaaagcgatca

SEQ ID NO: 1877689 - DNA, 15 bp, Homo sapiens
tcctaaagcgatcag

SEQ ID NO: 1877690 - DNA, 15 bp, Homo sapiens
cctaaagcgatcagt

SEQ ID NO: 1877691 - DNA, 15 bp, Homo sapiens
ctaaagcgatcagtt

SEQ ID NO: 1877692 - DNA, 15 bp, Homo sapiens
taaagcgatcagttg

SEQ ID NO: 1877693 - DNA, 15 bp, Homo sapiens
aaagcgatcagttgg

SEQ ID NO: 1877694 - DNA, 15 bp, Homo sapiens
aagcgatcagttggc

SEQ ID NO: 1877695 - DNA, 15 bp, Homo sapiens
agcgatcagttggcc

SEQ ID NO: 1877696 - DNA, 15 bp, Homo sapiens
gcgatcagttggccc

SEQ ID NO: 1877697 - DNA, 15 bp, Homo sapiens
cgatcagttggccca

SEQ ID NO: 1877698 - DNA, 15 bp, Homo sapiens
gatcagttggcccat

SEQ ID NO: 1877699 - DNA, 15 bp, Homo sapiens
atcagttggcccata

SEQ ID NO: 1877700 - DNA, 15 bp, Homo sapiens
tcagttggcccatat

SEQ ID NO: 1877701 - DNA, 15 bp, Homo sapiens
cagttggcccatatt

SEQ ID NO: 1877702 - DNA, 15 bp, Homo sapiens
agttggcccatattc

SEQ ID NO: 1877703 - DNA, 15 bp, Homo sapiens
gttggcccatattct

SEQ ID NO: 1877704 - DNA, 15 bp, Homo sapiens
ttggcccatattctg

SEQ ID NO: 1877705 - DNA, 15 bp, Homo sapiens
tggcccatattctgt

SEQ ID NO: 1877706 - DNA, 15 bp, Homo sapiens
ggcccatattctgtc

SEQ ID NO: 1877707 - DNA, 15 bp, Homo sapiens
gcccatattctgtct

SEQ ID NO: 1877708 - DNA, 15 bp, Homo sapiens
cccatattctgtctc

SEQ ID NO: 1877709 - DNA, 15 bp, Homo sapiens
ccatattctgtctct

SEQ ID NO: 1877710 - DNA, 15 bp, Homo sapiens
catattctgtctctc

SEQ ID NO: 1877711 - DNA, 15 bp, Homo sapiens
atattctgtctctct

SEQ ID NO: 1877712 - DNA, 15 bp, Homo sapiens
tattctgtctctctt

SEQ ID NO: 1877713 - DNA, 15 bp, Homo sapiens
attctgtctctcttc

SEQ ID NO: 1877714 - DNA, 15 bp, Homo sapiens
ttctgtctctcttcc

SEQ ID NO: 1877715 - DNA, 15 bp, Homo sapiens
tctgtctctcttcct

SEQ ID NO: 1877716 - DNA, 15 bp, Homo sapiens
ctgtctctcttcctt

SEQ ID NO: 1877717 - DNA, 15 bp, Homo sapiens
tgtctctcttccttc

SEQ ID NO: 1877718 - DNA, 15 bp, Homo sapiens
gtctctcttccttcc

SEQ ID NO: 1877719 - DNA, 15 bp, Homo sapiens
tctctcttccttcct

SEQ ID NO: 1877720 - DNA, 15 bp, Homo sapiens
ctctcttccttcctt

SEQ ID NO: 1877721 - DNA, 15 bp, Homo sapiens
tctcttccttccttc

SEQ ID NO: 1877722 - DNA, 15 bp, Homo sapiens
ctcttccttccttct

SEQ ID NO: 1877723 - DNA, 15 bp, Homo sapiens
tcttccttccttctt

SEQ ID NO: 1877724 - DNA, 15 bp, Homo sapiens
cttccttccttcttt

SEQ ID NO: 1877725 - DNA, 15 bp, Homo sapiens
ttccttccttctttc

SEQ ID NO: 1877726 - DNA, 15 bp, Homo sapiens
tccttccttctttct

SEQ ID NO: 1877727 - DNA, 15 bp, Homo sapiens
ccttccttctttctt

SEQ ID NO: 1877728 - DNA, 15 bp, Homo sapiens
cttccttctttcttt

SEQ ID NO: 1877729 - DNA, 15 bp, Homo sapiens
ttccttctttctttc

SEQ ID NO: 1877730 - DNA, 15 bp, Homo sapiens
tccttctttctttcc

SEQ ID NO: 1877731 - DNA, 15 bp, Homo sapiens
ccttctttctttcct

SEQ ID NO: 1877732 - DNA, 15 bp, Homo sapiens
cttctttctttcctt

SEQ ID NO: 1877733 - DNA, 15 bp, Homo sapiens
ttctttctttccttc

SEQ ID NO: 1877734 - DNA, 15 bp, Homo sapiens
tctttctttccttct

SEQ ID NO: 1877735 - DNA, 15 bp, Homo sapiens
ctttctttccttctt

SEQ ID NO: 1877736 - DNA, 15 bp, Homo sapiens
tttctttccttcttt

SEQ ID NO: 1877737 - DNA, 15 bp, Homo sapiens
ttctttccttctttt

SEQ ID NO: 1877738 - DNA, 15 bp, Homo sapiens
tctttccttcttttt

SEQ ID NO: 1877739 - DNA, 15 bp, Homo sapiens
ctttccttctttttt

SEQ ID NO: 1877740 - DNA, 15 bp, Homo sapiens
tttccttcttttttc

SEQ ID NO: 1877741 - DNA, 15 bp, Homo sapiens
ttccttcttttttcc

SEQ ID NO: 1877742 - DNA, 15 bp, Homo sapiens
tccttcttttttccc

SEQ ID NO: 1877743 - DNA, 15 bp, Homo sapiens
ccttcttttttccct

SEQ ID NO: 1877744 - DNA, 15 bp, Homo sapiens
cttcttttttccctt

SEQ ID NO: 1877745 - DNA, 15 bp, Homo sapiens
ttcttttttcccttt

SEQ ID NO: 1877746 - DNA, 15 bp, Homo sapiens
tcttttttccctttc

SEQ ID NO: 1877747 - DNA, 15 bp, Homo sapiens
cttttttccctttct

SEQ ID NO: 1877748 - DNA, 15 bp, Homo sapiens
ttttttccctttctt

SEQ ID NO: 1877749 - DNA, 15 bp, Homo sapiens
tttttccctttcttc

SEQ ID NO: 1877750 - DNA, 15 bp, Homo sapiens
ttttccctttcttcc

SEQ ID NO: 1877751 - DNA, 15 bp, Homo sapiens
tttccctttcttccc

SEQ ID NO: 1877752 - DNA, 15 bp, Homo sapiens
ttccctttcttccct

SEQ ID NO: 1877753 - DNA, 15 bp, Homo sapiens
tccctttcttccctc

SEQ ID NO: 1877754 - DNA, 15 bp, Homo sapiens
ccctttcttccctcc

SEQ ID NO: 1877755 - DNA, 15 bp, Homo sapiens
cctttcttccctcct

SEQ ID NO: 1877756 - DNA, 15 bp, Homo sapiens
ctttcttccctcctt

SEQ ID NO: 1877757 - DNA, 15 bp, Homo sapiens
tttcttccctccttc

SEQ ID NO: 1877758 - DNA, 15 bp, Homo sapiens
ttcttccctccttct

SEQ ID NO: 1877759 - DNA, 15 bp, Homo sapiens
tcttccctccttctt

SEQ ID NO: 1877760 - DNA, 15 bp, Homo sapiens
cttccctccttcttt

SEQ ID NO: 1877761 - DNA, 15 bp, Homo sapiens
ttccctccttctttc

SEQ ID NO: 1877762 - DNA, 15 bp, Homo sapiens
tccctccttctttct

SEQ ID NO: 1877763 - DNA, 15 bp, Homo sapiens
ccctccttctttctt

SEQ ID NO: 1877764 - DNA, 15 bp, Homo sapiens
cctccttctttcttt

SEQ ID NO: 1877765 - DNA, 15 bp, Homo sapiens
ctccttctttctttt

SEQ ID NO: 1877766 - DNA, 15 bp, Homo sapiens
tccttctttcttttc

SEQ ID NO: 1877767 - DNA, 15 bp, Homo sapiens
ccttctttcttttct

SEQ ID NO: 1877768 - DNA, 15 bp, Homo sapiens
cttctttcttttctt

SEQ ID NO: 1877769 - DNA, 15 bp, Homo sapiens
ttctttcttttcttt

SEQ ID NO: 1877770 - DNA, 15 bp, Homo sapiens
ctttcttttcttttt

SEQ ID NO: 1877771 - DNA, 15 bp, Homo sapiens
cttttcttttttttc

SEQ ID NO: 1877772 - DNA, 15 bp, Homo sapiens
tttcttttttttccc

SEQ ID NO: 1877773 - DNA, 15 bp, Homo sapiens
ttcttttttttcccc

SEQ ID NO: 1877774 - DNA, 15 bp, Homo sapiens
tcttttttttcccct

SEQ ID NO: 1877775 - DNA, 15 bp, Homo sapiens
cttttttttcccctc

SEQ ID NO: 1877776 - DNA, 15 bp, Homo sapiens
ttttttttcccctcc

SEQ ID NO: 1877777 - DNA, 15 bp, Homo sapiens
tttttttcccctccc

SEQ ID NO: 1877778 - DNA, 15 bp, Homo sapiens
ttttttcccctccct

SEQ ID NO: 1877779 - DNA, 15 bp, Homo sapiens
tttttcccctccctc

SEQ ID NO: 1877780 - DNA, 15 bp, Homo sapiens
ttttcccctccctcc

SEQ ID NO: 1877781 - DNA, 15 bp, Homo sapiens
tttcccctccctcct

SEQ ID NO: 1877782 - DNA, 15 bp, Homo sapiens
ttcccctccctcctt

SEQ ID NO: 1877783 - DNA, 15 bp, Homo sapiens
tcccctccctccttc

SEQ ID NO: 1877784 - DNA, 15 bp, Homo sapiens
cccctccctccttcc

SEQ ID NO: 1877785 - DNA, 15 bp, Homo sapiens
ctccctccttccctc

SEQ ID NO: 1877786 - DNA, 15 bp, Homo sapiens
tccctccttccctcc

SEQ ID NO: 1877787 - DNA, 15 bp, Homo sapiens
ccctccttccctccc

SEQ ID NO: 1877788 - DNA, 15 bp, Homo sapiens
cctccttccctccct

SEQ ID NO: 1877789 - DNA, 15 bp, Homo sapiens
ctccttccctccctc

SEQ ID NO: 1877790 - DNA, 15 bp, Homo sapiens
tccttccctccctct

SEQ ID NO: 1877791 - DNA, 15 bp, Homo sapiens
ccttccctccctctc

SEQ ID NO: 1877792 - DNA, 15 bp, Homo sapiens
ttccctccctctctc

SEQ ID NO: 1877793 - DNA, 15 bp, Homo sapiens
tccctccctctctcc

SEQ ID NO: 1877794 - DNA, 15 bp, Homo sapiens
ccctccctctctccc

SEQ ID NO: 1877795 - DNA, 15 bp, Homo sapiens
cctccctctctccct

SEQ ID NO: 1877796 - DNA, 15 bp, Homo sapiens
ctccctctctccctc

SEQ ID NO: 1877797 - DNA, 15 bp, Homo sapiens
tccctctctccctcc

SEQ ID NO: 1877798 - DNA, 15 bp, Homo sapiens
ccctctctccctccc

SEQ ID NO: 1877799 - DNA, 15 bp, Homo sapiens
cctctctccctccct

SEQ ID NO: 1877800 - DNA, 15 bp, Homo sapiens
ctctctccctccctt

SEQ ID NO: 1877801 - DNA, 15 bp, Homo sapiens
tctctccctcccttc

SEQ ID NO: 1877802 - DNA, 15 bp, Homo sapiens
ctctccctcccttcc

SEQ ID NO: 1877803 - DNA, 15 bp, Homo sapiens
tctccctcccttcct

SEQ ID NO: 1877804 - DNA, 15 bp, Homo sapiens
ttccttccttccttg

SEQ ID NO: 1877805 - DNA, 15 bp, Homo sapiens
tccttccttccttgt

SEQ ID NO: 1877806 - DNA, 15 bp, Homo sapiens
ccttccttccttgtt

SEQ ID NO: 1877807 - DNA, 15 bp, Homo sapiens
cttccttccttgttt

SEQ ID NO: 1877808 - DNA, 15 bp, Homo sapiens
ttccttccttgtttc

SEQ ID NO: 1877809 - DNA, 15 bp, Homo sapiens
tccttccttgtttcc

SEQ ID NO: 1877810 - DNA, 15 bp, Homo sapiens
ccttccttgtttcct

SEQ ID NO: 1877811 - DNA, 15 bp, Homo sapiens
cttccttgtttcctt

SEQ ID NO: 1877812 - DNA, 15 bp, Homo sapiens
ttccttgtttccttc

SEQ ID NO: 1877813 - DNA, 15 bp, Homo sapiens
tccttgtttccttct

SEQ ID NO: 1877814 - DNA, 15 bp, Homo sapiens
ccttgtttccttctt

SEQ ID NO: 1877815 - DNA, 15 bp, Homo sapiens
cttgtttccttcttt

SEQ ID NO: 1877816 - DNA, 15 bp, Homo sapiens
ttgtttccttctttc

SEQ ID NO: 1877817 - DNA, 15 bp, Homo sapiens
tgtttccttctttcc

SEQ ID NO: 1877818 - DNA, 15 bp, Homo sapiens
gtttccttctttcct

SEQ ID NO: 1877819 - DNA, 15 bp, Homo sapiens
tttccttctttcctc

SEQ ID NO: 1877820 - DNA, 15 bp, Homo sapiens
ttccttctttcctcc

SEQ ID NO: 1877821 - DNA, 15 bp, Homo sapiens
tccttctttcctcct

SEQ ID NO: 1877822 - DNA, 15 bp, Homo sapiens
ccttctttcctcctc

SEQ ID NO: 1877823 - DNA, 15 bp, Homo sapiens
ttctttcctcctctc

SEQ ID NO: 1877824 - DNA, 15 bp, Homo sapiens
tctttcctcctctca

SEQ ID NO: 1877825 - DNA, 15 bp, Homo sapiens
ctttcctcctctcat

SEQ ID NO: 1877826 - DNA, 15 bp, Homo sapiens
tttcctcctctcatt

SEQ ID NO: 1877827 - DNA, 15 bp, Homo sapiens
ttcctcctctcattt

SEQ ID NO: 1877828 - DNA, 15 bp, Homo sapiens
tcctcctctcattta

SEQ ID NO: 1877829 - DNA, 15 bp, Homo sapiens
cctcctctcatttat

SEQ ID NO: 1877830 - DNA, 15 bp, Homo sapiens
ctcctctcatttatt

SEQ ID NO: 1877831 - DNA, 15 bp, Homo sapiens
tcctctcatttattt

SEQ ID NO: 1877832 - DNA, 15 bp, Homo sapiens
cctctcatttattta

SEQ ID NO: 1877833 - DNA, 15 bp, Homo sapiens
ctctcatttatttat

SEQ ID NO: 1877834 - DNA, 15 bp, Homo sapiens
tctcatttatttatt

SEQ ID NO: 1877835 - DNA, 15 bp, Homo sapiens
ctcatttatttattc

SEQ ID NO: 1877836 - DNA, 15 bp, Homo sapiens
catttatttattcaa

SEQ ID NO: 1877837 - DNA, 15 bp, Homo sapiens
ttatttattcaacag

SEQ ID NO: 1877838 - DNA, 15 bp, Homo sapiens
tatttattcaacagc

SEQ ID NO: 1877839 - DNA, 15 bp, Homo sapiens
atttattcaacagcc

SEQ ID NO: 1877840 - DNA, 15 bp, Homo sapiens
tttattcaacagcca

SEQ ID NO: 1877841 - DNA, 15 bp, Homo sapiens
ttattcaacagccat

SEQ ID NO: 1877842 - DNA, 15 bp, Homo sapiens
tattcaacagccatt

SEQ ID NO: 1877843 - DNA, 15 bp, Homo sapiens
attcaacagccattg

SEQ ID NO: 1877844 - DNA, 15 bp, Homo sapiens
ttcaacagccattga

SEQ ID NO: 1877845 - DNA, 15 bp, Homo sapiens
tcaacagccattgag

SEQ ID NO: 1877846 - DNA, 15 bp, Homo sapiens
caacagccattgagc

SEQ ID NO: 1877847 - DNA, 15 bp, Homo sapiens
aacagccattgagca

SEQ ID NO: 1877848 - DNA, 15 bp, Homo sapiens
acagccattgagcac

SEQ ID NO: 1877849 - DNA, 15 bp, Homo sapiens
cagccattgagcacc

SEQ ID NO: 1877850 - DNA, 15 bp, Homo sapiens
agccattgagcacct

SEQ ID NO: 1877851 - DNA, 15 bp, Homo sapiens
gccattgagcacctc

SEQ ID NO: 1877852 - DNA, 15 bp, Homo sapiens
ccattgagcacctcc

SEQ ID NO: 1877853 - DNA, 15 bp, Homo sapiens
cattgagcacctcct

SEQ ID NO: 1877854 - DNA, 15 bp, Homo sapiens
attgagcacctcctg

SEQ ID NO: 1877855 - DNA, 15 bp, Homo sapiens
ttgagcacctcctgt

SEQ ID NO: 1877856 - DNA, 15 bp, Homo sapiens
agcacctcctgtgtc

SEQ ID NO: 1877857 - DNA, 15 bp, Homo sapiens
gcacctcctgtgtca

SEQ ID NO: 1877858 - DNA, 15 bp, Homo sapiens
cacctcctgtgtcaa

SEQ ID NO: 1877859 - DNA, 15 bp, Homo sapiens
acctcctgtgtcaag

SEQ ID NO: 1877860 - DNA, 15 bp, Homo sapiens
cctcctgtgtcaagc

SEQ ID NO: 1877861 - DNA, 15 bp, Homo sapiens
ctcctgtgtcaagcc

SEQ ID NO: 1877862 - DNA, 15 bp, Homo sapiens
tcctgtgtcaagcct

SEQ ID NO: 1877863 - DNA, 15 bp, Homo sapiens
cctgtgtcaagcctg

SEQ ID NO: 1877864 - DNA, 15 bp, Homo sapiens
ctgtgtcaagcctgt

SEQ ID NO: 1877865 - DNA, 15 bp, Homo sapiens
tgtgtcaagcctgta

SEQ ID NO: 1877866 - DNA, 15 bp, Homo sapiens
gtgtcaagcctgtag

SEQ ID NO: 1877867 - DNA, 15 bp, Homo sapiens
tgtcaagcctgtagg

SEQ ID NO: 1877868 - DNA, 15 bp, Homo sapiens
gtcaagcctgtagga

SEQ ID NO: 1877869 - DNA, 15 bp, Homo sapiens
tcaagcctgtaggac

SEQ ID NO: 1877870 - DNA, 15 bp, Homo sapiens
caagcctgtaggact

SEQ ID NO: 1877871 - DNA, 15 bp, Homo sapiens
aagcctgtaggactc

SEQ ID NO: 1877872 - DNA, 15 bp, Homo sapiens
agcctgtaggactca

SEQ ID NO: 1877873 - DNA, 15 bp, Homo sapiens
gcctgtaggactcaa

SEQ ID NO: 1877874 - DNA, 15 bp, Homo sapiens
cctgtaggactcaag

SEQ ID NO: 1877875 - DNA, 15 bp, Homo sapiens
ctgtaggactcaaga

SEQ ID NO: 1877876 - DNA, 15 bp, Homo sapiens
tgtaggactcaagag

SEQ ID NO: 1877877 - DNA, 15 bp, Homo sapiens
gtaggactcaagagg

SEQ ID NO: 1877878 - DNA, 15 bp, Homo sapiens
tgcaaggaatctggc

SEQ ID NO: 1877879 - DNA, 15 bp, Homo sapiens
gcaaggaatctggct

SEQ ID NO: 1877880 - DNA, 15 bp, Homo sapiens
caaggaatctggctc

SEQ ID NO: 1877881 - DNA, 15 bp, Homo sapiens
aaggaatctggctca

SEQ ID NO: 1877882 - DNA, 15 bp, Homo sapiens
aggaatctggctcaa

SEQ ID NO: 1877883 - DNA, 15 bp, Homo sapiens
ggaatctggctcaac

SEQ ID NO: 1877884 - DNA, 15 bp, Homo sapiens
gaatctggctcaaca

SEQ ID NO: 1877885 - DNA, 15 bp, Homo sapiens
aatctggctcaacac

SEQ ID NO: 1877886 - DNA, 15 bp, Homo sapiens
atctggctcaacacc

SEQ ID NO: 1877887 - DNA, 15 bp, Homo sapiens
tctggctcaacacct

SEQ ID NO: 1877888 - DNA, 15 bp, Homo sapiens
ctggctcaacacctg

SEQ ID NO: 1877889 - DNA, 15 bp, Homo sapiens
tggctcaacacctgc

SEQ ID NO: 1877890 - DNA, 15 bp, Homo sapiens
ggctcaacacctgcc

SEQ ID NO: 1877891 - DNA, 15 bp, Homo sapiens
gctcaacacctgcca

SEQ ID NO: 1877892 - DNA, 15 bp, Homo sapiens
ctcaacacctgccat

SEQ ID NO: 1877893 - DNA, 15 bp, Homo sapiens
tcaacacctgccatt

SEQ ID NO: 1877894 - DNA, 15 bp, Homo sapiens
caacacctgccattt

SEQ ID NO: 1877895 - DNA, 15 bp, Homo sapiens
aacacctgccatttg

SEQ ID NO: 1877896 - DNA, 15 bp, Homo sapiens
acacctgccatttgg

SEQ ID NO: 1877897 - DNA, 15 bp, Homo sapiens
cacctgccatttggg

SEQ ID NO: 1877898 - DNA, 15 bp, Homo sapiens
acctgccatttgggt

SEQ ID NO: 1877899 - DNA, 15 bp, Homo sapiens
cctgccatttgggtc

SEQ ID NO: 1877900 - DNA, 15 bp, Homo sapiens
ctgccatttgggtct

SEQ ID NO: 1877901 - DNA, 15 bp, Homo sapiens
tgccatttgggtctc

SEQ ID NO: 1877902 - DNA, 15 bp, Homo sapiens
gccatttgggtctca

SEQ ID NO: 1877903 - DNA, 15 bp, Homo sapiens
ccatttgggtctcag

SEQ ID NO: 1877904 - DNA, 15 bp, Homo sapiens
catttgggtctcagt

SEQ ID NO: 1877905 - DNA, 15 bp, Homo sapiens
atttgggtctcagtt

SEQ ID NO: 1877906 - DNA, 15 bp, Homo sapiens
tttgggtctcagttt

SEQ ID NO: 1877907 - DNA, 15 bp, Homo sapiens
ttgggtctcagtttt

SEQ ID NO: 1877908 - DNA, 15 bp, Homo sapiens
tgggtctcagtttta

SEQ ID NO: 1877909 - DNA, 15 bp, Homo sapiens
gggtctcagttttac

SEQ ID NO: 1877910 - DNA, 15 bp, Homo sapiens
ggtctcagttttaca

SEQ ID NO: 1877911 - DNA, 15 bp, Homo sapiens
gtctcagttttacac

SEQ ID NO: 1877912 - DNA, 15 bp, Homo sapiens
tctcagttttacaca

SEQ ID NO: 1877913 - DNA, 15 bp, Homo sapiens
ctcagttttacacat

SEQ ID NO: 1877914 - DNA, 15 bp, Homo sapiens
tcagttttacacatt

SEQ ID NO: 1877915 - DNA, 15 bp, Homo sapiens
cagttttacacattt

SEQ ID NO: 1877916 - DNA, 15 bp, Homo sapiens
agttttacacatttt

SEQ ID NO: 1877917 - DNA, 15 bp, Homo sapiens
gttttacacattttg

SEQ ID NO: 1877918 - DNA, 15 bp, Homo sapiens
ttttacacattttga

SEQ ID NO: 1877919 - DNA, 15 bp, Homo sapiens
tttacacattttgat

SEQ ID NO: 1877920 - DNA, 15 bp, Homo sapiens
ttacacattttgatc

SEQ ID NO: 1877921 - DNA, 15 bp, Homo sapiens
tacacattttgatct

SEQ ID NO: 1877922 - DNA, 15 bp, Homo sapiens
acacattttgatctt

SEQ ID NO: 1877923 - DNA, 15 bp, Homo sapiens
cacattttgatcttg

SEQ ID NO: 1877924 - DNA, 15 bp, Homo sapiens
acattttgatcttgc

SEQ ID NO: 1877925 - DNA, 15 bp, Homo sapiens
cattttgatcttgca

SEQ ID NO: 1877926 - DNA, 15 bp, Homo sapiens
attttgatcttgcac

SEQ ID NO: 1877927 - DNA, 15 bp, Homo sapiens
ttttgatcttgcaca

SEQ ID NO: 1877928 - DNA, 15 bp, Homo sapiens
tttgatcttgcacat

SEQ ID NO: 1877929 - DNA, 15 bp, Homo sapiens
ttgatcttgcacatg

SEQ ID NO: 1877930 - DNA, 15 bp, Homo sapiens
tgatcttgcacatga

SEQ ID NO: 1877931 - DNA, 15 bp, Homo sapiens
gatcttgcacatgat

SEQ ID NO: 1877932 - DNA, 15 bp, Homo sapiens
atcttgcacatgatt

SEQ ID NO: 1877933 - DNA, 15 bp, Homo sapiens
tcttgcacatgattt

SEQ ID NO: 1877934 - DNA, 15 bp, Homo sapiens
cttgcacatgatttc

SEQ ID NO: 1877935 - DNA, 15 bp, Homo sapiens
ttgcacatgatttca

SEQ ID NO: 1877936 - DNA, 15 bp, Homo sapiens
tgcacatgatttcac

SEQ ID NO: 1877937 - DNA, 15 bp, Homo sapiens
gcacatgatttcact

SEQ ID NO: 1877938 - DNA, 15 bp, Homo sapiens
cacatgatttcacta

SEQ ID NO: 1877939 - DNA, 15 bp, Homo sapiens
acatgatttcactag

SEQ ID NO: 1877940 - DNA, 15 bp, Homo sapiens
catgatttcactagg

SEQ ID NO: 1877941 - DNA, 15 bp, Homo sapiens
atgatttcactaggg

SEQ ID NO: 1877942 - DNA, 15 bp, Homo sapiens
tgatttcactagggc

SEQ ID NO: 1877943 - DNA, 15 bp, Homo sapiens
gatttcactagggca

SEQ ID NO: 1877944 - DNA, 15 bp, Homo sapiens
atttcactagggcaa

SEQ ID NO: 1877945 - DNA, 15 bp, Homo sapiens
tttcactagggcaaa

SEQ ID NO: 1877946 - DNA, 15 bp, Homo sapiens
ttcactagggcaaaa

SEQ ID NO: 1877947 - DNA, 15 bp, Homo sapiens
tcactagggcaaaat

SEQ ID NO: 1877948 - DNA, 15 bp, Homo sapiens
cactagggcaaaatt

SEQ ID NO: 1877949 - DNA, 15 bp, Homo sapiens
actagggcaaaatta

SEQ ID NO: 1877950 - DNA, 15 bp, Homo sapiens
ctagggcaaaattaa

SEQ ID NO: 1877951 - DNA, 15 bp, Homo sapiens
tagggcaaaattaag

SEQ ID NO: 1877952 - DNA, 15 bp, Homo sapiens
agggcaaaattaagt

SEQ ID NO: 1877953 - DNA, 15 bp, Homo sapiens
gggcaaaattaagtg

SEQ ID NO: 1877954 - DNA, 15 bp, Homo sapiens
ggcaaaattaagtgc

SEQ ID NO: 1877955 - DNA, 15 bp, Homo sapiens
gcaaaattaagtgca

SEQ ID NO: 1877956 - DNA, 15 bp, Homo sapiens
caaaattaagtgcat

SEQ ID NO: 1877957 - DNA, 15 bp, Homo sapiens
aaaattaagtgcatg

SEQ ID NO: 1877958 - DNA, 15 bp, Homo sapiens
aaattaagtgcatga

SEQ ID NO: 1877959 - DNA, 15 bp, Homo sapiens
aattaagtgcatgaa

SEQ ID NO: 1877960 - DNA, 15 bp, Homo sapiens
attaagtgcatgaag

SEQ ID NO: 1877961 - DNA, 15 bp, Homo sapiens
ttaagtgcatgaagg

SEQ ID NO: 1877962 - DNA, 15 bp, Homo sapiens
taagtgcatgaagga

SEQ ID NO: 1877963 - DNA, 15 bp, Homo sapiens
aagtgcatgaaggaa

SEQ ID NO: 1877964 - DNA, 15 bp, Homo sapiens
agtgcatgaaggaat

SEQ ID NO: 1877965 - DNA, 15 bp, Homo sapiens
gtgcatgaaggaatc

SEQ ID NO: 1877966 - DNA, 15 bp, Homo sapiens
tgcatgaaggaatca

SEQ ID NO: 1877967 - DNA, 15 bp, Homo sapiens
gcatgaaggaatcac

SEQ ID NO: 1877968 - DNA, 15 bp, Homo sapiens
catgaaggaatcaca

SEQ ID NO: 1877969 - DNA, 15 bp, Homo sapiens
atgaaggaatcacac

SEQ ID NO: 1877970 - DNA, 15 bp, Homo sapiens
tgaaggaatcacaca

SEQ ID NO: 1877971 - DNA, 15 bp, Homo sapiens
gaaggaatcacacat

SEQ ID NO: 1877972 - DNA, 15 bp, Homo sapiens
aaggaatcacacatt

SEQ ID NO: 1877973 - DNA, 15 bp, Homo sapiens
aggaatcacacattc

SEQ ID NO: 1877974 - DNA, 15 bp, Homo sapiens
ggaatcacacattcc

SEQ ID NO: 1877975 - DNA, 15 bp, Homo sapiens
gaatcacacattcct

SEQ ID NO: 1877976 - DNA, 15 bp, Homo sapiens
aatcacacattcctg

SEQ ID NO: 1877977 - DNA, 15 bp, Homo sapiens
atcacacattcctgg

SEQ ID NO: 1877978 - DNA, 15 bp, Homo sapiens
tcacacattcctggg

SEQ ID NO: 1877979 - DNA, 15 bp, Homo sapiens
cacacattcctgggt

SEQ ID NO: 1877980 - DNA, 15 bp, Homo sapiens
acacattcctgggtc

SEQ ID NO: 1877981 - DNA, 15 bp, Homo sapiens
cacattcctgggtct

SEQ ID NO: 1877982 - DNA, 15 bp, Homo sapiens
acattcctgggtctc

SEQ ID NO: 1877983 - DNA, 15 bp, Homo sapiens
cattcctgggtctcg

SEQ ID NO: 1877984 - DNA, 15 bp, Homo sapiens
attcctgggtctcgc

SEQ ID NO: 1877985 - DNA, 15 bp, Homo sapiens
ttcctgggtctcgcc

SEQ ID NO: 1877986 - DNA, 15 bp, Homo sapiens
tcctgggtctcgccc

SEQ ID NO: 1877987 - DNA, 15 bp, Homo sapiens
cctgggtctcgccct

SEQ ID NO: 1877988 - DNA, 15 bp, Homo sapiens
ctgggtctcgccctc

SEQ ID NO: 1877989 - DNA, 15 bp, Homo sapiens
tgggtctcgccctca

SEQ ID NO: 1877990 - DNA, 15 bp, Homo sapiens
gggtctcgccctcag

SEQ ID NO: 1877991 - DNA, 15 bp, Homo sapiens
ggtctcgccctcagt

SEQ ID NO: 1877992 - DNA, 15 bp, Homo sapiens
gtctcgccctcagtg

SEQ ID NO: 1877993 - DNA, 15 bp, Homo sapiens
tctcgccctcagtga

SEQ ID NO: 1877994 - DNA, 15 bp, Homo sapiens
ctcgccctcagtgat

SEQ ID NO: 1877995 - DNA, 15 bp, Homo sapiens
tcgccctcagtgatg

SEQ ID NO: 1877996 - DNA, 15 bp, Homo sapiens
cgccctcagtgatgc

SEQ ID NO: 1877997 - DNA, 15 bp, Homo sapiens
gccctcagtgatgca

SEQ ID NO: 1877998 - DNA, 15 bp, Homo sapiens
ccctcagtgatgcag

SEQ ID NO: 1877999 - DNA, 15 bp, Homo sapiens
cctcagtgatgcaga

SEQ ID NO: 1878000 - DNA, 15 bp, Homo sapiens
ctcagtgatgcagag

SEQ ID NO: 1878001 - DNA, 15 bp, Homo sapiens
tcagtgatgcagagt

SEQ ID NO: 1878002 - DNA, 15 bp, Homo sapiens
cagtgatgcagagtg

SEQ ID NO: 1878003 - DNA, 15 bp, Homo sapiens
agtgatgcagagtgg

SEQ ID NO: 1878004 - DNA, 15 bp, Homo sapiens
gtgatgcagagtggg

SEQ ID NO: 1878005 - DNA, 15 bp, Homo sapiens
tgatgcagagtgggt

SEQ ID NO: 1878006 - DNA, 15 bp, Homo sapiens
gatgcagagtgggta

SEQ ID NO: 1878007 - DNA, 15 bp, Homo sapiens
atgcagagtgggtag

SEQ ID NO: 1878008 - DNA, 15 bp, Homo sapiens
tgcagagtgggtagg

SEQ ID NO: 1878009 - DNA, 15 bp, Homo sapiens
gcagagtgggtaggg

SEQ ID NO: 1878010 - DNA, 15 bp, Homo sapiens
cagagtgggtaggga

SEQ ID NO: 1878011 - DNA, 15 bp, Homo sapiens
agagtgggtagggac

SEQ ID NO: 1878012 - DNA, 15 bp, Homo sapiens
gagtgggtagggacc

SEQ ID NO: 1878013 - DNA, 15 bp, Homo sapiens
agtgggtagggacct

SEQ ID NO: 1878014 - DNA, 15 bp, Homo sapiens
gtgggtagggacctg

SEQ ID NO: 1878015 - DNA, 15 bp, Homo sapiens
tgggtagggacctgg

SEQ ID NO: 1878016 - DNA, 15 bp, Homo sapiens
gggtagggacctggg

SEQ ID NO: 1878017 - DNA, 15 bp, Homo sapiens
ggtagggacctgggc

SEQ ID NO: 1878018 - DNA, 15 bp, Homo sapiens
gtagggacctgggct

SEQ ID NO: 1878019 - DNA, 15 bp, Homo sapiens
tagggacctgggcta

SEQ ID NO: 1878020 - DNA, 15 bp, Homo sapiens
agggacctgggctat

SEQ ID NO: 1878021 - DNA, 15 bp, Homo sapiens
gggacctgggctatg

SEQ ID NO: 1878022 - DNA, 15 bp, Homo sapiens
ggacctgggctatgg

SEQ ID NO: 1878023 - DNA, 15 bp, Homo sapiens
gacctgggctatggg

SEQ ID NO: 1878024 - DNA, 15 bp, Homo sapiens
acctgggctatgggg

SEQ ID NO: 1878025 - DNA, 15 bp, Homo sapiens
cctgggctatggggg

SEQ ID NO: 1878026 - DNA, 15 bp, Homo sapiens
ctgggctatgggggc

SEQ ID NO: 1878027 - DNA, 15 bp, Homo sapiens
tgggctatgggggcc

SEQ ID NO: 1878028 - DNA, 15 bp, Homo sapiens
gggctatgggggccc

SEQ ID NO: 1878029 - DNA, 15 bp, Homo sapiens
ggctatgggggccct

SEQ ID NO: 1878030 - DNA, 15 bp, Homo sapiens
gctatgggggccctg

SEQ ID NO: 1878031 - DNA, 15 bp, Homo sapiens
ctatgggggccctgt

SEQ ID NO: 1878032 - DNA, 15 bp, Homo sapiens
tatgggggccctgta

SEQ ID NO: 1878033 - DNA, 15 bp, Homo sapiens
atgggggccctgtag

SEQ ID NO: 1878034 - DNA, 15 bp, Homo sapiens
tgggggccctgtagg

SEQ ID NO: 1878035 - DNA, 15 bp, Homo sapiens
gggggccctgtaggt

SEQ ID NO: 1878036 - DNA, 15 bp, Homo sapiens
ggggccctgtaggta

SEQ ID NO: 1878037 - DNA, 15 bp, Homo sapiens
gggccctgtaggtat

SEQ ID NO: 1878038 - DNA, 15 bp, Homo sapiens
ggccctgtaggtatt

SEQ ID NO: 1878039 - DNA, 15 bp, Homo sapiens
gccctgtaggtattc

SEQ ID NO: 1878040 - DNA, 15 bp, Homo sapiens
ccctgtaggtattct

SEQ ID NO: 1878041 - DNA, 15 bp, Homo sapiens
cctgtaggtattctg

SEQ ID NO: 1878042 - DNA, 15 bp, Homo sapiens
ctgtaggtattctgc

SEQ ID NO: 1878043 - DNA, 15 bp, Homo sapiens
tgtaggtattctgct

SEQ ID NO: 1878044 - DNA, 15 bp, Homo sapiens
gtaggtattctgctg

SEQ ID NO: 1878045 - DNA, 15 bp, Homo sapiens
taggtattctgctgc

SEQ ID NO: 1878046 - DNA, 15 bp, Homo sapiens
aggtattctgctgca

SEQ ID NO: 1878047 - DNA, 15 bp, Homo sapiens
ggtattctgctgcag

SEQ ID NO: 1878048 - DNA, 15 bp, Homo sapiens
gtattctgctgcaga

SEQ ID NO: 1878049 - DNA, 15 bp, Homo sapiens
tattctgctgcagat

SEQ ID NO: 1878050 - DNA, 15 bp, Homo sapiens
attctgctgcagatg

SEQ ID NO: 1878051 - DNA, 15 bp, Homo sapiens
ttctgctgcagatgg

SEQ ID NO: 1878052 - DNA, 15 bp, Homo sapiens
tctgctgcagatggg

SEQ ID NO: 1878053 - DNA, 15 bp, Homo sapiens
ctgctgcagatgggg

SEQ ID NO: 1878054 - DNA, 15 bp, Homo sapiens
tgctgcagatggggg

SEQ ID NO: 1878055 - DNA, 15 bp, Homo sapiens
gctgcagatgggggc

SEQ ID NO: 1878056 - DNA, 15 bp, Homo sapiens
ctgcagatgggggca

SEQ ID NO: 1878057 - DNA, 15 bp, Homo sapiens
tgcagatgggggcac

SEQ ID NO: 1878058 - DNA, 15 bp, Homo sapiens
gcagatgggggcacc

SEQ ID NO: 1878059 - DNA, 15 bp, Homo sapiens
cagatgggggcacca

SEQ ID NO: 1878060 - DNA, 15 bp, Homo sapiens
agatgggggcaccac

SEQ ID NO: 1878061 - DNA, 15 bp, Homo sapiens
gatgggggcaccaca

SEQ ID NO: 1878062 - DNA, 15 bp, Homo sapiens
atgggggcaccacac

SEQ ID NO: 1878063 - DNA, 15 bp, Homo sapiens
tgggggcaccacact

SEQ ID NO: 1878064 - DNA, 15 bp, Homo sapiens
gggggcaccacactt

SEQ ID NO: 1878065 - DNA, 15 bp, Homo sapiens
ggggcaccacacttg

SEQ ID NO: 1878066 - DNA, 15 bp, Homo sapiens
gggcaccacacttgc

SEQ ID NO: 1878067 - DNA, 15 bp, Homo sapiens
ggcaccacacttgca

SEQ ID NO: 1878068 - DNA, 15 bp, Homo sapiens
gcaccacacttgcag

SEQ ID NO: 1878069 - DNA, 15 bp, Homo sapiens
caccacacttgcagc

SEQ ID NO: 1878070 - DNA, 15 bp, Homo sapiens
accacacttgcagct

SEQ ID NO: 1878071 - DNA, 15 bp, Homo sapiens
ccacacttgcagctc

SEQ ID NO: 1878072 - DNA, 15 bp, Homo sapiens
cacacttgcagctca

SEQ ID NO: 1878073 - DNA, 15 bp, Homo sapiens
acacttgcagctcag

SEQ ID NO: 1878074 - DNA, 15 bp, Homo sapiens
cacttgcagctcaga

SEQ ID NO: 1878075 - DNA, 15 bp, Homo sapiens
acttgcagctcagaa

SEQ ID NO: 1878076 - DNA, 15 bp, Homo sapiens
cttgcagctcagaac

SEQ ID NO: 1878077 - DNA, 15 bp, Homo sapiens
ttgcagctcagaaca

SEQ ID NO: 1878078 - DNA, 15 bp, Homo sapiens
tgcagctcagaacag

SEQ ID NO: 1878079 - DNA, 15 bp, Homo sapiens
gcagctcagaacaga

SEQ ID NO: 1878080 - DNA, 15 bp, Homo sapiens
cagctcagaacagag

SEQ ID NO: 1878081 - DNA, 15 bp, Homo sapiens
agctcagaacagaga

SEQ ID NO: 1878082 - DNA, 15 bp, Homo sapiens
gctcagaacagagat

SEQ ID NO: 1878083 - DNA, 15 bp, Homo sapiens
ctcagaacagagata

SEQ ID NO: 1878084 - DNA, 15 bp, Homo sapiens
tcagaacagagataa

SEQ ID NO: 1878085 - DNA, 15 bp, Homo sapiens
cagaacagagataaa

SEQ ID NO: 1878086 - DNA, 15 bp, Homo sapiens
agaacagagataaaa

SEQ ID NO: 1878087 - DNA, 15 bp, Homo sapiens
gaacagagataaaac

SEQ ID NO: 1878088 - DNA, 15 bp, Homo sapiens
aacagagataaaacc

SEQ ID NO: 1878089 - DNA, 15 bp, Homo sapiens
acagagataaaacca

SEQ ID NO: 1878090 - DNA, 15 bp, Homo sapiens
cagagataaaaccag

SEQ ID NO: 1878091 - DNA, 15 bp, Homo sapiens
agagataaaaccaga

SEQ ID NO: 1878092 - DNA, 15 bp, Homo sapiens
gagataaaaccagat

SEQ ID NO: 1878093 - DNA, 15 bp, Homo sapiens
agataaaaccagata

SEQ ID NO: 1878094 - DNA, 15 bp, Homo sapiens
gataaaaccagataa

SEQ ID NO: 1878095 - DNA, 15 bp, Homo sapiens
ataaaaccagataaa

SEQ ID NO: 1878096 - DNA, 15 bp, Homo sapiens
taaaaccagataaaa

SEQ ID NO: 1878097 - DNA, 15 bp, Homo sapiens
aaaaccagataaaac

SEQ ID NO: 1878098 - DNA, 15 bp, Homo sapiens
aaaccagataaaact

SEQ ID NO: 1878099 - DNA, 15 bp, Homo sapiens
aaccagataaaactc

SEQ ID NO: 1878100 - DNA, 15 bp, Homo sapiens
accagataaaactcc

SEQ ID NO: 1878101 - DNA, 15 bp, Homo sapiens
ccagataaaactccg

SEQ ID NO: 1878102 - DNA, 15 bp, Homo sapiens
cagataaaactccgc

SEQ ID NO: 1878103 - DNA, 15 bp, Homo sapiens
agataaaactccgct

SEQ ID NO: 1878104 - DNA, 15 bp, Homo sapiens
gataaaactccgctt

SEQ ID NO: 1878105 - DNA, 15 bp, Homo sapiens
ataaaactccgcttt

SEQ ID NO: 1878106 - DNA, 15 bp, Homo sapiens
taaaactccgcttta

SEQ ID NO: 1878107 - DNA, 15 bp, Homo sapiens
aaaactccgctttat

SEQ ID NO: 1878108 - DNA, 15 bp, Homo sapiens
aaactccgctttatg

SEQ ID NO: 1878109 - DNA, 15 bp, Homo sapiens
aactccgctttatga

SEQ ID NO: 1878110 - DNA, 15 bp, Homo sapiens
actccgctttatgac

SEQ ID NO: 1878111 - DNA, 15 bp, Homo sapiens
ctccgctttatgact

SEQ ID NO: 1878112 - DNA, 15 bp, Homo sapiens
tccgctttatgactg

SEQ ID NO: 1878113 - DNA, 15 bp, Homo sapiens
ccgctttatgactgc

SEQ ID NO: 1878114 - DNA, 15 bp, Homo sapiens
cgctttatgactgct

SEQ ID NO: 1878115 - DNA, 15 bp, Homo sapiens
gctttatgactgctt

SEQ ID NO: 1878116 - DNA, 15 bp, Homo sapiens
ctttatgactgcttt

SEQ ID NO: 1878117 - DNA, 15 bp, Homo sapiens
tttatgactgctttg

SEQ ID NO: 1878118 - DNA, 15 bp, Homo sapiens
ttatgactgctttgc

SEQ ID NO: 1878119 - DNA, 15 bp, Homo sapiens
tatgactgctttgca

SEQ ID NO: 1878120 - DNA, 15 bp, Homo sapiens
atgactgctttgcat

SEQ ID NO: 1878121 - DNA, 15 bp, Homo sapiens
tgactgctttgcatc

SEQ ID NO: 1878122 - DNA, 15 bp, Homo sapiens
gactgctttgcatca

SEQ ID NO: 1878123 - DNA, 15 bp, Homo sapiens
actgctttgcatcac

SEQ ID NO: 1878124 - DNA, 15 bp, Homo sapiens
ctgctttgcatcact

SEQ ID NO: 1878125 - DNA, 15 bp, Homo sapiens
tgctttgcatcactt

SEQ ID NO: 1878126 - DNA, 15 bp, Homo sapiens
gctttgcatcacttt

SEQ ID NO: 1878127 - DNA, 15 bp, Homo sapiens
ctttgcatcactttc

SEQ ID NO: 1878128 - DNA, 15 bp, Homo sapiens
tttgcatcactttcc

SEQ ID NO: 1878129 - DNA, 15 bp, Homo sapiens
ttgcatcactttcca

SEQ ID NO: 1878130 - DNA, 15 bp, Homo sapiens
tgcatcactttccag

SEQ ID NO: 1878131 - DNA, 15 bp, Homo sapiens
gcatcactttccagc

SEQ ID NO: 1878132 - DNA, 15 bp, Homo sapiens
catcactttccagct

SEQ ID NO: 1878133 - DNA, 15 bp, Homo sapiens
atcactttccagctg

SEQ ID NO: 1878134 - DNA, 15 bp, Homo sapiens
tcactttccagctgg

SEQ ID NO: 1878135 - DNA, 15 bp, Homo sapiens
cactttccagctggc

SEQ ID NO: 1878136 - DNA, 15 bp, Homo sapiens
actttccagctggcc

SEQ ID NO: 1878137 - DNA, 15 bp, Homo sapiens
ctttccagctggcct

SEQ ID NO: 1878138 - DNA, 15 bp, Homo sapiens
tttccagctggcctc

SEQ ID NO: 1878139 - DNA, 15 bp, Homo sapiens
ttccagctggcctca

SEQ ID NO: 1878140 - DNA, 15 bp, Homo sapiens
tccagctggcctcat

SEQ ID NO: 1878141 - DNA, 15 bp, Homo sapiens
ccagctggcctcatc

SEQ ID NO: 1878142 - DNA, 15 bp, Homo sapiens
cagctggcctcatct

SEQ ID NO: 1878143 - DNA, 15 bp, Homo sapiens
agctggcctcatctg

SEQ ID NO: 1878144 - DNA, 15 bp, Homo sapiens
gctggcctcatctga

SEQ ID NO: 1878145 - DNA, 15 bp, Homo sapiens
ctggcctcatctgaa

SEQ ID NO: 1878146 - DNA, 15 bp, Homo sapiens
tggcctcatctgaac

SEQ ID NO: 1878147 - DNA, 15 bp, Homo sapiens
ggcctcatctgaaca

SEQ ID NO: 1878148 - DNA, 15 bp, Homo sapiens
gcctcatctgaacag

SEQ ID NO: 1878149 - DNA, 15 bp, Homo sapiens
cctcatctgaacagg

SEQ ID NO: 1878150 - DNA, 15 bp, Homo sapiens
ctcatctgaacaggg

SEQ ID NO: 1878151 - DNA, 15 bp, Homo sapiens
tcatctgaacagggc

SEQ ID NO: 1878152 - DNA, 15 bp, Homo sapiens
catctgaacagggca

SEQ ID NO: 1878153 - DNA, 15 bp, Homo sapiens
atctgaacagggcag

SEQ ID NO: 1878154 - DNA, 15 bp, Homo sapiens
tctgaacagggcaga

SEQ ID NO: 1878155 - DNA, 15 bp, Homo sapiens
ctgaacagggcagaa

SEQ ID NO: 1878156 - DNA, 15 bp, Homo sapiens
tgaacagggcagaaa

SEQ ID NO: 1878157 - DNA, 15 bp, Homo sapiens
gaacagggcagaaag

SEQ ID NO: 1878158 - DNA, 15 bp, Homo sapiens
aacagggcagaaagt

SEQ ID NO: 1878159 - DNA, 15 bp, Homo sapiens
acagggcagaaagtt

SEQ ID NO: 1878160 - DNA, 15 bp, Homo sapiens
cagggcagaaagttc

SEQ ID NO: 1878161 - DNA, 15 bp, Homo sapiens
agggcagaaagttcc

SEQ ID NO: 1878162 - DNA, 15 bp, Homo sapiens
gggcagaaagttcct

SEQ ID NO: 1878163 - DNA, 15 bp, Homo sapiens
ggcagaaagttccta

SEQ ID NO: 1878164 - DNA, 15 bp, Homo sapiens
gcagaaagttcctaa

SEQ ID NO: 1878165 - DNA, 15 bp, Homo sapiens
cagaaagttcctaat

SEQ ID NO: 1878166 - DNA, 15 bp, Homo sapiens
agaaagttcctaata

SEQ ID NO: 1878167 - DNA, 15 bp, Homo sapiens
gaaagttcctaataa

SEQ ID NO: 1878168 - DNA, 15 bp, Homo sapiens
aaagttcctaataac

SEQ ID NO: 1878169 - DNA, 15 bp, Homo sapiens
aagttcctaataaca

SEQ ID NO: 1878170 - DNA, 15 bp, Homo sapiens
agttcctaataacaa

SEQ ID NO: 1878171 - DNA, 15 bp, Homo sapiens
gttcctaataacaat

SEQ ID NO: 1878172 - DNA, 15 bp, Homo sapiens
ttcctaataacaata

SEQ ID NO: 1878173 - DNA, 15 bp, Homo sapiens
tcctaataacaataa

SEQ ID NO: 1878174 - DNA, 15 bp, Homo sapiens
cctaataacaataat

SEQ ID NO: 1878175 - DNA, 15 bp, Homo sapiens
ctaataacaataatc

SEQ ID NO: 1878176 - DNA, 15 bp, Homo sapiens
taataacaataatca

SEQ ID NO: 1878177 - DNA, 15 bp, Homo sapiens
aataacaataatcaa

SEQ ID NO: 1878178 - DNA, 15 bp, Homo sapiens
ataacaataatcaac

SEQ ID NO: 1878179 - DNA, 15 bp, Homo sapiens
taacaataatcaacg

SEQ ID NO: 1878180 - DNA, 15 bp, Homo sapiens
aacaataatcaacgt

SEQ ID NO: 1878181 - DNA, 15 bp, Homo sapiens
acaataatcaacgtc

SEQ ID NO: 1878182 - DNA, 15 bp, Homo sapiens
caataatcaacgtca

SEQ ID NO: 1878183 - DNA, 15 bp, Homo sapiens
aataatcaacgtcag

SEQ ID NO: 1878184 - DNA, 15 bp, Homo sapiens
ataatcaacgtcaga

SEQ ID NO: 1878185 - DNA, 15 bp, Homo sapiens
taatcaacgtcagaa

SEQ ID NO: 1878186 - DNA, 15 bp, Homo sapiens
aatcaacgtcagaat

SEQ ID NO: 1878187 - DNA, 15 bp, Homo sapiens
atcaacgtcagaatt

SEQ ID NO: 1878188 - DNA, 15 bp, Homo sapiens
tcaacgtcagaatta

SEQ ID NO: 1878189 - DNA, 15 bp, Homo sapiens
caacgtcagaattaa

SEQ ID NO: 1878190 - DNA, 15 bp, Homo sapiens
aacgtcagaattaaa

SEQ ID NO: 1878191 - DNA, 15 bp, Homo sapiens
acgtcagaattaaat

SEQ ID NO: 1878192 - DNA, 15 bp, Homo sapiens
cgtcagaattaaatg

SEQ ID NO: 1878193 - DNA, 15 bp, Homo sapiens
gtcagaattaaatgt

SEQ ID NO: 1878194 - DNA, 15 bp, Homo sapiens
tcagaattaaatgtg

SEQ ID NO: 1878195 - DNA, 15 bp, Homo sapiens
cagaattaaatgtgt

SEQ ID NO: 1878196 - DNA, 15 bp, Homo sapiens
agaattaaatgtgtg

SEQ ID NO: 1878197 - DNA, 15 bp, Homo sapiens
gaattaaatgtgtgt

SEQ ID NO: 1878198 - DNA, 15 bp, Homo sapiens
aattaaatgtgtgtc

SEQ ID NO: 1878199 - DNA, 15 bp, Homo sapiens
attaaatgtgtgtca

SEQ ID NO: 1878200 - DNA, 15 bp, Homo sapiens
ttaaatgtgtgtcat

SEQ ID NO: 1878201 - DNA, 15 bp, Homo sapiens
taaatgtgtgtcatg

SEQ ID NO: 1878202 - DNA, 15 bp, Homo sapiens
aaatgtgtgtcatgc

SEQ ID NO: 1878203 - DNA, 15 bp, Homo sapiens
aatgtgtgtcatgct

SEQ ID NO: 1878204 - DNA, 15 bp, Homo sapiens
atgtgtgtcatgctc

SEQ ID NO: 1878205 - DNA, 15 bp, Homo sapiens
tgtgtgtcatgctct

SEQ ID NO: 1878206 - DNA, 15 bp, Homo sapiens
gtgtgtcatgctctg

SEQ ID NO: 1878207 - DNA, 15 bp, Homo sapiens
tgtgtcatgctctgc

SEQ ID NO: 1878208 - DNA, 15 bp, Homo sapiens
gtgtcatgctctgct

SEQ ID NO: 1878209 - DNA, 15 bp, Homo sapiens
tgtcatgctctgctg

SEQ ID NO: 1878210 - DNA, 15 bp, Homo sapiens
gtcatgctctgctgg

SEQ ID NO: 1878211 - DNA, 15 bp, Homo sapiens
tcatgctctgctggc

SEQ ID NO: 1878212 - DNA, 15 bp, Homo sapiens
catgctctgctggca

SEQ ID NO: 1878213 - DNA, 15 bp, Homo sapiens
atgctctgctggcac

SEQ ID NO: 1878214 - DNA, 15 bp, Homo sapiens
tgctctgctggcaca

SEQ ID NO: 1878215 - DNA, 15 bp, Homo sapiens
gctctgctggcacaa

SEQ ID NO: 1878216 - DNA, 15 bp, Homo sapiens
ctctgctggcacaaa

SEQ ID NO: 1878217 - DNA, 15 bp, Homo sapiens
tctgctggcacaaaa

SEQ ID NO: 1878218 - DNA, 15 bp, Homo sapiens
ctgctggcacaaaac

SEQ ID NO: 1878219 - DNA, 15 bp, Homo sapiens
tgctggcacaaaact

SEQ ID NO: 1878220 - DNA, 15 bp, Homo sapiens
gctggcacaaaactc

SEQ ID NO: 1878221 - DNA, 15 bp, Homo sapiens
ctggcacaaaactct

SEQ ID NO: 1878222 - DNA, 15 bp, Homo sapiens
tggcacaaaactctt

SEQ ID NO: 1878223 - DNA, 15 bp, Homo sapiens
ggcacaaaactcttt

SEQ ID NO: 1878224 - DNA, 15 bp, Homo sapiens
gcacaaaactctttt

SEQ ID NO: 1878225 - DNA, 15 bp, Homo sapiens
cacaaaactcttttc

SEQ ID NO: 1878226 - DNA, 15 bp, Homo sapiens
acaaaactcttttca

SEQ ID NO: 1878227 - DNA, 15 bp, Homo sapiens
caaaactcttttcaa

SEQ ID NO: 1878228 - DNA, 15 bp, Homo sapiens
aaaactcttttcaat

SEQ ID NO: 1878229 - DNA, 15 bp, Homo sapiens
aaactcttttcaatg

SEQ ID NO: 1878230 - DNA, 15 bp, Homo sapiens
aactcttttcaatgc

SEQ ID NO: 1878231 - DNA, 15 bp, Homo sapiens
actcttttcaatgca

SEQ ID NO: 1878232 - DNA, 15 bp, Homo sapiens
ctcttttcaatgcat

SEQ ID NO: 1878233 - DNA, 15 bp, Homo sapiens
tcttttcaatgcatt

SEQ ID NO: 1878234 - DNA, 15 bp, Homo sapiens
cttttcaatgcattc

SEQ ID NO: 1878235 - DNA, 15 bp, Homo sapiens
ttttcaatgcattct

SEQ ID NO: 1878236 - DNA, 15 bp, Homo sapiens
tttcaatgcattctt

SEQ ID NO: 1878237 - DNA, 15 bp, Homo sapiens
ttcaatgcattcttt

SEQ ID NO: 1878238 - DNA, 15 bp, Homo sapiens
tcaatgcattctttc

SEQ ID NO: 1878239 - DNA, 15 bp, Homo sapiens
caatgcattctttct

SEQ ID NO: 1878240 - DNA, 15 bp, Homo sapiens
aatgcattctttctt

SEQ ID NO: 1878241 - DNA, 15 bp, Homo sapiens
atgcattctttcttt

SEQ ID NO: 1878242 - DNA, 15 bp, Homo sapiens
tgcattctttctttc

SEQ ID NO: 1878243 - DNA, 15 bp, Homo sapiens
gcattctttctttcc

SEQ ID NO: 1878244 - DNA, 15 bp, Homo sapiens
cattctttctttcct

SEQ ID NO: 1878245 - DNA, 15 bp, Homo sapiens
attctttctttcctt

SEQ ID NO: 1878246 - DNA, 15 bp, Homo sapiens
tctttctttcctttg

SEQ ID NO: 1878247 - DNA, 15 bp, Homo sapiens
ctttctttcctttgg

SEQ ID NO: 1878248 - DNA, 15 bp, Homo sapiens
tttctttcctttgga

SEQ ID NO: 1878249 - DNA, 15 bp, Homo sapiens
ttctttcctttggat

SEQ ID NO: 1878250 - DNA, 15 bp, Homo sapiens
tctttcctttggatc

SEQ ID NO: 1878251 - DNA, 15 bp, Homo sapiens
ctttcctttggatcc

SEQ ID NO: 1878252 - DNA, 15 bp, Homo sapiens
tttcctttggatccc

SEQ ID NO: 1878253 - DNA, 15 bp, Homo sapiens
ttcctttggatccca

SEQ ID NO: 1878254 - DNA, 15 bp, Homo sapiens
tcctttggatcccag

SEQ ID NO: 1878255 - DNA, 15 bp, Homo sapiens
cctttggatcccagt

SEQ ID NO: 1878256 - DNA, 15 bp, Homo sapiens
ctttggatcccagtg

SEQ ID NO: 1878257 - DNA, 15 bp, Homo sapiens
tttggatcccagtgt

SEQ ID NO: 1878258 - DNA, 15 bp, Homo sapiens
ttggatcccagtgtc

SEQ ID NO: 1878259 - DNA, 15 bp, Homo sapiens
tggatcccagtgtca

SEQ ID NO: 1878260 - DNA, 15 bp, Homo sapiens
ggatcccagtgtcaa

SEQ ID NO: 1878261 - DNA, 15 bp, Homo sapiens
gatcccagtgtcaaa

SEQ ID NO: 1878262 - DNA, 15 bp, Homo sapiens
atcccagtgtcaaat

SEQ ID NO: 1878263 - DNA, 15 bp, Homo sapiens
tcccagtgtcaaata

SEQ ID NO: 1878264 - DNA, 15 bp, Homo sapiens
cccagtgtcaaatac

SEQ ID NO: 1878265 - DNA, 15 bp, Homo sapiens
ccagtgtcaaatacc

SEQ ID NO: 1878266 - DNA, 15 bp, Homo sapiens
cagtgtcaaataccc

SEQ ID NO: 1878267 - DNA, 15 bp, Homo sapiens
agtgtcaaatacccg

SEQ ID NO: 1878268 - DNA, 15 bp, Homo sapiens
gtgtcaaatacccgc

SEQ ID NO: 1878269 - DNA, 15 bp, Homo sapiens
tgtcaaatacccgct

SEQ ID NO: 1878270 - DNA, 15 bp, Homo sapiens
gtcaaatacccgctt

SEQ ID NO: 1878271 - DNA, 15 bp, Homo sapiens
tcaaatacccgcttg

SEQ ID NO: 1878272 - DNA, 15 bp, Homo sapiens
caaatacccgcttgc

SEQ ID NO: 1878273 - DNA, 15 bp, Homo sapiens
aaatacccgcttgcc

SEQ ID NO: 1878274 - DNA, 15 bp, Homo sapiens
aatacccgcttgcca

SEQ ID NO: 1878275 - DNA, 15 bp, Homo sapiens
atacccgcttgccaa

SEQ ID NO: 1878276 - DNA, 15 bp, Homo sapiens
tacccgcttgccaac

SEQ ID NO: 1878277 - DNA, 15 bp, Homo sapiens
acccgcttgccaaca

SEQ ID NO: 1878278 - DNA, 15 bp, Homo sapiens
cccgcttgccaacat

SEQ ID NO: 1878279 - DNA, 15 bp, Homo sapiens
ccgcttgccaacata

SEQ ID NO: 1878280 - DNA, 15 bp, Homo sapiens
cgcttgccaacatag

SEQ ID NO: 1878281 - DNA, 15 bp, Homo sapiens
gcttgccaacatagt

SEQ ID NO: 1878282 - DNA, 15 bp, Homo sapiens
cttgccaacatagtt

SEQ ID NO: 1878283 - DNA, 15 bp, Homo sapiens
ttgccaacatagttt

SEQ ID NO: 1878284 - DNA, 15 bp, Homo sapiens
tgccaacatagtttg

SEQ ID NO: 1878285 - DNA, 15 bp, Homo sapiens
gccaacatagtttgt

SEQ ID NO: 1878286 - DNA, 15 bp, Homo sapiens
ccaacatagtttgtt

SEQ ID NO: 1878287 - DNA, 15 bp, Homo sapiens
caacatagtttgttt

SEQ ID NO: 1878288 - DNA, 15 bp, Homo sapiens
aacatagtttgtttg

SEQ ID NO: 1878289 - DNA, 15 bp, Homo sapiens
acatagtttgtttgc

SEQ ID NO: 1878290 - DNA, 15 bp, Homo sapiens
catagtttgtttgct

SEQ ID NO: 1878291 - DNA, 15 bp, Homo sapiens
atagtttgtttgctg

SEQ ID NO: 1878292 - DNA, 15 bp, Homo sapiens
tagtttgtttgctgt

SEQ ID NO: 1878293 - DNA, 15 bp, Homo sapiens
agtttgtttgctgta

SEQ ID NO: 1878294 - DNA, 15 bp, Homo sapiens
gtttgtttgctgtac

SEQ ID NO: 1878295 - DNA, 15 bp, Homo sapiens
tttgtttgctgtaca

SEQ ID NO: 1878296 - DNA, 15 bp, Homo sapiens
ttgtttgctgtacac

SEQ ID NO: 1878297 - DNA, 15 bp, Homo sapiens
tgtttgctgtacaca

SEQ ID NO: 1878298 - DNA, 15 bp, Homo sapiens
gtttgctgtacacag

SEQ ID NO: 1878299 - DNA, 15 bp, Homo sapiens
tttgctgtacacagg

SEQ ID NO: 1878300 - DNA, 15 bp, Homo sapiens
ttgctgtacacaggt

SEQ ID NO: 1878301 - DNA, 15 bp, Homo sapiens
tgctgtacacaggtt

SEQ ID NO: 1878302 - DNA, 15 bp, Homo sapiens
gctgtacacaggttg

SEQ ID NO: 1878303 - DNA, 15 bp, Homo sapiens
ctgtacacaggttga

SEQ ID NO: 1878304 - DNA, 15 bp, Homo sapiens
tgtacacaggttgaa

SEQ ID NO: 1878305 - DNA, 15 bp, Homo sapiens
gtacacaggttgaaa

SEQ ID NO: 1878306 - DNA, 15 bp, Homo sapiens
tacacaggttgaaac

SEQ ID NO: 1878307 - DNA, 15 bp, Homo sapiens
acacaggttgaaact

SEQ ID NO: 1878308 - DNA, 15 bp, Homo sapiens
cacaggttgaaactg

SEQ ID NO: 1878309 - DNA, 15 bp, Homo sapiens
acaggttgaaactgc

SEQ ID NO: 1878310 - DNA, 15 bp, Homo sapiens
caggttgaaactgca

SEQ ID NO: 1878311 - DNA, 15 bp, Homo sapiens
aggttgaaactgcaa

SEQ ID NO: 1878312 - DNA, 15 bp, Homo sapiens
ggttgaaactgcaaa

SEQ ID NO: 1878313 - DNA, 15 bp, Homo sapiens
gttgaaactgcaaag

SEQ ID NO: 1878314 - DNA, 15 bp, Homo sapiens
ttgaaactgcaaagg

SEQ ID NO: 1878315 - DNA, 15 bp, Homo sapiens
tgaaactgcaaaggt

SEQ ID NO: 1878316 - DNA, 15 bp, Homo sapiens
gaaactgcaaaggtt

SEQ ID NO: 1878317 - DNA, 15 bp, Homo sapiens
aaactgcaaaggttt

SEQ ID NO: 1878318 - DNA, 15 bp, Homo sapiens
aactgcaaaggtttt

SEQ ID NO: 1878319 - DNA, 15 bp, Homo sapiens
actgcaaaggttttc

SEQ ID NO: 1878320 - DNA, 15 bp, Homo sapiens
ctgcaaaggttttca

SEQ ID NO: 1878321 - DNA, 15 bp, Homo sapiens
tgcaaaggttttcaa

SEQ ID NO: 1878322 - DNA, 15 bp, Homo sapiens
gcaaaggttttcaat

SEQ ID NO: 1878323 - DNA, 15 bp, Homo sapiens
caaaggttttcaatt

SEQ ID NO: 1878324 - DNA, 15 bp, Homo sapiens
aaaggttttcaattt

SEQ ID NO: 1878325 - DNA, 15 bp, Homo sapiens
aaggttttcaatttt

SEQ ID NO: 1878326 - DNA, 15 bp, Homo sapiens
aggttttcaatttta

SEQ ID NO: 1878327 - DNA, 15 bp, Homo sapiens
ggttttcaattttaa

SEQ ID NO: 1878328 - DNA, 15 bp, Homo sapiens
gttttcaattttaaa

SEQ ID NO: 1878329 - DNA, 15 bp, Homo sapiens
ttttcaattttaaat

SEQ ID NO: 1878330 - DNA, 15 bp, Homo sapiens
tttcaattttaaatt

SEQ ID NO: 1878331 - DNA, 15 bp, Homo sapiens
ttcaattttaaattt

SEQ ID NO: 1878332 - DNA, 15 bp, Homo sapiens
tcaattttaaattta

SEQ ID NO: 1878333 - DNA, 15 bp, Homo sapiens
caattttaaatttag

SEQ ID NO: 1878334 - DNA, 15 bp, Homo sapiens
aattttaaatttagc

SEQ ID NO: 1878335 - DNA, 15 bp, Homo sapiens
attttaaatttagct

SEQ ID NO: 1878336 - DNA, 15 bp, Homo sapiens
ttttaaatttagcta

SEQ ID NO: 1878337 - DNA, 15 bp, Homo sapiens
tttaaatttagctaa

SEQ ID NO: 1878338 - DNA, 15 bp, Homo sapiens
ttaaatttagctaat

SEQ ID NO: 1878339 - DNA, 15 bp, Homo sapiens
taaatttagctaata

SEQ ID NO: 1878340 - DNA, 15 bp, Homo sapiens
aaatttagctaatat

SEQ ID NO: 1878341 - DNA, 15 bp, Homo sapiens
aatttagctaatatt

SEQ ID NO: 1878342 - DNA, 15 bp, Homo sapiens
atttagctaatattt

SEQ ID NO: 1878343 - DNA, 15 bp, Homo sapiens
tttagctaatatttt

SEQ ID NO: 1878344 - DNA, 15 bp, Homo sapiens
ttagctaatatttta

SEQ ID NO: 1878345 - DNA, 15 bp, Homo sapiens
tagctaatattttac

SEQ ID NO: 1878346 - DNA, 15 bp, Homo sapiens
agctaatattttact

SEQ ID NO: 1878347 - DNA, 15 bp, Homo sapiens
gctaatattttactt

SEQ ID NO: 1878348 - DNA, 15 bp, Homo sapiens
ctaatattttacttt

SEQ ID NO: 1878349 - DNA, 15 bp, Homo sapiens
taatattttactttt

SEQ ID NO: 1878350 - DNA, 15 bp, Homo sapiens
aatattttacttttt

SEQ ID NO: 1878351 - DNA, 15 bp, Homo sapiens
atattttactttttt

SEQ ID NO: 1878352 - DNA, 15 bp, Homo sapiens
tattttacttttttt

SEQ ID NO: 1878353 - DNA, 15 bp, Homo sapiens
attttactttttttt

SEQ ID NO: 1878354 - DNA, 15 bp, Homo sapiens
ttttacttttttttt

SEQ ID NO: 1878355 - DNA, 15 bp, Homo sapiens
tttactttttttttt

SEQ ID NO: 1878356 - DNA, 15 bp, Homo sapiens
ttacttttttttttt

SEQ ID NO: 1878357 - DNA, 15 bp, Homo sapiens
ttttttttttttgaa

SEQ ID NO: 1878358 - DNA, 15 bp, Homo sapiens
tttttttttttgaaa

SEQ ID NO: 1878359 - DNA, 15 bp, Homo sapiens
ttttttttttgaaat

SEQ ID NO: 1878360 - DNA, 15 bp, Homo sapiens
tttttttttgaaatg

SEQ ID NO: 1878361 - DNA, 15 bp, Homo sapiens
ttttttttgaaatgg

SEQ ID NO: 1878362 - DNA, 15 bp, Homo sapiens
tttttttgaaatggg

SEQ ID NO: 1878363 - DNA, 15 bp, Homo sapiens
ttttttgaaatggga

SEQ ID NO: 1878364 - DNA, 15 bp, Homo sapiens
tttttgaaatgggat

SEQ ID NO: 1878365 - DNA, 15 bp, Homo sapiens
ttttgaaatgggatc

SEQ ID NO: 1878366 - DNA, 15 bp, Homo sapiens
tttgaaatgggatct

SEQ ID NO: 1878367 - DNA, 15 bp, Homo sapiens
ttgaaatgggatctc

SEQ ID NO: 1878368 - DNA, 15 bp, Homo sapiens
tgaaatgggatctcg

SEQ ID NO: 1878369 - DNA, 15 bp, Homo sapiens
gaaatgggatctcgc

SEQ ID NO: 1878370 - DNA, 15 bp, Homo sapiens
aaatgggatctcgct

SEQ ID NO: 1878371 - DNA, 15 bp, Homo sapiens
aatgggatctcgctt

SEQ ID NO: 1878372 - DNA, 15 bp, Homo sapiens
atgggatctcgcttt

SEQ ID NO: 1878373 - DNA, 15 bp, Homo sapiens
tgggatctcgctttg

SEQ ID NO: 1878374 - DNA, 15 bp, Homo sapiens
gggatctcgctttgt

SEQ ID NO: 1878375 - DNA, 15 bp, Homo sapiens
ggatctcgctttgtt

SEQ ID NO: 1878376 - DNA, 15 bp, Homo sapiens
gatctcgctttgttg

SEQ ID NO: 1878377 - DNA, 15 bp, Homo sapiens
atctcgctttgttgc

SEQ ID NO: 1878378 - DNA, 15 bp, Homo sapiens
ctcgctttgttgcct

SEQ ID NO: 1878379 - DNA, 15 bp, Homo sapiens
tcgctttgttgcctt

SEQ ID NO: 1878380 - DNA, 15 bp, Homo sapiens
cgctttgttgcctta

SEQ ID NO: 1878381 - DNA, 15 bp, Homo sapiens
gctttgttgccttac

SEQ ID NO: 1878382 - DNA, 15 bp, Homo sapiens
ctttgttgccttacc

SEQ ID NO: 1878383 - DNA, 15 bp, Homo sapiens
tttgttgccttacct

SEQ ID NO: 1878384 - DNA, 15 bp, Homo sapiens
ttgttgccttacctg

SEQ ID NO: 1878385 - DNA, 15 bp, Homo sapiens
tgttgccttacctgg

SEQ ID NO: 1878386 - DNA, 15 bp, Homo sapiens
gttgccttacctgga

SEQ ID NO: 1878387 - DNA, 15 bp, Homo sapiens
ttgccttacctggag

SEQ ID NO: 1878388 - DNA, 15 bp, Homo sapiens
tgccttacctggagt

SEQ ID NO: 1878389 - DNA, 15 bp, Homo sapiens
gccttacctggagtg

SEQ ID NO: 1878390 - DNA, 15 bp, Homo sapiens
ccttacctggagtgt

SEQ ID NO: 1878391 - DNA, 15 bp, Homo sapiens
cttacctggagtgta

SEQ ID NO: 1878392 - DNA, 15 bp, Homo sapiens
ttacctggagtgtag

SEQ ID NO: 1878393 - DNA, 15 bp, Homo sapiens
tacctggagtgtagt

SEQ ID NO: 1878394 - DNA, 15 bp, Homo sapiens
acctggagtgtagtt

SEQ ID NO: 1878395 - DNA, 15 bp, Homo sapiens
cctggagtgtagttg

SEQ ID NO: 1878396 - DNA, 15 bp, Homo sapiens
ctggagtgtagttgc

SEQ ID NO: 1878397 - DNA, 15 bp, Homo sapiens
tggagtgtagttgcg

SEQ ID NO: 1878398 - DNA, 15 bp, Homo sapiens
ggagtgtagttgcga

SEQ ID NO: 1878399 - DNA, 15 bp, Homo sapiens
gagtgtagttgcgag

SEQ ID NO: 1878400 - DNA, 15 bp, Homo sapiens
agtgtagttgcgaga

SEQ ID NO: 1878401 - DNA, 15 bp, Homo sapiens
gtgtagttgcgagat

SEQ ID NO: 1878402 - DNA, 15 bp, Homo sapiens
tgtagttgcgagatc

SEQ ID NO: 1878403 - DNA, 15 bp, Homo sapiens
gtagttgcgagatca

SEQ ID NO: 1878404 - DNA, 15 bp, Homo sapiens
tagttgcgagatcat

SEQ ID NO: 1878405 - DNA, 15 bp, Homo sapiens
agttgcgagatcata

SEQ ID NO: 1878406 - DNA, 15 bp, Homo sapiens
gttgcgagatcatag

SEQ ID NO: 1878407 - DNA, 15 bp, Homo sapiens
ttgcgagatcatagc

SEQ ID NO: 1878408 - DNA, 15 bp, Homo sapiens
tgcgagatcatagct

SEQ ID NO: 1878409 - DNA, 15 bp, Homo sapiens
gcgagatcatagctc

SEQ ID NO: 1878410 - DNA, 15 bp, Homo sapiens
cgagatcatagctca

SEQ ID NO: 1878411 - DNA, 15 bp, Homo sapiens
gagatcatagctcac

SEQ ID NO: 1878412 - DNA, 15 bp, Homo sapiens
agatcatagctcact

SEQ ID NO: 1878413 - DNA, 15 bp, Homo sapiens
tcctcccacctcagt

SEQ ID NO: 1878414 - DNA, 15 bp, Homo sapiens
ccacctcagtctcct

SEQ ID NO: 1878415 - DNA, 15 bp, Homo sapiens
cacctcagtctcctg

SEQ ID NO: 1878416 - DNA, 15 bp, Homo sapiens
acctcagtctcctgt

SEQ ID NO: 1878417 - DNA, 15 bp, Homo sapiens
cctcagtctcctgtg

SEQ ID NO: 1878418 - DNA, 15 bp, Homo sapiens
ctcagtctcctgtgt

SEQ ID NO: 1878419 - DNA, 15 bp, Homo sapiens
tcagtctcctgtgta

SEQ ID NO: 1878420 - DNA, 15 bp, Homo sapiens
cagtctcctgtgtag

SEQ ID NO: 1878421 - DNA, 15 bp, Homo sapiens
agtctcctgtgtagc

SEQ ID NO: 1878422 - DNA, 15 bp, Homo sapiens
gtctcctgtgtagct

SEQ ID NO: 1878423 - DNA, 15 bp, Homo sapiens
tctcctgtgtagctg

SEQ ID NO: 1878424 - DNA, 15 bp, Homo sapiens
ctcctgtgtagctgg

SEQ ID NO: 1878425 - DNA, 15 bp, Homo sapiens
tcctgtgtagctggg

SEQ ID NO: 1878426 - DNA, 15 bp, Homo sapiens
cctgtgtagctggga

SEQ ID NO: 1878427 - DNA, 15 bp, Homo sapiens
ctgtgtagctgggac

SEQ ID NO: 1878428 - DNA, 15 bp, Homo sapiens
tgtgtagctgggact

SEQ ID NO: 1878429 - DNA, 15 bp, Homo sapiens
gtgtagctgggacta

SEQ ID NO: 1878430 - DNA, 15 bp, Homo sapiens
ctgggactacaggta

SEQ ID NO: 1878431 - DNA, 15 bp, Homo sapiens
tgggactacaggtac

SEQ ID NO: 1878432 - DNA, 15 bp, Homo sapiens
gggactacaggtaca

SEQ ID NO: 1878433 - DNA, 15 bp, Homo sapiens
ggactacaggtacac

SEQ ID NO: 1878434 - DNA, 15 bp, Homo sapiens
gactacaggtacacc

SEQ ID NO: 1878435 - DNA, 15 bp, Homo sapiens
actacaggtacacca

SEQ ID NO: 1878436 - DNA, 15 bp, Homo sapiens
ctacaggtacaccac

SEQ ID NO: 1878437 - DNA, 15 bp, Homo sapiens
tacaggtacaccacc

SEQ ID NO: 1878438 - DNA, 15 bp, Homo sapiens
acaggtacaccacca

SEQ ID NO: 1878439 - DNA, 15 bp, Homo sapiens
caggtacaccaccat

SEQ ID NO: 1878440 - DNA, 15 bp, Homo sapiens
aggtacaccaccatg

SEQ ID NO: 1878441 - DNA, 15 bp, Homo sapiens
ggtacaccaccatgc

SEQ ID NO: 1878442 - DNA, 15 bp, Homo sapiens
gtacaccaccatgcc

SEQ ID NO: 1878443 - DNA, 15 bp, Homo sapiens
tacaccaccatgccc

SEQ ID NO: 1878444 - DNA, 15 bp, Homo sapiens
acaccaccatgccca

SEQ ID NO: 1878445 - DNA, 15 bp, Homo sapiens
caccaccatgcccac

SEQ ID NO: 1878446 - DNA, 15 bp, Homo sapiens
accaccatgcccacc

SEQ ID NO: 1878447 - DNA, 15 bp, Homo sapiens
ccaccatgcccacct

SEQ ID NO: 1878448 - DNA, 15 bp, Homo sapiens
caccatgcccacctg

SEQ ID NO: 1878449 - DNA, 15 bp, Homo sapiens
accatgcccacctgg

SEQ ID NO: 1878450 - DNA, 15 bp, Homo sapiens
ccatgcccacctgga

SEQ ID NO: 1878451 - DNA, 15 bp, Homo sapiens
catgcccacctggat

SEQ ID NO: 1878452 - DNA, 15 bp, Homo sapiens
atgcccacctggata

SEQ ID NO: 1878453 - DNA, 15 bp, Homo sapiens
tgcccacctggataa

SEQ ID NO: 1878454 - DNA, 15 bp, Homo sapiens
cccacctggataatt

SEQ ID NO: 1878455 - DNA, 15 bp, Homo sapiens
ccacctggataattt

SEQ ID NO: 1878456 - DNA, 15 bp, Homo sapiens
cacctggataatttt

SEQ ID NO: 1878457 - DNA, 15 bp, Homo sapiens
acctggataattttt

SEQ ID NO: 1878458 - DNA, 15 bp, Homo sapiens
cctggataattttta

SEQ ID NO: 1878459 - DNA, 15 bp, Homo sapiens
ctggataatttttaa

SEQ ID NO: 1878460 - DNA, 15 bp, Homo sapiens
tggataatttttaac

SEQ ID NO: 1878461 - DNA, 15 bp, Homo sapiens
ggataatttttaact

SEQ ID NO: 1878462 - DNA, 15 bp, Homo sapiens
gataatttttaactt

SEQ ID NO: 1878463 - DNA, 15 bp, Homo sapiens
ataatttttaacttt

SEQ ID NO: 1878464 - DNA, 15 bp, Homo sapiens
taatttttaactttt

SEQ ID NO: 1878465 - DNA, 15 bp, Homo sapiens
aatttttaacttttt

SEQ ID NO: 1878466 - DNA, 15 bp, Homo sapiens
atttttaactttttt

SEQ ID NO: 1878467 - DNA, 15 bp, Homo sapiens
tttttaacttttttt

SEQ ID NO: 1878468 - DNA, 15 bp, Homo sapiens
ttttaactttttttg

SEQ ID NO: 1878469 - DNA, 15 bp, Homo sapiens
tttaactttttttgt

SEQ ID NO: 1878470 - DNA, 15 bp, Homo sapiens
ttaactttttttgta

SEQ ID NO: 1878471 - DNA, 15 bp, Homo sapiens
taactttttttgtag

SEQ ID NO: 1878472 - DNA, 15 bp, Homo sapiens
aactttttttgtaga

SEQ ID NO: 1878473 - DNA, 15 bp, Homo sapiens
actttttttgtagag

SEQ ID NO: 1878474 - DNA, 15 bp, Homo sapiens
ctttttttgtagaga

SEQ ID NO: 1878475 - DNA, 15 bp, Homo sapiens
tttttgtagagataa

SEQ ID NO: 1878476 - DNA, 15 bp, Homo sapiens
ttttgtagagataaa

SEQ ID NO: 1878477 - DNA, 15 bp, Homo sapiens
tttgtagagataaag

SEQ ID NO: 1878478 - DNA, 15 bp, Homo sapiens
ttgtagagataaagt

SEQ ID NO: 1878479 - DNA, 15 bp, Homo sapiens
tgtagagataaagtc

SEQ ID NO: 1878480 - DNA, 15 bp, Homo sapiens
gtagagataaagtct

SEQ ID NO: 1878481 - DNA, 15 bp, Homo sapiens
tagagataaagtctt

SEQ ID NO: 1878482 - DNA, 15 bp, Homo sapiens
agagataaagtcttg

SEQ ID NO: 1878483 - DNA, 15 bp, Homo sapiens
gagataaagtcttgc

SEQ ID NO: 1878484 - DNA, 15 bp, Homo sapiens
agataaagtcttgct

SEQ ID NO: 1878485 - DNA, 15 bp, Homo sapiens
gataaagtcttgcta

SEQ ID NO: 1878486 - DNA, 15 bp, Homo sapiens
ataaagtcttgctat

SEQ ID NO: 1878487 - DNA, 15 bp, Homo sapiens
taaagtcttgctatg

SEQ ID NO: 1878488 - DNA, 15 bp, Homo sapiens
aaagtcttgctatgt

SEQ ID NO: 1878489 - DNA, 15 bp, Homo sapiens
aagtcttgctatgtt

SEQ ID NO: 1878490 - DNA, 15 bp, Homo sapiens
agtcttgctatgttg

SEQ ID NO: 1878491 - DNA, 15 bp, Homo sapiens
cttgctatgttgcct

SEQ ID NO: 1878492 - DNA, 15 bp, Homo sapiens
ttgctatgttgccta

SEQ ID NO: 1878493 - DNA, 15 bp, Homo sapiens
tgctatgttgcctag

SEQ ID NO: 1878494 - DNA, 15 bp, Homo sapiens
gctatgttgcctagg

SEQ ID NO: 1878495 - DNA, 15 bp, Homo sapiens
ctatgttgcctaggc

SEQ ID NO: 1878496 - DNA, 15 bp, Homo sapiens
tatgttgcctaggct

SEQ ID NO: 1878497 - DNA, 15 bp, Homo sapiens
atgttgcctaggcta

SEQ ID NO: 1878498 - DNA, 15 bp, Homo sapiens
tgttgcctaggctag

SEQ ID NO: 1878499 - DNA, 15 bp, Homo sapiens
gttgcctaggctagt

SEQ ID NO: 1878500 - DNA, 15 bp, Homo sapiens
ttgcctaggctagtc

SEQ ID NO: 1878501 - DNA, 15 bp, Homo sapiens
tgcctaggctagtct

SEQ ID NO: 1878502 - DNA, 15 bp, Homo sapiens
gcctaggctagtctc

SEQ ID NO: 1878503 - DNA, 15 bp, Homo sapiens
cctaggctagtctcg

SEQ ID NO: 1878504 - DNA, 15 bp, Homo sapiens
ctaggctagtctcga

SEQ ID NO: 1878505 - DNA, 15 bp, Homo sapiens
taggctagtctcgaa

SEQ ID NO: 1878506 - DNA, 15 bp, Homo sapiens
ctcctgggctcaagg

SEQ ID NO: 1878507 - DNA, 15 bp, Homo sapiens
tcctgggctcaaggg

SEQ ID NO: 1878508 - DNA, 15 bp, Homo sapiens
cctgggctcaaggga

SEQ ID NO: 1878509 - DNA, 15 bp, Homo sapiens
ctgggctcaagggat

SEQ ID NO: 1878510 - DNA, 15 bp, Homo sapiens
gggctcaagggatcc

SEQ ID NO: 1878511 - DNA, 15 bp, Homo sapiens
ggctcaagggatcct

SEQ ID NO: 1878512 - DNA, 15 bp, Homo sapiens
gctcaagggatcctt

SEQ ID NO: 1878513 - DNA, 15 bp, Homo sapiens
tcaagggatccttcc

SEQ ID NO: 1878514 - DNA, 15 bp, Homo sapiens
caagggatccttccc

SEQ ID NO: 1878515 - DNA, 15 bp, Homo sapiens
aagggatccttcccc

SEQ ID NO: 1878516 - DNA, 15 bp, Homo sapiens
agggatccttcccct

SEQ ID NO: 1878517 - DNA, 15 bp, Homo sapiens
gggatccttcccctt

SEQ ID NO: 1878518 - DNA, 15 bp, Homo sapiens
ggatccttccccttc

SEQ ID NO: 1878519 - DNA, 15 bp, Homo sapiens
gatccttccccttcg

SEQ ID NO: 1878520 - DNA, 15 bp, Homo sapiens
atccttccccttcgg

SEQ ID NO: 1878521 - DNA, 15 bp, Homo sapiens
tccttccccttcggc

SEQ ID NO: 1878522 - DNA, 15 bp, Homo sapiens
ccttccccttcggct

SEQ ID NO: 1878523 - DNA, 15 bp, Homo sapiens
cttccccttcggctt

SEQ ID NO: 1878524 - DNA, 15 bp, Homo sapiens
ttccccttcggcttc

SEQ ID NO: 1878525 - DNA, 15 bp, Homo sapiens
tccccttcggcttcc

SEQ ID NO: 1878526 - DNA, 15 bp, Homo sapiens
ccccttcggcttccc

SEQ ID NO: 1878527 - DNA, 15 bp, Homo sapiens
cccttcggcttccca

SEQ ID NO: 1878528 - DNA, 15 bp, Homo sapiens
ccttcggcttcccaa

SEQ ID NO: 1878529 - DNA, 15 bp, Homo sapiens
cttcggcttcccaaa

SEQ ID NO: 1878530 - DNA, 15 bp, Homo sapiens
ttcggcttcccaaag

SEQ ID NO: 1878531 - DNA, 15 bp, Homo sapiens
cttcccaaagtgtta

SEQ ID NO: 1878532 - DNA, 15 bp, Homo sapiens
ttcccaaagtgttag

SEQ ID NO: 1878533 - DNA, 15 bp, Homo sapiens
tcccaaagtgttagg

SEQ ID NO: 1878534 - DNA, 15 bp, Homo sapiens
cccaaagtgttagga

SEQ ID NO: 1878535 - DNA, 15 bp, Homo sapiens
ccaaagtgttaggat

SEQ ID NO: 1878536 - DNA, 15 bp, Homo sapiens
caaagtgttaggatt

SEQ ID NO: 1878537 - DNA, 15 bp, Homo sapiens
aaagtgttaggatta

SEQ ID NO: 1878538 - DNA, 15 bp, Homo sapiens
aagtgttaggattac

SEQ ID NO: 1878539 - DNA, 15 bp, Homo sapiens
agtgttaggattaca

SEQ ID NO: 1878540 - DNA, 15 bp, Homo sapiens
gtgttaggattacag

SEQ ID NO: 1878541 - DNA, 15 bp, Homo sapiens
tgttaggattacagg

SEQ ID NO: 1878542 - DNA, 15 bp, Homo sapiens
gttaggattacaggt

SEQ ID NO: 1878543 - DNA, 15 bp, Homo sapiens
ttaggattacaggtg

SEQ ID NO: 1878544 - DNA, 15 bp, Homo sapiens
ttacaggtgtgatct

SEQ ID NO: 1878545 - DNA, 15 bp, Homo sapiens
tacaggtgtgatctg

SEQ ID NO: 1878546 - DNA, 15 bp, Homo sapiens
acaggtgtgatctgg

SEQ ID NO: 1878547 - DNA, 15 bp, Homo sapiens
caggtgtgatctggt

SEQ ID NO: 1878548 - DNA, 15 bp, Homo sapiens
aggtgtgatctggtt

SEQ ID NO: 1878549 - DNA, 15 bp, Homo sapiens
ggtgtgatctggttt

SEQ ID NO: 1878550 - DNA, 15 bp, Homo sapiens
gtgtgatctggtttc

SEQ ID NO: 1878551 - DNA, 15 bp, Homo sapiens
tgtgatctggtttct

SEQ ID NO: 1878552 - DNA, 15 bp, Homo sapiens
gtgatctggtttcta

SEQ ID NO: 1878553 - DNA, 15 bp, Homo sapiens
tgatctggtttctaa

SEQ ID NO: 1878554 - DNA, 15 bp, Homo sapiens
gatctggtttctaac

SEQ ID NO: 1878555 - DNA, 15 bp, Homo sapiens
atctggtttctaact

SEQ ID NO: 1878556 - DNA, 15 bp, Homo sapiens
tctggtttctaactt

SEQ ID NO: 1878557 - DNA, 15 bp, Homo sapiens
ctggtttctaacttc

SEQ ID NO: 1878558 - DNA, 15 bp, Homo sapiens
tggtttctaacttct

SEQ ID NO: 1878559 - DNA, 15 bp, Homo sapiens
ggtttctaacttctc

SEQ ID NO: 1878560 - DNA, 15 bp, Homo sapiens
gtttctaacttctct

SEQ ID NO: 1878561 - DNA, 15 bp, Homo sapiens
tttctaacttctctt

SEQ ID NO: 1878562 - DNA, 15 bp, Homo sapiens
ttctaacttctctta

SEQ ID NO: 1878563 - DNA, 15 bp, Homo sapiens
tctaacttctcttaa

SEQ ID NO: 1878564 - DNA, 15 bp, Homo sapiens
ctaacttctcttaaa

SEQ ID NO: 1878565 - DNA, 15 bp, Homo sapiens
taacttctcttaaag

SEQ ID NO: 1878566 - DNA, 15 bp, Homo sapiens
aacttctcttaaagt

SEQ ID NO: 1878567 - DNA, 15 bp, Homo sapiens
acttctcttaaagtg

SEQ ID NO: 1878568 - DNA, 15 bp, Homo sapiens
cttctcttaaagtgt

SEQ ID NO: 1878569 - DNA, 15 bp, Homo sapiens
ttctcttaaagtgtt

SEQ ID NO: 1878570 - DNA, 15 bp, Homo sapiens
tctcttaaagtgttg

SEQ ID NO: 1878571 - DNA, 15 bp, Homo sapiens
ctcttaaagtgttgg

SEQ ID NO: 1878572 - DNA, 15 bp, Homo sapiens
tcttaaagtgttgga

SEQ ID NO: 1878573 - DNA, 15 bp, Homo sapiens
cttaaagtgttggag

SEQ ID NO: 1878574 - DNA, 15 bp, Homo sapiens
ttaaagtgttggagg

SEQ ID NO: 1878575 - DNA, 15 bp, Homo sapiens
taaagtgttggaggt

SEQ ID NO: 1878576 - DNA, 15 bp, Homo sapiens
aaagtgttggaggtc

SEQ ID NO: 1878577 - DNA, 15 bp, Homo sapiens
aagtgttggaggtct

SEQ ID NO: 1878578 - DNA, 15 bp, Homo sapiens
agtgttggaggtctg

SEQ ID NO: 1878579 - DNA, 15 bp, Homo sapiens
gtgttggaggtctgg

SEQ ID NO: 1878580 - DNA, 15 bp, Homo sapiens
tgttggaggtctggc

SEQ ID NO: 1878581 - DNA, 15 bp, Homo sapiens
gttggaggtctggct

SEQ ID NO: 1878582 - DNA, 15 bp, Homo sapiens
ttggaggtctggcta

SEQ ID NO: 1878583 - DNA, 15 bp, Homo sapiens
tggaggtctggctat

SEQ ID NO: 1878584 - DNA, 15 bp, Homo sapiens
ggaggtctggctatt

SEQ ID NO: 1878585 - DNA, 15 bp, Homo sapiens
gaggtctggctatta

SEQ ID NO: 1878586 - DNA, 15 bp, Homo sapiens
aggtctggctattat

SEQ ID NO: 1878587 - DNA, 15 bp, Homo sapiens
ggtctggctattata

SEQ ID NO: 1878588 - DNA, 15 bp, Homo sapiens
gtctggctattatag

SEQ ID NO: 1878589 - DNA, 15 bp, Homo sapiens
tctggctattataga

SEQ ID NO: 1878590 - DNA, 15 bp, Homo sapiens
ctggctattatagat

SEQ ID NO: 1878591 - DNA, 15 bp, Homo sapiens
tggctattatagatc

SEQ ID NO: 1878592 - DNA, 15 bp, Homo sapiens
ggctattatagatct

SEQ ID NO: 1878593 - DNA, 15 bp, Homo sapiens
gctattatagatctt

SEQ ID NO: 1878594 - DNA, 15 bp, Homo sapiens
ctattatagatcttc

SEQ ID NO: 1878595 - DNA, 15 bp, Homo sapiens
tattatagatcttct

SEQ ID NO: 1878596 - DNA, 15 bp, Homo sapiens
attatagatcttctg

SEQ ID NO: 1878597 - DNA, 15 bp, Homo sapiens
ttatagatcttctgg

SEQ ID NO: 1878598 - DNA, 15 bp, Homo sapiens
tatagatcttctgga

SEQ ID NO: 1878599 - DNA, 15 bp, Homo sapiens
atagatcttctggat

SEQ ID NO: 1878600 - DNA, 15 bp, Homo sapiens
tagatcttctggatg

SEQ ID NO: 1878601 - DNA, 15 bp, Homo sapiens
agatcttctggatgg

SEQ ID NO: 1878602 - DNA, 15 bp, Homo sapiens
gatcttctggatggc

SEQ ID NO: 1878603 - DNA, 15 bp, Homo sapiens
atcttctggatggcc

SEQ ID NO: 1878604 - DNA, 15 bp, Homo sapiens
tcttctggatggcct

SEQ ID NO: 1878605 - DNA, 15 bp, Homo sapiens
cttctggatggcctg

SEQ ID NO: 1878606 - DNA, 15 bp, Homo sapiens
ttctggatggcctga

SEQ ID NO: 1878607 - DNA, 15 bp, Homo sapiens
tctggatggcctgac

SEQ ID NO: 1878608 - DNA, 15 bp, Homo sapiens
ctggatggcctgaca

SEQ ID NO: 1878609 - DNA, 15 bp, Homo sapiens
tggatggcctgacat

SEQ ID NO: 1878610 - DNA, 15 bp, Homo sapiens
ggatggcctgacatc

SEQ ID NO: 1878611 - DNA, 15 bp, Homo sapiens
gatggcctgacatcc

SEQ ID NO: 1878612 - DNA, 15 bp, Homo sapiens
atggcctgacatcca

SEQ ID NO: 1878613 - DNA, 15 bp, Homo sapiens
tggcctgacatccat

SEQ ID NO: 1878614 - DNA, 15 bp, Homo sapiens
ggcctgacatccatt

SEQ ID NO: 1878615 - DNA, 15 bp, Homo sapiens
gcctgacatccattg

SEQ ID NO: 1878616 - DNA, 15 bp, Homo sapiens
cctgacatccattgc

SEQ ID NO: 1878617 - DNA, 15 bp, Homo sapiens
ctgacatccattgcc

SEQ ID NO: 1878618 - DNA, 15 bp, Homo sapiens
tgacatccattgcct

SEQ ID NO: 1878619 - DNA, 15 bp, Homo sapiens
gacatccattgcctg

SEQ ID NO: 1878620 - DNA, 15 bp, Homo sapiens
acatccattgcctgg

SEQ ID NO: 1878621 - DNA, 15 bp, Homo sapiens
catccattgcctgga

SEQ ID NO: 1878622 - DNA, 15 bp, Homo sapiens
atccattgcctggag

SEQ ID NO: 1878623 - DNA, 15 bp, Homo sapiens
tccattgcctggagg

SEQ ID NO: 1878624 - DNA, 15 bp, Homo sapiens
ccattgcctggaggg

SEQ ID NO: 1878625 - DNA, 15 bp, Homo sapiens
cattgcctggaggga

SEQ ID NO: 1878626 - DNA, 15 bp, Homo sapiens
attgcctggagggag

SEQ ID NO: 1878627 - DNA, 15 bp, Homo sapiens
ttgcctggagggagt

SEQ ID NO: 1878628 - DNA, 15 bp, Homo sapiens
tgcctggagggagtg

SEQ ID NO: 1878629 - DNA, 15 bp, Homo sapiens
gcctggagggagtgg

SEQ ID NO: 1878630 - DNA, 15 bp, Homo sapiens
cctggagggagtggt

SEQ ID NO: 1878631 - DNA, 15 bp, Homo sapiens
ctggagggagtggtg

SEQ ID NO: 1878632 - DNA, 15 bp, Homo sapiens
tggagggagtggtga

SEQ ID NO: 1878633 - DNA, 15 bp, Homo sapiens
ggagggagtggtgac

SEQ ID NO: 1878634 - DNA, 15 bp, Homo sapiens
gagggagtggtgact

SEQ ID NO: 1878635 - DNA, 15 bp, Homo sapiens
agggagtggtgactg

SEQ ID NO: 1878636 - DNA, 15 bp, Homo sapiens
gggagtggtgactgc

SEQ ID NO: 1878637 - DNA, 15 bp, Homo sapiens
ggagtggtgactgcc

SEQ ID NO: 1878638 - DNA, 15 bp, Homo sapiens
gagtggtgactgcct

SEQ ID NO: 1878639 - DNA, 15 bp, Homo sapiens
agtggtgactgcctg

SEQ ID NO: 1878640 - DNA, 15 bp, Homo sapiens
gtggtgactgcctgt

SEQ ID NO: 1878641 - DNA, 15 bp, Homo sapiens
tggtgactgcctgtc

SEQ ID NO: 1878642 - DNA, 15 bp, Homo sapiens
ggtgactgcctgtct

SEQ ID NO: 1878643 - DNA, 15 bp, Homo sapiens
gtgactgcctgtctg

SEQ ID NO: 1878644 - DNA, 15 bp, Homo sapiens
tgactgcctgtctgg

SEQ ID NO: 1878645 - DNA, 15 bp, Homo sapiens
gactgcctgtctgga

SEQ ID NO: 1878646 - DNA, 15 bp, Homo sapiens
actgcctgtctggag

SEQ ID NO: 1878647 - DNA, 15 bp, Homo sapiens
ctgcctgtctggagg

SEQ ID NO: 1878648 - DNA, 15 bp, Homo sapiens
tgcctgtctggaggc

SEQ ID NO: 1878649 - DNA, 15 bp, Homo sapiens
gcctgtctggaggca

SEQ ID NO: 1878650 - DNA, 15 bp, Homo sapiens
cctgtctggaggcag

SEQ ID NO: 1878651 - DNA, 15 bp, Homo sapiens
ctgtctggaggcagc

SEQ ID NO: 1878652 - DNA, 15 bp, Homo sapiens
tgtctggaggcagct

SEQ ID NO: 1878653 - DNA, 15 bp, Homo sapiens
gtctggaggcagctg

SEQ ID NO: 1878654 - DNA, 15 bp, Homo sapiens
tctggaggcagctgg

SEQ ID NO: 1878655 - DNA, 15 bp, Homo sapiens
ctggaggcagctggc

SEQ ID NO: 1878656 - DNA, 15 bp, Homo sapiens
tggaggcagctggct

SEQ ID NO: 1878657 - DNA, 15 bp, Homo sapiens
ggaggcagctggctc

SEQ ID NO: 1878658 - DNA, 15 bp, Homo sapiens
gaggcagctggctct

SEQ ID NO: 1878659 - DNA, 15 bp, Homo sapiens
aggcagctggctctc

SEQ ID NO: 1878660 - DNA, 15 bp, Homo sapiens
ggcagctggctctct

SEQ ID NO: 1878661 - DNA, 15 bp, Homo sapiens
gcagctggctctctc

SEQ ID NO: 1878662 - DNA, 15 bp, Homo sapiens
cagctggctctctcc

SEQ ID NO: 1878663 - DNA, 15 bp, Homo sapiens
agctggctctctccc

SEQ ID NO: 1878664 - DNA, 15 bp, Homo sapiens
gctggctctctccct

SEQ ID NO: 1878665 - DNA, 15 bp, Homo sapiens
ctggctctctcccta

SEQ ID NO: 1878666 - DNA, 15 bp, Homo sapiens
tggctctctccctat

SEQ ID NO: 1878667 - DNA, 15 bp, Homo sapiens
ggctctctccctatt

SEQ ID NO: 1878668 - DNA, 15 bp, Homo sapiens
gctctctccctattg

SEQ ID NO: 1878669 - DNA, 15 bp, Homo sapiens
ctctctccctattga

SEQ ID NO: 1878670 - DNA, 15 bp, Homo sapiens
tctctccctattgac

SEQ ID NO: 1878671 - DNA, 15 bp, Homo sapiens
ctctccctattgaca

SEQ ID NO: 1878672 - DNA, 15 bp, Homo sapiens
tctccctattgacag

SEQ ID NO: 1878673 - DNA, 15 bp, Homo sapiens
ctccctattgacagg

SEQ ID NO: 1878674 - DNA, 15 bp, Homo sapiens
tccctattgacaggc

SEQ ID NO: 1878675 - DNA, 15 bp, Homo sapiens
ccctattgacaggcc

SEQ ID NO: 1878676 - DNA, 15 bp, Homo sapiens
cctattgacaggccc

SEQ ID NO: 1878677 - DNA, 15 bp, Homo sapiens
ctattgacaggccct

SEQ ID NO: 1878678 - DNA, 15 bp, Homo sapiens
tattgacaggccctg

SEQ ID NO: 1878679 - DNA, 15 bp, Homo sapiens
attgacaggccctgc

SEQ ID NO: 1878680 - DNA, 15 bp, Homo sapiens
ttgacaggccctgcc

SEQ ID NO: 1878681 - DNA, 15 bp, Homo sapiens
tgacaggccctgcca

SEQ ID NO: 1878682 - DNA, 15 bp, Homo sapiens
gacaggccctgccac

SEQ ID NO: 1878683 - DNA, 15 bp, Homo sapiens
acaggccctgccaca

SEQ ID NO: 1878684 - DNA, 15 bp, Homo sapiens
caggccctgccacac

SEQ ID NO: 1878685 - DNA, 15 bp, Homo sapiens
aggccctgccacacc

SEQ ID NO: 1878686 - DNA, 15 bp, Homo sapiens
ggccctgccacaccc

SEQ ID NO: 1878687 - DNA, 15 bp, Homo sapiens
gccctgccacaccct

SEQ ID NO: 1878688 - DNA, 15 bp, Homo sapiens
ccctgccacaccctg

SEQ ID NO: 1878689 - DNA, 15 bp, Homo sapiens
cctgccacaccctgg

SEQ ID NO: 1878690 - DNA, 15 bp, Homo sapiens
ctgccacaccctggc

SEQ ID NO: 1878691 - DNA, 15 bp, Homo sapiens
tgccacaccctggca

SEQ ID NO: 1878692 - DNA, 15 bp, Homo sapiens
gccacaccctggcaa

SEQ ID NO: 1878693 - DNA, 15 bp, Homo sapiens
ccacaccctggcaat

SEQ ID NO: 1878694 - DNA, 15 bp, Homo sapiens
cacaccctggcaatt

SEQ ID NO: 1878695 - DNA, 15 bp, Homo sapiens
acaccctggcaattc

SEQ ID NO: 1878696 - DNA, 15 bp, Homo sapiens
caccctggcaattct

SEQ ID NO: 1878697 - DNA, 15 bp, Homo sapiens
accctggcaattctt

SEQ ID NO: 1878698 - DNA, 15 bp, Homo sapiens
ccctggcaattcttc

SEQ ID NO: 1878699 - DNA, 15 bp, Homo sapiens
cctggcaattcttcc

SEQ ID NO: 1878700 - DNA, 15 bp, Homo sapiens
ctggcaattcttcct

SEQ ID NO: 1878701 - DNA, 15 bp, Homo sapiens
tggcaattcttcctg

SEQ ID NO: 1878702 - DNA, 15 bp, Homo sapiens
ggcaattcttcctgg

SEQ ID NO: 1878703 - DNA, 15 bp, Homo sapiens
gcaattcttcctggc

SEQ ID NO: 1878704 - DNA, 15 bp, Homo sapiens
caattcttcctggca

SEQ ID NO: 1878705 - DNA, 15 bp, Homo sapiens
aattcttcctggcac

SEQ ID NO: 1878706 - DNA, 15 bp, Homo sapiens
attcttcctggcacc

SEQ ID NO: 1878707 - DNA, 15 bp, Homo sapiens
ttcttcctggcacca

SEQ ID NO: 1878708 - DNA, 15 bp, Homo sapiens
tcttcctggcaccaa

SEQ ID NO: 1878709 - DNA, 15 bp, Homo sapiens
cttcctggcaccaag

SEQ ID NO: 1878710 - DNA, 15 bp, Homo sapiens
ttcctggcaccaagg

SEQ ID NO: 1878711 - DNA, 15 bp, Homo sapiens
tcctggcaccaaggc

SEQ ID NO: 1878712 - DNA, 15 bp, Homo sapiens
cctggcaccaaggca

SEQ ID NO: 1878713 - DNA, 15 bp, Homo sapiens
ctggcaccaaggcaa

SEQ ID NO: 1878714 - DNA, 15 bp, Homo sapiens
tggcaccaaggcaag

SEQ ID NO: 1878715 - DNA, 15 bp, Homo sapiens
ggcaccaaggcaaga

SEQ ID NO: 1878716 - DNA, 15 bp, Homo sapiens
gcaccaaggcaagag

SEQ ID NO: 1878717 - DNA, 15 bp, Homo sapiens
caccaaggcaagagt

SEQ ID NO: 1878718 - DNA, 15 bp, Homo sapiens
accaaggcaagagtc

SEQ ID NO: 1878719 - DNA, 15 bp, Homo sapiens
ccaaggcaagagtca

SEQ ID NO: 1878720 - DNA, 15 bp, Homo sapiens
caaggcaagagtcag

SEQ ID NO: 1878721 - DNA, 15 bp, Homo sapiens
aaggcaagagtcagt

SEQ ID NO: 1878722 - DNA, 15 bp, Homo sapiens
aggcaagagtcagtg

SEQ ID NO: 1878723 - DNA, 15 bp, Homo sapiens
ggcaagagtcagtgg

SEQ ID NO: 1878724 - DNA, 15 bp, Homo sapiens
gcaagagtcagtggg

SEQ ID NO: 1878725 - DNA, 15 bp, Homo sapiens
caagagtcagtgggc

SEQ ID NO: 1878726 - DNA, 15 bp, Homo sapiens
aagagtcagtgggca

SEQ ID NO: 1878727 - DNA, 15 bp, Homo sapiens
agagtcagtgggcac

SEQ ID NO: 1878728 - DNA, 15 bp, Homo sapiens
gagtcagtgggcacc

SEQ ID NO: 1878729 - DNA, 15 bp, Homo sapiens
agtcagtgggcacct

SEQ ID NO: 1878730 - DNA, 15 bp, Homo sapiens
gtcagtgggcacctg

SEQ ID NO: 1878731 - DNA, 15 bp, Homo sapiens
tcagtgggcacctgt

SEQ ID NO: 1878732 - DNA, 15 bp, Homo sapiens
cagtgggcacctgtc

SEQ ID NO: 1878733 - DNA, 15 bp, Homo sapiens
agtgggcacctgtca

SEQ ID NO: 1878734 - DNA, 15 bp, Homo sapiens
gtgggcacctgtcat

SEQ ID NO: 1878735 - DNA, 15 bp, Homo sapiens
tgggcacctgtcatc

SEQ ID NO: 1878736 - DNA, 15 bp, Homo sapiens
gggcacctgtcatct

SEQ ID NO: 1878737 - DNA, 15 bp, Homo sapiens
ggcacctgtcatctc

SEQ ID NO: 1878738 - DNA, 15 bp, Homo sapiens
gcacctgtcatctca

SEQ ID NO: 1878739 - DNA, 15 bp, Homo sapiens
cacctgtcatctcat

SEQ ID NO: 1878740 - DNA, 15 bp, Homo sapiens
acctgtcatctcatt

SEQ ID NO: 1878741 - DNA, 15 bp, Homo sapiens
cctgtcatctcattg

SEQ ID NO: 1878742 - DNA, 15 bp, Homo sapiens
ctgtcatctcattgc

SEQ ID NO: 1878743 - DNA, 15 bp, Homo sapiens
tgtcatctcattgct

SEQ ID NO: 1878744 - DNA, 15 bp, Homo sapiens
gtcatctcattgctt

SEQ ID NO: 1878745 - DNA, 15 bp, Homo sapiens
tcatctcattgcttt

SEQ ID NO: 1878746 - DNA, 15 bp, Homo sapiens
catctcattgctttg

SEQ ID NO: 1878747 - DNA, 15 bp, Homo sapiens
atctcattgctttgc

SEQ ID NO: 1878748 - DNA, 15 bp, Homo sapiens
tctcattgctttgcc

SEQ ID NO: 1878749 - DNA, 15 bp, Homo sapiens
ctcattgctttgcct

SEQ ID NO: 1878750 - DNA, 15 bp, Homo sapiens
tcattgctttgcctg

SEQ ID NO: 1878751 - DNA, 15 bp, Homo sapiens
cattgctttgcctgc

SEQ ID NO: 1878752 - DNA, 15 bp, Homo sapiens
attgctttgcctgct

SEQ ID NO: 1878753 - DNA, 15 bp, Homo sapiens
ttgctttgcctgctt

SEQ ID NO: 1878754 - DNA, 15 bp, Homo sapiens
tgctttgcctgcttc

SEQ ID NO: 1878755 - DNA, 15 bp, Homo sapiens
gctttgcctgcttca

SEQ ID NO: 1878756 - DNA, 15 bp, Homo sapiens
ctttgcctgcttcac

SEQ ID NO: 1878757 - DNA, 15 bp, Homo sapiens
tttgcctgcttcacc

SEQ ID NO: 1878758 - DNA, 15 bp, Homo sapiens
ttgcctgcttcaccc

SEQ ID NO: 1878759 - DNA, 15 bp, Homo sapiens
tgcctgcttcaccct

SEQ ID NO: 1878760 - DNA, 15 bp, Homo sapiens
gcctgcttcaccctc

SEQ ID NO: 1878761 - DNA, 15 bp, Homo sapiens
cctgcttcaccctct

SEQ ID NO: 1878762 - DNA, 15 bp, Homo sapiens
ctgcttcaccctctg

SEQ ID NO: 1878763 - DNA, 15 bp, Homo sapiens
tgcttcaccctctga

SEQ ID NO: 1878764 - DNA, 15 bp, Homo sapiens
gcttcaccctctgac

SEQ ID NO: 1878765 - DNA, 15 bp, Homo sapiens
cttcaccctctgaca

SEQ ID NO: 1878766 - DNA, 15 bp, Homo sapiens
ttcaccctctgacaa

SEQ ID NO: 1878767 - DNA, 15 bp, Homo sapiens
tcaccctctgacaat

SEQ ID NO: 1878768 - DNA, 15 bp, Homo sapiens
caccctctgacaata

SEQ ID NO: 1878769 - DNA, 15 bp, Homo sapiens
accctctgacaatac

SEQ ID NO: 1878770 - DNA, 15 bp, Homo sapiens
ccctctgacaatacc

SEQ ID NO: 1878771 - DNA, 15 bp, Homo sapiens
cctctgacaatacct

SEQ ID NO: 1878772 - DNA, 15 bp, Homo sapiens
ctctgacaatacctt

SEQ ID NO: 1878773 - DNA, 15 bp, Homo sapiens
tctgacaataccttc

SEQ ID NO: 1878774 - DNA, 15 bp, Homo sapiens
ctgacaataccttca

SEQ ID NO: 1878775 - DNA, 15 bp, Homo sapiens
tgacaataccttcat

SEQ ID NO: 1878776 - DNA, 15 bp, Homo sapiens
gacaataccttcatg

SEQ ID NO: 1878777 - DNA, 15 bp, Homo sapiens
acaataccttcatga

SEQ ID NO: 1878778 - DNA, 15 bp, Homo sapiens
caataccttcatgag

SEQ ID NO: 1878779 - DNA, 15 bp, Homo sapiens
aataccttcatgagc

SEQ ID NO: 1878780 - DNA, 15 bp, Homo sapiens
ataccttcatgagcc

SEQ ID NO: 1878781 - DNA, 15 bp, Homo sapiens
taccttcatgagccc

SEQ ID NO: 1878782 - DNA, 15 bp, Homo sapiens
accttcatgagccct

SEQ ID NO: 1878783 - DNA, 15 bp, Homo sapiens
ccttcatgagccctg

SEQ ID NO: 1878784 - DNA, 15 bp, Homo sapiens
cttcatgagccctgt

SEQ ID NO: 1878785 - DNA, 15 bp, Homo sapiens
ttcatgagccctgta

SEQ ID NO: 1878786 - DNA, 15 bp, Homo sapiens
tcatgagccctgtag

SEQ ID NO: 1878787 - DNA, 15 bp, Homo sapiens
catgagccctgtagg

SEQ ID NO: 1878788 - DNA, 15 bp, Homo sapiens
atgagccctgtaggc

SEQ ID NO: 1878789 - DNA, 15 bp, Homo sapiens
tgagccctgtaggca

SEQ ID NO: 1878790 - DNA, 15 bp, Homo sapiens
gagccctgtaggcaa

SEQ ID NO: 1878791 - DNA, 15 bp, Homo sapiens
agccctgtaggcaat

SEQ ID NO: 1878792 - DNA, 15 bp, Homo sapiens
gccctgtaggcaatt

SEQ ID NO: 1878793 - DNA, 15 bp, Homo sapiens
ccctgtaggcaattg

SEQ ID NO: 1878794 - DNA, 15 bp, Homo sapiens
cctgtaggcaattga

SEQ ID NO: 1878795 - DNA, 15 bp, Homo sapiens
ctgtaggcaattgag

SEQ ID NO: 1878796 - DNA, 15 bp, Homo sapiens
tgtaggcaattgagc

SEQ ID NO: 1878797 - DNA, 15 bp, Homo sapiens
gtaggcaattgagca

SEQ ID NO: 1878798 - DNA, 15 bp, Homo sapiens
taggcaattgagcac

SEQ ID NO: 1878799 - DNA, 15 bp, Homo sapiens
aggcaattgagcaca

SEQ ID NO: 1878800 - DNA, 15 bp, Homo sapiens
ggcaattgagcacat

SEQ ID NO: 1878801 - DNA, 15 bp, Homo sapiens
gcaattgagcacatg

SEQ ID NO: 1878802 - DNA, 15 bp, Homo sapiens
caattgagcacatga

SEQ ID NO: 1878803 - DNA, 15 bp, Homo sapiens
aattgagcacatgat

SEQ ID NO: 1878804 - DNA, 15 bp, Homo sapiens
attgagcacatgatc

SEQ ID NO: 1878805 - DNA, 15 bp, Homo sapiens
ttgagcacatgatct

SEQ ID NO: 1878806 - DNA, 15 bp, Homo sapiens
tgagcacatgatctc

SEQ ID NO: 1878807 - DNA, 15 bp, Homo sapiens
gagcacatgatctcg

SEQ ID NO: 1878808 - DNA, 15 bp, Homo sapiens
agcacatgatctcga

SEQ ID NO: 1878809 - DNA, 15 bp, Homo sapiens
gcacatgatctcgat

SEQ ID NO: 1878810 - DNA, 15 bp, Homo sapiens
cacatgatctcgatt

SEQ ID NO: 1878811 - DNA, 15 bp, Homo sapiens
acatgatctcgattt

SEQ ID NO: 1878812 - DNA, 15 bp, Homo sapiens
catgatctcgatttc

SEQ ID NO: 1878813 - DNA, 15 bp, Homo sapiens
atgatctcgatttca

SEQ ID NO: 1878814 - DNA, 15 bp, Homo sapiens
tgatctcgatttcaa

SEQ ID NO: 1878815 - DNA, 15 bp, Homo sapiens
gatctcgatttcaaa

SEQ ID NO: 1878816 - DNA, 15 bp, Homo sapiens
atctcgatttcaaat

SEQ ID NO: 1878817 - DNA, 15 bp, Homo sapiens
tctcgatttcaaata

SEQ ID NO: 1878818 - DNA, 15 bp, Homo sapiens
ctcgatttcaaatac

SEQ ID NO: 1878819 - DNA, 15 bp, Homo sapiens
tcgatttcaaataca

SEQ ID NO: 1878820 - DNA, 15 bp, Homo sapiens
cgatttcaaatacac

SEQ ID NO: 1878821 - DNA, 15 bp, Homo sapiens
gatttcaaatacaca

SEQ ID NO: 1878822 - DNA, 15 bp, Homo sapiens
atttcaaatacacag

SEQ ID NO: 1878823 - DNA, 15 bp, Homo sapiens
tttcaaatacacagc

SEQ ID NO: 1878824 - DNA, 15 bp, Homo sapiens
ttcaaatacacagcc

SEQ ID NO: 1878825 - DNA, 15 bp, Homo sapiens
tcaaatacacagccc

SEQ ID NO: 1878826 - DNA, 15 bp, Homo sapiens
caaatacacagccca

SEQ ID NO: 1878827 - DNA, 15 bp, Homo sapiens
aaatacacagcccac

SEQ ID NO: 1878828 - DNA, 15 bp, Homo sapiens
aatacacagcccact

SEQ ID NO: 1878829 - DNA, 15 bp, Homo sapiens
atacacagcccactt

SEQ ID NO: 1878830 - DNA, 15 bp, Homo sapiens
tacacagcccacttg

SEQ ID NO: 1878831 - DNA, 15 bp, Homo sapiens
acacagcccacttgg

SEQ ID NO: 1878832 - DNA, 15 bp, Homo sapiens
cacagcccacttggc

SEQ ID NO: 1878833 - DNA, 15 bp, Homo sapiens
acagcccacttggcc

SEQ ID NO: 1878834 - DNA, 15 bp, Homo sapiens
cagcccacttggcct

SEQ ID NO: 1878835 - DNA, 15 bp, Homo sapiens
agcccacttggcctg

SEQ ID NO: 1878836 - DNA, 15 bp, Homo sapiens
gcccacttggcctgt

SEQ ID NO: 1878837 - DNA, 15 bp, Homo sapiens
cccacttggcctgtg

SEQ ID NO: 1878838 - DNA, 15 bp, Homo sapiens
ccacttggcctgtgt

SEQ ID NO: 1878839 - DNA, 15 bp, Homo sapiens
cacttggcctgtgtc

SEQ ID NO: 1878840 - DNA, 15 bp, Homo sapiens
acttggcctgtgtcc

SEQ ID NO: 1878841 - DNA, 15 bp, Homo sapiens
cttggcctgtgtccc

SEQ ID NO: 1878842 - DNA, 15 bp, Homo sapiens
ttggcctgtgtccct

SEQ ID NO: 1878843 - DNA, 15 bp, Homo sapiens
tggcctgtgtccctc

SEQ ID NO: 1878844 - DNA, 15 bp, Homo sapiens
ggcctgtgtccctcc

SEQ ID NO: 1878845 - DNA, 15 bp, Homo sapiens
gcctgtgtccctccc

SEQ ID NO: 1878846 - DNA, 15 bp, Homo sapiens
cctgtgtccctccct

SEQ ID NO: 1878847 - DNA, 15 bp, Homo sapiens
ctgtgtccctccctg

SEQ ID NO: 1878848 - DNA, 15 bp, Homo sapiens
tgtgtccctccctgg

SEQ ID NO: 1878849 - DNA, 15 bp, Homo sapiens
gtgtccctccctggt

SEQ ID NO: 1878850 - DNA, 15 bp, Homo sapiens
tgtccctccctggtt

SEQ ID NO: 1878851 - DNA, 15 bp, Homo sapiens
gtccctccctggttt

SEQ ID NO: 1878852 - DNA, 15 bp, Homo sapiens
tccctccctggtttc

SEQ ID NO: 1878853 - DNA, 15 bp, Homo sapiens
ccctccctggtttcc

SEQ ID NO: 1878854 - DNA, 15 bp, Homo sapiens
cctccctggtttcct

SEQ ID NO: 1878855 - DNA, 15 bp, Homo sapiens
ctccctggtttcctt

SEQ ID NO: 1878856 - DNA, 15 bp, Homo sapiens
tccctggtttcctta

SEQ ID NO: 1878857 - DNA, 15 bp, Homo sapiens
ccctggtttccttag

SEQ ID NO: 1878858 - DNA, 15 bp, Homo sapiens
cctggtttccttaga

SEQ ID NO: 1878859 - DNA, 15 bp, Homo sapiens
ctggtttccttagat

SEQ ID NO: 1878860 - DNA, 15 bp, Homo sapiens
tggtttccttagata

SEQ ID NO: 1878861 - DNA, 15 bp, Homo sapiens
ggtttccttagatag

SEQ ID NO: 1878862 - DNA, 15 bp, Homo sapiens
gtttccttagatagc

SEQ ID NO: 1878863 - DNA, 15 bp, Homo sapiens
tttccttagatagct

SEQ ID NO: 1878864 - DNA, 15 bp, Homo sapiens
ttccttagatagctc

SEQ ID NO: 1878865 - DNA, 15 bp, Homo sapiens
tccttagatagctct

SEQ ID NO: 1878866 - DNA, 15 bp, Homo sapiens
ccttagatagctctg

SEQ ID NO: 1878867 - DNA, 15 bp, Homo sapiens
cttagatagctctgt

SEQ ID NO: 1878868 - DNA, 15 bp, Homo sapiens
ttagatagctctgtg

SEQ ID NO: 1878869 - DNA, 15 bp, Homo sapiens
tagatagctctgtgt

SEQ ID NO: 1878870 - DNA, 15 bp, Homo sapiens
agatagctctgtgtg

SEQ ID NO: 1878871 - DNA, 15 bp, Homo sapiens
gatagctctgtgtga

SEQ ID NO: 1878872 - DNA, 15 bp, Homo sapiens
atagctctgtgtgaa

SEQ ID NO: 1878873 - DNA, 15 bp, Homo sapiens
tagctctgtgtgaag

SEQ ID NO: 1878874 - DNA, 15 bp, Homo sapiens
agctctgtgtgaagt

SEQ ID NO: 1878875 - DNA, 15 bp, Homo sapiens
gctctgtgtgaagtc

SEQ ID NO: 1878876 - DNA, 15 bp, Homo sapiens
ctctgtgtgaagtcc

SEQ ID NO: 1878877 - DNA, 15 bp, Homo sapiens
tctgtgtgaagtcct

SEQ ID NO: 1878878 - DNA, 15 bp, Homo sapiens
ctgtgtgaagtcctt

SEQ ID NO: 1878879 - DNA, 15 bp, Homo sapiens
tgtgtgaagtccttc

SEQ ID NO: 1878880 - DNA, 15 bp, Homo sapiens
gtgtgaagtccttct

SEQ ID NO: 1878881 - DNA, 15 bp, Homo sapiens
tgtgaagtccttctt

SEQ ID NO: 1878882 - DNA, 15 bp, Homo sapiens
gtgaagtccttcttt

SEQ ID NO: 1878883 - DNA, 15 bp, Homo sapiens
tgaagtccttctttc

SEQ ID NO: 1878884 - DNA, 15 bp, Homo sapiens
gaagtccttctttca

SEQ ID NO: 1878885 - DNA, 15 bp, Homo sapiens
aagtccttctttcat

SEQ ID NO: 1878886 - DNA, 15 bp, Homo sapiens
agtccttctttcata

SEQ ID NO: 1878887 - DNA, 15 bp, Homo sapiens
gtccttctttcataa

SEQ ID NO: 1878888 - DNA, 15 bp, Homo sapiens
tccttctttcataat

SEQ ID NO: 1878889 - DNA, 15 bp, Homo sapiens
ccttctttcataata

SEQ ID NO: 1878890 - DNA, 15 bp, Homo sapiens
cttctttcataatat

SEQ ID NO: 1878891 - DNA, 15 bp, Homo sapiens
ttctttcataatatc

SEQ ID NO: 1878892 - DNA, 15 bp, Homo sapiens
tctttcataatatcc

SEQ ID NO: 1878893 - DNA, 15 bp, Homo sapiens
ctttcataatatcct

SEQ ID NO: 1878894 - DNA, 15 bp, Homo sapiens
tttcataatatcctt

SEQ ID NO: 1878895 - DNA, 15 bp, Homo sapiens
ttcataatatccttt

SEQ ID NO: 1878896 - DNA, 15 bp, Homo sapiens
tcataatatcctttg

SEQ ID NO: 1878897 - DNA, 15 bp, Homo sapiens
cataatatcctttga

SEQ ID NO: 1878898 - DNA, 15 bp, Homo sapiens
ataatatcctttgaa

SEQ ID NO: 1878899 - DNA, 15 bp, Homo sapiens
taatatcctttgaaa

SEQ ID NO: 1878900 - DNA, 15 bp, Homo sapiens
aatatcctttgaaac

SEQ ID NO: 1878901 - DNA, 15 bp, Homo sapiens
atatcctttgaaacc

SEQ ID NO: 1878902 - DNA, 15 bp, Homo sapiens
tatcctttgaaaccg

SEQ ID NO: 1878903 - DNA, 15 bp, Homo sapiens
atcctttgaaaccga

SEQ ID NO: 1878904 - DNA, 15 bp, Homo sapiens
tcctttgaaaccgat

SEQ ID NO: 1878905 - DNA, 15 bp, Homo sapiens
cctttgaaaccgata

SEQ ID NO: 1878906 - DNA, 15 bp, Homo sapiens
ctttgaaaccgatat

SEQ ID NO: 1878907 - DNA, 15 bp, Homo sapiens
tttgaaaccgatatt

SEQ ID NO: 1878908 - DNA, 15 bp, Homo sapiens
ttgaaaccgatattc

SEQ ID NO: 1878909 - DNA, 15 bp, Homo sapiens
tgaaaccgatattca

SEQ ID NO: 1878910 - DNA, 15 bp, Homo sapiens
gaaaccgatattcac

SEQ ID NO: 1878911 - DNA, 15 bp, Homo sapiens
aaaccgatattcacc

SEQ ID NO: 1878912 - DNA, 15 bp, Homo sapiens
aaccgatattcaccc

SEQ ID NO: 1878913 - DNA, 15 bp, Homo sapiens
accgatattcaccca

SEQ ID NO: 1878914 - DNA, 15 bp, Homo sapiens
ccgatattcacccat

SEQ ID NO: 1878915 - DNA, 15 bp, Homo sapiens
cgatattcacccatt

SEQ ID NO: 1878916 - DNA, 15 bp, Homo sapiens
gatattcacccattt

SEQ ID NO: 1878917 - DNA, 15 bp, Homo sapiens
attcacccatttaag

SEQ ID NO: 1878918 - DNA, 15 bp, Homo sapiens
ttcacccatttaagt

SEQ ID NO: 1878919 - DNA, 15 bp, Homo sapiens
tcacccatttaagtg

SEQ ID NO: 1878920 - DNA, 15 bp, Homo sapiens
cacccatttaagtga

SEQ ID NO: 1878921 - DNA, 15 bp, Homo sapiens
acccatttaagtgat

SEQ ID NO: 1878922 - DNA, 15 bp, Homo sapiens
cccatttaagtgatg

SEQ ID NO: 1878923 - DNA, 15 bp, Homo sapiens
ccatttaagtgatga

SEQ ID NO: 1878924 - DNA, 15 bp, Homo sapiens
catttaagtgatgaa

SEQ ID NO: 1878925 - DNA, 15 bp, Homo sapiens
atttaagtgatgaag

SEQ ID NO: 1878926 - DNA, 15 bp, Homo sapiens
tttaagtgatgaagc

SEQ ID NO: 1878927 - DNA, 15 bp, Homo sapiens
ttaagtgatgaagct

SEQ ID NO: 1878928 - DNA, 15 bp, Homo sapiens
taagtgatgaagctt

SEQ ID NO: 1878929 - DNA, 15 bp, Homo sapiens
aagtgatgaagcttc

SEQ ID NO: 1878930 - DNA, 15 bp, Homo sapiens
agtgatgaagcttca

SEQ ID NO: 1878931 - DNA, 15 bp, Homo sapiens
gtgatgaagcttcag

SEQ ID NO: 1878932 - DNA, 15 bp, Homo sapiens
tgatgaagcttcagg

SEQ ID NO: 1878933 - DNA, 15 bp, Homo sapiens
gatgaagcttcaggg

SEQ ID NO: 1878934 - DNA, 15 bp, Homo sapiens
atgaagcttcagggc

SEQ ID NO: 1878935 - DNA, 15 bp, Homo sapiens
tgaagcttcagggct

SEQ ID NO: 1878936 - DNA, 15 bp, Homo sapiens
gaagcttcagggctc

SEQ ID NO: 1878937 - DNA, 15 bp, Homo sapiens
aagcttcagggctca

SEQ ID NO: 1878938 - DNA, 15 bp, Homo sapiens
agcttcagggctcag

SEQ ID NO: 1878939 - DNA, 15 bp, Homo sapiens
gcttcagggctcaga

SEQ ID NO: 1878940 - DNA, 15 bp, Homo sapiens
cttcagggctcagaa

SEQ ID NO: 1878941 - DNA, 15 bp, Homo sapiens
ttcagggctcagaaa

SEQ ID NO: 1878942 - DNA, 15 bp, Homo sapiens
tcagggctcagaaag

SEQ ID NO: 1878943 - DNA, 15 bp, Homo sapiens
cagggctcagaaaga

SEQ ID NO: 1878944 - DNA, 15 bp, Homo sapiens
agggctcagaaagag

SEQ ID NO: 1878945 - DNA, 15 bp, Homo sapiens
gggctcagaaagagt

SEQ ID NO: 1878946 - DNA, 15 bp, Homo sapiens
ggctcagaaagagtg

SEQ ID NO: 1878947 - DNA, 15 bp, Homo sapiens
gctcagaaagagtga

SEQ ID NO: 1878948 - DNA, 15 bp, Homo sapiens
ctcagaaagagtgag

SEQ ID NO: 1878949 - DNA, 15 bp, Homo sapiens
tcagaaagagtgaga

SEQ ID NO: 1878950 - DNA, 15 bp, Homo sapiens
cagaaagagtgagaa

SEQ ID NO: 1878951 - DNA, 15 bp, Homo sapiens
gaaagagtgagaaat

SEQ ID NO: 1878952 - DNA, 15 bp, Homo sapiens
aaagagtgagaaatt

SEQ ID NO: 1878953 - DNA, 15 bp, Homo sapiens
aagagtgagaaattt

SEQ ID NO: 1878954 - DNA, 15 bp, Homo sapiens
agagtgagaaatttg

SEQ ID NO: 1878955 - DNA, 15 bp, Homo sapiens
gagtgagaaatttgc

SEQ ID NO: 1878956 - DNA, 15 bp, Homo sapiens
agtgagaaatttgcc

SEQ ID NO: 1878957 - DNA, 15 bp, Homo sapiens
gtgagaaatttgcca

SEQ ID NO: 1878958 - DNA, 15 bp, Homo sapiens
tgagaaatttgccaa

SEQ ID NO: 1878959 - DNA, 15 bp, Homo sapiens
gagaaatttgccaaa

SEQ ID NO: 1878960 - DNA, 15 bp, Homo sapiens
agaaatttgccaaaa

SEQ ID NO: 1878961 - DNA, 15 bp, Homo sapiens
gaaatttgccaaaaa

SEQ ID NO: 1878962 - DNA, 15 bp, Homo sapiens
aaatttgccaaaaat

SEQ ID NO: 1878963 - DNA, 15 bp, Homo sapiens
aatttgccaaaaatt

SEQ ID NO: 1878964 - DNA, 15 bp, Homo sapiens
atttgccaaaaattc

SEQ ID NO: 1878965 - DNA, 15 bp, Homo sapiens
tttgccaaaaattct

SEQ ID NO: 1878966 - DNA, 15 bp, Homo sapiens
ttgccaaaaattcta

SEQ ID NO: 1878967 - DNA, 15 bp, Homo sapiens
tgccaaaaattctac

SEQ ID NO: 1878968 - DNA, 15 bp, Homo sapiens
gccaaaaattctaca

SEQ ID NO: 1878969 - DNA, 15 bp, Homo sapiens
ccaaaaattctacag

SEQ ID NO: 1878970 - DNA, 15 bp, Homo sapiens
caaaaattctacagc

SEQ ID NO: 1878971 - DNA, 15 bp, Homo sapiens
aaaaattctacagcc

SEQ ID NO: 1878972 - DNA, 15 bp, Homo sapiens
aaaattctacagcca

SEQ ID NO: 1878973 - DNA, 15 bp, Homo sapiens
aaattctacagccaa

SEQ ID NO: 1878974 - DNA, 15 bp, Homo sapiens
aattctacagccaat

SEQ ID NO: 1878975 - DNA, 15 bp, Homo sapiens
attctacagccaatc

SEQ ID NO: 1878976 - DNA, 15 bp, Homo sapiens
ttctacagccaatcc

SEQ ID NO: 1878977 - DNA, 15 bp, Homo sapiens
tctacagccaatcca

SEQ ID NO: 1878978 - DNA, 15 bp, Homo sapiens
ctacagccaatccaa

SEQ ID NO: 1878979 - DNA, 15 bp, Homo sapiens
tacagccaatccaag

SEQ ID NO: 1878980 - DNA, 15 bp, Homo sapiens
acagccaatccaagc

SEQ ID NO: 1878981 - DNA, 15 bp, Homo sapiens
cagccaatccaagca

SEQ ID NO: 1878982 - DNA, 15 bp, Homo sapiens
agccaatccaagcag

SEQ ID NO: 1878983 - DNA, 15 bp, Homo sapiens
gccaatccaagcaga

SEQ ID NO: 1878984 - DNA, 15 bp, Homo sapiens
ccaatccaagcagag

SEQ ID NO: 1878985 - DNA, 15 bp, Homo sapiens
caatccaagcagagc

SEQ ID NO: 1878986 - DNA, 15 bp, Homo sapiens
aatccaagcagagcc

SEQ ID NO: 1878987 - DNA, 15 bp, Homo sapiens
atccaagcagagcca

SEQ ID NO: 1878988 - DNA, 15 bp, Homo sapiens
tccaagcagagccag

SEQ ID NO: 1878989 - DNA, 15 bp, Homo sapiens
ccaagcagagccagg

SEQ ID NO: 1878990 - DNA, 15 bp, Homo sapiens
caagcagagccagga

SEQ ID NO: 1878991 - DNA, 15 bp, Homo sapiens
aagcagagccaggac

SEQ ID NO: 1878992 - DNA, 15 bp, Homo sapiens
agcagagccaggact

SEQ ID NO: 1878993 - DNA, 15 bp, Homo sapiens
gcagagccaggactc

SEQ ID NO: 1878994 - DNA, 15 bp, Homo sapiens
cagagccaggactcc

SEQ ID NO: 1878995 - DNA, 15 bp, Homo sapiens
agagccaggactcca

SEQ ID NO: 1878996 - DNA, 15 bp, Homo sapiens
gagccaggactccaa

SEQ ID NO: 1878997 - DNA, 15 bp, Homo sapiens
agccaggactccaag

SEQ ID NO: 1878998 - DNA, 15 bp, Homo sapiens
gccaggactccaagg

SEQ ID NO: 1878999 - DNA, 15 bp, Homo sapiens
ccaggactccaaggt

SEQ ID NO: 1879000 - DNA, 15 bp, Homo sapiens
caggactccaaggta

SEQ ID NO: 1879001 - DNA, 15 bp, Homo sapiens
aggactccaaggtag

SEQ ID NO: 1879002 - DNA, 15 bp, Homo sapiens
ggactccaaggtagg

SEQ ID NO: 1879003 - DNA, 15 bp, Homo sapiens
gactccaaggtagga

SEQ ID NO: 1879004 - DNA, 15 bp, Homo sapiens
actccaaggtaggac

SEQ ID NO: 1879005 - DNA, 15 bp, Homo sapiens
ctccaaggtaggacc

SEQ ID NO: 1879006 - DNA, 15 bp, Homo sapiens
tccaaggtaggacct

SEQ ID NO: 1879007 - DNA, 15 bp, Homo sapiens
ccaaggtaggacctg

SEQ ID NO: 1879008 - DNA, 15 bp, Homo sapiens
caaggtaggacctgc

SEQ ID NO: 1879009 - DNA, 15 bp, Homo sapiens
aaggtaggacctgcg

SEQ ID NO: 1879010 - DNA, 15 bp, Homo sapiens
aggtaggacctgcgc

SEQ ID NO: 1879011 - DNA, 15 bp, Homo sapiens
ggtaggacctgcgcc

SEQ ID NO: 1879012 - DNA, 15 bp, Homo sapiens
gtaggacctgcgccc

SEQ ID NO: 1879013 - DNA, 15 bp, Homo sapiens
taggacctgcgccca

SEQ ID NO: 1879014 - DNA, 15 bp, Homo sapiens
aggacctgcgcccag

SEQ ID NO: 1879015 - DNA, 15 bp, Homo sapiens
ggacctgcgcccagg

SEQ ID NO: 1879016 - DNA, 15 bp, Homo sapiens
gacctgcgcccaggt

SEQ ID NO: 1879017 - DNA, 15 bp, Homo sapiens
acctgcgcccaggtg

SEQ ID NO: 1879018 - DNA, 15 bp, Homo sapiens
cctgcgcccaggtgt

SEQ ID NO: 1879019 - DNA, 15 bp, Homo sapiens
ctgcgcccaggtgtg

SEQ ID NO: 1879020 - DNA, 15 bp, Homo sapiens
tgcgcccaggtgtgt

SEQ ID NO: 1879021 - DNA, 15 bp, Homo sapiens
gcgcccaggtgtgta

SEQ ID NO: 1879022 - DNA, 15 bp, Homo sapiens
cgcccaggtgtgtag

SEQ ID NO: 1879023 - DNA, 15 bp, Homo sapiens
gcccaggtgtgtagc

SEQ ID NO: 1879024 - DNA, 15 bp, Homo sapiens
cccaggtgtgtagcc

SEQ ID NO: 1879025 - DNA, 15 bp, Homo sapiens
ccaggtgtgtagcct

SEQ ID NO: 1879026 - DNA, 15 bp, Homo sapiens
caggtgtgtagcctg

SEQ ID NO: 1879027 - DNA, 15 bp, Homo sapiens
aggtgtgtagcctgt

SEQ ID NO: 1879028 - DNA, 15 bp, Homo sapiens
ggtgtgtagcctgta

SEQ ID NO: 1879029 - DNA, 15 bp, Homo sapiens
gtgtgtagcctgtac

SEQ ID NO: 1879030 - DNA, 15 bp, Homo sapiens
tgtgtagcctgtacc

SEQ ID NO: 1879031 - DNA, 15 bp, Homo sapiens
gtgtagcctgtaccc

SEQ ID NO: 1879032 - DNA, 15 bp, Homo sapiens
tgtagcctgtacccc

SEQ ID NO: 1879033 - DNA, 15 bp, Homo sapiens
gtagcctgtaccccg

SEQ ID NO: 1879034 - DNA, 15 bp, Homo sapiens
tagcctgtaccccga

SEQ ID NO: 1879035 - DNA, 15 bp, Homo sapiens
agcctgtaccccgag

SEQ ID NO: 1879036 - DNA, 15 bp, Homo sapiens
gcctgtaccccgagc

SEQ ID NO: 1879037 - DNA, 15 bp, Homo sapiens
cctgtaccccgagca

SEQ ID NO: 1879038 - DNA, 15 bp, Homo sapiens
ctgtaccccgagcag

SEQ ID NO: 1879039 - DNA, 15 bp, Homo sapiens
tgtaccccgagcagc

SEQ ID NO: 1879040 - DNA, 15 bp, Homo sapiens
gtaccccgagcagct

SEQ ID NO: 1879041 - DNA, 15 bp, Homo sapiens
taccccgagcagctc

SEQ ID NO: 1879042 - DNA, 15 bp, Homo sapiens
accccgagcagctcc

SEQ ID NO: 1879043 - DNA, 15 bp, Homo sapiens
ccccgagcagctcca

SEQ ID NO: 1879044 - DNA, 15 bp, Homo sapiens
cccgagcagctccag

SEQ ID NO: 1879045 - DNA, 15 bp, Homo sapiens
ccgagcagctccagc

SEQ ID NO: 1879046 - DNA, 15 bp, Homo sapiens
cgagcagctccagca

SEQ ID NO: 1879047 - DNA, 15 bp, Homo sapiens
gagcagctccagcac

SEQ ID NO: 1879048 - DNA, 15 bp, Homo sapiens
agcagctccagcacc

SEQ ID NO: 1879049 - DNA, 15 bp, Homo sapiens
gcagctccagcaccg

SEQ ID NO: 1879050 - DNA, 15 bp, Homo sapiens
cagctccagcaccgc

SEQ ID NO: 1879051 - DNA, 15 bp, Homo sapiens
agctccagcaccgcc

SEQ ID NO: 1879052 - DNA, 15 bp, Homo sapiens
gctccagcaccgcca

SEQ ID NO: 1879053 - DNA, 15 bp, Homo sapiens
ctccagcaccgccat

SEQ ID NO: 1879054 - DNA, 15 bp, Homo sapiens
tccagcaccgccatc

SEQ ID NO: 1879055 - DNA, 15 bp, Homo sapiens
ccagcaccgccatcc

SEQ ID NO: 1879056 - DNA, 15 bp, Homo sapiens
cagcaccgccatcca

SEQ ID NO: 1879057 - DNA, 15 bp, Homo sapiens
agcaccgccatccac

SEQ ID NO: 1879058 - DNA, 15 bp, Homo sapiens
gcaccgccatccaca

SEQ ID NO: 1879059 - DNA, 15 bp, Homo sapiens
caccgccatccacac

SEQ ID NO: 1879060 - DNA, 15 bp, Homo sapiens
accgccatccacaca

SEQ ID NO: 1879061 - DNA, 15 bp, Homo sapiens
ccgccatccacacac

SEQ ID NO: 1879062 - DNA, 15 bp, Homo sapiens
cgccatccacacaca

SEQ ID NO: 1879063 - DNA, 15 bp, Homo sapiens
gccatccacacacaa

SEQ ID NO: 1879064 - DNA, 15 bp, Homo sapiens
ccatccacacacaag

SEQ ID NO: 1879065 - DNA, 15 bp, Homo sapiens
catccacacacaaga

SEQ ID NO: 1879066 - DNA, 15 bp, Homo sapiens
atccacacacaagac

SEQ ID NO: 1879067 - DNA, 15 bp, Homo sapiens
tccacacacaagaca

SEQ ID NO: 1879068 - DNA, 15 bp, Homo sapiens
ccacacacaagacac

SEQ ID NO: 1879069 - DNA, 15 bp, Homo sapiens
cacacacaagacaca

SEQ ID NO: 1879070 - DNA, 15 bp, Homo sapiens
acacacaagacacaa

SEQ ID NO: 1879071 - DNA, 15 bp, Homo sapiens
cacacaagacacaaa

SEQ ID NO: 1879072 - DNA, 15 bp, Homo sapiens
acacaagacacaaat

SEQ ID NO: 1879073 - DNA, 15 bp, Homo sapiens
cacaagacacaaatg

SEQ ID NO: 1879074 - DNA, 15 bp, Homo sapiens
acaagacacaaatga

SEQ ID NO: 1879075 - DNA, 15 bp, Homo sapiens
caagacacaaatgag

SEQ ID NO: 1879076 - DNA, 15 bp, Homo sapiens
aagacacaaatgaga

SEQ ID NO: 1879077 - DNA, 15 bp, Homo sapiens
agacacaaatgagag

SEQ ID NO: 1879078 - DNA, 15 bp, Homo sapiens
gacacaaatgagagc

SEQ ID NO: 1879079 - DNA, 15 bp, Homo sapiens
acacaaatgagagcg

SEQ ID NO: 1879080 - DNA, 15 bp, Homo sapiens
cacaaatgagagcgt

SEQ ID NO: 1879081 - DNA, 15 bp, Homo sapiens
acaaatgagagcgtg

SEQ ID NO: 1879082 - DNA, 15 bp, Homo sapiens
caaatgagagcgtgc

SEQ ID NO: 1879083 - DNA, 15 bp, Homo sapiens
aaatgagagcgtgct

SEQ ID NO: 1879084 - DNA, 15 bp, Homo sapiens
aatgagagcgtgctc

SEQ ID NO: 1879085 - DNA, 15 bp, Homo sapiens
atgagagcgtgctct

SEQ ID NO: 1879086 - DNA, 15 bp, Homo sapiens
tgagagcgtgctctc

SEQ ID NO: 1879087 - DNA, 15 bp, Homo sapiens
gagagcgtgctctcc

SEQ ID NO: 1879088 - DNA, 15 bp, Homo sapiens
agagcgtgctctcca

SEQ ID NO: 1879089 - DNA, 15 bp, Homo sapiens
gagcgtgctctccag

SEQ ID NO: 1879090 - DNA, 15 bp, Homo sapiens
agcgtgctctccaga

SEQ ID NO: 1879091 - DNA, 15 bp, Homo sapiens
gcgtgctctccagac

SEQ ID NO: 1879092 - DNA, 15 bp, Homo sapiens
cgtgctctccagacc

SEQ ID NO: 1879093 - DNA, 15 bp, Homo sapiens
gtgctctccagacct

SEQ ID NO: 1879094 - DNA, 15 bp, Homo sapiens
tgctctccagacctg

SEQ ID NO: 1879095 - DNA, 15 bp, Homo sapiens
gctctccagacctgt

SEQ ID NO: 1879096 - DNA, 15 bp, Homo sapiens
ctctccagacctgta

SEQ ID NO: 1879097 - DNA, 15 bp, Homo sapiens
tctccagacctgtac

SEQ ID NO: 1879098 - DNA, 15 bp, Homo sapiens
ctccagacctgtaca

SEQ ID NO: 1879099 - DNA, 15 bp, Homo sapiens
tccagacctgtacag

SEQ ID NO: 1879100 - DNA, 15 bp, Homo sapiens
ccagacctgtacagc

SEQ ID NO: 1879101 - DNA, 15 bp, Homo sapiens
cagacctgtacagcg

SEQ ID NO: 1879102 - DNA, 15 bp, Homo sapiens
agacctgtacagcgc

SEQ ID NO: 1879103 - DNA, 15 bp, Homo sapiens
gacctgtacagcgca

SEQ ID NO: 1879104 - DNA, 15 bp, Homo sapiens
acctgtacagcgcat

SEQ ID NO: 1879105 - DNA, 15 bp, Homo sapiens
cctgtacagcgcatg

SEQ ID NO: 1879106 - DNA, 15 bp, Homo sapiens
ctgtacagcgcatgg

SEQ ID NO: 1879107 - DNA, 15 bp, Homo sapiens
tgtacagcgcatggc

SEQ ID NO: 1879108 - DNA, 15 bp, Homo sapiens
gtacagcgcatggcc

SEQ ID NO: 1879109 - DNA, 15 bp, Homo sapiens
tacagcgcatggcct

SEQ ID NO: 1879110 - DNA, 15 bp, Homo sapiens
acagcgcatggcctg

SEQ ID NO: 1879111 - DNA, 15 bp, Homo sapiens
cagcgcatggcctgc

SEQ ID NO: 1879112 - DNA, 15 bp, Homo sapiens
agcgcatggcctgcc

SEQ ID NO: 1879113 - DNA, 15 bp, Homo sapiens
gcgcatggcctgcca

SEQ ID NO: 1879114 - DNA, 15 bp, Homo sapiens
cgcatggcctgccaa

SEQ ID NO: 1879115 - DNA, 15 bp, Homo sapiens
gcatggcctgccaag

SEQ ID NO: 1879116 - DNA, 15 bp, Homo sapiens
catggcctgccaagc

SEQ ID NO: 1879117 - DNA, 15 bp, Homo sapiens
atggcctgccaagct

SEQ ID NO: 1879118 - DNA, 15 bp, Homo sapiens
tggcctgccaagctt

SEQ ID NO: 1879119 - DNA, 15 bp, Homo sapiens
ggcctgccaagcttt

SEQ ID NO: 1879120 - DNA, 15 bp, Homo sapiens
gcctgccaagcttta

SEQ ID NO: 1879121 - DNA, 15 bp, Homo sapiens
cctgccaagctttag

SEQ ID NO: 1879122 - DNA, 15 bp, Homo sapiens
ctgccaagctttaga

SEQ ID NO: 1879123 - DNA, 15 bp, Homo sapiens
tgccaagctttagac

SEQ ID NO: 1879124 - DNA, 15 bp, Homo sapiens
gccaagctttagacc

SEQ ID NO: 1879125 - DNA, 15 bp, Homo sapiens
ccaagctttagacca

SEQ ID NO: 1879126 - DNA, 15 bp, Homo sapiens
caagctttagaccaa

SEQ ID NO: 1879127 - DNA, 15 bp, Homo sapiens
aagctttagaccaaa

SEQ ID NO: 1879128 - DNA, 15 bp, Homo sapiens
agctttagaccaaag

SEQ ID NO: 1879129 - DNA, 15 bp, Homo sapiens
gctttagaccaaagc

SEQ ID NO: 1879130 - DNA, 15 bp, Homo sapiens
ctttagaccaaagcc

SEQ ID NO: 1879131 - DNA, 15 bp, Homo sapiens
tttagaccaaagccc

SEQ ID NO: 1879132 - DNA, 15 bp, Homo sapiens
ttagaccaaagcccc

SEQ ID NO: 1879133 - DNA, 15 bp, Homo sapiens
tagaccaaagccccg

SEQ ID NO: 1879134 - DNA, 15 bp, Homo sapiens
agaccaaagccccga

SEQ ID NO: 1879135 - DNA, 15 bp, Homo sapiens
gaccaaagccccgac

SEQ ID NO: 1879136 - DNA, 15 bp, Homo sapiens
accaaagccccgact

SEQ ID NO: 1879137 - DNA, 15 bp, Homo sapiens
ccaaagccccgactc

SEQ ID NO: 1879138 - DNA, 15 bp, Homo sapiens
caaagccccgactcc

SEQ ID NO: 1879139 - DNA, 15 bp, Homo sapiens
aaagccccgactcca

SEQ ID NO: 1879140 - DNA, 15 bp, Homo sapiens
aagccccgactccaa

SEQ ID NO: 1879141 - DNA, 15 bp, Homo sapiens
agccccgactccaat

SEQ ID NO: 1879142 - DNA, 15 bp, Homo sapiens
gccccgactccaatc

SEQ ID NO: 1879143 - DNA, 15 bp, Homo sapiens
ccccgactccaatcc

SEQ ID NO: 1879144 - DNA, 15 bp, Homo sapiens
cccgactccaatcca

SEQ ID NO: 1879145 - DNA, 15 bp, Homo sapiens
ccgactccaatccag

SEQ ID NO: 1879146 - DNA, 15 bp, Homo sapiens
cgactccaatccagg

SEQ ID NO: 1879147 - DNA, 15 bp, Homo sapiens
gactccaatccaggg

SEQ ID NO: 1879148 - DNA, 15 bp, Homo sapiens
actccaatccagggg

SEQ ID NO: 1879149 - DNA, 15 bp, Homo sapiens
ctccaatccaggggc

SEQ ID NO: 1879150 - DNA, 15 bp, Homo sapiens
tccaatccaggggcc

SEQ ID NO: 1879151 - DNA, 15 bp, Homo sapiens
ccaatccaggggccc

SEQ ID NO: 1879152 - DNA, 15 bp, Homo sapiens
caatccaggggcccg

SEQ ID NO: 1879153 - DNA, 15 bp, Homo sapiens
aatccaggggcccga

SEQ ID NO: 1879154 - DNA, 15 bp, Homo sapiens
atccaggggcccgac

SEQ ID NO: 1879155 - DNA, 15 bp, Homo sapiens
tccaggggcccgact

SEQ ID NO: 1879156 - DNA, 15 bp, Homo sapiens
ccaggggcccgacta

SEQ ID NO: 1879157 - DNA, 15 bp, Homo sapiens
caggggcccgactac

SEQ ID NO: 1879158 - DNA, 15 bp, Homo sapiens
aggggcccgactaca

SEQ ID NO: 1879159 - DNA, 15 bp, Homo sapiens
ggggcccgactacaa

SEQ ID NO: 1879160 - DNA, 15 bp, Homo sapiens
gggcccgactacaaa

SEQ ID NO: 1879161 - DNA, 15 bp, Homo sapiens
ggcccgactacaaag

SEQ ID NO: 1879162 - DNA, 15 bp, Homo sapiens
gcccgactacaaagc

SEQ ID NO: 1879163 - DNA, 15 bp, Homo sapiens
cccgactacaaagct

SEQ ID NO: 1879164 - DNA, 15 bp, Homo sapiens
ccgactacaaagctg

SEQ ID NO: 1879165 - DNA, 15 bp, Homo sapiens
cgactacaaagctgg

SEQ ID NO: 1879166 - DNA, 15 bp, Homo sapiens
gactacaaagctggt

SEQ ID NO: 1879167 - DNA, 15 bp, Homo sapiens
actacaaagctggta

SEQ ID NO: 1879168 - DNA, 15 bp, Homo sapiens
ctacaaagctggtat

SEQ ID NO: 1879169 - DNA, 15 bp, Homo sapiens
tacaaagctggtatt

SEQ ID NO: 1879170 - DNA, 15 bp, Homo sapiens
acaaagctggtattt

SEQ ID NO: 1879171 - DNA, 15 bp, Homo sapiens
caaagctggtatttt

SEQ ID NO: 1879172 - DNA, 15 bp, Homo sapiens
aaagctggtattttt

SEQ ID NO: 1879173 - DNA, 15 bp, Homo sapiens
aagctggtatttttc

SEQ ID NO: 1879174 - DNA, 15 bp, Homo sapiens
agctggtatttttct

SEQ ID NO: 1879175 - DNA, 15 bp, Homo sapiens
gctggtatttttctt

SEQ ID NO: 1879176 - DNA, 15 bp, Homo sapiens
ctggtatttttcttt

SEQ ID NO: 1879177 - DNA, 15 bp, Homo sapiens
tggtatttttcttta

SEQ ID NO: 1879178 - DNA, 15 bp, Homo sapiens
ggtatttttctttac

SEQ ID NO: 1879179 - DNA, 15 bp, Homo sapiens
gtatttttctttact

SEQ ID NO: 1879180 - DNA, 15 bp, Homo sapiens
tatttttctttactc

SEQ ID NO: 1879181 - DNA, 15 bp, Homo sapiens
atttttctttactcc

SEQ ID NO: 1879182 - DNA, 15 bp, Homo sapiens
tttttctttactcca

SEQ ID NO: 1879183 - DNA, 15 bp, Homo sapiens
ttttctttactccat

SEQ ID NO: 1879184 - DNA, 15 bp, Homo sapiens
tttctttactccata

SEQ ID NO: 1879185 - DNA, 15 bp, Homo sapiens
ttctttactccatat

SEQ ID NO: 1879186 - DNA, 15 bp, Homo sapiens
tctttactccatatc

SEQ ID NO: 1879187 - DNA, 15 bp, Homo sapiens
ctttactccatatca

SEQ ID NO: 1879188 - DNA, 15 bp, Homo sapiens
tttactccatatcaa

SEQ ID NO: 1879189 - DNA, 15 bp, Homo sapiens
ttactccatatcaag

SEQ ID NO: 1879190 - DNA, 15 bp, Homo sapiens
tactccatatcaagc

SEQ ID NO: 1879191 - DNA, 15 bp, Homo sapiens
actccatatcaagcc

SEQ ID NO: 1879192 - DNA, 15 bp, Homo sapiens
ctccatatcaagccc

SEQ ID NO: 1879193 - DNA, 15 bp, Homo sapiens
tccatatcaagccct

SEQ ID NO: 1879194 - DNA, 15 bp, Homo sapiens
ccatatcaagccctt

SEQ ID NO: 1879195 - DNA, 15 bp, Homo sapiens
catatcaagcccttg

SEQ ID NO: 1879196 - DNA, 15 bp, Homo sapiens
atatcaagcccttgg

SEQ ID NO: 1879197 - DNA, 15 bp, Homo sapiens
tatcaagcccttggc

SEQ ID NO: 1879198 - DNA, 15 bp, Homo sapiens
atcaagcccttggct

SEQ ID NO: 1879199 - DNA, 15 bp, Homo sapiens
tcaagcccttggcta

SEQ ID NO: 1879200 - DNA, 15 bp, Homo sapiens
caagcccttggctaa

SEQ ID NO: 1879201 - DNA, 15 bp, Homo sapiens
aagcccttggctaag

SEQ ID NO: 1879202 - DNA, 15 bp, Homo sapiens
agcccttggctaaga

SEQ ID NO: 1879203 - DNA, 15 bp, Homo sapiens
gcccttggctaagaa

SEQ ID NO: 1879204 - DNA, 15 bp, Homo sapiens
cccttggctaagaaa

SEQ ID NO: 1879205 - DNA, 15 bp, Homo sapiens
ccttggctaagaaat

SEQ ID NO: 1879206 - DNA, 15 bp, Homo sapiens
cttggctaagaaatg

SEQ ID NO: 1879207 - DNA, 15 bp, Homo sapiens
ttggctaagaaatgg

SEQ ID NO: 1879208 - DNA, 15 bp, Homo sapiens
tggctaagaaatggg

SEQ ID NO: 1879209 - DNA, 15 bp, Homo sapiens
ggctaagaaatgggg

SEQ ID NO: 1879210 - DNA, 15 bp, Homo sapiens
gctaagaaatgggga

SEQ ID NO: 1879211 - DNA, 15 bp, Homo sapiens
ctaagaaatggggat

SEQ ID NO: 1879212 - DNA, 15 bp, Homo sapiens
taagaaatggggatt

SEQ ID NO: 1879213 - DNA, 15 bp, Homo sapiens
aagaaatggggattt

SEQ ID NO: 1879214 - DNA, 15 bp, Homo sapiens
agaaatggggatttc

SEQ ID NO: 1879215 - DNA, 15 bp, Homo sapiens
gaaatggggatttcc

SEQ ID NO: 1879216 - DNA, 15 bp, Homo sapiens
aaatggggatttcca

SEQ ID NO: 1879217 - DNA, 15 bp, Homo sapiens
aatggggatttccaa

SEQ ID NO: 1879218 - DNA, 15 bp, Homo sapiens
atggggatttccaag

SEQ ID NO: 1879219 - DNA, 15 bp, Homo sapiens
tggggatttccaagc

SEQ ID NO: 1879220 - DNA, 15 bp, Homo sapiens
ggggatttccaagcc

SEQ ID NO: 1879221 - DNA, 15 bp, Homo sapiens
gggatttccaagccc

SEQ ID NO: 1879222 - DNA, 15 bp, Homo sapiens
ggatttccaagccca

SEQ ID NO: 1879223 - DNA, 15 bp, Homo sapiens
gatttccaagcccac

SEQ ID NO: 1879224 - DNA, 15 bp, Homo sapiens
atttccaagcccaca

SEQ ID NO: 1879225 - DNA, 15 bp, Homo sapiens
tttccaagcccacag

SEQ ID NO: 1879226 - DNA, 15 bp, Homo sapiens
ttccaagcccacagc

SEQ ID NO: 1879227 - DNA, 15 bp, Homo sapiens
tccaagcccacagct

SEQ ID NO: 1879228 - DNA, 15 bp, Homo sapiens
ccaagcccacagctg

SEQ ID NO: 1879229 - DNA, 15 bp, Homo sapiens
caagcccacagctgc

SEQ ID NO: 1879230 - DNA, 15 bp, Homo sapiens
aagcccacagctgct

SEQ ID NO: 1879231 - DNA, 15 bp, Homo sapiens
gcccacagctgctct

SEQ ID NO: 1879232 - DNA, 15 bp, Homo sapiens
cccacagctgctctt

SEQ ID NO: 1879233 - DNA, 15 bp, Homo sapiens
ccacagctgctcttg

SEQ ID NO: 1879234 - DNA, 15 bp, Homo sapiens
cacagctgctcttgt

SEQ ID NO: 1879235 - DNA, 15 bp, Homo sapiens
acagctgctcttgtt

SEQ ID NO: 1879236 - DNA, 15 bp, Homo sapiens
cagctgctcttgttt

SEQ ID NO: 1879237 - DNA, 15 bp, Homo sapiens
agctgctcttgtttc

SEQ ID NO: 1879238 - DNA, 15 bp, Homo sapiens
gctgctcttgtttct

SEQ ID NO: 1879239 - DNA, 15 bp, Homo sapiens
ctgctcttgtttctc

SEQ ID NO: 1879240 - DNA, 15 bp, Homo sapiens
tgctcttgtttctcc

SEQ ID NO: 1879241 - DNA, 15 bp, Homo sapiens
gctcttgtttctccc

SEQ ID NO: 1879242 - DNA, 15 bp, Homo sapiens
ctcttgtttctcccc

SEQ ID NO: 1879243 - DNA, 15 bp, Homo sapiens
tcttgtttctcccca

SEQ ID NO: 1879244 - DNA, 15 bp, Homo sapiens
cttgtttctccccac

SEQ ID NO: 1879245 - DNA, 15 bp, Homo sapiens
ttgtttctccccaca

SEQ ID NO: 1879246 - DNA, 15 bp, Homo sapiens
tgtttctccccacag

SEQ ID NO: 1879247 - DNA, 15 bp, Homo sapiens
gtttctccccacagt

SEQ ID NO: 1879248 - DNA, 15 bp, Homo sapiens
tttctccccacagtg

SEQ ID NO: 1879249 - DNA, 15 bp, Homo sapiens
ttctccccacagtgc

SEQ ID NO: 1879250 - DNA, 15 bp, Homo sapiens
tctccccacagtgct

SEQ ID NO: 1879251 - DNA, 15 bp, Homo sapiens
ctccccacagtgctc

SEQ ID NO: 1879252 - DNA, 15 bp, Homo sapiens
tccccacagtgctcc

SEQ ID NO: 1879253 - DNA, 15 bp, Homo sapiens
ccccacagtgctcct

SEQ ID NO: 1879254 - DNA, 15 bp, Homo sapiens
cccacagtgctccta

SEQ ID NO: 1879255 - DNA, 15 bp, Homo sapiens
ccacagtgctcctac

SEQ ID NO: 1879256 - DNA, 15 bp, Homo sapiens
cacagtgctcctaca

SEQ ID NO: 1879257 - DNA, 15 bp, Homo sapiens
acagtgctcctacat

SEQ ID NO: 1879258 - DNA, 15 bp, Homo sapiens
cagtgctcctacatc

SEQ ID NO: 1879259 - DNA, 15 bp, Homo sapiens
agtgctcctacatcc

SEQ ID NO: 1879260 - DNA, 15 bp, Homo sapiens
gtgctcctacatccc

SEQ ID NO: 1879261 - DNA, 15 bp, Homo sapiens
tgctcctacatccca

SEQ ID NO: 1879262 - DNA, 15 bp, Homo sapiens
gctcctacatcccag

SEQ ID NO: 1879263 - DNA, 15 bp, Homo sapiens
ctcctacatcccagg

SEQ ID NO: 1879264 - DNA, 15 bp, Homo sapiens
tcctacatcccaggc

SEQ ID NO: 1879265 - DNA, 15 bp, Homo sapiens
cctacatcccaggca

SEQ ID NO: 1879266 - DNA, 15 bp, Homo sapiens
ctacatcccaggcag

SEQ ID NO: 1879267 - DNA, 15 bp, Homo sapiens
tacatcccaggcagc

SEQ ID NO: 1879268 - DNA, 15 bp, Homo sapiens
acatcccaggcagcg

SEQ ID NO: 1879269 - DNA, 15 bp, Homo sapiens
catcccaggcagcgt

SEQ ID NO: 1879270 - DNA, 15 bp, Homo sapiens
atcccaggcagcgtg

SEQ ID NO: 1879271 - DNA, 15 bp, Homo sapiens
tcccaggcagcgtgg

SEQ ID NO: 1879272 - DNA, 15 bp, Homo sapiens
cccaggcagcgtgga

SEQ ID NO: 1879273 - DNA, 15 bp, Homo sapiens
ccaggcagcgtggac

SEQ ID NO: 1879274 - DNA, 15 bp, Homo sapiens
caggcagcgtggaca

SEQ ID NO: 1879275 - DNA, 15 bp, Homo sapiens
aggcagcgtggacaa

SEQ ID NO: 1879276 - DNA, 15 bp, Homo sapiens
ggcagcgtggacaat

SEQ ID NO: 1879277 - DNA, 15 bp, Homo sapiens
gcagcgtggacaatt

SEQ ID NO: 1879278 - DNA, 15 bp, Homo sapiens
cagcgtggacaatta

SEQ ID NO: 1879279 - DNA, 15 bp, Homo sapiens
agcgtggacaattac

SEQ ID NO: 1879280 - DNA, 15 bp, Homo sapiens
gcgtggacaattacc

SEQ ID NO: 1879281 - DNA, 15 bp, Homo sapiens
cgtggacaattacca

SEQ ID NO: 1879282 - DNA, 15 bp, Homo sapiens
gtggacaattaccag

SEQ ID NO: 1879283 - DNA, 15 bp, Homo sapiens
tggacaattaccaga

SEQ ID NO: 1879284 - DNA, 15 bp, Homo sapiens
ggacaattaccagac

SEQ ID NO: 1879285 - DNA, 15 bp, Homo sapiens
gacaattaccagacg

SEQ ID NO: 1879286 - DNA, 15 bp, Homo sapiens
acaattaccagacgg

SEQ ID NO: 1879287 - DNA, 15 bp, Homo sapiens
caattaccagacggc

SEQ ID NO: 1879288 - DNA, 15 bp, Homo sapiens
aattaccagacggcc

SEQ ID NO: 1879289 - DNA, 15 bp, Homo sapiens
attaccagacggccc

SEQ ID NO: 1879290 - DNA, 15 bp, Homo sapiens
ttaccagacggcccg

SEQ ID NO: 1879291 - DNA, 15 bp, Homo sapiens
taccagacggcccgg

SEQ ID NO: 1879292 - DNA, 15 bp, Homo sapiens
accagacggcccggg

SEQ ID NO: 1879293 - DNA, 15 bp, Homo sapiens
ccagacggcccgggc

SEQ ID NO: 1879294 - DNA, 15 bp, Homo sapiens
cagacggcccgggcc

SEQ ID NO: 1879295 - DNA, 15 bp, Homo sapiens
agacggcccgggccg

SEQ ID NO: 1879296 - DNA, 15 bp, Homo sapiens
gacggcccgggccga

SEQ ID NO: 1879297 - DNA, 15 bp, Homo sapiens
acggcccgggccgac

SEQ ID NO: 1879298 - DNA, 15 bp, Homo sapiens
cggcccgggccgacg

SEQ ID NO: 1879299 - DNA, 15 bp, Homo sapiens
ggcccgggccgacgt

SEQ ID NO: 1879300 - DNA, 15 bp, Homo sapiens
gcccgggccgacgtg

SEQ ID NO: 1879301 - DNA, 15 bp, Homo sapiens
cccgggccgacgtgg

SEQ ID NO: 1879302 - DNA, 15 bp, Homo sapiens
ccgggccgacgtgga

SEQ ID NO: 1879303 - DNA, 15 bp, Homo sapiens
cgggccgacgtggag

SEQ ID NO: 1879304 - DNA, 15 bp, Homo sapiens
gggccgacgtggaga

SEQ ID NO: 1879305 - DNA, 15 bp, Homo sapiens
ggccgacgtggagaa

SEQ ID NO: 1879306 - DNA, 15 bp, Homo sapiens
gccgacgtggagaag

SEQ ID NO: 1879307 - DNA, 15 bp, Homo sapiens
ccgacgtggagaagg

SEQ ID NO: 1879308 - DNA, 15 bp, Homo sapiens
cgacgtggagaaggt

SEQ ID NO: 1879309 - DNA, 15 bp, Homo sapiens
gacgtggagaaggtc

SEQ ID NO: 1879310 - DNA, 15 bp, Homo sapiens
acgtggagaaggtca

SEQ ID NO: 1879311 - DNA, 15 bp, Homo sapiens
cgtggagaaggtcag

SEQ ID NO: 1879312 - DNA, 15 bp, Homo sapiens
gtggagaaggtcaga

SEQ ID NO: 1879313 - DNA, 15 bp, Homo sapiens
tggagaaggtcagag

SEQ ID NO: 1879314 - DNA, 15 bp, Homo sapiens
ggagaaggtcagagc

SEQ ID NO: 1879315 - DNA, 15 bp, Homo sapiens
gagaaggtcagagcc

SEQ ID NO: 1879316 - DNA, 15 bp, Homo sapiens
agaaggtcagagcca

SEQ ID NO: 1879317 - DNA, 15 bp, Homo sapiens
gaaggtcagagccaa

SEQ ID NO: 1879318 - DNA, 15 bp, Homo sapiens
aaggtcagagccaaa

SEQ ID NO: 1879319 - DNA, 15 bp, Homo sapiens
aggtcagagccaaat

SEQ ID NO: 1879320 - DNA, 15 bp, Homo sapiens
ggtcagagccaaatt

SEQ ID NO: 1879321 - DNA, 15 bp, Homo sapiens
gtcagagccaaattc

SEQ ID NO: 1879322 - DNA, 15 bp, Homo sapiens
tcagagccaaattcc

SEQ ID NO: 1879323 - DNA, 15 bp, Homo sapiens
cagagccaaattcca

SEQ ID NO: 1879324 - DNA, 15 bp, Homo sapiens
agagccaaattccaa

SEQ ID NO: 1879325 - DNA, 15 bp, Homo sapiens
gagccaaattccaag

SEQ ID NO: 1879326 - DNA, 15 bp, Homo sapiens
agccaaattccaaga

SEQ ID NO: 1879327 - DNA, 15 bp, Homo sapiens
gccaaattccaagag

SEQ ID NO: 1879328 - DNA, 15 bp, Homo sapiens
ccaaattccaagagc

SEQ ID NO: 1879329 - DNA, 15 bp, Homo sapiens
caaattccaagagca

SEQ ID NO: 1879330 - DNA, 15 bp, Homo sapiens
aaattccaagagcag

SEQ ID NO: 1879331 - DNA, 15 bp, Homo sapiens
aattccaagagcagc

SEQ ID NO: 1879332 - DNA, 15 bp, Homo sapiens
attccaagagcagca

SEQ ID NO: 1879333 - DNA, 15 bp, Homo sapiens
ttccaagagcagcag

SEQ ID NO: 1879334 - DNA, 15 bp, Homo sapiens
tccaagagcagcagg

SEQ ID NO: 1879335 - DNA, 15 bp, Homo sapiens
ccaagagcagcaggt

SEQ ID NO: 1879336 - DNA, 15 bp, Homo sapiens
caagagcagcaggtc

SEQ ID NO: 1879337 - DNA, 15 bp, Homo sapiens
aagagcagcaggtct

SEQ ID NO: 1879338 - DNA, 15 bp, Homo sapiens
agagcagcaggtctt

SEQ ID NO: 1879339 - DNA, 15 bp, Homo sapiens
gagcagcaggtcttc

SEQ ID NO: 1879340 - DNA, 15 bp, Homo sapiens
agcagcaggtcttct

SEQ ID NO: 1879341 - DNA, 15 bp, Homo sapiens
gcagcaggtcttcta

SEQ ID NO: 1879342 - DNA, 15 bp, Homo sapiens
cagcaggtcttctac

SEQ ID NO: 1879343 - DNA, 15 bp, Homo sapiens
agcaggtcttctact

SEQ ID NO: 1879344 - DNA, 15 bp, Homo sapiens
gcaggtcttctactg

SEQ ID NO: 1879345 - DNA, 15 bp, Homo sapiens
caggtcttctactgc

SEQ ID NO: 1879346 - DNA, 15 bp, Homo sapiens
aggtcttctactgct

SEQ ID NO: 1879347 - DNA, 15 bp, Homo sapiens
ggtcttctactgctt

SEQ ID NO: 1879348 - DNA, 15 bp, Homo sapiens
gtcttctactgcttc

SEQ ID NO: 1879349 - DNA, 15 bp, Homo sapiens
tcttctactgcttct

SEQ ID NO: 1879350 - DNA, 15 bp, Homo sapiens
cttctactgcttctc

SEQ ID NO: 1879351 - DNA, 15 bp, Homo sapiens
ttctactgcttctcc

SEQ ID NO: 1879352 - DNA, 15 bp, Homo sapiens
tctactgcttctccg

SEQ ID NO: 1879353 - DNA, 15 bp, Homo sapiens
ctactgcttctccgc

SEQ ID NO: 1879354 - DNA, 15 bp, Homo sapiens
tactgcttctccgca

SEQ ID NO: 1879355 - DNA, 15 bp, Homo sapiens
actgcttctccgcac

SEQ ID NO: 1879356 - DNA, 15 bp, Homo sapiens
ctgcttctccgcacc

SEQ ID NO: 1879357 - DNA, 15 bp, Homo sapiens
tgcttctccgcacct

SEQ ID NO: 1879358 - DNA, 15 bp, Homo sapiens
gcttctccgcacctc

SEQ ID NO: 1879359 - DNA, 15 bp, Homo sapiens
cttctccgcacctcg

SEQ ID NO: 1879360 - DNA, 15 bp, Homo sapiens
ttctccgcacctcgg

SEQ ID NO: 1879361 - DNA, 15 bp, Homo sapiens
tctccgcacctcggg

SEQ ID NO: 1879362 - DNA, 15 bp, Homo sapiens
ctccgcacctcgggg

SEQ ID NO: 1879363 - DNA, 15 bp, Homo sapiens
tccgcacctcggggg

SEQ ID NO: 1879364 - DNA, 15 bp, Homo sapiens
ccgcacctcggggga

SEQ ID NO: 1879365 - DNA, 15 bp, Homo sapiens
cgcacctcgggggaa

SEQ ID NO: 1879366 - DNA, 15 bp, Homo sapiens
gcacctcgggggaac

SEQ ID NO: 1879367 - DNA, 15 bp, Homo sapiens
cacctcgggggaacg

SEQ ID NO: 1879368 - DNA, 15 bp, Homo sapiens
acctcgggggaacga

SEQ ID NO: 1879369 - DNA, 15 bp, Homo sapiens
cctcgggggaacgaa

SEQ ID NO: 1879370 - DNA, 15 bp, Homo sapiens
ctcgggggaacgaaa

SEQ ID NO: 1879371 - DNA, 15 bp, Homo sapiens
tcgggggaacgaaac

SEQ ID NO: 1879372 - DNA, 15 bp, Homo sapiens
cgggggaacgaaacc

SEQ ID NO: 1879373 - DNA, 15 bp, Homo sapiens
gggggaacgaaacca

SEQ ID NO: 1879374 - DNA, 15 bp, Homo sapiens
ggggaacgaaaccag

SEQ ID NO: 1879375 - DNA, 15 bp, Homo sapiens
gggaacgaaaccagc

SEQ ID NO: 1879376 - DNA, 15 bp, Homo sapiens
ggaacgaaaccagcg

SEQ ID NO: 1879377 - DNA, 15 bp, Homo sapiens
gaacgaaaccagcgt

SEQ ID NO: 1879378 - DNA, 15 bp, Homo sapiens
aacgaaaccagcgtc

SEQ ID NO: 1879379 - DNA, 15 bp, Homo sapiens
acgaaaccagcgtcc

SEQ ID NO: 1879380 - DNA, 15 bp, Homo sapiens
cgaaaccagcgtcct

SEQ ID NO: 1879381 - DNA, 15 bp, Homo sapiens
gaaaccagcgtccta

SEQ ID NO: 1879382 - DNA, 15 bp, Homo sapiens
aaaccagcgtcctat

SEQ ID NO: 1879383 - DNA, 15 bp, Homo sapiens
aaccagcgtcctatt

SEQ ID NO: 1879384 - DNA, 15 bp, Homo sapiens
accagcgtcctattc

SEQ ID NO: 1879385 - DNA, 15 bp, Homo sapiens
ccagcgtcctattcc

SEQ ID NO: 1879386 - DNA, 15 bp, Homo sapiens
cagcgtcctattcca

SEQ ID NO: 1879387 - DNA, 15 bp, Homo sapiens
agcgtcctattccag

SEQ ID NO: 1879388 - DNA, 15 bp, Homo sapiens
gcgtcctattccagc

SEQ ID NO: 1879389 - DNA, 15 bp, Homo sapiens
cgtcctattccagcg

SEQ ID NO: 1879390 - DNA, 15 bp, Homo sapiens
gtcctattccagcgc

SEQ ID NO: 1879391 - DNA, 15 bp, Homo sapiens
tcctattccagcgcc

SEQ ID NO: 1879392 - DNA, 15 bp, Homo sapiens
cctattccagcgcct

SEQ ID NO: 1879393 - DNA, 15 bp, Homo sapiens
ctattccagcgcctc

SEQ ID NO: 1879394 - DNA, 15 bp, Homo sapiens
tattccagcgcctct

SEQ ID NO: 1879395 - DNA, 15 bp, Homo sapiens
attccagcgcctcta

SEQ ID NO: 1879396 - DNA, 15 bp, Homo sapiens
ttccagcgcctctac

SEQ ID NO: 1879397 - DNA, 15 bp, Homo sapiens
tccagcgcctctacg

SEQ ID NO: 1879398 - DNA, 15 bp, Homo sapiens
ccagcgcctctacgg

SEQ ID NO: 1879399 - DNA, 15 bp, Homo sapiens
cagcgcctctacggg

SEQ ID NO: 1879400 - DNA, 15 bp, Homo sapiens
agcgcctctacgggc

SEQ ID NO: 1879401 - DNA, 15 bp, Homo sapiens
gcgcctctacgggcc

SEQ ID NO: 1879402 - DNA, 15 bp, Homo sapiens
cgcctctacgggccc

SEQ ID NO: 1879403 - DNA, 15 bp, Homo sapiens
gcctctacgggcccc

SEQ ID NO: 1879404 - DNA, 15 bp, Homo sapiens
cctctacgggcccca

SEQ ID NO: 1879405 - DNA, 15 bp, Homo sapiens
ctctacgggccccag

SEQ ID NO: 1879406 - DNA, 15 bp, Homo sapiens
tctacgggccccagg

SEQ ID NO: 1879407 - DNA, 15 bp, Homo sapiens
ctacgggccccaggc

SEQ ID NO: 1879408 - DNA, 15 bp, Homo sapiens
tacgggccccaggcc

SEQ ID NO: 1879409 - DNA, 15 bp, Homo sapiens
acgggccccaggccc

SEQ ID NO: 1879410 - DNA, 15 bp, Homo sapiens
cgggccccaggccct

SEQ ID NO: 1879411 - DNA, 15 bp, Homo sapiens
gggccccaggccctc

SEQ ID NO: 1879412 - DNA, 15 bp, Homo sapiens
ggccccaggccctcc

SEQ ID NO: 1879413 - DNA, 15 bp, Homo sapiens
gccccaggccctcct

SEQ ID NO: 1879414 - DNA, 15 bp, Homo sapiens
ccccaggccctcctc

SEQ ID NO: 1879415 - DNA, 15 bp, Homo sapiens
cccaggccctcctct

SEQ ID NO: 1879416 - DNA, 15 bp, Homo sapiens
ccaggccctcctctt

SEQ ID NO: 1879417 - DNA, 15 bp, Homo sapiens
caggccctcctcttc

SEQ ID NO: 1879418 - DNA, 15 bp, Homo sapiens
aggccctcctcttct

SEQ ID NO: 1879419 - DNA, 15 bp, Homo sapiens
ggccctcctcttctc

SEQ ID NO: 1879420 - DNA, 15 bp, Homo sapiens
gccctcctcttctcc

SEQ ID NO: 1879421 - DNA, 15 bp, Homo sapiens
ccctcctcttctccc

SEQ ID NO: 1879422 - DNA, 15 bp, Homo sapiens
cctcctcttctccct

SEQ ID NO: 1879423 - DNA, 15 bp, Homo sapiens
ctcctcttctccctc

SEQ ID NO: 1879424 - DNA, 15 bp, Homo sapiens
tcctcttctccctct

SEQ ID NO: 1879425 - DNA, 15 bp, Homo sapiens
cctcttctccctctt

SEQ ID NO: 1879426 - DNA, 15 bp, Homo sapiens
ctcttctccctcttc

SEQ ID NO: 1879427 - DNA, 15 bp, Homo sapiens
tcttctccctcttct

SEQ ID NO: 1879428 - DNA, 15 bp, Homo sapiens
cttctccctcttctg

SEQ ID NO: 1879429 - DNA, 15 bp, Homo sapiens
ttctccctcttctgg

SEQ ID NO: 1879430 - DNA, 15 bp, Homo sapiens
tctccctcttctggc

SEQ ID NO: 1879431 - DNA, 15 bp, Homo sapiens
ctccctcttctggcc

SEQ ID NO: 1879432 - DNA, 15 bp, Homo sapiens
tccctcttctggccc

SEQ ID NO: 1879433 - DNA, 15 bp, Homo sapiens
ccctcttctggccca

SEQ ID NO: 1879434 - DNA, 15 bp, Homo sapiens
cctcttctggcccac

SEQ ID NO: 1879435 - DNA, 15 bp, Homo sapiens
ctcttctggcccacc

SEQ ID NO: 1879436 - DNA, 15 bp, Homo sapiens
tcttctggcccacct

SEQ ID NO: 1879437 - DNA, 15 bp, Homo sapiens
cttctggcccacctt

SEQ ID NO: 1879438 - DNA, 15 bp, Homo sapiens
ttctggcccaccttc

SEQ ID NO: 1879439 - DNA, 15 bp, Homo sapiens
tctggcccaccttcc

SEQ ID NO: 1879440 - DNA, 15 bp, Homo sapiens
ctggcccaccttcct

SEQ ID NO: 1879441 - DNA, 15 bp, Homo sapiens
tggcccaccttcctg

SEQ ID NO: 1879442 - DNA, 15 bp, Homo sapiens
ggcccaccttcctgc

SEQ ID NO: 1879443 - DNA, 15 bp, Homo sapiens
gcccaccttcctgct

SEQ ID NO: 1879444 - DNA, 15 bp, Homo sapiens
cccaccttcctgctg

SEQ ID NO: 1879445 - DNA, 15 bp, Homo sapiens
ccaccttcctgctga

SEQ ID NO: 1879446 - DNA, 15 bp, Homo sapiens
caccttcctgctgac

SEQ ID NO: 1879447 - DNA, 15 bp, Homo sapiens
accttcctgctgacc

SEQ ID NO: 1879448 - DNA, 15 bp, Homo sapiens
ccttcctgctgaccg

SEQ ID NO: 1879449 - DNA, 15 bp, Homo sapiens
cttcctgctgaccgg

SEQ ID NO: 1879450 - DNA, 15 bp, Homo sapiens
ttcctgctgaccggt

SEQ ID NO: 1879451 - DNA, 15 bp, Homo sapiens
tcctgctgaccggtg

SEQ ID NO: 1879452 - DNA, 15 bp, Homo sapiens
cctgctgaccggtgg

SEQ ID NO: 1879453 - DNA, 15 bp, Homo sapiens
ctgctgaccggtggc

SEQ ID NO: 1879454 - DNA, 15 bp, Homo sapiens
tgctgaccggtggcc

SEQ ID NO: 1879455 - DNA, 15 bp, Homo sapiens
gctgaccggtggcct

SEQ ID NO: 1879456 - DNA, 15 bp, Homo sapiens
ctgaccggtggcctc

SEQ ID NO: 1879457 - DNA, 15 bp, Homo sapiens
tgaccggtggcctcc

SEQ ID NO: 1879458 - DNA, 15 bp, Homo sapiens
gaccggtggcctcct

SEQ ID NO: 1879459 - DNA, 15 bp, Homo sapiens
accggtggcctcctc

SEQ ID NO: 1879460 - DNA, 15 bp, Homo sapiens
ccggtggcctcctca

SEQ ID NO: 1879461 - DNA, 15 bp, Homo sapiens
cggtggcctcctcat

SEQ ID NO: 1879462 - DNA, 15 bp, Homo sapiens
ggtggcctcctcatt

SEQ ID NO: 1879463 - DNA, 15 bp, Homo sapiens
gtggcctcctcatta

SEQ ID NO: 1879464 - DNA, 15 bp, Homo sapiens
tggcctcctcattat

SEQ ID NO: 1879465 - DNA, 15 bp, Homo sapiens
ggcctcctcattatc

SEQ ID NO: 1879466 - DNA, 15 bp, Homo sapiens
gcctcctcattatcg

SEQ ID NO: 1879467 - DNA, 15 bp, Homo sapiens
cctcctcattatcgc

SEQ ID NO: 1879468 - DNA, 15 bp, Homo sapiens
ctcctcattatcgcc

SEQ ID NO: 1879469 - DNA, 15 bp, Homo sapiens
tcctcattatcgcca

SEQ ID NO: 1879470 - DNA, 15 bp, Homo sapiens
cctcattatcgccat

SEQ ID NO: 1879471 - DNA, 15 bp, Homo sapiens
ctcattatcgccatg

SEQ ID NO: 1879472 - DNA, 15 bp, Homo sapiens
tcattatcgccatgg

SEQ ID NO: 1879473 - DNA, 15 bp, Homo sapiens
cattatcgccatggt

SEQ ID NO: 1879474 - DNA, 15 bp, Homo sapiens
attatcgccatggtg

SEQ ID NO: 1879475 - DNA, 15 bp, Homo sapiens
ttatcgccatggtga

SEQ ID NO: 1879476 - DNA, 15 bp, Homo sapiens
tatcgccatggtgaa

SEQ ID NO: 1879477 - DNA, 15 bp, Homo sapiens
atcgccatggtgaag

SEQ ID NO: 1879478 - DNA, 15 bp, Homo sapiens
tcgccatggtgaaga

SEQ ID NO: 1879479 - DNA, 15 bp, Homo sapiens
cgccatggtgaagag

SEQ ID NO: 1879480 - DNA, 15 bp, Homo sapiens
gccatggtgaagagc

SEQ ID NO: 1879481 - DNA, 15 bp, Homo sapiens
ccatggtgaagagca

SEQ ID NO: 1879482 - DNA, 15 bp, Homo sapiens
catggtgaagagcaa

SEQ ID NO: 1879483 - DNA, 15 bp, Homo sapiens
atggtgaagagcaac

SEQ ID NO: 1879484 - DNA, 15 bp, Homo sapiens
tggtgaagagcaacc

SEQ ID NO: 1879485 - DNA, 15 bp, Homo sapiens
ggtgaagagcaacca

SEQ ID NO: 1879486 - DNA, 15 bp, Homo sapiens
gtgaagagcaaccag

SEQ ID NO: 1879487 - DNA, 15 bp, Homo sapiens
tgaagagcaaccagt

SEQ ID NO: 1879488 - DNA, 15 bp, Homo sapiens
gaagagcaaccagta

SEQ ID NO: 1879489 - DNA, 15 bp, Homo sapiens
aagagcaaccagtac

SEQ ID NO: 1879490 - DNA, 15 bp, Homo sapiens
agagcaaccagtacc

SEQ ID NO: 1879491 - DNA, 15 bp, Homo sapiens
gagcaaccagtacct

SEQ ID NO: 1879492 - DNA, 15 bp, Homo sapiens
agcaaccagtacctg

SEQ ID NO: 1879493 - DNA, 15 bp, Homo sapiens
gcaaccagtacctgt

SEQ ID NO: 1879494 - DNA, 15 bp, Homo sapiens
caaccagtacctgtc

SEQ ID NO: 1879495 - DNA, 15 bp, Homo sapiens
aaccagtacctgtcc

SEQ ID NO: 1879496 - DNA, 15 bp, Homo sapiens
accagtacctgtcca

SEQ ID NO: 1879497 - DNA, 15 bp, Homo sapiens
ccagtacctgtccat

SEQ ID NO: 1879498 - DNA, 15 bp, Homo sapiens
cagtacctgtccatc

SEQ ID NO: 1879499 - DNA, 15 bp, Homo sapiens
agtacctgtccatcc

SEQ ID NO: 1879500 - DNA, 15 bp, Homo sapiens
gtacctgtccatcct

SEQ ID NO: 1879501 - DNA, 15 bp, Homo sapiens
tacctgtccatcctg

SEQ ID NO: 1879502 - DNA, 15 bp, Homo sapiens
acctgtccatcctgg

SEQ ID NO: 1879503 - DNA, 15 bp, Homo sapiens
cctgtccatcctggc

SEQ ID NO: 1879504 - DNA, 15 bp, Homo sapiens
ctgtccatcctggcg

SEQ ID NO: 1879505 - DNA, 15 bp, Homo sapiens
tgtccatcctggcgg

SEQ ID NO: 1879506 - DNA, 15 bp, Homo sapiens
gtccatcctggcggc

SEQ ID NO: 1879507 - DNA, 15 bp, Homo sapiens
tccatcctggcggcc

SEQ ID NO: 1879508 - DNA, 15 bp, Homo sapiens
ccatcctggcggccc

SEQ ID NO: 1879509 - DNA, 15 bp, Homo sapiens
catcctggcggccca

SEQ ID NO: 1879510 - DNA, 15 bp, Homo sapiens
atcctggcggcccag

SEQ ID NO: 1879511 - DNA, 15 bp, Homo sapiens
tcctggcggcccaga

SEQ ID NO: 1879512 - DNA, 15 bp, Homo sapiens
gaccaggtgaatgca

SEQ ID NO: 1879513 - DNA, 15 bp, Homo sapiens
accaggtgaatgcat

SEQ ID NO: 1879514 - DNA, 15 bp, Homo sapiens
ccaggtgaatgcatg

SEQ ID NO: 1879515 - DNA, 15 bp, Homo sapiens
caggtgaatgcatga

SEQ ID NO: 1879516 - DNA, 15 bp, Homo sapiens
aggtgaatgcatgat

SEQ ID NO: 1879517 - DNA, 15 bp, Homo sapiens
ggtgaatgcatgatc

SEQ ID NO: 1879518 - DNA, 15 bp, Homo sapiens
gtgaatgcatgatca

SEQ ID NO: 1879519 - DNA, 15 bp, Homo sapiens
tgaatgcatgatcat

SEQ ID NO: 1879520 - DNA, 15 bp, Homo sapiens
gaatgcatgatcata

SEQ ID NO: 1879521 - DNA, 15 bp, Homo sapiens
aatgcatgatcatac

SEQ ID NO: 1879522 - DNA, 15 bp, Homo sapiens
atgcatgatcataca

SEQ ID NO: 1879523 - DNA, 15 bp, Homo sapiens
tgcatgatcatacaa

SEQ ID NO: 1879524 - DNA, 15 bp, Homo sapiens
gcatgatcatacaaa

SEQ ID NO: 1879525 - DNA, 15 bp, Homo sapiens
catgatcatacaaat

SEQ ID NO: 1879526 - DNA, 15 bp, Homo sapiens
atgatcatacaaatg

SEQ ID NO: 1879527 - DNA, 15 bp, Homo sapiens
tgatcatacaaatga

SEQ ID NO: 1879528 - DNA, 15 bp, Homo sapiens
gatcatacaaatgac

SEQ ID NO: 1879529 - DNA, 15 bp, Homo sapiens
atcatacaaatgact

SEQ ID NO: 1879530 - DNA, 15 bp, Homo sapiens
tcatacaaatgactt

SEQ ID NO: 1879531 - DNA, 15 bp, Homo sapiens
catacaaatgacttc

SEQ ID NO: 1879532 - DNA, 15 bp, Homo sapiens
atacaaatgacttca

SEQ ID NO: 1879533 - DNA, 15 bp, Homo sapiens
tacaaatgacttcag

SEQ ID NO: 1879534 - DNA, 15 bp, Homo sapiens
acaaatgacttcagt

SEQ ID NO: 1879535 - DNA, 15 bp, Homo sapiens
caaatgacttcagtg

SEQ ID NO: 1879536 - DNA, 15 bp, Homo sapiens
aaatgacttcagtgc

SEQ ID NO: 1879537 - DNA, 15 bp, Homo sapiens
aatgacttcagtgca

SEQ ID NO: 1879538 - DNA, 15 bp, Homo sapiens
atgacttcagtgcac

SEQ ID NO: 1879539 - DNA, 15 bp, Homo sapiens
tgacttcagtgcaca

SEQ ID NO: 1879540 - DNA, 15 bp, Homo sapiens
gacttcagtgcacaa

SEQ ID NO: 1879541 - DNA, 15 bp, Homo sapiens
acttcagtgcacaac

SEQ ID NO: 1879542 - DNA, 15 bp, Homo sapiens
cttcagtgcacaacg

SEQ ID NO: 1879543 - DNA, 15 bp, Homo sapiens
ttcagtgcacaacgt

SEQ ID NO: 1879544 - DNA, 15 bp, Homo sapiens
tcagtgcacaacgtg

SEQ ID NO: 1879545 - DNA, 15 bp, Homo sapiens
cagtgcacaacgtgc

SEQ ID NO: 1879546 - DNA, 15 bp, Homo sapiens
agtgcacaacgtgca

SEQ ID NO: 1879547 - DNA, 15 bp, Homo sapiens
gtgcacaacgtgcat

SEQ ID NO: 1879548 - DNA, 15 bp, Homo sapiens
tgcacaacgtgcatg

SEQ ID NO: 1879549 - DNA, 15 bp, Homo sapiens
gcacaacgtgcatga

SEQ ID NO: 1879550 - DNA, 15 bp, Homo sapiens
cacaacgtgcatgaa

SEQ ID NO: 1879551 - DNA, 15 bp, Homo sapiens
acaacgtgcatgaaa

SEQ ID NO: 1879552 - DNA, 15 bp, Homo sapiens
caacgtgcatgaaat

SEQ ID NO: 1879553 - DNA, 15 bp, Homo sapiens
aacgtgcatgaaatt

SEQ ID NO: 1879554 - DNA, 15 bp, Homo sapiens
acgtgcatgaaattg

SEQ ID NO: 1879555 - DNA, 15 bp, Homo sapiens
cgtgcatgaaattgg

SEQ ID NO: 1879556 - DNA, 15 bp, Homo sapiens
gtgcatgaaattggg

SEQ ID NO: 1879557 - DNA, 15 bp, Homo sapiens
tgcatgaaattggga

SEQ ID NO: 1879558 - DNA, 15 bp, Homo sapiens
gcatgaaattgggaa

SEQ ID NO: 1879559 - DNA, 15 bp, Homo sapiens
catgaaattgggaat

SEQ ID NO: 1879560 - DNA, 15 bp, Homo sapiens
atgaaattgggaatt

SEQ ID NO: 1879561 - DNA, 15 bp, Homo sapiens
tgaaattgggaatta

SEQ ID NO: 1879562 - DNA, 15 bp, Homo sapiens
gaaattgggaattaa

SEQ ID NO: 1879563 - DNA, 15 bp, Homo sapiens
aaattgggaattaac

SEQ ID NO: 1879564 - DNA, 15 bp, Homo sapiens
aattgggaattaacc

SEQ ID NO: 1879565 - DNA, 15 bp, Homo sapiens
attgggaattaacct

SEQ ID NO: 1879566 - DNA, 15 bp, Homo sapiens
ttgggaattaacctc

SEQ ID NO: 1879567 - DNA, 15 bp, Homo sapiens
tgggaattaacctca

SEQ ID NO: 1879568 - DNA, 15 bp, Homo sapiens
gggaattaacctcat

SEQ ID NO: 1879569 - DNA, 15 bp, Homo sapiens
ggaattaacctcatc

SEQ ID NO: 1879570 - DNA, 15 bp, Homo sapiens
gaattaacctcatca

SEQ ID NO: 1879571 - DNA, 15 bp, Homo sapiens
aattaacctcatcag

SEQ ID NO: 1879572 - DNA, 15 bp, Homo sapiens
attaacctcatcagt

SEQ ID NO: 1879573 - DNA, 15 bp, Homo sapiens
ttaacctcatcagtt

SEQ ID NO: 1879574 - DNA, 15 bp, Homo sapiens
taacctcatcagtta

SEQ ID NO: 1879575 - DNA, 15 bp, Homo sapiens
aacctcatcagttac

SEQ ID NO: 1879576 - DNA, 15 bp, Homo sapiens
acctcatcagttact

SEQ ID NO: 1879577 - DNA, 15 bp, Homo sapiens
cctcatcagttactc

SEQ ID NO: 1879578 - DNA, 15 bp, Homo sapiens
ctcatcagttactct

SEQ ID NO: 1879579 - DNA, 15 bp, Homo sapiens
tcatcagttactcta

SEQ ID NO: 1879580 - DNA, 15 bp, Homo sapiens
catcagttactctag

SEQ ID NO: 1879581 - DNA, 15 bp, Homo sapiens
atcagttactctaga

SEQ ID NO: 1879582 - DNA, 15 bp, Homo sapiens
tcagttactctagat

SEQ ID NO: 1879583 - DNA, 15 bp, Homo sapiens
cagttactctagatt

SEQ ID NO: 1879584 - DNA, 15 bp, Homo sapiens
agttactctagattt

SEQ ID NO: 1879585 - DNA, 15 bp, Homo sapiens
gttactctagattta

SEQ ID NO: 1879586 - DNA, 15 bp, Homo sapiens
ttactctagatttag

SEQ ID NO: 1879587 - DNA, 15 bp, Homo sapiens
tactctagatttagc

SEQ ID NO: 1879588 - DNA, 15 bp, Homo sapiens
actctagatttagca

SEQ ID NO: 1879589 - DNA, 15 bp, Homo sapiens
ctctagatttagcat

SEQ ID NO: 1879590 - DNA, 15 bp, Homo sapiens
tctagatttagcatt

SEQ ID NO: 1879591 - DNA, 15 bp, Homo sapiens
ctagatttagcatta

SEQ ID NO: 1879592 - DNA, 15 bp, Homo sapiens
tagatttagcattaa

SEQ ID NO: 1879593 - DNA, 15 bp, Homo sapiens
agatttagcattaat

SEQ ID NO: 1879594 - DNA, 15 bp, Homo sapiens
gatttagcattaatt

SEQ ID NO: 1879595 - DNA, 15 bp, Homo sapiens
atttagcattaattt

SEQ ID NO: 1879596 - DNA, 15 bp, Homo sapiens
tttagcattaatttt

SEQ ID NO: 1879597 - DNA, 15 bp, Homo sapiens
ttagcattaattttt

SEQ ID NO: 1879598 - DNA, 15 bp, Homo sapiens
tagcattaatttttg

SEQ ID NO: 1879599 - DNA, 15 bp, Homo sapiens
agcattaatttttga

SEQ ID NO: 1879600 - DNA, 15 bp, Homo sapiens
gcattaatttttgaa

SEQ ID NO: 1879601 - DNA, 15 bp, Homo sapiens
cattaatttttgaat

SEQ ID NO: 1879602 - DNA, 15 bp, Homo sapiens
attaatttttgaatc

SEQ ID NO: 1879603 - DNA, 15 bp, Homo sapiens
ttaatttttgaatcc

SEQ ID NO: 1879604 - DNA, 15 bp, Homo sapiens
taatttttgaatcca

SEQ ID NO: 1879605 - DNA, 15 bp, Homo sapiens
aatttttgaatccaa

SEQ ID NO: 1879606 - DNA, 15 bp, Homo sapiens
atttttgaatccaaa

SEQ ID NO: 1879607 - DNA, 15 bp, Homo sapiens
tttttgaatccaaag

SEQ ID NO: 1879608 - DNA, 15 bp, Homo sapiens
ttttgaatccaaagg

SEQ ID NO: 1879609 - DNA, 15 bp, Homo sapiens
tttgaatccaaaggg

SEQ ID NO: 1879610 - DNA, 15 bp, Homo sapiens
ttgaatccaaagggt

SEQ ID NO: 1879611 - DNA, 15 bp, Homo sapiens
tgaatccaaagggtg

SEQ ID NO: 1879612 - DNA, 15 bp, Homo sapiens
gaatccaaagggtgt

SEQ ID NO: 1879613 - DNA, 15 bp, Homo sapiens
aatccaaagggtgtt

SEQ ID NO: 1879614 - DNA, 15 bp, Homo sapiens
atccaaagggtgttt

SEQ ID NO: 1879615 - DNA, 15 bp, Homo sapiens
tccaaagggtgtttc

SEQ ID NO: 1879616 - DNA, 15 bp, Homo sapiens
ccaaagggtgtttca

SEQ ID NO: 1879617 - DNA, 15 bp, Homo sapiens
caaagggtgtttcat

SEQ ID NO: 1879618 - DNA, 15 bp, Homo sapiens
aaagggtgtttcatt

SEQ ID NO: 1879619 - DNA, 15 bp, Homo sapiens
aagggtgtttcattt

SEQ ID NO: 1879620 - DNA, 15 bp, Homo sapiens
agggtgtttcattta

SEQ ID NO: 1879621 - DNA, 15 bp, Homo sapiens
gggtgtttcatttaa

SEQ ID NO: 1879622 - DNA, 15 bp, Homo sapiens
ggtgtttcatttaat

SEQ ID NO: 1879623 - DNA, 15 bp, Homo sapiens
gtgtttcatttaatt

SEQ ID NO: 1879624 - DNA, 15 bp, Homo sapiens
tgtttcatttaattg

SEQ ID NO: 1879625 - DNA, 15 bp, Homo sapiens
gtttcatttaattgc

SEQ ID NO: 1879626 - DNA, 15 bp, Homo sapiens
tttcatttaattgct

SEQ ID NO: 1879627 - DNA, 15 bp, Homo sapiens
ttcatttaattgctc

SEQ ID NO: 1879628 - DNA, 15 bp, Homo sapiens
tcatttaattgctca

SEQ ID NO: 1879629 - DNA, 15 bp, Homo sapiens
catttaattgctcaa

SEQ ID NO: 1879630 - DNA, 15 bp, Homo sapiens
atttaattgctcaat

SEQ ID NO: 1879631 - DNA, 15 bp, Homo sapiens
tttaattgctcaata

SEQ ID NO: 1879632 - DNA, 15 bp, Homo sapiens
ttaattgctcaataa

SEQ ID NO: 1879633 - DNA, 15 bp, Homo sapiens
taattgctcaataaa

SEQ ID NO: 1879634 - DNA, 15 bp, Homo sapiens
aattgctcaataaaa

SEQ ID NO: 1879635 - DNA, 15 bp, Homo sapiens
attgctcaataaaaa

SEQ ID NO: 1879636 - DNA, 15 bp, Homo sapiens
ttgctcaataaaaat

SEQ ID NO: 1879637 - DNA, 15 bp, Homo sapiens
tgctcaataaaaatg

SEQ ID NO: 1879638 - DNA, 15 bp, Homo sapiens
gctcaataaaaatgt

SEQ ID NO: 1879639 - DNA, 15 bp, Homo sapiens
ctcaataaaaatgtc

SEQ ID NO: 1879640 - DNA, 15 bp, Homo sapiens
tcaataaaaatgtca

SEQ ID NO: 1879641 - DNA, 15 bp, Homo sapiens
caataaaaatgtcac

SEQ ID NO: 1879642 - DNA, 15 bp, Homo sapiens
aataaaaatgtcact

SEQ ID NO: 1879643 - DNA, 15 bp, Homo sapiens
ataaaaatgtcacta

SEQ ID NO: 1879644 - DNA, 15 bp, Homo sapiens
taaaaatgtcactac

SEQ ID NO: 1879645 - DNA, 15 bp, Homo sapiens
aaaaatgtcactacc

SEQ ID NO: 1879646 - DNA, 15 bp, Homo sapiens
aaaatgtcactacct

SEQ ID NO: 1879647 - DNA, 15 bp, Homo sapiens
aaatgtcactacctc

SEQ ID NO: 1879648 - DNA, 15 bp, Homo sapiens
aatgtcactacctcc

SEQ ID NO: 1879649 - DNA, 15 bp, Homo sapiens
atgtcactacctcca

SEQ ID NO: 1879650 - DNA, 15 bp, Homo sapiens
tgtcactacctccaa

SEQ ID NO: 1879651 - DNA, 15 bp, Homo sapiens
gtcactacctccaat

SEQ ID NO: 1879652 - DNA, 15 bp, Homo sapiens
tcactacctccaatt

SEQ ID NO: 1879653 - DNA, 15 bp, Homo sapiens
cactacctccaatta

SEQ ID NO: 1879654 - DNA, 15 bp, Homo sapiens
actacctccaattaa

SEQ ID NO: 1879655 - DNA, 15 bp, Homo sapiens
ctacctccaattaaa

SEQ ID NO: 1879656 - DNA, 15 bp, Homo sapiens
tacctccaattaaac

SEQ ID NO: 1879657 - DNA, 15 bp, Homo sapiens
acctccaattaaact

SEQ ID NO: 1879658 - DNA, 15 bp, Homo sapiens
cctccaattaaacta

SEQ ID NO: 1879659 - DNA, 15 bp, Homo sapiens
ctccaattaaactat

SEQ ID NO: 1879660 - DNA, 15 bp, Homo sapiens
tccaattaaactatt

SEQ ID NO: 1879661 - DNA, 15 bp, Homo sapiens
ccaattaaactattg

SEQ ID NO: 1879662 - DNA, 15 bp, Homo sapiens
caattaaactattgg

SEQ ID NO: 1879663 - DNA, 15 bp, Homo sapiens
aattaaactattggg

SEQ ID NO: 1879664 - DNA, 15 bp, Homo sapiens
attaaactattggga

SEQ ID NO: 1879665 - DNA, 15 bp, Homo sapiens
ttaaactattgggaa

SEQ ID NO: 1879666 - DNA, 15 bp, Homo sapiens
taaactattgggaaa

SEQ ID NO: 1879667 - DNA, 15 bp, Homo sapiens
aaactattgggaaac

SEQ ID NO: 1879668 - DNA, 15 bp, Homo sapiens
aactattgggaaact

SEQ ID NO: 1879669 - DNA, 15 bp, Homo sapiens
actattgggaaactc

SEQ ID NO: 1879670 - DNA, 15 bp, Homo sapiens
ctattgggaaactct

SEQ ID NO: 1879671 - DNA, 15 bp, Homo sapiens
tattgggaaactctc

SEQ ID NO: 1879672 - DNA, 15 bp, Homo sapiens
attgggaaactctca

SEQ ID NO: 1879673 - DNA, 15 bp, Homo sapiens
ttgggaaactctcaa

SEQ ID NO: 1879674 - DNA, 15 bp, Homo sapiens
tgggaaactctcaaa

SEQ ID NO: 1879675 - DNA, 15 bp, Homo sapiens
gggaaactctcaaat

SEQ ID NO: 1879676 - DNA, 15 bp, Homo sapiens
ggaaactctcaaatc

SEQ ID NO: 1879677 - DNA, 15 bp, Homo sapiens
gaaactctcaaatcc

SEQ ID NO: 1879678 - DNA, 15 bp, Homo sapiens
aaactctcaaatcct

SEQ ID NO: 1879679 - DNA, 15 bp, Homo sapiens
aactctcaaatcctg

SEQ ID NO: 1879680 - DNA, 15 bp, Homo sapiens
actctcaaatcctga

SEQ ID NO: 1879681 - DNA, 15 bp, Homo sapiens
ctctcaaatcctgat

SEQ ID NO: 1879682 - DNA, 15 bp, Homo sapiens
tctcaaatcctgatc

SEQ ID NO: 1879683 - DNA, 15 bp, Homo sapiens
ctcaaatcctgatct

SEQ ID NO: 1879684 - DNA, 15 bp, Homo sapiens
tcaaatcctgatcta

SEQ ID NO: 1879685 - DNA, 15 bp, Homo sapiens
caaatcctgatctac

SEQ ID NO: 1879686 - DNA, 15 bp, Homo sapiens
aaatcctgatctact

SEQ ID NO: 1879687 - DNA, 15 bp, Homo sapiens
aatcctgatctacta

SEQ ID NO: 1879688 - DNA, 15 bp, Homo sapiens
atcctgatctactac

SEQ ID NO: 1879689 - DNA, 15 bp, Homo sapiens
tcctgatctactaca

SEQ ID NO: 1879690 - DNA, 15 bp, Homo sapiens
cctgatctactacat

SEQ ID NO: 1879691 - DNA, 15 bp, Homo sapiens
ctgatctactacata

SEQ ID NO: 1879692 - DNA, 15 bp, Homo sapiens
tgatctactacatag

SEQ ID NO: 1879693 - DNA, 15 bp, Homo sapiens
gatctactacatagg

SEQ ID NO: 1879694 - DNA, 15 bp, Homo sapiens
atctactacataggt

SEQ ID NO: 1879695 - DNA, 15 bp, Homo sapiens
tctactacataggtt

SEQ ID NO: 1879696 - DNA, 15 bp, Homo sapiens
ctactacataggtta

SEQ ID NO: 1879697 - DNA, 15 bp, Homo sapiens
tactacataggttaa

SEQ ID NO: 1879698 - DNA, 15 bp, Homo sapiens
actacataggttaaa

SEQ ID NO: 1879699 - DNA, 15 bp, Homo sapiens
ctacataggttaaac

SEQ ID NO: 1879700 - DNA, 15 bp, Homo sapiens
tacataggttaaact

SEQ ID NO: 1879701 - DNA, 15 bp, Homo sapiens
acataggttaaactt

SEQ ID NO: 1879702 - DNA, 15 bp, Homo sapiens
cataggttaaacttt

SEQ ID NO: 1879703 - DNA, 15 bp, Homo sapiens
ataggttaaactttc

SEQ ID NO: 1879704 - DNA, 15 bp, Homo sapiens
taggttaaactttcc

SEQ ID NO: 1879705 - DNA, 15 bp, Homo sapiens
aggttaaactttcct

SEQ ID NO: 1879706 - DNA, 15 bp, Homo sapiens
ggttaaactttcctt

SEQ ID NO: 1879707 - DNA, 15 bp, Homo sapiens
gttaaactttccttt

SEQ ID NO: 1879708 - DNA, 15 bp, Homo sapiens
ttaaactttcctttt

SEQ ID NO: 1879709 - DNA, 15 bp, Homo sapiens
taaactttccttttc

SEQ ID NO: 1879710 - DNA, 15 bp, Homo sapiens
aaactttccttttct

SEQ ID NO: 1879711 - DNA, 15 bp, Homo sapiens
aactttccttttctt

SEQ ID NO: 1879712 - DNA, 15 bp, Homo sapiens
actttccttttcttt

SEQ ID NO: 1879713 - DNA, 15 bp, Homo sapiens
ctttccttttctttg

SEQ ID NO: 1879714 - DNA, 15 bp, Homo sapiens
tttccttttctttgg

SEQ ID NO: 1879715 - DNA, 15 bp, Homo sapiens
ttccttttctttggt

SEQ ID NO: 1879716 - DNA, 15 bp, Homo sapiens
tccttttctttggtc

SEQ ID NO: 1879717 - DNA, 15 bp, Homo sapiens
ccttttctttggtca

SEQ ID NO: 1879718 - DNA, 15 bp, Homo sapiens
cttttctttggtcaa

SEQ ID NO: 1879719 - DNA, 15 bp, Homo sapiens
ttttctttggtcaat

SEQ ID NO: 1879720 - DNA, 15 bp, Homo sapiens
tttctttggtcaatt

SEQ ID NO: 1879721 - DNA, 15 bp, Homo sapiens
ttctttggtcaattc

SEQ ID NO: 1879722 - DNA, 15 bp, Homo sapiens
tctttggtcaattct

SEQ ID NO: 1879723 - DNA, 15 bp, Homo sapiens
ctttggtcaattctg

SEQ ID NO: 1879724 - DNA, 15 bp, Homo sapiens
tttggtcaattctga

SEQ ID NO: 1879725 - DNA, 15 bp, Homo sapiens
ttggtcaattctgag

SEQ ID NO: 1879726 - DNA, 15 bp, Homo sapiens
tggtcaattctgagc

SEQ ID NO: 1879727 - DNA, 15 bp, Homo sapiens
ggtcaattctgagct

SEQ ID NO: 1879728 - DNA, 15 bp, Homo sapiens
gtcaattctgagctt

SEQ ID NO: 1879729 - DNA, 15 bp, Homo sapiens
tcaattctgagcttc

SEQ ID NO: 1879730 - DNA, 15 bp, Homo sapiens
caattctgagcttca

SEQ ID NO: 1879731 - DNA, 15 bp, Homo sapiens
aattctgagcttcat

SEQ ID NO: 1879732 - DNA, 15 bp, Homo sapiens
attctgagcttcatt

SEQ ID NO: 1879733 - DNA, 15 bp, Homo sapiens
ttctgagcttcattc

SEQ ID NO: 1879734 - DNA, 15 bp, Homo sapiens
tctgagcttcattct

SEQ ID NO: 1879735 - DNA, 15 bp, Homo sapiens
ctgagcttcattctg

SEQ ID NO: 1879736 - DNA, 15 bp, Homo sapiens
tgagcttcattctgt

SEQ ID NO: 1879737 - DNA, 15 bp, Homo sapiens
gagcttcattctgta

SEQ ID NO: 1879738 - DNA, 15 bp, Homo sapiens
agcttcattctgtac

SEQ ID NO: 1879739 - DNA, 15 bp, Homo sapiens
gcttcattctgtacc

SEQ ID NO: 1879740 - DNA, 15 bp, Homo sapiens
cttcattctgtacca

SEQ ID NO: 1879741 - DNA, 15 bp, Homo sapiens
ttcattctgtaccaa

SEQ ID NO: 1879742 - DNA, 15 bp, Homo sapiens
tcattctgtaccaaa

SEQ ID NO: 1879743 - DNA, 15 bp, Homo sapiens
cattctgtaccaaat

SEQ ID NO: 1879744 - DNA, 15 bp, Homo sapiens
attctgtaccaaata

SEQ ID NO: 1879745 - DNA, 15 bp, Homo sapiens
ttctgtaccaaataa

SEQ ID NO: 1879746 - DNA, 15 bp, Homo sapiens
tctgtaccaaataac

SEQ ID NO: 1879747 - DNA, 15 bp, Homo sapiens
ctgtaccaaataact

SEQ ID NO: 1879748 - DNA, 15 bp, Homo sapiens
tgtaccaaataactt

SEQ ID NO: 1879749 - DNA, 15 bp, Homo sapiens
gtaccaaataacttc

SEQ ID NO: 1879750 - DNA, 15 bp, Homo sapiens
taccaaataacttct

SEQ ID NO: 1879751 - DNA, 15 bp, Homo sapiens
accaaataacttctc

SEQ ID NO: 1879752 - DNA, 15 bp, Homo sapiens
ccaaataacttctca

SEQ ID NO: 1879753 - DNA, 15 bp, Homo sapiens
caaataacttctcaa

SEQ ID NO: 1879754 - DNA, 15 bp, Homo sapiens
aaataacttctcaaa

SEQ ID NO: 1879755 - DNA, 15 bp, Homo sapiens
aataacttctcaaat

SEQ ID NO: 1879756 - DNA, 15 bp, Homo sapiens
ataacttctcaaatt

SEQ ID NO: 1879757 - DNA, 15 bp, Homo sapiens
taacttctcaaattt

SEQ ID NO: 1879758 - DNA, 15 bp, Homo sapiens
aacttctcaaatttc

SEQ ID NO: 1879759 - DNA, 15 bp, Homo sapiens
acttctcaaatttcc

SEQ ID NO: 1879760 - DNA, 15 bp, Homo sapiens
cttctcaaatttccg

SEQ ID NO: 1879761 - DNA, 15 bp, Homo sapiens
ttctcaaatttccga

SEQ ID NO: 1879762 - DNA, 15 bp, Homo sapiens
tctcaaatttccgat

SEQ ID NO: 1879763 - DNA, 15 bp, Homo sapiens
ctcaaatttccgatt

SEQ ID NO: 1879764 - DNA, 15 bp, Homo sapiens
tcaaatttccgattc

SEQ ID NO: 1879765 - DNA, 15 bp, Homo sapiens
caaatttccgattcc

SEQ ID NO: 1879766 - DNA, 15 bp, Homo sapiens
aaatttccgattcct

SEQ ID NO: 1879767 - DNA, 15 bp, Homo sapiens
aatttccgattcctg

SEQ ID NO: 1879768 - DNA, 15 bp, Homo sapiens
atttccgattcctga

SEQ ID NO: 1879769 - DNA, 15 bp, Homo sapiens
tttccgattcctgaa

SEQ ID NO: 1879770 - DNA, 15 bp, Homo sapiens
ttccgattcctgaag

SEQ ID NO: 1879771 - DNA, 15 bp, Homo sapiens
tccgattcctgaagc

SEQ ID NO: 1879772 - DNA, 15 bp, Homo sapiens
ccgattcctgaagct

SEQ ID NO: 1879773 - DNA, 15 bp, Homo sapiens
cgattcctgaagctt

SEQ ID NO: 1879774 - DNA, 15 bp, Homo sapiens
gattcctgaagcttg

SEQ ID NO: 1879775 - DNA, 15 bp, Homo sapiens
attcctgaagcttgg

SEQ ID NO: 1879776 - DNA, 15 bp, Homo sapiens
ttcctgaagcttggt

SEQ ID NO: 1879777 - DNA, 15 bp, Homo sapiens
tcctgaagcttggta

SEQ ID NO: 1879778 - DNA, 15 bp, Homo sapiens
cctgaagcttggtaa

SEQ ID NO: 1879779 - DNA, 15 bp, Homo sapiens
ctgaagcttggtaac

SEQ ID NO: 1879780 - DNA, 15 bp, Homo sapiens
tgaagcttggtaact

SEQ ID NO: 1879781 - DNA, 15 bp, Homo sapiens
gaagcttggtaacta

SEQ ID NO: 1879782 - DNA, 15 bp, Homo sapiens
aagcttggtaactaa

SEQ ID NO: 1879783 - DNA, 15 bp, Homo sapiens
agcttggtaactaat

SEQ ID NO: 1879784 - DNA, 15 bp, Homo sapiens
gcttggtaactaatg

SEQ ID NO: 1879785 - DNA, 15 bp, Homo sapiens
cttggtaactaatgg

SEQ ID NO: 1879786 - DNA, 15 bp, Homo sapiens
ttggtaactaatggt

SEQ ID NO: 1879787 - DNA, 15 bp, Homo sapiens
tggtaactaatggtt

SEQ ID NO: 1879788 - DNA, 15 bp, Homo sapiens
ggtaactaatggttg

SEQ ID NO: 1879789 - DNA, 15 bp, Homo sapiens
gtaactaatggttga

SEQ ID NO: 1879790 - DNA, 15 bp, Homo sapiens
taactaatggttgaa

SEQ ID NO: 1879791 - DNA, 15 bp, Homo sapiens
aactaatggttgaat

SEQ ID NO: 1879792 - DNA, 15 bp, Homo sapiens
actaatggttgaatt

SEQ ID NO: 1879793 - DNA, 15 bp, Homo sapiens
ctaatggttgaattt

SEQ ID NO: 1879794 - DNA, 15 bp, Homo sapiens
taatggttgaatttt

SEQ ID NO: 1879795 - DNA, 15 bp, Homo sapiens
aatggttgaattttg

SEQ ID NO: 1879796 - DNA, 15 bp, Homo sapiens
atggttgaattttgg

SEQ ID NO: 1879797 - DNA, 15 bp, Homo sapiens
tggttgaattttggg

SEQ ID NO: 1879798 - DNA, 15 bp, Homo sapiens
ggttgaattttgggg

SEQ ID NO: 1879799 - DNA, 15 bp, Homo sapiens
gttgaattttggggg

SEQ ID NO: 1879800 - DNA, 15 bp, Homo sapiens
ttgaattttggggga

SEQ ID NO: 1879801 - DNA, 15 bp, Homo sapiens
tgaattttgggggat

SEQ ID NO: 1879802 - DNA, 15 bp, Homo sapiens
gaattttgggggatg

SEQ ID NO: 1879803 - DNA, 15 bp, Homo sapiens
aattttgggggatgt

SEQ ID NO: 1879804 - DNA, 15 bp, Homo sapiens
attttgggggatgtg

SEQ ID NO: 1879805 - DNA, 15 bp, Homo sapiens
ttttgggggatgtgt

SEQ ID NO: 1879806 - DNA, 15 bp, Homo sapiens
tttgggggatgtgtt

SEQ ID NO: 1879807 - DNA, 15 bp, Homo sapiens
ttgggggatgtgttc

SEQ ID NO: 1879808 - DNA, 15 bp, Homo sapiens
tgggggatgtgttct

SEQ ID NO: 1879809 - DNA, 15 bp, Homo sapiens
gggggatgtgttctt

SEQ ID NO: 1879810 - DNA, 15 bp, Homo sapiens
ggggatgtgttcttt

SEQ ID NO: 1879811 - DNA, 15 bp, Homo sapiens
gggatgtgttcttta

SEQ ID NO: 1879812 - DNA, 15 bp, Homo sapiens
ggatgtgttctttaa

SEQ ID NO: 1879813 - DNA, 15 bp, Homo sapiens
gatgtgttctttaat

SEQ ID NO: 1879814 - DNA, 15 bp, Homo sapiens
atgtgttctttaata

SEQ ID NO: 1879815 - DNA, 15 bp, Homo sapiens
tgtgttctttaatat

SEQ ID NO: 1879816 - DNA, 15 bp, Homo sapiens
gtgttctttaatatt

SEQ ID NO: 1879817 - DNA, 15 bp, Homo sapiens
tgttctttaatattt

SEQ ID NO: 1879818 - DNA, 15 bp, Homo sapiens
gttctttaatatttt

SEQ ID NO: 1879819 - DNA, 15 bp, Homo sapiens
ttctttaatattttg

SEQ ID NO: 1879820 - DNA, 15 bp, Homo sapiens
tctttaatattttgt

SEQ ID NO: 1879821 - DNA, 15 bp, Homo sapiens
ctttaatattttgta

SEQ ID NO: 1879822 - DNA, 15 bp, Homo sapiens
tttaatattttgtaa

SEQ ID NO: 1879823 - DNA, 15 bp, Homo sapiens
ttaatattttgtaat

SEQ ID NO: 1879824 - DNA, 15 bp, Homo sapiens
taatattttgtaatt

SEQ ID NO: 1879825 - DNA, 15 bp, Homo sapiens
aatattttgtaattt

SEQ ID NO: 1879826 - DNA, 15 bp, Homo sapiens
atattttgtaatttc

SEQ ID NO: 1879827 - DNA, 15 bp, Homo sapiens
tattttgtaatttct

SEQ ID NO: 1879828 - DNA, 15 bp, Homo sapiens
attttgtaatttctc

SEQ ID NO: 1879829 - DNA, 15 bp, Homo sapiens
ttttgtaatttctca

SEQ ID NO: 1879830 - DNA, 15 bp, Homo sapiens
tttgtaatttctcat

SEQ ID NO: 1879831 - DNA, 15 bp, Homo sapiens
ttgtaatttctcata

SEQ ID NO: 1879832 - DNA, 15 bp, Homo sapiens
tgtaatttctcatat

SEQ ID NO: 1879833 - DNA, 15 bp, Homo sapiens
gtaatttctcatatc

SEQ ID NO: 1879834 - DNA, 15 bp, Homo sapiens
taatttctcatatct

SEQ ID NO: 1879835 - DNA, 15 bp, Homo sapiens
aatttctcatatctt

SEQ ID NO: 1879836 - DNA, 15 bp, Homo sapiens
atttctcatatcttc

SEQ ID NO: 1879837 - DNA, 15 bp, Homo sapiens
tttctcatatcttcc

SEQ ID NO: 1879838 - DNA, 15 bp, Homo sapiens
ttctcatatcttcct

SEQ ID NO: 1879839 - DNA, 15 bp, Homo sapiens
tctcatatcttcctc

SEQ ID NO: 1879840 - DNA, 15 bp, Homo sapiens
ctcatatcttcctct

SEQ ID NO: 1879841 - DNA, 15 bp, Homo sapiens
tcatatcttcctctg

SEQ ID NO: 1879842 - DNA, 15 bp, Homo sapiens
catatcttcctctgt

SEQ ID NO: 1879843 - DNA, 15 bp, Homo sapiens
atatcttcctctgta

SEQ ID NO: 1879844 - DNA, 15 bp, Homo sapiens
tatcttcctctgtaa

SEQ ID NO: 1879845 - DNA, 15 bp, Homo sapiens
atcttcctctgtaag

SEQ ID NO: 1879846 - DNA, 15 bp, Homo sapiens
tcttcctctgtaagt

SEQ ID NO: 1879847 - DNA, 15 bp, Homo sapiens
cttcctctgtaagtg

SEQ ID NO: 1879848 - DNA, 15 bp, Homo sapiens
ttcctctgtaagtgc

SEQ ID NO: 1879849 - DNA, 15 bp, Homo sapiens
tcctctgtaagtgca

SEQ ID NO: 1879850 - DNA, 15 bp, Homo sapiens
cctctgtaagtgcaa

SEQ ID NO: 1879851 - DNA, 15 bp, Homo sapiens
ctctgtaagtgcaac

SEQ ID NO: 1879852 - DNA, 15 bp, Homo sapiens
tctgtaagtgcaact

SEQ ID NO: 1879853 - DNA, 15 bp, Homo sapiens
ctgtaagtgcaactg

SEQ ID NO: 1879854 - DNA, 15 bp, Homo sapiens
tgtaagtgcaactgg

SEQ ID NO: 1879855 - DNA, 15 bp, Homo sapiens
gtaagtgcaactggt

SEQ ID NO: 1879856 - DNA, 15 bp, Homo sapiens
taagtgcaactggtc

SEQ ID NO: 1879857 - DNA, 15 bp, Homo sapiens
aagtgcaactggtcc

SEQ ID NO: 1879858 - DNA, 15 bp, Homo sapiens
agtgcaactggtccc

SEQ ID NO: 1879859 - DNA, 15 bp, Homo sapiens
gtgcaactggtcccg

SEQ ID NO: 1879860 - DNA, 15 bp, Homo sapiens
tgcaactggtcccga

SEQ ID NO: 1879861 - DNA, 15 bp, Homo sapiens
gcaactggtcccgac

SEQ ID NO: 1879862 - DNA, 15 bp, Homo sapiens
caactggtcccgaca

SEQ ID NO: 1879863 - DNA, 15 bp, Homo sapiens
aactggtcccgacac

SEQ ID NO: 1879864 - DNA, 15 bp, Homo sapiens
actggtcccgacact

SEQ ID NO: 1879865 - DNA, 15 bp, Homo sapiens
ctggtcccgacacta

SEQ ID NO: 1879866 - DNA, 15 bp, Homo sapiens
tggtcccgacactag

SEQ ID NO: 1879867 - DNA, 15 bp, Homo sapiens
ggtcccgacactagt

SEQ ID NO: 1879868 - DNA, 15 bp, Homo sapiens
gtcccgacactagta

SEQ ID NO: 1879869 - DNA, 15 bp, Homo sapiens
tcccgacactagtat

SEQ ID NO: 1879870 - DNA, 15 bp, Homo sapiens
cccgacactagtata

SEQ ID NO: 1879871 - DNA, 15 bp, Homo sapiens
ccgacactagtatat

SEQ ID NO: 1879872 - DNA, 15 bp, Homo sapiens
cgacactagtatatc

SEQ ID NO: 1879873 - DNA, 15 bp, Homo sapiens
gacactagtatatct

SEQ ID NO: 1879874 - DNA, 15 bp, Homo sapiens
acactagtatatctc

SEQ ID NO: 1879875 - DNA, 15 bp, Homo sapiens
cactagtatatctct

SEQ ID NO: 1879876 - DNA, 15 bp, Homo sapiens
actagtatatctctc

SEQ ID NO: 1879877 - DNA, 15 bp, Homo sapiens
ctagtatatctctcc

SEQ ID NO: 1879878 - DNA, 15 bp, Homo sapiens
tagtatatctctcca

SEQ ID NO: 1879879 - DNA, 15 bp, Homo sapiens
agtatatctctccaa

SEQ ID NO: 1879880 - DNA, 15 bp, Homo sapiens
gtatatctctccaaa

SEQ ID NO: 1879881 - DNA, 15 bp, Homo sapiens
tatatctctccaaaa

SEQ ID NO: 1879882 - DNA, 15 bp, Homo sapiens
atatctctccaaaag

SEQ ID NO: 1879883 - DNA, 15 bp, Homo sapiens
tatctctccaaaagt

SEQ ID NO: 1879884 - DNA, 15 bp, Homo sapiens
atctctccaaaagtg

SEQ ID NO: 1879885 - DNA, 15 bp, Homo sapiens
tctctccaaaagtgt

SEQ ID NO: 1879886 - DNA, 15 bp, Homo sapiens
ctctccaaaagtgtg

SEQ ID NO: 1879887 - DNA, 15 bp, Homo sapiens
tctccaaaagtgtgt

SEQ ID NO: 1879888 - DNA, 15 bp, Homo sapiens
ctccaaaagtgtgta

SEQ ID NO: 1879889 - DNA, 15 bp, Homo sapiens
tccaaaagtgtgtat

SEQ ID NO: 1879890 - DNA, 15 bp, Homo sapiens
ccaaaagtgtgtatg

SEQ ID NO: 1879891 - DNA, 15 bp, Homo sapiens
caaaagtgtgtatgt

SEQ ID NO: 1879892 - DNA, 15 bp, Homo sapiens
aaaagtgtgtatgtg

SEQ ID NO: 1879893 - DNA, 15 bp, Homo sapiens
aaagtgtgtatgtgt

SEQ ID NO: 1879894 - DNA, 15 bp, Homo sapiens
aagtgtgtatgtgtc

SEQ ID NO: 1879895 - DNA, 15 bp, Homo sapiens
agtgtgtatgtgtca

SEQ ID NO: 1879896 - DNA, 15 bp, Homo sapiens
gtgtgtatgtgtcac

SEQ ID NO: 1879897 - DNA, 15 bp, Homo sapiens
tgtgtatgtgtcact

SEQ ID NO: 1879898 - DNA, 15 bp, Homo sapiens
gtgtatgtgtcactg

SEQ ID NO: 1879899 - DNA, 15 bp, Homo sapiens
tgtatgtgtcactgt

SEQ ID NO: 1879900 - DNA, 15 bp, Homo sapiens
gtatgtgtcactgtc

SEQ ID NO: 1879901 - DNA, 15 bp, Homo sapiens
tatgtgtcactgtca

SEQ ID NO: 1879902 - DNA, 15 bp, Homo sapiens
atgtgtcactgtcat

SEQ ID NO: 1879903 - DNA, 15 bp, Homo sapiens
tgtgtcactgtcata

SEQ ID NO: 1879904 - DNA, 15 bp, Homo sapiens
gtgtcactgtcataa

SEQ ID NO: 1879905 - DNA, 15 bp, Homo sapiens
tgtcactgtcataaa

SEQ ID NO: 1879906 - DNA, 15 bp, Homo sapiens
gtcactgtcataaaa

SEQ ID NO: 1879907 - DNA, 15 bp, Homo sapiens
tcactgtcataaaaa

SEQ ID NO: 1879908 - DNA, 15 bp, Homo sapiens
cactgtcataaaaat

SEQ ID NO: 1879909 - DNA, 15 bp, Homo sapiens
actgtcataaaaatg

SEQ ID NO: 1879910 - DNA, 15 bp, Homo sapiens
ctgtcataaaaatgt

SEQ ID NO: 1879911 - DNA, 15 bp, Homo sapiens
tgtcataaaaatgtc

SEQ ID NO: 1879912 - DNA, 15 bp, Homo sapiens
gtcataaaaatgtca

SEQ ID NO: 1879913 - DNA, 15 bp, Homo sapiens
tcataaaaatgtcac

SEQ ID NO: 1879914 - DNA, 15 bp, Homo sapiens
cataaaaatgtcaca

SEQ ID NO: 1879915 - DNA, 15 bp, Homo sapiens
ataaaaatgtcacag

SEQ ID NO: 1879916 - DNA, 15 bp, Homo sapiens
taaaaatgtcacaga

SEQ ID NO: 1879917 - DNA, 15 bp, Homo sapiens
aaaaatgtcacagat

SEQ ID NO: 1879918 - DNA, 15 bp, Homo sapiens
aaaatgtcacagatt

SEQ ID NO: 1879919 - DNA, 15 bp, Homo sapiens
aaatgtcacagattt

SEQ ID NO: 1879920 - DNA, 15 bp, Homo sapiens
aatgtcacagatttt

SEQ ID NO: 1879921 - DNA, 15 bp, Homo sapiens
atgtcacagattttt

SEQ ID NO: 1879922 - DNA, 15 bp, Homo sapiens
tgtcacagattttta

SEQ ID NO: 1879923 - DNA, 15 bp, Homo sapiens
gtcacagatttttaa

SEQ ID NO: 1879924 - DNA, 15 bp, Homo sapiens
tcacagatttttaag

SEQ ID NO: 1879925 - DNA, 15 bp, Homo sapiens
cacagatttttaaga

SEQ ID NO: 1879926 - DNA, 15 bp, Homo sapiens
acagatttttaagat

SEQ ID NO: 1879927 - DNA, 15 bp, Homo sapiens
cagatttttaagatt

SEQ ID NO: 1879928 - DNA, 15 bp, Homo sapiens
agatttttaagattg

SEQ ID NO: 1879929 - DNA, 15 bp, Homo sapiens
gatttttaagattgg

SEQ ID NO: 1879930 - DNA, 15 bp, Homo sapiens
atttttaagattgga

SEQ ID NO: 1879931 - DNA, 15 bp, Homo sapiens
tttttaagattggat

SEQ ID NO: 1879932 - DNA, 15 bp, Homo sapiens
ttttaagattggatt

SEQ ID NO: 1879933 - DNA, 15 bp, Homo sapiens
tttaagattggattt

SEQ ID NO: 1879934 - DNA, 15 bp, Homo sapiens
ttaagattggatttt

SEQ ID NO: 1879935 - DNA, 15 bp, Homo sapiens
taagattggattttt

SEQ ID NO: 1879936 - DNA, 15 bp, Homo sapiens
aagattggatttttt

SEQ ID NO: 1879937 - DNA, 15 bp, Homo sapiens
agattggattttttt

SEQ ID NO: 1879938 - DNA, 15 bp, Homo sapiens
gattggatttttttc

SEQ ID NO: 1879939 - DNA, 15 bp, Homo sapiens
attggatttttttct

SEQ ID NO: 1879940 - DNA, 15 bp, Homo sapiens
ttggatttttttctt

SEQ ID NO: 1879941 - DNA, 15 bp, Homo sapiens
tggatttttttctta

SEQ ID NO: 1879942 - DNA, 15 bp, Homo sapiens
ggatttttttcttaa

SEQ ID NO: 1879943 - DNA, 15 bp, Homo sapiens
gatttttttcttaat

SEQ ID NO: 1879944 - DNA, 15 bp, Homo sapiens
atttttttcttaatc

SEQ ID NO: 1879945 - DNA, 15 bp, Homo sapiens
tttttttcttaatct

SEQ ID NO: 1879946 - DNA, 15 bp, Homo sapiens
ttttttcttaatctt

SEQ ID NO: 1879947 - DNA, 15 bp, Homo sapiens
tttttcttaatcttc

SEQ ID NO: 1879948 - DNA, 15 bp, Homo sapiens
ttttcttaatcttca

SEQ ID NO: 1879949 - DNA, 15 bp, Homo sapiens
tttcttaatcttcac

SEQ ID NO: 1879950 - DNA, 15 bp, Homo sapiens
ttcttaatcttcaca

SEQ ID NO: 1879951 - DNA, 15 bp, Homo sapiens
tcttaatcttcacaa

SEQ ID NO: 1879952 - DNA, 15 bp, Homo sapiens
cttaatcttcacaat

SEQ ID NO: 1879953 - DNA, 15 bp, Homo sapiens
ttaatcttcacaata

SEQ ID NO: 1879954 - DNA, 15 bp, Homo sapiens
taatcttcacaatat

SEQ ID NO: 1879955 - DNA, 15 bp, Homo sapiens
aatcttcacaatatg

SEQ ID NO: 1879956 - DNA, 15 bp, Homo sapiens
atcttcacaatatgt

SEQ ID NO: 1879957 - DNA, 15 bp, Homo sapiens
tcttcacaatatgtt

SEQ ID NO: 1879958 - DNA, 15 bp, Homo sapiens
cttcacaatatgttt

SEQ ID NO: 1879959 - DNA, 15 bp, Homo sapiens
ttcacaatatgtttc

SEQ ID NO: 1879960 - DNA, 15 bp, Homo sapiens
tcacaatatgtttct

SEQ ID NO: 1879961 - DNA, 15 bp, Homo sapiens
cacaatatgtttctc

SEQ ID NO: 1879962 - DNA, 15 bp, Homo sapiens
acaatatgtttctcc

SEQ ID NO: 1879963 - DNA, 15 bp, Homo sapiens
caatatgtttctcct

SEQ ID NO: 1879964 - DNA, 15 bp, Homo sapiens
aatatgtttctcctt

SEQ ID NO: 1879965 - DNA, 15 bp, Homo sapiens
atatgtttctccttt

SEQ ID NO: 1879966 - DNA, 15 bp, Homo sapiens
tatgtttctcctttt

SEQ ID NO: 1879967 - DNA, 15 bp, Homo sapiens
atgtttctccttttt

SEQ ID NO: 1879968 - DNA, 15 bp, Homo sapiens
tgtttctcctttttg

SEQ ID NO: 1879969 - DNA, 15 bp, Homo sapiens
gtttctcctttttgt

SEQ ID NO: 1879970 - DNA, 15 bp, Homo sapiens
tttctcctttttgtt

SEQ ID NO: 1879971 - DNA, 15 bp, Homo sapiens
ttctcctttttgttg

SEQ ID NO: 1879972 - DNA, 15 bp, Homo sapiens
tctcctttttgttgc

SEQ ID NO: 1879973 - DNA, 15 bp, Homo sapiens
ctcctttttgttgca

SEQ ID NO: 1879974 - DNA, 15 bp, Homo sapiens
tcctttttgttgcaa

SEQ ID NO: 1879975 - DNA, 15 bp, Homo sapiens
cctttttgttgcaag

SEQ ID NO: 1879976 - DNA, 15 bp, Homo sapiens
ctttttgttgcaaga

SEQ ID NO: 1879977 - DNA, 15 bp, Homo sapiens
tttttgttgcaagaa

SEQ ID NO: 1879978 - DNA, 15 bp, Homo sapiens
ttttgttgcaagaat

SEQ ID NO: 1879979 - DNA, 15 bp, Homo sapiens
tttgttgcaagaata

SEQ ID NO: 1879980 - DNA, 15 bp, Homo sapiens
ttgttgcaagaatac

SEQ ID NO: 1879981 - DNA, 15 bp, Homo sapiens
tgttgcaagaatact

SEQ ID NO: 1879982 - DNA, 15 bp, Homo sapiens
gttgcaagaatactc

SEQ ID NO: 1879983 - DNA, 15 bp, Homo sapiens
ttgcaagaatactct

SEQ ID NO: 1879984 - DNA, 15 bp, Homo sapiens
tgcaagaatactctg

SEQ ID NO: 1879985 - DNA, 15 bp, Homo sapiens
gcaagaatactctgt

SEQ ID NO: 1879986 - DNA, 15 bp, Homo sapiens
caagaatactctgtg

SEQ ID NO: 1879987 - DNA, 15 bp, Homo sapiens
aagaatactctgtgc

SEQ ID NO: 1879988 - DNA, 15 bp, Homo sapiens
agaatactctgtgca

SEQ ID NO: 1879989 - DNA, 15 bp, Homo sapiens
gaatactctgtgcat

SEQ ID NO: 1879990 - DNA, 15 bp, Homo sapiens
aatactctgtgcata

SEQ ID NO: 1879991 - DNA, 15 bp, Homo sapiens
atactctgtgcataa

SEQ ID NO: 1879992 - DNA, 15 bp, Homo sapiens
tactctgtgcataat

SEQ ID NO: 1879993 - DNA, 15 bp, Homo sapiens
actctgtgcataatt

SEQ ID NO: 1879994 - DNA, 15 bp, Homo sapiens
ctctgtgcataattc

SEQ ID NO: 1879995 - DNA, 15 bp, Homo sapiens
tctgtgcataattct

SEQ ID NO: 1879996 - DNA, 15 bp, Homo sapiens
ctgtgcataattcta

SEQ ID NO: 1879997 - DNA, 15 bp, Homo sapiens
tgtgcataattctac

SEQ ID NO: 1879998 - DNA, 15 bp, Homo sapiens
gtgcataattctacc

SEQ ID NO: 1879999 - DNA, 15 bp, Homo sapiens
tgcataattctacca

SEQ ID NO: 1880000 - DNA, 15 bp, Homo sapiens
gcataattctaccac

SEQ ID NO: 1880001 - DNA, 15 bp, Homo sapiens
cataattctaccacg

SEQ ID NO: 1880002 - DNA, 15 bp, Homo sapiens
ataattctaccacgg

SEQ ID NO: 1880003 - DNA, 15 bp, Homo sapiens
taattctaccacggt

SEQ ID NO: 1880004 - DNA, 15 bp, Homo sapiens
aattctaccacggtc

SEQ ID NO: 1880005 - DNA, 15 bp, Homo sapiens
attctaccacggtcc

SEQ ID NO: 1880006 - DNA, 15 bp, Homo sapiens
ttctaccacggtcct

SEQ ID NO: 1880007 - DNA, 15 bp, Homo sapiens
tctaccacggtcctt

SEQ ID NO: 1880008 - DNA, 15 bp, Homo sapiens
ctaccacggtcctta

SEQ ID NO: 1880009 - DNA, 15 bp, Homo sapiens
taccacggtccttaa

SEQ ID NO: 1880010 - DNA, 15 bp, Homo sapiens
accacggtccttaat

SEQ ID NO: 1880011 - DNA, 15 bp, Homo sapiens
ccacggtccttaata

SEQ ID NO: 1880012 - DNA, 15 bp, Homo sapiens
cacggtccttaatac

SEQ ID NO: 1880013 - DNA, 15 bp, Homo sapiens
acggtccttaataca

SEQ ID NO: 1880014 - DNA, 15 bp, Homo sapiens
cggtccttaatacat

SEQ ID NO: 1880015 - DNA, 15 bp, Homo sapiens
ggtccttaatacatt

SEQ ID NO: 1880016 - DNA, 15 bp, Homo sapiens
gtccttaatacatta

SEQ ID NO: 1880017 - DNA, 15 bp, Homo sapiens
tccttaatacattat

SEQ ID NO: 1880018 - DNA, 15 bp, Homo sapiens
ccttaatacattatg

SEQ ID NO: 1880019 - DNA, 15 bp, Homo sapiens
cttaatacattatgc

SEQ ID NO: 1880020 - DNA, 15 bp, Homo sapiens
ttaatacattatgct

SEQ ID NO: 1880021 - DNA, 15 bp, Homo sapiens
taatacattatgctg

SEQ ID NO: 1880022 - DNA, 15 bp, Homo sapiens
aatacattatgctgt

SEQ ID NO: 1880023 - DNA, 15 bp, Homo sapiens
atacattatgctgtg

SEQ ID NO: 1880024 - DNA, 15 bp, Homo sapiens
tacattatgctgtga

SEQ ID NO: 1880025 - DNA, 15 bp, Homo sapiens
acattatgctgtgat

SEQ ID NO: 1880026 - DNA, 15 bp, Homo sapiens
cattatgctgtgata

SEQ ID NO: 1880027 - DNA, 15 bp, Homo sapiens
attatgctgtgatat

SEQ ID NO: 1880028 - DNA, 15 bp, Homo sapiens
ttatgctgtgatatt

SEQ ID NO: 1880029 - DNA, 15 bp, Homo sapiens
tatgctgtgatattt

SEQ ID NO: 1880030 - DNA, 15 bp, Homo sapiens
atgctgtgatatttg

SEQ ID NO: 1880031 - DNA, 15 bp, Homo sapiens
tgctgtgatatttgg

SEQ ID NO: 1880032 - DNA, 15 bp, Homo sapiens
gctgtgatatttggt

SEQ ID NO: 1880033 - DNA, 15 bp, Homo sapiens
ctgtgatatttggtt

SEQ ID NO: 1880034 - DNA, 15 bp, Homo sapiens
tgtgatatttggttc

SEQ ID NO: 1880035 - DNA, 15 bp, Homo sapiens
gtgatatttggttca

SEQ ID NO: 1880036 - DNA, 15 bp, Homo sapiens
tgatatttggttcac

SEQ ID NO: 1880037 - DNA, 15 bp, Homo sapiens
gatatttggttcact

SEQ ID NO: 1880038 - DNA, 15 bp, Homo sapiens
atatttggttcactt

SEQ ID NO: 1880039 - DNA, 15 bp, Homo sapiens
tatttggttcactta

SEQ ID NO: 1880040 - DNA, 15 bp, Homo sapiens
atttggttcacttat

SEQ ID NO: 1880041 - DNA, 15 bp, Homo sapiens
tttggttcacttatc

SEQ ID NO: 1880042 - DNA, 15 bp, Homo sapiens
ttggttcacttatct

SEQ ID NO: 1880043 - DNA, 15 bp, Homo sapiens
tggttcacttatctg

SEQ ID NO: 1880044 - DNA, 15 bp, Homo sapiens
ggttcacttatctgc

SEQ ID NO: 1880045 - DNA, 15 bp, Homo sapiens
gttcacttatctgcc

SEQ ID NO: 1880046 - DNA, 15 bp, Homo sapiens
ttcacttatctgcct

SEQ ID NO: 1880047 - DNA, 15 bp, Homo sapiens
tcacttatctgcctc

SEQ ID NO: 1880048 - DNA, 15 bp, Homo sapiens
cacttatctgcctcc

SEQ ID NO: 1880049 - DNA, 15 bp, Homo sapiens
acttatctgcctcct

SEQ ID NO: 1880050 - DNA, 15 bp, Homo sapiens
cttatctgcctcctt

SEQ ID NO: 1880051 - DNA, 15 bp, Homo sapiens
ttatctgcctccttc

SEQ ID NO: 1880052 - DNA, 15 bp, Homo sapiens
tatctgcctccttcc

SEQ ID NO: 1880053 - DNA, 15 bp, Homo sapiens
atctgcctccttcca

SEQ ID NO: 1880054 - DNA, 15 bp, Homo sapiens
tctgcctccttccac

SEQ ID NO: 1880055 - DNA, 15 bp, Homo sapiens
ctgcctccttccacc

SEQ ID NO: 1880056 - DNA, 15 bp, Homo sapiens
tgcctccttccaccc

SEQ ID NO: 1880057 - DNA, 15 bp, Homo sapiens
gcctccttccacccc

SEQ ID NO: 1880058 - DNA, 15 bp, Homo sapiens
cctccttccacccct

SEQ ID NO: 1880059 - DNA, 15 bp, Homo sapiens
ctccttccacccctc

SEQ ID NO: 1880060 - DNA, 15 bp, Homo sapiens
tccttccacccctcc

SEQ ID NO: 1880061 - DNA, 15 bp, Homo sapiens
ccttccacccctcct

SEQ ID NO: 1880062 - DNA, 15 bp, Homo sapiens
cttccacccctcctt

SEQ ID NO: 1880063 - DNA, 15 bp, Homo sapiens
ttccacccctcctta

SEQ ID NO: 1880064 - DNA, 15 bp, Homo sapiens
tccacccctccttaa

SEQ ID NO: 1880065 - DNA, 15 bp, Homo sapiens
ccacccctccttaaa

SEQ ID NO: 1880066 - DNA, 15 bp, Homo sapiens
cacccctccttaaac

SEQ ID NO: 1880067 - DNA, 15 bp, Homo sapiens
acccctccttaaact

SEQ ID NO: 1880068 - DNA, 15 bp, Homo sapiens
cccctccttaaactg

SEQ ID NO: 1880069 - DNA, 15 bp, Homo sapiens
ccctccttaaactgt

SEQ ID NO: 1880070 - DNA, 15 bp, Homo sapiens
cctccttaaactgta

SEQ ID NO: 1880071 - DNA, 15 bp, Homo sapiens
ctccttaaactgtaa

SEQ ID NO: 1880072 - DNA, 15 bp, Homo sapiens
tccttaaactgtaag

SEQ ID NO: 1880073 - DNA, 15 bp, Homo sapiens
ccttaaactgtaagt

SEQ ID NO: 1880074 - DNA, 15 bp, Homo sapiens
cttaaactgtaagtc

SEQ ID NO: 1880075 - DNA, 15 bp, Homo sapiens
ttaaactgtaagtct

SEQ ID NO: 1880076 - DNA, 15 bp, Homo sapiens
taaactgtaagtctc

SEQ ID NO: 1880077 - DNA, 15 bp, Homo sapiens
aaactgtaagtctct

SEQ ID NO: 1880078 - DNA, 15 bp, Homo sapiens
aactgtaagtctctg

SEQ ID NO: 1880079 - DNA, 15 bp, Homo sapiens
actgtaagtctctga

SEQ ID NO: 1880080 - DNA, 15 bp, Homo sapiens
ctgtaagtctctgaa

SEQ ID NO: 1880081 - DNA, 15 bp, Homo sapiens
tgtaagtctctgaaa

SEQ ID NO: 1880082 - DNA, 15 bp, Homo sapiens
gtaagtctctgaaag

SEQ ID NO: 1880083 - DNA, 15 bp, Homo sapiens
taagtctctgaaagg

SEQ ID NO: 1880084 - DNA, 15 bp, Homo sapiens
aagtctctgaaaggt

SEQ ID NO: 1880085 - DNA, 15 bp, Homo sapiens
agtctctgaaaggtt

SEQ ID NO: 1880086 - DNA, 15 bp, Homo sapiens
gtctctgaaaggtta

SEQ ID NO: 1880087 - DNA, 15 bp, Homo sapiens
tctctgaaaggttaa

SEQ ID NO: 1880088 - DNA, 15 bp, Homo sapiens
ctctgaaaggttaag

SEQ ID NO: 1880089 - DNA, 15 bp, Homo sapiens
tctgaaaggttaagg

SEQ ID NO: 1880090 - DNA, 15 bp, Homo sapiens
ctgaaaggttaagga

SEQ ID NO: 1880091 - DNA, 15 bp, Homo sapiens
tgaaaggttaaggac

SEQ ID NO: 1880092 - DNA, 15 bp, Homo sapiens
gaaaggttaaggact

SEQ ID NO: 1880093 - DNA, 15 bp, Homo sapiens
aaaggttaaggacta

SEQ ID NO: 1880094 - DNA, 15 bp, Homo sapiens
aaggttaaggactag

SEQ ID NO: 1880095 - DNA, 15 bp, Homo sapiens
aggttaaggactagg

SEQ ID NO: 1880096 - DNA, 15 bp, Homo sapiens
ggttaaggactaggt

SEQ ID NO: 1880097 - DNA, 15 bp, Homo sapiens
gttaaggactaggtc

SEQ ID NO: 1880098 - DNA, 15 bp, Homo sapiens
ttaaggactaggtca

SEQ ID NO: 1880099 - DNA, 15 bp, Homo sapiens
taaggactaggtcat

SEQ ID NO: 1880100 - DNA, 15 bp, Homo sapiens
aaggactaggtcatc

SEQ ID NO: 1880101 - DNA, 15 bp, Homo sapiens
aggactaggtcatcg

SEQ ID NO: 1880102 - DNA, 15 bp, Homo sapiens
ggactaggtcatcgt

SEQ ID NO: 1880103 - DNA, 15 bp, Homo sapiens
gactaggtcatcgtc

SEQ ID NO: 1880104 - DNA, 15 bp, Homo sapiens
actaggtcatcgtca

SEQ ID NO: 1880105 - DNA, 15 bp, Homo sapiens
ctaggtcatcgtcat

SEQ ID NO: 1880106 - DNA, 15 bp, Homo sapiens
taggtcatcgtcatc

SEQ ID NO: 1880107 - DNA, 15 bp, Homo sapiens
aggtcatcgtcatca

SEQ ID NO: 1880108 - DNA, 15 bp, Homo sapiens
ggtcatcgtcatcac

SEQ ID NO: 1880109 - DNA, 15 bp, Homo sapiens
gtcatcgtcatcaca

SEQ ID NO: 1880110 - DNA, 15 bp, Homo sapiens
tcatcgtcatcacag

SEQ ID NO: 1880111 - DNA, 15 bp, Homo sapiens
catcgtcatcacagt

SEQ ID NO: 1880112 - DNA, 15 bp, Homo sapiens
atcgtcatcacagta

SEQ ID NO: 1880113 - DNA, 15 bp, Homo sapiens
tcgtcatcacagtac

SEQ ID NO: 1880114 - DNA, 15 bp, Homo sapiens
cgtcatcacagtact

SEQ ID NO: 1880115 - DNA, 15 bp, Homo sapiens
gtcatcacagtactt

SEQ ID NO: 1880116 - DNA, 15 bp, Homo sapiens
tcatcacagtacttt

SEQ ID NO: 1880117 - DNA, 15 bp, Homo sapiens
catcacagtactttc

SEQ ID NO: 1880118 - DNA, 15 bp, Homo sapiens
atcacagtactttca

SEQ ID NO: 1880119 - DNA, 15 bp, Homo sapiens
tcacagtactttcaa

SEQ ID NO: 1880120 - DNA, 15 bp, Homo sapiens
cacagtactttcaat

SEQ ID NO: 1880121 - DNA, 15 bp, Homo sapiens
acagtactttcaatg

SEQ ID NO: 1880122 - DNA, 15 bp, Homo sapiens
cagtactttcaatgc

SEQ ID NO: 1880123 - DNA, 15 bp, Homo sapiens
agtactttcaatgcc

SEQ ID NO: 1880124 - DNA, 15 bp, Homo sapiens
gtactttcaatgcct

SEQ ID NO: 1880125 - DNA, 15 bp, Homo sapiens
tactttcaatgccta

SEQ ID NO: 1880126 - DNA, 15 bp, Homo sapiens
actttcaatgcctag

SEQ ID NO: 1880127 - DNA, 15 bp, Homo sapiens
ctttcaatgcctagc

SEQ ID NO: 1880128 - DNA, 15 bp, Homo sapiens
tttcaatgcctagca

SEQ ID NO: 1880129 - DNA, 15 bp, Homo sapiens
ttcaatgcctagcac

SEQ ID NO: 1880130 - DNA, 15 bp, Homo sapiens
tcaatgcctagcaca

SEQ ID NO: 1880131 - DNA, 15 bp, Homo sapiens
caatgcctagcacag

SEQ ID NO: 1880132 - DNA, 15 bp, Homo sapiens
aatgcctagcacagt

SEQ ID NO: 1880133 - DNA, 15 bp, Homo sapiens
atgcctagcacagtt

SEQ ID NO: 1880134 - DNA, 15 bp, Homo sapiens
tgcctagcacagttc

SEQ ID NO: 1880135 - DNA, 15 bp, Homo sapiens
gcctagcacagttca

SEQ ID NO: 1880136 - DNA, 15 bp, Homo sapiens
cctagcacagttcat

SEQ ID NO: 1880137 - DNA, 15 bp, Homo sapiens
ctagcacagttcatg

SEQ ID NO: 1880138 - DNA, 15 bp, Homo sapiens
tagcacagttcatgg

SEQ ID NO: 1880139 - DNA, 15 bp, Homo sapiens
agcacagttcatggc

SEQ ID NO: 1880140 - DNA, 15 bp, Homo sapiens
gcacagttcatggca

SEQ ID NO: 1880141 - DNA, 15 bp, Homo sapiens
cacagttcatggcag

SEQ ID NO: 1880142 - DNA, 15 bp, Homo sapiens
acagttcatggcagt

SEQ ID NO: 1880143 - DNA, 15 bp, Homo sapiens
cagttcatggcagta

SEQ ID NO: 1880144 - DNA, 15 bp, Homo sapiens
agttcatggcagtag

SEQ ID NO: 1880145 - DNA, 15 bp, Homo sapiens
gttcatggcagtagt

SEQ ID NO: 1880146 - DNA, 15 bp, Homo sapiens
ttcatggcagtagtt

SEQ ID NO: 1880147 - DNA, 15 bp, Homo sapiens
tcatggcagtagtta

SEQ ID NO: 1880148 - DNA, 15 bp, Homo sapiens
catggcagtagttaa

SEQ ID NO: 1880149 - DNA, 15 bp, Homo sapiens
atggcagtagttaat

SEQ ID NO: 1880150 - DNA, 15 bp, Homo sapiens
tggcagtagttaatg

SEQ ID NO: 1880151 - DNA, 15 bp, Homo sapiens
ggcagtagttaatgc

SEQ ID NO: 1880152 - DNA, 15 bp, Homo sapiens
gcagtagttaatgct

SEQ ID NO: 1880153 - DNA, 15 bp, Homo sapiens
cagtagttaatgctc

SEQ ID NO: 1880154 - DNA, 15 bp, Homo sapiens
agtagttaatgctca

SEQ ID NO: 1880155 - DNA, 15 bp, Homo sapiens
gtagttaatgctcaa

SEQ ID NO: 1880156 - DNA, 15 bp, Homo sapiens
tagttaatgctcaat

SEQ ID NO: 1880157 - DNA, 15 bp, Homo sapiens
agttaatgctcaata

SEQ ID NO: 1880158 - DNA, 15 bp, Homo sapiens
gttaatgctcaataa

SEQ ID NO: 1880159 - DNA, 15 bp, Homo sapiens
ttaatgctcaataag

SEQ ID NO: 1880160 - DNA, 15 bp, Homo sapiens
taatgctcaataagt

SEQ ID NO: 1880161 - DNA, 15 bp, Homo sapiens
aatgctcaataagtg

SEQ ID NO: 1880162 - DNA, 15 bp, Homo sapiens
atgctcaataagtgt

SEQ ID NO: 1880163 - DNA, 15 bp, Homo sapiens
tgctcaataagtgtt

SEQ ID NO: 1880164 - DNA, 15 bp, Homo sapiens
gctcaataagtgttt

SEQ ID NO: 1880165 - DNA, 15 bp, Homo sapiens
ctcaataagtgtttc

SEQ ID NO: 1880166 - DNA, 15 bp, Homo sapiens
tcaataagtgtttct

SEQ ID NO: 1880167 - DNA, 15 bp, Homo sapiens
caataagtgtttctt

SEQ ID NO: 1880168 - DNA, 15 bp, Homo sapiens
aataagtgtttcttg

SEQ ID NO: 1880169 - DNA, 15 bp, Homo sapiens
ataagtgtttcttga

SEQ ID NO: 1880170 - DNA, 15 bp, Homo sapiens
taagtgtttcttgaa

SEQ ID NO: 1880171 - DNA, 15 bp, Homo sapiens
aagtgtttcttgaaa

SEQ ID NO: 1880172 - DNA, 15 bp, Homo sapiens
agtgtttcttgaaag

SEQ ID NO: 1880173 - DNA, 15 bp, Homo sapiens
gtgtttcttgaaaga

SEQ ID NO: 1880174 - DNA, 15 bp, Homo sapiens
tgtttcttgaaagaa

SEQ ID NO: 1880175 - DNA, 15 bp, Homo sapiens
gtttcttgaaagaac

SEQ ID NO: 1880176 - DNA, 15 bp, Homo sapiens
tttcttgaaagaaca

SEQ ID NO: 1880177 - DNA, 15 bp, Homo sapiens
ttcttgaaagaacaa

SEQ ID NO: 1880178 - DNA, 15 bp, Homo sapiens
tcttgaaagaacaaa

SEQ ID NO: 1880179 - DNA, 15 bp, Homo sapiens
cttgaaagaacaaat

SEQ ID NO: 1880180 - DNA, 15 bp, Homo sapiens
ttgaaagaacaaatc

SEQ ID NO: 1880181 - DNA, 15 bp, Homo sapiens
tgaaagaacaaatca

SEQ ID NO: 1880182 - DNA, 15 bp, Homo sapiens
gaaagaacaaatcaa

SEQ ID NO: 1880183 - DNA, 15 bp, Homo sapiens
aaagaacaaatcaat

SEQ ID NO: 1880184 - DNA, 15 bp, Homo sapiens
aagaacaaatcaatc

SEQ ID NO: 1880185 - DNA, 15 bp, Homo sapiens
agaacaaatcaatca

SEQ ID NO: 1880186 - DNA, 15 bp, Homo sapiens
gaacaaatcaatcat

SEQ ID NO: 1880187 - DNA, 15 bp, Homo sapiens
aacaaatcaatcata

SEQ ID NO: 1880188 - DNA, 15 bp, Homo sapiens
acaaatcaatcatat

SEQ ID NO: 1880189 - DNA, 15 bp, Homo sapiens
caaatcaatcatatc

SEQ ID NO: 1880190 - DNA, 15 bp, Homo sapiens
aaatcaatcatatct

SEQ ID NO: 1880191 - DNA, 15 bp, Homo sapiens
aatcaatcatatcta

SEQ ID NO: 1880192 - DNA, 15 bp, Homo sapiens
atcaatcatatctat

SEQ ID NO: 1880193 - DNA, 15 bp, Homo sapiens
tcaatcatatctata

SEQ ID NO: 1880194 - DNA, 15 bp, Homo sapiens
caatcatatctatag

SEQ ID NO: 1880195 - DNA, 15 bp, Homo sapiens
aatcatatctatagt

SEQ ID NO: 1880196 - DNA, 15 bp, Homo sapiens
atcatatctatagta

SEQ ID NO: 1880197 - DNA, 15 bp, Homo sapiens
tcatatctatagtat

SEQ ID NO: 1880198 - DNA, 15 bp, Homo sapiens
catatctatagtata

SEQ ID NO: 1880199 - DNA, 15 bp, Homo sapiens
atatctatagtatat

SEQ ID NO: 1880200 - DNA, 15 bp, Homo sapiens
tatctatagtatatt

SEQ ID NO: 1880201 - DNA, 15 bp, Homo sapiens
atctatagtatattt

SEQ ID NO: 1880202 - DNA, 15 bp, Homo sapiens
tctatagtatatttc

SEQ ID NO: 1880203 - DNA, 15 bp, Homo sapiens
ctatagtatatttct

SEQ ID NO: 1880204 - DNA, 15 bp, Homo sapiens
tatagtatatttctt

SEQ ID NO: 1880205 - DNA, 15 bp, Homo sapiens
atagtatatttctta

SEQ ID NO: 1880206 - DNA, 15 bp, Homo sapiens
tagtatatttcttag

SEQ ID NO: 1880207 - DNA, 15 bp, Homo sapiens
agtatatttcttagt

SEQ ID NO: 1880208 - DNA, 15 bp, Homo sapiens
gtatatttcttagtg

SEQ ID NO: 1880209 - DNA, 15 bp, Homo sapiens
tatatttcttagtgt

SEQ ID NO: 1880210 - DNA, 15 bp, Homo sapiens
atatttcttagtgtc

SEQ ID NO: 1880211 - DNA, 15 bp, Homo sapiens
tatttcttagtgtcc

SEQ ID NO: 1880212 - DNA, 15 bp, Homo sapiens
atttcttagtgtcca

SEQ ID NO: 1880213 - DNA, 15 bp, Homo sapiens
tttcttagtgtccag

SEQ ID NO: 1880214 - DNA, 15 bp, Homo sapiens
ttcttagtgtccagt

SEQ ID NO: 1880215 - DNA, 15 bp, Homo sapiens
tcttagtgtccagtt

SEQ ID NO: 1880216 - DNA, 15 bp, Homo sapiens
cttagtgtccagttt

SEQ ID NO: 1880217 - DNA, 15 bp, Homo sapiens
ttagtgtccagtttg

SEQ ID NO: 1880218 - DNA, 15 bp, Homo sapiens
tagtgtccagtttga

SEQ ID NO: 1880219 - DNA, 15 bp, Homo sapiens
agtgtccagtttgac

SEQ ID NO: 1880220 - DNA, 15 bp, Homo sapiens
gtgtccagtttgacc

SEQ ID NO: 1880221 - DNA, 15 bp, Homo sapiens
tgtccagtttgacct

SEQ ID NO: 1880222 - DNA, 15 bp, Homo sapiens
gtccagtttgaccta

SEQ ID NO: 1880223 - DNA, 15 bp, Homo sapiens
tccagtttgacctaa

SEQ ID NO: 1880224 - DNA, 15 bp, Homo sapiens
ccagtttgacctaaa

SEQ ID NO: 1880225 - DNA, 15 bp, Homo sapiens
cagtttgacctaaaa

SEQ ID NO: 1880226 - DNA, 15 bp, Homo sapiens
agtttgacctaaaaa

SEQ ID NO: 1880227 - DNA, 15 bp, Homo sapiens
gtttgacctaaaaag

SEQ ID NO: 1880228 - DNA, 15 bp, Homo sapiens
tttgacctaaaaagg

SEQ ID NO: 1880229 - DNA, 15 bp, Homo sapiens
ttgacctaaaaaggg

SEQ ID NO: 1880230 - DNA, 15 bp, Homo sapiens
tgacctaaaaagggt

SEQ ID NO: 1880231 - DNA, 15 bp, Homo sapiens
gacctaaaaagggta

SEQ ID NO: 1880232 - DNA, 15 bp, Homo sapiens
acctaaaaagggtaa

SEQ ID NO: 1880233 - DNA, 15 bp, Homo sapiens
cctaaaaagggtaaa

SEQ ID NO: 1880234 - DNA, 15 bp, Homo sapiens
ctaaaaagggtaaat

SEQ ID NO: 1880235 - DNA, 15 bp, Homo sapiens
taaaaagggtaaatg

SEQ ID NO: 1880236 - DNA, 15 bp, Homo sapiens
aaaaagggtaaatgc

SEQ ID NO: 1880237 - DNA, 15 bp, Homo sapiens
aaaagggtaaatgcc

SEQ ID NO: 1880238 - DNA, 15 bp, Homo sapiens
aaagggtaaatgccc

SEQ ID NO: 1880239 - DNA, 15 bp, Homo sapiens
aagggtaaatgccca

SEQ ID NO: 1880240 - DNA, 15 bp, Homo sapiens
agggtaaatgcccac

SEQ ID NO: 1880241 - DNA, 15 bp, Homo sapiens
gggtaaatgcccaca

SEQ ID NO: 1880242 - DNA, 15 bp, Homo sapiens
ggtaaatgcccacat

SEQ ID NO: 1880243 - DNA, 15 bp, Homo sapiens
gtaaatgcccacatg

SEQ ID NO: 1880244 - DNA, 15 bp, Homo sapiens
taaatgcccacatgg

SEQ ID NO: 1880245 - DNA, 15 bp, Homo sapiens
aaatgcccacatggt

SEQ ID NO: 1880246 - DNA, 15 bp, Homo sapiens
aatgcccacatggtc

SEQ ID NO: 1880247 - DNA, 15 bp, Homo sapiens
atgcccacatggtca

SEQ ID NO: 1880248 - DNA, 15 bp, Homo sapiens
tgcccacatggtcaa

SEQ ID NO: 1880249 - DNA, 15 bp, Homo sapiens
gcccacatggtcaaa

SEQ ID NO: 1880250 - DNA, 15 bp, Homo sapiens
cccacatggtcaaaa

SEQ ID NO: 1880251 - DNA, 15 bp, Homo sapiens
ccacatggtcaaaaa

SEQ ID NO: 1880252 - DNA, 15 bp, Homo sapiens
cacatggtcaaaaaa

SEQ ID NO: 1880253 - DNA, 15 bp, Homo sapiens
acatggtcaaaaaaa

SEQ ID NO: 1880254 - DNA, 15 bp, Homo sapiens
catggtcaaaaaaat

SEQ ID NO: 1880255 - DNA, 15 bp, Homo sapiens
atggtcaaaaaaatc

SEQ ID NO: 1880256 - DNA, 15 bp, Homo sapiens
tggtcaaaaaaatca

SEQ ID NO: 1880257 - DNA, 15 bp, Homo sapiens
ggtcaaaaaaatcat

SEQ ID NO: 1880258 - DNA, 15 bp, Homo sapiens
gtcaaaaaaatcata

SEQ ID NO: 1880259 - DNA, 15 bp, Homo sapiens
tcaaaaaaatcatac

SEQ ID NO: 1880260 - DNA, 15 bp, Homo sapiens
caaaaaaatcataca

SEQ ID NO: 1880261 - DNA, 15 bp, Homo sapiens
aaaaaaatcatacac

SEQ ID NO: 1880262 - DNA, 15 bp, Homo sapiens
aaaaaatcatacacc

SEQ ID NO: 1880263 - DNA, 15 bp, Homo sapiens
aaaaatcatacacct

SEQ ID NO: 1880264 - DNA, 15 bp, Homo sapiens
aaaatcatacacctc

SEQ ID NO: 1880265 - DNA, 15 bp, Homo sapiens
aaatcatacacctca

SEQ ID NO: 1880266 - DNA, 15 bp, Homo sapiens
aatcatacacctcag

SEQ ID NO: 1880267 - DNA, 15 bp, Homo sapiens
atcatacacctcaga

SEQ ID NO: 1880268 - DNA, 15 bp, Homo sapiens
tcatacacctcagaa

SEQ ID NO: 1880269 - DNA, 15 bp, Homo sapiens
catacacctcagaaa

SEQ ID NO: 1880270 - DNA, 15 bp, Homo sapiens
atacacctcagaaat

SEQ ID NO: 1880271 - DNA, 15 bp, Homo sapiens
tacacctcagaaata

SEQ ID NO: 1880272 - DNA, 15 bp, Homo sapiens
acacctcagaaatac

SEQ ID NO: 1880273 - DNA, 15 bp, Homo sapiens
cacctcagaaataca

SEQ ID NO: 1880274 - DNA, 15 bp, Homo sapiens
acctcagaaatacag

SEQ ID NO: 1880275 - DNA, 15 bp, Homo sapiens
cctcagaaatacagt

SEQ ID NO: 1880276 - DNA, 15 bp, Homo sapiens
ctcagaaatacagtg

SEQ ID NO: 1880277 - DNA, 15 bp, Homo sapiens
tcagaaatacagtgc

SEQ ID NO: 1880278 - DNA, 15 bp, Homo sapiens
cagaaatacagtgct

SEQ ID NO: 1880279 - DNA, 15 bp, Homo sapiens
agaaatacagtgctg

SEQ ID NO: 1880280 - DNA, 15 bp, Homo sapiens
gaaatacagtgctgc

SEQ ID NO: 1880281 - DNA, 15 bp, Homo sapiens
aaatacagtgctgca

SEQ ID NO: 1880282 - DNA, 15 bp, Homo sapiens
aatacagtgctgcag

SEQ ID NO: 1880283 - DNA, 15 bp, Homo sapiens
atacagtgctgcagg

SEQ ID NO: 1880284 - DNA, 15 bp, Homo sapiens
tacagtgctgcaggg

SEQ ID NO: 1880285 - DNA, 15 bp, Homo sapiens
acagtgctgcaggga

SEQ ID NO: 1880286 - DNA, 15 bp, Homo sapiens
cagtgctgcagggaa

SEQ ID NO: 1880287 - DNA, 15 bp, Homo sapiens
agtgctgcagggaat

SEQ ID NO: 1880288 - DNA, 15 bp, Homo sapiens
gtgctgcagggaatt

SEQ ID NO: 1880289 - DNA, 15 bp, Homo sapiens
tgctgcagggaatta

SEQ ID NO: 1880290 - DNA, 15 bp, Homo sapiens
gctgcagggaattat

SEQ ID NO: 1880291 - DNA, 15 bp, Homo sapiens
ctgcagggaattatt

SEQ ID NO: 1880292 - DNA, 15 bp, Homo sapiens
tgcagggaattattt

SEQ ID NO: 1880293 - DNA, 15 bp, Homo sapiens
gcagggaattatttt

SEQ ID NO: 1880294 - DNA, 15 bp, Homo sapiens
cagggaattatttta

SEQ ID NO: 1880295 - DNA, 15 bp, Homo sapiens
agggaattattttat

SEQ ID NO: 1880296 - DNA, 15 bp, Homo sapiens
gggaattattttata

SEQ ID NO: 1880297 - DNA, 15 bp, Homo sapiens
ggaattattttataa

SEQ ID NO: 1880298 - DNA, 15 bp, Homo sapiens
gaattattttataat

SEQ ID NO: 1880299 - DNA, 15 bp, Homo sapiens
aattattttataata

SEQ ID NO: 1880300 - DNA, 15 bp, Homo sapiens
attattttataataa

SEQ ID NO: 1880301 - DNA, 15 bp, Homo sapiens
ttattttataataat

SEQ ID NO: 1880302 - DNA, 15 bp, Homo sapiens
tattttataataatt

SEQ ID NO: 1880303 - DNA, 15 bp, Homo sapiens
attttataataatta

SEQ ID NO: 1880304 - DNA, 15 bp, Homo sapiens
ttttataataattaa

SEQ ID NO: 1880305 - DNA, 15 bp, Homo sapiens
tttataataattaag

SEQ ID NO: 1880306 - DNA, 15 bp, Homo sapiens
ttataataattaagc

SEQ ID NO: 1880307 - DNA, 15 bp, Homo sapiens
tataataattaagcc

SEQ ID NO: 1880308 - DNA, 15 bp, Homo sapiens
ataataattaagccc

SEQ ID NO: 1880309 - DNA, 15 bp, Homo sapiens
taataattaagccct

SEQ ID NO: 1880310 - DNA, 15 bp, Homo sapiens
aataattaagccctg

SEQ ID NO: 1880311 - DNA, 15 bp, Homo sapiens
ataattaagccctgg

SEQ ID NO: 1880312 - DNA, 15 bp, Homo sapiens
taattaagccctgga

SEQ ID NO: 1880313 - DNA, 15 bp, Homo sapiens
aattaagccctggat

SEQ ID NO: 1880314 - DNA, 15 bp, Homo sapiens
attaagccctggatc

SEQ ID NO: 1880315 - DNA, 15 bp, Homo sapiens
ttaagccctggatct

SEQ ID NO: 1880316 - DNA, 15 bp, Homo sapiens
taagccctggatctg

SEQ ID NO: 1880317 - DNA, 15 bp, Homo sapiens
aagccctggatctgc

SEQ ID NO: 1880318 - DNA, 15 bp, Homo sapiens
agccctggatctgcc

SEQ ID NO: 1880319 - DNA, 15 bp, Homo sapiens
gccctggatctgcca

SEQ ID NO: 1880320 - DNA, 15 bp, Homo sapiens
ccctggatctgccat

SEQ ID NO: 1880321 - DNA, 15 bp, Homo sapiens
cctggatctgccatg

SEQ ID NO: 1880322 - DNA, 15 bp, Homo sapiens
ctggatctgccatgg

SEQ ID NO: 1880323 - DNA, 15 bp, Homo sapiens
tggatctgccatggg

SEQ ID NO: 1880324 - DNA, 15 bp, Homo sapiens
ggatctgccatgggc

SEQ ID NO: 1880325 - DNA, 15 bp, Homo sapiens
gatctgccatgggct

SEQ ID NO: 1880326 - DNA, 15 bp, Homo sapiens
atctgccatgggctc

SEQ ID NO: 1880327 - DNA, 15 bp, Homo sapiens
tctgccatgggctca

SEQ ID NO: 1880328 - DNA, 15 bp, Homo sapiens
ctgccatgggctcac

SEQ ID NO: 1880329 - DNA, 15 bp, Homo sapiens
tgccatgggctcact

SEQ ID NO: 1880330 - DNA, 15 bp, Homo sapiens
gccatgggctcacta

SEQ ID NO: 1880331 - DNA, 15 bp, Homo sapiens
ccatgggctcactaa

SEQ ID NO: 1880332 - DNA, 15 bp, Homo sapiens
catgggctcactaaa

SEQ ID NO: 1880333 - DNA, 15 bp, Homo sapiens
atgggctcactaaac

SEQ ID NO: 1880334 - DNA, 15 bp, Homo sapiens
tgggctcactaaact

SEQ ID NO: 1880335 - DNA, 15 bp, Homo sapiens
gggctcactaaactc

SEQ ID NO: 1880336 - DNA, 15 bp, Homo sapiens
ggctcactaaactct

SEQ ID NO: 1880337 - DNA, 15 bp, Homo sapiens
gctcactaaactctc

SEQ ID NO: 1880338 - DNA, 15 bp, Homo sapiens
ctcactaaactctca

SEQ ID NO: 1880339 - DNA, 15 bp, Homo sapiens
tcactaaactctcat

SEQ ID NO: 1880340 - DNA, 15 bp, Homo sapiens
cactaaactctcatt

SEQ ID NO: 1880341 - DNA, 15 bp, Homo sapiens
actaaactctcattc

SEQ ID NO: 1880342 - DNA, 15 bp, Homo sapiens
ctaaactctcattca

SEQ ID NO: 1880343 - DNA, 15 bp, Homo sapiens
taaactctcattcac

SEQ ID NO: 1880344 - DNA, 15 bp, Homo sapiens
aaactctcattcacc

SEQ ID NO: 1880345 - DNA, 15 bp, Homo sapiens
aactctcattcacct

SEQ ID NO: 1880346 - DNA, 15 bp, Homo sapiens
actctcattcacctg

SEQ ID NO: 1880347 - DNA, 15 bp, Homo sapiens
ctctcattcacctgt

SEQ ID NO: 1880348 - DNA, 15 bp, Homo sapiens
tctcattcacctgtc

SEQ ID NO: 1880349 - DNA, 15 bp, Homo sapiens
ctcattcacctgtcc

SEQ ID NO: 1880350 - DNA, 15 bp, Homo sapiens
tcattcacctgtcct

SEQ ID NO: 1880351 - DNA, 15 bp, Homo sapiens
cattcacctgtcctc

SEQ ID NO: 1880352 - DNA, 15 bp, Homo sapiens
attcacctgtcctct

SEQ ID NO: 1880353 - DNA, 15 bp, Homo sapiens
ttcacctgtcctctc

SEQ ID NO: 1880354 - DNA, 15 bp, Homo sapiens
tcacctgtcctctca

SEQ ID NO: 1880355 - DNA, 15 bp, Homo sapiens
cacctgtcctctcac

SEQ ID NO: 1880356 - DNA, 15 bp, Homo sapiens
acctgtcctctcacc

SEQ ID NO: 1880357 - DNA, 15 bp, Homo sapiens
ctgtcctctcacctc

SEQ ID NO: 1880358 - DNA, 15 bp, Homo sapiens
tgtcctctcacctct

SEQ ID NO: 1880359 - DNA, 15 bp, Homo sapiens
gtcctctcacctctt

SEQ ID NO: 1880360 - DNA, 15 bp, Homo sapiens
tcctctcacctcttc

SEQ ID NO: 1880361 - DNA, 15 bp, Homo sapiens
cctctcacctcttct

SEQ ID NO: 1880362 - DNA, 15 bp, Homo sapiens
ctctcacctcttctc

SEQ ID NO: 1880363 - DNA, 15 bp, Homo sapiens
tctcacctcttctct

SEQ ID NO: 1880364 - DNA, 15 bp, Homo sapiens
ctcacctcttctctt

SEQ ID NO: 1880365 - DNA, 15 bp, Homo sapiens
tcacctcttctcttt

SEQ ID NO: 1880366 - DNA, 15 bp, Homo sapiens
cacctcttctcttta

SEQ ID NO: 1880367 - DNA, 15 bp, Homo sapiens
acctcttctctttat

SEQ ID NO: 1880368 - DNA, 15 bp, Homo sapiens
cctcttctctttata

SEQ ID NO: 1880369 - DNA, 15 bp, Homo sapiens
ctcttctctttatat

SEQ ID NO: 1880370 - DNA, 15 bp, Homo sapiens
tcttctctttatatt

SEQ ID NO: 1880371 - DNA, 15 bp, Homo sapiens
cttctctttatattc

SEQ ID NO: 1880372 - DNA, 15 bp, Homo sapiens
ttctctttatattcc

SEQ ID NO: 1880373 - DNA, 15 bp, Homo sapiens
tctctttatattccc

SEQ ID NO: 1880374 - DNA, 15 bp, Homo sapiens
ctctttatattccca

SEQ ID NO: 1880375 - DNA, 15 bp, Homo sapiens
tctttatattcccag

SEQ ID NO: 1880376 - DNA, 15 bp, Homo sapiens
ctttatattcccagg

SEQ ID NO: 1880377 - DNA, 15 bp, Homo sapiens
tttatattcccaggc

SEQ ID NO: 1880378 - DNA, 15 bp, Homo sapiens
ttatattcccaggcc

SEQ ID NO: 1880379 - DNA, 15 bp, Homo sapiens
tatattcccaggccc

SEQ ID NO: 1880380 - DNA, 15 bp, Homo sapiens
atattcccaggccca

SEQ ID NO: 1880381 - DNA, 15 bp, Homo sapiens
tattcccaggcccac

SEQ ID NO: 1880382 - DNA, 15 bp, Homo sapiens
attcccaggcccaca

SEQ ID NO: 1880383 - DNA, 15 bp, Homo sapiens
ttcccaggcccacat

SEQ ID NO: 1880384 - DNA, 15 bp, Homo sapiens
tcccaggcccacatc

SEQ ID NO: 1880385 - DNA, 15 bp, Homo sapiens
cccaggcccacatca

SEQ ID NO: 1880386 - DNA, 15 bp, Homo sapiens
ccaggcccacatcag

SEQ ID NO: 1880387 - DNA, 15 bp, Homo sapiens
caggcccacatcaga

SEQ ID NO: 1880388 - DNA, 15 bp, Homo sapiens
aggcccacatcagat

SEQ ID NO: 1880389 - DNA, 15 bp, Homo sapiens
ggcccacatcagatg

SEQ ID NO: 1880390 - DNA, 15 bp, Homo sapiens
gcccacatcagatgc

SEQ ID NO: 1880391 - DNA, 15 bp, Homo sapiens
cccacatcagatgct

SEQ ID NO: 1880392 - DNA, 15 bp, Homo sapiens
ccacatcagatgctc

SEQ ID NO: 1880393 - DNA, 15 bp, Homo sapiens
cacatcagatgctct

SEQ ID NO: 1880394 - DNA, 15 bp, Homo sapiens
acatcagatgctctt

SEQ ID NO: 1880395 - DNA, 15 bp, Homo sapiens
catcagatgctcttt

SEQ ID NO: 1880396 - DNA, 15 bp, Homo sapiens
atcagatgctctttc

SEQ ID NO: 1880397 - DNA, 15 bp, Homo sapiens
tcagatgctctttca

SEQ ID NO: 1880398 - DNA, 15 bp, Homo sapiens
cagatgctctttcag

SEQ ID NO: 1880399 - DNA, 15 bp, Homo sapiens
agatgctctttcaga

SEQ ID NO: 1880400 - DNA, 15 bp, Homo sapiens
gatgctctttcagaa

SEQ ID NO: 1880401 - DNA, 15 bp, Homo sapiens
atgctctttcagaat

SEQ ID NO: 1880402 - DNA, 15 bp, Homo sapiens
tgctctttcagaatg

SEQ ID NO: 1880403 - DNA, 15 bp, Homo sapiens
gctctttcagaatgt

SEQ ID NO: 1880404 - DNA, 15 bp, Homo sapiens
ctctttcagaatgtt

SEQ ID NO: 1880405 - DNA, 15 bp, Homo sapiens
tctttcagaatgttt

SEQ ID NO: 1880406 - DNA, 15 bp, Homo sapiens
ctttcagaatgtttc

SEQ ID NO: 1880407 - DNA, 15 bp, Homo sapiens
tttcagaatgtttct

SEQ ID NO: 1880408 - DNA, 15 bp, Homo sapiens
ttcagaatgtttctc

SEQ ID NO: 1880409 - DNA, 15 bp, Homo sapiens
tcagaatgtttctct

SEQ ID NO: 1880410 - DNA, 15 bp, Homo sapiens
cagaatgtttctctc

SEQ ID NO: 1880411 - DNA, 15 bp, Homo sapiens
agaatgtttctctct

SEQ ID NO: 1880412 - DNA, 15 bp, Homo sapiens
aatgtttctctctcc

SEQ ID NO: 1880413 - DNA, 15 bp, Homo sapiens
atgtttctctctccc

SEQ ID NO: 1880414 - DNA, 15 bp, Homo sapiens
tgtttctctctccct

SEQ ID NO: 1880415 - DNA, 15 bp, Homo sapiens
gtttctctctccctt

SEQ ID NO: 1880416 - DNA, 15 bp, Homo sapiens
tttctctctcccttc

SEQ ID NO: 1880417 - DNA, 15 bp, Homo sapiens
ttctctctcccttcc

SEQ ID NO: 1880418 - DNA, 15 bp, Homo sapiens
tctctctcccttcct

SEQ ID NO: 1880419 - DNA, 15 bp, Homo sapiens
ctctctcccttcctc

SEQ ID NO: 1880420 - DNA, 15 bp, Homo sapiens
tctctcccttcctct

SEQ ID NO: 1880421 - DNA, 15 bp, Homo sapiens
ctctcccttcctctc

SEQ ID NO: 1880422 - DNA, 15 bp, Homo sapiens
tctcccttcctctct

SEQ ID NO: 1880423 - DNA, 15 bp, Homo sapiens
ctcccttcctctctg

SEQ ID NO: 1880424 - DNA, 15 bp, Homo sapiens
tcccttcctctctgc

SEQ ID NO: 1880425 - DNA, 15 bp, Homo sapiens
cccttcctctctgct

SEQ ID NO: 1880426 - DNA, 15 bp, Homo sapiens
ccttcctctctgctg

SEQ ID NO: 1880427 - DNA, 15 bp, Homo sapiens
cttcctctctgctgt

SEQ ID NO: 1880428 - DNA, 15 bp, Homo sapiens
ttcctctctgctgtc

SEQ ID NO: 1880429 - DNA, 15 bp, Homo sapiens
tcctctctgctgtct

SEQ ID NO: 1880430 - DNA, 15 bp, Homo sapiens
cctctctgctgtctg

SEQ ID NO: 1880431 - DNA, 15 bp, Homo sapiens
ctctctgctgtctgc

SEQ ID NO: 1880432 - DNA, 15 bp, Homo sapiens
tctctgctgtctgcc

SEQ ID NO: 1880433 - DNA, 15 bp, Homo sapiens
ctctgctgtctgccc

SEQ ID NO: 1880434 - DNA, 15 bp, Homo sapiens
tctgctgtctgccca

SEQ ID NO: 1880435 - DNA, 15 bp, Homo sapiens
ctgctgtctgcccac

SEQ ID NO: 1880436 - DNA, 15 bp, Homo sapiens
tgctgtctgcccaca

SEQ ID NO: 1880437 - DNA, 15 bp, Homo sapiens
gctgtctgcccacag

SEQ ID NO: 1880438 - DNA, 15 bp, Homo sapiens
ctgtctgcccacagc

SEQ ID NO: 1880439 - DNA, 15 bp, Homo sapiens
tgtctgcccacagcc

SEQ ID NO: 1880440 - DNA, 15 bp, Homo sapiens
gtctgcccacagcca

SEQ ID NO: 1880441 - DNA, 15 bp, Homo sapiens
tctgcccacagccac

SEQ ID NO: 1880442 - DNA, 15 bp, Homo sapiens
ctgcccacagccact

SEQ ID NO: 1880443 - DNA, 15 bp, Homo sapiens
tgcccacagccacta

SEQ ID NO: 1880444 - DNA, 15 bp, Homo sapiens
gcccacagccactac

SEQ ID NO: 1880445 - DNA, 15 bp, Homo sapiens
cccacagccactacc

SEQ ID NO: 1880446 - DNA, 15 bp, Homo sapiens
ccacagccactaccc

SEQ ID NO: 1880447 - DNA, 15 bp, Homo sapiens
cacagccactaccct

SEQ ID NO: 1880448 - DNA, 15 bp, Homo sapiens
acagccactacccta

SEQ ID NO: 1880449 - DNA, 15 bp, Homo sapiens
cagccactaccctat

SEQ ID NO: 1880450 - DNA, 15 bp, Homo sapiens
agccactaccctatt

SEQ ID NO: 1880451 - DNA, 15 bp, Homo sapiens
gccactaccctattt

SEQ ID NO: 1880452 - DNA, 15 bp, Homo sapiens
ccactaccctatttt

SEQ ID NO: 1880453 - DNA, 15 bp, Homo sapiens
cactaccctattttt

SEQ ID NO: 1880454 - DNA, 15 bp, Homo sapiens
actaccctatttttc

SEQ ID NO: 1880455 - DNA, 15 bp, Homo sapiens
ctaccctatttttct

SEQ ID NO: 1880456 - DNA, 15 bp, Homo sapiens
taccctatttttcta

SEQ ID NO: 1880457 - DNA, 15 bp, Homo sapiens
accctatttttctaa

SEQ ID NO: 1880458 - DNA, 15 bp, Homo sapiens
ccctatttttctaaa

SEQ ID NO: 1880459 - DNA, 15 bp, Homo sapiens
cctatttttctaaag

SEQ ID NO: 1880460 - DNA, 15 bp, Homo sapiens
ctatttttctaaagc

SEQ ID NO: 1880461 - DNA, 15 bp, Homo sapiens
tatttttctaaagca

SEQ ID NO: 1880462 - DNA, 15 bp, Homo sapiens
atttttctaaagcac

SEQ ID NO: 1880463 - DNA, 15 bp, Homo sapiens
tttttctaaagcaca

SEQ ID NO: 1880464 - DNA, 15 bp, Homo sapiens
ttttctaaagcacat

SEQ ID NO: 1880465 - DNA, 15 bp, Homo sapiens
tttctaaagcacatg

SEQ ID NO: 1880466 - DNA, 15 bp, Homo sapiens
ttctaaagcacatgg

SEQ ID NO: 1880467 - DNA, 15 bp, Homo sapiens
tctaaagcacatggt

SEQ ID NO: 1880468 - DNA, 15 bp, Homo sapiens
ctaaagcacatggtg

SEQ ID NO: 1880469 - DNA, 15 bp, Homo sapiens
taaagcacatggtgg

SEQ ID NO: 1880470 - DNA, 15 bp, Homo sapiens
aaagcacatggtggg

SEQ ID NO: 1880471 - DNA, 15 bp, Homo sapiens
aagcacatggtggga

SEQ ID NO: 1880472 - DNA, 15 bp, Homo sapiens
agcacatggtgggac

SEQ ID NO: 1880473 - DNA, 15 bp, Homo sapiens
gcacatggtgggacc

SEQ ID NO: 1880474 - DNA, 15 bp, Homo sapiens
cacatggtgggacct

SEQ ID NO: 1880475 - DNA, 15 bp, Homo sapiens
acatggtgggacctt

SEQ ID NO: 1880476 - DNA, 15 bp, Homo sapiens
catggtgggaccttc

SEQ ID NO: 1880477 - DNA, 15 bp, Homo sapiens
atggtgggaccttcc

SEQ ID NO: 1880478 - DNA, 15 bp, Homo sapiens
tggtgggaccttcca

SEQ ID NO: 1880479 - DNA, 15 bp, Homo sapiens
ggtgggaccttccat

SEQ ID NO: 1880480 - DNA, 15 bp, Homo sapiens
gtgggaccttccatt

SEQ ID NO: 1880481 - DNA, 15 bp, Homo sapiens
tgggaccttccattc

SEQ ID NO: 1880482 - DNA, 15 bp, Homo sapiens
gggaccttccattca

SEQ ID NO: 1880483 - DNA, 15 bp, Homo sapiens
ggaccttccattcaa

SEQ ID NO: 1880484 - DNA, 15 bp, Homo sapiens
gaccttccattcaaa

SEQ ID NO: 1880485 - DNA, 15 bp, Homo sapiens
accttccattcaaag

SEQ ID NO: 1880486 - DNA, 15 bp, Homo sapiens
ccttccattcaaagc

SEQ ID NO: 1880487 - DNA, 15 bp, Homo sapiens
cttccattcaaagct

SEQ ID NO: 1880488 - DNA, 15 bp, Homo sapiens
ttccattcaaagctg

SEQ ID NO: 1880489 - DNA, 15 bp, Homo sapiens
tccattcaaagctga

SEQ ID NO: 1880490 - DNA, 15 bp, Homo sapiens
ccattcaaagctgac

SEQ ID NO: 1880491 - DNA, 15 bp, Homo sapiens
cattcaaagctgact

SEQ ID NO: 1880492 - DNA, 15 bp, Homo sapiens
ttcaaagctgacttt

SEQ ID NO: 1880493 - DNA, 15 bp, Homo sapiens
tcaaagctgactttg

SEQ ID NO: 1880494 - DNA, 15 bp, Homo sapiens
caaagctgactttga

SEQ ID NO: 1880495 - DNA, 15 bp, Homo sapiens
aaagctgactttgag

SEQ ID NO: 1880496 - DNA, 15 bp, Homo sapiens
aagctgactttgagt

SEQ ID NO: 1880497 - DNA, 15 bp, Homo sapiens
agctgactttgagtt

SEQ ID NO: 1880498 - DNA, 15 bp, Homo sapiens
gctgactttgagttt

SEQ ID NO: 1880499 - DNA, 15 bp, Homo sapiens
ctgactttgagtttg

SEQ ID NO: 1880500 - DNA, 15 bp, Homo sapiens
tgactttgagtttga

SEQ ID NO: 1880501 - DNA, 15 bp, Homo sapiens
gactttgagtttgac

SEQ ID NO: 1880502 - DNA, 15 bp, Homo sapiens
actttgagtttgaca

SEQ ID NO: 1880503 - DNA, 15 bp, Homo sapiens
ctttgagtttgacag

SEQ ID NO: 1880504 - DNA, 15 bp, Homo sapiens
tttgagtttgacagt

SEQ ID NO: 1880505 - DNA, 15 bp, Homo sapiens
ttgagtttgacagtt

SEQ ID NO: 1880506 - DNA, 15 bp, Homo sapiens
tgagtttgacagttc

SEQ ID NO: 1880507 - DNA, 15 bp, Homo sapiens
gagtttgacagttca

SEQ ID NO: 1880508 - DNA, 15 bp, Homo sapiens
agtttgacagttcag

SEQ ID NO: 1880509 - DNA, 15 bp, Homo sapiens
gtttgacagttcaga

SEQ ID NO: 1880510 - DNA, 15 bp, Homo sapiens
tttgacagttcagac

SEQ ID NO: 1880511 - DNA, 15 bp, Homo sapiens
ttgacagttcagaca

SEQ ID NO: 1880512 - DNA, 15 bp, Homo sapiens
tgacagttcagacag

SEQ ID NO: 1880513 - DNA, 15 bp, Homo sapiens
gacagttcagacagc

SEQ ID NO: 1880514 - DNA, 15 bp, Homo sapiens
acagttcagacagca

SEQ ID NO: 1880515 - DNA, 15 bp, Homo sapiens
cagttcagacagcaa

SEQ ID NO: 1880516 - DNA, 15 bp, Homo sapiens
agttcagacagcaaa

SEQ ID NO: 1880517 - DNA, 15 bp, Homo sapiens
gttcagacagcaaat

SEQ ID NO: 1880518 - DNA, 15 bp, Homo sapiens
ttcagacagcaaatg

SEQ ID NO: 1880519 - DNA, 15 bp, Homo sapiens
tcagacagcaaatgc

SEQ ID NO: 1880520 - DNA, 15 bp, Homo sapiens
cagacagcaaatgcc

SEQ ID NO: 1880521 - DNA, 15 bp, Homo sapiens
agacagcaaatgcct

SEQ ID NO: 1880522 - DNA, 15 bp, Homo sapiens
gacagcaaatgccta

SEQ ID NO: 1880523 - DNA, 15 bp, Homo sapiens
acagcaaatgcctaa

SEQ ID NO: 1880524 - DNA, 15 bp, Homo sapiens
cagcaaatgcctaaa

SEQ ID NO: 1880525 - DNA, 15 bp, Homo sapiens
agcaaatgcctaaac

SEQ ID NO: 1880526 - DNA, 15 bp, Homo sapiens
gcaaatgcctaaacc

SEQ ID NO: 1880527 - DNA, 15 bp, Homo sapiens
caaatgcctaaaccc

SEQ ID NO: 1880528 - DNA, 15 bp, Homo sapiens
aaatgcctaaacccc

SEQ ID NO: 1880529 - DNA, 15 bp, Homo sapiens
aatgcctaaaccccc

SEQ ID NO: 1880530 - DNA, 15 bp, Homo sapiens
atgcctaaaccccct

SEQ ID NO: 1880531 - DNA, 15 bp, Homo sapiens
tgcctaaaccccctc

SEQ ID NO: 1880532 - DNA, 15 bp, Homo sapiens
gcctaaaccccctcc

SEQ ID NO: 1880533 - DNA, 15 bp, Homo sapiens
cctaaaccccctcct

SEQ ID NO: 1880534 - DNA, 15 bp, Homo sapiens
ctaaaccccctcctc

SEQ ID NO: 1880535 - DNA, 15 bp, Homo sapiens
taaaccccctcctca

SEQ ID NO: 1880536 - DNA, 15 bp, Homo sapiens
aaaccccctcctcat

SEQ ID NO: 1880537 - DNA, 15 bp, Homo sapiens
aaccccctcctcatc

SEQ ID NO: 1880538 - DNA, 15 bp, Homo sapiens
accccctcctcatca

SEQ ID NO: 1880539 - DNA, 15 bp, Homo sapiens
ccccctcctcatcaa

SEQ ID NO: 1880540 - DNA, 15 bp, Homo sapiens
cccctcctcatcaaa

SEQ ID NO: 1880541 - DNA, 15 bp, Homo sapiens
ccctcctcatcaaag

SEQ ID NO: 1880542 - DNA, 15 bp, Homo sapiens
cctcctcatcaaagc

SEQ ID NO: 1880543 - DNA, 15 bp, Homo sapiens
ctcctcatcaaagcc

SEQ ID NO: 1880544 - DNA, 15 bp, Homo sapiens
tcctcatcaaagccc

SEQ ID NO: 1880545 - DNA, 15 bp, Homo sapiens
cctcatcaaagcccg

SEQ ID NO: 1880546 - DNA, 15 bp, Homo sapiens
ctcatcaaagcccgg

SEQ ID NO: 1880547 - DNA, 15 bp, Homo sapiens
tcatcaaagcccggg

SEQ ID NO: 1880548 - DNA, 15 bp, Homo sapiens
catcaaagcccgggt

SEQ ID NO: 1880549 - DNA, 15 bp, Homo sapiens
atcaaagcccgggtg

SEQ ID NO: 1880550 - DNA, 15 bp, Homo sapiens
tcaaagcccgggtga

SEQ ID NO: 1880551 - DNA, 15 bp, Homo sapiens
caaagcccgggtgac

SEQ ID NO: 1880552 - DNA, 15 bp, Homo sapiens
aaagcccgggtgaca

SEQ ID NO: 1880553 - DNA, 15 bp, Homo sapiens
aagcccgggtgacag

SEQ ID NO: 1880554 - DNA, 15 bp, Homo sapiens
agcccgggtgacaga

SEQ ID NO: 1880555 - DNA, 15 bp, Homo sapiens
gcccgggtgacagat

SEQ ID NO: 1880556 - DNA, 15 bp, Homo sapiens
cccgggtgacagatg

SEQ ID NO: 1880557 - DNA, 15 bp, Homo sapiens
ccgggtgacagatga

SEQ ID NO: 1880558 - DNA, 15 bp, Homo sapiens
cgggtgacagatgat

SEQ ID NO: 1880559 - DNA, 15 bp, Homo sapiens
gggtgacagatgatc

SEQ ID NO: 1880560 - DNA, 15 bp, Homo sapiens
ggtgacagatgatcc

SEQ ID NO: 1880561 - DNA, 15 bp, Homo sapiens
gtgacagatgatcct

SEQ ID NO: 1880562 - DNA, 15 bp, Homo sapiens
tgacagatgatcctg

SEQ ID NO: 1880563 - DNA, 15 bp, Homo sapiens
gacagatgatcctgg

SEQ ID NO: 1880564 - DNA, 15 bp, Homo sapiens
acagatgatcctggg

SEQ ID NO: 1880565 - DNA, 15 bp, Homo sapiens
cagatgatcctgggt

SEQ ID NO: 1880566 - DNA, 15 bp, Homo sapiens
agatgatcctgggtg

SEQ ID NO: 1880567 - DNA, 15 bp, Homo sapiens
gatgatcctgggtga

SEQ ID NO: 1880568 - DNA, 15 bp, Homo sapiens
atgatcctgggtgag

SEQ ID NO: 1880569 - DNA, 15 bp, Homo sapiens
tgatcctgggtgaga

SEQ ID NO: 1880570 - DNA, 15 bp, Homo sapiens
gatcctgggtgagaa

SEQ ID NO: 1880571 - DNA, 15 bp, Homo sapiens
atcctgggtgagaat

SEQ ID NO: 1880572 - DNA, 15 bp, Homo sapiens
tcctgggtgagaatt

SEQ ID NO: 1880573 - DNA, 15 bp, Homo sapiens
cctgggtgagaattt

SEQ ID NO: 1880574 - DNA, 15 bp, Homo sapiens
ctgggtgagaatttc

SEQ ID NO: 1880575 - DNA, 15 bp, Homo sapiens
tgggtgagaatttca

SEQ ID NO: 1880576 - DNA, 15 bp, Homo sapiens
gggtgagaatttcag

SEQ ID NO: 1880577 - DNA, 15 bp, Homo sapiens
ggtgagaatttcagc

SEQ ID NO: 1880578 - DNA, 15 bp, Homo sapiens
gtgagaatttcagct

SEQ ID NO: 1880579 - DNA, 15 bp, Homo sapiens
tgagaatttcagctc

SEQ ID NO: 1880580 - DNA, 15 bp, Homo sapiens
gagaatttcagctct

SEQ ID NO: 1880581 - DNA, 15 bp, Homo sapiens
agaatttcagctctg

SEQ ID NO: 1880582 - DNA, 15 bp, Homo sapiens
gaatttcagctctgg

SEQ ID NO: 1880583 - DNA, 15 bp, Homo sapiens
aatttcagctctgga

SEQ ID NO: 1880584 - DNA, 15 bp, Homo sapiens
atttcagctctggag

SEQ ID NO: 1880585 - DNA, 15 bp, Homo sapiens
tttcagctctggaga

SEQ ID NO: 1880586 - DNA, 15 bp, Homo sapiens
ttcagctctggagag

SEQ ID NO: 1880587 - DNA, 15 bp, Homo sapiens
tcagctctggagagg

SEQ ID NO: 1880588 - DNA, 15 bp, Homo sapiens
cagctctggagaggg

SEQ ID NO: 1880589 - DNA, 15 bp, Homo sapiens
agctctggagagggg

SEQ ID NO: 1880590 - DNA, 15 bp, Homo sapiens
gctctggagagggga

SEQ ID NO: 1880591 - DNA, 15 bp, Homo sapiens
ctctggagaggggag

SEQ ID NO: 1880592 - DNA, 15 bp, Homo sapiens
tctggagaggggagg

SEQ ID NO: 1880593 - DNA, 15 bp, Homo sapiens
ctggagaggggagga

SEQ ID NO: 1880594 - DNA, 15 bp, Homo sapiens
tggagaggggaggaa

SEQ ID NO: 1880595 - DNA, 15 bp, Homo sapiens
ggagaggggaggaaa

SEQ ID NO: 1880596 - DNA, 15 bp, Homo sapiens
gagaggggaggaaat

SEQ ID NO: 1880597 - DNA, 15 bp, Homo sapiens
agaggggaggaaatg

SEQ ID NO: 1880598 - DNA, 15 bp, Homo sapiens
gaggggaggaaatga

SEQ ID NO: 1880599 - DNA, 15 bp, Homo sapiens
aggggaggaaatgaa

SEQ ID NO: 1880600 - DNA, 15 bp, Homo sapiens
ggggaggaaatgaat

SEQ ID NO: 1880601 - DNA, 15 bp, Homo sapiens
gggaggaaatgaata

SEQ ID NO: 1880602 - DNA, 15 bp, Homo sapiens
ggaggaaatgaataa

SEQ ID NO: 1880603 - DNA, 15 bp, Homo sapiens
gaggaaatgaataag

SEQ ID NO: 1880604 - DNA, 15 bp, Homo sapiens
aggaaatgaataagc

SEQ ID NO: 1880605 - DNA, 15 bp, Homo sapiens
ggaaatgaataagca

SEQ ID NO: 1880606 - DNA, 15 bp, Homo sapiens
gaaatgaataagcag

SEQ ID NO: 1880607 - DNA, 15 bp, Homo sapiens
aaatgaataagcagt

SEQ ID NO: 1880608 - DNA, 15 bp, Homo sapiens
aatgaataagcagtc

SEQ ID NO: 1880609 - DNA, 15 bp, Homo sapiens
atgaataagcagtca

SEQ ID NO: 1880610 - DNA, 15 bp, Homo sapiens
tgaataagcagtcaa

SEQ ID NO: 1880611 - DNA, 15 bp, Homo sapiens
gaataagcagtcaaa

SEQ ID NO: 1880612 - DNA, 15 bp, Homo sapiens
aataagcagtcaaat

SEQ ID NO: 1880613 - DNA, 15 bp, Homo sapiens
ataagcagtcaaatg

SEQ ID NO: 1880614 - DNA, 15 bp, Homo sapiens
taagcagtcaaatgt

SEQ ID NO: 1880615 - DNA, 15 bp, Homo sapiens
aagcagtcaaatgtc

SEQ ID NO: 1880616 - DNA, 15 bp, Homo sapiens
agcagtcaaatgtca

SEQ ID NO: 1880617 - DNA, 15 bp, Homo sapiens
gcagtcaaatgtcaa

SEQ ID NO: 1880618 - DNA, 15 bp, Homo sapiens
cagtcaaatgtcaag

SEQ ID NO: 1880619 - DNA, 15 bp, Homo sapiens
agtcaaatgtcaagt

SEQ ID NO: 1880620 - DNA, 15 bp, Homo sapiens
gtcaaatgtcaagtc

SEQ ID NO: 1880621 - DNA, 15 bp, Homo sapiens
tcaaatgtcaagtct

SEQ ID NO: 1880622 - DNA, 15 bp, Homo sapiens
caaatgtcaagtctg

SEQ ID NO: 1880623 - DNA, 15 bp, Homo sapiens
aaatgtcaagtctgc

SEQ ID NO: 1880624 - DNA, 15 bp, Homo sapiens
aatgtcaagtctgct

SEQ ID NO: 1880625 - DNA, 15 bp, Homo sapiens
atgtcaagtctgctg

SEQ ID NO: 1880626 - DNA, 15 bp, Homo sapiens
tgtcaagtctgctga

SEQ ID NO: 1880627 - DNA, 15 bp, Homo sapiens
gtcaagtctgctgac

SEQ ID NO: 1880628 - DNA, 15 bp, Homo sapiens
tcaagtctgctgact

SEQ ID NO: 1880629 - DNA, 15 bp, Homo sapiens
caagtctgctgactt

SEQ ID NO: 1880630 - DNA, 15 bp, Homo sapiens
aagtctgctgacttc

SEQ ID NO: 1880631 - DNA, 15 bp, Homo sapiens
agtctgctgacttct

SEQ ID NO: 1880632 - DNA, 15 bp, Homo sapiens
gtctgctgacttctt

SEQ ID NO: 1880633 - DNA, 15 bp, Homo sapiens
tctgctgacttctta

SEQ ID NO: 1880634 - DNA, 15 bp, Homo sapiens
ctgctgacttcttag

SEQ ID NO: 1880635 - DNA, 15 bp, Homo sapiens
tgctgacttcttagg

SEQ ID NO: 1880636 - DNA, 15 bp, Homo sapiens
gctgacttcttagga

SEQ ID NO: 1880637 - DNA, 15 bp, Homo sapiens
ctgacttcttaggaa

SEQ ID NO: 1880638 - DNA, 15 bp, Homo sapiens
tgacttcttaggaaa

SEQ ID NO: 1880639 - DNA, 15 bp, Homo sapiens
gacttcttaggaaag

SEQ ID NO: 1880640 - DNA, 15 bp, Homo sapiens
acttcttaggaaaga

SEQ ID NO: 1880641 - DNA, 15 bp, Homo sapiens
cttcttaggaaagaa

SEQ ID NO: 1880642 - DNA, 15 bp, Homo sapiens
ttcttaggaaagaaa

SEQ ID NO: 1880643 - DNA, 15 bp, Homo sapiens
tcttaggaaagaaag

SEQ ID NO: 1880644 - DNA, 15 bp, Homo sapiens
cttaggaaagaaaga

SEQ ID NO: 1880645 - DNA, 15 bp, Homo sapiens
ttaggaaagaaagag

SEQ ID NO: 1880646 - DNA, 15 bp, Homo sapiens
taggaaagaaagaga

SEQ ID NO: 1880647 - DNA, 15 bp, Homo sapiens
aggaaagaaagagaa

SEQ ID NO: 1880648 - DNA, 15 bp, Homo sapiens
ggaaagaaagagaag

SEQ ID NO: 1880649 - DNA, 15 bp, Homo sapiens
gaaagaaagagaaga

SEQ ID NO: 1880650 - DNA, 15 bp, Homo sapiens
aaagaaagagaagat

SEQ ID NO: 1880651 - DNA, 15 bp, Homo sapiens
aagaaagagaagata

SEQ ID NO: 1880652 - DNA, 15 bp, Homo sapiens
agaaagagaagatac

SEQ ID NO: 1880653 - DNA, 15 bp, Homo sapiens
gaaagagaagatact

SEQ ID NO: 1880654 - DNA, 15 bp, Homo sapiens
aaagagaagatactt

SEQ ID NO: 1880655 - DNA, 15 bp, Homo sapiens
aagagaagatactta

SEQ ID NO: 1880656 - DNA, 15 bp, Homo sapiens
agagaagatacttat

SEQ ID NO: 1880657 - DNA, 15 bp, Homo sapiens
gagaagatacttata

SEQ ID NO: 1880658 - DNA, 15 bp, Homo sapiens
agaagatacttataa

SEQ ID NO: 1880659 - DNA, 15 bp, Homo sapiens
gaagatacttataat

SEQ ID NO: 1880660 - DNA, 15 bp, Homo sapiens
aagatacttataata

SEQ ID NO: 1880661 - DNA, 15 bp, Homo sapiens
agatacttataatac

SEQ ID NO: 1880662 - DNA, 15 bp, Homo sapiens
gatacttataatact

SEQ ID NO: 1880663 - DNA, 15 bp, Homo sapiens
atacttataatactg

SEQ ID NO: 1880664 - DNA, 15 bp, Homo sapiens
tacttataatactgg

SEQ ID NO: 1880665 - DNA, 15 bp, Homo sapiens
acttataatactgga

SEQ ID NO: 1880666 - DNA, 15 bp, Homo sapiens
cttataatactggac

SEQ ID NO: 1880667 - DNA, 15 bp, Homo sapiens
ttataatactggaca

SEQ ID NO: 1880668 - DNA, 15 bp, Homo sapiens
tataatactggacag

SEQ ID NO: 1880669 - DNA, 15 bp, Homo sapiens
ataatactggacagg

SEQ ID NO: 1880670 - DNA, 15 bp, Homo sapiens
taatactggacagga

SEQ ID NO: 1880671 - DNA, 15 bp, Homo sapiens
aatactggacaggag

SEQ ID NO: 1880672 - DNA, 15 bp, Homo sapiens
atactggacaggagg

SEQ ID NO: 1880673 - DNA, 15 bp, Homo sapiens
tactggacaggaggg

SEQ ID NO: 1880674 - DNA, 15 bp, Homo sapiens
actggacaggagggc

SEQ ID NO: 1880675 - DNA, 15 bp, Homo sapiens
ctggacaggagggct

SEQ ID NO: 1880676 - DNA, 15 bp, Homo sapiens
tggacaggagggctt

SEQ ID NO: 1880677 - DNA, 15 bp, Homo sapiens
ggacaggagggcttt

SEQ ID NO: 1880678 - DNA, 15 bp, Homo sapiens
gacaggagggctttg

SEQ ID NO: 1880679 - DNA, 15 bp, Homo sapiens
acaggagggctttgg

SEQ ID NO: 1880680 - DNA, 15 bp, Homo sapiens
caggagggctttggc

SEQ ID NO: 1880681 - DNA, 15 bp, Homo sapiens
aggagggctttggct

SEQ ID NO: 1880682 - DNA, 15 bp, Homo sapiens
ggagggctttggctt

SEQ ID NO: 1880683 - DNA, 15 bp, Homo sapiens
gagggctttggctta

SEQ ID NO: 1880684 - DNA, 15 bp, Homo sapiens
agggctttggcttac

SEQ ID NO: 1880685 - DNA, 15 bp, Homo sapiens
gggctttggcttaca

SEQ ID NO: 1880686 - DNA, 15 bp, Homo sapiens
ggctttggcttacat

SEQ ID NO: 1880687 - DNA, 15 bp, Homo sapiens
gctttggcttacatt

SEQ ID NO: 1880688 - DNA, 15 bp, Homo sapiens
ctttggcttacattt

SEQ ID NO: 1880689 - DNA, 15 bp, Homo sapiens
tttggcttacatttg

SEQ ID NO: 1880690 - DNA, 15 bp, Homo sapiens
ttggcttacatttgc

SEQ ID NO: 1880691 - DNA, 15 bp, Homo sapiens
tggcttacatttgcc

SEQ ID NO: 1880692 - DNA, 15 bp, Homo sapiens
ggcttacatttgcca

SEQ ID NO: 1880693 - DNA, 15 bp, Homo sapiens
gcttacatttgccag

SEQ ID NO: 1880694 - DNA, 15 bp, Homo sapiens
cttacatttgccagc

SEQ ID NO: 1880695 - DNA, 15 bp, Homo sapiens
ttacatttgccagca

SEQ ID NO: 1880696 - DNA, 15 bp, Homo sapiens
tacatttgccagcat

SEQ ID NO: 1880697 - DNA, 15 bp, Homo sapiens
acatttgccagcatt

SEQ ID NO: 1880698 - DNA, 15 bp, Homo sapiens
catttgccagcatta

SEQ ID NO: 1880699 - DNA, 15 bp, Homo sapiens
atttgccagcattat

SEQ ID NO: 1880700 - DNA, 15 bp, Homo sapiens
tttgccagcattata

SEQ ID NO: 1880701 - DNA, 15 bp, Homo sapiens
ttgccagcattatac

SEQ ID NO: 1880702 - DNA, 15 bp, Homo sapiens
tgccagcattatact

SEQ ID NO: 1880703 - DNA, 15 bp, Homo sapiens
gccagcattatacta

SEQ ID NO: 1880704 - DNA, 15 bp, Homo sapiens
ccagcattatactaa

SEQ ID NO: 1880705 - DNA, 15 bp, Homo sapiens
cagcattatactaaa

SEQ ID NO: 1880706 - DNA, 15 bp, Homo sapiens
agcattatactaaat

SEQ ID NO: 1880707 - DNA, 15 bp, Homo sapiens
gcattatactaaata

SEQ ID NO: 1880708 - DNA, 15 bp, Homo sapiens
cattatactaaatag

SEQ ID NO: 1880709 - DNA, 15 bp, Homo sapiens
attatactaaatagg

SEQ ID NO: 1880710 - DNA, 15 bp, Homo sapiens
ttatactaaataggg

SEQ ID NO: 1880711 - DNA, 15 bp, Homo sapiens
tatactaaataggga

SEQ ID NO: 1880712 - DNA, 15 bp, Homo sapiens
atactaaatagggaa

SEQ ID NO: 1880713 - DNA, 15 bp, Homo sapiens
tactaaatagggaaa

SEQ ID NO: 1880714 - DNA, 15 bp, Homo sapiens
actaaatagggaaaa

SEQ ID NO: 1880715 - DNA, 15 bp, Homo sapiens
ctaaatagggaaaat

SEQ ID NO: 1880716 - DNA, 15 bp, Homo sapiens
taaatagggaaaatg

SEQ ID NO: 1880717 - DNA, 15 bp, Homo sapiens
aaatagggaaaatgt

SEQ ID NO: 1880718 - DNA, 15 bp, Homo sapiens
aatagggaaaatgtc

SEQ ID NO: 1880719 - DNA, 15 bp, Homo sapiens
atagggaaaatgtca

SEQ ID NO: 1880720 - DNA, 15 bp, Homo sapiens
tagggaaaatgtcag

SEQ ID NO: 1880721 - DNA, 15 bp, Homo sapiens
agggaaaatgtcagc

SEQ ID NO: 1880722 - DNA, 15 bp, Homo sapiens
gggaaaatgtcagct

SEQ ID NO: 1880723 - DNA, 15 bp, Homo sapiens
ggaaaatgtcagctg

SEQ ID NO: 1880724 - DNA, 15 bp, Homo sapiens
gaaaatgtcagctga

SEQ ID NO: 1880725 - DNA, 15 bp, Homo sapiens
aaaatgtcagctgag

SEQ ID NO: 1880726 - DNA, 15 bp, Homo sapiens
aaatgtcagctgagt

SEQ ID NO: 1880727 - DNA, 15 bp, Homo sapiens
aatgtcagctgagtc

SEQ ID NO: 1880728 - DNA, 15 bp, Homo sapiens
atgtcagctgagtcc

SEQ ID NO: 1880729 - DNA, 15 bp, Homo sapiens
tgtcagctgagtccc

SEQ ID NO: 1880730 - DNA, 15 bp, Homo sapiens
gtcagctgagtccca

SEQ ID NO: 1880731 - DNA, 15 bp, Homo sapiens
tcagctgagtcccac

SEQ ID NO: 1880732 - DNA, 15 bp, Homo sapiens
cagctgagtcccaca

SEQ ID NO: 1880733 - DNA, 15 bp, Homo sapiens
agctgagtcccacat

SEQ ID NO: 1880734 - DNA, 15 bp, Homo sapiens
gctgagtcccacatg

SEQ ID NO: 1880735 - DNA, 15 bp, Homo sapiens
ctgagtcccacatgt

SEQ ID NO: 1880736 - DNA, 15 bp, Homo sapiens
tgagtcccacatgta

SEQ ID NO: 1880737 - DNA, 15 bp, Homo sapiens
gagtcccacatgtag

SEQ ID NO: 1880738 - DNA, 15 bp, Homo sapiens
agtcccacatgtaga

SEQ ID NO: 1880739 - DNA, 15 bp, Homo sapiens
gtcccacatgtagat

SEQ ID NO: 1880740 - DNA, 15 bp, Homo sapiens
tcccacatgtagatt

SEQ ID NO: 1880741 - DNA, 15 bp, Homo sapiens
cccacatgtagattc

SEQ ID NO: 1880742 - DNA, 15 bp, Homo sapiens
ccacatgtagattcc

SEQ ID NO: 1880743 - DNA, 15 bp, Homo sapiens
cacatgtagattcct

SEQ ID NO: 1880744 - DNA, 15 bp, Homo sapiens
acatgtagattcctt

SEQ ID NO: 1880745 - DNA, 15 bp, Homo sapiens
catgtagattccttg

SEQ ID NO: 1880746 - DNA, 15 bp, Homo sapiens
atgtagattccttgt

SEQ ID NO: 1880747 - DNA, 15 bp, Homo sapiens
tgtagattccttgtc

SEQ ID NO: 1880748 - DNA, 15 bp, Homo sapiens
gtagattccttgtca

SEQ ID NO: 1880749 - DNA, 15 bp, Homo sapiens
tagattccttgtcat

SEQ ID NO: 1880750 - DNA, 15 bp, Homo sapiens
agattccttgtcatc

SEQ ID NO: 1880751 - DNA, 15 bp, Homo sapiens
gattccttgtcatct

SEQ ID NO: 1880752 - DNA, 15 bp, Homo sapiens
attccttgtcatctt

SEQ ID NO: 1880753 - DNA, 15 bp, Homo sapiens
ttccttgtcatcttg

SEQ ID NO: 1880754 - DNA, 15 bp, Homo sapiens
tccttgtcatcttgg

SEQ ID NO: 1880755 - DNA, 15 bp, Homo sapiens
ccttgtcatcttggt

SEQ ID NO: 1880756 - DNA, 15 bp, Homo sapiens
cttgtcatcttggtg

SEQ ID NO: 1880757 - DNA, 15 bp, Homo sapiens
ttgtcatcttggtgt

SEQ ID NO: 1880758 - DNA, 15 bp, Homo sapiens
tgtcatcttggtgtt

SEQ ID NO: 1880759 - DNA, 15 bp, Homo sapiens
gtcatcttggtgttt

SEQ ID NO: 1880760 - DNA, 15 bp, Homo sapiens
tcatcttggtgtttt

SEQ ID NO: 1880761 - DNA, 15 bp, Homo sapiens
catcttggtgttttc

SEQ ID NO: 1880762 - DNA, 15 bp, Homo sapiens
atcttggtgttttcc

SEQ ID NO: 1880763 - DNA, 15 bp, Homo sapiens
tcttggtgttttcct

SEQ ID NO: 1880764 - DNA, 15 bp, Homo sapiens
cttggtgttttcctg

SEQ ID NO: 1880765 - DNA, 15 bp, Homo sapiens
ttggtgttttcctga

SEQ ID NO: 1880766 - DNA, 15 bp, Homo sapiens
tggtgttttcctgag

SEQ ID NO: 1880767 - DNA, 15 bp, Homo sapiens
ggtgttttcctgagt

SEQ ID NO: 1880768 - DNA, 15 bp, Homo sapiens
gtgttttcctgagtg

SEQ ID NO: 1880769 - DNA, 15 bp, Homo sapiens
tgttttcctgagtgt

SEQ ID NO: 1880770 - DNA, 15 bp, Homo sapiens
gttttcctgagtgta

SEQ ID NO: 1880771 - DNA, 15 bp, Homo sapiens
ttttcctgagtgtaa

SEQ ID NO: 1880772 - DNA, 15 bp, Homo sapiens
tttcctgagtgtaaa

SEQ ID NO: 1880773 - DNA, 15 bp, Homo sapiens
ttcctgagtgtaaaa

SEQ ID NO: 1880774 - DNA, 15 bp, Homo sapiens
tcctgagtgtaaaat

SEQ ID NO: 1880775 - DNA, 15 bp, Homo sapiens
cctgagtgtaaaatt

SEQ ID NO: 1880776 - DNA, 15 bp, Homo sapiens
ctgagtgtaaaatta

SEQ ID NO: 1880777 - DNA, 15 bp, Homo sapiens
tgagtgtaaaattaa

SEQ ID NO: 1880778 - DNA, 15 bp, Homo sapiens
gagtgtaaaattaaa

SEQ ID NO: 1880779 - DNA, 15 bp, Homo sapiens
agtgtaaaattaaaa

SEQ ID NO: 1880780 - DNA, 15 bp, Homo sapiens
gtgtaaaattaaaac

SEQ ID NO: 1880781 - DNA, 15 bp, Homo sapiens
tgtaaaattaaaact

SEQ ID NO: 1880782 - DNA, 15 bp, Homo sapiens
gtaaaattaaaactc

SEQ ID NO: 1880783 - DNA, 15 bp, Homo sapiens
taaaattaaaactcc

SEQ ID NO: 1880784 - DNA, 15 bp, Homo sapiens
aaattaaaactccaa

SEQ ID NO: 1880785 - DNA, 15 bp, Homo sapiens
aattaaaactccaaa

SEQ ID NO: 1880786 - DNA, 15 bp, Homo sapiens
attaaaactccaaaa

SEQ ID NO: 1880787 - DNA, 15 bp, Homo sapiens
ttaaaactccaaaag

SEQ ID NO: 1880788 - DNA, 15 bp, Homo sapiens
taaaactccaaaaga

SEQ ID NO: 1880789 - DNA, 15 bp, Homo sapiens
aaaactccaaaagat

SEQ ID NO: 1880790 - DNA, 15 bp, Homo sapiens
aaactccaaaagatt

SEQ ID NO: 1880791 - DNA, 15 bp, Homo sapiens
aactccaaaagattc

SEQ ID NO: 1880792 - DNA, 15 bp, Homo sapiens
actccaaaagattct

SEQ ID NO: 1880793 - DNA, 15 bp, Homo sapiens
ctccaaaagattctg

SEQ ID NO: 1880794 - DNA, 15 bp, Homo sapiens
tccaaaagattctgg

SEQ ID NO: 1880795 - DNA, 15 bp, Homo sapiens
ccaaaagattctgga

SEQ ID NO: 1880796 - DNA, 15 bp, Homo sapiens
caaaagattctggac

SEQ ID NO: 1880797 - DNA, 15 bp, Homo sapiens
aaaagattctggaca

SEQ ID NO: 1880798 - DNA, 15 bp, Homo sapiens
aaagattctggacat

SEQ ID NO: 1880799 - DNA, 15 bp, Homo sapiens
aagattctggacatc

SEQ ID NO: 1880800 - DNA, 15 bp, Homo sapiens
agattctggacatca

SEQ ID NO: 1880801 - DNA, 15 bp, Homo sapiens
gattctggacatcag

SEQ ID NO: 1880802 - DNA, 15 bp, Homo sapiens
attctggacatcaga

SEQ ID NO: 1880803 - DNA, 15 bp, Homo sapiens
ttctggacatcagag

SEQ ID NO: 1880804 - DNA, 15 bp, Homo sapiens
tctggacatcagagc

SEQ ID NO: 1880805 - DNA, 15 bp, Homo sapiens
ctggacatcagagct

SEQ ID NO: 1880806 - DNA, 15 bp, Homo sapiens
tggacatcagagctc

SEQ ID NO: 1880807 - DNA, 15 bp, Homo sapiens
ggacatcagagctca

SEQ ID NO: 1880808 - DNA, 15 bp, Homo sapiens
gacatcagagctcat

SEQ ID NO: 1880809 - DNA, 15 bp, Homo sapiens
acatcagagctcatt

SEQ ID NO: 1880810 - DNA, 15 bp, Homo sapiens
catcagagctcattt

SEQ ID NO: 1880811 - DNA, 15 bp, Homo sapiens
atcagagctcatttt

SEQ ID NO: 1880812 - DNA, 15 bp, Homo sapiens
tcagagctcattttc

SEQ ID NO: 1880813 - DNA, 15 bp, Homo sapiens
cagagctcattttca

SEQ ID NO: 1880814 - DNA, 15 bp, Homo sapiens
agagctcattttcag

SEQ ID NO: 1880815 - DNA, 15 bp, Homo sapiens
gagctcattttcagt

SEQ ID NO: 1880816 - DNA, 15 bp, Homo sapiens
agctcattttcagtt

SEQ ID NO: 1880817 - DNA, 15 bp, Homo sapiens
gctcattttcagttt

SEQ ID NO: 1880818 - DNA, 15 bp, Homo sapiens
ctcattttcagtttt

SEQ ID NO: 1880819 - DNA, 15 bp, Homo sapiens
tcattttcagttttc

SEQ ID NO: 1880820 - DNA, 15 bp, Homo sapiens
cattttcagttttca

SEQ ID NO: 1880821 - DNA, 15 bp, Homo sapiens
attttcagttttcaa

SEQ ID NO: 1880822 - DNA, 15 bp, Homo sapiens
ttttcagttttcaac

SEQ ID NO: 1880823 - DNA, 15 bp, Homo sapiens
tttcagttttcaaca

SEQ ID NO: 1880824 - DNA, 15 bp, Homo sapiens
ttcagttttcaacaa

SEQ ID NO: 1880825 - DNA, 15 bp, Homo sapiens
tcagttttcaacaaa

SEQ ID NO: 1880826 - DNA, 15 bp, Homo sapiens
cagttttcaacaaat

SEQ ID NO: 1880827 - DNA, 15 bp, Homo sapiens
agttttcaacaaatc

SEQ ID NO: 1880828 - DNA, 15 bp, Homo sapiens
gttttcaacaaatct

SEQ ID NO: 1880829 - DNA, 15 bp, Homo sapiens
ttttcaacaaatcta

SEQ ID NO: 1880830 - DNA, 15 bp, Homo sapiens
tttcaacaaatctat

SEQ ID NO: 1880831 - DNA, 15 bp, Homo sapiens
ttcaacaaatctatc

SEQ ID NO: 1880832 - DNA, 15 bp, Homo sapiens
tcaacaaatctatct

SEQ ID NO: 1880833 - DNA, 15 bp, Homo sapiens
caacaaatctatctg

SEQ ID NO: 1880834 - DNA, 15 bp, Homo sapiens
aacaaatctatctga

SEQ ID NO: 1880835 - DNA, 15 bp, Homo sapiens
acaaatctatctgat

SEQ ID NO: 1880836 - DNA, 15 bp, Homo sapiens
caaatctatctgatg

SEQ ID NO: 1880837 - DNA, 15 bp, Homo sapiens
aaatctatctgatga

SEQ ID NO: 1880838 - DNA, 15 bp, Homo sapiens
aatctatctgatgag

SEQ ID NO: 1880839 - DNA, 15 bp, Homo sapiens
atctatctgatgaga

SEQ ID NO: 1880840 - DNA, 15 bp, Homo sapiens
tctatctgatgagaa

SEQ ID NO: 1880841 - DNA, 15 bp, Homo sapiens
ctatctgatgagaaa

SEQ ID NO: 1880842 - DNA, 15 bp, Homo sapiens
tatctgatgagaaaa

SEQ ID NO: 1880843 - DNA, 15 bp, Homo sapiens
atctgatgagaaaaa

SEQ ID NO: 1880844 - DNA, 15 bp, Homo sapiens
tctgatgagaaaaaa

SEQ ID NO: 1880845 - DNA, 15 bp, Homo sapiens
ctgatgagaaaaaaa

SEQ ID NO: 1880846 - DNA, 15 bp, Homo sapiens
tgatgagaaaaaaaa

SEQ ID NO: 1880847 - DNA, 15 bp, Homo sapiens
gatgagaaaaaaaat

SEQ ID NO: 1880848 - DNA, 15 bp, Homo sapiens
atgagaaaaaaaata

SEQ ID NO: 1880849 - DNA, 15 bp, Homo sapiens
tgagaaaaaaaatag

SEQ ID NO: 1880850 - DNA, 15 bp, Homo sapiens
gagaaaaaaaatagg

SEQ ID NO: 1880851 - DNA, 15 bp, Homo sapiens
agaaaaaaaataggc

SEQ ID NO: 1880852 - DNA, 15 bp, Homo sapiens
gaaaaaaaataggca

SEQ ID NO: 1880853 - DNA, 15 bp, Homo sapiens
aaaaaaaataggcaa

SEQ ID NO: 1880854 - DNA, 15 bp, Homo sapiens
aaaaaaataggcaag

SEQ ID NO: 1880855 - DNA, 15 bp, Homo sapiens
aaaaaataggcaagt

SEQ ID NO: 1880856 - DNA, 15 bp, Homo sapiens
aaaaataggcaagta

SEQ ID NO: 1880857 - DNA, 15 bp, Homo sapiens
aaaataggcaagtag

SEQ ID NO: 1880858 - DNA, 15 bp, Homo sapiens
aaataggcaagtagt

SEQ ID NO: 1880859 - DNA, 15 bp, Homo sapiens
aataggcaagtagta

SEQ ID NO: 1880860 - DNA, 15 bp, Homo sapiens
ataggcaagtagtaa

SEQ ID NO: 1880861 - DNA, 15 bp, Homo sapiens
taggcaagtagtaaa

SEQ ID NO: 1880862 - DNA, 15 bp, Homo sapiens
aggcaagtagtaaaa

SEQ ID NO: 1880863 - DNA, 15 bp, Homo sapiens
ggcaagtagtaaaat

SEQ ID NO: 1880864 - DNA, 15 bp, Homo sapiens
gcaagtagtaaaata

SEQ ID NO: 1880865 - DNA, 15 bp, Homo sapiens
caagtagtaaaatat

SEQ ID NO: 1880866 - DNA, 15 bp, Homo sapiens
aagtagtaaaatatg

SEQ ID NO: 1880867 - DNA, 15 bp, Homo sapiens
agtagtaaaatatgc

SEQ ID NO: 1880868 - DNA, 15 bp, Homo sapiens
gtagtaaaatatgca

SEQ ID NO: 1880869 - DNA, 15 bp, Homo sapiens
tagtaaaatatgcaa

SEQ ID NO: 1880870 - DNA, 15 bp, Homo sapiens
agtaaaatatgcaac

SEQ ID NO: 1880871 - DNA, 15 bp, Homo sapiens
gtaaaatatgcaact

SEQ ID NO: 1880872 - DNA, 15 bp, Homo sapiens
taaaatatgcaacta

SEQ ID NO: 1880873 - DNA, 15 bp, Homo sapiens
aaaatatgcaactaa

SEQ ID NO: 1880874 - DNA, 15 bp, Homo sapiens
aaatatgcaactaaa

SEQ ID NO: 1880875 - DNA, 15 bp, Homo sapiens
aatatgcaactaaaa

SEQ ID NO: 1880876 - DNA, 15 bp, Homo sapiens
atatgcaactaaaat

SEQ ID NO: 1880877 - DNA, 15 bp, Homo sapiens
tatgcaactaaaatt

SEQ ID NO: 1880878 - DNA, 15 bp, Homo sapiens
atgcaactaaaattt

SEQ ID NO: 1880879 - DNA, 15 bp, Homo sapiens
tgcaactaaaatttt

SEQ ID NO: 1880880 - DNA, 15 bp, Homo sapiens
gcaactaaaatttta

SEQ ID NO: 1880881 - DNA, 15 bp, Homo sapiens
caactaaaattttaa

SEQ ID NO: 1880882 - DNA, 15 bp, Homo sapiens
aactaaaattttaaa

SEQ ID NO: 1880883 - DNA, 15 bp, Homo sapiens
actaaaattttaaag

SEQ ID NO: 1880884 - DNA, 15 bp, Homo sapiens
ctaaaattttaaagt

SEQ ID NO: 1880885 - DNA, 15 bp, Homo sapiens
taaaattttaaagtc

SEQ ID NO: 1880886 - DNA, 15 bp, Homo sapiens
aaaattttaaagtct

SEQ ID NO: 1880887 - DNA, 15 bp, Homo sapiens
aaattttaaagtcta

SEQ ID NO: 1880888 - DNA, 15 bp, Homo sapiens
aattttaaagtctaa

SEQ ID NO: 1880889 - DNA, 15 bp, Homo sapiens
attttaaagtctaat

SEQ ID NO: 1880890 - DNA, 15 bp, Homo sapiens
ttttaaagtctaatt

SEQ ID NO: 1880891 - DNA, 15 bp, Homo sapiens
tttaaagtctaattt

SEQ ID NO: 1880892 - DNA, 15 bp, Homo sapiens
ttaaagtctaatttt

SEQ ID NO: 1880893 - DNA, 15 bp, Homo sapiens
taaagtctaattttt

SEQ ID NO: 1880894 - DNA, 15 bp, Homo sapiens
aaagtctaattttta

SEQ ID NO: 1880895 - DNA, 15 bp, Homo sapiens
aagtctaatttttag

SEQ ID NO: 1880896 - DNA, 15 bp, Homo sapiens
agtctaatttttagc

SEQ ID NO: 1880897 - DNA, 15 bp, Homo sapiens
gtctaatttttagcc

SEQ ID NO: 1880898 - DNA, 15 bp, Homo sapiens
tctaatttttagcca

SEQ ID NO: 1880899 - DNA, 15 bp, Homo sapiens
ctaatttttagccag

SEQ ID NO: 1880900 - DNA, 15 bp, Homo sapiens
taatttttagccaga

SEQ ID NO: 1880901 - DNA, 15 bp, Homo sapiens
aatttttagccagat

SEQ ID NO: 1880902 - DNA, 15 bp, Homo sapiens
atttttagccagata

SEQ ID NO: 1880903 - DNA, 15 bp, Homo sapiens
tttttagccagataa

SEQ ID NO: 1880904 - DNA, 15 bp, Homo sapiens
ttttagccagataat

SEQ ID NO: 1880905 - DNA, 15 bp, Homo sapiens
tttagccagataatt

SEQ ID NO: 1880906 - DNA, 15 bp, Homo sapiens
ttagccagataatta

SEQ ID NO: 1880907 - DNA, 15 bp, Homo sapiens
tagccagataattag

SEQ ID NO: 1880908 - DNA, 15 bp, Homo sapiens
agccagataattagg

SEQ ID NO: 1880909 - DNA, 15 bp, Homo sapiens
gccagataattaggt

SEQ ID NO: 1880910 - DNA, 15 bp, Homo sapiens
ccagataattaggtt

SEQ ID NO: 1880911 - DNA, 15 bp, Homo sapiens
cagataattaggttg

SEQ ID NO: 1880912 - DNA, 15 bp, Homo sapiens
agataattaggttgc

SEQ ID NO: 1880913 - DNA, 15 bp, Homo sapiens
gataattaggttgca

SEQ ID NO: 1880914 - DNA, 15 bp, Homo sapiens
ataattaggttgcaa

SEQ ID NO: 1880915 - DNA, 15 bp, Homo sapiens
taattaggttgcaaa

SEQ ID NO: 1880916 - DNA, 15 bp, Homo sapiens
aattaggttgcaaac

SEQ ID NO: 1880917 - DNA, 15 bp, Homo sapiens
attaggttgcaaact

SEQ ID NO: 1880918 - DNA, 15 bp, Homo sapiens
ttaggttgcaaactc

SEQ ID NO: 1880919 - DNA, 15 bp, Homo sapiens
taggttgcaaactca

SEQ ID NO: 1880920 - DNA, 15 bp, Homo sapiens
aggttgcaaactcat

SEQ ID NO: 1880921 - DNA, 15 bp, Homo sapiens
ggttgcaaactcatt

SEQ ID NO: 1880922 - DNA, 15 bp, Homo sapiens
gttgcaaactcattg

SEQ ID NO: 1880923 - DNA, 15 bp, Homo sapiens
ttgcaaactcattga

SEQ ID NO: 1880924 - DNA, 15 bp, Homo sapiens
tgcaaactcattgaa

SEQ ID NO: 1880925 - DNA, 15 bp, Homo sapiens
gcaaactcattgaaa

SEQ ID NO: 1880926 - DNA, 15 bp, Homo sapiens
caaactcattgaaag

SEQ ID NO: 1880927 - DNA, 15 bp, Homo sapiens
aaactcattgaaagc

SEQ ID NO: 1880928 - DNA, 15 bp, Homo sapiens
aactcattgaaagca

SEQ ID NO: 1880929 - DNA, 15 bp, Homo sapiens
actcattgaaagcag

SEQ ID NO: 1880930 - DNA, 15 bp, Homo sapiens
ctcattgaaagcagc

SEQ ID NO: 1880931 - DNA, 15 bp, Homo sapiens
tcattgaaagcagca

SEQ ID NO: 1880932 - DNA, 15 bp, Homo sapiens
cattgaaagcagcaa

SEQ ID NO: 1880933 - DNA, 15 bp, Homo sapiens
attgaaagcagcaac

SEQ ID NO: 1880934 - DNA, 15 bp, Homo sapiens
ttgaaagcagcaacg

SEQ ID NO: 1880935 - DNA, 15 bp, Homo sapiens
tgaaagcagcaacga

SEQ ID NO: 1880936 - DNA, 15 bp, Homo sapiens
gaaagcagcaacgat

SEQ ID NO: 1880937 - DNA, 15 bp, Homo sapiens
aaagcagcaacgatg

SEQ ID NO: 1880938 - DNA, 15 bp, Homo sapiens
aagcagcaacgatgt

SEQ ID NO: 1880939 - DNA, 15 bp, Homo sapiens
agcagcaacgatgtt

SEQ ID NO: 1880940 - DNA, 15 bp, Homo sapiens
gcagcaacgatgttt

SEQ ID NO: 1880941 - DNA, 15 bp, Homo sapiens
cagcaacgatgtttt

SEQ ID NO: 1880942 - DNA, 15 bp, Homo sapiens
agcaacgatgttttt

SEQ ID NO: 1880943 - DNA, 15 bp, Homo sapiens
gcaacgatgtttttt

SEQ ID NO: 1880944 - DNA, 15 bp, Homo sapiens
caacgatgtttttta

SEQ ID NO: 1880945 - DNA, 15 bp, Homo sapiens
aacgatgttttttat

SEQ ID NO: 1880946 - DNA, 15 bp, Homo sapiens
acgatgttttttata

SEQ ID NO: 1880947 - DNA, 15 bp, Homo sapiens
cgatgttttttataa

SEQ ID NO: 1880948 - DNA, 15 bp, Homo sapiens
gatgttttttataaa

SEQ ID NO: 1880949 - DNA, 15 bp, Homo sapiens
atgttttttataaat

SEQ ID NO: 1880950 - DNA, 15 bp, Homo sapiens
tgttttttataaatc

SEQ ID NO: 1880951 - DNA, 15 bp, Homo sapiens
gttttttataaatct

SEQ ID NO: 1880952 - DNA, 15 bp, Homo sapiens
ttttttataaatctc

SEQ ID NO: 1880953 - DNA, 15 bp, Homo sapiens
tttttataaatctca

SEQ ID NO: 1880954 - DNA, 15 bp, Homo sapiens
ttttataaatctcag

SEQ ID NO: 1880955 - DNA, 15 bp, Homo sapiens
tttataaatctcagg

SEQ ID NO: 1880956 - DNA, 15 bp, Homo sapiens
ttataaatctcaggt

SEQ ID NO: 1880957 - DNA, 15 bp, Homo sapiens
tataaatctcaggtg

SEQ ID NO: 1880958 - DNA, 15 bp, Homo sapiens
ataaatctcaggtga

SEQ ID NO: 1880959 - DNA, 15 bp, Homo sapiens
taaatctcaggtgac

SEQ ID NO: 1880960 - DNA, 15 bp, Homo sapiens
aaatctcaggtgact

SEQ ID NO: 1880961 - DNA, 15 bp, Homo sapiens
aatctcaggtgacta

SEQ ID NO: 1880962 - DNA, 15 bp, Homo sapiens
atctcaggtgactag

SEQ ID NO: 1880963 - DNA, 15 bp, Homo sapiens
tctcaggtgactaga

SEQ ID NO: 1880964 - DNA, 15 bp, Homo sapiens
ctcaggtgactagaa

SEQ ID NO: 1880965 - DNA, 15 bp, Homo sapiens
tcaggtgactagaac

SEQ ID NO: 1880966 - DNA, 15 bp, Homo sapiens
caggtgactagaact

SEQ ID NO: 1880967 - DNA, 15 bp, Homo sapiens
aggtgactagaacta

SEQ ID NO: 1880968 - DNA, 15 bp, Homo sapiens
ggtgactagaactat

SEQ ID NO: 1880969 - DNA, 15 bp, Homo sapiens
gtgactagaactata

SEQ ID NO: 1880970 - DNA, 15 bp, Homo sapiens
tgactagaactatat

SEQ ID NO: 1880971 - DNA, 15 bp, Homo sapiens
gactagaactatatt

SEQ ID NO: 1880972 - DNA, 15 bp, Homo sapiens
actagaactatatta

SEQ ID NO: 1880973 - DNA, 15 bp, Homo sapiens
ctagaactatattaa

SEQ ID NO: 1880974 - DNA, 15 bp, Homo sapiens
tagaactatattaag

SEQ ID NO: 1880975 - DNA, 15 bp, Homo sapiens
agaactatattaagt

SEQ ID NO: 1880976 - DNA, 15 bp, Homo sapiens
gaactatattaagta

SEQ ID NO: 1880977 - DNA, 15 bp, Homo sapiens
aactatattaagtat

SEQ ID NO: 1880978 - DNA, 15 bp, Homo sapiens
actatattaagtata

SEQ ID NO: 1880979 - DNA, 15 bp, Homo sapiens
ctatattaagtatat

SEQ ID NO: 1880980 - DNA, 15 bp, Homo sapiens
tatattaagtatata

SEQ ID NO: 1880981 - DNA, 15 bp, Homo sapiens
atattaagtatatac

SEQ ID NO: 1880982 - DNA, 15 bp, Homo sapiens
tattaagtatataca

SEQ ID NO: 1880983 - DNA, 15 bp, Homo sapiens
attaagtatatacaa

SEQ ID NO: 1880984 - DNA, 15 bp, Homo sapiens
ttaagtatatacaat

SEQ ID NO: 1880985 - DNA, 15 bp, Homo sapiens
taagtatatacaata

SEQ ID NO: 1880986 - DNA, 15 bp, Homo sapiens
aagtatatacaatag

SEQ ID NO: 1880987 - DNA, 15 bp, Homo sapiens
agtatatacaatagg

SEQ ID NO: 1880988 - DNA, 15 bp, Homo sapiens
gtatatacaataggt

SEQ ID NO: 1880989 - DNA, 15 bp, Homo sapiens
tatatacaataggtt

SEQ ID NO: 1880990 - DNA, 15 bp, Homo sapiens
atatacaataggttt

SEQ ID NO: 1880991 - DNA, 15 bp, Homo sapiens
tatacaataggtttt

SEQ ID NO: 1880992 - DNA, 15 bp, Homo sapiens
atacaataggttttt

SEQ ID NO: 1880993 - DNA, 15 bp, Homo sapiens
tacaataggtttttt

SEQ ID NO: 1880994 - DNA, 15 bp, Homo sapiens
acaataggtttttta

SEQ ID NO: 1880995 - DNA, 15 bp, Homo sapiens
caataggttttttaa

SEQ ID NO: 1880996 - DNA, 15 bp, Homo sapiens
aataggttttttaaa

SEQ ID NO: 1880997 - DNA, 15 bp, Homo sapiens
ataggttttttaaaa

SEQ ID NO: 1880998 - DNA, 15 bp, Homo sapiens
taggttttttaaaaa

SEQ ID NO: 1880999 - DNA, 15 bp, Homo sapiens
aggttttttaaaaac

SEQ ID NO: 1881000 - DNA, 15 bp, Homo sapiens
ggttttttaaaaaca

SEQ ID NO: 1881001 - DNA, 15 bp, Homo sapiens
gttttttaaaaacaa

SEQ ID NO: 1881002 - DNA, 15 bp, Homo sapiens
ttttttaaaaacaac

SEQ ID NO: 1881003 - DNA, 15 bp, Homo sapiens
tttttaaaaacaacc

SEQ ID NO: 1881004 - DNA, 15 bp, Homo sapiens
ttttaaaaacaacct

SEQ ID NO: 1881005 - DNA, 15 bp, Homo sapiens
tttaaaaacaacctc

SEQ ID NO: 1881006 - DNA, 15 bp, Homo sapiens
ttaaaaacaacctct

SEQ ID NO: 1881007 - DNA, 15 bp, Homo sapiens
taaaaacaacctctt

SEQ ID NO: 1881008 - DNA, 15 bp, Homo sapiens
aaaaacaacctcttg

SEQ ID NO: 1881009 - DNA, 15 bp, Homo sapiens
aaaacaacctcttga

SEQ ID NO: 1881010 - DNA, 15 bp, Homo sapiens
aaacaacctcttgat

SEQ ID NO: 1881011 - DNA, 15 bp, Homo sapiens
aacaacctcttgatt

SEQ ID NO: 1881012 - DNA, 15 bp, Homo sapiens
acaacctcttgatta

SEQ ID NO: 1881013 - DNA, 15 bp, Homo sapiens
caacctcttgattaa

SEQ ID NO: 1881014 - DNA, 15 bp, Homo sapiens
aacctcttgattaat

SEQ ID NO: 1881015 - DNA, 15 bp, Homo sapiens
acctcttgattaata

SEQ ID NO: 1881016 - DNA, 15 bp, Homo sapiens
cctcttgattaatat

SEQ ID NO: 1881017 - DNA, 15 bp, Homo sapiens
ctcttgattaatata

SEQ ID NO: 1881018 - DNA, 15 bp, Homo sapiens
tcttgattaatatat

SEQ ID NO: 1881019 - DNA, 15 bp, Homo sapiens
cttgattaatatatg

SEQ ID NO: 1881020 - DNA, 15 bp, Homo sapiens
ttgattaatatatgc

SEQ ID NO: 1881021 - DNA, 15 bp, Homo sapiens
tgattaatatatgcc

SEQ ID NO: 1881022 - DNA, 15 bp, Homo sapiens
gattaatatatgccc

SEQ ID NO: 1881023 - DNA, 15 bp, Homo sapiens
attaatatatgccct

SEQ ID NO: 1881024 - DNA, 15 bp, Homo sapiens
ttaatatatgccctc

SEQ ID NO: 1881025 - DNA, 15 bp, Homo sapiens
taatatatgccctcc

SEQ ID NO: 1881026 - DNA, 15 bp, Homo sapiens
aatatatgccctcct

SEQ ID NO: 1881027 - DNA, 15 bp, Homo sapiens
atatatgccctcctc

SEQ ID NO: 1881028 - DNA, 15 bp, Homo sapiens
tatatgccctcctcc

SEQ ID NO: 1881029 - DNA, 15 bp, Homo sapiens
atatgccctcctcct

SEQ ID NO: 1881030 - DNA, 15 bp, Homo sapiens
tatgccctcctcctt

SEQ ID NO: 1881031 - DNA, 15 bp, Homo sapiens
atgccctcctcctta

SEQ ID NO: 1881032 - DNA, 15 bp, Homo sapiens
tgccctcctccttac

SEQ ID NO: 1881033 - DNA, 15 bp, Homo sapiens
gccctcctccttacc

SEQ ID NO: 1881034 - DNA, 15 bp, Homo sapiens
ccctcctccttaccc

SEQ ID NO: 1881035 - DNA, 15 bp, Homo sapiens
cctcctccttaccct

SEQ ID NO: 1881036 - DNA, 15 bp, Homo sapiens
ctcctccttaccctg

SEQ ID NO: 1881037 - DNA, 15 bp, Homo sapiens
tcctccttaccctgt

SEQ ID NO: 1881038 - DNA, 15 bp, Homo sapiens
cctccttaccctgtc

SEQ ID NO: 1881039 - DNA, 15 bp, Homo sapiens
ctccttaccctgtcc

SEQ ID NO: 1881040 - DNA, 15 bp, Homo sapiens
tccttaccctgtccc

SEQ ID NO: 1881041 - DNA, 15 bp, Homo sapiens
ccttaccctgtcccc

SEQ ID NO: 1881042 - DNA, 15 bp, Homo sapiens
cttaccctgtcccct

SEQ ID NO: 1881043 - DNA, 15 bp, Homo sapiens
ttaccctgtcccctg

SEQ ID NO: 1881044 - DNA, 15 bp, Homo sapiens
taccctgtcccctga

SEQ ID NO: 1881045 - DNA, 15 bp, Homo sapiens
accctgtcccctgag

SEQ ID NO: 1881046 - DNA, 15 bp, Homo sapiens
ccctgtcccctgagg

SEQ ID NO: 1881047 - DNA, 15 bp, Homo sapiens
cctgtcccctgaggt

SEQ ID NO: 1881048 - DNA, 15 bp, Homo sapiens
ctgtcccctgaggta

SEQ ID NO: 1881049 - DNA, 15 bp, Homo sapiens
tgtcccctgaggtaa

SEQ ID NO: 1881050 - DNA, 15 bp, Homo sapiens
gtcccctgaggtaaa

SEQ ID NO: 1881051 - DNA, 15 bp, Homo sapiens
tcccctgaggtaaag

SEQ ID NO: 1881052 - DNA, 15 bp, Homo sapiens
cccctgaggtaaagc

SEQ ID NO: 1881053 - DNA, 15 bp, Homo sapiens
ccctgaggtaaagcc

SEQ ID NO: 1881054 - DNA, 15 bp, Homo sapiens
cctgaggtaaagcca

SEQ ID NO: 1881055 - DNA, 15 bp, Homo sapiens
ctgaggtaaagccat

SEQ ID NO: 1881056 - DNA, 15 bp, Homo sapiens
tgaggtaaagccata

SEQ ID NO: 1881057 - DNA, 15 bp, Homo sapiens
gaggtaaagccatat

SEQ ID NO: 1881058 - DNA, 15 bp, Homo sapiens
aggtaaagccatatt

SEQ ID NO: 1881059 - DNA, 15 bp, Homo sapiens
ggtaaagccatatta

SEQ ID NO: 1881060 - DNA, 15 bp, Homo sapiens
gtaaagccatattag

SEQ ID NO: 1881061 - DNA, 15 bp, Homo sapiens
taaagccatattagg

SEQ ID NO: 1881062 - DNA, 15 bp, Homo sapiens
aaagccatattaggg

SEQ ID NO: 1881063 - DNA, 15 bp, Homo sapiens
aagccatattaggga

SEQ ID NO: 1881064 - DNA, 15 bp, Homo sapiens
agccatattagggaa

SEQ ID NO: 1881065 - DNA, 15 bp, Homo sapiens
gccatattagggaaa

SEQ ID NO: 1881066 - DNA, 15 bp, Homo sapiens
ccatattagggaaat

SEQ ID NO: 1881067 - DNA, 15 bp, Homo sapiens
catattagggaaatc

SEQ ID NO: 1881068 - DNA, 15 bp, Homo sapiens
atattagggaaatca

SEQ ID NO: 1881069 - DNA, 15 bp, Homo sapiens
tattagggaaatcaa

SEQ ID NO: 1881070 - DNA, 15 bp, Homo sapiens
attagggaaatcaag

SEQ ID NO: 1881071 - DNA, 15 bp, Homo sapiens
ttagggaaatcaagt

SEQ ID NO: 1881072 - DNA, 15 bp, Homo sapiens
tagggaaatcaagta

SEQ ID NO: 1881073 - DNA, 15 bp, Homo sapiens
agggaaatcaagtaa

SEQ ID NO: 1881074 - DNA, 15 bp, Homo sapiens
gggaaatcaagtaaa

SEQ ID NO: 1881075 - DNA, 15 bp, Homo sapiens
ggaaatcaagtaaat

SEQ ID NO: 1881076 - DNA, 15 bp, Homo sapiens
gaaatcaagtaaatg

SEQ ID NO: 1881077 - DNA, 15 bp, Homo sapiens
aaatcaagtaaatgc

SEQ ID NO: 1881078 - DNA, 15 bp, Homo sapiens
aatcaagtaaatgcc

SEQ ID NO: 1881079 - DNA, 15 bp, Homo sapiens
atcaagtaaatgcct

SEQ ID NO: 1881080 - DNA, 15 bp, Homo sapiens
tcaagtaaatgcctt

SEQ ID NO: 1881081 - DNA, 15 bp, Homo sapiens
caagtaaatgcctta

SEQ ID NO: 1881082 - DNA, 15 bp, Homo sapiens
aagtaaatgccttat

SEQ ID NO: 1881083 - DNA, 15 bp, Homo sapiens
agtaaatgccttatc

SEQ ID NO: 1881084 - DNA, 15 bp, Homo sapiens
gtaaatgccttatct

SEQ ID NO: 1881085 - DNA, 15 bp, Homo sapiens
taaatgccttatctt

SEQ ID NO: 1881086 - DNA, 15 bp, Homo sapiens
aaatgccttatcttt

SEQ ID NO: 1881087 - DNA, 15 bp, Homo sapiens
aatgccttatcttta

SEQ ID NO: 1881088 - DNA, 15 bp, Homo sapiens
atgccttatctttat

SEQ ID NO: 1881089 - DNA, 15 bp, Homo sapiens
tgccttatctttatt

SEQ ID NO: 1881090 - DNA, 15 bp, Homo sapiens
gccttatctttattt

SEQ ID NO: 1881091 - DNA, 15 bp, Homo sapiens
ccttatctttattta

SEQ ID NO: 1881092 - DNA, 15 bp, Homo sapiens
cttatctttatttac

SEQ ID NO: 1881093 - DNA, 15 bp, Homo sapiens
ttatctttatttacc

SEQ ID NO: 1881094 - DNA, 15 bp, Homo sapiens
tatctttatttacca

SEQ ID NO: 1881095 - DNA, 15 bp, Homo sapiens
atctttatttaccag

SEQ ID NO: 1881096 - DNA, 15 bp, Homo sapiens
tctttatttaccaga

SEQ ID NO: 1881097 - DNA, 15 bp, Homo sapiens
ctttatttaccagac

SEQ ID NO: 1881098 - DNA, 15 bp, Homo sapiens
tttatttaccagact

SEQ ID NO: 1881099 - DNA, 15 bp, Homo sapiens
ttatttaccagactg

SEQ ID NO: 1881100 - DNA, 15 bp, Homo sapiens
tatttaccagactgc

SEQ ID NO: 1881101 - DNA, 15 bp, Homo sapiens
atttaccagactgct

SEQ ID NO: 1881102 - DNA, 15 bp, Homo sapiens
tttaccagactgctt

SEQ ID NO: 1881103 - DNA, 15 bp, Homo sapiens
ttaccagactgcttg

SEQ ID NO: 1881104 - DNA, 15 bp, Homo sapiens
taccagactgcttga

SEQ ID NO: 1881105 - DNA, 15 bp, Homo sapiens
accagactgcttgac

SEQ ID NO: 1881106 - DNA, 15 bp, Homo sapiens
ccagactgcttgact

SEQ ID NO: 1881107 - DNA, 15 bp, Homo sapiens
cagactgcttgactg

SEQ ID NO: 1881108 - DNA, 15 bp, Homo sapiens
agactgcttgactgg

SEQ ID NO: 1881109 - DNA, 15 bp, Homo sapiens
gactgcttgactggg

SEQ ID NO: 1881110 - DNA, 15 bp, Homo sapiens
actgcttgactgggg

SEQ ID NO: 1881111 - DNA, 15 bp, Homo sapiens
ctgcttgactgggga

SEQ ID NO: 1881112 - DNA, 15 bp, Homo sapiens
tgcttgactggggat

SEQ ID NO: 1881113 - DNA, 15 bp, Homo sapiens
gcttgactggggatt

SEQ ID NO: 1881114 - DNA, 15 bp, Homo sapiens
cttgactggggattt

SEQ ID NO: 1881115 - DNA, 15 bp, Homo sapiens
ttgactggggattta

SEQ ID NO: 1881116 - DNA, 15 bp, Homo sapiens
tgactggggatttag

SEQ ID NO: 1881117 - DNA, 15 bp, Homo sapiens
gactggggatttagg

SEQ ID NO: 1881118 - DNA, 15 bp, Homo sapiens
actggggatttaggg

SEQ ID NO: 1881119 - DNA, 15 bp, Homo sapiens
ctggggatttagggt

SEQ ID NO: 1881120 - DNA, 15 bp, Homo sapiens
tggggatttagggtt

SEQ ID NO: 1881121 - DNA, 15 bp, Homo sapiens
ggggatttagggttc

SEQ ID NO: 1881122 - DNA, 15 bp, Homo sapiens
gggatttagggttcc

SEQ ID NO: 1881123 - DNA, 15 bp, Homo sapiens
ggatttagggttcca

SEQ ID NO: 1881124 - DNA, 15 bp, Homo sapiens
gatttagggttccag

SEQ ID NO: 1881125 - DNA, 15 bp, Homo sapiens
atttagggttccaga

SEQ ID NO: 1881126 - DNA, 15 bp, Homo sapiens
tttagggttccagaa

SEQ ID NO: 1881127 - DNA, 15 bp, Homo sapiens
ttagggttccagaaa

SEQ ID NO: 1881128 - DNA, 15 bp, Homo sapiens
tagggttccagaaac

SEQ ID NO: 1881129 - DNA, 15 bp, Homo sapiens
agggttccagaaacc

SEQ ID NO: 1881130 - DNA, 15 bp, Homo sapiens
gggttccagaaacca

SEQ ID NO: 1881131 - DNA, 15 bp, Homo sapiens
ggttccagaaaccac

SEQ ID NO: 1881132 - DNA, 15 bp, Homo sapiens
gttccagaaaccaca

SEQ ID NO: 1881133 - DNA, 15 bp, Homo sapiens
ttccagaaaccacac

SEQ ID NO: 1881134 - DNA, 15 bp, Homo sapiens
tccagaaaccacaca

SEQ ID NO: 1881135 - DNA, 15 bp, Homo sapiens
ccagaaaccacacaa

SEQ ID NO: 1881136 - DNA, 15 bp, Homo sapiens
cagaaaccacacaag

SEQ ID NO: 1881137 - DNA, 15 bp, Homo sapiens
agaaaccacacaagt

SEQ ID NO: 1881138 - DNA, 15 bp, Homo sapiens
gaaaccacacaagtt

SEQ ID NO: 1881139 - DNA, 15 bp, Homo sapiens
aaaccacacaagttt

SEQ ID NO: 1881140 - DNA, 15 bp, Homo sapiens
aaccacacaagtttt

SEQ ID NO: 1881141 - DNA, 15 bp, Homo sapiens
accacacaagtttta

SEQ ID NO: 1881142 - DNA, 15 bp, Homo sapiens
ccacacaagttttaa

SEQ ID NO: 1881143 - DNA, 15 bp, Homo sapiens
cacacaagttttaat

SEQ ID NO: 1881144 - DNA, 15 bp, Homo sapiens
acacaagttttaatt

SEQ ID NO: 1881145 - DNA, 15 bp, Homo sapiens
cacaagttttaattc

SEQ ID NO: 1881146 - DNA, 15 bp, Homo sapiens
acaagttttaattcc

SEQ ID NO: 1881147 - DNA, 15 bp, Homo sapiens
caagttttaattcca

SEQ ID NO: 1881148 - DNA, 15 bp, Homo sapiens
aagttttaattccac

SEQ ID NO: 1881149 - DNA, 15 bp, Homo sapiens
agttttaattccaca

SEQ ID NO: 1881150 - DNA, 15 bp, Homo sapiens
gttttaattccacag

SEQ ID NO: 1881151 - DNA, 15 bp, Homo sapiens
ttttaattccacaga

SEQ ID NO: 1881152 - DNA, 15 bp, Homo sapiens
tttaattccacagaa

SEQ ID NO: 1881153 - DNA, 15 bp, Homo sapiens
ttaattccacagaat

SEQ ID NO: 1881154 - DNA, 15 bp, Homo sapiens
taattccacagaatc

SEQ ID NO: 1881155 - DNA, 15 bp, Homo sapiens
aattccacagaatcc

SEQ ID NO: 1881156 - DNA, 15 bp, Homo sapiens
attccacagaatccc

SEQ ID NO: 1881157 - DNA, 15 bp, Homo sapiens
ttccacagaatcccc

SEQ ID NO: 1881158 - DNA, 15 bp, Homo sapiens
attgggaatgtcagg

SEQ ID NO: 1881159 - DNA, 15 bp, Homo sapiens
ttgggaatgtcaggc

SEQ ID NO: 1881160 - DNA, 15 bp, Homo sapiens
tgggaatgtcaggcc

SEQ ID NO: 1881161 - DNA, 15 bp, Homo sapiens
gggaatgtcaggccc

SEQ ID NO: 1881162 - DNA, 15 bp, Homo sapiens
ggaatgtcaggccct

SEQ ID NO: 1881163 - DNA, 15 bp, Homo sapiens
gaatgtcaggcccta

SEQ ID NO: 1881164 - DNA, 15 bp, Homo sapiens
aatgtcaggccctaa

SEQ ID NO: 1881165 - DNA, 15 bp, Homo sapiens
atgtcaggccctaaa

SEQ ID NO: 1881166 - DNA, 15 bp, Homo sapiens
tgtcaggccctaaag

SEQ ID NO: 1881167 - DNA, 15 bp, Homo sapiens
gtcaggccctaaaga

SEQ ID NO: 1881168 - DNA, 15 bp, Homo sapiens
tcaggccctaaagag

SEQ ID NO: 1881169 - DNA, 15 bp, Homo sapiens
caggccctaaagaga

SEQ ID NO: 1881170 - DNA, 15 bp, Homo sapiens
aggccctaaagagag

SEQ ID NO: 1881171 - DNA, 15 bp, Homo sapiens
ggccctaaagagagc

SEQ ID NO: 1881172 - DNA, 15 bp, Homo sapiens
gccctaaagagagcc

SEQ ID NO: 1881173 - DNA, 15 bp, Homo sapiens
ccctaaagagagcct

SEQ ID NO: 1881174 - DNA, 15 bp, Homo sapiens
cctaaagagagcctg

SEQ ID NO: 1881175 - DNA, 15 bp, Homo sapiens
ctaaagagagcctga

SEQ ID NO: 1881176 - DNA, 15 bp, Homo sapiens
taaagagagcctgag

SEQ ID NO: 1881177 - DNA, 15 bp, Homo sapiens
aaagagagcctgagt

SEQ ID NO: 1881178 - DNA, 15 bp, Homo sapiens
aagagagcctgagta

SEQ ID NO: 1881179 - DNA, 15 bp, Homo sapiens
agagagcctgagtag

SEQ ID NO: 1881180 - DNA, 15 bp, Homo sapiens
gagagcctgagtagc

SEQ ID NO: 1881181 - DNA, 15 bp, Homo sapiens
agagcctgagtagca

SEQ ID NO: 1881182 - DNA, 15 bp, Homo sapiens
gagcctgagtagcat

SEQ ID NO: 1881183 - DNA, 15 bp, Homo sapiens
agcctgagtagcatg

SEQ ID NO: 1881184 - DNA, 15 bp, Homo sapiens
gcctgagtagcatga

SEQ ID NO: 1881185 - DNA, 15 bp, Homo sapiens
cctgagtagcatgaa

SEQ ID NO: 1881186 - DNA, 15 bp, Homo sapiens
ctgagtagcatgaag

SEQ ID NO: 1881187 - DNA, 15 bp, Homo sapiens
tgagtagcatgaagc

SEQ ID NO: 1881188 - DNA, 15 bp, Homo sapiens
gagtagcatgaagca

SEQ ID NO: 1881189 - DNA, 15 bp, Homo sapiens
agtagcatgaagcat

SEQ ID NO: 1881190 - DNA, 15 bp, Homo sapiens
gtagcatgaagcata

SEQ ID NO: 1881191 - DNA, 15 bp, Homo sapiens
tagcatgaagcataa

SEQ ID NO: 1881192 - DNA, 15 bp, Homo sapiens
agcatgaagcataag

SEQ ID NO: 1881193 - DNA, 15 bp, Homo sapiens
gcatgaagcataagg

SEQ ID NO: 1881194 - DNA, 15 bp, Homo sapiens
catgaagcataaggg

SEQ ID NO: 1881195 - DNA, 15 bp, Homo sapiens
atgaagcataaggga

SEQ ID NO: 1881196 - DNA, 15 bp, Homo sapiens
tgaagcataagggac

SEQ ID NO: 1881197 - DNA, 15 bp, Homo sapiens
gaagcataagggact

SEQ ID NO: 1881198 - DNA, 15 bp, Homo sapiens
aagcataagggactg

SEQ ID NO: 1881199 - DNA, 15 bp, Homo sapiens
agcataagggactgt

SEQ ID NO: 1881200 - DNA, 15 bp, Homo sapiens
gcataagggactgtg

SEQ ID NO: 1881201 - DNA, 15 bp, Homo sapiens
cataagggactgtgt

SEQ ID NO: 1881202 - DNA, 15 bp, Homo sapiens
ataagggactgtgta

SEQ ID NO: 1881203 - DNA, 15 bp, Homo sapiens
taagggactgtgtat

SEQ ID NO: 1881204 - DNA, 15 bp, Homo sapiens
aagggactgtgtatg

SEQ ID NO: 1881205 - DNA, 15 bp, Homo sapiens
agggactgtgtatgc

SEQ ID NO: 1881206 - DNA, 15 bp, Homo sapiens
gggactgtgtatgcc

SEQ ID NO: 1881207 - DNA, 15 bp, Homo sapiens
ggactgtgtatgcca

SEQ ID NO: 1881208 - DNA, 15 bp, Homo sapiens
gactgtgtatgccat

SEQ ID NO: 1881209 - DNA, 15 bp, Homo sapiens
actgtgtatgccatg

SEQ ID NO: 1881210 - DNA, 15 bp, Homo sapiens
ctgtgtatgccatga

SEQ ID NO: 1881211 - DNA, 15 bp, Homo sapiens
tgtgtatgccatgag

SEQ ID NO: 1881212 - DNA, 15 bp, Homo sapiens
gtgtatgccatgagg

SEQ ID NO: 1881213 - DNA, 15 bp, Homo sapiens
tgtatgccatgaggt

SEQ ID NO: 1881214 - DNA, 15 bp, Homo sapiens
gtatgccatgaggtg

SEQ ID NO: 1881215 - DNA, 15 bp, Homo sapiens
tatgccatgaggtga

SEQ ID NO: 1881216 - DNA, 15 bp, Homo sapiens
atgccatgaggtgac

SEQ ID NO: 1881217 - DNA, 15 bp, Homo sapiens
tgccatgaggtgact

SEQ ID NO: 1881218 - DNA, 15 bp, Homo sapiens
gccatgaggtgactg

SEQ ID NO: 1881219 - DNA, 15 bp, Homo sapiens
ccatgaggtgactgc

SEQ ID NO: 1881220 - DNA, 15 bp, Homo sapiens
catgaggtgactgca

SEQ ID NO: 1881221 - DNA, 15 bp, Homo sapiens
atgaggtgactgcat

SEQ ID NO: 1881222 - DNA, 15 bp, Homo sapiens
tgaggtgactgcata

SEQ ID NO: 1881223 - DNA, 15 bp, Homo sapiens
gaggtgactgcatag

SEQ ID NO: 1881224 - DNA, 15 bp, Homo sapiens
aggtgactgcataga

SEQ ID NO: 1881225 - DNA, 15 bp, Homo sapiens
ggtgactgcatagaa

SEQ ID NO: 1881226 - DNA, 15 bp, Homo sapiens
gtgactgcatagaaa

SEQ ID NO: 1881227 - DNA, 15 bp, Homo sapiens
tgactgcatagaaag

SEQ ID NO: 1881228 - DNA, 15 bp, Homo sapiens
gactgcatagaaagc

SEQ ID NO: 1881229 - DNA, 15 bp, Homo sapiens
actgcatagaaagct

SEQ ID NO: 1881230 - DNA, 15 bp, Homo sapiens
ctgcatagaaagctg

SEQ ID NO: 1881231 - DNA, 15 bp, Homo sapiens
tgcatagaaagctgt

SEQ ID NO: 1881232 - DNA, 15 bp, Homo sapiens
gcatagaaagctgtt

SEQ ID NO: 1881233 - DNA, 15 bp, Homo sapiens
catagaaagctgttt

SEQ ID NO: 1881234 - DNA, 15 bp, Homo sapiens
atagaaagctgtttc

SEQ ID NO: 1881235 - DNA, 15 bp, Homo sapiens
tagaaagctgtttca

SEQ ID NO: 1881236 - DNA, 15 bp, Homo sapiens
agaaagctgtttcag

SEQ ID NO: 1881237 - DNA, 15 bp, Homo sapiens
gaaagctgtttcagg

SEQ ID NO: 1881238 - DNA, 15 bp, Homo sapiens
aaagctgtttcaggg

SEQ ID NO: 1881239 - DNA, 15 bp, Homo sapiens
aagctgtttcagggc

SEQ ID NO: 1881240 - DNA, 15 bp, Homo sapiens
agctgtttcagggct

SEQ ID NO: 1881241 - DNA, 15 bp, Homo sapiens
gctgtttcagggcta

SEQ ID NO: 1881242 - DNA, 15 bp, Homo sapiens
ctgtttcagggctaa

SEQ ID NO: 1881243 - DNA, 15 bp, Homo sapiens
tgtttcagggctaac

SEQ ID NO: 1881244 - DNA, 15 bp, Homo sapiens
gtttcagggctaaca

SEQ ID NO: 1881245 - DNA, 15 bp, Homo sapiens
tttcagggctaacaa

SEQ ID NO: 1881246 - DNA, 15 bp, Homo sapiens
ttcagggctaacaag

SEQ ID NO: 1881247 - DNA, 15 bp, Homo sapiens
tcagggctaacaagg

SEQ ID NO: 1881248 - DNA, 15 bp, Homo sapiens
cagggctaacaagga

SEQ ID NO: 1881249 - DNA, 15 bp, Homo sapiens
ggctaacaaggagca

SEQ ID NO: 1881250 - DNA, 15 bp, Homo sapiens
gctaacaaggagcag

SEQ ID NO: 1881251 - DNA, 15 bp, Homo sapiens
ctaacaaggagcaga

SEQ ID NO: 1881252 - DNA, 15 bp, Homo sapiens
taacaaggagcagaa

SEQ ID NO: 1881253 - DNA, 15 bp, Homo sapiens
aacaaggagcagaac

SEQ ID NO: 1881254 - DNA, 15 bp, Homo sapiens
acaaggagcagaacc

SEQ ID NO: 1881255 - DNA, 15 bp, Homo sapiens
caaggagcagaacca

SEQ ID NO: 1881256 - DNA, 15 bp, Homo sapiens
aaggagcagaaccat

SEQ ID NO: 1881257 - DNA, 15 bp, Homo sapiens
aggagcagaaccatt

SEQ ID NO: 1881258 - DNA, 15 bp, Homo sapiens
ggagcagaaccattg

SEQ ID NO: 1881259 - DNA, 15 bp, Homo sapiens
gagcagaaccattga

SEQ ID NO: 1881260 - DNA, 15 bp, Homo sapiens
agcagaaccattgag

SEQ ID NO: 1881261 - DNA, 15 bp, Homo sapiens
gcagaaccattgaga

SEQ ID NO: 1881262 - DNA, 15 bp, Homo sapiens
cagaaccattgagaa

SEQ ID NO: 1881263 - DNA, 15 bp, Homo sapiens
agaaccattgagaag

SEQ ID NO: 1881264 - DNA, 15 bp, Homo sapiens
gaaccattgagaaga

SEQ ID NO: 1881265 - DNA, 15 bp, Homo sapiens
aaccattgagaagat

SEQ ID NO: 1881266 - DNA, 15 bp, Homo sapiens
accattgagaagata

SEQ ID NO: 1881267 - DNA, 15 bp, Homo sapiens
ccattgagaagataa

SEQ ID NO: 1881268 - DNA, 15 bp, Homo sapiens
cattgagaagataaa

SEQ ID NO: 1881269 - DNA, 15 bp, Homo sapiens
attgagaagataaag

SEQ ID NO: 1881270 - DNA, 15 bp, Homo sapiens
ttgagaagataaagt

SEQ ID NO: 1881271 - DNA, 15 bp, Homo sapiens
tgagaagataaagtg

SEQ ID NO: 1881272 - DNA, 15 bp, Homo sapiens
gagaagataaagtgg

SEQ ID NO: 1881273 - DNA, 15 bp, Homo sapiens
agaagataaagtggg

SEQ ID NO: 1881274 - DNA, 15 bp, Homo sapiens
gaagataaagtggga

SEQ ID NO: 1881275 - DNA, 15 bp, Homo sapiens
aagataaagtgggag

SEQ ID NO: 1881276 - DNA, 15 bp, Homo sapiens
agataaagtgggaga

SEQ ID NO: 1881277 - DNA, 15 bp, Homo sapiens
gataaagtgggagag

SEQ ID NO: 1881278 - DNA, 15 bp, Homo sapiens
ataaagtgggagaga

SEQ ID NO: 1881279 - DNA, 15 bp, Homo sapiens
taaagtgggagagag

SEQ ID NO: 1881280 - DNA, 15 bp, Homo sapiens
aaagtgggagagagg

SEQ ID NO: 1881281 - DNA, 15 bp, Homo sapiens
aagtgggagagagga

SEQ ID NO: 1881282 - DNA, 15 bp, Homo sapiens
agtgggagagaggag

SEQ ID NO: 1881283 - DNA, 15 bp, Homo sapiens
gtgggagagaggagg

SEQ ID NO: 1881284 - DNA, 15 bp, Homo sapiens
tgggagagaggagga

SEQ ID NO: 1881285 - DNA, 15 bp, Homo sapiens
gggagagaggaggat

SEQ ID NO: 1881286 - DNA, 15 bp, Homo sapiens
ggagagaggaggatg

SEQ ID NO: 1881287 - DNA, 15 bp, Homo sapiens
gagagaggaggatgc

SEQ ID NO: 1881288 - DNA, 15 bp, Homo sapiens
agagaggaggatgca

SEQ ID NO: 1881289 - DNA, 15 bp, Homo sapiens
gagaggaggatgcat

SEQ ID NO: 1881290 - DNA, 15 bp, Homo sapiens
agaggaggatgcata

SEQ ID NO: 1881291 - DNA, 15 bp, Homo sapiens
gaggaggatgcatag

SEQ ID NO: 1881292 - DNA, 15 bp, Homo sapiens
aggaggatgcataga

SEQ ID NO: 1881293 - DNA, 15 bp, Homo sapiens
ggaggatgcatagaa

SEQ ID NO: 1881294 - DNA, 15 bp, Homo sapiens
gaggatgcatagaat

SEQ ID NO: 1881295 - DNA, 15 bp, Homo sapiens
aggatgcatagaatc

SEQ ID NO: 1881296 - DNA, 15 bp, Homo sapiens
ggatgcatagaatcg

SEQ ID NO: 1881297 - DNA, 15 bp, Homo sapiens
gatgcatagaatcgt

SEQ ID NO: 1881298 - DNA, 15 bp, Homo sapiens
atgcatagaatcgta

SEQ ID NO: 1881299 - DNA, 15 bp, Homo sapiens
tgcatagaatcgtag

SEQ ID NO: 1881300 - DNA, 15 bp, Homo sapiens
gcatagaatcgtagc

SEQ ID NO: 1881301 - DNA, 15 bp, Homo sapiens
catagaatcgtagct

SEQ ID NO: 1881302 - DNA, 15 bp, Homo sapiens
atagaatcgtagctt

SEQ ID NO: 1881303 - DNA, 15 bp, Homo sapiens
tagaatcgtagcttg

SEQ ID NO: 1881304 - DNA, 15 bp, Homo sapiens
agaatcgtagcttga

SEQ ID NO: 1881305 - DNA, 15 bp, Homo sapiens
gaatcgtagcttgag

SEQ ID NO: 1881306 - DNA, 15 bp, Homo sapiens
aatcgtagcttgagg

SEQ ID NO: 1881307 - DNA, 15 bp, Homo sapiens
atcgtagcttgaggg

SEQ ID NO: 1881308 - DNA, 15 bp, Homo sapiens
tcgtagcttgaggga

SEQ ID NO: 1881309 - DNA, 15 bp, Homo sapiens
cgtagcttgagggac

SEQ ID NO: 1881310 - DNA, 15 bp, Homo sapiens
gtagcttgagggaca

SEQ ID NO: 1881311 - DNA, 15 bp, Homo sapiens
tagcttgagggacaa

SEQ ID NO: 1881312 - DNA, 15 bp, Homo sapiens
agcttgagggacaag

SEQ ID NO: 1881313 - DNA, 15 bp, Homo sapiens
gcttgagggacaagg

SEQ ID NO: 1881314 - DNA, 15 bp, Homo sapiens
cttgagggacaaggg

SEQ ID NO: 1881315 - DNA, 15 bp, Homo sapiens
ttgagggacaaggga

SEQ ID NO: 1881316 - DNA, 15 bp, Homo sapiens
tgagggacaagggaa

SEQ ID NO: 1881317 - DNA, 15 bp, Homo sapiens
gagggacaagggaag

SEQ ID NO: 1881318 - DNA, 15 bp, Homo sapiens
agggacaagggaagg

SEQ ID NO: 1881319 - DNA, 15 bp, Homo sapiens
gggacaagggaaggt

SEQ ID NO: 1881320 - DNA, 15 bp, Homo sapiens
ggacaagggaaggtg

SEQ ID NO: 1881321 - DNA, 15 bp, Homo sapiens
gacaagggaaggtgt

SEQ ID NO: 1881322 - DNA, 15 bp, Homo sapiens
acaagggaaggtgtt

SEQ ID NO: 1881323 - DNA, 15 bp, Homo sapiens
caagggaaggtgttt

SEQ ID NO: 1881324 - DNA, 15 bp, Homo sapiens
aagggaaggtgtttt

SEQ ID NO: 1881325 - DNA, 15 bp, Homo sapiens
agggaaggtgtttta

SEQ ID NO: 1881326 - DNA, 15 bp, Homo sapiens
gggaaggtgttttat

SEQ ID NO: 1881327 - DNA, 15 bp, Homo sapiens
ggaaggtgttttatt

SEQ ID NO: 1881328 - DNA, 15 bp, Homo sapiens
gaaggtgttttatta

SEQ ID NO: 1881329 - DNA, 15 bp, Homo sapiens
aaggtgttttattag

SEQ ID NO: 1881330 - DNA, 15 bp, Homo sapiens
aggtgttttattagg

SEQ ID NO: 1881331 - DNA, 15 bp, Homo sapiens
ggtgttttattagga

SEQ ID NO: 1881332 - DNA, 15 bp, Homo sapiens
gtgttttattaggat

SEQ ID NO: 1881333 - DNA, 15 bp, Homo sapiens
tgttttattaggata

SEQ ID NO: 1881334 - DNA, 15 bp, Homo sapiens
gttttattaggataa

SEQ ID NO: 1881335 - DNA, 15 bp, Homo sapiens
ttttattaggataat

SEQ ID NO: 1881336 - DNA, 15 bp, Homo sapiens
tttattaggataata

SEQ ID NO: 1881337 - DNA, 15 bp, Homo sapiens
ttattaggataataa

SEQ ID NO: 1881338 - DNA, 15 bp, Homo sapiens
tattaggataataat

SEQ ID NO: 1881339 - DNA, 15 bp, Homo sapiens
attaggataataata

SEQ ID NO: 1881340 - DNA, 15 bp, Homo sapiens
ttaggataataatag

SEQ ID NO: 1881341 - DNA, 15 bp, Homo sapiens
taggataataatagc

SEQ ID NO: 1881342 - DNA, 15 bp, Homo sapiens
aggataataatagcc

SEQ ID NO: 1881343 - DNA, 15 bp, Homo sapiens
ggataataatagcct

SEQ ID NO: 1881344 - DNA, 15 bp, Homo sapiens
gataataatagccta

SEQ ID NO: 1881345 - DNA, 15 bp, Homo sapiens
ataataatagcctaa

SEQ ID NO: 1881346 - DNA, 15 bp, Homo sapiens
taataatagcctaaa

SEQ ID NO: 1881347 - DNA, 15 bp, Homo sapiens
aataatagcctaaac

SEQ ID NO: 1881348 - DNA, 15 bp, Homo sapiens
ataatagcctaaaca

SEQ ID NO: 1881349 - DNA, 15 bp, Homo sapiens
taatagcctaaacac

SEQ ID NO: 1881350 - DNA, 15 bp, Homo sapiens
aatagcctaaacaca

SEQ ID NO: 1881351 - DNA, 15 bp, Homo sapiens
atagcctaaacacat

SEQ ID NO: 1881352 - DNA, 15 bp, Homo sapiens
tagcctaaacacatt

SEQ ID NO: 1881353 - DNA, 15 bp, Homo sapiens
agcctaaacacattt

SEQ ID NO: 1881354 - DNA, 15 bp, Homo sapiens
gcctaaacacatttg

SEQ ID NO: 1881355 - DNA, 15 bp, Homo sapiens
cctaaacacatttgc

SEQ ID NO: 1881356 - DNA, 15 bp, Homo sapiens
ctaaacacatttgca

SEQ ID NO: 1881357 - DNA, 15 bp, Homo sapiens
taaacacatttgcag

SEQ ID NO: 1881358 - DNA, 15 bp, Homo sapiens
aaacacatttgcagg

SEQ ID NO: 1881359 - DNA, 15 bp, Homo sapiens
aacacatttgcaggt

SEQ ID NO: 1881360 - DNA, 15 bp, Homo sapiens
acacatttgcaggtt

SEQ ID NO: 1881361 - DNA, 15 bp, Homo sapiens
cacatttgcaggttt

SEQ ID NO: 1881362 - DNA, 15 bp, Homo sapiens
acatttgcaggtttg

SEQ ID NO: 1881363 - DNA, 15 bp, Homo sapiens
catttgcaggtttga

SEQ ID NO: 1881364 - DNA, 15 bp, Homo sapiens
atttgcaggtttgag

SEQ ID NO: 1881365 - DNA, 15 bp, Homo sapiens
tttgcaggtttgagg

SEQ ID NO: 1881366 - DNA, 15 bp, Homo sapiens
ttgcaggtttgaggg

SEQ ID NO: 1881367 - DNA, 15 bp, Homo sapiens
tgcaggtttgaggga

SEQ ID NO: 1881368 - DNA, 15 bp, Homo sapiens
gcaggtttgagggaa

SEQ ID NO: 1881369 - DNA, 15 bp, Homo sapiens
caggtttgagggaag

SEQ ID NO: 1881370 - DNA, 15 bp, Homo sapiens
aggtttgagggaagg

SEQ ID NO: 1881371 - DNA, 15 bp, Homo sapiens
ggtttgagggaagga

SEQ ID NO: 1881372 - DNA, 15 bp, Homo sapiens
gtttgagggaaggag

SEQ ID NO: 1881373 - DNA, 15 bp, Homo sapiens
tttgagggaaggagc

SEQ ID NO: 1881374 - DNA, 15 bp, Homo sapiens
ttgagggaaggagcc

SEQ ID NO: 1881375 - DNA, 15 bp, Homo sapiens
tgagggaaggagcca

SEQ ID NO: 1881376 - DNA, 15 bp, Homo sapiens
gagggaaggagccag

SEQ ID NO: 1881377 - DNA, 15 bp, Homo sapiens
agggaaggagccagt

SEQ ID NO: 1881378 - DNA, 15 bp, Homo sapiens
gggaaggagccagta

SEQ ID NO: 1881379 - DNA, 15 bp, Homo sapiens
ggaaggagccagtaa

SEQ ID NO: 1881380 - DNA, 15 bp, Homo sapiens
gaaggagccagtaaa

SEQ ID NO: 1881381 - DNA, 15 bp, Homo sapiens
aaggagccagtaaaa

SEQ ID NO: 1881382 - DNA, 15 bp, Homo sapiens
aggagccagtaaaat

SEQ ID NO: 1881383 - DNA, 15 bp, Homo sapiens
ggagccagtaaaatg

SEQ ID NO: 1881384 - DNA, 15 bp, Homo sapiens
gagccagtaaaatgg

SEQ ID NO: 1881385 - DNA, 15 bp, Homo sapiens
agccagtaaaatgga

SEQ ID NO: 1881386 - DNA, 15 bp, Homo sapiens
gccagtaaaatggat

SEQ ID NO: 1881387 - DNA, 15 bp, Homo sapiens
ccagtaaaatggatt

SEQ ID NO: 1881388 - DNA, 15 bp, Homo sapiens
cagtaaaatggatta

SEQ ID NO: 1881389 - DNA, 15 bp, Homo sapiens
agtaaaatggattaa

SEQ ID NO: 1881390 - DNA, 15 bp, Homo sapiens
gtaaaatggattaaa

SEQ ID NO: 1881391 - DNA, 15 bp, Homo sapiens
taaaatggattaaag

SEQ ID NO: 1881392 - DNA, 15 bp, Homo sapiens
aaaatggattaaagc

SEQ ID NO: 1881393 - DNA, 15 bp, Homo sapiens
aaatggattaaagct

SEQ ID NO: 1881394 - DNA, 15 bp, Homo sapiens
aatggattaaagctg

SEQ ID NO: 1881395 - DNA, 15 bp, Homo sapiens
atggattaaagctga

SEQ ID NO: 1881396 - DNA, 15 bp, Homo sapiens
tggattaaagctgaa

SEQ ID NO: 1881397 - DNA, 15 bp, Homo sapiens
ggattaaagctgaag

SEQ ID NO: 1881398 - DNA, 15 bp, Homo sapiens
gattaaagctgaaga

SEQ ID NO: 1881399 - DNA, 15 bp, Homo sapiens
attaaagctgaagaa

SEQ ID NO: 1881400 - DNA, 15 bp, Homo sapiens
ttaaagctgaagaat

SEQ ID NO: 1881401 - DNA, 15 bp, Homo sapiens
taaagctgaagaata

SEQ ID NO: 1881402 - DNA, 15 bp, Homo sapiens
aaagctgaagaataa

SEQ ID NO: 1881403 - DNA, 15 bp, Homo sapiens
aagctgaagaataaa

SEQ ID NO: 1881404 - DNA, 15 bp, Homo sapiens
agctgaagaataaac

SEQ ID NO: 1881405 - DNA, 15 bp, Homo sapiens
gctgaagaataaaca

SEQ ID NO: 1881406 - DNA, 15 bp, Homo sapiens
ctgaagaataaacaa

SEQ ID NO: 1881407 - DNA, 15 bp, Homo sapiens
tgaagaataaacaag

SEQ ID NO: 1881408 - DNA, 15 bp, Homo sapiens
gaagaataaacaagg

SEQ ID NO: 1881409 - DNA, 15 bp, Homo sapiens
aagaataaacaagga

SEQ ID NO: 1881410 - DNA, 15 bp, Homo sapiens
agaataaacaaggat

SEQ ID NO: 1881411 - DNA, 15 bp, Homo sapiens
gaataaacaaggatt

SEQ ID NO: 1881412 - DNA, 15 bp, Homo sapiens
aataaacaaggatta

SEQ ID NO: 1881413 - DNA, 15 bp, Homo sapiens
ataaacaaggattaa

SEQ ID NO: 1881414 - DNA, 15 bp, Homo sapiens
taaacaaggattaat

SEQ ID NO: 1881415 - DNA, 15 bp, Homo sapiens
aaacaaggattaatt

SEQ ID NO: 1881416 - DNA, 15 bp, Homo sapiens
aacaaggattaatta

SEQ ID NO: 1881417 - DNA, 15 bp, Homo sapiens
acaaggattaattaa

SEQ ID NO: 1881418 - DNA, 15 bp, Homo sapiens
caaggattaattaat

SEQ ID NO: 1881419 - DNA, 15 bp, Homo sapiens
aaggattaattaatc

SEQ ID NO: 1881420 - DNA, 15 bp, Homo sapiens
aggattaattaatca

SEQ ID NO: 1881421 - DNA, 15 bp, Homo sapiens
ggattaattaatcaa

SEQ ID NO: 1881422 - DNA, 15 bp, Homo sapiens
gattaattaatcaat

SEQ ID NO: 1881423 - DNA, 15 bp, Homo sapiens
attaattaatcaatc

SEQ ID NO: 1881424 - DNA, 15 bp, Homo sapiens
ttaattaatcaatca

SEQ ID NO: 1881425 - DNA, 15 bp, Homo sapiens
taattaatcaatcaa

SEQ ID NO: 1881426 - DNA, 15 bp, Homo sapiens
aattaatcaatcaag

SEQ ID NO: 1881427 - DNA, 15 bp, Homo sapiens
attaatcaatcaaga

SEQ ID NO: 1881428 - DNA, 15 bp, Homo sapiens
ttaatcaatcaagac

SEQ ID NO: 1881429 - DNA, 15 bp, Homo sapiens
taatcaatcaagacc

SEQ ID NO: 1881430 - DNA, 15 bp, Homo sapiens
aatcaatcaagacct

SEQ ID NO: 1881431 - DNA, 15 bp, Homo sapiens
atcaatcaagacctc

SEQ ID NO: 1881432 - DNA, 15 bp, Homo sapiens
tcaatcaagacctcc

SEQ ID NO: 1881433 - DNA, 15 bp, Homo sapiens
caatcaagacctcca

SEQ ID NO: 1881434 - DNA, 15 bp, Homo sapiens
aatcaagacctccac

SEQ ID NO: 1881435 - DNA, 15 bp, Homo sapiens
atcaagacctccaca

SEQ ID NO: 1881436 - DNA, 15 bp, Homo sapiens
tcaagacctccacag

SEQ ID NO: 1881437 - DNA, 15 bp, Homo sapiens
caagacctccacagc

SEQ ID NO: 1881438 - DNA, 15 bp, Homo sapiens
aagacctccacagca

SEQ ID NO: 1881439 - DNA, 15 bp, Homo sapiens
agacctccacagcac

SEQ ID NO: 1881440 - DNA, 15 bp, Homo sapiens
gacctccacagcact

SEQ ID NO: 1881441 - DNA, 15 bp, Homo sapiens
acctccacagcactg

SEQ ID NO: 1881442 - DNA, 15 bp, Homo sapiens
cctccacagcactgg

SEQ ID NO: 1881443 - DNA, 15 bp, Homo sapiens
ctccacagcactggt

SEQ ID NO: 1881444 - DNA, 15 bp, Homo sapiens
tccacagcactggtt

SEQ ID NO: 1881445 - DNA, 15 bp, Homo sapiens
ccacagcactggtta

SEQ ID NO: 1881446 - DNA, 15 bp, Homo sapiens
cacagcactggttat

SEQ ID NO: 1881447 - DNA, 15 bp, Homo sapiens
acagcactggttatc

SEQ ID NO: 1881448 - DNA, 15 bp, Homo sapiens
cagcactggttatca

SEQ ID NO: 1881449 - DNA, 15 bp, Homo sapiens
agcactggttatcaa

SEQ ID NO: 1881450 - DNA, 15 bp, Homo sapiens
gcactggttatcaac

SEQ ID NO: 1881451 - DNA, 15 bp, Homo sapiens
cactggttatcaacc

SEQ ID NO: 1881452 - DNA, 15 bp, Homo sapiens
actggttatcaaccc

SEQ ID NO: 1881453 - DNA, 15 bp, Homo sapiens
ctggttatcaaccct

SEQ ID NO: 1881454 - DNA, 15 bp, Homo sapiens
tggttatcaaccctt

SEQ ID NO: 1881455 - DNA, 15 bp, Homo sapiens
ggttatcaacccttt

SEQ ID NO: 1881456 - DNA, 15 bp, Homo sapiens
gttatcaaccctttc

SEQ ID NO: 1881457 - DNA, 15 bp, Homo sapiens
ttatcaaccctttct

SEQ ID NO: 1881458 - DNA, 15 bp, Homo sapiens
tatcaaccctttctt

SEQ ID NO: 1881459 - DNA, 15 bp, Homo sapiens
atcaaccctttctta

SEQ ID NO: 1881460 - DNA, 15 bp, Homo sapiens
tcaaccctttcttaa

SEQ ID NO: 1881461 - DNA, 15 bp, Homo sapiens
caaccctttcttaac

SEQ ID NO: 1881462 - DNA, 15 bp, Homo sapiens
aaccctttcttaaca

SEQ ID NO: 1881463 - DNA, 15 bp, Homo sapiens
accctttcttaacat

SEQ ID NO: 1881464 - DNA, 15 bp, Homo sapiens
ccctttcttaacata

SEQ ID NO: 1881465 - DNA, 15 bp, Homo sapiens
cctttcttaacataa

SEQ ID NO: 1881466 - DNA, 15 bp, Homo sapiens
ctttcttaacataaa

SEQ ID NO: 1881467 - DNA, 15 bp, Homo sapiens
tttcttaacataaaa

SEQ ID NO: 1881468 - DNA, 15 bp, Homo sapiens
ttcttaacataaaac

SEQ ID NO: 1881469 - DNA, 15 bp, Homo sapiens
tcttaacataaaact

SEQ ID NO: 1881470 - DNA, 15 bp, Homo sapiens
cttaacataaaactc

SEQ ID NO: 1881471 - DNA, 15 bp, Homo sapiens
ttaacataaaactca

SEQ ID NO: 1881472 - DNA, 15 bp, Homo sapiens
taacataaaactcac

SEQ ID NO: 1881473 - DNA, 15 bp, Homo sapiens
aacataaaactcact

SEQ ID NO: 1881474 - DNA, 15 bp, Homo sapiens
acataaaactcactt

SEQ ID NO: 1881475 - DNA, 15 bp, Homo sapiens
cataaaactcactta

SEQ ID NO: 1881476 - DNA, 15 bp, Homo sapiens
ataaaactcacttag

SEQ ID NO: 1881477 - DNA, 15 bp, Homo sapiens
taaaactcacttagg

SEQ ID NO: 1881478 - DNA, 15 bp, Homo sapiens
aaaactcacttagga

SEQ ID NO: 1881479 - DNA, 15 bp, Homo sapiens
aaactcacttaggac

SEQ ID NO: 1881480 - DNA, 15 bp, Homo sapiens
aactcacttaggacc

SEQ ID NO: 1881481 - DNA, 15 bp, Homo sapiens
actcacttaggaccc

SEQ ID NO: 1881482 - DNA, 15 bp, Homo sapiens
ctcacttaggaccct

SEQ ID NO: 1881483 - DNA, 15 bp, Homo sapiens
tcacttaggaccctt

SEQ ID NO: 1881484 - DNA, 15 bp, Homo sapiens
cacttaggaccctta

SEQ ID NO: 1881485 - DNA, 15 bp, Homo sapiens
acttaggacccttat

SEQ ID NO: 1881486 - DNA, 15 bp, Homo sapiens
cttaggacccttatt

SEQ ID NO: 1881487 - DNA, 15 bp, Homo sapiens
ttaggacccttatta

SEQ ID NO: 1881488 - DNA, 15 bp, Homo sapiens
taggacccttattat

SEQ ID NO: 1881489 - DNA, 15 bp, Homo sapiens
aggacccttattata

SEQ ID NO: 1881490 - DNA, 15 bp, Homo sapiens
ggacccttattataa

SEQ ID NO: 1881491 - DNA, 15 bp, Homo sapiens
gacccttattataat

SEQ ID NO: 1881492 - DNA, 15 bp, Homo sapiens
acccttattataata

SEQ ID NO: 1881493 - DNA, 15 bp, Homo sapiens
cccttattataatac

SEQ ID NO: 1881494 - DNA, 15 bp, Homo sapiens
ccttattataatact

SEQ ID NO: 1881495 - DNA, 15 bp, Homo sapiens
cttattataatacta

SEQ ID NO: 1881496 - DNA, 15 bp, Homo sapiens
ttattataatactaa

SEQ ID NO: 1881497 - DNA, 15 bp, Homo sapiens
tattataatactaac

SEQ ID NO: 1881498 - DNA, 15 bp, Homo sapiens
attataatactaaca

SEQ ID NO: 1881499 - DNA, 15 bp, Homo sapiens
ttataatactaacac

SEQ ID NO: 1881500 - DNA, 15 bp, Homo sapiens
tataatactaacacc

SEQ ID NO: 1881501 - DNA, 15 bp, Homo sapiens
ataatactaacacct

SEQ ID NO: 1881502 - DNA, 15 bp, Homo sapiens
taatactaacacctg

SEQ ID NO: 1881503 - DNA, 15 bp, Homo sapiens
aatactaacacctgg

SEQ ID NO: 1881504 - DNA, 15 bp, Homo sapiens
atactaacacctggt

SEQ ID NO: 1881505 - DNA, 15 bp, Homo sapiens
tactaacacctggtc

SEQ ID NO: 1881506 - DNA, 15 bp, Homo sapiens
actaacacctggtcc

SEQ ID NO: 1881507 - DNA, 15 bp, Homo sapiens
ctaacacctggtcct

SEQ ID NO: 1881508 - DNA, 15 bp, Homo sapiens
taacacctggtcctg

SEQ ID NO: 1881509 - DNA, 15 bp, Homo sapiens
aacacctggtcctga

SEQ ID NO: 1881510 - DNA, 15 bp, Homo sapiens
acacctggtcctgat

SEQ ID NO: 1881511 - DNA, 15 bp, Homo sapiens
cacctggtcctgatt

SEQ ID NO: 1881512 - DNA, 15 bp, Homo sapiens
acctggtcctgattc

SEQ ID NO: 1881513 - DNA, 15 bp, Homo sapiens
cctggtcctgattct

SEQ ID NO: 1881514 - DNA, 15 bp, Homo sapiens
ctggtcctgattctg

SEQ ID NO: 1881515 - DNA, 15 bp, Homo sapiens
tggtcctgattctga

SEQ ID NO: 1881516 - DNA, 15 bp, Homo sapiens
ggtcctgattctgat

SEQ ID NO: 1881517 - DNA, 15 bp, Homo sapiens
gtcctgattctgatc

SEQ ID NO: 1881518 - DNA, 15 bp, Homo sapiens
tcctgattctgatca

SEQ ID NO: 1881519 - DNA, 15 bp, Homo sapiens
cctgattctgatcag

SEQ ID NO: 1881520 - DNA, 15 bp, Homo sapiens
ctgattctgatcagg

SEQ ID NO: 1881521 - DNA, 15 bp, Homo sapiens
tgattctgatcagga

SEQ ID NO: 1881522 - DNA, 15 bp, Homo sapiens
gattctgatcaggat

SEQ ID NO: 1881523 - DNA, 15 bp, Homo sapiens
attctgatcaggatt

SEQ ID NO: 1881524 - DNA, 15 bp, Homo sapiens
ttctgatcaggatta

SEQ ID NO: 1881525 - DNA, 15 bp, Homo sapiens
tctgatcaggattat

SEQ ID NO: 1881526 - DNA, 15 bp, Homo sapiens
ctgatcaggattatt

SEQ ID NO: 1881527 - DNA, 15 bp, Homo sapiens
tgatcaggattattt

SEQ ID NO: 1881528 - DNA, 15 bp, Homo sapiens
gatcaggattattta

SEQ ID NO: 1881529 - DNA, 15 bp, Homo sapiens
atcaggattatttac

SEQ ID NO: 1881530 - DNA, 15 bp, Homo sapiens
tcaggattatttact

SEQ ID NO: 1881531 - DNA, 15 bp, Homo sapiens
caggattatttacta

SEQ ID NO: 1881532 - DNA, 15 bp, Homo sapiens
aggattatttactag

SEQ ID NO: 1881533 - DNA, 15 bp, Homo sapiens
ggattatttactagt

SEQ ID NO: 1881534 - DNA, 15 bp, Homo sapiens
gattatttactagtt

SEQ ID NO: 1881535 - DNA, 15 bp, Homo sapiens
attatttactagttt

SEQ ID NO: 1881536 - DNA, 15 bp, Homo sapiens
ttatttactagtttt

SEQ ID NO: 1881537 - DNA, 15 bp, Homo sapiens
tatttactagttttc

SEQ ID NO: 1881538 - DNA, 15 bp, Homo sapiens
atttactagttttcc

SEQ ID NO: 1881539 - DNA, 15 bp, Homo sapiens
tttactagttttccc

SEQ ID NO: 1881540 - DNA, 15 bp, Homo sapiens
ttactagttttccca

SEQ ID NO: 1881541 - DNA, 15 bp, Homo sapiens
tactagttttcccag

SEQ ID NO: 1881542 - DNA, 15 bp, Homo sapiens
actagttttcccagg

SEQ ID NO: 1881543 - DNA, 15 bp, Homo sapiens
ctagttttcccaggt

SEQ ID NO: 1881544 - DNA, 15 bp, Homo sapiens
tagttttcccaggtg

SEQ ID NO: 1881545 - DNA, 15 bp, Homo sapiens
agttttcccaggtga

SEQ ID NO: 1881546 - DNA, 15 bp, Homo sapiens
gttttcccaggtgat

SEQ ID NO: 1881547 - DNA, 15 bp, Homo sapiens
ttttcccaggtgatt

SEQ ID NO: 1881548 - DNA, 15 bp, Homo sapiens
tttcccaggtgattc

SEQ ID NO: 1881549 - DNA, 15 bp, Homo sapiens
ttcccaggtgattca

SEQ ID NO: 1881550 - DNA, 15 bp, Homo sapiens
tcccaggtgattcaa

SEQ ID NO: 1881551 - DNA, 15 bp, Homo sapiens
cccaggtgattcaaa

SEQ ID NO: 1881552 - DNA, 15 bp, Homo sapiens
ccaggtgattcaaat

SEQ ID NO: 1881553 - DNA, 15 bp, Homo sapiens
caggtgattcaaatc

SEQ ID NO: 1881554 - DNA, 15 bp, Homo sapiens
aggtgattcaaatct

SEQ ID NO: 1881555 - DNA, 15 bp, Homo sapiens
ggtgattcaaatctg

SEQ ID NO: 1881556 - DNA, 15 bp, Homo sapiens
gtgattcaaatctgt

SEQ ID NO: 1881557 - DNA, 15 bp, Homo sapiens
tgattcaaatctgta

SEQ ID NO: 1881558 - DNA, 15 bp, Homo sapiens
gattcaaatctgtat

SEQ ID NO: 1881559 - DNA, 15 bp, Homo sapiens
attcaaatctgtatc

SEQ ID NO: 1881560 - DNA, 15 bp, Homo sapiens
ttcaaatctgtatct

SEQ ID NO: 1881561 - DNA, 15 bp, Homo sapiens
tcaaatctgtatcta

SEQ ID NO: 1881562 - DNA, 15 bp, Homo sapiens
caaatctgtatctag

SEQ ID NO: 1881563 - DNA, 15 bp, Homo sapiens
aaatctgtatctagg

SEQ ID NO: 1881564 - DNA, 15 bp, Homo sapiens
aatctgtatctaggt

SEQ ID NO: 1881565 - DNA, 15 bp, Homo sapiens
atctgtatctaggta

SEQ ID NO: 1881566 - DNA, 15 bp, Homo sapiens
tctgtatctaggtat

SEQ ID NO: 1881567 - DNA, 15 bp, Homo sapiens
ctgtatctaggtatg

SEQ ID NO: 1881568 - DNA, 15 bp, Homo sapiens
tgtatctaggtatga

SEQ ID NO: 1881569 - DNA, 15 bp, Homo sapiens
gtatctaggtatgag

SEQ ID NO: 1881570 - DNA, 15 bp, Homo sapiens
tatctaggtatgaga

SEQ ID NO: 1881571 - DNA, 15 bp, Homo sapiens
atctaggtatgagag

SEQ ID NO: 1881572 - DNA, 15 bp, Homo sapiens
tctaggtatgagagt

SEQ ID NO: 1881573 - DNA, 15 bp, Homo sapiens
ctaggtatgagagtc

SEQ ID NO: 1881574 - DNA, 15 bp, Homo sapiens
taggtatgagagtca

SEQ ID NO: 1881575 - DNA, 15 bp, Homo sapiens
aggtatgagagtcac

SEQ ID NO: 1881576 - DNA, 15 bp, Homo sapiens
ggtatgagagtcact

SEQ ID NO: 1881577 - DNA, 15 bp, Homo sapiens
gtatgagagtcactt

SEQ ID NO: 1881578 - DNA, 15 bp, Homo sapiens
tatgagagtcactta

SEQ ID NO: 1881579 - DNA, 15 bp, Homo sapiens
atgagagtcacttac

SEQ ID NO: 1881580 - DNA, 15 bp, Homo sapiens
tgagagtcacttact

SEQ ID NO: 1881581 - DNA, 15 bp, Homo sapiens
gagagtcacttactt

SEQ ID NO: 1881582 - DNA, 15 bp, Homo sapiens
agagtcacttactta

SEQ ID NO: 1881583 - DNA, 15 bp, Homo sapiens
gagtcacttacttag

SEQ ID NO: 1881584 - DNA, 15 bp, Homo sapiens
agtcacttacttaga

SEQ ID NO: 1881585 - DNA, 15 bp, Homo sapiens
gtcacttacttagaa

SEQ ID NO: 1881586 - DNA, 15 bp, Homo sapiens
tcacttacttagaag

SEQ ID NO: 1881587 - DNA, 15 bp, Homo sapiens
cacttacttagaaga

SEQ ID NO: 1881588 - DNA, 15 bp, Homo sapiens
acttacttagaagaa

SEQ ID NO: 1881589 - DNA, 15 bp, Homo sapiens
cttacttagaagaac

SEQ ID NO: 1881590 - DNA, 15 bp, Homo sapiens
ttacttagaagaact

SEQ ID NO: 1881591 - DNA, 15 bp, Homo sapiens
tacttagaagaactg

SEQ ID NO: 1881592 - DNA, 15 bp, Homo sapiens
acttagaagaactgg

SEQ ID NO: 1881593 - DNA, 15 bp, Homo sapiens
cttagaagaactgga

SEQ ID NO: 1881594 - DNA, 15 bp, Homo sapiens
ttagaagaactggac

SEQ ID NO: 1881595 - DNA, 15 bp, Homo sapiens
tagaagaactggaca

SEQ ID NO: 1881596 - DNA, 15 bp, Homo sapiens
agaagaactggacat

SEQ ID NO: 1881597 - DNA, 15 bp, Homo sapiens
gaagaactggacatt

SEQ ID NO: 1881598 - DNA, 15 bp, Homo sapiens
aagaactggacattg

SEQ ID NO: 1881599 - DNA, 15 bp, Homo sapiens
agaactggacattgg

SEQ ID NO: 1881600 - DNA, 15 bp, Homo sapiens
gaactggacattgga

SEQ ID NO: 1881601 - DNA, 15 bp, Homo sapiens
aactggacattggat

SEQ ID NO: 1881602 - DNA, 15 bp, Homo sapiens
actggacattggatt

SEQ ID NO: 1881603 - DNA, 15 bp, Homo sapiens
ctggacattggatta

SEQ ID NO: 1881604 - DNA, 15 bp, Homo sapiens
tggacattggattaa

SEQ ID NO: 1881605 - DNA, 15 bp, Homo sapiens
ggacattggattaag

SEQ ID NO: 1881606 - DNA, 15 bp, Homo sapiens
gacattggattaaga

SEQ ID NO: 1881607 - DNA, 15 bp, Homo sapiens
acattggattaagac

SEQ ID NO: 1881608 - DNA, 15 bp, Homo sapiens
cattggattaagacc

SEQ ID NO: 1881609 - DNA, 15 bp, Homo sapiens
attggattaagacca

SEQ ID NO: 1881610 - DNA, 15 bp, Homo sapiens
ttggattaagaccac

SEQ ID NO: 1881611 - DNA, 15 bp, Homo sapiens
tggattaagaccact

SEQ ID NO: 1881612 - DNA, 15 bp, Homo sapiens
ggattaagaccacta

SEQ ID NO: 1881613 - DNA, 15 bp, Homo sapiens
gattaagaccactat

SEQ ID NO: 1881614 - DNA, 15 bp, Homo sapiens
attaagaccactata

SEQ ID NO: 1881615 - DNA, 15 bp, Homo sapiens
ttaagaccactatag

SEQ ID NO: 1881616 - DNA, 15 bp, Homo sapiens
taagaccactataga

SEQ ID NO: 1881617 - DNA, 15 bp, Homo sapiens
aagaccactatagat

SEQ ID NO: 1881618 - DNA, 15 bp, Homo sapiens
agaccactatagatg

SEQ ID NO: 1881619 - DNA, 15 bp, Homo sapiens
gaccactatagatgg

SEQ ID NO: 1881620 - DNA, 15 bp, Homo sapiens
accactatagatggt

SEQ ID NO: 1881621 - DNA, 15 bp, Homo sapiens
ccactatagatggtt

SEQ ID NO: 1881622 - DNA, 15 bp, Homo sapiens
cactatagatggtta

SEQ ID NO: 1881623 - DNA, 15 bp, Homo sapiens
actatagatggttat

SEQ ID NO: 1881624 - DNA, 15 bp, Homo sapiens
ctatagatggttatt

SEQ ID NO: 1881625 - DNA, 15 bp, Homo sapiens
tatagatggttattt

SEQ ID NO: 1881626 - DNA, 15 bp, Homo sapiens
atagatggttatttt

SEQ ID NO: 1881627 - DNA, 15 bp, Homo sapiens
tagatggttattttg

SEQ ID NO: 1881628 - DNA, 15 bp, Homo sapiens
agatggttattttgg

SEQ ID NO: 1881629 - DNA, 15 bp, Homo sapiens
gatggttattttggg

SEQ ID NO: 1881630 - DNA, 15 bp, Homo sapiens
atggttattttggga

SEQ ID NO: 1881631 - DNA, 15 bp, Homo sapiens
tggttattttgggat

SEQ ID NO: 1881632 - DNA, 15 bp, Homo sapiens
ggttattttgggatg

SEQ ID NO: 1881633 - DNA, 15 bp, Homo sapiens
gttattttgggatga

SEQ ID NO: 1881634 - DNA, 15 bp, Homo sapiens
ttattttgggatgac

SEQ ID NO: 1881635 - DNA, 15 bp, Homo sapiens
tattttgggatgaca

SEQ ID NO: 1881636 - DNA, 15 bp, Homo sapiens
attttgggatgacaa

SEQ ID NO: 1881637 - DNA, 15 bp, Homo sapiens
ttttgggatgacaaa

SEQ ID NO: 1881638 - DNA, 15 bp, Homo sapiens
tttgggatgacaaag

SEQ ID NO: 1881639 - DNA, 15 bp, Homo sapiens
ttgggatgacaaagg

SEQ ID NO: 1881640 - DNA, 15 bp, Homo sapiens
tgggatgacaaaggc

SEQ ID NO: 1881641 - DNA, 15 bp, Homo sapiens
gggatgacaaaggct

SEQ ID NO: 1881642 - DNA, 15 bp, Homo sapiens
ggatgacaaaggctc

SEQ ID NO: 1881643 - DNA, 15 bp, Homo sapiens
gatgacaaaggctct

SEQ ID NO: 1881644 - DNA, 15 bp, Homo sapiens
atgacaaaggctctc

SEQ ID NO: 1881645 - DNA, 15 bp, Homo sapiens
tgacaaaggctctct

SEQ ID NO: 1881646 - DNA, 15 bp, Homo sapiens
gacaaaggctctctt

SEQ ID NO: 1881647 - DNA, 15 bp, Homo sapiens
acaaaggctctcttt

SEQ ID NO: 1881648 - DNA, 15 bp, Homo sapiens
caaaggctctctttt

SEQ ID NO: 1881649 - DNA, 15 bp, Homo sapiens
aaaggctctcttttt

SEQ ID NO: 1881650 - DNA, 15 bp, Homo sapiens
aaggctctctttttc

SEQ ID NO: 1881651 - DNA, 15 bp, Homo sapiens
aggctctctttttcc

SEQ ID NO: 1881652 - DNA, 15 bp, Homo sapiens
ggctctctttttcct

SEQ ID NO: 1881653 - DNA, 15 bp, Homo sapiens
gctctctttttcctc

SEQ ID NO: 1881654 - DNA, 15 bp, Homo sapiens
ctctctttttcctct

SEQ ID NO: 1881655 - DNA, 15 bp, Homo sapiens
tctctttttcctctg

SEQ ID NO: 1881656 - DNA, 15 bp, Homo sapiens
ctctttttcctctga

SEQ ID NO: 1881657 - DNA, 15 bp, Homo sapiens
tctttttcctctgag

SEQ ID NO: 1881658 - DNA, 15 bp, Homo sapiens
ctttttcctctgaga

SEQ ID NO: 1881659 - DNA, 15 bp, Homo sapiens
tttttcctctgagat

SEQ ID NO: 1881660 - DNA, 15 bp, Homo sapiens
ttttcctctgagatg

SEQ ID NO: 1881661 - DNA, 15 bp, Homo sapiens
tttcctctgagatga

SEQ ID NO: 1881662 - DNA, 15 bp, Homo sapiens
ttcctctgagatgag

SEQ ID NO: 1881663 - DNA, 15 bp, Homo sapiens
tcctctgagatgagg

SEQ ID NO: 1881664 - DNA, 15 bp, Homo sapiens
cctctgagatgaggg

SEQ ID NO: 1881665 - DNA, 15 bp, Homo sapiens
ctctgagatgagggt

SEQ ID NO: 1881666 - DNA, 15 bp, Homo sapiens
tctgagatgagggta

SEQ ID NO: 1881667 - DNA, 15 bp, Homo sapiens
ctgagatgagggtag

SEQ ID NO: 1881668 - DNA, 15 bp, Homo sapiens
tgagatgagggtagt

SEQ ID NO: 1881669 - DNA, 15 bp, Homo sapiens
gagatgagggtagta

SEQ ID NO: 1881670 - DNA, 15 bp, Homo sapiens
agatgagggtagtat

SEQ ID NO: 1881671 - DNA, 15 bp, Homo sapiens
gatgagggtagtata

SEQ ID NO: 1881672 - DNA, 15 bp, Homo sapiens
atgagggtagtatag

SEQ ID NO: 1881673 - DNA, 15 bp, Homo sapiens
tgagggtagtatagt

SEQ ID NO: 1881674 - DNA, 15 bp, Homo sapiens
gagggtagtatagta

SEQ ID NO: 1881675 - DNA, 15 bp, Homo sapiens
agggtagtatagtac

SEQ ID NO: 1881676 - DNA, 15 bp, Homo sapiens
gggtagtatagtacc

SEQ ID NO: 1881677 - DNA, 15 bp, Homo sapiens
ggtagtatagtaccg

SEQ ID NO: 1881678 - DNA, 15 bp, Homo sapiens
gtagtatagtaccgg

SEQ ID NO: 1881679 - DNA, 15 bp, Homo sapiens
tagtatagtaccggg

SEQ ID NO: 1881680 - DNA, 15 bp, Homo sapiens
agtatagtaccgggg

SEQ ID NO: 1881681 - DNA, 15 bp, Homo sapiens
gtatagtaccggggt

SEQ ID NO: 1881682 - DNA, 15 bp, Homo sapiens
tatagtaccggggtg

SEQ ID NO: 1881683 - DNA, 15 bp, Homo sapiens
atagtaccggggtgg

SEQ ID NO: 1881684 - DNA, 15 bp, Homo sapiens
tagtaccggggtggc

SEQ ID NO: 1881685 - DNA, 15 bp, Homo sapiens
agtaccggggtggcg

SEQ ID NO: 1881686 - DNA, 15 bp, Homo sapiens
gtaccggggtggcgg

SEQ ID NO: 1881687 - DNA, 15 bp, Homo sapiens
taccggggtggcgga

SEQ ID NO: 1881688 - DNA, 15 bp, Homo sapiens
accggggtggcggag

SEQ ID NO: 1881689 - DNA, 15 bp, Homo sapiens
ccggggtggcggagt

SEQ ID NO: 1881690 - DNA, 15 bp, Homo sapiens
cggggtggcggagta

SEQ ID NO: 1881691 - DNA, 15 bp, Homo sapiens
ggggtggcggagtaa

SEQ ID NO: 1881692 - DNA, 15 bp, Homo sapiens
gggtggcggagtaag

SEQ ID NO: 1881693 - DNA, 15 bp, Homo sapiens
ggtggcggagtaaga

SEQ ID NO: 1881694 - DNA, 15 bp, Homo sapiens
gtggcggagtaagaa

SEQ ID NO: 1881695 - DNA, 15 bp, Homo sapiens
tggcggagtaagaaa

SEQ ID NO: 1881696 - DNA, 15 bp, Homo sapiens
ggcggagtaagaaaa

SEQ ID NO: 1881697 - DNA, 15 bp, Homo sapiens
gcggagtaagaaaag

SEQ ID NO: 1881698 - DNA, 15 bp, Homo sapiens
cggagtaagaaaagg

SEQ ID NO: 1881699 - DNA, 15 bp, Homo sapiens
ggagtaagaaaagga

SEQ ID NO: 1881700 - DNA, 15 bp, Homo sapiens
gagtaagaaaaggat

SEQ ID NO: 1881701 - DNA, 15 bp, Homo sapiens
agtaagaaaaggatg

SEQ ID NO: 1881702 - DNA, 15 bp, Homo sapiens
gtaagaaaaggatga

SEQ ID NO: 1881703 - DNA, 15 bp, Homo sapiens
taagaaaaggatgaa

SEQ ID NO: 1881704 - DNA, 15 bp, Homo sapiens
aagaaaaggatgaat

SEQ ID NO: 1881705 - DNA, 15 bp, Homo sapiens
agaaaaggatgaatt

SEQ ID NO: 1881706 - DNA, 15 bp, Homo sapiens
gaaaaggatgaatta

SEQ ID NO: 1881707 - DNA, 15 bp, Homo sapiens
aaaaggatgaattaa

SEQ ID NO: 1881708 - DNA, 15 bp, Homo sapiens
aaaggatgaattaag

SEQ ID NO: 1881709 - DNA, 15 bp, Homo sapiens
aaggatgaattaaga

SEQ ID NO: 1881710 - DNA, 15 bp, Homo sapiens
aggatgaattaagag

SEQ ID NO: 1881711 - DNA, 15 bp, Homo sapiens
ggatgaattaagagc

SEQ ID NO: 1881712 - DNA, 15 bp, Homo sapiens
gatgaattaagagcg

SEQ ID NO: 1881713 - DNA, 15 bp, Homo sapiens
atgaattaagagcgg

SEQ ID NO: 1881714 - DNA, 15 bp, Homo sapiens
tgaattaagagcgga

SEQ ID NO: 1881715 - DNA, 15 bp, Homo sapiens
gaattaagagcggaa

SEQ ID NO: 1881716 - DNA, 15 bp, Homo sapiens
aattaagagcggaaa

SEQ ID NO: 1881717 - DNA, 15 bp, Homo sapiens
attaagagcggaaac

SEQ ID NO: 1881718 - DNA, 15 bp, Homo sapiens
ttaagagcggaaaca

SEQ ID NO: 1881719 - DNA, 15 bp, Homo sapiens
taagagcggaaacat

SEQ ID NO: 1881720 - DNA, 15 bp, Homo sapiens
aagagcggaaacatt

SEQ ID NO: 1881721 - DNA, 15 bp, Homo sapiens
agagcggaaacattt

SEQ ID NO: 1881722 - DNA, 15 bp, Homo sapiens
gagcggaaacattta

SEQ ID NO: 1881723 - DNA, 15 bp, Homo sapiens
agcggaaacatttag

SEQ ID NO: 1881724 - DNA, 15 bp, Homo sapiens
gcggaaacatttaga

SEQ ID NO: 1881725 - DNA, 15 bp, Homo sapiens
cggaaacatttagaa

SEQ ID NO: 1881726 - DNA, 15 bp, Homo sapiens
ggaaacatttagaaa

SEQ ID NO: 1881727 - DNA, 15 bp, Homo sapiens
gaaacatttagaaag

SEQ ID NO: 1881728 - DNA, 15 bp, Homo sapiens
aaacatttagaaaga

SEQ ID NO: 1881729 - DNA, 15 bp, Homo sapiens
aacatttagaaagac

SEQ ID NO: 1881730 - DNA, 15 bp, Homo sapiens
acatttagaaagact

SEQ ID NO: 1881731 - DNA, 15 bp, Homo sapiens
catttagaaagactt

SEQ ID NO: 1881732 - DNA, 15 bp, Homo sapiens
atttagaaagacttt

SEQ ID NO: 1881733 - DNA, 15 bp, Homo sapiens
tttagaaagactttg

SEQ ID NO: 1881734 - DNA, 15 bp, Homo sapiens
ttagaaagactttga

SEQ ID NO: 1881735 - DNA, 15 bp, Homo sapiens
tagaaagactttgaa

SEQ ID NO: 1881736 - DNA, 15 bp, Homo sapiens
agaaagactttgaaa

SEQ ID NO: 1881737 - DNA, 15 bp, Homo sapiens
gaaagactttgaaag

SEQ ID NO: 1881738 - DNA, 15 bp, Homo sapiens
aaagactttgaaagg

SEQ ID NO: 1881739 - DNA, 15 bp, Homo sapiens
aagactttgaaagga

SEQ ID NO: 1881740 - DNA, 15 bp, Homo sapiens
agactttgaaaggac

SEQ ID NO: 1881741 - DNA, 15 bp, Homo sapiens
gactttgaaaggact

SEQ ID NO: 1881742 - DNA, 15 bp, Homo sapiens
actttgaaaggactc

SEQ ID NO: 1881743 - DNA, 15 bp, Homo sapiens
ctttgaaaggactcc

SEQ ID NO: 1881744 - DNA, 15 bp, Homo sapiens
tttgaaaggactcct

SEQ ID NO: 1881745 - DNA, 15 bp, Homo sapiens
ttgaaaggactcctg

SEQ ID NO: 1881746 - DNA, 15 bp, Homo sapiens
tgaaaggactcctga

SEQ ID NO: 1881747 - DNA, 15 bp, Homo sapiens
gaaaggactcctgat

SEQ ID NO: 1881748 - DNA, 15 bp, Homo sapiens
aaaggactcctgatg

SEQ ID NO: 1881749 - DNA, 15 bp, Homo sapiens
aaggactcctgatga

SEQ ID NO: 1881750 - DNA, 15 bp, Homo sapiens
aggactcctgatgaa

SEQ ID NO: 1881751 - DNA, 15 bp, Homo sapiens
ggactcctgatgaat

SEQ ID NO: 1881752 - DNA, 15 bp, Homo sapiens
gactcctgatgaatg

SEQ ID NO: 1881753 - DNA, 15 bp, Homo sapiens
actcctgatgaatgg

SEQ ID NO: 1881754 - DNA, 15 bp, Homo sapiens
ctcctgatgaatggc

SEQ ID NO: 1881755 - DNA, 15 bp, Homo sapiens
tcctgatgaatggct

SEQ ID NO: 1881756 - DNA, 15 bp, Homo sapiens
cctgatgaatggctt

SEQ ID NO: 1881757 - DNA, 15 bp, Homo sapiens
ctgatgaatggcttc

SEQ ID NO: 1881758 - DNA, 15 bp, Homo sapiens
tgatgaatggcttcg

SEQ ID NO: 1881759 - DNA, 15 bp, Homo sapiens
gatgaatggcttcga

SEQ ID NO: 1881760 - DNA, 15 bp, Homo sapiens
atgaatggcttcgaa

SEQ ID NO: 1881761 - DNA, 15 bp, Homo sapiens
tgaatggcttcgaac

SEQ ID NO: 1881762 - DNA, 15 bp, Homo sapiens
gaatggcttcgaact

SEQ ID NO: 1881763 - DNA, 15 bp, Homo sapiens
aatggcttcgaactg

SEQ ID NO: 1881764 - DNA, 15 bp, Homo sapiens
atggcttcgaactga

SEQ ID NO: 1881765 - DNA, 15 bp, Homo sapiens
tggcttcgaactgag

SEQ ID NO: 1881766 - DNA, 15 bp, Homo sapiens
ggcttcgaactgaga

SEQ ID NO: 1881767 - DNA, 15 bp, Homo sapiens
gcttcgaactgagaa

SEQ ID NO: 1881768 - DNA, 15 bp, Homo sapiens
cttcgaactgagaaa

SEQ ID NO: 1881769 - DNA, 15 bp, Homo sapiens
ttcgaactgagaaag

SEQ ID NO: 1881770 - DNA, 15 bp, Homo sapiens
tcgaactgagaaagt

SEQ ID NO: 1881771 - DNA, 15 bp, Homo sapiens
cgaactgagaaagta

SEQ ID NO: 1881772 - DNA, 15 bp, Homo sapiens
gaactgagaaagtag

SEQ ID NO: 1881773 - DNA, 15 bp, Homo sapiens
aactgagaaagtaga

SEQ ID NO: 1881774 - DNA, 15 bp, Homo sapiens
actgagaaagtagaa

SEQ ID NO: 1881775 - DNA, 15 bp, Homo sapiens
ctgagaaagtagaag

SEQ ID NO: 1881776 - DNA, 15 bp, Homo sapiens
tgagaaagtagaagg

SEQ ID NO: 1881777 - DNA, 15 bp, Homo sapiens
gagaaagtagaaggt

SEQ ID NO: 1881778 - DNA, 15 bp, Homo sapiens
agaaagtagaaggtg

SEQ ID NO: 1881779 - DNA, 15 bp, Homo sapiens
gaaagtagaaggtga

SEQ ID NO: 1881780 - DNA, 15 bp, Homo sapiens
aaagtagaaggtgag

SEQ ID NO: 1881781 - DNA, 15 bp, Homo sapiens
aagtagaaggtgaga

SEQ ID NO: 1881782 - DNA, 15 bp, Homo sapiens
agtagaaggtgagat

SEQ ID NO: 1881783 - DNA, 15 bp, Homo sapiens
gtagaaggtgagatg

SEQ ID NO: 1881784 - DNA, 15 bp, Homo sapiens
tagaaggtgagatgc

SEQ ID NO: 1881785 - DNA, 15 bp, Homo sapiens
agaaggtgagatgct

SEQ ID NO: 1881786 - DNA, 15 bp, Homo sapiens
gaaggtgagatgctt

SEQ ID NO: 1881787 - DNA, 15 bp, Homo sapiens
aaggtgagatgctta

SEQ ID NO: 1881788 - DNA, 15 bp, Homo sapiens
aggtgagatgcttac

SEQ ID NO: 1881789 - DNA, 15 bp, Homo sapiens
ggtgagatgcttaca

SEQ ID NO: 1881790 - DNA, 15 bp, Homo sapiens
gtgagatgcttacat

SEQ ID NO: 1881791 - DNA, 15 bp, Homo sapiens
tgagatgcttacatt

SEQ ID NO: 1881792 - DNA, 15 bp, Homo sapiens
gagatgcttacattg

SEQ ID NO: 1881793 - DNA, 15 bp, Homo sapiens
agatgcttacattga

SEQ ID NO: 1881794 - DNA, 15 bp, Homo sapiens
gatgcttacattgag

SEQ ID NO: 1881795 - DNA, 15 bp, Homo sapiens
atgcttacattgagg

SEQ ID NO: 1881796 - DNA, 15 bp, Homo sapiens
tgcttacattgaggg

SEQ ID NO: 1881797 - DNA, 15 bp, Homo sapiens
gcttacattgagggt

SEQ ID NO: 1881798 - DNA, 15 bp, Homo sapiens
cttacattgagggtg

SEQ ID NO: 1881799 - DNA, 15 bp, Homo sapiens
ttacattgagggtgc

SEQ ID NO: 1881800 - DNA, 15 bp, Homo sapiens
tacattgagggtgca

SEQ ID NO: 1881801 - DNA, 15 bp, Homo sapiens
acattgagggtgcaa

SEQ ID NO: 1881802 - DNA, 15 bp, Homo sapiens
cattgagggtgcaaa

SEQ ID NO: 1881803 - DNA, 15 bp, Homo sapiens
attgagggtgcaaaa

SEQ ID NO: 1881804 - DNA, 15 bp, Homo sapiens
ttgagggtgcaaaag

SEQ ID NO: 1881805 - DNA, 15 bp, Homo sapiens
tgagggtgcaaaagt

SEQ ID NO: 1881806 - DNA, 15 bp, Homo sapiens
gagggtgcaaaagta

SEQ ID NO: 1881807 - DNA, 15 bp, Homo sapiens
agggtgcaaaagtaa

SEQ ID NO: 1881808 - DNA, 15 bp, Homo sapiens
gggtgcaaaagtaag

SEQ ID NO: 1881809 - DNA, 15 bp, Homo sapiens
ggtgcaaaagtaaga

SEQ ID NO: 1881810 - DNA, 15 bp, Homo sapiens
gtgcaaaagtaagac

SEQ ID NO: 1881811 - DNA, 15 bp, Homo sapiens
tgcaaaagtaagact

SEQ ID NO: 1881812 - DNA, 15 bp, Homo sapiens
gcaaaagtaagactg

SEQ ID NO: 1881813 - DNA, 15 bp, Homo sapiens
caaaagtaagactgg

SEQ ID NO: 1881814 - DNA, 15 bp, Homo sapiens
aaaagtaagactggg

SEQ ID NO: 1881815 - DNA, 15 bp, Homo sapiens
aaagtaagactgggc

SEQ ID NO: 1881816 - DNA, 15 bp, Homo sapiens
aagtaagactgggcc

SEQ ID NO: 1881817 - DNA, 15 bp, Homo sapiens
agtaagactgggcca

SEQ ID NO: 1881818 - DNA, 15 bp, Homo sapiens
gtaagactgggccat

SEQ ID NO: 1881819 - DNA, 15 bp, Homo sapiens
taagactgggccatt

SEQ ID NO: 1881820 - DNA, 15 bp, Homo sapiens
aagactgggccatta

SEQ ID NO: 1881821 - DNA, 15 bp, Homo sapiens
agactgggccattaa

SEQ ID NO: 1881822 - DNA, 15 bp, Homo sapiens
gactgggccattaaa

SEQ ID NO: 1881823 - DNA, 15 bp, Homo sapiens
actgggccattaaag

SEQ ID NO: 1881824 - DNA, 15 bp, Homo sapiens
ctgggccattaaaga

SEQ ID NO: 1881825 - DNA, 15 bp, Homo sapiens
tgggccattaaagaa

SEQ ID NO: 1881826 - DNA, 15 bp, Homo sapiens
gggccattaaagaaa

SEQ ID NO: 1881827 - DNA, 15 bp, Homo sapiens
ggccattaaagaaat

SEQ ID NO: 1881828 - DNA, 15 bp, Homo sapiens
gccattaaagaaatt

SEQ ID NO: 1881829 - DNA, 15 bp, Homo sapiens
ccattaaagaaattt

SEQ ID NO: 1881830 - DNA, 15 bp, Homo sapiens
cattaaagaaattta

SEQ ID NO: 1881831 - DNA, 15 bp, Homo sapiens
attaaagaaatttaa

SEQ ID NO: 1881832 - DNA, 15 bp, Homo sapiens
ttaaagaaatttaaa

SEQ ID NO: 1881833 - DNA, 15 bp, Homo sapiens
taaagaaatttaaag

SEQ ID NO: 1881834 - DNA, 15 bp, Homo sapiens
aaagaaatttaaagc

SEQ ID NO: 1881835 - DNA, 15 bp, Homo sapiens
aagaaatttaaagca

SEQ ID NO: 1881836 - DNA, 15 bp, Homo sapiens
agaaatttaaagcat

SEQ ID NO: 1881837 - DNA, 15 bp, Homo sapiens
gaaatttaaagcatt

SEQ ID NO: 1881838 - DNA, 15 bp, Homo sapiens
aaatttaaagcattc

SEQ ID NO: 1881839 - DNA, 15 bp, Homo sapiens
aatttaaagcattcc

SEQ ID NO: 1881840 - DNA, 15 bp, Homo sapiens
atttaaagcattccg

SEQ ID NO: 1881841 - DNA, 15 bp, Homo sapiens
tttaaagcattccga

SEQ ID NO: 1881842 - DNA, 15 bp, Homo sapiens
ttaaagcattccgaa

SEQ ID NO: 1881843 - DNA, 15 bp, Homo sapiens
taaagcattccgaat

SEQ ID NO: 1881844 - DNA, 15 bp, Homo sapiens
aaagcattccgaata

SEQ ID NO: 1881845 - DNA, 15 bp, Homo sapiens
aagcattccgaataa

SEQ ID NO: 1881846 - DNA, 15 bp, Homo sapiens
gaaaaatctcatttt

SEQ ID NO: 1881847 - DNA, 15 bp, Homo sapiens
aaaaatctcattttc

SEQ ID NO: 1881848 - DNA, 15 bp, Homo sapiens
aaaatctcattttca

SEQ ID NO: 1881849 - DNA, 15 bp, Homo sapiens
aaatctcattttcac

SEQ ID NO: 1881850 - DNA, 15 bp, Homo sapiens
aatctcattttcacc

SEQ ID NO: 1881851 - DNA, 15 bp, Homo sapiens
atctcattttcacca

SEQ ID NO: 1881852 - DNA, 15 bp, Homo sapiens
tctcattttcaccaa

SEQ ID NO: 1881853 - DNA, 15 bp, Homo sapiens
ctcattttcaccaat

SEQ ID NO: 1881854 - DNA, 15 bp, Homo sapiens
tcattttcaccaata

SEQ ID NO: 1881855 - DNA, 15 bp, Homo sapiens
cattttcaccaatac

SEQ ID NO: 1881856 - DNA, 15 bp, Homo sapiens
attttcaccaatacc

SEQ ID NO: 1881857 - DNA, 15 bp, Homo sapiens
ttttcaccaatacct

SEQ ID NO: 1881858 - DNA, 15 bp, Homo sapiens
tttcaccaatacctg

SEQ ID NO: 1881859 - DNA, 15 bp, Homo sapiens
ttcaccaatacctgc

SEQ ID NO: 1881860 - DNA, 15 bp, Homo sapiens
tcaccaatacctgct

SEQ ID NO: 1881861 - DNA, 15 bp, Homo sapiens
caccaatacctgcta

SEQ ID NO: 1881862 - DNA, 15 bp, Homo sapiens
accaatacctgctag

SEQ ID NO: 1881863 - DNA, 15 bp, Homo sapiens
ccaatacctgctagc

SEQ ID NO: 1881864 - DNA, 15 bp, Homo sapiens
caatacctgctagca

SEQ ID NO: 1881865 - DNA, 15 bp, Homo sapiens
aatacctgctagcac

SEQ ID NO: 1881866 - DNA, 15 bp, Homo sapiens
atacctgctagcact

SEQ ID NO: 1881867 - DNA, 15 bp, Homo sapiens
tacctgctagcactt

SEQ ID NO: 1881868 - DNA, 15 bp, Homo sapiens
acctgctagcacttc

SEQ ID NO: 1881869 - DNA, 15 bp, Homo sapiens
cctgctagcacttcc

SEQ ID NO: 1881870 - DNA, 15 bp, Homo sapiens
ctgctagcacttccc

SEQ ID NO: 1881871 - DNA, 15 bp, Homo sapiens
tgctagcacttccct

SEQ ID NO: 1881872 - DNA, 15 bp, Homo sapiens
gctagcacttccctt

SEQ ID NO: 1881873 - DNA, 15 bp, Homo sapiens
ctagcacttcccttg

SEQ ID NO: 1881874 - DNA, 15 bp, Homo sapiens
tagcacttcccttgc

SEQ ID NO: 1881875 - DNA, 15 bp, Homo sapiens
agcacttcccttgcc

SEQ ID NO: 1881876 - DNA, 15 bp, Homo sapiens
gcacttcccttgcca

SEQ ID NO: 1881877 - DNA, 15 bp, Homo sapiens
cacttcccttgccaa

SEQ ID NO: 1881878 - DNA, 15 bp, Homo sapiens
acttcccttgccaaa

SEQ ID NO: 1881879 - DNA, 15 bp, Homo sapiens
cttcccttgccaaat

SEQ ID NO: 1881880 - DNA, 15 bp, Homo sapiens
ttcccttgccaaatc

SEQ ID NO: 1881881 - DNA, 15 bp, Homo sapiens
tcccttgccaaatca

SEQ ID NO: 1881882 - DNA, 15 bp, Homo sapiens
cccttgccaaatcat

SEQ ID NO: 1881883 - DNA, 15 bp, Homo sapiens
ccttgccaaatcatt

SEQ ID NO: 1881884 - DNA, 15 bp, Homo sapiens
cttgccaaatcattc

SEQ ID NO: 1881885 - DNA, 15 bp, Homo sapiens
ttgccaaatcattca

SEQ ID NO: 1881886 - DNA, 15 bp, Homo sapiens
tgccaaatcattcat

SEQ ID NO: 1881887 - DNA, 15 bp, Homo sapiens
gccaaatcattcatc

SEQ ID NO: 1881888 - DNA, 15 bp, Homo sapiens
ccaaatcattcatct

SEQ ID NO: 1881889 - DNA, 15 bp, Homo sapiens
caaatcattcatctg

SEQ ID NO: 1881890 - DNA, 15 bp, Homo sapiens
aaatcattcatctga

SEQ ID NO: 1881891 - DNA, 15 bp, Homo sapiens
aatcattcatctgat

SEQ ID NO: 1881892 - DNA, 15 bp, Homo sapiens
atcattcatctgatt

SEQ ID NO: 1881893 - DNA, 15 bp, Homo sapiens
tcattcatctgattt

SEQ ID NO: 1881894 - DNA, 15 bp, Homo sapiens
cattcatctgattta

SEQ ID NO: 1881895 - DNA, 15 bp, Homo sapiens
attcatctgatttat

SEQ ID NO: 1881896 - DNA, 15 bp, Homo sapiens
ttcatctgatttatt

SEQ ID NO: 1881897 - DNA, 15 bp, Homo sapiens
tcatctgatttatta

SEQ ID NO: 1881898 - DNA, 15 bp, Homo sapiens
catctgatttattag

SEQ ID NO: 1881899 - DNA, 15 bp, Homo sapiens
atctgatttattagt

SEQ ID NO: 1881900 - DNA, 15 bp, Homo sapiens
tctgatttattagtg

SEQ ID NO: 1881901 - DNA, 15 bp, Homo sapiens
ctgatttattagtga

SEQ ID NO: 1881902 - DNA, 15 bp, Homo sapiens
tgatttattagtgac

SEQ ID NO: 1881903 - DNA, 15 bp, Homo sapiens
gatttattagtgact

SEQ ID NO: 1881904 - DNA, 15 bp, Homo sapiens
atttattagtgacta

SEQ ID NO: 1881905 - DNA, 15 bp, Homo sapiens
tttattagtgactaa

SEQ ID NO: 1881906 - DNA, 15 bp, Homo sapiens
ttattagtgactaat

SEQ ID NO: 1881907 - DNA, 15 bp, Homo sapiens
tattagtgactaatg

SEQ ID NO: 1881908 - DNA, 15 bp, Homo sapiens
attagtgactaatga

SEQ ID NO: 1881909 - DNA, 15 bp, Homo sapiens
ttagtgactaatgat

SEQ ID NO: 1881910 - DNA, 15 bp, Homo sapiens
tagtgactaatgata

SEQ ID NO: 1881911 - DNA, 15 bp, Homo sapiens
agtgactaatgatac

SEQ ID NO: 1881912 - DNA, 15 bp, Homo sapiens
gtgactaatgatact

SEQ ID NO: 1881913 - DNA, 15 bp, Homo sapiens
tgactaatgatactc

SEQ ID NO: 1881914 - DNA, 15 bp, Homo sapiens
gactaatgatactca

SEQ ID NO: 1881915 - DNA, 15 bp, Homo sapiens
actaatgatactcat

SEQ ID NO: 1881916 - DNA, 15 bp, Homo sapiens
ctaatgatactcatt

SEQ ID NO: 1881917 - DNA, 15 bp, Homo sapiens
taatgatactcattc

SEQ ID NO: 1881918 - DNA, 15 bp, Homo sapiens
aatgatactcattct

SEQ ID NO: 1881919 - DNA, 15 bp, Homo sapiens
atgatactcattctg

SEQ ID NO: 1881920 - DNA, 15 bp, Homo sapiens
tgatactcattctga

SEQ ID NO: 1881921 - DNA, 15 bp, Homo sapiens
gatactcattctgaa

SEQ ID NO: 1881922 - DNA, 15 bp, Homo sapiens
atactcattctgaag

SEQ ID NO: 1881923 - DNA, 15 bp, Homo sapiens
tactcattctgaagt

SEQ ID NO: 1881924 - DNA, 15 bp, Homo sapiens
actcattctgaagtt

SEQ ID NO: 1881925 - DNA, 15 bp, Homo sapiens
ctcattctgaagtta

SEQ ID NO: 1881926 - DNA, 15 bp, Homo sapiens
tcattctgaagttac

SEQ ID NO: 1881927 - DNA, 15 bp, Homo sapiens
cattctgaagttact

SEQ ID NO: 1881928 - DNA, 15 bp, Homo sapiens
attctgaagttactt

SEQ ID NO: 1881929 - DNA, 15 bp, Homo sapiens
ttctgaagttacttg

SEQ ID NO: 1881930 - DNA, 15 bp, Homo sapiens
tctgaagttacttgc

SEQ ID NO: 1881931 - DNA, 15 bp, Homo sapiens
ctgaagttacttgcc

SEQ ID NO: 1881932 - DNA, 15 bp, Homo sapiens
tgaagttacttgcct

SEQ ID NO: 1881933 - DNA, 15 bp, Homo sapiens
gaagttacttgcctt

SEQ ID NO: 1881934 - DNA, 15 bp, Homo sapiens
aagttacttgccttg

SEQ ID NO: 1881935 - DNA, 15 bp, Homo sapiens
agttacttgccttgt

SEQ ID NO: 1881936 - DNA, 15 bp, Homo sapiens
gttacttgccttgta

SEQ ID NO: 1881937 - DNA, 15 bp, Homo sapiens
ttacttgccttgtat

SEQ ID NO: 1881938 - DNA, 15 bp, Homo sapiens
tacttgccttgtatg

SEQ ID NO: 1881939 - DNA, 15 bp, Homo sapiens
acttgccttgtatga

SEQ ID NO: 1881940 - DNA, 15 bp, Homo sapiens
cttgccttgtatgag

SEQ ID NO: 1881941 - DNA, 15 bp, Homo sapiens
ttgccttgtatgaga

SEQ ID NO: 1881942 - DNA, 15 bp, Homo sapiens
tgccttgtatgagaa

SEQ ID NO: 1881943 - DNA, 15 bp, Homo sapiens
gccttgtatgagaaa

SEQ ID NO: 1881944 - DNA, 15 bp, Homo sapiens
ccttgtatgagaaag

SEQ ID NO: 1881945 - DNA, 15 bp, Homo sapiens
cttgtatgagaaagc

SEQ ID NO: 1881946 - DNA, 15 bp, Homo sapiens
ttgtatgagaaagca

SEQ ID NO: 1881947 - DNA, 15 bp, Homo sapiens
tgtatgagaaagcat

SEQ ID NO: 1881948 - DNA, 15 bp, Homo sapiens
gtatgagaaagcata

SEQ ID NO: 1881949 - DNA, 15 bp, Homo sapiens
tatgagaaagcatag

SEQ ID NO: 1881950 - DNA, 15 bp, Homo sapiens
atgagaaagcataga

SEQ ID NO: 1881951 - DNA, 15 bp, Homo sapiens
tgagaaagcatagaa

SEQ ID NO: 1881952 - DNA, 15 bp, Homo sapiens
gagaaagcatagaat

SEQ ID NO: 1881953 - DNA, 15 bp, Homo sapiens
agaaagcatagaatc

SEQ ID NO: 1881954 - DNA, 15 bp, Homo sapiens
gaaagcatagaatct

SEQ ID NO: 1881955 - DNA, 15 bp, Homo sapiens
aaagcatagaatctg

SEQ ID NO: 1881956 - DNA, 15 bp, Homo sapiens
aagcatagaatctgg

SEQ ID NO: 1881957 - DNA, 15 bp, Homo sapiens
agcatagaatctggt

SEQ ID NO: 1881958 - DNA, 15 bp, Homo sapiens
gcatagaatctggtc

SEQ ID NO: 1881959 - DNA, 15 bp, Homo sapiens
catagaatctggtcc

SEQ ID NO: 1881960 - DNA, 15 bp, Homo sapiens
atagaatctggtcct

SEQ ID NO: 1881961 - DNA, 15 bp, Homo sapiens
tagaatctggtcctg

SEQ ID NO: 1881962 - DNA, 15 bp, Homo sapiens
agaatctggtcctgc

SEQ ID NO: 1881963 - DNA, 15 bp, Homo sapiens
gaatctggtcctgct

SEQ ID NO: 1881964 - DNA, 15 bp, Homo sapiens
aatctggtcctgctg

SEQ ID NO: 1881965 - DNA, 15 bp, Homo sapiens
atctggtcctgctgc

SEQ ID NO: 1881966 - DNA, 15 bp, Homo sapiens
tctggtcctgctgct

SEQ ID NO: 1881967 - DNA, 15 bp, Homo sapiens
ctggtcctgctgctg

SEQ ID NO: 1881968 - DNA, 15 bp, Homo sapiens
tggtcctgctgctgg

SEQ ID NO: 1881969 - DNA, 15 bp, Homo sapiens
ggtcctgctgctggc

SEQ ID NO: 1881970 - DNA, 15 bp, Homo sapiens
gtcctgctgctggct

SEQ ID NO: 1881971 - DNA, 15 bp, Homo sapiens
tcctgctgctggcta

SEQ ID NO: 1881972 - DNA, 15 bp, Homo sapiens
cctgctgctggctaa

SEQ ID NO: 1881973 - DNA, 15 bp, Homo sapiens
ctgctgctggctaac

SEQ ID NO: 1881974 - DNA, 15 bp, Homo sapiens
tgctgctggctaact

SEQ ID NO: 1881975 - DNA, 15 bp, Homo sapiens
gctgctggctaactt

SEQ ID NO: 1881976 - DNA, 15 bp, Homo sapiens
ctgctggctaactta

SEQ ID NO: 1881977 - DNA, 15 bp, Homo sapiens
tgctggctaacttat

SEQ ID NO: 1881978 - DNA, 15 bp, Homo sapiens
gctggctaacttatt

SEQ ID NO: 1881979 - DNA, 15 bp, Homo sapiens
ctggctaacttattt

SEQ ID NO: 1881980 - DNA, 15 bp, Homo sapiens
tggctaacttatttg

SEQ ID NO: 1881981 - DNA, 15 bp, Homo sapiens
ggctaacttatttga

SEQ ID NO: 1881982 - DNA, 15 bp, Homo sapiens
gctaacttatttgac

SEQ ID NO: 1881983 - DNA, 15 bp, Homo sapiens
ctaacttatttgaca

SEQ ID NO: 1881984 - DNA, 15 bp, Homo sapiens
taacttatttgacac

SEQ ID NO: 1881985 - DNA, 15 bp, Homo sapiens
aacttatttgacaca

SEQ ID NO: 1881986 - DNA, 15 bp, Homo sapiens
acttatttgacacaa

SEQ ID NO: 1881987 - DNA, 15 bp, Homo sapiens
cttatttgacacaaa

SEQ ID NO: 1881988 - DNA, 15 bp, Homo sapiens
ttatttgacacaaag

SEQ ID NO: 1881989 - DNA, 15 bp, Homo sapiens
tatttgacacaaagt

SEQ ID NO: 1881990 - DNA, 15 bp, Homo sapiens
atttgacacaaagta

SEQ ID NO: 1881991 - DNA, 15 bp, Homo sapiens
tttgacacaaagtaa

SEQ ID NO: 1881992 - DNA, 15 bp, Homo sapiens
ttgacacaaagtaaa

SEQ ID NO: 1881993 - DNA, 15 bp, Homo sapiens
tgacacaaagtaaat

SEQ ID NO: 1881994 - DNA, 15 bp, Homo sapiens
gacacaaagtaaatc

SEQ ID NO: 1881995 - DNA, 15 bp, Homo sapiens
acacaaagtaaatca

SEQ ID NO: 1881996 - DNA, 15 bp, Homo sapiens
cacaaagtaaatcat

SEQ ID NO: 1881997 - DNA, 15 bp, Homo sapiens
acaaagtaaatcatt

SEQ ID NO: 1881998 - DNA, 15 bp, Homo sapiens
caaagtaaatcattt

SEQ ID NO: 1881999 - DNA, 15 bp, Homo sapiens
aaagtaaatcattta

SEQ ID NO: 1882000 - DNA, 15 bp, Homo sapiens
aagtaaatcatttaa

SEQ ID NO: 1882001 - DNA, 15 bp, Homo sapiens
agtaaatcatttaaa

SEQ ID NO: 1882002 - DNA, 15 bp, Homo sapiens
gtaaatcatttaaat

SEQ ID NO: 1882003 - DNA, 15 bp, Homo sapiens
taaatcatttaaatc

SEQ ID NO: 1882004 - DNA, 15 bp, Homo sapiens
aaatcatttaaatca

SEQ ID NO: 1882005 - DNA, 15 bp, Homo sapiens
aatcatttaaatcaa

SEQ ID NO: 1882006 - DNA, 15 bp, Homo sapiens
atcatttaaatcaat

SEQ ID NO: 1882007 - DNA, 15 bp, Homo sapiens
tcatttaaatcaatc

SEQ ID NO: 1882008 - DNA, 15 bp, Homo sapiens
catttaaatcaatca

SEQ ID NO: 1882009 - DNA, 15 bp, Homo sapiens
atttaaatcaatcag

SEQ ID NO: 1882010 - DNA, 15 bp, Homo sapiens
tttaaatcaatcagt

SEQ ID NO: 1882011 - DNA, 15 bp, Homo sapiens
ttaaatcaatcagtt

SEQ ID NO: 1882012 - DNA, 15 bp, Homo sapiens
taaatcaatcagttt

SEQ ID NO: 1882013 - DNA, 15 bp, Homo sapiens
aaatcaatcagtttc

SEQ ID NO: 1882014 - DNA, 15 bp, Homo sapiens
aatcaatcagtttcc

SEQ ID NO: 1882015 - DNA, 15 bp, Homo sapiens
atcaatcagtttccc

SEQ ID NO: 1882016 - DNA, 15 bp, Homo sapiens
tcaatcagtttccca

SEQ ID NO: 1882017 - DNA, 15 bp, Homo sapiens
caatcagtttcccag

SEQ ID NO: 1882018 - DNA, 15 bp, Homo sapiens
aatcagtttcccagt

SEQ ID NO: 1882019 - DNA, 15 bp, Homo sapiens
atcagtttcccagta

SEQ ID NO: 1882020 - DNA, 15 bp, Homo sapiens
tcagtttcccagtaa

SEQ ID NO: 1882021 - DNA, 15 bp, Homo sapiens
cagtttcccagtaag

SEQ ID NO: 1882022 - DNA, 15 bp, Homo sapiens
agtttcccagtaagt

SEQ ID NO: 1882023 - DNA, 15 bp, Homo sapiens
gtttcccagtaagta

SEQ ID NO: 1882024 - DNA, 15 bp, Homo sapiens
tttcccagtaagtaa

SEQ ID NO: 1882025 - DNA, 15 bp, Homo sapiens
ttcccagtaagtaaa

SEQ ID NO: 1882026 - DNA, 15 bp, Homo sapiens
tcccagtaagtaaaa

SEQ ID NO: 1882027 - DNA, 15 bp, Homo sapiens
cccagtaagtaaaat

SEQ ID NO: 1882028 - DNA, 15 bp, Homo sapiens
ccagtaagtaaaatt

SEQ ID NO: 1882029 - DNA, 15 bp, Homo sapiens
cagtaagtaaaatta

SEQ ID NO: 1882030 - DNA, 15 bp, Homo sapiens
agtaagtaaaattat

SEQ ID NO: 1882031 - DNA, 15 bp, Homo sapiens
gtaagtaaaattatt

SEQ ID NO: 1882032 - DNA, 15 bp, Homo sapiens
taagtaaaattattc

SEQ ID NO: 1882033 - DNA, 15 bp, Homo sapiens
aagtaaaattattca

SEQ ID NO: 1882034 - DNA, 15 bp, Homo sapiens
agtaaaattattcaa

SEQ ID NO: 1882035 - DNA, 15 bp, Homo sapiens
gtaaaattattcaat

SEQ ID NO: 1882036 - DNA, 15 bp, Homo sapiens
taaaattattcaatt

SEQ ID NO: 1882037 - DNA, 15 bp, Homo sapiens
aaaattattcaattt

SEQ ID NO: 1882038 - DNA, 15 bp, Homo sapiens
aaattattcaatttg

SEQ ID NO: 1882039 - DNA, 15 bp, Homo sapiens
aattattcaatttga

SEQ ID NO: 1882040 - DNA, 15 bp, Homo sapiens
attattcaatttgat

SEQ ID NO: 1882041 - DNA, 15 bp, Homo sapiens
ttattcaatttgatt

SEQ ID NO: 1882042 - DNA, 15 bp, Homo sapiens
tattcaatttgatta

SEQ ID NO: 1882043 - DNA, 15 bp, Homo sapiens
attcaatttgattag

SEQ ID NO: 1882044 - DNA, 15 bp, Homo sapiens
ttcaatttgattagg

SEQ ID NO: 1882045 - DNA, 15 bp, Homo sapiens
tcaatttgattaggc

SEQ ID NO: 1882046 - DNA, 15 bp, Homo sapiens
caatttgattaggca

SEQ ID NO: 1882047 - DNA, 15 bp, Homo sapiens
aatttgattaggcaa

SEQ ID NO: 1882048 - DNA, 15 bp, Homo sapiens
atttgattaggcaat

SEQ ID NO: 1882049 - DNA, 15 bp, Homo sapiens
tttgattaggcaatc

SEQ ID NO: 1882050 - DNA, 15 bp, Homo sapiens
ttgattaggcaatct

SEQ ID NO: 1882051 - DNA, 15 bp, Homo sapiens
tgattaggcaatctg

SEQ ID NO: 1882052 - DNA, 15 bp, Homo sapiens
gattaggcaatctgt

SEQ ID NO: 1882053 - DNA, 15 bp, Homo sapiens
attaggcaatctgta

SEQ ID NO: 1882054 - DNA, 15 bp, Homo sapiens
ttaggcaatctgtaa

SEQ ID NO: 1882055 - DNA, 15 bp, Homo sapiens
taggcaatctgtaag

SEQ ID NO: 1882056 - DNA, 15 bp, Homo sapiens
aggcaatctgtaagt

SEQ ID NO: 1882057 - DNA, 15 bp, Homo sapiens
ggcaatctgtaagtt

SEQ ID NO: 1882058 - DNA, 15 bp, Homo sapiens
gcaatctgtaagttc

SEQ ID NO: 1882059 - DNA, 15 bp, Homo sapiens
caatctgtaagttcc

SEQ ID NO: 1882060 - DNA, 15 bp, Homo sapiens
aatctgtaagttcct

SEQ ID NO: 1882061 - DNA, 15 bp, Homo sapiens
atctgtaagttcctg

SEQ ID NO: 1882062 - DNA, 15 bp, Homo sapiens
ctgtaagttcctggc

SEQ ID NO: 1882063 - DNA, 15 bp, Homo sapiens
tgtaagttcctggct

SEQ ID NO: 1882064 - DNA, 15 bp, Homo sapiens
gtaagttcctggcta

SEQ ID NO: 1882065 - DNA, 15 bp, Homo sapiens
taagttcctggctag

SEQ ID NO: 1882066 - DNA, 15 bp, Homo sapiens
aagttcctggctagc

SEQ ID NO: 1882067 - DNA, 15 bp, Homo sapiens
agttcctggctagcc

SEQ ID NO: 1882068 - DNA, 15 bp, Homo sapiens
gttcctggctagcct

SEQ ID NO: 1882069 - DNA, 15 bp, Homo sapiens
ttcctggctagccta

SEQ ID NO: 1882070 - DNA, 15 bp, Homo sapiens
tcctggctagcctaa

SEQ ID NO: 1882071 - DNA, 15 bp, Homo sapiens
cctggctagcctaag

SEQ ID NO: 1882072 - DNA, 15 bp, Homo sapiens
ctggctagcctaaga

SEQ ID NO: 1882073 - DNA, 15 bp, Homo sapiens
tggctagcctaagaa

SEQ ID NO: 1882074 - DNA, 15 bp, Homo sapiens
ggctagcctaagaat

SEQ ID NO: 1882075 - DNA, 15 bp, Homo sapiens
gctagcctaagaatt

SEQ ID NO: 1882076 - DNA, 15 bp, Homo sapiens
ctagcctaagaattc

SEQ ID NO: 1882077 - DNA, 15 bp, Homo sapiens
tagcctaagaattct

SEQ ID NO: 1882078 - DNA, 15 bp, Homo sapiens
agcctaagaattctg

SEQ ID NO: 1882079 - DNA, 15 bp, Homo sapiens
gcctaagaattctga

SEQ ID NO: 1882080 - DNA, 15 bp, Homo sapiens
cctaagaattctgaa

SEQ ID NO: 1882081 - DNA, 15 bp, Homo sapiens
ctaagaattctgaaa

SEQ ID NO: 1882082 - DNA, 15 bp, Homo sapiens
taagaattctgaaaa

SEQ ID NO: 1882083 - DNA, 15 bp, Homo sapiens
aagaattctgaaaac

SEQ ID NO: 1882084 - DNA, 15 bp, Homo sapiens
agaattctgaaaaca

SEQ ID NO: 1882085 - DNA, 15 bp, Homo sapiens
gaattctgaaaacat

SEQ ID NO: 1882086 - DNA, 15 bp, Homo sapiens
aattctgaaaacatg

SEQ ID NO: 1882087 - DNA, 15 bp, Homo sapiens
attctgaaaacatga

SEQ ID NO: 1882088 - DNA, 15 bp, Homo sapiens
ttctgaaaacatgac

SEQ ID NO: 1882089 - DNA, 15 bp, Homo sapiens
tctgaaaacatgaca

SEQ ID NO: 1882090 - DNA, 15 bp, Homo sapiens
ctgaaaacatgacac

SEQ ID NO: 1882091 - DNA, 15 bp, Homo sapiens
tgaaaacatgacaca

SEQ ID NO: 1882092 - DNA, 15 bp, Homo sapiens
gaaaacatgacacat

SEQ ID NO: 1882093 - DNA, 15 bp, Homo sapiens
aaaacatgacacatt

SEQ ID NO: 1882094 - DNA, 15 bp, Homo sapiens
aaacatgacacatta

SEQ ID NO: 1882095 - DNA, 15 bp, Homo sapiens
aacatgacacattat

SEQ ID NO: 1882096 - DNA, 15 bp, Homo sapiens
acatgacacattata

SEQ ID NO: 1882097 - DNA, 15 bp, Homo sapiens
catgacacattatac

SEQ ID NO: 1882098 - DNA, 15 bp, Homo sapiens
atgacacattatact

SEQ ID NO: 1882099 - DNA, 15 bp, Homo sapiens
tgacacattatactc

SEQ ID NO: 1882100 - DNA, 15 bp, Homo sapiens
gacacattatactca

SEQ ID NO: 1882101 - DNA, 15 bp, Homo sapiens
acacattatactcat

SEQ ID NO: 1882102 - DNA, 15 bp, Homo sapiens
cacattatactcata

SEQ ID NO: 1882103 - DNA, 15 bp, Homo sapiens
acattatactcataa

SEQ ID NO: 1882104 - DNA, 15 bp, Homo sapiens
cattatactcataac

SEQ ID NO: 1882105 - DNA, 15 bp, Homo sapiens
attatactcataact

SEQ ID NO: 1882106 - DNA, 15 bp, Homo sapiens
ttatactcataactg

SEQ ID NO: 1882107 - DNA, 15 bp, Homo sapiens
tatactcataactgt

SEQ ID NO: 1882108 - DNA, 15 bp, Homo sapiens
atactcataactgtg

SEQ ID NO: 1882109 - DNA, 15 bp, Homo sapiens
tactcataactgtga

SEQ ID NO: 1882110 - DNA, 15 bp, Homo sapiens
actcataactgtgat

SEQ ID NO: 1882111 - DNA, 15 bp, Homo sapiens
ctcataactgtgata

SEQ ID NO: 1882112 - DNA, 15 bp, Homo sapiens
tcataactgtgatat

SEQ ID NO: 1882113 - DNA, 15 bp, Homo sapiens
cataactgtgatata

SEQ ID NO: 1882114 - DNA, 15 bp, Homo sapiens
ataactgtgatataa

SEQ ID NO: 1882115 - DNA, 15 bp, Homo sapiens
taactgtgatataat

SEQ ID NO: 1882116 - DNA, 15 bp, Homo sapiens
aactgtgatataata

SEQ ID NO: 1882117 - DNA, 15 bp, Homo sapiens
actgtgatataatag

SEQ ID NO: 1882118 - DNA, 15 bp, Homo sapiens
ctgtgatataatagc

SEQ ID NO: 1882119 - DNA, 15 bp, Homo sapiens
tgtgatataatagct

SEQ ID NO: 1882120 - DNA, 15 bp, Homo sapiens
gtgatataatagctt

SEQ ID NO: 1882121 - DNA, 15 bp, Homo sapiens
tgatataatagctta

SEQ ID NO: 1882122 - DNA, 15 bp, Homo sapiens
gatataatagcttat

SEQ ID NO: 1882123 - DNA, 15 bp, Homo sapiens
atataatagcttatg

SEQ ID NO: 1882124 - DNA, 15 bp, Homo sapiens
tataatagcttatga

SEQ ID NO: 1882125 - DNA, 15 bp, Homo sapiens
ataatagcttatgac

SEQ ID NO: 1882126 - DNA, 15 bp, Homo sapiens
taatagcttatgacc

SEQ ID NO: 1882127 - DNA, 15 bp, Homo sapiens
aatagcttatgacca

SEQ ID NO: 1882128 - DNA, 15 bp, Homo sapiens
atagcttatgaccaa

SEQ ID NO: 1882129 - DNA, 15 bp, Homo sapiens
tagcttatgaccaac

SEQ ID NO: 1882130 - DNA, 15 bp, Homo sapiens
agcttatgaccaaca

SEQ ID NO: 1882131 - DNA, 15 bp, Homo sapiens
gcttatgaccaacag

SEQ ID NO: 1882132 - DNA, 15 bp, Homo sapiens
cttatgaccaacaga

SEQ ID NO: 1882133 - DNA, 15 bp, Homo sapiens
ttatgaccaacagaa

SEQ ID NO: 1882134 - DNA, 15 bp, Homo sapiens
tatgaccaacagaat

SEQ ID NO: 1882135 - DNA, 15 bp, Homo sapiens
atgaccaacagaatc

SEQ ID NO: 1882136 - DNA, 15 bp, Homo sapiens
tgaccaacagaatca

SEQ ID NO: 1882137 - DNA, 15 bp, Homo sapiens
gaccaacagaatcat

SEQ ID NO: 1882138 - DNA, 15 bp, Homo sapiens
accaacagaatcata

SEQ ID NO: 1882139 - DNA, 15 bp, Homo sapiens
ccaacagaatcataa

SEQ ID NO: 1882140 - DNA, 15 bp, Homo sapiens
caacagaatcataaa

SEQ ID NO: 1882141 - DNA, 15 bp, Homo sapiens
aacagaatcataaaa

SEQ ID NO: 1882142 - DNA, 15 bp, Homo sapiens
acagaatcataaaac

SEQ ID NO: 1882143 - DNA, 15 bp, Homo sapiens
cagaatcataaaact

SEQ ID NO: 1882144 - DNA, 15 bp, Homo sapiens
agaatcataaaactg

SEQ ID NO: 1882145 - DNA, 15 bp, Homo sapiens
gaatcataaaactga

SEQ ID NO: 1882146 - DNA, 15 bp, Homo sapiens
aatcataaaactgat

SEQ ID NO: 1882147 - DNA, 15 bp, Homo sapiens
atcataaaactgatg

SEQ ID NO: 1882148 - DNA, 15 bp, Homo sapiens
tcataaaactgatga

SEQ ID NO: 1882149 - DNA, 15 bp, Homo sapiens
cataaaactgatgaa

SEQ ID NO: 1882150 - DNA, 15 bp, Homo sapiens
ataaaactgatgaaa

SEQ ID NO: 1882151 - DNA, 15 bp, Homo sapiens
taaaactgatgaaag

SEQ ID NO: 1882152 - DNA, 15 bp, Homo sapiens
aaaactgatgaaagc

SEQ ID NO: 1882153 - DNA, 15 bp, Homo sapiens
aaactgatgaaagct

SEQ ID NO: 1882154 - DNA, 15 bp, Homo sapiens
aactgatgaaagctt

SEQ ID NO: 1882155 - DNA, 15 bp, Homo sapiens
actgatgaaagctta

SEQ ID NO: 1882156 - DNA, 15 bp, Homo sapiens
ctgatgaaagcttag

SEQ ID NO: 1882157 - DNA, 15 bp, Homo sapiens
tgatgaaagcttaga

SEQ ID NO: 1882158 - DNA, 15 bp, Homo sapiens
gatgaaagcttagac

SEQ ID NO: 1882159 - DNA, 15 bp, Homo sapiens
atgaaagcttagaca

SEQ ID NO: 1882160 - DNA, 15 bp, Homo sapiens
tgaaagcttagacaa

SEQ ID NO: 1882161 - DNA, 15 bp, Homo sapiens
gaaagcttagacaat

SEQ ID NO: 1882162 - DNA, 15 bp, Homo sapiens
aaagcttagacaata

SEQ ID NO: 1882163 - DNA, 15 bp, Homo sapiens
aagcttagacaatat

SEQ ID NO: 1882164 - DNA, 15 bp, Homo sapiens
agcttagacaatatt

SEQ ID NO: 1882165 - DNA, 15 bp, Homo sapiens
gcttagacaatattc

SEQ ID NO: 1882166 - DNA, 15 bp, Homo sapiens
cttagacaatattca

SEQ ID NO: 1882167 - DNA, 15 bp, Homo sapiens
ttagacaatattcaa

SEQ ID NO: 1882168 - DNA, 15 bp, Homo sapiens
tagacaatattcaat

SEQ ID NO: 1882169 - DNA, 15 bp, Homo sapiens
agacaatattcaatt

SEQ ID NO: 1882170 - DNA, 15 bp, Homo sapiens
gacaatattcaattt

SEQ ID NO: 1882171 - DNA, 15 bp, Homo sapiens
acaatattcaatttg

SEQ ID NO: 1882172 - DNA, 15 bp, Homo sapiens
caatattcaatttgc

SEQ ID NO: 1882173 - DNA, 15 bp, Homo sapiens
aatattcaatttgcc

SEQ ID NO: 1882174 - DNA, 15 bp, Homo sapiens
atattcaatttgccc

SEQ ID NO: 1882175 - DNA, 15 bp, Homo sapiens
tattcaatttgcccc

SEQ ID NO: 1882176 - DNA, 15 bp, Homo sapiens
attcaatttgcccca

SEQ ID NO: 1882177 - DNA, 15 bp, Homo sapiens
ttcaatttgccccat

SEQ ID NO: 1882178 - DNA, 15 bp, Homo sapiens
tcaatttgccccatt

SEQ ID NO: 1882179 - DNA, 15 bp, Homo sapiens
caatttgccccattt

SEQ ID NO: 1882180 - DNA, 15 bp, Homo sapiens
aatttgccccatttg

SEQ ID NO: 1882181 - DNA, 15 bp, Homo sapiens
atttgccccatttgt

SEQ ID NO: 1882182 - DNA, 15 bp, Homo sapiens
tttgccccatttgtt

SEQ ID NO: 1882183 - DNA, 15 bp, Homo sapiens
ttgccccatttgttt

SEQ ID NO: 1882184 - DNA, 15 bp, Homo sapiens
tgccccatttgtttt

SEQ ID NO: 1882185 - DNA, 15 bp, Homo sapiens
gccccatttgtttta

SEQ ID NO: 1882186 - DNA, 15 bp, Homo sapiens
ccccatttgttttac

SEQ ID NO: 1882187 - DNA, 15 bp, Homo sapiens
cccatttgttttact

SEQ ID NO: 1882188 - DNA, 15 bp, Homo sapiens
ccatttgttttactg

SEQ ID NO: 1882189 - DNA, 15 bp, Homo sapiens
catttgttttactga

SEQ ID NO: 1882190 - DNA, 15 bp, Homo sapiens
atttgttttactgat

SEQ ID NO: 1882191 - DNA, 15 bp, Homo sapiens
tttgttttactgatc

SEQ ID NO: 1882192 - DNA, 15 bp, Homo sapiens
ttgttttactgatct

SEQ ID NO: 1882193 - DNA, 15 bp, Homo sapiens
tgttttactgatcta

SEQ ID NO: 1882194 - DNA, 15 bp, Homo sapiens
gttttactgatctat

SEQ ID NO: 1882195 - DNA, 15 bp, Homo sapiens
ttttactgatctata

SEQ ID NO: 1882196 - DNA, 15 bp, Homo sapiens
tttactgatctataa

SEQ ID NO: 1882197 - DNA, 15 bp, Homo sapiens
ttactgatctataaa

SEQ ID NO: 1882198 - DNA, 15 bp, Homo sapiens
tactgatctataaaa

SEQ ID NO: 1882199 - DNA, 15 bp, Homo sapiens
actgatctataaaaa

SEQ ID NO: 1882200 - DNA, 15 bp, Homo sapiens
ctgatctataaaaag

SEQ ID NO: 1882201 - DNA, 15 bp, Homo sapiens
tgatctataaaaaga

SEQ ID NO: 1882202 - DNA, 15 bp, Homo sapiens
gatctataaaaagaa

SEQ ID NO: 1882203 - DNA, 15 bp, Homo sapiens
atctataaaaagaag

SEQ ID NO: 1882204 - DNA, 15 bp, Homo sapiens
tctataaaaagaagt

SEQ ID NO: 1882205 - DNA, 15 bp, Homo sapiens
ctataaaaagaagtc

SEQ ID NO: 1882206 - DNA, 15 bp, Homo sapiens
tataaaaagaagtcc

SEQ ID NO: 1882207 - DNA, 15 bp, Homo sapiens
ataaaaagaagtccc

SEQ ID NO: 1882208 - DNA, 15 bp, Homo sapiens
taaaaagaagtcccc

SEQ ID NO: 1882209 - DNA, 15 bp, Homo sapiens
aaaaagaagtcccca

SEQ ID NO: 1882210 - DNA, 15 bp, Homo sapiens
aaaagaagtccccaa

SEQ ID NO: 1882211 - DNA, 15 bp, Homo sapiens
aaagaagtccccaaa

SEQ ID NO: 1882212 - DNA, 15 bp, Homo sapiens
aagaagtccccaaag

SEQ ID NO: 1882213 - DNA, 15 bp, Homo sapiens
agaagtccccaaaga

SEQ ID NO: 1882214 - DNA, 15 bp, Homo sapiens
gaagtccccaaagat

SEQ ID NO: 1882215 - DNA, 15 bp, Homo sapiens
aagtccccaaagatt

SEQ ID NO: 1882216 - DNA, 15 bp, Homo sapiens
agtccccaaagattt

SEQ ID NO: 1882217 - DNA, 15 bp, Homo sapiens
gtccccaaagattta

SEQ ID NO: 1882218 - DNA, 15 bp, Homo sapiens
tccccaaagatttat

SEQ ID NO: 1882219 - DNA, 15 bp, Homo sapiens
ccccaaagatttatg

SEQ ID NO: 1882220 - DNA, 15 bp, Homo sapiens
cccaaagatttatgt

SEQ ID NO: 1882221 - DNA, 15 bp, Homo sapiens
ccaaagatttatgtc

SEQ ID NO: 1882222 - DNA, 15 bp, Homo sapiens
caaagatttatgtct

SEQ ID NO: 1882223 - DNA, 15 bp, Homo sapiens
aaagatttatgtctg

SEQ ID NO: 1882224 - DNA, 15 bp, Homo sapiens
aagatttatgtctgg

SEQ ID NO: 1882225 - DNA, 15 bp, Homo sapiens
agatttatgtctggc

SEQ ID NO: 1882226 - DNA, 15 bp, Homo sapiens
gatttatgtctggcc

SEQ ID NO: 1882227 - DNA, 15 bp, Homo sapiens
atttatgtctggcct

SEQ ID NO: 1882228 - DNA, 15 bp, Homo sapiens
tttatgtctggccta

SEQ ID NO: 1882229 - DNA, 15 bp, Homo sapiens
ttatgtctggcctaa

SEQ ID NO: 1882230 - DNA, 15 bp, Homo sapiens
tatgtctggcctaag

SEQ ID NO: 1882231 - DNA, 15 bp, Homo sapiens
atgtctggcctaagg

SEQ ID NO: 1882232 - DNA, 15 bp, Homo sapiens
tgtctggcctaaggt

SEQ ID NO: 1882233 - DNA, 15 bp, Homo sapiens
gtctggcctaaggtc

SEQ ID NO: 1882234 - DNA, 15 bp, Homo sapiens
tctggcctaaggtca

SEQ ID NO: 1882235 - DNA, 15 bp, Homo sapiens
ctggcctaaggtcaa

SEQ ID NO: 1882236 - DNA, 15 bp, Homo sapiens
tggcctaaggtcaag

SEQ ID NO: 1882237 - DNA, 15 bp, Homo sapiens
ggcctaaggtcaagt

SEQ ID NO: 1882238 - DNA, 15 bp, Homo sapiens
gcctaaggtcaagta

SEQ ID NO: 1882239 - DNA, 15 bp, Homo sapiens
cctaaggtcaagtag

SEQ ID NO: 1882240 - DNA, 15 bp, Homo sapiens
ctaaggtcaagtagt

SEQ ID NO: 1882241 - DNA, 15 bp, Homo sapiens
taaggtcaagtagtt

SEQ ID NO: 1882242 - DNA, 15 bp, Homo sapiens
aaggtcaagtagttt

SEQ ID NO: 1882243 - DNA, 15 bp, Homo sapiens
aggtcaagtagtttt

SEQ ID NO: 1882244 - DNA, 15 bp, Homo sapiens
ggtcaagtagttttt

SEQ ID NO: 1882245 - DNA, 15 bp, Homo sapiens
gtcaagtagtttttt

SEQ ID NO: 1882246 - DNA, 15 bp, Homo sapiens
tcaagtagttttttt

SEQ ID NO: 1882247 - DNA, 15 bp, Homo sapiens
caagtagttttttta

SEQ ID NO: 1882248 - DNA, 15 bp, Homo sapiens
aagtagtttttttag

SEQ ID NO: 1882249 - DNA, 15 bp, Homo sapiens
agtagtttttttagg

SEQ ID NO: 1882250 - DNA, 15 bp, Homo sapiens
gtagtttttttagga

SEQ ID NO: 1882251 - DNA, 15 bp, Homo sapiens
tagtttttttaggac

SEQ ID NO: 1882252 - DNA, 15 bp, Homo sapiens
agtttttttaggacc

SEQ ID NO: 1882253 - DNA, 15 bp, Homo sapiens
gtttttttaggacct

SEQ ID NO: 1882254 - DNA, 15 bp, Homo sapiens
tttttttaggacctg

SEQ ID NO: 1882255 - DNA, 15 bp, Homo sapiens
ttttttaggacctgc

SEQ ID NO: 1882256 - DNA, 15 bp, Homo sapiens
tttttaggacctgct

SEQ ID NO: 1882257 - DNA, 15 bp, Homo sapiens
ttttaggacctgcta

SEQ ID NO: 1882258 - DNA, 15 bp, Homo sapiens
tttaggacctgctac

SEQ ID NO: 1882259 - DNA, 15 bp, Homo sapiens
ttaggacctgctaca

SEQ ID NO: 1882260 - DNA, 15 bp, Homo sapiens
taggacctgctacag

SEQ ID NO: 1882261 - DNA, 15 bp, Homo sapiens
aggacctgctacaga

SEQ ID NO: 1882262 - DNA, 15 bp, Homo sapiens
ggacctgctacagac

SEQ ID NO: 1882263 - DNA, 15 bp, Homo sapiens
gacctgctacagact

SEQ ID NO: 1882264 - DNA, 15 bp, Homo sapiens
acctgctacagactg

SEQ ID NO: 1882265 - DNA, 15 bp, Homo sapiens
cctgctacagactga

SEQ ID NO: 1882266 - DNA, 15 bp, Homo sapiens
ctgctacagactgaa

SEQ ID NO: 1882267 - DNA, 15 bp, Homo sapiens
tgctacagactgaat

SEQ ID NO: 1882268 - DNA, 15 bp, Homo sapiens
gctacagactgaatg

SEQ ID NO: 1882269 - DNA, 15 bp, Homo sapiens
ctacagactgaatgt

SEQ ID NO: 1882270 - DNA, 15 bp, Homo sapiens
tacagactgaatgtt

SEQ ID NO: 1882271 - DNA, 15 bp, Homo sapiens
acagactgaatgttt

SEQ ID NO: 1882272 - DNA, 15 bp, Homo sapiens
cagactgaatgtttg

SEQ ID NO: 1882273 - DNA, 15 bp, Homo sapiens
agactgaatgtttgt

SEQ ID NO: 1882274 - DNA, 15 bp, Homo sapiens
gactgaatgtttgtg

SEQ ID NO: 1882275 - DNA, 15 bp, Homo sapiens
actgaatgtttgtgt

SEQ ID NO: 1882276 - DNA, 15 bp, Homo sapiens
ctgaatgtttgtgtt

SEQ ID NO: 1882277 - DNA, 15 bp, Homo sapiens
tgaatgtttgtgttc

SEQ ID NO: 1882278 - DNA, 15 bp, Homo sapiens
gaatgtttgtgttcc

SEQ ID NO: 1882279 - DNA, 15 bp, Homo sapiens
aatgtttgtgttccc

SEQ ID NO: 1882280 - DNA, 15 bp, Homo sapiens
atgtttgtgttcccc

SEQ ID NO: 1882281 - DNA, 15 bp, Homo sapiens
tgtttgtgttcccct

SEQ ID NO: 1882282 - DNA, 15 bp, Homo sapiens
gtttgtgttccccta

SEQ ID NO: 1882283 - DNA, 15 bp, Homo sapiens
tttgtgttcccctaa

SEQ ID NO: 1882284 - DNA, 15 bp, Homo sapiens
ttgtgttcccctaaa

SEQ ID NO: 1882285 - DNA, 15 bp, Homo sapiens
tgtgttcccctaaaa

SEQ ID NO: 1882286 - DNA, 15 bp, Homo sapiens
gtgttcccctaaaat

SEQ ID NO: 1882287 - DNA, 15 bp, Homo sapiens
tgttcccctaaaatt

SEQ ID NO: 1882288 - DNA, 15 bp, Homo sapiens
gttcccctaaaattc

SEQ ID NO: 1882289 - DNA, 15 bp, Homo sapiens
ttcccctaaaattca

SEQ ID NO: 1882290 - DNA, 15 bp, Homo sapiens
tcccctaaaattcat

SEQ ID NO: 1882291 - DNA, 15 bp, Homo sapiens
cccctaaaattcata

SEQ ID NO: 1882292 - DNA, 15 bp, Homo sapiens
ccctaaaattcatat

SEQ ID NO: 1882293 - DNA, 15 bp, Homo sapiens
cctaaaattcatatt

SEQ ID NO: 1882294 - DNA, 15 bp, Homo sapiens
ctaaaattcatattt

SEQ ID NO: 1882295 - DNA, 15 bp, Homo sapiens
taaaattcatatttt

SEQ ID NO: 1882296 - DNA, 15 bp, Homo sapiens
aaaattcatattttg

SEQ ID NO: 1882297 - DNA, 15 bp, Homo sapiens
aaattcatattttga

SEQ ID NO: 1882298 - DNA, 15 bp, Homo sapiens
aattcatattttgaa

SEQ ID NO: 1882299 - DNA, 15 bp, Homo sapiens
attcatattttgaaa

SEQ ID NO: 1882300 - DNA, 15 bp, Homo sapiens
ttcatattttgaaat

SEQ ID NO: 1882301 - DNA, 15 bp, Homo sapiens
tcatattttgaaata

SEQ ID NO: 1882302 - DNA, 15 bp, Homo sapiens
catattttgaaatat

SEQ ID NO: 1882303 - DNA, 15 bp, Homo sapiens
atattttgaaatatt

SEQ ID NO: 1882304 - DNA, 15 bp, Homo sapiens
tattttgaaatatta

SEQ ID NO: 1882305 - DNA, 15 bp, Homo sapiens
attttgaaatattat

SEQ ID NO: 1882306 - DNA, 15 bp, Homo sapiens
ttttgaaatattatg

SEQ ID NO: 1882307 - DNA, 15 bp, Homo sapiens
tttgaaatattatgg

SEQ ID NO: 1882308 - DNA, 15 bp, Homo sapiens
ttgaaatattatggt

SEQ ID NO: 1882309 - DNA, 15 bp, Homo sapiens
tgaaatattatggta

SEQ ID NO: 1882310 - DNA, 15 bp, Homo sapiens
gaaatattatggtat

SEQ ID NO: 1882311 - DNA, 15 bp, Homo sapiens
aaatattatggtatt

SEQ ID NO: 1882312 - DNA, 15 bp, Homo sapiens
aatattatggtatta

SEQ ID NO: 1882313 - DNA, 15 bp, Homo sapiens
atattatggtattag

SEQ ID NO: 1882314 - DNA, 15 bp, Homo sapiens
tattatggtattagg

SEQ ID NO: 1882315 - DNA, 15 bp, Homo sapiens
attatggtattagga

SEQ ID NO: 1882316 - DNA, 15 bp, Homo sapiens
ttatggtattaggaa

SEQ ID NO: 1882317 - DNA, 15 bp, Homo sapiens
tatggtattaggaag

SEQ ID NO: 1882318 - DNA, 15 bp, Homo sapiens
atggtattaggaagc

SEQ ID NO: 1882319 - DNA, 15 bp, Homo sapiens
tggtattaggaagca

SEQ ID NO: 1882320 - DNA, 15 bp, Homo sapiens
ggtattaggaagcaa

SEQ ID NO: 1882321 - DNA, 15 bp, Homo sapiens
gtattaggaagcaag

SEQ ID NO: 1882322 - DNA, 15 bp, Homo sapiens
tattaggaagcaaga

SEQ ID NO: 1882323 - DNA, 15 bp, Homo sapiens
attaggaagcaagac

SEQ ID NO: 1882324 - DNA, 15 bp, Homo sapiens
ttaggaagcaagacc

SEQ ID NO: 1882325 - DNA, 15 bp, Homo sapiens
taggaagcaagacct

SEQ ID NO: 1882326 - DNA, 15 bp, Homo sapiens
aggaagcaagacctt

SEQ ID NO: 1882327 - DNA, 15 bp, Homo sapiens
ggaagcaagaccttt

SEQ ID NO: 1882328 - DNA, 15 bp, Homo sapiens
gaagcaagacctttg

SEQ ID NO: 1882329 - DNA, 15 bp, Homo sapiens
aagcaagacctttgg

SEQ ID NO: 1882330 - DNA, 15 bp, Homo sapiens
agcaagacctttggt

SEQ ID NO: 1882331 - DNA, 15 bp, Homo sapiens
gcaagacctttggtt

SEQ ID NO: 1882332 - DNA, 15 bp, Homo sapiens
caagacctttggttg

SEQ ID NO: 1882333 - DNA, 15 bp, Homo sapiens
aagacctttggttgg

SEQ ID NO: 1882334 - DNA, 15 bp, Homo sapiens
agacctttggttggt

SEQ ID NO: 1882335 - DNA, 15 bp, Homo sapiens
gacctttggttggtg

SEQ ID NO: 1882336 - DNA, 15 bp, Homo sapiens
acctttggttggtga

SEQ ID NO: 1882337 - DNA, 15 bp, Homo sapiens
cctttggttggtgat

SEQ ID NO: 1882338 - DNA, 15 bp, Homo sapiens
ctttggttggtgatt

SEQ ID NO: 1882339 - DNA, 15 bp, Homo sapiens
tttggttggtgatta

SEQ ID NO: 1882340 - DNA, 15 bp, Homo sapiens
ttggttggtgattag

SEQ ID NO: 1882341 - DNA, 15 bp, Homo sapiens
tggttggtgattagg

SEQ ID NO: 1882342 - DNA, 15 bp, Homo sapiens
ggttggtgattaggt

SEQ ID NO: 1882343 - DNA, 15 bp, Homo sapiens
gttggtgattaggtt

SEQ ID NO: 1882344 - DNA, 15 bp, Homo sapiens
ttggtgattaggttg

SEQ ID NO: 1882345 - DNA, 15 bp, Homo sapiens
tggtgattaggttgt

SEQ ID NO: 1882346 - DNA, 15 bp, Homo sapiens
ggtgattaggttgtg

SEQ ID NO: 1882347 - DNA, 15 bp, Homo sapiens
gtgattaggttgtga

SEQ ID NO: 1882348 - DNA, 15 bp, Homo sapiens
tgattaggttgtgag

SEQ ID NO: 1882349 - DNA, 15 bp, Homo sapiens
gattaggttgtgagg

SEQ ID NO: 1882350 - DNA, 15 bp, Homo sapiens
attaggttgtgagga

SEQ ID NO: 1882351 - DNA, 15 bp, Homo sapiens
ttaggttgtgaggac

SEQ ID NO: 1882352 - DNA, 15 bp, Homo sapiens
taggttgtgaggacc

SEQ ID NO: 1882353 - DNA, 15 bp, Homo sapiens
aggttgtgaggacca

SEQ ID NO: 1882354 - DNA, 15 bp, Homo sapiens
ggttgtgaggaccaa

SEQ ID NO: 1882355 - DNA, 15 bp, Homo sapiens
gttgtgaggaccaag

SEQ ID NO: 1882356 - DNA, 15 bp, Homo sapiens
ttgtgaggaccaaga

SEQ ID NO: 1882357 - DNA, 15 bp, Homo sapiens
tgtgaggaccaagac

SEQ ID NO: 1882358 - DNA, 15 bp, Homo sapiens
gtgaggaccaagacc

SEQ ID NO: 1882359 - DNA, 15 bp, Homo sapiens
tgaggaccaagacct

SEQ ID NO: 1882360 - DNA, 15 bp, Homo sapiens
gaggaccaagacctc

SEQ ID NO: 1882361 - DNA, 15 bp, Homo sapiens
aggaccaagacctca

SEQ ID NO: 1882362 - DNA, 15 bp, Homo sapiens
ggaccaagacctcat

SEQ ID NO: 1882363 - DNA, 15 bp, Homo sapiens
gaccaagacctcatg

SEQ ID NO: 1882364 - DNA, 15 bp, Homo sapiens
accaagacctcatga

SEQ ID NO: 1882365 - DNA, 15 bp, Homo sapiens
ccaagacctcatgaa

SEQ ID NO: 1882366 - DNA, 15 bp, Homo sapiens
caagacctcatgaat

SEQ ID NO: 1882367 - DNA, 15 bp, Homo sapiens
aagacctcatgaatg

SEQ ID NO: 1882368 - DNA, 15 bp, Homo sapiens
agacctcatgaatgg

SEQ ID NO: 1882369 - DNA, 15 bp, Homo sapiens
gacctcatgaatggg

SEQ ID NO: 1882370 - DNA, 15 bp, Homo sapiens
acctcatgaatggga

SEQ ID NO: 1882371 - DNA, 15 bp, Homo sapiens
cctcatgaatgggat

SEQ ID NO: 1882372 - DNA, 15 bp, Homo sapiens
ctcatgaatgggatt

SEQ ID NO: 1882373 - DNA, 15 bp, Homo sapiens
tcatgaatgggatta

SEQ ID NO: 1882374 - DNA, 15 bp, Homo sapiens
catgaatgggattaa

SEQ ID NO: 1882375 - DNA, 15 bp, Homo sapiens
atgaatgggattaaa

SEQ ID NO: 1882376 - DNA, 15 bp, Homo sapiens
tgaatgggattaaag

SEQ ID NO: 1882377 - DNA, 15 bp, Homo sapiens
gaatgggattaaagc

SEQ ID NO: 1882378 - DNA, 15 bp, Homo sapiens
aatgggattaaagcc

SEQ ID NO: 1882379 - DNA, 15 bp, Homo sapiens
atgggattaaagccc

SEQ ID NO: 1882380 - DNA, 15 bp, Homo sapiens
tgggattaaagccct

SEQ ID NO: 1882381 - DNA, 15 bp, Homo sapiens
gggattaaagccctt

SEQ ID NO: 1882382 - DNA, 15 bp, Homo sapiens
ggattaaagccctta

SEQ ID NO: 1882383 - DNA, 15 bp, Homo sapiens
gattaaagcccttat

SEQ ID NO: 1882384 - DNA, 15 bp, Homo sapiens
attaaagcccttata

SEQ ID NO: 1882385 - DNA, 15 bp, Homo sapiens
ttaaagcccttataa

SEQ ID NO: 1882386 - DNA, 15 bp, Homo sapiens
taaagcccttataaa

SEQ ID NO: 1882387 - DNA, 15 bp, Homo sapiens
aaagcccttataaaa

SEQ ID NO: 1882388 - DNA, 15 bp, Homo sapiens
aagcccttataaaag

SEQ ID NO: 1882389 - DNA, 15 bp, Homo sapiens
agcccttataaaaga

SEQ ID NO: 1882390 - DNA, 15 bp, Homo sapiens
gcccttataaaagag

SEQ ID NO: 1882391 - DNA, 15 bp, Homo sapiens
cccttataaaagagc

SEQ ID NO: 1882392 - DNA, 15 bp, Homo sapiens
ccttataaaagagct

SEQ ID NO: 1882393 - DNA, 15 bp, Homo sapiens
cttataaaagagctc

SEQ ID NO: 1882394 - DNA, 15 bp, Homo sapiens
ttataaaagagctct

SEQ ID NO: 1882395 - DNA, 15 bp, Homo sapiens
tataaaagagctctg

SEQ ID NO: 1882396 - DNA, 15 bp, Homo sapiens
ataaaagagctctga

SEQ ID NO: 1882397 - DNA, 15 bp, Homo sapiens
taaaagagctctgaa

SEQ ID NO: 1882398 - DNA, 15 bp, Homo sapiens
aaaagagctctgaag

SEQ ID NO: 1882399 - DNA, 15 bp, Homo sapiens
aaagagctctgaaga

SEQ ID NO: 1882400 - DNA, 15 bp, Homo sapiens
aagagctctgaagag

SEQ ID NO: 1882401 - DNA, 15 bp, Homo sapiens
agagctctgaagagc

SEQ ID NO: 1882402 - DNA, 15 bp, Homo sapiens
gagctctgaagagct

SEQ ID NO: 1882403 - DNA, 15 bp, Homo sapiens
agctctgaagagctc

SEQ ID NO: 1882404 - DNA, 15 bp, Homo sapiens
gctctgaagagctct

SEQ ID NO: 1882405 - DNA, 15 bp, Homo sapiens
ctctgaagagctctc

SEQ ID NO: 1882406 - DNA, 15 bp, Homo sapiens
tctgaagagctctct

SEQ ID NO: 1882407 - DNA, 15 bp, Homo sapiens
ctgaagagctctctc

SEQ ID NO: 1882408 - DNA, 15 bp, Homo sapiens
tgaagagctctctca

SEQ ID NO: 1882409 - DNA, 15 bp, Homo sapiens
gaagagctctctcac

SEQ ID NO: 1882410 - DNA, 15 bp, Homo sapiens
aagagctctctcacc

SEQ ID NO: 1882411 - DNA, 15 bp, Homo sapiens
agagctctctcaccc

SEQ ID NO: 1882412 - DNA, 15 bp, Homo sapiens
gagctctctcaccct

SEQ ID NO: 1882413 - DNA, 15 bp, Homo sapiens
agctctctcaccctc

SEQ ID NO: 1882414 - DNA, 15 bp, Homo sapiens
gctctctcaccctct

SEQ ID NO: 1882415 - DNA, 15 bp, Homo sapiens
ctctctcaccctctt

SEQ ID NO: 1882416 - DNA, 15 bp, Homo sapiens
tctctcaccctcttt

SEQ ID NO: 1882417 - DNA, 15 bp, Homo sapiens
ctctcaccctctttc

SEQ ID NO: 1882418 - DNA, 15 bp, Homo sapiens
tctcaccctctttca

SEQ ID NO: 1882419 - DNA, 15 bp, Homo sapiens
ctcaccctctttcat

SEQ ID NO: 1882420 - DNA, 15 bp, Homo sapiens
tcaccctctttcatc

SEQ ID NO: 1882421 - DNA, 15 bp, Homo sapiens
caccctctttcatca

SEQ ID NO: 1882422 - DNA, 15 bp, Homo sapiens
accctctttcatcac

SEQ ID NO: 1882423 - DNA, 15 bp, Homo sapiens
ccctctttcatcaca

SEQ ID NO: 1882424 - DNA, 15 bp, Homo sapiens
cctctttcatcacat

SEQ ID NO: 1882425 - DNA, 15 bp, Homo sapiens
ctctttcatcacatg

SEQ ID NO: 1882426 - DNA, 15 bp, Homo sapiens
tctttcatcacatga

SEQ ID NO: 1882427 - DNA, 15 bp, Homo sapiens
ctttcatcacatgag

SEQ ID NO: 1882428 - DNA, 15 bp, Homo sapiens
tttcatcacatgagg

SEQ ID NO: 1882429 - DNA, 15 bp, Homo sapiens
ttcatcacatgagga

SEQ ID NO: 1882430 - DNA, 15 bp, Homo sapiens
tcatcacatgaggac

SEQ ID NO: 1882431 - DNA, 15 bp, Homo sapiens
catcacatgaggaca

SEQ ID NO: 1882432 - DNA, 15 bp, Homo sapiens
atcacatgaggacac

SEQ ID NO: 1882433 - DNA, 15 bp, Homo sapiens
tcacatgaggacaca

SEQ ID NO: 1882434 - DNA, 15 bp, Homo sapiens
cacatgaggacacaa

SEQ ID NO: 1882435 - DNA, 15 bp, Homo sapiens
acatgaggacacaac

SEQ ID NO: 1882436 - DNA, 15 bp, Homo sapiens
catgaggacacaacc

SEQ ID NO: 1882437 - DNA, 15 bp, Homo sapiens
atgaggacacaacca

SEQ ID NO: 1882438 - DNA, 15 bp, Homo sapiens
tgaggacacaaccag

SEQ ID NO: 1882439 - DNA, 15 bp, Homo sapiens
gaggacacaaccaga

SEQ ID NO: 1882440 - DNA, 15 bp, Homo sapiens
aggacacaaccagaa

SEQ ID NO: 1882441 - DNA, 15 bp, Homo sapiens
ggacacaaccagaag

SEQ ID NO: 1882442 - DNA, 15 bp, Homo sapiens
acacaaccagaagat

SEQ ID NO: 1882443 - DNA, 15 bp, Homo sapiens
cacaaccagaagatg

SEQ ID NO: 1882444 - DNA, 15 bp, Homo sapiens
acaaccagaagatga

SEQ ID NO: 1882445 - DNA, 15 bp, Homo sapiens
caaccagaagatgac

SEQ ID NO: 1882446 - DNA, 15 bp, Homo sapiens
aaccagaagatgacc

SEQ ID NO: 1882447 - DNA, 15 bp, Homo sapiens
accagaagatgacca

SEQ ID NO: 1882448 - DNA, 15 bp, Homo sapiens
ccagaagatgaccag

SEQ ID NO: 1882449 - DNA, 15 bp, Homo sapiens
cagaagatgaccaga

SEQ ID NO: 1882450 - DNA, 15 bp, Homo sapiens
agaagatgaccagac

SEQ ID NO: 1882451 - DNA, 15 bp, Homo sapiens
gaagatgaccagaca

SEQ ID NO: 1882452 - DNA, 15 bp, Homo sapiens
aagatgaccagacac

SEQ ID NO: 1882453 - DNA, 15 bp, Homo sapiens
agatgaccagacact

SEQ ID NO: 1882454 - DNA, 15 bp, Homo sapiens
gatgaccagacacta

SEQ ID NO: 1882455 - DNA, 15 bp, Homo sapiens
atgaccagacactaa

SEQ ID NO: 1882456 - DNA, 15 bp, Homo sapiens
tgaccagacactaaa

SEQ ID NO: 1882457 - DNA, 15 bp, Homo sapiens
gaccagacactaaat

SEQ ID NO: 1882458 - DNA, 15 bp, Homo sapiens
cagacactaaatcta

SEQ ID NO: 1882459 - DNA, 15 bp, Homo sapiens
agacactaaatctat

SEQ ID NO: 1882460 - DNA, 15 bp, Homo sapiens
gacactaaatctatc

SEQ ID NO: 1882461 - DNA, 15 bp, Homo sapiens
acactaaatctatca

SEQ ID NO: 1882462 - DNA, 15 bp, Homo sapiens
cactaaatctatcag

SEQ ID NO: 1882463 - DNA, 15 bp, Homo sapiens
actaaatctatcagt

SEQ ID NO: 1882464 - DNA, 15 bp, Homo sapiens
ctaaatctatcagtg

SEQ ID NO: 1882465 - DNA, 15 bp, Homo sapiens
taaatctatcagtgc

SEQ ID NO: 1882466 - DNA, 15 bp, Homo sapiens
aaatctatcagtgct

SEQ ID NO: 1882467 - DNA, 15 bp, Homo sapiens
aatctatcagtgctt

SEQ ID NO: 1882468 - DNA, 15 bp, Homo sapiens
atctatcagtgcttt

SEQ ID NO: 1882469 - DNA, 15 bp, Homo sapiens
tctatcagtgctttg

SEQ ID NO: 1882470 - DNA, 15 bp, Homo sapiens
ctatcagtgctttga

SEQ ID NO: 1882471 - DNA, 15 bp, Homo sapiens
tatcagtgctttgat

SEQ ID NO: 1882472 - DNA, 15 bp, Homo sapiens
atcagtgctttgatc

SEQ ID NO: 1882473 - DNA, 15 bp, Homo sapiens
tcagtgctttgatct

SEQ ID NO: 1882474 - DNA, 15 bp, Homo sapiens
cagtgctttgatcta

SEQ ID NO: 1882475 - DNA, 15 bp, Homo sapiens
agtgctttgatctag

SEQ ID NO: 1882476 - DNA, 15 bp, Homo sapiens
gtgctttgatctagg

SEQ ID NO: 1882477 - DNA, 15 bp, Homo sapiens
tgctttgatctagga

SEQ ID NO: 1882478 - DNA, 15 bp, Homo sapiens
gctttgatctaggac

SEQ ID NO: 1882479 - DNA, 15 bp, Homo sapiens
ctttgatctaggact

SEQ ID NO: 1882480 - DNA, 15 bp, Homo sapiens
tttgatctaggactt

SEQ ID NO: 1882481 - DNA, 15 bp, Homo sapiens
ttgatctaggacttc

SEQ ID NO: 1882482 - DNA, 15 bp, Homo sapiens
tgatctaggacttcc

SEQ ID NO: 1882483 - DNA, 15 bp, Homo sapiens
gatctaggacttccc

SEQ ID NO: 1882484 - DNA, 15 bp, Homo sapiens
atctaggacttccca

SEQ ID NO: 1882485 - DNA, 15 bp, Homo sapiens
tctaggacttcccag

SEQ ID NO: 1882486 - DNA, 15 bp, Homo sapiens
ctaggacttcccagc

SEQ ID NO: 1882487 - DNA, 15 bp, Homo sapiens
taggacttcccagcc

SEQ ID NO: 1882488 - DNA, 15 bp, Homo sapiens
aggacttcccagcct

SEQ ID NO: 1882489 - DNA, 15 bp, Homo sapiens
ggacttcccagcctc

SEQ ID NO: 1882490 - DNA, 15 bp, Homo sapiens
gacttcccagcctct

SEQ ID NO: 1882491 - DNA, 15 bp, Homo sapiens
acttcccagcctcta

SEQ ID NO: 1882492 - DNA, 15 bp, Homo sapiens
cttcccagcctctaa

SEQ ID NO: 1882493 - DNA, 15 bp, Homo sapiens
ttcccagcctctaaa

SEQ ID NO: 1882494 - DNA, 15 bp, Homo sapiens
tcccagcctctaaag

SEQ ID NO: 1882495 - DNA, 15 bp, Homo sapiens
cccagcctctaaagc

SEQ ID NO: 1882496 - DNA, 15 bp, Homo sapiens
ccagcctctaaagct

SEQ ID NO: 1882497 - DNA, 15 bp, Homo sapiens
cagcctctaaagctg

SEQ ID NO: 1882498 - DNA, 15 bp, Homo sapiens
agcctctaaagctgt

SEQ ID NO: 1882499 - DNA, 15 bp, Homo sapiens
gcctctaaagctgtg

SEQ ID NO: 1882500 - DNA, 15 bp, Homo sapiens
cctctaaagctgtgg

SEQ ID NO: 1882501 - DNA, 15 bp, Homo sapiens
ctctaaagctgtgga

SEQ ID NO: 1882502 - DNA, 15 bp, Homo sapiens
tctaaagctgtggag

SEQ ID NO: 1882503 - DNA, 15 bp, Homo sapiens
ctaaagctgtggaga

SEQ ID NO: 1882504 - DNA, 15 bp, Homo sapiens
taaagctgtggagaa

SEQ ID NO: 1882505 - DNA, 15 bp, Homo sapiens
aaagctgtggagaaa

SEQ ID NO: 1882506 - DNA, 15 bp, Homo sapiens
aagctgtggagaaat

SEQ ID NO: 1882507 - DNA, 15 bp, Homo sapiens
agctgtggagaaata

SEQ ID NO: 1882508 - DNA, 15 bp, Homo sapiens
gctgtggagaaataa

SEQ ID NO: 1882509 - DNA, 15 bp, Homo sapiens
ctgtggagaaataaa

SEQ ID NO: 1882510 - DNA, 15 bp, Homo sapiens
tgtggagaaataaat

SEQ ID NO: 1882511 - DNA, 15 bp, Homo sapiens
gtggagaaataaatt

SEQ ID NO: 1882512 - DNA, 15 bp, Homo sapiens
tggagaaataaattt

SEQ ID NO: 1882513 - DNA, 15 bp, Homo sapiens
ggagaaataaatttc

SEQ ID NO: 1882514 - DNA, 15 bp, Homo sapiens
agaaataaatttctg

SEQ ID NO: 1882515 - DNA, 15 bp, Homo sapiens
gaaataaatttctgt

SEQ ID NO: 1882516 - DNA, 15 bp, Homo sapiens
aaataaatttctgtt

SEQ ID NO: 1882517 - DNA, 15 bp, Homo sapiens
aataaatttctgttg

SEQ ID NO: 1882518 - DNA, 15 bp, Homo sapiens
ataaatttctgttgt

SEQ ID NO: 1882519 - DNA, 15 bp, Homo sapiens
taaatttctgttgtt

SEQ ID NO: 1882520 - DNA, 15 bp, Homo sapiens
aaatttctgttgttt

SEQ ID NO: 1882521 - DNA, 15 bp, Homo sapiens
aatttctgttgttta

SEQ ID NO: 1882522 - DNA, 15 bp, Homo sapiens
atttctgttgtttat

SEQ ID NO: 1882523 - DNA, 15 bp, Homo sapiens
ctgttgtttataaaa

SEQ ID NO: 1882524 - DNA, 15 bp, Homo sapiens
tgttgtttataaaag

SEQ ID NO: 1882525 - DNA, 15 bp, Homo sapiens
gttgtttataaaagc

SEQ ID NO: 1882526 - DNA, 15 bp, Homo sapiens
ttgtttataaaagct

SEQ ID NO: 1882527 - DNA, 15 bp, Homo sapiens
tgtttataaaagcta

SEQ ID NO: 1882528 - DNA, 15 bp, Homo sapiens
gtttataaaagctac

SEQ ID NO: 1882529 - DNA, 15 bp, Homo sapiens
tttataaaagctact

SEQ ID NO: 1882530 - DNA, 15 bp, Homo sapiens
ttataaaagctactt

SEQ ID NO: 1882531 - DNA, 15 bp, Homo sapiens
tataaaagctactta

SEQ ID NO: 1882532 - DNA, 15 bp, Homo sapiens
ataaaagctacttag

SEQ ID NO: 1882533 - DNA, 15 bp, Homo sapiens
taaaagctacttagt

SEQ ID NO: 1882534 - DNA, 15 bp, Homo sapiens
aaaagctacttagtc

SEQ ID NO: 1882535 - DNA, 15 bp, Homo sapiens
aaagctacttagtct

SEQ ID NO: 1882536 - DNA, 15 bp, Homo sapiens
aagctacttagtctg

SEQ ID NO: 1882537 - DNA, 15 bp, Homo sapiens
agctacttagtctgt

SEQ ID NO: 1882538 - DNA, 15 bp, Homo sapiens
gctacttagtctgtg

SEQ ID NO: 1882539 - DNA, 15 bp, Homo sapiens
ctacttagtctgtgg

SEQ ID NO: 1882540 - DNA, 15 bp, Homo sapiens
tacttagtctgtgga

SEQ ID NO: 1882541 - DNA, 15 bp, Homo sapiens
acttagtctgtggaa

SEQ ID NO: 1882542 - DNA, 15 bp, Homo sapiens
cttagtctgtggaat

SEQ ID NO: 1882543 - DNA, 15 bp, Homo sapiens
ttagtctgtggaatt

SEQ ID NO: 1882544 - DNA, 15 bp, Homo sapiens
tagtctgtggaattc

SEQ ID NO: 1882545 - DNA, 15 bp, Homo sapiens
agtctgtggaattct

SEQ ID NO: 1882546 - DNA, 15 bp, Homo sapiens
gtctgtggaattctc

SEQ ID NO: 1882547 - DNA, 15 bp, Homo sapiens
tctgtggaattctct

SEQ ID NO: 1882548 - DNA, 15 bp, Homo sapiens
ctgtggaattctctt

SEQ ID NO: 1882549 - DNA, 15 bp, Homo sapiens
tgtggaattctctta

SEQ ID NO: 1882550 - DNA, 15 bp, Homo sapiens
gtggaattctcttat

SEQ ID NO: 1882551 - DNA, 15 bp, Homo sapiens
tggaattctcttata

SEQ ID NO: 1882552 - DNA, 15 bp, Homo sapiens
ggaattctcttatag

SEQ ID NO: 1882553 - DNA, 15 bp, Homo sapiens
gaattctcttatagc

SEQ ID NO: 1882554 - DNA, 15 bp, Homo sapiens
aattctcttatagca

SEQ ID NO: 1882555 - DNA, 15 bp, Homo sapiens
attctcttatagcag

SEQ ID NO: 1882556 - DNA, 15 bp, Homo sapiens
ttctcttatagcagc

SEQ ID NO: 1882557 - DNA, 15 bp, Homo sapiens
tctcttatagcagcc

SEQ ID NO: 1882558 - DNA, 15 bp, Homo sapiens
ctcttatagcagccc

SEQ ID NO: 1882559 - DNA, 15 bp, Homo sapiens
tcttatagcagccca

SEQ ID NO: 1882560 - DNA, 15 bp, Homo sapiens
cttatagcagcccaa

SEQ ID NO: 1882561 - DNA, 15 bp, Homo sapiens
ttatagcagcccaaa

SEQ ID NO: 1882562 - DNA, 15 bp, Homo sapiens
tatagcagcccaaac

SEQ ID NO: 1882563 - DNA, 15 bp, Homo sapiens
atagcagcccaaact

SEQ ID NO: 1882564 - DNA, 15 bp, Homo sapiens
tagcagcccaaactg

SEQ ID NO: 1882565 - DNA, 15 bp, Homo sapiens
agcagcccaaactga

SEQ ID NO: 1882566 - DNA, 15 bp, Homo sapiens
gcagcccaaactgac

SEQ ID NO: 1882567 - DNA, 15 bp, Homo sapiens
cagcccaaactgact

SEQ ID NO: 1882568 - DNA, 15 bp, Homo sapiens
agcccaaactgacta

SEQ ID NO: 1882569 - DNA, 15 bp, Homo sapiens
gcccaaactgactaa

SEQ ID NO: 1882570 - DNA, 15 bp, Homo sapiens
cccaaactgactaag

SEQ ID NO: 1882571 - DNA, 15 bp, Homo sapiens
ccaaactgactaaga

SEQ ID NO: 1882572 - DNA, 15 bp, Homo sapiens
caaactgactaagac

SEQ ID NO: 1882573 - DNA, 15 bp, Homo sapiens
aaactgactaagaca

SEQ ID NO: 1882574 - DNA, 15 bp, Homo sapiens
aactgactaagacag

SEQ ID NO: 1882575 - DNA, 15 bp, Homo sapiens
actgactaagacaga

SEQ ID NO: 1882576 - DNA, 15 bp, Homo sapiens
ctgactaagacagaa

SEQ ID NO: 1882577 - DNA, 15 bp, Homo sapiens
tgactaagacagaaa

SEQ ID NO: 1882578 - DNA, 15 bp, Homo sapiens
gactaagacagaaaa

SEQ ID NO: 1882579 - DNA, 15 bp, Homo sapiens
ctaagacagaaaatt

SEQ ID NO: 1882580 - DNA, 15 bp, Homo sapiens
taagacagaaaattg

SEQ ID NO: 1882581 - DNA, 15 bp, Homo sapiens
aagacagaaaattgg

SEQ ID NO: 1882582 - DNA, 15 bp, Homo sapiens
agacagaaaattggt

SEQ ID NO: 1882583 - DNA, 15 bp, Homo sapiens
gacagaaaattggtc

SEQ ID NO: 1882584 - DNA, 15 bp, Homo sapiens
acagaaaattggtcc

SEQ ID NO: 1882585 - DNA, 15 bp, Homo sapiens
cagaaaattggtccc

SEQ ID NO: 1882586 - DNA, 15 bp, Homo sapiens
agaaaattggtccca

SEQ ID NO: 1882587 - DNA, 15 bp, Homo sapiens
gaaaattggtcccaa

SEQ ID NO: 1882588 - DNA, 15 bp, Homo sapiens
aaaattggtcccaag

SEQ ID NO: 1882589 - DNA, 15 bp, Homo sapiens
aaattggtcccaaga

SEQ ID NO: 1882590 - DNA, 15 bp, Homo sapiens
aattggtcccaagaa

SEQ ID NO: 1882591 - DNA, 15 bp, Homo sapiens
attggtcccaagaag

SEQ ID NO: 1882592 - DNA, 15 bp, Homo sapiens
ttggtcccaagaagt

SEQ ID NO: 1882593 - DNA, 15 bp, Homo sapiens
tggtcccaagaagtg

SEQ ID NO: 1882594 - DNA, 15 bp, Homo sapiens
ggtcccaagaagtga

SEQ ID NO: 1882595 - DNA, 15 bp, Homo sapiens
gtcccaagaagtgaa

SEQ ID NO: 1882596 - DNA, 15 bp, Homo sapiens
tcccaagaagtgaac

SEQ ID NO: 1882597 - DNA, 15 bp, Homo sapiens
cccaagaagtgaacg

SEQ ID NO: 1882598 - DNA, 15 bp, Homo sapiens
ccaagaagtgaacgt

SEQ ID NO: 1882599 - DNA, 15 bp, Homo sapiens
caagaagtgaacgtg

SEQ ID NO: 1882600 - DNA, 15 bp, Homo sapiens
aagaagtgaacgtgc

SEQ ID NO: 1882601 - DNA, 15 bp, Homo sapiens
agaagtgaacgtgct

SEQ ID NO: 1882602 - DNA, 15 bp, Homo sapiens
gaagtgaacgtgctg

SEQ ID NO: 1882603 - DNA, 15 bp, Homo sapiens
aagtgaacgtgctgc

SEQ ID NO: 1882604 - DNA, 15 bp, Homo sapiens
agtgaacgtgctgct

SEQ ID NO: 1882605 - DNA, 15 bp, Homo sapiens
gtgaacgtgctgctg

SEQ ID NO: 1882606 - DNA, 15 bp, Homo sapiens
tgaacgtgctgctgt

SEQ ID NO: 1882607 - DNA, 15 bp, Homo sapiens
gaacgtgctgctgta

SEQ ID NO: 1882608 - DNA, 15 bp, Homo sapiens
aacgtgctgctgtaa

SEQ ID NO: 1882609 - DNA, 15 bp, Homo sapiens
acgtgctgctgtaac

SEQ ID NO: 1882610 - DNA, 15 bp, Homo sapiens
cgtgctgctgtaaca

SEQ ID NO: 1882611 - DNA, 15 bp, Homo sapiens
gtgctgctgtaacaa

SEQ ID NO: 1882612 - DNA, 15 bp, Homo sapiens
ctgctgtaacaaata

SEQ ID NO: 1882613 - DNA, 15 bp, Homo sapiens
tgctgtaacaaatac

SEQ ID NO: 1882614 - DNA, 15 bp, Homo sapiens
gctgtaacaaatacc

SEQ ID NO: 1882615 - DNA, 15 bp, Homo sapiens
ctgtaacaaatacct

SEQ ID NO: 1882616 - DNA, 15 bp, Homo sapiens
tgtaacaaatacctt

SEQ ID NO: 1882617 - DNA, 15 bp, Homo sapiens
gtaacaaatacctta

SEQ ID NO: 1882618 - DNA, 15 bp, Homo sapiens
taacaaataccttaa

SEQ ID NO: 1882619 - DNA, 15 bp, Homo sapiens
aacaaataccttaaa

SEQ ID NO: 1882620 - DNA, 15 bp, Homo sapiens
acaaataccttaaaa

SEQ ID NO: 1882621 - DNA, 15 bp, Homo sapiens
caaataccttaaaac

SEQ ID NO: 1882622 - DNA, 15 bp, Homo sapiens
aaataccttaaaacg

SEQ ID NO: 1882623 - DNA, 15 bp, Homo sapiens
aataccttaaaacgt

SEQ ID NO: 1882624 - DNA, 15 bp, Homo sapiens
ataccttaaaacgta

SEQ ID NO: 1882625 - DNA, 15 bp, Homo sapiens
taccttaaaacgtat

SEQ ID NO: 1882626 - DNA, 15 bp, Homo sapiens
accttaaaacgtatc

SEQ ID NO: 1882627 - DNA, 15 bp, Homo sapiens
ccttaaaacgtatct

SEQ ID NO: 1882628 - DNA, 15 bp, Homo sapiens
cttaaaacgtatctt

SEQ ID NO: 1882629 - DNA, 15 bp, Homo sapiens
ttaaaacgtatctta

SEQ ID NO: 1882630 - DNA, 15 bp, Homo sapiens
taaaacgtatcttaa

SEQ ID NO: 1882631 - DNA, 15 bp, Homo sapiens
aaaacgtatcttaaa

SEQ ID NO: 1882632 - DNA, 15 bp, Homo sapiens
aaacgtatcttaaaa

SEQ ID NO: 1882633 - DNA, 15 bp, Homo sapiens
aacgtatcttaaaac

SEQ ID NO: 1882634 - DNA, 15 bp, Homo sapiens
acgtatcttaaaaca

SEQ ID NO: 1882635 - DNA, 15 bp, Homo sapiens
cgtatcttaaaacag

SEQ ID NO: 1882636 - DNA, 15 bp, Homo sapiens
gtatcttaaaacagg

SEQ ID NO: 1882637 - DNA, 15 bp, Homo sapiens
tatcttaaaacagga

SEQ ID NO: 1882638 - DNA, 15 bp, Homo sapiens
atcttaaaacaggat

SEQ ID NO: 1882639 - DNA, 15 bp, Homo sapiens
tcttaaaacaggata

SEQ ID NO: 1882640 - DNA, 15 bp, Homo sapiens
cttaaaacaggataa

SEQ ID NO: 1882641 - DNA, 15 bp, Homo sapiens
ttaaaacaggataaa

SEQ ID NO: 1882642 - DNA, 15 bp, Homo sapiens
taaaacaggataaag

SEQ ID NO: 1882643 - DNA, 15 bp, Homo sapiens
aaaacaggataaagg

SEQ ID NO: 1882644 - DNA, 15 bp, Homo sapiens
aaacaggataaaggg

SEQ ID NO: 1882645 - DNA, 15 bp, Homo sapiens
aacaggataaagggt

SEQ ID NO: 1882646 - DNA, 15 bp, Homo sapiens
acaggataaagggtg

SEQ ID NO: 1882647 - DNA, 15 bp, Homo sapiens
caggataaagggtgg

SEQ ID NO: 1882648 - DNA, 15 bp, Homo sapiens
aggataaagggtgga

SEQ ID NO: 1882649 - DNA, 15 bp, Homo sapiens
ggataaagggtggag

SEQ ID NO: 1882650 - DNA, 15 bp, Homo sapiens
gataaagggtggagg

SEQ ID NO: 1882651 - DNA, 15 bp, Homo sapiens
ataaagggtggaggc

SEQ ID NO: 1882652 - DNA, 15 bp, Homo sapiens
taaagggtggaggct

SEQ ID NO: 1882653 - DNA, 15 bp, Homo sapiens
aaagggtggaggctg

SEQ ID NO: 1882654 - DNA, 15 bp, Homo sapiens
aagggtggaggctga

SEQ ID NO: 1882655 - DNA, 15 bp, Homo sapiens
agggtggaggctgaa

SEQ ID NO: 1882656 - DNA, 15 bp, Homo sapiens
gggtggaggctgaaa

SEQ ID NO: 1882657 - DNA, 15 bp, Homo sapiens
ggtggaggctgaaag

SEQ ID NO: 1882658 - DNA, 15 bp, Homo sapiens
gtggaggctgaaaga

SEQ ID NO: 1882659 - DNA, 15 bp, Homo sapiens
tggaggctgaaagag

SEQ ID NO: 1882660 - DNA, 15 bp, Homo sapiens
ggaggctgaaagagt

SEQ ID NO: 1882661 - DNA, 15 bp, Homo sapiens
gaggctgaaagagtt

SEQ ID NO: 1882662 - DNA, 15 bp, Homo sapiens
aggctgaaagagttt

SEQ ID NO: 1882663 - DNA, 15 bp, Homo sapiens
ggctgaaagagtttg

SEQ ID NO: 1882664 - DNA, 15 bp, Homo sapiens
gctgaaagagtttgt

SEQ ID NO: 1882665 - DNA, 15 bp, Homo sapiens
ctgaaagagtttgta

SEQ ID NO: 1882666 - DNA, 15 bp, Homo sapiens
tgaaagagtttgtat

SEQ ID NO: 1882667 - DNA, 15 bp, Homo sapiens
gaaagagtttgtatg

SEQ ID NO: 1882668 - DNA, 15 bp, Homo sapiens
aaagagtttgtatgt

SEQ ID NO: 1882669 - DNA, 15 bp, Homo sapiens
aagagtttgtatgta

SEQ ID NO: 1882670 - DNA, 15 bp, Homo sapiens
agagtttgtatgtac

SEQ ID NO: 1882671 - DNA, 15 bp, Homo sapiens
gagtttgtatgtaca

SEQ ID NO: 1882672 - DNA, 15 bp, Homo sapiens
agtttgtatgtacat

SEQ ID NO: 1882673 - DNA, 15 bp, Homo sapiens
gtttgtatgtacatg

SEQ ID NO: 1882674 - DNA, 15 bp, Homo sapiens
tttgtatgtacatgc

SEQ ID NO: 1882675 - DNA, 15 bp, Homo sapiens
ttgtatgtacatgct

SEQ ID NO: 1882676 - DNA, 15 bp, Homo sapiens
tgtatgtacatgcta

SEQ ID NO: 1882677 - DNA, 15 bp, Homo sapiens
gtatgtacatgctag

SEQ ID NO: 1882678 - DNA, 15 bp, Homo sapiens
tatgtacatgctagg

SEQ ID NO: 1882679 - DNA, 15 bp, Homo sapiens
atgtacatgctagga

SEQ ID NO: 1882680 - DNA, 15 bp, Homo sapiens
tgtacatgctaggaa

SEQ ID NO: 1882681 - DNA, 15 bp, Homo sapiens
gtacatgctaggaaa

SEQ ID NO: 1882682 - DNA, 15 bp, Homo sapiens
tacatgctaggaaaa

SEQ ID NO: 1882683 - DNA, 15 bp, Homo sapiens
acatgctaggaaaag

SEQ ID NO: 1882684 - DNA, 15 bp, Homo sapiens
catgctaggaaaagt

SEQ ID NO: 1882685 - DNA, 15 bp, Homo sapiens
atgctaggaaaagtt

SEQ ID NO: 1882686 - DNA, 15 bp, Homo sapiens
tgctaggaaaagttt

SEQ ID NO: 1882687 - DNA, 15 bp, Homo sapiens
gctaggaaaagtttg

SEQ ID NO: 1882688 - DNA, 15 bp, Homo sapiens
ctaggaaaagtttgc

SEQ ID NO: 1882689 - DNA, 15 bp, Homo sapiens
taggaaaagtttgca

SEQ ID NO: 1882690 - DNA, 15 bp, Homo sapiens
aggaaaagtttgcat

SEQ ID NO: 1882691 - DNA, 15 bp, Homo sapiens
ggaaaagtttgcatt

SEQ ID NO: 1882692 - DNA, 15 bp, Homo sapiens
gaaaagtttgcattt

SEQ ID NO: 1882693 - DNA, 15 bp, Homo sapiens
aaaagtttgcatttc

SEQ ID NO: 1882694 - DNA, 15 bp, Homo sapiens
aaagtttgcatttcc

SEQ ID NO: 1882695 - DNA, 15 bp, Homo sapiens
aagtttgcatttcca

SEQ ID NO: 1882696 - DNA, 15 bp, Homo sapiens
agtttgcatttccat

SEQ ID NO: 1882697 - DNA, 15 bp, Homo sapiens
gtttgcatttccatg

SEQ ID NO: 1882698 - DNA, 15 bp, Homo sapiens
tttgcatttccatga

SEQ ID NO: 1882699 - DNA, 15 bp, Homo sapiens
ttgcatttccatgaa

SEQ ID NO: 1882700 - DNA, 15 bp, Homo sapiens
tgcatttccatgaat

SEQ ID NO: 1882701 - DNA, 15 bp, Homo sapiens
gcatttccatgaata

SEQ ID NO: 1882702 - DNA, 15 bp, Homo sapiens
catttccatgaatag

SEQ ID NO: 1882703 - DNA, 15 bp, Homo sapiens
atttccatgaataga

SEQ ID NO: 1882704 - DNA, 15 bp, Homo sapiens
tttccatgaatagac

SEQ ID NO: 1882705 - DNA, 15 bp, Homo sapiens
ttccatgaatagacc

SEQ ID NO: 1882706 - DNA, 15 bp, Homo sapiens
tccatgaatagacct

SEQ ID NO: 1882707 - DNA, 15 bp, Homo sapiens
ccatgaatagacctt

SEQ ID NO: 1882708 - DNA, 15 bp, Homo sapiens
catgaatagaccttt

SEQ ID NO: 1882709 - DNA, 15 bp, Homo sapiens
atgaatagaccttta

SEQ ID NO: 1882710 - DNA, 15 bp, Homo sapiens
tgaatagacctttaa

SEQ ID NO: 1882711 - DNA, 15 bp, Homo sapiens
gaatagacctttaaa

SEQ ID NO: 1882712 - DNA, 15 bp, Homo sapiens
aatagacctttaaag

SEQ ID NO: 1882713 - DNA, 15 bp, Homo sapiens
atagacctttaaagg

SEQ ID NO: 1882714 - DNA, 15 bp, Homo sapiens
tagacctttaaaggt

SEQ ID NO: 1882715 - DNA, 15 bp, Homo sapiens
agacctttaaaggtg

SEQ ID NO: 1882716 - DNA, 15 bp, Homo sapiens
gacctttaaaggtga

SEQ ID NO: 1882717 - DNA, 15 bp, Homo sapiens
acctttaaaggtgat

SEQ ID NO: 1882718 - DNA, 15 bp, Homo sapiens
cctttaaaggtgatt

SEQ ID NO: 1882719 - DNA, 15 bp, Homo sapiens
ctttaaaggtgattc

SEQ ID NO: 1882720 - DNA, 15 bp, Homo sapiens
tttaaaggtgattct

SEQ ID NO: 1882721 - DNA, 15 bp, Homo sapiens
ttaaaggtgattctg

SEQ ID NO: 1882722 - DNA, 15 bp, Homo sapiens
taaaggtgattctgg

SEQ ID NO: 1882723 - DNA, 15 bp, Homo sapiens
aaaggtgattctggt

SEQ ID NO: 1882724 - DNA, 15 bp, Homo sapiens
aaggtgattctggta

SEQ ID NO: 1882725 - DNA, 15 bp, Homo sapiens
aggtgattctggtac

SEQ ID NO: 1882726 - DNA, 15 bp, Homo sapiens
ggtgattctggtaca

SEQ ID NO: 1882727 - DNA, 15 bp, Homo sapiens
gtgattctggtacag

SEQ ID NO: 1882728 - DNA, 15 bp, Homo sapiens
tgattctggtacagg

SEQ ID NO: 1882729 - DNA, 15 bp, Homo sapiens
gattctggtacaggc

SEQ ID NO: 1882730 - DNA, 15 bp, Homo sapiens
attctggtacaggct

SEQ ID NO: 1882731 - DNA, 15 bp, Homo sapiens
ttctggtacaggctc

SEQ ID NO: 1882732 - DNA, 15 bp, Homo sapiens
tctggtacaggctca

SEQ ID NO: 1882733 - DNA, 15 bp, Homo sapiens
ctggtacaggctcag

SEQ ID NO: 1882734 - DNA, 15 bp, Homo sapiens
tggtacaggctcaga

SEQ ID NO: 1882735 - DNA, 15 bp, Homo sapiens
ggtacaggctcagaa

SEQ ID NO: 1882736 - DNA, 15 bp, Homo sapiens
gtacaggctcagaaa

SEQ ID NO: 1882737 - DNA, 15 bp, Homo sapiens
tacaggctcagaaag

SEQ ID NO: 1882738 - DNA, 15 bp, Homo sapiens
acaggctcagaaaga

SEQ ID NO: 1882739 - DNA, 15 bp, Homo sapiens
caggctcagaaagaa

SEQ ID NO: 1882740 - DNA, 15 bp, Homo sapiens
aggctcagaaagaaa

SEQ ID NO: 1882741 - DNA, 15 bp, Homo sapiens
ggctcagaaagaaaa

SEQ ID NO: 1882742 - DNA, 15 bp, Homo sapiens
gctcagaaagaaaag

SEQ ID NO: 1882743 - DNA, 15 bp, Homo sapiens
ctcagaaagaaaagc

SEQ ID NO: 1882744 - DNA, 15 bp, Homo sapiens
tcagaaagaaaagca

SEQ ID NO: 1882745 - DNA, 15 bp, Homo sapiens
cagaaagaaaagcag

SEQ ID NO: 1882746 - DNA, 15 bp, Homo sapiens
agaaagaaaagcagc

SEQ ID NO: 1882747 - DNA, 15 bp, Homo sapiens
gaaagaaaagcagca

SEQ ID NO: 1882748 - DNA, 15 bp, Homo sapiens
aaagaaaagcagcat

SEQ ID NO: 1882749 - DNA, 15 bp, Homo sapiens
aagaaaagcagcata

SEQ ID NO: 1882750 - DNA, 15 bp, Homo sapiens
agaaaagcagcatag

SEQ ID NO: 1882751 - DNA, 15 bp, Homo sapiens
gaaaagcagcataga

SEQ ID NO: 1882752 - DNA, 15 bp, Homo sapiens
aaaagcagcatagaa

SEQ ID NO: 1882753 - DNA, 15 bp, Homo sapiens
aaagcagcatagaaa

SEQ ID NO: 1882754 - DNA, 15 bp, Homo sapiens
aagcagcatagaaag

SEQ ID NO: 1882755 - DNA, 15 bp, Homo sapiens
agcagcatagaaagc

SEQ ID NO: 1882756 - DNA, 15 bp, Homo sapiens
gcagcatagaaagcc

SEQ ID NO: 1882757 - DNA, 15 bp, Homo sapiens
cagcatagaaagcct

SEQ ID NO: 1882758 - DNA, 15 bp, Homo sapiens
agcatagaaagcctc

SEQ ID NO: 1882759 - DNA, 15 bp, Homo sapiens
gcatagaaagcctca

SEQ ID NO: 1882760 - DNA, 15 bp, Homo sapiens
catagaaagcctcag

SEQ ID NO: 1882761 - DNA, 15 bp, Homo sapiens
atagaaagcctcagt

SEQ ID NO: 1882762 - DNA, 15 bp, Homo sapiens
tagaaagcctcagtc

SEQ ID NO: 1882763 - DNA, 15 bp, Homo sapiens
agaaagcctcagtct

SEQ ID NO: 1882764 - DNA, 15 bp, Homo sapiens
gaaagcctcagtctt

SEQ ID NO: 1882765 - DNA, 15 bp, Homo sapiens
aaagcctcagtcttc

SEQ ID NO: 1882766 - DNA, 15 bp, Homo sapiens
aagcctcagtcttcc

SEQ ID NO: 1882767 - DNA, 15 bp, Homo sapiens
agcctcagtcttcct

SEQ ID NO: 1882768 - DNA, 15 bp, Homo sapiens
gcctcagtcttccta

SEQ ID NO: 1882769 - DNA, 15 bp, Homo sapiens
cctcagtcttcctat

SEQ ID NO: 1882770 - DNA, 15 bp, Homo sapiens
ctcagtcttcctatg

SEQ ID NO: 1882771 - DNA, 15 bp, Homo sapiens
tcagtcttcctatgg

SEQ ID NO: 1882772 - DNA, 15 bp, Homo sapiens
cagtcttcctatgga

SEQ ID NO: 1882773 - DNA, 15 bp, Homo sapiens
agtcttcctatggaa

SEQ ID NO: 1882774 - DNA, 15 bp, Homo sapiens
gtcttcctatggaat

SEQ ID NO: 1882775 - DNA, 15 bp, Homo sapiens
tcttcctatggaata

SEQ ID NO: 1882776 - DNA, 15 bp, Homo sapiens
cttcctatggaatag

SEQ ID NO: 1882777 - DNA, 15 bp, Homo sapiens
ttcctatggaatagc

SEQ ID NO: 1882778 - DNA, 15 bp, Homo sapiens
tcctatggaatagct

SEQ ID NO: 1882779 - DNA, 15 bp, Homo sapiens
cctatggaatagcta

SEQ ID NO: 1882780 - DNA, 15 bp, Homo sapiens
ctatggaatagctaa

SEQ ID NO: 1882781 - DNA, 15 bp, Homo sapiens
tatggaatagctaag

SEQ ID NO: 1882782 - DNA, 15 bp, Homo sapiens
atggaatagctaagt

SEQ ID NO: 1882783 - DNA, 15 bp, Homo sapiens
tggaatagctaagta

SEQ ID NO: 1882784 - DNA, 15 bp, Homo sapiens
ggaatagctaagtat

SEQ ID NO: 1882785 - DNA, 15 bp, Homo sapiens
gaatagctaagtatc

SEQ ID NO: 1882786 - DNA, 15 bp, Homo sapiens
aatagctaagtatca

SEQ ID NO: 1882787 - DNA, 15 bp, Homo sapiens
atagctaagtatcat

SEQ ID NO: 1882788 - DNA, 15 bp, Homo sapiens
tagctaagtatcatg

SEQ ID NO: 1882789 - DNA, 15 bp, Homo sapiens
agctaagtatcatga

SEQ ID NO: 1882790 - DNA, 15 bp, Homo sapiens
gctaagtatcatgaa

SEQ ID NO: 1882791 - DNA, 15 bp, Homo sapiens
ctaagtatcatgaac

SEQ ID NO: 1882792 - DNA, 15 bp, Homo sapiens
taagtatcatgaaca

SEQ ID NO: 1882793 - DNA, 15 bp, Homo sapiens
aagtatcatgaacag

SEQ ID NO: 1882794 - DNA, 15 bp, Homo sapiens
agtatcatgaacaga

SEQ ID NO: 1882795 - DNA, 15 bp, Homo sapiens
gtatcatgaacagaa

SEQ ID NO: 1882796 - DNA, 15 bp, Homo sapiens
tatcatgaacagaat

SEQ ID NO: 1882797 - DNA, 15 bp, Homo sapiens
atcatgaacagaata

SEQ ID NO: 1882798 - DNA, 15 bp, Homo sapiens
tcatgaacagaatat

SEQ ID NO: 1882799 - DNA, 15 bp, Homo sapiens
catgaacagaatatt

SEQ ID NO: 1882800 - DNA, 15 bp, Homo sapiens
atgaacagaatattg

SEQ ID NO: 1882801 - DNA, 15 bp, Homo sapiens
tgaacagaatattgg

SEQ ID NO: 1882802 - DNA, 15 bp, Homo sapiens
gaacagaatattggt

SEQ ID NO: 1882803 - DNA, 15 bp, Homo sapiens
aacagaatattggta

SEQ ID NO: 1882804 - DNA, 15 bp, Homo sapiens
acagaatattggtag

SEQ ID NO: 1882805 - DNA, 15 bp, Homo sapiens
cagaatattggtaga

SEQ ID NO: 1882806 - DNA, 15 bp, Homo sapiens
agaatattggtagac

SEQ ID NO: 1882807 - DNA, 15 bp, Homo sapiens
gaatattggtagaca

SEQ ID NO: 1882808 - DNA, 15 bp, Homo sapiens
aatattggtagacat

SEQ ID NO: 1882809 - DNA, 15 bp, Homo sapiens
atattggtagacata

SEQ ID NO: 1882810 - DNA, 15 bp, Homo sapiens
tattggtagacatat

SEQ ID NO: 1882811 - DNA, 15 bp, Homo sapiens
attggtagacatata

SEQ ID NO: 1882812 - DNA, 15 bp, Homo sapiens
ttggtagacatataa

SEQ ID NO: 1882813 - DNA, 15 bp, Homo sapiens
tggtagacatataaa

SEQ ID NO: 1882814 - DNA, 15 bp, Homo sapiens
ggtagacatataaac

SEQ ID NO: 1882815 - DNA, 15 bp, Homo sapiens
gtagacatataaaca

SEQ ID NO: 1882816 - DNA, 15 bp, Homo sapiens
tagacatataaacag

SEQ ID NO: 1882817 - DNA, 15 bp, Homo sapiens
agacatataaacagc

SEQ ID NO: 1882818 - DNA, 15 bp, Homo sapiens
gacatataaacagca

SEQ ID NO: 1882819 - DNA, 15 bp, Homo sapiens
acatataaacagcaa

SEQ ID NO: 1882820 - DNA, 15 bp, Homo sapiens
catataaacagcaaa

SEQ ID NO: 1882821 - DNA, 15 bp, Homo sapiens
atataaacagcaaaa

SEQ ID NO: 1882822 - DNA, 15 bp, Homo sapiens
tataaacagcaaaag

SEQ ID NO: 1882823 - DNA, 15 bp, Homo sapiens
ataaacagcaaaagt

SEQ ID NO: 1882824 - DNA, 15 bp, Homo sapiens
taaacagcaaaagtc

SEQ ID NO: 1882825 - DNA, 15 bp, Homo sapiens
aaacagcaaaagtca

SEQ ID NO: 1882826 - DNA, 15 bp, Homo sapiens
aacagcaaaagtcag

SEQ ID NO: 1882827 - DNA, 15 bp, Homo sapiens
acagcaaaagtcaga

SEQ ID NO: 1882828 - DNA, 15 bp, Homo sapiens
cagcaaaagtcagac

SEQ ID NO: 1882829 - DNA, 15 bp, Homo sapiens
agcaaaagtcagaca

SEQ ID NO: 1882830 - DNA, 15 bp, Homo sapiens
gcaaaagtcagacag

SEQ ID NO: 1882831 - DNA, 15 bp, Homo sapiens
caaaagtcagacaga

SEQ ID NO: 1882832 - DNA, 15 bp, Homo sapiens
aaaagtcagacagaa

SEQ ID NO: 1882833 - DNA, 15 bp, Homo sapiens
aaagtcagacagaaa

SEQ ID NO: 1882834 - DNA, 15 bp, Homo sapiens
aagtcagacagaaat

SEQ ID NO: 1882835 - DNA, 15 bp, Homo sapiens
agtcagacagaaatg

SEQ ID NO: 1882836 - DNA, 15 bp, Homo sapiens
gtcagacagaaatga

SEQ ID NO: 1882837 - DNA, 15 bp, Homo sapiens
tcagacagaaatgag

SEQ ID NO: 1882838 - DNA, 15 bp, Homo sapiens
cagacagaaatgagg

SEQ ID NO: 1882839 - DNA, 15 bp, Homo sapiens
agacagaaatgagga

SEQ ID NO: 1882840 - DNA, 15 bp, Homo sapiens
gacagaaatgaggaa

SEQ ID NO: 1882841 - DNA, 15 bp, Homo sapiens
acagaaatgaggaat

SEQ ID NO: 1882842 - DNA, 15 bp, Homo sapiens
cagaaatgaggaata

SEQ ID NO: 1882843 - DNA, 15 bp, Homo sapiens
agaaatgaggaatat

SEQ ID NO: 1882844 - DNA, 15 bp, Homo sapiens
gaaatgaggaatatt

SEQ ID NO: 1882845 - DNA, 15 bp, Homo sapiens
aaatgaggaatattt

SEQ ID NO: 1882846 - DNA, 15 bp, Homo sapiens
aatgaggaatatttt

SEQ ID NO: 1882847 - DNA, 15 bp, Homo sapiens
atgaggaatatttta

SEQ ID NO: 1882848 - DNA, 15 bp, Homo sapiens
tgaggaatattttat

SEQ ID NO: 1882849 - DNA, 15 bp, Homo sapiens
gaggaatattttatt

SEQ ID NO: 1882850 - DNA, 15 bp, Homo sapiens
aggaatattttattg

SEQ ID NO: 1882851 - DNA, 15 bp, Homo sapiens
ggaatattttattgg

SEQ ID NO: 1882852 - DNA, 15 bp, Homo sapiens
gaatattttattgga

SEQ ID NO: 1882853 - DNA, 15 bp, Homo sapiens
aatattttattggaa

SEQ ID NO: 1882854 - DNA, 15 bp, Homo sapiens
atattttattggaaa

SEQ ID NO: 1882855 - DNA, 15 bp, Homo sapiens
tattttattggaaac

SEQ ID NO: 1882856 - DNA, 15 bp, Homo sapiens
attttattggaaact

SEQ ID NO: 1882857 - DNA, 15 bp, Homo sapiens
ttttattggaaactg

SEQ ID NO: 1882858 - DNA, 15 bp, Homo sapiens
tttattggaaactgg

SEQ ID NO: 1882859 - DNA, 15 bp, Homo sapiens
ttattggaaactgga

SEQ ID NO: 1882860 - DNA, 15 bp, Homo sapiens
tattggaaactggag

SEQ ID NO: 1882861 - DNA, 15 bp, Homo sapiens
attggaaactggagg

SEQ ID NO: 1882862 - DNA, 15 bp, Homo sapiens
ttggaaactggagga

SEQ ID NO: 1882863 - DNA, 15 bp, Homo sapiens
tggaaactggaggaa

SEQ ID NO: 1882864 - DNA, 15 bp, Homo sapiens
ggaaactggaggaaa

SEQ ID NO: 1882865 - DNA, 15 bp, Homo sapiens
gaaactggaggaaag

SEQ ID NO: 1882866 - DNA, 15 bp, Homo sapiens
aaactggaggaaagg

SEQ ID NO: 1882867 - DNA, 15 bp, Homo sapiens
aactggaggaaaggt

SEQ ID NO: 1882868 - DNA, 15 bp, Homo sapiens
actggaggaaaggtg

SEQ ID NO: 1882869 - DNA, 15 bp, Homo sapiens
ctggaggaaaggtga

SEQ ID NO: 1882870 - DNA, 15 bp, Homo sapiens
tggaggaaaggtgat

SEQ ID NO: 1882871 - DNA, 15 bp, Homo sapiens
ggaggaaaggtgatc

SEQ ID NO: 1882872 - DNA, 15 bp, Homo sapiens
gaggaaaggtgatct

SEQ ID NO: 1882873 - DNA, 15 bp, Homo sapiens
aggaaaggtgatctt

SEQ ID NO: 1882874 - DNA, 15 bp, Homo sapiens
ggaaaggtgatcttt

SEQ ID NO: 1882875 - DNA, 15 bp, Homo sapiens
gaaaggtgatctttt

SEQ ID NO: 1882876 - DNA, 15 bp, Homo sapiens
aaaggtgatcttttt

SEQ ID NO: 1882877 - DNA, 15 bp, Homo sapiens
aaggtgatctttttt

SEQ ID NO: 1882878 - DNA, 15 bp, Homo sapiens
aggtgatctttttta

SEQ ID NO: 1882879 - DNA, 15 bp, Homo sapiens
ggtgatcttttttat

SEQ ID NO: 1882880 - DNA, 15 bp, Homo sapiens
gtgatcttttttata

SEQ ID NO: 1882881 - DNA, 15 bp, Homo sapiens
tgatcttttttataa

SEQ ID NO: 1882882 - DNA, 15 bp, Homo sapiens
gatcttttttataaa

SEQ ID NO: 1882883 - DNA, 15 bp, Homo sapiens
atcttttttataaag

SEQ ID NO: 1882884 - DNA, 15 bp, Homo sapiens
tcttttttataaagt

SEQ ID NO: 1882885 - DNA, 15 bp, Homo sapiens
cttttttataaagtg

SEQ ID NO: 1882886 - DNA, 15 bp, Homo sapiens
ttttttataaagtgg

SEQ ID NO: 1882887 - DNA, 15 bp, Homo sapiens
tttttataaagtggc

SEQ ID NO: 1882888 - DNA, 15 bp, Homo sapiens
ttttataaagtggca

SEQ ID NO: 1882889 - DNA, 15 bp, Homo sapiens
tttataaagtggcaa

SEQ ID NO: 1882890 - DNA, 15 bp, Homo sapiens
ttataaagtggcaaa

SEQ ID NO: 1882891 - DNA, 15 bp, Homo sapiens
tataaagtggcaaat

SEQ ID NO: 1882892 - DNA, 15 bp, Homo sapiens
ataaagtggcaaata

SEQ ID NO: 1882893 - DNA, 15 bp, Homo sapiens
taaagtggcaaataa

SEQ ID NO: 1882894 - DNA, 15 bp, Homo sapiens
aaagtggcaaataat

SEQ ID NO: 1882895 - DNA, 15 bp, Homo sapiens
aagtggcaaataatt

SEQ ID NO: 1882896 - DNA, 15 bp, Homo sapiens
agtggcaaataattt

SEQ ID NO: 1882897 - DNA, 15 bp, Homo sapiens
gtggcaaataatttg

SEQ ID NO: 1882898 - DNA, 15 bp, Homo sapiens
tggcaaataatttgg

SEQ ID NO: 1882899 - DNA, 15 bp, Homo sapiens
ggcaaataatttggc

SEQ ID NO: 1882900 - DNA, 15 bp, Homo sapiens
gcaaataatttggct

SEQ ID NO: 1882901 - DNA, 15 bp, Homo sapiens
caaataatttggctg

SEQ ID NO: 1882902 - DNA, 15 bp, Homo sapiens
aaataatttggctga

SEQ ID NO: 1882903 - DNA, 15 bp, Homo sapiens
aataatttggctgaa

SEQ ID NO: 1882904 - DNA, 15 bp, Homo sapiens
ataatttggctgaat

SEQ ID NO: 1882905 - DNA, 15 bp, Homo sapiens
taatttggctgaata

SEQ ID NO: 1882906 - DNA, 15 bp, Homo sapiens
aatttggctgaatag

SEQ ID NO: 1882907 - DNA, 15 bp, Homo sapiens
atttggctgaatagt

SEQ ID NO: 1882908 - DNA, 15 bp, Homo sapiens
tttggctgaatagtg

SEQ ID NO: 1882909 - DNA, 15 bp, Homo sapiens
ttggctgaatagtgt

SEQ ID NO: 1882910 - DNA, 15 bp, Homo sapiens
tggctgaatagtgtt

SEQ ID NO: 1882911 - DNA, 15 bp, Homo sapiens
ggctgaatagtgttt

SEQ ID NO: 1882912 - DNA, 15 bp, Homo sapiens
gctgaatagtgttta

SEQ ID NO: 1882913 - DNA, 15 bp, Homo sapiens
ctgaatagtgtttat

SEQ ID NO: 1882914 - DNA, 15 bp, Homo sapiens
tgaatagtgtttatg

SEQ ID NO: 1882915 - DNA, 15 bp, Homo sapiens
gaatagtgtttatgt

SEQ ID NO: 1882916 - DNA, 15 bp, Homo sapiens
aatagtgtttatgtt

SEQ ID NO: 1882917 - DNA, 15 bp, Homo sapiens
atagtgtttatgttc

SEQ ID NO: 1882918 - DNA, 15 bp, Homo sapiens
tagtgtttatgttct

SEQ ID NO: 1882919 - DNA, 15 bp, Homo sapiens
agtgtttatgttcta

SEQ ID NO: 1882920 - DNA, 15 bp, Homo sapiens
gtgtttatgttctag

SEQ ID NO: 1882921 - DNA, 15 bp, Homo sapiens
tgtttatgttctagt

SEQ ID NO: 1882922 - DNA, 15 bp, Homo sapiens
gtttatgttctagtg

SEQ ID NO: 1882923 - DNA, 15 bp, Homo sapiens
tttatgttctagtgc

SEQ ID NO: 1882924 - DNA, 15 bp, Homo sapiens
ttatgttctagtgct

SEQ ID NO: 1882925 - DNA, 15 bp, Homo sapiens
tatgttctagtgctt

SEQ ID NO: 1882926 - DNA, 15 bp, Homo sapiens
atgttctagtgcttt

SEQ ID NO: 1882927 - DNA, 15 bp, Homo sapiens
tgttctagtgctttg

SEQ ID NO: 1882928 - DNA, 15 bp, Homo sapiens
gttctagtgctttgt

SEQ ID NO: 1882929 - DNA, 15 bp, Homo sapiens
ttctagtgctttgtg

SEQ ID NO: 1882930 - DNA, 15 bp, Homo sapiens
tctagtgctttgtgg

SEQ ID NO: 1882931 - DNA, 15 bp, Homo sapiens
ctagtgctttgtgga

SEQ ID NO: 1882932 - DNA, 15 bp, Homo sapiens
tagtgctttgtggaa

SEQ ID NO: 1882933 - DNA, 15 bp, Homo sapiens
agtgctttgtggaag

SEQ ID NO: 1882934 - DNA, 15 bp, Homo sapiens
gtgctttgtggaaga

SEQ ID NO: 1882935 - DNA, 15 bp, Homo sapiens
tgctttgtggaagat

SEQ ID NO: 1882936 - DNA, 15 bp, Homo sapiens
gctttgtggaagata

SEQ ID NO: 1882937 - DNA, 15 bp, Homo sapiens
ctttgtggaagatag

SEQ ID NO: 1882938 - DNA, 15 bp, Homo sapiens
tttgtggaagataga

SEQ ID NO: 1882939 - DNA, 15 bp, Homo sapiens
ttgtggaagatagaa

SEQ ID NO: 1882940 - DNA, 15 bp, Homo sapiens
tgtggaagatagaac

SEQ ID NO: 1882941 - DNA, 15 bp, Homo sapiens
gtggaagatagaact

SEQ ID NO: 1882942 - DNA, 15 bp, Homo sapiens
tggaagatagaactt

SEQ ID NO: 1882943 - DNA, 15 bp, Homo sapiens
ggaagatagaacttg

SEQ ID NO: 1882944 - DNA, 15 bp, Homo sapiens
gaagatagaacttgc

SEQ ID NO: 1882945 - DNA, 15 bp, Homo sapiens
aagatagaacttgca

SEQ ID NO: 1882946 - DNA, 15 bp, Homo sapiens
agatagaacttgcaa

SEQ ID NO: 1882947 - DNA, 15 bp, Homo sapiens
gatagaacttgcaag

SEQ ID NO: 1882948 - DNA, 15 bp, Homo sapiens
atagaacttgcaagc

SEQ ID NO: 1882949 - DNA, 15 bp, Homo sapiens
tagaacttgcaagct

SEQ ID NO: 1882950 - DNA, 15 bp, Homo sapiens
agaacttgcaagctt

SEQ ID NO: 1882951 - DNA, 15 bp, Homo sapiens
gaacttgcaagcttt

SEQ ID NO: 1882952 - DNA, 15 bp, Homo sapiens
aacttgcaagctttg

SEQ ID NO: 1882953 - DNA, 15 bp, Homo sapiens
acttgcaagctttga

SEQ ID NO: 1882954 - DNA, 15 bp, Homo sapiens
cttgcaagctttgat

SEQ ID NO: 1882955 - DNA, 15 bp, Homo sapiens
ttgcaagctttgata

SEQ ID NO: 1882956 - DNA, 15 bp, Homo sapiens
tgcaagctttgatat

SEQ ID NO: 1882957 - DNA, 15 bp, Homo sapiens
gcaagctttgatatt

SEQ ID NO: 1882958 - DNA, 15 bp, Homo sapiens
caagctttgatattt

SEQ ID NO: 1882959 - DNA, 15 bp, Homo sapiens
aagctttgatattta

SEQ ID NO: 1882960 - DNA, 15 bp, Homo sapiens
agctttgatatttag

SEQ ID NO: 1882961 - DNA, 15 bp, Homo sapiens
gctttgatatttagc

SEQ ID NO: 1882962 - DNA, 15 bp, Homo sapiens
ctttgatatttagct

SEQ ID NO: 1882963 - DNA, 15 bp, Homo sapiens
tttgatatttagctg

SEQ ID NO: 1882964 - DNA, 15 bp, Homo sapiens
ttgatatttagctga

SEQ ID NO: 1882965 - DNA, 15 bp, Homo sapiens
tgatatttagctgaa

SEQ ID NO: 1882966 - DNA, 15 bp, Homo sapiens
gatatttagctgaaa

SEQ ID NO: 1882967 - DNA, 15 bp, Homo sapiens
atatttagctgaaat

SEQ ID NO: 1882968 - DNA, 15 bp, Homo sapiens
tatttagctgaaata

SEQ ID NO: 1882969 - DNA, 15 bp, Homo sapiens
atttagctgaaataa

SEQ ID NO: 1882970 - DNA, 15 bp, Homo sapiens
tttagctgaaataat

SEQ ID NO: 1882971 - DNA, 15 bp, Homo sapiens
ttagctgaaataatt

SEQ ID NO: 1882972 - DNA, 15 bp, Homo sapiens
tagctgaaataattc

SEQ ID NO: 1882973 - DNA, 15 bp, Homo sapiens
gctgaaataattccc

SEQ ID NO: 1882974 - DNA, 15 bp, Homo sapiens
ctgaaataattccca

SEQ ID NO: 1882975 - DNA, 15 bp, Homo sapiens
tgaaataattcccaa

SEQ ID NO: 1882976 - DNA, 15 bp, Homo sapiens
gaaataattcccaag

SEQ ID NO: 1882977 - DNA, 15 bp, Homo sapiens
aaataattcccaagc

SEQ ID NO: 1882978 - DNA, 15 bp, Homo sapiens
aataattcccaagca

SEQ ID NO: 1882979 - DNA, 15 bp, Homo sapiens
ataattcccaagcaa

SEQ ID NO: 1882980 - DNA, 15 bp, Homo sapiens
taattcccaagcaaa

SEQ ID NO: 1882981 - DNA, 15 bp, Homo sapiens
aattcccaagcaaag

SEQ ID NO: 1882982 - DNA, 15 bp, Homo sapiens
attcccaagcaaagt

SEQ ID NO: 1882983 - DNA, 15 bp, Homo sapiens
ttcccaagcaaagtg

SEQ ID NO: 1882984 - DNA, 15 bp, Homo sapiens
tcccaagcaaagtgt

SEQ ID NO: 1882985 - DNA, 15 bp, Homo sapiens
cccaagcaaagtgtt

SEQ ID NO: 1882986 - DNA, 15 bp, Homo sapiens
ccaagcaaagtgtta

SEQ ID NO: 1882987 - DNA, 15 bp, Homo sapiens
caagcaaagtgttaa

SEQ ID NO: 1882988 - DNA, 15 bp, Homo sapiens
aagcaaagtgttaaa

SEQ ID NO: 1882989 - DNA, 15 bp, Homo sapiens
agcaaagtgttaaaa

SEQ ID NO: 1882990 - DNA, 15 bp, Homo sapiens
gcaaagtgttaaaag

SEQ ID NO: 1882991 - DNA, 15 bp, Homo sapiens
caaagtgttaaaagt

SEQ ID NO: 1882992 - DNA, 15 bp, Homo sapiens
aaagtgttaaaagta

SEQ ID NO: 1882993 - DNA, 15 bp, Homo sapiens
aagtgttaaaagtac

SEQ ID NO: 1882994 - DNA, 15 bp, Homo sapiens
agtgttaaaagtaca

SEQ ID NO: 1882995 - DNA, 15 bp, Homo sapiens
gtgttaaaagtacag

SEQ ID NO: 1882996 - DNA, 15 bp, Homo sapiens
tgttaaaagtacagc

SEQ ID NO: 1882997 - DNA, 15 bp, Homo sapiens
gttaaaagtacagct

SEQ ID NO: 1882998 - DNA, 15 bp, Homo sapiens
ttaaaagtacagctt

SEQ ID NO: 1882999 - DNA, 15 bp, Homo sapiens
taaaagtacagcttg

SEQ ID NO: 1883000 - DNA, 15 bp, Homo sapiens
aaaagtacagcttgg

SEQ ID NO: 1883001 - DNA, 15 bp, Homo sapiens
aaagtacagcttggt

SEQ ID NO: 1883002 - DNA, 15 bp, Homo sapiens
aagtacagcttggtg

SEQ ID NO: 1883003 - DNA, 15 bp, Homo sapiens
agtacagcttggtgc

SEQ ID NO: 1883004 - DNA, 15 bp, Homo sapiens
gtacagcttggtgcc

SEQ ID NO: 1883005 - DNA, 15 bp, Homo sapiens
tacagcttggtgccc

SEQ ID NO: 1883006 - DNA, 15 bp, Homo sapiens
acagcttggtgcccc

SEQ ID NO: 1883007 - DNA, 15 bp, Homo sapiens
cagcttggtgccccc

SEQ ID NO: 1883008 - DNA, 15 bp, Homo sapiens
agcttggtgccccct

SEQ ID NO: 1883009 - DNA, 15 bp, Homo sapiens
gcttggtgccccctg

SEQ ID NO: 1883010 - DNA, 15 bp, Homo sapiens
cttggtgccccctgg

SEQ ID NO: 1883011 - DNA, 15 bp, Homo sapiens
ttggtgccccctggc

SEQ ID NO: 1883012 - DNA, 15 bp, Homo sapiens
tggtgccccctggct

SEQ ID NO: 1883013 - DNA, 15 bp, Homo sapiens
ggtgccccctggctt

SEQ ID NO: 1883014 - DNA, 15 bp, Homo sapiens
gtgccccctggcttc

SEQ ID NO: 1883015 - DNA, 15 bp, Homo sapiens
tgccccctggcttct

SEQ ID NO: 1883016 - DNA, 15 bp, Homo sapiens
gccccctggcttctt

SEQ ID NO: 1883017 - DNA, 15 bp, Homo sapiens
ccccctggcttctta

SEQ ID NO: 1883018 - DNA, 15 bp, Homo sapiens
cccctggcttcttac

SEQ ID NO: 1883019 - DNA, 15 bp, Homo sapiens
ccctggcttcttaca

SEQ ID NO: 1883020 - DNA, 15 bp, Homo sapiens
cctggcttcttacag

SEQ ID NO: 1883021 - DNA, 15 bp, Homo sapiens
ctggcttcttacagt

SEQ ID NO: 1883022 - DNA, 15 bp, Homo sapiens
tggcttcttacagta

SEQ ID NO: 1883023 - DNA, 15 bp, Homo sapiens
ggcttcttacagtaa

SEQ ID NO: 1883024 - DNA, 15 bp, Homo sapiens
gcttcttacagtaaa

SEQ ID NO: 1883025 - DNA, 15 bp, Homo sapiens
cttcttacagtaaaa

SEQ ID NO: 1883026 - DNA, 15 bp, Homo sapiens
ttcttacagtaaaat

SEQ ID NO: 1883027 - DNA, 15 bp, Homo sapiens
tcttacagtaaaatc

SEQ ID NO: 1883028 - DNA, 15 bp, Homo sapiens
cttacagtaaaatct

SEQ ID NO: 1883029 - DNA, 15 bp, Homo sapiens
ttacagtaaaatcta

SEQ ID NO: 1883030 - DNA, 15 bp, Homo sapiens
tacagtaaaatctaa

SEQ ID NO: 1883031 - DNA, 15 bp, Homo sapiens
acagtaaaatctaag

SEQ ID NO: 1883032 - DNA, 15 bp, Homo sapiens
cagtaaaatctaaga

SEQ ID NO: 1883033 - DNA, 15 bp, Homo sapiens
agtaaaatctaagag

SEQ ID NO: 1883034 - DNA, 15 bp, Homo sapiens
gtaaaatctaagagg

SEQ ID NO: 1883035 - DNA, 15 bp, Homo sapiens
taaaatctaagaggg

SEQ ID NO: 1883036 - DNA, 15 bp, Homo sapiens
aaaatctaagaggga

SEQ ID NO: 1883037 - DNA, 15 bp, Homo sapiens
aaatctaagagggaa

SEQ ID NO: 1883038 - DNA, 15 bp, Homo sapiens
aatctaagagggaaa

SEQ ID NO: 1883039 - DNA, 15 bp, Homo sapiens
atctaagagggaaaa

SEQ ID NO: 1883040 - DNA, 15 bp, Homo sapiens
tctaagagggaaaat

SEQ ID NO: 1883041 - DNA, 15 bp, Homo sapiens
ctaagagggaaaatg

SEQ ID NO: 1883042 - DNA, 15 bp, Homo sapiens
taagagggaaaatga

SEQ ID NO: 1883043 - DNA, 15 bp, Homo sapiens
aagagggaaaatgac

SEQ ID NO: 1883044 - DNA, 15 bp, Homo sapiens
agagggaaaatgaca

SEQ ID NO: 1883045 - DNA, 15 bp, Homo sapiens
gagggaaaatgacat

SEQ ID NO: 1883046 - DNA, 15 bp, Homo sapiens
agggaaaatgacata

SEQ ID NO: 1883047 - DNA, 15 bp, Homo sapiens
gggaaaatgacataa

SEQ ID NO: 1883048 - DNA, 15 bp, Homo sapiens
ggaaaatgacataac

SEQ ID NO: 1883049 - DNA, 15 bp, Homo sapiens
gaaaatgacataaca

SEQ ID NO: 1883050 - DNA, 15 bp, Homo sapiens
aaaatgacataacaa

SEQ ID NO: 1883051 - DNA, 15 bp, Homo sapiens
aaatgacataacaat

SEQ ID NO: 1883052 - DNA, 15 bp, Homo sapiens
aatgacataacaata

SEQ ID NO: 1883053 - DNA, 15 bp, Homo sapiens
atgacataacaatag

SEQ ID NO: 1883054 - DNA, 15 bp, Homo sapiens
tgacataacaataga

SEQ ID NO: 1883055 - DNA, 15 bp, Homo sapiens
gacataacaatagaa

SEQ ID NO: 1883056 - DNA, 15 bp, Homo sapiens
acataacaatagaat

SEQ ID NO: 1883057 - DNA, 15 bp, Homo sapiens
cataacaatagaatt

SEQ ID NO: 1883058 - DNA, 15 bp, Homo sapiens
ataacaatagaattg

SEQ ID NO: 1883059 - DNA, 15 bp, Homo sapiens
taacaatagaattgt

SEQ ID NO: 1883060 - DNA, 15 bp, Homo sapiens
aacaatagaattgtt

SEQ ID NO: 1883061 - DNA, 15 bp, Homo sapiens
acaatagaattgtta

SEQ ID NO: 1883062 - DNA, 15 bp, Homo sapiens
caatagaattgttag

SEQ ID NO: 1883063 - DNA, 15 bp, Homo sapiens
aatagaattgttagg

SEQ ID NO: 1883064 - DNA, 15 bp, Homo sapiens
atagaattgttaggc

SEQ ID NO: 1883065 - DNA, 15 bp, Homo sapiens
tagaattgttaggca

SEQ ID NO: 1883066 - DNA, 15 bp, Homo sapiens
agaattgttaggcaa

SEQ ID NO: 1883067 - DNA, 15 bp, Homo sapiens
gaattgttaggcaaa

SEQ ID NO: 1883068 - DNA, 15 bp, Homo sapiens
aattgttaggcaaaa

SEQ ID NO: 1883069 - DNA, 15 bp, Homo sapiens
attgttaggcaaaaa

SEQ ID NO: 1883070 - DNA, 15 bp, Homo sapiens
ttgttaggcaaaaag

SEQ ID NO: 1883071 - DNA, 15 bp, Homo sapiens
tgttaggcaaaaagg

SEQ ID NO: 1883072 - DNA, 15 bp, Homo sapiens
gttaggcaaaaagga

SEQ ID NO: 1883073 - DNA, 15 bp, Homo sapiens
ttaggcaaaaaggat

SEQ ID NO: 1883074 - DNA, 15 bp, Homo sapiens
taggcaaaaaggatc

SEQ ID NO: 1883075 - DNA, 15 bp, Homo sapiens
aggcaaaaaggatct

SEQ ID NO: 1883076 - DNA, 15 bp, Homo sapiens
ggcaaaaaggatcta

SEQ ID NO: 1883077 - DNA, 15 bp, Homo sapiens
gcaaaaaggatctaa

SEQ ID NO: 1883078 - DNA, 15 bp, Homo sapiens
caaaaaggatctaaa

SEQ ID NO: 1883079 - DNA, 15 bp, Homo sapiens
aaaaaggatctaaac

SEQ ID NO: 1883080 - DNA, 15 bp, Homo sapiens
aaaaggatctaaact

SEQ ID NO: 1883081 - DNA, 15 bp, Homo sapiens
aaaggatctaaactt

SEQ ID NO: 1883082 - DNA, 15 bp, Homo sapiens
aaggatctaaactta

SEQ ID NO: 1883083 - DNA, 15 bp, Homo sapiens
aggatctaaacttaa

SEQ ID NO: 1883084 - DNA, 15 bp, Homo sapiens
ggatctaaacttaaa

SEQ ID NO: 1883085 - DNA, 15 bp, Homo sapiens
gatctaaacttaaag

SEQ ID NO: 1883086 - DNA, 15 bp, Homo sapiens
atctaaacttaaaga

SEQ ID NO: 1883087 - DNA, 15 bp, Homo sapiens
tctaaacttaaagat

SEQ ID NO: 1883088 - DNA, 15 bp, Homo sapiens
ctaaacttaaagatt

SEQ ID NO: 1883089 - DNA, 15 bp, Homo sapiens
taaacttaaagattt

SEQ ID NO: 1883090 - DNA, 15 bp, Homo sapiens
aaacttaaagatttg

SEQ ID NO: 1883091 - DNA, 15 bp, Homo sapiens
aacttaaagatttgg

SEQ ID NO: 1883092 - DNA, 15 bp, Homo sapiens
acttaaagatttgga

SEQ ID NO: 1883093 - DNA, 15 bp, Homo sapiens
cttaaagatttggaa

SEQ ID NO: 1883094 - DNA, 15 bp, Homo sapiens
ttaaagatttggaaa

SEQ ID NO: 1883095 - DNA, 15 bp, Homo sapiens
taaagatttggaaaa

SEQ ID NO: 1883096 - DNA, 15 bp, Homo sapiens
aaagatttggaaaat

SEQ ID NO: 1883097 - DNA, 15 bp, Homo sapiens
aagatttggaaaatt

SEQ ID NO: 1883098 - DNA, 15 bp, Homo sapiens
agatttggaaaattt

SEQ ID NO: 1883099 - DNA, 15 bp, Homo sapiens
gatttggaaaatttg

SEQ ID NO: 1883100 - DNA, 15 bp, Homo sapiens
atttggaaaatttgc

SEQ ID NO: 1883101 - DNA, 15 bp, Homo sapiens
tttggaaaatttgca

SEQ ID NO: 1883102 - DNA, 15 bp, Homo sapiens
ttggaaaatttgcag

SEQ ID NO: 1883103 - DNA, 15 bp, Homo sapiens
tggaaaatttgcagc

SEQ ID NO: 1883104 - DNA, 15 bp, Homo sapiens
ggaaaatttgcagcc

SEQ ID NO: 1883105 - DNA, 15 bp, Homo sapiens
gaaaatttgcagcca

SEQ ID NO: 1883106 - DNA, 15 bp, Homo sapiens
aaaatttgcagccat

SEQ ID NO: 1883107 - DNA, 15 bp, Homo sapiens
aaatttgcagccatc

SEQ ID NO: 1883108 - DNA, 15 bp, Homo sapiens
aatttgcagccatcc

SEQ ID NO: 1883109 - DNA, 15 bp, Homo sapiens
atttgcagccatcca

SEQ ID NO: 1883110 - DNA, 15 bp, Homo sapiens
tttgcagccatccat

SEQ ID NO: 1883111 - DNA, 15 bp, Homo sapiens
ttgcagccatccata

SEQ ID NO: 1883112 - DNA, 15 bp, Homo sapiens
tgcagccatccatat

SEQ ID NO: 1883113 - DNA, 15 bp, Homo sapiens
gcagccatccatatt

SEQ ID NO: 1883114 - DNA, 15 bp, Homo sapiens
cagccatccatattg

SEQ ID NO: 1883115 - DNA, 15 bp, Homo sapiens
agccatccatattgc

SEQ ID NO: 1883116 - DNA, 15 bp, Homo sapiens
gccatccatattgca

SEQ ID NO: 1883117 - DNA, 15 bp, Homo sapiens
ccatccatattgcaa

SEQ ID NO: 1883118 - DNA, 15 bp, Homo sapiens
catccatattgcaaa

SEQ ID NO: 1883119 - DNA, 15 bp, Homo sapiens
atccatattgcaaaa

SEQ ID NO: 1883120 - DNA, 15 bp, Homo sapiens
tccatattgcaaaaa

SEQ ID NO: 1883121 - DNA, 15 bp, Homo sapiens
ccatattgcaaaaat

SEQ ID NO: 1883122 - DNA, 15 bp, Homo sapiens
catattgcaaaaatt

SEQ ID NO: 1883123 - DNA, 15 bp, Homo sapiens
atattgcaaaaattg

SEQ ID NO: 1883124 - DNA, 15 bp, Homo sapiens
tattgcaaaaattga

SEQ ID NO: 1883125 - DNA, 15 bp, Homo sapiens
attgcaaaaattgag

SEQ ID NO: 1883126 - DNA, 15 bp, Homo sapiens
ttgcaaaaattgaga

SEQ ID NO: 1883127 - DNA, 15 bp, Homo sapiens
tgcaaaaattgagaa

SEQ ID NO: 1883128 - DNA, 15 bp, Homo sapiens
gcaaaaattgagaaa

SEQ ID NO: 1883129 - DNA, 15 bp, Homo sapiens
caaaaattgagaaaa

SEQ ID NO: 1883130 - DNA, 15 bp, Homo sapiens
aaaaattgagaaaaa

SEQ ID NO: 1883131 - DNA, 15 bp, Homo sapiens
aaaattgagaaaaaa

SEQ ID NO: 1883132 - DNA, 15 bp, Homo sapiens
aaattgagaaaaaat

SEQ ID NO: 1883133 - DNA, 15 bp, Homo sapiens
aattgagaaaaaatg

SEQ ID NO: 1883134 - DNA, 15 bp, Homo sapiens
attgagaaaaaatgt

SEQ ID NO: 1883135 - DNA, 15 bp, Homo sapiens
ttgagaaaaaatgtt

SEQ ID NO: 1883136 - DNA, 15 bp, Homo sapiens
tgagaaaaaatgttt

SEQ ID NO: 1883137 - DNA, 15 bp, Homo sapiens
gagaaaaaatgtttg

SEQ ID NO: 1883138 - DNA, 15 bp, Homo sapiens
agaaaaaatgtttgg

SEQ ID NO: 1883139 - DNA, 15 bp, Homo sapiens
gaaaaaatgtttgga

SEQ ID NO: 1883140 - DNA, 15 bp, Homo sapiens
aaaaaatgtttggaa

SEQ ID NO: 1883141 - DNA, 15 bp, Homo sapiens
aaaaatgtttggaac

SEQ ID NO: 1883142 - DNA, 15 bp, Homo sapiens
aaaatgtttggaaca

SEQ ID NO: 1883143 - DNA, 15 bp, Homo sapiens
aaatgtttggaacac

SEQ ID NO: 1883144 - DNA, 15 bp, Homo sapiens
aatgtttggaacact

SEQ ID NO: 1883145 - DNA, 15 bp, Homo sapiens
atgtttggaacacta

SEQ ID NO: 1883146 - DNA, 15 bp, Homo sapiens
tgtttggaacactaa

SEQ ID NO: 1883147 - DNA, 15 bp, Homo sapiens
gtttggaacactaag

SEQ ID NO: 1883148 - DNA, 15 bp, Homo sapiens
tttggaacactaagg

SEQ ID NO: 1883149 - DNA, 15 bp, Homo sapiens
ttggaacactaaggg

SEQ ID NO: 1883150 - DNA, 15 bp, Homo sapiens
tggaacactaagggt

SEQ ID NO: 1883151 - DNA, 15 bp, Homo sapiens
ggaacactaagggtg

SEQ ID NO: 1883152 - DNA, 15 bp, Homo sapiens
gaacactaagggtgt

SEQ ID NO: 1883153 - DNA, 15 bp, Homo sapiens
aacactaagggtgtg

SEQ ID NO: 1883154 - DNA, 15 bp, Homo sapiens
acactaagggtgtgg

SEQ ID NO: 1883155 - DNA, 15 bp, Homo sapiens
cactaagggtgtggc

SEQ ID NO: 1883156 - DNA, 15 bp, Homo sapiens
actaagggtgtggcc

SEQ ID NO: 1883157 - DNA, 15 bp, Homo sapiens
ctaagggtgtggcct

SEQ ID NO: 1883158 - DNA, 15 bp, Homo sapiens
taagggtgtggccta

SEQ ID NO: 1883159 - DNA, 15 bp, Homo sapiens
aagggtgtggcctag

SEQ ID NO: 1883160 - DNA, 15 bp, Homo sapiens
agggtgtggcctagt

SEQ ID NO: 1883161 - DNA, 15 bp, Homo sapiens
gggtgtggcctagtg

SEQ ID NO: 1883162 - DNA, 15 bp, Homo sapiens
ggtgtggcctagtga

SEQ ID NO: 1883163 - DNA, 15 bp, Homo sapiens
gtgtggcctagtgac

SEQ ID NO: 1883164 - DNA, 15 bp, Homo sapiens
tgtggcctagtgacc

SEQ ID NO: 1883165 - DNA, 15 bp, Homo sapiens
gtggcctagtgacca

SEQ ID NO: 1883166 - DNA, 15 bp, Homo sapiens
tggcctagtgaccat

SEQ ID NO: 1883167 - DNA, 15 bp, Homo sapiens
ggcctagtgaccatt

SEQ ID NO: 1883168 - DNA, 15 bp, Homo sapiens
gcctagtgaccattt

SEQ ID NO: 1883169 - DNA, 15 bp, Homo sapiens
cctagtgaccatttg

SEQ ID NO: 1883170 - DNA, 15 bp, Homo sapiens
ctagtgaccatttga

SEQ ID NO: 1883171 - DNA, 15 bp, Homo sapiens
tagtgaccatttgat

SEQ ID NO: 1883172 - DNA, 15 bp, Homo sapiens
agtgaccatttgata

SEQ ID NO: 1883173 - DNA, 15 bp, Homo sapiens
gtgaccatttgataa

SEQ ID NO: 1883174 - DNA, 15 bp, Homo sapiens
tgaccatttgataag

SEQ ID NO: 1883175 - DNA, 15 bp, Homo sapiens
gaccatttgataaga

SEQ ID NO: 1883176 - DNA, 15 bp, Homo sapiens
accatttgataagat

SEQ ID NO: 1883177 - DNA, 15 bp, Homo sapiens
ccatttgataagatt

SEQ ID NO: 1883178 - DNA, 15 bp, Homo sapiens
catttgataagattt

SEQ ID NO: 1883179 - DNA, 15 bp, Homo sapiens
atttgataagatttg

SEQ ID NO: 1883180 - DNA, 15 bp, Homo sapiens
tttgataagatttgt

SEQ ID NO: 1883181 - DNA, 15 bp, Homo sapiens
ttgataagatttgtg

SEQ ID NO: 1883182 - DNA, 15 bp, Homo sapiens
tgataagatttgtgt

SEQ ID NO: 1883183 - DNA, 15 bp, Homo sapiens
gataagatttgtgtg

SEQ ID NO: 1883184 - DNA, 15 bp, Homo sapiens
ataagatttgtgtgg

SEQ ID NO: 1883185 - DNA, 15 bp, Homo sapiens
taagatttgtgtggg

SEQ ID NO: 1883186 - DNA, 15 bp, Homo sapiens
aagatttgtgtgggc

SEQ ID NO: 1883187 - DNA, 15 bp, Homo sapiens
agatttgtgtgggca

SEQ ID NO: 1883188 - DNA, 15 bp, Homo sapiens
gatttgtgtgggcat

SEQ ID NO: 1883189 - DNA, 15 bp, Homo sapiens
atttgtgtgggcata

SEQ ID NO: 1883190 - DNA, 15 bp, Homo sapiens
tttgtgtgggcataa

SEQ ID NO: 1883191 - DNA, 15 bp, Homo sapiens
ttgtgtgggcataaa

SEQ ID NO: 1883192 - DNA, 15 bp, Homo sapiens
tgtgtgggcataaac

SEQ ID NO: 1883193 - DNA, 15 bp, Homo sapiens
gtgtgggcataaact

SEQ ID NO: 1883194 - DNA, 15 bp, Homo sapiens
tgtgggcataaactg

SEQ ID NO: 1883195 - DNA, 15 bp, Homo sapiens
gtgggcataaactgt

SEQ ID NO: 1883196 - DNA, 15 bp, Homo sapiens
tgggcataaactgta

SEQ ID NO: 1883197 - DNA, 15 bp, Homo sapiens
gggcataaactgtag

SEQ ID NO: 1883198 - DNA, 15 bp, Homo sapiens
ggcataaactgtaga

SEQ ID NO: 1883199 - DNA, 15 bp, Homo sapiens
gcataaactgtagat

SEQ ID NO: 1883200 - DNA, 15 bp, Homo sapiens
cataaactgtagatt

SEQ ID NO: 1883201 - DNA, 15 bp, Homo sapiens
ataaactgtagattt

SEQ ID NO: 1883202 - DNA, 15 bp, Homo sapiens
taaactgtagattta

SEQ ID NO: 1883203 - DNA, 15 bp, Homo sapiens
aaactgtagatttaa

SEQ ID NO: 1883204 - DNA, 15 bp, Homo sapiens
aactgtagatttaat

SEQ ID NO: 1883205 - DNA, 15 bp, Homo sapiens
actgtagatttaatc

SEQ ID NO: 1883206 - DNA, 15 bp, Homo sapiens
ctgtagatttaatca

SEQ ID NO: 1883207 - DNA, 15 bp, Homo sapiens
tgtagatttaatcag

SEQ ID NO: 1883208 - DNA, 15 bp, Homo sapiens
gtagatttaatcagc

SEQ ID NO: 1883209 - DNA, 15 bp, Homo sapiens
tagatttaatcagcc

SEQ ID NO: 1883210 - DNA, 15 bp, Homo sapiens
agatttaatcagcca

SEQ ID NO: 1883211 - DNA, 15 bp, Homo sapiens
gatttaatcagccac

SEQ ID NO: 1883212 - DNA, 15 bp, Homo sapiens
atttaatcagccacc

SEQ ID NO: 1883213 - DNA, 15 bp, Homo sapiens
tttaatcagccaccc

SEQ ID NO: 1883214 - DNA, 15 bp, Homo sapiens
ttaatcagccacccc

SEQ ID NO: 1883215 - DNA, 15 bp, Homo sapiens
taatcagccacccca

SEQ ID NO: 1883216 - DNA, 15 bp, Homo sapiens
aatcagccaccccag

SEQ ID NO: 1883217 - DNA, 15 bp, Homo sapiens
atcagccaccccaga

SEQ ID NO: 1883218 - DNA, 15 bp, Homo sapiens
tcagccaccccagaa

SEQ ID NO: 1883219 - DNA, 15 bp, Homo sapiens
cagccaccccagaag

SEQ ID NO: 1883220 - DNA, 15 bp, Homo sapiens
agccaccccagaagg

SEQ ID NO: 1883221 - DNA, 15 bp, Homo sapiens
gccaccccagaagga

SEQ ID NO: 1883222 - DNA, 15 bp, Homo sapiens
ccaccccagaaggaa

SEQ ID NO: 1883223 - DNA, 15 bp, Homo sapiens
caccccagaaggaat

SEQ ID NO: 1883224 - DNA, 15 bp, Homo sapiens
accccagaaggaata

SEQ ID NO: 1883225 - DNA, 15 bp, Homo sapiens
ccccagaaggaatac

SEQ ID NO: 1883226 - DNA, 15 bp, Homo sapiens
cccagaaggaatacc

SEQ ID NO: 1883227 - DNA, 15 bp, Homo sapiens
ccagaaggaatacca

SEQ ID NO: 1883228 - DNA, 15 bp, Homo sapiens
cagaaggaataccac

SEQ ID NO: 1883229 - DNA, 15 bp, Homo sapiens
agaaggaataccacc

SEQ ID NO: 1883230 - DNA, 15 bp, Homo sapiens
gaaggaataccacca

SEQ ID NO: 1883231 - DNA, 15 bp, Homo sapiens
aaggaataccaccag

SEQ ID NO: 1883232 - DNA, 15 bp, Homo sapiens
aggaataccaccagt

SEQ ID NO: 1883233 - DNA, 15 bp, Homo sapiens
ggaataccaccagtt

SEQ ID NO: 1883234 - DNA, 15 bp, Homo sapiens
gaataccaccagttt

SEQ ID NO: 1883235 - DNA, 15 bp, Homo sapiens
aataccaccagtttg

SEQ ID NO: 1883236 - DNA, 15 bp, Homo sapiens
ataccaccagtttga

SEQ ID NO: 1883237 - DNA, 15 bp, Homo sapiens
taccaccagtttgaa

SEQ ID NO: 1883238 - DNA, 15 bp, Homo sapiens
accaccagtttgaac

SEQ ID NO: 1883239 - DNA, 15 bp, Homo sapiens
ccaccagtttgaact

SEQ ID NO: 1883240 - DNA, 15 bp, Homo sapiens
caccagtttgaactg

SEQ ID NO: 1883241 - DNA, 15 bp, Homo sapiens
accagtttgaactga

SEQ ID NO: 1883242 - DNA, 15 bp, Homo sapiens
ccagtttgaactgaa

SEQ ID NO: 1883243 - DNA, 15 bp, Homo sapiens
cagtttgaactgaag

SEQ ID NO: 1883244 - DNA, 15 bp, Homo sapiens
agtttgaactgaagg

SEQ ID NO: 1883245 - DNA, 15 bp, Homo sapiens
gtttgaactgaaggg

SEQ ID NO: 1883246 - DNA, 15 bp, Homo sapiens
tttgaactgaagggg

SEQ ID NO: 1883247 - DNA, 15 bp, Homo sapiens
ttgaactgaagggga

SEQ ID NO: 1883248 - DNA, 15 bp, Homo sapiens
tgaactgaaggggaa

SEQ ID NO: 1883249 - DNA, 15 bp, Homo sapiens
gaactgaaggggaag

SEQ ID NO: 1883250 - DNA, 15 bp, Homo sapiens
aactgaaggggaagg

SEQ ID NO: 1883251 - DNA, 15 bp, Homo sapiens
actgaaggggaagga

SEQ ID NO: 1883252 - DNA, 15 bp, Homo sapiens
ctgaaggggaaggag

SEQ ID NO: 1883253 - DNA, 15 bp, Homo sapiens
tgaaggggaaggaga

SEQ ID NO: 1883254 - DNA, 15 bp, Homo sapiens
gaaggggaaggagat

SEQ ID NO: 1883255 - DNA, 15 bp, Homo sapiens
aaggggaaggagata

SEQ ID NO: 1883256 - DNA, 15 bp, Homo sapiens
aggggaaggagatag

SEQ ID NO: 1883257 - DNA, 15 bp, Homo sapiens
ggggaaggagatagg

SEQ ID NO: 1883258 - DNA, 15 bp, Homo sapiens
gggaaggagatagga

SEQ ID NO: 1883259 - DNA, 15 bp, Homo sapiens
ggaaggagataggaa

SEQ ID NO: 1883260 - DNA, 15 bp, Homo sapiens
gaaggagataggaag

SEQ ID NO: 1883261 - DNA, 15 bp, Homo sapiens
aaggagataggaagg

SEQ ID NO: 1883262 - DNA, 15 bp, Homo sapiens
aggagataggaagga

SEQ ID NO: 1883263 - DNA, 15 bp, Homo sapiens
ggagataggaaggaa

SEQ ID NO: 1883264 - DNA, 15 bp, Homo sapiens
gagataggaaggaat

SEQ ID NO: 1883265 - DNA, 15 bp, Homo sapiens
agataggaaggaatg

SEQ ID NO: 1883266 - DNA, 15 bp, Homo sapiens
gataggaaggaatga

SEQ ID NO: 1883267 - DNA, 15 bp, Homo sapiens
ataggaaggaatgaa

SEQ ID NO: 1883268 - DNA, 15 bp, Homo sapiens
taggaaggaatgaag

SEQ ID NO: 1883269 - DNA, 15 bp, Homo sapiens
aggaaggaatgaagg

SEQ ID NO: 1883270 - DNA, 15 bp, Homo sapiens
ggaaggaatgaaggg

SEQ ID NO: 1883271 - DNA, 15 bp, Homo sapiens
gaaggaatgaaggga

SEQ ID NO: 1883272 - DNA, 15 bp, Homo sapiens
aaggaatgaagggag

SEQ ID NO: 1883273 - DNA, 15 bp, Homo sapiens
aggaatgaagggagg

SEQ ID NO: 1883274 - DNA, 15 bp, Homo sapiens
ggaatgaagggaggc

SEQ ID NO: 1883275 - DNA, 15 bp, Homo sapiens
gaatgaagggaggct

SEQ ID NO: 1883276 - DNA, 15 bp, Homo sapiens
aatgaagggaggctg

SEQ ID NO: 1883277 - DNA, 15 bp, Homo sapiens
atgaagggaggctgt

SEQ ID NO: 1883278 - DNA, 15 bp, Homo sapiens
tgaagggaggctgtc

SEQ ID NO: 1883279 - DNA, 15 bp, Homo sapiens
gaagggaggctgtca

SEQ ID NO: 1883280 - DNA, 15 bp, Homo sapiens
aagggaggctgtcag

SEQ ID NO: 1883281 - DNA, 15 bp, Homo sapiens
agggaggctgtcaga

SEQ ID NO: 1883282 - DNA, 15 bp, Homo sapiens
gggaggctgtcagac

SEQ ID NO: 1883283 - DNA, 15 bp, Homo sapiens
ggaggctgtcagact

SEQ ID NO: 1883284 - DNA, 15 bp, Homo sapiens
gaggctgtcagactt

SEQ ID NO: 1883285 - DNA, 15 bp, Homo sapiens
aggctgtcagacttc

SEQ ID NO: 1883286 - DNA, 15 bp, Homo sapiens
ggctgtcagacttct

SEQ ID NO: 1883287 - DNA, 15 bp, Homo sapiens
gctgtcagacttctt

SEQ ID NO: 1883288 - DNA, 15 bp, Homo sapiens
ctgtcagacttctta

SEQ ID NO: 1883289 - DNA, 15 bp, Homo sapiens
tgtcagacttcttac

SEQ ID NO: 1883290 - DNA, 15 bp, Homo sapiens
gtcagacttcttacg

SEQ ID NO: 1883291 - DNA, 15 bp, Homo sapiens
tcagacttcttacgt

SEQ ID NO: 1883292 - DNA, 15 bp, Homo sapiens
cagacttcttacgtc

SEQ ID NO: 1883293 - DNA, 15 bp, Homo sapiens
agacttcttacgtct

SEQ ID NO: 1883294 - DNA, 15 bp, Homo sapiens
gacttcttacgtctt

SEQ ID NO: 1883295 - DNA, 15 bp, Homo sapiens
acttcttacgtctta

SEQ ID NO: 1883296 - DNA, 15 bp, Homo sapiens
cttcttacgtcttat

SEQ ID NO: 1883297 - DNA, 15 bp, Homo sapiens
ttcttacgtcttata

SEQ ID NO: 1883298 - DNA, 15 bp, Homo sapiens
tcttacgtcttatag

SEQ ID NO: 1883299 - DNA, 15 bp, Homo sapiens
cttacgtcttatagg

SEQ ID NO: 1883300 - DNA, 15 bp, Homo sapiens
ttacgtcttatagga

SEQ ID NO: 1883301 - DNA, 15 bp, Homo sapiens
tacgtcttataggac

SEQ ID NO: 1883302 - DNA, 15 bp, Homo sapiens
acgtcttataggaca

SEQ ID NO: 1883303 - DNA, 15 bp, Homo sapiens
cgtcttataggacag

SEQ ID NO: 1883304 - DNA, 15 bp, Homo sapiens
gtcttataggacagg

SEQ ID NO: 1883305 - DNA, 15 bp, Homo sapiens
tcttataggacagga

SEQ ID NO: 1883306 - DNA, 15 bp, Homo sapiens
cttataggacaggac

SEQ ID NO: 1883307 - DNA, 15 bp, Homo sapiens
ttataggacaggacc

SEQ ID NO: 1883308 - DNA, 15 bp, Homo sapiens
tataggacaggacca

SEQ ID NO: 1883309 - DNA, 15 bp, Homo sapiens
ataggacaggaccaa

SEQ ID NO: 1883310 - DNA, 15 bp, Homo sapiens
taggacaggaccaat

SEQ ID NO: 1883311 - DNA, 15 bp, Homo sapiens
aggacaggaccaatc

SEQ ID NO: 1883312 - DNA, 15 bp, Homo sapiens
ggacaggaccaatct

SEQ ID NO: 1883313 - DNA, 15 bp, Homo sapiens
gacaggaccaatctt

SEQ ID NO: 1883314 - DNA, 15 bp, Homo sapiens
acaggaccaatctta

SEQ ID NO: 1883315 - DNA, 15 bp, Homo sapiens
caggaccaatcttat

SEQ ID NO: 1883316 - DNA, 15 bp, Homo sapiens
aggaccaatcttata

SEQ ID NO: 1883317 - DNA, 15 bp, Homo sapiens
ggaccaatcttatag

SEQ ID NO: 1883318 - DNA, 15 bp, Homo sapiens
gaccaatcttataga

SEQ ID NO: 1883319 - DNA, 15 bp, Homo sapiens
accaatcttatagat

SEQ ID NO: 1883320 - DNA, 15 bp, Homo sapiens
ccaatcttatagata

SEQ ID NO: 1883321 - DNA, 15 bp, Homo sapiens
caatcttatagatac

SEQ ID NO: 1883322 - DNA, 15 bp, Homo sapiens
aatcttatagatacg

SEQ ID NO: 1883323 - DNA, 15 bp, Homo sapiens
atcttatagatacgt

SEQ ID NO: 1883324 - DNA, 15 bp, Homo sapiens
tcttatagatacgtt

SEQ ID NO: 1883325 - DNA, 15 bp, Homo sapiens
cttatagatacgttt

SEQ ID NO: 1883326 - DNA, 15 bp, Homo sapiens
ttatagatacgtttt

SEQ ID NO: 1883327 - DNA, 15 bp, Homo sapiens
tatagatacgtttta

SEQ ID NO: 1883328 - DNA, 15 bp, Homo sapiens
atagatacgttttat

SEQ ID NO: 1883329 - DNA, 15 bp, Homo sapiens
tagatacgttttata

SEQ ID NO: 1883330 - DNA, 15 bp, Homo sapiens
agatacgttttatag

SEQ ID NO: 1883331 - DNA, 15 bp, Homo sapiens
gatacgttttatagt

SEQ ID NO: 1883332 - DNA, 15 bp, Homo sapiens
atacgttttatagta

SEQ ID NO: 1883333 - DNA, 15 bp, Homo sapiens
tacgttttatagtat

SEQ ID NO: 1883334 - DNA, 15 bp, Homo sapiens
acgttttatagtata

SEQ ID NO: 1883335 - DNA, 15 bp, Homo sapiens
cgttttatagtatag

SEQ ID NO: 1883336 - DNA, 15 bp, Homo sapiens
gttttatagtatagg

SEQ ID NO: 1883337 - DNA, 15 bp, Homo sapiens
ttttatagtatagga

SEQ ID NO: 1883338 - DNA, 15 bp, Homo sapiens
tttatagtataggac

SEQ ID NO: 1883339 - DNA, 15 bp, Homo sapiens
ttatagtataggacc

SEQ ID NO: 1883340 - DNA, 15 bp, Homo sapiens
tatagtataggacct

SEQ ID NO: 1883341 - DNA, 15 bp, Homo sapiens
atagtataggaccta

SEQ ID NO: 1883342 - DNA, 15 bp, Homo sapiens
tagtataggacctat

SEQ ID NO: 1883343 - DNA, 15 bp, Homo sapiens
agtataggacctatt

SEQ ID NO: 1883344 - DNA, 15 bp, Homo sapiens
gtataggacctattc

SEQ ID NO: 1883345 - DNA, 15 bp, Homo sapiens
tataggacctattca

SEQ ID NO: 1883346 - DNA, 15 bp, Homo sapiens
ataggacctattcag

SEQ ID NO: 1883347 - DNA, 15 bp, Homo sapiens
taggacctattcagc

SEQ ID NO: 1883348 - DNA, 15 bp, Homo sapiens
aggacctattcagct

SEQ ID NO: 1883349 - DNA, 15 bp, Homo sapiens
ggacctattcagctg

SEQ ID NO: 1883350 - DNA, 15 bp, Homo sapiens
gacctattcagctgc

SEQ ID NO: 1883351 - DNA, 15 bp, Homo sapiens
acctattcagctgca

SEQ ID NO: 1883352 - DNA, 15 bp, Homo sapiens
cctattcagctgcaa

SEQ ID NO: 1883353 - DNA, 15 bp, Homo sapiens
ctattcagctgcaaa

SEQ ID NO: 1883354 - DNA, 15 bp, Homo sapiens
tattcagctgcaaat

SEQ ID NO: 1883355 - DNA, 15 bp, Homo sapiens
attcagctgcaaatg

SEQ ID NO: 1883356 - DNA, 15 bp, Homo sapiens
ttcagctgcaaatgt

SEQ ID NO: 1883357 - DNA, 15 bp, Homo sapiens
tcagctgcaaatgtg

SEQ ID NO: 1883358 - DNA, 15 bp, Homo sapiens
cagctgcaaatgtgc

SEQ ID NO: 1883359 - DNA, 15 bp, Homo sapiens
agctgcaaatgtgca

SEQ ID NO: 1883360 - DNA, 15 bp, Homo sapiens
gctgcaaatgtgcac

SEQ ID NO: 1883361 - DNA, 15 bp, Homo sapiens
ctgcaaatgtgcact

SEQ ID NO: 1883362 - DNA, 15 bp, Homo sapiens
tgcaaatgtgcacta

SEQ ID NO: 1883363 - DNA, 15 bp, Homo sapiens
gcaaatgtgcactat

SEQ ID NO: 1883364 - DNA, 15 bp, Homo sapiens
caaatgtgcactatt

SEQ ID NO: 1883365 - DNA, 15 bp, Homo sapiens
aaatgtgcactattg

SEQ ID NO: 1883366 - DNA, 15 bp, Homo sapiens
aatgtgcactattga

SEQ ID NO: 1883367 - DNA, 15 bp, Homo sapiens
atgtgcactattgaa

SEQ ID NO: 1883368 - DNA, 15 bp, Homo sapiens
tgtgcactattgaag

SEQ ID NO: 1883369 - DNA, 15 bp, Homo sapiens
gtgcactattgaaga

SEQ ID NO: 1883370 - DNA, 15 bp, Homo sapiens
tgcactattgaagac

SEQ ID NO: 1883371 - DNA, 15 bp, Homo sapiens
gcactattgaagaca

SEQ ID NO: 1883372 - DNA, 15 bp, Homo sapiens
cactattgaagacaa

SEQ ID NO: 1883373 - DNA, 15 bp, Homo sapiens
actattgaagacaag

SEQ ID NO: 1883374 - DNA, 15 bp, Homo sapiens
ctattgaagacaagg

SEQ ID NO: 1883375 - DNA, 15 bp, Homo sapiens
tattgaagacaaggg

SEQ ID NO: 1883376 - DNA, 15 bp, Homo sapiens
attgaagacaaggga

SEQ ID NO: 1883377 - DNA, 15 bp, Homo sapiens
ttgaagacaagggaa

SEQ ID NO: 1883378 - DNA, 15 bp, Homo sapiens
tgaagacaagggaag

SEQ ID NO: 1883379 - DNA, 15 bp, Homo sapiens
gaagacaagggaaga

SEQ ID NO: 1883380 - DNA, 15 bp, Homo sapiens
aagacaagggaagaa

SEQ ID NO: 1883381 - DNA, 15 bp, Homo sapiens
agacaagggaagaag

SEQ ID NO: 1883382 - DNA, 15 bp, Homo sapiens
gacaagggaagaaga

SEQ ID NO: 1883383 - DNA, 15 bp, Homo sapiens
acaagggaagaagaa

SEQ ID NO: 1883384 - DNA, 15 bp, Homo sapiens
caagggaagaagaac

SEQ ID NO: 1883385 - DNA, 15 bp, Homo sapiens
aagggaagaagaacc

SEQ ID NO: 1883386 - DNA, 15 bp, Homo sapiens
agggaagaagaaccc

SEQ ID NO: 1883387 - DNA, 15 bp, Homo sapiens
gggaagaagaacccc

SEQ ID NO: 1883388 - DNA, 15 bp, Homo sapiens
ggaagaagaacccca

SEQ ID NO: 1883389 - DNA, 15 bp, Homo sapiens
gaagaagaaccccaa

SEQ ID NO: 1883390 - DNA, 15 bp, Homo sapiens
aagaagaaccccaaa

SEQ ID NO: 1883391 - DNA, 15 bp, Homo sapiens
agaagaaccccaaaa

SEQ ID NO: 1883392 - DNA, 15 bp, Homo sapiens
gaagaaccccaaaag

SEQ ID NO: 1883393 - DNA, 15 bp, Homo sapiens
aagaaccccaaaagc

SEQ ID NO: 1883394 - DNA, 15 bp, Homo sapiens
agaaccccaaaagca

SEQ ID NO: 1883395 - DNA, 15 bp, Homo sapiens
gaaccccaaaagcaa

SEQ ID NO: 1883396 - DNA, 15 bp, Homo sapiens
aaccccaaaagcaat

SEQ ID NO: 1883397 - DNA, 15 bp, Homo sapiens
accccaaaagcaatt

SEQ ID NO: 1883398 - DNA, 15 bp, Homo sapiens
ccccaaaagcaattc

SEQ ID NO: 1883399 - DNA, 15 bp, Homo sapiens
cccaaaagcaattca

SEQ ID NO: 1883400 - DNA, 15 bp, Homo sapiens
ccaaaagcaattcaa

SEQ ID NO: 1883401 - DNA, 15 bp, Homo sapiens
caaaagcaattcaaa

SEQ ID NO: 1883402 - DNA, 15 bp, Homo sapiens
aaaagcaattcaaat

SEQ ID NO: 1883403 - DNA, 15 bp, Homo sapiens
aaagcaattcaaata

SEQ ID NO: 1883404 - DNA, 15 bp, Homo sapiens
aagcaattcaaatat

SEQ ID NO: 1883405 - DNA, 15 bp, Homo sapiens
agcaattcaaatatc

SEQ ID NO: 1883406 - DNA, 15 bp, Homo sapiens
gcaattcaaatatca

SEQ ID NO: 1883407 - DNA, 15 bp, Homo sapiens
caattcaaatatcat

SEQ ID NO: 1883408 - DNA, 15 bp, Homo sapiens
aattcaaatatcatc

SEQ ID NO: 1883409 - DNA, 15 bp, Homo sapiens
attcaaatatcatca

SEQ ID NO: 1883410 - DNA, 15 bp, Homo sapiens
ttcaaatatcatcag

SEQ ID NO: 1883411 - DNA, 15 bp, Homo sapiens
tcaaatatcatcaga

SEQ ID NO: 1883412 - DNA, 15 bp, Homo sapiens
caaatatcatcagag

SEQ ID NO: 1883413 - DNA, 15 bp, Homo sapiens
aaatatcatcagaga

SEQ ID NO: 1883414 - DNA, 15 bp, Homo sapiens
aatatcatcagagat

SEQ ID NO: 1883415 - DNA, 15 bp, Homo sapiens
atatcatcagagatg

SEQ ID NO: 1883416 - DNA, 15 bp, Homo sapiens
tatcatcagagatgc

SEQ ID NO: 1883417 - DNA, 15 bp, Homo sapiens
atcatcagagatgcc

SEQ ID NO: 1883418 - DNA, 15 bp, Homo sapiens
tcatcagagatgcct

SEQ ID NO: 1883419 - DNA, 15 bp, Homo sapiens
catcagagatgcctc

SEQ ID NO: 1883420 - DNA, 15 bp, Homo sapiens
atcagagatgcctct

SEQ ID NO: 1883421 - DNA, 15 bp, Homo sapiens
tcagagatgcctctt

SEQ ID NO: 1883422 - DNA, 15 bp, Homo sapiens
cagagatgcctcttc

SEQ ID NO: 1883423 - DNA, 15 bp, Homo sapiens
agagatgcctcttca

SEQ ID NO: 1883424 - DNA, 15 bp, Homo sapiens
gagatgcctcttcag

SEQ ID NO: 1883425 - DNA, 15 bp, Homo sapiens
agatgcctcttcagt

SEQ ID NO: 1883426 - DNA, 15 bp, Homo sapiens
gatgcctcttcagtt

SEQ ID NO: 1883427 - DNA, 15 bp, Homo sapiens
atgcctcttcagtta

SEQ ID NO: 1883428 - DNA, 15 bp, Homo sapiens
tgcctcttcagttac

SEQ ID NO: 1883429 - DNA, 15 bp, Homo sapiens
gcctcttcagttaca

SEQ ID NO: 1883430 - DNA, 15 bp, Homo sapiens
cctcttcagttacaa

SEQ ID NO: 1883431 - DNA, 15 bp, Homo sapiens
ctcttcagttacaaa

SEQ ID NO: 1883432 - DNA, 15 bp, Homo sapiens
tcttcagttacaaaa

SEQ ID NO: 1883433 - DNA, 15 bp, Homo sapiens
cttcagttacaaaaa

SEQ ID NO: 1883434 - DNA, 15 bp, Homo sapiens
ttcagttacaaaaag

SEQ ID NO: 1883435 - DNA, 15 bp, Homo sapiens
tcagttacaaaaagt

SEQ ID NO: 1883436 - DNA, 15 bp, Homo sapiens
cagttacaaaaagtg

SEQ ID NO: 1883437 - DNA, 15 bp, Homo sapiens
agttacaaaaagtgg

SEQ ID NO: 1883438 - DNA, 15 bp, Homo sapiens
gttacaaaaagtgga

SEQ ID NO: 1883439 - DNA, 15 bp, Homo sapiens
ttacaaaaagtggag

SEQ ID NO: 1883440 - DNA, 15 bp, Homo sapiens
tacaaaaagtggagc

SEQ ID NO: 1883441 - DNA, 15 bp, Homo sapiens
acaaaaagtggagcc

SEQ ID NO: 1883442 - DNA, 15 bp, Homo sapiens
caaaaagtggagcca

SEQ ID NO: 1883443 - DNA, 15 bp, Homo sapiens
aaaaagtggagccat

SEQ ID NO: 1883444 - DNA, 15 bp, Homo sapiens
aaaagtggagccatt

SEQ ID NO: 1883445 - DNA, 15 bp, Homo sapiens
aaagtggagccattg

SEQ ID NO: 1883446 - DNA, 15 bp, Homo sapiens
aagtggagccattgc

SEQ ID NO: 1883447 - DNA, 15 bp, Homo sapiens
agtggagccattgcc

SEQ ID NO: 1883448 - DNA, 15 bp, Homo sapiens
gtggagccattgcct

SEQ ID NO: 1883449 - DNA, 15 bp, Homo sapiens
tggagccattgcctg

SEQ ID NO: 1883450 - DNA, 15 bp, Homo sapiens
ggagccattgcctga

SEQ ID NO: 1883451 - DNA, 15 bp, Homo sapiens
gagccattgcctgag

SEQ ID NO: 1883452 - DNA, 15 bp, Homo sapiens
agccattgcctgagt

SEQ ID NO: 1883453 - DNA, 15 bp, Homo sapiens
gccattgcctgagtt

SEQ ID NO: 1883454 - DNA, 15 bp, Homo sapiens
ccattgcctgagttt

SEQ ID NO: 1883455 - DNA, 15 bp, Homo sapiens
cattgcctgagtttc

SEQ ID NO: 1883456 - DNA, 15 bp, Homo sapiens
attgcctgagtttca

SEQ ID NO: 1883457 - DNA, 15 bp, Homo sapiens
ttgcctgagtttcaa

SEQ ID NO: 1883458 - DNA, 15 bp, Homo sapiens
tgcctgagtttcaac

SEQ ID NO: 1883459 - DNA, 15 bp, Homo sapiens
gcctgagtttcaact

SEQ ID NO: 1883460 - DNA, 15 bp, Homo sapiens
cctgagtttcaactg

SEQ ID NO: 1883461 - DNA, 15 bp, Homo sapiens
ctgagtttcaactgg

SEQ ID NO: 1883462 - DNA, 15 bp, Homo sapiens
tgagtttcaactggt

SEQ ID NO: 1883463 - DNA, 15 bp, Homo sapiens
gagtttcaactggtt

SEQ ID NO: 1883464 - DNA, 15 bp, Homo sapiens
agtttcaactggtta

SEQ ID NO: 1883465 - DNA, 15 bp, Homo sapiens
gtttcaactggttag

SEQ ID NO: 1883466 - DNA, 15 bp, Homo sapiens
tttcaactggttaga

SEQ ID NO: 1883467 - DNA, 15 bp, Homo sapiens
ttcaactggttagac

SEQ ID NO: 1883468 - DNA, 15 bp, Homo sapiens
tcaactggttagaca

SEQ ID NO: 1883469 - DNA, 15 bp, Homo sapiens
caactggttagacag

SEQ ID NO: 1883470 - DNA, 15 bp, Homo sapiens
aactggttagacagg

SEQ ID NO: 1883471 - DNA, 15 bp, Homo sapiens
actggttagacaggt

SEQ ID NO: 1883472 - DNA, 15 bp, Homo sapiens
ctggttagacaggtt

SEQ ID NO: 1883473 - DNA, 15 bp, Homo sapiens
tggttagacaggttc

SEQ ID NO: 1883474 - DNA, 15 bp, Homo sapiens
ggttagacaggttct

SEQ ID NO: 1883475 - DNA, 15 bp, Homo sapiens
gttagacaggttctg

SEQ ID NO: 1883476 - DNA, 15 bp, Homo sapiens
ttagacaggttctgc

SEQ ID NO: 1883477 - DNA, 15 bp, Homo sapiens
tagacaggttctgcc

SEQ ID NO: 1883478 - DNA, 15 bp, Homo sapiens
agacaggttctgccc

SEQ ID NO: 1883479 - DNA, 15 bp, Homo sapiens
gacaggttctgccca

SEQ ID NO: 1883480 - DNA, 15 bp, Homo sapiens
acaggttctgcccaa

SEQ ID NO: 1883481 - DNA, 15 bp, Homo sapiens
caggttctgcccaaa

SEQ ID NO: 1883482 - DNA, 15 bp, Homo sapiens
aggttctgcccaaag

SEQ ID NO: 1883483 - DNA, 15 bp, Homo sapiens
ggttctgcccaaagc

SEQ ID NO: 1883484 - DNA, 15 bp, Homo sapiens
gttctgcccaaagct

SEQ ID NO: 1883485 - DNA, 15 bp, Homo sapiens
ttctgcccaaagctg

SEQ ID NO: 1883486 - DNA, 15 bp, Homo sapiens
tctgcccaaagctgt

SEQ ID NO: 1883487 - DNA, 15 bp, Homo sapiens
ctgcccaaagctgtg

SEQ ID NO: 1883488 - DNA, 15 bp, Homo sapiens
tgcccaaagctgtgg

SEQ ID NO: 1883489 - DNA, 15 bp, Homo sapiens
gcccaaagctgtggg

SEQ ID NO: 1883490 - DNA, 15 bp, Homo sapiens
cccaaagctgtgggt

SEQ ID NO: 1883491 - DNA, 15 bp, Homo sapiens
ccaaagctgtgggtc

SEQ ID NO: 1883492 - DNA, 15 bp, Homo sapiens
caaagctgtgggtcc

SEQ ID NO: 1883493 - DNA, 15 bp, Homo sapiens
aaagctgtgggtcca

SEQ ID NO: 1883494 - DNA, 15 bp, Homo sapiens
aagctgtgggtccat

SEQ ID NO: 1883495 - DNA, 15 bp, Homo sapiens
agctgtgggtccata

SEQ ID NO: 1883496 - DNA, 15 bp, Homo sapiens
gctgtgggtccatag

SEQ ID NO: 1883497 - DNA, 15 bp, Homo sapiens
ctgtgggtccataga

SEQ ID NO: 1883498 - DNA, 15 bp, Homo sapiens
tgtgggtccatagag

SEQ ID NO: 1883499 - DNA, 15 bp, Homo sapiens
gtgggtccatagaga

SEQ ID NO: 1883500 - DNA, 15 bp, Homo sapiens
tgggtccatagagag

SEQ ID NO: 1883501 - DNA, 15 bp, Homo sapiens
gggtccatagagagg

SEQ ID NO: 1883502 - DNA, 15 bp, Homo sapiens
ggtccatagagaggt

SEQ ID NO: 1883503 - DNA, 15 bp, Homo sapiens
gtccatagagaggta

SEQ ID NO: 1883504 - DNA, 15 bp, Homo sapiens
tccatagagaggtac

SEQ ID NO: 1883505 - DNA, 15 bp, Homo sapiens
ccatagagaggtacc

SEQ ID NO: 1883506 - DNA, 15 bp, Homo sapiens
catagagaggtacct

SEQ ID NO: 1883507 - DNA, 15 bp, Homo sapiens
atagagaggtacctc

SEQ ID NO: 1883508 - DNA, 15 bp, Homo sapiens
tagagaggtacctcc

SEQ ID NO: 1883509 - DNA, 15 bp, Homo sapiens
agagaggtacctccc

SEQ ID NO: 1883510 - DNA, 15 bp, Homo sapiens
gagaggtacctcccc

SEQ ID NO: 1883511 - DNA, 15 bp, Homo sapiens
agaggtacctcccca

SEQ ID NO: 1883512 - DNA, 15 bp, Homo sapiens
gaggtacctccccaa

SEQ ID NO: 1883513 - DNA, 15 bp, Homo sapiens
aggtacctccccaac

SEQ ID NO: 1883514 - DNA, 15 bp, Homo sapiens
ggtacctccccaact

SEQ ID NO: 1883515 - DNA, 15 bp, Homo sapiens
gtacctccccaacta

SEQ ID NO: 1883516 - DNA, 15 bp, Homo sapiens
tacctccccaactag

SEQ ID NO: 1883517 - DNA, 15 bp, Homo sapiens
acctccccaactagt

SEQ ID NO: 1883518 - DNA, 15 bp, Homo sapiens
cctccccaactagtg

SEQ ID NO: 1883519 - DNA, 15 bp, Homo sapiens
ctccccaactagtgg

SEQ ID NO: 1883520 - DNA, 15 bp, Homo sapiens
tccccaactagtgga

SEQ ID NO: 1883521 - DNA, 15 bp, Homo sapiens
ccccaactagtggac

SEQ ID NO: 1883522 - DNA, 15 bp, Homo sapiens
cccaactagtggacc

SEQ ID NO: 1883523 - DNA, 15 bp, Homo sapiens
ccaactagtggacct

SEQ ID NO: 1883524 - DNA, 15 bp, Homo sapiens
caactagtggaccta

SEQ ID NO: 1883525 - DNA, 15 bp, Homo sapiens
aactagtggacctag

SEQ ID NO: 1883526 - DNA, 15 bp, Homo sapiens
actagtggacctaga

SEQ ID NO: 1883527 - DNA, 15 bp, Homo sapiens
ctagtggacctagag

SEQ ID NO: 1883528 - DNA, 15 bp, Homo sapiens
tagtggacctagagg

SEQ ID NO: 1883529 - DNA, 15 bp, Homo sapiens
agtggacctagaggg

SEQ ID NO: 1883530 - DNA, 15 bp, Homo sapiens
gtggacctagagggc

SEQ ID NO: 1883531 - DNA, 15 bp, Homo sapiens
tggacctagagggca

SEQ ID NO: 1883532 - DNA, 15 bp, Homo sapiens
ggacctagagggcag

SEQ ID NO: 1883533 - DNA, 15 bp, Homo sapiens
gacctagagggcaga

SEQ ID NO: 1883534 - DNA, 15 bp, Homo sapiens
acctagagggcagag

SEQ ID NO: 1883535 - DNA, 15 bp, Homo sapiens
cctagagggcagagc

SEQ ID NO: 1883536 - DNA, 15 bp, Homo sapiens
ctagagggcagagcc

SEQ ID NO: 1883537 - DNA, 15 bp, Homo sapiens
tagagggcagagcca

SEQ ID NO: 1883538 - DNA, 15 bp, Homo sapiens
agagggcagagccac

SEQ ID NO: 1883539 - DNA, 15 bp, Homo sapiens
gagggcagagccaca

SEQ ID NO: 1883540 - DNA, 15 bp, Homo sapiens
agggcagagccacaa

SEQ ID NO: 1883541 - DNA, 15 bp, Homo sapiens
gggcagagccacaag

SEQ ID NO: 1883542 - DNA, 15 bp, Homo sapiens
ggcagagccacaagc

SEQ ID NO: 1883543 - DNA, 15 bp, Homo sapiens
gcagagccacaagcc

SEQ ID NO: 1883544 - DNA, 15 bp, Homo sapiens
cagagccacaagcca

SEQ ID NO: 1883545 - DNA, 15 bp, Homo sapiens
agagccacaagccaa

SEQ ID NO: 1883546 - DNA, 15 bp, Homo sapiens
gagccacaagccaaa

SEQ ID NO: 1883547 - DNA, 15 bp, Homo sapiens
agccacaagccaaag

SEQ ID NO: 1883548 - DNA, 15 bp, Homo sapiens
gccacaagccaaaga

SEQ ID NO: 1883549 - DNA, 15 bp, Homo sapiens
ccacaagccaaagag

SEQ ID NO: 1883550 - DNA, 15 bp, Homo sapiens
cacaagccaaagagg

SEQ ID NO: 1883551 - DNA, 15 bp, Homo sapiens
acaagccaaagagga

SEQ ID NO: 1883552 - DNA, 15 bp, Homo sapiens
caagccaaagaggat

SEQ ID NO: 1883553 - DNA, 15 bp, Homo sapiens
aagccaaagaggatt

SEQ ID NO: 1883554 - DNA, 15 bp, Homo sapiens
agccaaagaggatta

SEQ ID NO: 1883555 - DNA, 15 bp, Homo sapiens
gccaaagaggattat

SEQ ID NO: 1883556 - DNA, 15 bp, Homo sapiens
ccaaagaggattatt

SEQ ID NO: 1883557 - DNA, 15 bp, Homo sapiens
caaagaggattattc

SEQ ID NO: 1883558 - DNA, 15 bp, Homo sapiens
aaagaggattattct

SEQ ID NO: 1883559 - DNA, 15 bp, Homo sapiens
aagaggattattctg

SEQ ID NO: 1883560 - DNA, 15 bp, Homo sapiens
agaggattattctgc

SEQ ID NO: 1883561 - DNA, 15 bp, Homo sapiens
gaggattattctgca

SEQ ID NO: 1883562 - DNA, 15 bp, Homo sapiens
aggattattctgcag

SEQ ID NO: 1883563 - DNA, 15 bp, Homo sapiens
ggattattctgcagc

SEQ ID NO: 1883564 - DNA, 15 bp, Homo sapiens
gattattctgcagct

SEQ ID NO: 1883565 - DNA, 15 bp, Homo sapiens
attattctgcagctg

SEQ ID NO: 1883566 - DNA, 15 bp, Homo sapiens
ttattctgcagctgt

SEQ ID NO: 1883567 - DNA, 15 bp, Homo sapiens
tattctgcagctgta

SEQ ID NO: 1883568 - DNA, 15 bp, Homo sapiens
attctgcagctgtaa

SEQ ID NO: 1883569 - DNA, 15 bp, Homo sapiens
ttctgcagctgtaag

SEQ ID NO: 1883570 - DNA, 15 bp, Homo sapiens
tctgcagctgtaaga

SEQ ID NO: 1883571 - DNA, 15 bp, Homo sapiens
ctgcagctgtaagac

SEQ ID NO: 1883572 - DNA, 15 bp, Homo sapiens
tgcagctgtaagacc

SEQ ID NO: 1883573 - DNA, 15 bp, Homo sapiens
gcagctgtaagacct

SEQ ID NO: 1883574 - DNA, 15 bp, Homo sapiens
cagctgtaagacctc

SEQ ID NO: 1883575 - DNA, 15 bp, Homo sapiens
agctgtaagacctca

SEQ ID NO: 1883576 - DNA, 15 bp, Homo sapiens
gctgtaagacctcat

SEQ ID NO: 1883577 - DNA, 15 bp, Homo sapiens
ctgtaagacctcatg

SEQ ID NO: 1883578 - DNA, 15 bp, Homo sapiens
tgtaagacctcatga

SEQ ID NO: 1883579 - DNA, 15 bp, Homo sapiens
gtaagacctcatgaa

SEQ ID NO: 1883580 - DNA, 15 bp, Homo sapiens
taagacctcatgaag

SEQ ID NO: 1883581 - DNA, 15 bp, Homo sapiens
aagacctcatgaagt

SEQ ID NO: 1883582 - DNA, 15 bp, Homo sapiens
agacctcatgaagtt

SEQ ID NO: 1883583 - DNA, 15 bp, Homo sapiens
gacctcatgaagttt

SEQ ID NO: 1883584 - DNA, 15 bp, Homo sapiens
acctcatgaagtttc

SEQ ID NO: 1883585 - DNA, 15 bp, Homo sapiens
cctcatgaagtttcc

SEQ ID NO: 1883586 - DNA, 15 bp, Homo sapiens
ctcatgaagtttccc

SEQ ID NO: 1883587 - DNA, 15 bp, Homo sapiens
tcatgaagtttccct

SEQ ID NO: 1883588 - DNA, 15 bp, Homo sapiens
catgaagtttccctt

SEQ ID NO: 1883589 - DNA, 15 bp, Homo sapiens
atgaagtttcccttg

SEQ ID NO: 1883590 - DNA, 15 bp, Homo sapiens
tgaagtttcccttgt

SEQ ID NO: 1883591 - DNA, 15 bp, Homo sapiens
gaagtttcccttgta

SEQ ID NO: 1883592 - DNA, 15 bp, Homo sapiens
aagtttcccttgtag

SEQ ID NO: 1883593 - DNA, 15 bp, Homo sapiens
agtttcccttgtagc

SEQ ID NO: 1883594 - DNA, 15 bp, Homo sapiens
gtttcccttgtagcc

SEQ ID NO: 1883595 - DNA, 15 bp, Homo sapiens
tttcccttgtagcct

SEQ ID NO: 1883596 - DNA, 15 bp, Homo sapiens
ttcccttgtagcctg

SEQ ID NO: 1883597 - DNA, 15 bp, Homo sapiens
tcccttgtagcctgg

SEQ ID NO: 1883598 - DNA, 15 bp, Homo sapiens
cccttgtagcctgga

SEQ ID NO: 1883599 - DNA, 15 bp, Homo sapiens
ccttgtagcctggac

SEQ ID NO: 1883600 - DNA, 15 bp, Homo sapiens
cttgtagcctggact

SEQ ID NO: 1883601 - DNA, 15 bp, Homo sapiens
ttgtagcctggactt

SEQ ID NO: 1883602 - DNA, 15 bp, Homo sapiens
tgtagcctggactta

SEQ ID NO: 1883603 - DNA, 15 bp, Homo sapiens
gtagcctggacttat

SEQ ID NO: 1883604 - DNA, 15 bp, Homo sapiens
tagcctggacttatt

SEQ ID NO: 1883605 - DNA, 15 bp, Homo sapiens
agcctggacttattt

SEQ ID NO: 1883606 - DNA, 15 bp, Homo sapiens
gcctggacttatttt

SEQ ID NO: 1883607 - DNA, 15 bp, Homo sapiens
cctggacttattttg

SEQ ID NO: 1883608 - DNA, 15 bp, Homo sapiens
ctggacttattttga

SEQ ID NO: 1883609 - DNA, 15 bp, Homo sapiens
tggacttattttgaa

SEQ ID NO: 1883610 - DNA, 15 bp, Homo sapiens
ggacttattttgaat

SEQ ID NO: 1883611 - DNA, 15 bp, Homo sapiens
gacttattttgaatg

SEQ ID NO: 1883612 - DNA, 15 bp, Homo sapiens
acttattttgaatgt

SEQ ID NO: 1883613 - DNA, 15 bp, Homo sapiens
cttattttgaatgtg

SEQ ID NO: 1883614 - DNA, 15 bp, Homo sapiens
ttattttgaatgtgt

SEQ ID NO: 1883615 - DNA, 15 bp, Homo sapiens
tattttgaatgtgtt

SEQ ID NO: 1883616 - DNA, 15 bp, Homo sapiens
attttgaatgtgtta

SEQ ID NO: 1883617 - DNA, 15 bp, Homo sapiens
ttttgaatgtgttat

SEQ ID NO: 1883618 - DNA, 15 bp, Homo sapiens
tttgaatgtgttatg

SEQ ID NO: 1883619 - DNA, 15 bp, Homo sapiens
ttgaatgtgttatgc

SEQ ID NO: 1883620 - DNA, 15 bp, Homo sapiens
tgaatgtgttatgcc

SEQ ID NO: 1883621 - DNA, 15 bp, Homo sapiens
gaatgtgttatgcct

SEQ ID NO: 1883622 - DNA, 15 bp, Homo sapiens
aatgtgttatgcctt

SEQ ID NO: 1883623 - DNA, 15 bp, Homo sapiens
atgtgttatgccttt

SEQ ID NO: 1883624 - DNA, 15 bp, Homo sapiens
tgtgttatgcctttc

SEQ ID NO: 1883625 - DNA, 15 bp, Homo sapiens
gtgttatgcctttct

SEQ ID NO: 1883626 - DNA, 15 bp, Homo sapiens
tgttatgcctttctt

SEQ ID NO: 1883627 - DNA, 15 bp, Homo sapiens
gttatgcctttcttc

SEQ ID NO: 1883628 - DNA, 15 bp, Homo sapiens
ttatgcctttcttct

SEQ ID NO: 1883629 - DNA, 15 bp, Homo sapiens
tatgcctttcttctt

SEQ ID NO: 1883630 - DNA, 15 bp, Homo sapiens
atgcctttcttcttt

SEQ ID NO: 1883631 - DNA, 15 bp, Homo sapiens
tgcctttcttctttc

SEQ ID NO: 1883632 - DNA, 15 bp, Homo sapiens
gcctttcttctttcc

SEQ ID NO: 1883633 - DNA, 15 bp, Homo sapiens
cctttcttctttcct

SEQ ID NO: 1883634 - DNA, 15 bp, Homo sapiens
ctttcttctttccta

SEQ ID NO: 1883635 - DNA, 15 bp, Homo sapiens
tttcttctttcctat

SEQ ID NO: 1883636 - DNA, 15 bp, Homo sapiens
ttcttctttcctatt

SEQ ID NO: 1883637 - DNA, 15 bp, Homo sapiens
tcttctttcctattt

SEQ ID NO: 1883638 - DNA, 15 bp, Homo sapiens
cttctttcctatttc

SEQ ID NO: 1883639 - DNA, 15 bp, Homo sapiens
ttctttcctatttct

SEQ ID NO: 1883640 - DNA, 15 bp, Homo sapiens
tctttcctatttctt

SEQ ID NO: 1883641 - DNA, 15 bp, Homo sapiens
ctttcctatttcttt

SEQ ID NO: 1883642 - DNA, 15 bp, Homo sapiens
tttcctatttctttt

SEQ ID NO: 1883643 - DNA, 15 bp, Homo sapiens
ttcctatttcttttt

SEQ ID NO: 1883644 - DNA, 15 bp, Homo sapiens
tcctatttctttttt

SEQ ID NO: 1883645 - DNA, 15 bp, Homo sapiens
cctatttcttttttt

SEQ ID NO: 1883646 - DNA, 15 bp, Homo sapiens
ctatttctttttttt

SEQ ID NO: 1883647 - DNA, 15 bp, Homo sapiens
tatttcttttttttt

SEQ ID NO: 1883648 - DNA, 15 bp, Homo sapiens
atttctttttttttt

SEQ ID NO: 1883649 - DNA, 15 bp, Homo sapiens
ttttttttttttgtg

SEQ ID NO: 1883650 - DNA, 15 bp, Homo sapiens
tttttttttttgtgg

SEQ ID NO: 1883651 - DNA, 15 bp, Homo sapiens
ttttttttgtggaaa

SEQ ID NO: 1883652 - DNA, 15 bp, Homo sapiens
tttttttgtggaaat

SEQ ID NO: 1883653 - DNA, 15 bp, Homo sapiens
ttttttgtggaaatt

SEQ ID NO: 1883654 - DNA, 15 bp, Homo sapiens
tttttgtggaaattt

SEQ ID NO: 1883655 - DNA, 15 bp, Homo sapiens
ttttgtggaaatttc

SEQ ID NO: 1883656 - DNA, 15 bp, Homo sapiens
tttgtggaaatttct

SEQ ID NO: 1883657 - DNA, 15 bp, Homo sapiens
ttgtggaaatttctt

SEQ ID NO: 1883658 - DNA, 15 bp, Homo sapiens
tgtggaaatttcttt

SEQ ID NO: 1883659 - DNA, 15 bp, Homo sapiens
gtggaaatttctttc

SEQ ID NO: 1883660 - DNA, 15 bp, Homo sapiens
tggaaatttctttcc

SEQ ID NO: 1883661 - DNA, 15 bp, Homo sapiens
ggaaatttctttcct

SEQ ID NO: 1883662 - DNA, 15 bp, Homo sapiens
gaaatttctttcctt

SEQ ID NO: 1883663 - DNA, 15 bp, Homo sapiens
aaatttctttccttt

SEQ ID NO: 1883664 - DNA, 15 bp, Homo sapiens
aatttctttcctttg

SEQ ID NO: 1883665 - DNA, 15 bp, Homo sapiens
atttctttcctttgt

SEQ ID NO: 1883666 - DNA, 15 bp, Homo sapiens
tttctttcctttgtc

SEQ ID NO: 1883667 - DNA, 15 bp, Homo sapiens
ttctttcctttgtct

SEQ ID NO: 1883668 - DNA, 15 bp, Homo sapiens
tctttcctttgtctg

SEQ ID NO: 1883669 - DNA, 15 bp, Homo sapiens
ctttcctttgtctga

SEQ ID NO: 1883670 - DNA, 15 bp, Homo sapiens
tttcctttgtctgag

SEQ ID NO: 1883671 - DNA, 15 bp, Homo sapiens
tcctttgtctgagcc

SEQ ID NO: 1883672 - DNA, 15 bp, Homo sapiens
cctttgtctgagcca

SEQ ID NO: 1883673 - DNA, 15 bp, Homo sapiens
ctttgtctgagccat

SEQ ID NO: 1883674 - DNA, 15 bp, Homo sapiens
tttgtctgagccatc

SEQ ID NO: 1883675 - DNA, 15 bp, Homo sapiens
ttgtctgagccatct

SEQ ID NO: 1883676 - DNA, 15 bp, Homo sapiens
tgtctgagccatctt

SEQ ID NO: 1883677 - DNA, 15 bp, Homo sapiens
gtctgagccatcttt

SEQ ID NO: 1883678 - DNA, 15 bp, Homo sapiens
tctgagccatctttg

SEQ ID NO: 1883679 - DNA, 15 bp, Homo sapiens
ctgagccatctttga

SEQ ID NO: 1883680 - DNA, 15 bp, Homo sapiens
tgagccatctttgaa

SEQ ID NO: 1883681 - DNA, 15 bp, Homo sapiens
gagccatctttgaat

SEQ ID NO: 1883682 - DNA, 15 bp, Homo sapiens
agccatctttgaatt

SEQ ID NO: 1883683 - DNA, 15 bp, Homo sapiens
gccatctttgaattt

SEQ ID NO: 1883684 - DNA, 15 bp, Homo sapiens
ccatctttgaatttt

SEQ ID NO: 1883685 - DNA, 15 bp, Homo sapiens
catctttgaattttg

SEQ ID NO: 1883686 - DNA, 15 bp, Homo sapiens
atctttgaattttgg

SEQ ID NO: 1883687 - DNA, 15 bp, Homo sapiens
tctttgaattttgga

SEQ ID NO: 1883688 - DNA, 15 bp, Homo sapiens
ctttgaattttggaa

SEQ ID NO: 1883689 - DNA, 15 bp, Homo sapiens
tttgaattttggaag

SEQ ID NO: 1883690 - DNA, 15 bp, Homo sapiens
ttgaattttggaagt

SEQ ID NO: 1883691 - DNA, 15 bp, Homo sapiens
tgaattttggaagta

SEQ ID NO: 1883692 - DNA, 15 bp, Homo sapiens
gaattttggaagtac

SEQ ID NO: 1883693 - DNA, 15 bp, Homo sapiens
aattttggaagtaca

SEQ ID NO: 1883694 - DNA, 15 bp, Homo sapiens
attttggaagtacat

SEQ ID NO: 1883695 - DNA, 15 bp, Homo sapiens
ttttggaagtacata

SEQ ID NO: 1883696 - DNA, 15 bp, Homo sapiens
tttggaagtacataa

SEQ ID NO: 1883697 - DNA, 15 bp, Homo sapiens
ttggaagtacataat

SEQ ID NO: 1883698 - DNA, 15 bp, Homo sapiens
tggaagtacataatt

SEQ ID NO: 1883699 - DNA, 15 bp, Homo sapiens
ggaagtacataattt

SEQ ID NO: 1883700 - DNA, 15 bp, Homo sapiens
gaagtacataatttg

SEQ ID NO: 1883701 - DNA, 15 bp, Homo sapiens
aagtacataatttgt

SEQ ID NO: 1883702 - DNA, 15 bp, Homo sapiens
agtacataatttgtt

SEQ ID NO: 1883703 - DNA, 15 bp, Homo sapiens
gtacataatttgttt

SEQ ID NO: 1883704 - DNA, 15 bp, Homo sapiens
tacataatttgtttg

SEQ ID NO: 1883705 - DNA, 15 bp, Homo sapiens
acataatttgtttgg

SEQ ID NO: 1883706 - DNA, 15 bp, Homo sapiens
cataatttgtttggt

SEQ ID NO: 1883707 - DNA, 15 bp, Homo sapiens
ataatttgtttggtt

SEQ ID NO: 1883708 - DNA, 15 bp, Homo sapiens
taatttgtttggttt

SEQ ID NO: 1883709 - DNA, 15 bp, Homo sapiens
aatttgtttggtttc

SEQ ID NO: 1883710 - DNA, 15 bp, Homo sapiens
atttgtttggtttca

SEQ ID NO: 1883711 - DNA, 15 bp, Homo sapiens
tttgtttggtttcac

SEQ ID NO: 1883712 - DNA, 15 bp, Homo sapiens
ttgtttggtttcaca

SEQ ID NO: 1883713 - DNA, 15 bp, Homo sapiens
tgtttggtttcacaa

SEQ ID NO: 1883714 - DNA, 15 bp, Homo sapiens
gtttggtttcacaag

SEQ ID NO: 1883715 - DNA, 15 bp, Homo sapiens
tttggtttcacaagc

SEQ ID NO: 1883716 - DNA, 15 bp, Homo sapiens
ttggtttcacaagct

SEQ ID NO: 1883717 - DNA, 15 bp, Homo sapiens
tggtttcacaagctc

SEQ ID NO: 1883718 - DNA, 15 bp, Homo sapiens
ggtttcacaagctca

SEQ ID NO: 1883719 - DNA, 15 bp, Homo sapiens
gtttcacaagctcac

SEQ ID NO: 1883720 - DNA, 15 bp, Homo sapiens
tttcacaagctcaca

SEQ ID NO: 1883721 - DNA, 15 bp, Homo sapiens
ttcacaagctcacag

SEQ ID NO: 1883722 - DNA, 15 bp, Homo sapiens
tcacaagctcacagc

SEQ ID NO: 1883723 - DNA, 15 bp, Homo sapiens
cacaagctcacagct

SEQ ID NO: 1883724 - DNA, 15 bp, Homo sapiens
acaagctcacagctg

SEQ ID NO: 1883725 - DNA, 15 bp, Homo sapiens
caagctcacagctgg

SEQ ID NO: 1883726 - DNA, 15 bp, Homo sapiens
aagctcacagctgga

SEQ ID NO: 1883727 - DNA, 15 bp, Homo sapiens
agctcacagctggag

SEQ ID NO: 1883728 - DNA, 15 bp, Homo sapiens
gctcacagctggaga

SEQ ID NO: 1883729 - DNA, 15 bp, Homo sapiens
ctcacagctggagag

SEQ ID NO: 1883730 - DNA, 15 bp, Homo sapiens
tcacagctggagagc

SEQ ID NO: 1883731 - DNA, 15 bp, Homo sapiens
cacagctggagagca

SEQ ID NO: 1883732 - DNA, 15 bp, Homo sapiens
acagctggagagcaa

SEQ ID NO: 1883733 - DNA, 15 bp, Homo sapiens
cagctggagagcaat

SEQ ID NO: 1883734 - DNA, 15 bp, Homo sapiens
agctggagagcaatt

SEQ ID NO: 1883735 - DNA, 15 bp, Homo sapiens
gctggagagcaattt

SEQ ID NO: 1883736 - DNA, 15 bp, Homo sapiens
ctggagagcaatttg

SEQ ID NO: 1883737 - DNA, 15 bp, Homo sapiens
tggagagcaatttgt

SEQ ID NO: 1883738 - DNA, 15 bp, Homo sapiens
ggagagcaatttgtc

SEQ ID NO: 1883739 - DNA, 15 bp, Homo sapiens
gagagcaatttgtct

SEQ ID NO: 1883740 - DNA, 15 bp, Homo sapiens
agagcaatttgtctc

SEQ ID NO: 1883741 - DNA, 15 bp, Homo sapiens
gagcaatttgtctct

SEQ ID NO: 1883742 - DNA, 15 bp, Homo sapiens
agcaatttgtctctg

SEQ ID NO: 1883743 - DNA, 15 bp, Homo sapiens
gcaatttgtctctgg

SEQ ID NO: 1883744 - DNA, 15 bp, Homo sapiens
caatttgtctctgga

SEQ ID NO: 1883745 - DNA, 15 bp, Homo sapiens
aatttgtctctggat

SEQ ID NO: 1883746 - DNA, 15 bp, Homo sapiens
atttgtctctggatg

SEQ ID NO: 1883747 - DNA, 15 bp, Homo sapiens
tttgtctctggatga

SEQ ID NO: 1883748 - DNA, 15 bp, Homo sapiens
ttgtctctggatgaa

SEQ ID NO: 1883749 - DNA, 15 bp, Homo sapiens
tgtctctggatgaat

SEQ ID NO: 1883750 - DNA, 15 bp, Homo sapiens
gtctctggatgaatc

SEQ ID NO: 1883751 - DNA, 15 bp, Homo sapiens
tctctggatgaatca

SEQ ID NO: 1883752 - DNA, 15 bp, Homo sapiens
ctctggatgaatcat

SEQ ID NO: 1883753 - DNA, 15 bp, Homo sapiens
tctggatgaatcata

SEQ ID NO: 1883754 - DNA, 15 bp, Homo sapiens
ctggatgaatcatac

SEQ ID NO: 1883755 - DNA, 15 bp, Homo sapiens
tggatgaatcatacc

SEQ ID NO: 1883756 - DNA, 15 bp, Homo sapiens
ggatgaatcatacct

SEQ ID NO: 1883757 - DNA, 15 bp, Homo sapiens
gatgaatcatacctt

SEQ ID NO: 1883758 - DNA, 15 bp, Homo sapiens
atgaatcataccttg

SEQ ID NO: 1883759 - DNA, 15 bp, Homo sapiens
tgaatcataccttga

SEQ ID NO: 1883760 - DNA, 15 bp, Homo sapiens
gaatcataccttgag

SEQ ID NO: 1883761 - DNA, 15 bp, Homo sapiens
aatcataccttgagt

SEQ ID NO: 1883762 - DNA, 15 bp, Homo sapiens
atcataccttgagtc

SEQ ID NO: 1883763 - DNA, 15 bp, Homo sapiens
tcataccttgagtct

SEQ ID NO: 1883764 - DNA, 15 bp, Homo sapiens
cataccttgagtctc

SEQ ID NO: 1883765 - DNA, 15 bp, Homo sapiens
ataccttgagtctca

SEQ ID NO: 1883766 - DNA, 15 bp, Homo sapiens
taccttgagtctcac

SEQ ID NO: 1883767 - DNA, 15 bp, Homo sapiens
accttgagtctcacc

SEQ ID NO: 1883768 - DNA, 15 bp, Homo sapiens
ccttgagtctcaccc

SEQ ID NO: 1883769 - DNA, 15 bp, Homo sapiens
cttgagtctcaccca

SEQ ID NO: 1883770 - DNA, 15 bp, Homo sapiens
ttgagtctcacccat

SEQ ID NO: 1883771 - DNA, 15 bp, Homo sapiens
tgagtctcacccatc

SEQ ID NO: 1883772 - DNA, 15 bp, Homo sapiens
gagtctcacccatct

SEQ ID NO: 1883773 - DNA, 15 bp, Homo sapiens
agtctcacccatctc

SEQ ID NO: 1883774 - DNA, 15 bp, Homo sapiens
gtctcacccatctct

SEQ ID NO: 1883775 - DNA, 15 bp, Homo sapiens
tctcacccatctctg

SEQ ID NO: 1883776 - DNA, 15 bp, Homo sapiens
ctcacccatctctgg

SEQ ID NO: 1883777 - DNA, 15 bp, Homo sapiens
tcacccatctctggg

SEQ ID NO: 1883778 - DNA, 15 bp, Homo sapiens
cacccatctctgggg

SEQ ID NO: 1883779 - DNA, 15 bp, Homo sapiens
acccatctctggggc

SEQ ID NO: 1883780 - DNA, 15 bp, Homo sapiens
cccatctctggggct

SEQ ID NO: 1883781 - DNA, 15 bp, Homo sapiens
ccatctctggggcta

SEQ ID NO: 1883782 - DNA, 15 bp, Homo sapiens
catctctggggctat

SEQ ID NO: 1883783 - DNA, 15 bp, Homo sapiens
atctctggggctatg

SEQ ID NO: 1883784 - DNA, 15 bp, Homo sapiens
tctctggggctatga

SEQ ID NO: 1883785 - DNA, 15 bp, Homo sapiens
ctctggggctatgat

SEQ ID NO: 1883786 - DNA, 15 bp, Homo sapiens
tctggggctatgatg

SEQ ID NO: 1883787 - DNA, 15 bp, Homo sapiens
ctggggctatgatga

SEQ ID NO: 1883788 - DNA, 15 bp, Homo sapiens
tggggctatgatgat

SEQ ID NO: 1883789 - DNA, 15 bp, Homo sapiens
ggggctatgatgatc

SEQ ID NO: 1883790 - DNA, 15 bp, Homo sapiens
gggctatgatgatcc

SEQ ID NO: 1883791 - DNA, 15 bp, Homo sapiens
ggctatgatgatccc

SEQ ID NO: 1883792 - DNA, 15 bp, Homo sapiens
gctatgatgatccct

SEQ ID NO: 1883793 - DNA, 15 bp, Homo sapiens
ctatgatgatccctt

SEQ ID NO: 1883794 - DNA, 15 bp, Homo sapiens
tatgatgatcccttt

SEQ ID NO: 1883795 - DNA, 15 bp, Homo sapiens
atgatgatcccttta

SEQ ID NO: 1883796 - DNA, 15 bp, Homo sapiens
tgatgatccctttaa

SEQ ID NO: 1883797 - DNA, 15 bp, Homo sapiens
gatgatccctttaat

SEQ ID NO: 1883798 - DNA, 15 bp, Homo sapiens
atgatccctttaatg

SEQ ID NO: 1883799 - DNA, 15 bp, Homo sapiens
tgatccctttaatgt

SEQ ID NO: 1883800 - DNA, 15 bp, Homo sapiens
gatccctttaatgta

SEQ ID NO: 1883801 - DNA, 15 bp, Homo sapiens
atccctttaatgtat

SEQ ID NO: 1883802 - DNA, 15 bp, Homo sapiens
tccctttaatgtatt

SEQ ID NO: 1883803 - DNA, 15 bp, Homo sapiens
ccctttaatgtattt

SEQ ID NO: 1883804 - DNA, 15 bp, Homo sapiens
cctttaatgtatttt

SEQ ID NO: 1883805 - DNA, 15 bp, Homo sapiens
ctttaatgtattttg

SEQ ID NO: 1883806 - DNA, 15 bp, Homo sapiens
tttaatgtattttgc

SEQ ID NO: 1883807 - DNA, 15 bp, Homo sapiens
ttaatgtattttgca

SEQ ID NO: 1883808 - DNA, 15 bp, Homo sapiens
taatgtattttgcat

SEQ ID NO: 1883809 - DNA, 15 bp, Homo sapiens
aatgtattttgcatg

SEQ ID NO: 1883810 - DNA, 15 bp, Homo sapiens
atgtattttgcatgt

SEQ ID NO: 1883811 - DNA, 15 bp, Homo sapiens
tgtattttgcatgta

SEQ ID NO: 1883812 - DNA, 15 bp, Homo sapiens
gtattttgcatgtaa

SEQ ID NO: 1883813 - DNA, 15 bp, Homo sapiens
tattttgcatgtaag

SEQ ID NO: 1883814 - DNA, 15 bp, Homo sapiens
attttgcatgtaaga

SEQ ID NO: 1883815 - DNA, 15 bp, Homo sapiens
ttttgcatgtaagaa

SEQ ID NO: 1883816 - DNA, 15 bp, Homo sapiens
tttgcatgtaagaag

SEQ ID NO: 1883817 - DNA, 15 bp, Homo sapiens
ttgcatgtaagaagg

SEQ ID NO: 1883818 - DNA, 15 bp, Homo sapiens
tgcatgtaagaagga

SEQ ID NO: 1883819 - DNA, 15 bp, Homo sapiens
gcatgtaagaaggac

SEQ ID NO: 1883820 - DNA, 15 bp, Homo sapiens
catgtaagaaggaca

SEQ ID NO: 1883821 - DNA, 15 bp, Homo sapiens
atgtaagaaggacat

SEQ ID NO: 1883822 - DNA, 15 bp, Homo sapiens
tgtaagaaggacatg

SEQ ID NO: 1883823 - DNA, 15 bp, Homo sapiens
gtaagaaggacatga

SEQ ID NO: 1883824 - DNA, 15 bp, Homo sapiens
taagaaggacatgat

SEQ ID NO: 1883825 - DNA, 15 bp, Homo sapiens
aagaaggacatgatt

SEQ ID NO: 1883826 - DNA, 15 bp, Homo sapiens
agaaggacatgattt

SEQ ID NO: 1883827 - DNA, 15 bp, Homo sapiens
gaaggacatgatttg

SEQ ID NO: 1883828 - DNA, 15 bp, Homo sapiens
aaggacatgatttgg

SEQ ID NO: 1883829 - DNA, 15 bp, Homo sapiens
aggacatgatttggg

SEQ ID NO: 1883830 - DNA, 15 bp, Homo sapiens
ggacatgatttgggg

SEQ ID NO: 1883831 - DNA, 15 bp, Homo sapiens
gacatgatttggggg

SEQ ID NO: 1883832 - DNA, 15 bp, Homo sapiens
acatgatttgggggt

SEQ ID NO: 1883833 - DNA, 15 bp, Homo sapiens
catgatttgggggtg

SEQ ID NO: 1883834 - DNA, 15 bp, Homo sapiens
atgatttgggggtgg

SEQ ID NO: 1883835 - DNA, 15 bp, Homo sapiens
tgatttgggggtggg

SEQ ID NO: 1883836 - DNA, 15 bp, Homo sapiens
gatttgggggtgggg

SEQ ID NO: 1883837 - DNA, 15 bp, Homo sapiens
atttgggggtggggg

SEQ ID NO: 1883838 - DNA, 15 bp, Homo sapiens
tttgggggtgggggc

SEQ ID NO: 1883839 - DNA, 15 bp, Homo sapiens
ttgggggtgggggca

SEQ ID NO: 1883840 - DNA, 15 bp, Homo sapiens
tgggggtgggggcag

SEQ ID NO: 1883841 - DNA, 15 bp, Homo sapiens
gggggtgggggcaga

SEQ ID NO: 1883842 - DNA, 15 bp, Homo sapiens
ggggtgggggcagaa

SEQ ID NO: 1883843 - DNA, 15 bp, Homo sapiens
gggtgggggcagaag

SEQ ID NO: 1883844 - DNA, 15 bp, Homo sapiens
ggtgggggcagaagc

SEQ ID NO: 1883845 - DNA, 15 bp, Homo sapiens
gtgggggcagaagct

SEQ ID NO: 1883846 - DNA, 15 bp, Homo sapiens
tgggggcagaagctg

SEQ ID NO: 1883847 - DNA, 15 bp, Homo sapiens
gggggcagaagctga

SEQ ID NO: 1883848 - DNA, 15 bp, Homo sapiens
ggggcagaagctgaa

SEQ ID NO: 1883849 - DNA, 15 bp, Homo sapiens
gggcagaagctgaat

SEQ ID NO: 1883850 - DNA, 15 bp, Homo sapiens
ggcagaagctgaata

SEQ ID NO: 1883851 - DNA, 15 bp, Homo sapiens
gcagaagctgaataa

SEQ ID NO: 1883852 - DNA, 15 bp, Homo sapiens
cagaagctgaataat

SEQ ID NO: 1883853 - DNA, 15 bp, Homo sapiens
agaagctgaataata

SEQ ID NO: 1883854 - DNA, 15 bp, Homo sapiens
gaagctgaataatat

SEQ ID NO: 1883855 - DNA, 15 bp, Homo sapiens
aagctgaataatata

SEQ ID NO: 1883856 - DNA, 15 bp, Homo sapiens
agctgaataatatag

SEQ ID NO: 1883857 - DNA, 15 bp, Homo sapiens
gctgaataatataga

SEQ ID NO: 1883858 - DNA, 15 bp, Homo sapiens
ctgaataatatagat

SEQ ID NO: 1883859 - DNA, 15 bp, Homo sapiens
tgaataatatagatt

SEQ ID NO: 1883860 - DNA, 15 bp, Homo sapiens
gaataatatagattg

SEQ ID NO: 1883861 - DNA, 15 bp, Homo sapiens
aataatatagattga

SEQ ID NO: 1883862 - DNA, 15 bp, Homo sapiens
ataatatagattgaa

SEQ ID NO: 1883863 - DNA, 15 bp, Homo sapiens
taatatagattgaat

SEQ ID NO: 1883864 - DNA, 15 bp, Homo sapiens
aatatagattgaatg

SEQ ID NO: 1883865 - DNA, 15 bp, Homo sapiens
atatagattgaatgt

SEQ ID NO: 1883866 - DNA, 15 bp, Homo sapiens
tatagattgaatgtt

SEQ ID NO: 1883867 - DNA, 15 bp, Homo sapiens
atagattgaatgttt

SEQ ID NO: 1883868 - DNA, 15 bp, Homo sapiens
tagattgaatgtttg

SEQ ID NO: 1883869 - DNA, 15 bp, Homo sapiens
agattgaatgtttgc

SEQ ID NO: 1883870 - DNA, 15 bp, Homo sapiens
gattgaatgtttgca

SEQ ID NO: 1883871 - DNA, 15 bp, Homo sapiens
attgaatgtttgcat

SEQ ID NO: 1883872 - DNA, 15 bp, Homo sapiens
ttgaatgtttgcatc

SEQ ID NO: 1883873 - DNA, 15 bp, Homo sapiens
tgaatgtttgcatcc

SEQ ID NO: 1883874 - DNA, 15 bp, Homo sapiens
gaatgtttgcatccc

SEQ ID NO: 1883875 - DNA, 15 bp, Homo sapiens
aatgtttgcatcccc

SEQ ID NO: 1883876 - DNA, 15 bp, Homo sapiens
atgtttgcatccccc

SEQ ID NO: 1883877 - DNA, 15 bp, Homo sapiens
tgtttgcatcccccc

SEQ ID NO: 1883878 - DNA, 15 bp, Homo sapiens
gtttgcatccccccc

SEQ ID NO: 1883879 - DNA, 15 bp, Homo sapiens
tttgcatccccccca

SEQ ID NO: 1883880 - DNA, 15 bp, Homo sapiens
ttgcatcccccccac

SEQ ID NO: 1883881 - DNA, 15 bp, Homo sapiens
tgcatcccccccacc

SEQ ID NO: 1883882 - DNA, 15 bp, Homo sapiens
gcatcccccccacca

SEQ ID NO: 1883883 - DNA, 15 bp, Homo sapiens
catcccccccaccaa

SEQ ID NO: 1883884 - DNA, 15 bp, Homo sapiens
atcccccccaccaaa

SEQ ID NO: 1883885 - DNA, 15 bp, Homo sapiens
tcccccccaccaaat

SEQ ID NO: 1883886 - DNA, 15 bp, Homo sapiens
cccccccaccaaatt

SEQ ID NO: 1883887 - DNA, 15 bp, Homo sapiens
ccccccaccaaattc

SEQ ID NO: 1883888 - DNA, 15 bp, Homo sapiens
cccccaccaaattca

SEQ ID NO: 1883889 - DNA, 15 bp, Homo sapiens
ccccaccaaattcat

SEQ ID NO: 1883890 - DNA, 15 bp, Homo sapiens
cccaccaaattcata

SEQ ID NO: 1883891 - DNA, 15 bp, Homo sapiens
ccaccaaattcataa

SEQ ID NO: 1883892 - DNA, 15 bp, Homo sapiens
caccaaattcataag

SEQ ID NO: 1883893 - DNA, 15 bp, Homo sapiens
accaaattcataagt

SEQ ID NO: 1883894 - DNA, 15 bp, Homo sapiens
ccaaattcataagtt

SEQ ID NO: 1883895 - DNA, 15 bp, Homo sapiens
caaattcataagtta

SEQ ID NO: 1883896 - DNA, 15 bp, Homo sapiens
aaattcataagttaa

SEQ ID NO: 1883897 - DNA, 15 bp, Homo sapiens
aattcataagttaaa

SEQ ID NO: 1883898 - DNA, 15 bp, Homo sapiens
attcataagttaaaa

SEQ ID NO: 1883899 - DNA, 15 bp, Homo sapiens
ttcataagttaaaat

SEQ ID NO: 1883900 - DNA, 15 bp, Homo sapiens
tcataagttaaaatc

SEQ ID NO: 1883901 - DNA, 15 bp, Homo sapiens
cataagttaaaatcc

SEQ ID NO: 1883902 - DNA, 15 bp, Homo sapiens
ataagttaaaatcct

SEQ ID NO: 1883903 - DNA, 15 bp, Homo sapiens
taagttaaaatcctc

SEQ ID NO: 1883904 - DNA, 15 bp, Homo sapiens
aagttaaaatcctca

SEQ ID NO: 1883905 - DNA, 15 bp, Homo sapiens
agttaaaatcctcat

SEQ ID NO: 1883906 - DNA, 15 bp, Homo sapiens
gttaaaatcctcatc

SEQ ID NO: 1883907 - DNA, 15 bp, Homo sapiens
ttaaaatcctcatcc

SEQ ID NO: 1883908 - DNA, 15 bp, Homo sapiens
taaaatcctcatccc

SEQ ID NO: 1883909 - DNA, 15 bp, Homo sapiens
aaaatcctcatccct

SEQ ID NO: 1883910 - DNA, 15 bp, Homo sapiens
aaatcctcatcccta

SEQ ID NO: 1883911 - DNA, 15 bp, Homo sapiens
aatcctcatccctaa

SEQ ID NO: 1883912 - DNA, 15 bp, Homo sapiens
atcctcatccctaat

SEQ ID NO: 1883913 - DNA, 15 bp, Homo sapiens
tcctcatccctaata

SEQ ID NO: 1883914 - DNA, 15 bp, Homo sapiens
cctcatccctaatat

SEQ ID NO: 1883915 - DNA, 15 bp, Homo sapiens
ctcatccctaatatg

SEQ ID NO: 1883916 - DNA, 15 bp, Homo sapiens
tcatccctaatatga

SEQ ID NO: 1883917 - DNA, 15 bp, Homo sapiens
catccctaatatgat

SEQ ID NO: 1883918 - DNA, 15 bp, Homo sapiens
atccctaatatgatg

SEQ ID NO: 1883919 - DNA, 15 bp, Homo sapiens
tccctaatatgatgg

SEQ ID NO: 1883920 - DNA, 15 bp, Homo sapiens
ccctaatatgatggt

SEQ ID NO: 1883921 - DNA, 15 bp, Homo sapiens
cctaatatgatggta

SEQ ID NO: 1883922 - DNA, 15 bp, Homo sapiens
ctaatatgatggtat

SEQ ID NO: 1883923 - DNA, 15 bp, Homo sapiens
taatatgatggtatt

SEQ ID NO: 1883924 - DNA, 15 bp, Homo sapiens
aatatgatggtatta

SEQ ID NO: 1883925 - DNA, 15 bp, Homo sapiens
atatgatggtattaa

SEQ ID NO: 1883926 - DNA, 15 bp, Homo sapiens
tatgatggtattaag

SEQ ID NO: 1883927 - DNA, 15 bp, Homo sapiens
atgatggtattaaga

SEQ ID NO: 1883928 - DNA, 15 bp, Homo sapiens
tgatggtattaagag

SEQ ID NO: 1883929 - DNA, 15 bp, Homo sapiens
gatggtattaagagg

SEQ ID NO: 1883930 - DNA, 15 bp, Homo sapiens
atggtattaagaggt

SEQ ID NO: 1883931 - DNA, 15 bp, Homo sapiens
tggtattaagaggta

SEQ ID NO: 1883932 - DNA, 15 bp, Homo sapiens
ggtattaagaggtaa

SEQ ID NO: 1883933 - DNA, 15 bp, Homo sapiens
gtattaagaggtaag

SEQ ID NO: 1883934 - DNA, 15 bp, Homo sapiens
tattaagaggtaagg

SEQ ID NO: 1883935 - DNA, 15 bp, Homo sapiens
attaagaggtaaggg

SEQ ID NO: 1883936 - DNA, 15 bp, Homo sapiens
ttaagaggtaagggg

SEQ ID NO: 1883937 - DNA, 15 bp, Homo sapiens
taagaggtaaggggc

SEQ ID NO: 1883938 - DNA, 15 bp, Homo sapiens
aagaggtaaggggct

SEQ ID NO: 1883939 - DNA, 15 bp, Homo sapiens
agaggtaaggggctt

SEQ ID NO: 1883940 - DNA, 15 bp, Homo sapiens
gaggtaaggggcttt

SEQ ID NO: 1883941 - DNA, 15 bp, Homo sapiens
aggtaaggggctttg

SEQ ID NO: 1883942 - DNA, 15 bp, Homo sapiens
ggtaaggggctttgg

SEQ ID NO: 1883943 - DNA, 15 bp, Homo sapiens
gtaaggggctttggt

SEQ ID NO: 1883944 - DNA, 15 bp, Homo sapiens
taaggggctttggta

SEQ ID NO: 1883945 - DNA, 15 bp, Homo sapiens
aaggggctttggtag

SEQ ID NO: 1883946 - DNA, 15 bp, Homo sapiens
aggggctttggtagg

SEQ ID NO: 1883947 - DNA, 15 bp, Homo sapiens
ggggctttggtagga

SEQ ID NO: 1883948 - DNA, 15 bp, Homo sapiens
gggctttggtaggag

SEQ ID NO: 1883949 - DNA, 15 bp, Homo sapiens
ggctttggtaggaga

SEQ ID NO: 1883950 - DNA, 15 bp, Homo sapiens
gctttggtaggagag

SEQ ID NO: 1883951 - DNA, 15 bp, Homo sapiens
ctttggtaggagagt

SEQ ID NO: 1883952 - DNA, 15 bp, Homo sapiens
tttggtaggagagta

SEQ ID NO: 1883953 - DNA, 15 bp, Homo sapiens
ttggtaggagagtaa

SEQ ID NO: 1883954 - DNA, 15 bp, Homo sapiens
tggtaggagagtaag

SEQ ID NO: 1883955 - DNA, 15 bp, Homo sapiens
ggtaggagagtaagt

SEQ ID NO: 1883956 - DNA, 15 bp, Homo sapiens
gtaggagagtaagtc

SEQ ID NO: 1883957 - DNA, 15 bp, Homo sapiens
taggagagtaagtca

SEQ ID NO: 1883958 - DNA, 15 bp, Homo sapiens
aggagagtaagtcac

SEQ ID NO: 1883959 - DNA, 15 bp, Homo sapiens
ggagagtaagtcaca

SEQ ID NO: 1883960 - DNA, 15 bp, Homo sapiens
gagagtaagtcacaa

SEQ ID NO: 1883961 - DNA, 15 bp, Homo sapiens
agagtaagtcacaag

SEQ ID NO: 1883962 - DNA, 15 bp, Homo sapiens
gagtaagtcacaagg

SEQ ID NO: 1883963 - DNA, 15 bp, Homo sapiens
agtaagtcacaaggg

SEQ ID NO: 1883964 - DNA, 15 bp, Homo sapiens
gtaagtcacaagggc

SEQ ID NO: 1883965 - DNA, 15 bp, Homo sapiens
taagtcacaagggca

SEQ ID NO: 1883966 - DNA, 15 bp, Homo sapiens
aagtcacaagggcag

SEQ ID NO: 1883967 - DNA, 15 bp, Homo sapiens
agtcacaagggcaga

SEQ ID NO: 1883968 - DNA, 15 bp, Homo sapiens
gtcacaagggcagag

SEQ ID NO: 1883969 - DNA, 15 bp, Homo sapiens
tcacaagggcagagc

SEQ ID NO: 1883970 - DNA, 15 bp, Homo sapiens
cacaagggcagagcc

SEQ ID NO: 1883971 - DNA, 15 bp, Homo sapiens
acaagggcagagccc

SEQ ID NO: 1883972 - DNA, 15 bp, Homo sapiens
caagggcagagccct

SEQ ID NO: 1883973 - DNA, 15 bp, Homo sapiens
aagggcagagccctt

SEQ ID NO: 1883974 - DNA, 15 bp, Homo sapiens
agggcagagccctta

SEQ ID NO: 1883975 - DNA, 15 bp, Homo sapiens
gggcagagcccttac

SEQ ID NO: 1883976 - DNA, 15 bp, Homo sapiens
ggcagagcccttaca

SEQ ID NO: 1883977 - DNA, 15 bp, Homo sapiens
gcagagcccttacaa

SEQ ID NO: 1883978 - DNA, 15 bp, Homo sapiens
cagagcccttacaaa

SEQ ID NO: 1883979 - DNA, 15 bp, Homo sapiens
agagcccttacaaat

SEQ ID NO: 1883980 - DNA, 15 bp, Homo sapiens
gagcccttacaaatg

SEQ ID NO: 1883981 - DNA, 15 bp, Homo sapiens
agcccttacaaatgg

SEQ ID NO: 1883982 - DNA, 15 bp, Homo sapiens
gcccttacaaatggg

SEQ ID NO: 1883983 - DNA, 15 bp, Homo sapiens
cccttacaaatggga

SEQ ID NO: 1883984 - DNA, 15 bp, Homo sapiens
ccttacaaatgggat

SEQ ID NO: 1883985 - DNA, 15 bp, Homo sapiens
cttacaaatgggatt

SEQ ID NO: 1883986 - DNA, 15 bp, Homo sapiens
ttacaaatgggattt

SEQ ID NO: 1883987 - DNA, 15 bp, Homo sapiens
tacaaatgggatttg

SEQ ID NO: 1883988 - DNA, 15 bp, Homo sapiens
acaaatgggatttga

SEQ ID NO: 1883989 - DNA, 15 bp, Homo sapiens
caaatgggatttgag

SEQ ID NO: 1883990 - DNA, 15 bp, Homo sapiens
aaatgggatttgagc

SEQ ID NO: 1883991 - DNA, 15 bp, Homo sapiens
aatgggatttgagct

SEQ ID NO: 1883992 - DNA, 15 bp, Homo sapiens
atgggatttgagcta

SEQ ID NO: 1883993 - DNA, 15 bp, Homo sapiens
tgggatttgagctat

SEQ ID NO: 1883994 - DNA, 15 bp, Homo sapiens
gggatttgagctata

SEQ ID NO: 1883995 - DNA, 15 bp, Homo sapiens
ggatttgagctatag

SEQ ID NO: 1883996 - DNA, 15 bp, Homo sapiens
gatttgagctataga

SEQ ID NO: 1883997 - DNA, 15 bp, Homo sapiens
atttgagctatagag

SEQ ID NO: 1883998 - DNA, 15 bp, Homo sapiens
tttgagctatagaga

SEQ ID NO: 1883999 - DNA, 15 bp, Homo sapiens
ttgagctatagagaa

SEQ ID NO: 1884000 - DNA, 15 bp, Homo sapiens
tgagctatagagaaa

SEQ ID NO: 1884001 - DNA, 15 bp, Homo sapiens
gagctatagagaaag

SEQ ID NO: 1884002 - DNA, 15 bp, Homo sapiens
agctatagagaaagc

SEQ ID NO: 1884003 - DNA, 15 bp, Homo sapiens
gctatagagaaagct

SEQ ID NO: 1884004 - DNA, 15 bp, Homo sapiens
ctatagagaaagctt

SEQ ID NO: 1884005 - DNA, 15 bp, Homo sapiens
tatagagaaagcttc

SEQ ID NO: 1884006 - DNA, 15 bp, Homo sapiens
atagagaaagcttca

SEQ ID NO: 1884007 - DNA, 15 bp, Homo sapiens
tagagaaagcttcaa

SEQ ID NO: 1884008 - DNA, 15 bp, Homo sapiens
agagaaagcttcaat

SEQ ID NO: 1884009 - DNA, 15 bp, Homo sapiens
gagaaagcttcaatc

SEQ ID NO: 1884010 - DNA, 15 bp, Homo sapiens
agaaagcttcaatct

SEQ ID NO: 1884011 - DNA, 15 bp, Homo sapiens
gaaagcttcaatctc

SEQ ID NO: 1884012 - DNA, 15 bp, Homo sapiens
aaagcttcaatctcg

SEQ ID NO: 1884013 - DNA, 15 bp, Homo sapiens
aagcttcaatctcgg

SEQ ID NO: 1884014 - DNA, 15 bp, Homo sapiens
agcttcaatctcggg

SEQ ID NO: 1884015 - DNA, 15 bp, Homo sapiens
gcttcaatctcggga

SEQ ID NO: 1884016 - DNA, 15 bp, Homo sapiens
cttcaatctcgggaa

SEQ ID NO: 1884017 - DNA, 15 bp, Homo sapiens
ttcaatctcgggaaa

SEQ ID NO: 1884018 - DNA, 15 bp, Homo sapiens
tcaatctcgggaaat

SEQ ID NO: 1884019 - DNA, 15 bp, Homo sapiens
caatctcgggaaata

SEQ ID NO: 1884020 - DNA, 15 bp, Homo sapiens
aatctcgggaaatac

SEQ ID NO: 1884021 - DNA, 15 bp, Homo sapiens
atctcgggaaataca

SEQ ID NO: 1884022 - DNA, 15 bp, Homo sapiens
tctcgggaaatacaa

SEQ ID NO: 1884023 - DNA, 15 bp, Homo sapiens
ctcgggaaatacaag

SEQ ID NO: 1884024 - DNA, 15 bp, Homo sapiens
tcgggaaatacaaga

SEQ ID NO: 1884025 - DNA, 15 bp, Homo sapiens
cgggaaatacaagat

SEQ ID NO: 1884026 - DNA, 15 bp, Homo sapiens
gggaaatacaagatg

SEQ ID NO: 1884027 - DNA, 15 bp, Homo sapiens
ggaaatacaagatga

SEQ ID NO: 1884028 - DNA, 15 bp, Homo sapiens
gaaatacaagatgag

SEQ ID NO: 1884029 - DNA, 15 bp, Homo sapiens
aaatacaagatgaga

SEQ ID NO: 1884030 - DNA, 15 bp, Homo sapiens
aatacaagatgagat

SEQ ID NO: 1884031 - DNA, 15 bp, Homo sapiens
atacaagatgagata

SEQ ID NO: 1884032 - DNA, 15 bp, Homo sapiens
tacaagatgagatac

SEQ ID NO: 1884033 - DNA, 15 bp, Homo sapiens
acaagatgagatacc

SEQ ID NO: 1884034 - DNA, 15 bp, Homo sapiens
caagatgagatacca

SEQ ID NO: 1884035 - DNA, 15 bp, Homo sapiens
aagatgagataccag

SEQ ID NO: 1884036 - DNA, 15 bp, Homo sapiens
agatgagataccaga

SEQ ID NO: 1884037 - DNA, 15 bp, Homo sapiens
gatgagataccagaa

SEQ ID NO: 1884038 - DNA, 15 bp, Homo sapiens
atgagataccagaaa

SEQ ID NO: 1884039 - DNA, 15 bp, Homo sapiens
tgagataccagaaag

SEQ ID NO: 1884040 - DNA, 15 bp, Homo sapiens
gagataccagaaagc

SEQ ID NO: 1884041 - DNA, 15 bp, Homo sapiens
agataccagaaagct

SEQ ID NO: 1884042 - DNA, 15 bp, Homo sapiens
gataccagaaagctc

SEQ ID NO: 1884043 - DNA, 15 bp, Homo sapiens
ataccagaaagctct

SEQ ID NO: 1884044 - DNA, 15 bp, Homo sapiens
taccagaaagctctc

SEQ ID NO: 1884045 - DNA, 15 bp, Homo sapiens
accagaaagctctct

SEQ ID NO: 1884046 - DNA, 15 bp, Homo sapiens
ccagaaagctctctc

SEQ ID NO: 1884047 - DNA, 15 bp, Homo sapiens
cagaaagctctctct

SEQ ID NO: 1884048 - DNA, 15 bp, Homo sapiens
agaaagctctctctc

SEQ ID NO: 1884049 - DNA, 15 bp, Homo sapiens
gaaagctctctctcc

SEQ ID NO: 1884050 - DNA, 15 bp, Homo sapiens
aaagctctctctccc

SEQ ID NO: 1884051 - DNA, 15 bp, Homo sapiens
aagctctctctcccc

SEQ ID NO: 1884052 - DNA, 15 bp, Homo sapiens
agctctctctcccct

SEQ ID NO: 1884053 - DNA, 15 bp, Homo sapiens
gctctctctcccctt

SEQ ID NO: 1884054 - DNA, 15 bp, Homo sapiens
ctctctccccttcca

SEQ ID NO: 1884055 - DNA, 15 bp, Homo sapiens
tctctccccttccat

SEQ ID NO: 1884056 - DNA, 15 bp, Homo sapiens
ctctccccttccatc

SEQ ID NO: 1884057 - DNA, 15 bp, Homo sapiens
tctccccttccatca

SEQ ID NO: 1884058 - DNA, 15 bp, Homo sapiens
ctccccttccatcat

SEQ ID NO: 1884059 - DNA, 15 bp, Homo sapiens
tccccttccatcatg

SEQ ID NO: 1884060 - DNA, 15 bp, Homo sapiens
ccccttccatcatgt

SEQ ID NO: 1884061 - DNA, 15 bp, Homo sapiens
cttccatcatgtgaa

SEQ ID NO: 1884062 - DNA, 15 bp, Homo sapiens
ttccatcatgtgaag

SEQ ID NO: 1884063 - DNA, 15 bp, Homo sapiens
tccatcatgtgaaga

SEQ ID NO: 1884064 - DNA, 15 bp, Homo sapiens
ccatcatgtgaagac

SEQ ID NO: 1884065 - DNA, 15 bp, Homo sapiens
catcatgtgaagaca

SEQ ID NO: 1884066 - DNA, 15 bp, Homo sapiens
atcatgtgaagacac

SEQ ID NO: 1884067 - DNA, 15 bp, Homo sapiens
tcatgtgaagacaca

SEQ ID NO: 1884068 - DNA, 15 bp, Homo sapiens
catgtgaagacacag

SEQ ID NO: 1884069 - DNA, 15 bp, Homo sapiens
atgtgaagacacagc

SEQ ID NO: 1884070 - DNA, 15 bp, Homo sapiens
tgtgaagacacagca

SEQ ID NO: 1884071 - DNA, 15 bp, Homo sapiens
gtgaagacacagcaa

SEQ ID NO: 1884072 - DNA, 15 bp, Homo sapiens
tgaagacacagcaaa

SEQ ID NO: 1884073 - DNA, 15 bp, Homo sapiens
gaagacacagcaaaa

SEQ ID NO: 1884074 - DNA, 15 bp, Homo sapiens
aagacacagcaaaaa

SEQ ID NO: 1884075 - DNA, 15 bp, Homo sapiens
agacacagcaaaaag

SEQ ID NO: 1884076 - DNA, 15 bp, Homo sapiens
gacacagcaaaaaga

SEQ ID NO: 1884077 - DNA, 15 bp, Homo sapiens
acacagcaaaaagac

SEQ ID NO: 1884078 - DNA, 15 bp, Homo sapiens
cacagcaaaaagaca

SEQ ID NO: 1884079 - DNA, 15 bp, Homo sapiens
acagcaaaaagacag

SEQ ID NO: 1884080 - DNA, 15 bp, Homo sapiens
cagcaaaaagacagc

SEQ ID NO: 1884081 - DNA, 15 bp, Homo sapiens
agcaaaaagacagcc

SEQ ID NO: 1884082 - DNA, 15 bp, Homo sapiens
gcaaaaagacagcca

SEQ ID NO: 1884083 - DNA, 15 bp, Homo sapiens
caaaaagacagccat

SEQ ID NO: 1884084 - DNA, 15 bp, Homo sapiens
aaaaagacagccatc

SEQ ID NO: 1884085 - DNA, 15 bp, Homo sapiens
aaaagacagccatct

SEQ ID NO: 1884086 - DNA, 15 bp, Homo sapiens
aaagacagccatcta

SEQ ID NO: 1884087 - DNA, 15 bp, Homo sapiens
aagacagccatctat

SEQ ID NO: 1884088 - DNA, 15 bp, Homo sapiens
agacagccatctatg

SEQ ID NO: 1884089 - DNA, 15 bp, Homo sapiens
gacagccatctatga

SEQ ID NO: 1884090 - DNA, 15 bp, Homo sapiens
acagccatctatgaa

SEQ ID NO: 1884091 - DNA, 15 bp, Homo sapiens
cagccatctatgaac

SEQ ID NO: 1884092 - DNA, 15 bp, Homo sapiens
agccatctatgaacc

SEQ ID NO: 1884093 - DNA, 15 bp, Homo sapiens
gccatctatgaacca

SEQ ID NO: 1884094 - DNA, 15 bp, Homo sapiens
ccatctatgaaccaa

SEQ ID NO: 1884095 - DNA, 15 bp, Homo sapiens
catctatgaaccaat

SEQ ID NO: 1884096 - DNA, 15 bp, Homo sapiens
atctatgaaccaata

SEQ ID NO: 1884097 - DNA, 15 bp, Homo sapiens
tctatgaaccaataa

SEQ ID NO: 1884098 - DNA, 15 bp, Homo sapiens
ctatgaaccaataag

SEQ ID NO: 1884099 - DNA, 15 bp, Homo sapiens
tatgaaccaataagt

SEQ ID NO: 1884100 - DNA, 15 bp, Homo sapiens
atgaaccaataagta

SEQ ID NO: 1884101 - DNA, 15 bp, Homo sapiens
tgaaccaataagtag

SEQ ID NO: 1884102 - DNA, 15 bp, Homo sapiens
gaaccaataagtagt

SEQ ID NO: 1884103 - DNA, 15 bp, Homo sapiens
aaccaataagtagtc

SEQ ID NO: 1884104 - DNA, 15 bp, Homo sapiens
accaataagtagtcc

SEQ ID NO: 1884105 - DNA, 15 bp, Homo sapiens
ccaataagtagtccc

SEQ ID NO: 1884106 - DNA, 15 bp, Homo sapiens
caataagtagtccct

SEQ ID NO: 1884107 - DNA, 15 bp, Homo sapiens
aataagtagtccctc

SEQ ID NO: 1884108 - DNA, 15 bp, Homo sapiens
ataagtagtccctca

SEQ ID NO: 1884109 - DNA, 15 bp, Homo sapiens
taagtagtccctcac

SEQ ID NO: 1884110 - DNA, 15 bp, Homo sapiens
aagtagtccctcact

SEQ ID NO: 1884111 - DNA, 15 bp, Homo sapiens
agtagtccctcacta

SEQ ID NO: 1884112 - DNA, 15 bp, Homo sapiens
gtagtccctcactag

SEQ ID NO: 1884113 - DNA, 15 bp, Homo sapiens
tagtccctcactaga

SEQ ID NO: 1884114 - DNA, 15 bp, Homo sapiens
agtccctcactagac

SEQ ID NO: 1884115 - DNA, 15 bp, Homo sapiens
gtccctcactagaca

SEQ ID NO: 1884116 - DNA, 15 bp, Homo sapiens
tccctcactagacat

SEQ ID NO: 1884117 - DNA, 15 bp, Homo sapiens
ccctcactagacatt

SEQ ID NO: 1884118 - DNA, 15 bp, Homo sapiens
cctcactagacattg

SEQ ID NO: 1884119 - DNA, 15 bp, Homo sapiens
ctcactagacattga

SEQ ID NO: 1884120 - DNA, 15 bp, Homo sapiens
tcactagacattgaa

SEQ ID NO: 1884121 - DNA, 15 bp, Homo sapiens
cactagacattgaat

SEQ ID NO: 1884122 - DNA, 15 bp, Homo sapiens
actagacattgaatc

SEQ ID NO: 1884123 - DNA, 15 bp, Homo sapiens
ctagacattgaatct

SEQ ID NO: 1884124 - DNA, 15 bp, Homo sapiens
tagacattgaatctg

SEQ ID NO: 1884125 - DNA, 15 bp, Homo sapiens
agacattgaatctgc

SEQ ID NO: 1884126 - DNA, 15 bp, Homo sapiens
gacattgaatctgcc

SEQ ID NO: 1884127 - DNA, 15 bp, Homo sapiens
acattgaatctgcca

SEQ ID NO: 1884128 - DNA, 15 bp, Homo sapiens
cattgaatctgccag

SEQ ID NO: 1884129 - DNA, 15 bp, Homo sapiens
attgaatctgccagc

SEQ ID NO: 1884130 - DNA, 15 bp, Homo sapiens
ttgaatctgccagca

SEQ ID NO: 1884131 - DNA, 15 bp, Homo sapiens
tgaatctgccagcac

SEQ ID NO: 1884132 - DNA, 15 bp, Homo sapiens
gaatctgccagcact

SEQ ID NO: 1884133 - DNA, 15 bp, Homo sapiens
aatctgccagcactt

SEQ ID NO: 1884134 - DNA, 15 bp, Homo sapiens
atctgccagcacttt

SEQ ID NO: 1884135 - DNA, 15 bp, Homo sapiens
tctgccagcactttg

SEQ ID NO: 1884136 - DNA, 15 bp, Homo sapiens
ctgccagcactttga

SEQ ID NO: 1884137 - DNA, 15 bp, Homo sapiens
tgccagcactttgat

SEQ ID NO: 1884138 - DNA, 15 bp, Homo sapiens
gccagcactttgatc

SEQ ID NO: 1884139 - DNA, 15 bp, Homo sapiens
ccagcactttgatct

SEQ ID NO: 1884140 - DNA, 15 bp, Homo sapiens
cagcactttgatcta

SEQ ID NO: 1884141 - DNA, 15 bp, Homo sapiens
agcactttgatctag

SEQ ID NO: 1884142 - DNA, 15 bp, Homo sapiens
gcactttgatctagg

SEQ ID NO: 1884143 - DNA, 15 bp, Homo sapiens
cactttgatctagga

SEQ ID NO: 1884144 - DNA, 15 bp, Homo sapiens
ggacttcccagcctt

SEQ ID NO: 1884145 - DNA, 15 bp, Homo sapiens
gacttcccagccttc

SEQ ID NO: 1884146 - DNA, 15 bp, Homo sapiens
acttcccagccttca

SEQ ID NO: 1884147 - DNA, 15 bp, Homo sapiens
cttcccagccttcag

SEQ ID NO: 1884148 - DNA, 15 bp, Homo sapiens
ttcccagccttcaga

SEQ ID NO: 1884149 - DNA, 15 bp, Homo sapiens
tcccagccttcagaa

SEQ ID NO: 1884150 - DNA, 15 bp, Homo sapiens
cccagccttcagaac

SEQ ID NO: 1884151 - DNA, 15 bp, Homo sapiens
ccagccttcagaact

SEQ ID NO: 1884152 - DNA, 15 bp, Homo sapiens
cagccttcagaactg

SEQ ID NO: 1884153 - DNA, 15 bp, Homo sapiens
agccttcagaactgt

SEQ ID NO: 1884154 - DNA, 15 bp, Homo sapiens
gccttcagaactgtg

SEQ ID NO: 1884155 - DNA, 15 bp, Homo sapiens
ccttcagaactgtga

SEQ ID NO: 1884156 - DNA, 15 bp, Homo sapiens
cttcagaactgtgag

SEQ ID NO: 1884157 - DNA, 15 bp, Homo sapiens
ttcagaactgtgaga

SEQ ID NO: 1884158 - DNA, 15 bp, Homo sapiens
tcagaactgtgagaa

SEQ ID NO: 1884159 - DNA, 15 bp, Homo sapiens
cagaactgtgagaaa

SEQ ID NO: 1884160 - DNA, 15 bp, Homo sapiens
agaactgtgagaaat

SEQ ID NO: 1884161 - DNA, 15 bp, Homo sapiens
gaactgtgagaaata

SEQ ID NO: 1884162 - DNA, 15 bp, Homo sapiens
aactgtgagaaataa

SEQ ID NO: 1884163 - DNA, 15 bp, Homo sapiens
actgtgagaaataaa

SEQ ID NO: 1884164 - DNA, 15 bp, Homo sapiens
ctgtgagaaataaat

SEQ ID NO: 1884165 - DNA, 15 bp, Homo sapiens
gaaataaatttctgc

SEQ ID NO: 1884166 - DNA, 15 bp, Homo sapiens
aaataaatttctgct

SEQ ID NO: 1884167 - DNA, 15 bp, Homo sapiens
aataaatttctgctg

SEQ ID NO: 1884168 - DNA, 15 bp, Homo sapiens
ataaatttctgctgt

SEQ ID NO: 1884169 - DNA, 15 bp, Homo sapiens
taaatttctgctgtt

SEQ ID NO: 1884170 - DNA, 15 bp, Homo sapiens
aaatttctgctgttt

SEQ ID NO: 1884171 - DNA, 15 bp, Homo sapiens
aatttctgctgttta

SEQ ID NO: 1884172 - DNA, 15 bp, Homo sapiens
atttctgctgtttat

SEQ ID NO: 1884173 - DNA, 15 bp, Homo sapiens
tttctgctgtttata

SEQ ID NO: 1884174 - DNA, 15 bp, Homo sapiens
ttctgctgtttataa

SEQ ID NO: 1884175 - DNA, 15 bp, Homo sapiens
tctgctgtttataag

SEQ ID NO: 1884176 - DNA, 15 bp, Homo sapiens
ctgctgtttataagc

SEQ ID NO: 1884177 - DNA, 15 bp, Homo sapiens
tgctgtttataagca

SEQ ID NO: 1884178 - DNA, 15 bp, Homo sapiens
gctgtttataagcaa

SEQ ID NO: 1884179 - DNA, 15 bp, Homo sapiens
ctgtttataagcaac

SEQ ID NO: 1884180 - DNA, 15 bp, Homo sapiens
tgtttataagcaacc

SEQ ID NO: 1884181 - DNA, 15 bp, Homo sapiens
gtttataagcaaccc

SEQ ID NO: 1884182 - DNA, 15 bp, Homo sapiens
tttataagcaaccca

SEQ ID NO: 1884183 - DNA, 15 bp, Homo sapiens
ttataagcaacccag

SEQ ID NO: 1884184 - DNA, 15 bp, Homo sapiens
tataagcaacccagc

SEQ ID NO: 1884185 - DNA, 15 bp, Homo sapiens
ataagcaacccagct

SEQ ID NO: 1884186 - DNA, 15 bp, Homo sapiens
taagcaacccagctt

SEQ ID NO: 1884187 - DNA, 15 bp, Homo sapiens
aagcaacccagctta

SEQ ID NO: 1884188 - DNA, 15 bp, Homo sapiens
agcaacccagcttat

SEQ ID NO: 1884189 - DNA, 15 bp, Homo sapiens
gcaacccagcttatg

SEQ ID NO: 1884190 - DNA, 15 bp, Homo sapiens
caacccagcttatgg

SEQ ID NO: 1884191 - DNA, 15 bp, Homo sapiens
aacccagcttatggt

SEQ ID NO: 1884192 - DNA, 15 bp, Homo sapiens
acccagcttatggta

SEQ ID NO: 1884193 - DNA, 15 bp, Homo sapiens
cccagcttatggtag

SEQ ID NO: 1884194 - DNA, 15 bp, Homo sapiens
ccagcttatggtagt

SEQ ID NO: 1884195 - DNA, 15 bp, Homo sapiens
cagcttatggtagtt

SEQ ID NO: 1884196 - DNA, 15 bp, Homo sapiens
agcttatggtagttt

SEQ ID NO: 1884197 - DNA, 15 bp, Homo sapiens
gcttatggtagttta

SEQ ID NO: 1884198 - DNA, 15 bp, Homo sapiens
cttatggtagtttat

SEQ ID NO: 1884199 - DNA, 15 bp, Homo sapiens
ttatggtagtttatt

SEQ ID NO: 1884200 - DNA, 15 bp, Homo sapiens
tatggtagtttatta

SEQ ID NO: 1884201 - DNA, 15 bp, Homo sapiens
atggtagtttattat

SEQ ID NO: 1884202 - DNA, 15 bp, Homo sapiens
tggtagtttattata

SEQ ID NO: 1884203 - DNA, 15 bp, Homo sapiens
ggtagtttattatag

SEQ ID NO: 1884204 - DNA, 15 bp, Homo sapiens
gtagtttattatagc

SEQ ID NO: 1884205 - DNA, 15 bp, Homo sapiens
tagtttattatagca

SEQ ID NO: 1884206 - DNA, 15 bp, Homo sapiens
agtttattatagcag

SEQ ID NO: 1884207 - DNA, 15 bp, Homo sapiens
gtttattatagcagc

SEQ ID NO: 1884208 - DNA, 15 bp, Homo sapiens
tttattatagcagcc

SEQ ID NO: 1884209 - DNA, 15 bp, Homo sapiens
ttattatagcagcct

SEQ ID NO: 1884210 - DNA, 15 bp, Homo sapiens
tattatagcagcctg

SEQ ID NO: 1884211 - DNA, 15 bp, Homo sapiens
attatagcagcctga

SEQ ID NO: 1884212 - DNA, 15 bp, Homo sapiens
ttatagcagcctgaa

SEQ ID NO: 1884213 - DNA, 15 bp, Homo sapiens
tatagcagcctgaat

SEQ ID NO: 1884214 - DNA, 15 bp, Homo sapiens
atagcagcctgaata

SEQ ID NO: 1884215 - DNA, 15 bp, Homo sapiens
tagcagcctgaatag

SEQ ID NO: 1884216 - DNA, 15 bp, Homo sapiens
agcagcctgaataga

SEQ ID NO: 1884217 - DNA, 15 bp, Homo sapiens
gcagcctgaatagac

SEQ ID NO: 1884218 - DNA, 15 bp, Homo sapiens
cagcctgaatagact

SEQ ID NO: 1884219 - DNA, 15 bp, Homo sapiens
agcctgaatagacta

SEQ ID NO: 1884220 - DNA, 15 bp, Homo sapiens
gcctgaatagactaa

SEQ ID NO: 1884221 - DNA, 15 bp, Homo sapiens
cctgaatagactaaa

SEQ ID NO: 1884222 - DNA, 15 bp, Homo sapiens
ctgaatagactaaaa

SEQ ID NO: 1884223 - DNA, 15 bp, Homo sapiens
tgaatagactaaaac

SEQ ID NO: 1884224 - DNA, 15 bp, Homo sapiens
gaatagactaaaaca

SEQ ID NO: 1884225 - DNA, 15 bp, Homo sapiens
aatagactaaaacag

SEQ ID NO: 1884226 - DNA, 15 bp, Homo sapiens
atagactaaaacagg

SEQ ID NO: 1884227 - DNA, 15 bp, Homo sapiens
tagactaaaacagga

SEQ ID NO: 1884228 - DNA, 15 bp, Homo sapiens
agactaaaacaggac

SEQ ID NO: 1884229 - DNA, 15 bp, Homo sapiens
gactaaaacaggacc

SEQ ID NO: 1884230 - DNA, 15 bp, Homo sapiens
actaaaacaggacca

SEQ ID NO: 1884231 - DNA, 15 bp, Homo sapiens
ctaaaacaggaccag

SEQ ID NO: 1884232 - DNA, 15 bp, Homo sapiens
taaaacaggaccagg

SEQ ID NO: 1884233 - DNA, 15 bp, Homo sapiens
aaaacaggaccaggt

SEQ ID NO: 1884234 - DNA, 15 bp, Homo sapiens
aaacaggaccaggtc

SEQ ID NO: 1884235 - DNA, 15 bp, Homo sapiens
aacaggaccaggtcc

SEQ ID NO: 1884236 - DNA, 15 bp, Homo sapiens
acaggaccaggtcca

SEQ ID NO: 1884237 - DNA, 15 bp, Homo sapiens
caggaccaggtccaa

SEQ ID NO: 1884238 - DNA, 15 bp, Homo sapiens
aggaccaggtccaag

SEQ ID NO: 1884239 - DNA, 15 bp, Homo sapiens
ggaccaggtccaagg

SEQ ID NO: 1884240 - DNA, 15 bp, Homo sapiens
gaccaggtccaaggt

SEQ ID NO: 1884241 - DNA, 15 bp, Homo sapiens
accaggtccaaggtc

SEQ ID NO: 1884242 - DNA, 15 bp, Homo sapiens
ccaggtccaaggtca

SEQ ID NO: 1884243 - DNA, 15 bp, Homo sapiens
caggtccaaggtcag

SEQ ID NO: 1884244 - DNA, 15 bp, Homo sapiens
aggtccaaggtcaga

SEQ ID NO: 1884245 - DNA, 15 bp, Homo sapiens
ggtccaaggtcagat

SEQ ID NO: 1884246 - DNA, 15 bp, Homo sapiens
gtccaaggtcagatt

SEQ ID NO: 1884247 - DNA, 15 bp, Homo sapiens
tccaaggtcagattt

SEQ ID NO: 1884248 - DNA, 15 bp, Homo sapiens
ccaaggtcagattta

SEQ ID NO: 1884249 - DNA, 15 bp, Homo sapiens
caaggtcagatttag

SEQ ID NO: 1884250 - DNA, 15 bp, Homo sapiens
aaggtcagatttagg

SEQ ID NO: 1884251 - DNA, 15 bp, Homo sapiens
aggtcagatttagga

SEQ ID NO: 1884252 - DNA, 15 bp, Homo sapiens
ggtcagatttaggac

SEQ ID NO: 1884253 - DNA, 15 bp, Homo sapiens
gtcagatttaggacg

SEQ ID NO: 1884254 - DNA, 15 bp, Homo sapiens
tcagatttaggacga

SEQ ID NO: 1884255 - DNA, 15 bp, Homo sapiens
cagatttaggacgag

SEQ ID NO: 1884256 - DNA, 15 bp, Homo sapiens
agatttaggacgagt

SEQ ID NO: 1884257 - DNA, 15 bp, Homo sapiens
gatttaggacgagtg

SEQ ID NO: 1884258 - DNA, 15 bp, Homo sapiens
atttaggacgagtgt

SEQ ID NO: 1884259 - DNA, 15 bp, Homo sapiens
tttaggacgagtgtt

SEQ ID NO: 1884260 - DNA, 15 bp, Homo sapiens
ttaggacgagtgtta

SEQ ID NO: 1884261 - DNA, 15 bp, Homo sapiens
taggacgagtgttat

SEQ ID NO: 1884262 - DNA, 15 bp, Homo sapiens
aggacgagtgttatt

SEQ ID NO: 1884263 - DNA, 15 bp, Homo sapiens
ggacgagtgttattt

SEQ ID NO: 1884264 - DNA, 15 bp, Homo sapiens
gacgagtgttatttc

SEQ ID NO: 1884265 - DNA, 15 bp, Homo sapiens
acgagtgttatttcc

SEQ ID NO: 1884266 - DNA, 15 bp, Homo sapiens
cgagtgttatttcca

SEQ ID NO: 1884267 - DNA, 15 bp, Homo sapiens
gagtgttatttccac

SEQ ID NO: 1884268 - DNA, 15 bp, Homo sapiens
agtgttatttccact

SEQ ID NO: 1884269 - DNA, 15 bp, Homo sapiens
gtgttatttccactg

SEQ ID NO: 1884270 - DNA, 15 bp, Homo sapiens
tgttatttccactgg

SEQ ID NO: 1884271 - DNA, 15 bp, Homo sapiens
gttatttccactgga

SEQ ID NO: 1884272 - DNA, 15 bp, Homo sapiens
ttatttccactggag

SEQ ID NO: 1884273 - DNA, 15 bp, Homo sapiens
tatttccactggagc

SEQ ID NO: 1884274 - DNA, 15 bp, Homo sapiens
atttccactggagca

SEQ ID NO: 1884275 - DNA, 15 bp, Homo sapiens
tttccactggagcat

SEQ ID NO: 1884276 - DNA, 15 bp, Homo sapiens
ttccactggagcata

SEQ ID NO: 1884277 - DNA, 15 bp, Homo sapiens
tccactggagcatat

SEQ ID NO: 1884278 - DNA, 15 bp, Homo sapiens
ccactggagcatatt

SEQ ID NO: 1884279 - DNA, 15 bp, Homo sapiens
cactggagcatattc

SEQ ID NO: 1884280 - DNA, 15 bp, Homo sapiens
actggagcatattcc

SEQ ID NO: 1884281 - DNA, 15 bp, Homo sapiens
ctggagcatattcct

SEQ ID NO: 1884282 - DNA, 15 bp, Homo sapiens
tggagcatattcctc

SEQ ID NO: 1884283 - DNA, 15 bp, Homo sapiens
ggagcatattcctct

SEQ ID NO: 1884284 - DNA, 15 bp, Homo sapiens
gagcatattcctctt

SEQ ID NO: 1884285 - DNA, 15 bp, Homo sapiens
agcatattcctctta

SEQ ID NO: 1884286 - DNA, 15 bp, Homo sapiens
gcatattcctcttaa

SEQ ID NO: 1884287 - DNA, 15 bp, Homo sapiens
catattcctcttaaa

SEQ ID NO: 1884288 - DNA, 15 bp, Homo sapiens
atattcctcttaaag

SEQ ID NO: 1884289 - DNA, 15 bp, Homo sapiens
tattcctcttaaaga

SEQ ID NO: 1884290 - DNA, 15 bp, Homo sapiens
attcctcttaaagag

SEQ ID NO: 1884291 - DNA, 15 bp, Homo sapiens
ttcctcttaaagaga

SEQ ID NO: 1884292 - DNA, 15 bp, Homo sapiens
tcctcttaaagagag

SEQ ID NO: 1884293 - DNA, 15 bp, Homo sapiens
cctcttaaagagagg

SEQ ID NO: 1884294 - DNA, 15 bp, Homo sapiens
ctcttaaagagaggt

SEQ ID NO: 1884295 - DNA, 15 bp, Homo sapiens
tcttaaagagaggtt

SEQ ID NO: 1884296 - DNA, 15 bp, Homo sapiens
cttaaagagaggtta

SEQ ID NO: 1884297 - DNA, 15 bp, Homo sapiens
ttaaagagaggttaa

SEQ ID NO: 1884298 - DNA, 15 bp, Homo sapiens
taaagagaggttaag

SEQ ID NO: 1884299 - DNA, 15 bp, Homo sapiens
aaagagaggttaaga

SEQ ID NO: 1884300 - DNA, 15 bp, Homo sapiens
aagagaggttaagac

SEQ ID NO: 1884301 - DNA, 15 bp, Homo sapiens
agagaggttaagaca

SEQ ID NO: 1884302 - DNA, 15 bp, Homo sapiens
gagaggttaagacaa

SEQ ID NO: 1884303 - DNA, 15 bp, Homo sapiens
agaggttaagacaac

SEQ ID NO: 1884304 - DNA, 15 bp, Homo sapiens
gaggttaagacaaca

SEQ ID NO: 1884305 - DNA, 15 bp, Homo sapiens
aggttaagacaacac

SEQ ID NO: 1884306 - DNA, 15 bp, Homo sapiens
ggttaagacaacaca

SEQ ID NO: 1884307 - DNA, 15 bp, Homo sapiens
gttaagacaacacaa

SEQ ID NO: 1884308 - DNA, 15 bp, Homo sapiens
ttaagacaacacaaa

SEQ ID NO: 1884309 - DNA, 15 bp, Homo sapiens
taagacaacacaaag

SEQ ID NO: 1884310 - DNA, 15 bp, Homo sapiens
aagacaacacaaaga

SEQ ID NO: 1884311 - DNA, 15 bp, Homo sapiens
agacaacacaaagaa

SEQ ID NO: 1884312 - DNA, 15 bp, Homo sapiens
gacaacacaaagaac

SEQ ID NO: 1884313 - DNA, 15 bp, Homo sapiens
acaacacaaagaact

SEQ ID NO: 1884314 - DNA, 15 bp, Homo sapiens
caacacaaagaactg

SEQ ID NO: 1884315 - DNA, 15 bp, Homo sapiens
aacacaaagaactga

SEQ ID NO: 1884316 - DNA, 15 bp, Homo sapiens
acacaaagaactgaa

SEQ ID NO: 1884317 - DNA, 15 bp, Homo sapiens
cacaaagaactgaat

SEQ ID NO: 1884318 - DNA, 15 bp, Homo sapiens
acaaagaactgaata

SEQ ID NO: 1884319 - DNA, 15 bp, Homo sapiens
caaagaactgaatat

SEQ ID NO: 1884320 - DNA, 15 bp, Homo sapiens
aaagaactgaatata

SEQ ID NO: 1884321 - DNA, 15 bp, Homo sapiens
aagaactgaatatag

SEQ ID NO: 1884322 - DNA, 15 bp, Homo sapiens
agaactgaatataga

SEQ ID NO: 1884323 - DNA, 15 bp, Homo sapiens
gaactgaatatagaa

SEQ ID NO: 1884324 - DNA, 15 bp, Homo sapiens
aactgaatatagaaa

SEQ ID NO: 1884325 - DNA, 15 bp, Homo sapiens
actgaatatagaaac

SEQ ID NO: 1884326 - DNA, 15 bp, Homo sapiens
ctgaatatagaaact

SEQ ID NO: 1884327 - DNA, 15 bp, Homo sapiens
tgaatatagaaactt

SEQ ID NO: 1884328 - DNA, 15 bp, Homo sapiens
gaatatagaaactta

SEQ ID NO: 1884329 - DNA, 15 bp, Homo sapiens
aatatagaaacttaa

SEQ ID NO: 1884330 - DNA, 15 bp, Homo sapiens
atatagaaacttaat

SEQ ID NO: 1884331 - DNA, 15 bp, Homo sapiens
tatagaaacttaatg

SEQ ID NO: 1884332 - DNA, 15 bp, Homo sapiens
atagaaacttaatgg

SEQ ID NO: 1884333 - DNA, 15 bp, Homo sapiens
tagaaacttaatggt

SEQ ID NO: 1884334 - DNA, 15 bp, Homo sapiens
agaaacttaatggtg

SEQ ID NO: 1884335 - DNA, 15 bp, Homo sapiens
gaaacttaatggtga

SEQ ID NO: 1884336 - DNA, 15 bp, Homo sapiens
aaacttaatggtgat

SEQ ID NO: 1884337 - DNA, 15 bp, Homo sapiens
aacttaatggtgatt

SEQ ID NO: 1884338 - DNA, 15 bp, Homo sapiens
acttaatggtgattc

SEQ ID NO: 1884339 - DNA, 15 bp, Homo sapiens
cttaatggtgattcg

SEQ ID NO: 1884340 - DNA, 15 bp, Homo sapiens
ttaatggtgattcgg

SEQ ID NO: 1884341 - DNA, 15 bp, Homo sapiens
taatggtgattcggg

SEQ ID NO: 1884342 - DNA, 15 bp, Homo sapiens
aatggtgattcgggt

SEQ ID NO: 1884343 - DNA, 15 bp, Homo sapiens
atggtgattcgggtg

SEQ ID NO: 1884344 - DNA, 15 bp, Homo sapiens
tggtgattcgggtgt

SEQ ID NO: 1884345 - DNA, 15 bp, Homo sapiens
ggtgattcgggtgta

SEQ ID NO: 1884346 - DNA, 15 bp, Homo sapiens
gtgattcgggtgtaa

SEQ ID NO: 1884347 - DNA, 15 bp, Homo sapiens
tgattcgggtgtaaa

SEQ ID NO: 1884348 - DNA, 15 bp, Homo sapiens
gattcgggtgtaaaa

SEQ ID NO: 1884349 - DNA, 15 bp, Homo sapiens
attcgggtgtaaaaa

SEQ ID NO: 1884350 - DNA, 15 bp, Homo sapiens
ttcgggtgtaaaaaa

SEQ ID NO: 1884351 - DNA, 15 bp, Homo sapiens
tcgggtgtaaaaaac

SEQ ID NO: 1884352 - DNA, 15 bp, Homo sapiens
cgggtgtaaaaaaca

SEQ ID NO: 1884353 - DNA, 15 bp, Homo sapiens
gggtgtaaaaaacat

SEQ ID NO: 1884354 - DNA, 15 bp, Homo sapiens
ggtgtaaaaaacatc

SEQ ID NO: 1884355 - DNA, 15 bp, Homo sapiens
gtgtaaaaaacatcg

SEQ ID NO: 1884356 - DNA, 15 bp, Homo sapiens
tgtaaaaaacatcgg

SEQ ID NO: 1884357 - DNA, 15 bp, Homo sapiens
gtaaaaaacatcggg

SEQ ID NO: 1884358 - DNA, 15 bp, Homo sapiens
taaaaaacatcgggg

SEQ ID NO: 1884359 - DNA, 15 bp, Homo sapiens
aaaaaacatcggggc

SEQ ID NO: 1884360 - DNA, 15 bp, Homo sapiens
aaaaacatcggggca

SEQ ID NO: 1884361 - DNA, 15 bp, Homo sapiens
aaaacatcggggcag

SEQ ID NO: 1884362 - DNA, 15 bp, Homo sapiens
aaacatcggggcagg

SEQ ID NO: 1884363 - DNA, 15 bp, Homo sapiens
aacatcggggcaggt

SEQ ID NO: 1884364 - DNA, 15 bp, Homo sapiens
acatcggggcaggta

SEQ ID NO: 1884365 - DNA, 15 bp, Homo sapiens
catcggggcaggtat

SEQ ID NO: 1884366 - DNA, 15 bp, Homo sapiens
atcggggcaggtata

SEQ ID NO: 1884367 - DNA, 15 bp, Homo sapiens
tcggggcaggtatac

SEQ ID NO: 1884368 - DNA, 15 bp, Homo sapiens
cggggcaggtataca

SEQ ID NO: 1884369 - DNA, 15 bp, Homo sapiens
ggggcaggtatacag

SEQ ID NO: 1884370 - DNA, 15 bp, Homo sapiens
gggcaggtatacagt

SEQ ID NO: 1884371 - DNA, 15 bp, Homo sapiens
ggcaggtatacagtg

SEQ ID NO: 1884372 - DNA, 15 bp, Homo sapiens
gcaggtatacagtgc

SEQ ID NO: 1884373 - DNA, 15 bp, Homo sapiens
caggtatacagtgca

SEQ ID NO: 1884374 - DNA, 15 bp, Homo sapiens
aggtatacagtgcag

SEQ ID NO: 1884375 - DNA, 15 bp, Homo sapiens
ggtatacagtgcagt

SEQ ID NO: 1884376 - DNA, 15 bp, Homo sapiens
gtatacagtgcagtg

SEQ ID NO: 1884377 - DNA, 15 bp, Homo sapiens
tatacagtgcagtgg

SEQ ID NO: 1884378 - DNA, 15 bp, Homo sapiens
atacagtgcagtggc

SEQ ID NO: 1884379 - DNA, 15 bp, Homo sapiens
tacagtgcagtggca

SEQ ID NO: 1884380 - DNA, 15 bp, Homo sapiens
acagtgcagtggcaa

SEQ ID NO: 1884381 - DNA, 15 bp, Homo sapiens
cagtgcagtggcaaa

SEQ ID NO: 1884382 - DNA, 15 bp, Homo sapiens
agtgcagtggcaaag

SEQ ID NO: 1884383 - DNA, 15 bp, Homo sapiens
gtgcagtggcaaagg

SEQ ID NO: 1884384 - DNA, 15 bp, Homo sapiens
tgcagtggcaaaggg

SEQ ID NO: 1884385 - DNA, 15 bp, Homo sapiens
gcagtggcaaagggt

SEQ ID NO: 1884386 - DNA, 15 bp, Homo sapiens
cagtggcaaagggtt

SEQ ID NO: 1884387 - DNA, 15 bp, Homo sapiens
agtggcaaagggtta

SEQ ID NO: 1884388 - DNA, 15 bp, Homo sapiens
gtggcaaagggttag

SEQ ID NO: 1884389 - DNA, 15 bp, Homo sapiens
tggcaaagggttaga

SEQ ID NO: 1884390 - DNA, 15 bp, Homo sapiens
ggcaaagggttagat

SEQ ID NO: 1884391 - DNA, 15 bp, Homo sapiens
gcaaagggttagatc

SEQ ID NO: 1884392 - DNA, 15 bp, Homo sapiens
caaagggttagatct

SEQ ID NO: 1884393 - DNA, 15 bp, Homo sapiens
aaagggttagatctc

SEQ ID NO: 1884394 - DNA, 15 bp, Homo sapiens
aagggttagatctcc

SEQ ID NO: 1884395 - DNA, 15 bp, Homo sapiens
agggttagatctcct

SEQ ID NO: 1884396 - DNA, 15 bp, Homo sapiens
gggttagatctccta

SEQ ID NO: 1884397 - DNA, 15 bp, Homo sapiens
ggttagatctcctag

SEQ ID NO: 1884398 - DNA, 15 bp, Homo sapiens
gttagatctcctaga

SEQ ID NO: 1884399 - DNA, 15 bp, Homo sapiens
ttagatctcctagaa

SEQ ID NO: 1884400 - DNA, 15 bp, Homo sapiens
tagatctcctagaag

SEQ ID NO: 1884401 - DNA, 15 bp, Homo sapiens
agatctcctagaaga

SEQ ID NO: 1884402 - DNA, 15 bp, Homo sapiens
gatctcctagaagaa

SEQ ID NO: 1884403 - DNA, 15 bp, Homo sapiens
atctcctagaagaaa

SEQ ID NO: 1884404 - DNA, 15 bp, Homo sapiens
tctcctagaagaaag

SEQ ID NO: 1884405 - DNA, 15 bp, Homo sapiens
ctcctagaagaaaga

SEQ ID NO: 1884406 - DNA, 15 bp, Homo sapiens
tcctagaagaaagat

SEQ ID NO: 1884407 - DNA, 15 bp, Homo sapiens
cctagaagaaagata

SEQ ID NO: 1884408 - DNA, 15 bp, Homo sapiens
ctagaagaaagatat

SEQ ID NO: 1884409 - DNA, 15 bp, Homo sapiens
tagaagaaagatatt

SEQ ID NO: 1884410 - DNA, 15 bp, Homo sapiens
agaagaaagatattt

SEQ ID NO: 1884411 - DNA, 15 bp, Homo sapiens
gaagaaagatatttt

SEQ ID NO: 1884412 - DNA, 15 bp, Homo sapiens
aagaaagatattttg

SEQ ID NO: 1884413 - DNA, 15 bp, Homo sapiens
agaaagatattttga

SEQ ID NO: 1884414 - DNA, 15 bp, Homo sapiens
gaaagatattttgac

SEQ ID NO: 1884415 - DNA, 15 bp, Homo sapiens
aaagatattttgacg

SEQ ID NO: 1884416 - DNA, 15 bp, Homo sapiens
aagatattttgacgg

SEQ ID NO: 1884417 - DNA, 15 bp, Homo sapiens
agatattttgacgga

SEQ ID NO: 1884418 - DNA, 15 bp, Homo sapiens
gatattttgacggag

SEQ ID NO: 1884419 - DNA, 15 bp, Homo sapiens
atattttgacggagc

SEQ ID NO: 1884420 - DNA, 15 bp, Homo sapiens
tattttgacggagcc

SEQ ID NO: 1884421 - DNA, 15 bp, Homo sapiens
attttgacggagccc

SEQ ID NO: 1884422 - DNA, 15 bp, Homo sapiens
ttttgacggagccct

SEQ ID NO: 1884423 - DNA, 15 bp, Homo sapiens
tttgacggagcccta

SEQ ID NO: 1884424 - DNA, 15 bp, Homo sapiens
ttgacggagccctaa

SEQ ID NO: 1884425 - DNA, 15 bp, Homo sapiens
tgacggagccctaaa

SEQ ID NO: 1884426 - DNA, 15 bp, Homo sapiens
gacggagccctaaag

SEQ ID NO: 1884427 - DNA, 15 bp, Homo sapiens
acggagccctaaaga

SEQ ID NO: 1884428 - DNA, 15 bp, Homo sapiens
cggagccctaaagat

SEQ ID NO: 1884429 - DNA, 15 bp, Homo sapiens
ggagccctaaagatt

SEQ ID NO: 1884430 - DNA, 15 bp, Homo sapiens
gagccctaaagattc

SEQ ID NO: 1884431 - DNA, 15 bp, Homo sapiens
agccctaaagattct

SEQ ID NO: 1884432 - DNA, 15 bp, Homo sapiens
gccctaaagattctg

SEQ ID NO: 1884433 - DNA, 15 bp, Homo sapiens
ccctaaagattctga

SEQ ID NO: 1884434 - DNA, 15 bp, Homo sapiens
cctaaagattctgaa

SEQ ID NO: 1884435 - DNA, 15 bp, Homo sapiens
ctaaagattctgaaa

SEQ ID NO: 1884436 - DNA, 15 bp, Homo sapiens
taaagattctgaaac

SEQ ID NO: 1884437 - DNA, 15 bp, Homo sapiens
aaagattctgaaaca

SEQ ID NO: 1884438 - DNA, 15 bp, Homo sapiens
aagattctgaaacat

SEQ ID NO: 1884439 - DNA, 15 bp, Homo sapiens
agattctgaaacatg

SEQ ID NO: 1884440 - DNA, 15 bp, Homo sapiens
gattctgaaacatgt

SEQ ID NO: 1884441 - DNA, 15 bp, Homo sapiens
attctgaaacatgtg

SEQ ID NO: 1884442 - DNA, 15 bp, Homo sapiens
ttctgaaacatgtgg

SEQ ID NO: 1884443 - DNA, 15 bp, Homo sapiens
tctgaaacatgtgga

SEQ ID NO: 1884444 - DNA, 15 bp, Homo sapiens
ctgaaacatgtggaa

SEQ ID NO: 1884445 - DNA, 15 bp, Homo sapiens
tgaaacatgtggaaa

SEQ ID NO: 1884446 - DNA, 15 bp, Homo sapiens
gaaacatgtggaaag

SEQ ID NO: 1884447 - DNA, 15 bp, Homo sapiens
aaacatgtggaaagg

SEQ ID NO: 1884448 - DNA, 15 bp, Homo sapiens
aacatgtggaaaggc

SEQ ID NO: 1884449 - DNA, 15 bp, Homo sapiens
acatgtggaaaggct

SEQ ID NO: 1884450 - DNA, 15 bp, Homo sapiens
catgtggaaaggcta

SEQ ID NO: 1884451 - DNA, 15 bp, Homo sapiens
atgtggaaaggctaa

SEQ ID NO: 1884452 - DNA, 15 bp, Homo sapiens
tgtggaaaggctaag

SEQ ID NO: 1884453 - DNA, 15 bp, Homo sapiens
gtggaaaggctaagt

SEQ ID NO: 1884454 - DNA, 15 bp, Homo sapiens
tggaaaggctaagtt

SEQ ID NO: 1884455 - DNA, 15 bp, Homo sapiens
ggaaaggctaagttg

SEQ ID NO: 1884456 - DNA, 15 bp, Homo sapiens
gaaaggctaagttga

SEQ ID NO: 1884457 - DNA, 15 bp, Homo sapiens
aaaggctaagttgat

SEQ ID NO: 1884458 - DNA, 15 bp, Homo sapiens
aaggctaagttgata

SEQ ID NO: 1884459 - DNA, 15 bp, Homo sapiens
aggctaagttgataa

SEQ ID NO: 1884460 - DNA, 15 bp, Homo sapiens
ggctaagttgataat

SEQ ID NO: 1884461 - DNA, 15 bp, Homo sapiens
gctaagttgataata

SEQ ID NO: 1884462 - DNA, 15 bp, Homo sapiens
ctaagttgataataa

SEQ ID NO: 1884463 - DNA, 15 bp, Homo sapiens
taagttgataataaa

SEQ ID NO: 1884464 - DNA, 15 bp, Homo sapiens
aagttgataataaat

SEQ ID NO: 1884465 - DNA, 15 bp, Homo sapiens
agttgataataaatt

SEQ ID NO: 1884466 - DNA, 15 bp, Homo sapiens
gttgataataaatta

SEQ ID NO: 1884467 - DNA, 15 bp, Homo sapiens
ttgataataaattaa

SEQ ID NO: 1884468 - DNA, 15 bp, Homo sapiens
tgataataaattaag

SEQ ID NO: 1884469 - DNA, 15 bp, Homo sapiens
gataataaattaaga

SEQ ID NO: 1884470 - DNA, 15 bp, Homo sapiens
ataataaattaagaa

SEQ ID NO: 1884471 - DNA, 15 bp, Homo sapiens
taataaattaagaaa

SEQ ID NO: 1884472 - DNA, 15 bp, Homo sapiens
aataaattaagaaat

SEQ ID NO: 1884473 - DNA, 15 bp, Homo sapiens
aaattaagaaatcaa

SEQ ID NO: 1884474 - DNA, 15 bp, Homo sapiens
aattaagaaatcaaa

SEQ ID NO: 1884475 - DNA, 15 bp, Homo sapiens
attaagaaatcaaaa

SEQ ID NO: 1884476 - DNA, 15 bp, Homo sapiens
ttaagaaatcaaaag

SEQ ID NO: 1884477 - DNA, 15 bp, Homo sapiens
taagaaatcaaaaga

SEQ ID NO: 1884478 - DNA, 15 bp, Homo sapiens
aagaaatcaaaagac

SEQ ID NO: 1884479 - DNA, 15 bp, Homo sapiens
agaaatcaaaagaca

SEQ ID NO: 1884480 - DNA, 15 bp, Homo sapiens
gaaatcaaaagacag

SEQ ID NO: 1884481 - DNA, 15 bp, Homo sapiens
aaatcaaaagacagg

SEQ ID NO: 1884482 - DNA, 15 bp, Homo sapiens
aatcaaaagacaggc

SEQ ID NO: 1884483 - DNA, 15 bp, Homo sapiens
atcaaaagacaggca

SEQ ID NO: 1884484 - DNA, 15 bp, Homo sapiens
tcaaaagacaggcag

SEQ ID NO: 1884485 - DNA, 15 bp, Homo sapiens
caaaagacaggcagg

SEQ ID NO: 1884486 - DNA, 15 bp, Homo sapiens
aaaagacaggcagga

SEQ ID NO: 1884487 - DNA, 15 bp, Homo sapiens
aaagacaggcaggat

SEQ ID NO: 1884488 - DNA, 15 bp, Homo sapiens
aagacaggcaggatt

SEQ ID NO: 1884489 - DNA, 15 bp, Homo sapiens
agacaggcaggattg

SEQ ID NO: 1884490 - DNA, 15 bp, Homo sapiens
gacaggcaggattgt

SEQ ID NO: 1884491 - DNA, 15 bp, Homo sapiens
acaggcaggattgtg

SEQ ID NO: 1884492 - DNA, 15 bp, Homo sapiens
caggcaggattgtgg

SEQ ID NO: 1884493 - DNA, 15 bp, Homo sapiens
aggcaggattgtgga

SEQ ID NO: 1884494 - DNA, 15 bp, Homo sapiens
ggcaggattgtggat

SEQ ID NO: 1884495 - DNA, 15 bp, Homo sapiens
gcaggattgtggatg

SEQ ID NO: 1884496 - DNA, 15 bp, Homo sapiens
caggattgtggatgg

SEQ ID NO: 1884497 - DNA, 15 bp, Homo sapiens
aggattgtggatgga

SEQ ID NO: 1884498 - DNA, 15 bp, Homo sapiens
ggattgtggatggag

SEQ ID NO: 1884499 - DNA, 15 bp, Homo sapiens
gattgtggatggagt

SEQ ID NO: 1884500 - DNA, 15 bp, Homo sapiens
attgtggatggagta

SEQ ID NO: 1884501 - DNA, 15 bp, Homo sapiens
ttgtggatggagtat

SEQ ID NO: 1884502 - DNA, 15 bp, Homo sapiens
tgtggatggagtatg

SEQ ID NO: 1884503 - DNA, 15 bp, Homo sapiens
gtggatggagtatgt

SEQ ID NO: 1884504 - DNA, 15 bp, Homo sapiens
tggatggagtatgtc

SEQ ID NO: 1884505 - DNA, 15 bp, Homo sapiens
ggatggagtatgtca

SEQ ID NO: 1884506 - DNA, 15 bp, Homo sapiens
gatggagtatgtcag

SEQ ID NO: 1884507 - DNA, 15 bp, Homo sapiens
atggagtatgtcagt

SEQ ID NO: 1884508 - DNA, 15 bp, Homo sapiens
tggagtatgtcagtg

SEQ ID NO: 1884509 - DNA, 15 bp, Homo sapiens
ggagtatgtcagtgg

SEQ ID NO: 1884510 - DNA, 15 bp, Homo sapiens
gagtatgtcagtggt

SEQ ID NO: 1884511 - DNA, 15 bp, Homo sapiens
agtatgtcagtggtc

SEQ ID NO: 1884512 - DNA, 15 bp, Homo sapiens
gtatgtcagtggtca

SEQ ID NO: 1884513 - DNA, 15 bp, Homo sapiens
tatgtcagtggtcat

SEQ ID NO: 1884514 - DNA, 15 bp, Homo sapiens
atgtcagtggtcatt

SEQ ID NO: 1884515 - DNA, 15 bp, Homo sapiens
tgtcagtggtcattt

SEQ ID NO: 1884516 - DNA, 15 bp, Homo sapiens
gtcagtggtcattta

SEQ ID NO: 1884517 - DNA, 15 bp, Homo sapiens
tcagtggtcatttaa

SEQ ID NO: 1884518 - DNA, 15 bp, Homo sapiens
cagtggtcatttaaa

SEQ ID NO: 1884519 - DNA, 15 bp, Homo sapiens
agtggtcatttaaaa

SEQ ID NO: 1884520 - DNA, 15 bp, Homo sapiens
gtggtcatttaaaat

SEQ ID NO: 1884521 - DNA, 15 bp, Homo sapiens
tggtcatttaaaatc

SEQ ID NO: 1884522 - DNA, 15 bp, Homo sapiens
ggtcatttaaaatcc

SEQ ID NO: 1884523 - DNA, 15 bp, Homo sapiens
gtcatttaaaatcca

SEQ ID NO: 1884524 - DNA, 15 bp, Homo sapiens
tcatttaaaatccat

SEQ ID NO: 1884525 - DNA, 15 bp, Homo sapiens
catttaaaatccatg

SEQ ID NO: 1884526 - DNA, 15 bp, Homo sapiens
atttaaaatccatgt

SEQ ID NO: 1884527 - DNA, 15 bp, Homo sapiens
tttaaaatccatgtt

SEQ ID NO: 1884528 - DNA, 15 bp, Homo sapiens
ttaaaatccatgttt

SEQ ID NO: 1884529 - DNA, 15 bp, Homo sapiens
taaaatccatgtttt

SEQ ID NO: 1884530 - DNA, 15 bp, Homo sapiens
aaaatccatgttttt

SEQ ID NO: 1884531 - DNA, 15 bp, Homo sapiens
aaatccatgtttttg

SEQ ID NO: 1884532 - DNA, 15 bp, Homo sapiens
aatccatgtttttgt

SEQ ID NO: 1884533 - DNA, 15 bp, Homo sapiens
atccatgtttttgtt

SEQ ID NO: 1884534 - DNA, 15 bp, Homo sapiens
tccatgtttttgttt

SEQ ID NO: 1884535 - DNA, 15 bp, Homo sapiens
ccatgtttttgtttt

SEQ ID NO: 1884536 - DNA, 15 bp, Homo sapiens
catgtttttgttttt

SEQ ID NO: 1884537 - DNA, 15 bp, Homo sapiens
atgtttttgttttta

SEQ ID NO: 1884538 - DNA, 15 bp, Homo sapiens
gtttttgtttttaaa

SEQ ID NO: 1884539 - DNA, 15 bp, Homo sapiens
tttttgtttttaaaa

SEQ ID NO: 1884540 - DNA, 15 bp, Homo sapiens
ttttgtttttaaaat

SEQ ID NO: 1884541 - DNA, 15 bp, Homo sapiens
tttgtttttaaaatg

SEQ ID NO: 1884542 - DNA, 15 bp, Homo sapiens
ttgtttttaaaatgc

SEQ ID NO: 1884543 - DNA, 15 bp, Homo sapiens
tgtttttaaaatgcc

SEQ ID NO: 1884544 - DNA, 15 bp, Homo sapiens
gtttttaaaatgcct

SEQ ID NO: 1884545 - DNA, 15 bp, Homo sapiens
tttttaaaatgcctg

SEQ ID NO: 1884546 - DNA, 15 bp, Homo sapiens
ttttaaaatgcctgc

SEQ ID NO: 1884547 - DNA, 15 bp, Homo sapiens
tttaaaatgcctgca

SEQ ID NO: 1884548 - DNA, 15 bp, Homo sapiens
ttaaaatgcctgcaa

SEQ ID NO: 1884549 - DNA, 15 bp, Homo sapiens
taaaatgcctgcaaa

SEQ ID NO: 1884550 - DNA, 15 bp, Homo sapiens
aaaatgcctgcaaac

SEQ ID NO: 1884551 - DNA, 15 bp, Homo sapiens
aaatgcctgcaaacc

SEQ ID NO: 1884552 - DNA, 15 bp, Homo sapiens
aatgcctgcaaacct

SEQ ID NO: 1884553 - DNA, 15 bp, Homo sapiens
atgcctgcaaacctc

SEQ ID NO: 1884554 - DNA, 15 bp, Homo sapiens
tgcctgcaaacctct

SEQ ID NO: 1884555 - DNA, 15 bp, Homo sapiens
gcctgcaaacctctt

SEQ ID NO: 1884556 - DNA, 15 bp, Homo sapiens
cctgcaaacctcttc

SEQ ID NO: 1884557 - DNA, 15 bp, Homo sapiens
ctgcaaacctcttca

SEQ ID NO: 1884558 - DNA, 15 bp, Homo sapiens
tgcaaacctcttcaa

SEQ ID NO: 1884559 - DNA, 15 bp, Homo sapiens
gcaaacctcttcaaa

SEQ ID NO: 1884560 - DNA, 15 bp, Homo sapiens
caaacctcttcaaac

SEQ ID NO: 1884561 - DNA, 15 bp, Homo sapiens
aaacctcttcaaacc

SEQ ID NO: 1884562 - DNA, 15 bp, Homo sapiens
aacctcttcaaacct

SEQ ID NO: 1884563 - DNA, 15 bp, Homo sapiens
acctcttcaaacctc

SEQ ID NO: 1884564 - DNA, 15 bp, Homo sapiens
cctcttcaaacctct

SEQ ID NO: 1884565 - DNA, 15 bp, Homo sapiens
ctcttcaaacctctg

SEQ ID NO: 1884566 - DNA, 15 bp, Homo sapiens
tcttcaaacctctga

SEQ ID NO: 1884567 - DNA, 15 bp, Homo sapiens
cttcaaacctctgat

SEQ ID NO: 1884568 - DNA, 15 bp, Homo sapiens
ttcaaacctctgatt

SEQ ID NO: 1884569 - DNA, 15 bp, Homo sapiens
tcaaacctctgatta

SEQ ID NO: 1884570 - DNA, 15 bp, Homo sapiens
caaacctctgattac

SEQ ID NO: 1884571 - DNA, 15 bp, Homo sapiens
aaacctctgattaca

SEQ ID NO: 1884572 - DNA, 15 bp, Homo sapiens
aacctctgattacaa

SEQ ID NO: 1884573 - DNA, 15 bp, Homo sapiens
acctctgattacaac

SEQ ID NO: 1884574 - DNA, 15 bp, Homo sapiens
cctctgattacaaca

SEQ ID NO: 1884575 - DNA, 15 bp, Homo sapiens
ctctgattacaacaa

SEQ ID NO: 1884576 - DNA, 15 bp, Homo sapiens
tctgattacaacaac

SEQ ID NO: 1884577 - DNA, 15 bp, Homo sapiens
ctgattacaacaacc

SEQ ID NO: 1884578 - DNA, 15 bp, Homo sapiens
tgattacaacaacct

SEQ ID NO: 1884579 - DNA, 15 bp, Homo sapiens
gattacaacaacctg

SEQ ID NO: 1884580 - DNA, 15 bp, Homo sapiens
attacaacaacctgt

SEQ ID NO: 1884581 - DNA, 15 bp, Homo sapiens
ttacaacaacctgtt

SEQ ID NO: 1884582 - DNA, 15 bp, Homo sapiens
tacaacaacctgtta

SEQ ID NO: 1884583 - DNA, 15 bp, Homo sapiens
acaacaacctgttaa

SEQ ID NO: 1884584 - DNA, 15 bp, Homo sapiens
caacaacctgttaac

SEQ ID NO: 1884585 - DNA, 15 bp, Homo sapiens
aacaacctgttaact

SEQ ID NO: 1884586 - DNA, 15 bp, Homo sapiens
acaacctgttaactt

SEQ ID NO: 1884587 - DNA, 15 bp, Homo sapiens
caacctgttaacttc

SEQ ID NO: 1884588 - DNA, 15 bp, Homo sapiens
aacctgttaacttct

SEQ ID NO: 1884589 - DNA, 15 bp, Homo sapiens
acctgttaacttctt

SEQ ID NO: 1884590 - DNA, 15 bp, Homo sapiens
cctgttaacttcttg

SEQ ID NO: 1884591 - DNA, 15 bp, Homo sapiens
ctgttaacttcttgt

SEQ ID NO: 1884592 - DNA, 15 bp, Homo sapiens
tgttaacttcttgtt

SEQ ID NO: 1884593 - DNA, 15 bp, Homo sapiens
gttaacttcttgttc

SEQ ID NO: 1884594 - DNA, 15 bp, Homo sapiens
ttaacttcttgttct

SEQ ID NO: 1884595 - DNA, 15 bp, Homo sapiens
taacttcttgttcta

SEQ ID NO: 1884596 - DNA, 15 bp, Homo sapiens
aacttcttgttctag

SEQ ID NO: 1884597 - DNA, 15 bp, Homo sapiens
acttcttgttctaga

SEQ ID NO: 1884598 - DNA, 15 bp, Homo sapiens
cttcttgttctagac

SEQ ID NO: 1884599 - DNA, 15 bp, Homo sapiens
ttcttgttctagact

SEQ ID NO: 1884600 - DNA, 15 bp, Homo sapiens
tcttgttctagactg

SEQ ID NO: 1884601 - DNA, 15 bp, Homo sapiens
cttgttctagactgc

SEQ ID NO: 1884602 - DNA, 15 bp, Homo sapiens
ttgttctagactgcc

SEQ ID NO: 1884603 - DNA, 15 bp, Homo sapiens
tgttctagactgccc

SEQ ID NO: 1884604 - DNA, 15 bp, Homo sapiens
gttctagactgccca

SEQ ID NO: 1884605 - DNA, 15 bp, Homo sapiens
ttctagactgcccag

SEQ ID NO: 1884606 - DNA, 15 bp, Homo sapiens
tctagactgcccaga

SEQ ID NO: 1884607 - DNA, 15 bp, Homo sapiens
ctagactgcccagat

SEQ ID NO: 1884608 - DNA, 15 bp, Homo sapiens
tagactgcccagatt

SEQ ID NO: 1884609 - DNA, 15 bp, Homo sapiens
agactgcccagattt

SEQ ID NO: 1884610 - DNA, 15 bp, Homo sapiens
gactgcccagatttc

SEQ ID NO: 1884611 - DNA, 15 bp, Homo sapiens
actgcccagatttca

SEQ ID NO: 1884612 - DNA, 15 bp, Homo sapiens
ctgcccagatttcag

SEQ ID NO: 1884613 - DNA, 15 bp, Homo sapiens
tgcccagatttcagg

SEQ ID NO: 1884614 - DNA, 15 bp, Homo sapiens
gcccagatttcagga

SEQ ID NO: 1884615 - DNA, 15 bp, Homo sapiens
cccagatttcaggac

SEQ ID NO: 1884616 - DNA, 15 bp, Homo sapiens
ccagatttcaggact

SEQ ID NO: 1884617 - DNA, 15 bp, Homo sapiens
cagatttcaggacta

SEQ ID NO: 1884618 - DNA, 15 bp, Homo sapiens
agatttcaggactac

SEQ ID NO: 1884619 - DNA, 15 bp, Homo sapiens
gatttcaggactaca

SEQ ID NO: 1884620 - DNA, 15 bp, Homo sapiens
atttcaggactacag

SEQ ID NO: 1884621 - DNA, 15 bp, Homo sapiens
tttcaggactacaga

SEQ ID NO: 1884622 - DNA, 15 bp, Homo sapiens
ttcaggactacagag

SEQ ID NO: 1884623 - DNA, 15 bp, Homo sapiens
tcaggactacagagt

SEQ ID NO: 1884624 - DNA, 15 bp, Homo sapiens
caggactacagagtt

SEQ ID NO: 1884625 - DNA, 15 bp, Homo sapiens
aggactacagagttg

SEQ ID NO: 1884626 - DNA, 15 bp, Homo sapiens
ggactacagagttgt

SEQ ID NO: 1884627 - DNA, 15 bp, Homo sapiens
gactacagagttgtg

SEQ ID NO: 1884628 - DNA, 15 bp, Homo sapiens
actacagagttgtgt

SEQ ID NO: 1884629 - DNA, 15 bp, Homo sapiens
ctacagagttgtgtt

SEQ ID NO: 1884630 - DNA, 15 bp, Homo sapiens
tacagagttgtgttt

SEQ ID NO: 1884631 - DNA, 15 bp, Homo sapiens
acagagttgtgtttc

SEQ ID NO: 1884632 - DNA, 15 bp, Homo sapiens
cagagttgtgtttct

SEQ ID NO: 1884633 - DNA, 15 bp, Homo sapiens
gagttgtgtttctca

SEQ ID NO: 1884634 - DNA, 15 bp, Homo sapiens
agttgtgtttctcag

SEQ ID NO: 1884635 - DNA, 15 bp, Homo sapiens
gttgtgtttctcagt

SEQ ID NO: 1884636 - DNA, 15 bp, Homo sapiens
ttgtgtttctcagtc

SEQ ID NO: 1884637 - DNA, 15 bp, Homo sapiens
tgtgtttctcagtct

SEQ ID NO: 1884638 - DNA, 15 bp, Homo sapiens
gtgtttctcagtctc

SEQ ID NO: 1884639 - DNA, 15 bp, Homo sapiens
tgtttctcagtctct

SEQ ID NO: 1884640 - DNA, 15 bp, Homo sapiens
gtttctcagtctctg

SEQ ID NO: 1884641 - DNA, 15 bp, Homo sapiens
tttctcagtctctgt

SEQ ID NO: 1884642 - DNA, 15 bp, Homo sapiens
ttctcagtctctgta

SEQ ID NO: 1884643 - DNA, 15 bp, Homo sapiens
tctcagtctctgtaa

SEQ ID NO: 1884644 - DNA, 15 bp, Homo sapiens
ctcagtctctgtaat

SEQ ID NO: 1884645 - DNA, 15 bp, Homo sapiens
tcagtctctgtaatg

SEQ ID NO: 1884646 - DNA, 15 bp, Homo sapiens
cagtctctgtaatgt

SEQ ID NO: 1884647 - DNA, 15 bp, Homo sapiens
agtctctgtaatgta

SEQ ID NO: 1884648 - DNA, 15 bp, Homo sapiens
gtctctgtaatgtag

SEQ ID NO: 1884649 - DNA, 15 bp, Homo sapiens
tctctgtaatgtagg

SEQ ID NO: 1884650 - DNA, 15 bp, Homo sapiens
ctctgtaatgtaggc

SEQ ID NO: 1884651 - DNA, 15 bp, Homo sapiens
tctgtaatgtaggca

SEQ ID NO: 1884652 - DNA, 15 bp, Homo sapiens
ctgtaatgtaggcat

SEQ ID NO: 1884653 - DNA, 15 bp, Homo sapiens
tgtaatgtaggcatt

SEQ ID NO: 1884654 - DNA, 15 bp, Homo sapiens
gtaatgtaggcattg

SEQ ID NO: 1884655 - DNA, 15 bp, Homo sapiens
taatgtaggcattgt

SEQ ID NO: 1884656 - DNA, 15 bp, Homo sapiens
aatgtaggcattgta

SEQ ID NO: 1884657 - DNA, 15 bp, Homo sapiens
atgtaggcattgtat

SEQ ID NO: 1884658 - DNA, 15 bp, Homo sapiens
tgtaggcattgtatc

SEQ ID NO: 1884659 - DNA, 15 bp, Homo sapiens
gtaggcattgtatct

SEQ ID NO: 1884660 - DNA, 15 bp, Homo sapiens
taggcattgtatctt

SEQ ID NO: 1884661 - DNA, 15 bp, Homo sapiens
aggcattgtatctta

SEQ ID NO: 1884662 - DNA, 15 bp, Homo sapiens
ggcattgtatcttat

SEQ ID NO: 1884663 - DNA, 15 bp, Homo sapiens
gcattgtatcttatc

SEQ ID NO: 1884664 - DNA, 15 bp, Homo sapiens
cattgtatcttatct

SEQ ID NO: 1884665 - DNA, 15 bp, Homo sapiens
attgtatcttatctg

SEQ ID NO: 1884666 - DNA, 15 bp, Homo sapiens
ttgtatcttatctga

SEQ ID NO: 1884667 - DNA, 15 bp, Homo sapiens
tgtatcttatctgag

SEQ ID NO: 1884668 - DNA, 15 bp, Homo sapiens
gtatcttatctgaga

SEQ ID NO: 1884669 - DNA, 15 bp, Homo sapiens
tatcttatctgagag

SEQ ID NO: 1884670 - DNA, 15 bp, Homo sapiens
atcttatctgagagt

SEQ ID NO: 1884671 - DNA, 15 bp, Homo sapiens
tcttatctgagagtt

SEQ ID NO: 1884672 - DNA, 15 bp, Homo sapiens
cttatctgagagttt

SEQ ID NO: 1884673 - DNA, 15 bp, Homo sapiens
ttatctgagagttta

SEQ ID NO: 1884674 - DNA, 15 bp, Homo sapiens
tatctgagagtttat

SEQ ID NO: 1884675 - DNA, 15 bp, Homo sapiens
atctgagagtttata

SEQ ID NO: 1884676 - DNA, 15 bp, Homo sapiens
tctgagagtttatat

SEQ ID NO: 1884677 - DNA, 15 bp, Homo sapiens
ctgagagtttatata

SEQ ID NO: 1884678 - DNA, 15 bp, Homo sapiens
tgagagtttatatac

SEQ ID NO: 1884679 - DNA, 15 bp, Homo sapiens
gagagtttatataca

SEQ ID NO: 1884680 - DNA, 15 bp, Homo sapiens
agagtttatatacag

SEQ ID NO: 1884681 - DNA, 15 bp, Homo sapiens
gagtttatatacagg

SEQ ID NO: 1884682 - DNA, 15 bp, Homo sapiens
agtttatatacagga

SEQ ID NO: 1884683 - DNA, 15 bp, Homo sapiens
gtttatatacaggat

SEQ ID NO: 1884684 - DNA, 15 bp, Homo sapiens
tttatatacaggatt

SEQ ID NO: 1884685 - DNA, 15 bp, Homo sapiens
ttatatacaggattg

SEQ ID NO: 1884686 - DNA, 15 bp, Homo sapiens
tatatacaggattgc

SEQ ID NO: 1884687 - DNA, 15 bp, Homo sapiens
atatacaggattgcc

SEQ ID NO: 1884688 - DNA, 15 bp, Homo sapiens
tatacaggattgcca

SEQ ID NO: 1884689 - DNA, 15 bp, Homo sapiens
atacaggattgccaa

SEQ ID NO: 1884690 - DNA, 15 bp, Homo sapiens
tacaggattgccaag

SEQ ID NO: 1884691 - DNA, 15 bp, Homo sapiens
acaggattgccaagg

SEQ ID NO: 1884692 - DNA, 15 bp, Homo sapiens
caggattgccaaggt

SEQ ID NO: 1884693 - DNA, 15 bp, Homo sapiens
aggattgccaaggta

SEQ ID NO: 1884694 - DNA, 15 bp, Homo sapiens
ggattgccaaggtag

SEQ ID NO: 1884695 - DNA, 15 bp, Homo sapiens
gattgccaaggtagt

SEQ ID NO: 1884696 - DNA, 15 bp, Homo sapiens
attgccaaggtagtg

SEQ ID NO: 1884697 - DNA, 15 bp, Homo sapiens
ttgccaaggtagtga

SEQ ID NO: 1884698 - DNA, 15 bp, Homo sapiens
tgccaaggtagtgat

SEQ ID NO: 1884699 - DNA, 15 bp, Homo sapiens
gccaaggtagtgatc

SEQ ID NO: 1884700 - DNA, 15 bp, Homo sapiens
ccaaggtagtgatca

SEQ ID NO: 1884701 - DNA, 15 bp, Homo sapiens
caaggtagtgatcaa

SEQ ID NO: 1884702 - DNA, 15 bp, Homo sapiens
aaggtagtgatcaaa

SEQ ID NO: 1884703 - DNA, 15 bp, Homo sapiens
aggtagtgatcaaag

SEQ ID NO: 1884704 - DNA, 15 bp, Homo sapiens
ggtagtgatcaaagt

SEQ ID NO: 1884705 - DNA, 15 bp, Homo sapiens
gtagtgatcaaagta

SEQ ID NO: 1884706 - DNA, 15 bp, Homo sapiens
tagtgatcaaagtaa

SEQ ID NO: 1884707 - DNA, 15 bp, Homo sapiens
agtgatcaaagtaaa

SEQ ID NO: 1884708 - DNA, 15 bp, Homo sapiens
gtgatcaaagtaaat

SEQ ID NO: 1884709 - DNA, 15 bp, Homo sapiens
tgatcaaagtaaatg

SEQ ID NO: 1884710 - DNA, 15 bp, Homo sapiens
gatcaaagtaaatgc

SEQ ID NO: 1884711 - DNA, 15 bp, Homo sapiens
atcaaagtaaatgca

SEQ ID NO: 1884712 - DNA, 15 bp, Homo sapiens
tcaaagtaaatgcaa

SEQ ID NO: 1884713 - DNA, 15 bp, Homo sapiens
caaagtaaatgcaat

SEQ ID NO: 1884714 - DNA, 15 bp, Homo sapiens
aaagtaaatgcaatt

SEQ ID NO: 1884715 - DNA, 15 bp, Homo sapiens
aagtaaatgcaattg

SEQ ID NO: 1884716 - DNA, 15 bp, Homo sapiens
agtaaatgcaattgt

SEQ ID NO: 1884717 - DNA, 15 bp, Homo sapiens
gtaaatgcaattgtc

SEQ ID NO: 1884718 - DNA, 15 bp, Homo sapiens
taaatgcaattgtca

SEQ ID NO: 1884719 - DNA, 15 bp, Homo sapiens
aaatgcaattgtcaa

SEQ ID NO: 1884720 - DNA, 15 bp, Homo sapiens
aatgcaattgtcaat

SEQ ID NO: 1884721 - DNA, 15 bp, Homo sapiens
atgcaattgtcaatt

SEQ ID NO: 1884722 - DNA, 15 bp, Homo sapiens
tgcaattgtcaattt

SEQ ID NO: 1884723 - DNA, 15 bp, Homo sapiens
gcaattgtcaattta

SEQ ID NO: 1884724 - DNA, 15 bp, Homo sapiens
caattgtcaatttaa

SEQ ID NO: 1884725 - DNA, 15 bp, Homo sapiens
aattgtcaatttaat

SEQ ID NO: 1884726 - DNA, 15 bp, Homo sapiens
attgtcaatttaatt

SEQ ID NO: 1884727 - DNA, 15 bp, Homo sapiens
ttgtcaatttaatta

SEQ ID NO: 1884728 - DNA, 15 bp, Homo sapiens
tgtcaatttaattag

SEQ ID NO: 1884729 - DNA, 15 bp, Homo sapiens
gtcaatttaattagc

SEQ ID NO: 1884730 - DNA, 15 bp, Homo sapiens
tcaatttaattagca

SEQ ID NO: 1884731 - DNA, 15 bp, Homo sapiens
caatttaattagcat

SEQ ID NO: 1884732 - DNA, 15 bp, Homo sapiens
aatttaattagcatt

SEQ ID NO: 1884733 - DNA, 15 bp, Homo sapiens
atttaattagcatta

SEQ ID NO: 1884734 - DNA, 15 bp, Homo sapiens
tttaattagcattag

SEQ ID NO: 1884735 - DNA, 15 bp, Homo sapiens
ttaattagcattagt

SEQ ID NO: 1884736 - DNA, 15 bp, Homo sapiens
taattagcattagtc

SEQ ID NO: 1884737 - DNA, 15 bp, Homo sapiens
aattagcattagtcc

SEQ ID NO: 1884738 - DNA, 15 bp, Homo sapiens
attagcattagtccc

SEQ ID NO: 1884739 - DNA, 15 bp, Homo sapiens
ttagcattagtccct

SEQ ID NO: 1884740 - DNA, 15 bp, Homo sapiens
tagcattagtccctc

SEQ ID NO: 1884741 - DNA, 15 bp, Homo sapiens
agcattagtccctcc

SEQ ID NO: 1884742 - DNA, 15 bp, Homo sapiens
gcattagtccctcca

SEQ ID NO: 1884743 - DNA, 15 bp, Homo sapiens
cattagtccctccaa

SEQ ID NO: 1884744 - DNA, 15 bp, Homo sapiens
attagtccctccaaa

SEQ ID NO: 1884745 - DNA, 15 bp, Homo sapiens
ttagtccctccaaat

SEQ ID NO: 1884746 - DNA, 15 bp, Homo sapiens
tagtccctccaaatt

SEQ ID NO: 1884747 - DNA, 15 bp, Homo sapiens
agtccctccaaattc

SEQ ID NO: 1884748 - DNA, 15 bp, Homo sapiens
ccctccaaattcatt

SEQ ID NO: 1884749 - DNA, 15 bp, Homo sapiens
cctccaaattcattg

SEQ ID NO: 1884750 - DNA, 15 bp, Homo sapiens
ctccaaattcattgt

SEQ ID NO: 1884751 - DNA, 15 bp, Homo sapiens
tccaaattcattgtg

SEQ ID NO: 1884752 - DNA, 15 bp, Homo sapiens
ccaaattcattgtgc

SEQ ID NO: 1884753 - DNA, 15 bp, Homo sapiens
caaattcattgtgca

SEQ ID NO: 1884754 - DNA, 15 bp, Homo sapiens
aaattcattgtgcat

SEQ ID NO: 1884755 - DNA, 15 bp, Homo sapiens
aattcattgtgcatg

SEQ ID NO: 1884756 - DNA, 15 bp, Homo sapiens
attcattgtgcatgc

SEQ ID NO: 1884757 - DNA, 15 bp, Homo sapiens
ttcattgtgcatgcg

SEQ ID NO: 1884758 - DNA, 15 bp, Homo sapiens
tcattgtgcatgcgt

SEQ ID NO: 1884759 - DNA, 15 bp, Homo sapiens
cattgtgcatgcgtg

SEQ ID NO: 1884760 - DNA, 15 bp, Homo sapiens
attgtgcatgcgtgt

SEQ ID NO: 1884761 - DNA, 15 bp, Homo sapiens
ttgtgcatgcgtgtg

SEQ ID NO: 1884762 - DNA, 15 bp, Homo sapiens
gcgtgtgtgtgtgtg

SEQ ID NO: 1884763 - DNA, 15 bp, Homo sapiens
gtgtgtgtgtgtatg

SEQ ID NO: 1884764 - DNA, 15 bp, Homo sapiens
tgtgtatgtgtgcat

SEQ ID NO: 1884765 - DNA, 15 bp, Homo sapiens
gtgtatgtgtgcata

SEQ ID NO: 1884766 - DNA, 15 bp, Homo sapiens
tgtatgtgtgcataa

SEQ ID NO: 1884767 - DNA, 15 bp, Homo sapiens
gtatgtgtgcataaa

SEQ ID NO: 1884768 - DNA, 15 bp, Homo sapiens
tatgtgtgcataaac

SEQ ID NO: 1884769 - DNA, 15 bp, Homo sapiens
atgtgtgcataaaca

SEQ ID NO: 1884770 - DNA, 15 bp, Homo sapiens
tgtgtgcataaacac

SEQ ID NO: 1884771 - DNA, 15 bp, Homo sapiens
gtgtgcataaacaca

SEQ ID NO: 1884772 - DNA, 15 bp, Homo sapiens
tgtgcataaacacat

SEQ ID NO: 1884773 - DNA, 15 bp, Homo sapiens
gtgcataaacacata

SEQ ID NO: 1884774 - DNA, 15 bp, Homo sapiens
tgcataaacacatac

SEQ ID NO: 1884775 - DNA, 15 bp, Homo sapiens
gcataaacacataca

SEQ ID NO: 1884776 - DNA, 15 bp, Homo sapiens
cataaacacatacaa

SEQ ID NO: 1884777 - DNA, 15 bp, Homo sapiens
ataaacacatacaag

SEQ ID NO: 1884778 - DNA, 15 bp, Homo sapiens
taaacacatacaagt

SEQ ID NO: 1884779 - DNA, 15 bp, Homo sapiens
aaacacatacaagtt

SEQ ID NO: 1884780 - DNA, 15 bp, Homo sapiens
aacacatacaagttt

SEQ ID NO: 1884781 - DNA, 15 bp, Homo sapiens
acacatacaagtttg

SEQ ID NO: 1884782 - DNA, 15 bp, Homo sapiens
cacatacaagtttgt

SEQ ID NO: 1884783 - DNA, 15 bp, Homo sapiens
acatacaagtttgtg

SEQ ID NO: 1884784 - DNA, 15 bp, Homo sapiens
catacaagtttgtgt

SEQ ID NO: 1884785 - DNA, 15 bp, Homo sapiens
atacaagtttgtgtt

SEQ ID NO: 1884786 - DNA, 15 bp, Homo sapiens
tacaagtttgtgttt

SEQ ID NO: 1884787 - DNA, 15 bp, Homo sapiens
acaagtttgtgtttc

SEQ ID NO: 1884788 - DNA, 15 bp, Homo sapiens
caagtttgtgtttca

SEQ ID NO: 1884789 - DNA, 15 bp, Homo sapiens
aagtttgtgtttcag

SEQ ID NO: 1884790 - DNA, 15 bp, Homo sapiens
agtttgtgtttcagg

SEQ ID NO: 1884791 - DNA, 15 bp, Homo sapiens
gtttgtgtttcaggt

SEQ ID NO: 1884792 - DNA, 15 bp, Homo sapiens
tttgtgtttcaggtt

SEQ ID NO: 1884793 - DNA, 15 bp, Homo sapiens
ttgtgtttcaggttt

SEQ ID NO: 1884794 - DNA, 15 bp, Homo sapiens
tgtgtttcaggtttg

SEQ ID NO: 1884795 - DNA, 15 bp, Homo sapiens
gtgtttcaggtttgc

SEQ ID NO: 1884796 - DNA, 15 bp, Homo sapiens
tgtttcaggtttgct

SEQ ID NO: 1884797 - DNA, 15 bp, Homo sapiens
gtttcaggtttgcta

SEQ ID NO: 1884798 - DNA, 15 bp, Homo sapiens
tttcaggtttgctaa

SEQ ID NO: 1884799 - DNA, 15 bp, Homo sapiens
ttcaggtttgctaac

SEQ ID NO: 1884800 - DNA, 15 bp, Homo sapiens
tcaggtttgctaact

SEQ ID NO: 1884801 - DNA, 15 bp, Homo sapiens
caggtttgctaactg

SEQ ID NO: 1884802 - DNA, 15 bp, Homo sapiens
aggtttgctaactgg

SEQ ID NO: 1884803 - DNA, 15 bp, Homo sapiens
ggtttgctaactggc

SEQ ID NO: 1884804 - DNA, 15 bp, Homo sapiens
gtttgctaactggct

SEQ ID NO: 1884805 - DNA, 15 bp, Homo sapiens
tttgctaactggctt

SEQ ID NO: 1884806 - DNA, 15 bp, Homo sapiens
ttgctaactggctta

SEQ ID NO: 1884807 - DNA, 15 bp, Homo sapiens
tgctaactggcttat

SEQ ID NO: 1884808 - DNA, 15 bp, Homo sapiens
gctaactggcttatt

SEQ ID NO: 1884809 - DNA, 15 bp, Homo sapiens
ctaactggcttatta

SEQ ID NO: 1884810 - DNA, 15 bp, Homo sapiens
taactggcttattag

SEQ ID NO: 1884811 - DNA, 15 bp, Homo sapiens
aactggcttattagc

SEQ ID NO: 1884812 - DNA, 15 bp, Homo sapiens
actggcttattagca

SEQ ID NO: 1884813 - DNA, 15 bp, Homo sapiens
ctggcttattagcaa

SEQ ID NO: 1884814 - DNA, 15 bp, Homo sapiens
tggcttattagcaaa

SEQ ID NO: 1884815 - DNA, 15 bp, Homo sapiens
ggcttattagcaaat

SEQ ID NO: 1884816 - DNA, 15 bp, Homo sapiens
gcttattagcaaata

SEQ ID NO: 1884817 - DNA, 15 bp, Homo sapiens
cttattagcaaatac

SEQ ID NO: 1884818 - DNA, 15 bp, Homo sapiens
ttattagcaaatact

SEQ ID NO: 1884819 - DNA, 15 bp, Homo sapiens
tattagcaaatacta

SEQ ID NO: 1884820 - DNA, 15 bp, Homo sapiens
attagcaaatactaa

SEQ ID NO: 1884821 - DNA, 15 bp, Homo sapiens
ttagcaaatactaaa

SEQ ID NO: 1884822 - DNA, 15 bp, Homo sapiens
tagcaaatactaaag

SEQ ID NO: 1884823 - DNA, 15 bp, Homo sapiens
agcaaatactaaaga

SEQ ID NO: 1884824 - DNA, 15 bp, Homo sapiens
gcaaatactaaagac

SEQ ID NO: 1884825 - DNA, 15 bp, Homo sapiens
caaatactaaagaca

SEQ ID NO: 1884826 - DNA, 15 bp, Homo sapiens
aaatactaaagacaa

SEQ ID NO: 1884827 - DNA, 15 bp, Homo sapiens
aatactaaagacaaa

SEQ ID NO: 1884828 - DNA, 15 bp, Homo sapiens
atactaaagacaaag

SEQ ID NO: 1884829 - DNA, 15 bp, Homo sapiens
tactaaagacaaagc

SEQ ID NO: 1884830 - DNA, 15 bp, Homo sapiens
actaaagacaaagct

SEQ ID NO: 1884831 - DNA, 15 bp, Homo sapiens
ctaaagacaaagctt

SEQ ID NO: 1884832 - DNA, 15 bp, Homo sapiens
taaagacaaagcttt

SEQ ID NO: 1884833 - DNA, 15 bp, Homo sapiens
aaagacaaagcttta

SEQ ID NO: 1884834 - DNA, 15 bp, Homo sapiens
aagacaaagctttaa

SEQ ID NO: 1884835 - DNA, 15 bp, Homo sapiens
agacaaagctttaag

SEQ ID NO: 1884836 - DNA, 15 bp, Homo sapiens
gacaaagctttaaga

SEQ ID NO: 1884837 - DNA, 15 bp, Homo sapiens
acaaagctttaagaa

SEQ ID NO: 1884838 - DNA, 15 bp, Homo sapiens
caaagctttaagaaa

SEQ ID NO: 1884839 - DNA, 15 bp, Homo sapiens
aaagctttaagaaag

SEQ ID NO: 1884840 - DNA, 15 bp, Homo sapiens
aagctttaagaaagc

SEQ ID NO: 1884841 - DNA, 15 bp, Homo sapiens
agctttaagaaagca

SEQ ID NO: 1884842 - DNA, 15 bp, Homo sapiens
gctttaagaaagcat

SEQ ID NO: 1884843 - DNA, 15 bp, Homo sapiens
ctttaagaaagcatt

SEQ ID NO: 1884844 - DNA, 15 bp, Homo sapiens
tttaagaaagcattc

SEQ ID NO: 1884845 - DNA, 15 bp, Homo sapiens
ttaagaaagcattca

SEQ ID NO: 1884846 - DNA, 15 bp, Homo sapiens
taagaaagcattcat

SEQ ID NO: 1884847 - DNA, 15 bp, Homo sapiens
aagaaagcattcata

SEQ ID NO: 1884848 - DNA, 15 bp, Homo sapiens
agaaagcattcataa

SEQ ID NO: 1884849 - DNA, 15 bp, Homo sapiens
gaaagcattcataat

SEQ ID NO: 1884850 - DNA, 15 bp, Homo sapiens
aaagcattcataatt

SEQ ID NO: 1884851 - DNA, 15 bp, Homo sapiens
aagcattcataattt

SEQ ID NO: 1884852 - DNA, 15 bp, Homo sapiens
agcattcataatttc

SEQ ID NO: 1884853 - DNA, 15 bp, Homo sapiens
gcattcataatttct

SEQ ID NO: 1884854 - DNA, 15 bp, Homo sapiens
cattcataatttctt

SEQ ID NO: 1884855 - DNA, 15 bp, Homo sapiens
attcataatttcttg

SEQ ID NO: 1884856 - DNA, 15 bp, Homo sapiens
ttcataatttcttgg

SEQ ID NO: 1884857 - DNA, 15 bp, Homo sapiens
tcataatttcttggg

SEQ ID NO: 1884858 - DNA, 15 bp, Homo sapiens
cataatttcttgggt

SEQ ID NO: 1884859 - DNA, 15 bp, Homo sapiens
ataatttcttgggtc

SEQ ID NO: 1884860 - DNA, 15 bp, Homo sapiens
taatttcttgggtca

SEQ ID NO: 1884861 - DNA, 15 bp, Homo sapiens
aatttcttgggtcag

SEQ ID NO: 1884862 - DNA, 15 bp, Homo sapiens
atttcttgggtcagc

SEQ ID NO: 1884863 - DNA, 15 bp, Homo sapiens
tttcttgggtcagct

SEQ ID NO: 1884864 - DNA, 15 bp, Homo sapiens
ttcttgggtcagcta

SEQ ID NO: 1884865 - DNA, 15 bp, Homo sapiens
tcttgggtcagctac

SEQ ID NO: 1884866 - DNA, 15 bp, Homo sapiens
cttgggtcagctact

SEQ ID NO: 1884867 - DNA, 15 bp, Homo sapiens
ttgggtcagctactg

SEQ ID NO: 1884868 - DNA, 15 bp, Homo sapiens
tgggtcagctactga

SEQ ID NO: 1884869 - DNA, 15 bp, Homo sapiens
gggtcagctactgag

SEQ ID NO: 1884870 - DNA, 15 bp, Homo sapiens
ggtcagctactgagt

SEQ ID NO: 1884871 - DNA, 15 bp, Homo sapiens
gtcagctactgagta

SEQ ID NO: 1884872 - DNA, 15 bp, Homo sapiens
tcagctactgagtat

SEQ ID NO: 1884873 - DNA, 15 bp, Homo sapiens
cagctactgagtatc

SEQ ID NO: 1884874 - DNA, 15 bp, Homo sapiens
agctactgagtatct

SEQ ID NO: 1884875 - DNA, 15 bp, Homo sapiens
gctactgagtatcta

SEQ ID NO: 1884876 - DNA, 15 bp, Homo sapiens
ctactgagtatctaa

SEQ ID NO: 1884877 - DNA, 15 bp, Homo sapiens
tactgagtatctaac

SEQ ID NO: 1884878 - DNA, 15 bp, Homo sapiens
actgagtatctaaca

SEQ ID NO: 1884879 - DNA, 15 bp, Homo sapiens
ctgagtatctaacat

SEQ ID NO: 1884880 - DNA, 15 bp, Homo sapiens
tgagtatctaacata

SEQ ID NO: 1884881 - DNA, 15 bp, Homo sapiens
gagtatctaacataa

SEQ ID NO: 1884882 - DNA, 15 bp, Homo sapiens
agtatctaacataag

SEQ ID NO: 1884883 - DNA, 15 bp, Homo sapiens
gtatctaacataagt

SEQ ID NO: 1884884 - DNA, 15 bp, Homo sapiens
tatctaacataagta

SEQ ID NO: 1884885 - DNA, 15 bp, Homo sapiens
atctaacataagtaa

SEQ ID NO: 1884886 - DNA, 15 bp, Homo sapiens
tctaacataagtaat

SEQ ID NO: 1884887 - DNA, 15 bp, Homo sapiens
ctaacataagtaatt

SEQ ID NO: 1884888 - DNA, 15 bp, Homo sapiens
taacataagtaattt

SEQ ID NO: 1884889 - DNA, 15 bp, Homo sapiens
aacataagtaatttc

SEQ ID NO: 1884890 - DNA, 15 bp, Homo sapiens
acataagtaatttcc

SEQ ID NO: 1884891 - DNA, 15 bp, Homo sapiens
cataagtaatttcct

SEQ ID NO: 1884892 - DNA, 15 bp, Homo sapiens
ataagtaatttcctt

SEQ ID NO: 1884893 - DNA, 15 bp, Homo sapiens
taagtaatttccttc

SEQ ID NO: 1884894 - DNA, 15 bp, Homo sapiens
aagtaatttccttct

SEQ ID NO: 1884895 - DNA, 15 bp, Homo sapiens
agtaatttccttcta

SEQ ID NO: 1884896 - DNA, 15 bp, Homo sapiens
gtaatttccttctat

SEQ ID NO: 1884897 - DNA, 15 bp, Homo sapiens
taatttccttctatg

SEQ ID NO: 1884898 - DNA, 15 bp, Homo sapiens
aatttccttctatgc

SEQ ID NO: 1884899 - DNA, 15 bp, Homo sapiens
atttccttctatgct

SEQ ID NO: 1884900 - DNA, 15 bp, Homo sapiens
tttccttctatgctc

SEQ ID NO: 1884901 - DNA, 15 bp, Homo sapiens
ttccttctatgctct

SEQ ID NO: 1884902 - DNA, 15 bp, Homo sapiens
tccttctatgctctg

SEQ ID NO: 1884903 - DNA, 15 bp, Homo sapiens
ccttctatgctctgt

SEQ ID NO: 1884904 - DNA, 15 bp, Homo sapiens
cttctatgctctgtt

SEQ ID NO: 1884905 - DNA, 15 bp, Homo sapiens
ttctatgctctgtta

SEQ ID NO: 1884906 - DNA, 15 bp, Homo sapiens
tctatgctctgttat

SEQ ID NO: 1884907 - DNA, 15 bp, Homo sapiens
ctatgctctgttatc

SEQ ID NO: 1884908 - DNA, 15 bp, Homo sapiens
tatgctctgttatct

SEQ ID NO: 1884909 - DNA, 15 bp, Homo sapiens
atgctctgttatctt

SEQ ID NO: 1884910 - DNA, 15 bp, Homo sapiens
tgctctgttatcttg

SEQ ID NO: 1884911 - DNA, 15 bp, Homo sapiens
gctctgttatcttgt

SEQ ID NO: 1884912 - DNA, 15 bp, Homo sapiens
ctctgttatcttgtt

SEQ ID NO: 1884913 - DNA, 15 bp, Homo sapiens
tctgttatcttgtta

SEQ ID NO: 1884914 - DNA, 15 bp, Homo sapiens
ctgttatcttgttaa

SEQ ID NO: 1884915 - DNA, 15 bp, Homo sapiens
tgttatcttgttaat

SEQ ID NO: 1884916 - DNA, 15 bp, Homo sapiens
gttatcttgttaata

SEQ ID NO: 1884917 - DNA, 15 bp, Homo sapiens
ttatcttgttaatac

SEQ ID NO: 1884918 - DNA, 15 bp, Homo sapiens
tatcttgttaataca

SEQ ID NO: 1884919 - DNA, 15 bp, Homo sapiens
atcttgttaatacag

SEQ ID NO: 1884920 - DNA, 15 bp, Homo sapiens
tcttgttaatacagt

SEQ ID NO: 1884921 - DNA, 15 bp, Homo sapiens
cttgttaatacagtc

SEQ ID NO: 1884922 - DNA, 15 bp, Homo sapiens
ttgttaatacagtca

SEQ ID NO: 1884923 - DNA, 15 bp, Homo sapiens
tgttaatacagtcat

SEQ ID NO: 1884924 - DNA, 15 bp, Homo sapiens
gttaatacagtcatt

SEQ ID NO: 1884925 - DNA, 15 bp, Homo sapiens
ttaatacagtcattt

SEQ ID NO: 1884926 - DNA, 15 bp, Homo sapiens
taatacagtcattta

SEQ ID NO: 1884927 - DNA, 15 bp, Homo sapiens
aatacagtcatttaa

SEQ ID NO: 1884928 - DNA, 15 bp, Homo sapiens
atacagtcatttaaa

SEQ ID NO: 1884929 - DNA, 15 bp, Homo sapiens
tacagtcatttaaaa

SEQ ID NO: 1884930 - DNA, 15 bp, Homo sapiens
acagtcatttaaaat

SEQ ID NO: 1884931 - DNA, 15 bp, Homo sapiens
cagtcatttaaaatg

SEQ ID NO: 1884932 - DNA, 15 bp, Homo sapiens
agtcatttaaaatga

SEQ ID NO: 1884933 - DNA, 15 bp, Homo sapiens
gtcatttaaaatgag

SEQ ID NO: 1884934 - DNA, 15 bp, Homo sapiens
tcatttaaaatgaga

SEQ ID NO: 1884935 - DNA, 15 bp, Homo sapiens
catttaaaatgagat

SEQ ID NO: 1884936 - DNA, 15 bp, Homo sapiens
atttaaaatgagatt

SEQ ID NO: 1884937 - DNA, 15 bp, Homo sapiens
tttaaaatgagattt

SEQ ID NO: 1884938 - DNA, 15 bp, Homo sapiens
ttaaaatgagatttt

SEQ ID NO: 1884939 - DNA, 15 bp, Homo sapiens
taaaatgagattttc

SEQ ID NO: 1884940 - DNA, 15 bp, Homo sapiens
aaaatgagattttct

SEQ ID NO: 1884941 - DNA, 15 bp, Homo sapiens
aaatgagattttctt

SEQ ID NO: 1884942 - DNA, 15 bp, Homo sapiens
aatgagattttcttt

SEQ ID NO: 1884943 - DNA, 15 bp, Homo sapiens
atgagattttcttta

SEQ ID NO: 1884944 - DNA, 15 bp, Homo sapiens
tgagattttctttat

SEQ ID NO: 1884945 - DNA, 15 bp, Homo sapiens
gagattttctttata

SEQ ID NO: 1884946 - DNA, 15 bp, Homo sapiens
agattttctttatag

SEQ ID NO: 1884947 - DNA, 15 bp, Homo sapiens
gattttctttatagg

SEQ ID NO: 1884948 - DNA, 15 bp, Homo sapiens
attttctttataggt

SEQ ID NO: 1884949 - DNA, 15 bp, Homo sapiens
ttttctttataggtt

SEQ ID NO: 1884950 - DNA, 15 bp, Homo sapiens
tttctttataggttt

SEQ ID NO: 1884951 - DNA, 15 bp, Homo sapiens
ttctttataggtttt

SEQ ID NO: 1884952 - DNA, 15 bp, Homo sapiens
tctttataggtttta

SEQ ID NO: 1884953 - DNA, 15 bp, Homo sapiens
ctttataggttttaa

SEQ ID NO: 1884954 - DNA, 15 bp, Homo sapiens
tttataggttttaat

SEQ ID NO: 1884955 - DNA, 15 bp, Homo sapiens
ttataggttttaatg

SEQ ID NO: 1884956 - DNA, 15 bp, Homo sapiens
tataggttttaatga

SEQ ID NO: 1884957 - DNA, 15 bp, Homo sapiens
ataggttttaatgaa

SEQ ID NO: 1884958 - DNA, 15 bp, Homo sapiens
taggttttaatgaaa

SEQ ID NO: 1884959 - DNA, 15 bp, Homo sapiens
aggttttaatgaaaa

SEQ ID NO: 1884960 - DNA, 15 bp, Homo sapiens
ggttttaatgaaaag

SEQ ID NO: 1884961 - DNA, 15 bp, Homo sapiens
gttttaatgaaaaga

SEQ ID NO: 1884962 - DNA, 15 bp, Homo sapiens
ttttaatgaaaagaa

SEQ ID NO: 1884963 - DNA, 15 bp, Homo sapiens
tttaatgaaaagaac

SEQ ID NO: 1884964 - DNA, 15 bp, Homo sapiens
ttaatgaaaagaaca

SEQ ID NO: 1884965 - DNA, 15 bp, Homo sapiens
taatgaaaagaacag

SEQ ID NO: 1884966 - DNA, 15 bp, Homo sapiens
aatgaaaagaacaga

SEQ ID NO: 1884967 - DNA, 15 bp, Homo sapiens
atgaaaagaacagat

SEQ ID NO: 1884968 - DNA, 15 bp, Homo sapiens
tgaaaagaacagatc

SEQ ID NO: 1884969 - DNA, 15 bp, Homo sapiens
gaaaagaacagatca

SEQ ID NO: 1884970 - DNA, 15 bp, Homo sapiens
aaaagaacagatcaa

SEQ ID NO: 1884971 - DNA, 15 bp, Homo sapiens
aaagaacagatcaat

SEQ ID NO: 1884972 - DNA, 15 bp, Homo sapiens
aagaacagatcaatt

SEQ ID NO: 1884973 - DNA, 15 bp, Homo sapiens
agaacagatcaattt

SEQ ID NO: 1884974 - DNA, 15 bp, Homo sapiens
gaacagatcaatttt

SEQ ID NO: 1884975 - DNA, 15 bp, Homo sapiens
aacagatcaattttt

SEQ ID NO: 1884976 - DNA, 15 bp, Homo sapiens
acagatcaattttta

SEQ ID NO: 1884977 - DNA, 15 bp, Homo sapiens
cagatcaatttttat

SEQ ID NO: 1884978 - DNA, 15 bp, Homo sapiens
agatcaatttttatg

SEQ ID NO: 1884979 - DNA, 15 bp, Homo sapiens
gatcaatttttatgg

SEQ ID NO: 1884980 - DNA, 15 bp, Homo sapiens
atcaatttttatggg

SEQ ID NO: 1884981 - DNA, 15 bp, Homo sapiens
tcaatttttatggga

SEQ ID NO: 1884982 - DNA, 15 bp, Homo sapiens
caatttttatgggat

SEQ ID NO: 1884983 - DNA, 15 bp, Homo sapiens
aatttttatgggatc

SEQ ID NO: 1884984 - DNA, 15 bp, Homo sapiens
atttttatgggatcc

SEQ ID NO: 1884985 - DNA, 15 bp, Homo sapiens
tttttatgggatcca

SEQ ID NO: 1884986 - DNA, 15 bp, Homo sapiens
ttttatgggatccat

SEQ ID NO: 1884987 - DNA, 15 bp, Homo sapiens
tttatgggatccatg

SEQ ID NO: 1884988 - DNA, 15 bp, Homo sapiens
ttatgggatccatgt

SEQ ID NO: 1884989 - DNA, 15 bp, Homo sapiens
tatgggatccatgtt

SEQ ID NO: 1884990 - DNA, 15 bp, Homo sapiens
atgggatccatgttc

SEQ ID NO: 1884991 - DNA, 15 bp, Homo sapiens
tgggatccatgttcc

SEQ ID NO: 1884992 - DNA, 15 bp, Homo sapiens
gggatccatgttcct

SEQ ID NO: 1884993 - DNA, 15 bp, Homo sapiens
ggatccatgttccta

SEQ ID NO: 1884994 - DNA, 15 bp, Homo sapiens
gatccatgttcctac

SEQ ID NO: 1884995 - DNA, 15 bp, Homo sapiens
atccatgttcctact

SEQ ID NO: 1884996 - DNA, 15 bp, Homo sapiens
tccatgttcctactc

SEQ ID NO: 1884997 - DNA, 15 bp, Homo sapiens
ccatgttcctactca

SEQ ID NO: 1884998 - DNA, 15 bp, Homo sapiens
catgttcctactcag

SEQ ID NO: 1884999 - DNA, 15 bp, Homo sapiens
atgttcctactcagc

SEQ ID NO: 1885000 - DNA, 15 bp, Homo sapiens
tgttcctactcagct

SEQ ID NO: 1885001 - DNA, 15 bp, Homo sapiens
gttcctactcagcta

SEQ ID NO: 1885002 - DNA, 15 bp, Homo sapiens
ttcctactcagctag

SEQ ID NO: 1885003 - DNA, 15 bp, Homo sapiens
tcctactcagctagc

SEQ ID NO: 1885004 - DNA, 15 bp, Homo sapiens
cctactcagctagca

SEQ ID NO: 1885005 - DNA, 15 bp, Homo sapiens
ctactcagctagcaa

SEQ ID NO: 1885006 - DNA, 15 bp, Homo sapiens
tactcagctagcaag

SEQ ID NO: 1885007 - DNA, 15 bp, Homo sapiens
actcagctagcaaga

SEQ ID NO: 1885008 - DNA, 15 bp, Homo sapiens
ctcagctagcaagaa

SEQ ID NO: 1885009 - DNA, 15 bp, Homo sapiens
tcagctagcaagaat

SEQ ID NO: 1885010 - DNA, 15 bp, Homo sapiens
cagctagcaagaatg

SEQ ID NO: 1885011 - DNA, 15 bp, Homo sapiens
agctagcaagaatga

SEQ ID NO: 1885012 - DNA, 15 bp, Homo sapiens
gctagcaagaatgaa

SEQ ID NO: 1885013 - DNA, 15 bp, Homo sapiens
ctagcaagaatgaac

SEQ ID NO: 1885014 - DNA, 15 bp, Homo sapiens
tagcaagaatgaaca

SEQ ID NO: 1885015 - DNA, 15 bp, Homo sapiens
agcaagaatgaacac

SEQ ID NO: 1885016 - DNA, 15 bp, Homo sapiens
gcaagaatgaacacc

SEQ ID NO: 1885017 - DNA, 15 bp, Homo sapiens
caagaatgaacacca

SEQ ID NO: 1885018 - DNA, 15 bp, Homo sapiens
aagaatgaacaccat

SEQ ID NO: 1885019 - DNA, 15 bp, Homo sapiens
agaatgaacaccatt

SEQ ID NO: 1885020 - DNA, 15 bp, Homo sapiens
gaatgaacaccattt

SEQ ID NO: 1885021 - DNA, 15 bp, Homo sapiens
aatgaacaccatttc

SEQ ID NO: 1885022 - DNA, 15 bp, Homo sapiens
atgaacaccatttct

SEQ ID NO: 1885023 - DNA, 15 bp, Homo sapiens
gaacaccatttctct

SEQ ID NO: 1885024 - DNA, 15 bp, Homo sapiens
aacaccatttctcta

SEQ ID NO: 1885025 - DNA, 15 bp, Homo sapiens
acaccatttctctag

SEQ ID NO: 1885026 - DNA, 15 bp, Homo sapiens
caccatttctctagt

SEQ ID NO: 1885027 - DNA, 15 bp, Homo sapiens
accatttctctagta

SEQ ID NO: 1885028 - DNA, 15 bp, Homo sapiens
ccatttctctagtag

SEQ ID NO: 1885029 - DNA, 15 bp, Homo sapiens
catttctctagtagt

SEQ ID NO: 1885030 - DNA, 15 bp, Homo sapiens
atttctctagtagtt

SEQ ID NO: 1885031 - DNA, 15 bp, Homo sapiens
tttctctagtagttc

SEQ ID NO: 1885032 - DNA, 15 bp, Homo sapiens
ttctctagtagttct

SEQ ID NO: 1885033 - DNA, 15 bp, Homo sapiens
tctctagtagttcta

SEQ ID NO: 1885034 - DNA, 15 bp, Homo sapiens
ctctagtagttctaa

SEQ ID NO: 1885035 - DNA, 15 bp, Homo sapiens
tctagtagttctaag

SEQ ID NO: 1885036 - DNA, 15 bp, Homo sapiens
ctagtagttctaaga

SEQ ID NO: 1885037 - DNA, 15 bp, Homo sapiens
tagtagttctaagat

SEQ ID NO: 1885038 - DNA, 15 bp, Homo sapiens
agtagttctaagatt

SEQ ID NO: 1885039 - DNA, 15 bp, Homo sapiens
gtagttctaagattc

SEQ ID NO: 1885040 - DNA, 15 bp, Homo sapiens
tagttctaagattct

SEQ ID NO: 1885041 - DNA, 15 bp, Homo sapiens
agttctaagattctt

SEQ ID NO: 1885042 - DNA, 15 bp, Homo sapiens
gttctaagattcttc

SEQ ID NO: 1885043 - DNA, 15 bp, Homo sapiens
ttctaagattcttcc

SEQ ID NO: 1885044 - DNA, 15 bp, Homo sapiens
tctaagattcttcct

SEQ ID NO: 1885045 - DNA, 15 bp, Homo sapiens
ctaagattcttcctt

SEQ ID NO: 1885046 - DNA, 15 bp, Homo sapiens
taagattcttcctta

SEQ ID NO: 1885047 - DNA, 15 bp, Homo sapiens
aagattcttccttaa

SEQ ID NO: 1885048 - DNA, 15 bp, Homo sapiens
agattcttccttaag

SEQ ID NO: 1885049 - DNA, 15 bp, Homo sapiens
gattcttccttaagt

SEQ ID NO: 1885050 - DNA, 15 bp, Homo sapiens
attcttccttaagta

SEQ ID NO: 1885051 - DNA, 15 bp, Homo sapiens
ttcttccttaagtaa

SEQ ID NO: 1885052 - DNA, 15 bp, Homo sapiens
tcttccttaagtaaa

SEQ ID NO: 1885053 - DNA, 15 bp, Homo sapiens
cttccttaagtaaaa

SEQ ID NO: 1885054 - DNA, 15 bp, Homo sapiens
ttccttaagtaaaat

SEQ ID NO: 1885055 - DNA, 15 bp, Homo sapiens
tccttaagtaaaatt

SEQ ID NO: 1885056 - DNA, 15 bp, Homo sapiens
ttaagtaaaatttta

SEQ ID NO: 1885057 - DNA, 15 bp, Homo sapiens
taagtaaaattttaa

SEQ ID NO: 1885058 - DNA, 15 bp, Homo sapiens
aagtaaaattttaat

SEQ ID NO: 1885059 - DNA, 15 bp, Homo sapiens
agtaaaattttaatg

SEQ ID NO: 1885060 - DNA, 15 bp, Homo sapiens
gtaaaattttaatgt

SEQ ID NO: 1885061 - DNA, 15 bp, Homo sapiens
taaaattttaatgtt

SEQ ID NO: 1885062 - DNA, 15 bp, Homo sapiens
aaaattttaatgttt

SEQ ID NO: 1885063 - DNA, 15 bp, Homo sapiens
aaattttaatgttta

SEQ ID NO: 1885064 - DNA, 15 bp, Homo sapiens
aattttaatgtttag

SEQ ID NO: 1885065 - DNA, 15 bp, Homo sapiens
attttaatgtttagg

SEQ ID NO: 1885066 - DNA, 15 bp, Homo sapiens
ttttaatgtttagga

SEQ ID NO: 1885067 - DNA, 15 bp, Homo sapiens
tttaatgtttaggag

SEQ ID NO: 1885068 - DNA, 15 bp, Homo sapiens
ttaatgtttaggaga

SEQ ID NO: 1885069 - DNA, 15 bp, Homo sapiens
taatgtttaggagac

SEQ ID NO: 1885070 - DNA, 15 bp, Homo sapiens
aatgtttaggagaca

SEQ ID NO: 1885071 - DNA, 15 bp, Homo sapiens
atgtttaggagacac

SEQ ID NO: 1885072 - DNA, 15 bp, Homo sapiens
tgtttaggagacaca

SEQ ID NO: 1885073 - DNA, 15 bp, Homo sapiens
gtttaggagacacag

SEQ ID NO: 1885074 - DNA, 15 bp, Homo sapiens
tttaggagacacaga

SEQ ID NO: 1885075 - DNA, 15 bp, Homo sapiens
ttaggagacacagag

SEQ ID NO: 1885076 - DNA, 15 bp, Homo sapiens
taggagacacagagc

SEQ ID NO: 1885077 - DNA, 15 bp, Homo sapiens
aggagacacagagca

SEQ ID NO: 1885078 - DNA, 15 bp, Homo sapiens
ggagacacagagcac

SEQ ID NO: 1885079 - DNA, 15 bp, Homo sapiens
gagacacagagcaca

SEQ ID NO: 1885080 - DNA, 15 bp, Homo sapiens
agacacagagcacac

SEQ ID NO: 1885081 - DNA, 15 bp, Homo sapiens
gacacagagcacaca

SEQ ID NO: 1885082 - DNA, 15 bp, Homo sapiens
acacagagcacacaa

SEQ ID NO: 1885083 - DNA, 15 bp, Homo sapiens
cacagagcacacaaa

SEQ ID NO: 1885084 - DNA, 15 bp, Homo sapiens
acagagcacacaaag

SEQ ID NO: 1885085 - DNA, 15 bp, Homo sapiens
cagagcacacaaagg

SEQ ID NO: 1885086 - DNA, 15 bp, Homo sapiens
agagcacacaaaggg

SEQ ID NO: 1885087 - DNA, 15 bp, Homo sapiens
gagcacacaaaggga

SEQ ID NO: 1885088 - DNA, 15 bp, Homo sapiens
agcacacaaagggag

SEQ ID NO: 1885089 - DNA, 15 bp, Homo sapiens
gcacacaaagggagt

SEQ ID NO: 1885090 - DNA, 15 bp, Homo sapiens
cacacaaagggagta

SEQ ID NO: 1885091 - DNA, 15 bp, Homo sapiens
acacaaagggagtaa

SEQ ID NO: 1885092 - DNA, 15 bp, Homo sapiens
cacaaagggagtaaa

SEQ ID NO: 1885093 - DNA, 15 bp, Homo sapiens
acaaagggagtaaaa

SEQ ID NO: 1885094 - DNA, 15 bp, Homo sapiens
caaagggagtaaaag

SEQ ID NO: 1885095 - DNA, 15 bp, Homo sapiens
aaagggagtaaaaga

SEQ ID NO: 1885096 - DNA, 15 bp, Homo sapiens
aagggagtaaaagag

SEQ ID NO: 1885097 - DNA, 15 bp, Homo sapiens
agggagtaaaagagc

SEQ ID NO: 1885098 - DNA, 15 bp, Homo sapiens
gggagtaaaagagct

SEQ ID NO: 1885099 - DNA, 15 bp, Homo sapiens
ggagtaaaagagctt

SEQ ID NO: 1885100 - DNA, 15 bp, Homo sapiens
gagtaaaagagctta

SEQ ID NO: 1885101 - DNA, 15 bp, Homo sapiens
agtaaaagagcttaa

SEQ ID NO: 1885102 - DNA, 15 bp, Homo sapiens
gtaaaagagcttaaa

SEQ ID NO: 1885103 - DNA, 15 bp, Homo sapiens
taaaagagcttaaaa

SEQ ID NO: 1885104 - DNA, 15 bp, Homo sapiens
aaaagagcttaaaaa

SEQ ID NO: 1885105 - DNA, 15 bp, Homo sapiens
aaagagcttaaaaat

SEQ ID NO: 1885106 - DNA, 15 bp, Homo sapiens
aagagcttaaaaatg

SEQ ID NO: 1885107 - DNA, 15 bp, Homo sapiens
agagcttaaaaatgt

SEQ ID NO: 1885108 - DNA, 15 bp, Homo sapiens
gagcttaaaaatgtg

SEQ ID NO: 1885109 - DNA, 15 bp, Homo sapiens
agcttaaaaatgtga

SEQ ID NO: 1885110 - DNA, 15 bp, Homo sapiens
gcttaaaaatgtgag

SEQ ID NO: 1885111 - DNA, 15 bp, Homo sapiens
cttaaaaatgtgagt

SEQ ID NO: 1885112 - DNA, 15 bp, Homo sapiens
ttaaaaatgtgagtt

SEQ ID NO: 1885113 - DNA, 15 bp, Homo sapiens
taaaaatgtgagttt

SEQ ID NO: 1885114 - DNA, 15 bp, Homo sapiens
aaaaatgtgagttta

SEQ ID NO: 1885115 - DNA, 15 bp, Homo sapiens
aaaatgtgagtttat

SEQ ID NO: 1885116 - DNA, 15 bp, Homo sapiens
aaatgtgagtttata

SEQ ID NO: 1885117 - DNA, 15 bp, Homo sapiens
aatgtgagtttatat

SEQ ID NO: 1885118 - DNA, 15 bp, Homo sapiens
atgtgagtttatatt

SEQ ID NO: 1885119 - DNA, 15 bp, Homo sapiens
tgtgagtttatattt

SEQ ID NO: 1885120 - DNA, 15 bp, Homo sapiens
gtgagtttatatttt

SEQ ID NO: 1885121 - DNA, 15 bp, Homo sapiens
tgagtttatattttg

SEQ ID NO: 1885122 - DNA, 15 bp, Homo sapiens
gagtttatattttga

SEQ ID NO: 1885123 - DNA, 15 bp, Homo sapiens
agtttatattttgaa

SEQ ID NO: 1885124 - DNA, 15 bp, Homo sapiens
gtttatattttgaat

SEQ ID NO: 1885125 - DNA, 15 bp, Homo sapiens
tttatattttgaatc

SEQ ID NO: 1885126 - DNA, 15 bp, Homo sapiens
ttatattttgaatca

SEQ ID NO: 1885127 - DNA, 15 bp, Homo sapiens
tatattttgaatcat

SEQ ID NO: 1885128 - DNA, 15 bp, Homo sapiens
atattttgaatcatc

SEQ ID NO: 1885129 - DNA, 15 bp, Homo sapiens
tattttgaatcatcc

SEQ ID NO: 1885130 - DNA, 15 bp, Homo sapiens
attttgaatcatcct

SEQ ID NO: 1885131 - DNA, 15 bp, Homo sapiens
ttttgaatcatccta

SEQ ID NO: 1885132 - DNA, 15 bp, Homo sapiens
tttgaatcatcctaa

SEQ ID NO: 1885133 - DNA, 15 bp, Homo sapiens
ttgaatcatcctaaa

SEQ ID NO: 1885134 - DNA, 15 bp, Homo sapiens
tgaatcatcctaaac

SEQ ID NO: 1885135 - DNA, 15 bp, Homo sapiens
gaatcatcctaaaca

SEQ ID NO: 1885136 - DNA, 15 bp, Homo sapiens
aatcatcctaaacaa

SEQ ID NO: 1885137 - DNA, 15 bp, Homo sapiens
atcatcctaaacaag

SEQ ID NO: 1885138 - DNA, 15 bp, Homo sapiens
tcatcctaaacaagc

SEQ ID NO: 1885139 - DNA, 15 bp, Homo sapiens
catcctaaacaagca

SEQ ID NO: 1885140 - DNA, 15 bp, Homo sapiens
atcctaaacaagcac

SEQ ID NO: 1885141 - DNA, 15 bp, Homo sapiens
tcctaaacaagcaca

SEQ ID NO: 1885142 - DNA, 15 bp, Homo sapiens
cctaaacaagcacag

SEQ ID NO: 1885143 - DNA, 15 bp, Homo sapiens
ctaaacaagcacaga

SEQ ID NO: 1885144 - DNA, 15 bp, Homo sapiens
taaacaagcacagaa

SEQ ID NO: 1885145 - DNA, 15 bp, Homo sapiens
aaacaagcacagaaa

SEQ ID NO: 1885146 - DNA, 15 bp, Homo sapiens
aacaagcacagaaat

SEQ ID NO: 1885147 - DNA, 15 bp, Homo sapiens
acaagcacagaaata

SEQ ID NO: 1885148 - DNA, 15 bp, Homo sapiens
caagcacagaaatat

SEQ ID NO: 1885149 - DNA, 15 bp, Homo sapiens
aagcacagaaatata

SEQ ID NO: 1885150 - DNA, 15 bp, Homo sapiens
agcacagaaatatac

SEQ ID NO: 1885151 - DNA, 15 bp, Homo sapiens
gcacagaaatataca

SEQ ID NO: 1885152 - DNA, 15 bp, Homo sapiens
cacagaaatatacat

SEQ ID NO: 1885153 - DNA, 15 bp, Homo sapiens
acagaaatatacatg

SEQ ID NO: 1885154 - DNA, 15 bp, Homo sapiens
cagaaatatacatga

SEQ ID NO: 1885155 - DNA, 15 bp, Homo sapiens
agaaatatacatgag

SEQ ID NO: 1885156 - DNA, 15 bp, Homo sapiens
gaaatatacatgaga

SEQ ID NO: 1885157 - DNA, 15 bp, Homo sapiens
aaatatacatgagag

SEQ ID NO: 1885158 - DNA, 15 bp, Homo sapiens
aatatacatgagagg

SEQ ID NO: 1885159 - DNA, 15 bp, Homo sapiens
atatacatgagagga

SEQ ID NO: 1885160 - DNA, 15 bp, Homo sapiens
tatacatgagaggaa

SEQ ID NO: 1885161 - DNA, 15 bp, Homo sapiens
atacatgagaggaag

SEQ ID NO: 1885162 - DNA, 15 bp, Homo sapiens
tacatgagaggaagt

SEQ ID NO: 1885163 - DNA, 15 bp, Homo sapiens
acatgagaggaagta

SEQ ID NO: 1885164 - DNA, 15 bp, Homo sapiens
catgagaggaagtaa

SEQ ID NO: 1885165 - DNA, 15 bp, Homo sapiens
atgagaggaagtaaa

SEQ ID NO: 1885166 - DNA, 15 bp, Homo sapiens
tgagaggaagtaaaa

SEQ ID NO: 1885167 - DNA, 15 bp, Homo sapiens
gagaggaagtaaaat

SEQ ID NO: 1885168 - DNA, 15 bp, Homo sapiens
agaggaagtaaaatt

SEQ ID NO: 1885169 - DNA, 15 bp, Homo sapiens
gaggaagtaaaatta

SEQ ID NO: 1885170 - DNA, 15 bp, Homo sapiens
ggaagtaaaattata

SEQ ID NO: 1885171 - DNA, 15 bp, Homo sapiens
gaagtaaaattatag

SEQ ID NO: 1885172 - DNA, 15 bp, Homo sapiens
aagtaaaattatagt

SEQ ID NO: 1885173 - DNA, 15 bp, Homo sapiens
agtaaaattatagtc

SEQ ID NO: 1885174 - DNA, 15 bp, Homo sapiens
gtaaaattatagtca

SEQ ID NO: 1885175 - DNA, 15 bp, Homo sapiens
taaaattatagtcac

SEQ ID NO: 1885176 - DNA, 15 bp, Homo sapiens
aaaattatagtcaca

SEQ ID NO: 1885177 - DNA, 15 bp, Homo sapiens
aaattatagtcacag

SEQ ID NO: 1885178 - DNA, 15 bp, Homo sapiens
aattatagtcacagg

SEQ ID NO: 1885179 - DNA, 15 bp, Homo sapiens
attatagtcacagga

SEQ ID NO: 1885180 - DNA, 15 bp, Homo sapiens
ttatagtcacaggat

SEQ ID NO: 1885181 - DNA, 15 bp, Homo sapiens
tatagtcacaggata

SEQ ID NO: 1885182 - DNA, 15 bp, Homo sapiens
atagtcacaggatag

SEQ ID NO: 1885183 - DNA, 15 bp, Homo sapiens
tagtcacaggataga

SEQ ID NO: 1885184 - DNA, 15 bp, Homo sapiens
agtcacaggatagag

SEQ ID NO: 1885185 - DNA, 15 bp, Homo sapiens
gtcacaggatagaga

SEQ ID NO: 1885186 - DNA, 15 bp, Homo sapiens
tcacaggatagagag

SEQ ID NO: 1885187 - DNA, 15 bp, Homo sapiens
cacaggatagagaga

SEQ ID NO: 1885188 - DNA, 15 bp, Homo sapiens
acaggatagagagac

SEQ ID NO: 1885189 - DNA, 15 bp, Homo sapiens
caggatagagagact

SEQ ID NO: 1885190 - DNA, 15 bp, Homo sapiens
aggatagagagactt

SEQ ID NO: 1885191 - DNA, 15 bp, Homo sapiens
ggatagagagacttt

SEQ ID NO: 1885192 - DNA, 15 bp, Homo sapiens
gatagagagactttg

SEQ ID NO: 1885193 - DNA, 15 bp, Homo sapiens
atagagagactttga

SEQ ID NO: 1885194 - DNA, 15 bp, Homo sapiens
tagagagactttgaa

SEQ ID NO: 1885195 - DNA, 15 bp, Homo sapiens
agagagactttgaaa

SEQ ID NO: 1885196 - DNA, 15 bp, Homo sapiens
gagagactttgaaag

SEQ ID NO: 1885197 - DNA, 15 bp, Homo sapiens
agagactttgaaaga

SEQ ID NO: 1885198 - DNA, 15 bp, Homo sapiens
gagactttgaaagag

SEQ ID NO: 1885199 - DNA, 15 bp, Homo sapiens
agactttgaaagagg

SEQ ID NO: 1885200 - DNA, 15 bp, Homo sapiens
gactttgaaagaggt

SEQ ID NO: 1885201 - DNA, 15 bp, Homo sapiens
actttgaaagaggta

SEQ ID NO: 1885202 - DNA, 15 bp, Homo sapiens
ctttgaaagaggtaa

SEQ ID NO: 1885203 - DNA, 15 bp, Homo sapiens
tttgaaagaggtaag

SEQ ID NO: 1885204 - DNA, 15 bp, Homo sapiens
ttgaaagaggtaaga

SEQ ID NO: 1885205 - DNA, 15 bp, Homo sapiens
tgaaagaggtaagag

SEQ ID NO: 1885206 - DNA, 15 bp, Homo sapiens
gaaagaggtaagagc

SEQ ID NO: 1885207 - DNA, 15 bp, Homo sapiens
aaagaggtaagagca

SEQ ID NO: 1885208 - DNA, 15 bp, Homo sapiens
aagaggtaagagcaa

SEQ ID NO: 1885209 - DNA, 15 bp, Homo sapiens
agaggtaagagcaaa

SEQ ID NO: 1885210 - DNA, 15 bp, Homo sapiens
gaggtaagagcaaaa

SEQ ID NO: 1885211 - DNA, 15 bp, Homo sapiens
aggtaagagcaaaat

SEQ ID NO: 1885212 - DNA, 15 bp, Homo sapiens
ggtaagagcaaaata

SEQ ID NO: 1885213 - DNA, 15 bp, Homo sapiens
gtaagagcaaaatag

SEQ ID NO: 1885214 - DNA, 15 bp, Homo sapiens
taagagcaaaataga

SEQ ID NO: 1885215 - DNA, 15 bp, Homo sapiens
aagagcaaaatagac

SEQ ID NO: 1885216 - DNA, 15 bp, Homo sapiens
agagcaaaatagaca

SEQ ID NO: 1885217 - DNA, 15 bp, Homo sapiens
gagcaaaatagacaa

SEQ ID NO: 1885218 - DNA, 15 bp, Homo sapiens
agcaaaatagacaaa

SEQ ID NO: 1885219 - DNA, 15 bp, Homo sapiens
gcaaaatagacaaaa

SEQ ID NO: 1885220 - DNA, 15 bp, Homo sapiens
caaaatagacaaaat

SEQ ID NO: 1885221 - DNA, 15 bp, Homo sapiens
aaaatagacaaaatc

SEQ ID NO: 1885222 - DNA, 15 bp, Homo sapiens
aaatagacaaaatca

SEQ ID NO: 1885223 - DNA, 15 bp, Homo sapiens
aatagacaaaatcag

SEQ ID NO: 1885224 - DNA, 15 bp, Homo sapiens
atagacaaaatcaga

SEQ ID NO: 1885225 - DNA, 15 bp, Homo sapiens
tagacaaaatcagaa

SEQ ID NO: 1885226 - DNA, 15 bp, Homo sapiens
agacaaaatcagaaa

SEQ ID NO: 1885227 - DNA, 15 bp, Homo sapiens
gacaaaatcagaaaa

SEQ ID NO: 1885228 - DNA, 15 bp, Homo sapiens
acaaaatcagaaaat

SEQ ID NO: 1885229 - DNA, 15 bp, Homo sapiens
caaaatcagaaaatt

SEQ ID NO: 1885230 - DNA, 15 bp, Homo sapiens
aaaatcagaaaatta

SEQ ID NO: 1885231 - DNA, 15 bp, Homo sapiens
aaatcagaaaattaa

SEQ ID NO: 1885232 - DNA, 15 bp, Homo sapiens
aatcagaaaattaaa

SEQ ID NO: 1885233 - DNA, 15 bp, Homo sapiens
atcagaaaattaaat

SEQ ID NO: 1885234 - DNA, 15 bp, Homo sapiens
tcagaaaattaaatt

SEQ ID NO: 1885235 - DNA, 15 bp, Homo sapiens
cagaaaattaaattc

SEQ ID NO: 1885236 - DNA, 15 bp, Homo sapiens
agaaaattaaattca

SEQ ID NO: 1885237 - DNA, 15 bp, Homo sapiens
gaaaattaaattcaa

SEQ ID NO: 1885238 - DNA, 15 bp, Homo sapiens
aaaattaaattcaaa

SEQ ID NO: 1885239 - DNA, 15 bp, Homo sapiens
aaattaaattcaaac

SEQ ID NO: 1885240 - DNA, 15 bp, Homo sapiens
aattaaattcaaact

SEQ ID NO: 1885241 - DNA, 15 bp, Homo sapiens
attaaattcaaactt

SEQ ID NO: 1885242 - DNA, 15 bp, Homo sapiens
ttaaattcaaacttc

SEQ ID NO: 1885243 - DNA, 15 bp, Homo sapiens
taaattcaaacttct

SEQ ID NO: 1885244 - DNA, 15 bp, Homo sapiens
aaattcaaacttcta

SEQ ID NO: 1885245 - DNA, 15 bp, Homo sapiens
aattcaaacttctaa

SEQ ID NO: 1885246 - DNA, 15 bp, Homo sapiens
attcaaacttctaaa

SEQ ID NO: 1885247 - DNA, 15 bp, Homo sapiens
ttcaaacttctaaag

SEQ ID NO: 1885248 - DNA, 15 bp, Homo sapiens
tcaaacttctaaagt

SEQ ID NO: 1885249 - DNA, 15 bp, Homo sapiens
caaacttctaaagta

SEQ ID NO: 1885250 - DNA, 15 bp, Homo sapiens
aaacttctaaagtaa

SEQ ID NO: 1885251 - DNA, 15 bp, Homo sapiens
aacttctaaagtaaa

SEQ ID NO: 1885252 - DNA, 15 bp, Homo sapiens
acttctaaagtaaag

SEQ ID NO: 1885253 - DNA, 15 bp, Homo sapiens
cttctaaagtaaagc

SEQ ID NO: 1885254 - DNA, 15 bp, Homo sapiens
ttctaaagtaaagca

SEQ ID NO: 1885255 - DNA, 15 bp, Homo sapiens
tctaaagtaaagcaa

SEQ ID NO: 1885256 - DNA, 15 bp, Homo sapiens
ctaaagtaaagcaac

SEQ ID NO: 1885257 - DNA, 15 bp, Homo sapiens
taaagtaaagcaaca

SEQ ID NO: 1885258 - DNA, 15 bp, Homo sapiens
aaagtaaagcaacag

SEQ ID NO: 1885259 - DNA, 15 bp, Homo sapiens
aagtaaagcaacaga

SEQ ID NO: 1885260 - DNA, 15 bp, Homo sapiens
agtaaagcaacagac

SEQ ID NO: 1885261 - DNA, 15 bp, Homo sapiens
gtaaagcaacagaca

SEQ ID NO: 1885262 - DNA, 15 bp, Homo sapiens
taaagcaacagacac

SEQ ID NO: 1885263 - DNA, 15 bp, Homo sapiens
aaagcaacagacact

SEQ ID NO: 1885264 - DNA, 15 bp, Homo sapiens
aagcaacagacacta

SEQ ID NO: 1885265 - DNA, 15 bp, Homo sapiens
agcaacagacactat

SEQ ID NO: 1885266 - DNA, 15 bp, Homo sapiens
gcaacagacactatg

SEQ ID NO: 1885267 - DNA, 15 bp, Homo sapiens
caacagacactatga

SEQ ID NO: 1885268 - DNA, 15 bp, Homo sapiens
aacagacactatgaa

SEQ ID NO: 1885269 - DNA, 15 bp, Homo sapiens
acagacactatgaat

SEQ ID NO: 1885270 - DNA, 15 bp, Homo sapiens
cagacactatgaatg

SEQ ID NO: 1885271 - DNA, 15 bp, Homo sapiens
agacactatgaatgc

SEQ ID NO: 1885272 - DNA, 15 bp, Homo sapiens
gacactatgaatgct

SEQ ID NO: 1885273 - DNA, 15 bp, Homo sapiens
acactatgaatgctt

SEQ ID NO: 1885274 - DNA, 15 bp, Homo sapiens
cactatgaatgcttt

SEQ ID NO: 1885275 - DNA, 15 bp, Homo sapiens
actatgaatgctttg

SEQ ID NO: 1885276 - DNA, 15 bp, Homo sapiens
ctatgaatgctttgg

SEQ ID NO: 1885277 - DNA, 15 bp, Homo sapiens
tatgaatgctttgga

SEQ ID NO: 1885278 - DNA, 15 bp, Homo sapiens
atgaatgctttggag

SEQ ID NO: 1885279 - DNA, 15 bp, Homo sapiens
tgaatgctttggaga

SEQ ID NO: 1885280 - DNA, 15 bp, Homo sapiens
gaatgctttggagaa

SEQ ID NO: 1885281 - DNA, 15 bp, Homo sapiens
aatgctttggagaaa

SEQ ID NO: 1885282 - DNA, 15 bp, Homo sapiens
atgctttggagaaaa

SEQ ID NO: 1885283 - DNA, 15 bp, Homo sapiens
tgctttggagaaaaa

SEQ ID NO: 1885284 - DNA, 15 bp, Homo sapiens
gctttggagaaaaac

SEQ ID NO: 1885285 - DNA, 15 bp, Homo sapiens
ctttggagaaaaact

SEQ ID NO: 1885286 - DNA, 15 bp, Homo sapiens
tttggagaaaaactg

SEQ ID NO: 1885287 - DNA, 15 bp, Homo sapiens
ttggagaaaaactgg

SEQ ID NO: 1885288 - DNA, 15 bp, Homo sapiens
tggagaaaaactgga

SEQ ID NO: 1885289 - DNA, 15 bp, Homo sapiens
ggagaaaaactggac

SEQ ID NO: 1885290 - DNA, 15 bp, Homo sapiens
gagaaaaactggact

SEQ ID NO: 1885291 - DNA, 15 bp, Homo sapiens
agaaaaactggactt

SEQ ID NO: 1885292 - DNA, 15 bp, Homo sapiens
gaaaaactggacttt

SEQ ID NO: 1885293 - DNA, 15 bp, Homo sapiens
aaaaactggactttg

SEQ ID NO: 1885294 - DNA, 15 bp, Homo sapiens
aaaactggactttgt

SEQ ID NO: 1885295 - DNA, 15 bp, Homo sapiens
aaactggactttgtg

SEQ ID NO: 1885296 - DNA, 15 bp, Homo sapiens
aactggactttgtgg

SEQ ID NO: 1885297 - DNA, 15 bp, Homo sapiens
actggactttgtggg

SEQ ID NO: 1885298 - DNA, 15 bp, Homo sapiens
ctggactttgtggga

SEQ ID NO: 1885299 - DNA, 15 bp, Homo sapiens
tggactttgtgggat

SEQ ID NO: 1885300 - DNA, 15 bp, Homo sapiens
ggactttgtgggatt

SEQ ID NO: 1885301 - DNA, 15 bp, Homo sapiens
gactttgtgggattt

SEQ ID NO: 1885302 - DNA, 15 bp, Homo sapiens
actttgtgggatttt

SEQ ID NO: 1885303 - DNA, 15 bp, Homo sapiens
ctttgtgggattttt

SEQ ID NO: 1885304 - DNA, 15 bp, Homo sapiens
tttgtgggattttta

SEQ ID NO: 1885305 - DNA, 15 bp, Homo sapiens
ttgtgggatttttaa

SEQ ID NO: 1885306 - DNA, 15 bp, Homo sapiens
tgtgggatttttaac

SEQ ID NO: 1885307 - DNA, 15 bp, Homo sapiens
gtgggatttttaacc

SEQ ID NO: 1885308 - DNA, 15 bp, Homo sapiens
tgggatttttaaccc

SEQ ID NO: 1885309 - DNA, 15 bp, Homo sapiens
gggatttttaaccca

SEQ ID NO: 1885310 - DNA, 15 bp, Homo sapiens
ggatttttaacccat

SEQ ID NO: 1885311 - DNA, 15 bp, Homo sapiens
gatttttaacccatg

SEQ ID NO: 1885312 - DNA, 15 bp, Homo sapiens
atttttaacccatga

SEQ ID NO: 1885313 - DNA, 15 bp, Homo sapiens
tttttaacccatgaa

SEQ ID NO: 1885314 - DNA, 15 bp, Homo sapiens
ttttaacccatgaag

SEQ ID NO: 1885315 - DNA, 15 bp, Homo sapiens
tttaacccatgaagg

SEQ ID NO: 1885316 - DNA, 15 bp, Homo sapiens
ttaacccatgaagga

SEQ ID NO: 1885317 - DNA, 15 bp, Homo sapiens
taacccatgaaggaa

SEQ ID NO: 1885318 - DNA, 15 bp, Homo sapiens
aacccatgaaggaaa

SEQ ID NO: 1885319 - DNA, 15 bp, Homo sapiens
acccatgaaggaaag

SEQ ID NO: 1885320 - DNA, 15 bp, Homo sapiens
cccatgaaggaaagt

SEQ ID NO: 1885321 - DNA, 15 bp, Homo sapiens
ccatgaaggaaagta

SEQ ID NO: 1885322 - DNA, 15 bp, Homo sapiens
catgaaggaaagtaa

SEQ ID NO: 1885323 - DNA, 15 bp, Homo sapiens
atgaaggaaagtaaa

SEQ ID NO: 1885324 - DNA, 15 bp, Homo sapiens
tgaaggaaagtaaac

SEQ ID NO: 1885325 - DNA, 15 bp, Homo sapiens
gaaggaaagtaaaca

SEQ ID NO: 1885326 - DNA, 15 bp, Homo sapiens
aaggaaagtaaacaa

SEQ ID NO: 1885327 - DNA, 15 bp, Homo sapiens
aggaaagtaaacaag

SEQ ID NO: 1885328 - DNA, 15 bp, Homo sapiens
ggaaagtaaacaagg

SEQ ID NO: 1885329 - DNA, 15 bp, Homo sapiens
gaaagtaaacaagga

SEQ ID NO: 1885330 - DNA, 15 bp, Homo sapiens
aaagtaaacaaggat

SEQ ID NO: 1885331 - DNA, 15 bp, Homo sapiens
aagtaaacaaggatg

SEQ ID NO: 1885332 - DNA, 15 bp, Homo sapiens
agtaaacaaggatgc

SEQ ID NO: 1885333 - DNA, 15 bp, Homo sapiens
gtaaacaaggatgca

SEQ ID NO: 1885334 - DNA, 15 bp, Homo sapiens
taaacaaggatgcaa

SEQ ID NO: 1885335 - DNA, 15 bp, Homo sapiens
aaacaaggatgcaag

SEQ ID NO: 1885336 - DNA, 15 bp, Homo sapiens
aacaaggatgcaaga

SEQ ID NO: 1885337 - DNA, 15 bp, Homo sapiens
acaaggatgcaagag

SEQ ID NO: 1885338 - DNA, 15 bp, Homo sapiens
caaggatgcaagagc

SEQ ID NO: 1885339 - DNA, 15 bp, Homo sapiens
aaggatgcaagagca

SEQ ID NO: 1885340 - DNA, 15 bp, Homo sapiens
aggatgcaagagcat

SEQ ID NO: 1885341 - DNA, 15 bp, Homo sapiens
ggatgcaagagcatt

SEQ ID NO: 1885342 - DNA, 15 bp, Homo sapiens
gatgcaagagcattt

SEQ ID NO: 1885343 - DNA, 15 bp, Homo sapiens
atgcaagagcatttt

SEQ ID NO: 1885344 - DNA, 15 bp, Homo sapiens
tgcaagagcatttta

SEQ ID NO: 1885345 - DNA, 15 bp, Homo sapiens
gcaagagcattttat

SEQ ID NO: 1885346 - DNA, 15 bp, Homo sapiens
caagagcattttata

SEQ ID NO: 1885347 - DNA, 15 bp, Homo sapiens
aagagcattttataa

SEQ ID NO: 1885348 - DNA, 15 bp, Homo sapiens
agagcattttataat

SEQ ID NO: 1885349 - DNA, 15 bp, Homo sapiens
gagcattttataatt

SEQ ID NO: 1885350 - DNA, 15 bp, Homo sapiens
agcattttataattt

SEQ ID NO: 1885351 - DNA, 15 bp, Homo sapiens
gcattttataatttt

SEQ ID NO: 1885352 - DNA, 15 bp, Homo sapiens
cattttataatttta

SEQ ID NO: 1885353 - DNA, 15 bp, Homo sapiens
attttataattttac

SEQ ID NO: 1885354 - DNA, 15 bp, Homo sapiens
ttttataattttacc

SEQ ID NO: 1885355 - DNA, 15 bp, Homo sapiens
tttataattttaccc

SEQ ID NO: 1885356 - DNA, 15 bp, Homo sapiens
ttataattttaccca

SEQ ID NO: 1885357 - DNA, 15 bp, Homo sapiens
tataattttacccat

SEQ ID NO: 1885358 - DNA, 15 bp, Homo sapiens
ataattttacccata

SEQ ID NO: 1885359 - DNA, 15 bp, Homo sapiens
taattttacccatag

SEQ ID NO: 1885360 - DNA, 15 bp, Homo sapiens
aattttacccatagg

SEQ ID NO: 1885361 - DNA, 15 bp, Homo sapiens
attttacccataggc

SEQ ID NO: 1885362 - DNA, 15 bp, Homo sapiens
ttttacccataggct

SEQ ID NO: 1885363 - DNA, 15 bp, Homo sapiens
tttacccataggctg

SEQ ID NO: 1885364 - DNA, 15 bp, Homo sapiens
ttacccataggctgg

SEQ ID NO: 1885365 - DNA, 15 bp, Homo sapiens
tacccataggctggc

SEQ ID NO: 1885366 - DNA, 15 bp, Homo sapiens
acccataggctggca

SEQ ID NO: 1885367 - DNA, 15 bp, Homo sapiens
cccataggctggcaa

SEQ ID NO: 1885368 - DNA, 15 bp, Homo sapiens
ccataggctggcaat

SEQ ID NO: 1885369 - DNA, 15 bp, Homo sapiens
cataggctggcaata

SEQ ID NO: 1885370 - DNA, 15 bp, Homo sapiens
ataggctggcaataa

SEQ ID NO: 1885371 - DNA, 15 bp, Homo sapiens
taggctggcaataat

SEQ ID NO: 1885372 - DNA, 15 bp, Homo sapiens
aggctggcaataatc

SEQ ID NO: 1885373 - DNA, 15 bp, Homo sapiens
ggctggcaataatca

SEQ ID NO: 1885374 - DNA, 15 bp, Homo sapiens
gctggcaataatcat

SEQ ID NO: 1885375 - DNA, 15 bp, Homo sapiens
ctggcaataatcatt

SEQ ID NO: 1885376 - DNA, 15 bp, Homo sapiens
tggcaataatcattt

SEQ ID NO: 1885377 - DNA, 15 bp, Homo sapiens
ggcaataatcattta

SEQ ID NO: 1885378 - DNA, 15 bp, Homo sapiens
gcaataatcatttat

SEQ ID NO: 1885379 - DNA, 15 bp, Homo sapiens
caataatcatttatt

SEQ ID NO: 1885380 - DNA, 15 bp, Homo sapiens
aataatcatttattc

SEQ ID NO: 1885381 - DNA, 15 bp, Homo sapiens
ataatcatttattcc

SEQ ID NO: 1885382 - DNA, 15 bp, Homo sapiens
taatcatttattcct

SEQ ID NO: 1885383 - DNA, 15 bp, Homo sapiens
aatcatttattcctg

SEQ ID NO: 1885384 - DNA, 15 bp, Homo sapiens
atcatttattcctgc

SEQ ID NO: 1885385 - DNA, 15 bp, Homo sapiens
tcatttattcctgca

SEQ ID NO: 1885386 - DNA, 15 bp, Homo sapiens
catttattcctgcag

SEQ ID NO: 1885387 - DNA, 15 bp, Homo sapiens
atttattcctgcagg

SEQ ID NO: 1885388 - DNA, 15 bp, Homo sapiens
tttattcctgcagga

SEQ ID NO: 1885389 - DNA, 15 bp, Homo sapiens
ttattcctgcaggac

SEQ ID NO: 1885390 - DNA, 15 bp, Homo sapiens
tattcctgcaggaca

SEQ ID NO: 1885391 - DNA, 15 bp, Homo sapiens
attcctgcaggacat

SEQ ID NO: 1885392 - DNA, 15 bp, Homo sapiens
ttcctgcaggacatg

SEQ ID NO: 1885393 - DNA, 15 bp, Homo sapiens
tcctgcaggacatgg

SEQ ID NO: 1885394 - DNA, 15 bp, Homo sapiens
cctgcaggacatgga

SEQ ID NO: 1885395 - DNA, 15 bp, Homo sapiens
ctgcaggacatggag

SEQ ID NO: 1885396 - DNA, 15 bp, Homo sapiens
tgcaggacatggagt

SEQ ID NO: 1885397 - DNA, 15 bp, Homo sapiens
gcaggacatggagtt

SEQ ID NO: 1885398 - DNA, 15 bp, Homo sapiens
caggacatggagtta

SEQ ID NO: 1885399 - DNA, 15 bp, Homo sapiens
aggacatggagttaa

SEQ ID NO: 1885400 - DNA, 15 bp, Homo sapiens
ggacatggagttaaa

SEQ ID NO: 1885401 - DNA, 15 bp, Homo sapiens
gacatggagttaaaa

SEQ ID NO: 1885402 - DNA, 15 bp, Homo sapiens
acatggagttaaaat

SEQ ID NO: 1885403 - DNA, 15 bp, Homo sapiens
catggagttaaaatt

SEQ ID NO: 1885404 - DNA, 15 bp, Homo sapiens
atggagttaaaattg

SEQ ID NO: 1885405 - DNA, 15 bp, Homo sapiens
tggagttaaaattga

SEQ ID NO: 1885406 - DNA, 15 bp, Homo sapiens
ggagttaaaattgaa

SEQ ID NO: 1885407 - DNA, 15 bp, Homo sapiens
gagttaaaattgaag

SEQ ID NO: 1885408 - DNA, 15 bp, Homo sapiens
agttaaaattgaagt

SEQ ID NO: 1885409 - DNA, 15 bp, Homo sapiens
gttaaaattgaagtg

SEQ ID NO: 1885410 - DNA, 15 bp, Homo sapiens
ttaaaattgaagtgc

SEQ ID NO: 1885411 - DNA, 15 bp, Homo sapiens
taaaattgaagtgct

SEQ ID NO: 1885412 - DNA, 15 bp, Homo sapiens
aaaattgaagtgctc

SEQ ID NO: 1885413 - DNA, 15 bp, Homo sapiens
aaattgaagtgctca

SEQ ID NO: 1885414 - DNA, 15 bp, Homo sapiens
aattgaagtgctcaa

SEQ ID NO: 1885415 - DNA, 15 bp, Homo sapiens
attgaagtgctcaaa

SEQ ID NO: 1885416 - DNA, 15 bp, Homo sapiens
ttgaagtgctcaaat

SEQ ID NO: 1885417 - DNA, 15 bp, Homo sapiens
tgaagtgctcaaatt

SEQ ID NO: 1885418 - DNA, 15 bp, Homo sapiens
gaagtgctcaaattg

SEQ ID NO: 1885419 - DNA, 15 bp, Homo sapiens
aagtgctcaaattgg

SEQ ID NO: 1885420 - DNA, 15 bp, Homo sapiens
agtgctcaaattggc

SEQ ID NO: 1885421 - DNA, 15 bp, Homo sapiens
gtgctcaaattggct

SEQ ID NO: 1885422 - DNA, 15 bp, Homo sapiens
tgctcaaattggctc

SEQ ID NO: 1885423 - DNA, 15 bp, Homo sapiens
gctcaaattggctct

SEQ ID NO: 1885424 - DNA, 15 bp, Homo sapiens
ctcaaattggctctg

SEQ ID NO: 1885425 - DNA, 15 bp, Homo sapiens
tcaaattggctctga

SEQ ID NO: 1885426 - DNA, 15 bp, Homo sapiens
caaattggctctgaa

SEQ ID NO: 1885427 - DNA, 15 bp, Homo sapiens
aaattggctctgaat

SEQ ID NO: 1885428 - DNA, 15 bp, Homo sapiens
aattggctctgaatt

SEQ ID NO: 1885429 - DNA, 15 bp, Homo sapiens
attggctctgaattc

SEQ ID NO: 1885430 - DNA, 15 bp, Homo sapiens
ttggctctgaattct

SEQ ID NO: 1885431 - DNA, 15 bp, Homo sapiens
tggctctgaattctc

SEQ ID NO: 1885432 - DNA, 15 bp, Homo sapiens
ggctctgaattctct

SEQ ID NO: 1885433 - DNA, 15 bp, Homo sapiens
gctctgaattctctc

SEQ ID NO: 1885434 - DNA, 15 bp, Homo sapiens
ctctgaattctctca

SEQ ID NO: 1885435 - DNA, 15 bp, Homo sapiens
tctgaattctctcat

SEQ ID NO: 1885436 - DNA, 15 bp, Homo sapiens
ctgaattctctcatt

SEQ ID NO: 1885437 - DNA, 15 bp, Homo sapiens
tgaattctctcatta

SEQ ID NO: 1885438 - DNA, 15 bp, Homo sapiens
gaattctctcattaa

SEQ ID NO: 1885439 - DNA, 15 bp, Homo sapiens
aattctctcattaaa

SEQ ID NO: 1885440 - DNA, 15 bp, Homo sapiens
attctctcattaaaa

SEQ ID NO: 1885441 - DNA, 15 bp, Homo sapiens
ttctctcattaaaac

SEQ ID NO: 1885442 - DNA, 15 bp, Homo sapiens
tctctcattaaaact

SEQ ID NO: 1885443 - DNA, 15 bp, Homo sapiens
ctctcattaaaactg

SEQ ID NO: 1885444 - DNA, 15 bp, Homo sapiens
tctcattaaaactgt

SEQ ID NO: 1885445 - DNA, 15 bp, Homo sapiens
ctcattaaaactgtc

SEQ ID NO: 1885446 - DNA, 15 bp, Homo sapiens
tcattaaaactgtcc

SEQ ID NO: 1885447 - DNA, 15 bp, Homo sapiens
cattaaaactgtcct

SEQ ID NO: 1885448 - DNA, 15 bp, Homo sapiens
attaaaactgtccta

SEQ ID NO: 1885449 - DNA, 15 bp, Homo sapiens
ttaaaactgtcctaa

SEQ ID NO: 1885450 - DNA, 15 bp, Homo sapiens
taaaactgtcctaaa

SEQ ID NO: 1885451 - DNA, 15 bp, Homo sapiens
aaaactgtcctaaaa

SEQ ID NO: 1885452 - DNA, 15 bp, Homo sapiens
aaactgtcctaaaat

SEQ ID NO: 1885453 - DNA, 15 bp, Homo sapiens
aactgtcctaaaata

SEQ ID NO: 1885454 - DNA, 15 bp, Homo sapiens
actgtcctaaaatat

SEQ ID NO: 1885455 - DNA, 15 bp, Homo sapiens
ctgtcctaaaatata

SEQ ID NO: 1885456 - DNA, 15 bp, Homo sapiens
tgtcctaaaatatac

SEQ ID NO: 1885457 - DNA, 15 bp, Homo sapiens
gtcctaaaatataca

SEQ ID NO: 1885458 - DNA, 15 bp, Homo sapiens
tcctaaaatatacat

SEQ ID NO: 1885459 - DNA, 15 bp, Homo sapiens
cctaaaatatacata

SEQ ID NO: 1885460 - DNA, 15 bp, Homo sapiens
ctaaaatatacatag

SEQ ID NO: 1885461 - DNA, 15 bp, Homo sapiens
taaaatatacatagg

SEQ ID NO: 1885462 - DNA, 15 bp, Homo sapiens
aaaatatacataggg

SEQ ID NO: 1885463 - DNA, 15 bp, Homo sapiens
aaatatacatagggt

SEQ ID NO: 1885464 - DNA, 15 bp, Homo sapiens
aatatacatagggtt

SEQ ID NO: 1885465 - DNA, 15 bp, Homo sapiens
atatacatagggttg

SEQ ID NO: 1885466 - DNA, 15 bp, Homo sapiens
tatacatagggttga

SEQ ID NO: 1885467 - DNA, 15 bp, Homo sapiens
atacatagggttgat

SEQ ID NO: 1885468 - DNA, 15 bp, Homo sapiens
tacatagggttgatt

SEQ ID NO: 1885469 - DNA, 15 bp, Homo sapiens
acatagggttgattg

SEQ ID NO: 1885470 - DNA, 15 bp, Homo sapiens
catagggttgattgt

SEQ ID NO: 1885471 - DNA, 15 bp, Homo sapiens
atagggttgattgta

SEQ ID NO: 1885472 - DNA, 15 bp, Homo sapiens
tagggttgattgtat

SEQ ID NO: 1885473 - DNA, 15 bp, Homo sapiens
agggttgattgtatt

SEQ ID NO: 1885474 - DNA, 15 bp, Homo sapiens
gggttgattgtattt

SEQ ID NO: 1885475 - DNA, 15 bp, Homo sapiens
ggttgattgtatttt

SEQ ID NO: 1885476 - DNA, 15 bp, Homo sapiens
gttgattgtattttt

SEQ ID NO: 1885477 - DNA, 15 bp, Homo sapiens
ttgattgtattttta

SEQ ID NO: 1885478 - DNA, 15 bp, Homo sapiens
tgattgtatttttaa

SEQ ID NO: 1885479 - DNA, 15 bp, Homo sapiens
gattgtatttttaat

SEQ ID NO: 1885480 - DNA, 15 bp, Homo sapiens
attgtatttttaatt

SEQ ID NO: 1885481 - DNA, 15 bp, Homo sapiens
ttgtatttttaattt

SEQ ID NO: 1885482 - DNA, 15 bp, Homo sapiens
tgtatttttaattta

SEQ ID NO: 1885483 - DNA, 15 bp, Homo sapiens
gtatttttaatttat

SEQ ID NO: 1885484 - DNA, 15 bp, Homo sapiens
tatttttaatttatc

SEQ ID NO: 1885485 - DNA, 15 bp, Homo sapiens
atttttaatttatcc

SEQ ID NO: 1885486 - DNA, 15 bp, Homo sapiens
tttttaatttatcct

SEQ ID NO: 1885487 - DNA, 15 bp, Homo sapiens
ttttaatttatcctt

SEQ ID NO: 1885488 - DNA, 15 bp, Homo sapiens
tttaatttatccttt

SEQ ID NO: 1885489 - DNA, 15 bp, Homo sapiens
ttaatttatcctttt

SEQ ID NO: 1885490 - DNA, 15 bp, Homo sapiens
taatttatccttttt

SEQ ID NO: 1885491 - DNA, 15 bp, Homo sapiens
aatttatcctttttt

SEQ ID NO: 1885492 - DNA, 15 bp, Homo sapiens
atttatccttttttt

SEQ ID NO: 1885493 - DNA, 15 bp, Homo sapiens
tttatccttttttta

SEQ ID NO: 1885494 - DNA, 15 bp, Homo sapiens
ttatcctttttttaa

SEQ ID NO: 1885495 - DNA, 15 bp, Homo sapiens
tatcctttttttaat

SEQ ID NO: 1885496 - DNA, 15 bp, Homo sapiens
atcctttttttaatt

SEQ ID NO: 1885497 - DNA, 15 bp, Homo sapiens
tcctttttttaattt

SEQ ID NO: 1885498 - DNA, 15 bp, Homo sapiens
cctttttttaatttt

SEQ ID NO: 1885499 - DNA, 15 bp, Homo sapiens
ttttttaatttttgt

SEQ ID NO: 1885500 - DNA, 15 bp, Homo sapiens
tttaatttttgtggg

SEQ ID NO: 1885501 - DNA, 15 bp, Homo sapiens
ttaatttttgtgggt

SEQ ID NO: 1885502 - DNA, 15 bp, Homo sapiens
taatttttgtgggta

SEQ ID NO: 1885503 - DNA, 15 bp, Homo sapiens
aatttttgtgggtac

SEQ ID NO: 1885504 - DNA, 15 bp, Homo sapiens
atttttgtgggtaca

SEQ ID NO: 1885505 - DNA, 15 bp, Homo sapiens
tttttgtgggtacat

SEQ ID NO: 1885506 - DNA, 15 bp, Homo sapiens
ttttgtgggtacata

SEQ ID NO: 1885507 - DNA, 15 bp, Homo sapiens
tttgtgggtacatag

SEQ ID NO: 1885508 - DNA, 15 bp, Homo sapiens
ttgtgggtacatagt

SEQ ID NO: 1885509 - DNA, 15 bp, Homo sapiens
tgtgggtacatagta

SEQ ID NO: 1885510 - DNA, 15 bp, Homo sapiens
gtgggtacatagtag

SEQ ID NO: 1885511 - DNA, 15 bp, Homo sapiens
tgggtacatagtagg

SEQ ID NO: 1885512 - DNA, 15 bp, Homo sapiens
gggtacatagtaggt

SEQ ID NO: 1885513 - DNA, 15 bp, Homo sapiens
tacatagtaggtgca

SEQ ID NO: 1885514 - DNA, 15 bp, Homo sapiens
acatagtaggtgcat

SEQ ID NO: 1885515 - DNA, 15 bp, Homo sapiens
catagtaggtgcata

SEQ ID NO: 1885516 - DNA, 15 bp, Homo sapiens
atagtaggtgcatat

SEQ ID NO: 1885517 - DNA, 15 bp, Homo sapiens
tagtaggtgcatata

SEQ ID NO: 1885518 - DNA, 15 bp, Homo sapiens
agtaggtgcatatat

SEQ ID NO: 1885519 - DNA, 15 bp, Homo sapiens
gtaggtgcatatatt

SEQ ID NO: 1885520 - DNA, 15 bp, Homo sapiens
taggtgcatatattt

SEQ ID NO: 1885521 - DNA, 15 bp, Homo sapiens
aggtgcatatattta

SEQ ID NO: 1885522 - DNA, 15 bp, Homo sapiens
ggtgcatatatttat

SEQ ID NO: 1885523 - DNA, 15 bp, Homo sapiens
gtgcatatatttatt

SEQ ID NO: 1885524 - DNA, 15 bp, Homo sapiens
tgcatatatttattg

SEQ ID NO: 1885525 - DNA, 15 bp, Homo sapiens
gcatatatttattga

SEQ ID NO: 1885526 - DNA, 15 bp, Homo sapiens
catatatttattgag

SEQ ID NO: 1885527 - DNA, 15 bp, Homo sapiens
atatatttattgagt

SEQ ID NO: 1885528 - DNA, 15 bp, Homo sapiens
tatatttattgagta

SEQ ID NO: 1885529 - DNA, 15 bp, Homo sapiens
atatttattgagtac

SEQ ID NO: 1885530 - DNA, 15 bp, Homo sapiens
tatttattgagtaca

SEQ ID NO: 1885531 - DNA, 15 bp, Homo sapiens
atttattgagtacat

SEQ ID NO: 1885532 - DNA, 15 bp, Homo sapiens
tttattgagtacatg

SEQ ID NO: 1885533 - DNA, 15 bp, Homo sapiens
ttattgagtacatga

SEQ ID NO: 1885534 - DNA, 15 bp, Homo sapiens
tattgagtacatgag

SEQ ID NO: 1885535 - DNA, 15 bp, Homo sapiens
attgagtacatgaga

SEQ ID NO: 1885536 - DNA, 15 bp, Homo sapiens
ttgagtacatgagat

SEQ ID NO: 1885537 - DNA, 15 bp, Homo sapiens
tgagtacatgagatg

SEQ ID NO: 1885538 - DNA, 15 bp, Homo sapiens
gagtacatgagatgt

SEQ ID NO: 1885539 - DNA, 15 bp, Homo sapiens
agtacatgagatgtt

SEQ ID NO: 1885540 - DNA, 15 bp, Homo sapiens
gtacatgagatgttt

SEQ ID NO: 1885541 - DNA, 15 bp, Homo sapiens
tacatgagatgtttt

SEQ ID NO: 1885542 - DNA, 15 bp, Homo sapiens
acatgagatgttttg

SEQ ID NO: 1885543 - DNA, 15 bp, Homo sapiens
catgagatgttttga

SEQ ID NO: 1885544 - DNA, 15 bp, Homo sapiens
atgagatgttttgat

SEQ ID NO: 1885545 - DNA, 15 bp, Homo sapiens
tgagatgttttgata

SEQ ID NO: 1885546 - DNA, 15 bp, Homo sapiens
gagatgttttgatag

SEQ ID NO: 1885547 - DNA, 15 bp, Homo sapiens
agatgttttgataga

SEQ ID NO: 1885548 - DNA, 15 bp, Homo sapiens
gatgttttgatagag

SEQ ID NO: 1885549 - DNA, 15 bp, Homo sapiens
atgttttgatagagg

SEQ ID NO: 1885550 - DNA, 15 bp, Homo sapiens
tgttttgatagaggc

SEQ ID NO: 1885551 - DNA, 15 bp, Homo sapiens
gttttgatagaggca

SEQ ID NO: 1885552 - DNA, 15 bp, Homo sapiens
ttttgatagaggcat

SEQ ID NO: 1885553 - DNA, 15 bp, Homo sapiens
tttgatagaggcatg

SEQ ID NO: 1885554 - DNA, 15 bp, Homo sapiens
ttgatagaggcatgc

SEQ ID NO: 1885555 - DNA, 15 bp, Homo sapiens
tgatagaggcatgca

SEQ ID NO: 1885556 - DNA, 15 bp, Homo sapiens
gatagaggcatgcag

SEQ ID NO: 1885557 - DNA, 15 bp, Homo sapiens
atagaggcatgcagc

SEQ ID NO: 1885558 - DNA, 15 bp, Homo sapiens
tagaggcatgcagca

SEQ ID NO: 1885559 - DNA, 15 bp, Homo sapiens
agaggcatgcagcat

SEQ ID NO: 1885560 - DNA, 15 bp, Homo sapiens
gaggcatgcagcatg

SEQ ID NO: 1885561 - DNA, 15 bp, Homo sapiens
aggcatgcagcatga

SEQ ID NO: 1885562 - DNA, 15 bp, Homo sapiens
ggcatgcagcatgaa

SEQ ID NO: 1885563 - DNA, 15 bp, Homo sapiens
gcatgcagcatgaaa

SEQ ID NO: 1885564 - DNA, 15 bp, Homo sapiens
catgcagcatgaaat

SEQ ID NO: 1885565 - DNA, 15 bp, Homo sapiens
atgcagcatgaaata

SEQ ID NO: 1885566 - DNA, 15 bp, Homo sapiens
tgcagcatgaaataa

SEQ ID NO: 1885567 - DNA, 15 bp, Homo sapiens
gcagcatgaaataag

SEQ ID NO: 1885568 - DNA, 15 bp, Homo sapiens
cagcatgaaataagc

SEQ ID NO: 1885569 - DNA, 15 bp, Homo sapiens
agcatgaaataagca

SEQ ID NO: 1885570 - DNA, 15 bp, Homo sapiens
gcatgaaataagcac

SEQ ID NO: 1885571 - DNA, 15 bp, Homo sapiens
catgaaataagcaca

SEQ ID NO: 1885572 - DNA, 15 bp, Homo sapiens
atgaaataagcacaa

SEQ ID NO: 1885573 - DNA, 15 bp, Homo sapiens
tgaaataagcacaat

SEQ ID NO: 1885574 - DNA, 15 bp, Homo sapiens
gaaataagcacaata

SEQ ID NO: 1885575 - DNA, 15 bp, Homo sapiens
aaataagcacaataa

SEQ ID NO: 1885576 - DNA, 15 bp, Homo sapiens
aataagcacaataat

SEQ ID NO: 1885577 - DNA, 15 bp, Homo sapiens
ataagcacaataata

SEQ ID NO: 1885578 - DNA, 15 bp, Homo sapiens
taagcacaataatag

SEQ ID NO: 1885579 - DNA, 15 bp, Homo sapiens
aagcacaataataga

SEQ ID NO: 1885580 - DNA, 15 bp, Homo sapiens
agcacaataatagag

SEQ ID NO: 1885581 - DNA, 15 bp, Homo sapiens
gcacaataatagaga

SEQ ID NO: 1885582 - DNA, 15 bp, Homo sapiens
cacaataatagagaa

SEQ ID NO: 1885583 - DNA, 15 bp, Homo sapiens
acaataatagagaat

SEQ ID NO: 1885584 - DNA, 15 bp, Homo sapiens
caataatagagaatg

SEQ ID NO: 1885585 - DNA, 15 bp, Homo sapiens
aataatagagaatgg

SEQ ID NO: 1885586 - DNA, 15 bp, Homo sapiens
ataatagagaatggg

SEQ ID NO: 1885587 - DNA, 15 bp, Homo sapiens
taatagagaatgggc

SEQ ID NO: 1885588 - DNA, 15 bp, Homo sapiens
aatagagaatgggct

SEQ ID NO: 1885589 - DNA, 15 bp, Homo sapiens
atagagaatgggcta

SEQ ID NO: 1885590 - DNA, 15 bp, Homo sapiens
tagagaatgggctat

SEQ ID NO: 1885591 - DNA, 15 bp, Homo sapiens
agagaatgggctatc

SEQ ID NO: 1885592 - DNA, 15 bp, Homo sapiens
gagaatgggctatcc

SEQ ID NO: 1885593 - DNA, 15 bp, Homo sapiens
agaatgggctatcca

SEQ ID NO: 1885594 - DNA, 15 bp, Homo sapiens
gaatgggctatccat

SEQ ID NO: 1885595 - DNA, 15 bp, Homo sapiens
aatgggctatccatc

SEQ ID NO: 1885596 - DNA, 15 bp, Homo sapiens
atgggctatccatcc

SEQ ID NO: 1885597 - DNA, 15 bp, Homo sapiens
tgggctatccatcca

SEQ ID NO: 1885598 - DNA, 15 bp, Homo sapiens
gggctatccatccat

SEQ ID NO: 1885599 - DNA, 15 bp, Homo sapiens
ggctatccatccatc

SEQ ID NO: 1885600 - DNA, 15 bp, Homo sapiens
gctatccatccatca

SEQ ID NO: 1885601 - DNA, 15 bp, Homo sapiens
ctatccatccatcaa

SEQ ID NO: 1885602 - DNA, 15 bp, Homo sapiens
tatccatccatcaaa

SEQ ID NO: 1885603 - DNA, 15 bp, Homo sapiens
atccatccatcaaag

SEQ ID NO: 1885604 - DNA, 15 bp, Homo sapiens
tccatccatcaaagt

SEQ ID NO: 1885605 - DNA, 15 bp, Homo sapiens
ccatccatcaaagta

SEQ ID NO: 1885606 - DNA, 15 bp, Homo sapiens
catccatcaaagtat

SEQ ID NO: 1885607 - DNA, 15 bp, Homo sapiens
atccatcaaagtatt

SEQ ID NO: 1885608 - DNA, 15 bp, Homo sapiens
tccatcaaagtattt

SEQ ID NO: 1885609 - DNA, 15 bp, Homo sapiens
ccatcaaagtattta

SEQ ID NO: 1885610 - DNA, 15 bp, Homo sapiens
catcaaagtatttat

SEQ ID NO: 1885611 - DNA, 15 bp, Homo sapiens
atcaaagtatttatc

SEQ ID NO: 1885612 - DNA, 15 bp, Homo sapiens
tcaaagtatttatcc

SEQ ID NO: 1885613 - DNA, 15 bp, Homo sapiens
caaagtatttatcca

SEQ ID NO: 1885614 - DNA, 15 bp, Homo sapiens
aaagtatttatccat

SEQ ID NO: 1885615 - DNA, 15 bp, Homo sapiens
aagtatttatccatt

SEQ ID NO: 1885616 - DNA, 15 bp, Homo sapiens
agtatttatccattg

SEQ ID NO: 1885617 - DNA, 15 bp, Homo sapiens
gtatttatccattga

SEQ ID NO: 1885618 - DNA, 15 bp, Homo sapiens
tatttatccattgag

SEQ ID NO: 1885619 - DNA, 15 bp, Homo sapiens
atttatccattgagt

SEQ ID NO: 1885620 - DNA, 15 bp, Homo sapiens
tttatccattgagtt

SEQ ID NO: 1885621 - DNA, 15 bp, Homo sapiens
ttatccattgagtta

SEQ ID NO: 1885622 - DNA, 15 bp, Homo sapiens
tatccattgagttac

SEQ ID NO: 1885623 - DNA, 15 bp, Homo sapiens
atccattgagttaca

SEQ ID NO: 1885624 - DNA, 15 bp, Homo sapiens
tccattgagttacaa

SEQ ID NO: 1885625 - DNA, 15 bp, Homo sapiens
ccattgagttacaaa

SEQ ID NO: 1885626 - DNA, 15 bp, Homo sapiens
cattgagttacaaac

SEQ ID NO: 1885627 - DNA, 15 bp, Homo sapiens
attgagttacaaaca

SEQ ID NO: 1885628 - DNA, 15 bp, Homo sapiens
ttgagttacaaacaa

SEQ ID NO: 1885629 - DNA, 15 bp, Homo sapiens
tgagttacaaacaat

SEQ ID NO: 1885630 - DNA, 15 bp, Homo sapiens
gagttacaaacaatc

SEQ ID NO: 1885631 - DNA, 15 bp, Homo sapiens
agttacaaacaatcc

SEQ ID NO: 1885632 - DNA, 15 bp, Homo sapiens
aaacaatccaattac

SEQ ID NO: 1885633 - DNA, 15 bp, Homo sapiens
aacaatccaattaca

SEQ ID NO: 1885634 - DNA, 15 bp, Homo sapiens
acaatccaattacac

SEQ ID NO: 1885635 - DNA, 15 bp, Homo sapiens
caatccaattacact

SEQ ID NO: 1885636 - DNA, 15 bp, Homo sapiens
aatccaattacactc

SEQ ID NO: 1885637 - DNA, 15 bp, Homo sapiens
atccaattacactct

SEQ ID NO: 1885638 - DNA, 15 bp, Homo sapiens
tccaattacactcta

SEQ ID NO: 1885639 - DNA, 15 bp, Homo sapiens
ccaattacactctat

SEQ ID NO: 1885640 - DNA, 15 bp, Homo sapiens
caattacactctatt

SEQ ID NO: 1885641 - DNA, 15 bp, Homo sapiens
aattacactctattt

SEQ ID NO: 1885642 - DNA, 15 bp, Homo sapiens
attacactctatttt

SEQ ID NO: 1885643 - DNA, 15 bp, Homo sapiens
ttacactctatttta

SEQ ID NO: 1885644 - DNA, 15 bp, Homo sapiens
tacactctattttaa

SEQ ID NO: 1885645 - DNA, 15 bp, Homo sapiens
acactctattttaaa

SEQ ID NO: 1885646 - DNA, 15 bp, Homo sapiens
cactctattttaaaa

SEQ ID NO: 1885647 - DNA, 15 bp, Homo sapiens
actctattttaaaat

SEQ ID NO: 1885648 - DNA, 15 bp, Homo sapiens
ctctattttaaaatg

SEQ ID NO: 1885649 - DNA, 15 bp, Homo sapiens
tctattttaaaatgt

SEQ ID NO: 1885650 - DNA, 15 bp, Homo sapiens
ctattttaaaatgta

SEQ ID NO: 1885651 - DNA, 15 bp, Homo sapiens
tattttaaaatgtac

SEQ ID NO: 1885652 - DNA, 15 bp, Homo sapiens
attttaaaatgtaca

SEQ ID NO: 1885653 - DNA, 15 bp, Homo sapiens
ttttaaaatgtacaa

SEQ ID NO: 1885654 - DNA, 15 bp, Homo sapiens
tttaaaatgtacaat

SEQ ID NO: 1885655 - DNA, 15 bp, Homo sapiens
ttaaaatgtacaatt

SEQ ID NO: 1885656 - DNA, 15 bp, Homo sapiens
taaaatgtacaatta

SEQ ID NO: 1885657 - DNA, 15 bp, Homo sapiens
aaaatgtacaattaa

SEQ ID NO: 1885658 - DNA, 15 bp, Homo sapiens
aaatgtacaattaag

SEQ ID NO: 1885659 - DNA, 15 bp, Homo sapiens
aatgtacaattaagt

SEQ ID NO: 1885660 - DNA, 15 bp, Homo sapiens
atgtacaattaagtt

SEQ ID NO: 1885661 - DNA, 15 bp, Homo sapiens
tgtacaattaagtta

SEQ ID NO: 1885662 - DNA, 15 bp, Homo sapiens
gtacaattaagttat

SEQ ID NO: 1885663 - DNA, 15 bp, Homo sapiens
tacaattaagttatc

SEQ ID NO: 1885664 - DNA, 15 bp, Homo sapiens
acaattaagttatca

SEQ ID NO: 1885665 - DNA, 15 bp, Homo sapiens
caattaagttatcat

SEQ ID NO: 1885666 - DNA, 15 bp, Homo sapiens
aattaagttatcatt

SEQ ID NO: 1885667 - DNA, 15 bp, Homo sapiens
attaagttatcattg

SEQ ID NO: 1885668 - DNA, 15 bp, Homo sapiens
ttaagttatcattga

SEQ ID NO: 1885669 - DNA, 15 bp, Homo sapiens
taagttatcattgac

SEQ ID NO: 1885670 - DNA, 15 bp, Homo sapiens
aagttatcattgaca

SEQ ID NO: 1885671 - DNA, 15 bp, Homo sapiens
agttatcattgacaa

SEQ ID NO: 1885672 - DNA, 15 bp, Homo sapiens
gttatcattgacaat

SEQ ID NO: 1885673 - DNA, 15 bp, Homo sapiens
ttatcattgacaata

SEQ ID NO: 1885674 - DNA, 15 bp, Homo sapiens
tatcattgacaataa

SEQ ID NO: 1885675 - DNA, 15 bp, Homo sapiens
atcattgacaataat

SEQ ID NO: 1885676 - DNA, 15 bp, Homo sapiens
tcattgacaataatc

SEQ ID NO: 1885677 - DNA, 15 bp, Homo sapiens
cattgacaataatca

SEQ ID NO: 1885678 - DNA, 15 bp, Homo sapiens
attgacaataatcac

SEQ ID NO: 1885679 - DNA, 15 bp, Homo sapiens
ttgacaataatcacc

SEQ ID NO: 1885680 - DNA, 15 bp, Homo sapiens
tgacaataatcaccc

SEQ ID NO: 1885681 - DNA, 15 bp, Homo sapiens
gacaataatcaccct

SEQ ID NO: 1885682 - DNA, 15 bp, Homo sapiens
acaataatcacccta

SEQ ID NO: 1885683 - DNA, 15 bp, Homo sapiens
caataatcaccctat

SEQ ID NO: 1885684 - DNA, 15 bp, Homo sapiens
aataatcaccctatt

SEQ ID NO: 1885685 - DNA, 15 bp, Homo sapiens
ataatcaccctattg

SEQ ID NO: 1885686 - DNA, 15 bp, Homo sapiens
taatcaccctattgt

SEQ ID NO: 1885687 - DNA, 15 bp, Homo sapiens
aatcaccctattgtg

SEQ ID NO: 1885688 - DNA, 15 bp, Homo sapiens
atcaccctattgtgc

SEQ ID NO: 1885689 - DNA, 15 bp, Homo sapiens
tcaccctattgtgct

SEQ ID NO: 1885690 - DNA, 15 bp, Homo sapiens
caccctattgtgcta

SEQ ID NO: 1885691 - DNA, 15 bp, Homo sapiens
accctattgtgctat

SEQ ID NO: 1885692 - DNA, 15 bp, Homo sapiens
ccctattgtgctatt

SEQ ID NO: 1885693 - DNA, 15 bp, Homo sapiens
cctattgtgctattg

SEQ ID NO: 1885694 - DNA, 15 bp, Homo sapiens
ctattgtgctattga

SEQ ID NO: 1885695 - DNA, 15 bp, Homo sapiens
tattgtgctattgaa

SEQ ID NO: 1885696 - DNA, 15 bp, Homo sapiens
attgtgctattgaat

SEQ ID NO: 1885697 - DNA, 15 bp, Homo sapiens
ttgtgctattgaata

SEQ ID NO: 1885698 - DNA, 15 bp, Homo sapiens
tgtgctattgaatag

SEQ ID NO: 1885699 - DNA, 15 bp, Homo sapiens
gtgctattgaatagt

SEQ ID NO: 1885700 - DNA, 15 bp, Homo sapiens
tgctattgaatagta

SEQ ID NO: 1885701 - DNA, 15 bp, Homo sapiens
gctattgaatagtag

SEQ ID NO: 1885702 - DNA, 15 bp, Homo sapiens
ctattgaatagtagg

SEQ ID NO: 1885703 - DNA, 15 bp, Homo sapiens
tattgaatagtaggt

SEQ ID NO: 1885704 - DNA, 15 bp, Homo sapiens
attgaatagtaggtc

SEQ ID NO: 1885705 - DNA, 15 bp, Homo sapiens
ttgaatagtaggtct

SEQ ID NO: 1885706 - DNA, 15 bp, Homo sapiens
tgaatagtaggtctt

SEQ ID NO: 1885707 - DNA, 15 bp, Homo sapiens
gaatagtaggtctta

SEQ ID NO: 1885708 - DNA, 15 bp, Homo sapiens
aatagtaggtcttat

SEQ ID NO: 1885709 - DNA, 15 bp, Homo sapiens
atagtaggtcttatt

SEQ ID NO: 1885710 - DNA, 15 bp, Homo sapiens
tagtaggtcttattt

SEQ ID NO: 1885711 - DNA, 15 bp, Homo sapiens
agtaggtcttattta

SEQ ID NO: 1885712 - DNA, 15 bp, Homo sapiens
gtaggtcttatttat

SEQ ID NO: 1885713 - DNA, 15 bp, Homo sapiens
taggtcttatttatt

SEQ ID NO: 1885714 - DNA, 15 bp, Homo sapiens
aggtcttatttattc

SEQ ID NO: 1885715 - DNA, 15 bp, Homo sapiens
ggtcttatttattct

SEQ ID NO: 1885716 - DNA, 15 bp, Homo sapiens
gtcttatttattctt

SEQ ID NO: 1885717 - DNA, 15 bp, Homo sapiens
tcttatttattcttt

SEQ ID NO: 1885718 - DNA, 15 bp, Homo sapiens
cttatttattctttc

SEQ ID NO: 1885719 - DNA, 15 bp, Homo sapiens
ttatttattctttct

SEQ ID NO: 1885720 - DNA, 15 bp, Homo sapiens
tatttattctttcta

SEQ ID NO: 1885721 - DNA, 15 bp, Homo sapiens
atttattctttctat

SEQ ID NO: 1885722 - DNA, 15 bp, Homo sapiens
tttattctttctatt

SEQ ID NO: 1885723 - DNA, 15 bp, Homo sapiens
ttattctttctattt

SEQ ID NO: 1885724 - DNA, 15 bp, Homo sapiens
tattctttctatttt

SEQ ID NO: 1885725 - DNA, 15 bp, Homo sapiens
attctttctattttt

SEQ ID NO: 1885726 - DNA, 15 bp, Homo sapiens
ttctttctatttttt

SEQ ID NO: 1885727 - DNA, 15 bp, Homo sapiens
tctttctattttttg

SEQ ID NO: 1885728 - DNA, 15 bp, Homo sapiens
ctttctattttttgt

SEQ ID NO: 1885729 - DNA, 15 bp, Homo sapiens
tttctattttttgta

SEQ ID NO: 1885730 - DNA, 15 bp, Homo sapiens
ttctattttttgtac

SEQ ID NO: 1885731 - DNA, 15 bp, Homo sapiens
tctattttttgtacc

SEQ ID NO: 1885732 - DNA, 15 bp, Homo sapiens
ctattttttgtacct

SEQ ID NO: 1885733 - DNA, 15 bp, Homo sapiens
tattttttgtaccta

SEQ ID NO: 1885734 - DNA, 15 bp, Homo sapiens
attttttgtacctat

SEQ ID NO: 1885735 - DNA, 15 bp, Homo sapiens
ttttttgtacctatt

SEQ ID NO: 1885736 - DNA, 15 bp, Homo sapiens
tttttgtacctattt

SEQ ID NO: 1885737 - DNA, 15 bp, Homo sapiens
ttttgtacctatttc

SEQ ID NO: 1885738 - DNA, 15 bp, Homo sapiens
tttgtacctatttcc

SEQ ID NO: 1885739 - DNA, 15 bp, Homo sapiens
ttgtacctatttcca

SEQ ID NO: 1885740 - DNA, 15 bp, Homo sapiens
tgtacctatttccac

SEQ ID NO: 1885741 - DNA, 15 bp, Homo sapiens
gtacctatttccact

SEQ ID NO: 1885742 - DNA, 15 bp, Homo sapiens
tacctatttccactg

SEQ ID NO: 1885743 - DNA, 15 bp, Homo sapiens
acctatttccactgc

SEQ ID NO: 1885744 - DNA, 15 bp, Homo sapiens
cctatttccactgcc

SEQ ID NO: 1885745 - DNA, 15 bp, Homo sapiens
tatttccactgcccc

SEQ ID NO: 1885746 - DNA, 15 bp, Homo sapiens
atttccactgccccc

SEQ ID NO: 1885747 - DNA, 15 bp, Homo sapiens
tttccactgccccct

SEQ ID NO: 1885748 - DNA, 15 bp, Homo sapiens
ttccactgccccctc

SEQ ID NO: 1885749 - DNA, 15 bp, Homo sapiens
tccactgccccctca

SEQ ID NO: 1885750 - DNA, 15 bp, Homo sapiens
ccactgccccctcag

SEQ ID NO: 1885751 - DNA, 15 bp, Homo sapiens
cactgccccctcagc

SEQ ID NO: 1885752 - DNA, 15 bp, Homo sapiens
actgccccctcagcc

SEQ ID NO: 1885753 - DNA, 15 bp, Homo sapiens
ctgccccctcagccc

SEQ ID NO: 1885754 - DNA, 15 bp, Homo sapiens
tgccccctcagcccc

SEQ ID NO: 1885755 - DNA, 15 bp, Homo sapiens
gccccctcagccccc

SEQ ID NO: 1885756 - DNA, 15 bp, Homo sapiens
ccccctcagccccca

SEQ ID NO: 1885757 - DNA, 15 bp, Homo sapiens
cccctcagcccccaa

SEQ ID NO: 1885758 - DNA, 15 bp, Homo sapiens
ccctcagcccccaac

SEQ ID NO: 1885759 - DNA, 15 bp, Homo sapiens
cctcagcccccaact

SEQ ID NO: 1885760 - DNA, 15 bp, Homo sapiens
ctcagcccccaacta

SEQ ID NO: 1885761 - DNA, 15 bp, Homo sapiens
tcagcccccaactac

SEQ ID NO: 1885762 - DNA, 15 bp, Homo sapiens
cagcccccaactacc

SEQ ID NO: 1885763 - DNA, 15 bp, Homo sapiens
agcccccaactaccc

SEQ ID NO: 1885764 - DNA, 15 bp, Homo sapiens
gcccccaactaccct

SEQ ID NO: 1885765 - DNA, 15 bp, Homo sapiens
cccccaactaccctt

SEQ ID NO: 1885766 - DNA, 15 bp, Homo sapiens
ccccaactacccttc

SEQ ID NO: 1885767 - DNA, 15 bp, Homo sapiens
cccaactacccttcc

SEQ ID NO: 1885768 - DNA, 15 bp, Homo sapiens
ccaactacccttccc

SEQ ID NO: 1885769 - DNA, 15 bp, Homo sapiens
caactacccttccca

SEQ ID NO: 1885770 - DNA, 15 bp, Homo sapiens
aactacccttcccag

SEQ ID NO: 1885771 - DNA, 15 bp, Homo sapiens
actacccttcccagc

SEQ ID NO: 1885772 - DNA, 15 bp, Homo sapiens
ctacccttcccagct

SEQ ID NO: 1885773 - DNA, 15 bp, Homo sapiens
tacccttcccagctc

SEQ ID NO: 1885774 - DNA, 15 bp, Homo sapiens
acccttcccagctcc

SEQ ID NO: 1885775 - DNA, 15 bp, Homo sapiens
cccttcccagctcct

SEQ ID NO: 1885776 - DNA, 15 bp, Homo sapiens
ccttcccagctcctg

SEQ ID NO: 1885777 - DNA, 15 bp, Homo sapiens
cttcccagctcctgg

SEQ ID NO: 1885778 - DNA, 15 bp, Homo sapiens
ttcccagctcctggg

SEQ ID NO: 1885779 - DNA, 15 bp, Homo sapiens
tcccagctcctggga

SEQ ID NO: 1885780 - DNA, 15 bp, Homo sapiens
cccagctcctgggaa

SEQ ID NO: 1885781 - DNA, 15 bp, Homo sapiens
ccagctcctgggaac

SEQ ID NO: 1885782 - DNA, 15 bp, Homo sapiens
cagctcctgggaacc

SEQ ID NO: 1885783 - DNA, 15 bp, Homo sapiens
agctcctgggaacca

SEQ ID NO: 1885784 - DNA, 15 bp, Homo sapiens
gctcctgggaaccac

SEQ ID NO: 1885785 - DNA, 15 bp, Homo sapiens
ctcctgggaaccact

SEQ ID NO: 1885786 - DNA, 15 bp, Homo sapiens
tcctgggaaccactc

SEQ ID NO: 1885787 - DNA, 15 bp, Homo sapiens
cctgggaaccactct

SEQ ID NO: 1885788 - DNA, 15 bp, Homo sapiens
ctgggaaccactctt

SEQ ID NO: 1885789 - DNA, 15 bp, Homo sapiens
tgggaaccactcttc

SEQ ID NO: 1885790 - DNA, 15 bp, Homo sapiens
gggaaccactcttct

SEQ ID NO: 1885791 - DNA, 15 bp, Homo sapiens
ggaaccactcttcta

SEQ ID NO: 1885792 - DNA, 15 bp, Homo sapiens
gaaccactcttctac

SEQ ID NO: 1885793 - DNA, 15 bp, Homo sapiens
aaccactcttctact

SEQ ID NO: 1885794 - DNA, 15 bp, Homo sapiens
accactcttctactc

SEQ ID NO: 1885795 - DNA, 15 bp, Homo sapiens
ccactcttctactct

SEQ ID NO: 1885796 - DNA, 15 bp, Homo sapiens
cactcttctactctc

SEQ ID NO: 1885797 - DNA, 15 bp, Homo sapiens
actcttctactctct

SEQ ID NO: 1885798 - DNA, 15 bp, Homo sapiens
ctcttctactctctg

SEQ ID NO: 1885799 - DNA, 15 bp, Homo sapiens
tcttctactctctgg

SEQ ID NO: 1885800 - DNA, 15 bp, Homo sapiens
cttctactctctggg

SEQ ID NO: 1885801 - DNA, 15 bp, Homo sapiens
ttctactctctgggt

SEQ ID NO: 1885802 - DNA, 15 bp, Homo sapiens
tctactctctgggtc

SEQ ID NO: 1885803 - DNA, 15 bp, Homo sapiens
ctactctctgggtcc

SEQ ID NO: 1885804 - DNA, 15 bp, Homo sapiens
tactctctgggtcca

SEQ ID NO: 1885805 - DNA, 15 bp, Homo sapiens
actctctgggtccat

SEQ ID NO: 1885806 - DNA, 15 bp, Homo sapiens
ctctctgggtccatg

SEQ ID NO: 1885807 - DNA, 15 bp, Homo sapiens
tctctgggtccatga

SEQ ID NO: 1885808 - DNA, 15 bp, Homo sapiens
ctctgggtccatgag

SEQ ID NO: 1885809 - DNA, 15 bp, Homo sapiens
tctgggtccatgagt

SEQ ID NO: 1885810 - DNA, 15 bp, Homo sapiens
ctgggtccatgagtt

SEQ ID NO: 1885811 - DNA, 15 bp, Homo sapiens
tgggtccatgagttc

SEQ ID NO: 1885812 - DNA, 15 bp, Homo sapiens
gggtccatgagttca

SEQ ID NO: 1885813 - DNA, 15 bp, Homo sapiens
ggtccatgagttcaa

SEQ ID NO: 1885814 - DNA, 15 bp, Homo sapiens
gtccatgagttcaat

SEQ ID NO: 1885815 - DNA, 15 bp, Homo sapiens
tgggtggaagaatgg

SEQ ID NO: 1885816 - DNA, 15 bp, Homo sapiens
gggtggaagaatggg

SEQ ID NO: 1885817 - DNA, 15 bp, Homo sapiens
ggtggaagaatggga

SEQ ID NO: 1885818 - DNA, 15 bp, Homo sapiens
gtggaagaatgggag

SEQ ID NO: 1885819 - DNA, 15 bp, Homo sapiens
tggaagaatgggagg

SEQ ID NO: 1885820 - DNA, 15 bp, Homo sapiens
ggaagaatgggaggg

SEQ ID NO: 1885821 - DNA, 15 bp, Homo sapiens
gaagaatgggagggg

SEQ ID NO: 1885822 - DNA, 15 bp, Homo sapiens
aagaatgggagggga

SEQ ID NO: 1885823 - DNA, 15 bp, Homo sapiens
agaatgggaggggag

SEQ ID NO: 1885824 - DNA, 15 bp, Homo sapiens
gaatgggaggggagt

SEQ ID NO: 1885825 - DNA, 15 bp, Homo sapiens
aatgggaggggagtg

SEQ ID NO: 1885826 - DNA, 15 bp, Homo sapiens
atgggaggggagtga

SEQ ID NO: 1885827 - DNA, 15 bp, Homo sapiens
tgggaggggagtgag

SEQ ID NO: 1885828 - DNA, 15 bp, Homo sapiens
gggaggggagtgagg

SEQ ID NO: 1885829 - DNA, 15 bp, Homo sapiens
gaggggagtgaggga

SEQ ID NO: 1885830 - DNA, 15 bp, Homo sapiens
aggggagtgagggat

SEQ ID NO: 1885831 - DNA, 15 bp, Homo sapiens
ggggagtgagggata

SEQ ID NO: 1885832 - DNA, 15 bp, Homo sapiens
gggagtgagggataa

SEQ ID NO: 1885833 - DNA, 15 bp, Homo sapiens
ggagtgagggataaa

SEQ ID NO: 1885834 - DNA, 15 bp, Homo sapiens
gagtgagggataaaa

SEQ ID NO: 1885835 - DNA, 15 bp, Homo sapiens
agtgagggataaaag

SEQ ID NO: 1885836 - DNA, 15 bp, Homo sapiens
gtgagggataaaaga

SEQ ID NO: 1885837 - DNA, 15 bp, Homo sapiens
tgagggataaaagaa

SEQ ID NO: 1885838 - DNA, 15 bp, Homo sapiens
gagggataaaagaat

SEQ ID NO: 1885839 - DNA, 15 bp, Homo sapiens
agggataaaagaata

SEQ ID NO: 1885840 - DNA, 15 bp, Homo sapiens
gggataaaagaatac

SEQ ID NO: 1885841 - DNA, 15 bp, Homo sapiens
ggataaaagaataca

SEQ ID NO: 1885842 - DNA, 15 bp, Homo sapiens
gataaaagaatacaa

SEQ ID NO: 1885843 - DNA, 15 bp, Homo sapiens
ataaaagaatacaaa

SEQ ID NO: 1885844 - DNA, 15 bp, Homo sapiens
taaaagaatacaaat

SEQ ID NO: 1885845 - DNA, 15 bp, Homo sapiens
aaaagaatacaaata

SEQ ID NO: 1885846 - DNA, 15 bp, Homo sapiens
aaagaatacaaatat

SEQ ID NO: 1885847 - DNA, 15 bp, Homo sapiens
agaatacaaatataa

SEQ ID NO: 1885848 - DNA, 15 bp, Homo sapiens
gaatacaaatataat

SEQ ID NO: 1885849 - DNA, 15 bp, Homo sapiens
aatacaaatataatg

SEQ ID NO: 1885850 - DNA, 15 bp, Homo sapiens
atacaaatataatgc

SEQ ID NO: 1885851 - DNA, 15 bp, Homo sapiens
tacaaatataatgca

SEQ ID NO: 1885852 - DNA, 15 bp, Homo sapiens
acaaatataatgcag

SEQ ID NO: 1885853 - DNA, 15 bp, Homo sapiens
caaatataatgcagt

SEQ ID NO: 1885854 - DNA, 15 bp, Homo sapiens
aaatataatgcagtg

SEQ ID NO: 1885855 - DNA, 15 bp, Homo sapiens
aatataatgcagtgt

SEQ ID NO: 1885856 - DNA, 15 bp, Homo sapiens
atataatgcagtgta

SEQ ID NO: 1885857 - DNA, 15 bp, Homo sapiens
tataatgcagtgtat

SEQ ID NO: 1885858 - DNA, 15 bp, Homo sapiens
ataatgcagtgtata

SEQ ID NO: 1885859 - DNA, 15 bp, Homo sapiens
taatgcagtgtatac

SEQ ID NO: 1885860 - DNA, 15 bp, Homo sapiens
aatgcagtgtatact

SEQ ID NO: 1885861 - DNA, 15 bp, Homo sapiens
atgcagtgtatactg

SEQ ID NO: 1885862 - DNA, 15 bp, Homo sapiens
tgcagtgtatactgc

SEQ ID NO: 1885863 - DNA, 15 bp, Homo sapiens
cagtgtatactgctc

SEQ ID NO: 1885864 - DNA, 15 bp, Homo sapiens
agtgtatactgctcg

SEQ ID NO: 1885865 - DNA, 15 bp, Homo sapiens
gtgtatactgctcgg

SEQ ID NO: 1885866 - DNA, 15 bp, Homo sapiens
tgtatactgctcggg

SEQ ID NO: 1885867 - DNA, 15 bp, Homo sapiens
gtatactgctcgggt

SEQ ID NO: 1885868 - DNA, 15 bp, Homo sapiens
tatactgctcgggtg

SEQ ID NO: 1885869 - DNA, 15 bp, Homo sapiens
atactgctcgggtga

SEQ ID NO: 1885870 - DNA, 15 bp, Homo sapiens
tactgctcgggtgat

SEQ ID NO: 1885871 - DNA, 15 bp, Homo sapiens
actgctcgggtgatg

SEQ ID NO: 1885872 - DNA, 15 bp, Homo sapiens
ctgctcgggtgatgg

SEQ ID NO: 1885873 - DNA, 15 bp, Homo sapiens
tgctcgggtgatggg

SEQ ID NO: 1885874 - DNA, 15 bp, Homo sapiens
gctcgggtgatgggt

SEQ ID NO: 1885875 - DNA, 15 bp, Homo sapiens
ctcgggtgatgggtg

SEQ ID NO: 1885876 - DNA, 15 bp, Homo sapiens
tcgggtgatgggtgc

SEQ ID NO: 1885877 - DNA, 15 bp, Homo sapiens
cgggtgatgggtgca

SEQ ID NO: 1885878 - DNA, 15 bp, Homo sapiens
gggtgatgggtgcac

SEQ ID NO: 1885879 - DNA, 15 bp, Homo sapiens
ggtgatgggtgcacc

SEQ ID NO: 1885880 - DNA, 15 bp, Homo sapiens
gtgatgggtgcacca

SEQ ID NO: 1885881 - DNA, 15 bp, Homo sapiens
tgatgggtgcaccaa

SEQ ID NO: 1885882 - DNA, 15 bp, Homo sapiens
gatgggtgcaccaaa

SEQ ID NO: 1885883 - DNA, 15 bp, Homo sapiens
atgggtgcaccaaaa

SEQ ID NO: 1885884 - DNA, 15 bp, Homo sapiens
tgggtgcaccaaaat

SEQ ID NO: 1885885 - DNA, 15 bp, Homo sapiens
gggtgcaccaaaatc

SEQ ID NO: 1885886 - DNA, 15 bp, Homo sapiens
ggtgcaccaaaatct

SEQ ID NO: 1885887 - DNA, 15 bp, Homo sapiens
gtgcaccaaaatctt

SEQ ID NO: 1885888 - DNA, 15 bp, Homo sapiens
tgcaccaaaatctta

SEQ ID NO: 1885889 - DNA, 15 bp, Homo sapiens
gcaccaaaatcttac

SEQ ID NO: 1885890 - DNA, 15 bp, Homo sapiens
caccaaaatcttaca

SEQ ID NO: 1885891 - DNA, 15 bp, Homo sapiens
accaaaatcttacaa

SEQ ID NO: 1885892 - DNA, 15 bp, Homo sapiens
ccaaaatcttacaaa

SEQ ID NO: 1885893 - DNA, 15 bp, Homo sapiens
caaaatcttacaaat

SEQ ID NO: 1885894 - DNA, 15 bp, Homo sapiens
aaaatcttacaaatc

SEQ ID NO: 1885895 - DNA, 15 bp, Homo sapiens
aaatcttacaaatca

SEQ ID NO: 1885896 - DNA, 15 bp, Homo sapiens
aatcttacaaatcac

SEQ ID NO: 1885897 - DNA, 15 bp, Homo sapiens
atcttacaaatcacc

SEQ ID NO: 1885898 - DNA, 15 bp, Homo sapiens
tcttacaaatcacca

SEQ ID NO: 1885899 - DNA, 15 bp, Homo sapiens
cttacaaatcaccac

SEQ ID NO: 1885900 - DNA, 15 bp, Homo sapiens
ttacaaatcaccact

SEQ ID NO: 1885901 - DNA, 15 bp, Homo sapiens
tacaaatcaccacta

SEQ ID NO: 1885902 - DNA, 15 bp, Homo sapiens
acaaatcaccactaa

SEQ ID NO: 1885903 - DNA, 15 bp, Homo sapiens
caaatcaccactaaa

SEQ ID NO: 1885904 - DNA, 15 bp, Homo sapiens
aaatcaccactaaag

SEQ ID NO: 1885905 - DNA, 15 bp, Homo sapiens
aatcaccactaaaga

SEQ ID NO: 1885906 - DNA, 15 bp, Homo sapiens
agaacttactcatgt

SEQ ID NO: 1885907 - DNA, 15 bp, Homo sapiens
gaacttactcatgta

SEQ ID NO: 1885908 - DNA, 15 bp, Homo sapiens
aacttactcatgtaa

SEQ ID NO: 1885909 - DNA, 15 bp, Homo sapiens
acttactcatgtaac

SEQ ID NO: 1885910 - DNA, 15 bp, Homo sapiens
cttactcatgtaact

SEQ ID NO: 1885911 - DNA, 15 bp, Homo sapiens
ttactcatgtaacta

SEQ ID NO: 1885912 - DNA, 15 bp, Homo sapiens
tactcatgtaactaa

SEQ ID NO: 1885913 - DNA, 15 bp, Homo sapiens
actcatgtaactaaa

SEQ ID NO: 1885914 - DNA, 15 bp, Homo sapiens
ctcatgtaactaaat

SEQ ID NO: 1885915 - DNA, 15 bp, Homo sapiens
tcatgtaactaaata

SEQ ID NO: 1885916 - DNA, 15 bp, Homo sapiens
catgtaactaaatac

SEQ ID NO: 1885917 - DNA, 15 bp, Homo sapiens
atgtaactaaatacc

SEQ ID NO: 1885918 - DNA, 15 bp, Homo sapiens
tgtaactaaatacca

SEQ ID NO: 1885919 - DNA, 15 bp, Homo sapiens
gtaactaaataccac

SEQ ID NO: 1885920 - DNA, 15 bp, Homo sapiens
taactaaataccacc

SEQ ID NO: 1885921 - DNA, 15 bp, Homo sapiens
aactaaataccacct

SEQ ID NO: 1885922 - DNA, 15 bp, Homo sapiens
actaaataccacctg

SEQ ID NO: 1885923 - DNA, 15 bp, Homo sapiens
ctaaataccacctgt

SEQ ID NO: 1885924 - DNA, 15 bp, Homo sapiens
taaataccacctgta

SEQ ID NO: 1885925 - DNA, 15 bp, Homo sapiens
aaataccacctgtac

SEQ ID NO: 1885926 - DNA, 15 bp, Homo sapiens
aataccacctgtacc

SEQ ID NO: 1885927 - DNA, 15 bp, Homo sapiens
ataccacctgtaccc

SEQ ID NO: 1885928 - DNA, 15 bp, Homo sapiens
taccacctgtacccc

SEQ ID NO: 1885929 - DNA, 15 bp, Homo sapiens
cctgtaccccaataa

SEQ ID NO: 1885930 - DNA, 15 bp, Homo sapiens
ctgtaccccaataac

SEQ ID NO: 1885931 - DNA, 15 bp, Homo sapiens
tgtaccccaataact

SEQ ID NO: 1885932 - DNA, 15 bp, Homo sapiens
gtaccccaataactt

SEQ ID NO: 1885933 - DNA, 15 bp, Homo sapiens
taccccaataactta

SEQ ID NO: 1885934 - DNA, 15 bp, Homo sapiens
accccaataacttac

SEQ ID NO: 1885935 - DNA, 15 bp, Homo sapiens
ccccaataacttacg

SEQ ID NO: 1885936 - DNA, 15 bp, Homo sapiens
cccaataacttacga

SEQ ID NO: 1885937 - DNA, 15 bp, Homo sapiens
ccaataacttacgaa

SEQ ID NO: 1885938 - DNA, 15 bp, Homo sapiens
caataacttacgaaa

SEQ ID NO: 1885939 - DNA, 15 bp, Homo sapiens
aataacttacgaaaa

SEQ ID NO: 1885940 - DNA, 15 bp, Homo sapiens
ataacttacgaaaaa

SEQ ID NO: 1885941 - DNA, 15 bp, Homo sapiens
taacttacgaaaaaa

SEQ ID NO: 1885942 - DNA, 15 bp, Homo sapiens
aacttacgaaaaaaa

SEQ ID NO: 1885943 - DNA, 15 bp, Homo sapiens
acttacgaaaaaaat

SEQ ID NO: 1885944 - DNA, 15 bp, Homo sapiens
cttacgaaaaaaata

SEQ ID NO: 1885945 - DNA, 15 bp, Homo sapiens
ttacgaaaaaaataa

SEQ ID NO: 1885946 - DNA, 15 bp, Homo sapiens
tacgaaaaaaataaa

SEQ ID NO: 1885947 - DNA, 15 bp, Homo sapiens
acgaaaaaaataaaa

SEQ ID NO: 1885948 - DNA, 15 bp, Homo sapiens
cgaaaaaaataaaat

SEQ ID NO: 1885949 - DNA, 15 bp, Homo sapiens
gaaaaaaataaaata

SEQ ID NO: 1885950 - DNA, 15 bp, Homo sapiens
aaataaaataaagta

SEQ ID NO: 1885951 - DNA, 15 bp, Homo sapiens
aataaaataaagtaa

SEQ ID NO: 1885952 - DNA, 15 bp, Homo sapiens
ataaaataaagtaag

SEQ ID NO: 1885953 - DNA, 15 bp, Homo sapiens
taaaataaagtaaga

SEQ ID NO: 1885954 - DNA, 15 bp, Homo sapiens
aaaataaagtaagag

SEQ ID NO: 1885955 - DNA, 15 bp, Homo sapiens
aaataaagtaagagg

SEQ ID NO: 1885956 - DNA, 15 bp, Homo sapiens
aataaagtaagaggc

SEQ ID NO: 1885957 - DNA, 15 bp, Homo sapiens
ataaagtaagaggca

SEQ ID NO: 1885958 - DNA, 15 bp, Homo sapiens
taaagtaagaggcac

SEQ ID NO: 1885959 - DNA, 15 bp, Homo sapiens
aaagtaagaggcaca

SEQ ID NO: 1885960 - DNA, 15 bp, Homo sapiens
aagtaagaggcacaa

SEQ ID NO: 1885961 - DNA, 15 bp, Homo sapiens
agtaagaggcacaag

SEQ ID NO: 1885962 - DNA, 15 bp, Homo sapiens
gtaagaggcacaagt

SEQ ID NO: 1885963 - DNA, 15 bp, Homo sapiens
taagaggcacaagta

SEQ ID NO: 1885964 - DNA, 15 bp, Homo sapiens
aagaggcacaagtaa

SEQ ID NO: 1885965 - DNA, 15 bp, Homo sapiens
agaggcacaagtaac

SEQ ID NO: 1885966 - DNA, 15 bp, Homo sapiens
gaggcacaagtaaca

SEQ ID NO: 1885967 - DNA, 15 bp, Homo sapiens
aggcacaagtaacat

SEQ ID NO: 1885968 - DNA, 15 bp, Homo sapiens
ggcacaagtaacatt

SEQ ID NO: 1885969 - DNA, 15 bp, Homo sapiens
gcacaagtaacatta

SEQ ID NO: 1885970 - DNA, 15 bp, Homo sapiens
cacaagtaacattaa

SEQ ID NO: 1885971 - DNA, 15 bp, Homo sapiens
acaagtaacattaaa

SEQ ID NO: 1885972 - DNA, 15 bp, Homo sapiens
caagtaacattaaaa

SEQ ID NO: 1885973 - DNA, 15 bp, Homo sapiens
aagtaacattaaaaa

SEQ ID NO: 1885974 - DNA, 15 bp, Homo sapiens
agtaacattaaaaaa

SEQ ID NO: 1885975 - DNA, 15 bp, Homo sapiens
gtaacattaaaaaaa

SEQ ID NO: 1885976 - DNA, 15 bp, Homo sapiens
taacattaaaaaaat

SEQ ID NO: 1885977 - DNA, 15 bp, Homo sapiens
aacattaaaaaaatc

SEQ ID NO: 1885978 - DNA, 15 bp, Homo sapiens
acattaaaaaaatct

SEQ ID NO: 1885979 - DNA, 15 bp, Homo sapiens
cattaaaaaaatctc

SEQ ID NO: 1885980 - DNA, 15 bp, Homo sapiens
attaaaaaaatctct

SEQ ID NO: 1885981 - DNA, 15 bp, Homo sapiens
ttaaaaaaatctctt

SEQ ID NO: 1885982 - DNA, 15 bp, Homo sapiens
taaaaaaatctcttc

SEQ ID NO: 1885983 - DNA, 15 bp, Homo sapiens
aaaaaaatctcttca

SEQ ID NO: 1885984 - DNA, 15 bp, Homo sapiens
aaaaaatctcttcaa

SEQ ID NO: 1885985 - DNA, 15 bp, Homo sapiens
aaaaatctcttcaac

SEQ ID NO: 1885986 - DNA, 15 bp, Homo sapiens
aaaatctcttcaact

SEQ ID NO: 1885987 - DNA, 15 bp, Homo sapiens
aaatctcttcaactt

SEQ ID NO: 1885988 - DNA, 15 bp, Homo sapiens
aatctcttcaactta

SEQ ID NO: 1885989 - DNA, 15 bp, Homo sapiens
atctcttcaacttag

SEQ ID NO: 1885990 - DNA, 15 bp, Homo sapiens
tctcttcaacttaga

SEQ ID NO: 1885991 - DNA, 15 bp, Homo sapiens
ctcttcaacttagat

SEQ ID NO: 1885992 - DNA, 15 bp, Homo sapiens
tcttcaacttagatg

SEQ ID NO: 1885993 - DNA, 15 bp, Homo sapiens
cttcaacttagatga

SEQ ID NO: 1885994 - DNA, 15 bp, Homo sapiens
ttcaacttagatgaa

SEQ ID NO: 1885995 - DNA, 15 bp, Homo sapiens
tcaacttagatgaat

SEQ ID NO: 1885996 - DNA, 15 bp, Homo sapiens
caacttagatgaatt

SEQ ID NO: 1885997 - DNA, 15 bp, Homo sapiens
aacttagatgaatta

SEQ ID NO: 1885998 - DNA, 15 bp, Homo sapiens
acttagatgaattat

SEQ ID NO: 1885999 - DNA, 15 bp, Homo sapiens
cttagatgaattatg

SEQ ID NO: 1886000 - DNA, 15 bp, Homo sapiens
ttagatgaattatgt

SEQ ID NO: 1886001 - DNA, 15 bp, Homo sapiens
tagatgaattatgtt

SEQ ID NO: 1886002 - DNA, 15 bp, Homo sapiens
agatgaattatgttt

SEQ ID NO: 1886003 - DNA, 15 bp, Homo sapiens
gatgaattatgtttt

SEQ ID NO: 1886004 - DNA, 15 bp, Homo sapiens
atgaattatgttttt

SEQ ID NO: 1886005 - DNA, 15 bp, Homo sapiens
tgaattatgtttttc

SEQ ID NO: 1886006 - DNA, 15 bp, Homo sapiens
gaattatgtttttca

SEQ ID NO: 1886007 - DNA, 15 bp, Homo sapiens
aattatgtttttcac

SEQ ID NO: 1886008 - DNA, 15 bp, Homo sapiens
attatgtttttcacg

SEQ ID NO: 1886009 - DNA, 15 bp, Homo sapiens
ttatgtttttcacgc

SEQ ID NO: 1886010 - DNA, 15 bp, Homo sapiens
tatgtttttcacgca

SEQ ID NO: 1886011 - DNA, 15 bp, Homo sapiens
atgtttttcacgcat

SEQ ID NO: 1886012 - DNA, 15 bp, Homo sapiens
tgtttttcacgcatg

SEQ ID NO: 1886013 - DNA, 15 bp, Homo sapiens
gtttttcacgcatgt

SEQ ID NO: 1886014 - DNA, 15 bp, Homo sapiens
tttttcacgcatgtc

SEQ ID NO: 1886015 - DNA, 15 bp, Homo sapiens
ttttcacgcatgtca

SEQ ID NO: 1886016 - DNA, 15 bp, Homo sapiens
tttcacgcatgtcat

SEQ ID NO: 1886017 - DNA, 15 bp, Homo sapiens
ttcacgcatgtcatt

SEQ ID NO: 1886018 - DNA, 15 bp, Homo sapiens
tcacgcatgtcattt

SEQ ID NO: 1886019 - DNA, 15 bp, Homo sapiens
cacgcatgtcattta

SEQ ID NO: 1886020 - DNA, 15 bp, Homo sapiens
acgcatgtcatttaa

SEQ ID NO: 1886021 - DNA, 15 bp, Homo sapiens
cgcatgtcatttaaa

SEQ ID NO: 1886022 - DNA, 15 bp, Homo sapiens
gcatgtcatttaaaa

SEQ ID NO: 1886023 - DNA, 15 bp, Homo sapiens
catgtcatttaaaaa

SEQ ID NO: 1886024 - DNA, 15 bp, Homo sapiens
atgtcatttaaaaac

SEQ ID NO: 1886025 - DNA, 15 bp, Homo sapiens
tgtcatttaaaaaca

SEQ ID NO: 1886026 - DNA, 15 bp, Homo sapiens
gtcatttaaaaacaa

SEQ ID NO: 1886027 - DNA, 15 bp, Homo sapiens
tcatttaaaaacaaa

SEQ ID NO: 1886028 - DNA, 15 bp, Homo sapiens
catttaaaaacaaaa

SEQ ID NO: 1886029 - DNA, 15 bp, Homo sapiens
atttaaaaacaaaac

SEQ ID NO: 1886030 - DNA, 15 bp, Homo sapiens
tttaaaaacaaaaca

SEQ ID NO: 1886031 - DNA, 15 bp, Homo sapiens
ttaaaaacaaaacac

SEQ ID NO: 1886032 - DNA, 15 bp, Homo sapiens
taaaaacaaaacaca

SEQ ID NO: 1886033 - DNA, 15 bp, Homo sapiens
aaaaacaaaacacaa

SEQ ID NO: 1886034 - DNA, 15 bp, Homo sapiens
aaaacaaaacacaaa

SEQ ID NO: 1886035 - DNA, 15 bp, Homo sapiens
aaacaaaacacaaat

SEQ ID NO: 1886036 - DNA, 15 bp, Homo sapiens
aacaaaacacaaata

SEQ ID NO: 1886037 - DNA, 15 bp, Homo sapiens
acaaaacacaaatag

SEQ ID NO: 1886038 - DNA, 15 bp, Homo sapiens
caaaacacaaataga

SEQ ID NO: 1886039 - DNA, 15 bp, Homo sapiens
aaaacacaaatagag

SEQ ID NO: 1886040 - DNA, 15 bp, Homo sapiens
aaacacaaatagagg

SEQ ID NO: 1886041 - DNA, 15 bp, Homo sapiens
aacacaaatagaggg

SEQ ID NO: 1886042 - DNA, 15 bp, Homo sapiens
acacaaatagaggga

SEQ ID NO: 1886043 - DNA, 15 bp, Homo sapiens
cacaaatagagggac

SEQ ID NO: 1886044 - DNA, 15 bp, Homo sapiens
acaaatagagggacc

SEQ ID NO: 1886045 - DNA, 15 bp, Homo sapiens
caaatagagggaccc

SEQ ID NO: 1886046 - DNA, 15 bp, Homo sapiens
aaatagagggaccca

SEQ ID NO: 1886047 - DNA, 15 bp, Homo sapiens
aatagagggacccat

SEQ ID NO: 1886048 - DNA, 15 bp, Homo sapiens
atagagggacccatg

SEQ ID NO: 1886049 - DNA, 15 bp, Homo sapiens
tagagggacccatgt

SEQ ID NO: 1886050 - DNA, 15 bp, Homo sapiens
agagggacccatgtc

SEQ ID NO: 1886051 - DNA, 15 bp, Homo sapiens
gagggacccatgtct

SEQ ID NO: 1886052 - DNA, 15 bp, Homo sapiens
agggacccatgtctg

SEQ ID NO: 1886053 - DNA, 15 bp, Homo sapiens
gggacccatgtctga

SEQ ID NO: 1886054 - DNA, 15 bp, Homo sapiens
ggacccatgtctgaa

SEQ ID NO: 1886055 - DNA, 15 bp, Homo sapiens
gacccatgtctgaat

SEQ ID NO: 1886056 - DNA, 15 bp, Homo sapiens
acccatgtctgaatt

SEQ ID NO: 1886057 - DNA, 15 bp, Homo sapiens
cccatgtctgaatta

SEQ ID NO: 1886058 - DNA, 15 bp, Homo sapiens
ccatgtctgaattaa

SEQ ID NO: 1886059 - DNA, 15 bp, Homo sapiens
catgtctgaattaat

SEQ ID NO: 1886060 - DNA, 15 bp, Homo sapiens
atgtctgaattaatt

SEQ ID NO: 1886061 - DNA, 15 bp, Homo sapiens
tgtctgaattaattg

SEQ ID NO: 1886062 - DNA, 15 bp, Homo sapiens
gtctgaattaattgc

SEQ ID NO: 1886063 - DNA, 15 bp, Homo sapiens
tctgaattaattgcc

SEQ ID NO: 1886064 - DNA, 15 bp, Homo sapiens
ctgaattaattgcct

SEQ ID NO: 1886065 - DNA, 15 bp, Homo sapiens
tgaattaattgcctt

SEQ ID NO: 1886066 - DNA, 15 bp, Homo sapiens
gaattaattgccttg

SEQ ID NO: 1886067 - DNA, 15 bp, Homo sapiens
aattaattgccttgt

SEQ ID NO: 1886068 - DNA, 15 bp, Homo sapiens
attaattgccttgtg

SEQ ID NO: 1886069 - DNA, 15 bp, Homo sapiens
ttaattgccttgtga

SEQ ID NO: 1886070 - DNA, 15 bp, Homo sapiens
taattgccttgtgat

SEQ ID NO: 1886071 - DNA, 15 bp, Homo sapiens
aattgccttgtgata

SEQ ID NO: 1886072 - DNA, 15 bp, Homo sapiens
attgccttgtgatat

SEQ ID NO: 1886073 - DNA, 15 bp, Homo sapiens
ttgccttgtgatatc

SEQ ID NO: 1886074 - DNA, 15 bp, Homo sapiens
tgccttgtgatatca

SEQ ID NO: 1886075 - DNA, 15 bp, Homo sapiens
gccttgtgatatcac

SEQ ID NO: 1886076 - DNA, 15 bp, Homo sapiens
ccttgtgatatcact

SEQ ID NO: 1886077 - DNA, 15 bp, Homo sapiens
cttgtgatatcactg

SEQ ID NO: 1886078 - DNA, 15 bp, Homo sapiens
ttgtgatatcactgt

SEQ ID NO: 1886079 - DNA, 15 bp, Homo sapiens
tgtgatatcactgtg

SEQ ID NO: 1886080 - DNA, 15 bp, Homo sapiens
gtgatatcactgtgc

SEQ ID NO: 1886081 - DNA, 15 bp, Homo sapiens
tgatatcactgtgca

SEQ ID NO: 1886082 - DNA, 15 bp, Homo sapiens
gatatcactgtgcat

SEQ ID NO: 1886083 - DNA, 15 bp, Homo sapiens
atatcactgtgcatt

SEQ ID NO: 1886084 - DNA, 15 bp, Homo sapiens
tatcactgtgcattg

SEQ ID NO: 1886085 - DNA, 15 bp, Homo sapiens
atcactgtgcattgg

SEQ ID NO: 1886086 - DNA, 15 bp, Homo sapiens
tcactgtgcattggg

SEQ ID NO: 1886087 - DNA, 15 bp, Homo sapiens
cactgtgcattgggg

SEQ ID NO: 1886088 - DNA, 15 bp, Homo sapiens
actgtgcattgggga

SEQ ID NO: 1886089 - DNA, 15 bp, Homo sapiens
ctgtgcattggggac

SEQ ID NO: 1886090 - DNA, 15 bp, Homo sapiens
tgtgcattggggact

SEQ ID NO: 1886091 - DNA, 15 bp, Homo sapiens
gtgcattggggactt

SEQ ID NO: 1886092 - DNA, 15 bp, Homo sapiens
tgcattggggactta

SEQ ID NO: 1886093 - DNA, 15 bp, Homo sapiens
gcattggggacttaa

SEQ ID NO: 1886094 - DNA, 15 bp, Homo sapiens
cattggggacttaat

SEQ ID NO: 1886095 - DNA, 15 bp, Homo sapiens
attggggacttaata

SEQ ID NO: 1886096 - DNA, 15 bp, Homo sapiens
ttggggacttaatat

SEQ ID NO: 1886097 - DNA, 15 bp, Homo sapiens
tggggacttaatata

SEQ ID NO: 1886098 - DNA, 15 bp, Homo sapiens
ggggacttaatatat

SEQ ID NO: 1886099 - DNA, 15 bp, Homo sapiens
gggacttaatatata

SEQ ID NO: 1886100 - DNA, 15 bp, Homo sapiens
ggacttaatatataa

SEQ ID NO: 1886101 - DNA, 15 bp, Homo sapiens
gacttaatatataat

SEQ ID NO: 1886102 - DNA, 15 bp, Homo sapiens
acttaatatataatc

SEQ ID NO: 1886103 - DNA, 15 bp, Homo sapiens
cttaatatataatca

SEQ ID NO: 1886104 - DNA, 15 bp, Homo sapiens
ttaatatataatcag

SEQ ID NO: 1886105 - DNA, 15 bp, Homo sapiens
taatatataatcaga

SEQ ID NO: 1886106 - DNA, 15 bp, Homo sapiens
aatatataatcagaa

SEQ ID NO: 1886107 - DNA, 15 bp, Homo sapiens
atatataatcagaaa

SEQ ID NO: 1886108 - DNA, 15 bp, Homo sapiens
tatataatcagaaag

SEQ ID NO: 1886109 - DNA, 15 bp, Homo sapiens
atataatcagaaaga

SEQ ID NO: 1886110 - DNA, 15 bp, Homo sapiens
tataatcagaaagaa

SEQ ID NO: 1886111 - DNA, 15 bp, Homo sapiens
ataatcagaaagaaa

SEQ ID NO: 1886112 - DNA, 15 bp, Homo sapiens
taatcagaaagaaaa

SEQ ID NO: 1886113 - DNA, 15 bp, Homo sapiens
aatcagaaagaaaaa

SEQ ID NO: 1886114 - DNA, 15 bp, Homo sapiens
atcagaaagaaaaac

SEQ ID NO: 1886115 - DNA, 15 bp, Homo sapiens
tcagaaagaaaaact

SEQ ID NO: 1886116 - DNA, 15 bp, Homo sapiens
cagaaagaaaaactg

SEQ ID NO: 1886117 - DNA, 15 bp, Homo sapiens
agaaagaaaaactgc

SEQ ID NO: 1886118 - DNA, 15 bp, Homo sapiens
gaaagaaaaactgca

SEQ ID NO: 1886119 - DNA, 15 bp, Homo sapiens
aaagaaaaactgcac

SEQ ID NO: 1886120 - DNA, 15 bp, Homo sapiens
aagaaaaactgcact

SEQ ID NO: 1886121 - DNA, 15 bp, Homo sapiens
agaaaaactgcactc

SEQ ID NO: 1886122 - DNA, 15 bp, Homo sapiens
gaaaaactgcactca

SEQ ID NO: 1886123 - DNA, 15 bp, Homo sapiens
aaaaactgcactcac

SEQ ID NO: 1886124 - DNA, 15 bp, Homo sapiens
aaaactgcactcact

SEQ ID NO: 1886125 - DNA, 15 bp, Homo sapiens
aaactgcactcactc

SEQ ID NO: 1886126 - DNA, 15 bp, Homo sapiens
aactgcactcactct

SEQ ID NO: 1886127 - DNA, 15 bp, Homo sapiens
actgcactcactctc

SEQ ID NO: 1886128 - DNA, 15 bp, Homo sapiens
ctgcactcactctct

SEQ ID NO: 1886129 - DNA, 15 bp, Homo sapiens
tgcactcactctctt

SEQ ID NO: 1886130 - DNA, 15 bp, Homo sapiens
gcactcactctctta

SEQ ID NO: 1886131 - DNA, 15 bp, Homo sapiens
cactcactctcttag

SEQ ID NO: 1886132 - DNA, 15 bp, Homo sapiens
actcactctcttagc

SEQ ID NO: 1886133 - DNA, 15 bp, Homo sapiens
ctcactctcttagct

SEQ ID NO: 1886134 - DNA, 15 bp, Homo sapiens
tcactctcttagctt

SEQ ID NO: 1886135 - DNA, 15 bp, Homo sapiens
cactctcttagcttc

SEQ ID NO: 1886136 - DNA, 15 bp, Homo sapiens
actctcttagcttct

SEQ ID NO: 1886137 - DNA, 15 bp, Homo sapiens
ctctcttagcttctt

SEQ ID NO: 1886138 - DNA, 15 bp, Homo sapiens
tctcttagcttcttg

SEQ ID NO: 1886139 - DNA, 15 bp, Homo sapiens
ctcttagcttcttga

SEQ ID NO: 1886140 - DNA, 15 bp, Homo sapiens
tcttagcttcttgag

SEQ ID NO: 1886141 - DNA, 15 bp, Homo sapiens
cttagcttcttgagt

SEQ ID NO: 1886142 - DNA, 15 bp, Homo sapiens
ttagcttcttgagta

SEQ ID NO: 1886143 - DNA, 15 bp, Homo sapiens
tagcttcttgagtat

SEQ ID NO: 1886144 - DNA, 15 bp, Homo sapiens
agcttcttgagtatc

SEQ ID NO: 1886145 - DNA, 15 bp, Homo sapiens
gcttcttgagtatct

SEQ ID NO: 1886146 - DNA, 15 bp, Homo sapiens
cttcttgagtatctt

SEQ ID NO: 1886147 - DNA, 15 bp, Homo sapiens
ttcttgagtatcttg

SEQ ID NO: 1886148 - DNA, 15 bp, Homo sapiens
tcttgagtatcttga

SEQ ID NO: 1886149 - DNA, 15 bp, Homo sapiens
cttgagtatcttgaa

SEQ ID NO: 1886150 - DNA, 15 bp, Homo sapiens
ttgagtatcttgaag

SEQ ID NO: 1886151 - DNA, 15 bp, Homo sapiens
tgagtatcttgaagc

SEQ ID NO: 1886152 - DNA, 15 bp, Homo sapiens
gagtatcttgaagct

SEQ ID NO: 1886153 - DNA, 15 bp, Homo sapiens
agtatcttgaagctt

SEQ ID NO: 1886154 - DNA, 15 bp, Homo sapiens
gtatcttgaagcttc

SEQ ID NO: 1886155 - DNA, 15 bp, Homo sapiens
tatcttgaagcttcc

SEQ ID NO: 1886156 - DNA, 15 bp, Homo sapiens
atcttgaagcttcca

SEQ ID NO: 1886157 - DNA, 15 bp, Homo sapiens
tcttgaagcttccag

SEQ ID NO: 1886158 - DNA, 15 bp, Homo sapiens
cttgaagcttccagc

SEQ ID NO: 1886159 - DNA, 15 bp, Homo sapiens
ttgaagcttccagca

SEQ ID NO: 1886160 - DNA, 15 bp, Homo sapiens
tgaagcttccagcac

SEQ ID NO: 1886161 - DNA, 15 bp, Homo sapiens
gaagcttccagcact

SEQ ID NO: 1886162 - DNA, 15 bp, Homo sapiens
aagcttccagcactc

SEQ ID NO: 1886163 - DNA, 15 bp, Homo sapiens
agcttccagcactct

SEQ ID NO: 1886164 - DNA, 15 bp, Homo sapiens
gcttccagcactctt

SEQ ID NO: 1886165 - DNA, 15 bp, Homo sapiens
cttccagcactcttt

SEQ ID NO: 1886166 - DNA, 15 bp, Homo sapiens
ttccagcactctttt

SEQ ID NO: 1886167 - DNA, 15 bp, Homo sapiens
tccagcactcttttc

SEQ ID NO: 1886168 - DNA, 15 bp, Homo sapiens
ccagcactcttttca

SEQ ID NO: 1886169 - DNA, 15 bp, Homo sapiens
cagcactcttttcac

SEQ ID NO: 1886170 - DNA, 15 bp, Homo sapiens
agcactcttttcacc

SEQ ID NO: 1886171 - DNA, 15 bp, Homo sapiens
gcactcttttcacct

SEQ ID NO: 1886172 - DNA, 15 bp, Homo sapiens
actcttttcaccttc

SEQ ID NO: 1886173 - DNA, 15 bp, Homo sapiens
ctcttttcaccttca

SEQ ID NO: 1886174 - DNA, 15 bp, Homo sapiens
tcttttcaccttcat

SEQ ID NO: 1886175 - DNA, 15 bp, Homo sapiens
cttttcaccttcatg

SEQ ID NO: 1886176 - DNA, 15 bp, Homo sapiens
ttttcaccttcatgt

SEQ ID NO: 1886177 - DNA, 15 bp, Homo sapiens
tttcaccttcatgtg

SEQ ID NO: 1886178 - DNA, 15 bp, Homo sapiens
ttcaccttcatgtgg

SEQ ID NO: 1886179 - DNA, 15 bp, Homo sapiens
tcaccttcatgtggg

SEQ ID NO: 1886180 - DNA, 15 bp, Homo sapiens
caccttcatgtggga

SEQ ID NO: 1886181 - DNA, 15 bp, Homo sapiens
accttcatgtgggac

SEQ ID NO: 1886182 - DNA, 15 bp, Homo sapiens
ccttcatgtgggaca

SEQ ID NO: 1886183 - DNA, 15 bp, Homo sapiens
cttcatgtgggacaa

SEQ ID NO: 1886184 - DNA, 15 bp, Homo sapiens
ttcatgtgggacaaa

SEQ ID NO: 1886185 - DNA, 15 bp, Homo sapiens
tcatgtgggacaaat

SEQ ID NO: 1886186 - DNA, 15 bp, Homo sapiens
catgtgggacaaata

SEQ ID NO: 1886187 - DNA, 15 bp, Homo sapiens
atgtgggacaaatac

SEQ ID NO: 1886188 - DNA, 15 bp, Homo sapiens
tgtgggacaaataca

SEQ ID NO: 1886189 - DNA, 15 bp, Homo sapiens
gtgggacaaatacac

SEQ ID NO: 1886190 - DNA, 15 bp, Homo sapiens
tgggacaaatacaca

SEQ ID NO: 1886191 - DNA, 15 bp, Homo sapiens
gggacaaatacacaa

SEQ ID NO: 1886192 - DNA, 15 bp, Homo sapiens
ggacaaatacacaaa

SEQ ID NO: 1886193 - DNA, 15 bp, Homo sapiens
gacaaatacacaaaa

SEQ ID NO: 1886194 - DNA, 15 bp, Homo sapiens
acaaatacacaaaac

SEQ ID NO: 1886195 - DNA, 15 bp, Homo sapiens
caaatacacaaaact

SEQ ID NO: 1886196 - DNA, 15 bp, Homo sapiens
aaatacacaaaactg

SEQ ID NO: 1886197 - DNA, 15 bp, Homo sapiens
aatacacaaaactgc

SEQ ID NO: 1886198 - DNA, 15 bp, Homo sapiens
atacacaaaactgct

SEQ ID NO: 1886199 - DNA, 15 bp, Homo sapiens
tacacaaaactgctt

SEQ ID NO: 1886200 - DNA, 15 bp, Homo sapiens
acacaaaactgcttg

SEQ ID NO: 1886201 - DNA, 15 bp, Homo sapiens
cacaaaactgcttga

SEQ ID NO: 1886202 - DNA, 15 bp, Homo sapiens
acaaaactgcttgag

SEQ ID NO: 1886203 - DNA, 15 bp, Homo sapiens
caaaactgcttgagc

SEQ ID NO: 1886204 - DNA, 15 bp, Homo sapiens
aaaactgcttgagca

SEQ ID NO: 1886205 - DNA, 15 bp, Homo sapiens
aaactgcttgagcaa

SEQ ID NO: 1886206 - DNA, 15 bp, Homo sapiens
aactgcttgagcaag

SEQ ID NO: 1886207 - DNA, 15 bp, Homo sapiens
actgcttgagcaagc

SEQ ID NO: 1886208 - DNA, 15 bp, Homo sapiens
ctgcttgagcaagcc

SEQ ID NO: 1886209 - DNA, 15 bp, Homo sapiens
tgcttgagcaagcca

SEQ ID NO: 1886210 - DNA, 15 bp, Homo sapiens
gcttgagcaagccat

SEQ ID NO: 1886211 - DNA, 15 bp, Homo sapiens
cttgagcaagccatc

SEQ ID NO: 1886212 - DNA, 15 bp, Homo sapiens
ttgagcaagccatct

SEQ ID NO: 1886213 - DNA, 15 bp, Homo sapiens
tgagcaagccatctg

SEQ ID NO: 1886214 - DNA, 15 bp, Homo sapiens
gagcaagccatctgg

SEQ ID NO: 1886215 - DNA, 15 bp, Homo sapiens
agcaagccatctggg

SEQ ID NO: 1886216 - DNA, 15 bp, Homo sapiens
gcaagccatctggga

SEQ ID NO: 1886217 - DNA, 15 bp, Homo sapiens
caagccatctgggac

SEQ ID NO: 1886218 - DNA, 15 bp, Homo sapiens
aagccatctgggacc

SEQ ID NO: 1886219 - DNA, 15 bp, Homo sapiens
agccatctgggacct

SEQ ID NO: 1886220 - DNA, 15 bp, Homo sapiens
gccatctgggacctc

SEQ ID NO: 1886221 - DNA, 15 bp, Homo sapiens
ccatctgggacctct

SEQ ID NO: 1886222 - DNA, 15 bp, Homo sapiens
catctgggacctctt

SEQ ID NO: 1886223 - DNA, 15 bp, Homo sapiens
atctgggacctcttt

SEQ ID NO: 1886224 - DNA, 15 bp, Homo sapiens
tctgggacctctttc

SEQ ID NO: 1886225 - DNA, 15 bp, Homo sapiens
ctgggacctctttcc

SEQ ID NO: 1886226 - DNA, 15 bp, Homo sapiens
tgggacctctttcca

SEQ ID NO: 1886227 - DNA, 15 bp, Homo sapiens
gggacctctttccaa

SEQ ID NO: 1886228 - DNA, 15 bp, Homo sapiens
ggacctctttccaag

SEQ ID NO: 1886229 - DNA, 15 bp, Homo sapiens
gacctctttccaaga

SEQ ID NO: 1886230 - DNA, 15 bp, Homo sapiens
acctctttccaagaa

SEQ ID NO: 1886231 - DNA, 15 bp, Homo sapiens
cctctttccaagaat

SEQ ID NO: 1886232 - DNA, 15 bp, Homo sapiens
ctctttccaagaatc

SEQ ID NO: 1886233 - DNA, 15 bp, Homo sapiens
tctttccaagaatcg

SEQ ID NO: 1886234 - DNA, 15 bp, Homo sapiens
ctttccaagaatcgt

SEQ ID NO: 1886235 - DNA, 15 bp, Homo sapiens
tttccaagaatcgtc

SEQ ID NO: 1886236 - DNA, 15 bp, Homo sapiens
ttccaagaatcgtcc

SEQ ID NO: 1886237 - DNA, 15 bp, Homo sapiens
tccaagaatcgtcct

SEQ ID NO: 1886238 - DNA, 15 bp, Homo sapiens
ccaagaatcgtcctt

SEQ ID NO: 1886239 - DNA, 15 bp, Homo sapiens
caagaatcgtccttc

SEQ ID NO: 1886240 - DNA, 15 bp, Homo sapiens
aagaatcgtccttct

SEQ ID NO: 1886241 - DNA, 15 bp, Homo sapiens
agaatcgtccttctc

SEQ ID NO: 1886242 - DNA, 15 bp, Homo sapiens
gaatcgtccttctct

SEQ ID NO: 1886243 - DNA, 15 bp, Homo sapiens
aatcgtccttctcta

SEQ ID NO: 1886244 - DNA, 15 bp, Homo sapiens
atcgtccttctctat

SEQ ID NO: 1886245 - DNA, 15 bp, Homo sapiens
tcgtccttctctatc

SEQ ID NO: 1886246 - DNA, 15 bp, Homo sapiens
cgtccttctctatca

SEQ ID NO: 1886247 - DNA, 15 bp, Homo sapiens
gtccttctctatcat

SEQ ID NO: 1886248 - DNA, 15 bp, Homo sapiens
tccttctctatcatt

SEQ ID NO: 1886249 - DNA, 15 bp, Homo sapiens
ccttctctatcattg

SEQ ID NO: 1886250 - DNA, 15 bp, Homo sapiens
cttctctatcattgg

SEQ ID NO: 1886251 - DNA, 15 bp, Homo sapiens
ttctctatcattgga

SEQ ID NO: 1886252 - DNA, 15 bp, Homo sapiens
tctctatcattggag

SEQ ID NO: 1886253 - DNA, 15 bp, Homo sapiens
ctctatcattggagt

SEQ ID NO: 1886254 - DNA, 15 bp, Homo sapiens
tctatcattggagtc

SEQ ID NO: 1886255 - DNA, 15 bp, Homo sapiens
ctatcattggagtct

SEQ ID NO: 1886256 - DNA, 15 bp, Homo sapiens
tatcattggagtctc

SEQ ID NO: 1886257 - DNA, 15 bp, Homo sapiens
atcattggagtctct

SEQ ID NO: 1886258 - DNA, 15 bp, Homo sapiens
tcattggagtctctt

SEQ ID NO: 1886259 - DNA, 15 bp, Homo sapiens
cattggagtctcttc

SEQ ID NO: 1886260 - DNA, 15 bp, Homo sapiens
attggagtctcttct

SEQ ID NO: 1886261 - DNA, 15 bp, Homo sapiens
ttggagtctcttcta

SEQ ID NO: 1886262 - DNA, 15 bp, Homo sapiens
tggagtctcttctaa

SEQ ID NO: 1886263 - DNA, 15 bp, Homo sapiens
ggagtctcttctaag

SEQ ID NO: 1886264 - DNA, 15 bp, Homo sapiens
gagtctcttctaagc

SEQ ID NO: 1886265 - DNA, 15 bp, Homo sapiens
agtctcttctaagca

SEQ ID NO: 1886266 - DNA, 15 bp, Homo sapiens
gtctcttctaagcat

SEQ ID NO: 1886267 - DNA, 15 bp, Homo sapiens
tctcttctaagcatt

SEQ ID NO: 1886268 - DNA, 15 bp, Homo sapiens
ctcttctaagcattg

SEQ ID NO: 1886269 - DNA, 15 bp, Homo sapiens
tcttctaagcattgc

SEQ ID NO: 1886270 - DNA, 15 bp, Homo sapiens
cttctaagcattgct

SEQ ID NO: 1886271 - DNA, 15 bp, Homo sapiens
ttctaagcattgctt

SEQ ID NO: 1886272 - DNA, 15 bp, Homo sapiens
tctaagcattgcttt

SEQ ID NO: 1886273 - DNA, 15 bp, Homo sapiens
ctaagcattgctttt

SEQ ID NO: 1886274 - DNA, 15 bp, Homo sapiens
taagcattgctttta

SEQ ID NO: 1886275 - DNA, 15 bp, Homo sapiens
aagcattgcttttat

SEQ ID NO: 1886276 - DNA, 15 bp, Homo sapiens
agcattgcttttatt

SEQ ID NO: 1886277 - DNA, 15 bp, Homo sapiens
gcattgcttttattt

SEQ ID NO: 1886278 - DNA, 15 bp, Homo sapiens
cattgcttttatttt

SEQ ID NO: 1886279 - DNA, 15 bp, Homo sapiens
attgcttttattttc

SEQ ID NO: 1886280 - DNA, 15 bp, Homo sapiens
ttgcttttattttct

SEQ ID NO: 1886281 - DNA, 15 bp, Homo sapiens
tgcttttattttctt

SEQ ID NO: 1886282 - DNA, 15 bp, Homo sapiens
gcttttattttcttc

SEQ ID NO: 1886283 - DNA, 15 bp, Homo sapiens
cttttattttcttca

SEQ ID NO: 1886284 - DNA, 15 bp, Homo sapiens
ttttattttcttcaa

SEQ ID NO: 1886285 - DNA, 15 bp, Homo sapiens
tttattttcttcaac

SEQ ID NO: 1886286 - DNA, 15 bp, Homo sapiens
ttattttcttcaact

SEQ ID NO: 1886287 - DNA, 15 bp, Homo sapiens
tattttcttcaactt

SEQ ID NO: 1886288 - DNA, 15 bp, Homo sapiens
attttcttcaacttt

SEQ ID NO: 1886289 - DNA, 15 bp, Homo sapiens
ttttcttcaactttt

SEQ ID NO: 1886290 - DNA, 15 bp, Homo sapiens
tttcttcaactttta

SEQ ID NO: 1886291 - DNA, 15 bp, Homo sapiens
ttcttcaacttttaa

SEQ ID NO: 1886292 - DNA, 15 bp, Homo sapiens
tcttcaacttttaag

SEQ ID NO: 1886293 - DNA, 15 bp, Homo sapiens
cttcaacttttaagt

SEQ ID NO: 1886294 - DNA, 15 bp, Homo sapiens
ttcaacttttaagta

SEQ ID NO: 1886295 - DNA, 15 bp, Homo sapiens
tcaacttttaagtac

SEQ ID NO: 1886296 - DNA, 15 bp, Homo sapiens
caacttttaagtaca

SEQ ID NO: 1886297 - DNA, 15 bp, Homo sapiens
aacttttaagtacac

SEQ ID NO: 1886298 - DNA, 15 bp, Homo sapiens
acttttaagtacact

SEQ ID NO: 1886299 - DNA, 15 bp, Homo sapiens
cttttaagtacactg

SEQ ID NO: 1886300 - DNA, 15 bp, Homo sapiens
ttttaagtacactgg

SEQ ID NO: 1886301 - DNA, 15 bp, Homo sapiens
tttaagtacactggt

SEQ ID NO: 1886302 - DNA, 15 bp, Homo sapiens
ttaagtacactggta

SEQ ID NO: 1886303 - DNA, 15 bp, Homo sapiens
taagtacactggtac

SEQ ID NO: 1886304 - DNA, 15 bp, Homo sapiens
aagtacactggtaca

SEQ ID NO: 1886305 - DNA, 15 bp, Homo sapiens
agtacactggtacat

SEQ ID NO: 1886306 - DNA, 15 bp, Homo sapiens
gtacactggtacatg

SEQ ID NO: 1886307 - DNA, 15 bp, Homo sapiens
tacactggtacatgt

SEQ ID NO: 1886308 - DNA, 15 bp, Homo sapiens
acactggtacatgtg

SEQ ID NO: 1886309 - DNA, 15 bp, Homo sapiens
cactggtacatgtgc

SEQ ID NO: 1886310 - DNA, 15 bp, Homo sapiens
actggtacatgtgcc

SEQ ID NO: 1886311 - DNA, 15 bp, Homo sapiens
ctggtacatgtgcca

SEQ ID NO: 1886312 - DNA, 15 bp, Homo sapiens
tggtacatgtgccag

SEQ ID NO: 1886313 - DNA, 15 bp, Homo sapiens
ggtacatgtgccaga

SEQ ID NO: 1886314 - DNA, 15 bp, Homo sapiens
gtacatgtgccagat

SEQ ID NO: 1886315 - DNA, 15 bp, Homo sapiens
tacatgtgccagatg

SEQ ID NO: 1886316 - DNA, 15 bp, Homo sapiens
acatgtgccagatgt

SEQ ID NO: 1886317 - DNA, 15 bp, Homo sapiens
catgtgccagatgtg

SEQ ID NO: 1886318 - DNA, 15 bp, Homo sapiens
atgtgccagatgtgc

SEQ ID NO: 1886319 - DNA, 15 bp, Homo sapiens
tgtgccagatgtgca

SEQ ID NO: 1886320 - DNA, 15 bp, Homo sapiens
gtgccagatgtgcag

SEQ ID NO: 1886321 - DNA, 15 bp, Homo sapiens
tgccagatgtgcagg

SEQ ID NO: 1886322 - DNA, 15 bp, Homo sapiens
gccagatgtgcaggt

SEQ ID NO: 1886323 - DNA, 15 bp, Homo sapiens
ccagatgtgcaggtt

SEQ ID NO: 1886324 - DNA, 15 bp, Homo sapiens
cagatgtgcaggttt

SEQ ID NO: 1886325 - DNA, 15 bp, Homo sapiens
agatgtgcaggtttg

SEQ ID NO: 1886326 - DNA, 15 bp, Homo sapiens
gatgtgcaggtttgt

SEQ ID NO: 1886327 - DNA, 15 bp, Homo sapiens
atgtgcaggtttgtt

SEQ ID NO: 1886328 - DNA, 15 bp, Homo sapiens
tgtgcaggtttgtta

SEQ ID NO: 1886329 - DNA, 15 bp, Homo sapiens
gcaggtttgttacag

SEQ ID NO: 1886330 - DNA, 15 bp, Homo sapiens
caggtttgttacaga

SEQ ID NO: 1886331 - DNA, 15 bp, Homo sapiens
aggtttgttacagag

SEQ ID NO: 1886332 - DNA, 15 bp, Homo sapiens
ggtttgttacagagg

SEQ ID NO: 1886333 - DNA, 15 bp, Homo sapiens
gtttgttacagaggt

SEQ ID NO: 1886334 - DNA, 15 bp, Homo sapiens
tttgttacagaggta

SEQ ID NO: 1886335 - DNA, 15 bp, Homo sapiens
ttgttacagaggtaa

SEQ ID NO: 1886336 - DNA, 15 bp, Homo sapiens
tgttacagaggtaaa

SEQ ID NO: 1886337 - DNA, 15 bp, Homo sapiens
gttacagaggtaaac

SEQ ID NO: 1886338 - DNA, 15 bp, Homo sapiens
ttacagaggtaaaca

SEQ ID NO: 1886339 - DNA, 15 bp, Homo sapiens
tacagaggtaaacat

SEQ ID NO: 1886340 - DNA, 15 bp, Homo sapiens
acagaggtaaacatg

SEQ ID NO: 1886341 - DNA, 15 bp, Homo sapiens
cagaggtaaacatgt

SEQ ID NO: 1886342 - DNA, 15 bp, Homo sapiens
agaggtaaacatgtg

SEQ ID NO: 1886343 - DNA, 15 bp, Homo sapiens
gaggtaaacatgtgc

SEQ ID NO: 1886344 - DNA, 15 bp, Homo sapiens
aggtaaacatgtgcc

SEQ ID NO: 1886345 - DNA, 15 bp, Homo sapiens
ggtaaacatgtgccg

SEQ ID NO: 1886346 - DNA, 15 bp, Homo sapiens
gtaaacatgtgccgt

SEQ ID NO: 1886347 - DNA, 15 bp, Homo sapiens
taaacatgtgccgtg

SEQ ID NO: 1886348 - DNA, 15 bp, Homo sapiens
aaacatgtgccgtgg

SEQ ID NO: 1886349 - DNA, 15 bp, Homo sapiens
aacatgtgccgtggt

SEQ ID NO: 1886350 - DNA, 15 bp, Homo sapiens
acatgtgccgtggtg

SEQ ID NO: 1886351 - DNA, 15 bp, Homo sapiens
catgtgccgtggtgg

SEQ ID NO: 1886352 - DNA, 15 bp, Homo sapiens
atgtgccgtggtggt

SEQ ID NO: 1886353 - DNA, 15 bp, Homo sapiens
tgtgccgtggtggtt

SEQ ID NO: 1886354 - DNA, 15 bp, Homo sapiens
gtgccgtggtggttt

SEQ ID NO: 1886355 - DNA, 15 bp, Homo sapiens
tgccgtggtggtttg

SEQ ID NO: 1886356 - DNA, 15 bp, Homo sapiens
gccgtggtggtttgc

SEQ ID NO: 1886357 - DNA, 15 bp, Homo sapiens
ccgtggtggtttgct

SEQ ID NO: 1886358 - DNA, 15 bp, Homo sapiens
cgtggtggtttgctg

SEQ ID NO: 1886359 - DNA, 15 bp, Homo sapiens
gtggtggtttgctgc

SEQ ID NO: 1886360 - DNA, 15 bp, Homo sapiens
gtggtttgctgcaca

SEQ ID NO: 1886361 - DNA, 15 bp, Homo sapiens
tggtttgctgcacag

SEQ ID NO: 1886362 - DNA, 15 bp, Homo sapiens
ggtttgctgcacaga

SEQ ID NO: 1886363 - DNA, 15 bp, Homo sapiens
gtttgctgcacagat

SEQ ID NO: 1886364 - DNA, 15 bp, Homo sapiens
tttgctgcacagatc

SEQ ID NO: 1886365 - DNA, 15 bp, Homo sapiens
ttgctgcacagatca

SEQ ID NO: 1886366 - DNA, 15 bp, Homo sapiens
tgctgcacagatcat

SEQ ID NO: 1886367 - DNA, 15 bp, Homo sapiens
gctgcacagatcatt

SEQ ID NO: 1886368 - DNA, 15 bp, Homo sapiens
ctgcacagatcattc

SEQ ID NO: 1886369 - DNA, 15 bp, Homo sapiens
tgcacagatcattcc

SEQ ID NO: 1886370 - DNA, 15 bp, Homo sapiens
gcacagatcattcca

SEQ ID NO: 1886371 - DNA, 15 bp, Homo sapiens
cacagatcattccac

SEQ ID NO: 1886372 - DNA, 15 bp, Homo sapiens
acagatcattccacc

SEQ ID NO: 1886373 - DNA, 15 bp, Homo sapiens
cagatcattccacca

SEQ ID NO: 1886374 - DNA, 15 bp, Homo sapiens
agatcattccaccac

SEQ ID NO: 1886375 - DNA, 15 bp, Homo sapiens
gatcattccaccacc

SEQ ID NO: 1886376 - DNA, 15 bp, Homo sapiens
atcattccaccaccc

SEQ ID NO: 1886377 - DNA, 15 bp, Homo sapiens
tcattccaccaccca

SEQ ID NO: 1886378 - DNA, 15 bp, Homo sapiens
cattccaccacccaa

SEQ ID NO: 1886379 - DNA, 15 bp, Homo sapiens
attccaccacccaag

SEQ ID NO: 1886380 - DNA, 15 bp, Homo sapiens
ttccaccacccaagt

SEQ ID NO: 1886381 - DNA, 15 bp, Homo sapiens
tccaccacccaagta

SEQ ID NO: 1886382 - DNA, 15 bp, Homo sapiens
ccaccacccaagtat

SEQ ID NO: 1886383 - DNA, 15 bp, Homo sapiens
caccacccaagtatt

SEQ ID NO: 1886384 - DNA, 15 bp, Homo sapiens
accacccaagtatta

SEQ ID NO: 1886385 - DNA, 15 bp, Homo sapiens
ccacccaagtattaa

SEQ ID NO: 1886386 - DNA, 15 bp, Homo sapiens
cacccaagtattaag

SEQ ID NO: 1886387 - DNA, 15 bp, Homo sapiens
acccaagtattaagc

SEQ ID NO: 1886388 - DNA, 15 bp, Homo sapiens
cccaagtattaagcc

SEQ ID NO: 1886389 - DNA, 15 bp, Homo sapiens
ccaagtattaagccc

SEQ ID NO: 1886390 - DNA, 15 bp, Homo sapiens
caagtattaagccca

SEQ ID NO: 1886391 - DNA, 15 bp, Homo sapiens
aagtattaagcccat

SEQ ID NO: 1886392 - DNA, 15 bp, Homo sapiens
agtattaagcccatg

SEQ ID NO: 1886393 - DNA, 15 bp, Homo sapiens
gtattaagcccatgc

SEQ ID NO: 1886394 - DNA, 15 bp, Homo sapiens
tattaagcccatgcc

SEQ ID NO: 1886395 - DNA, 15 bp, Homo sapiens
attaagcccatgccc

SEQ ID NO: 1886396 - DNA, 15 bp, Homo sapiens
ttaagcccatgcccc

SEQ ID NO: 1886397 - DNA, 15 bp, Homo sapiens
taagcccatgccccc

SEQ ID NO: 1886398 - DNA, 15 bp, Homo sapiens
aagcccatgcccccc

SEQ ID NO: 1886399 - DNA, 15 bp, Homo sapiens
agcccatgcccccca

SEQ ID NO: 1886400 - DNA, 15 bp, Homo sapiens
gcccatgccccccaa

SEQ ID NO: 1886401 - DNA, 15 bp, Homo sapiens
cccatgccccccaac

SEQ ID NO: 1886402 - DNA, 15 bp, Homo sapiens
ccatgccccccaaca

SEQ ID NO: 1886403 - DNA, 15 bp, Homo sapiens
catgccccccaacag

SEQ ID NO: 1886404 - DNA, 15 bp, Homo sapiens
atgccccccaacaga

SEQ ID NO: 1886405 - DNA, 15 bp, Homo sapiens
tgccccccaacagac

SEQ ID NO: 1886406 - DNA, 15 bp, Homo sapiens
gccccccaacagacc

SEQ ID NO: 1886407 - DNA, 15 bp, Homo sapiens
ccccccaacagacca

SEQ ID NO: 1886408 - DNA, 15 bp, Homo sapiens
cccccaacagaccac

SEQ ID NO: 1886409 - DNA, 15 bp, Homo sapiens
ccccaacagaccaca

SEQ ID NO: 1886410 - DNA, 15 bp, Homo sapiens
cccaacagaccacag

SEQ ID NO: 1886411 - DNA, 15 bp, Homo sapiens
ccaacagaccacagt

SEQ ID NO: 1886412 - DNA, 15 bp, Homo sapiens
caacagaccacagtg

SEQ ID NO: 1886413 - DNA, 15 bp, Homo sapiens
aacagaccacagtgt

SEQ ID NO: 1886414 - DNA, 15 bp, Homo sapiens
acagaccacagtgtg

SEQ ID NO: 1886415 - DNA, 15 bp, Homo sapiens
cagaccacagtgtgt

SEQ ID NO: 1886416 - DNA, 15 bp, Homo sapiens
agaccacagtgtgtg

SEQ ID NO: 1886417 - DNA, 15 bp, Homo sapiens
gaccacagtgtgtgt

SEQ ID NO: 1886418 - DNA, 15 bp, Homo sapiens
accacagtgtgtgtt

SEQ ID NO: 1886419 - DNA, 15 bp, Homo sapiens
ccacagtgtgtgttg

SEQ ID NO: 1886420 - DNA, 15 bp, Homo sapiens
cacagtgtgtgttgt

SEQ ID NO: 1886421 - DNA, 15 bp, Homo sapiens
acagtgtgtgttgtt

SEQ ID NO: 1886422 - DNA, 15 bp, Homo sapiens
agtgtgtgttgttcc

SEQ ID NO: 1886423 - DNA, 15 bp, Homo sapiens
gtgtgtgttgttccc

SEQ ID NO: 1886424 - DNA, 15 bp, Homo sapiens
tgtgtgttgttcccc

SEQ ID NO: 1886425 - DNA, 15 bp, Homo sapiens
gtgtgttgttccccc

SEQ ID NO: 1886426 - DNA, 15 bp, Homo sapiens
tgtgttgttccccca

SEQ ID NO: 1886427 - DNA, 15 bp, Homo sapiens
gtgttgttcccccat

SEQ ID NO: 1886428 - DNA, 15 bp, Homo sapiens
tgttgttcccccatg

SEQ ID NO: 1886429 - DNA, 15 bp, Homo sapiens
gttgttcccccatgt

SEQ ID NO: 1886430 - DNA, 15 bp, Homo sapiens
ttgttcccccatgtg

SEQ ID NO: 1886431 - DNA, 15 bp, Homo sapiens
tgttcccccatgtgt

SEQ ID NO: 1886432 - DNA, 15 bp, Homo sapiens
gttcccccatgtgtc

SEQ ID NO: 1886433 - DNA, 15 bp, Homo sapiens
ttcccccatgtgtcc

SEQ ID NO: 1886434 - DNA, 15 bp, Homo sapiens
tcccccatgtgtcca

SEQ ID NO: 1886435 - DNA, 15 bp, Homo sapiens
cccccatgtgtccac

SEQ ID NO: 1886436 - DNA, 15 bp, Homo sapiens
ccccatgtgtccacg

SEQ ID NO: 1886437 - DNA, 15 bp, Homo sapiens
cccatgtgtccacgt

SEQ ID NO: 1886438 - DNA, 15 bp, Homo sapiens
ccatgtgtccacgtg

SEQ ID NO: 1886439 - DNA, 15 bp, Homo sapiens
catgtgtccacgtgt

SEQ ID NO: 1886440 - DNA, 15 bp, Homo sapiens
atgtgtccacgtgtt

SEQ ID NO: 1886441 - DNA, 15 bp, Homo sapiens
tgtgtccacgtgttc

SEQ ID NO: 1886442 - DNA, 15 bp, Homo sapiens
gtgtccacgtgttct

SEQ ID NO: 1886443 - DNA, 15 bp, Homo sapiens
tgtccacgtgttctc

SEQ ID NO: 1886444 - DNA, 15 bp, Homo sapiens
gtccacgtgttctca

SEQ ID NO: 1886445 - DNA, 15 bp, Homo sapiens
tccacgtgttctcat

SEQ ID NO: 1886446 - DNA, 15 bp, Homo sapiens
ccacgtgttctcatc

SEQ ID NO: 1886447 - DNA, 15 bp, Homo sapiens
cacgtgttctcatca

SEQ ID NO: 1886448 - DNA, 15 bp, Homo sapiens
acgtgttctcatcat

SEQ ID NO: 1886449 - DNA, 15 bp, Homo sapiens
cgtgttctcatcatt

SEQ ID NO: 1886450 - DNA, 15 bp, Homo sapiens
gtgttctcatcattc

SEQ ID NO: 1886451 - DNA, 15 bp, Homo sapiens
tgttctcatcattca

SEQ ID NO: 1886452 - DNA, 15 bp, Homo sapiens
gttctcatcattcag

SEQ ID NO: 1886453 - DNA, 15 bp, Homo sapiens
ttctcatcattcagc

SEQ ID NO: 1886454 - DNA, 15 bp, Homo sapiens
tctcatcattcagca

SEQ ID NO: 1886455 - DNA, 15 bp, Homo sapiens
ctcatcattcagcac

SEQ ID NO: 1886456 - DNA, 15 bp, Homo sapiens
tcatcattcagcacc

SEQ ID NO: 1886457 - DNA, 15 bp, Homo sapiens
catcattcagcaccc

SEQ ID NO: 1886458 - DNA, 15 bp, Homo sapiens
atcattcagcaccca

SEQ ID NO: 1886459 - DNA, 15 bp, Homo sapiens
tcattcagcacccac

SEQ ID NO: 1886460 - DNA, 15 bp, Homo sapiens
cattcagcacccact

SEQ ID NO: 1886461 - DNA, 15 bp, Homo sapiens
attcagcacccactc

SEQ ID NO: 1886462 - DNA, 15 bp, Homo sapiens
ttcagcacccactca

SEQ ID NO: 1886463 - DNA, 15 bp, Homo sapiens
tcagcacccactcat

SEQ ID NO: 1886464 - DNA, 15 bp, Homo sapiens
cagcacccactcata

SEQ ID NO: 1886465 - DNA, 15 bp, Homo sapiens
agcacccactcataa

SEQ ID NO: 1886466 - DNA, 15 bp, Homo sapiens
gcacccactcataag

SEQ ID NO: 1886467 - DNA, 15 bp, Homo sapiens
cacccactcataagt

SEQ ID NO: 1886468 - DNA, 15 bp, Homo sapiens
acccactcataagtg

SEQ ID NO: 1886469 - DNA, 15 bp, Homo sapiens
cccactcataagtga

SEQ ID NO: 1886470 - DNA, 15 bp, Homo sapiens
ccactcataagtgag

SEQ ID NO: 1886471 - DNA, 15 bp, Homo sapiens
cactcataagtgaga

SEQ ID NO: 1886472 - DNA, 15 bp, Homo sapiens
actcataagtgagaa

SEQ ID NO: 1886473 - DNA, 15 bp, Homo sapiens
ctcataagtgagaac

SEQ ID NO: 1886474 - DNA, 15 bp, Homo sapiens
tcataagtgagaaca

SEQ ID NO: 1886475 - DNA, 15 bp, Homo sapiens
cataagtgagaacat

SEQ ID NO: 1886476 - DNA, 15 bp, Homo sapiens
ataagtgagaacatg

SEQ ID NO: 1886477 - DNA, 15 bp, Homo sapiens
taagtgagaacatgt

SEQ ID NO: 1886478 - DNA, 15 bp, Homo sapiens
aacatgtggtgtttg

SEQ ID NO: 1886479 - DNA, 15 bp, Homo sapiens
acatgtggtgtttgg

SEQ ID NO: 1886480 - DNA, 15 bp, Homo sapiens
catgtggtgtttggt

SEQ ID NO: 1886481 - DNA, 15 bp, Homo sapiens
atgtggtgtttggtt

SEQ ID NO: 1886482 - DNA, 15 bp, Homo sapiens
tgtggtgtttggttt

SEQ ID NO: 1886483 - DNA, 15 bp, Homo sapiens
gtggtgtttggtttt

SEQ ID NO: 1886484 - DNA, 15 bp, Homo sapiens
tggtgtttggttttc

SEQ ID NO: 1886485 - DNA, 15 bp, Homo sapiens
ggtgtttggttttca

SEQ ID NO: 1886486 - DNA, 15 bp, Homo sapiens
gtgtttggttttcag

SEQ ID NO: 1886487 - DNA, 15 bp, Homo sapiens
tgtttggttttcagt

SEQ ID NO: 1886488 - DNA, 15 bp, Homo sapiens
tttggttttcagttc

SEQ ID NO: 1886489 - DNA, 15 bp, Homo sapiens
ttggttttcagttct

SEQ ID NO: 1886490 - DNA, 15 bp, Homo sapiens
tggttttcagttctt

SEQ ID NO: 1886491 - DNA, 15 bp, Homo sapiens
ggttttcagttcttg

SEQ ID NO: 1886492 - DNA, 15 bp, Homo sapiens
gttttcagttcttgc

SEQ ID NO: 1886493 - DNA, 15 bp, Homo sapiens
ttttcagttcttgca

SEQ ID NO: 1886494 - DNA, 15 bp, Homo sapiens
tttcagttcttgcat

SEQ ID NO: 1886495 - DNA, 15 bp, Homo sapiens
ttcagttcttgcatt

SEQ ID NO: 1886496 - DNA, 15 bp, Homo sapiens
tcagttcttgcatta

SEQ ID NO: 1886497 - DNA, 15 bp, Homo sapiens
cagttcttgcattag

SEQ ID NO: 1886498 - DNA, 15 bp, Homo sapiens
agttcttgcattagt

SEQ ID NO: 1886499 - DNA, 15 bp, Homo sapiens
gttcttgcattagtt

SEQ ID NO: 1886500 - DNA, 15 bp, Homo sapiens
ttcttgcattagttt

SEQ ID NO: 1886501 - DNA, 15 bp, Homo sapiens
tcttgcattagtttg

SEQ ID NO: 1886502 - DNA, 15 bp, Homo sapiens
cttgcattagtttgt

SEQ ID NO: 1886503 - DNA, 15 bp, Homo sapiens
ttgcattagtttgtt

SEQ ID NO: 1886504 - DNA, 15 bp, Homo sapiens
tgcattagtttgtta

SEQ ID NO: 1886505 - DNA, 15 bp, Homo sapiens
gcattagtttgttaa

SEQ ID NO: 1886506 - DNA, 15 bp, Homo sapiens
cattagtttgttaag

SEQ ID NO: 1886507 - DNA, 15 bp, Homo sapiens
attagtttgttaagg

SEQ ID NO: 1886508 - DNA, 15 bp, Homo sapiens
ttagtttgttaagga

SEQ ID NO: 1886509 - DNA, 15 bp, Homo sapiens
tagtttgttaaggaa

SEQ ID NO: 1886510 - DNA, 15 bp, Homo sapiens
agtttgttaaggaaa

SEQ ID NO: 1886511 - DNA, 15 bp, Homo sapiens
gtttgttaaggaaaa

SEQ ID NO: 1886512 - DNA, 15 bp, Homo sapiens
tttgttaaggaaaat

SEQ ID NO: 1886513 - DNA, 15 bp, Homo sapiens
ttgttaaggaaaatg

SEQ ID NO: 1886514 - DNA, 15 bp, Homo sapiens
tgttaaggaaaatga

SEQ ID NO: 1886515 - DNA, 15 bp, Homo sapiens
gttaaggaaaatgac

SEQ ID NO: 1886516 - DNA, 15 bp, Homo sapiens
ttaaggaaaatgact

SEQ ID NO: 1886517 - DNA, 15 bp, Homo sapiens
taaggaaaatgactt

SEQ ID NO: 1886518 - DNA, 15 bp, Homo sapiens
aaggaaaatgacttc

SEQ ID NO: 1886519 - DNA, 15 bp, Homo sapiens
aggaaaatgacttcc

SEQ ID NO: 1886520 - DNA, 15 bp, Homo sapiens
ggaaaatgacttcca

SEQ ID NO: 1886521 - DNA, 15 bp, Homo sapiens
gaaaatgacttccaa

SEQ ID NO: 1886522 - DNA, 15 bp, Homo sapiens
aaaatgacttccaac

SEQ ID NO: 1886523 - DNA, 15 bp, Homo sapiens
aaatgacttccaact

SEQ ID NO: 1886524 - DNA, 15 bp, Homo sapiens
aatgacttccaactc

SEQ ID NO: 1886525 - DNA, 15 bp, Homo sapiens
atgacttccaactcc

SEQ ID NO: 1886526 - DNA, 15 bp, Homo sapiens
tgacttccaactcca

SEQ ID NO: 1886527 - DNA, 15 bp, Homo sapiens
gacttccaactccat

SEQ ID NO: 1886528 - DNA, 15 bp, Homo sapiens
acttccaactccatc

SEQ ID NO: 1886529 - DNA, 15 bp, Homo sapiens
cttccaactccatcc

SEQ ID NO: 1886530 - DNA, 15 bp, Homo sapiens
ttccaactccatcca

SEQ ID NO: 1886531 - DNA, 15 bp, Homo sapiens
tccaactccatccat

SEQ ID NO: 1886532 - DNA, 15 bp, Homo sapiens
ccaactccatccata

SEQ ID NO: 1886533 - DNA, 15 bp, Homo sapiens
caactccatccatat

SEQ ID NO: 1886534 - DNA, 15 bp, Homo sapiens
aactccatccatatt

SEQ ID NO: 1886535 - DNA, 15 bp, Homo sapiens
actccatccatattc

SEQ ID NO: 1886536 - DNA, 15 bp, Homo sapiens
ctccatccatattcc

SEQ ID NO: 1886537 - DNA, 15 bp, Homo sapiens
tccatccatattcct

SEQ ID NO: 1886538 - DNA, 15 bp, Homo sapiens
ccatccatattcctg

SEQ ID NO: 1886539 - DNA, 15 bp, Homo sapiens
catccatattcctgc

SEQ ID NO: 1886540 - DNA, 15 bp, Homo sapiens
atccatattcctgca

SEQ ID NO: 1886541 - DNA, 15 bp, Homo sapiens
tccatattcctgcaa

SEQ ID NO: 1886542 - DNA, 15 bp, Homo sapiens
ccatattcctgcaaa

SEQ ID NO: 1886543 - DNA, 15 bp, Homo sapiens
catattcctgcaaag

SEQ ID NO: 1886544 - DNA, 15 bp, Homo sapiens
atattcctgcaaagg

SEQ ID NO: 1886545 - DNA, 15 bp, Homo sapiens
tattcctgcaaagga

SEQ ID NO: 1886546 - DNA, 15 bp, Homo sapiens
attcctgcaaaggac

SEQ ID NO: 1886547 - DNA, 15 bp, Homo sapiens
ttcctgcaaaggaca

SEQ ID NO: 1886548 - DNA, 15 bp, Homo sapiens
tcctgcaaaggacat

SEQ ID NO: 1886549 - DNA, 15 bp, Homo sapiens
ctgcaaaggacatgc

SEQ ID NO: 1886550 - DNA, 15 bp, Homo sapiens
tgcaaaggacatgct

SEQ ID NO: 1886551 - DNA, 15 bp, Homo sapiens
gcaaaggacatgctc

SEQ ID NO: 1886552 - DNA, 15 bp, Homo sapiens
caaaggacatgctct

SEQ ID NO: 1886553 - DNA, 15 bp, Homo sapiens
aaaggacatgctctc

SEQ ID NO: 1886554 - DNA, 15 bp, Homo sapiens
aaggacatgctctca

SEQ ID NO: 1886555 - DNA, 15 bp, Homo sapiens
aggacatgctctcat

SEQ ID NO: 1886556 - DNA, 15 bp, Homo sapiens
ggacatgctctcatt

SEQ ID NO: 1886557 - DNA, 15 bp, Homo sapiens
gacatgctctcattc

SEQ ID NO: 1886558 - DNA, 15 bp, Homo sapiens
acatgctctcattct

SEQ ID NO: 1886559 - DNA, 15 bp, Homo sapiens
catgctctcattctt

SEQ ID NO: 1886560 - DNA, 15 bp, Homo sapiens
atgctctcattcttt

SEQ ID NO: 1886561 - DNA, 15 bp, Homo sapiens
tgctctcattctttt

SEQ ID NO: 1886562 - DNA, 15 bp, Homo sapiens
gctctcattcttttt

SEQ ID NO: 1886563 - DNA, 15 bp, Homo sapiens
ctctcattctttttt

SEQ ID NO: 1886564 - DNA, 15 bp, Homo sapiens
tctcattcttttttt

SEQ ID NO: 1886565 - DNA, 15 bp, Homo sapiens
ctcattctttttttt

SEQ ID NO: 1886566 - DNA, 15 bp, Homo sapiens
tcattcttttttttg

SEQ ID NO: 1886567 - DNA, 15 bp, Homo sapiens
cattcttttttttgt

SEQ ID NO: 1886568 - DNA, 15 bp, Homo sapiens
attcttttttttgtg

SEQ ID NO: 1886569 - DNA, 15 bp, Homo sapiens
ttcttttttttgtgg

SEQ ID NO: 1886570 - DNA, 15 bp, Homo sapiens
tcttttttttgtggc

SEQ ID NO: 1886571 - DNA, 15 bp, Homo sapiens
cttttttttgtggct

SEQ ID NO: 1886572 - DNA, 15 bp, Homo sapiens
ttttttttgtggctg

SEQ ID NO: 1886573 - DNA, 15 bp, Homo sapiens
tttttttgtggctgc

SEQ ID NO: 1886574 - DNA, 15 bp, Homo sapiens
ttttttgtggctgca

SEQ ID NO: 1886575 - DNA, 15 bp, Homo sapiens
tttttgtggctgcat

SEQ ID NO: 1886576 - DNA, 15 bp, Homo sapiens
ttttgtggctgcata

SEQ ID NO: 1886577 - DNA, 15 bp, Homo sapiens
tttgtggctgcatag

SEQ ID NO: 1886578 - DNA, 15 bp, Homo sapiens
ttgtggctgcatagt

SEQ ID NO: 1886579 - DNA, 15 bp, Homo sapiens
tgtggctgcatagta

SEQ ID NO: 1886580 - DNA, 15 bp, Homo sapiens
gtggctgcatagtat

SEQ ID NO: 1886581 - DNA, 15 bp, Homo sapiens
gctgcatagtattcc

SEQ ID NO: 1886582 - DNA, 15 bp, Homo sapiens
ctgcatagtattcca

SEQ ID NO: 1886583 - DNA, 15 bp, Homo sapiens
tgcatagtattccat

SEQ ID NO: 1886584 - DNA, 15 bp, Homo sapiens
gcatagtattccatg

SEQ ID NO: 1886585 - DNA, 15 bp, Homo sapiens
catagtattccatgg

SEQ ID NO: 1886586 - DNA, 15 bp, Homo sapiens
atagtattccatggt

SEQ ID NO: 1886587 - DNA, 15 bp, Homo sapiens
tagtattccatggtg

SEQ ID NO: 1886588 - DNA, 15 bp, Homo sapiens
agtattccatggtgt

SEQ ID NO: 1886589 - DNA, 15 bp, Homo sapiens
gtattccatggtgta

SEQ ID NO: 1886590 - DNA, 15 bp, Homo sapiens
tattccatggtgtat

SEQ ID NO: 1886591 - DNA, 15 bp, Homo sapiens
attccatggtgtata

SEQ ID NO: 1886592 - DNA, 15 bp, Homo sapiens
ttccatggtgtatac

SEQ ID NO: 1886593 - DNA, 15 bp, Homo sapiens
tccatggtgtatacg

SEQ ID NO: 1886594 - DNA, 15 bp, Homo sapiens
ccatggtgtatacgt

SEQ ID NO: 1886595 - DNA, 15 bp, Homo sapiens
catggtgtatacgta

SEQ ID NO: 1886596 - DNA, 15 bp, Homo sapiens
atggtgtatacgtac

SEQ ID NO: 1886597 - DNA, 15 bp, Homo sapiens
tggtgtatacgtacc

SEQ ID NO: 1886598 - DNA, 15 bp, Homo sapiens
ggtgtatacgtacca

SEQ ID NO: 1886599 - DNA, 15 bp, Homo sapiens
gtgtatacgtaccat

SEQ ID NO: 1886600 - DNA, 15 bp, Homo sapiens
tgtatacgtaccata

SEQ ID NO: 1886601 - DNA, 15 bp, Homo sapiens
gtatacgtaccatat

SEQ ID NO: 1886602 - DNA, 15 bp, Homo sapiens
tatacgtaccatatt

SEQ ID NO: 1886603 - DNA, 15 bp, Homo sapiens
atacgtaccatattt

SEQ ID NO: 1886604 - DNA, 15 bp, Homo sapiens
tacgtaccatatttt

SEQ ID NO: 1886605 - DNA, 15 bp, Homo sapiens
acgtaccatattttg

SEQ ID NO: 1886606 - DNA, 15 bp, Homo sapiens
cgtaccatattttgt

SEQ ID NO: 1886607 - DNA, 15 bp, Homo sapiens
gtaccatattttgtt

SEQ ID NO: 1886608 - DNA, 15 bp, Homo sapiens
taccatattttgttt

SEQ ID NO: 1886609 - DNA, 15 bp, Homo sapiens
accatattttgttta

SEQ ID NO: 1886610 - DNA, 15 bp, Homo sapiens
ccatattttgtttat

SEQ ID NO: 1886611 - DNA, 15 bp, Homo sapiens
catattttgtttatc

SEQ ID NO: 1886612 - DNA, 15 bp, Homo sapiens
atattttgtttatcc

SEQ ID NO: 1886613 - DNA, 15 bp, Homo sapiens
tattttgtttatcca

SEQ ID NO: 1886614 - DNA, 15 bp, Homo sapiens
attttgtttatccaa

SEQ ID NO: 1886615 - DNA, 15 bp, Homo sapiens
ttttgtttatccaat

SEQ ID NO: 1886616 - DNA, 15 bp, Homo sapiens
tttgtttatccaatc

SEQ ID NO: 1886617 - DNA, 15 bp, Homo sapiens
ttgtttatccaatct

SEQ ID NO: 1886618 - DNA, 15 bp, Homo sapiens
tgtttatccaatcta

SEQ ID NO: 1886619 - DNA, 15 bp, Homo sapiens
gtttatccaatctat

SEQ ID NO: 1886620 - DNA, 15 bp, Homo sapiens
tttatccaatctatc

SEQ ID NO: 1886621 - DNA, 15 bp, Homo sapiens
ttatccaatctatca

SEQ ID NO: 1886622 - DNA, 15 bp, Homo sapiens
tatccaatctatcat

SEQ ID NO: 1886623 - DNA, 15 bp, Homo sapiens
atccaatctatcatt

SEQ ID NO: 1886624 - DNA, 15 bp, Homo sapiens
tccaatctatcattg

SEQ ID NO: 1886625 - DNA, 15 bp, Homo sapiens
ccaatctatcattga

SEQ ID NO: 1886626 - DNA, 15 bp, Homo sapiens
caatctatcattgat

SEQ ID NO: 1886627 - DNA, 15 bp, Homo sapiens
aatctatcattgatg

SEQ ID NO: 1886628 - DNA, 15 bp, Homo sapiens
atctatcattgatgg

SEQ ID NO: 1886629 - DNA, 15 bp, Homo sapiens
tctatcattgatggg

SEQ ID NO: 1886630 - DNA, 15 bp, Homo sapiens
ctatcattgatgggc

SEQ ID NO: 1886631 - DNA, 15 bp, Homo sapiens
tatcattgatgggca

SEQ ID NO: 1886632 - DNA, 15 bp, Homo sapiens
atcattgatgggcat

SEQ ID NO: 1886633 - DNA, 15 bp, Homo sapiens
tcattgatgggcatt

SEQ ID NO: 1886634 - DNA, 15 bp, Homo sapiens
cattgatgggcattt

SEQ ID NO: 1886635 - DNA, 15 bp, Homo sapiens
attgatgggcattta

SEQ ID NO: 1886636 - DNA, 15 bp, Homo sapiens
tgatgggcatttagg

SEQ ID NO: 1886637 - DNA, 15 bp, Homo sapiens
gatgggcatttaggc

SEQ ID NO: 1886638 - DNA, 15 bp, Homo sapiens
atgggcatttaggct

SEQ ID NO: 1886639 - DNA, 15 bp, Homo sapiens
tgggcatttaggctg

SEQ ID NO: 1886640 - DNA, 15 bp, Homo sapiens
gggcatttaggctgc

SEQ ID NO: 1886641 - DNA, 15 bp, Homo sapiens
ggcatttaggctgct

SEQ ID NO: 1886642 - DNA, 15 bp, Homo sapiens
gcatttaggctgctt

SEQ ID NO: 1886643 - DNA, 15 bp, Homo sapiens
catttaggctgcttc

SEQ ID NO: 1886644 - DNA, 15 bp, Homo sapiens
atttaggctgcttcc

SEQ ID NO: 1886645 - DNA, 15 bp, Homo sapiens
tttaggctgcttcca

SEQ ID NO: 1886646 - DNA, 15 bp, Homo sapiens
ttaggctgcttccat

SEQ ID NO: 1886647 - DNA, 15 bp, Homo sapiens
taggctgcttccatg

SEQ ID NO: 1886648 - DNA, 15 bp, Homo sapiens
aggctgcttccatgc

SEQ ID NO: 1886649 - DNA, 15 bp, Homo sapiens
ggctgcttccatgcc

SEQ ID NO: 1886650 - DNA, 15 bp, Homo sapiens
gctgcttccatgcct

SEQ ID NO: 1886651 - DNA, 15 bp, Homo sapiens
ctgcttccatgcctt

SEQ ID NO: 1886652 - DNA, 15 bp, Homo sapiens
tgcttccatgccttt

SEQ ID NO: 1886653 - DNA, 15 bp, Homo sapiens
gcttccatgcctttt

SEQ ID NO: 1886654 - DNA, 15 bp, Homo sapiens
cttccatgccttttc

SEQ ID NO: 1886655 - DNA, 15 bp, Homo sapiens
ttccatgccttttct

SEQ ID NO: 1886656 - DNA, 15 bp, Homo sapiens
tccatgccttttcta

SEQ ID NO: 1886657 - DNA, 15 bp, Homo sapiens
ccatgccttttctat

SEQ ID NO: 1886658 - DNA, 15 bp, Homo sapiens
catgccttttctatt

SEQ ID NO: 1886659 - DNA, 15 bp, Homo sapiens
atgccttttctattg

SEQ ID NO: 1886660 - DNA, 15 bp, Homo sapiens
tgccttttctattgt

SEQ ID NO: 1886661 - DNA, 15 bp, Homo sapiens
gccttttctattgtg

SEQ ID NO: 1886662 - DNA, 15 bp, Homo sapiens
ccttttctattgtgt

SEQ ID NO: 1886663 - DNA, 15 bp, Homo sapiens
cttttctattgtgta

SEQ ID NO: 1886664 - DNA, 15 bp, Homo sapiens
ttttctattgtgtat

SEQ ID NO: 1886665 - DNA, 15 bp, Homo sapiens
tttctattgtgtata

SEQ ID NO: 1886666 - DNA, 15 bp, Homo sapiens
ttctattgtgtatag

SEQ ID NO: 1886667 - DNA, 15 bp, Homo sapiens
tctattgtgtatagt

SEQ ID NO: 1886668 - DNA, 15 bp, Homo sapiens
ctattgtgtatagtg

SEQ ID NO: 1886669 - DNA, 15 bp, Homo sapiens
tattgtgtatagtgc

SEQ ID NO: 1886670 - DNA, 15 bp, Homo sapiens
attgtgtatagtgct

SEQ ID NO: 1886671 - DNA, 15 bp, Homo sapiens
ttgtgtatagtgctg

SEQ ID NO: 1886672 - DNA, 15 bp, Homo sapiens
tgtgtatagtgctgc

SEQ ID NO: 1886673 - DNA, 15 bp, Homo sapiens
gtgtatagtgctgca

SEQ ID NO: 1886674 - DNA, 15 bp, Homo sapiens
tgtatagtgctgcaa

SEQ ID NO: 1886675 - DNA, 15 bp, Homo sapiens
gtatagtgctgcaat

SEQ ID NO: 1886676 - DNA, 15 bp, Homo sapiens
tatagtgctgcaatg

SEQ ID NO: 1886677 - DNA, 15 bp, Homo sapiens
atagtgctgcaatga

SEQ ID NO: 1886678 - DNA, 15 bp, Homo sapiens
tagtgctgcaatgaa

SEQ ID NO: 1886679 - DNA, 15 bp, Homo sapiens
agtgctgcaatgaac

SEQ ID NO: 1886680 - DNA, 15 bp, Homo sapiens
gtgctgcaatgaaca

SEQ ID NO: 1886681 - DNA, 15 bp, Homo sapiens
tgctgcaatgaacat

SEQ ID NO: 1886682 - DNA, 15 bp, Homo sapiens
gctgcaatgaacata

SEQ ID NO: 1886683 - DNA, 15 bp, Homo sapiens
ctgcaatgaacatat

SEQ ID NO: 1886684 - DNA, 15 bp, Homo sapiens
tgcaatgaacatatg

SEQ ID NO: 1886685 - DNA, 15 bp, Homo sapiens
gcaatgaacatatgc

SEQ ID NO: 1886686 - DNA, 15 bp, Homo sapiens
caatgaacatatgca

SEQ ID NO: 1886687 - DNA, 15 bp, Homo sapiens
aatgaacatatgcaa

SEQ ID NO: 1886688 - DNA, 15 bp, Homo sapiens
atgaacatatgcaag

SEQ ID NO: 1886689 - DNA, 15 bp, Homo sapiens
tgaacatatgcaagc

SEQ ID NO: 1886690 - DNA, 15 bp, Homo sapiens
gaacatatgcaagca

SEQ ID NO: 1886691 - DNA, 15 bp, Homo sapiens
aacatatgcaagcat

SEQ ID NO: 1886692 - DNA, 15 bp, Homo sapiens
acatatgcaagcatg

SEQ ID NO: 1886693 - DNA, 15 bp, Homo sapiens
catatgcaagcatgt

SEQ ID NO: 1886694 - DNA, 15 bp, Homo sapiens
atatgcaagcatgta

SEQ ID NO: 1886695 - DNA, 15 bp, Homo sapiens
tatgcaagcatgtat

SEQ ID NO: 1886696 - DNA, 15 bp, Homo sapiens
atgcaagcatgtatc

SEQ ID NO: 1886697 - DNA, 15 bp, Homo sapiens
tgcaagcatgtatct

SEQ ID NO: 1886698 - DNA, 15 bp, Homo sapiens
gcaagcatgtatctt

SEQ ID NO: 1886699 - DNA, 15 bp, Homo sapiens
caagcatgtatcttt

SEQ ID NO: 1886700 - DNA, 15 bp, Homo sapiens
aagcatgtatcttta

SEQ ID NO: 1886701 - DNA, 15 bp, Homo sapiens
agcatgtatctttat

SEQ ID NO: 1886702 - DNA, 15 bp, Homo sapiens
gcatgtatctttata

SEQ ID NO: 1886703 - DNA, 15 bp, Homo sapiens
catgtatctttataa

SEQ ID NO: 1886704 - DNA, 15 bp, Homo sapiens
atgtatctttataac

SEQ ID NO: 1886705 - DNA, 15 bp, Homo sapiens
tgtatctttataaca

SEQ ID NO: 1886706 - DNA, 15 bp, Homo sapiens
gtatctttataacag

SEQ ID NO: 1886707 - DNA, 15 bp, Homo sapiens
tatctttataacaga

SEQ ID NO: 1886708 - DNA, 15 bp, Homo sapiens
atctttataacagaa

SEQ ID NO: 1886709 - DNA, 15 bp, Homo sapiens
tctttataacagaat

SEQ ID NO: 1886710 - DNA, 15 bp, Homo sapiens
ctttataacagaatg

SEQ ID NO: 1886711 - DNA, 15 bp, Homo sapiens
tttataacagaatga

SEQ ID NO: 1886712 - DNA, 15 bp, Homo sapiens
ttataacagaatgat

SEQ ID NO: 1886713 - DNA, 15 bp, Homo sapiens
tataacagaatgatt

SEQ ID NO: 1886714 - DNA, 15 bp, Homo sapiens
ataacagaatgattt

SEQ ID NO: 1886715 - DNA, 15 bp, Homo sapiens
taacagaatgatttc

SEQ ID NO: 1886716 - DNA, 15 bp, Homo sapiens
aacagaatgatttct

SEQ ID NO: 1886717 - DNA, 15 bp, Homo sapiens
acagaatgatttctg

SEQ ID NO: 1886718 - DNA, 15 bp, Homo sapiens
cagaatgatttctgt

SEQ ID NO: 1886719 - DNA, 15 bp, Homo sapiens
agaatgatttctgtt

SEQ ID NO: 1886720 - DNA, 15 bp, Homo sapiens
gaatgatttctgttc

SEQ ID NO: 1886721 - DNA, 15 bp, Homo sapiens
aatgatttctgttcc

SEQ ID NO: 1886722 - DNA, 15 bp, Homo sapiens
atgatttctgttcct

SEQ ID NO: 1886723 - DNA, 15 bp, Homo sapiens
tgatttctgttcctt

SEQ ID NO: 1886724 - DNA, 15 bp, Homo sapiens
gatttctgttccttt

SEQ ID NO: 1886725 - DNA, 15 bp, Homo sapiens
atttctgttcctttg

SEQ ID NO: 1886726 - DNA, 15 bp, Homo sapiens
tttctgttcctttga

SEQ ID NO: 1886727 - DNA, 15 bp, Homo sapiens
ttctgttcctttgag

SEQ ID NO: 1886728 - DNA, 15 bp, Homo sapiens
tctgttcctttgagt

SEQ ID NO: 1886729 - DNA, 15 bp, Homo sapiens
ctgttcctttgagta

SEQ ID NO: 1886730 - DNA, 15 bp, Homo sapiens
tgttcctttgagtat

SEQ ID NO: 1886731 - DNA, 15 bp, Homo sapiens
gttcctttgagtatg

SEQ ID NO: 1886732 - DNA, 15 bp, Homo sapiens
ttcctttgagtatgt

SEQ ID NO: 1886733 - DNA, 15 bp, Homo sapiens
tcctttgagtatgta

SEQ ID NO: 1886734 - DNA, 15 bp, Homo sapiens
cctttgagtatgtac

SEQ ID NO: 1886735 - DNA, 15 bp, Homo sapiens
ctttgagtatgtacc

SEQ ID NO: 1886736 - DNA, 15 bp, Homo sapiens
tttgagtatgtacct

SEQ ID NO: 1886737 - DNA, 15 bp, Homo sapiens
ttgagtatgtaccta

SEQ ID NO: 1886738 - DNA, 15 bp, Homo sapiens
tgagtatgtacctag

SEQ ID NO: 1886739 - DNA, 15 bp, Homo sapiens
gagtatgtacctagt

SEQ ID NO: 1886740 - DNA, 15 bp, Homo sapiens
agtatgtacctagta

SEQ ID NO: 1886741 - DNA, 15 bp, Homo sapiens
gtatgtacctagtaa

SEQ ID NO: 1886742 - DNA, 15 bp, Homo sapiens
tatgtacctagtaat

SEQ ID NO: 1886743 - DNA, 15 bp, Homo sapiens
atgtacctagtaatg

SEQ ID NO: 1886744 - DNA, 15 bp, Homo sapiens
tgtacctagtaatgg

SEQ ID NO: 1886745 - DNA, 15 bp, Homo sapiens
gtacctagtaatggg

SEQ ID NO: 1886746 - DNA, 15 bp, Homo sapiens
tacctagtaatggga

SEQ ID NO: 1886747 - DNA, 15 bp, Homo sapiens
acctagtaatgggat

SEQ ID NO: 1886748 - DNA, 15 bp, Homo sapiens
cctagtaatgggatt

SEQ ID NO: 1886749 - DNA, 15 bp, Homo sapiens
ctagtaatgggattg

SEQ ID NO: 1886750 - DNA, 15 bp, Homo sapiens
tagtaatgggattgt

SEQ ID NO: 1886751 - DNA, 15 bp, Homo sapiens
agtaatgggattgtt

SEQ ID NO: 1886752 - DNA, 15 bp, Homo sapiens
gtaatgggattgttg

SEQ ID NO: 1886753 - DNA, 15 bp, Homo sapiens
taatgggattgttgg

SEQ ID NO: 1886754 - DNA, 15 bp, Homo sapiens
aatgggattgttggg

SEQ ID NO: 1886755 - DNA, 15 bp, Homo sapiens
atgggattgttgggt

SEQ ID NO: 1886756 - DNA, 15 bp, Homo sapiens
tgggattgttgggtc

SEQ ID NO: 1886757 - DNA, 15 bp, Homo sapiens
gggattgttgggtca

SEQ ID NO: 1886758 - DNA, 15 bp, Homo sapiens
ggattgttgggtcaa

SEQ ID NO: 1886759 - DNA, 15 bp, Homo sapiens
gattgttgggtcaaa

SEQ ID NO: 1886760 - DNA, 15 bp, Homo sapiens
attgttgggtcaaat

SEQ ID NO: 1886761 - DNA, 15 bp, Homo sapiens
ttgttgggtcaaatt

SEQ ID NO: 1886762 - DNA, 15 bp, Homo sapiens
tgttgggtcaaattg

SEQ ID NO: 1886763 - DNA, 15 bp, Homo sapiens
gttgggtcaaattgt

SEQ ID NO: 1886764 - DNA, 15 bp, Homo sapiens
ttgggtcaaattgta

SEQ ID NO: 1886765 - DNA, 15 bp, Homo sapiens
tgggtcaaattgtat

SEQ ID NO: 1886766 - DNA, 15 bp, Homo sapiens
gggtcaaattgtatt

SEQ ID NO: 1886767 - DNA, 15 bp, Homo sapiens
aaattgtatttctgc

SEQ ID NO: 1886768 - DNA, 15 bp, Homo sapiens
aattgtatttctgct

SEQ ID NO: 1886769 - DNA, 15 bp, Homo sapiens
attgtatttctgctt

SEQ ID NO: 1886770 - DNA, 15 bp, Homo sapiens
ttgtatttctgcttc

SEQ ID NO: 1886771 - DNA, 15 bp, Homo sapiens
tgtatttctgcttct

SEQ ID NO: 1886772 - DNA, 15 bp, Homo sapiens
gtatttctgcttcta

SEQ ID NO: 1886773 - DNA, 15 bp, Homo sapiens
tatttctgcttctag

SEQ ID NO: 1886774 - DNA, 15 bp, Homo sapiens
atttctgcttctagg

SEQ ID NO: 1886775 - DNA, 15 bp, Homo sapiens
tttctgcttctaggt

SEQ ID NO: 1886776 - DNA, 15 bp, Homo sapiens
ttctgcttctaggtc

SEQ ID NO: 1886777 - DNA, 15 bp, Homo sapiens
tctgcttctaggtct

SEQ ID NO: 1886778 - DNA, 15 bp, Homo sapiens
ctgcttctaggtctt

SEQ ID NO: 1886779 - DNA, 15 bp, Homo sapiens
tgcttctaggtcttt

SEQ ID NO: 1886780 - DNA, 15 bp, Homo sapiens
gcttctaggtctttg

SEQ ID NO: 1886781 - DNA, 15 bp, Homo sapiens
cttctaggtctttga

SEQ ID NO: 1886782 - DNA, 15 bp, Homo sapiens
ttctaggtctttgag

SEQ ID NO: 1886783 - DNA, 15 bp, Homo sapiens
tctaggtctttgagg

SEQ ID NO: 1886784 - DNA, 15 bp, Homo sapiens
ctaggtctttgagga

SEQ ID NO: 1886785 - DNA, 15 bp, Homo sapiens
taggtctttgaggaa

SEQ ID NO: 1886786 - DNA, 15 bp, Homo sapiens
aggtctttgaggaat

SEQ ID NO: 1886787 - DNA, 15 bp, Homo sapiens
ggtctttgaggaata

SEQ ID NO: 1886788 - DNA, 15 bp, Homo sapiens
gtctttgaggaatag

SEQ ID NO: 1886789 - DNA, 15 bp, Homo sapiens
tctttgaggaatagc

SEQ ID NO: 1886790 - DNA, 15 bp, Homo sapiens
ctttgaggaatagcc

SEQ ID NO: 1886791 - DNA, 15 bp, Homo sapiens
tttgaggaatagcca

SEQ ID NO: 1886792 - DNA, 15 bp, Homo sapiens
ttgaggaatagccac

SEQ ID NO: 1886793 - DNA, 15 bp, Homo sapiens
tgaggaatagccaca

SEQ ID NO: 1886794 - DNA, 15 bp, Homo sapiens
gaggaatagccacac

SEQ ID NO: 1886795 - DNA, 15 bp, Homo sapiens
aggaatagccacact

SEQ ID NO: 1886796 - DNA, 15 bp, Homo sapiens
ggaatagccacactg

SEQ ID NO: 1886797 - DNA, 15 bp, Homo sapiens
gaatagccacactgt

SEQ ID NO: 1886798 - DNA, 15 bp, Homo sapiens
aatagccacactgtc

SEQ ID NO: 1886799 - DNA, 15 bp, Homo sapiens
atagccacactgtct

SEQ ID NO: 1886800 - DNA, 15 bp, Homo sapiens
tagccacactgtctt

SEQ ID NO: 1886801 - DNA, 15 bp, Homo sapiens
agccacactgtctta

SEQ ID NO: 1886802 - DNA, 15 bp, Homo sapiens
gccacactgtcttac

SEQ ID NO: 1886803 - DNA, 15 bp, Homo sapiens
ccacactgtcttaca

SEQ ID NO: 1886804 - DNA, 15 bp, Homo sapiens
cacactgtcttacac

SEQ ID NO: 1886805 - DNA, 15 bp, Homo sapiens
acactgtcttacaca

SEQ ID NO: 1886806 - DNA, 15 bp, Homo sapiens
cactgtcttacacaa

SEQ ID NO: 1886807 - DNA, 15 bp, Homo sapiens
actgtcttacacaac

SEQ ID NO: 1886808 - DNA, 15 bp, Homo sapiens
ctgtcttacacaacg

SEQ ID NO: 1886809 - DNA, 15 bp, Homo sapiens
tgtcttacacaacgg

SEQ ID NO: 1886810 - DNA, 15 bp, Homo sapiens
gtcttacacaacggt

SEQ ID NO: 1886811 - DNA, 15 bp, Homo sapiens
tcttacacaacggtt

SEQ ID NO: 1886812 - DNA, 15 bp, Homo sapiens
cttacacaacggttg

SEQ ID NO: 1886813 - DNA, 15 bp, Homo sapiens
ttacacaacggttga

SEQ ID NO: 1886814 - DNA, 15 bp, Homo sapiens
tacacaacggttgaa

SEQ ID NO: 1886815 - DNA, 15 bp, Homo sapiens
acacaacggttgaat

SEQ ID NO: 1886816 - DNA, 15 bp, Homo sapiens
cacaacggttgaatt

SEQ ID NO: 1886817 - DNA, 15 bp, Homo sapiens
acaacggttgaatta

SEQ ID NO: 1886818 - DNA, 15 bp, Homo sapiens
caacggttgaattaa

SEQ ID NO: 1886819 - DNA, 15 bp, Homo sapiens
aacggttgaattaat

SEQ ID NO: 1886820 - DNA, 15 bp, Homo sapiens
acggttgaattaatt

SEQ ID NO: 1886821 - DNA, 15 bp, Homo sapiens
cggttgaattaattt

SEQ ID NO: 1886822 - DNA, 15 bp, Homo sapiens
ggttgaattaattta

SEQ ID NO: 1886823 - DNA, 15 bp, Homo sapiens
gttgaattaatttac

SEQ ID NO: 1886824 - DNA, 15 bp, Homo sapiens
tgaattaatttacac

SEQ ID NO: 1886825 - DNA, 15 bp, Homo sapiens
gaattaatttacact

SEQ ID NO: 1886826 - DNA, 15 bp, Homo sapiens
aattaatttacactc

SEQ ID NO: 1886827 - DNA, 15 bp, Homo sapiens
attaatttacactcc

SEQ ID NO: 1886828 - DNA, 15 bp, Homo sapiens
ttaatttacactccc

SEQ ID NO: 1886829 - DNA, 15 bp, Homo sapiens
taatttacactccca

SEQ ID NO: 1886830 - DNA, 15 bp, Homo sapiens
aatttacactcccac

SEQ ID NO: 1886831 - DNA, 15 bp, Homo sapiens
atttacactcccact

SEQ ID NO: 1886832 - DNA, 15 bp, Homo sapiens
tttacactcccacta

SEQ ID NO: 1886833 - DNA, 15 bp, Homo sapiens
ttacactcccactaa

SEQ ID NO: 1886834 - DNA, 15 bp, Homo sapiens
tacactcccactaac

SEQ ID NO: 1886835 - DNA, 15 bp, Homo sapiens
acactcccactaaca

SEQ ID NO: 1886836 - DNA, 15 bp, Homo sapiens
cactcccactaacat

SEQ ID NO: 1886837 - DNA, 15 bp, Homo sapiens
actcccactaacatt

SEQ ID NO: 1886838 - DNA, 15 bp, Homo sapiens
ctcccactaacattg

SEQ ID NO: 1886839 - DNA, 15 bp, Homo sapiens
tcccactaacattgt

SEQ ID NO: 1886840 - DNA, 15 bp, Homo sapiens
cccactaacattgta

SEQ ID NO: 1886841 - DNA, 15 bp, Homo sapiens
ccactaacattgtaa

SEQ ID NO: 1886842 - DNA, 15 bp, Homo sapiens
cactaacattgtaaa

SEQ ID NO: 1886843 - DNA, 15 bp, Homo sapiens
actaacattgtaaaa

SEQ ID NO: 1886844 - DNA, 15 bp, Homo sapiens
ctaacattgtaaaaa

SEQ ID NO: 1886845 - DNA, 15 bp, Homo sapiens
taacattgtaaaaac

SEQ ID NO: 1886846 - DNA, 15 bp, Homo sapiens
aacattgtaaaaaca

SEQ ID NO: 1886847 - DNA, 15 bp, Homo sapiens
acattgtaaaaacat

SEQ ID NO: 1886848 - DNA, 15 bp, Homo sapiens
cattgtaaaaacatt

SEQ ID NO: 1886849 - DNA, 15 bp, Homo sapiens
attgtaaaaacattc

SEQ ID NO: 1886850 - DNA, 15 bp, Homo sapiens
ttgtaaaaacattcc

SEQ ID NO: 1886851 - DNA, 15 bp, Homo sapiens
tgtaaaaacattcct

SEQ ID NO: 1886852 - DNA, 15 bp, Homo sapiens
gtaaaaacattcctt

SEQ ID NO: 1886853 - DNA, 15 bp, Homo sapiens
taaaaacattccttt

SEQ ID NO: 1886854 - DNA, 15 bp, Homo sapiens
aaaaacattcctttt

SEQ ID NO: 1886855 - DNA, 15 bp, Homo sapiens
aaaacattccttttt

SEQ ID NO: 1886856 - DNA, 15 bp, Homo sapiens
aaacattcctttttc

SEQ ID NO: 1886857 - DNA, 15 bp, Homo sapiens
aacattcctttttct

SEQ ID NO: 1886858 - DNA, 15 bp, Homo sapiens
cattcctttttctat

SEQ ID NO: 1886859 - DNA, 15 bp, Homo sapiens
attcctttttctatg

SEQ ID NO: 1886860 - DNA, 15 bp, Homo sapiens
ttcctttttctatgt

SEQ ID NO: 1886861 - DNA, 15 bp, Homo sapiens
tcctttttctatgtg

SEQ ID NO: 1886862 - DNA, 15 bp, Homo sapiens
cctttttctatgtgg

SEQ ID NO: 1886863 - DNA, 15 bp, Homo sapiens
ctttttctatgtggc

SEQ ID NO: 1886864 - DNA, 15 bp, Homo sapiens
tttttctatgtggct

SEQ ID NO: 1886865 - DNA, 15 bp, Homo sapiens
ttttctatgtggctt

SEQ ID NO: 1886866 - DNA, 15 bp, Homo sapiens
tttctatgtggcttc

SEQ ID NO: 1886867 - DNA, 15 bp, Homo sapiens
ttctatgtggcttca

SEQ ID NO: 1886868 - DNA, 15 bp, Homo sapiens
tctatgtggcttcac

SEQ ID NO: 1886869 - DNA, 15 bp, Homo sapiens
ctatgtggcttcacc

SEQ ID NO: 1886870 - DNA, 15 bp, Homo sapiens
tatgtggcttcacca

SEQ ID NO: 1886871 - DNA, 15 bp, Homo sapiens
atgtggcttcaccag

SEQ ID NO: 1886872 - DNA, 15 bp, Homo sapiens
tgtggcttcaccagc

SEQ ID NO: 1886873 - DNA, 15 bp, Homo sapiens
gtggcttcaccagca

SEQ ID NO: 1886874 - DNA, 15 bp, Homo sapiens
tggcttcaccagcat

SEQ ID NO: 1886875 - DNA, 15 bp, Homo sapiens
ggcttcaccagcatg

SEQ ID NO: 1886876 - DNA, 15 bp, Homo sapiens
gcttcaccagcatga

SEQ ID NO: 1886877 - DNA, 15 bp, Homo sapiens
cttcaccagcatgat

SEQ ID NO: 1886878 - DNA, 15 bp, Homo sapiens
ttcaccagcatgatc

SEQ ID NO: 1886879 - DNA, 15 bp, Homo sapiens
tcaccagcatgatca

SEQ ID NO: 1886880 - DNA, 15 bp, Homo sapiens
caccagcatgatcaa

SEQ ID NO: 1886881 - DNA, 15 bp, Homo sapiens
accagcatgatcaaa

SEQ ID NO: 1886882 - DNA, 15 bp, Homo sapiens
ccagcatgatcaaac

SEQ ID NO: 1886883 - DNA, 15 bp, Homo sapiens
cagcatgatcaaact

SEQ ID NO: 1886884 - DNA, 15 bp, Homo sapiens
agcatgatcaaacta

SEQ ID NO: 1886885 - DNA, 15 bp, Homo sapiens
gcatgatcaaactat

SEQ ID NO: 1886886 - DNA, 15 bp, Homo sapiens
catgatcaaactatc

SEQ ID NO: 1886887 - DNA, 15 bp, Homo sapiens
atgatcaaactatct

SEQ ID NO: 1886888 - DNA, 15 bp, Homo sapiens
tgatcaaactatctt

SEQ ID NO: 1886889 - DNA, 15 bp, Homo sapiens
gatcaaactatcttt

SEQ ID NO: 1886890 - DNA, 15 bp, Homo sapiens
atcaaactatctttg

SEQ ID NO: 1886891 - DNA, 15 bp, Homo sapiens
tcaaactatctttgt

SEQ ID NO: 1886892 - DNA, 15 bp, Homo sapiens
caaactatctttgtt

SEQ ID NO: 1886893 - DNA, 15 bp, Homo sapiens
aaactatctttgttt

SEQ ID NO: 1886894 - DNA, 15 bp, Homo sapiens
aactatctttgtttc

SEQ ID NO: 1886895 - DNA, 15 bp, Homo sapiens
actatctttgtttcc

SEQ ID NO: 1886896 - DNA, 15 bp, Homo sapiens
ctatctttgtttcct

SEQ ID NO: 1886897 - DNA, 15 bp, Homo sapiens
tatctttgtttccta

SEQ ID NO: 1886898 - DNA, 15 bp, Homo sapiens
atctttgtttcctat

SEQ ID NO: 1886899 - DNA, 15 bp, Homo sapiens
tctttgtttcctatt

SEQ ID NO: 1886900 - DNA, 15 bp, Homo sapiens
ctttgtttcctattt

SEQ ID NO: 1886901 - DNA, 15 bp, Homo sapiens
tttgtttcctatttt

SEQ ID NO: 1886902 - DNA, 15 bp, Homo sapiens
ttgtttcctattttc

SEQ ID NO: 1886903 - DNA, 15 bp, Homo sapiens
tgtttcctattttct

SEQ ID NO: 1886904 - DNA, 15 bp, Homo sapiens
gtttcctattttctt

SEQ ID NO: 1886905 - DNA, 15 bp, Homo sapiens
tttcctattttcttt

SEQ ID NO: 1886906 - DNA, 15 bp, Homo sapiens
ttcctattttctttt

SEQ ID NO: 1886907 - DNA, 15 bp, Homo sapiens
tcctattttcttttc

SEQ ID NO: 1886908 - DNA, 15 bp, Homo sapiens
cctattttcttttct

SEQ ID NO: 1886909 - DNA, 15 bp, Homo sapiens
ctattttcttttctt

SEQ ID NO: 1886910 - DNA, 15 bp, Homo sapiens
tattttcttttcttg

SEQ ID NO: 1886911 - DNA, 15 bp, Homo sapiens
attttcttttcttga

SEQ ID NO: 1886912 - DNA, 15 bp, Homo sapiens
ttttcttttcttgag

SEQ ID NO: 1886913 - DNA, 15 bp, Homo sapiens
tttcttttcttgagg

SEQ ID NO: 1886914 - DNA, 15 bp, Homo sapiens
ttcttttcttgaggt

SEQ ID NO: 1886915 - DNA, 15 bp, Homo sapiens
tcttttcttgaggtt

SEQ ID NO: 1886916 - DNA, 15 bp, Homo sapiens
cttttcttgaggtta

SEQ ID NO: 1886917 - DNA, 15 bp, Homo sapiens
ttttcttgaggttag

SEQ ID NO: 1886918 - DNA, 15 bp, Homo sapiens
tttcttgaggttagg

SEQ ID NO: 1886919 - DNA, 15 bp, Homo sapiens
ttcttgaggttagga

SEQ ID NO: 1886920 - DNA, 15 bp, Homo sapiens
tcttgaggttaggag

SEQ ID NO: 1886921 - DNA, 15 bp, Homo sapiens
cttgaggttaggagt

SEQ ID NO: 1886922 - DNA, 15 bp, Homo sapiens
ttgaggttaggagtt

SEQ ID NO: 1886923 - DNA, 15 bp, Homo sapiens
tgaggttaggagttc

SEQ ID NO: 1886924 - DNA, 15 bp, Homo sapiens
gaggttaggagttcc

SEQ ID NO: 1886925 - DNA, 15 bp, Homo sapiens
aggttaggagttcct

SEQ ID NO: 1886926 - DNA, 15 bp, Homo sapiens
ggttaggagttcctg

SEQ ID NO: 1886927 - DNA, 15 bp, Homo sapiens
gttaggagttcctgt

SEQ ID NO: 1886928 - DNA, 15 bp, Homo sapiens
ttaggagttcctgtg

SEQ ID NO: 1886929 - DNA, 15 bp, Homo sapiens
taggagttcctgtga

SEQ ID NO: 1886930 - DNA, 15 bp, Homo sapiens
aggagttcctgtgac

SEQ ID NO: 1886931 - DNA, 15 bp, Homo sapiens
ggagttcctgtgaca

SEQ ID NO: 1886932 - DNA, 15 bp, Homo sapiens
gagttcctgtgacac

SEQ ID NO: 1886933 - DNA, 15 bp, Homo sapiens
agttcctgtgacaca

SEQ ID NO: 1886934 - DNA, 15 bp, Homo sapiens
gttcctgtgacacag

SEQ ID NO: 1886935 - DNA, 15 bp, Homo sapiens
ttcctgtgacacagg

SEQ ID NO: 1886936 - DNA, 15 bp, Homo sapiens
tcctgtgacacaggg

SEQ ID NO: 1886937 - DNA, 15 bp, Homo sapiens
cctgtgacacaggga

SEQ ID NO: 1886938 - DNA, 15 bp, Homo sapiens
ctgtgacacagggat

SEQ ID NO: 1886939 - DNA, 15 bp, Homo sapiens
tgtgacacagggatg

SEQ ID NO: 1886940 - DNA, 15 bp, Homo sapiens
gtgacacagggatgg

SEQ ID NO: 1886941 - DNA, 15 bp, Homo sapiens
tgacacagggatggg

SEQ ID NO: 1886942 - DNA, 15 bp, Homo sapiens
gacacagggatggga

SEQ ID NO: 1886943 - DNA, 15 bp, Homo sapiens
acacagggatgggaa

SEQ ID NO: 1886944 - DNA, 15 bp, Homo sapiens
cacagggatgggaag

SEQ ID NO: 1886945 - DNA, 15 bp, Homo sapiens
acagggatgggaaga

SEQ ID NO: 1886946 - DNA, 15 bp, Homo sapiens
cagggatgggaagaa

SEQ ID NO: 1886947 - DNA, 15 bp, Homo sapiens
agggatgggaagaac

SEQ ID NO: 1886948 - DNA, 15 bp, Homo sapiens
gggatgggaagaact

SEQ ID NO: 1886949 - DNA, 15 bp, Homo sapiens
ggatgggaagaactg

SEQ ID NO: 1886950 - DNA, 15 bp, Homo sapiens
gatgggaagaactgt

SEQ ID NO: 1886951 - DNA, 15 bp, Homo sapiens
atgggaagaactgtc

SEQ ID NO: 1886952 - DNA, 15 bp, Homo sapiens
tgggaagaactgtct

SEQ ID NO: 1886953 - DNA, 15 bp, Homo sapiens
gggaagaactgtctt

SEQ ID NO: 1886954 - DNA, 15 bp, Homo sapiens
ggaagaactgtctta

SEQ ID NO: 1886955 - DNA, 15 bp, Homo sapiens
gaagaactgtcttat

SEQ ID NO: 1886956 - DNA, 15 bp, Homo sapiens
aagaactgtcttatg

SEQ ID NO: 1886957 - DNA, 15 bp, Homo sapiens
agaactgtcttatga

SEQ ID NO: 1886958 - DNA, 15 bp, Homo sapiens
gaactgtcttatgac

SEQ ID NO: 1886959 - DNA, 15 bp, Homo sapiens
aactgtcttatgaca

SEQ ID NO: 1886960 - DNA, 15 bp, Homo sapiens
actgtcttatgacac

SEQ ID NO: 1886961 - DNA, 15 bp, Homo sapiens
ctgtcttatgacaca

SEQ ID NO: 1886962 - DNA, 15 bp, Homo sapiens
tgtcttatgacacag

SEQ ID NO: 1886963 - DNA, 15 bp, Homo sapiens
gtcttatgacacagc

SEQ ID NO: 1886964 - DNA, 15 bp, Homo sapiens
tcttatgacacagca

SEQ ID NO: 1886965 - DNA, 15 bp, Homo sapiens
cttatgacacagcag

SEQ ID NO: 1886966 - DNA, 15 bp, Homo sapiens
ttatgacacagcaga

SEQ ID NO: 1886967 - DNA, 15 bp, Homo sapiens
tatgacacagcagaa

SEQ ID NO: 1886968 - DNA, 15 bp, Homo sapiens
atgacacagcagaac

SEQ ID NO: 1886969 - DNA, 15 bp, Homo sapiens
tgacacagcagaact

SEQ ID NO: 1886970 - DNA, 15 bp, Homo sapiens
gacacagcagaactt

SEQ ID NO: 1886971 - DNA, 15 bp, Homo sapiens
acacagcagaacttg

SEQ ID NO: 1886972 - DNA, 15 bp, Homo sapiens
cacagcagaacttgg

SEQ ID NO: 1886973 - DNA, 15 bp, Homo sapiens
acagcagaacttgga

SEQ ID NO: 1886974 - DNA, 15 bp, Homo sapiens
cagcagaacttggac

SEQ ID NO: 1886975 - DNA, 15 bp, Homo sapiens
agcagaacttggaca

SEQ ID NO: 1886976 - DNA, 15 bp, Homo sapiens
gcagaacttggacac

SEQ ID NO: 1886977 - DNA, 15 bp, Homo sapiens
cagaacttggacact

SEQ ID NO: 1886978 - DNA, 15 bp, Homo sapiens
agaacttggacactg

SEQ ID NO: 1886979 - DNA, 15 bp, Homo sapiens
gaacttggacactgg

SEQ ID NO: 1886980 - DNA, 15 bp, Homo sapiens
aacttggacactgga

SEQ ID NO: 1886981 - DNA, 15 bp, Homo sapiens
acttggacactggaa

SEQ ID NO: 1886982 - DNA, 15 bp, Homo sapiens
cttggacactggaag

SEQ ID NO: 1886983 - DNA, 15 bp, Homo sapiens
ttggacactggaagg

SEQ ID NO: 1886984 - DNA, 15 bp, Homo sapiens
tggacactggaaggg

SEQ ID NO: 1886985 - DNA, 15 bp, Homo sapiens
ggacactggaaggga

SEQ ID NO: 1886986 - DNA, 15 bp, Homo sapiens
gacactggaagggag

SEQ ID NO: 1886987 - DNA, 15 bp, Homo sapiens
acactggaagggagt

SEQ ID NO: 1886988 - DNA, 15 bp, Homo sapiens
cactggaagggagtg

SEQ ID NO: 1886989 - DNA, 15 bp, Homo sapiens
actggaagggagtgg

SEQ ID NO: 1886990 - DNA, 15 bp, Homo sapiens
ctggaagggagtggt

SEQ ID NO: 1886991 - DNA, 15 bp, Homo sapiens
tggaagggagtggtg

SEQ ID NO: 1886992 - DNA, 15 bp, Homo sapiens
ggaagggagtggtga

SEQ ID NO: 1886993 - DNA, 15 bp, Homo sapiens
gaagggagtggtgag

SEQ ID NO: 1886994 - DNA, 15 bp, Homo sapiens
aagggagtggtgaga

SEQ ID NO: 1886995 - DNA, 15 bp, Homo sapiens
agggagtggtgagaa

SEQ ID NO: 1886996 - DNA, 15 bp, Homo sapiens
gggagtggtgagaag

SEQ ID NO: 1886997 - DNA, 15 bp, Homo sapiens
ggagtggtgagaagg

SEQ ID NO: 1886998 - DNA, 15 bp, Homo sapiens
gagtggtgagaaggt

SEQ ID NO: 1886999 - DNA, 15 bp, Homo sapiens
agtggtgagaaggtt

SEQ ID NO: 1887000 - DNA, 15 bp, Homo sapiens
gtggtgagaaggttc

SEQ ID NO: 1887001 - DNA, 15 bp, Homo sapiens
tggtgagaaggttct

SEQ ID NO: 1887002 - DNA, 15 bp, Homo sapiens
ggtgagaaggttctt

SEQ ID NO: 1887003 - DNA, 15 bp, Homo sapiens
gtgagaaggttcttc

SEQ ID NO: 1887004 - DNA, 15 bp, Homo sapiens
tgagaaggttcttca

SEQ ID NO: 1887005 - DNA, 15 bp, Homo sapiens
gagaaggttcttcat

SEQ ID NO: 1887006 - DNA, 15 bp, Homo sapiens
agaaggttcttcatt

SEQ ID NO: 1887007 - DNA, 15 bp, Homo sapiens
gaaggttcttcatta

SEQ ID NO: 1887008 - DNA, 15 bp, Homo sapiens
aaggttcttcattag

SEQ ID NO: 1887009 - DNA, 15 bp, Homo sapiens
aggttcttcattagt

SEQ ID NO: 1887010 - DNA, 15 bp, Homo sapiens
ggttcttcattagta

SEQ ID NO: 1887011 - DNA, 15 bp, Homo sapiens
gttcttcattagtat

SEQ ID NO: 1887012 - DNA, 15 bp, Homo sapiens
ttcttcattagtatc

SEQ ID NO: 1887013 - DNA, 15 bp, Homo sapiens
tcttcattagtatct

SEQ ID NO: 1887014 - DNA, 15 bp, Homo sapiens
cttcattagtatcta

SEQ ID NO: 1887015 - DNA, 15 bp, Homo sapiens
ttcattagtatctaa

SEQ ID NO: 1887016 - DNA, 15 bp, Homo sapiens
tcattagtatctaat

SEQ ID NO: 1887017 - DNA, 15 bp, Homo sapiens
cattagtatctaata

SEQ ID NO: 1887018 - DNA, 15 bp, Homo sapiens
attagtatctaataa

SEQ ID NO: 1887019 - DNA, 15 bp, Homo sapiens
ttagtatctaataac

SEQ ID NO: 1887020 - DNA, 15 bp, Homo sapiens
tagtatctaataaca

SEQ ID NO: 1887021 - DNA, 15 bp, Homo sapiens
agtatctaataacat

SEQ ID NO: 1887022 - DNA, 15 bp, Homo sapiens
gtatctaataacatt

SEQ ID NO: 1887023 - DNA, 15 bp, Homo sapiens
tatctaataacattt

SEQ ID NO: 1887024 - DNA, 15 bp, Homo sapiens
atctaataacattta

SEQ ID NO: 1887025 - DNA, 15 bp, Homo sapiens
tctaataacatttag

SEQ ID NO: 1887026 - DNA, 15 bp, Homo sapiens
ctaataacatttaga

SEQ ID NO: 1887027 - DNA, 15 bp, Homo sapiens
taataacatttagaa

SEQ ID NO: 1887028 - DNA, 15 bp, Homo sapiens
aataacatttagaag

SEQ ID NO: 1887029 - DNA, 15 bp, Homo sapiens
ataacatttagaaga

SEQ ID NO: 1887030 - DNA, 15 bp, Homo sapiens
taacatttagaagat

SEQ ID NO: 1887031 - DNA, 15 bp, Homo sapiens
aacatttagaagata

SEQ ID NO: 1887032 - DNA, 15 bp, Homo sapiens
acatttagaagatag

SEQ ID NO: 1887033 - DNA, 15 bp, Homo sapiens
catttagaagatagt

SEQ ID NO: 1887034 - DNA, 15 bp, Homo sapiens
atttagaagatagtt

SEQ ID NO: 1887035 - DNA, 15 bp, Homo sapiens
tttagaagatagtta

SEQ ID NO: 1887036 - DNA, 15 bp, Homo sapiens
ttagaagatagttaa

SEQ ID NO: 1887037 - DNA, 15 bp, Homo sapiens
tagaagatagttaat

SEQ ID NO: 1887038 - DNA, 15 bp, Homo sapiens
agaagatagttaatt

SEQ ID NO: 1887039 - DNA, 15 bp, Homo sapiens
gaagatagttaatta

SEQ ID NO: 1887040 - DNA, 15 bp, Homo sapiens
aagatagttaattac

SEQ ID NO: 1887041 - DNA, 15 bp, Homo sapiens
agatagttaattaca

SEQ ID NO: 1887042 - DNA, 15 bp, Homo sapiens
gatagttaattacat

SEQ ID NO: 1887043 - DNA, 15 bp, Homo sapiens
atagttaattacatt

SEQ ID NO: 1887044 - DNA, 15 bp, Homo sapiens
tagttaattacattg

SEQ ID NO: 1887045 - DNA, 15 bp, Homo sapiens
agttaattacattgg

SEQ ID NO: 1887046 - DNA, 15 bp, Homo sapiens
gttaattacattggt

SEQ ID NO: 1887047 - DNA, 15 bp, Homo sapiens
ttaattacattggtc

SEQ ID NO: 1887048 - DNA, 15 bp, Homo sapiens
taattacattggtct

SEQ ID NO: 1887049 - DNA, 15 bp, Homo sapiens
aattacattggtctt

SEQ ID NO: 1887050 - DNA, 15 bp, Homo sapiens
attacattggtcttt

SEQ ID NO: 1887051 - DNA, 15 bp, Homo sapiens
ttacattggtcttta

SEQ ID NO: 1887052 - DNA, 15 bp, Homo sapiens
tacattggtctttag

SEQ ID NO: 1887053 - DNA, 15 bp, Homo sapiens
acattggtctttagt

SEQ ID NO: 1887054 - DNA, 15 bp, Homo sapiens
cattggtctttagtt

SEQ ID NO: 1887055 - DNA, 15 bp, Homo sapiens
attggtctttagttt

SEQ ID NO: 1887056 - DNA, 15 bp, Homo sapiens
ttggtctttagtttc

SEQ ID NO: 1887057 - DNA, 15 bp, Homo sapiens
tggtctttagtttcc

SEQ ID NO: 1887058 - DNA, 15 bp, Homo sapiens
ggtctttagtttccc

SEQ ID NO: 1887059 - DNA, 15 bp, Homo sapiens
gtctttagtttcccc

SEQ ID NO: 1887060 - DNA, 15 bp, Homo sapiens
tctttagtttcccca

SEQ ID NO: 1887061 - DNA, 15 bp, Homo sapiens
ctttagtttccccaa

SEQ ID NO: 1887062 - DNA, 15 bp, Homo sapiens
tttagtttccccaat

SEQ ID NO: 1887063 - DNA, 15 bp, Homo sapiens
ttagtttccccaatc

SEQ ID NO: 1887064 - DNA, 15 bp, Homo sapiens
tagtttccccaatct

SEQ ID NO: 1887065 - DNA, 15 bp, Homo sapiens
agtttccccaatcta

SEQ ID NO: 1887066 - DNA, 15 bp, Homo sapiens
ttccccaatctataa

SEQ ID NO: 1887067 - DNA, 15 bp, Homo sapiens
tccccaatctataag

SEQ ID NO: 1887068 - DNA, 15 bp, Homo sapiens
ccccaatctataagg

SEQ ID NO: 1887069 - DNA, 15 bp, Homo sapiens
cccaatctataaggt

SEQ ID NO: 1887070 - DNA, 15 bp, Homo sapiens
ccaatctataaggtg

SEQ ID NO: 1887071 - DNA, 15 bp, Homo sapiens
caatctataaggtga

SEQ ID NO: 1887072 - DNA, 15 bp, Homo sapiens
aatctataaggtgaa

SEQ ID NO: 1887073 - DNA, 15 bp, Homo sapiens
atctataaggtgaaa

SEQ ID NO: 1887074 - DNA, 15 bp, Homo sapiens
tctataaggtgaaat

SEQ ID NO: 1887075 - DNA, 15 bp, Homo sapiens
ctataaggtgaaatt

SEQ ID NO: 1887076 - DNA, 15 bp, Homo sapiens
tataaggtgaaatta

SEQ ID NO: 1887077 - DNA, 15 bp, Homo sapiens
ataaggtgaaattat

SEQ ID NO: 1887078 - DNA, 15 bp, Homo sapiens
taaggtgaaattata

SEQ ID NO: 1887079 - DNA, 15 bp, Homo sapiens
aaggtgaaattatag

SEQ ID NO: 1887080 - DNA, 15 bp, Homo sapiens
aggtgaaattataga

SEQ ID NO: 1887081 - DNA, 15 bp, Homo sapiens
ggtgaaattatagaa

SEQ ID NO: 1887082 - DNA, 15 bp, Homo sapiens
gtgaaattatagaaa

SEQ ID NO: 1887083 - DNA, 15 bp, Homo sapiens
tgaaattatagaaaa

SEQ ID NO: 1887084 - DNA, 15 bp, Homo sapiens
gaaattatagaaaaa

SEQ ID NO: 1887085 - DNA, 15 bp, Homo sapiens
aaattatagaaaaag

SEQ ID NO: 1887086 - DNA, 15 bp, Homo sapiens
aattatagaaaaaga

SEQ ID NO: 1887087 - DNA, 15 bp, Homo sapiens
attatagaaaaagaa

SEQ ID NO: 1887088 - DNA, 15 bp, Homo sapiens
ttatagaaaaagaaa

SEQ ID NO: 1887089 - DNA, 15 bp, Homo sapiens
tagaaaaagaaaatt

SEQ ID NO: 1887090 - DNA, 15 bp, Homo sapiens
gaaaaagaaaatttg

SEQ ID NO: 1887091 - DNA, 15 bp, Homo sapiens
aaaaagaaaatttgt

SEQ ID NO: 1887092 - DNA, 15 bp, Homo sapiens
aaaagaaaatttgtg

SEQ ID NO: 1887093 - DNA, 15 bp, Homo sapiens
aaagaaaatttgtga

SEQ ID NO: 1887094 - DNA, 15 bp, Homo sapiens
aagaaaatttgtgag

SEQ ID NO: 1887095 - DNA, 15 bp, Homo sapiens
agaaaatttgtgagg

SEQ ID NO: 1887096 - DNA, 15 bp, Homo sapiens
gaaaatttgtgaggt

SEQ ID NO: 1887097 - DNA, 15 bp, Homo sapiens
aaaatttgtgaggtc

SEQ ID NO: 1887098 - DNA, 15 bp, Homo sapiens
aaatttgtgaggtcc

SEQ ID NO: 1887099 - DNA, 15 bp, Homo sapiens
aatttgtgaggtccc

SEQ ID NO: 1887100 - DNA, 15 bp, Homo sapiens
atttgtgaggtccca

SEQ ID NO: 1887101 - DNA, 15 bp, Homo sapiens
tttgtgaggtcccat

SEQ ID NO: 1887102 - DNA, 15 bp, Homo sapiens
ttgtgaggtcccata

SEQ ID NO: 1887103 - DNA, 15 bp, Homo sapiens
tgtgaggtcccatac

SEQ ID NO: 1887104 - DNA, 15 bp, Homo sapiens
gtgaggtcccatacc

SEQ ID NO: 1887105 - DNA, 15 bp, Homo sapiens
tgaggtcccatacct

SEQ ID NO: 1887106 - DNA, 15 bp, Homo sapiens
gaggtcccataccta

SEQ ID NO: 1887107 - DNA, 15 bp, Homo sapiens
aggtcccatacctat

SEQ ID NO: 1887108 - DNA, 15 bp, Homo sapiens
ggtcccatacctatt

SEQ ID NO: 1887109 - DNA, 15 bp, Homo sapiens
gtcccatacctattg

SEQ ID NO: 1887110 - DNA, 15 bp, Homo sapiens
tcccatacctattgt

SEQ ID NO: 1887111 - DNA, 15 bp, Homo sapiens
cccatacctattgtt

SEQ ID NO: 1887112 - DNA, 15 bp, Homo sapiens
ccatacctattgttc

SEQ ID NO: 1887113 - DNA, 15 bp, Homo sapiens
catacctattgttct

SEQ ID NO: 1887114 - DNA, 15 bp, Homo sapiens
atacctattgttcta

SEQ ID NO: 1887115 - DNA, 15 bp, Homo sapiens
tacctattgttctaa

SEQ ID NO: 1887116 - DNA, 15 bp, Homo sapiens
acctattgttctaat

SEQ ID NO: 1887117 - DNA, 15 bp, Homo sapiens
cctattgttctaatt

SEQ ID NO: 1887118 - DNA, 15 bp, Homo sapiens
ctattgttctaattc

SEQ ID NO: 1887119 - DNA, 15 bp, Homo sapiens
tattgttctaattca

SEQ ID NO: 1887120 - DNA, 15 bp, Homo sapiens
attgttctaattcag

SEQ ID NO: 1887121 - DNA, 15 bp, Homo sapiens
ttgttctaattcagt

SEQ ID NO: 1887122 - DNA, 15 bp, Homo sapiens
tgttctaattcagta

SEQ ID NO: 1887123 - DNA, 15 bp, Homo sapiens
gttctaattcagtaa

SEQ ID NO: 1887124 - DNA, 15 bp, Homo sapiens
ttctaattcagtaaa

SEQ ID NO: 1887125 - DNA, 15 bp, Homo sapiens
tctaattcagtaaat

SEQ ID NO: 1887126 - DNA, 15 bp, Homo sapiens
ctaattcagtaaatg

SEQ ID NO: 1887127 - DNA, 15 bp, Homo sapiens
taattcagtaaatga

SEQ ID NO: 1887128 - DNA, 15 bp, Homo sapiens
aattcagtaaatgaa

SEQ ID NO: 1887129 - DNA, 15 bp, Homo sapiens
attcagtaaatgaat

SEQ ID NO: 1887130 - DNA, 15 bp, Homo sapiens
ttcagtaaatgaatg

SEQ ID NO: 1887131 - DNA, 15 bp, Homo sapiens
tcagtaaatgaatgt

SEQ ID NO: 1887132 - DNA, 15 bp, Homo sapiens
cagtaaatgaatgta

SEQ ID NO: 1887133 - DNA, 15 bp, Homo sapiens
agtaaatgaatgtaa

SEQ ID NO: 1887134 - DNA, 15 bp, Homo sapiens
gtaaatgaatgtaaa

SEQ ID NO: 1887135 - DNA, 15 bp, Homo sapiens
taaatgaatgtaaat

SEQ ID NO: 1887136 - DNA, 15 bp, Homo sapiens
aaatgaatgtaaatg

SEQ ID NO: 1887137 - DNA, 15 bp, Homo sapiens
aatgaatgtaaatgg

SEQ ID NO: 1887138 - DNA, 15 bp, Homo sapiens
atgaatgtaaatggt

SEQ ID NO: 1887139 - DNA, 15 bp, Homo sapiens
tgaatgtaaatggtc

SEQ ID NO: 1887140 - DNA, 15 bp, Homo sapiens
gaatgtaaatggtct

SEQ ID NO: 1887141 - DNA, 15 bp, Homo sapiens
aatgtaaatggtcta

SEQ ID NO: 1887142 - DNA, 15 bp, Homo sapiens
atgtaaatggtctaa

SEQ ID NO: 1887143 - DNA, 15 bp, Homo sapiens
tgtaaatggtctaac

SEQ ID NO: 1887144 - DNA, 15 bp, Homo sapiens
gtaaatggtctaaca

SEQ ID NO: 1887145 - DNA, 15 bp, Homo sapiens
taaatggtctaacac

SEQ ID NO: 1887146 - DNA, 15 bp, Homo sapiens
aaatggtctaacaca

SEQ ID NO: 1887147 - DNA, 15 bp, Homo sapiens
aatggtctaacacaa

SEQ ID NO: 1887148 - DNA, 15 bp, Homo sapiens
atggtctaacacaag

SEQ ID NO: 1887149 - DNA, 15 bp, Homo sapiens
tggtctaacacaagt

SEQ ID NO: 1887150 - DNA, 15 bp, Homo sapiens
ggtctaacacaagtg

SEQ ID NO: 1887151 - DNA, 15 bp, Homo sapiens
gtctaacacaagtga

SEQ ID NO: 1887152 - DNA, 15 bp, Homo sapiens
tctaacacaagtgaa

SEQ ID NO: 1887153 - DNA, 15 bp, Homo sapiens
ctaacacaagtgaaa

SEQ ID NO: 1887154 - DNA, 15 bp, Homo sapiens
taacacaagtgaaat

SEQ ID NO: 1887155 - DNA, 15 bp, Homo sapiens
aacacaagtgaaatg

SEQ ID NO: 1887156 - DNA, 15 bp, Homo sapiens
acacaagtgaaatga

SEQ ID NO: 1887157 - DNA, 15 bp, Homo sapiens
cacaagtgaaatgaa

SEQ ID NO: 1887158 - DNA, 15 bp, Homo sapiens
acaagtgaaatgaag

SEQ ID NO: 1887159 - DNA, 15 bp, Homo sapiens
caagtgaaatgaagg

SEQ ID NO: 1887160 - DNA, 15 bp, Homo sapiens
aagtgaaatgaaggt

SEQ ID NO: 1887161 - DNA, 15 bp, Homo sapiens
agtgaaatgaaggtc

SEQ ID NO: 1887162 - DNA, 15 bp, Homo sapiens
gtgaaatgaaggtca

SEQ ID NO: 1887163 - DNA, 15 bp, Homo sapiens
tgaaatgaaggtcat

SEQ ID NO: 1887164 - DNA, 15 bp, Homo sapiens
gaaatgaaggtcata

SEQ ID NO: 1887165 - DNA, 15 bp, Homo sapiens
aaatgaaggtcatac

SEQ ID NO: 1887166 - DNA, 15 bp, Homo sapiens
aatgaaggtcataca

SEQ ID NO: 1887167 - DNA, 15 bp, Homo sapiens
atgaaggtcatacag

SEQ ID NO: 1887168 - DNA, 15 bp, Homo sapiens
tgaaggtcatacagg

SEQ ID NO: 1887169 - DNA, 15 bp, Homo sapiens
gaaggtcatacaggg

SEQ ID NO: 1887170 - DNA, 15 bp, Homo sapiens
aaggtcatacaggga

SEQ ID NO: 1887171 - DNA, 15 bp, Homo sapiens
aggtcatacagggat

SEQ ID NO: 1887172 - DNA, 15 bp, Homo sapiens
ggtcatacagggata

SEQ ID NO: 1887173 - DNA, 15 bp, Homo sapiens
gtcatacagggatag

SEQ ID NO: 1887174 - DNA, 15 bp, Homo sapiens
tcatacagggataga

SEQ ID NO: 1887175 - DNA, 15 bp, Homo sapiens
catacagggatagat

SEQ ID NO: 1887176 - DNA, 15 bp, Homo sapiens
atacagggatagatg

SEQ ID NO: 1887177 - DNA, 15 bp, Homo sapiens
tacagggatagatgg

SEQ ID NO: 1887178 - DNA, 15 bp, Homo sapiens
acagggatagatggt

SEQ ID NO: 1887179 - DNA, 15 bp, Homo sapiens
cagggatagatggtt

SEQ ID NO: 1887180 - DNA, 15 bp, Homo sapiens
agggatagatggttt

SEQ ID NO: 1887181 - DNA, 15 bp, Homo sapiens
gggatagatggttta

SEQ ID NO: 1887182 - DNA, 15 bp, Homo sapiens
ggatagatggtttat

SEQ ID NO: 1887183 - DNA, 15 bp, Homo sapiens
gatagatggtttatg

SEQ ID NO: 1887184 - DNA, 15 bp, Homo sapiens
atagatggtttatga

SEQ ID NO: 1887185 - DNA, 15 bp, Homo sapiens
tagatggtttatgaa

SEQ ID NO: 1887186 - DNA, 15 bp, Homo sapiens
agatggtttatgaag

SEQ ID NO: 1887187 - DNA, 15 bp, Homo sapiens
gatggtttatgaaga

SEQ ID NO: 1887188 - DNA, 15 bp, Homo sapiens
atggtttatgaagaa

SEQ ID NO: 1887189 - DNA, 15 bp, Homo sapiens
tggtttatgaagaaa

SEQ ID NO: 1887190 - DNA, 15 bp, Homo sapiens
ggtttatgaagaaac

SEQ ID NO: 1887191 - DNA, 15 bp, Homo sapiens
gtttatgaagaaacc

SEQ ID NO: 1887192 - DNA, 15 bp, Homo sapiens
tttatgaagaaacca

SEQ ID NO: 1887193 - DNA, 15 bp, Homo sapiens
ttatgaagaaaccac

SEQ ID NO: 1887194 - DNA, 15 bp, Homo sapiens
tatgaagaaaccact

SEQ ID NO: 1887195 - DNA, 15 bp, Homo sapiens
atgaagaaaccacta

SEQ ID NO: 1887196 - DNA, 15 bp, Homo sapiens
tgaagaaaccactaa

SEQ ID NO: 1887197 - DNA, 15 bp, Homo sapiens
gaagaaaccactaac

SEQ ID NO: 1887198 - DNA, 15 bp, Homo sapiens
aagaaaccactaaca

SEQ ID NO: 1887199 - DNA, 15 bp, Homo sapiens
agaaaccactaacaa

SEQ ID NO: 1887200 - DNA, 15 bp, Homo sapiens
gaaaccactaacaaa

SEQ ID NO: 1887201 - DNA, 15 bp, Homo sapiens
aaaccactaacaaac

SEQ ID NO: 1887202 - DNA, 15 bp, Homo sapiens
aaccactaacaaact

SEQ ID NO: 1887203 - DNA, 15 bp, Homo sapiens
accactaacaaactc

SEQ ID NO: 1887204 - DNA, 15 bp, Homo sapiens
ccactaacaaactca

SEQ ID NO: 1887205 - DNA, 15 bp, Homo sapiens
cactaacaaactcat

SEQ ID NO: 1887206 - DNA, 15 bp, Homo sapiens
actaacaaactcatg

SEQ ID NO: 1887207 - DNA, 15 bp, Homo sapiens
ctaacaaactcatgg

SEQ ID NO: 1887208 - DNA, 15 bp, Homo sapiens
taacaaactcatggg

SEQ ID NO: 1887209 - DNA, 15 bp, Homo sapiens
aacaaactcatgggg

SEQ ID NO: 1887210 - DNA, 15 bp, Homo sapiens
acaaactcatggggc

SEQ ID NO: 1887211 - DNA, 15 bp, Homo sapiens
caaactcatggggca

SEQ ID NO: 1887212 - DNA, 15 bp, Homo sapiens
aaactcatggggcaa

SEQ ID NO: 1887213 - DNA, 15 bp, Homo sapiens
aactcatggggcaaa

SEQ ID NO: 1887214 - DNA, 15 bp, Homo sapiens
actcatggggcaaac

SEQ ID NO: 1887215 - DNA, 15 bp, Homo sapiens
ctcatggggcaaacc

SEQ ID NO: 1887216 - DNA, 15 bp, Homo sapiens
tcatggggcaaacct

SEQ ID NO: 1887217 - DNA, 15 bp, Homo sapiens
catggggcaaacctg

SEQ ID NO: 1887218 - DNA, 15 bp, Homo sapiens
atggggcaaacctgg

SEQ ID NO: 1887219 - DNA, 15 bp, Homo sapiens
tggggcaaacctgga

SEQ ID NO: 1887220 - DNA, 15 bp, Homo sapiens
ggggcaaacctggag

SEQ ID NO: 1887221 - DNA, 15 bp, Homo sapiens
gggcaaacctggaga

SEQ ID NO: 1887222 - DNA, 15 bp, Homo sapiens
ggcaaacctggagat

SEQ ID NO: 1887223 - DNA, 15 bp, Homo sapiens
gcaaacctggagata

SEQ ID NO: 1887224 - DNA, 15 bp, Homo sapiens
caaacctggagatac

SEQ ID NO: 1887225 - DNA, 15 bp, Homo sapiens
acctggagatactag

SEQ ID NO: 1887226 - DNA, 15 bp, Homo sapiens
cctggagatactagg

SEQ ID NO: 1887227 - DNA, 15 bp, Homo sapiens
ctggagatactaggt

SEQ ID NO: 1887228 - DNA, 15 bp, Homo sapiens
tggagatactaggta

SEQ ID NO: 1887229 - DNA, 15 bp, Homo sapiens
ggagatactaggtag

SEQ ID NO: 1887230 - DNA, 15 bp, Homo sapiens
gagatactaggtagt

SEQ ID NO: 1887231 - DNA, 15 bp, Homo sapiens
agatactaggtagtc

SEQ ID NO: 1887232 - DNA, 15 bp, Homo sapiens
gatactaggtagtca

SEQ ID NO: 1887233 - DNA, 15 bp, Homo sapiens
atactaggtagtcac

SEQ ID NO: 1887234 - DNA, 15 bp, Homo sapiens
tactaggtagtcaca

SEQ ID NO: 1887235 - DNA, 15 bp, Homo sapiens
actaggtagtcacaa

SEQ ID NO: 1887236 - DNA, 15 bp, Homo sapiens
ctaggtagtcacaag

SEQ ID NO: 1887237 - DNA, 15 bp, Homo sapiens
taggtagtcacaagc

SEQ ID NO: 1887238 - DNA, 15 bp, Homo sapiens
aggtagtcacaagca

SEQ ID NO: 1887239 - DNA, 15 bp, Homo sapiens
ggtagtcacaagcat

SEQ ID NO: 1887240 - DNA, 15 bp, Homo sapiens
gtagtcacaagcatg

SEQ ID NO: 1887241 - DNA, 15 bp, Homo sapiens
tagtcacaagcatgg

SEQ ID NO: 1887242 - DNA, 15 bp, Homo sapiens
agtcacaagcatggt

SEQ ID NO: 1887243 - DNA, 15 bp, Homo sapiens
gtcacaagcatggta

SEQ ID NO: 1887244 - DNA, 15 bp, Homo sapiens
tcacaagcatggtag

SEQ ID NO: 1887245 - DNA, 15 bp, Homo sapiens
cacaagcatggtaga

SEQ ID NO: 1887246 - DNA, 15 bp, Homo sapiens
acaagcatggtagaa

SEQ ID NO: 1887247 - DNA, 15 bp, Homo sapiens
caagcatggtagaag

SEQ ID NO: 1887248 - DNA, 15 bp, Homo sapiens
aagcatggtagaaga

SEQ ID NO: 1887249 - DNA, 15 bp, Homo sapiens
agcatggtagaagaa

SEQ ID NO: 1887250 - DNA, 15 bp, Homo sapiens
gcatggtagaagaaa

SEQ ID NO: 1887251 - DNA, 15 bp, Homo sapiens
catggtagaagaaac

SEQ ID NO: 1887252 - DNA, 15 bp, Homo sapiens
atggtagaagaaacc

SEQ ID NO: 1887253 - DNA, 15 bp, Homo sapiens
tggtagaagaaaccc

SEQ ID NO: 1887254 - DNA, 15 bp, Homo sapiens
ggtagaagaaaccca

SEQ ID NO: 1887255 - DNA, 15 bp, Homo sapiens
gtagaagaaacccaa

SEQ ID NO: 1887256 - DNA, 15 bp, Homo sapiens
tagaagaaacccaag

SEQ ID NO: 1887257 - DNA, 15 bp, Homo sapiens
agaagaaacccaagg

SEQ ID NO: 1887258 - DNA, 15 bp, Homo sapiens
gaagaaacccaaggc

SEQ ID NO: 1887259 - DNA, 15 bp, Homo sapiens
aagaaacccaaggct

SEQ ID NO: 1887260 - DNA, 15 bp, Homo sapiens
agaaacccaaggctc

SEQ ID NO: 1887261 - DNA, 15 bp, Homo sapiens
gaaacccaaggctca

SEQ ID NO: 1887262 - DNA, 15 bp, Homo sapiens
aaacccaaggctcat

SEQ ID NO: 1887263 - DNA, 15 bp, Homo sapiens
aacccaaggctcata

SEQ ID NO: 1887264 - DNA, 15 bp, Homo sapiens
acccaaggctcataa

SEQ ID NO: 1887265 - DNA, 15 bp, Homo sapiens
cccaaggctcataac

SEQ ID NO: 1887266 - DNA, 15 bp, Homo sapiens
ccaaggctcataaca

SEQ ID NO: 1887267 - DNA, 15 bp, Homo sapiens
caaggctcataacaa

SEQ ID NO: 1887268 - DNA, 15 bp, Homo sapiens
aaggctcataacaaa

SEQ ID NO: 1887269 - DNA, 15 bp, Homo sapiens
aggctcataacaaac

SEQ ID NO: 1887270 - DNA, 15 bp, Homo sapiens
ggctcataacaaacc

SEQ ID NO: 1887271 - DNA, 15 bp, Homo sapiens
gctcataacaaaccc

SEQ ID NO: 1887272 - DNA, 15 bp, Homo sapiens
ctcataacaaaccct

SEQ ID NO: 1887273 - DNA, 15 bp, Homo sapiens
tcataacaaaccctg

SEQ ID NO: 1887274 - DNA, 15 bp, Homo sapiens
cataacaaaccctgc

SEQ ID NO: 1887275 - DNA, 15 bp, Homo sapiens
ataacaaaccctgca

SEQ ID NO: 1887276 - DNA, 15 bp, Homo sapiens
taacaaaccctgcat

SEQ ID NO: 1887277 - DNA, 15 bp, Homo sapiens
aacaaaccctgcata

SEQ ID NO: 1887278 - DNA, 15 bp, Homo sapiens
acaaaccctgcatat

SEQ ID NO: 1887279 - DNA, 15 bp, Homo sapiens
caaaccctgcatatg

SEQ ID NO: 1887280 - DNA, 15 bp, Homo sapiens
aaaccctgcatatgg

SEQ ID NO: 1887281 - DNA, 15 bp, Homo sapiens
aaccctgcatatggt

SEQ ID NO: 1887282 - DNA, 15 bp, Homo sapiens
accctgcatatggta

SEQ ID NO: 1887283 - DNA, 15 bp, Homo sapiens
ccctgcatatggtag

SEQ ID NO: 1887284 - DNA, 15 bp, Homo sapiens
cctgcatatggtagt

SEQ ID NO: 1887285 - DNA, 15 bp, Homo sapiens
ctgcatatggtagtt

SEQ ID NO: 1887286 - DNA, 15 bp, Homo sapiens
tgcatatggtagtta

SEQ ID NO: 1887287 - DNA, 15 bp, Homo sapiens
gcatatggtagttat

SEQ ID NO: 1887288 - DNA, 15 bp, Homo sapiens
catatggtagttatt

SEQ ID NO: 1887289 - DNA, 15 bp, Homo sapiens
atatggtagttattt

SEQ ID NO: 1887290 - DNA, 15 bp, Homo sapiens
tatggtagttatttt

SEQ ID NO: 1887291 - DNA, 15 bp, Homo sapiens
atggtagttattttc

SEQ ID NO: 1887292 - DNA, 15 bp, Homo sapiens
tggtagttattttct

SEQ ID NO: 1887293 - DNA, 15 bp, Homo sapiens
ggtagttattttctg

SEQ ID NO: 1887294 - DNA, 15 bp, Homo sapiens
gtagttattttctgt

SEQ ID NO: 1887295 - DNA, 15 bp, Homo sapiens
tagttattttctgtc

SEQ ID NO: 1887296 - DNA, 15 bp, Homo sapiens
agttattttctgtct

SEQ ID NO: 1887297 - DNA, 15 bp, Homo sapiens
gttattttctgtctc

SEQ ID NO: 1887298 - DNA, 15 bp, Homo sapiens
ttattttctgtctct

SEQ ID NO: 1887299 - DNA, 15 bp, Homo sapiens
tattttctgtctctg

SEQ ID NO: 1887300 - DNA, 15 bp, Homo sapiens
attttctgtctctga

SEQ ID NO: 1887301 - DNA, 15 bp, Homo sapiens
ttttctgtctctgat

SEQ ID NO: 1887302 - DNA, 15 bp, Homo sapiens
tttctgtctctgata

SEQ ID NO: 1887303 - DNA, 15 bp, Homo sapiens
ttctgtctctgatag

SEQ ID NO: 1887304 - DNA, 15 bp, Homo sapiens
tctgtctctgataga

SEQ ID NO: 1887305 - DNA, 15 bp, Homo sapiens
ctgtctctgatagac

SEQ ID NO: 1887306 - DNA, 15 bp, Homo sapiens
tgtctctgatagacc

SEQ ID NO: 1887307 - DNA, 15 bp, Homo sapiens
gtctctgatagacca

SEQ ID NO: 1887308 - DNA, 15 bp, Homo sapiens
tctctgatagaccat

SEQ ID NO: 1887309 - DNA, 15 bp, Homo sapiens
ctctgatagaccatt

SEQ ID NO: 1887310 - DNA, 15 bp, Homo sapiens
tctgatagaccattc

SEQ ID NO: 1887311 - DNA, 15 bp, Homo sapiens
ctgatagaccattct

SEQ ID NO: 1887312 - DNA, 15 bp, Homo sapiens
tgatagaccattctc

SEQ ID NO: 1887313 - DNA, 15 bp, Homo sapiens
gatagaccattctcc

SEQ ID NO: 1887314 - DNA, 15 bp, Homo sapiens
atagaccattctccc

SEQ ID NO: 1887315 - DNA, 15 bp, Homo sapiens
tagaccattctccct

SEQ ID NO: 1887316 - DNA, 15 bp, Homo sapiens
agaccattctccctt

SEQ ID NO: 1887317 - DNA, 15 bp, Homo sapiens
gaccattctcccttt

SEQ ID NO: 1887318 - DNA, 15 bp, Homo sapiens
accattctcccttta

SEQ ID NO: 1887319 - DNA, 15 bp, Homo sapiens
ccattctccctttac

SEQ ID NO: 1887320 - DNA, 15 bp, Homo sapiens
cattctccctttaca

SEQ ID NO: 1887321 - DNA, 15 bp, Homo sapiens
attctccctttacaa

SEQ ID NO: 1887322 - DNA, 15 bp, Homo sapiens
ttctccctttacaac

SEQ ID NO: 1887323 - DNA, 15 bp, Homo sapiens
tctccctttacaaca

SEQ ID NO: 1887324 - DNA, 15 bp, Homo sapiens
ctccctttacaacat

SEQ ID NO: 1887325 - DNA, 15 bp, Homo sapiens
tccctttacaacatc

SEQ ID NO: 1887326 - DNA, 15 bp, Homo sapiens
ccctttacaacatct

SEQ ID NO: 1887327 - DNA, 15 bp, Homo sapiens
cctttacaacatctt

SEQ ID NO: 1887328 - DNA, 15 bp, Homo sapiens
ctttacaacatctta

SEQ ID NO: 1887329 - DNA, 15 bp, Homo sapiens
tttacaacatcttac

SEQ ID NO: 1887330 - DNA, 15 bp, Homo sapiens
ttacaacatcttact

SEQ ID NO: 1887331 - DNA, 15 bp, Homo sapiens
tacaacatcttactg

SEQ ID NO: 1887332 - DNA, 15 bp, Homo sapiens
acaacatcttactgg

SEQ ID NO: 1887333 - DNA, 15 bp, Homo sapiens
caacatcttactgga

SEQ ID NO: 1887334 - DNA, 15 bp, Homo sapiens
aacatcttactggac

SEQ ID NO: 1887335 - DNA, 15 bp, Homo sapiens
acatcttactggaca

SEQ ID NO: 1887336 - DNA, 15 bp, Homo sapiens
catcttactggacat

SEQ ID NO: 1887337 - DNA, 15 bp, Homo sapiens
atcttactggacatg

SEQ ID NO: 1887338 - DNA, 15 bp, Homo sapiens
tcttactggacatgt

SEQ ID NO: 1887339 - DNA, 15 bp, Homo sapiens
cttactggacatgtt

SEQ ID NO: 1887340 - DNA, 15 bp, Homo sapiens
ttactggacatgttc

SEQ ID NO: 1887341 - DNA, 15 bp, Homo sapiens
tactggacatgttcc

SEQ ID NO: 1887342 - DNA, 15 bp, Homo sapiens
actggacatgttcct

SEQ ID NO: 1887343 - DNA, 15 bp, Homo sapiens
ctggacatgttccta

SEQ ID NO: 1887344 - DNA, 15 bp, Homo sapiens
tggacatgttcctac

SEQ ID NO: 1887345 - DNA, 15 bp, Homo sapiens
ggacatgttcctact

SEQ ID NO: 1887346 - DNA, 15 bp, Homo sapiens
gacatgttcctactt

SEQ ID NO: 1887347 - DNA, 15 bp, Homo sapiens
acatgttcctacttg

SEQ ID NO: 1887348 - DNA, 15 bp, Homo sapiens
catgttcctacttgg

SEQ ID NO: 1887349 - DNA, 15 bp, Homo sapiens
atgttcctacttggg

SEQ ID NO: 1887350 - DNA, 15 bp, Homo sapiens
tgttcctacttgggt

SEQ ID NO: 1887351 - DNA, 15 bp, Homo sapiens
gttcctacttgggtg

SEQ ID NO: 1887352 - DNA, 15 bp, Homo sapiens
ttcctacttgggtgt

SEQ ID NO: 1887353 - DNA, 15 bp, Homo sapiens
tcctacttgggtgtt

SEQ ID NO: 1887354 - DNA, 15 bp, Homo sapiens
cctacttgggtgttc

SEQ ID NO: 1887355 - DNA, 15 bp, Homo sapiens
ctacttgggtgttct

SEQ ID NO: 1887356 - DNA, 15 bp, Homo sapiens
tacttgggtgttcta

SEQ ID NO: 1887357 - DNA, 15 bp, Homo sapiens
acttgggtgttctat

SEQ ID NO: 1887358 - DNA, 15 bp, Homo sapiens
cttgggtgttctata

SEQ ID NO: 1887359 - DNA, 15 bp, Homo sapiens
ttgggtgttctataa

SEQ ID NO: 1887360 - DNA, 15 bp, Homo sapiens
tgggtgttctataag

SEQ ID NO: 1887361 - DNA, 15 bp, Homo sapiens
gggtgttctataaga

SEQ ID NO: 1887362 - DNA, 15 bp, Homo sapiens
ggtgttctataagat

SEQ ID NO: 1887363 - DNA, 15 bp, Homo sapiens
gtgttctataagata

SEQ ID NO: 1887364 - DNA, 15 bp, Homo sapiens
tgttctataagataa

SEQ ID NO: 1887365 - DNA, 15 bp, Homo sapiens
gttctataagataaa

SEQ ID NO: 1887366 - DNA, 15 bp, Homo sapiens
ttctataagataaat

SEQ ID NO: 1887367 - DNA, 15 bp, Homo sapiens
tctataagataaatt

SEQ ID NO: 1887368 - DNA, 15 bp, Homo sapiens
ctataagataaattc

SEQ ID NO: 1887369 - DNA, 15 bp, Homo sapiens
tataagataaattca

SEQ ID NO: 1887370 - DNA, 15 bp, Homo sapiens
ataagataaattcaa

SEQ ID NO: 1887371 - DNA, 15 bp, Homo sapiens
taagataaattcaaa

SEQ ID NO: 1887372 - DNA, 15 bp, Homo sapiens
aagataaattcaaac

SEQ ID NO: 1887373 - DNA, 15 bp, Homo sapiens
agataaattcaaact

SEQ ID NO: 1887374 - DNA, 15 bp, Homo sapiens
gataaattcaaactt

SEQ ID NO: 1887375 - DNA, 15 bp, Homo sapiens
ataaattcaaactta

SEQ ID NO: 1887376 - DNA, 15 bp, Homo sapiens
taaattcaaacttat

SEQ ID NO: 1887377 - DNA, 15 bp, Homo sapiens
aaattcaaacttatt

SEQ ID NO: 1887378 - DNA, 15 bp, Homo sapiens
aattcaaacttatta

SEQ ID NO: 1887379 - DNA, 15 bp, Homo sapiens
attcaaacttattaa

SEQ ID NO: 1887380 - DNA, 15 bp, Homo sapiens
ttcaaacttattaag

SEQ ID NO: 1887381 - DNA, 15 bp, Homo sapiens
tcaaacttattaagt

SEQ ID NO: 1887382 - DNA, 15 bp, Homo sapiens
caaacttattaagtc

SEQ ID NO: 1887383 - DNA, 15 bp, Homo sapiens
aaacttattaagtcc

SEQ ID NO: 1887384 - DNA, 15 bp, Homo sapiens
aacttattaagtccc

SEQ ID NO: 1887385 - DNA, 15 bp, Homo sapiens
acttattaagtccca

SEQ ID NO: 1887386 - DNA, 15 bp, Homo sapiens
cttattaagtcccac

SEQ ID NO: 1887387 - DNA, 15 bp, Homo sapiens
ttattaagtcccaca

SEQ ID NO: 1887388 - DNA, 15 bp, Homo sapiens
tattaagtcccacaa

SEQ ID NO: 1887389 - DNA, 15 bp, Homo sapiens
attaagtcccacaat

SEQ ID NO: 1887390 - DNA, 15 bp, Homo sapiens
ttaagtcccacaatg

SEQ ID NO: 1887391 - DNA, 15 bp, Homo sapiens
taagtcccacaatga

SEQ ID NO: 1887392 - DNA, 15 bp, Homo sapiens
aagtcccacaatgat

SEQ ID NO: 1887393 - DNA, 15 bp, Homo sapiens
agtcccacaatgatt

SEQ ID NO: 1887394 - DNA, 15 bp, Homo sapiens
gtcccacaatgattt

SEQ ID NO: 1887395 - DNA, 15 bp, Homo sapiens
tcccacaatgatttc

SEQ ID NO: 1887396 - DNA, 15 bp, Homo sapiens
cccacaatgatttca

SEQ ID NO: 1887397 - DNA, 15 bp, Homo sapiens
ccacaatgatttcag

SEQ ID NO: 1887398 - DNA, 15 bp, Homo sapiens
cacaatgatttcagt

SEQ ID NO: 1887399 - DNA, 15 bp, Homo sapiens
acaatgatttcagta

SEQ ID NO: 1887400 - DNA, 15 bp, Homo sapiens
caatgatttcagtat

SEQ ID NO: 1887401 - DNA, 15 bp, Homo sapiens
aatgatttcagtatt

SEQ ID NO: 1887402 - DNA, 15 bp, Homo sapiens
atgatttcagtattt

SEQ ID NO: 1887403 - DNA, 15 bp, Homo sapiens
tgatttcagtatttc

SEQ ID NO: 1887404 - DNA, 15 bp, Homo sapiens
gatttcagtatttct

SEQ ID NO: 1887405 - DNA, 15 bp, Homo sapiens
atttcagtatttctg

SEQ ID NO: 1887406 - DNA, 15 bp, Homo sapiens
tttcagtatttctgt

SEQ ID NO: 1887407 - DNA, 15 bp, Homo sapiens
ttcagtatttctgtc

SEQ ID NO: 1887408 - DNA, 15 bp, Homo sapiens
tcagtatttctgtca

SEQ ID NO: 1887409 - DNA, 15 bp, Homo sapiens
cagtatttctgtcaa

SEQ ID NO: 1887410 - DNA, 15 bp, Homo sapiens
agtatttctgtcaat

SEQ ID NO: 1887411 - DNA, 15 bp, Homo sapiens
gtatttctgtcaatc

SEQ ID NO: 1887412 - DNA, 15 bp, Homo sapiens
tatttctgtcaatcc

SEQ ID NO: 1887413 - DNA, 15 bp, Homo sapiens
atttctgtcaatcct

SEQ ID NO: 1887414 - DNA, 15 bp, Homo sapiens
tttctgtcaatcctg

SEQ ID NO: 1887415 - DNA, 15 bp, Homo sapiens
ttctgtcaatcctga

SEQ ID NO: 1887416 - DNA, 15 bp, Homo sapiens
tctgtcaatcctgaa

SEQ ID NO: 1887417 - DNA, 15 bp, Homo sapiens
ctgtcaatcctgaat

SEQ ID NO: 1887418 - DNA, 15 bp, Homo sapiens
tgtcaatcctgaatc

SEQ ID NO: 1887419 - DNA, 15 bp, Homo sapiens
gtcaatcctgaatct

SEQ ID NO: 1887420 - DNA, 15 bp, Homo sapiens
tcaatcctgaatctt

SEQ ID NO: 1887421 - DNA, 15 bp, Homo sapiens
caatcctgaatcttc

SEQ ID NO: 1887422 - DNA, 15 bp, Homo sapiens
aatcctgaatcttct

SEQ ID NO: 1887423 - DNA, 15 bp, Homo sapiens
atcctgaatcttcta

SEQ ID NO: 1887424 - DNA, 15 bp, Homo sapiens
tcctgaatcttctaa

SEQ ID NO: 1887425 - DNA, 15 bp, Homo sapiens
cctgaatcttctaat

SEQ ID NO: 1887426 - DNA, 15 bp, Homo sapiens
ctgaatcttctaata

SEQ ID NO: 1887427 - DNA, 15 bp, Homo sapiens
tgaatcttctaatac

SEQ ID NO: 1887428 - DNA, 15 bp, Homo sapiens
gaatcttctaatact

SEQ ID NO: 1887429 - DNA, 15 bp, Homo sapiens
aatcttctaatactt

SEQ ID NO: 1887430 - DNA, 15 bp, Homo sapiens
atcttctaatacttc

SEQ ID NO: 1887431 - DNA, 15 bp, Homo sapiens
tcttctaatacttct

SEQ ID NO: 1887432 - DNA, 15 bp, Homo sapiens
cttctaatacttctg

SEQ ID NO: 1887433 - DNA, 15 bp, Homo sapiens
ttctaatacttctgt

SEQ ID NO: 1887434 - DNA, 15 bp, Homo sapiens
tctaatacttctgtt

SEQ ID NO: 1887435 - DNA, 15 bp, Homo sapiens
ctaatacttctgttt

SEQ ID NO: 1887436 - DNA, 15 bp, Homo sapiens
taatacttctgtttt

SEQ ID NO: 1887437 - DNA, 15 bp, Homo sapiens
aatacttctgttttt

SEQ ID NO: 1887438 - DNA, 15 bp, Homo sapiens
atacttctgttttta

SEQ ID NO: 1887439 - DNA, 15 bp, Homo sapiens
tacttctgtttttat

SEQ ID NO: 1887440 - DNA, 15 bp, Homo sapiens
acttctgtttttatt

SEQ ID NO: 1887441 - DNA, 15 bp, Homo sapiens
cttctgtttttattg

SEQ ID NO: 1887442 - DNA, 15 bp, Homo sapiens
ttctgtttttattga

SEQ ID NO: 1887443 - DNA, 15 bp, Homo sapiens
tctgtttttattgag

SEQ ID NO: 1887444 - DNA, 15 bp, Homo sapiens
ctgtttttattgagg

SEQ ID NO: 1887445 - DNA, 15 bp, Homo sapiens
tgtttttattgagga

SEQ ID NO: 1887446 - DNA, 15 bp, Homo sapiens
gtttttattgaggag

SEQ ID NO: 1887447 - DNA, 15 bp, Homo sapiens
tttttattgaggagt

SEQ ID NO: 1887448 - DNA, 15 bp, Homo sapiens
ttttattgaggagtc

SEQ ID NO: 1887449 - DNA, 15 bp, Homo sapiens
tttattgaggagtcc

SEQ ID NO: 1887450 - DNA, 15 bp, Homo sapiens
ttattgaggagtccc

SEQ ID NO: 1887451 - DNA, 15 bp, Homo sapiens
tattgaggagtccca

SEQ ID NO: 1887452 - DNA, 15 bp, Homo sapiens
attgaggagtcccag

SEQ ID NO: 1887453 - DNA, 15 bp, Homo sapiens
ttgaggagtcccagc

SEQ ID NO: 1887454 - DNA, 15 bp, Homo sapiens
tgaggagtcccagca

SEQ ID NO: 1887455 - DNA, 15 bp, Homo sapiens
gaggagtcccagcac

SEQ ID NO: 1887456 - DNA, 15 bp, Homo sapiens
aggagtcccagcacc

SEQ ID NO: 1887457 - DNA, 15 bp, Homo sapiens
ggagtcccagcaccc

SEQ ID NO: 1887458 - DNA, 15 bp, Homo sapiens
gagtcccagcaccct

SEQ ID NO: 1887459 - DNA, 15 bp, Homo sapiens
agtcccagcaccctc

SEQ ID NO: 1887460 - DNA, 15 bp, Homo sapiens
gtcccagcaccctct

SEQ ID NO: 1887461 - DNA, 15 bp, Homo sapiens
cccagcaccctctta

SEQ ID NO: 1887462 - DNA, 15 bp, Homo sapiens
ccagcaccctcttag

SEQ ID NO: 1887463 - DNA, 15 bp, Homo sapiens
cagcaccctcttagt

SEQ ID NO: 1887464 - DNA, 15 bp, Homo sapiens
agcaccctcttagtg

SEQ ID NO: 1887465 - DNA, 15 bp, Homo sapiens
gcaccctcttagtga

SEQ ID NO: 1887466 - DNA, 15 bp, Homo sapiens
caccctcttagtgat

SEQ ID NO: 1887467 - DNA, 15 bp, Homo sapiens
accctcttagtgata

SEQ ID NO: 1887468 - DNA, 15 bp, Homo sapiens
ccctcttagtgatac

SEQ ID NO: 1887469 - DNA, 15 bp, Homo sapiens
cctcttagtgataca

SEQ ID NO: 1887470 - DNA, 15 bp, Homo sapiens
ctcttagtgatacag

SEQ ID NO: 1887471 - DNA, 15 bp, Homo sapiens
tcttagtgatacagc

SEQ ID NO: 1887472 - DNA, 15 bp, Homo sapiens
cttagtgatacagct

SEQ ID NO: 1887473 - DNA, 15 bp, Homo sapiens
ttagtgatacagctt

SEQ ID NO: 1887474 - DNA, 15 bp, Homo sapiens
tagtgatacagcttt

SEQ ID NO: 1887475 - DNA, 15 bp, Homo sapiens
agtgatacagctttc

SEQ ID NO: 1887476 - DNA, 15 bp, Homo sapiens
gtgatacagctttca

SEQ ID NO: 1887477 - DNA, 15 bp, Homo sapiens
tgatacagctttcag

SEQ ID NO: 1887478 - DNA, 15 bp, Homo sapiens
gatacagctttcaga

SEQ ID NO: 1887479 - DNA, 15 bp, Homo sapiens
atacagctttcagat

SEQ ID NO: 1887480 - DNA, 15 bp, Homo sapiens
tacagctttcagatt

SEQ ID NO: 1887481 - DNA, 15 bp, Homo sapiens
acagctttcagattt

SEQ ID NO: 1887482 - DNA, 15 bp, Homo sapiens
cagctttcagattta

SEQ ID NO: 1887483 - DNA, 15 bp, Homo sapiens
agctttcagatttac

SEQ ID NO: 1887484 - DNA, 15 bp, Homo sapiens
gctttcagatttact

SEQ ID NO: 1887485 - DNA, 15 bp, Homo sapiens
ctttcagatttacta

SEQ ID NO: 1887486 - DNA, 15 bp, Homo sapiens
tttcagatttactaa

SEQ ID NO: 1887487 - DNA, 15 bp, Homo sapiens
ttcagatttactaaa

SEQ ID NO: 1887488 - DNA, 15 bp, Homo sapiens
tcagatttactaaac

SEQ ID NO: 1887489 - DNA, 15 bp, Homo sapiens
cagatttactaaact

SEQ ID NO: 1887490 - DNA, 15 bp, Homo sapiens
agatttactaaactc

SEQ ID NO: 1887491 - DNA, 15 bp, Homo sapiens
gatttactaaactcc

SEQ ID NO: 1887492 - DNA, 15 bp, Homo sapiens
atttactaaactcct

SEQ ID NO: 1887493 - DNA, 15 bp, Homo sapiens
tttactaaactcctt

SEQ ID NO: 1887494 - DNA, 15 bp, Homo sapiens
ttactaaactccttt

SEQ ID NO: 1887495 - DNA, 15 bp, Homo sapiens
tactaaactcctttc

SEQ ID NO: 1887496 - DNA, 15 bp, Homo sapiens
actaaactcctttct

SEQ ID NO: 1887497 - DNA, 15 bp, Homo sapiens
ctaaactcctttctg

SEQ ID NO: 1887498 - DNA, 15 bp, Homo sapiens
taaactcctttctgt

SEQ ID NO: 1887499 - DNA, 15 bp, Homo sapiens
aaactcctttctgtt

SEQ ID NO: 1887500 - DNA, 15 bp, Homo sapiens
aactcctttctgttc

SEQ ID NO: 1887501 - DNA, 15 bp, Homo sapiens
actcctttctgttcc

SEQ ID NO: 1887502 - DNA, 15 bp, Homo sapiens
ctcctttctgttcct

SEQ ID NO: 1887503 - DNA, 15 bp, Homo sapiens
tcctttctgttcctg

SEQ ID NO: 1887504 - DNA, 15 bp, Homo sapiens
cctttctgttcctgg

SEQ ID NO: 1887505 - DNA, 15 bp, Homo sapiens
ctttctgttcctgga

SEQ ID NO: 1887506 - DNA, 15 bp, Homo sapiens
tttctgttcctggac

SEQ ID NO: 1887507 - DNA, 15 bp, Homo sapiens
ttctgttcctggaca

SEQ ID NO: 1887508 - DNA, 15 bp, Homo sapiens
tctgttcctggacac

SEQ ID NO: 1887509 - DNA, 15 bp, Homo sapiens
ctgttcctggacact

SEQ ID NO: 1887510 - DNA, 15 bp, Homo sapiens
tgttcctggacactc

SEQ ID NO: 1887511 - DNA, 15 bp, Homo sapiens
gttcctggacactca

SEQ ID NO: 1887512 - DNA, 15 bp, Homo sapiens
ttcctggacactcat

SEQ ID NO: 1887513 - DNA, 15 bp, Homo sapiens
tcctggacactcatc

SEQ ID NO: 1887514 - DNA, 15 bp, Homo sapiens
cctggacactcatct

SEQ ID NO: 1887515 - DNA, 15 bp, Homo sapiens
ctggacactcatcta

SEQ ID NO: 1887516 - DNA, 15 bp, Homo sapiens
tggacactcatctaa

SEQ ID NO: 1887517 - DNA, 15 bp, Homo sapiens
ggacactcatctaaa

SEQ ID NO: 1887518 - DNA, 15 bp, Homo sapiens
gacactcatctaaac

SEQ ID NO: 1887519 - DNA, 15 bp, Homo sapiens
acactcatctaaaca

SEQ ID NO: 1887520 - DNA, 15 bp, Homo sapiens
cactcatctaaacag

SEQ ID NO: 1887521 - DNA, 15 bp, Homo sapiens
actcatctaaacagg

SEQ ID NO: 1887522 - DNA, 15 bp, Homo sapiens
ctcatctaaacaggg

SEQ ID NO: 1887523 - DNA, 15 bp, Homo sapiens
tcatctaaacagggc

SEQ ID NO: 1887524 - DNA, 15 bp, Homo sapiens
catctaaacagggct

SEQ ID NO: 1887525 - DNA, 15 bp, Homo sapiens
atctaaacagggctc

SEQ ID NO: 1887526 - DNA, 15 bp, Homo sapiens
tctaaacagggctca

SEQ ID NO: 1887527 - DNA, 15 bp, Homo sapiens
ctaaacagggctcaa

SEQ ID NO: 1887528 - DNA, 15 bp, Homo sapiens
taaacagggctcaat

SEQ ID NO: 1887529 - DNA, 15 bp, Homo sapiens
aaacagggctcaatc

SEQ ID NO: 1887530 - DNA, 15 bp, Homo sapiens
aacagggctcaatcc

SEQ ID NO: 1887531 - DNA, 15 bp, Homo sapiens
acagggctcaatcct

SEQ ID NO: 1887532 - DNA, 15 bp, Homo sapiens
cagggctcaatcctg

SEQ ID NO: 1887533 - DNA, 15 bp, Homo sapiens
agggctcaatcctgc

SEQ ID NO: 1887534 - DNA, 15 bp, Homo sapiens
gggctcaatcctgct

SEQ ID NO: 1887535 - DNA, 15 bp, Homo sapiens
ggctcaatcctgctg

SEQ ID NO: 1887536 - DNA, 15 bp, Homo sapiens
gctcaatcctgctga

SEQ ID NO: 1887537 - DNA, 15 bp, Homo sapiens
ctcaatcctgctgat

SEQ ID NO: 1887538 - DNA, 15 bp, Homo sapiens
tcaatcctgctgatt

SEQ ID NO: 1887539 - DNA, 15 bp, Homo sapiens
caatcctgctgattc

SEQ ID NO: 1887540 - DNA, 15 bp, Homo sapiens
aatcctgctgattca

SEQ ID NO: 1887541 - DNA, 15 bp, Homo sapiens
atcctgctgattcaa

SEQ ID NO: 1887542 - DNA, 15 bp, Homo sapiens
tcctgctgattcaac

SEQ ID NO: 1887543 - DNA, 15 bp, Homo sapiens
cctgctgattcaact

SEQ ID NO: 1887544 - DNA, 15 bp, Homo sapiens
ctgctgattcaactg

SEQ ID NO: 1887545 - DNA, 15 bp, Homo sapiens
tgctgattcaactgc

SEQ ID NO: 1887546 - DNA, 15 bp, Homo sapiens
gctgattcaactgcc

SEQ ID NO: 1887547 - DNA, 15 bp, Homo sapiens
ctgattcaactgcca

SEQ ID NO: 1887548 - DNA, 15 bp, Homo sapiens
tgattcaactgccac

SEQ ID NO: 1887549 - DNA, 15 bp, Homo sapiens
gattcaactgccaca

SEQ ID NO: 1887550 - DNA, 15 bp, Homo sapiens
attcaactgccacaa

SEQ ID NO: 1887551 - DNA, 15 bp, Homo sapiens
ttcaactgccacaac

SEQ ID NO: 1887552 - DNA, 15 bp, Homo sapiens
tcaactgccacaact

SEQ ID NO: 1887553 - DNA, 15 bp, Homo sapiens
caactgccacaactc

SEQ ID NO: 1887554 - DNA, 15 bp, Homo sapiens
aactgccacaactca

SEQ ID NO: 1887555 - DNA, 15 bp, Homo sapiens
actgccacaactcat

SEQ ID NO: 1887556 - DNA, 15 bp, Homo sapiens
ctgccacaactcata

SEQ ID NO: 1887557 - DNA, 15 bp, Homo sapiens
tgccacaactcatag

SEQ ID NO: 1887558 - DNA, 15 bp, Homo sapiens
gccacaactcatagc

SEQ ID NO: 1887559 - DNA, 15 bp, Homo sapiens
ccacaactcatagca

SEQ ID NO: 1887560 - DNA, 15 bp, Homo sapiens
cacaactcatagcag

SEQ ID NO: 1887561 - DNA, 15 bp, Homo sapiens
acaactcatagcagt

SEQ ID NO: 1887562 - DNA, 15 bp, Homo sapiens
caactcatagcagtt

SEQ ID NO: 1887563 - DNA, 15 bp, Homo sapiens
aactcatagcagtta

SEQ ID NO: 1887564 - DNA, 15 bp, Homo sapiens
actcatagcagttac

SEQ ID NO: 1887565 - DNA, 15 bp, Homo sapiens
ctcatagcagttacg

SEQ ID NO: 1887566 - DNA, 15 bp, Homo sapiens
tcatagcagttacgt

SEQ ID NO: 1887567 - DNA, 15 bp, Homo sapiens
catagcagttacgtc

SEQ ID NO: 1887568 - DNA, 15 bp, Homo sapiens
atagcagttacgtcc

SEQ ID NO: 1887569 - DNA, 15 bp, Homo sapiens
tagcagttacgtcct

SEQ ID NO: 1887570 - DNA, 15 bp, Homo sapiens
agcagttacgtcctc

SEQ ID NO: 1887571 - DNA, 15 bp, Homo sapiens
gcagttacgtcctct

SEQ ID NO: 1887572 - DNA, 15 bp, Homo sapiens
cagttacgtcctctt

SEQ ID NO: 1887573 - DNA, 15 bp, Homo sapiens
agttacgtcctcttc

SEQ ID NO: 1887574 - DNA, 15 bp, Homo sapiens
gttacgtcctcttca

SEQ ID NO: 1887575 - DNA, 15 bp, Homo sapiens
ttacgtcctcttcac

SEQ ID NO: 1887576 - DNA, 15 bp, Homo sapiens
tacgtcctcttcacc

SEQ ID NO: 1887577 - DNA, 15 bp, Homo sapiens
acgtcctcttcacca

SEQ ID NO: 1887578 - DNA, 15 bp, Homo sapiens
cgtcctcttcaccat

SEQ ID NO: 1887579 - DNA, 15 bp, Homo sapiens
gtcctcttcaccatc

SEQ ID NO: 1887580 - DNA, 15 bp, Homo sapiens
tcctcttcaccatca

SEQ ID NO: 1887581 - DNA, 15 bp, Homo sapiens
cctcttcaccatcag

SEQ ID NO: 1887582 - DNA, 15 bp, Homo sapiens
ctcttcaccatcagc

SEQ ID NO: 1887583 - DNA, 15 bp, Homo sapiens
tcttcaccatcagca

SEQ ID NO: 1887584 - DNA, 15 bp, Homo sapiens
cttcaccatcagcac

SEQ ID NO: 1887585 - DNA, 15 bp, Homo sapiens
ttcaccatcagcacc

SEQ ID NO: 1887586 - DNA, 15 bp, Homo sapiens
tcaccatcagcacct

SEQ ID NO: 1887587 - DNA, 15 bp, Homo sapiens
caccatcagcacctc

SEQ ID NO: 1887588 - DNA, 15 bp, Homo sapiens
accatcagcacctcg

SEQ ID NO: 1887589 - DNA, 15 bp, Homo sapiens
ccatcagcacctcga

SEQ ID NO: 1887590 - DNA, 15 bp, Homo sapiens
catcagcacctcgat

SEQ ID NO: 1887591 - DNA, 15 bp, Homo sapiens
atcagcacctcgatt

SEQ ID NO: 1887592 - DNA, 15 bp, Homo sapiens
tcagcacctcgattc

SEQ ID NO: 1887593 - DNA, 15 bp, Homo sapiens
cagcacctcgattca

SEQ ID NO: 1887594 - DNA, 15 bp, Homo sapiens
agcacctcgattcag

SEQ ID NO: 1887595 - DNA, 15 bp, Homo sapiens
gcacctcgattcaga

SEQ ID NO: 1887596 - DNA, 15 bp, Homo sapiens
cacctcgattcagac

SEQ ID NO: 1887597 - DNA, 15 bp, Homo sapiens
acctcgattcagacc

SEQ ID NO: 1887598 - DNA, 15 bp, Homo sapiens
cctcgattcagacct

SEQ ID NO: 1887599 - DNA, 15 bp, Homo sapiens
ctcgattcagacctc

SEQ ID NO: 1887600 - DNA, 15 bp, Homo sapiens
tcgattcagacctct

SEQ ID NO: 1887601 - DNA, 15 bp, Homo sapiens
cgattcagacctctc

SEQ ID NO: 1887602 - DNA, 15 bp, Homo sapiens
gattcagacctctct

SEQ ID NO: 1887603 - DNA, 15 bp, Homo sapiens
attcagacctctctg

SEQ ID NO: 1887604 - DNA, 15 bp, Homo sapiens
ttcagacctctctgt

SEQ ID NO: 1887605 - DNA, 15 bp, Homo sapiens
tcagacctctctgtg

SEQ ID NO: 1887606 - DNA, 15 bp, Homo sapiens
cagacctctctgtgg

SEQ ID NO: 1887607 - DNA, 15 bp, Homo sapiens
agacctctctgtgga

SEQ ID NO: 1887608 - DNA, 15 bp, Homo sapiens
gacctctctgtggat

SEQ ID NO: 1887609 - DNA, 15 bp, Homo sapiens
acctctctgtggatt

SEQ ID NO: 1887610 - DNA, 15 bp, Homo sapiens
cctctctgtggattt

SEQ ID NO: 1887611 - DNA, 15 bp, Homo sapiens
ctctctgtggatttc

SEQ ID NO: 1887612 - DNA, 15 bp, Homo sapiens
tctctgtggatttcc

SEQ ID NO: 1887613 - DNA, 15 bp, Homo sapiens
ctctgtggatttcca

SEQ ID NO: 1887614 - DNA, 15 bp, Homo sapiens
tctgtggatttccac

SEQ ID NO: 1887615 - DNA, 15 bp, Homo sapiens
ctgtggatttccaca

SEQ ID NO: 1887616 - DNA, 15 bp, Homo sapiens
tgtggatttccacaa

SEQ ID NO: 1887617 - DNA, 15 bp, Homo sapiens
gtggatttccacaat

SEQ ID NO: 1887618 - DNA, 15 bp, Homo sapiens
tggatttccacaata

SEQ ID NO: 1887619 - DNA, 15 bp, Homo sapiens
ggatttccacaatac

SEQ ID NO: 1887620 - DNA, 15 bp, Homo sapiens
gatttccacaatacc

SEQ ID NO: 1887621 - DNA, 15 bp, Homo sapiens
atttccacaatacct

SEQ ID NO: 1887622 - DNA, 15 bp, Homo sapiens
tttccacaataccta

SEQ ID NO: 1887623 - DNA, 15 bp, Homo sapiens
ttccacaatacctaa

SEQ ID NO: 1887624 - DNA, 15 bp, Homo sapiens
tccacaatacctaat

SEQ ID NO: 1887625 - DNA, 15 bp, Homo sapiens
ccacaatacctaatt

SEQ ID NO: 1887626 - DNA, 15 bp, Homo sapiens
cacaatacctaattt

SEQ ID NO: 1887627 - DNA, 15 bp, Homo sapiens
acaatacctaatttg

SEQ ID NO: 1887628 - DNA, 15 bp, Homo sapiens
caatacctaatttgc

SEQ ID NO: 1887629 - DNA, 15 bp, Homo sapiens
aatacctaatttgcg

SEQ ID NO: 1887630 - DNA, 15 bp, Homo sapiens
atacctaatttgcgg

SEQ ID NO: 1887631 - DNA, 15 bp, Homo sapiens
tacctaatttgcggc

SEQ ID NO: 1887632 - DNA, 15 bp, Homo sapiens
acctaatttgcggcc

SEQ ID NO: 1887633 - DNA, 15 bp, Homo sapiens
cctaatttgcggcct

SEQ ID NO: 1887634 - DNA, 15 bp, Homo sapiens
ctaatttgcggcctc

SEQ ID NO: 1887635 - DNA, 15 bp, Homo sapiens
taatttgcggcctca

SEQ ID NO: 1887636 - DNA, 15 bp, Homo sapiens
aatttgcggcctcac

SEQ ID NO: 1887637 - DNA, 15 bp, Homo sapiens
atttgcggcctcact

SEQ ID NO: 1887638 - DNA, 15 bp, Homo sapiens
tttgcggcctcactt

SEQ ID NO: 1887639 - DNA, 15 bp, Homo sapiens
ttgcggcctcactta

SEQ ID NO: 1887640 - DNA, 15 bp, Homo sapiens
tgcggcctcacttat

SEQ ID NO: 1887641 - DNA, 15 bp, Homo sapiens
gcggcctcacttatt

SEQ ID NO: 1887642 - DNA, 15 bp, Homo sapiens
cggcctcacttattt

SEQ ID NO: 1887643 - DNA, 15 bp, Homo sapiens
ggcctcacttatttt

SEQ ID NO: 1887644 - DNA, 15 bp, Homo sapiens
gcctcacttattttc

SEQ ID NO: 1887645 - DNA, 15 bp, Homo sapiens
cctcacttattttct

SEQ ID NO: 1887646 - DNA, 15 bp, Homo sapiens
ctcacttattttctc

SEQ ID NO: 1887647 - DNA, 15 bp, Homo sapiens
tcacttattttctct

SEQ ID NO: 1887648 - DNA, 15 bp, Homo sapiens
cacttattttctctg

SEQ ID NO: 1887649 - DNA, 15 bp, Homo sapiens
acttattttctctgt

SEQ ID NO: 1887650 - DNA, 15 bp, Homo sapiens
cttattttctctgtc

SEQ ID NO: 1887651 - DNA, 15 bp, Homo sapiens
ttattttctctgtct

SEQ ID NO: 1887652 - DNA, 15 bp, Homo sapiens
tattttctctgtctt

SEQ ID NO: 1887653 - DNA, 15 bp, Homo sapiens
attttctctgtcttc

SEQ ID NO: 1887654 - DNA, 15 bp, Homo sapiens
ttttctctgtcttcc

SEQ ID NO: 1887655 - DNA, 15 bp, Homo sapiens
tttctctgtcttcca

SEQ ID NO: 1887656 - DNA, 15 bp, Homo sapiens
ttctctgtcttccag

SEQ ID NO: 1887657 - DNA, 15 bp, Homo sapiens
tctctgtcttccagc

SEQ ID NO: 1887658 - DNA, 15 bp, Homo sapiens
ctctgtcttccagcc

SEQ ID NO: 1887659 - DNA, 15 bp, Homo sapiens
tctgtcttccagccc

SEQ ID NO: 1887660 - DNA, 15 bp, Homo sapiens
ctgtcttccagccca

SEQ ID NO: 1887661 - DNA, 15 bp, Homo sapiens
tgtcttccagcccat

SEQ ID NO: 1887662 - DNA, 15 bp, Homo sapiens
gtcttccagcccatt

SEQ ID NO: 1887663 - DNA, 15 bp, Homo sapiens
tcttccagcccattc

SEQ ID NO: 1887664 - DNA, 15 bp, Homo sapiens
cttccagcccattct

SEQ ID NO: 1887665 - DNA, 15 bp, Homo sapiens
ttccagcccattctg

SEQ ID NO: 1887666 - DNA, 15 bp, Homo sapiens
tccagcccattctgg

SEQ ID NO: 1887667 - DNA, 15 bp, Homo sapiens
ccagcccattctgga

SEQ ID NO: 1887668 - DNA, 15 bp, Homo sapiens
cagcccattctggaa

SEQ ID NO: 1887669 - DNA, 15 bp, Homo sapiens
agcccattctggaaa

SEQ ID NO: 1887670 - DNA, 15 bp, Homo sapiens
gcccattctggaaat

SEQ ID NO: 1887671 - DNA, 15 bp, Homo sapiens
cccattctggaaata

SEQ ID NO: 1887672 - DNA, 15 bp, Homo sapiens
ccattctggaaatag

SEQ ID NO: 1887673 - DNA, 15 bp, Homo sapiens
cattctggaaatagc

SEQ ID NO: 1887674 - DNA, 15 bp, Homo sapiens
attctggaaatagct

SEQ ID NO: 1887675 - DNA, 15 bp, Homo sapiens
ttctggaaatagcta

SEQ ID NO: 1887676 - DNA, 15 bp, Homo sapiens
tctggaaatagctac

SEQ ID NO: 1887677 - DNA, 15 bp, Homo sapiens
ctggaaatagctacc

SEQ ID NO: 1887678 - DNA, 15 bp, Homo sapiens
tggaaatagctacca

SEQ ID NO: 1887679 - DNA, 15 bp, Homo sapiens
ggaaatagctaccag

SEQ ID NO: 1887680 - DNA, 15 bp, Homo sapiens
gaaatagctaccaga

SEQ ID NO: 1887681 - DNA, 15 bp, Homo sapiens
aaatagctaccagag

SEQ ID NO: 1887682 - DNA, 15 bp, Homo sapiens
aatagctaccagagt

SEQ ID NO: 1887683 - DNA, 15 bp, Homo sapiens
atagctaccagagtt

SEQ ID NO: 1887684 - DNA, 15 bp, Homo sapiens
tagctaccagagtta

SEQ ID NO: 1887685 - DNA, 15 bp, Homo sapiens
agctaccagagttat

SEQ ID NO: 1887686 - DNA, 15 bp, Homo sapiens
gctaccagagttatt

SEQ ID NO: 1887687 - DNA, 15 bp, Homo sapiens
ctaccagagttattt

SEQ ID NO: 1887688 - DNA, 15 bp, Homo sapiens
taccagagttatttt

SEQ ID NO: 1887689 - DNA, 15 bp, Homo sapiens
accagagttattttt

SEQ ID NO: 1887690 - DNA, 15 bp, Homo sapiens
ccagagttatttttc

SEQ ID NO: 1887691 - DNA, 15 bp, Homo sapiens
cagagttatttttca

SEQ ID NO: 1887692 - DNA, 15 bp, Homo sapiens
agagttatttttcaa

SEQ ID NO: 1887693 - DNA, 15 bp, Homo sapiens
gagttatttttcaaa

SEQ ID NO: 1887694 - DNA, 15 bp, Homo sapiens
agttatttttcaaag

SEQ ID NO: 1887695 - DNA, 15 bp, Homo sapiens
gttatttttcaaagg

SEQ ID NO: 1887696 - DNA, 15 bp, Homo sapiens
ttatttttcaaagga

SEQ ID NO: 1887697 - DNA, 15 bp, Homo sapiens
tatttttcaaaggac

SEQ ID NO: 1887698 - DNA, 15 bp, Homo sapiens
atttttcaaaggaca

SEQ ID NO: 1887699 - DNA, 15 bp, Homo sapiens
tttttcaaaggacag

SEQ ID NO: 1887700 - DNA, 15 bp, Homo sapiens
ttttcaaaggacagg

SEQ ID NO: 1887701 - DNA, 15 bp, Homo sapiens
tttcaaaggacaggg

SEQ ID NO: 1887702 - DNA, 15 bp, Homo sapiens
ttcaaaggacaggga

SEQ ID NO: 1887703 - DNA, 15 bp, Homo sapiens
tcaaaggacagggaa

SEQ ID NO: 1887704 - DNA, 15 bp, Homo sapiens
caaaggacagggaaa

SEQ ID NO: 1887705 - DNA, 15 bp, Homo sapiens
aaaggacagggaaaa

SEQ ID NO: 1887706 - DNA, 15 bp, Homo sapiens
aaggacagggaaaag

SEQ ID NO: 1887707 - DNA, 15 bp, Homo sapiens
aggacagggaaaagt

SEQ ID NO: 1887708 - DNA, 15 bp, Homo sapiens
ggacagggaaaagtc

SEQ ID NO: 1887709 - DNA, 15 bp, Homo sapiens
gacagggaaaagtct

SEQ ID NO: 1887710 - DNA, 15 bp, Homo sapiens
acagggaaaagtcta

SEQ ID NO: 1887711 - DNA, 15 bp, Homo sapiens
cagggaaaagtctac

SEQ ID NO: 1887712 - DNA, 15 bp, Homo sapiens
agggaaaagtctact

SEQ ID NO: 1887713 - DNA, 15 bp, Homo sapiens
gggaaaagtctacta

SEQ ID NO: 1887714 - DNA, 15 bp, Homo sapiens
ggaaaagtctactat

SEQ ID NO: 1887715 - DNA, 15 bp, Homo sapiens
gaaaagtctactatt

SEQ ID NO: 1887716 - DNA, 15 bp, Homo sapiens
aaaagtctactattc

SEQ ID NO: 1887717 - DNA, 15 bp, Homo sapiens
atctttcccgctttc

SEQ ID NO: 1887718 - DNA, 15 bp, Homo sapiens
tctttcccgctttct

SEQ ID NO: 1887719 - DNA, 15 bp, Homo sapiens
ctttcccgctttctc

SEQ ID NO: 1887720 - DNA, 15 bp, Homo sapiens
tttcccgctttctcc

SEQ ID NO: 1887721 - DNA, 15 bp, Homo sapiens
ttcccgctttctcct

SEQ ID NO: 1887722 - DNA, 15 bp, Homo sapiens
tcccgctttctcctg

SEQ ID NO: 1887723 - DNA, 15 bp, Homo sapiens
cccgctttctcctgt

SEQ ID NO: 1887724 - DNA, 15 bp, Homo sapiens
ccgctttctcctgtg

SEQ ID NO: 1887725 - DNA, 15 bp, Homo sapiens
cgctttctcctgtgg

SEQ ID NO: 1887726 - DNA, 15 bp, Homo sapiens
gctttctcctgtggg

SEQ ID NO: 1887727 - DNA, 15 bp, Homo sapiens
ctttctcctgtgggc

SEQ ID NO: 1887728 - DNA, 15 bp, Homo sapiens
tttctcctgtgggca

SEQ ID NO: 1887729 - DNA, 15 bp, Homo sapiens
ttctcctgtgggcat

SEQ ID NO: 1887730 - DNA, 15 bp, Homo sapiens
tctcctgtgggcatt

SEQ ID NO: 1887731 - DNA, 15 bp, Homo sapiens
ctcctgtgggcattt

SEQ ID NO: 1887732 - DNA, 15 bp, Homo sapiens
tcctgtgggcattta

SEQ ID NO: 1887733 - DNA, 15 bp, Homo sapiens
cctgtgggcatttag

SEQ ID NO: 1887734 - DNA, 15 bp, Homo sapiens
ctgtgggcatttagc

SEQ ID NO: 1887735 - DNA, 15 bp, Homo sapiens
tgtgggcatttagcg

SEQ ID NO: 1887736 - DNA, 15 bp, Homo sapiens
gtgggcatttagcgc

SEQ ID NO: 1887737 - DNA, 15 bp, Homo sapiens
tgggcatttagcgct

SEQ ID NO: 1887738 - DNA, 15 bp, Homo sapiens
gggcatttagcgcta

SEQ ID NO: 1887739 - DNA, 15 bp, Homo sapiens
ggcatttagcgctat

SEQ ID NO: 1887740 - DNA, 15 bp, Homo sapiens
gcatttagcgctata

SEQ ID NO: 1887741 - DNA, 15 bp, Homo sapiens
catttagcgctataa

SEQ ID NO: 1887742 - DNA, 15 bp, Homo sapiens
atttagcgctataaa

SEQ ID NO: 1887743 - DNA, 15 bp, Homo sapiens
tttagcgctataaat

SEQ ID NO: 1887744 - DNA, 15 bp, Homo sapiens
ttagcgctataaatt

SEQ ID NO: 1887745 - DNA, 15 bp, Homo sapiens
tagcgctataaattt

SEQ ID NO: 1887746 - DNA, 15 bp, Homo sapiens
agcgctataaatttc

SEQ ID NO: 1887747 - DNA, 15 bp, Homo sapiens
gcgctataaatttcc

SEQ ID NO: 1887748 - DNA, 15 bp, Homo sapiens
cgctataaatttccc

SEQ ID NO: 1887749 - DNA, 15 bp, Homo sapiens
gctataaatttccct

SEQ ID NO: 1887750 - DNA, 15 bp, Homo sapiens
ctataaatttccctc

SEQ ID NO: 1887751 - DNA, 15 bp, Homo sapiens
tataaatttccctct

SEQ ID NO: 1887752 - DNA, 15 bp, Homo sapiens
ataaatttccctcta

SEQ ID NO: 1887753 - DNA, 15 bp, Homo sapiens
taaatttccctctaa

SEQ ID NO: 1887754 - DNA, 15 bp, Homo sapiens
aaatttccctctaaa

SEQ ID NO: 1887755 - DNA, 15 bp, Homo sapiens
aatttccctctaaat

SEQ ID NO: 1887756 - DNA, 15 bp, Homo sapiens
atttccctctaaatg

SEQ ID NO: 1887757 - DNA, 15 bp, Homo sapiens
tttccctctaaatgc

SEQ ID NO: 1887758 - DNA, 15 bp, Homo sapiens
ttccctctaaatgct

SEQ ID NO: 1887759 - DNA, 15 bp, Homo sapiens
tccctctaaatgctg

SEQ ID NO: 1887760 - DNA, 15 bp, Homo sapiens
ccctctaaatgctgc

SEQ ID NO: 1887761 - DNA, 15 bp, Homo sapiens
cctctaaatgctgct

SEQ ID NO: 1887762 - DNA, 15 bp, Homo sapiens
ctctaaatgctgctt

SEQ ID NO: 1887763 - DNA, 15 bp, Homo sapiens
tctaaatgctgcttt

SEQ ID NO: 1887764 - DNA, 15 bp, Homo sapiens
ctaaatgctgcttta

SEQ ID NO: 1887765 - DNA, 15 bp, Homo sapiens
taaatgctgctttag

SEQ ID NO: 1887766 - DNA, 15 bp, Homo sapiens
aaatgctgctttagc

SEQ ID NO: 1887767 - DNA, 15 bp, Homo sapiens
aatgctgctttagct

SEQ ID NO: 1887768 - DNA, 15 bp, Homo sapiens
atgctgctttagctg

SEQ ID NO: 1887769 - DNA, 15 bp, Homo sapiens
tgctgctttagctgt

SEQ ID NO: 1887770 - DNA, 15 bp, Homo sapiens
gctgctttagctgtg

SEQ ID NO: 1887771 - DNA, 15 bp, Homo sapiens
ctgctttagctgtgt

SEQ ID NO: 1887772 - DNA, 15 bp, Homo sapiens
tgctttagctgtgta

SEQ ID NO: 1887773 - DNA, 15 bp, Homo sapiens
gctttagctgtgtac

SEQ ID NO: 1887774 - DNA, 15 bp, Homo sapiens
ctttagctgtgtacc

SEQ ID NO: 1887775 - DNA, 15 bp, Homo sapiens
tttagctgtgtacca

SEQ ID NO: 1887776 - DNA, 15 bp, Homo sapiens
ttagctgtgtaccag

SEQ ID NO: 1887777 - DNA, 15 bp, Homo sapiens
tagctgtgtaccagg

SEQ ID NO: 1887778 - DNA, 15 bp, Homo sapiens
agctgtgtaccaggg

SEQ ID NO: 1887779 - DNA, 15 bp, Homo sapiens
gctgtgtaccaggga

SEQ ID NO: 1887780 - DNA, 15 bp, Homo sapiens
ctgtgtaccagggat

SEQ ID NO: 1887781 - DNA, 15 bp, Homo sapiens
tgtgtaccagggatt

SEQ ID NO: 1887782 - DNA, 15 bp, Homo sapiens
gtgtaccagggattc

SEQ ID NO: 1887783 - DNA, 15 bp, Homo sapiens
tgtaccagggattct

SEQ ID NO: 1887784 - DNA, 15 bp, Homo sapiens
gtaccagggattctt

SEQ ID NO: 1887785 - DNA, 15 bp, Homo sapiens
taccagggattcttg

SEQ ID NO: 1887786 - DNA, 15 bp, Homo sapiens
accagggattcttgt

SEQ ID NO: 1887787 - DNA, 15 bp, Homo sapiens
ccagggattcttgta

SEQ ID NO: 1887788 - DNA, 15 bp, Homo sapiens
cagggattcttgtac

SEQ ID NO: 1887789 - DNA, 15 bp, Homo sapiens
agggattcttgtaca

SEQ ID NO: 1887790 - DNA, 15 bp, Homo sapiens
gggattcttgtacat

SEQ ID NO: 1887791 - DNA, 15 bp, Homo sapiens
ggattcttgtacatt

SEQ ID NO: 1887792 - DNA, 15 bp, Homo sapiens
gattcttgtacattg

SEQ ID NO: 1887793 - DNA, 15 bp, Homo sapiens
attcttgtacattgt

SEQ ID NO: 1887794 - DNA, 15 bp, Homo sapiens
ttcttgtacattgtg

SEQ ID NO: 1887795 - DNA, 15 bp, Homo sapiens
tcttgtacattgtgt

SEQ ID NO: 1887796 - DNA, 15 bp, Homo sapiens
cttgtacattgtgtc

SEQ ID NO: 1887797 - DNA, 15 bp, Homo sapiens
ttgtacattgtgtct

SEQ ID NO: 1887798 - DNA, 15 bp, Homo sapiens
tgtacattgtgtctt

SEQ ID NO: 1887799 - DNA, 15 bp, Homo sapiens
gtacattgtgtcttt

SEQ ID NO: 1887800 - DNA, 15 bp, Homo sapiens
tacattgtgtctttg

SEQ ID NO: 1887801 - DNA, 15 bp, Homo sapiens
acattgtgtctttgt

SEQ ID NO: 1887802 - DNA, 15 bp, Homo sapiens
cattgtgtctttgtt

SEQ ID NO: 1887803 - DNA, 15 bp, Homo sapiens
attgtgtctttgttc

SEQ ID NO: 1887804 - DNA, 15 bp, Homo sapiens
ttgtgtctttgttct

SEQ ID NO: 1887805 - DNA, 15 bp, Homo sapiens
tgtgtctttgttctc

SEQ ID NO: 1887806 - DNA, 15 bp, Homo sapiens
gtgtctttgttctca

SEQ ID NO: 1887807 - DNA, 15 bp, Homo sapiens
tgtctttgttctcat

SEQ ID NO: 1887808 - DNA, 15 bp, Homo sapiens
gtctttgttctcatt

SEQ ID NO: 1887809 - DNA, 15 bp, Homo sapiens
tctttgttctcattg

SEQ ID NO: 1887810 - DNA, 15 bp, Homo sapiens
ctttgttctcattgg

SEQ ID NO: 1887811 - DNA, 15 bp, Homo sapiens
tttgttctcattggt

SEQ ID NO: 1887812 - DNA, 15 bp, Homo sapiens
ttgttctcattggtt

SEQ ID NO: 1887813 - DNA, 15 bp, Homo sapiens
tgttctcattggttt

SEQ ID NO: 1887814 - DNA, 15 bp, Homo sapiens
gttctcattggtttc

SEQ ID NO: 1887815 - DNA, 15 bp, Homo sapiens
ttctcattggtttca

SEQ ID NO: 1887816 - DNA, 15 bp, Homo sapiens
tctcattggtttcaa

SEQ ID NO: 1887817 - DNA, 15 bp, Homo sapiens
ctcattggtttcaaa

SEQ ID NO: 1887818 - DNA, 15 bp, Homo sapiens
tcattggtttcaaag

SEQ ID NO: 1887819 - DNA, 15 bp, Homo sapiens
cattggtttcaaaga

SEQ ID NO: 1887820 - DNA, 15 bp, Homo sapiens
attggtttcaaagaa

SEQ ID NO: 1887821 - DNA, 15 bp, Homo sapiens
ttggtttcaaagaac

SEQ ID NO: 1887822 - DNA, 15 bp, Homo sapiens
tggtttcaaagaact

SEQ ID NO: 1887823 - DNA, 15 bp, Homo sapiens
ggtttcaaagaactt

SEQ ID NO: 1887824 - DNA, 15 bp, Homo sapiens
gtttcaaagaactta

SEQ ID NO: 1887825 - DNA, 15 bp, Homo sapiens
tttcaaagaacttat

SEQ ID NO: 1887826 - DNA, 15 bp, Homo sapiens
ttcaaagaacttatt

SEQ ID NO: 1887827 - DNA, 15 bp, Homo sapiens
tcaaagaacttattt

SEQ ID NO: 1887828 - DNA, 15 bp, Homo sapiens
caaagaacttattta

SEQ ID NO: 1887829 - DNA, 15 bp, Homo sapiens
aaagaacttatttat

SEQ ID NO: 1887830 - DNA, 15 bp, Homo sapiens
aagaacttatttatt

SEQ ID NO: 1887831 - DNA, 15 bp, Homo sapiens
agaacttatttattt

SEQ ID NO: 1887832 - DNA, 15 bp, Homo sapiens
gaacttatttatttc

SEQ ID NO: 1887833 - DNA, 15 bp, Homo sapiens
aacttatttatttct

SEQ ID NO: 1887834 - DNA, 15 bp, Homo sapiens
acttatttatttctg

SEQ ID NO: 1887835 - DNA, 15 bp, Homo sapiens
cttatttatttctgc

SEQ ID NO: 1887836 - DNA, 15 bp, Homo sapiens
ttatttatttctgcc

SEQ ID NO: 1887837 - DNA, 15 bp, Homo sapiens
tatttatttctgcct

SEQ ID NO: 1887838 - DNA, 15 bp, Homo sapiens
atttatttctgcctt

SEQ ID NO: 1887839 - DNA, 15 bp, Homo sapiens
tttatttctgcctta

SEQ ID NO: 1887840 - DNA, 15 bp, Homo sapiens
ttatttctgccttaa

SEQ ID NO: 1887841 - DNA, 15 bp, Homo sapiens
tatttctgccttaat

SEQ ID NO: 1887842 - DNA, 15 bp, Homo sapiens
atttctgccttaatt

SEQ ID NO: 1887843 - DNA, 15 bp, Homo sapiens
tttctgccttaattt

SEQ ID NO: 1887844 - DNA, 15 bp, Homo sapiens
ttctgccttaatttc

SEQ ID NO: 1887845 - DNA, 15 bp, Homo sapiens
tctgccttaatttca

SEQ ID NO: 1887846 - DNA, 15 bp, Homo sapiens
ctgccttaatttcat

SEQ ID NO: 1887847 - DNA, 15 bp, Homo sapiens
tgccttaatttcatt

SEQ ID NO: 1887848 - DNA, 15 bp, Homo sapiens
gccttaatttcatta

SEQ ID NO: 1887849 - DNA, 15 bp, Homo sapiens
ccttaatttcattat

SEQ ID NO: 1887850 - DNA, 15 bp, Homo sapiens
cttaatttcattatt

SEQ ID NO: 1887851 - DNA, 15 bp, Homo sapiens
ttaatttcattattt

SEQ ID NO: 1887852 - DNA, 15 bp, Homo sapiens
taatttcattattta

SEQ ID NO: 1887853 - DNA, 15 bp, Homo sapiens
aatttcattatttac

SEQ ID NO: 1887854 - DNA, 15 bp, Homo sapiens
atttcattatttacc

SEQ ID NO: 1887855 - DNA, 15 bp, Homo sapiens
tttcattatttaccc

SEQ ID NO: 1887856 - DNA, 15 bp, Homo sapiens
ttcattatttaccca

SEQ ID NO: 1887857 - DNA, 15 bp, Homo sapiens
tcattatttacccag

SEQ ID NO: 1887858 - DNA, 15 bp, Homo sapiens
cattatttacccagt

SEQ ID NO: 1887859 - DNA, 15 bp, Homo sapiens
attatttacccagta

SEQ ID NO: 1887860 - DNA, 15 bp, Homo sapiens
ttatttacccagtag

SEQ ID NO: 1887861 - DNA, 15 bp, Homo sapiens
tatttacccagtagt

SEQ ID NO: 1887862 - DNA, 15 bp, Homo sapiens
atttacccagtagtc

SEQ ID NO: 1887863 - DNA, 15 bp, Homo sapiens
tttacccagtagtca

SEQ ID NO: 1887864 - DNA, 15 bp, Homo sapiens
ttacccagtagtcat

SEQ ID NO: 1887865 - DNA, 15 bp, Homo sapiens
tacccagtagtcatt

SEQ ID NO: 1887866 - DNA, 15 bp, Homo sapiens
acccagtagtcattc

SEQ ID NO: 1887867 - DNA, 15 bp, Homo sapiens
cccagtagtcattca

SEQ ID NO: 1887868 - DNA, 15 bp, Homo sapiens
ccagtagtcattcag

SEQ ID NO: 1887869 - DNA, 15 bp, Homo sapiens
cagtagtcattcagg

SEQ ID NO: 1887870 - DNA, 15 bp, Homo sapiens
agtagtcattcagga

SEQ ID NO: 1887871 - DNA, 15 bp, Homo sapiens
gtagtcattcaggag

SEQ ID NO: 1887872 - DNA, 15 bp, Homo sapiens
tagtcattcaggagt

SEQ ID NO: 1887873 - DNA, 15 bp, Homo sapiens
agtcattcaggagta

SEQ ID NO: 1887874 - DNA, 15 bp, Homo sapiens
gtcattcaggagtag

SEQ ID NO: 1887875 - DNA, 15 bp, Homo sapiens
tcattcaggagtagc

SEQ ID NO: 1887876 - DNA, 15 bp, Homo sapiens
cattcaggagtagct

SEQ ID NO: 1887877 - DNA, 15 bp, Homo sapiens
attcaggagtagctt

SEQ ID NO: 1887878 - DNA, 15 bp, Homo sapiens
ttcaggagtagcttg

SEQ ID NO: 1887879 - DNA, 15 bp, Homo sapiens
tcaggagtagcttgt

SEQ ID NO: 1887880 - DNA, 15 bp, Homo sapiens
caggagtagcttgtt

SEQ ID NO: 1887881 - DNA, 15 bp, Homo sapiens
aggagtagcttgttc

SEQ ID NO: 1887882 - DNA, 15 bp, Homo sapiens
ggagtagcttgttca

SEQ ID NO: 1887883 - DNA, 15 bp, Homo sapiens
gagtagcttgttcag

SEQ ID NO: 1887884 - DNA, 15 bp, Homo sapiens
agtagcttgttcagt

SEQ ID NO: 1887885 - DNA, 15 bp, Homo sapiens
gtagcttgttcagtt

SEQ ID NO: 1887886 - DNA, 15 bp, Homo sapiens
tagcttgttcagttt

SEQ ID NO: 1887887 - DNA, 15 bp, Homo sapiens
agcttgttcagtttc

SEQ ID NO: 1887888 - DNA, 15 bp, Homo sapiens
gcttgttcagtttcc

SEQ ID NO: 1887889 - DNA, 15 bp, Homo sapiens
cttgttcagtttcca

SEQ ID NO: 1887890 - DNA, 15 bp, Homo sapiens
ttgttcagtttccat

SEQ ID NO: 1887891 - DNA, 15 bp, Homo sapiens
tgttcagtttccatg

SEQ ID NO: 1887892 - DNA, 15 bp, Homo sapiens
gttcagtttccatgt

SEQ ID NO: 1887893 - DNA, 15 bp, Homo sapiens
ttcagtttccatgta

SEQ ID NO: 1887894 - DNA, 15 bp, Homo sapiens
tcagtttccatgtag

SEQ ID NO: 1887895 - DNA, 15 bp, Homo sapiens
cagtttccatgtagt

SEQ ID NO: 1887896 - DNA, 15 bp, Homo sapiens
agtttccatgtagtt

SEQ ID NO: 1887897 - DNA, 15 bp, Homo sapiens
gtttccatgtagttg

SEQ ID NO: 1887898 - DNA, 15 bp, Homo sapiens
tttccatgtagttgt

SEQ ID NO: 1887899 - DNA, 15 bp, Homo sapiens
ttccatgtagttgta

SEQ ID NO: 1887900 - DNA, 15 bp, Homo sapiens
tccatgtagttgtat

SEQ ID NO: 1887901 - DNA, 15 bp, Homo sapiens
ccatgtagttgtatg

SEQ ID NO: 1887902 - DNA, 15 bp, Homo sapiens
catgtagttgtatgg

SEQ ID NO: 1887903 - DNA, 15 bp, Homo sapiens
atgtagttgtatggt

SEQ ID NO: 1887904 - DNA, 15 bp, Homo sapiens
tgtagttgtatggtt

SEQ ID NO: 1887905 - DNA, 15 bp, Homo sapiens
gtagttgtatggttt

SEQ ID NO: 1887906 - DNA, 15 bp, Homo sapiens
tagttgtatggtttt

SEQ ID NO: 1887907 - DNA, 15 bp, Homo sapiens
agttgtatggttttg

SEQ ID NO: 1887908 - DNA, 15 bp, Homo sapiens
gttgtatggttttga

SEQ ID NO: 1887909 - DNA, 15 bp, Homo sapiens
ttgtatggttttgag

SEQ ID NO: 1887910 - DNA, 15 bp, Homo sapiens
tgtatggttttgagt

SEQ ID NO: 1887911 - DNA, 15 bp, Homo sapiens
gtatggttttgagtg

SEQ ID NO: 1887912 - DNA, 15 bp, Homo sapiens
tatggttttgagtga

SEQ ID NO: 1887913 - DNA, 15 bp, Homo sapiens
atggttttgagtgag

SEQ ID NO: 1887914 - DNA, 15 bp, Homo sapiens
tggttttgagtgagt

SEQ ID NO: 1887915 - DNA, 15 bp, Homo sapiens
ggttttgagtgagtt

SEQ ID NO: 1887916 - DNA, 15 bp, Homo sapiens
gttttgagtgagttt

SEQ ID NO: 1887917 - DNA, 15 bp, Homo sapiens
ttttgagtgagtttc

SEQ ID NO: 1887918 - DNA, 15 bp, Homo sapiens
tttgagtgagtttct

SEQ ID NO: 1887919 - DNA, 15 bp, Homo sapiens
ttgagtgagtttctt

SEQ ID NO: 1887920 - DNA, 15 bp, Homo sapiens
tgagtgagtttctta

SEQ ID NO: 1887921 - DNA, 15 bp, Homo sapiens
gagtgagtttcttaa

SEQ ID NO: 1887922 - DNA, 15 bp, Homo sapiens
agtgagtttcttaat

SEQ ID NO: 1887923 - DNA, 15 bp, Homo sapiens
gtgagtttcttaatc

SEQ ID NO: 1887924 - DNA, 15 bp, Homo sapiens
tgagtttcttaatcc

SEQ ID NO: 1887925 - DNA, 15 bp, Homo sapiens
gagtttcttaatcct

SEQ ID NO: 1887926 - DNA, 15 bp, Homo sapiens
agtttcttaatcctg

SEQ ID NO: 1887927 - DNA, 15 bp, Homo sapiens
gtttcttaatcctga

SEQ ID NO: 1887928 - DNA, 15 bp, Homo sapiens
tttcttaatcctgag

SEQ ID NO: 1887929 - DNA, 15 bp, Homo sapiens
ttcttaatcctgagt

SEQ ID NO: 1887930 - DNA, 15 bp, Homo sapiens
tcttaatcctgagtt

SEQ ID NO: 1887931 - DNA, 15 bp, Homo sapiens
cttaatcctgagttc

SEQ ID NO: 1887932 - DNA, 15 bp, Homo sapiens
ttaatcctgagttct

SEQ ID NO: 1887933 - DNA, 15 bp, Homo sapiens
taatcctgagttcta

SEQ ID NO: 1887934 - DNA, 15 bp, Homo sapiens
aatcctgagttctaa

SEQ ID NO: 1887935 - DNA, 15 bp, Homo sapiens
atcctgagttctaat

SEQ ID NO: 1887936 - DNA, 15 bp, Homo sapiens
tcctgagttctaatt

SEQ ID NO: 1887937 - DNA, 15 bp, Homo sapiens
cctgagttctaattt

SEQ ID NO: 1887938 - DNA, 15 bp, Homo sapiens
ctgagttctaatttg

SEQ ID NO: 1887939 - DNA, 15 bp, Homo sapiens
tgagttctaatttga

SEQ ID NO: 1887940 - DNA, 15 bp, Homo sapiens
gagttctaatttgat

SEQ ID NO: 1887941 - DNA, 15 bp, Homo sapiens
agttctaatttgatt

SEQ ID NO: 1887942 - DNA, 15 bp, Homo sapiens
gttctaatttgattg

SEQ ID NO: 1887943 - DNA, 15 bp, Homo sapiens
ttctaatttgattgc

SEQ ID NO: 1887944 - DNA, 15 bp, Homo sapiens
tctaatttgattgca

SEQ ID NO: 1887945 - DNA, 15 bp, Homo sapiens
ctaatttgattgcac

SEQ ID NO: 1887946 - DNA, 15 bp, Homo sapiens
taatttgattgcact

SEQ ID NO: 1887947 - DNA, 15 bp, Homo sapiens
aatttgattgcactg

SEQ ID NO: 1887948 - DNA, 15 bp, Homo sapiens
atttgattgcactgt

SEQ ID NO: 1887949 - DNA, 15 bp, Homo sapiens
tttgattgcactgtg

SEQ ID NO: 1887950 - DNA, 15 bp, Homo sapiens
ttgattgcactgtgg

SEQ ID NO: 1887951 - DNA, 15 bp, Homo sapiens
tgattgcactgtggt

SEQ ID NO: 1887952 - DNA, 15 bp, Homo sapiens
gattgcactgtggtc

SEQ ID NO: 1887953 - DNA, 15 bp, Homo sapiens
attgcactgtggtct

SEQ ID NO: 1887954 - DNA, 15 bp, Homo sapiens
ttgcactgtggtctg

SEQ ID NO: 1887955 - DNA, 15 bp, Homo sapiens
tgcactgtggtctga

SEQ ID NO: 1887956 - DNA, 15 bp, Homo sapiens
gcactgtggtctgag

SEQ ID NO: 1887957 - DNA, 15 bp, Homo sapiens
cactgtggtctgaga

SEQ ID NO: 1887958 - DNA, 15 bp, Homo sapiens
actgtggtctgagag

SEQ ID NO: 1887959 - DNA, 15 bp, Homo sapiens
ctgtggtctgagaga

SEQ ID NO: 1887960 - DNA, 15 bp, Homo sapiens
tgtggtctgagagac

SEQ ID NO: 1887961 - DNA, 15 bp, Homo sapiens
gtggtctgagagact

SEQ ID NO: 1887962 - DNA, 15 bp, Homo sapiens
tggtctgagagactg

SEQ ID NO: 1887963 - DNA, 15 bp, Homo sapiens
ggtctgagagactgt

SEQ ID NO: 1887964 - DNA, 15 bp, Homo sapiens
gtctgagagactgtt

SEQ ID NO: 1887965 - DNA, 15 bp, Homo sapiens
tctgagagactgttt

SEQ ID NO: 1887966 - DNA, 15 bp, Homo sapiens
ctgagagactgtttg

SEQ ID NO: 1887967 - DNA, 15 bp, Homo sapiens
tgagagactgtttgt

SEQ ID NO: 1887968 - DNA, 15 bp, Homo sapiens
gagagactgtttgtt

SEQ ID NO: 1887969 - DNA, 15 bp, Homo sapiens
agagactgtttgtta

SEQ ID NO: 1887970 - DNA, 15 bp, Homo sapiens
gagactgtttgttat

SEQ ID NO: 1887971 - DNA, 15 bp, Homo sapiens
agactgtttgttatg

SEQ ID NO: 1887972 - DNA, 15 bp, Homo sapiens
gactgtttgttatga

SEQ ID NO: 1887973 - DNA, 15 bp, Homo sapiens
actgtttgttatgat

SEQ ID NO: 1887974 - DNA, 15 bp, Homo sapiens
ctgtttgttatgatt

SEQ ID NO: 1887975 - DNA, 15 bp, Homo sapiens
tgtttgttatgattt

SEQ ID NO: 1887976 - DNA, 15 bp, Homo sapiens
gtttgttatgatttc

SEQ ID NO: 1887977 - DNA, 15 bp, Homo sapiens
tttgttatgatttcc

SEQ ID NO: 1887978 - DNA, 15 bp, Homo sapiens
ttgttatgatttcca

SEQ ID NO: 1887979 - DNA, 15 bp, Homo sapiens
tgttatgatttccat

SEQ ID NO: 1887980 - DNA, 15 bp, Homo sapiens
gttatgatttccatt

SEQ ID NO: 1887981 - DNA, 15 bp, Homo sapiens
ttatgatttccattc

SEQ ID NO: 1887982 - DNA, 15 bp, Homo sapiens
tatgatttccattct

SEQ ID NO: 1887983 - DNA, 15 bp, Homo sapiens
atgatttccattctt

SEQ ID NO: 1887984 - DNA, 15 bp, Homo sapiens
tgatttccattcttt

SEQ ID NO: 1887985 - DNA, 15 bp, Homo sapiens
gatttccattctttt

SEQ ID NO: 1887986 - DNA, 15 bp, Homo sapiens
atttccattcttttg

SEQ ID NO: 1887987 - DNA, 15 bp, Homo sapiens
tttccattcttttgc

SEQ ID NO: 1887988 - DNA, 15 bp, Homo sapiens
ttccattcttttgca

SEQ ID NO: 1887989 - DNA, 15 bp, Homo sapiens
tccattcttttgcat

SEQ ID NO: 1887990 - DNA, 15 bp, Homo sapiens
ccattcttttgcatt

SEQ ID NO: 1887991 - DNA, 15 bp, Homo sapiens
cattcttttgcattt

SEQ ID NO: 1887992 - DNA, 15 bp, Homo sapiens
attcttttgcatttg

SEQ ID NO: 1887993 - DNA, 15 bp, Homo sapiens
ttcttttgcatttgc

SEQ ID NO: 1887994 - DNA, 15 bp, Homo sapiens
tcttttgcatttgct

SEQ ID NO: 1887995 - DNA, 15 bp, Homo sapiens
cttttgcatttgctg

SEQ ID NO: 1887996 - DNA, 15 bp, Homo sapiens
ttttgcatttgctga

SEQ ID NO: 1887997 - DNA, 15 bp, Homo sapiens
tttgcatttgctgag

SEQ ID NO: 1887998 - DNA, 15 bp, Homo sapiens
ttgcatttgctgagg

SEQ ID NO: 1887999 - DNA, 15 bp, Homo sapiens
tgcatttgctgagga

SEQ ID NO: 1888000 - DNA, 15 bp, Homo sapiens
gcatttgctgaggag

SEQ ID NO: 1888001 - DNA, 15 bp, Homo sapiens
catttgctgaggagt

SEQ ID NO: 1888002 - DNA, 15 bp, Homo sapiens
atttgctgaggagtg

SEQ ID NO: 1888003 - DNA, 15 bp, Homo sapiens
tttgctgaggagtgt

SEQ ID NO: 1888004 - DNA, 15 bp, Homo sapiens
ttgctgaggagtgtt

SEQ ID NO: 1888005 - DNA, 15 bp, Homo sapiens
tgctgaggagtgttt

SEQ ID NO: 1888006 - DNA, 15 bp, Homo sapiens
gctgaggagtgtttt

SEQ ID NO: 1888007 - DNA, 15 bp, Homo sapiens
ctgaggagtgttttg

SEQ ID NO: 1888008 - DNA, 15 bp, Homo sapiens
tgaggagtgttttgc

SEQ ID NO: 1888009 - DNA, 15 bp, Homo sapiens
gaggagtgttttgct

SEQ ID NO: 1888010 - DNA, 15 bp, Homo sapiens
aggagtgttttgctc

SEQ ID NO: 1888011 - DNA, 15 bp, Homo sapiens
ggagtgttttgctcc

SEQ ID NO: 1888012 - DNA, 15 bp, Homo sapiens
gagtgttttgctccc

SEQ ID NO: 1888013 - DNA, 15 bp, Homo sapiens
agtgttttgctccca

SEQ ID NO: 1888014 - DNA, 15 bp, Homo sapiens
gtgttttgctcccaa

SEQ ID NO: 1888015 - DNA, 15 bp, Homo sapiens
tgttttgctcccaat

SEQ ID NO: 1888016 - DNA, 15 bp, Homo sapiens
gttttgctcccaatt

SEQ ID NO: 1888017 - DNA, 15 bp, Homo sapiens
ttttgctcccaatta

SEQ ID NO: 1888018 - DNA, 15 bp, Homo sapiens
tttgctcccaattat

SEQ ID NO: 1888019 - DNA, 15 bp, Homo sapiens
ttgctcccaattatg

SEQ ID NO: 1888020 - DNA, 15 bp, Homo sapiens
tgctcccaattatgt

SEQ ID NO: 1888021 - DNA, 15 bp, Homo sapiens
gctcccaattatgtg

SEQ ID NO: 1888022 - DNA, 15 bp, Homo sapiens
ctcccaattatgtgg

SEQ ID NO: 1888023 - DNA, 15 bp, Homo sapiens
tcccaattatgtggt

SEQ ID NO: 1888024 - DNA, 15 bp, Homo sapiens
cccaattatgtggtc

SEQ ID NO: 1888025 - DNA, 15 bp, Homo sapiens
ccaattatgtggtca

SEQ ID NO: 1888026 - DNA, 15 bp, Homo sapiens
caattatgtggtcaa

SEQ ID NO: 1888027 - DNA, 15 bp, Homo sapiens
aattatgtggtcaat

SEQ ID NO: 1888028 - DNA, 15 bp, Homo sapiens
attatgtggtcaatt

SEQ ID NO: 1888029 - DNA, 15 bp, Homo sapiens
ttatgtggtcaattt

SEQ ID NO: 1888030 - DNA, 15 bp, Homo sapiens
tatgtggtcaatttt

SEQ ID NO: 1888031 - DNA, 15 bp, Homo sapiens
atgtggtcaatttta

SEQ ID NO: 1888032 - DNA, 15 bp, Homo sapiens
tgtggtcaattttag

SEQ ID NO: 1888033 - DNA, 15 bp, Homo sapiens
gtggtcaattttaga

SEQ ID NO: 1888034 - DNA, 15 bp, Homo sapiens
tggtcaattttagaa

SEQ ID NO: 1888035 - DNA, 15 bp, Homo sapiens
ggtcaattttagaat

SEQ ID NO: 1888036 - DNA, 15 bp, Homo sapiens
gtcaattttagaata

SEQ ID NO: 1888037 - DNA, 15 bp, Homo sapiens
tcaattttagaataa

SEQ ID NO: 1888038 - DNA, 15 bp, Homo sapiens
caattttagaataag

SEQ ID NO: 1888039 - DNA, 15 bp, Homo sapiens
aattttagaataagt

SEQ ID NO: 1888040 - DNA, 15 bp, Homo sapiens
attttagaataagtg

SEQ ID NO: 1888041 - DNA, 15 bp, Homo sapiens
ttttagaataagtgt

SEQ ID NO: 1888042 - DNA, 15 bp, Homo sapiens
tttagaataagtgtg

SEQ ID NO: 1888043 - DNA, 15 bp, Homo sapiens
ttagaataagtgtga

SEQ ID NO: 1888044 - DNA, 15 bp, Homo sapiens
tagaataagtgtgat

SEQ ID NO: 1888045 - DNA, 15 bp, Homo sapiens
agaataagtgtgatg

SEQ ID NO: 1888046 - DNA, 15 bp, Homo sapiens
gaataagtgtgatgt

SEQ ID NO: 1888047 - DNA, 15 bp, Homo sapiens
aataagtgtgatgtg

SEQ ID NO: 1888048 - DNA, 15 bp, Homo sapiens
ataagtgtgatgtgg

SEQ ID NO: 1888049 - DNA, 15 bp, Homo sapiens
taagtgtgatgtggt

SEQ ID NO: 1888050 - DNA, 15 bp, Homo sapiens
aagtgtgatgtggtg

SEQ ID NO: 1888051 - DNA, 15 bp, Homo sapiens
agtgtgatgtggtgc

SEQ ID NO: 1888052 - DNA, 15 bp, Homo sapiens
gtgtgatgtggtgct

SEQ ID NO: 1888053 - DNA, 15 bp, Homo sapiens
tgtgatgtggtgctg

SEQ ID NO: 1888054 - DNA, 15 bp, Homo sapiens
gtgatgtggtgctga

SEQ ID NO: 1888055 - DNA, 15 bp, Homo sapiens
tgatgtggtgctgag

SEQ ID NO: 1888056 - DNA, 15 bp, Homo sapiens
gatgtggtgctgaga

SEQ ID NO: 1888057 - DNA, 15 bp, Homo sapiens
atgtggtgctgagaa

SEQ ID NO: 1888058 - DNA, 15 bp, Homo sapiens
tgtggtgctgagaaa

SEQ ID NO: 1888059 - DNA, 15 bp, Homo sapiens
gtggtgctgagaaaa

SEQ ID NO: 1888060 - DNA, 15 bp, Homo sapiens
tggtgctgagaaaaa

SEQ ID NO: 1888061 - DNA, 15 bp, Homo sapiens
ggtgctgagaaaaat

SEQ ID NO: 1888062 - DNA, 15 bp, Homo sapiens
gtgctgagaaaaatg

SEQ ID NO: 1888063 - DNA, 15 bp, Homo sapiens
tgctgagaaaaatgt

SEQ ID NO: 1888064 - DNA, 15 bp, Homo sapiens
gctgagaaaaatgta

SEQ ID NO: 1888065 - DNA, 15 bp, Homo sapiens
ctgagaaaaatgtat

SEQ ID NO: 1888066 - DNA, 15 bp, Homo sapiens
tgagaaaaatgtata

SEQ ID NO: 1888067 - DNA, 15 bp, Homo sapiens
gagaaaaatgtatat

SEQ ID NO: 1888068 - DNA, 15 bp, Homo sapiens
agaaaaatgtatatt

SEQ ID NO: 1888069 - DNA, 15 bp, Homo sapiens
gaaaaatgtatattc

SEQ ID NO: 1888070 - DNA, 15 bp, Homo sapiens
aaaaatgtatattct

SEQ ID NO: 1888071 - DNA, 15 bp, Homo sapiens
aaaatgtatattctg

SEQ ID NO: 1888072 - DNA, 15 bp, Homo sapiens
aaatgtatattctgt

SEQ ID NO: 1888073 - DNA, 15 bp, Homo sapiens
aatgtatattctgtt

SEQ ID NO: 1888074 - DNA, 15 bp, Homo sapiens
atgtatattctgtta

SEQ ID NO: 1888075 - DNA, 15 bp, Homo sapiens
tgtatattctgttac

SEQ ID NO: 1888076 - DNA, 15 bp, Homo sapiens
gtatattctgttact

SEQ ID NO: 1888077 - DNA, 15 bp, Homo sapiens
tatattctgttactt

SEQ ID NO: 1888078 - DNA, 15 bp, Homo sapiens
atattctgttacttt

SEQ ID NO: 1888079 - DNA, 15 bp, Homo sapiens
tattctgttactttg

SEQ ID NO: 1888080 - DNA, 15 bp, Homo sapiens
attctgttactttgg

SEQ ID NO: 1888081 - DNA, 15 bp, Homo sapiens
ttctgttactttggg

SEQ ID NO: 1888082 - DNA, 15 bp, Homo sapiens
tctgttactttgggg

SEQ ID NO: 1888083 - DNA, 15 bp, Homo sapiens
ctgttactttggggt

SEQ ID NO: 1888084 - DNA, 15 bp, Homo sapiens
tgttactttggggtg

SEQ ID NO: 1888085 - DNA, 15 bp, Homo sapiens
gttactttggggtgg

SEQ ID NO: 1888086 - DNA, 15 bp, Homo sapiens
ttactttggggtgga

SEQ ID NO: 1888087 - DNA, 15 bp, Homo sapiens
tactttggggtggag

SEQ ID NO: 1888088 - DNA, 15 bp, Homo sapiens
actttggggtggaga

SEQ ID NO: 1888089 - DNA, 15 bp, Homo sapiens
ctttggggtggagag

SEQ ID NO: 1888090 - DNA, 15 bp, Homo sapiens
tttggggtggagagt

SEQ ID NO: 1888091 - DNA, 15 bp, Homo sapiens
ttggggtggagagtt

SEQ ID NO: 1888092 - DNA, 15 bp, Homo sapiens
tggggtggagagttc

SEQ ID NO: 1888093 - DNA, 15 bp, Homo sapiens
ggggtggagagttct

SEQ ID NO: 1888094 - DNA, 15 bp, Homo sapiens
gggtggagagttctg

SEQ ID NO: 1888095 - DNA, 15 bp, Homo sapiens
ggtggagagttctgt

SEQ ID NO: 1888096 - DNA, 15 bp, Homo sapiens
gtggagagttctgta

SEQ ID NO: 1888097 - DNA, 15 bp, Homo sapiens
tggagagttctgtag

SEQ ID NO: 1888098 - DNA, 15 bp, Homo sapiens
ggagagttctgtaga

SEQ ID NO: 1888099 - DNA, 15 bp, Homo sapiens
gagagttctgtagat

SEQ ID NO: 1888100 - DNA, 15 bp, Homo sapiens
agagttctgtagatg

SEQ ID NO: 1888101 - DNA, 15 bp, Homo sapiens
gagttctgtagatgt

SEQ ID NO: 1888102 - DNA, 15 bp, Homo sapiens
agttctgtagatgtc

SEQ ID NO: 1888103 - DNA, 15 bp, Homo sapiens
gttctgtagatgtct

SEQ ID NO: 1888104 - DNA, 15 bp, Homo sapiens
ttctgtagatgtcta

SEQ ID NO: 1888105 - DNA, 15 bp, Homo sapiens
tctgtagatgtctat

SEQ ID NO: 1888106 - DNA, 15 bp, Homo sapiens
ctgtagatgtctatt

SEQ ID NO: 1888107 - DNA, 15 bp, Homo sapiens
tgtagatgtctatta

SEQ ID NO: 1888108 - DNA, 15 bp, Homo sapiens
gtagatgtctattag

SEQ ID NO: 1888109 - DNA, 15 bp, Homo sapiens
tagatgtctattagg

SEQ ID NO: 1888110 - DNA, 15 bp, Homo sapiens
gatgtctattaggtc

SEQ ID NO: 1888111 - DNA, 15 bp, Homo sapiens
atgtctattaggtcc

SEQ ID NO: 1888112 - DNA, 15 bp, Homo sapiens
tgtctattaggtccg

SEQ ID NO: 1888113 - DNA, 15 bp, Homo sapiens
gtctattaggtccgc

SEQ ID NO: 1888114 - DNA, 15 bp, Homo sapiens
tctattaggtccgct

SEQ ID NO: 1888115 - DNA, 15 bp, Homo sapiens
ctattaggtccgctt

SEQ ID NO: 1888116 - DNA, 15 bp, Homo sapiens
tattaggtccgcttg

SEQ ID NO: 1888117 - DNA, 15 bp, Homo sapiens
attaggtccgcttga

SEQ ID NO: 1888118 - DNA, 15 bp, Homo sapiens
ttaggtccgcttgat

SEQ ID NO: 1888119 - DNA, 15 bp, Homo sapiens
taggtccgcttgatc

SEQ ID NO: 1888120 - DNA, 15 bp, Homo sapiens
aggtccgcttgatcc

SEQ ID NO: 1888121 - DNA, 15 bp, Homo sapiens
ggtccgcttgatcct

SEQ ID NO: 1888122 - DNA, 15 bp, Homo sapiens
gtccgcttgatcctg

SEQ ID NO: 1888123 - DNA, 15 bp, Homo sapiens
tccgcttgatcctga

SEQ ID NO: 1888124 - DNA, 15 bp, Homo sapiens
ccgcttgatcctgag

SEQ ID NO: 1888125 - DNA, 15 bp, Homo sapiens
cgcttgatcctgagt

SEQ ID NO: 1888126 - DNA, 15 bp, Homo sapiens
gcttgatcctgagtt

SEQ ID NO: 1888127 - DNA, 15 bp, Homo sapiens
cttgatcctgagttt

SEQ ID NO: 1888128 - DNA, 15 bp, Homo sapiens
ttgatcctgagttta

SEQ ID NO: 1888129 - DNA, 15 bp, Homo sapiens
tgatcctgagtttaa

SEQ ID NO: 1888130 - DNA, 15 bp, Homo sapiens
gatcctgagtttaag

SEQ ID NO: 1888131 - DNA, 15 bp, Homo sapiens
atcctgagtttaagt

SEQ ID NO: 1888132 - DNA, 15 bp, Homo sapiens
tcctgagtttaagtc

SEQ ID NO: 1888133 - DNA, 15 bp, Homo sapiens
cctgagtttaagtct

SEQ ID NO: 1888134 - DNA, 15 bp, Homo sapiens
ctgagtttaagtctt

SEQ ID NO: 1888135 - DNA, 15 bp, Homo sapiens
tgagtttaagtcttc

SEQ ID NO: 1888136 - DNA, 15 bp, Homo sapiens
gagtttaagtcttca

SEQ ID NO: 1888137 - DNA, 15 bp, Homo sapiens
agtttaagtcttcaa

SEQ ID NO: 1888138 - DNA, 15 bp, Homo sapiens
gtttaagtcttcaat

SEQ ID NO: 1888139 - DNA, 15 bp, Homo sapiens
tttaagtcttcaata

SEQ ID NO: 1888140 - DNA, 15 bp, Homo sapiens
ttaagtcttcaatat

SEQ ID NO: 1888141 - DNA, 15 bp, Homo sapiens
taagtcttcaatatc

SEQ ID NO: 1888142 - DNA, 15 bp, Homo sapiens
aagtcttcaatatcc

SEQ ID NO: 1888143 - DNA, 15 bp, Homo sapiens
agtcttcaatatcct

SEQ ID NO: 1888144 - DNA, 15 bp, Homo sapiens
gtcttcaatatcctt

SEQ ID NO: 1888145 - DNA, 15 bp, Homo sapiens
tcttcaatatccttg

SEQ ID NO: 1888146 - DNA, 15 bp, Homo sapiens
cttcaatatccttgt

SEQ ID NO: 1888147 - DNA, 15 bp, Homo sapiens
ttcaatatccttgtt

SEQ ID NO: 1888148 - DNA, 15 bp, Homo sapiens
tcaatatccttgtta

SEQ ID NO: 1888149 - DNA, 15 bp, Homo sapiens
caatatccttgttaa

SEQ ID NO: 1888150 - DNA, 15 bp, Homo sapiens
aatatccttgttaat

SEQ ID NO: 1888151 - DNA, 15 bp, Homo sapiens
atatccttgttaatt

SEQ ID NO: 1888152 - DNA, 15 bp, Homo sapiens
tatccttgttaattt

SEQ ID NO: 1888153 - DNA, 15 bp, Homo sapiens
atccttgttaatttt

SEQ ID NO: 1888154 - DNA, 15 bp, Homo sapiens
tccttgttaattttc

SEQ ID NO: 1888155 - DNA, 15 bp, Homo sapiens
ccttgttaattttct

SEQ ID NO: 1888156 - DNA, 15 bp, Homo sapiens
cttgttaattttctg

SEQ ID NO: 1888157 - DNA, 15 bp, Homo sapiens
ttgttaattttctgt

SEQ ID NO: 1888158 - DNA, 15 bp, Homo sapiens
tgttaattttctgtc

SEQ ID NO: 1888159 - DNA, 15 bp, Homo sapiens
gttaattttctgtct

SEQ ID NO: 1888160 - DNA, 15 bp, Homo sapiens
ttaattttctgtctc

SEQ ID NO: 1888161 - DNA, 15 bp, Homo sapiens
taattttctgtctcg

SEQ ID NO: 1888162 - DNA, 15 bp, Homo sapiens
aattttctgtctcga

SEQ ID NO: 1888163 - DNA, 15 bp, Homo sapiens
attttctgtctcgat

SEQ ID NO: 1888164 - DNA, 15 bp, Homo sapiens
ttttctgtctcgatg

SEQ ID NO: 1888165 - DNA, 15 bp, Homo sapiens
tttctgtctcgatga

SEQ ID NO: 1888166 - DNA, 15 bp, Homo sapiens
ttctgtctcgatgat

SEQ ID NO: 1888167 - DNA, 15 bp, Homo sapiens
tctgtctcgatgatc

SEQ ID NO: 1888168 - DNA, 15 bp, Homo sapiens
ctgtctcgatgatct

SEQ ID NO: 1888169 - DNA, 15 bp, Homo sapiens
tgtctcgatgatctg

SEQ ID NO: 1888170 - DNA, 15 bp, Homo sapiens
gtctcgatgatctgt

SEQ ID NO: 1888171 - DNA, 15 bp, Homo sapiens
tctcgatgatctgtc

SEQ ID NO: 1888172 - DNA, 15 bp, Homo sapiens
ctcgatgatctgtct

SEQ ID NO: 1888173 - DNA, 15 bp, Homo sapiens
tcgatgatctgtcta

SEQ ID NO: 1888174 - DNA, 15 bp, Homo sapiens
cgatgatctgtctaa

SEQ ID NO: 1888175 - DNA, 15 bp, Homo sapiens
gatgatctgtctaat

SEQ ID NO: 1888176 - DNA, 15 bp, Homo sapiens
atgatctgtctaata

SEQ ID NO: 1888177 - DNA, 15 bp, Homo sapiens
tgatctgtctaatat

SEQ ID NO: 1888178 - DNA, 15 bp, Homo sapiens
gatctgtctaatatt

SEQ ID NO: 1888179 - DNA, 15 bp, Homo sapiens
atctgtctaatattg

SEQ ID NO: 1888180 - DNA, 15 bp, Homo sapiens
tctgtctaatattga

SEQ ID NO: 1888181 - DNA, 15 bp, Homo sapiens
ctgtctaatattgac

SEQ ID NO: 1888182 - DNA, 15 bp, Homo sapiens
tgtctaatattgaca

SEQ ID NO: 1888183 - DNA, 15 bp, Homo sapiens
gtctaatattgacag

SEQ ID NO: 1888184 - DNA, 15 bp, Homo sapiens
tctaatattgacagt

SEQ ID NO: 1888185 - DNA, 15 bp, Homo sapiens
ctaatattgacagtg

SEQ ID NO: 1888186 - DNA, 15 bp, Homo sapiens
taatattgacagtgg

SEQ ID NO: 1888187 - DNA, 15 bp, Homo sapiens
aatattgacagtggg

SEQ ID NO: 1888188 - DNA, 15 bp, Homo sapiens
atattgacagtgggg

SEQ ID NO: 1888189 - DNA, 15 bp, Homo sapiens
tattgacagtggggt

SEQ ID NO: 1888190 - DNA, 15 bp, Homo sapiens
attgacagtggggtg

SEQ ID NO: 1888191 - DNA, 15 bp, Homo sapiens
ttgacagtggggtgt

SEQ ID NO: 1888192 - DNA, 15 bp, Homo sapiens
tgacagtggggtgtt

SEQ ID NO: 1888193 - DNA, 15 bp, Homo sapiens
gacagtggggtgtta

SEQ ID NO: 1888194 - DNA, 15 bp, Homo sapiens
acagtggggtgttaa

SEQ ID NO: 1888195 - DNA, 15 bp, Homo sapiens
cagtggggtgttaaa

SEQ ID NO: 1888196 - DNA, 15 bp, Homo sapiens
agtggggtgttaaag

SEQ ID NO: 1888197 - DNA, 15 bp, Homo sapiens
gtggggtgttaaagt

SEQ ID NO: 1888198 - DNA, 15 bp, Homo sapiens
tggggtgttaaagtc

SEQ ID NO: 1888199 - DNA, 15 bp, Homo sapiens
ggggtgttaaagtct

SEQ ID NO: 1888200 - DNA, 15 bp, Homo sapiens
gggtgttaaagtctc

SEQ ID NO: 1888201 - DNA, 15 bp, Homo sapiens
ggtgttaaagtctcc

SEQ ID NO: 1888202 - DNA, 15 bp, Homo sapiens
gtgttaaagtctcct

SEQ ID NO: 1888203 - DNA, 15 bp, Homo sapiens
tgttaaagtctccta

SEQ ID NO: 1888204 - DNA, 15 bp, Homo sapiens
gttaaagtctcctac

SEQ ID NO: 1888205 - DNA, 15 bp, Homo sapiens
ttaaagtctcctact

SEQ ID NO: 1888206 - DNA, 15 bp, Homo sapiens
taaagtctcctacta

SEQ ID NO: 1888207 - DNA, 15 bp, Homo sapiens
aaagtctcctactat

SEQ ID NO: 1888208 - DNA, 15 bp, Homo sapiens
aagtctcctactatt

SEQ ID NO: 1888209 - DNA, 15 bp, Homo sapiens
agtctcctactatta

SEQ ID NO: 1888210 - DNA, 15 bp, Homo sapiens
gtctcctactattat

SEQ ID NO: 1888211 - DNA, 15 bp, Homo sapiens
tctcctactattatt

SEQ ID NO: 1888212 - DNA, 15 bp, Homo sapiens
ctcctactattatta

SEQ ID NO: 1888213 - DNA, 15 bp, Homo sapiens
tcctactattattat

SEQ ID NO: 1888214 - DNA, 15 bp, Homo sapiens
cctactattattatg

SEQ ID NO: 1888215 - DNA, 15 bp, Homo sapiens
ctactattattatgt

SEQ ID NO: 1888216 - DNA, 15 bp, Homo sapiens
tactattattatgtg

SEQ ID NO: 1888217 - DNA, 15 bp, Homo sapiens
actattattatgtgg

SEQ ID NO: 1888218 - DNA, 15 bp, Homo sapiens
ctattattatgtggg

SEQ ID NO: 1888219 - DNA, 15 bp, Homo sapiens
tattattatgtggga

SEQ ID NO: 1888220 - DNA, 15 bp, Homo sapiens
attattatgtgggag

SEQ ID NO: 1888221 - DNA, 15 bp, Homo sapiens
ttattatgtgggagt

SEQ ID NO: 1888222 - DNA, 15 bp, Homo sapiens
tattatgtgggagtc

SEQ ID NO: 1888223 - DNA, 15 bp, Homo sapiens
attatgtgggagtct

SEQ ID NO: 1888224 - DNA, 15 bp, Homo sapiens
ttatgtgggagtcta

SEQ ID NO: 1888225 - DNA, 15 bp, Homo sapiens
tatgtgggagtctac

SEQ ID NO: 1888226 - DNA, 15 bp, Homo sapiens
atgtgggagtctacg

SEQ ID NO: 1888227 - DNA, 15 bp, Homo sapiens
tgtgggagtctacgt

SEQ ID NO: 1888228 - DNA, 15 bp, Homo sapiens
gtgggagtctacgtc

SEQ ID NO: 1888229 - DNA, 15 bp, Homo sapiens
tgggagtctacgtct

SEQ ID NO: 1888230 - DNA, 15 bp, Homo sapiens
gggagtctacgtctt

SEQ ID NO: 1888231 - DNA, 15 bp, Homo sapiens
ggagtctacgtcttt

SEQ ID NO: 1888232 - DNA, 15 bp, Homo sapiens
gagtctacgtctttt

SEQ ID NO: 1888233 - DNA, 15 bp, Homo sapiens
agtctacgtcttttt

SEQ ID NO: 1888234 - DNA, 15 bp, Homo sapiens
gtctacgtctttttg

SEQ ID NO: 1888235 - DNA, 15 bp, Homo sapiens
tctacgtctttttgt

SEQ ID NO: 1888236 - DNA, 15 bp, Homo sapiens
ctacgtctttttgta

SEQ ID NO: 1888237 - DNA, 15 bp, Homo sapiens
tacgtctttttgtag

SEQ ID NO: 1888238 - DNA, 15 bp, Homo sapiens
acgtctttttgtagg

SEQ ID NO: 1888239 - DNA, 15 bp, Homo sapiens
cgtctttttgtaggt

SEQ ID NO: 1888240 - DNA, 15 bp, Homo sapiens
gtctttttgtaggtg

SEQ ID NO: 1888241 - DNA, 15 bp, Homo sapiens
tctttttgtaggtgt

SEQ ID NO: 1888242 - DNA, 15 bp, Homo sapiens
ctttttgtaggtgtc

SEQ ID NO: 1888243 - DNA, 15 bp, Homo sapiens
tttttgtaggtgtct

SEQ ID NO: 1888244 - DNA, 15 bp, Homo sapiens
ttttgtaggtgtcta

SEQ ID NO: 1888245 - DNA, 15 bp, Homo sapiens
tttgtaggtgtctaa

SEQ ID NO: 1888246 - DNA, 15 bp, Homo sapiens
ttgtaggtgtctaag

SEQ ID NO: 1888247 - DNA, 15 bp, Homo sapiens
tgtaggtgtctaaga

SEQ ID NO: 1888248 - DNA, 15 bp, Homo sapiens
gtaggtgtctaagat

SEQ ID NO: 1888249 - DNA, 15 bp, Homo sapiens
taggtgtctaagatc

SEQ ID NO: 1888250 - DNA, 15 bp, Homo sapiens
aggtgtctaagatct

SEQ ID NO: 1888251 - DNA, 15 bp, Homo sapiens
ggtgtctaagatctt

SEQ ID NO: 1888252 - DNA, 15 bp, Homo sapiens
gtgtctaagatcttg

SEQ ID NO: 1888253 - DNA, 15 bp, Homo sapiens
tgtctaagatcttgc

SEQ ID NO: 1888254 - DNA, 15 bp, Homo sapiens
gtctaagatcttgct

SEQ ID NO: 1888255 - DNA, 15 bp, Homo sapiens
tctaagatcttgctt

SEQ ID NO: 1888256 - DNA, 15 bp, Homo sapiens
ctaagatcttgcttt

SEQ ID NO: 1888257 - DNA, 15 bp, Homo sapiens
taagatcttgcttta

SEQ ID NO: 1888258 - DNA, 15 bp, Homo sapiens
aagatcttgctttat

SEQ ID NO: 1888259 - DNA, 15 bp, Homo sapiens
agatcttgctttatg

SEQ ID NO: 1888260 - DNA, 15 bp, Homo sapiens
gatcttgctttatga

SEQ ID NO: 1888261 - DNA, 15 bp, Homo sapiens
atcttgctttatgaa

SEQ ID NO: 1888262 - DNA, 15 bp, Homo sapiens
tcttgctttatgaat

SEQ ID NO: 1888263 - DNA, 15 bp, Homo sapiens
cttgctttatgaatc

SEQ ID NO: 1888264 - DNA, 15 bp, Homo sapiens
ttgctttatgaatct

SEQ ID NO: 1888265 - DNA, 15 bp, Homo sapiens
tgctttatgaatctg

SEQ ID NO: 1888266 - DNA, 15 bp, Homo sapiens
gctttatgaatctgg

SEQ ID NO: 1888267 - DNA, 15 bp, Homo sapiens
ctttatgaatctggg

SEQ ID NO: 1888268 - DNA, 15 bp, Homo sapiens
tttatgaatctgggt

SEQ ID NO: 1888269 - DNA, 15 bp, Homo sapiens
ttatgaatctgggta

SEQ ID NO: 1888270 - DNA, 15 bp, Homo sapiens
tatgaatctgggtac

SEQ ID NO: 1888271 - DNA, 15 bp, Homo sapiens
atgaatctgggtact

SEQ ID NO: 1888272 - DNA, 15 bp, Homo sapiens
tgaatctgggtactc

SEQ ID NO: 1888273 - DNA, 15 bp, Homo sapiens
gaatctgggtactcc

SEQ ID NO: 1888274 - DNA, 15 bp, Homo sapiens
aatctgggtactcct

SEQ ID NO: 1888275 - DNA, 15 bp, Homo sapiens
atctgggtactcctt

SEQ ID NO: 1888276 - DNA, 15 bp, Homo sapiens
tctgggtactccttc

SEQ ID NO: 1888277 - DNA, 15 bp, Homo sapiens
ctgggtactccttct

SEQ ID NO: 1888278 - DNA, 15 bp, Homo sapiens
tgggtactccttctg

SEQ ID NO: 1888279 - DNA, 15 bp, Homo sapiens
gggtactccttctga

SEQ ID NO: 1888280 - DNA, 15 bp, Homo sapiens
ggtactccttctgaa

SEQ ID NO: 1888281 - DNA, 15 bp, Homo sapiens
gtactccttctgaac

SEQ ID NO: 1888282 - DNA, 15 bp, Homo sapiens
tactccttctgaact

SEQ ID NO: 1888283 - DNA, 15 bp, Homo sapiens
actccttctgaacta

SEQ ID NO: 1888284 - DNA, 15 bp, Homo sapiens
ctccttctgaactac

SEQ ID NO: 1888285 - DNA, 15 bp, Homo sapiens
tccttctgaactaca

SEQ ID NO: 1888286 - DNA, 15 bp, Homo sapiens
ccttctgaactacag

SEQ ID NO: 1888287 - DNA, 15 bp, Homo sapiens
cttctgaactacagg

SEQ ID NO: 1888288 - DNA, 15 bp, Homo sapiens
ttctgaactacaggg

SEQ ID NO: 1888289 - DNA, 15 bp, Homo sapiens
tctgaactacaggga

SEQ ID NO: 1888290 - DNA, 15 bp, Homo sapiens
ctgaactacagggac

SEQ ID NO: 1888291 - DNA, 15 bp, Homo sapiens
tgaactacagggact

SEQ ID NO: 1888292 - DNA, 15 bp, Homo sapiens
gaactacagggactt

SEQ ID NO: 1888293 - DNA, 15 bp, Homo sapiens
aactacagggacttc

SEQ ID NO: 1888294 - DNA, 15 bp, Homo sapiens
actacagggacttct

SEQ ID NO: 1888295 - DNA, 15 bp, Homo sapiens
ctacagggacttctc

SEQ ID NO: 1888296 - DNA, 15 bp, Homo sapiens
tacagggacttctcc

SEQ ID NO: 1888297 - DNA, 15 bp, Homo sapiens
acagggacttctccc

SEQ ID NO: 1888298 - DNA, 15 bp, Homo sapiens
cagggacttctccct

SEQ ID NO: 1888299 - DNA, 15 bp, Homo sapiens
agggacttctccctc

SEQ ID NO: 1888300 - DNA, 15 bp, Homo sapiens
gggacttctccctca

SEQ ID NO: 1888301 - DNA, 15 bp, Homo sapiens
ggacttctccctcac

SEQ ID NO: 1888302 - DNA, 15 bp, Homo sapiens
gacttctccctcact

SEQ ID NO: 1888303 - DNA, 15 bp, Homo sapiens
acttctccctcactc

SEQ ID NO: 1888304 - DNA, 15 bp, Homo sapiens
cttctccctcactca

SEQ ID NO: 1888305 - DNA, 15 bp, Homo sapiens
ttctccctcactcat

SEQ ID NO: 1888306 - DNA, 15 bp, Homo sapiens
tctccctcactcatt

SEQ ID NO: 1888307 - DNA, 15 bp, Homo sapiens
ctccctcactcattt

SEQ ID NO: 1888308 - DNA, 15 bp, Homo sapiens
tccctcactcatttc

SEQ ID NO: 1888309 - DNA, 15 bp, Homo sapiens
ccctcactcatttca

SEQ ID NO: 1888310 - DNA, 15 bp, Homo sapiens
cctcactcatttcat

SEQ ID NO: 1888311 - DNA, 15 bp, Homo sapiens
ctcactcatttcatg

SEQ ID NO: 1888312 - DNA, 15 bp, Homo sapiens
tcactcatttcatga

SEQ ID NO: 1888313 - DNA, 15 bp, Homo sapiens
cactcatttcatgag

SEQ ID NO: 1888314 - DNA, 15 bp, Homo sapiens
actcatttcatgagg

SEQ ID NO: 1888315 - DNA, 15 bp, Homo sapiens
ctcatttcatgaggc

SEQ ID NO: 1888316 - DNA, 15 bp, Homo sapiens
tcatttcatgaggcc

SEQ ID NO: 1888317 - DNA, 15 bp, Homo sapiens
catttcatgaggcca

SEQ ID NO: 1888318 - DNA, 15 bp, Homo sapiens
atttcatgaggccag

SEQ ID NO: 1888319 - DNA, 15 bp, Homo sapiens
tttcatgaggccagc

SEQ ID NO: 1888320 - DNA, 15 bp, Homo sapiens
ttcatgaggccagca

SEQ ID NO: 1888321 - DNA, 15 bp, Homo sapiens
tcatgaggccagcat

SEQ ID NO: 1888322 - DNA, 15 bp, Homo sapiens
catgaggccagcatc

SEQ ID NO: 1888323 - DNA, 15 bp, Homo sapiens
atgaggccagcatca

SEQ ID NO: 1888324 - DNA, 15 bp, Homo sapiens
tgaggccagcatcat

SEQ ID NO: 1888325 - DNA, 15 bp, Homo sapiens
gaggccagcatcatc

SEQ ID NO: 1888326 - DNA, 15 bp, Homo sapiens
aggccagcatcatcc

SEQ ID NO: 1888327 - DNA, 15 bp, Homo sapiens
ggccagcatcatcct

SEQ ID NO: 1888328 - DNA, 15 bp, Homo sapiens
gccagcatcatcctg

SEQ ID NO: 1888329 - DNA, 15 bp, Homo sapiens
catcatcctgatacc

SEQ ID NO: 1888330 - DNA, 15 bp, Homo sapiens
atcatcctgatacca

SEQ ID NO: 1888331 - DNA, 15 bp, Homo sapiens
tcatcctgataccaa

SEQ ID NO: 1888332 - DNA, 15 bp, Homo sapiens
catcctgataccaaa

SEQ ID NO: 1888333 - DNA, 15 bp, Homo sapiens
atcctgataccaaaa

SEQ ID NO: 1888334 - DNA, 15 bp, Homo sapiens
tcctgataccaaaac

SEQ ID NO: 1888335 - DNA, 15 bp, Homo sapiens
cctgataccaaaacc

SEQ ID NO: 1888336 - DNA, 15 bp, Homo sapiens
ctgataccaaaacct

SEQ ID NO: 1888337 - DNA, 15 bp, Homo sapiens
tgataccaaaacctg

SEQ ID NO: 1888338 - DNA, 15 bp, Homo sapiens
gataccaaaacctgg

SEQ ID NO: 1888339 - DNA, 15 bp, Homo sapiens
ataccaaaacctggc

SEQ ID NO: 1888340 - DNA, 15 bp, Homo sapiens
taccaaaacctggca

SEQ ID NO: 1888341 - DNA, 15 bp, Homo sapiens
accaaaacctggcag

SEQ ID NO: 1888342 - DNA, 15 bp, Homo sapiens
ccaaaacctggcaga

SEQ ID NO: 1888343 - DNA, 15 bp, Homo sapiens
caaaacctggcagag

SEQ ID NO: 1888344 - DNA, 15 bp, Homo sapiens
aaaacctggcagaga

SEQ ID NO: 1888345 - DNA, 15 bp, Homo sapiens
aaacctggcagagac

SEQ ID NO: 1888346 - DNA, 15 bp, Homo sapiens
aacctggcagagaca

SEQ ID NO: 1888347 - DNA, 15 bp, Homo sapiens
acctggcagagacac

SEQ ID NO: 1888348 - DNA, 15 bp, Homo sapiens
cctggcagagacaca

SEQ ID NO: 1888349 - DNA, 15 bp, Homo sapiens
ctggcagagacacaa

SEQ ID NO: 1888350 - DNA, 15 bp, Homo sapiens
tggcagagacacaac

SEQ ID NO: 1888351 - DNA, 15 bp, Homo sapiens
ggcagagacacaaca

SEQ ID NO: 1888352 - DNA, 15 bp, Homo sapiens
gcagagacacaacaa

SEQ ID NO: 1888353 - DNA, 15 bp, Homo sapiens
cagagacacaacaac

SEQ ID NO: 1888354 - DNA, 15 bp, Homo sapiens
agagacacaacaaca

SEQ ID NO: 1888355 - DNA, 15 bp, Homo sapiens
gagacacaacaacaa

SEQ ID NO: 1888356 - DNA, 15 bp, Homo sapiens
agacacaacaacaaa

SEQ ID NO: 1888357 - DNA, 15 bp, Homo sapiens
gacacaacaacaaaa

SEQ ID NO: 1888358 - DNA, 15 bp, Homo sapiens
acacaacaacaaaaa

SEQ ID NO: 1888359 - DNA, 15 bp, Homo sapiens
cacaacaacaaaaaa

SEQ ID NO: 1888360 - DNA, 15 bp, Homo sapiens
acaacaaaaaaaaat

SEQ ID NO: 1888361 - DNA, 15 bp, Homo sapiens
caacaaaaaaaaatt

SEQ ID NO: 1888362 - DNA, 15 bp, Homo sapiens
aacaaaaaaaaattt

SEQ ID NO: 1888363 - DNA, 15 bp, Homo sapiens
acaaaaaaaaatttc

SEQ ID NO: 1888364 - DNA, 15 bp, Homo sapiens
caaaaaaaaatttca

SEQ ID NO: 1888365 - DNA, 15 bp, Homo sapiens
aaaaaaaaatttcag

SEQ ID NO: 1888366 - DNA, 15 bp, Homo sapiens
aaaaaaaatttcagg

SEQ ID NO: 1888367 - DNA, 15 bp, Homo sapiens
aaaaaaatttcaggc

SEQ ID NO: 1888368 - DNA, 15 bp, Homo sapiens
aaaaaatttcaggcc

SEQ ID NO: 1888369 - DNA, 15 bp, Homo sapiens
aaaaatttcaggcca

SEQ ID NO: 1888370 - DNA, 15 bp, Homo sapiens
ttcaggccaatatcc

SEQ ID NO: 1888371 - DNA, 15 bp, Homo sapiens
tcaggccaatatccc

SEQ ID NO: 1888372 - DNA, 15 bp, Homo sapiens
caggccaatatccct

SEQ ID NO: 1888373 - DNA, 15 bp, Homo sapiens
aggccaatatccctg

SEQ ID NO: 1888374 - DNA, 15 bp, Homo sapiens
ggccaatatccctga

SEQ ID NO: 1888375 - DNA, 15 bp, Homo sapiens
gccaatatccctgat

SEQ ID NO: 1888376 - DNA, 15 bp, Homo sapiens
ccaatatccctgatg

SEQ ID NO: 1888377 - DNA, 15 bp, Homo sapiens
caatatccctgatga

SEQ ID NO: 1888378 - DNA, 15 bp, Homo sapiens
aatatccctgatgaa

SEQ ID NO: 1888379 - DNA, 15 bp, Homo sapiens
atatccctgatgaac

SEQ ID NO: 1888380 - DNA, 15 bp, Homo sapiens
tatccctgatgaaca

SEQ ID NO: 1888381 - DNA, 15 bp, Homo sapiens
atccctgatgaacat

SEQ ID NO: 1888382 - DNA, 15 bp, Homo sapiens
tccctgatgaacatt

SEQ ID NO: 1888383 - DNA, 15 bp, Homo sapiens
ccctgatgaacattg

SEQ ID NO: 1888384 - DNA, 15 bp, Homo sapiens
gatgaacattgatgc

SEQ ID NO: 1888385 - DNA, 15 bp, Homo sapiens
atgaacattgatgcg

SEQ ID NO: 1888386 - DNA, 15 bp, Homo sapiens
tgaacattgatgcga

SEQ ID NO: 1888387 - DNA, 15 bp, Homo sapiens
gaacattgatgcgaa

SEQ ID NO: 1888388 - DNA, 15 bp, Homo sapiens
aacattgatgcgaaa

SEQ ID NO: 1888389 - DNA, 15 bp, Homo sapiens
acattgatgcgaaaa

SEQ ID NO: 1888390 - DNA, 15 bp, Homo sapiens
cattgatgcgaaaat

SEQ ID NO: 1888391 - DNA, 15 bp, Homo sapiens
attgatgcgaaaatc

SEQ ID NO: 1888392 - DNA, 15 bp, Homo sapiens
ttgatgcgaaaatcc

SEQ ID NO: 1888393 - DNA, 15 bp, Homo sapiens
tgatgcgaaaatcct

SEQ ID NO: 1888394 - DNA, 15 bp, Homo sapiens
gatgcgaaaatcctc

SEQ ID NO: 1888395 - DNA, 15 bp, Homo sapiens
atgcgaaaatcctca

SEQ ID NO: 1888396 - DNA, 15 bp, Homo sapiens
tgcgaaaatcctcaa

SEQ ID NO: 1888397 - DNA, 15 bp, Homo sapiens
gcgaaaatcctcaat

SEQ ID NO: 1888398 - DNA, 15 bp, Homo sapiens
cgaaaatcctcaata

SEQ ID NO: 1888399 - DNA, 15 bp, Homo sapiens
atcctcaataaaata

SEQ ID NO: 1888400 - DNA, 15 bp, Homo sapiens
tcctcaataaaatac

SEQ ID NO: 1888401 - DNA, 15 bp, Homo sapiens
cctcaataaaatact

SEQ ID NO: 1888402 - DNA, 15 bp, Homo sapiens
ctcaataaaatactg

SEQ ID NO: 1888403 - DNA, 15 bp, Homo sapiens
tcaataaaatactgg

SEQ ID NO: 1888404 - DNA, 15 bp, Homo sapiens
caataaaatactggc

SEQ ID NO: 1888405 - DNA, 15 bp, Homo sapiens
aataaaatactggca

SEQ ID NO: 1888406 - DNA, 15 bp, Homo sapiens
ataaaatactggcaa

SEQ ID NO: 1888407 - DNA, 15 bp, Homo sapiens
accgaatccagcagc

SEQ ID NO: 1888408 - DNA, 15 bp, Homo sapiens
ccgaatccagcagca

SEQ ID NO: 1888409 - DNA, 15 bp, Homo sapiens
cgaatccagcagcac

SEQ ID NO: 1888410 - DNA, 15 bp, Homo sapiens
gaatccagcagcaca

SEQ ID NO: 1888411 - DNA, 15 bp, Homo sapiens
aatccagcagcacat

SEQ ID NO: 1888412 - DNA, 15 bp, Homo sapiens
atccagcagcacatc

SEQ ID NO: 1888413 - DNA, 15 bp, Homo sapiens
tccagcagcacatca

SEQ ID NO: 1888414 - DNA, 15 bp, Homo sapiens
ccagcagcacatcaa

SEQ ID NO: 1888415 - DNA, 15 bp, Homo sapiens
cagcagcacatcaaa

SEQ ID NO: 1888416 - DNA, 15 bp, Homo sapiens
agcagcacatcaaaa

SEQ ID NO: 1888417 - DNA, 15 bp, Homo sapiens
gcagcacatcaaaaa

SEQ ID NO: 1888418 - DNA, 15 bp, Homo sapiens
agcacatcaaaaaga

SEQ ID NO: 1888419 - DNA, 15 bp, Homo sapiens
gcacatcaaaaagaa

SEQ ID NO: 1888420 - DNA, 15 bp, Homo sapiens
cacatcaaaaagaat

SEQ ID NO: 1888421 - DNA, 15 bp, Homo sapiens
acatcaaaaagaata

SEQ ID NO: 1888422 - DNA, 15 bp, Homo sapiens
catcaaaaagaatat

SEQ ID NO: 1888423 - DNA, 15 bp, Homo sapiens
atcaaaaagaatatc

SEQ ID NO: 1888424 - DNA, 15 bp, Homo sapiens
tcaaaaagaatatcc

SEQ ID NO: 1888425 - DNA, 15 bp, Homo sapiens
caaaaagaatatcca

SEQ ID NO: 1888426 - DNA, 15 bp, Homo sapiens
aaaaagaatatccac

SEQ ID NO: 1888427 - DNA, 15 bp, Homo sapiens
aaaagaatatccacc

SEQ ID NO: 1888428 - DNA, 15 bp, Homo sapiens
aaagaatatccaccg

SEQ ID NO: 1888429 - DNA, 15 bp, Homo sapiens
aagaatatccaccgt

SEQ ID NO: 1888430 - DNA, 15 bp, Homo sapiens
agaatatccaccgtg

SEQ ID NO: 1888431 - DNA, 15 bp, Homo sapiens
gaatatccaccgtga

SEQ ID NO: 1888432 - DNA, 15 bp, Homo sapiens
aatatccaccgtgat

SEQ ID NO: 1888433 - DNA, 15 bp, Homo sapiens
atatccaccgtgatc

SEQ ID NO: 1888434 - DNA, 15 bp, Homo sapiens
tatccaccgtgatca

SEQ ID NO: 1888435 - DNA, 15 bp, Homo sapiens
atccaccgtgatcac

SEQ ID NO: 1888436 - DNA, 15 bp, Homo sapiens
tccaccgtgatcacg

SEQ ID NO: 1888437 - DNA, 15 bp, Homo sapiens
ccaccgtgatcacgt

SEQ ID NO: 1888438 - DNA, 15 bp, Homo sapiens
caccgtgatcacgtt

SEQ ID NO: 1888439 - DNA, 15 bp, Homo sapiens
accgtgatcacgttg

SEQ ID NO: 1888440 - DNA, 15 bp, Homo sapiens
ccgtgatcacgttgc

SEQ ID NO: 1888441 - DNA, 15 bp, Homo sapiens
cgtgatcacgttgct

SEQ ID NO: 1888442 - DNA, 15 bp, Homo sapiens
gtgatcacgttgctt

SEQ ID NO: 1888443 - DNA, 15 bp, Homo sapiens
tgatcacgttgcttt

SEQ ID NO: 1888444 - DNA, 15 bp, Homo sapiens
gatcacgttgctttc

SEQ ID NO: 1888445 - DNA, 15 bp, Homo sapiens
atcacgttgctttca

SEQ ID NO: 1888446 - DNA, 15 bp, Homo sapiens
tcacgttgctttcat

SEQ ID NO: 1888447 - DNA, 15 bp, Homo sapiens
cacgttgctttcatc

SEQ ID NO: 1888448 - DNA, 15 bp, Homo sapiens
acgttgctttcatcc

SEQ ID NO: 1888449 - DNA, 15 bp, Homo sapiens
cgttgctttcatcca

SEQ ID NO: 1888450 - DNA, 15 bp, Homo sapiens
gttgctttcatccat

SEQ ID NO: 1888451 - DNA, 15 bp, Homo sapiens
ttgctttcatccata

SEQ ID NO: 1888452 - DNA, 15 bp, Homo sapiens
tgctttcatccatag

SEQ ID NO: 1888453 - DNA, 15 bp, Homo sapiens
gctttcatccatagg

SEQ ID NO: 1888454 - DNA, 15 bp, Homo sapiens
ctttcatccatagga

SEQ ID NO: 1888455 - DNA, 15 bp, Homo sapiens
tttcatccataggat

SEQ ID NO: 1888456 - DNA, 15 bp, Homo sapiens
ttcatccataggatg

SEQ ID NO: 1888457 - DNA, 15 bp, Homo sapiens
tcatccataggatgc

SEQ ID NO: 1888458 - DNA, 15 bp, Homo sapiens
catccataggatgca

SEQ ID NO: 1888459 - DNA, 15 bp, Homo sapiens
atccataggatgcaa

SEQ ID NO: 1888460 - DNA, 15 bp, Homo sapiens
tccataggatgcaag

SEQ ID NO: 1888461 - DNA, 15 bp, Homo sapiens
ccataggatgcaagg

SEQ ID NO: 1888462 - DNA, 15 bp, Homo sapiens
cataggatgcaaggc

SEQ ID NO: 1888463 - DNA, 15 bp, Homo sapiens
ataggatgcaaggct

SEQ ID NO: 1888464 - DNA, 15 bp, Homo sapiens
taggatgcaaggctg

SEQ ID NO: 1888465 - DNA, 15 bp, Homo sapiens
aggatgcaaggctga

SEQ ID NO: 1888466 - DNA, 15 bp, Homo sapiens
ggatgcaaggctgat

SEQ ID NO: 1888467 - DNA, 15 bp, Homo sapiens
gatgcaaggctgatt

SEQ ID NO: 1888468 - DNA, 15 bp, Homo sapiens
atgcaaggctgattc

SEQ ID NO: 1888469 - DNA, 15 bp, Homo sapiens
tgcaaggctgattca

SEQ ID NO: 1888470 - DNA, 15 bp, Homo sapiens
gcaaggctgattcaa

SEQ ID NO: 1888471 - DNA, 15 bp, Homo sapiens
caaggctgattcaac

SEQ ID NO: 1888472 - DNA, 15 bp, Homo sapiens
aaggctgattcaaca

SEQ ID NO: 1888473 - DNA, 15 bp, Homo sapiens
aggctgattcaacat

SEQ ID NO: 1888474 - DNA, 15 bp, Homo sapiens
ggctgattcaacata

SEQ ID NO: 1888475 - DNA, 15 bp, Homo sapiens
gctgattcaacatag

SEQ ID NO: 1888476 - DNA, 15 bp, Homo sapiens
ctgattcaacatagg

SEQ ID NO: 1888477 - DNA, 15 bp, Homo sapiens
tgattcaacataggc

SEQ ID NO: 1888478 - DNA, 15 bp, Homo sapiens
gattcaacataggca

SEQ ID NO: 1888479 - DNA, 15 bp, Homo sapiens
attcaacataggcat

SEQ ID NO: 1888480 - DNA, 15 bp, Homo sapiens
ttcaacataggcata

SEQ ID NO: 1888481 - DNA, 15 bp, Homo sapiens
tcaacataggcatat

SEQ ID NO: 1888482 - DNA, 15 bp, Homo sapiens
caacataggcatatc

SEQ ID NO: 1888483 - DNA, 15 bp, Homo sapiens
aacataggcatatca

SEQ ID NO: 1888484 - DNA, 15 bp, Homo sapiens
acataggcatatcaa

SEQ ID NO: 1888485 - DNA, 15 bp, Homo sapiens
cataggcatatcaat

SEQ ID NO: 1888486 - DNA, 15 bp, Homo sapiens
ataggcatatcaata

SEQ ID NO: 1888487 - DNA, 15 bp, Homo sapiens
taggcatatcaatat

SEQ ID NO: 1888488 - DNA, 15 bp, Homo sapiens
aggcatatcaatata

SEQ ID NO: 1888489 - DNA, 15 bp, Homo sapiens
ggcatatcaatatac

SEQ ID NO: 1888490 - DNA, 15 bp, Homo sapiens
gcatatcaatatacg

SEQ ID NO: 1888491 - DNA, 15 bp, Homo sapiens
catatcaatatacgt

SEQ ID NO: 1888492 - DNA, 15 bp, Homo sapiens
atatcaatatacgta

SEQ ID NO: 1888493 - DNA, 15 bp, Homo sapiens
tatcaatatacgtaa

SEQ ID NO: 1888494 - DNA, 15 bp, Homo sapiens
atcaatatacgtaat

SEQ ID NO: 1888495 - DNA, 15 bp, Homo sapiens
tcaatatacgtaatc

SEQ ID NO: 1888496 - DNA, 15 bp, Homo sapiens
caatatacgtaatcc

SEQ ID NO: 1888497 - DNA, 15 bp, Homo sapiens
aatatacgtaatcca

SEQ ID NO: 1888498 - DNA, 15 bp, Homo sapiens
atatacgtaatccat

SEQ ID NO: 1888499 - DNA, 15 bp, Homo sapiens
tatacgtaatccatc

SEQ ID NO: 1888500 - DNA, 15 bp, Homo sapiens
atacgtaatccatca

SEQ ID NO: 1888501 - DNA, 15 bp, Homo sapiens
tacgtaatccatcac

SEQ ID NO: 1888502 - DNA, 15 bp, Homo sapiens
acgtaatccatcaca

SEQ ID NO: 1888503 - DNA, 15 bp, Homo sapiens
cgtaatccatcacat

SEQ ID NO: 1888504 - DNA, 15 bp, Homo sapiens
aaacagaaccaatgg

SEQ ID NO: 1888505 - DNA, 15 bp, Homo sapiens
aacagaaccaatggc

SEQ ID NO: 1888506 - DNA, 15 bp, Homo sapiens
acagaaccaatggca

SEQ ID NO: 1888507 - DNA, 15 bp, Homo sapiens
cagaaccaatggcaa

SEQ ID NO: 1888508 - DNA, 15 bp, Homo sapiens
agaaccaatggcaaa

SEQ ID NO: 1888509 - DNA, 15 bp, Homo sapiens
gaaccaatggcaaaa

SEQ ID NO: 1888510 - DNA, 15 bp, Homo sapiens
aaccaatggcaaaaa

SEQ ID NO: 1888511 - DNA, 15 bp, Homo sapiens
accaatggcaaaaac

SEQ ID NO: 1888512 - DNA, 15 bp, Homo sapiens
ccaatggcaaaaacc

SEQ ID NO: 1888513 - DNA, 15 bp, Homo sapiens
caatggcaaaaacca

SEQ ID NO: 1888514 - DNA, 15 bp, Homo sapiens
aatggcaaaaaccac

SEQ ID NO: 1888515 - DNA, 15 bp, Homo sapiens
atggcaaaaaccaca

SEQ ID NO: 1888516 - DNA, 15 bp, Homo sapiens
tggcaaaaaccacac

SEQ ID NO: 1888517 - DNA, 15 bp, Homo sapiens
ggcaaaaaccacacg

SEQ ID NO: 1888518 - DNA, 15 bp, Homo sapiens
gcaaaaaccacacga

SEQ ID NO: 1888519 - DNA, 15 bp, Homo sapiens
gcagaaaaggccttt

SEQ ID NO: 1888520 - DNA, 15 bp, Homo sapiens
cagaaaaggcctttg

SEQ ID NO: 1888521 - DNA, 15 bp, Homo sapiens
cctttgataaaattt

SEQ ID NO: 1888522 - DNA, 15 bp, Homo sapiens
ctttgataaaattta

SEQ ID NO: 1888523 - DNA, 15 bp, Homo sapiens
tttgataaaatttaa

SEQ ID NO: 1888524 - DNA, 15 bp, Homo sapiens
ttgataaaatttaac

SEQ ID NO: 1888525 - DNA, 15 bp, Homo sapiens
tgataaaatttaaca

SEQ ID NO: 1888526 - DNA, 15 bp, Homo sapiens
gataaaatttaacac

SEQ ID NO: 1888527 - DNA, 15 bp, Homo sapiens
ataaaatttaacacc

SEQ ID NO: 1888528 - DNA, 15 bp, Homo sapiens
taaaatttaacaccg

SEQ ID NO: 1888529 - DNA, 15 bp, Homo sapiens
aaaatttaacaccgc

SEQ ID NO: 1888530 - DNA, 15 bp, Homo sapiens
aaatttaacaccgct

SEQ ID NO: 1888531 - DNA, 15 bp, Homo sapiens
aatttaacaccgctt

SEQ ID NO: 1888532 - DNA, 15 bp, Homo sapiens
atttaacaccgcttc

SEQ ID NO: 1888533 - DNA, 15 bp, Homo sapiens
tttaacaccgcttca

SEQ ID NO: 1888534 - DNA, 15 bp, Homo sapiens
ttaacaccgcttcat

SEQ ID NO: 1888535 - DNA, 15 bp, Homo sapiens
taacaccgcttcatg

SEQ ID NO: 1888536 - DNA, 15 bp, Homo sapiens
aacaccgcttcatgc

SEQ ID NO: 1888537 - DNA, 15 bp, Homo sapiens
acaccgcttcatgct

SEQ ID NO: 1888538 - DNA, 15 bp, Homo sapiens
caccgcttcatgcta

SEQ ID NO: 1888539 - DNA, 15 bp, Homo sapiens
accgcttcatgctaa

SEQ ID NO: 1888540 - DNA, 15 bp, Homo sapiens
ccgcttcatgctaaa

SEQ ID NO: 1888541 - DNA, 15 bp, Homo sapiens
cgcttcatgctaaaa

SEQ ID NO: 1888542 - DNA, 15 bp, Homo sapiens
gcttcatgctaaaaa

SEQ ID NO: 1888543 - DNA, 15 bp, Homo sapiens
catgctaaaaactct

SEQ ID NO: 1888544 - DNA, 15 bp, Homo sapiens
atgctaaaaactctc

SEQ ID NO: 1888545 - DNA, 15 bp, Homo sapiens
tgctaaaaactctca

SEQ ID NO: 1888546 - DNA, 15 bp, Homo sapiens
gctaaaaactctcaa

SEQ ID NO: 1888547 - DNA, 15 bp, Homo sapiens
ctaaaaactctcaat

SEQ ID NO: 1888548 - DNA, 15 bp, Homo sapiens
aactaggtattgatg

SEQ ID NO: 1888549 - DNA, 15 bp, Homo sapiens
actaggtattgatgg

SEQ ID NO: 1888550 - DNA, 15 bp, Homo sapiens
ctaggtattgatgga

SEQ ID NO: 1888551 - DNA, 15 bp, Homo sapiens
taggtattgatggaa

SEQ ID NO: 1888552 - DNA, 15 bp, Homo sapiens
aggtattgatggaac

SEQ ID NO: 1888553 - DNA, 15 bp, Homo sapiens
ggtattgatggaacg

SEQ ID NO: 1888554 - DNA, 15 bp, Homo sapiens
gtattgatggaacgt

SEQ ID NO: 1888555 - DNA, 15 bp, Homo sapiens
tattgatggaacgta

SEQ ID NO: 1888556 - DNA, 15 bp, Homo sapiens
attgatggaacgtat

SEQ ID NO: 1888557 - DNA, 15 bp, Homo sapiens
ttgatggaacgtatc

SEQ ID NO: 1888558 - DNA, 15 bp, Homo sapiens
tgatggaacgtatct

SEQ ID NO: 1888559 - DNA, 15 bp, Homo sapiens
gatggaacgtatctc

SEQ ID NO: 1888560 - DNA, 15 bp, Homo sapiens
atggaacgtatctca

SEQ ID NO: 1888561 - DNA, 15 bp, Homo sapiens
tggaacgtatctcaa

SEQ ID NO: 1888562 - DNA, 15 bp, Homo sapiens
ggaacgtatctcaaa

SEQ ID NO: 1888563 - DNA, 15 bp, Homo sapiens
gaacgtatctcaaaa

SEQ ID NO: 1888564 - DNA, 15 bp, Homo sapiens
aacgtatctcaaaat

SEQ ID NO: 1888565 - DNA, 15 bp, Homo sapiens
acgtatctcaaaatt

SEQ ID NO: 1888566 - DNA, 15 bp, Homo sapiens
cgtatctcaaaatta

SEQ ID NO: 1888567 - DNA, 15 bp, Homo sapiens
gtatctcaaaattat

SEQ ID NO: 1888568 - DNA, 15 bp, Homo sapiens
tatctcaaaattata

SEQ ID NO: 1888569 - DNA, 15 bp, Homo sapiens
atctcaaaattataa

SEQ ID NO: 1888570 - DNA, 15 bp, Homo sapiens
tctcaaaattataag

SEQ ID NO: 1888571 - DNA, 15 bp, Homo sapiens
ctcaaaattataaga

SEQ ID NO: 1888572 - DNA, 15 bp, Homo sapiens
tcaaaattataagag

SEQ ID NO: 1888573 - DNA, 15 bp, Homo sapiens
caaaattataagagc

SEQ ID NO: 1888574 - DNA, 15 bp, Homo sapiens
aaaattataagagct

SEQ ID NO: 1888575 - DNA, 15 bp, Homo sapiens
aaattataagagcta

SEQ ID NO: 1888576 - DNA, 15 bp, Homo sapiens
aattataagagctat

SEQ ID NO: 1888577 - DNA, 15 bp, Homo sapiens
attataagagctatt

SEQ ID NO: 1888578 - DNA, 15 bp, Homo sapiens
ttataagagctattt

SEQ ID NO: 1888579 - DNA, 15 bp, Homo sapiens
tataagagctattta

SEQ ID NO: 1888580 - DNA, 15 bp, Homo sapiens
agagctatttatgaa

SEQ ID NO: 1888581 - DNA, 15 bp, Homo sapiens
gagctatttatgaaa

SEQ ID NO: 1888582 - DNA, 15 bp, Homo sapiens
agctatttatgaaaa

SEQ ID NO: 1888583 - DNA, 15 bp, Homo sapiens
gctatttatgaaaaa

SEQ ID NO: 1888584 - DNA, 15 bp, Homo sapiens
ctatttatgaaaaac

SEQ ID NO: 1888585 - DNA, 15 bp, Homo sapiens
tatttatgaaaaacc

SEQ ID NO: 1888586 - DNA, 15 bp, Homo sapiens
atttatgaaaaaccc

SEQ ID NO: 1888587 - DNA, 15 bp, Homo sapiens
tttatgaaaaaccca

SEQ ID NO: 1888588 - DNA, 15 bp, Homo sapiens
ttatgaaaaacccac

SEQ ID NO: 1888589 - DNA, 15 bp, Homo sapiens
tatgaaaaacccaca

SEQ ID NO: 1888590 - DNA, 15 bp, Homo sapiens
atgaaaaacccacag

SEQ ID NO: 1888591 - DNA, 15 bp, Homo sapiens
tgaaaaacccacagc

SEQ ID NO: 1888592 - DNA, 15 bp, Homo sapiens
gaaaaacccacagcc

SEQ ID NO: 1888593 - DNA, 15 bp, Homo sapiens
aaaaacccacagcca

SEQ ID NO: 1888594 - DNA, 15 bp, Homo sapiens
aaaacccacagccaa

SEQ ID NO: 1888595 - DNA, 15 bp, Homo sapiens
cagccaatatcatat

SEQ ID NO: 1888596 - DNA, 15 bp, Homo sapiens
agccaatatcatatt

SEQ ID NO: 1888597 - DNA, 15 bp, Homo sapiens
gccaatatcatattg

SEQ ID NO: 1888598 - DNA, 15 bp, Homo sapiens
ccaatatcatattga

SEQ ID NO: 1888599 - DNA, 15 bp, Homo sapiens
caatatcatattgaa

SEQ ID NO: 1888600 - DNA, 15 bp, Homo sapiens
aatatcatattgaat

SEQ ID NO: 1888601 - DNA, 15 bp, Homo sapiens
atatcatattgaatg

SEQ ID NO: 1888602 - DNA, 15 bp, Homo sapiens
tatcatattgaatgg

SEQ ID NO: 1888603 - DNA, 15 bp, Homo sapiens
atcatattgaatggg

SEQ ID NO: 1888604 - DNA, 15 bp, Homo sapiens
tcatattgaatgggc

SEQ ID NO: 1888605 - DNA, 15 bp, Homo sapiens
catattgaatgggca

SEQ ID NO: 1888606 - DNA, 15 bp, Homo sapiens
atattgaatgggcaa

SEQ ID NO: 1888607 - DNA, 15 bp, Homo sapiens
tattgaatgggcaag

SEQ ID NO: 1888608 - DNA, 15 bp, Homo sapiens
attgaatgggcaaga

SEQ ID NO: 1888609 - DNA, 15 bp, Homo sapiens
ttgaatgggcaagag

SEQ ID NO: 1888610 - DNA, 15 bp, Homo sapiens
tgaatgggcaagagc

SEQ ID NO: 1888611 - DNA, 15 bp, Homo sapiens
gaatgggcaagagct

SEQ ID NO: 1888612 - DNA, 15 bp, Homo sapiens
aatgggcaagagctg

SEQ ID NO: 1888613 - DNA, 15 bp, Homo sapiens
atgggcaagagctgg

SEQ ID NO: 1888614 - DNA, 15 bp, Homo sapiens
tgggcaagagctgga

SEQ ID NO: 1888615 - DNA, 15 bp, Homo sapiens
gggcaagagctggaa

SEQ ID NO: 1888616 - DNA, 15 bp, Homo sapiens
ggcaagagctggaag

SEQ ID NO: 1888617 - DNA, 15 bp, Homo sapiens
gcaagagctggaagc

SEQ ID NO: 1888618 - DNA, 15 bp, Homo sapiens
caagagctggaagca

SEQ ID NO: 1888619 - DNA, 15 bp, Homo sapiens
aagagctggaagcat

SEQ ID NO: 1888620 - DNA, 15 bp, Homo sapiens
agagctggaagcatt

SEQ ID NO: 1888621 - DNA, 15 bp, Homo sapiens
gagctggaagcattc

SEQ ID NO: 1888622 - DNA, 15 bp, Homo sapiens
attccctttgaaaaa

SEQ ID NO: 1888623 - DNA, 15 bp, Homo sapiens
ttccctttgaaaaac

SEQ ID NO: 1888624 - DNA, 15 bp, Homo sapiens
tccctttgaaaaaca

SEQ ID NO: 1888625 - DNA, 15 bp, Homo sapiens
ccctttgaaaaacag

SEQ ID NO: 1888626 - DNA, 15 bp, Homo sapiens
cctttgaaaaacaga

SEQ ID NO: 1888627 - DNA, 15 bp, Homo sapiens
ctttgaaaaacagat

SEQ ID NO: 1888628 - DNA, 15 bp, Homo sapiens
tttgaaaaacagatc

SEQ ID NO: 1888629 - DNA, 15 bp, Homo sapiens
ttgaaaaacagatca

SEQ ID NO: 1888630 - DNA, 15 bp, Homo sapiens
tgaaaaacagatcaa

SEQ ID NO: 1888631 - DNA, 15 bp, Homo sapiens
gaaaaacagatcaag

SEQ ID NO: 1888632 - DNA, 15 bp, Homo sapiens
aaaaacagatcaaga

SEQ ID NO: 1888633 - DNA, 15 bp, Homo sapiens
aaaacagatcaagac

SEQ ID NO: 1888634 - DNA, 15 bp, Homo sapiens
aaacagatcaagaca

SEQ ID NO: 1888635 - DNA, 15 bp, Homo sapiens
aacagatcaagacaa

SEQ ID NO: 1888636 - DNA, 15 bp, Homo sapiens
acagatcaagacaac

SEQ ID NO: 1888637 - DNA, 15 bp, Homo sapiens
cagatcaagacaacg

SEQ ID NO: 1888638 - DNA, 15 bp, Homo sapiens
agatcaagacaacga

SEQ ID NO: 1888639 - DNA, 15 bp, Homo sapiens
gatcaagacaacgat

SEQ ID NO: 1888640 - DNA, 15 bp, Homo sapiens
atcaagacaacgatg

SEQ ID NO: 1888641 - DNA, 15 bp, Homo sapiens
tcaagacaacgatgc

SEQ ID NO: 1888642 - DNA, 15 bp, Homo sapiens
caagacaacgatgcc

SEQ ID NO: 1888643 - DNA, 15 bp, Homo sapiens
aagacaacgatgccc

SEQ ID NO: 1888644 - DNA, 15 bp, Homo sapiens
agacaacgatgccct

SEQ ID NO: 1888645 - DNA, 15 bp, Homo sapiens
gacaacgatgccctc

SEQ ID NO: 1888646 - DNA, 15 bp, Homo sapiens
acaacgatgccctct

SEQ ID NO: 1888647 - DNA, 15 bp, Homo sapiens
caacgatgccctctc

SEQ ID NO: 1888648 - DNA, 15 bp, Homo sapiens
aacgatgccctctct

SEQ ID NO: 1888649 - DNA, 15 bp, Homo sapiens
acgatgccctctctc

SEQ ID NO: 1888650 - DNA, 15 bp, Homo sapiens
cgatgccctctctca

SEQ ID NO: 1888651 - DNA, 15 bp, Homo sapiens
gatgccctctctcac

SEQ ID NO: 1888652 - DNA, 15 bp, Homo sapiens
atgccctctctcacc

SEQ ID NO: 1888653 - DNA, 15 bp, Homo sapiens
tgccctctctcacca

SEQ ID NO: 1888654 - DNA, 15 bp, Homo sapiens
gccctctctcaccac

SEQ ID NO: 1888655 - DNA, 15 bp, Homo sapiens
ccctctctcaccact

SEQ ID NO: 1888656 - DNA, 15 bp, Homo sapiens
cctctctcaccactc

SEQ ID NO: 1888657 - DNA, 15 bp, Homo sapiens
ctctctcaccactcc

SEQ ID NO: 1888658 - DNA, 15 bp, Homo sapiens
tctctcaccactcct

SEQ ID NO: 1888659 - DNA, 15 bp, Homo sapiens
ctctcaccactccta

SEQ ID NO: 1888660 - DNA, 15 bp, Homo sapiens
tctcaccactcctat

SEQ ID NO: 1888661 - DNA, 15 bp, Homo sapiens
ctcaccactcctatt

SEQ ID NO: 1888662 - DNA, 15 bp, Homo sapiens
tcaccactcctattc

SEQ ID NO: 1888663 - DNA, 15 bp, Homo sapiens
caccactcctattca

SEQ ID NO: 1888664 - DNA, 15 bp, Homo sapiens
accactcctattcaa

SEQ ID NO: 1888665 - DNA, 15 bp, Homo sapiens
ttggaagttctggca

SEQ ID NO: 1888666 - DNA, 15 bp, Homo sapiens
tggaagttctggcag

SEQ ID NO: 1888667 - DNA, 15 bp, Homo sapiens
ggaagttctggcagg

SEQ ID NO: 1888668 - DNA, 15 bp, Homo sapiens
gaagttctggcaggg

SEQ ID NO: 1888669 - DNA, 15 bp, Homo sapiens
aagttctggcagggc

SEQ ID NO: 1888670 - DNA, 15 bp, Homo sapiens
agttctggcagggca

SEQ ID NO: 1888671 - DNA, 15 bp, Homo sapiens
gttctggcagggcaa

SEQ ID NO: 1888672 - DNA, 15 bp, Homo sapiens
ttctggcagggcaat

SEQ ID NO: 1888673 - DNA, 15 bp, Homo sapiens
tctggcagggcaatc

SEQ ID NO: 1888674 - DNA, 15 bp, Homo sapiens
ctggcagggcaatca

SEQ ID NO: 1888675 - DNA, 15 bp, Homo sapiens
tggcagggcaatcag

SEQ ID NO: 1888676 - DNA, 15 bp, Homo sapiens
ggcagggcaatcagg

SEQ ID NO: 1888677 - DNA, 15 bp, Homo sapiens
gcagggcaatcaggc

SEQ ID NO: 1888678 - DNA, 15 bp, Homo sapiens
gcaagagaaagaaac

SEQ ID NO: 1888679 - DNA, 15 bp, Homo sapiens
caagagaaagaaaca

SEQ ID NO: 1888680 - DNA, 15 bp, Homo sapiens
aagagaaagaaacaa

SEQ ID NO: 1888681 - DNA, 15 bp, Homo sapiens
agagaaagaaacaaa

SEQ ID NO: 1888682 - DNA, 15 bp, Homo sapiens
gagaaagaaacaaag

SEQ ID NO: 1888683 - DNA, 15 bp, Homo sapiens
agaaagaaacaaagg

SEQ ID NO: 1888684 - DNA, 15 bp, Homo sapiens
gaaagaaacaaaggg

SEQ ID NO: 1888685 - DNA, 15 bp, Homo sapiens
aaagaaacaaagggc

SEQ ID NO: 1888686 - DNA, 15 bp, Homo sapiens
aagaaacaaagggca

SEQ ID NO: 1888687 - DNA, 15 bp, Homo sapiens
agaaacaaagggcat

SEQ ID NO: 1888688 - DNA, 15 bp, Homo sapiens
gaaacaaagggcatt

SEQ ID NO: 1888689 - DNA, 15 bp, Homo sapiens
aaacaaagggcattc

SEQ ID NO: 1888690 - DNA, 15 bp, Homo sapiens
aacaaagggcattca

SEQ ID NO: 1888691 - DNA, 15 bp, Homo sapiens
acaaagggcattcaa

SEQ ID NO: 1888692 - DNA, 15 bp, Homo sapiens
caaagggcattcaaa

SEQ ID NO: 1888693 - DNA, 15 bp, Homo sapiens
aaagggcattcaaat

SEQ ID NO: 1888694 - DNA, 15 bp, Homo sapiens
aagggcattcaaata

SEQ ID NO: 1888695 - DNA, 15 bp, Homo sapiens
agggcattcaaatag

SEQ ID NO: 1888696 - DNA, 15 bp, Homo sapiens
gggcattcaaatagg

SEQ ID NO: 1888697 - DNA, 15 bp, Homo sapiens
ggcattcaaatagga

SEQ ID NO: 1888698 - DNA, 15 bp, Homo sapiens
gcattcaaataggaa

SEQ ID NO: 1888699 - DNA, 15 bp, Homo sapiens
cattcaaataggaag

SEQ ID NO: 1888700 - DNA, 15 bp, Homo sapiens
agaggaagtcaaatg

SEQ ID NO: 1888701 - DNA, 15 bp, Homo sapiens
gaggaagtcaaatgg

SEQ ID NO: 1888702 - DNA, 15 bp, Homo sapiens
aggaagtcaaatggt

SEQ ID NO: 1888703 - DNA, 15 bp, Homo sapiens
ggaagtcaaatggtc

SEQ ID NO: 1888704 - DNA, 15 bp, Homo sapiens
gaagtcaaatggtct

SEQ ID NO: 1888705 - DNA, 15 bp, Homo sapiens
aagtcaaatggtctc

SEQ ID NO: 1888706 - DNA, 15 bp, Homo sapiens
agtcaaatggtctct

SEQ ID NO: 1888707 - DNA, 15 bp, Homo sapiens
gtcaaatggtctctg

SEQ ID NO: 1888708 - DNA, 15 bp, Homo sapiens
tcaaatggtctctgt

SEQ ID NO: 1888709 - DNA, 15 bp, Homo sapiens
caaatggtctctgtt

SEQ ID NO: 1888710 - DNA, 15 bp, Homo sapiens
aaatggtctctgttt

SEQ ID NO: 1888711 - DNA, 15 bp, Homo sapiens
aatggtctctgtttg

SEQ ID NO: 1888712 - DNA, 15 bp, Homo sapiens
atggtctctgtttga

SEQ ID NO: 1888713 - DNA, 15 bp, Homo sapiens
tggtctctgtttgaa

SEQ ID NO: 1888714 - DNA, 15 bp, Homo sapiens
ggtctctgtttgaag

SEQ ID NO: 1888715 - DNA, 15 bp, Homo sapiens
gtctctgtttgaaga

SEQ ID NO: 1888716 - DNA, 15 bp, Homo sapiens
tctctgtttgaagat

SEQ ID NO: 1888717 - DNA, 15 bp, Homo sapiens
ctctgtttgaagatg

SEQ ID NO: 1888718 - DNA, 15 bp, Homo sapiens
tctgtttgaagatga

SEQ ID NO: 1888719 - DNA, 15 bp, Homo sapiens
ctgtttgaagatgac

SEQ ID NO: 1888720 - DNA, 15 bp, Homo sapiens
tgtttgaagatgaca

SEQ ID NO: 1888721 - DNA, 15 bp, Homo sapiens
gtttgaagatgacat

SEQ ID NO: 1888722 - DNA, 15 bp, Homo sapiens
tttgaagatgacatg

SEQ ID NO: 1888723 - DNA, 15 bp, Homo sapiens
ttgaagatgacatga

SEQ ID NO: 1888724 - DNA, 15 bp, Homo sapiens
tgaagatgacatgat

SEQ ID NO: 1888725 - DNA, 15 bp, Homo sapiens
gaagatgacatgatt

SEQ ID NO: 1888726 - DNA, 15 bp, Homo sapiens
aagatgacatgattg

SEQ ID NO: 1888727 - DNA, 15 bp, Homo sapiens
agatgacatgattgt

SEQ ID NO: 1888728 - DNA, 15 bp, Homo sapiens
gatgacatgattgta

SEQ ID NO: 1888729 - DNA, 15 bp, Homo sapiens
atgacatgattgtat

SEQ ID NO: 1888730 - DNA, 15 bp, Homo sapiens
tgacatgattgtata

SEQ ID NO: 1888731 - DNA, 15 bp, Homo sapiens
acatgattgtatatt

SEQ ID NO: 1888732 - DNA, 15 bp, Homo sapiens
catgattgtatattt

SEQ ID NO: 1888733 - DNA, 15 bp, Homo sapiens
atgattgtatatttg

SEQ ID NO: 1888734 - DNA, 15 bp, Homo sapiens
tgattgtatatttgg

SEQ ID NO: 1888735 - DNA, 15 bp, Homo sapiens
gattgtatatttgga

SEQ ID NO: 1888736 - DNA, 15 bp, Homo sapiens
attgtatatttggaa

SEQ ID NO: 1888737 - DNA, 15 bp, Homo sapiens
ttgtatatttggaaa

SEQ ID NO: 1888738 - DNA, 15 bp, Homo sapiens
tgtatatttggaaaa

SEQ ID NO: 1888739 - DNA, 15 bp, Homo sapiens
gtatatttggaaaac

SEQ ID NO: 1888740 - DNA, 15 bp, Homo sapiens
tatatttggaaaacc

SEQ ID NO: 1888741 - DNA, 15 bp, Homo sapiens
atatttggaaaaccc

SEQ ID NO: 1888742 - DNA, 15 bp, Homo sapiens
tatttggaaaacccc

SEQ ID NO: 1888743 - DNA, 15 bp, Homo sapiens
atttggaaaacccca

SEQ ID NO: 1888744 - DNA, 15 bp, Homo sapiens
tttggaaaaccccat

SEQ ID NO: 1888745 - DNA, 15 bp, Homo sapiens
ttggaaaaccccatc

SEQ ID NO: 1888746 - DNA, 15 bp, Homo sapiens
tggaaaaccccatcg

SEQ ID NO: 1888747 - DNA, 15 bp, Homo sapiens
ggaaaaccccatcgt

SEQ ID NO: 1888748 - DNA, 15 bp, Homo sapiens
gaaaaccccatcgtc

SEQ ID NO: 1888749 - DNA, 15 bp, Homo sapiens
aaaaccccatcgtct

SEQ ID NO: 1888750 - DNA, 15 bp, Homo sapiens
aaaccccatcgtctc

SEQ ID NO: 1888751 - DNA, 15 bp, Homo sapiens
aaccccatcgtctca

SEQ ID NO: 1888752 - DNA, 15 bp, Homo sapiens
accccatcgtctcat

SEQ ID NO: 1888753 - DNA, 15 bp, Homo sapiens
ccccatcgtctcatc

SEQ ID NO: 1888754 - DNA, 15 bp, Homo sapiens
cccatcgtctcatcc

SEQ ID NO: 1888755 - DNA, 15 bp, Homo sapiens
ccatcgtctcatccc

SEQ ID NO: 1888756 - DNA, 15 bp, Homo sapiens
catcgtctcatccca

SEQ ID NO: 1888757 - DNA, 15 bp, Homo sapiens
atcgtctcatcccaa

SEQ ID NO: 1888758 - DNA, 15 bp, Homo sapiens
tcgtctcatcccaaa

SEQ ID NO: 1888759 - DNA, 15 bp, Homo sapiens
cgtctcatcccaaaa

SEQ ID NO: 1888760 - DNA, 15 bp, Homo sapiens
gtctcatcccaaaat

SEQ ID NO: 1888761 - DNA, 15 bp, Homo sapiens
tctcatcccaaaatc

SEQ ID NO: 1888762 - DNA, 15 bp, Homo sapiens
ctcatcccaaaatct

SEQ ID NO: 1888763 - DNA, 15 bp, Homo sapiens
tcatcccaaaatctc

SEQ ID NO: 1888764 - DNA, 15 bp, Homo sapiens
catcccaaaatctcc

SEQ ID NO: 1888765 - DNA, 15 bp, Homo sapiens
atcccaaaatctcct

SEQ ID NO: 1888766 - DNA, 15 bp, Homo sapiens
tcccaaaatctcctt

SEQ ID NO: 1888767 - DNA, 15 bp, Homo sapiens
cccaaaatctcctta

SEQ ID NO: 1888768 - DNA, 15 bp, Homo sapiens
ccaaaatctccttaa

SEQ ID NO: 1888769 - DNA, 15 bp, Homo sapiens
caaaatctccttaag

SEQ ID NO: 1888770 - DNA, 15 bp, Homo sapiens
aaaatctccttaagc

SEQ ID NO: 1888771 - DNA, 15 bp, Homo sapiens
agcaacttcagcaac

SEQ ID NO: 1888772 - DNA, 15 bp, Homo sapiens
gcaacttcagcaaca

SEQ ID NO: 1888773 - DNA, 15 bp, Homo sapiens
caacttcagcaacat

SEQ ID NO: 1888774 - DNA, 15 bp, Homo sapiens
aacttcagcaacatc

SEQ ID NO: 1888775 - DNA, 15 bp, Homo sapiens
acttcagcaacatct

SEQ ID NO: 1888776 - DNA, 15 bp, Homo sapiens
cttcagcaacatctc

SEQ ID NO: 1888777 - DNA, 15 bp, Homo sapiens
ttcagcaacatctca

SEQ ID NO: 1888778 - DNA, 15 bp, Homo sapiens
tcagcaacatctcag

SEQ ID NO: 1888779 - DNA, 15 bp, Homo sapiens
cagcaacatctcagg

SEQ ID NO: 1888780 - DNA, 15 bp, Homo sapiens
agcaacatctcagga

SEQ ID NO: 1888781 - DNA, 15 bp, Homo sapiens
gcaacatctcaggat

SEQ ID NO: 1888782 - DNA, 15 bp, Homo sapiens
caacatctcaggata

SEQ ID NO: 1888783 - DNA, 15 bp, Homo sapiens
aacatctcaggataa

SEQ ID NO: 1888784 - DNA, 15 bp, Homo sapiens
acatctcaggataaa

SEQ ID NO: 1888785 - DNA, 15 bp, Homo sapiens
catctcaggataaaa

SEQ ID NO: 1888786 - DNA, 15 bp, Homo sapiens
atctcaggataaaaa

SEQ ID NO: 1888787 - DNA, 15 bp, Homo sapiens
tctcaggataaaaat

SEQ ID NO: 1888788 - DNA, 15 bp, Homo sapiens
ctcaggataaaaatc

SEQ ID NO: 1888789 - DNA, 15 bp, Homo sapiens
tcaggataaaaatca

SEQ ID NO: 1888790 - DNA, 15 bp, Homo sapiens
caggataaaaatcaa

SEQ ID NO: 1888791 - DNA, 15 bp, Homo sapiens
aggataaaaatcaac

SEQ ID NO: 1888792 - DNA, 15 bp, Homo sapiens
ggataaaaatcaacg

SEQ ID NO: 1888793 - DNA, 15 bp, Homo sapiens
gataaaaatcaacgt

SEQ ID NO: 1888794 - DNA, 15 bp, Homo sapiens
ataaaaatcaacgtc

SEQ ID NO: 1888795 - DNA, 15 bp, Homo sapiens
taaaaatcaacgtct

SEQ ID NO: 1888796 - DNA, 15 bp, Homo sapiens
aaaaatcaacgtctc

SEQ ID NO: 1888797 - DNA, 15 bp, Homo sapiens
aaaatcaacgtctca

SEQ ID NO: 1888798 - DNA, 15 bp, Homo sapiens
aaatcaacgtctcag

SEQ ID NO: 1888799 - DNA, 15 bp, Homo sapiens
aatcaacgtctcagg

SEQ ID NO: 1888800 - DNA, 15 bp, Homo sapiens
atcaacgtctcagga

SEQ ID NO: 1888801 - DNA, 15 bp, Homo sapiens
tcaacgtctcaggat

SEQ ID NO: 1888802 - DNA, 15 bp, Homo sapiens
caacgtctcaggata

SEQ ID NO: 1888803 - DNA, 15 bp, Homo sapiens
aacgtctcaggatac

SEQ ID NO: 1888804 - DNA, 15 bp, Homo sapiens
acgtctcaggataca

SEQ ID NO: 1888805 - DNA, 15 bp, Homo sapiens
cgtctcaggatacaa

SEQ ID NO: 1888806 - DNA, 15 bp, Homo sapiens
gtctcaggatacaaa

SEQ ID NO: 1888807 - DNA, 15 bp, Homo sapiens
tctcaggatacaaaa

SEQ ID NO: 1888808 - DNA, 15 bp, Homo sapiens
ctcaggatacaaaat

SEQ ID NO: 1888809 - DNA, 15 bp, Homo sapiens
tcaggatacaaaatc

SEQ ID NO: 1888810 - DNA, 15 bp, Homo sapiens
caggatacaaaatca

SEQ ID NO: 1888811 - DNA, 15 bp, Homo sapiens
aggatacaaaatcaa

SEQ ID NO: 1888812 - DNA, 15 bp, Homo sapiens
ggatacaaaatcaat

SEQ ID NO: 1888813 - DNA, 15 bp, Homo sapiens
gatacaaaatcaatg

SEQ ID NO: 1888814 - DNA, 15 bp, Homo sapiens
atacaaaatcaatgt

SEQ ID NO: 1888815 - DNA, 15 bp, Homo sapiens
tacaaaatcaatgtg

SEQ ID NO: 1888816 - DNA, 15 bp, Homo sapiens
acaaaatcaatgtgc

SEQ ID NO: 1888817 - DNA, 15 bp, Homo sapiens
caaaatcaatgtgca

SEQ ID NO: 1888818 - DNA, 15 bp, Homo sapiens
aaaatcaatgtgcaa

SEQ ID NO: 1888819 - DNA, 15 bp, Homo sapiens
aaatcaatgtgcaaa

SEQ ID NO: 1888820 - DNA, 15 bp, Homo sapiens
aatcaatgtgcaaaa

SEQ ID NO: 1888821 - DNA, 15 bp, Homo sapiens
atcaatgtgcaaaaa

SEQ ID NO: 1888822 - DNA, 15 bp, Homo sapiens
tcaatgtgcaaaaat

SEQ ID NO: 1888823 - DNA, 15 bp, Homo sapiens
caatgtgcaaaaatc

SEQ ID NO: 1888824 - DNA, 15 bp, Homo sapiens
aatgtgcaaaaatca

SEQ ID NO: 1888825 - DNA, 15 bp, Homo sapiens
atgtgcaaaaatcac

SEQ ID NO: 1888826 - DNA, 15 bp, Homo sapiens
tgtgcaaaaatcaca

SEQ ID NO: 1888827 - DNA, 15 bp, Homo sapiens
gtgcaaaaatcacaa

SEQ ID NO: 1888828 - DNA, 15 bp, Homo sapiens
aaatcacaagcattc

SEQ ID NO: 1888829 - DNA, 15 bp, Homo sapiens
aatcacaagcattcc

SEQ ID NO: 1888830 - DNA, 15 bp, Homo sapiens
atcacaagcattcct

SEQ ID NO: 1888831 - DNA, 15 bp, Homo sapiens
tcacaagcattccta

SEQ ID NO: 1888832 - DNA, 15 bp, Homo sapiens
cacaagcattcctat

SEQ ID NO: 1888833 - DNA, 15 bp, Homo sapiens
acaagcattcctatt

SEQ ID NO: 1888834 - DNA, 15 bp, Homo sapiens
caagcattcctattc

SEQ ID NO: 1888835 - DNA, 15 bp, Homo sapiens
aagcattcctattca

SEQ ID NO: 1888836 - DNA, 15 bp, Homo sapiens
agcattcctattcac

SEQ ID NO: 1888837 - DNA, 15 bp, Homo sapiens
gcattcctattcacc

SEQ ID NO: 1888838 - DNA, 15 bp, Homo sapiens
cattcctattcacca

SEQ ID NO: 1888839 - DNA, 15 bp, Homo sapiens
attcctattcaccaa

SEQ ID NO: 1888840 - DNA, 15 bp, Homo sapiens
ttcctattcaccaaa

SEQ ID NO: 1888841 - DNA, 15 bp, Homo sapiens
tcctattcaccaaac

SEQ ID NO: 1888842 - DNA, 15 bp, Homo sapiens
cctattcaccaaaca

SEQ ID NO: 1888843 - DNA, 15 bp, Homo sapiens
ctattcaccaaacag

SEQ ID NO: 1888844 - DNA, 15 bp, Homo sapiens
tattcaccaaacaga

SEQ ID NO: 1888845 - DNA, 15 bp, Homo sapiens
attcaccaaacagag

SEQ ID NO: 1888846 - DNA, 15 bp, Homo sapiens
ttcaccaaacagaga

SEQ ID NO: 1888847 - DNA, 15 bp, Homo sapiens
tcaccaaacagagag

SEQ ID NO: 1888848 - DNA, 15 bp, Homo sapiens
caccaaacagagagc

SEQ ID NO: 1888849 - DNA, 15 bp, Homo sapiens
accaaacagagagcc

SEQ ID NO: 1888850 - DNA, 15 bp, Homo sapiens
ccaaacagagagcca

SEQ ID NO: 1888851 - DNA, 15 bp, Homo sapiens
ccattcacaattgcc

SEQ ID NO: 1888852 - DNA, 15 bp, Homo sapiens
cattcacaattgcca

SEQ ID NO: 1888853 - DNA, 15 bp, Homo sapiens
attcacaattgccac

SEQ ID NO: 1888854 - DNA, 15 bp, Homo sapiens
ttcacaattgccaca

SEQ ID NO: 1888855 - DNA, 15 bp, Homo sapiens
tcacaattgccacaa

SEQ ID NO: 1888856 - DNA, 15 bp, Homo sapiens
cacaattgccacaaa

SEQ ID NO: 1888857 - DNA, 15 bp, Homo sapiens
acaattgccacaaag

SEQ ID NO: 1888858 - DNA, 15 bp, Homo sapiens
caattgccacaaaga

SEQ ID NO: 1888859 - DNA, 15 bp, Homo sapiens
aattgccacaaagag

SEQ ID NO: 1888860 - DNA, 15 bp, Homo sapiens
attgccacaaagaga

SEQ ID NO: 1888861 - DNA, 15 bp, Homo sapiens
ttgccacaaagagaa

SEQ ID NO: 1888862 - DNA, 15 bp, Homo sapiens
tgccacaaagagaat

SEQ ID NO: 1888863 - DNA, 15 bp, Homo sapiens
gccacaaagagaata

SEQ ID NO: 1888864 - DNA, 15 bp, Homo sapiens
ccacaaagagaataa

SEQ ID NO: 1888865 - DNA, 15 bp, Homo sapiens
cacaaagagaataaa

SEQ ID NO: 1888866 - DNA, 15 bp, Homo sapiens
aataaaatacctaga

SEQ ID NO: 1888867 - DNA, 15 bp, Homo sapiens
ataaaatacctagaa

SEQ ID NO: 1888868 - DNA, 15 bp, Homo sapiens
taaaatacctagaaa

SEQ ID NO: 1888869 - DNA, 15 bp, Homo sapiens
aaaatacctagaaat

SEQ ID NO: 1888870 - DNA, 15 bp, Homo sapiens
aaatacctagaaata

SEQ ID NO: 1888871 - DNA, 15 bp, Homo sapiens
aatacctagaaatac

SEQ ID NO: 1888872 - DNA, 15 bp, Homo sapiens
atacctagaaataca

SEQ ID NO: 1888873 - DNA, 15 bp, Homo sapiens
tacctagaaatacaa

SEQ ID NO: 1888874 - DNA, 15 bp, Homo sapiens
acctagaaatacaac

SEQ ID NO: 1888875 - DNA, 15 bp, Homo sapiens
cctagaaatacaact

SEQ ID NO: 1888876 - DNA, 15 bp, Homo sapiens
ctagaaatacaactt

SEQ ID NO: 1888877 - DNA, 15 bp, Homo sapiens
tagaaatacaactta

SEQ ID NO: 1888878 - DNA, 15 bp, Homo sapiens
agaaatacaacttac

SEQ ID NO: 1888879 - DNA, 15 bp, Homo sapiens
gaaatacaacttaca

SEQ ID NO: 1888880 - DNA, 15 bp, Homo sapiens
aaatacaacttacaa

SEQ ID NO: 1888881 - DNA, 15 bp, Homo sapiens
aatacaacttacaag

SEQ ID NO: 1888882 - DNA, 15 bp, Homo sapiens
atacaacttacaagg

SEQ ID NO: 1888883 - DNA, 15 bp, Homo sapiens
tacaacttacaaggg

SEQ ID NO: 1888884 - DNA, 15 bp, Homo sapiens
acaacttacaaggga

SEQ ID NO: 1888885 - DNA, 15 bp, Homo sapiens
caacttacaagggat

SEQ ID NO: 1888886 - DNA, 15 bp, Homo sapiens
aacttacaagggatg

SEQ ID NO: 1888887 - DNA, 15 bp, Homo sapiens
acttacaagggatgt

SEQ ID NO: 1888888 - DNA, 15 bp, Homo sapiens
acaaacaaatggaaa

SEQ ID NO: 1888889 - DNA, 15 bp, Homo sapiens
caaacaaatggaaaa

SEQ ID NO: 1888890 - DNA, 15 bp, Homo sapiens
aaacaaatggaaaaa

SEQ ID NO: 1888891 - DNA, 15 bp, Homo sapiens
aacaaatggaaaaac

SEQ ID NO: 1888892 - DNA, 15 bp, Homo sapiens
acaaatggaaaaaca

SEQ ID NO: 1888893 - DNA, 15 bp, Homo sapiens
caaatggaaaaacat

SEQ ID NO: 1888894 - DNA, 15 bp, Homo sapiens
aaatggaaaaacatt

SEQ ID NO: 1888895 - DNA, 15 bp, Homo sapiens
aatggaaaaacattc

SEQ ID NO: 1888896 - DNA, 15 bp, Homo sapiens
atggaaaaacattcc

SEQ ID NO: 1888897 - DNA, 15 bp, Homo sapiens
tggaaaaacattcca

SEQ ID NO: 1888898 - DNA, 15 bp, Homo sapiens
ggaaaaacattccat

SEQ ID NO: 1888899 - DNA, 15 bp, Homo sapiens
aaaaacattccatgt

SEQ ID NO: 1888900 - DNA, 15 bp, Homo sapiens
aaaacattccatgtt

SEQ ID NO: 1888901 - DNA, 15 bp, Homo sapiens
aaacattccatgttc

SEQ ID NO: 1888902 - DNA, 15 bp, Homo sapiens
aacattccatgttca

SEQ ID NO: 1888903 - DNA, 15 bp, Homo sapiens
acattccatgttcat

SEQ ID NO: 1888904 - DNA, 15 bp, Homo sapiens
cattccatgttcatg

SEQ ID NO: 1888905 - DNA, 15 bp, Homo sapiens
attccatgttcatgg

SEQ ID NO: 1888906 - DNA, 15 bp, Homo sapiens
ttccatgttcatgga

SEQ ID NO: 1888907 - DNA, 15 bp, Homo sapiens
tccatgttcatggat

SEQ ID NO: 1888908 - DNA, 15 bp, Homo sapiens
ccatgttcatggata

SEQ ID NO: 1888909 - DNA, 15 bp, Homo sapiens
catgttcatggatag

SEQ ID NO: 1888910 - DNA, 15 bp, Homo sapiens
atgttcatggatagg

SEQ ID NO: 1888911 - DNA, 15 bp, Homo sapiens
tgttcatggatagga

SEQ ID NO: 1888912 - DNA, 15 bp, Homo sapiens
gttcatggataggaa

SEQ ID NO: 1888913 - DNA, 15 bp, Homo sapiens
ttcatggataggaag

SEQ ID NO: 1888914 - DNA, 15 bp, Homo sapiens
ttaaaatggccatac

SEQ ID NO: 1888915 - DNA, 15 bp, Homo sapiens
taaaatggccatact

SEQ ID NO: 1888916 - DNA, 15 bp, Homo sapiens
gccatactgcccaaa

SEQ ID NO: 1888917 - DNA, 15 bp, Homo sapiens
ccatactgcccaaag

SEQ ID NO: 1888918 - DNA, 15 bp, Homo sapiens
catactgcccaaagg

SEQ ID NO: 1888919 - DNA, 15 bp, Homo sapiens
atactgcccaaagga

SEQ ID NO: 1888920 - DNA, 15 bp, Homo sapiens
tactgcccaaaggaa

SEQ ID NO: 1888921 - DNA, 15 bp, Homo sapiens
actgcccaaaggaat

SEQ ID NO: 1888922 - DNA, 15 bp, Homo sapiens
ctgcccaaaggaatt

SEQ ID NO: 1888923 - DNA, 15 bp, Homo sapiens
tgcccaaaggaattt

SEQ ID NO: 1888924 - DNA, 15 bp, Homo sapiens
gcccaaaggaattta

SEQ ID NO: 1888925 - DNA, 15 bp, Homo sapiens
cccaaaggaatttat

SEQ ID NO: 1888926 - DNA, 15 bp, Homo sapiens
ccaaaggaatttata

SEQ ID NO: 1888927 - DNA, 15 bp, Homo sapiens
caaaggaatttatag

SEQ ID NO: 1888928 - DNA, 15 bp, Homo sapiens
aaaggaatttataga

SEQ ID NO: 1888929 - DNA, 15 bp, Homo sapiens
aaggaatttatagat

SEQ ID NO: 1888930 - DNA, 15 bp, Homo sapiens
aggaatttatagatt

SEQ ID NO: 1888931 - DNA, 15 bp, Homo sapiens
ggaatttatagattc

SEQ ID NO: 1888932 - DNA, 15 bp, Homo sapiens
gaatttatagattca

SEQ ID NO: 1888933 - DNA, 15 bp, Homo sapiens
atgctatccccatcg

SEQ ID NO: 1888934 - DNA, 15 bp, Homo sapiens
tgctatccccatcga

SEQ ID NO: 1888935 - DNA, 15 bp, Homo sapiens
gctatccccatcgag

SEQ ID NO: 1888936 - DNA, 15 bp, Homo sapiens
ctatccccatcgagc

SEQ ID NO: 1888937 - DNA, 15 bp, Homo sapiens
tatccccatcgagct

SEQ ID NO: 1888938 - DNA, 15 bp, Homo sapiens
atccccatcgagcta

SEQ ID NO: 1888939 - DNA, 15 bp, Homo sapiens
tccccatcgagctac

SEQ ID NO: 1888940 - DNA, 15 bp, Homo sapiens
ccccatcgagctacc

SEQ ID NO: 1888941 - DNA, 15 bp, Homo sapiens
cccatcgagctacca

SEQ ID NO: 1888942 - DNA, 15 bp, Homo sapiens
ccatcgagctaccat

SEQ ID NO: 1888943 - DNA, 15 bp, Homo sapiens
catcgagctaccatt

SEQ ID NO: 1888944 - DNA, 15 bp, Homo sapiens
atcgagctaccattg

SEQ ID NO: 1888945 - DNA, 15 bp, Homo sapiens
tcgagctaccattga

SEQ ID NO: 1888946 - DNA, 15 bp, Homo sapiens
cgagctaccattgac

SEQ ID NO: 1888947 - DNA, 15 bp, Homo sapiens
gagctaccattgact

SEQ ID NO: 1888948 - DNA, 15 bp, Homo sapiens
agctaccattgactt

SEQ ID NO: 1888949 - DNA, 15 bp, Homo sapiens
gctaccattgacttt

SEQ ID NO: 1888950 - DNA, 15 bp, Homo sapiens
ctaccattgactttc

SEQ ID NO: 1888951 - DNA, 15 bp, Homo sapiens
taccattgactttct

SEQ ID NO: 1888952 - DNA, 15 bp, Homo sapiens
accattgactttctt

SEQ ID NO: 1888953 - DNA, 15 bp, Homo sapiens
ccattgactttcttc

SEQ ID NO: 1888954 - DNA, 15 bp, Homo sapiens
cattgactttcttca

SEQ ID NO: 1888955 - DNA, 15 bp, Homo sapiens
attgactttcttcac

SEQ ID NO: 1888956 - DNA, 15 bp, Homo sapiens
ttgactttcttcaca

SEQ ID NO: 1888957 - DNA, 15 bp, Homo sapiens
gaattagaaaaaaac

SEQ ID NO: 1888958 - DNA, 15 bp, Homo sapiens
aattagaaaaaaact

SEQ ID NO: 1888959 - DNA, 15 bp, Homo sapiens
attagaaaaaaactg

SEQ ID NO: 1888960 - DNA, 15 bp, Homo sapiens
ttagaaaaaaactgc

SEQ ID NO: 1888961 - DNA, 15 bp, Homo sapiens
tagaaaaaaactgct

SEQ ID NO: 1888962 - DNA, 15 bp, Homo sapiens
agaaaaaaactgctt

SEQ ID NO: 1888963 - DNA, 15 bp, Homo sapiens
gaaaaaaactgcttt

SEQ ID NO: 1888964 - DNA, 15 bp, Homo sapiens
aaaaaaactgcttta

SEQ ID NO: 1888965 - DNA, 15 bp, Homo sapiens
aaaaaactgctttaa

SEQ ID NO: 1888966 - DNA, 15 bp, Homo sapiens
aaaaactgctttaaa

SEQ ID NO: 1888967 - DNA, 15 bp, Homo sapiens
aaaactgctttaaag

SEQ ID NO: 1888968 - DNA, 15 bp, Homo sapiens
aaactgctttaaagt

SEQ ID NO: 1888969 - DNA, 15 bp, Homo sapiens
aactgctttaaagtt

SEQ ID NO: 1888970 - DNA, 15 bp, Homo sapiens
actgctttaaagttc

SEQ ID NO: 1888971 - DNA, 15 bp, Homo sapiens
ctgctttaaagttca

SEQ ID NO: 1888972 - DNA, 15 bp, Homo sapiens
tgctttaaagttcat

SEQ ID NO: 1888973 - DNA, 15 bp, Homo sapiens
gctttaaagttcata

SEQ ID NO: 1888974 - DNA, 15 bp, Homo sapiens
ctttaaagttcatat

SEQ ID NO: 1888975 - DNA, 15 bp, Homo sapiens
tttaaagttcatatg

SEQ ID NO: 1888976 - DNA, 15 bp, Homo sapiens
atggaaccaaaaaat

SEQ ID NO: 1888977 - DNA, 15 bp, Homo sapiens
tggaaccaaaaaata

SEQ ID NO: 1888978 - DNA, 15 bp, Homo sapiens
ggaaccaaaaaatag

SEQ ID NO: 1888979 - DNA, 15 bp, Homo sapiens
gaaccaaaaaatagc

SEQ ID NO: 1888980 - DNA, 15 bp, Homo sapiens
aaccaaaaaatagcc

SEQ ID NO: 1888981 - DNA, 15 bp, Homo sapiens
accaaaaaatagccc

SEQ ID NO: 1888982 - DNA, 15 bp, Homo sapiens
ccaaaaaatagccca

SEQ ID NO: 1888983 - DNA, 15 bp, Homo sapiens
caaaaaatagcccat

SEQ ID NO: 1888984 - DNA, 15 bp, Homo sapiens
aaaaaatagcccata

SEQ ID NO: 1888985 - DNA, 15 bp, Homo sapiens
aaaaatagcccatat

SEQ ID NO: 1888986 - DNA, 15 bp, Homo sapiens
aaaatagcccatata

SEQ ID NO: 1888987 - DNA, 15 bp, Homo sapiens
aaatagcccatatag

SEQ ID NO: 1888988 - DNA, 15 bp, Homo sapiens
aatagcccatatagc

SEQ ID NO: 1888989 - DNA, 15 bp, Homo sapiens
atagcccatatagcc

SEQ ID NO: 1888990 - DNA, 15 bp, Homo sapiens
tagcccatatagcca

SEQ ID NO: 1888991 - DNA, 15 bp, Homo sapiens
agcccatatagccaa

SEQ ID NO: 1888992 - DNA, 15 bp, Homo sapiens
gcccatatagccaag

SEQ ID NO: 1888993 - DNA, 15 bp, Homo sapiens
cccatatagccaaga

SEQ ID NO: 1888994 - DNA, 15 bp, Homo sapiens
ccatatagccaagac

SEQ ID NO: 1888995 - DNA, 15 bp, Homo sapiens
catatagccaagaca

SEQ ID NO: 1888996 - DNA, 15 bp, Homo sapiens
atatagccaagacaa

SEQ ID NO: 1888997 - DNA, 15 bp, Homo sapiens
tatagccaagacaat

SEQ ID NO: 1888998 - DNA, 15 bp, Homo sapiens
atagccaagacaatc

SEQ ID NO: 1888999 - DNA, 15 bp, Homo sapiens
tagccaagacaatcc

SEQ ID NO: 1889000 - DNA, 15 bp, Homo sapiens
agccaagacaatcct

SEQ ID NO: 1889001 - DNA, 15 bp, Homo sapiens
gccaagacaatccta

SEQ ID NO: 1889002 - DNA, 15 bp, Homo sapiens
ccaagacaatcctaa

SEQ ID NO: 1889003 - DNA, 15 bp, Homo sapiens
caagacaatcctaag

SEQ ID NO: 1889004 - DNA, 15 bp, Homo sapiens
aagacaatcctaagc

SEQ ID NO: 1889005 - DNA, 15 bp, Homo sapiens
agacaatcctaagca

SEQ ID NO: 1889006 - DNA, 15 bp, Homo sapiens
gacaatcctaagcaa

SEQ ID NO: 1889007 - DNA, 15 bp, Homo sapiens
acaatcctaagcaaa

SEQ ID NO: 1889008 - DNA, 15 bp, Homo sapiens
caatcctaagcaaaa

SEQ ID NO: 1889009 - DNA, 15 bp, Homo sapiens
aatcctaagcaaaaa

SEQ ID NO: 1889010 - DNA, 15 bp, Homo sapiens
atcctaagcaaaaag

SEQ ID NO: 1889011 - DNA, 15 bp, Homo sapiens
tcctaagcaaaaaga

SEQ ID NO: 1889012 - DNA, 15 bp, Homo sapiens
cctaagcaaaaagaa

SEQ ID NO: 1889013 - DNA, 15 bp, Homo sapiens
gcaaaaagaacaaag

SEQ ID NO: 1889014 - DNA, 15 bp, Homo sapiens
caaaaagaacaaagc

SEQ ID NO: 1889015 - DNA, 15 bp, Homo sapiens
aaaaagaacaaagct

SEQ ID NO: 1889016 - DNA, 15 bp, Homo sapiens
agctggaggcatcaa

SEQ ID NO: 1889017 - DNA, 15 bp, Homo sapiens
gctggaggcatcaag

SEQ ID NO: 1889018 - DNA, 15 bp, Homo sapiens
ctggaggcatcaagc

SEQ ID NO: 1889019 - DNA, 15 bp, Homo sapiens
tggaggcatcaagct

SEQ ID NO: 1889020 - DNA, 15 bp, Homo sapiens
ggaggcatcaagcta

SEQ ID NO: 1889021 - DNA, 15 bp, Homo sapiens
gaggcatcaagctac

SEQ ID NO: 1889022 - DNA, 15 bp, Homo sapiens
aggcatcaagctacc

SEQ ID NO: 1889023 - DNA, 15 bp, Homo sapiens
ggcatcaagctacct

SEQ ID NO: 1889024 - DNA, 15 bp, Homo sapiens
gcatcaagctacctg

SEQ ID NO: 1889025 - DNA, 15 bp, Homo sapiens
catcaagctacctga

SEQ ID NO: 1889026 - DNA, 15 bp, Homo sapiens
atcaagctacctgac

SEQ ID NO: 1889027 - DNA, 15 bp, Homo sapiens
tcaagctacctgact

SEQ ID NO: 1889028 - DNA, 15 bp, Homo sapiens
caagctacctgactt

SEQ ID NO: 1889029 - DNA, 15 bp, Homo sapiens
aagctacctgacttc

SEQ ID NO: 1889030 - DNA, 15 bp, Homo sapiens
agctacctgacttca

SEQ ID NO: 1889031 - DNA, 15 bp, Homo sapiens
ggtaccaaaacagat

SEQ ID NO: 1889032 - DNA, 15 bp, Homo sapiens
gtaccaaaacagata

SEQ ID NO: 1889033 - DNA, 15 bp, Homo sapiens
taccaaaacagataa

SEQ ID NO: 1889034 - DNA, 15 bp, Homo sapiens
accaaaacagataaa

SEQ ID NO: 1889035 - DNA, 15 bp, Homo sapiens
ccaaaacagataaat

SEQ ID NO: 1889036 - DNA, 15 bp, Homo sapiens
caaaacagataaata

SEQ ID NO: 1889037 - DNA, 15 bp, Homo sapiens
aaaacagataaatag

SEQ ID NO: 1889038 - DNA, 15 bp, Homo sapiens
aaacagataaataga

SEQ ID NO: 1889039 - DNA, 15 bp, Homo sapiens
aacagataaatagaa

SEQ ID NO: 1889040 - DNA, 15 bp, Homo sapiens
acagataaatagaac

SEQ ID NO: 1889041 - DNA, 15 bp, Homo sapiens
cagataaatagaaca

SEQ ID NO: 1889042 - DNA, 15 bp, Homo sapiens
agataaatagaacaa

SEQ ID NO: 1889043 - DNA, 15 bp, Homo sapiens
gataaatagaacaat

SEQ ID NO: 1889044 - DNA, 15 bp, Homo sapiens
ataaatagaacaatg

SEQ ID NO: 1889045 - DNA, 15 bp, Homo sapiens
taaatagaacaatgg

SEQ ID NO: 1889046 - DNA, 15 bp, Homo sapiens
aaatagaacaatgga

SEQ ID NO: 1889047 - DNA, 15 bp, Homo sapiens
aatagaacaatggaa

SEQ ID NO: 1889048 - DNA, 15 bp, Homo sapiens
atagaacaatggaaa

SEQ ID NO: 1889049 - DNA, 15 bp, Homo sapiens
tagaacaatggaaaa

SEQ ID NO: 1889050 - DNA, 15 bp, Homo sapiens
agaacaatggaaaag

SEQ ID NO: 1889051 - DNA, 15 bp, Homo sapiens
gaacaatggaaaaga

SEQ ID NO: 1889052 - DNA, 15 bp, Homo sapiens
aacaatggaaaagaa

SEQ ID NO: 1889053 - DNA, 15 bp, Homo sapiens
acaatggaaaagaac

SEQ ID NO: 1889054 - DNA, 15 bp, Homo sapiens
caatggaaaagaaca

SEQ ID NO: 1889055 - DNA, 15 bp, Homo sapiens
aatggaaaagaacag

SEQ ID NO: 1889056 - DNA, 15 bp, Homo sapiens
atggaaaagaacaga

SEQ ID NO: 1889057 - DNA, 15 bp, Homo sapiens
tggaaaagaacagag

SEQ ID NO: 1889058 - DNA, 15 bp, Homo sapiens
ggaaaagaacagagg

SEQ ID NO: 1889059 - DNA, 15 bp, Homo sapiens
gaaaagaacagaggc

SEQ ID NO: 1889060 - DNA, 15 bp, Homo sapiens
aaagaacagaggcct

SEQ ID NO: 1889061 - DNA, 15 bp, Homo sapiens
aagaacagaggcctc

SEQ ID NO: 1889062 - DNA, 15 bp, Homo sapiens
agaacagaggcctca

SEQ ID NO: 1889063 - DNA, 15 bp, Homo sapiens
gaacagaggcctcag

SEQ ID NO: 1889064 - DNA, 15 bp, Homo sapiens
ggcctcagaaataat

SEQ ID NO: 1889065 - DNA, 15 bp, Homo sapiens
gcctcagaaataatg

SEQ ID NO: 1889066 - DNA, 15 bp, Homo sapiens
cctcagaaataatgc

SEQ ID NO: 1889067 - DNA, 15 bp, Homo sapiens
ctcagaaataatgcc

SEQ ID NO: 1889068 - DNA, 15 bp, Homo sapiens
tcagaaataatgcca

SEQ ID NO: 1889069 - DNA, 15 bp, Homo sapiens
cagaaataatgccac

SEQ ID NO: 1889070 - DNA, 15 bp, Homo sapiens
agaaataatgccaca

SEQ ID NO: 1889071 - DNA, 15 bp, Homo sapiens
gaaataatgccacac

SEQ ID NO: 1889072 - DNA, 15 bp, Homo sapiens
aaataatgccacaca

SEQ ID NO: 1889073 - DNA, 15 bp, Homo sapiens
aataatgccacacat

SEQ ID NO: 1889074 - DNA, 15 bp, Homo sapiens
ataatgccacacatc

SEQ ID NO: 1889075 - DNA, 15 bp, Homo sapiens
taatgccacacatct

SEQ ID NO: 1889076 - DNA, 15 bp, Homo sapiens
aatgccacacatcta

SEQ ID NO: 1889077 - DNA, 15 bp, Homo sapiens
atgccacacatctac

SEQ ID NO: 1889078 - DNA, 15 bp, Homo sapiens
tgccacacatctaca

SEQ ID NO: 1889079 - DNA, 15 bp, Homo sapiens
gccacacatctacaa

SEQ ID NO: 1889080 - DNA, 15 bp, Homo sapiens
ccacacatctacaac

SEQ ID NO: 1889081 - DNA, 15 bp, Homo sapiens
tctacaaccatctga

SEQ ID NO: 1889082 - DNA, 15 bp, Homo sapiens
ctacaaccatctgat

SEQ ID NO: 1889083 - DNA, 15 bp, Homo sapiens
tacaaccatctgatc

SEQ ID NO: 1889084 - DNA, 15 bp, Homo sapiens
acaaccatctgatct

SEQ ID NO: 1889085 - DNA, 15 bp, Homo sapiens
caaccatctgatctt

SEQ ID NO: 1889086 - DNA, 15 bp, Homo sapiens
aaccatctgatcttt

SEQ ID NO: 1889087 - DNA, 15 bp, Homo sapiens
accatctgatctttg

SEQ ID NO: 1889088 - DNA, 15 bp, Homo sapiens
ccatctgatctttga

SEQ ID NO: 1889089 - DNA, 15 bp, Homo sapiens
catctgatctttgac

SEQ ID NO: 1889090 - DNA, 15 bp, Homo sapiens
atctgatctttgaca

SEQ ID NO: 1889091 - DNA, 15 bp, Homo sapiens
tctgatctttgacaa

SEQ ID NO: 1889092 - DNA, 15 bp, Homo sapiens
ctgatctttgacaaa

SEQ ID NO: 1889093 - DNA, 15 bp, Homo sapiens
atctttgacaaacct

SEQ ID NO: 1889094 - DNA, 15 bp, Homo sapiens
tctttgacaaacctg

SEQ ID NO: 1889095 - DNA, 15 bp, Homo sapiens
ctttgacaaacctga

SEQ ID NO: 1889096 - DNA, 15 bp, Homo sapiens
ctgagaaaaacaagc

SEQ ID NO: 1889097 - DNA, 15 bp, Homo sapiens
tgagaaaaacaagca

SEQ ID NO: 1889098 - DNA, 15 bp, Homo sapiens
gagaaaaacaagcaa

SEQ ID NO: 1889099 - DNA, 15 bp, Homo sapiens
agaaaaacaagcaat

SEQ ID NO: 1889100 - DNA, 15 bp, Homo sapiens
gaaaaacaagcaatg

SEQ ID NO: 1889101 - DNA, 15 bp, Homo sapiens
aaaaacaagcaatgg

SEQ ID NO: 1889102 - DNA, 15 bp, Homo sapiens
aaaacaagcaatggg

SEQ ID NO: 1889103 - DNA, 15 bp, Homo sapiens
aaacaagcaatgggg

SEQ ID NO: 1889104 - DNA, 15 bp, Homo sapiens
aacaagcaatgggga

SEQ ID NO: 1889105 - DNA, 15 bp, Homo sapiens
acaagcaatggggaa

SEQ ID NO: 1889106 - DNA, 15 bp, Homo sapiens
caagcaatggggaaa

SEQ ID NO: 1889107 - DNA, 15 bp, Homo sapiens
aagcaatggggaaag

SEQ ID NO: 1889108 - DNA, 15 bp, Homo sapiens
agcaatggggaaaga

SEQ ID NO: 1889109 - DNA, 15 bp, Homo sapiens
gcaatggggaaagaa

SEQ ID NO: 1889110 - DNA, 15 bp, Homo sapiens
caatggggaaagaat

SEQ ID NO: 1889111 - DNA, 15 bp, Homo sapiens
aatggggaaagaatt

SEQ ID NO: 1889112 - DNA, 15 bp, Homo sapiens
atggggaaagaattc

SEQ ID NO: 1889113 - DNA, 15 bp, Homo sapiens
tggggaaagaattcc

SEQ ID NO: 1889114 - DNA, 15 bp, Homo sapiens
ggggaaagaattccc

SEQ ID NO: 1889115 - DNA, 15 bp, Homo sapiens
gggaaagaattccct

SEQ ID NO: 1889116 - DNA, 15 bp, Homo sapiens
ggaaagaattcccta

SEQ ID NO: 1889117 - DNA, 15 bp, Homo sapiens
gaaagaattccctat

SEQ ID NO: 1889118 - DNA, 15 bp, Homo sapiens
aaagaattccctatt

SEQ ID NO: 1889119 - DNA, 15 bp, Homo sapiens
aagaattccctattt

SEQ ID NO: 1889120 - DNA, 15 bp, Homo sapiens
agaattccctattta

SEQ ID NO: 1889121 - DNA, 15 bp, Homo sapiens
gaattccctatttaa

SEQ ID NO: 1889122 - DNA, 15 bp, Homo sapiens
aattccctatttaat

SEQ ID NO: 1889123 - DNA, 15 bp, Homo sapiens
ccctatttaataaac

SEQ ID NO: 1889124 - DNA, 15 bp, Homo sapiens
cctatttaataaaca

SEQ ID NO: 1889125 - DNA, 15 bp, Homo sapiens
ctatttaataaacag

SEQ ID NO: 1889126 - DNA, 15 bp, Homo sapiens
tatttaataaacagt

SEQ ID NO: 1889127 - DNA, 15 bp, Homo sapiens
atttaataaacagtg

SEQ ID NO: 1889128 - DNA, 15 bp, Homo sapiens
tttaataaacagtgt

SEQ ID NO: 1889129 - DNA, 15 bp, Homo sapiens
ttaataaacagtgtt

SEQ ID NO: 1889130 - DNA, 15 bp, Homo sapiens
taataaacagtgttg

SEQ ID NO: 1889131 - DNA, 15 bp, Homo sapiens
aataaacagtgttgg

SEQ ID NO: 1889132 - DNA, 15 bp, Homo sapiens
ataaacagtgttggg

SEQ ID NO: 1889133 - DNA, 15 bp, Homo sapiens
taaacagtgttggga

SEQ ID NO: 1889134 - DNA, 15 bp, Homo sapiens
aaacagtgttgggaa

SEQ ID NO: 1889135 - DNA, 15 bp, Homo sapiens
aacagtgttgggaaa

SEQ ID NO: 1889136 - DNA, 15 bp, Homo sapiens
acagtgttgggaaaa

SEQ ID NO: 1889137 - DNA, 15 bp, Homo sapiens
cagtgttgggaaaac

SEQ ID NO: 1889138 - DNA, 15 bp, Homo sapiens
agtgttgggaaaact

SEQ ID NO: 1889139 - DNA, 15 bp, Homo sapiens
gtgttgggaaaactg

SEQ ID NO: 1889140 - DNA, 15 bp, Homo sapiens
gccatatgcagaaag

SEQ ID NO: 1889141 - DNA, 15 bp, Homo sapiens
ccatatgcagaaagc

SEQ ID NO: 1889142 - DNA, 15 bp, Homo sapiens
catatgcagaaagct

SEQ ID NO: 1889143 - DNA, 15 bp, Homo sapiens
atatgcagaaagctg

SEQ ID NO: 1889144 - DNA, 15 bp, Homo sapiens
tatgcagaaagctga

SEQ ID NO: 1889145 - DNA, 15 bp, Homo sapiens
atgcagaaagctgaa

SEQ ID NO: 1889146 - DNA, 15 bp, Homo sapiens
tgcagaaagctgaaa

SEQ ID NO: 1889147 - DNA, 15 bp, Homo sapiens
gcagaaagctgaaac

SEQ ID NO: 1889148 - DNA, 15 bp, Homo sapiens
cagaaagctgaaact

SEQ ID NO: 1889149 - DNA, 15 bp, Homo sapiens
acaccttatacaaaa

SEQ ID NO: 1889150 - DNA, 15 bp, Homo sapiens
caccttatacaaaag

SEQ ID NO: 1889151 - DNA, 15 bp, Homo sapiens
accttatacaaaagt

SEQ ID NO: 1889152 - DNA, 15 bp, Homo sapiens
ccttatacaaaagtt

SEQ ID NO: 1889153 - DNA, 15 bp, Homo sapiens
cttatacaaaagtta

SEQ ID NO: 1889154 - DNA, 15 bp, Homo sapiens
ttatacaaaagttaa

SEQ ID NO: 1889155 - DNA, 15 bp, Homo sapiens
tatacaaaagttaac

SEQ ID NO: 1889156 - DNA, 15 bp, Homo sapiens
atacaaaagttaact

SEQ ID NO: 1889157 - DNA, 15 bp, Homo sapiens
tacaaaagttaactc

SEQ ID NO: 1889158 - DNA, 15 bp, Homo sapiens
acaaaagttaactca

SEQ ID NO: 1889159 - DNA, 15 bp, Homo sapiens
caaaagttaactcaa

SEQ ID NO: 1889160 - DNA, 15 bp, Homo sapiens
aaaagttaactcaag

SEQ ID NO: 1889161 - DNA, 15 bp, Homo sapiens
aaagttaactcaaga

SEQ ID NO: 1889162 - DNA, 15 bp, Homo sapiens
aagttaactcaagat

SEQ ID NO: 1889163 - DNA, 15 bp, Homo sapiens
agttaactcaagatg

SEQ ID NO: 1889164 - DNA, 15 bp, Homo sapiens
gttaactcaagatgg

SEQ ID NO: 1889165 - DNA, 15 bp, Homo sapiens
gattaaagacttaaa

SEQ ID NO: 1889166 - DNA, 15 bp, Homo sapiens
attaaagacttaaac

SEQ ID NO: 1889167 - DNA, 15 bp, Homo sapiens
ttaaagacttaaaca

SEQ ID NO: 1889168 - DNA, 15 bp, Homo sapiens
taaagacttaaacat

SEQ ID NO: 1889169 - DNA, 15 bp, Homo sapiens
aaagacttaaacatc

SEQ ID NO: 1889170 - DNA, 15 bp, Homo sapiens
aagacttaaacatca

SEQ ID NO: 1889171 - DNA, 15 bp, Homo sapiens
agacttaaacatcag

SEQ ID NO: 1889172 - DNA, 15 bp, Homo sapiens
gacttaaacatcaga

SEQ ID NO: 1889173 - DNA, 15 bp, Homo sapiens
acttaaacatcagac

SEQ ID NO: 1889174 - DNA, 15 bp, Homo sapiens
cttaaacatcagacc

SEQ ID NO: 1889175 - DNA, 15 bp, Homo sapiens
ttaaacatcagacct

SEQ ID NO: 1889176 - DNA, 15 bp, Homo sapiens
taaacatcagacctt

SEQ ID NO: 1889177 - DNA, 15 bp, Homo sapiens
aaacatcagacctta

SEQ ID NO: 1889178 - DNA, 15 bp, Homo sapiens
aacatcagaccttaa

SEQ ID NO: 1889179 - DNA, 15 bp, Homo sapiens
acatcagaccttaaa

SEQ ID NO: 1889180 - DNA, 15 bp, Homo sapiens
catcagaccttaaac

SEQ ID NO: 1889181 - DNA, 15 bp, Homo sapiens
atcagaccttaaacc

SEQ ID NO: 1889182 - DNA, 15 bp, Homo sapiens
tcagaccttaaacca

SEQ ID NO: 1889183 - DNA, 15 bp, Homo sapiens
cagaccttaaaccat

SEQ ID NO: 1889184 - DNA, 15 bp, Homo sapiens
agaccttaaaccata

SEQ ID NO: 1889185 - DNA, 15 bp, Homo sapiens
gaccttaaaccataa

SEQ ID NO: 1889186 - DNA, 15 bp, Homo sapiens
accttaaaccataaa

SEQ ID NO: 1889187 - DNA, 15 bp, Homo sapiens
ccttaaaccataaaa

SEQ ID NO: 1889188 - DNA, 15 bp, Homo sapiens
cttaaaccataaaaa

SEQ ID NO: 1889189 - DNA, 15 bp, Homo sapiens
ttaaaccataaaaac

SEQ ID NO: 1889190 - DNA, 15 bp, Homo sapiens
taaaccataaaaacc

SEQ ID NO: 1889191 - DNA, 15 bp, Homo sapiens
agaagaaaacctaga

SEQ ID NO: 1889192 - DNA, 15 bp, Homo sapiens
gaagaaaacctagac

SEQ ID NO: 1889193 - DNA, 15 bp, Homo sapiens
aagaaaacctagaca

SEQ ID NO: 1889194 - DNA, 15 bp, Homo sapiens
agaaaacctagacaa

SEQ ID NO: 1889195 - DNA, 15 bp, Homo sapiens
gaaaacctagacaat

SEQ ID NO: 1889196 - DNA, 15 bp, Homo sapiens
aaaacctagacaata

SEQ ID NO: 1889197 - DNA, 15 bp, Homo sapiens
aaacctagacaatac

SEQ ID NO: 1889198 - DNA, 15 bp, Homo sapiens
aacctagacaatacc

SEQ ID NO: 1889199 - DNA, 15 bp, Homo sapiens
acctagacaatacca

SEQ ID NO: 1889200 - DNA, 15 bp, Homo sapiens
cctagacaataccat

SEQ ID NO: 1889201 - DNA, 15 bp, Homo sapiens
ctagacaataccatt

SEQ ID NO: 1889202 - DNA, 15 bp, Homo sapiens
tagacaataccattc

SEQ ID NO: 1889203 - DNA, 15 bp, Homo sapiens
agacaataccattca

SEQ ID NO: 1889204 - DNA, 15 bp, Homo sapiens
gacaataccattcag

SEQ ID NO: 1889205 - DNA, 15 bp, Homo sapiens
acaataccattcagg

SEQ ID NO: 1889206 - DNA, 15 bp, Homo sapiens
ggacataggcatggg

SEQ ID NO: 1889207 - DNA, 15 bp, Homo sapiens
gacataggcatgggc

SEQ ID NO: 1889208 - DNA, 15 bp, Homo sapiens
acataggcatgggca

SEQ ID NO: 1889209 - DNA, 15 bp, Homo sapiens
cataggcatgggcaa

SEQ ID NO: 1889210 - DNA, 15 bp, Homo sapiens
ataggcatgggcaaa

SEQ ID NO: 1889211 - DNA, 15 bp, Homo sapiens
taggcatgggcaaag

SEQ ID NO: 1889212 - DNA, 15 bp, Homo sapiens
aggcatgggcaaaga

SEQ ID NO: 1889213 - DNA, 15 bp, Homo sapiens
ggcatgggcaaagac

SEQ ID NO: 1889214 - DNA, 15 bp, Homo sapiens
gcatgggcaaagact

SEQ ID NO: 1889215 - DNA, 15 bp, Homo sapiens
catgggcaaagactt

SEQ ID NO: 1889216 - DNA, 15 bp, Homo sapiens
atgggcaaagacttc

SEQ ID NO: 1889217 - DNA, 15 bp, Homo sapiens
tgggcaaagacttca

SEQ ID NO: 1889218 - DNA, 15 bp, Homo sapiens
gggcaaagacttcat

SEQ ID NO: 1889219 - DNA, 15 bp, Homo sapiens
ggcaaagacttcatg

SEQ ID NO: 1889220 - DNA, 15 bp, Homo sapiens
gcaaagacttcatga

SEQ ID NO: 1889221 - DNA, 15 bp, Homo sapiens
caaagacttcatgac

SEQ ID NO: 1889222 - DNA, 15 bp, Homo sapiens
aaagacttcatgact

SEQ ID NO: 1889223 - DNA, 15 bp, Homo sapiens
aagacttcatgacta

SEQ ID NO: 1889224 - DNA, 15 bp, Homo sapiens
agacttcatgactaa

SEQ ID NO: 1889225 - DNA, 15 bp, Homo sapiens
gacttcatgactaaa

SEQ ID NO: 1889226 - DNA, 15 bp, Homo sapiens
acttcatgactaaaa

SEQ ID NO: 1889227 - DNA, 15 bp, Homo sapiens
cttcatgactaaaac

SEQ ID NO: 1889228 - DNA, 15 bp, Homo sapiens
ttcatgactaaaaca

SEQ ID NO: 1889229 - DNA, 15 bp, Homo sapiens
tcatgactaaaacac

SEQ ID NO: 1889230 - DNA, 15 bp, Homo sapiens
catgactaaaacacc

SEQ ID NO: 1889231 - DNA, 15 bp, Homo sapiens
atgactaaaacacca

SEQ ID NO: 1889232 - DNA, 15 bp, Homo sapiens
caatggcaacaaaat

SEQ ID NO: 1889233 - DNA, 15 bp, Homo sapiens
aatggcaacaaaatc

SEQ ID NO: 1889234 - DNA, 15 bp, Homo sapiens
atggcaacaaaatcc

SEQ ID NO: 1889235 - DNA, 15 bp, Homo sapiens
tggcaacaaaatcca

SEQ ID NO: 1889236 - DNA, 15 bp, Homo sapiens
ggcaacaaaatccaa

SEQ ID NO: 1889237 - DNA, 15 bp, Homo sapiens
gcaacaaaatccaaa

SEQ ID NO: 1889238 - DNA, 15 bp, Homo sapiens
caacaaaatccaaaa

SEQ ID NO: 1889239 - DNA, 15 bp, Homo sapiens
aacaaaatccaaaat

SEQ ID NO: 1889240 - DNA, 15 bp, Homo sapiens
caaaatccaaaattg

SEQ ID NO: 1889241 - DNA, 15 bp, Homo sapiens
aaaatccaaaattga

SEQ ID NO: 1889242 - DNA, 15 bp, Homo sapiens
aaatccaaaattgac

SEQ ID NO: 1889243 - DNA, 15 bp, Homo sapiens
aatccaaaattgaca

SEQ ID NO: 1889244 - DNA, 15 bp, Homo sapiens
atccaaaattgacaa

SEQ ID NO: 1889245 - DNA, 15 bp, Homo sapiens
tccaaaattgacaaa

SEQ ID NO: 1889246 - DNA, 15 bp, Homo sapiens
ccaaaattgacaaat

SEQ ID NO: 1889247 - DNA, 15 bp, Homo sapiens
caaaattgacaaatg

SEQ ID NO: 1889248 - DNA, 15 bp, Homo sapiens
aaaattgacaaatgg

SEQ ID NO: 1889249 - DNA, 15 bp, Homo sapiens
aaattgacaaatggg

SEQ ID NO: 1889250 - DNA, 15 bp, Homo sapiens
aattgacaaatggga

SEQ ID NO: 1889251 - DNA, 15 bp, Homo sapiens
attgacaaatgggat

SEQ ID NO: 1889252 - DNA, 15 bp, Homo sapiens
ttgacaaatgggatc

SEQ ID NO: 1889253 - DNA, 15 bp, Homo sapiens
tgacaaatgggatct

SEQ ID NO: 1889254 - DNA, 15 bp, Homo sapiens
caaatgggatctaaa

SEQ ID NO: 1889255 - DNA, 15 bp, Homo sapiens
aaatgggatctaaat

SEQ ID NO: 1889256 - DNA, 15 bp, Homo sapiens
aatgggatctaaata

SEQ ID NO: 1889257 - DNA, 15 bp, Homo sapiens
atgggatctaaataa

SEQ ID NO: 1889258 - DNA, 15 bp, Homo sapiens
tgggatctaaataaa

SEQ ID NO: 1889259 - DNA, 15 bp, Homo sapiens
gggatctaaataaac

SEQ ID NO: 1889260 - DNA, 15 bp, Homo sapiens
ggatctaaataaact

SEQ ID NO: 1889261 - DNA, 15 bp, Homo sapiens
gatctaaataaacta

SEQ ID NO: 1889262 - DNA, 15 bp, Homo sapiens
atctaaataaactaa

SEQ ID NO: 1889263 - DNA, 15 bp, Homo sapiens
tctaaataaactaaa

SEQ ID NO: 1889264 - DNA, 15 bp, Homo sapiens
ctaaataaactaaag

SEQ ID NO: 1889265 - DNA, 15 bp, Homo sapiens
taaataaactaaaga

SEQ ID NO: 1889266 - DNA, 15 bp, Homo sapiens
aaataaactaaagaa

SEQ ID NO: 1889267 - DNA, 15 bp, Homo sapiens
aataaactaaagaac

SEQ ID NO: 1889268 - DNA, 15 bp, Homo sapiens
ataaactaaagaact

SEQ ID NO: 1889269 - DNA, 15 bp, Homo sapiens
taaactaaagaactt

SEQ ID NO: 1889270 - DNA, 15 bp, Homo sapiens
aaactaaagaacttc

SEQ ID NO: 1889271 - DNA, 15 bp, Homo sapiens
aactaaagaacttct

SEQ ID NO: 1889272 - DNA, 15 bp, Homo sapiens
actaaagaacttctg

SEQ ID NO: 1889273 - DNA, 15 bp, Homo sapiens
ctaaagaacttctgc

SEQ ID NO: 1889274 - DNA, 15 bp, Homo sapiens
taaagaacttctgca

SEQ ID NO: 1889275 - DNA, 15 bp, Homo sapiens
aaagaacttctgcac

SEQ ID NO: 1889276 - DNA, 15 bp, Homo sapiens
aagaacttctgcaca

SEQ ID NO: 1889277 - DNA, 15 bp, Homo sapiens
agaacttctgcacag

SEQ ID NO: 1889278 - DNA, 15 bp, Homo sapiens
gaacttctgcacagc

SEQ ID NO: 1889279 - DNA, 15 bp, Homo sapiens
aacttctgcacagca

SEQ ID NO: 1889280 - DNA, 15 bp, Homo sapiens
acttctgcacagcaa

SEQ ID NO: 1889281 - DNA, 15 bp, Homo sapiens
cagcaaaagaaactg

SEQ ID NO: 1889282 - DNA, 15 bp, Homo sapiens
agcaaaagaaactgt

SEQ ID NO: 1889283 - DNA, 15 bp, Homo sapiens
gcaaaagaaactgtc

SEQ ID NO: 1889284 - DNA, 15 bp, Homo sapiens
caaaagaaactgtcg

SEQ ID NO: 1889285 - DNA, 15 bp, Homo sapiens
aaaagaaactgtcgt

SEQ ID NO: 1889286 - DNA, 15 bp, Homo sapiens
aaagaaactgtcgtc

SEQ ID NO: 1889287 - DNA, 15 bp, Homo sapiens
aagaaactgtcgtca

SEQ ID NO: 1889288 - DNA, 15 bp, Homo sapiens
agaaactgtcgtcag

SEQ ID NO: 1889289 - DNA, 15 bp, Homo sapiens
gaaactgtcgtcaga

SEQ ID NO: 1889290 - DNA, 15 bp, Homo sapiens
aaactgtcgtcagag

SEQ ID NO: 1889291 - DNA, 15 bp, Homo sapiens
aactgtcgtcagagt

SEQ ID NO: 1889292 - DNA, 15 bp, Homo sapiens
actgtcgtcagagtg

SEQ ID NO: 1889293 - DNA, 15 bp, Homo sapiens
ctgtcgtcagagtga

SEQ ID NO: 1889294 - DNA, 15 bp, Homo sapiens
tgtcgtcagagtgaa

SEQ ID NO: 1889295 - DNA, 15 bp, Homo sapiens
gtcgtcagagtgaac

SEQ ID NO: 1889296 - DNA, 15 bp, Homo sapiens
tcgtcagagtgaaca

SEQ ID NO: 1889297 - DNA, 15 bp, Homo sapiens
cgtcagagtgaacag

SEQ ID NO: 1889298 - DNA, 15 bp, Homo sapiens
gtcagagtgaacagg

SEQ ID NO: 1889299 - DNA, 15 bp, Homo sapiens
tcagagtgaacaggt

SEQ ID NO: 1889300 - DNA, 15 bp, Homo sapiens
cagagtgaacaggta

SEQ ID NO: 1889301 - DNA, 15 bp, Homo sapiens
agagtgaacaggtaa

SEQ ID NO: 1889302 - DNA, 15 bp, Homo sapiens
gagtgaacaggtaac

SEQ ID NO: 1889303 - DNA, 15 bp, Homo sapiens
agtgaacaggtaacc

SEQ ID NO: 1889304 - DNA, 15 bp, Homo sapiens
gtgaacaggtaacct

SEQ ID NO: 1889305 - DNA, 15 bp, Homo sapiens
tgaacaggtaacctg

SEQ ID NO: 1889306 - DNA, 15 bp, Homo sapiens
gaacaggtaacctgc

SEQ ID NO: 1889307 - DNA, 15 bp, Homo sapiens
aacaggtaacctgca

SEQ ID NO: 1889308 - DNA, 15 bp, Homo sapiens
acaggtaacctgcag

SEQ ID NO: 1889309 - DNA, 15 bp, Homo sapiens
caggtaacctgcaga

SEQ ID NO: 1889310 - DNA, 15 bp, Homo sapiens
aggtaacctgcagaa

SEQ ID NO: 1889311 - DNA, 15 bp, Homo sapiens
ggtaacctgcagaat

SEQ ID NO: 1889312 - DNA, 15 bp, Homo sapiens
gtaacctgcagaatg

SEQ ID NO: 1889313 - DNA, 15 bp, Homo sapiens
taacctgcagaatgg

SEQ ID NO: 1889314 - DNA, 15 bp, Homo sapiens
aacctgcagaatggg

SEQ ID NO: 1889315 - DNA, 15 bp, Homo sapiens
acctgcagaatggga

SEQ ID NO: 1889316 - DNA, 15 bp, Homo sapiens
cctgcagaatgggag

SEQ ID NO: 1889317 - DNA, 15 bp, Homo sapiens
ctgcagaatgggaga

SEQ ID NO: 1889318 - DNA, 15 bp, Homo sapiens
tgcagaatgggagaa

SEQ ID NO: 1889319 - DNA, 15 bp, Homo sapiens
gcagaatgggagaaa

SEQ ID NO: 1889320 - DNA, 15 bp, Homo sapiens
ggagaaaatttttat

SEQ ID NO: 1889321 - DNA, 15 bp, Homo sapiens
gagaaaatttttatc

SEQ ID NO: 1889322 - DNA, 15 bp, Homo sapiens
agaaaatttttatct

SEQ ID NO: 1889323 - DNA, 15 bp, Homo sapiens
gaaaatttttatcta

SEQ ID NO: 1889324 - DNA, 15 bp, Homo sapiens
aaaatttttatctat

SEQ ID NO: 1889325 - DNA, 15 bp, Homo sapiens
aaatttttatctatc

SEQ ID NO: 1889326 - DNA, 15 bp, Homo sapiens
aatttttatctatct

SEQ ID NO: 1889327 - DNA, 15 bp, Homo sapiens
atttttatctatcta

SEQ ID NO: 1889328 - DNA, 15 bp, Homo sapiens
tttttatctatctat

SEQ ID NO: 1889329 - DNA, 15 bp, Homo sapiens
ttttatctatctatc

SEQ ID NO: 1889330 - DNA, 15 bp, Homo sapiens
tttatctatctatct

SEQ ID NO: 1889331 - DNA, 15 bp, Homo sapiens
ttatctatctatcta

SEQ ID NO: 1889332 - DNA, 15 bp, Homo sapiens
ctatctatctatctg

SEQ ID NO: 1889333 - DNA, 15 bp, Homo sapiens
tatctatctatctga

SEQ ID NO: 1889334 - DNA, 15 bp, Homo sapiens
atctatctatctgac

SEQ ID NO: 1889335 - DNA, 15 bp, Homo sapiens
tctatctatctgaca

SEQ ID NO: 1889336 - DNA, 15 bp, Homo sapiens
ctatctatctgacaa

SEQ ID NO: 1889337 - DNA, 15 bp, Homo sapiens
tatctatctgacaaa

SEQ ID NO: 1889338 - DNA, 15 bp, Homo sapiens
atctatctgacaaag

SEQ ID NO: 1889339 - DNA, 15 bp, Homo sapiens
tctatctgacaaaga

SEQ ID NO: 1889340 - DNA, 15 bp, Homo sapiens
ctatctgacaaagag

SEQ ID NO: 1889341 - DNA, 15 bp, Homo sapiens
tatctgacaaagagc

SEQ ID NO: 1889342 - DNA, 15 bp, Homo sapiens
atctgacaaagagct

SEQ ID NO: 1889343 - DNA, 15 bp, Homo sapiens
tctgacaaagagcta

SEQ ID NO: 1889344 - DNA, 15 bp, Homo sapiens
ctgacaaagagctat

SEQ ID NO: 1889345 - DNA, 15 bp, Homo sapiens
tgacaaagagctatt

SEQ ID NO: 1889346 - DNA, 15 bp, Homo sapiens
gacaaagagctatta

SEQ ID NO: 1889347 - DNA, 15 bp, Homo sapiens
acaaagagctattat

SEQ ID NO: 1889348 - DNA, 15 bp, Homo sapiens
caaagagctattatc

SEQ ID NO: 1889349 - DNA, 15 bp, Homo sapiens
aaagagctattatcc

SEQ ID NO: 1889350 - DNA, 15 bp, Homo sapiens
aagagctattatcca

SEQ ID NO: 1889351 - DNA, 15 bp, Homo sapiens
agagctattatccag

SEQ ID NO: 1889352 - DNA, 15 bp, Homo sapiens
gagctattatccaga

SEQ ID NO: 1889353 - DNA, 15 bp, Homo sapiens
agctattatccagaa

SEQ ID NO: 1889354 - DNA, 15 bp, Homo sapiens
gctattatccagaat

SEQ ID NO: 1889355 - DNA, 15 bp, Homo sapiens
ctattatccagaatc

SEQ ID NO: 1889356 - DNA, 15 bp, Homo sapiens
tattatccagaatct

SEQ ID NO: 1889357 - DNA, 15 bp, Homo sapiens
attatccagaatcta

SEQ ID NO: 1889358 - DNA, 15 bp, Homo sapiens
ttatccagaatctac

SEQ ID NO: 1889359 - DNA, 15 bp, Homo sapiens
tatccagaatctaca

SEQ ID NO: 1889360 - DNA, 15 bp, Homo sapiens
atccagaatctacaa

SEQ ID NO: 1889361 - DNA, 15 bp, Homo sapiens
tccagaatctacaag

SEQ ID NO: 1889362 - DNA, 15 bp, Homo sapiens
ccagaatctacaagg

SEQ ID NO: 1889363 - DNA, 15 bp, Homo sapiens
cagaatctacaagga

SEQ ID NO: 1889364 - DNA, 15 bp, Homo sapiens
agaatctacaaggaa

SEQ ID NO: 1889365 - DNA, 15 bp, Homo sapiens
gaatctacaaggaac

SEQ ID NO: 1889366 - DNA, 15 bp, Homo sapiens
aatctacaaggaact

SEQ ID NO: 1889367 - DNA, 15 bp, Homo sapiens
atctacaaggaactt

SEQ ID NO: 1889368 - DNA, 15 bp, Homo sapiens
tctacaaggaactta

SEQ ID NO: 1889369 - DNA, 15 bp, Homo sapiens
ctacaaggaacttaa

SEQ ID NO: 1889370 - DNA, 15 bp, Homo sapiens
tacaaggaacttaaa

SEQ ID NO: 1889371 - DNA, 15 bp, Homo sapiens
acaaggaacttaaac

SEQ ID NO: 1889372 - DNA, 15 bp, Homo sapiens
caaggaacttaaacg

SEQ ID NO: 1889373 - DNA, 15 bp, Homo sapiens
aaggaacttaaacga

SEQ ID NO: 1889374 - DNA, 15 bp, Homo sapiens
aggaacttaaacgaa

SEQ ID NO: 1889375 - DNA, 15 bp, Homo sapiens
ggaacttaaacgaat

SEQ ID NO: 1889376 - DNA, 15 bp, Homo sapiens
gaacttaaacgaatt

SEQ ID NO: 1889377 - DNA, 15 bp, Homo sapiens
aacttaaacgaattt

SEQ ID NO: 1889378 - DNA, 15 bp, Homo sapiens
acttaaacgaattta

SEQ ID NO: 1889379 - DNA, 15 bp, Homo sapiens
cttaaacgaatttac

SEQ ID NO: 1889380 - DNA, 15 bp, Homo sapiens
ttaaacgaatttaca

SEQ ID NO: 1889381 - DNA, 15 bp, Homo sapiens
taaacgaatttacat

SEQ ID NO: 1889382 - DNA, 15 bp, Homo sapiens
aaacgaatttacatg

SEQ ID NO: 1889383 - DNA, 15 bp, Homo sapiens
aacgaatttacatga

SEQ ID NO: 1889384 - DNA, 15 bp, Homo sapiens
acgaatttacatgaa

SEQ ID NO: 1889385 - DNA, 15 bp, Homo sapiens
cgaatttacatgaaa

SEQ ID NO: 1889386 - DNA, 15 bp, Homo sapiens
gaatttacatgaaaa

SEQ ID NO: 1889387 - DNA, 15 bp, Homo sapiens
aatttacatgaaaaa

SEQ ID NO: 1889388 - DNA, 15 bp, Homo sapiens
atttacatgaaaaaa

SEQ ID NO: 1889389 - DNA, 15 bp, Homo sapiens
tttacatgaaaaaaa

SEQ ID NO: 1889390 - DNA, 15 bp, Homo sapiens
ttacatgaaaaaaac

SEQ ID NO: 1889391 - DNA, 15 bp, Homo sapiens
tacatgaaaaaaaca

SEQ ID NO: 1889392 - DNA, 15 bp, Homo sapiens
acatgaaaaaaacaa

SEQ ID NO: 1889393 - DNA, 15 bp, Homo sapiens
catgaaaaaaacaaa

SEQ ID NO: 1889394 - DNA, 15 bp, Homo sapiens
atgaaaaaaacaaac

SEQ ID NO: 1889395 - DNA, 15 bp, Homo sapiens
aaaaaaacaaacaac

SEQ ID NO: 1889396 - DNA, 15 bp, Homo sapiens
aaaaaacaaacaacc

SEQ ID NO: 1889397 - DNA, 15 bp, Homo sapiens
aaaaacaaacaaccc

SEQ ID NO: 1889398 - DNA, 15 bp, Homo sapiens
aaaacaaacaacccc

SEQ ID NO: 1889399 - DNA, 15 bp, Homo sapiens
aaacaaacaacccca

SEQ ID NO: 1889400 - DNA, 15 bp, Homo sapiens
aacaaacaaccccat

SEQ ID NO: 1889401 - DNA, 15 bp, Homo sapiens
acaaacaaccccatc

SEQ ID NO: 1889402 - DNA, 15 bp, Homo sapiens
caaacaaccccatca

SEQ ID NO: 1889403 - DNA, 15 bp, Homo sapiens
aaacaaccccatcaa

SEQ ID NO: 1889404 - DNA, 15 bp, Homo sapiens
aacaaccccatcaaa

SEQ ID NO: 1889405 - DNA, 15 bp, Homo sapiens
acaaccccatcaaaa

SEQ ID NO: 1889406 - DNA, 15 bp, Homo sapiens
caaccccatcaaaaa

SEQ ID NO: 1889407 - DNA, 15 bp, Homo sapiens
aaccccatcaaaaag

SEQ ID NO: 1889408 - DNA, 15 bp, Homo sapiens
accccatcaaaaagt

SEQ ID NO: 1889409 - DNA, 15 bp, Homo sapiens
ccccatcaaaaagtg

SEQ ID NO: 1889410 - DNA, 15 bp, Homo sapiens
catcaaaaagtggga

SEQ ID NO: 1889411 - DNA, 15 bp, Homo sapiens
atcaaaaagtgggag

SEQ ID NO: 1889412 - DNA, 15 bp, Homo sapiens
tcaaaaagtgggagt

SEQ ID NO: 1889413 - DNA, 15 bp, Homo sapiens
caaaaagtgggagtt

SEQ ID NO: 1889414 - DNA, 15 bp, Homo sapiens
aaaaagtgggagttg

SEQ ID NO: 1889415 - DNA, 15 bp, Homo sapiens
aaaagtgggagttga

SEQ ID NO: 1889416 - DNA, 15 bp, Homo sapiens
aaagtgggagttgaa

SEQ ID NO: 1889417 - DNA, 15 bp, Homo sapiens
acatggacacaggga

SEQ ID NO: 1889418 - DNA, 15 bp, Homo sapiens
catggacacagggag

SEQ ID NO: 1889419 - DNA, 15 bp, Homo sapiens
atggacacagggagg

SEQ ID NO: 1889420 - DNA, 15 bp, Homo sapiens
tggacacagggaggg

SEQ ID NO: 1889421 - DNA, 15 bp, Homo sapiens
ggacacagggagggg

SEQ ID NO: 1889422 - DNA, 15 bp, Homo sapiens
gacacagggagggga

SEQ ID NO: 1889423 - DNA, 15 bp, Homo sapiens
acacagggaggggat

SEQ ID NO: 1889424 - DNA, 15 bp, Homo sapiens
cacagggaggggatc

SEQ ID NO: 1889425 - DNA, 15 bp, Homo sapiens
acagggaggggatca

SEQ ID NO: 1889426 - DNA, 15 bp, Homo sapiens
cagggaggggatcat

SEQ ID NO: 1889427 - DNA, 15 bp, Homo sapiens
agggaggggatcatt

SEQ ID NO: 1889428 - DNA, 15 bp, Homo sapiens
gggaggggatcattg

SEQ ID NO: 1889429 - DNA, 15 bp, Homo sapiens
ggaggggatcattgc

SEQ ID NO: 1889430 - DNA, 15 bp, Homo sapiens
gaggggatcattgca

SEQ ID NO: 1889431 - DNA, 15 bp, Homo sapiens
aggggatcattgcac

SEQ ID NO: 1889432 - DNA, 15 bp, Homo sapiens
ggggatcattgcaca

SEQ ID NO: 1889433 - DNA, 15 bp, Homo sapiens
gggatcattgcacac

SEQ ID NO: 1889434 - DNA, 15 bp, Homo sapiens
ggatcattgcacact

SEQ ID NO: 1889435 - DNA, 15 bp, Homo sapiens
gatcattgcacactg

SEQ ID NO: 1889436 - DNA, 15 bp, Homo sapiens
atcattgcacactgg

SEQ ID NO: 1889437 - DNA, 15 bp, Homo sapiens
tcattgcacactggg

SEQ ID NO: 1889438 - DNA, 15 bp, Homo sapiens
cattgcacactggga

SEQ ID NO: 1889439 - DNA, 15 bp, Homo sapiens
attgcacactgggac

SEQ ID NO: 1889440 - DNA, 15 bp, Homo sapiens
ttgcacactgggacc

SEQ ID NO: 1889441 - DNA, 15 bp, Homo sapiens
tgcacactgggacct

SEQ ID NO: 1889442 - DNA, 15 bp, Homo sapiens
gcacactgggacctg

SEQ ID NO: 1889443 - DNA, 15 bp, Homo sapiens
cacactgggacctgt

SEQ ID NO: 1889444 - DNA, 15 bp, Homo sapiens
acactgggacctgtc

SEQ ID NO: 1889445 - DNA, 15 bp, Homo sapiens
cactgggacctgtcg

SEQ ID NO: 1889446 - DNA, 15 bp, Homo sapiens
actgggacctgtcga

SEQ ID NO: 1889447 - DNA, 15 bp, Homo sapiens
ctgggacctgtcgag

SEQ ID NO: 1889448 - DNA, 15 bp, Homo sapiens
tgggacctgtcgagg

SEQ ID NO: 1889449 - DNA, 15 bp, Homo sapiens
gggacctgtcgaggt

SEQ ID NO: 1889450 - DNA, 15 bp, Homo sapiens
ggacctgtcgaggtt

SEQ ID NO: 1889451 - DNA, 15 bp, Homo sapiens
gacctgtcgaggttg

SEQ ID NO: 1889452 - DNA, 15 bp, Homo sapiens
acctgtcgaggttgg

SEQ ID NO: 1889453 - DNA, 15 bp, Homo sapiens
cctgtcgaggttggg

SEQ ID NO: 1889454 - DNA, 15 bp, Homo sapiens
ctgtcgaggttgggt

SEQ ID NO: 1889455 - DNA, 15 bp, Homo sapiens
tgtcgaggttgggtg

SEQ ID NO: 1889456 - DNA, 15 bp, Homo sapiens
gtcgaggttgggtgg

SEQ ID NO: 1889457 - DNA, 15 bp, Homo sapiens
tcgaggttgggtggc

SEQ ID NO: 1889458 - DNA, 15 bp, Homo sapiens
cgaggttgggtggct

SEQ ID NO: 1889459 - DNA, 15 bp, Homo sapiens
gaggttgggtggcta

SEQ ID NO: 1889460 - DNA, 15 bp, Homo sapiens
aggttgggtggctag

SEQ ID NO: 1889461 - DNA, 15 bp, Homo sapiens
ggttgggtggctagg

SEQ ID NO: 1889462 - DNA, 15 bp, Homo sapiens
gttgggtggctaggg

SEQ ID NO: 1889463 - DNA, 15 bp, Homo sapiens
ttgggtggctagggg

SEQ ID NO: 1889464 - DNA, 15 bp, Homo sapiens
tgggtggctagggga

SEQ ID NO: 1889465 - DNA, 15 bp, Homo sapiens
gggtggctaggggag

SEQ ID NO: 1889466 - DNA, 15 bp, Homo sapiens
ggtggctaggggagg

SEQ ID NO: 1889467 - DNA, 15 bp, Homo sapiens
gtggctaggggaggg

SEQ ID NO: 1889468 - DNA, 15 bp, Homo sapiens
tggctaggggaggga

SEQ ID NO: 1889469 - DNA, 15 bp, Homo sapiens
ggctaggggagggat

SEQ ID NO: 1889470 - DNA, 15 bp, Homo sapiens
gctaggggagggata

SEQ ID NO: 1889471 - DNA, 15 bp, Homo sapiens
ctaggggagggatag

SEQ ID NO: 1889472 - DNA, 15 bp, Homo sapiens
ggtgcagcaaaccat

SEQ ID NO: 1889473 - DNA, 15 bp, Homo sapiens
gtgcagcaaaccatc

SEQ ID NO: 1889474 - DNA, 15 bp, Homo sapiens
tgcagcaaaccatca

SEQ ID NO: 1889475 - DNA, 15 bp, Homo sapiens
gcagcaaaccatcat

SEQ ID NO: 1889476 - DNA, 15 bp, Homo sapiens
cagcaaaccatcatg

SEQ ID NO: 1889477 - DNA, 15 bp, Homo sapiens
agcaaaccatcatgg

SEQ ID NO: 1889478 - DNA, 15 bp, Homo sapiens
gcaaaccatcatggc

SEQ ID NO: 1889479 - DNA, 15 bp, Homo sapiens
caaaccatcatggca

SEQ ID NO: 1889480 - DNA, 15 bp, Homo sapiens
aaaccatcatggcat

SEQ ID NO: 1889481 - DNA, 15 bp, Homo sapiens
aaccatcatggcatg

SEQ ID NO: 1889482 - DNA, 15 bp, Homo sapiens
accatcatggcatgt

SEQ ID NO: 1889483 - DNA, 15 bp, Homo sapiens
ccatcatggcatgtg

SEQ ID NO: 1889484 - DNA, 15 bp, Homo sapiens
catcatggcatgtgt

SEQ ID NO: 1889485 - DNA, 15 bp, Homo sapiens
atcatggcatgtgta

SEQ ID NO: 1889486 - DNA, 15 bp, Homo sapiens
tcatggcatgtgtat

SEQ ID NO: 1889487 - DNA, 15 bp, Homo sapiens
catggcatgtgtata

SEQ ID NO: 1889488 - DNA, 15 bp, Homo sapiens
atggcatgtgtatac

SEQ ID NO: 1889489 - DNA, 15 bp, Homo sapiens
tggcatgtgtatacc

SEQ ID NO: 1889490 - DNA, 15 bp, Homo sapiens
ggcatgtgtatacct

SEQ ID NO: 1889491 - DNA, 15 bp, Homo sapiens
gcatgtgtataccta

SEQ ID NO: 1889492 - DNA, 15 bp, Homo sapiens
catgtgtatacctat

SEQ ID NO: 1889493 - DNA, 15 bp, Homo sapiens
atgtgtatacctatg

SEQ ID NO: 1889494 - DNA, 15 bp, Homo sapiens
tgtgtatacctatgt

SEQ ID NO: 1889495 - DNA, 15 bp, Homo sapiens
gtgtatacctatgta

SEQ ID NO: 1889496 - DNA, 15 bp, Homo sapiens
tgtatacctatgtaa

SEQ ID NO: 1889497 - DNA, 15 bp, Homo sapiens
gtatacctatgtaaa

SEQ ID NO: 1889498 - DNA, 15 bp, Homo sapiens
tatacctatgtaaaa

SEQ ID NO: 1889499 - DNA, 15 bp, Homo sapiens
atacctatgtaaaaa

SEQ ID NO: 1889500 - DNA, 15 bp, Homo sapiens
tacctatgtaaaaaa

SEQ ID NO: 1889501 - DNA, 15 bp, Homo sapiens
acctatgtaaaaaac

SEQ ID NO: 1889502 - DNA, 15 bp, Homo sapiens
cctatgtaaaaaacc

SEQ ID NO: 1889503 - DNA, 15 bp, Homo sapiens
ctatgtaaaaaacct

SEQ ID NO: 1889504 - DNA, 15 bp, Homo sapiens
tatgtaaaaaacctg

SEQ ID NO: 1889505 - DNA, 15 bp, Homo sapiens
atgtaaaaaacctgc

SEQ ID NO: 1889506 - DNA, 15 bp, Homo sapiens
tgtaaaaaacctgca

SEQ ID NO: 1889507 - DNA, 15 bp, Homo sapiens
gtaaaaaacctgcac

SEQ ID NO: 1889508 - DNA, 15 bp, Homo sapiens
taaaaaacctgcacg

SEQ ID NO: 1889509 - DNA, 15 bp, Homo sapiens
aaaaaacctgcacgt

SEQ ID NO: 1889510 - DNA, 15 bp, Homo sapiens
aaaaacctgcacgtt

SEQ ID NO: 1889511 - DNA, 15 bp, Homo sapiens
aaaacctgcacgttc

SEQ ID NO: 1889512 - DNA, 15 bp, Homo sapiens
aaacctgcacgttct

SEQ ID NO: 1889513 - DNA, 15 bp, Homo sapiens
aacctgcacgttctg

SEQ ID NO: 1889514 - DNA, 15 bp, Homo sapiens
acctgcacgttctgc

SEQ ID NO: 1889515 - DNA, 15 bp, Homo sapiens
cctgcacgttctgca

SEQ ID NO: 1889516 - DNA, 15 bp, Homo sapiens
ctgcacgttctgcac

SEQ ID NO: 1889517 - DNA, 15 bp, Homo sapiens
tgcacgttctgcaca

SEQ ID NO: 1889518 - DNA, 15 bp, Homo sapiens
gcacgttctgcacat

SEQ ID NO: 1889519 - DNA, 15 bp, Homo sapiens
cacgttctgcacatg

SEQ ID NO: 1889520 - DNA, 15 bp, Homo sapiens
acgttctgcacatgt

SEQ ID NO: 1889521 - DNA, 15 bp, Homo sapiens
cgttctgcacatgta

SEQ ID NO: 1889522 - DNA, 15 bp, Homo sapiens
gttctgcacatgtac

SEQ ID NO: 1889523 - DNA, 15 bp, Homo sapiens
ttctgcacatgtacc

SEQ ID NO: 1889524 - DNA, 15 bp, Homo sapiens
gtaccccagaacttg

SEQ ID NO: 1889525 - DNA, 15 bp, Homo sapiens
taccccagaacttga

SEQ ID NO: 1889526 - DNA, 15 bp, Homo sapiens
accccagaacttgaa

SEQ ID NO: 1889527 - DNA, 15 bp, Homo sapiens
ccccagaacttgaag

SEQ ID NO: 1889528 - DNA, 15 bp, Homo sapiens
cccagaacttgaagt

SEQ ID NO: 1889529 - DNA, 15 bp, Homo sapiens
ccagaacttgaagta

SEQ ID NO: 1889530 - DNA, 15 bp, Homo sapiens
cagaacttgaagtat

SEQ ID NO: 1889531 - DNA, 15 bp, Homo sapiens
agaacttgaagtatt

SEQ ID NO: 1889532 - DNA, 15 bp, Homo sapiens
gaacttgaagtatta

SEQ ID NO: 1889533 - DNA, 15 bp, Homo sapiens
aacttgaagtattaa

SEQ ID NO: 1889534 - DNA, 15 bp, Homo sapiens
acttgaagtattaaa

SEQ ID NO: 1889535 - DNA, 15 bp, Homo sapiens
cttgaagtattaaaa

SEQ ID NO: 1889536 - DNA, 15 bp, Homo sapiens
ttgaagtattaaaaa

SEQ ID NO: 1889537 - DNA, 15 bp, Homo sapiens
tgaagtattaaaaaa

SEQ ID NO: 1889538 - DNA, 15 bp, Homo sapiens
gaagtattaaaaaaa

SEQ ID NO: 1889539 - DNA, 15 bp, Homo sapiens
aagtattaaaaaaaa

SEQ ID NO: 1889540 - DNA, 15 bp, Homo sapiens
agtattaaaaaaaaa

SEQ ID NO: 1889541 - DNA, 15 bp, Homo sapiens
gtattaaaaaaaaaa

SEQ ID NO: 1889542 - DNA, 15 bp, Homo sapiens
tattaaaaaaaaaat

SEQ ID NO: 1889543 - DNA, 15 bp, Homo sapiens
attaaaaaaaaaatc

SEQ ID NO: 1889544 - DNA, 15 bp, Homo sapiens
ttaaaaaaaaaatca

SEQ ID NO: 1889545 - DNA, 15 bp, Homo sapiens
taaaaaaaaaatcat

SEQ ID NO: 1889546 - DNA, 15 bp, Homo sapiens
aaaaaaaaaatcatg

SEQ ID NO: 1889547 - DNA, 15 bp, Homo sapiens
aaaaaaaaatcatgt

SEQ ID NO: 1889548 - DNA, 15 bp, Homo sapiens
aaaaaaaatcatgta

SEQ ID NO: 1889549 - DNA, 15 bp, Homo sapiens
aaaaaaatcatgtat

SEQ ID NO: 1889550 - DNA, 15 bp, Homo sapiens
aaaaaatcatgtatt

SEQ ID NO: 1889551 - DNA, 15 bp, Homo sapiens
aaaaatcatgtattt

SEQ ID NO: 1889552 - DNA, 15 bp, Homo sapiens
aaaatcatgtatttt

SEQ ID NO: 1889553 - DNA, 15 bp, Homo sapiens
aaatcatgtattttt

SEQ ID NO: 1889554 - DNA, 15 bp, Homo sapiens
aatcatgtatttttt

SEQ ID NO: 1889555 - DNA, 15 bp, Homo sapiens
atcatgtattttttt

SEQ ID NO: 1889556 - DNA, 15 bp, Homo sapiens
tcatgtatttttttc

SEQ ID NO: 1889557 - DNA, 15 bp, Homo sapiens
catgtatttttttct

SEQ ID NO: 1889558 - DNA, 15 bp, Homo sapiens
atgtatttttttctc

SEQ ID NO: 1889559 - DNA, 15 bp, Homo sapiens
tgtatttttttctcc

SEQ ID NO: 1889560 - DNA, 15 bp, Homo sapiens
gtatttttttctcca

SEQ ID NO: 1889561 - DNA, 15 bp, Homo sapiens
tatttttttctccag

SEQ ID NO: 1889562 - DNA, 15 bp, Homo sapiens
atttttttctccagt

SEQ ID NO: 1889563 - DNA, 15 bp, Homo sapiens
tttttttctccagtg

SEQ ID NO: 1889564 - DNA, 15 bp, Homo sapiens
ttttttctccagtga

SEQ ID NO: 1889565 - DNA, 15 bp, Homo sapiens
tttttctccagtgat

SEQ ID NO: 1889566 - DNA, 15 bp, Homo sapiens
ttttctccagtgatt

SEQ ID NO: 1889567 - DNA, 15 bp, Homo sapiens
tttctccagtgattt

SEQ ID NO: 1889568 - DNA, 15 bp, Homo sapiens
ttctccagtgatttg

SEQ ID NO: 1889569 - DNA, 15 bp, Homo sapiens
tctccagtgatttgt

SEQ ID NO: 1889570 - DNA, 15 bp, Homo sapiens
ctccagtgatttgtg

SEQ ID NO: 1889571 - DNA, 15 bp, Homo sapiens
tccagtgatttgtga

SEQ ID NO: 1889572 - DNA, 15 bp, Homo sapiens
ccagtgatttgtgaa

SEQ ID NO: 1889573 - DNA, 15 bp, Homo sapiens
cagtgatttgtgaag

SEQ ID NO: 1889574 - DNA, 15 bp, Homo sapiens
agtgatttgtgaagc

SEQ ID NO: 1889575 - DNA, 15 bp, Homo sapiens
gtgatttgtgaagct

SEQ ID NO: 1889576 - DNA, 15 bp, Homo sapiens
tgatttgtgaagcta

SEQ ID NO: 1889577 - DNA, 15 bp, Homo sapiens
gatttgtgaagctat

SEQ ID NO: 1889578 - DNA, 15 bp, Homo sapiens
atttgtgaagctatt

SEQ ID NO: 1889579 - DNA, 15 bp, Homo sapiens
tttgtgaagctattt

SEQ ID NO: 1889580 - DNA, 15 bp, Homo sapiens
ttgtgaagctatttt

SEQ ID NO: 1889581 - DNA, 15 bp, Homo sapiens
tgtgaagctattttt

SEQ ID NO: 1889582 - DNA, 15 bp, Homo sapiens
gtgaagctattttta

SEQ ID NO: 1889583 - DNA, 15 bp, Homo sapiens
tgaagctatttttaa

SEQ ID NO: 1889584 - DNA, 15 bp, Homo sapiens
gaagctatttttaac

SEQ ID NO: 1889585 - DNA, 15 bp, Homo sapiens
aagctatttttaaca

SEQ ID NO: 1889586 - DNA, 15 bp, Homo sapiens
agctatttttaacac

SEQ ID NO: 1889587 - DNA, 15 bp, Homo sapiens
gctatttttaacaca

SEQ ID NO: 1889588 - DNA, 15 bp, Homo sapiens
ctatttttaacacac

SEQ ID NO: 1889589 - DNA, 15 bp, Homo sapiens
tatttttaacacaca

SEQ ID NO: 1889590 - DNA, 15 bp, Homo sapiens
atttttaacacacat

SEQ ID NO: 1889591 - DNA, 15 bp, Homo sapiens
tttttaacacacatc

SEQ ID NO: 1889592 - DNA, 15 bp, Homo sapiens
ttttaacacacatct

SEQ ID NO: 1889593 - DNA, 15 bp, Homo sapiens
tttaacacacatcta

SEQ ID NO: 1889594 - DNA, 15 bp, Homo sapiens
ttaacacacatctat

SEQ ID NO: 1889595 - DNA, 15 bp, Homo sapiens
taacacacatctatg

SEQ ID NO: 1889596 - DNA, 15 bp, Homo sapiens
aacacacatctatga

SEQ ID NO: 1889597 - DNA, 15 bp, Homo sapiens
acacatctatgatac

SEQ ID NO: 1889598 - DNA, 15 bp, Homo sapiens
cacatctatgatact

SEQ ID NO: 1889599 - DNA, 15 bp, Homo sapiens
acatctatgatactg

SEQ ID NO: 1889600 - DNA, 15 bp, Homo sapiens
catctatgatactgt

SEQ ID NO: 1889601 - DNA, 15 bp, Homo sapiens
atctatgatactgta

SEQ ID NO: 1889602 - DNA, 15 bp, Homo sapiens
tctatgatactgtaa

SEQ ID NO: 1889603 - DNA, 15 bp, Homo sapiens
ctatgatactgtaat

SEQ ID NO: 1889604 - DNA, 15 bp, Homo sapiens
tatgatactgtaata

SEQ ID NO: 1889605 - DNA, 15 bp, Homo sapiens
atgatactgtaatat

SEQ ID NO: 1889606 - DNA, 15 bp, Homo sapiens
tgatactgtaatatg

SEQ ID NO: 1889607 - DNA, 15 bp, Homo sapiens
gatactgtaatatgt

SEQ ID NO: 1889608 - DNA, 15 bp, Homo sapiens
atactgtaatatgtt

SEQ ID NO: 1889609 - DNA, 15 bp, Homo sapiens
tactgtaatatgttt

SEQ ID NO: 1889610 - DNA, 15 bp, Homo sapiens
actgtaatatgtttt

SEQ ID NO: 1889611 - DNA, 15 bp, Homo sapiens
ctgtaatatgtttta

SEQ ID NO: 1889612 - DNA, 15 bp, Homo sapiens
tgtaatatgttttaa

SEQ ID NO: 1889613 - DNA, 15 bp, Homo sapiens
gtaatatgttttaat

SEQ ID NO: 1889614 - DNA, 15 bp, Homo sapiens
taatatgttttaatg

SEQ ID NO: 1889615 - DNA, 15 bp, Homo sapiens
aatatgttttaatgt

SEQ ID NO: 1889616 - DNA, 15 bp, Homo sapiens
atatgttttaatgtt

SEQ ID NO: 1889617 - DNA, 15 bp, Homo sapiens
tatgttttaatgttt

SEQ ID NO: 1889618 - DNA, 15 bp, Homo sapiens
atgttttaatgttta

SEQ ID NO: 1889619 - DNA, 15 bp, Homo sapiens
tgttttaatgtttaa

SEQ ID NO: 1889620 - DNA, 15 bp, Homo sapiens
gttttaatgtttaaa

SEQ ID NO: 1889621 - DNA, 15 bp, Homo sapiens
ttttaatgtttaaat

SEQ ID NO: 1889622 - DNA, 15 bp, Homo sapiens
tttaatgtttaaatt

SEQ ID NO: 1889623 - DNA, 15 bp, Homo sapiens
ttaatgtttaaattt

SEQ ID NO: 1889624 - DNA, 15 bp, Homo sapiens
taatgtttaaattta

SEQ ID NO: 1889625 - DNA, 15 bp, Homo sapiens
aatgtttaaatttaa

SEQ ID NO: 1889626 - DNA, 15 bp, Homo sapiens
atgtttaaatttaat

SEQ ID NO: 1889627 - DNA, 15 bp, Homo sapiens
tgtttaaatttaatt

SEQ ID NO: 1889628 - DNA, 15 bp, Homo sapiens
gtttaaatttaatta

SEQ ID NO: 1889629 - DNA, 15 bp, Homo sapiens
tttaaatttaattaa

SEQ ID NO: 1889630 - DNA, 15 bp, Homo sapiens
ttaaatttaattaat

SEQ ID NO: 1889631 - DNA, 15 bp, Homo sapiens
taaatttaattaatt

SEQ ID NO: 1889632 - DNA, 15 bp, Homo sapiens
aaatttaattaattt

SEQ ID NO: 1889633 - DNA, 15 bp, Homo sapiens
aatttaattaattta

SEQ ID NO: 1889634 - DNA, 15 bp, Homo sapiens
atttaattaatttaa

SEQ ID NO: 1889635 - DNA, 15 bp, Homo sapiens
tttaattaatttaat

SEQ ID NO: 1889636 - DNA, 15 bp, Homo sapiens
ttaattaatttaata

SEQ ID NO: 1889637 - DNA, 15 bp, Homo sapiens
taattaatttaataa

SEQ ID NO: 1889638 - DNA, 15 bp, Homo sapiens
aattaatttaataat

SEQ ID NO: 1889639 - DNA, 15 bp, Homo sapiens
attaatttaataatg

SEQ ID NO: 1889640 - DNA, 15 bp, Homo sapiens
ttaatttaataatgt

SEQ ID NO: 1889641 - DNA, 15 bp, Homo sapiens
taatttaataatgtt

SEQ ID NO: 1889642 - DNA, 15 bp, Homo sapiens
aatttaataatgtta

SEQ ID NO: 1889643 - DNA, 15 bp, Homo sapiens
atttaataatgttac

SEQ ID NO: 1889644 - DNA, 15 bp, Homo sapiens
tttaataatgttacg

SEQ ID NO: 1889645 - DNA, 15 bp, Homo sapiens
ttaataatgttacgt

SEQ ID NO: 1889646 - DNA, 15 bp, Homo sapiens
taataatgttacgta

SEQ ID NO: 1889647 - DNA, 15 bp, Homo sapiens
aataatgttacgtat

SEQ ID NO: 1889648 - DNA, 15 bp, Homo sapiens
ataatgttacgtatt

SEQ ID NO: 1889649 - DNA, 15 bp, Homo sapiens
taatgttacgtattt

SEQ ID NO: 1889650 - DNA, 15 bp, Homo sapiens
aatgttacgtattta

SEQ ID NO: 1889651 - DNA, 15 bp, Homo sapiens
atgttacgtatttaa

SEQ ID NO: 1889652 - DNA, 15 bp, Homo sapiens
tgttacgtatttaat

SEQ ID NO: 1889653 - DNA, 15 bp, Homo sapiens
gttacgtatttaata

SEQ ID NO: 1889654 - DNA, 15 bp, Homo sapiens
ttacgtatttaatat

SEQ ID NO: 1889655 - DNA, 15 bp, Homo sapiens
tacgtatttaatatt

SEQ ID NO: 1889656 - DNA, 15 bp, Homo sapiens
acgtatttaatattg

SEQ ID NO: 1889657 - DNA, 15 bp, Homo sapiens
cgtatttaatattgt

SEQ ID NO: 1889658 - DNA, 15 bp, Homo sapiens
gtatttaatattgta

SEQ ID NO: 1889659 - DNA, 15 bp, Homo sapiens
tatttaatattgtaa

SEQ ID NO: 1889660 - DNA, 15 bp, Homo sapiens
atttaatattgtaag

SEQ ID NO: 1889661 - DNA, 15 bp, Homo sapiens
tttaatattgtaagg

SEQ ID NO: 1889662 - DNA, 15 bp, Homo sapiens
ttaatattgtaaggt

SEQ ID NO: 1889663 - DNA, 15 bp, Homo sapiens
taatattgtaaggta

SEQ ID NO: 1889664 - DNA, 15 bp, Homo sapiens
aatattgtaaggtaa

SEQ ID NO: 1889665 - DNA, 15 bp, Homo sapiens
atattgtaaggtaat

SEQ ID NO: 1889666 - DNA, 15 bp, Homo sapiens
tattgtaaggtaatt

SEQ ID NO: 1889667 - DNA, 15 bp, Homo sapiens
attgtaaggtaattt

SEQ ID NO: 1889668 - DNA, 15 bp, Homo sapiens
ttgtaaggtaatttc

SEQ ID NO: 1889669 - DNA, 15 bp, Homo sapiens
tgtaaggtaatttcc

SEQ ID NO: 1889670 - DNA, 15 bp, Homo sapiens
gtaaggtaatttccc

SEQ ID NO: 1889671 - DNA, 15 bp, Homo sapiens
taaggtaatttcccc

SEQ ID NO: 1889672 - DNA, 15 bp, Homo sapiens
aaggtaatttcccct

SEQ ID NO: 1889673 - DNA, 15 bp, Homo sapiens
aggtaatttcccctc

SEQ ID NO: 1889674 - DNA, 15 bp, Homo sapiens
ggtaatttcccctct

SEQ ID NO: 1889675 - DNA, 15 bp, Homo sapiens
gtaatttcccctctt

SEQ ID NO: 1889676 - DNA, 15 bp, Homo sapiens
taatttcccctcttt

SEQ ID NO: 1889677 - DNA, 15 bp, Homo sapiens
aatttcccctctttg

SEQ ID NO: 1889678 - DNA, 15 bp, Homo sapiens
atttcccctctttgc

SEQ ID NO: 1889679 - DNA, 15 bp, Homo sapiens
tttcccctctttgct

SEQ ID NO: 1889680 - DNA, 15 bp, Homo sapiens
ttcccctctttgctc

SEQ ID NO: 1889681 - DNA, 15 bp, Homo sapiens
tcccctctttgctcc

SEQ ID NO: 1889682 - DNA, 15 bp, Homo sapiens
cccctctttgctcct

SEQ ID NO: 1889683 - DNA, 15 bp, Homo sapiens
ccctctttgctcctt

SEQ ID NO: 1889684 - DNA, 15 bp, Homo sapiens
cctctttgctccttt

SEQ ID NO: 1889685 - DNA, 15 bp, Homo sapiens
ctctttgctcctttt

SEQ ID NO: 1889686 - DNA, 15 bp, Homo sapiens
tctttgctccttttt

SEQ ID NO: 1889687 - DNA, 15 bp, Homo sapiens
ctttgctcctttttt

SEQ ID NO: 1889688 - DNA, 15 bp, Homo sapiens
tttgctccttttttt

SEQ ID NO: 1889689 - DNA, 15 bp, Homo sapiens
ttgctcctttttttt

SEQ ID NO: 1889690 - DNA, 15 bp, Homo sapiens
tgctccttttttttt

SEQ ID NO: 1889691 - DNA, 15 bp, Homo sapiens
gctcctttttttttc

SEQ ID NO: 1889692 - DNA, 15 bp, Homo sapiens
ctcctttttttttct

SEQ ID NO: 1889693 - DNA, 15 bp, Homo sapiens
tttttttctttctta

SEQ ID NO: 1889694 - DNA, 15 bp, Homo sapiens
ttttttctttcttag

SEQ ID NO: 1889695 - DNA, 15 bp, Homo sapiens
tttttctttcttagc

SEQ ID NO: 1889696 - DNA, 15 bp, Homo sapiens
ttttctttcttagct

SEQ ID NO: 1889697 - DNA, 15 bp, Homo sapiens
tttctttcttagcta

SEQ ID NO: 1889698 - DNA, 15 bp, Homo sapiens
ttctttcttagctat

SEQ ID NO: 1889699 - DNA, 15 bp, Homo sapiens
tctttcttagctatt

SEQ ID NO: 1889700 - DNA, 15 bp, Homo sapiens
ctttcttagctattt

SEQ ID NO: 1889701 - DNA, 15 bp, Homo sapiens
tttcttagctatttc

SEQ ID NO: 1889702 - DNA, 15 bp, Homo sapiens
ttcttagctatttct

SEQ ID NO: 1889703 - DNA, 15 bp, Homo sapiens
tcttagctatttctg

SEQ ID NO: 1889704 - DNA, 15 bp, Homo sapiens
cttagctatttctgg

SEQ ID NO: 1889705 - DNA, 15 bp, Homo sapiens
ttagctatttctgga

SEQ ID NO: 1889706 - DNA, 15 bp, Homo sapiens
tagctatttctggac

SEQ ID NO: 1889707 - DNA, 15 bp, Homo sapiens
agctatttctggacc

SEQ ID NO: 1889708 - DNA, 15 bp, Homo sapiens
gctatttctggacct

SEQ ID NO: 1889709 - DNA, 15 bp, Homo sapiens
ctatttctggacctc

SEQ ID NO: 1889710 - DNA, 15 bp, Homo sapiens
tatttctggacctct

SEQ ID NO: 1889711 - DNA, 15 bp, Homo sapiens
atttctggacctcta

SEQ ID NO: 1889712 - DNA, 15 bp, Homo sapiens
tttctggacctctag

SEQ ID NO: 1889713 - DNA, 15 bp, Homo sapiens
ttctggacctctagt

SEQ ID NO: 1889714 - DNA, 15 bp, Homo sapiens
tctggacctctagtt

SEQ ID NO: 1889715 - DNA, 15 bp, Homo sapiens
ctggacctctagttc

SEQ ID NO: 1889716 - DNA, 15 bp, Homo sapiens
tggacctctagttct

SEQ ID NO: 1889717 - DNA, 15 bp, Homo sapiens
ggacctctagttctc

SEQ ID NO: 1889718 - DNA, 15 bp, Homo sapiens
gacctctagttctct

SEQ ID NO: 1889719 - DNA, 15 bp, Homo sapiens
acctctagttctcta

SEQ ID NO: 1889720 - DNA, 15 bp, Homo sapiens
cctctagttctctat

SEQ ID NO: 1889721 - DNA, 15 bp, Homo sapiens
ctctagttctctata

SEQ ID NO: 1889722 - DNA, 15 bp, Homo sapiens
tctagttctctatat

SEQ ID NO: 1889723 - DNA, 15 bp, Homo sapiens
ctagttctctatata

SEQ ID NO: 1889724 - DNA, 15 bp, Homo sapiens
tagttctctatatac

SEQ ID NO: 1889725 - DNA, 15 bp, Homo sapiens
agttctctatatact

SEQ ID NO: 1889726 - DNA, 15 bp, Homo sapiens
gttctctatatactt

SEQ ID NO: 1889727 - DNA, 15 bp, Homo sapiens
ttctctatatacttt

SEQ ID NO: 1889728 - DNA, 15 bp, Homo sapiens
tctctatatactttt

SEQ ID NO: 1889729 - DNA, 15 bp, Homo sapiens
ctctatatacttttt

SEQ ID NO: 1889730 - DNA, 15 bp, Homo sapiens
tctatatactttttt

SEQ ID NO: 1889731 - DNA, 15 bp, Homo sapiens
ctatatacttttttt

SEQ ID NO: 1889732 - DNA, 15 bp, Homo sapiens
tatatactttttttt

SEQ ID NO: 1889733 - DNA, 15 bp, Homo sapiens
atatacttttttttt

SEQ ID NO: 1889734 - DNA, 15 bp, Homo sapiens
ttttttttgagacaa

SEQ ID NO: 1889735 - DNA, 15 bp, Homo sapiens
tttttttgagacaag

SEQ ID NO: 1889736 - DNA, 15 bp, Homo sapiens
ttttttgagacaaga

SEQ ID NO: 1889737 - DNA, 15 bp, Homo sapiens
tttttgagacaagag

SEQ ID NO: 1889738 - DNA, 15 bp, Homo sapiens
ttttgagacaagagt

SEQ ID NO: 1889739 - DNA, 15 bp, Homo sapiens
tttgagacaagagtt

SEQ ID NO: 1889740 - DNA, 15 bp, Homo sapiens
ttgagacaagagttt

SEQ ID NO: 1889741 - DNA, 15 bp, Homo sapiens
tgagacaagagtttt

SEQ ID NO: 1889742 - DNA, 15 bp, Homo sapiens
gagacaagagttttg

SEQ ID NO: 1889743 - DNA, 15 bp, Homo sapiens
agacaagagttttgc

SEQ ID NO: 1889744 - DNA, 15 bp, Homo sapiens
gacaagagttttgct

SEQ ID NO: 1889745 - DNA, 15 bp, Homo sapiens
acaagagttttgctc

SEQ ID NO: 1889746 - DNA, 15 bp, Homo sapiens
caagagttttgctct

SEQ ID NO: 1889747 - DNA, 15 bp, Homo sapiens
aagagttttgctctt

SEQ ID NO: 1889748 - DNA, 15 bp, Homo sapiens
agagttttgctcttg

SEQ ID NO: 1889749 - DNA, 15 bp, Homo sapiens
agttttgctcttgtc

SEQ ID NO: 1889750 - DNA, 15 bp, Homo sapiens
gttttgctcttgtcg

SEQ ID NO: 1889751 - DNA, 15 bp, Homo sapiens
ttttgctcttgtcgc

SEQ ID NO: 1889752 - DNA, 15 bp, Homo sapiens
tttgctcttgtcgcc

SEQ ID NO: 1889753 - DNA, 15 bp, Homo sapiens
ttgctcttgtcgccc

SEQ ID NO: 1889754 - DNA, 15 bp, Homo sapiens
tgctcttgtcgccca

SEQ ID NO: 1889755 - DNA, 15 bp, Homo sapiens
gtgcaatctcagctg

SEQ ID NO: 1889756 - DNA, 15 bp, Homo sapiens
tgcaatctcagctga

SEQ ID NO: 1889757 - DNA, 15 bp, Homo sapiens
gcaatctcagctgac

SEQ ID NO: 1889758 - DNA, 15 bp, Homo sapiens
caatctcagctgact

SEQ ID NO: 1889759 - DNA, 15 bp, Homo sapiens
aatctcagctgactg

SEQ ID NO: 1889760 - DNA, 15 bp, Homo sapiens
atctcagctgactgc

SEQ ID NO: 1889761 - DNA, 15 bp, Homo sapiens
tctcagctgactgca

SEQ ID NO: 1889762 - DNA, 15 bp, Homo sapiens
ctcagctgactgcaa

SEQ ID NO: 1889763 - DNA, 15 bp, Homo sapiens
tcagctgactgcaac

SEQ ID NO: 1889764 - DNA, 15 bp, Homo sapiens
cagctgactgcaacc

SEQ ID NO: 1889765 - DNA, 15 bp, Homo sapiens
agctgactgcaacct

SEQ ID NO: 1889766 - DNA, 15 bp, Homo sapiens
gctgactgcaacctc

SEQ ID NO: 1889767 - DNA, 15 bp, Homo sapiens
ctgactgcaacctct

SEQ ID NO: 1889768 - DNA, 15 bp, Homo sapiens
tgactgcaacctctt

SEQ ID NO: 1889769 - DNA, 15 bp, Homo sapiens
gactgcaacctcttc

SEQ ID NO: 1889770 - DNA, 15 bp, Homo sapiens
actgcaacctcttcc

SEQ ID NO: 1889771 - DNA, 15 bp, Homo sapiens
ctgcaacctcttcct

SEQ ID NO: 1889772 - DNA, 15 bp, Homo sapiens
tgcaacctcttcctc

SEQ ID NO: 1889773 - DNA, 15 bp, Homo sapiens
gcaacctcttcctcc

SEQ ID NO: 1889774 - DNA, 15 bp, Homo sapiens
caacctcttcctcct

SEQ ID NO: 1889775 - DNA, 15 bp, Homo sapiens
aacctcttcctcctg

SEQ ID NO: 1889776 - DNA, 15 bp, Homo sapiens
acctcttcctcctgg

SEQ ID NO: 1889777 - DNA, 15 bp, Homo sapiens
cctcttcctcctggg

SEQ ID NO: 1889778 - DNA, 15 bp, Homo sapiens
ctcttcctcctgggt

SEQ ID NO: 1889779 - DNA, 15 bp, Homo sapiens
tcttcctcctgggtt

SEQ ID NO: 1889780 - DNA, 15 bp, Homo sapiens
cttcctcctgggttc

SEQ ID NO: 1889781 - DNA, 15 bp, Homo sapiens
ttcctcctgggttca

SEQ ID NO: 1889782 - DNA, 15 bp, Homo sapiens
tcctcctgggttcaa

SEQ ID NO: 1889783 - DNA, 15 bp, Homo sapiens
gtgattctcctgcca

SEQ ID NO: 1889784 - DNA, 15 bp, Homo sapiens
tgattctcctgccac

SEQ ID NO: 1889785 - DNA, 15 bp, Homo sapiens
gattctcctgccaca

SEQ ID NO: 1889786 - DNA, 15 bp, Homo sapiens
attctcctgccacag

SEQ ID NO: 1889787 - DNA, 15 bp, Homo sapiens
ttctcctgccacagc

SEQ ID NO: 1889788 - DNA, 15 bp, Homo sapiens
tctcctgccacagcc

SEQ ID NO: 1889789 - DNA, 15 bp, Homo sapiens
ctcctgccacagcct

SEQ ID NO: 1889790 - DNA, 15 bp, Homo sapiens
tcctgccacagcctc

SEQ ID NO: 1889791 - DNA, 15 bp, Homo sapiens
cctgccacagcctcc

SEQ ID NO: 1889792 - DNA, 15 bp, Homo sapiens
ctgccacagcctccc

SEQ ID NO: 1889793 - DNA, 15 bp, Homo sapiens
tgccacagcctcccg

SEQ ID NO: 1889794 - DNA, 15 bp, Homo sapiens
gccacagcctcccgt

SEQ ID NO: 1889795 - DNA, 15 bp, Homo sapiens
ccacagcctcccgtg

SEQ ID NO: 1889796 - DNA, 15 bp, Homo sapiens
cacagcctcccgtgt

SEQ ID NO: 1889797 - DNA, 15 bp, Homo sapiens
acagcctcccgtgtt

SEQ ID NO: 1889798 - DNA, 15 bp, Homo sapiens
cagcctcccgtgttg

SEQ ID NO: 1889799 - DNA, 15 bp, Homo sapiens
agcctcccgtgttgc

SEQ ID NO: 1889800 - DNA, 15 bp, Homo sapiens
gcctcccgtgttgct

SEQ ID NO: 1889801 - DNA, 15 bp, Homo sapiens
cctcccgtgttgctg

SEQ ID NO: 1889802 - DNA, 15 bp, Homo sapiens
ctcccgtgttgctgg

SEQ ID NO: 1889803 - DNA, 15 bp, Homo sapiens
tcccgtgttgctggg

SEQ ID NO: 1889804 - DNA, 15 bp, Homo sapiens
cccgtgttgctggga

SEQ ID NO: 1889805 - DNA, 15 bp, Homo sapiens
ccgtgttgctgggat

SEQ ID NO: 1889806 - DNA, 15 bp, Homo sapiens
cgtgttgctgggatt

SEQ ID NO: 1889807 - DNA, 15 bp, Homo sapiens
gtgttgctgggatta

SEQ ID NO: 1889808 - DNA, 15 bp, Homo sapiens
tgttgctgggattac

SEQ ID NO: 1889809 - DNA, 15 bp, Homo sapiens
gttgctgggattaca

SEQ ID NO: 1889810 - DNA, 15 bp, Homo sapiens
ttgctgggattacaa

SEQ ID NO: 1889811 - DNA, 15 bp, Homo sapiens
ggattacaagcatgt

SEQ ID NO: 1889812 - DNA, 15 bp, Homo sapiens
gattacaagcatgtg

SEQ ID NO: 1889813 - DNA, 15 bp, Homo sapiens
caagcatgtgccacc

SEQ ID NO: 1889814 - DNA, 15 bp, Homo sapiens
aagcatgtgccacca

SEQ ID NO: 1889815 - DNA, 15 bp, Homo sapiens
agcatgtgccaccac

SEQ ID NO: 1889816 - DNA, 15 bp, Homo sapiens
accacgcctggccat

SEQ ID NO: 1889817 - DNA, 15 bp, Homo sapiens
ccacgcctggccatt

SEQ ID NO: 1889818 - DNA, 15 bp, Homo sapiens
cacgcctggccattt

SEQ ID NO: 1889819 - DNA, 15 bp, Homo sapiens
acgcctggccatttt

SEQ ID NO: 1889820 - DNA, 15 bp, Homo sapiens
cgcctggccattttt

SEQ ID NO: 1889821 - DNA, 15 bp, Homo sapiens
gcctggccatttttt

SEQ ID NO: 1889822 - DNA, 15 bp, Homo sapiens
cctggccattttttt

SEQ ID NO: 1889823 - DNA, 15 bp, Homo sapiens
ctggccatttttttt

SEQ ID NO: 1889824 - DNA, 15 bp, Homo sapiens
tggccattttttttg

SEQ ID NO: 1889825 - DNA, 15 bp, Homo sapiens
ggccattttttttgt

SEQ ID NO: 1889826 - DNA, 15 bp, Homo sapiens
gccattttttttgta

SEQ ID NO: 1889827 - DNA, 15 bp, Homo sapiens
ccattttttttgtat

SEQ ID NO: 1889828 - DNA, 15 bp, Homo sapiens
cattttttttgtatt

SEQ ID NO: 1889829 - DNA, 15 bp, Homo sapiens
ttttttttgtattta

SEQ ID NO: 1889830 - DNA, 15 bp, Homo sapiens
tttttttgtatttaa

SEQ ID NO: 1889831 - DNA, 15 bp, Homo sapiens
ttttttgtatttaat

SEQ ID NO: 1889832 - DNA, 15 bp, Homo sapiens
tttttgtatttaata

SEQ ID NO: 1889833 - DNA, 15 bp, Homo sapiens
ttttgtatttaatag

SEQ ID NO: 1889834 - DNA, 15 bp, Homo sapiens
tttgtatttaatagt

SEQ ID NO: 1889835 - DNA, 15 bp, Homo sapiens
ttgtatttaatagtg

SEQ ID NO: 1889836 - DNA, 15 bp, Homo sapiens
tgtatttaatagtga

SEQ ID NO: 1889837 - DNA, 15 bp, Homo sapiens
gtatttaatagtgac

SEQ ID NO: 1889838 - DNA, 15 bp, Homo sapiens
tatttaatagtgacg

SEQ ID NO: 1889839 - DNA, 15 bp, Homo sapiens
atttaatagtgacga

SEQ ID NO: 1889840 - DNA, 15 bp, Homo sapiens
tttaatagtgacgag

SEQ ID NO: 1889841 - DNA, 15 bp, Homo sapiens
ttaatagtgacgagg

SEQ ID NO: 1889842 - DNA, 15 bp, Homo sapiens
taatagtgacgaggt

SEQ ID NO: 1889843 - DNA, 15 bp, Homo sapiens
aatagtgacgaggtt

SEQ ID NO: 1889844 - DNA, 15 bp, Homo sapiens
atagtgacgaggttt

SEQ ID NO: 1889845 - DNA, 15 bp, Homo sapiens
tagtgacgaggtttc

SEQ ID NO: 1889846 - DNA, 15 bp, Homo sapiens
agtgacgaggtttca

SEQ ID NO: 1889847 - DNA, 15 bp, Homo sapiens
gtgacgaggtttcac

SEQ ID NO: 1889848 - DNA, 15 bp, Homo sapiens
tgacgaggtttcacc

SEQ ID NO: 1889849 - DNA, 15 bp, Homo sapiens
tcaaactcctgaccc

SEQ ID NO: 1889850 - DNA, 15 bp, Homo sapiens
caaactcctgacccc

SEQ ID NO: 1889851 - DNA, 15 bp, Homo sapiens
aaactcctgacccca

SEQ ID NO: 1889852 - DNA, 15 bp, Homo sapiens
aactcctgaccccag

SEQ ID NO: 1889853 - DNA, 15 bp, Homo sapiens
actcctgaccccagg

SEQ ID NO: 1889854 - DNA, 15 bp, Homo sapiens
ctcctgaccccaggt

SEQ ID NO: 1889855 - DNA, 15 bp, Homo sapiens
tcctgaccccaggtg

SEQ ID NO: 1889856 - DNA, 15 bp, Homo sapiens
cctgaccccaggtga

SEQ ID NO: 1889857 - DNA, 15 bp, Homo sapiens
ctgaccccaggtgat

SEQ ID NO: 1889858 - DNA, 15 bp, Homo sapiens
tgaccccaggtgatc

SEQ ID NO: 1889859 - DNA, 15 bp, Homo sapiens
gaccccaggtgatcc

SEQ ID NO: 1889860 - DNA, 15 bp, Homo sapiens
accccaggtgatcca

SEQ ID NO: 1889861 - DNA, 15 bp, Homo sapiens
ccccaggtgatccac

SEQ ID NO: 1889862 - DNA, 15 bp, Homo sapiens
cccaggtgatccacc

SEQ ID NO: 1889863 - DNA, 15 bp, Homo sapiens
ccaggtgatccacct

SEQ ID NO: 1889864 - DNA, 15 bp, Homo sapiens
aggcgtgagccactg

SEQ ID NO: 1889865 - DNA, 15 bp, Homo sapiens
ggcgtgagccactgc

SEQ ID NO: 1889866 - DNA, 15 bp, Homo sapiens
gcgtgagccactgct

SEQ ID NO: 1889867 - DNA, 15 bp, Homo sapiens
cgtgagccactgctc

SEQ ID NO: 1889868 - DNA, 15 bp, Homo sapiens
gtgagccactgctcc

SEQ ID NO: 1889869 - DNA, 15 bp, Homo sapiens
gagccactgctccca

SEQ ID NO: 1889870 - DNA, 15 bp, Homo sapiens
agccactgctcccag

SEQ ID NO: 1889871 - DNA, 15 bp, Homo sapiens
gccactgctcccagt

SEQ ID NO: 1889872 - DNA, 15 bp, Homo sapiens
ccactgctcccagtc

SEQ ID NO: 1889873 - DNA, 15 bp, Homo sapiens
cactgctcccagtcc

SEQ ID NO: 1889874 - DNA, 15 bp, Homo sapiens
actgctcccagtcct

SEQ ID NO: 1889875 - DNA, 15 bp, Homo sapiens
ctgctcccagtcctc

SEQ ID NO: 1889876 - DNA, 15 bp, Homo sapiens
tgctcccagtcctct

SEQ ID NO: 1889877 - DNA, 15 bp, Homo sapiens
gctcccagtcctcta

SEQ ID NO: 1889878 - DNA, 15 bp, Homo sapiens
ctcccagtcctctat

SEQ ID NO: 1889879 - DNA, 15 bp, Homo sapiens
tcccagtcctctata

SEQ ID NO: 1889880 - DNA, 15 bp, Homo sapiens
cccagtcctctatat

SEQ ID NO: 1889881 - DNA, 15 bp, Homo sapiens
ccagtcctctatata

SEQ ID NO: 1889882 - DNA, 15 bp, Homo sapiens
cagtcctctatatac

SEQ ID NO: 1889883 - DNA, 15 bp, Homo sapiens
agtcctctatatact

SEQ ID NO: 1889884 - DNA, 15 bp, Homo sapiens
gtcctctatatactg

SEQ ID NO: 1889885 - DNA, 15 bp, Homo sapiens
tcctctatatactgt

SEQ ID NO: 1889886 - DNA, 15 bp, Homo sapiens
cctctatatactgtt

SEQ ID NO: 1889887 - DNA, 15 bp, Homo sapiens
ctctatatactgttt

SEQ ID NO: 1889888 - DNA, 15 bp, Homo sapiens
tctatatactgtttt

SEQ ID NO: 1889889 - DNA, 15 bp, Homo sapiens
ctatatactgtttta

SEQ ID NO: 1889890 - DNA, 15 bp, Homo sapiens
tatatactgttttaa

SEQ ID NO: 1889891 - DNA, 15 bp, Homo sapiens
atatactgttttaag

SEQ ID NO: 1889892 - DNA, 15 bp, Homo sapiens
tatactgttttaagt

SEQ ID NO: 1889893 - DNA, 15 bp, Homo sapiens
atactgttttaagtc

SEQ ID NO: 1889894 - DNA, 15 bp, Homo sapiens
tactgttttaagtca

SEQ ID NO: 1889895 - DNA, 15 bp, Homo sapiens
actgttttaagtcaa

SEQ ID NO: 1889896 - DNA, 15 bp, Homo sapiens
ctgttttaagtcaac

SEQ ID NO: 1889897 - DNA, 15 bp, Homo sapiens
tgttttaagtcaact

SEQ ID NO: 1889898 - DNA, 15 bp, Homo sapiens
gttttaagtcaactt

SEQ ID NO: 1889899 - DNA, 15 bp, Homo sapiens
ttttaagtcaactta

SEQ ID NO: 1889900 - DNA, 15 bp, Homo sapiens
tttaagtcaacttat

SEQ ID NO: 1889901 - DNA, 15 bp, Homo sapiens
ttaagtcaacttatt

SEQ ID NO: 1889902 - DNA, 15 bp, Homo sapiens
taagtcaacttatta

SEQ ID NO: 1889903 - DNA, 15 bp, Homo sapiens
aagtcaacttattaa

SEQ ID NO: 1889904 - DNA, 15 bp, Homo sapiens
agtcaacttattaag

SEQ ID NO: 1889905 - DNA, 15 bp, Homo sapiens
gtcaacttattaaga

SEQ ID NO: 1889906 - DNA, 15 bp, Homo sapiens
tcaacttattaagat

SEQ ID NO: 1889907 - DNA, 15 bp, Homo sapiens
caacttattaagatt

SEQ ID NO: 1889908 - DNA, 15 bp, Homo sapiens
aacttattaagatta

SEQ ID NO: 1889909 - DNA, 15 bp, Homo sapiens
acttattaagattac

SEQ ID NO: 1889910 - DNA, 15 bp, Homo sapiens
cttattaagattacc

SEQ ID NO: 1889911 - DNA, 15 bp, Homo sapiens
ttattaagattaccc

SEQ ID NO: 1889912 - DNA, 15 bp, Homo sapiens
tattaagattaccct

SEQ ID NO: 1889913 - DNA, 15 bp, Homo sapiens
attaagattacccta

SEQ ID NO: 1889914 - DNA, 15 bp, Homo sapiens
ttaagattaccctaa

SEQ ID NO: 1889915 - DNA, 15 bp, Homo sapiens
taagattaccctaaa

SEQ ID NO: 1889916 - DNA, 15 bp, Homo sapiens
aagattaccctaaaa

SEQ ID NO: 1889917 - DNA, 15 bp, Homo sapiens
agattaccctaaaat

SEQ ID NO: 1889918 - DNA, 15 bp, Homo sapiens
gattaccctaaaatt

SEQ ID NO: 1889919 - DNA, 15 bp, Homo sapiens
attaccctaaaattt

SEQ ID NO: 1889920 - DNA, 15 bp, Homo sapiens
ttaccctaaaatttt

SEQ ID NO: 1889921 - DNA, 15 bp, Homo sapiens
taccctaaaattttt

SEQ ID NO: 1889922 - DNA, 15 bp, Homo sapiens
accctaaaatttttg

SEQ ID NO: 1889923 - DNA, 15 bp, Homo sapiens
ccctaaaatttttgc

SEQ ID NO: 1889924 - DNA, 15 bp, Homo sapiens
cctaaaatttttgct

SEQ ID NO: 1889925 - DNA, 15 bp, Homo sapiens
ctaaaatttttgctg

SEQ ID NO: 1889926 - DNA, 15 bp, Homo sapiens
taaaatttttgctgg

SEQ ID NO: 1889927 - DNA, 15 bp, Homo sapiens
aaaatttttgctggt

SEQ ID NO: 1889928 - DNA, 15 bp, Homo sapiens
aaatttttgctggta

SEQ ID NO: 1889929 - DNA, 15 bp, Homo sapiens
aatttttgctggtat

SEQ ID NO: 1889930 - DNA, 15 bp, Homo sapiens
atttttgctggtatt

SEQ ID NO: 1889931 - DNA, 15 bp, Homo sapiens
tttttgctggtattt

SEQ ID NO: 1889932 - DNA, 15 bp, Homo sapiens
ttttgctggtatttt

SEQ ID NO: 1889933 - DNA, 15 bp, Homo sapiens
tttgctggtatttta

SEQ ID NO: 1889934 - DNA, 15 bp, Homo sapiens
ttgctggtattttaa

SEQ ID NO: 1889935 - DNA, 15 bp, Homo sapiens
tgctggtattttaat

SEQ ID NO: 1889936 - DNA, 15 bp, Homo sapiens
gctggtattttaatt

SEQ ID NO: 1889937 - DNA, 15 bp, Homo sapiens
ctggtattttaatta

SEQ ID NO: 1889938 - DNA, 15 bp, Homo sapiens
tggtattttaattaa

SEQ ID NO: 1889939 - DNA, 15 bp, Homo sapiens
ggtattttaattaaa

SEQ ID NO: 1889940 - DNA, 15 bp, Homo sapiens
gtattttaattaaat

SEQ ID NO: 1889941 - DNA, 15 bp, Homo sapiens
attttaattaaattt

SEQ ID NO: 1889942 - DNA, 15 bp, Homo sapiens
ttttaattaaattta

SEQ ID NO: 1889943 - DNA, 15 bp, Homo sapiens
tttaattaaatttat

SEQ ID NO: 1889944 - DNA, 15 bp, Homo sapiens
ttaattaaatttata

SEQ ID NO: 1889945 - DNA, 15 bp, Homo sapiens
taattaaatttatat

SEQ ID NO: 1889946 - DNA, 15 bp, Homo sapiens
aattaaatttatatc

SEQ ID NO: 1889947 - DNA, 15 bp, Homo sapiens
attaaatttatatcc

SEQ ID NO: 1889948 - DNA, 15 bp, Homo sapiens
ttaaatttatatcca

SEQ ID NO: 1889949 - DNA, 15 bp, Homo sapiens
taaatttatatccat

SEQ ID NO: 1889950 - DNA, 15 bp, Homo sapiens
aaatttatatccata

SEQ ID NO: 1889951 - DNA, 15 bp, Homo sapiens
aatttatatccataa

SEQ ID NO: 1889952 - DNA, 15 bp, Homo sapiens
atttatatccataaa

SEQ ID NO: 1889953 - DNA, 15 bp, Homo sapiens
tttatatccataaat

SEQ ID NO: 1889954 - DNA, 15 bp, Homo sapiens
ttatatccataaatt

SEQ ID NO: 1889955 - DNA, 15 bp, Homo sapiens
tatatccataaatta

SEQ ID NO: 1889956 - DNA, 15 bp, Homo sapiens
atatccataaattaa

SEQ ID NO: 1889957 - DNA, 15 bp, Homo sapiens
tatccataaattaat

SEQ ID NO: 1889958 - DNA, 15 bp, Homo sapiens
atccataaattaatt

SEQ ID NO: 1889959 - DNA, 15 bp, Homo sapiens
tccataaattaattg

SEQ ID NO: 1889960 - DNA, 15 bp, Homo sapiens
ccataaattaattga

SEQ ID NO: 1889961 - DNA, 15 bp, Homo sapiens
cataaattaattgat

SEQ ID NO: 1889962 - DNA, 15 bp, Homo sapiens
ataaattaattgata

SEQ ID NO: 1889963 - DNA, 15 bp, Homo sapiens
taaattaattgatat

SEQ ID NO: 1889964 - DNA, 15 bp, Homo sapiens
aaattaattgatata

SEQ ID NO: 1889965 - DNA, 15 bp, Homo sapiens
aattaattgatatat

SEQ ID NO: 1889966 - DNA, 15 bp, Homo sapiens
attaattgatatatt

SEQ ID NO: 1889967 - DNA, 15 bp, Homo sapiens
ttaattgatatatta

SEQ ID NO: 1889968 - DNA, 15 bp, Homo sapiens
taattgatatattaa

SEQ ID NO: 1889969 - DNA, 15 bp, Homo sapiens
aattgatatattaat

SEQ ID NO: 1889970 - DNA, 15 bp, Homo sapiens
attgatatattaatt

SEQ ID NO: 1889971 - DNA, 15 bp, Homo sapiens
ttgatatattaattt

SEQ ID NO: 1889972 - DNA, 15 bp, Homo sapiens
tgatatattaattta

SEQ ID NO: 1889973 - DNA, 15 bp, Homo sapiens
gatatattaatttaa

SEQ ID NO: 1889974 - DNA, 15 bp, Homo sapiens
atatattaatttaag

SEQ ID NO: 1889975 - DNA, 15 bp, Homo sapiens
tatattaatttaaga

SEQ ID NO: 1889976 - DNA, 15 bp, Homo sapiens
atattaatttaagaa

SEQ ID NO: 1889977 - DNA, 15 bp, Homo sapiens
tattaatttaagaat

SEQ ID NO: 1889978 - DNA, 15 bp, Homo sapiens
attaatttaagaatt

SEQ ID NO: 1889979 - DNA, 15 bp, Homo sapiens
ttaatttaagaatta

SEQ ID NO: 1889980 - DNA, 15 bp, Homo sapiens
taatttaagaattat

SEQ ID NO: 1889981 - DNA, 15 bp, Homo sapiens
aatttaagaattatt

SEQ ID NO: 1889982 - DNA, 15 bp, Homo sapiens
atttaagaattatta

SEQ ID NO: 1889983 - DNA, 15 bp, Homo sapiens
tttaagaattattaa

SEQ ID NO: 1889984 - DNA, 15 bp, Homo sapiens
ttaagaattattaac

SEQ ID NO: 1889985 - DNA, 15 bp, Homo sapiens
taagaattattaaca

SEQ ID NO: 1889986 - DNA, 15 bp, Homo sapiens
aagaattattaacac

SEQ ID NO: 1889987 - DNA, 15 bp, Homo sapiens
agaattattaacacc

SEQ ID NO: 1889988 - DNA, 15 bp, Homo sapiens
gaattattaacacct

SEQ ID NO: 1889989 - DNA, 15 bp, Homo sapiens
aattattaacacctt

SEQ ID NO: 1889990 - DNA, 15 bp, Homo sapiens
attattaacaccttt

SEQ ID NO: 1889991 - DNA, 15 bp, Homo sapiens
ttattaacaccttta

SEQ ID NO: 1889992 - DNA, 15 bp, Homo sapiens
tattaacacctttac

SEQ ID NO: 1889993 - DNA, 15 bp, Homo sapiens
attaacacctttaca

SEQ ID NO: 1889994 - DNA, 15 bp, Homo sapiens
ttaacacctttacaa

SEQ ID NO: 1889995 - DNA, 15 bp, Homo sapiens
taacacctttacaac

SEQ ID NO: 1889996 - DNA, 15 bp, Homo sapiens
aacacctttacaaca

SEQ ID NO: 1889997 - DNA, 15 bp, Homo sapiens
acacctttacaacat

SEQ ID NO: 1889998 - DNA, 15 bp, Homo sapiens
cacctttacaacatc

SEQ ID NO: 1889999 - DNA, 15 bp, Homo sapiens
acctttacaacatca

SEQ ID NO: 1890000 - DNA, 15 bp, Homo sapiens
cctttacaacatcat

SEQ ID NO: 1890001 - DNA, 15 bp, Homo sapiens
ctttacaacatcatc

SEQ ID NO: 1890002 - DNA, 15 bp, Homo sapiens
tttacaacatcatct

SEQ ID NO: 1890003 - DNA, 15 bp, Homo sapiens
ttacaacatcatctt

SEQ ID NO: 1890004 - DNA, 15 bp, Homo sapiens
tacaacatcatctta

SEQ ID NO: 1890005 - DNA, 15 bp, Homo sapiens
acaacatcatcttat

SEQ ID NO: 1890006 - DNA, 15 bp, Homo sapiens
caacatcatcttatc

SEQ ID NO: 1890007 - DNA, 15 bp, Homo sapiens
aacatcatcttatcc

SEQ ID NO: 1890008 - DNA, 15 bp, Homo sapiens
acatcatcttatcca

SEQ ID NO: 1890009 - DNA, 15 bp, Homo sapiens
catcatcttatccat

SEQ ID NO: 1890010 - DNA, 15 bp, Homo sapiens
atcatcttatccata

SEQ ID NO: 1890011 - DNA, 15 bp, Homo sapiens
tcatcttatccatat

SEQ ID NO: 1890012 - DNA, 15 bp, Homo sapiens
catcttatccatata

SEQ ID NO: 1890013 - DNA, 15 bp, Homo sapiens
atcttatccatatac

SEQ ID NO: 1890014 - DNA, 15 bp, Homo sapiens
tcttatccatatact

SEQ ID NO: 1890015 - DNA, 15 bp, Homo sapiens
cttatccatatacta

SEQ ID NO: 1890016 - DNA, 15 bp, Homo sapiens
ttatccatatactaa

SEQ ID NO: 1890017 - DNA, 15 bp, Homo sapiens
tatccatatactaat

SEQ ID NO: 1890018 - DNA, 15 bp, Homo sapiens
atccatatactaatg

SEQ ID NO: 1890019 - DNA, 15 bp, Homo sapiens
tccatatactaatgc

SEQ ID NO: 1890020 - DNA, 15 bp, Homo sapiens
ccatatactaatgct

SEQ ID NO: 1890021 - DNA, 15 bp, Homo sapiens
catatactaatgcta

SEQ ID NO: 1890022 - DNA, 15 bp, Homo sapiens
atatactaatgctat

SEQ ID NO: 1890023 - DNA, 15 bp, Homo sapiens
tatactaatgctatc

SEQ ID NO: 1890024 - DNA, 15 bp, Homo sapiens
atactaatgctatca

SEQ ID NO: 1890025 - DNA, 15 bp, Homo sapiens
tactaatgctatcac

SEQ ID NO: 1890026 - DNA, 15 bp, Homo sapiens
actaatgctatcact

SEQ ID NO: 1890027 - DNA, 15 bp, Homo sapiens
ctaatgctatcactt

SEQ ID NO: 1890028 - DNA, 15 bp, Homo sapiens
taatgctatcacttc

SEQ ID NO: 1890029 - DNA, 15 bp, Homo sapiens
aatgctatcacttca

SEQ ID NO: 1890030 - DNA, 15 bp, Homo sapiens
atgctatcacttcat

SEQ ID NO: 1890031 - DNA, 15 bp, Homo sapiens
tgctatcacttcatt

SEQ ID NO: 1890032 - DNA, 15 bp, Homo sapiens
gctatcacttcattt

SEQ ID NO: 1890033 - DNA, 15 bp, Homo sapiens
ctatcacttcattta

SEQ ID NO: 1890034 - DNA, 15 bp, Homo sapiens
tatcacttcatttat

SEQ ID NO: 1890035 - DNA, 15 bp, Homo sapiens
atcacttcatttatt

SEQ ID NO: 1890036 - DNA, 15 bp, Homo sapiens
tcacttcatttattc

SEQ ID NO: 1890037 - DNA, 15 bp, Homo sapiens
cacttcatttattca

SEQ ID NO: 1890038 - DNA, 15 bp, Homo sapiens
acttcatttattcag

SEQ ID NO: 1890039 - DNA, 15 bp, Homo sapiens
cttcatttattcagg

SEQ ID NO: 1890040 - DNA, 15 bp, Homo sapiens
ttcatttattcaggt

SEQ ID NO: 1890041 - DNA, 15 bp, Homo sapiens
tcatttattcaggta

SEQ ID NO: 1890042 - DNA, 15 bp, Homo sapiens
catttattcaggtat

SEQ ID NO: 1890043 - DNA, 15 bp, Homo sapiens
atttattcaggtatc

SEQ ID NO: 1890044 - DNA, 15 bp, Homo sapiens
tttattcaggtatct

SEQ ID NO: 1890045 - DNA, 15 bp, Homo sapiens
ttattcaggtatctt

SEQ ID NO: 1890046 - DNA, 15 bp, Homo sapiens
tattcaggtatcttt

SEQ ID NO: 1890047 - DNA, 15 bp, Homo sapiens
attcaggtatctttt

SEQ ID NO: 1890048 - DNA, 15 bp, Homo sapiens
ttcaggtatctttta

SEQ ID NO: 1890049 - DNA, 15 bp, Homo sapiens
tcaggtatcttttat

SEQ ID NO: 1890050 - DNA, 15 bp, Homo sapiens
caggtatcttttata

SEQ ID NO: 1890051 - DNA, 15 bp, Homo sapiens
aggtatcttttatat

SEQ ID NO: 1890052 - DNA, 15 bp, Homo sapiens
ggtatcttttatatt

SEQ ID NO: 1890053 - DNA, 15 bp, Homo sapiens
gtatcttttatattc

SEQ ID NO: 1890054 - DNA, 15 bp, Homo sapiens
tatcttttatattct

SEQ ID NO: 1890055 - DNA, 15 bp, Homo sapiens
atcttttatattctt

SEQ ID NO: 1890056 - DNA, 15 bp, Homo sapiens
tcttttatattcttt

SEQ ID NO: 1890057 - DNA, 15 bp, Homo sapiens
cttttatattcttta

SEQ ID NO: 1890058 - DNA, 15 bp, Homo sapiens
ttttatattctttag

SEQ ID NO: 1890059 - DNA, 15 bp, Homo sapiens
tttatattctttagt

SEQ ID NO: 1890060 - DNA, 15 bp, Homo sapiens
ttatattctttagta

SEQ ID NO: 1890061 - DNA, 15 bp, Homo sapiens
tatattctttagtag

SEQ ID NO: 1890062 - DNA, 15 bp, Homo sapiens
atattctttagtagg

SEQ ID NO: 1890063 - DNA, 15 bp, Homo sapiens
tattctttagtagga

SEQ ID NO: 1890064 - DNA, 15 bp, Homo sapiens
attctttagtaggat

SEQ ID NO: 1890065 - DNA, 15 bp, Homo sapiens
ttctttagtaggatc

SEQ ID NO: 1890066 - DNA, 15 bp, Homo sapiens
tctttagtaggatct

SEQ ID NO: 1890067 - DNA, 15 bp, Homo sapiens
ctttagtaggatctt

SEQ ID NO: 1890068 - DNA, 15 bp, Homo sapiens
tttagtaggatctta

SEQ ID NO: 1890069 - DNA, 15 bp, Homo sapiens
ttagtaggatcttat

SEQ ID NO: 1890070 - DNA, 15 bp, Homo sapiens
tagtaggatcttata

SEQ ID NO: 1890071 - DNA, 15 bp, Homo sapiens
agtaggatcttatac

SEQ ID NO: 1890072 - DNA, 15 bp, Homo sapiens
gtaggatcttatact

SEQ ID NO: 1890073 - DNA, 15 bp, Homo sapiens
taggatcttatactt

SEQ ID NO: 1890074 - DNA, 15 bp, Homo sapiens
aggatcttatacttt

SEQ ID NO: 1890075 - DNA, 15 bp, Homo sapiens
ggatcttatactttc

SEQ ID NO: 1890076 - DNA, 15 bp, Homo sapiens
gatcttatactttct

SEQ ID NO: 1890077 - DNA, 15 bp, Homo sapiens
atcttatactttctc

SEQ ID NO: 1890078 - DNA, 15 bp, Homo sapiens
tcttatactttctcc

SEQ ID NO: 1890079 - DNA, 15 bp, Homo sapiens
cttatactttctcca

SEQ ID NO: 1890080 - DNA, 15 bp, Homo sapiens
ttatactttctccat

SEQ ID NO: 1890081 - DNA, 15 bp, Homo sapiens
tatactttctccata

SEQ ID NO: 1890082 - DNA, 15 bp, Homo sapiens
atactttctccataa

SEQ ID NO: 1890083 - DNA, 15 bp, Homo sapiens
tactttctccataat

SEQ ID NO: 1890084 - DNA, 15 bp, Homo sapiens
actttctccataatg

SEQ ID NO: 1890085 - DNA, 15 bp, Homo sapiens
ctttctccataatgg

SEQ ID NO: 1890086 - DNA, 15 bp, Homo sapiens
tttctccataatggt

SEQ ID NO: 1890087 - DNA, 15 bp, Homo sapiens
ttctccataatggtc

SEQ ID NO: 1890088 - DNA, 15 bp, Homo sapiens
tctccataatggtcc

SEQ ID NO: 1890089 - DNA, 15 bp, Homo sapiens
ctccataatggtcct

SEQ ID NO: 1890090 - DNA, 15 bp, Homo sapiens
tccataatggtccta

SEQ ID NO: 1890091 - DNA, 15 bp, Homo sapiens
ccataatggtcctat

SEQ ID NO: 1890092 - DNA, 15 bp, Homo sapiens
cataatggtcctatg

SEQ ID NO: 1890093 - DNA, 15 bp, Homo sapiens
ataatggtcctatgg

SEQ ID NO: 1890094 - DNA, 15 bp, Homo sapiens
taatggtcctatgga

SEQ ID NO: 1890095 - DNA, 15 bp, Homo sapiens
aatggtcctatggat

SEQ ID NO: 1890096 - DNA, 15 bp, Homo sapiens
atggtcctatggatt

SEQ ID NO: 1890097 - DNA, 15 bp, Homo sapiens
tggtcctatggattc

SEQ ID NO: 1890098 - DNA, 15 bp, Homo sapiens
ggtcctatggattct

SEQ ID NO: 1890099 - DNA, 15 bp, Homo sapiens
gtcctatggattctt

SEQ ID NO: 1890100 - DNA, 15 bp, Homo sapiens
tcctatggattcttt

SEQ ID NO: 1890101 - DNA, 15 bp, Homo sapiens
cctatggattctttg

SEQ ID NO: 1890102 - DNA, 15 bp, Homo sapiens
ctatggattctttgt

SEQ ID NO: 1890103 - DNA, 15 bp, Homo sapiens
tatggattctttgtt

SEQ ID NO: 1890104 - DNA, 15 bp, Homo sapiens
atggattctttgtta

SEQ ID NO: 1890105 - DNA, 15 bp, Homo sapiens
tggattctttgttaa

SEQ ID NO: 1890106 - DNA, 15 bp, Homo sapiens
ggattctttgttaag

SEQ ID NO: 1890107 - DNA, 15 bp, Homo sapiens
gattctttgttaagg

SEQ ID NO: 1890108 - DNA, 15 bp, Homo sapiens
attctttgttaaggt

SEQ ID NO: 1890109 - DNA, 15 bp, Homo sapiens
ttctttgttaaggta

SEQ ID NO: 1890110 - DNA, 15 bp, Homo sapiens
tctttgttaaggtaa

SEQ ID NO: 1890111 - DNA, 15 bp, Homo sapiens
ctttgttaaggtaat

SEQ ID NO: 1890112 - DNA, 15 bp, Homo sapiens
tttgttaaggtaatt

SEQ ID NO: 1890113 - DNA, 15 bp, Homo sapiens
ttgttaaggtaattt

SEQ ID NO: 1890114 - DNA, 15 bp, Homo sapiens
tgttaaggtaatttc

SEQ ID NO: 1890115 - DNA, 15 bp, Homo sapiens
gttaaggtaatttct

SEQ ID NO: 1890116 - DNA, 15 bp, Homo sapiens
ttaaggtaatttcta

SEQ ID NO: 1890117 - DNA, 15 bp, Homo sapiens
taaggtaatttctat

SEQ ID NO: 1890118 - DNA, 15 bp, Homo sapiens
aaggtaatttctatg

SEQ ID NO: 1890119 - DNA, 15 bp, Homo sapiens
aggtaatttctatgt

SEQ ID NO: 1890120 - DNA, 15 bp, Homo sapiens
ggtaatttctatgta

SEQ ID NO: 1890121 - DNA, 15 bp, Homo sapiens
gtaatttctatgtag

SEQ ID NO: 1890122 - DNA, 15 bp, Homo sapiens
taatttctatgtaga

SEQ ID NO: 1890123 - DNA, 15 bp, Homo sapiens
aatttctatgtagat

SEQ ID NO: 1890124 - DNA, 15 bp, Homo sapiens
atttctatgtagata

SEQ ID NO: 1890125 - DNA, 15 bp, Homo sapiens
tttctatgtagatag

SEQ ID NO: 1890126 - DNA, 15 bp, Homo sapiens
ttctatgtagatagt

SEQ ID NO: 1890127 - DNA, 15 bp, Homo sapiens
tctatgtagatagtt

SEQ ID NO: 1890128 - DNA, 15 bp, Homo sapiens
ctatgtagatagttt

SEQ ID NO: 1890129 - DNA, 15 bp, Homo sapiens
tatgtagatagttta

SEQ ID NO: 1890130 - DNA, 15 bp, Homo sapiens
atgtagatagtttat

SEQ ID NO: 1890131 - DNA, 15 bp, Homo sapiens
tgtagatagtttata

SEQ ID NO: 1890132 - DNA, 15 bp, Homo sapiens
gtagatagtttatat

SEQ ID NO: 1890133 - DNA, 15 bp, Homo sapiens
tagatagtttatatt

SEQ ID NO: 1890134 - DNA, 15 bp, Homo sapiens
agatagtttatattc

SEQ ID NO: 1890135 - DNA, 15 bp, Homo sapiens
gatagtttatattca

SEQ ID NO: 1890136 - DNA, 15 bp, Homo sapiens
atagtttatattcat

SEQ ID NO: 1890137 - DNA, 15 bp, Homo sapiens
tagtttatattcata

SEQ ID NO: 1890138 - DNA, 15 bp, Homo sapiens
agtttatattcatag

SEQ ID NO: 1890139 - DNA, 15 bp, Homo sapiens
gtttatattcatagc

SEQ ID NO: 1890140 - DNA, 15 bp, Homo sapiens
tttatattcatagcc

SEQ ID NO: 1890141 - DNA, 15 bp, Homo sapiens
ttatattcatagcct

SEQ ID NO: 1890142 - DNA, 15 bp, Homo sapiens
tatattcatagcctt

SEQ ID NO: 1890143 - DNA, 15 bp, Homo sapiens
atattcatagccttt

SEQ ID NO: 1890144 - DNA, 15 bp, Homo sapiens
tattcatagcctttg

SEQ ID NO: 1890145 - DNA, 15 bp, Homo sapiens
attcatagcctttgg

SEQ ID NO: 1890146 - DNA, 15 bp, Homo sapiens
ttcatagcctttgga

SEQ ID NO: 1890147 - DNA, 15 bp, Homo sapiens
tcatagcctttggat

SEQ ID NO: 1890148 - DNA, 15 bp, Homo sapiens
catagcctttggata

SEQ ID NO: 1890149 - DNA, 15 bp, Homo sapiens
atagcctttggataa

SEQ ID NO: 1890150 - DNA, 15 bp, Homo sapiens
tagcctttggataat

SEQ ID NO: 1890151 - DNA, 15 bp, Homo sapiens
agcctttggataata

SEQ ID NO: 1890152 - DNA, 15 bp, Homo sapiens
gcctttggataatat

SEQ ID NO: 1890153 - DNA, 15 bp, Homo sapiens
cctttggataatatc

SEQ ID NO: 1890154 - DNA, 15 bp, Homo sapiens
ctttggataatatca

SEQ ID NO: 1890155 - DNA, 15 bp, Homo sapiens
tttggataatatcat

SEQ ID NO: 1890156 - DNA, 15 bp, Homo sapiens
ttggataatatcata

SEQ ID NO: 1890157 - DNA, 15 bp, Homo sapiens
tggataatatcatat

SEQ ID NO: 1890158 - DNA, 15 bp, Homo sapiens
ggataatatcatatt

SEQ ID NO: 1890159 - DNA, 15 bp, Homo sapiens
gataatatcatattt

SEQ ID NO: 1890160 - DNA, 15 bp, Homo sapiens
ataatatcatatttt

SEQ ID NO: 1890161 - DNA, 15 bp, Homo sapiens
taatatcatattttc

SEQ ID NO: 1890162 - DNA, 15 bp, Homo sapiens
aatatcatattttct

SEQ ID NO: 1890163 - DNA, 15 bp, Homo sapiens
atatcatattttcta

SEQ ID NO: 1890164 - DNA, 15 bp, Homo sapiens
tatcatattttctat

SEQ ID NO: 1890165 - DNA, 15 bp, Homo sapiens
atcatattttctatc

SEQ ID NO: 1890166 - DNA, 15 bp, Homo sapiens
tcatattttctatct

SEQ ID NO: 1890167 - DNA, 15 bp, Homo sapiens
catattttctatctg

SEQ ID NO: 1890168 - DNA, 15 bp, Homo sapiens
atattttctatctga

SEQ ID NO: 1890169 - DNA, 15 bp, Homo sapiens
tattttctatctgat

SEQ ID NO: 1890170 - DNA, 15 bp, Homo sapiens
attttctatctgatt

SEQ ID NO: 1890171 - DNA, 15 bp, Homo sapiens
ttttctatctgattt

SEQ ID NO: 1890172 - DNA, 15 bp, Homo sapiens
tttctatctgatttt

SEQ ID NO: 1890173 - DNA, 15 bp, Homo sapiens
ttctatctgattttt

SEQ ID NO: 1890174 - DNA, 15 bp, Homo sapiens
tctatctgatttttg

SEQ ID NO: 1890175 - DNA, 15 bp, Homo sapiens
ctatctgatttttgc

SEQ ID NO: 1890176 - DNA, 15 bp, Homo sapiens
tatctgatttttgct

SEQ ID NO: 1890177 - DNA, 15 bp, Homo sapiens
atctgatttttgcta

SEQ ID NO: 1890178 - DNA, 15 bp, Homo sapiens
tctgatttttgctaa

SEQ ID NO: 1890179 - DNA, 15 bp, Homo sapiens
ctgatttttgctaat

SEQ ID NO: 1890180 - DNA, 15 bp, Homo sapiens
tgatttttgctaata

SEQ ID NO: 1890181 - DNA, 15 bp, Homo sapiens
gatttttgctaatat

SEQ ID NO: 1890182 - DNA, 15 bp, Homo sapiens
atttttgctaatata

SEQ ID NO: 1890183 - DNA, 15 bp, Homo sapiens
tttttgctaatataa

SEQ ID NO: 1890184 - DNA, 15 bp, Homo sapiens
ttttgctaatataaa

SEQ ID NO: 1890185 - DNA, 15 bp, Homo sapiens
tttgctaatataaaa

SEQ ID NO: 1890186 - DNA, 15 bp, Homo sapiens
ttgctaatataaaaa

SEQ ID NO: 1890187 - DNA, 15 bp, Homo sapiens
tgctaatataaaaat

SEQ ID NO: 1890188 - DNA, 15 bp, Homo sapiens
gctaatataaaaata

SEQ ID NO: 1890189 - DNA, 15 bp, Homo sapiens
ctaatataaaaatac

SEQ ID NO: 1890190 - DNA, 15 bp, Homo sapiens
taatataaaaatact

SEQ ID NO: 1890191 - DNA, 15 bp, Homo sapiens
aatataaaaatacta

SEQ ID NO: 1890192 - DNA, 15 bp, Homo sapiens
atataaaaatactaa

SEQ ID NO: 1890193 - DNA, 15 bp, Homo sapiens
tataaaaatactaag

SEQ ID NO: 1890194 - DNA, 15 bp, Homo sapiens
ataaaaatactaagt

SEQ ID NO: 1890195 - DNA, 15 bp, Homo sapiens
taaaaatactaagtt

SEQ ID NO: 1890196 - DNA, 15 bp, Homo sapiens
aaaaatactaagtta

SEQ ID NO: 1890197 - DNA, 15 bp, Homo sapiens
aaaatactaagttaa

SEQ ID NO: 1890198 - DNA, 15 bp, Homo sapiens
aaatactaagttaat

SEQ ID NO: 1890199 - DNA, 15 bp, Homo sapiens
aatactaagttaatt

SEQ ID NO: 1890200 - DNA, 15 bp, Homo sapiens
atactaagttaattt

SEQ ID NO: 1890201 - DNA, 15 bp, Homo sapiens
tactaagttaattta

SEQ ID NO: 1890202 - DNA, 15 bp, Homo sapiens
actaagttaatttaa

SEQ ID NO: 1890203 - DNA, 15 bp, Homo sapiens
ctaagttaatttaaa

SEQ ID NO: 1890204 - DNA, 15 bp, Homo sapiens
taagttaatttaaac

SEQ ID NO: 1890205 - DNA, 15 bp, Homo sapiens
aagttaatttaaact

SEQ ID NO: 1890206 - DNA, 15 bp, Homo sapiens
agttaatttaaactt

SEQ ID NO: 1890207 - DNA, 15 bp, Homo sapiens
gttaatttaaacttg

SEQ ID NO: 1890208 - DNA, 15 bp, Homo sapiens
ttaatttaaacttgc

SEQ ID NO: 1890209 - DNA, 15 bp, Homo sapiens
taatttaaacttgct

SEQ ID NO: 1890210 - DNA, 15 bp, Homo sapiens
aatttaaacttgcta

SEQ ID NO: 1890211 - DNA, 15 bp, Homo sapiens
atttaaacttgctaa

SEQ ID NO: 1890212 - DNA, 15 bp, Homo sapiens
tttaaacttgctaaa

SEQ ID NO: 1890213 - DNA, 15 bp, Homo sapiens
ttaaacttgctaaac

SEQ ID NO: 1890214 - DNA, 15 bp, Homo sapiens
taaacttgctaaaca

SEQ ID NO: 1890215 - DNA, 15 bp, Homo sapiens
aaacttgctaaacat

SEQ ID NO: 1890216 - DNA, 15 bp, Homo sapiens
aacttgctaaacatt

SEQ ID NO: 1890217 - DNA, 15 bp, Homo sapiens
acttgctaaacattc

SEQ ID NO: 1890218 - DNA, 15 bp, Homo sapiens
cttgctaaacattca

SEQ ID NO: 1890219 - DNA, 15 bp, Homo sapiens
ttgctaaacattcat

SEQ ID NO: 1890220 - DNA, 15 bp, Homo sapiens
tgctaaacattcata

SEQ ID NO: 1890221 - DNA, 15 bp, Homo sapiens
gctaaacattcatat

SEQ ID NO: 1890222 - DNA, 15 bp, Homo sapiens
ctaaacattcatatt

SEQ ID NO: 1890223 - DNA, 15 bp, Homo sapiens
taaacattcatatta

SEQ ID NO: 1890224 - DNA, 15 bp, Homo sapiens
aaacattcatattag

SEQ ID NO: 1890225 - DNA, 15 bp, Homo sapiens
aacattcatattagt

SEQ ID NO: 1890226 - DNA, 15 bp, Homo sapiens
acattcatattagtt

SEQ ID NO: 1890227 - DNA, 15 bp, Homo sapiens
cattcatattagttt

SEQ ID NO: 1890228 - DNA, 15 bp, Homo sapiens
attcatattagtttt

SEQ ID NO: 1890229 - DNA, 15 bp, Homo sapiens
ttcatattagttttt

SEQ ID NO: 1890230 - DNA, 15 bp, Homo sapiens
tcatattagttttta

SEQ ID NO: 1890231 - DNA, 15 bp, Homo sapiens
catattagtttttat

SEQ ID NO: 1890232 - DNA, 15 bp, Homo sapiens
atattagtttttata

SEQ ID NO: 1890233 - DNA, 15 bp, Homo sapiens
tattagtttttatag

SEQ ID NO: 1890234 - DNA, 15 bp, Homo sapiens
attagtttttatagt

SEQ ID NO: 1890235 - DNA, 15 bp, Homo sapiens
ttagtttttatagtt

SEQ ID NO: 1890236 - DNA, 15 bp, Homo sapiens
tagtttttatagttt

SEQ ID NO: 1890237 - DNA, 15 bp, Homo sapiens
agtttttatagttta

SEQ ID NO: 1890238 - DNA, 15 bp, Homo sapiens
gtttttatagtttat

SEQ ID NO: 1890239 - DNA, 15 bp, Homo sapiens
tttttatagtttatt

SEQ ID NO: 1890240 - DNA, 15 bp, Homo sapiens
ttttatagtttattc

SEQ ID NO: 1890241 - DNA, 15 bp, Homo sapiens
tttatagtttattca

SEQ ID NO: 1890242 - DNA, 15 bp, Homo sapiens
ttatagtttattcat

SEQ ID NO: 1890243 - DNA, 15 bp, Homo sapiens
tatagtttattcatg

SEQ ID NO: 1890244 - DNA, 15 bp, Homo sapiens
atagtttattcatga

SEQ ID NO: 1890245 - DNA, 15 bp, Homo sapiens
tagtttattcatgaa

SEQ ID NO: 1890246 - DNA, 15 bp, Homo sapiens
agtttattcatgaat

SEQ ID NO: 1890247 - DNA, 15 bp, Homo sapiens
gtttattcatgaatt

SEQ ID NO: 1890248 - DNA, 15 bp, Homo sapiens
tttattcatgaattc

SEQ ID NO: 1890249 - DNA, 15 bp, Homo sapiens
ttattcatgaattct

SEQ ID NO: 1890250 - DNA, 15 bp, Homo sapiens
tattcatgaattctt

SEQ ID NO: 1890251 - DNA, 15 bp, Homo sapiens
attcatgaattcttt

SEQ ID NO: 1890252 - DNA, 15 bp, Homo sapiens
ttcatgaattctttt

SEQ ID NO: 1890253 - DNA, 15 bp, Homo sapiens
tcatgaattcttttt

SEQ ID NO: 1890254 - DNA, 15 bp, Homo sapiens
catgaattctttttt

SEQ ID NO: 1890255 - DNA, 15 bp, Homo sapiens
atgaattctttttta

SEQ ID NO: 1890256 - DNA, 15 bp, Homo sapiens
tgaattcttttttat

SEQ ID NO: 1890257 - DNA, 15 bp, Homo sapiens
gaattcttttttatg

SEQ ID NO: 1890258 - DNA, 15 bp, Homo sapiens
aattcttttttatgt

SEQ ID NO: 1890259 - DNA, 15 bp, Homo sapiens
attcttttttatgtt

SEQ ID NO: 1890260 - DNA, 15 bp, Homo sapiens
ttcttttttatgttt

SEQ ID NO: 1890261 - DNA, 15 bp, Homo sapiens
tcttttttatgtttg

SEQ ID NO: 1890262 - DNA, 15 bp, Homo sapiens
cttttttatgtttga

SEQ ID NO: 1890263 - DNA, 15 bp, Homo sapiens
ttttttatgtttgat

SEQ ID NO: 1890264 - DNA, 15 bp, Homo sapiens
tttttatgtttgatg

SEQ ID NO: 1890265 - DNA, 15 bp, Homo sapiens
ttttatgtttgatgt

SEQ ID NO: 1890266 - DNA, 15 bp, Homo sapiens
tttatgtttgatgta

SEQ ID NO: 1890267 - DNA, 15 bp, Homo sapiens
ttatgtttgatgtaa

SEQ ID NO: 1890268 - DNA, 15 bp, Homo sapiens
tatgtttgatgtaaa

SEQ ID NO: 1890269 - DNA, 15 bp, Homo sapiens
atgtttgatgtaaat

SEQ ID NO: 1890270 - DNA, 15 bp, Homo sapiens
tgtttgatgtaaata

SEQ ID NO: 1890271 - DNA, 15 bp, Homo sapiens
gtttgatgtaaataa

SEQ ID NO: 1890272 - DNA, 15 bp, Homo sapiens
tttgatgtaaataat

SEQ ID NO: 1890273 - DNA, 15 bp, Homo sapiens
ttgatgtaaataatt

SEQ ID NO: 1890274 - DNA, 15 bp, Homo sapiens
tgatgtaaataatta

SEQ ID NO: 1890275 - DNA, 15 bp, Homo sapiens
gatgtaaataattat

SEQ ID NO: 1890276 - DNA, 15 bp, Homo sapiens
atgtaaataattatg

SEQ ID NO: 1890277 - DNA, 15 bp, Homo sapiens
tgtaaataattatgt

SEQ ID NO: 1890278 - DNA, 15 bp, Homo sapiens
gtaaataattatgtc

SEQ ID NO: 1890279 - DNA, 15 bp, Homo sapiens
taaataattatgtca

SEQ ID NO: 1890280 - DNA, 15 bp, Homo sapiens
aaataattatgtcat

SEQ ID NO: 1890281 - DNA, 15 bp, Homo sapiens
aataattatgtcatt

SEQ ID NO: 1890282 - DNA, 15 bp, Homo sapiens
ataattatgtcattt

SEQ ID NO: 1890283 - DNA, 15 bp, Homo sapiens
taattatgtcatttt

SEQ ID NO: 1890284 - DNA, 15 bp, Homo sapiens
aattatgtcattttc

SEQ ID NO: 1890285 - DNA, 15 bp, Homo sapiens
attatgtcattttca

SEQ ID NO: 1890286 - DNA, 15 bp, Homo sapiens
ttatgtcattttcaa

SEQ ID NO: 1890287 - DNA, 15 bp, Homo sapiens
tatgtcattttcaaa

SEQ ID NO: 1890288 - DNA, 15 bp, Homo sapiens
atgtcattttcaaat

SEQ ID NO: 1890289 - DNA, 15 bp, Homo sapiens
tgtcattttcaaata

SEQ ID NO: 1890290 - DNA, 15 bp, Homo sapiens
gtcattttcaaataa

SEQ ID NO: 1890291 - DNA, 15 bp, Homo sapiens
tcattttcaaataat

SEQ ID NO: 1890292 - DNA, 15 bp, Homo sapiens
cattttcaaataata

SEQ ID NO: 1890293 - DNA, 15 bp, Homo sapiens
attttcaaataataa

SEQ ID NO: 1890294 - DNA, 15 bp, Homo sapiens
ttttcaaataataac

SEQ ID NO: 1890295 - DNA, 15 bp, Homo sapiens
tttcaaataataaca

SEQ ID NO: 1890296 - DNA, 15 bp, Homo sapiens
ttcaaataataacaa

SEQ ID NO: 1890297 - DNA, 15 bp, Homo sapiens
tcaaataataacaat

SEQ ID NO: 1890298 - DNA, 15 bp, Homo sapiens
caaataataacaatt

SEQ ID NO: 1890299 - DNA, 15 bp, Homo sapiens
aaataataacaattc

SEQ ID NO: 1890300 - DNA, 15 bp, Homo sapiens
aataataacaattct

SEQ ID NO: 1890301 - DNA, 15 bp, Homo sapiens
ataataacaattctg

SEQ ID NO: 1890302 - DNA, 15 bp, Homo sapiens
taataacaattctgt

SEQ ID NO: 1890303 - DNA, 15 bp, Homo sapiens
aataacaattctgtc

SEQ ID NO: 1890304 - DNA, 15 bp, Homo sapiens
ataacaattctgtct

SEQ ID NO: 1890305 - DNA, 15 bp, Homo sapiens
taacaattctgtctc

SEQ ID NO: 1890306 - DNA, 15 bp, Homo sapiens
aacaattctgtctct

SEQ ID NO: 1890307 - DNA, 15 bp, Homo sapiens
acaattctgtctctt

SEQ ID NO: 1890308 - DNA, 15 bp, Homo sapiens
caattctgtctcttc

SEQ ID NO: 1890309 - DNA, 15 bp, Homo sapiens
aattctgtctcttcc

SEQ ID NO: 1890310 - DNA, 15 bp, Homo sapiens
attctgtctcttccc

SEQ ID NO: 1890311 - DNA, 15 bp, Homo sapiens
ttctgtctcttccct

SEQ ID NO: 1890312 - DNA, 15 bp, Homo sapiens
tctgtctcttccctt

SEQ ID NO: 1890313 - DNA, 15 bp, Homo sapiens
ctgtctcttcccttc

SEQ ID NO: 1890314 - DNA, 15 bp, Homo sapiens
tgtctcttcccttct

SEQ ID NO: 1890315 - DNA, 15 bp, Homo sapiens
gtctcttcccttcta

SEQ ID NO: 1890316 - DNA, 15 bp, Homo sapiens
tctcttcccttctaa

SEQ ID NO: 1890317 - DNA, 15 bp, Homo sapiens
ctcttcccttctaat

SEQ ID NO: 1890318 - DNA, 15 bp, Homo sapiens
tcttcccttctaatt

SEQ ID NO: 1890319 - DNA, 15 bp, Homo sapiens
cttcccttctaattc

SEQ ID NO: 1890320 - DNA, 15 bp, Homo sapiens
ttcccttctaattct

SEQ ID NO: 1890321 - DNA, 15 bp, Homo sapiens
tcccttctaattctt

SEQ ID NO: 1890322 - DNA, 15 bp, Homo sapiens
cccttctaattctta

SEQ ID NO: 1890323 - DNA, 15 bp, Homo sapiens
ccttctaattcttat

SEQ ID NO: 1890324 - DNA, 15 bp, Homo sapiens
cttctaattcttatt

SEQ ID NO: 1890325 - DNA, 15 bp, Homo sapiens
tctaattcttattct

SEQ ID NO: 1890326 - DNA, 15 bp, Homo sapiens
ctaattcttattctt

SEQ ID NO: 1890327 - DNA, 15 bp, Homo sapiens
taattcttattcttt

SEQ ID NO: 1890328 - DNA, 15 bp, Homo sapiens
aattcttattcttta

SEQ ID NO: 1890329 - DNA, 15 bp, Homo sapiens
attcttattctttat

SEQ ID NO: 1890330 - DNA, 15 bp, Homo sapiens
ttcttattctttatt

SEQ ID NO: 1890331 - DNA, 15 bp, Homo sapiens
tcttattctttattt

SEQ ID NO: 1890332 - DNA, 15 bp, Homo sapiens
cttattctttattta

SEQ ID NO: 1890333 - DNA, 15 bp, Homo sapiens
ttattctttatttat

SEQ ID NO: 1890334 - DNA, 15 bp, Homo sapiens
tattctttatttatt

SEQ ID NO: 1890335 - DNA, 15 bp, Homo sapiens
attctttatttattt

SEQ ID NO: 1890336 - DNA, 15 bp, Homo sapiens
ttctttatttatttt

SEQ ID NO: 1890337 - DNA, 15 bp, Homo sapiens
ctttatttattttct

SEQ ID NO: 1890338 - DNA, 15 bp, Homo sapiens
tttatttattttctt

SEQ ID NO: 1890339 - DNA, 15 bp, Homo sapiens
ttatttattttctta

SEQ ID NO: 1890340 - DNA, 15 bp, Homo sapiens
tatttattttcttat

SEQ ID NO: 1890341 - DNA, 15 bp, Homo sapiens
atttattttcttata

SEQ ID NO: 1890342 - DNA, 15 bp, Homo sapiens
tttattttcttatag

SEQ ID NO: 1890343 - DNA, 15 bp, Homo sapiens
ttattttcttatagc

SEQ ID NO: 1890344 - DNA, 15 bp, Homo sapiens
tattttcttatagca

SEQ ID NO: 1890345 - DNA, 15 bp, Homo sapiens
attttcttatagcat

SEQ ID NO: 1890346 - DNA, 15 bp, Homo sapiens
ttttcttatagcata

SEQ ID NO: 1890347 - DNA, 15 bp, Homo sapiens
tttcttatagcatag

SEQ ID NO: 1890348 - DNA, 15 bp, Homo sapiens
ttcttatagcataga

SEQ ID NO: 1890349 - DNA, 15 bp, Homo sapiens
tcttatagcatagaa

SEQ ID NO: 1890350 - DNA, 15 bp, Homo sapiens
cttatagcatagaaa

SEQ ID NO: 1890351 - DNA, 15 bp, Homo sapiens
ttatagcatagaaag

SEQ ID NO: 1890352 - DNA, 15 bp, Homo sapiens
tatagcatagaaagg

SEQ ID NO: 1890353 - DNA, 15 bp, Homo sapiens
atagcatagaaagga

SEQ ID NO: 1890354 - DNA, 15 bp, Homo sapiens
tagcatagaaaggat

SEQ ID NO: 1890355 - DNA, 15 bp, Homo sapiens
agcatagaaaggata

SEQ ID NO: 1890356 - DNA, 15 bp, Homo sapiens
gcatagaaaggatac

SEQ ID NO: 1890357 - DNA, 15 bp, Homo sapiens
catagaaaggatact

SEQ ID NO: 1890358 - DNA, 15 bp, Homo sapiens
atagaaaggatacta

SEQ ID NO: 1890359 - DNA, 15 bp, Homo sapiens
tagaaaggatactat

SEQ ID NO: 1890360 - DNA, 15 bp, Homo sapiens
agaaaggatactatg

SEQ ID NO: 1890361 - DNA, 15 bp, Homo sapiens
gaaaggatactatgt

SEQ ID NO: 1890362 - DNA, 15 bp, Homo sapiens
aaaggatactatgta

SEQ ID NO: 1890363 - DNA, 15 bp, Homo sapiens
aaggatactatgtac

SEQ ID NO: 1890364 - DNA, 15 bp, Homo sapiens
aggatactatgtact

SEQ ID NO: 1890365 - DNA, 15 bp, Homo sapiens
ggatactatgtactg

SEQ ID NO: 1890366 - DNA, 15 bp, Homo sapiens
gatactatgtactgt

SEQ ID NO: 1890367 - DNA, 15 bp, Homo sapiens
atactatgtactgta

SEQ ID NO: 1890368 - DNA, 15 bp, Homo sapiens
tactatgtactgtac

SEQ ID NO: 1890369 - DNA, 15 bp, Homo sapiens
actatgtactgtacc

SEQ ID NO: 1890370 - DNA, 15 bp, Homo sapiens
ctatgtactgtacca

SEQ ID NO: 1890371 - DNA, 15 bp, Homo sapiens
tatgtactgtaccaa

SEQ ID NO: 1890372 - DNA, 15 bp, Homo sapiens
atgtactgtaccaaa

SEQ ID NO: 1890373 - DNA, 15 bp, Homo sapiens
tgtactgtaccaaat

SEQ ID NO: 1890374 - DNA, 15 bp, Homo sapiens
gtactgtaccaaata

SEQ ID NO: 1890375 - DNA, 15 bp, Homo sapiens
tactgtaccaaatag

SEQ ID NO: 1890376 - DNA, 15 bp, Homo sapiens
actgtaccaaatagt

SEQ ID NO: 1890377 - DNA, 15 bp, Homo sapiens
ctgtaccaaatagta

SEQ ID NO: 1890378 - DNA, 15 bp, Homo sapiens
tgtaccaaatagtag

SEQ ID NO: 1890379 - DNA, 15 bp, Homo sapiens
gtaccaaatagtagt

SEQ ID NO: 1890380 - DNA, 15 bp, Homo sapiens
taccaaatagtagta

SEQ ID NO: 1890381 - DNA, 15 bp, Homo sapiens
accaaatagtagtaa

SEQ ID NO: 1890382 - DNA, 15 bp, Homo sapiens
ccaaatagtagtaaa

SEQ ID NO: 1890383 - DNA, 15 bp, Homo sapiens
caaatagtagtaaag

SEQ ID NO: 1890384 - DNA, 15 bp, Homo sapiens
aaatagtagtaaaga

SEQ ID NO: 1890385 - DNA, 15 bp, Homo sapiens
aatagtagtaaagat

SEQ ID NO: 1890386 - DNA, 15 bp, Homo sapiens
atagtagtaaagatt

SEQ ID NO: 1890387 - DNA, 15 bp, Homo sapiens
tagtagtaaagattg

SEQ ID NO: 1890388 - DNA, 15 bp, Homo sapiens
agtagtaaagattgt

SEQ ID NO: 1890389 - DNA, 15 bp, Homo sapiens
gtagtaaagattgtg

SEQ ID NO: 1890390 - DNA, 15 bp, Homo sapiens
tagtaaagattgtgg

SEQ ID NO: 1890391 - DNA, 15 bp, Homo sapiens
agtaaagattgtggc

SEQ ID NO: 1890392 - DNA, 15 bp, Homo sapiens
gtaaagattgtggcc

SEQ ID NO: 1890393 - DNA, 15 bp, Homo sapiens
taaagattgtggcca

SEQ ID NO: 1890394 - DNA, 15 bp, Homo sapiens
aaagattgtggccat

SEQ ID NO: 1890395 - DNA, 15 bp, Homo sapiens
aagattgtggccatc

SEQ ID NO: 1890396 - DNA, 15 bp, Homo sapiens
agattgtggccatcc

SEQ ID NO: 1890397 - DNA, 15 bp, Homo sapiens
gattgtggccatcct

SEQ ID NO: 1890398 - DNA, 15 bp, Homo sapiens
attgtggccatcctt

SEQ ID NO: 1890399 - DNA, 15 bp, Homo sapiens
ttgtggccatccttg

SEQ ID NO: 1890400 - DNA, 15 bp, Homo sapiens
tgtggccatccttgt

SEQ ID NO: 1890401 - DNA, 15 bp, Homo sapiens
gtggccatccttgtt

SEQ ID NO: 1890402 - DNA, 15 bp, Homo sapiens
tggccatccttgttt

SEQ ID NO: 1890403 - DNA, 15 bp, Homo sapiens
ggccatccttgtttt

SEQ ID NO: 1890404 - DNA, 15 bp, Homo sapiens
gccatccttgttttg

SEQ ID NO: 1890405 - DNA, 15 bp, Homo sapiens
ccatccttgttttgt

SEQ ID NO: 1890406 - DNA, 15 bp, Homo sapiens
catccttgttttgtg

SEQ ID NO: 1890407 - DNA, 15 bp, Homo sapiens
atccttgttttgtgt

SEQ ID NO: 1890408 - DNA, 15 bp, Homo sapiens
tccttgttttgtgtc

SEQ ID NO: 1890409 - DNA, 15 bp, Homo sapiens
ccttgttttgtgtct

SEQ ID NO: 1890410 - DNA, 15 bp, Homo sapiens
cttgttttgtgtctg

SEQ ID NO: 1890411 - DNA, 15 bp, Homo sapiens
ttgttttgtgtctga

SEQ ID NO: 1890412 - DNA, 15 bp, Homo sapiens
tgttttgtgtctgac

SEQ ID NO: 1890413 - DNA, 15 bp, Homo sapiens
gttttgtgtctgacc

SEQ ID NO: 1890414 - DNA, 15 bp, Homo sapiens
ttttgtgtctgacct

SEQ ID NO: 1890415 - DNA, 15 bp, Homo sapiens
tttgtgtctgacctt

SEQ ID NO: 1890416 - DNA, 15 bp, Homo sapiens
ttgtgtctgacctta

SEQ ID NO: 1890417 - DNA, 15 bp, Homo sapiens
tgtgtctgaccttaa

SEQ ID NO: 1890418 - DNA, 15 bp, Homo sapiens
gtgtctgaccttaaa

SEQ ID NO: 1890419 - DNA, 15 bp, Homo sapiens
tgtctgaccttaaag

SEQ ID NO: 1890420 - DNA, 15 bp, Homo sapiens
gtctgaccttaaagt

SEQ ID NO: 1890421 - DNA, 15 bp, Homo sapiens
tctgaccttaaagta

SEQ ID NO: 1890422 - DNA, 15 bp, Homo sapiens
ctgaccttaaagtat

SEQ ID NO: 1890423 - DNA, 15 bp, Homo sapiens
tgaccttaaagtatc

SEQ ID NO: 1890424 - DNA, 15 bp, Homo sapiens
gaccttaaagtatct

SEQ ID NO: 1890425 - DNA, 15 bp, Homo sapiens
accttaaagtatctc

SEQ ID NO: 1890426 - DNA, 15 bp, Homo sapiens
ccttaaagtatctcc

SEQ ID NO: 1890427 - DNA, 15 bp, Homo sapiens
cttaaagtatctcca

SEQ ID NO: 1890428 - DNA, 15 bp, Homo sapiens
ttaaagtatctccat

SEQ ID NO: 1890429 - DNA, 15 bp, Homo sapiens
taaagtatctccatt

SEQ ID NO: 1890430 - DNA, 15 bp, Homo sapiens
aaagtatctccatta

SEQ ID NO: 1890431 - DNA, 15 bp, Homo sapiens
aagtatctccattaa

SEQ ID NO: 1890432 - DNA, 15 bp, Homo sapiens
agtatctccattaag

SEQ ID NO: 1890433 - DNA, 15 bp, Homo sapiens
gtatctccattaagt

SEQ ID NO: 1890434 - DNA, 15 bp, Homo sapiens
tatctccattaagta

SEQ ID NO: 1890435 - DNA, 15 bp, Homo sapiens
atctccattaagtac

SEQ ID NO: 1890436 - DNA, 15 bp, Homo sapiens
tctccattaagtacg

SEQ ID NO: 1890437 - DNA, 15 bp, Homo sapiens
ctccattaagtacga

SEQ ID NO: 1890438 - DNA, 15 bp, Homo sapiens
tccattaagtacgat

SEQ ID NO: 1890439 - DNA, 15 bp, Homo sapiens
ccattaagtacgatg

SEQ ID NO: 1890440 - DNA, 15 bp, Homo sapiens
cattaagtacgatgt

SEQ ID NO: 1890441 - DNA, 15 bp, Homo sapiens
attaagtacgatgtt

SEQ ID NO: 1890442 - DNA, 15 bp, Homo sapiens
ttaagtacgatgttt

SEQ ID NO: 1890443 - DNA, 15 bp, Homo sapiens
taagtacgatgtttg

SEQ ID NO: 1890444 - DNA, 15 bp, Homo sapiens
aagtacgatgtttgc

SEQ ID NO: 1890445 - DNA, 15 bp, Homo sapiens
agtacgatgtttgct

SEQ ID NO: 1890446 - DNA, 15 bp, Homo sapiens
gtacgatgtttgctc

SEQ ID NO: 1890447 - DNA, 15 bp, Homo sapiens
tacgatgtttgctct

SEQ ID NO: 1890448 - DNA, 15 bp, Homo sapiens
acgatgtttgctcta

SEQ ID NO: 1890449 - DNA, 15 bp, Homo sapiens
cgatgtttgctctag

SEQ ID NO: 1890450 - DNA, 15 bp, Homo sapiens
gatgtttgctctagc

SEQ ID NO: 1890451 - DNA, 15 bp, Homo sapiens
atgtttgctctagcc

SEQ ID NO: 1890452 - DNA, 15 bp, Homo sapiens
tgtttgctctagcct

SEQ ID NO: 1890453 - DNA, 15 bp, Homo sapiens
gtttgctctagcctt

SEQ ID NO: 1890454 - DNA, 15 bp, Homo sapiens
tttgctctagccttt

SEQ ID NO: 1890455 - DNA, 15 bp, Homo sapiens
ttgctctagcctttt

SEQ ID NO: 1890456 - DNA, 15 bp, Homo sapiens
tgctctagccttttg

SEQ ID NO: 1890457 - DNA, 15 bp, Homo sapiens
gctctagccttttga

SEQ ID NO: 1890458 - DNA, 15 bp, Homo sapiens
ctctagccttttgat

SEQ ID NO: 1890459 - DNA, 15 bp, Homo sapiens
tctagccttttgata

SEQ ID NO: 1890460 - DNA, 15 bp, Homo sapiens
ctagccttttgatat

SEQ ID NO: 1890461 - DNA, 15 bp, Homo sapiens
tagccttttgatatg

SEQ ID NO: 1890462 - DNA, 15 bp, Homo sapiens
agccttttgatatgt

SEQ ID NO: 1890463 - DNA, 15 bp, Homo sapiens
gccttttgatatgta

SEQ ID NO: 1890464 - DNA, 15 bp, Homo sapiens
ccttttgatatgtag

SEQ ID NO: 1890465 - DNA, 15 bp, Homo sapiens
cttttgatatgtagc

SEQ ID NO: 1890466 - DNA, 15 bp, Homo sapiens
ttttgatatgtagct

SEQ ID NO: 1890467 - DNA, 15 bp, Homo sapiens
tttgatatgtagctt

SEQ ID NO: 1890468 - DNA, 15 bp, Homo sapiens
ttgatatgtagcttc

SEQ ID NO: 1890469 - DNA, 15 bp, Homo sapiens
tgatatgtagcttct

SEQ ID NO: 1890470 - DNA, 15 bp, Homo sapiens
gatatgtagcttcta

SEQ ID NO: 1890471 - DNA, 15 bp, Homo sapiens
atatgtagcttctat

SEQ ID NO: 1890472 - DNA, 15 bp, Homo sapiens
tatgtagcttctata

SEQ ID NO: 1890473 - DNA, 15 bp, Homo sapiens
atgtagcttctatag

SEQ ID NO: 1890474 - DNA, 15 bp, Homo sapiens
tgtagcttctataga

SEQ ID NO: 1890475 - DNA, 15 bp, Homo sapiens
gtagcttctatagag

SEQ ID NO: 1890476 - DNA, 15 bp, Homo sapiens
tagcttctatagagt

SEQ ID NO: 1890477 - DNA, 15 bp, Homo sapiens
agcttctatagagtt

SEQ ID NO: 1890478 - DNA, 15 bp, Homo sapiens
gcttctatagagtta

SEQ ID NO: 1890479 - DNA, 15 bp, Homo sapiens
cttctatagagttaa

SEQ ID NO: 1890480 - DNA, 15 bp, Homo sapiens
ttctatagagttaaa

SEQ ID NO: 1890481 - DNA, 15 bp, Homo sapiens
tctatagagttaaac

SEQ ID NO: 1890482 - DNA, 15 bp, Homo sapiens
ctatagagttaaaca

SEQ ID NO: 1890483 - DNA, 15 bp, Homo sapiens
tatagagttaaacaa

SEQ ID NO: 1890484 - DNA, 15 bp, Homo sapiens
atagagttaaacaag

SEQ ID NO: 1890485 - DNA, 15 bp, Homo sapiens
tagagttaaacaagg

SEQ ID NO: 1890486 - DNA, 15 bp, Homo sapiens
agagttaaacaaggc

SEQ ID NO: 1890487 - DNA, 15 bp, Homo sapiens
gagttaaacaaggcc

SEQ ID NO: 1890488 - DNA, 15 bp, Homo sapiens
agttaaacaaggcct

SEQ ID NO: 1890489 - DNA, 15 bp, Homo sapiens
gttaaacaaggcctg

SEQ ID NO: 1890490 - DNA, 15 bp, Homo sapiens
ttaaacaaggcctgg

SEQ ID NO: 1890491 - DNA, 15 bp, Homo sapiens
taaacaaggcctggc

SEQ ID NO: 1890492 - DNA, 15 bp, Homo sapiens
aaacaaggcctggcc

SEQ ID NO: 1890493 - DNA, 15 bp, Homo sapiens
aacaaggcctggccc

SEQ ID NO: 1890494 - DNA, 15 bp, Homo sapiens
acaaggcctggccct

SEQ ID NO: 1890495 - DNA, 15 bp, Homo sapiens
caaggcctggccctc

SEQ ID NO: 1890496 - DNA, 15 bp, Homo sapiens
aaggcctggccctcc

SEQ ID NO: 1890497 - DNA, 15 bp, Homo sapiens
aggcctggccctcca

SEQ ID NO: 1890498 - DNA, 15 bp, Homo sapiens
ggcctggccctccag

SEQ ID NO: 1890499 - DNA, 15 bp, Homo sapiens
gcctggccctccagg

SEQ ID NO: 1890500 - DNA, 15 bp, Homo sapiens
cctggccctccagga

SEQ ID NO: 1890501 - DNA, 15 bp, Homo sapiens
ctggccctccaggaa

SEQ ID NO: 1890502 - DNA, 15 bp, Homo sapiens
tggccctccaggaaa

SEQ ID NO: 1890503 - DNA, 15 bp, Homo sapiens
ggccctccaggaaat

SEQ ID NO: 1890504 - DNA, 15 bp, Homo sapiens
gccctccaggaaatt

SEQ ID NO: 1890505 - DNA, 15 bp, Homo sapiens
ccctccaggaaattt

SEQ ID NO: 1890506 - DNA, 15 bp, Homo sapiens
cctccaggaaatttt

SEQ ID NO: 1890507 - DNA, 15 bp, Homo sapiens
ctccaggaaattttt

SEQ ID NO: 1890508 - DNA, 15 bp, Homo sapiens
tccaggaaattttta

SEQ ID NO: 1890509 - DNA, 15 bp, Homo sapiens
ccaggaaatttttag

SEQ ID NO: 1890510 - DNA, 15 bp, Homo sapiens
caggaaatttttaga

SEQ ID NO: 1890511 - DNA, 15 bp, Homo sapiens
aggaaatttttagaa

SEQ ID NO: 1890512 - DNA, 15 bp, Homo sapiens
ggaaatttttagaaa

SEQ ID NO: 1890513 - DNA, 15 bp, Homo sapiens
gaaatttttagaaac

SEQ ID NO: 1890514 - DNA, 15 bp, Homo sapiens
aaatttttagaaacc

SEQ ID NO: 1890515 - DNA, 15 bp, Homo sapiens
aatttttagaaacca

SEQ ID NO: 1890516 - DNA, 15 bp, Homo sapiens
atttttagaaaccat

SEQ ID NO: 1890517 - DNA, 15 bp, Homo sapiens
tttttagaaaccata

SEQ ID NO: 1890518 - DNA, 15 bp, Homo sapiens
ttttagaaaccataa

SEQ ID NO: 1890519 - DNA, 15 bp, Homo sapiens
tttagaaaccataaa

SEQ ID NO: 1890520 - DNA, 15 bp, Homo sapiens
ttagaaaccataaat

SEQ ID NO: 1890521 - DNA, 15 bp, Homo sapiens
tagaaaccataaatc

SEQ ID NO: 1890522 - DNA, 15 bp, Homo sapiens
agaaaccataaatct

SEQ ID NO: 1890523 - DNA, 15 bp, Homo sapiens
gaaaccataaatctt

SEQ ID NO: 1890524 - DNA, 15 bp, Homo sapiens
aaaccataaatcttc

SEQ ID NO: 1890525 - DNA, 15 bp, Homo sapiens
aaccataaatcttca

SEQ ID NO: 1890526 - DNA, 15 bp, Homo sapiens
accataaatcttcat

SEQ ID NO: 1890527 - DNA, 15 bp, Homo sapiens
ccataaatcttcatc

SEQ ID NO: 1890528 - DNA, 15 bp, Homo sapiens
cataaatcttcatca

SEQ ID NO: 1890529 - DNA, 15 bp, Homo sapiens
ataaatcttcatcaa

SEQ ID NO: 1890530 - DNA, 15 bp, Homo sapiens
taaatcttcatcaag

SEQ ID NO: 1890531 - DNA, 15 bp, Homo sapiens
aaatcttcatcaagt

SEQ ID NO: 1890532 - DNA, 15 bp, Homo sapiens
aatcttcatcaagtg

SEQ ID NO: 1890533 - DNA, 15 bp, Homo sapiens
atcttcatcaagtgt

SEQ ID NO: 1890534 - DNA, 15 bp, Homo sapiens
tcttcatcaagtgtt

SEQ ID NO: 1890535 - DNA, 15 bp, Homo sapiens
cttcatcaagtgttt

SEQ ID NO: 1890536 - DNA, 15 bp, Homo sapiens
ttcatcaagtgtttt

SEQ ID NO: 1890537 - DNA, 15 bp, Homo sapiens
tcatcaagtgttttt

SEQ ID NO: 1890538 - DNA, 15 bp, Homo sapiens
catcaagtgtttttg

SEQ ID NO: 1890539 - DNA, 15 bp, Homo sapiens
atcaagtgtttttga

SEQ ID NO: 1890540 - DNA, 15 bp, Homo sapiens
tcaagtgtttttgat

SEQ ID NO: 1890541 - DNA, 15 bp, Homo sapiens
caagtgtttttgata

SEQ ID NO: 1890542 - DNA, 15 bp, Homo sapiens
aagtgtttttgatat

SEQ ID NO: 1890543 - DNA, 15 bp, Homo sapiens
agtgtttttgatatt

SEQ ID NO: 1890544 - DNA, 15 bp, Homo sapiens
gtgtttttgatattc

SEQ ID NO: 1890545 - DNA, 15 bp, Homo sapiens
tgtttttgatattct

SEQ ID NO: 1890546 - DNA, 15 bp, Homo sapiens
gtttttgatattctt

SEQ ID NO: 1890547 - DNA, 15 bp, Homo sapiens
tttttgatattcttt

SEQ ID NO: 1890548 - DNA, 15 bp, Homo sapiens
ttttgatattcttta

SEQ ID NO: 1890549 - DNA, 15 bp, Homo sapiens
tttgatattctttaa

SEQ ID NO: 1890550 - DNA, 15 bp, Homo sapiens
ttgatattctttaac

SEQ ID NO: 1890551 - DNA, 15 bp, Homo sapiens
tgatattctttaact

SEQ ID NO: 1890552 - DNA, 15 bp, Homo sapiens
gatattctttaacta

SEQ ID NO: 1890553 - DNA, 15 bp, Homo sapiens
atattctttaactaa

SEQ ID NO: 1890554 - DNA, 15 bp, Homo sapiens
tattctttaactaaa

SEQ ID NO: 1890555 - DNA, 15 bp, Homo sapiens
attctttaactaaag

SEQ ID NO: 1890556 - DNA, 15 bp, Homo sapiens
ttctttaactaaagt

SEQ ID NO: 1890557 - DNA, 15 bp, Homo sapiens
tctttaactaaagta

SEQ ID NO: 1890558 - DNA, 15 bp, Homo sapiens
ctttaactaaagtaa

SEQ ID NO: 1890559 - DNA, 15 bp, Homo sapiens
tttaactaaagtaac

SEQ ID NO: 1890560 - DNA, 15 bp, Homo sapiens
ttaactaaagtaaca

SEQ ID NO: 1890561 - DNA, 15 bp, Homo sapiens
taactaaagtaacaa

SEQ ID NO: 1890562 - DNA, 15 bp, Homo sapiens
aactaaagtaacaat

SEQ ID NO: 1890563 - DNA, 15 bp, Homo sapiens
actaaagtaacaatt

SEQ ID NO: 1890564 - DNA, 15 bp, Homo sapiens
ctaaagtaacaattg

SEQ ID NO: 1890565 - DNA, 15 bp, Homo sapiens
taaagtaacaattga

SEQ ID NO: 1890566 - DNA, 15 bp, Homo sapiens
aaagtaacaattgat

SEQ ID NO: 1890567 - DNA, 15 bp, Homo sapiens
aagtaacaattgata

SEQ ID NO: 1890568 - DNA, 15 bp, Homo sapiens
agtaacaattgatat

SEQ ID NO: 1890569 - DNA, 15 bp, Homo sapiens
gtaacaattgatata

SEQ ID NO: 1890570 - DNA, 15 bp, Homo sapiens
taacaattgatataa

SEQ ID NO: 1890571 - DNA, 15 bp, Homo sapiens
aacaattgatataat

SEQ ID NO: 1890572 - DNA, 15 bp, Homo sapiens
acaattgatataatt

SEQ ID NO: 1890573 - DNA, 15 bp, Homo sapiens
caattgatataatta

SEQ ID NO: 1890574 - DNA, 15 bp, Homo sapiens
aattgatataattaa

SEQ ID NO: 1890575 - DNA, 15 bp, Homo sapiens
attgatataattaaa

SEQ ID NO: 1890576 - DNA, 15 bp, Homo sapiens
ttgatataattaaat

SEQ ID NO: 1890577 - DNA, 15 bp, Homo sapiens
tgatataattaaata

SEQ ID NO: 1890578 - DNA, 15 bp, Homo sapiens
gatataattaaataa

SEQ ID NO: 1890579 - DNA, 15 bp, Homo sapiens
atataattaaataat

SEQ ID NO: 1890580 - DNA, 15 bp, Homo sapiens
tataattaaataatt

SEQ ID NO: 1890581 - DNA, 15 bp, Homo sapiens
ataattaaataattt

SEQ ID NO: 1890582 - DNA, 15 bp, Homo sapiens
taattaaataatttt

SEQ ID NO: 1890583 - DNA, 15 bp, Homo sapiens
aattaaataattttt

SEQ ID NO: 1890584 - DNA, 15 bp, Homo sapiens
attaaataatttttt

SEQ ID NO: 1890585 - DNA, 15 bp, Homo sapiens
ttaaataattttttc

SEQ ID NO: 1890586 - DNA, 15 bp, Homo sapiens
taaataattttttct

SEQ ID NO: 1890587 - DNA, 15 bp, Homo sapiens
aaataattttttctc

SEQ ID NO: 1890588 - DNA, 15 bp, Homo sapiens
aataattttttctct

SEQ ID NO: 1890589 - DNA, 15 bp, Homo sapiens
ataattttttctcta

SEQ ID NO: 1890590 - DNA, 15 bp, Homo sapiens
taattttttctctat

SEQ ID NO: 1890591 - DNA, 15 bp, Homo sapiens
aattttttctctatt

SEQ ID NO: 1890592 - DNA, 15 bp, Homo sapiens
attttttctctatta

SEQ ID NO: 1890593 - DNA, 15 bp, Homo sapiens
ttttttctctattaa

SEQ ID NO: 1890594 - DNA, 15 bp, Homo sapiens
tttttctctattaat

SEQ ID NO: 1890595 - DNA, 15 bp, Homo sapiens
ttttctctattaatg

SEQ ID NO: 1890596 - DNA, 15 bp, Homo sapiens
tttctctattaatga

SEQ ID NO: 1890597 - DNA, 15 bp, Homo sapiens
ttctctattaatgaa

SEQ ID NO: 1890598 - DNA, 15 bp, Homo sapiens
tctctattaatgaat

SEQ ID NO: 1890599 - DNA, 15 bp, Homo sapiens
ctctattaatgaatt

SEQ ID NO: 1890600 - DNA, 15 bp, Homo sapiens
tctattaatgaattg

SEQ ID NO: 1890601 - DNA, 15 bp, Homo sapiens
ctattaatgaattga

SEQ ID NO: 1890602 - DNA, 15 bp, Homo sapiens
tattaatgaattgaa

SEQ ID NO: 1890603 - DNA, 15 bp, Homo sapiens
attaatgaattgaat

SEQ ID NO: 1890604 - DNA, 15 bp, Homo sapiens
ttaatgaattgaatt

SEQ ID NO: 1890605 - DNA, 15 bp, Homo sapiens
taatgaattgaatta

SEQ ID NO: 1890606 - DNA, 15 bp, Homo sapiens
aatgaattgaattac

SEQ ID NO: 1890607 - DNA, 15 bp, Homo sapiens
atgaattgaattaca

SEQ ID NO: 1890608 - DNA, 15 bp, Homo sapiens
tgaattgaattacat

SEQ ID NO: 1890609 - DNA, 15 bp, Homo sapiens
gaattgaattacatt

SEQ ID NO: 1890610 - DNA, 15 bp, Homo sapiens
aattgaattacatta

SEQ ID NO: 1890611 - DNA, 15 bp, Homo sapiens
attgaattacattaa

SEQ ID NO: 1890612 - DNA, 15 bp, Homo sapiens
ttgaattacattaat

SEQ ID NO: 1890613 - DNA, 15 bp, Homo sapiens
tgaattacattaata

SEQ ID NO: 1890614 - DNA, 15 bp, Homo sapiens
gaattacattaatat

SEQ ID NO: 1890615 - DNA, 15 bp, Homo sapiens
aattacattaatata

SEQ ID NO: 1890616 - DNA, 15 bp, Homo sapiens
attacattaatatat

SEQ ID NO: 1890617 - DNA, 15 bp, Homo sapiens
ttacattaatatatt

SEQ ID NO: 1890618 - DNA, 15 bp, Homo sapiens
tacattaatatatta

SEQ ID NO: 1890619 - DNA, 15 bp, Homo sapiens
acattaatatattat

SEQ ID NO: 1890620 - DNA, 15 bp, Homo sapiens
cattaatatattatt

SEQ ID NO: 1890621 - DNA, 15 bp, Homo sapiens
attaatatattatta

SEQ ID NO: 1890622 - DNA, 15 bp, Homo sapiens
ttaatatattattaa

SEQ ID NO: 1890623 - DNA, 15 bp, Homo sapiens
taatatattattaat

SEQ ID NO: 1890624 - DNA, 15 bp, Homo sapiens
aatatattattaata

SEQ ID NO: 1890625 - DNA, 15 bp, Homo sapiens
atatattattaatat

SEQ ID NO: 1890626 - DNA, 15 bp, Homo sapiens
tatattattaatatc

SEQ ID NO: 1890627 - DNA, 15 bp, Homo sapiens
atattattaatatca

SEQ ID NO: 1890628 - DNA, 15 bp, Homo sapiens
tattattaatatcaa

SEQ ID NO: 1890629 - DNA, 15 bp, Homo sapiens
attattaatatcaaa

SEQ ID NO: 1890630 - DNA, 15 bp, Homo sapiens
ttattaatatcaaat

SEQ ID NO: 1890631 - DNA, 15 bp, Homo sapiens
tattaatatcaaatt

SEQ ID NO: 1890632 - DNA, 15 bp, Homo sapiens
attaatatcaaattg

SEQ ID NO: 1890633 - DNA, 15 bp, Homo sapiens
ttaatatcaaattgt

SEQ ID NO: 1890634 - DNA, 15 bp, Homo sapiens
taatatcaaattgtc

SEQ ID NO: 1890635 - DNA, 15 bp, Homo sapiens
aatatcaaattgtct

SEQ ID NO: 1890636 - DNA, 15 bp, Homo sapiens
atatcaaattgtctt

SEQ ID NO: 1890637 - DNA, 15 bp, Homo sapiens
tatcaaattgtcttt

SEQ ID NO: 1890638 - DNA, 15 bp, Homo sapiens
atcaaattgtcttta

SEQ ID NO: 1890639 - DNA, 15 bp, Homo sapiens
tcaaattgtctttat

SEQ ID NO: 1890640 - DNA, 15 bp, Homo sapiens
caaattgtctttatg

SEQ ID NO: 1890641 - DNA, 15 bp, Homo sapiens
aaattgtctttatgt

SEQ ID NO: 1890642 - DNA, 15 bp, Homo sapiens
aattgtctttatgtt

SEQ ID NO: 1890643 - DNA, 15 bp, Homo sapiens
attgtctttatgttt

SEQ ID NO: 1890644 - DNA, 15 bp, Homo sapiens
ttgtctttatgtttt

SEQ ID NO: 1890645 - DNA, 15 bp, Homo sapiens
tgtctttatgttttt

SEQ ID NO: 1890646 - DNA, 15 bp, Homo sapiens
gtctttatgttttta

SEQ ID NO: 1890647 - DNA, 15 bp, Homo sapiens
tctttatgtttttaa

SEQ ID NO: 1890648 - DNA, 15 bp, Homo sapiens
ctttatgtttttaag

SEQ ID NO: 1890649 - DNA, 15 bp, Homo sapiens
tttatgtttttaaga

SEQ ID NO: 1890650 - DNA, 15 bp, Homo sapiens
ttatgtttttaagat

SEQ ID NO: 1890651 - DNA, 15 bp, Homo sapiens
tatgtttttaagatt

SEQ ID NO: 1890652 - DNA, 15 bp, Homo sapiens
atgtttttaagattg

SEQ ID NO: 1890653 - DNA, 15 bp, Homo sapiens
tgtttttaagattga

SEQ ID NO: 1890654 - DNA, 15 bp, Homo sapiens
gtttttaagattgaa

SEQ ID NO: 1890655 - DNA, 15 bp, Homo sapiens
tttttaagattgaat

SEQ ID NO: 1890656 - DNA, 15 bp, Homo sapiens
ttttaagattgaatc

SEQ ID NO: 1890657 - DNA, 15 bp, Homo sapiens
tttaagattgaatca

SEQ ID NO: 1890658 - DNA, 15 bp, Homo sapiens
ttaagattgaatcat

SEQ ID NO: 1890659 - DNA, 15 bp, Homo sapiens
taagattgaatcatg

SEQ ID NO: 1890660 - DNA, 15 bp, Homo sapiens
aagattgaatcatgc

SEQ ID NO: 1890661 - DNA, 15 bp, Homo sapiens
agattgaatcatgct

SEQ ID NO: 1890662 - DNA, 15 bp, Homo sapiens
gattgaatcatgctt

SEQ ID NO: 1890663 - DNA, 15 bp, Homo sapiens
attgaatcatgctta

SEQ ID NO: 1890664 - DNA, 15 bp, Homo sapiens
ttgaatcatgcttaa

SEQ ID NO: 1890665 - DNA, 15 bp, Homo sapiens
tgaatcatgcttaat

SEQ ID NO: 1890666 - DNA, 15 bp, Homo sapiens
gaatcatgcttaatt

SEQ ID NO: 1890667 - DNA, 15 bp, Homo sapiens
aatcatgcttaatta

SEQ ID NO: 1890668 - DNA, 15 bp, Homo sapiens
atcatgcttaattat

SEQ ID NO: 1890669 - DNA, 15 bp, Homo sapiens
tcatgcttaattata

SEQ ID NO: 1890670 - DNA, 15 bp, Homo sapiens
catgcttaattataa

SEQ ID NO: 1890671 - DNA, 15 bp, Homo sapiens
atgcttaattataat

SEQ ID NO: 1890672 - DNA, 15 bp, Homo sapiens
tgcttaattataatt

SEQ ID NO: 1890673 - DNA, 15 bp, Homo sapiens
gcttaattataattt

SEQ ID NO: 1890674 - DNA, 15 bp, Homo sapiens
cttaattataatttt

SEQ ID NO: 1890675 - DNA, 15 bp, Homo sapiens
ttaattataattttc

SEQ ID NO: 1890676 - DNA, 15 bp, Homo sapiens
taattataattttca

SEQ ID NO: 1890677 - DNA, 15 bp, Homo sapiens
aattataattttcat

SEQ ID NO: 1890678 - DNA, 15 bp, Homo sapiens
attataattttcata

SEQ ID NO: 1890679 - DNA, 15 bp, Homo sapiens
ttataattttcataa

SEQ ID NO: 1890680 - DNA, 15 bp, Homo sapiens
tataattttcataaa

SEQ ID NO: 1890681 - DNA, 15 bp, Homo sapiens
ataattttcataaaa

SEQ ID NO: 1890682 - DNA, 15 bp, Homo sapiens
taattttcataaaat

SEQ ID NO: 1890683 - DNA, 15 bp, Homo sapiens
aattttcataaaata

SEQ ID NO: 1890684 - DNA, 15 bp, Homo sapiens
attttcataaaatat

SEQ ID NO: 1890685 - DNA, 15 bp, Homo sapiens
ttttcataaaatata

SEQ ID NO: 1890686 - DNA, 15 bp, Homo sapiens
tttcataaaatatac

SEQ ID NO: 1890687 - DNA, 15 bp, Homo sapiens
ttcataaaatatact

SEQ ID NO: 1890688 - DNA, 15 bp, Homo sapiens
tcataaaatatactg

SEQ ID NO: 1890689 - DNA, 15 bp, Homo sapiens
cataaaatatactgt

SEQ ID NO: 1890690 - DNA, 15 bp, Homo sapiens
ataaaatatactgta

SEQ ID NO: 1890691 - DNA, 15 bp, Homo sapiens
taaaatatactgtaa

SEQ ID NO: 1890692 - DNA, 15 bp, Homo sapiens
aaaatatactgtaaa

SEQ ID NO: 1890693 - DNA, 15 bp, Homo sapiens
aaatatactgtaaaa

SEQ ID NO: 1890694 - DNA, 15 bp, Homo sapiens
aatatactgtaaaat

SEQ ID NO: 1890695 - DNA, 15 bp, Homo sapiens
atatactgtaaaatt

SEQ ID NO: 1890696 - DNA, 15 bp, Homo sapiens
tatactgtaaaattt

SEQ ID NO: 1890697 - DNA, 15 bp, Homo sapiens
atactgtaaaatttg

SEQ ID NO: 1890698 - DNA, 15 bp, Homo sapiens
tactgtaaaatttgg

SEQ ID NO: 1890699 - DNA, 15 bp, Homo sapiens
actgtaaaatttggc

SEQ ID NO: 1890700 - DNA, 15 bp, Homo sapiens
ctgtaaaatttggct

SEQ ID NO: 1890701 - DNA, 15 bp, Homo sapiens
tgtaaaatttggcta

SEQ ID NO: 1890702 - DNA, 15 bp, Homo sapiens
gtaaaatttggctag

SEQ ID NO: 1890703 - DNA, 15 bp, Homo sapiens
taaaatttggctagc

SEQ ID NO: 1890704 - DNA, 15 bp, Homo sapiens
aaaatttggctagct

SEQ ID NO: 1890705 - DNA, 15 bp, Homo sapiens
aaatttggctagctg

SEQ ID NO: 1890706 - DNA, 15 bp, Homo sapiens
aatttggctagctga

SEQ ID NO: 1890707 - DNA, 15 bp, Homo sapiens
atttggctagctgag

SEQ ID NO: 1890708 - DNA, 15 bp, Homo sapiens
tttggctagctgaga

SEQ ID NO: 1890709 - DNA, 15 bp, Homo sapiens
ttggctagctgagat

SEQ ID NO: 1890710 - DNA, 15 bp, Homo sapiens
tggctagctgagatt

SEQ ID NO: 1890711 - DNA, 15 bp, Homo sapiens
ggctagctgagattt

SEQ ID NO: 1890712 - DNA, 15 bp, Homo sapiens
gctagctgagatttt

SEQ ID NO: 1890713 - DNA, 15 bp, Homo sapiens
ctagctgagatttta

SEQ ID NO: 1890714 - DNA, 15 bp, Homo sapiens
tagctgagattttac

SEQ ID NO: 1890715 - DNA, 15 bp, Homo sapiens
agctgagattttact

SEQ ID NO: 1890716 - DNA, 15 bp, Homo sapiens
gctgagattttactt

SEQ ID NO: 1890717 - DNA, 15 bp, Homo sapiens
ctgagattttacttg

SEQ ID NO: 1890718 - DNA, 15 bp, Homo sapiens
tgagattttacttgc

SEQ ID NO: 1890719 - DNA, 15 bp, Homo sapiens
gagattttacttgca

SEQ ID NO: 1890720 - DNA, 15 bp, Homo sapiens
agattttacttgcaa

SEQ ID NO: 1890721 - DNA, 15 bp, Homo sapiens
gattttacttgcaac

SEQ ID NO: 1890722 - DNA, 15 bp, Homo sapiens
attttacttgcaaca

SEQ ID NO: 1890723 - DNA, 15 bp, Homo sapiens
ttttacttgcaacat

SEQ ID NO: 1890724 - DNA, 15 bp, Homo sapiens
tttacttgcaacatc

SEQ ID NO: 1890725 - DNA, 15 bp, Homo sapiens
ttacttgcaacatct

SEQ ID NO: 1890726 - DNA, 15 bp, Homo sapiens
tacttgcaacatctg

SEQ ID NO: 1890727 - DNA, 15 bp, Homo sapiens
acttgcaacatctgc

SEQ ID NO: 1890728 - DNA, 15 bp, Homo sapiens
cttgcaacatctgca

SEQ ID NO: 1890729 - DNA, 15 bp, Homo sapiens
ttgcaacatctgcac

SEQ ID NO: 1890730 - DNA, 15 bp, Homo sapiens
tgcaacatctgcacc

SEQ ID NO: 1890731 - DNA, 15 bp, Homo sapiens
gcaacatctgcacca

SEQ ID NO: 1890732 - DNA, 15 bp, Homo sapiens
caacatctgcaccaa

SEQ ID NO: 1890733 - DNA, 15 bp, Homo sapiens
aacatctgcaccaat

SEQ ID NO: 1890734 - DNA, 15 bp, Homo sapiens
acatctgcaccaata

SEQ ID NO: 1890735 - DNA, 15 bp, Homo sapiens
catctgcaccaataa

SEQ ID NO: 1890736 - DNA, 15 bp, Homo sapiens
atctgcaccaataac

SEQ ID NO: 1890737 - DNA, 15 bp, Homo sapiens
tctgcaccaataacc

SEQ ID NO: 1890738 - DNA, 15 bp, Homo sapiens
ctgcaccaataacca

SEQ ID NO: 1890739 - DNA, 15 bp, Homo sapiens
tgcaccaataaccat

SEQ ID NO: 1890740 - DNA, 15 bp, Homo sapiens
gcaccaataaccatc

SEQ ID NO: 1890741 - DNA, 15 bp, Homo sapiens
caccaataaccatca

SEQ ID NO: 1890742 - DNA, 15 bp, Homo sapiens
accaataaccatcat

SEQ ID NO: 1890743 - DNA, 15 bp, Homo sapiens
ccaataaccatcatt

SEQ ID NO: 1890744 - DNA, 15 bp, Homo sapiens
caataaccatcattg

SEQ ID NO: 1890745 - DNA, 15 bp, Homo sapiens
aataaccatcattga

SEQ ID NO: 1890746 - DNA, 15 bp, Homo sapiens
ataaccatcattgaa

SEQ ID NO: 1890747 - DNA, 15 bp, Homo sapiens
taaccatcattgaaa

SEQ ID NO: 1890748 - DNA, 15 bp, Homo sapiens
aaccatcattgaaat

SEQ ID NO: 1890749 - DNA, 15 bp, Homo sapiens
accatcattgaaatt

SEQ ID NO: 1890750 - DNA, 15 bp, Homo sapiens
ccatcattgaaattg

SEQ ID NO: 1890751 - DNA, 15 bp, Homo sapiens
catcattgaaattgg

SEQ ID NO: 1890752 - DNA, 15 bp, Homo sapiens
atcattgaaattggc

SEQ ID NO: 1890753 - DNA, 15 bp, Homo sapiens
tcattgaaattggcc

SEQ ID NO: 1890754 - DNA, 15 bp, Homo sapiens
cattgaaattggcct

SEQ ID NO: 1890755 - DNA, 15 bp, Homo sapiens
attgaaattggccta

SEQ ID NO: 1890756 - DNA, 15 bp, Homo sapiens
ttgaaattggcctat

SEQ ID NO: 1890757 - DNA, 15 bp, Homo sapiens
tgaaattggcctata

SEQ ID NO: 1890758 - DNA, 15 bp, Homo sapiens
gaaattggcctataa

SEQ ID NO: 1890759 - DNA, 15 bp, Homo sapiens
aaattggcctataat

SEQ ID NO: 1890760 - DNA, 15 bp, Homo sapiens
aattggcctataatt

SEQ ID NO: 1890761 - DNA, 15 bp, Homo sapiens
attggcctataattt

SEQ ID NO: 1890762 - DNA, 15 bp, Homo sapiens
ttggcctataatttt

SEQ ID NO: 1890763 - DNA, 15 bp, Homo sapiens
tggcctataattttc

SEQ ID NO: 1890764 - DNA, 15 bp, Homo sapiens
ggcctataattttca

SEQ ID NO: 1890765 - DNA, 15 bp, Homo sapiens
gcctataattttcat

SEQ ID NO: 1890766 - DNA, 15 bp, Homo sapiens
cctataattttcata

SEQ ID NO: 1890767 - DNA, 15 bp, Homo sapiens
ctataattttcatat

SEQ ID NO: 1890768 - DNA, 15 bp, Homo sapiens
tataattttcatatg

SEQ ID NO: 1890769 - DNA, 15 bp, Homo sapiens
ataattttcatatgt

SEQ ID NO: 1890770 - DNA, 15 bp, Homo sapiens
taattttcatatgtg

SEQ ID NO: 1890771 - DNA, 15 bp, Homo sapiens
aattttcatatgtgt

SEQ ID NO: 1890772 - DNA, 15 bp, Homo sapiens
attttcatatgtgtg

SEQ ID NO: 1890773 - DNA, 15 bp, Homo sapiens
ttttcatatgtgtgc

SEQ ID NO: 1890774 - DNA, 15 bp, Homo sapiens
tttcatatgtgtgct

SEQ ID NO: 1890775 - DNA, 15 bp, Homo sapiens
ttcatatgtgtgctg

SEQ ID NO: 1890776 - DNA, 15 bp, Homo sapiens
tcatatgtgtgctga

SEQ ID NO: 1890777 - DNA, 15 bp, Homo sapiens
catatgtgtgctgag

SEQ ID NO: 1890778 - DNA, 15 bp, Homo sapiens
atatgtgtgctgagt

SEQ ID NO: 1890779 - DNA, 15 bp, Homo sapiens
tatgtgtgctgagtt

SEQ ID NO: 1890780 - DNA, 15 bp, Homo sapiens
atgtgtgctgagttt

SEQ ID NO: 1890781 - DNA, 15 bp, Homo sapiens
tgtgtgctgagttta

SEQ ID NO: 1890782 - DNA, 15 bp, Homo sapiens
gtgtgctgagtttat

SEQ ID NO: 1890783 - DNA, 15 bp, Homo sapiens
tgtgctgagtttatg

SEQ ID NO: 1890784 - DNA, 15 bp, Homo sapiens
gtgctgagtttatgt

SEQ ID NO: 1890785 - DNA, 15 bp, Homo sapiens
tgctgagtttatgtg

SEQ ID NO: 1890786 - DNA, 15 bp, Homo sapiens
gctgagtttatgtgt

SEQ ID NO: 1890787 - DNA, 15 bp, Homo sapiens
ctgagtttatgtgtc

SEQ ID NO: 1890788 - DNA, 15 bp, Homo sapiens
tgagtttatgtgtcc

SEQ ID NO: 1890789 - DNA, 15 bp, Homo sapiens
gagtttatgtgtccc

SEQ ID NO: 1890790 - DNA, 15 bp, Homo sapiens
agtttatgtgtccct

SEQ ID NO: 1890791 - DNA, 15 bp, Homo sapiens
gtttatgtgtccctc

SEQ ID NO: 1890792 - DNA, 15 bp, Homo sapiens
tttatgtgtccctca

SEQ ID NO: 1890793 - DNA, 15 bp, Homo sapiens
ttatgtgtccctcat

SEQ ID NO: 1890794 - DNA, 15 bp, Homo sapiens
tatgtgtccctcatc

SEQ ID NO: 1890795 - DNA, 15 bp, Homo sapiens
atgtgtccctcatct

SEQ ID NO: 1890796 - DNA, 15 bp, Homo sapiens
tgtgtccctcatctc

SEQ ID NO: 1890797 - DNA, 15 bp, Homo sapiens
gtgtccctcatctca

SEQ ID NO: 1890798 - DNA, 15 bp, Homo sapiens
tgtccctcatctcag

SEQ ID NO: 1890799 - DNA, 15 bp, Homo sapiens
gtccctcatctcagt

SEQ ID NO: 1890800 - DNA, 15 bp, Homo sapiens
tccctcatctcagta

SEQ ID NO: 1890801 - DNA, 15 bp, Homo sapiens
ccctcatctcagtat

SEQ ID NO: 1890802 - DNA, 15 bp, Homo sapiens
cctcatctcagtatt

SEQ ID NO: 1890803 - DNA, 15 bp, Homo sapiens
ctcatctcagtatta

SEQ ID NO: 1890804 - DNA, 15 bp, Homo sapiens
tcatctcagtattac

SEQ ID NO: 1890805 - DNA, 15 bp, Homo sapiens
catctcagtattaca

SEQ ID NO: 1890806 - DNA, 15 bp, Homo sapiens
atctcagtattacac

SEQ ID NO: 1890807 - DNA, 15 bp, Homo sapiens
tctcagtattacact

SEQ ID NO: 1890808 - DNA, 15 bp, Homo sapiens
ctcagtattacactg

SEQ ID NO: 1890809 - DNA, 15 bp, Homo sapiens
tcagtattacactgg

SEQ ID NO: 1890810 - DNA, 15 bp, Homo sapiens
cagtattacactggc

SEQ ID NO: 1890811 - DNA, 15 bp, Homo sapiens
agtattacactggcc

SEQ ID NO: 1890812 - DNA, 15 bp, Homo sapiens
gtattacactggcct

SEQ ID NO: 1890813 - DNA, 15 bp, Homo sapiens
tattacactggcctc

SEQ ID NO: 1890814 - DNA, 15 bp, Homo sapiens
attacactggcctca

SEQ ID NO: 1890815 - DNA, 15 bp, Homo sapiens
ttacactggcctcat

SEQ ID NO: 1890816 - DNA, 15 bp, Homo sapiens
tacactggcctcatg

SEQ ID NO: 1890817 - DNA, 15 bp, Homo sapiens
acactggcctcatga

SEQ ID NO: 1890818 - DNA, 15 bp, Homo sapiens
cactggcctcatgaa

SEQ ID NO: 1890819 - DNA, 15 bp, Homo sapiens
actggcctcatgaaa

SEQ ID NO: 1890820 - DNA, 15 bp, Homo sapiens
ctggcctcatgaaat

SEQ ID NO: 1890821 - DNA, 15 bp, Homo sapiens
tggcctcatgaaatg

SEQ ID NO: 1890822 - DNA, 15 bp, Homo sapiens
ggcctcatgaaatga

SEQ ID NO: 1890823 - DNA, 15 bp, Homo sapiens
gcctcatgaaatgag

SEQ ID NO: 1890824 - DNA, 15 bp, Homo sapiens
cctcatgaaatgagt

SEQ ID NO: 1890825 - DNA, 15 bp, Homo sapiens
ctcatgaaatgagtt

SEQ ID NO: 1890826 - DNA, 15 bp, Homo sapiens
tcatgaaatgagtta

SEQ ID NO: 1890827 - DNA, 15 bp, Homo sapiens
catgaaatgagttag

SEQ ID NO: 1890828 - DNA, 15 bp, Homo sapiens
atgaaatgagttaga

SEQ ID NO: 1890829 - DNA, 15 bp, Homo sapiens
tgaaatgagttagaa

SEQ ID NO: 1890830 - DNA, 15 bp, Homo sapiens
gaaatgagttagaaa

SEQ ID NO: 1890831 - DNA, 15 bp, Homo sapiens
aaatgagttagaaaa

SEQ ID NO: 1890832 - DNA, 15 bp, Homo sapiens
aatgagttagaaaat

SEQ ID NO: 1890833 - DNA, 15 bp, Homo sapiens
atgagttagaaaatc

SEQ ID NO: 1890834 - DNA, 15 bp, Homo sapiens
tgagttagaaaatct

SEQ ID NO: 1890835 - DNA, 15 bp, Homo sapiens
gagttagaaaatctt

SEQ ID NO: 1890836 - DNA, 15 bp, Homo sapiens
agttagaaaatcttc

SEQ ID NO: 1890837 - DNA, 15 bp, Homo sapiens
gttagaaaatcttcc

SEQ ID NO: 1890838 - DNA, 15 bp, Homo sapiens
ttagaaaatcttccc

SEQ ID NO: 1890839 - DNA, 15 bp, Homo sapiens
tagaaaatcttccct

SEQ ID NO: 1890840 - DNA, 15 bp, Homo sapiens
agaaaatcttccctt

SEQ ID NO: 1890841 - DNA, 15 bp, Homo sapiens
gaaaatcttcccttt

SEQ ID NO: 1890842 - DNA, 15 bp, Homo sapiens
aaaatcttccctttt

SEQ ID NO: 1890843 - DNA, 15 bp, Homo sapiens
aaatcttcccttttt

SEQ ID NO: 1890844 - DNA, 15 bp, Homo sapiens
aatcttccctttttt

SEQ ID NO: 1890845 - DNA, 15 bp, Homo sapiens
atcttcccttttttt

SEQ ID NO: 1890846 - DNA, 15 bp, Homo sapiens
tcttcccttttttta

SEQ ID NO: 1890847 - DNA, 15 bp, Homo sapiens
cttccctttttttac

SEQ ID NO: 1890848 - DNA, 15 bp, Homo sapiens
ttccctttttttact

SEQ ID NO: 1890849 - DNA, 15 bp, Homo sapiens
tccctttttttacta

SEQ ID NO: 1890850 - DNA, 15 bp, Homo sapiens
ccctttttttactac

SEQ ID NO: 1890851 - DNA, 15 bp, Homo sapiens
cctttttttactact

SEQ ID NO: 1890852 - DNA, 15 bp, Homo sapiens
ctttttttactactt

SEQ ID NO: 1890853 - DNA, 15 bp, Homo sapiens
tttttttactacttt

SEQ ID NO: 1890854 - DNA, 15 bp, Homo sapiens
ttttttactactttc

SEQ ID NO: 1890855 - DNA, 15 bp, Homo sapiens
tttttactactttct

SEQ ID NO: 1890856 - DNA, 15 bp, Homo sapiens
ttttactactttctg

SEQ ID NO: 1890857 - DNA, 15 bp, Homo sapiens
tttactactttctga

SEQ ID NO: 1890858 - DNA, 15 bp, Homo sapiens
ttactactttctgaa

SEQ ID NO: 1890859 - DNA, 15 bp, Homo sapiens
tactactttctgaaa

SEQ ID NO: 1890860 - DNA, 15 bp, Homo sapiens
actactttctgaaaa

SEQ ID NO: 1890861 - DNA, 15 bp, Homo sapiens
ctactttctgaaaac

SEQ ID NO: 1890862 - DNA, 15 bp, Homo sapiens
tactttctgaaaact

SEQ ID NO: 1890863 - DNA, 15 bp, Homo sapiens
actttctgaaaactc

SEQ ID NO: 1890864 - DNA, 15 bp, Homo sapiens
ctttctgaaaactct

SEQ ID NO: 1890865 - DNA, 15 bp, Homo sapiens
tttctgaaaactctt

SEQ ID NO: 1890866 - DNA, 15 bp, Homo sapiens
ttctgaaaactcttt

SEQ ID NO: 1890867 - DNA, 15 bp, Homo sapiens
tctgaaaactctttc

SEQ ID NO: 1890868 - DNA, 15 bp, Homo sapiens
ctgaaaactctttca

SEQ ID NO: 1890869 - DNA, 15 bp, Homo sapiens
tgaaaactctttcat

SEQ ID NO: 1890870 - DNA, 15 bp, Homo sapiens
gaaaactctttcata

SEQ ID NO: 1890871 - DNA, 15 bp, Homo sapiens
aaaactctttcataa

SEQ ID NO: 1890872 - DNA, 15 bp, Homo sapiens
aaactctttcataag

SEQ ID NO: 1890873 - DNA, 15 bp, Homo sapiens
aactctttcataaga

SEQ ID NO: 1890874 - DNA, 15 bp, Homo sapiens
actctttcataagat

SEQ ID NO: 1890875 - DNA, 15 bp, Homo sapiens
ctctttcataagatg

SEQ ID NO: 1890876 - DNA, 15 bp, Homo sapiens
tctttcataagatga

SEQ ID NO: 1890877 - DNA, 15 bp, Homo sapiens
ctttcataagatgaa

SEQ ID NO: 1890878 - DNA, 15 bp, Homo sapiens
tttcataagatgaaa

SEQ ID NO: 1890879 - DNA, 15 bp, Homo sapiens
ttcataagatgaaaa

SEQ ID NO: 1890880 - DNA, 15 bp, Homo sapiens
tcataagatgaaaac

SEQ ID NO: 1890881 - DNA, 15 bp, Homo sapiens
cataagatgaaaact

SEQ ID NO: 1890882 - DNA, 15 bp, Homo sapiens
ataagatgaaaacta

SEQ ID NO: 1890883 - DNA, 15 bp, Homo sapiens
taagatgaaaactac

SEQ ID NO: 1890884 - DNA, 15 bp, Homo sapiens
aagatgaaaactacc

SEQ ID NO: 1890885 - DNA, 15 bp, Homo sapiens
agatgaaaactacca

SEQ ID NO: 1890886 - DNA, 15 bp, Homo sapiens
gatgaaaactaccat

SEQ ID NO: 1890887 - DNA, 15 bp, Homo sapiens
atgaaaactaccatt

SEQ ID NO: 1890888 - DNA, 15 bp, Homo sapiens
tgaaaactaccattt

SEQ ID NO: 1890889 - DNA, 15 bp, Homo sapiens
gaaaactaccatttc

SEQ ID NO: 1890890 - DNA, 15 bp, Homo sapiens
aaaactaccatttct

SEQ ID NO: 1890891 - DNA, 15 bp, Homo sapiens
aaactaccatttctt

SEQ ID NO: 1890892 - DNA, 15 bp, Homo sapiens
aactaccatttcttg

SEQ ID NO: 1890893 - DNA, 15 bp, Homo sapiens
actaccatttcttgc

SEQ ID NO: 1890894 - DNA, 15 bp, Homo sapiens
ctaccatttcttgca

SEQ ID NO: 1890895 - DNA, 15 bp, Homo sapiens
taccatttcttgcaa

SEQ ID NO: 1890896 - DNA, 15 bp, Homo sapiens
accatttcttgcaag

SEQ ID NO: 1890897 - DNA, 15 bp, Homo sapiens
ccatttcttgcaagt

SEQ ID NO: 1890898 - DNA, 15 bp, Homo sapiens
catttcttgcaagtt

SEQ ID NO: 1890899 - DNA, 15 bp, Homo sapiens
atttcttgcaagttt

SEQ ID NO: 1890900 - DNA, 15 bp, Homo sapiens
tttcttgcaagtttg

SEQ ID NO: 1890901 - DNA, 15 bp, Homo sapiens
ttcttgcaagtttga

SEQ ID NO: 1890902 - DNA, 15 bp, Homo sapiens
tcttgcaagtttgag

SEQ ID NO: 1890903 - DNA, 15 bp, Homo sapiens
cttgcaagtttgagt

SEQ ID NO: 1890904 - DNA, 15 bp, Homo sapiens
ttgcaagtttgagtc

SEQ ID NO: 1890905 - DNA, 15 bp, Homo sapiens
tgcaagtttgagtca

SEQ ID NO: 1890906 - DNA, 15 bp, Homo sapiens
gcaagtttgagtcag

SEQ ID NO: 1890907 - DNA, 15 bp, Homo sapiens
caagtttgagtcaga

SEQ ID NO: 1890908 - DNA, 15 bp, Homo sapiens
aagtttgagtcagat

SEQ ID NO: 1890909 - DNA, 15 bp, Homo sapiens
agtttgagtcagatc

SEQ ID NO: 1890910 - DNA, 15 bp, Homo sapiens
gtttgagtcagatca

SEQ ID NO: 1890911 - DNA, 15 bp, Homo sapiens
tttgagtcagatcat

SEQ ID NO: 1890912 - DNA, 15 bp, Homo sapiens
ttgagtcagatcatc

SEQ ID NO: 1890913 - DNA, 15 bp, Homo sapiens
tgagtcagatcatct

SEQ ID NO: 1890914 - DNA, 15 bp, Homo sapiens
gagtcagatcatctg

SEQ ID NO: 1890915 - DNA, 15 bp, Homo sapiens
agtcagatcatctgt

SEQ ID NO: 1890916 - DNA, 15 bp, Homo sapiens
gtcagatcatctgtg

SEQ ID NO: 1890917 - DNA, 15 bp, Homo sapiens
tcagatcatctgtgt

SEQ ID NO: 1890918 - DNA, 15 bp, Homo sapiens
cagatcatctgtgta

SEQ ID NO: 1890919 - DNA, 15 bp, Homo sapiens
agatcatctgtgtaa

SEQ ID NO: 1890920 - DNA, 15 bp, Homo sapiens
gatcatctgtgtaat

SEQ ID NO: 1890921 - DNA, 15 bp, Homo sapiens
atcatctgtgtaatg

SEQ ID NO: 1890922 - DNA, 15 bp, Homo sapiens
tcatctgtgtaatgg

SEQ ID NO: 1890923 - DNA, 15 bp, Homo sapiens
catctgtgtaatggg

SEQ ID NO: 1890924 - DNA, 15 bp, Homo sapiens
atctgtgtaatgggc

SEQ ID NO: 1890925 - DNA, 15 bp, Homo sapiens
tctgtgtaatgggct

SEQ ID NO: 1890926 - DNA, 15 bp, Homo sapiens
ctgtgtaatgggctg

SEQ ID NO: 1890927 - DNA, 15 bp, Homo sapiens
tgtgtaatgggctga

SEQ ID NO: 1890928 - DNA, 15 bp, Homo sapiens
gtgtaatgggctgaa

SEQ ID NO: 1890929 - DNA, 15 bp, Homo sapiens
tgtaatgggctgaac

SEQ ID NO: 1890930 - DNA, 15 bp, Homo sapiens
gtaatgggctgaacc

SEQ ID NO: 1890931 - DNA, 15 bp, Homo sapiens
taatgggctgaacct

SEQ ID NO: 1890932 - DNA, 15 bp, Homo sapiens
aatgggctgaaccta

SEQ ID NO: 1890933 - DNA, 15 bp, Homo sapiens
atgggctgaacctag

SEQ ID NO: 1890934 - DNA, 15 bp, Homo sapiens
tgggctgaacctaga

SEQ ID NO: 1890935 - DNA, 15 bp, Homo sapiens
gggctgaacctagaa

SEQ ID NO: 1890936 - DNA, 15 bp, Homo sapiens
ggctgaacctagaag

SEQ ID NO: 1890937 - DNA, 15 bp, Homo sapiens
gctgaacctagaagc

SEQ ID NO: 1890938 - DNA, 15 bp, Homo sapiens
ctgaacctagaagct

SEQ ID NO: 1890939 - DNA, 15 bp, Homo sapiens
aagttttattgcctt

SEQ ID NO: 1890940 - DNA, 15 bp, Homo sapiens
agttttattgccttc

SEQ ID NO: 1890941 - DNA, 15 bp, Homo sapiens
gttttattgccttca

SEQ ID NO: 1890942 - DNA, 15 bp, Homo sapiens
ttttattgccttcat

SEQ ID NO: 1890943 - DNA, 15 bp, Homo sapiens
tttattgccttcatg

SEQ ID NO: 1890944 - DNA, 15 bp, Homo sapiens
ttattgccttcatga

SEQ ID NO: 1890945 - DNA, 15 bp, Homo sapiens
tattgccttcatgat

SEQ ID NO: 1890946 - DNA, 15 bp, Homo sapiens
attgccttcatgatt

SEQ ID NO: 1890947 - DNA, 15 bp, Homo sapiens
ttgccttcatgattc

SEQ ID NO: 1890948 - DNA, 15 bp, Homo sapiens
tgccttcatgattca

SEQ ID NO: 1890949 - DNA, 15 bp, Homo sapiens
gccttcatgattcag

SEQ ID NO: 1890950 - DNA, 15 bp, Homo sapiens
ccttcatgattcagt

SEQ ID NO: 1890951 - DNA, 15 bp, Homo sapiens
cttcatgattcagta

SEQ ID NO: 1890952 - DNA, 15 bp, Homo sapiens
ttcatgattcagtat

SEQ ID NO: 1890953 - DNA, 15 bp, Homo sapiens
tcatgattcagtatt

SEQ ID NO: 1890954 - DNA, 15 bp, Homo sapiens
catgattcagtattt

SEQ ID NO: 1890955 - DNA, 15 bp, Homo sapiens
atgattcagtattta

SEQ ID NO: 1890956 - DNA, 15 bp, Homo sapiens
tgattcagtatttaa

SEQ ID NO: 1890957 - DNA, 15 bp, Homo sapiens
gattcagtatttaaa

SEQ ID NO: 1890958 - DNA, 15 bp, Homo sapiens
attcagtatttaaaa

SEQ ID NO: 1890959 - DNA, 15 bp, Homo sapiens
ttcagtatttaaaat

SEQ ID NO: 1890960 - DNA, 15 bp, Homo sapiens
tcagtatttaaaatt

SEQ ID NO: 1890961 - DNA, 15 bp, Homo sapiens
cagtatttaaaattt

SEQ ID NO: 1890962 - DNA, 15 bp, Homo sapiens
agtatttaaaattta

SEQ ID NO: 1890963 - DNA, 15 bp, Homo sapiens
gtatttaaaatttat

SEQ ID NO: 1890964 - DNA, 15 bp, Homo sapiens
tatttaaaatttata

SEQ ID NO: 1890965 - DNA, 15 bp, Homo sapiens
atttaaaatttataa

SEQ ID NO: 1890966 - DNA, 15 bp, Homo sapiens
tttaaaatttataaa

SEQ ID NO: 1890967 - DNA, 15 bp, Homo sapiens
ttaaaatttataaag

SEQ ID NO: 1890968 - DNA, 15 bp, Homo sapiens
taaaatttataaagc

SEQ ID NO: 1890969 - DNA, 15 bp, Homo sapiens
aaaatttataaagca

SEQ ID NO: 1890970 - DNA, 15 bp, Homo sapiens
aaatttataaagcat

SEQ ID NO: 1890971 - DNA, 15 bp, Homo sapiens
aatttataaagcatt

SEQ ID NO: 1890972 - DNA, 15 bp, Homo sapiens
atttataaagcattt

SEQ ID NO: 1890973 - DNA, 15 bp, Homo sapiens
tttataaagcatttt

SEQ ID NO: 1890974 - DNA, 15 bp, Homo sapiens
ttataaagcattttc

SEQ ID NO: 1890975 - DNA, 15 bp, Homo sapiens
tataaagcattttct

SEQ ID NO: 1890976 - DNA, 15 bp, Homo sapiens
ataaagcattttcta

SEQ ID NO: 1890977 - DNA, 15 bp, Homo sapiens
taaagcattttctac

SEQ ID NO: 1890978 - DNA, 15 bp, Homo sapiens
aaagcattttctacg

SEQ ID NO: 1890979 - DNA, 15 bp, Homo sapiens
aagcattttctacgt

SEQ ID NO: 1890980 - DNA, 15 bp, Homo sapiens
agcattttctacgtt

SEQ ID NO: 1890981 - DNA, 15 bp, Homo sapiens
gcattttctacgttc

SEQ ID NO: 1890982 - DNA, 15 bp, Homo sapiens
cattttctacgttcc

SEQ ID NO: 1890983 - DNA, 15 bp, Homo sapiens
attttctacgttcca

SEQ ID NO: 1890984 - DNA, 15 bp, Homo sapiens
ttttctacgttccag

SEQ ID NO: 1890985 - DNA, 15 bp, Homo sapiens
tttctacgttccagg

SEQ ID NO: 1890986 - DNA, 15 bp, Homo sapiens
ttctacgttccagga

SEQ ID NO: 1890987 - DNA, 15 bp, Homo sapiens
tctacgttccaggac

SEQ ID NO: 1890988 - DNA, 15 bp, Homo sapiens
ctacgttccaggact

SEQ ID NO: 1890989 - DNA, 15 bp, Homo sapiens
tacgttccaggactc

SEQ ID NO: 1890990 - DNA, 15 bp, Homo sapiens
acgttccaggactct

SEQ ID NO: 1890991 - DNA, 15 bp, Homo sapiens
cgttccaggactcta

SEQ ID NO: 1890992 - DNA, 15 bp, Homo sapiens
gttccaggactctac

SEQ ID NO: 1890993 - DNA, 15 bp, Homo sapiens
ttccaggactctact

SEQ ID NO: 1890994 - DNA, 15 bp, Homo sapiens
tccaggactctactg

SEQ ID NO: 1890995 - DNA, 15 bp, Homo sapiens
ccaggactctactga

SEQ ID NO: 1890996 - DNA, 15 bp, Homo sapiens
caggactctactgat

SEQ ID NO: 1890997 - DNA, 15 bp, Homo sapiens
aggactctactgatc

SEQ ID NO: 1890998 - DNA, 15 bp, Homo sapiens
ggactctactgatca

SEQ ID NO: 1890999 - DNA, 15 bp, Homo sapiens
gactctactgatcac

SEQ ID NO: 1891000 - DNA, 15 bp, Homo sapiens
actctactgatcacc

SEQ ID NO: 1891001 - DNA, 15 bp, Homo sapiens
ctctactgatcacct

SEQ ID NO: 1891002 - DNA, 15 bp, Homo sapiens
tctactgatcacctt

SEQ ID NO: 1891003 - DNA, 15 bp, Homo sapiens
ctactgatcaccttc

SEQ ID NO: 1891004 - DNA, 15 bp, Homo sapiens
tactgatcaccttct

SEQ ID NO: 1891005 - DNA, 15 bp, Homo sapiens
actgatcaccttcta

SEQ ID NO: 1891006 - DNA, 15 bp, Homo sapiens
ctgatcaccttctat

SEQ ID NO: 1891007 - DNA, 15 bp, Homo sapiens
tgatcaccttctatg

SEQ ID NO: 1891008 - DNA, 15 bp, Homo sapiens
gatcaccttctatgt

SEQ ID NO: 1891009 - DNA, 15 bp, Homo sapiens
atcaccttctatgta

SEQ ID NO: 1891010 - DNA, 15 bp, Homo sapiens
tcaccttctatgtaa

SEQ ID NO: 1891011 - DNA, 15 bp, Homo sapiens
caccttctatgtaaa

SEQ ID NO: 1891012 - DNA, 15 bp, Homo sapiens
accttctatgtaaag

SEQ ID NO: 1891013 - DNA, 15 bp, Homo sapiens
ccttctatgtaaagc

SEQ ID NO: 1891014 - DNA, 15 bp, Homo sapiens
cttctatgtaaagcc

SEQ ID NO: 1891015 - DNA, 15 bp, Homo sapiens
ttctatgtaaagcct

SEQ ID NO: 1891016 - DNA, 15 bp, Homo sapiens
tctatgtaaagcctt

SEQ ID NO: 1891017 - DNA, 15 bp, Homo sapiens
ctatgtaaagccttg

SEQ ID NO: 1891018 - DNA, 15 bp, Homo sapiens
tatgtaaagccttgt

SEQ ID NO: 1891019 - DNA, 15 bp, Homo sapiens
atgtaaagccttgtc

SEQ ID NO: 1891020 - DNA, 15 bp, Homo sapiens
tgtaaagccttgtca

SEQ ID NO: 1891021 - DNA, 15 bp, Homo sapiens
gtaaagccttgtcac

SEQ ID NO: 1891022 - DNA, 15 bp, Homo sapiens
taaagccttgtcaca

SEQ ID NO: 1891023 - DNA, 15 bp, Homo sapiens
aaagccttgtcacat

SEQ ID NO: 1891024 - DNA, 15 bp, Homo sapiens
aagccttgtcacatg

SEQ ID NO: 1891025 - DNA, 15 bp, Homo sapiens
agccttgtcacatgg

SEQ ID NO: 1891026 - DNA, 15 bp, Homo sapiens
gccttgtcacatgga

SEQ ID NO: 1891027 - DNA, 15 bp, Homo sapiens
ccttgtcacatggat

SEQ ID NO: 1891028 - DNA, 15 bp, Homo sapiens
cttgtcacatggatt

SEQ ID NO: 1891029 - DNA, 15 bp, Homo sapiens
ttgtcacatggattc

SEQ ID NO: 1891030 - DNA, 15 bp, Homo sapiens
tgtcacatggattcc

SEQ ID NO: 1891031 - DNA, 15 bp, Homo sapiens
gtcacatggattcct

SEQ ID NO: 1891032 - DNA, 15 bp, Homo sapiens
tcacatggattcctt

SEQ ID NO: 1891033 - DNA, 15 bp, Homo sapiens
cacatggattcctta

SEQ ID NO: 1891034 - DNA, 15 bp, Homo sapiens
acatggattccttac

SEQ ID NO: 1891035 - DNA, 15 bp, Homo sapiens
catggattccttacc

SEQ ID NO: 1891036 - DNA, 15 bp, Homo sapiens
atggattccttacca

SEQ ID NO: 1891037 - DNA, 15 bp, Homo sapiens
tggattccttaccac

SEQ ID NO: 1891038 - DNA, 15 bp, Homo sapiens
ggattccttaccaca

SEQ ID NO: 1891039 - DNA, 15 bp, Homo sapiens
gattccttaccacac

SEQ ID NO: 1891040 - DNA, 15 bp, Homo sapiens
attccttaccacacc

SEQ ID NO: 1891041 - DNA, 15 bp, Homo sapiens
ttccttaccacaccc

SEQ ID NO: 1891042 - DNA, 15 bp, Homo sapiens
tccttaccacacccc

SEQ ID NO: 1891043 - DNA, 15 bp, Homo sapiens
ccttaccacacccct

SEQ ID NO: 1891044 - DNA, 15 bp, Homo sapiens
cttaccacacccctg

SEQ ID NO: 1891045 - DNA, 15 bp, Homo sapiens
ttaccacacccctgt

SEQ ID NO: 1891046 - DNA, 15 bp, Homo sapiens
taccacacccctgtg

SEQ ID NO: 1891047 - DNA, 15 bp, Homo sapiens
accacacccctgtga

SEQ ID NO: 1891048 - DNA, 15 bp, Homo sapiens
ccacacccctgtgag

SEQ ID NO: 1891049 - DNA, 15 bp, Homo sapiens
cacacccctgtgagg

SEQ ID NO: 1891050 - DNA, 15 bp, Homo sapiens
acacccctgtgaggg

SEQ ID NO: 1891051 - DNA, 15 bp, Homo sapiens
cacccctgtgagggg

SEQ ID NO: 1891052 - DNA, 15 bp, Homo sapiens
acccctgtgaggggt

SEQ ID NO: 1891053 - DNA, 15 bp, Homo sapiens
cccctgtgaggggtg

SEQ ID NO: 1891054 - DNA, 15 bp, Homo sapiens
ccctgtgaggggtgc

SEQ ID NO: 1891055 - DNA, 15 bp, Homo sapiens
cctgtgaggggtgca

SEQ ID NO: 1891056 - DNA, 15 bp, Homo sapiens
ctgtgaggggtgcag

SEQ ID NO: 1891057 - DNA, 15 bp, Homo sapiens
tgtgaggggtgcagg

SEQ ID NO: 1891058 - DNA, 15 bp, Homo sapiens
gtgaggggtgcagga

SEQ ID NO: 1891059 - DNA, 15 bp, Homo sapiens
tgaggggtgcaggag

SEQ ID NO: 1891060 - DNA, 15 bp, Homo sapiens
gaggggtgcaggagg

SEQ ID NO: 1891061 - DNA, 15 bp, Homo sapiens
aggggtgcaggaggt

SEQ ID NO: 1891062 - DNA, 15 bp, Homo sapiens
ggggtgcaggaggta

SEQ ID NO: 1891063 - DNA, 15 bp, Homo sapiens
gggtgcaggaggtag

SEQ ID NO: 1891064 - DNA, 15 bp, Homo sapiens
ggtgcaggaggtagt

SEQ ID NO: 1891065 - DNA, 15 bp, Homo sapiens
gtgcaggaggtagta

SEQ ID NO: 1891066 - DNA, 15 bp, Homo sapiens
tgcaggaggtagtag

SEQ ID NO: 1891067 - DNA, 15 bp, Homo sapiens
gcaggaggtagtagg

SEQ ID NO: 1891068 - DNA, 15 bp, Homo sapiens
caggaggtagtaggg

SEQ ID NO: 1891069 - DNA, 15 bp, Homo sapiens
aggaggtagtagggg

SEQ ID NO: 1891070 - DNA, 15 bp, Homo sapiens
ggaggtagtaggggg

SEQ ID NO: 1891071 - DNA, 15 bp, Homo sapiens
gaggtagtagggggt

SEQ ID NO: 1891072 - DNA, 15 bp, Homo sapiens
aggtagtagggggta

SEQ ID NO: 1891073 - DNA, 15 bp, Homo sapiens
ggtagtagggggtaa

SEQ ID NO: 1891074 - DNA, 15 bp, Homo sapiens
gtagtagggggtaat

SEQ ID NO: 1891075 - DNA, 15 bp, Homo sapiens
tagtagggggtaatg

SEQ ID NO: 1891076 - DNA, 15 bp, Homo sapiens
agtagggggtaatgt

SEQ ID NO: 1891077 - DNA, 15 bp, Homo sapiens
gtagggggtaatgtc

SEQ ID NO: 1891078 - DNA, 15 bp, Homo sapiens
tagggggtaatgtcc

SEQ ID NO: 1891079 - DNA, 15 bp, Homo sapiens
agggggtaatgtccc

SEQ ID NO: 1891080 - DNA, 15 bp, Homo sapiens
gggggtaatgtcccc

SEQ ID NO: 1891081 - DNA, 15 bp, Homo sapiens
ggggtaatgtcccca

SEQ ID NO: 1891082 - DNA, 15 bp, Homo sapiens
gggtaatgtccccat

SEQ ID NO: 1891083 - DNA, 15 bp, Homo sapiens
ggtaatgtccccatc

SEQ ID NO: 1891084 - DNA, 15 bp, Homo sapiens
gtaatgtccccatct

SEQ ID NO: 1891085 - DNA, 15 bp, Homo sapiens
taatgtccccatctt

SEQ ID NO: 1891086 - DNA, 15 bp, Homo sapiens
aatgtccccatctta

SEQ ID NO: 1891087 - DNA, 15 bp, Homo sapiens
atgtccccatcttac

SEQ ID NO: 1891088 - DNA, 15 bp, Homo sapiens
tgtccccatcttaca

SEQ ID NO: 1891089 - DNA, 15 bp, Homo sapiens
gtccccatcttacag

SEQ ID NO: 1891090 - DNA, 15 bp, Homo sapiens
tccccatcttacaga

SEQ ID NO: 1891091 - DNA, 15 bp, Homo sapiens
ccccatcttacagac

SEQ ID NO: 1891092 - DNA, 15 bp, Homo sapiens
cccatcttacagaca

SEQ ID NO: 1891093 - DNA, 15 bp, Homo sapiens
ccatcttacagacaa

SEQ ID NO: 1891094 - DNA, 15 bp, Homo sapiens
catcttacagacaag

SEQ ID NO: 1891095 - DNA, 15 bp, Homo sapiens
atcttacagacaagg

SEQ ID NO: 1891096 - DNA, 15 bp, Homo sapiens
tcttacagacaagga

SEQ ID NO: 1891097 - DNA, 15 bp, Homo sapiens
cttacagacaaggaa

SEQ ID NO: 1891098 - DNA, 15 bp, Homo sapiens
ttacagacaaggaaa

SEQ ID NO: 1891099 - DNA, 15 bp, Homo sapiens
tacagacaaggaaat

SEQ ID NO: 1891100 - DNA, 15 bp, Homo sapiens
acagacaaggaaatg

SEQ ID NO: 1891101 - DNA, 15 bp, Homo sapiens
cagacaaggaaatgg

SEQ ID NO: 1891102 - DNA, 15 bp, Homo sapiens
agacaaggaaatggc

SEQ ID NO: 1891103 - DNA, 15 bp, Homo sapiens
gacaaggaaatggcc

SEQ ID NO: 1891104 - DNA, 15 bp, Homo sapiens
acaaggaaatggcca

SEQ ID NO: 1891105 - DNA, 15 bp, Homo sapiens
caaggaaatggccat

SEQ ID NO: 1891106 - DNA, 15 bp, Homo sapiens
aaggaaatggccata

SEQ ID NO: 1891107 - DNA, 15 bp, Homo sapiens
aggaaatggccataa

SEQ ID NO: 1891108 - DNA, 15 bp, Homo sapiens
ggaaatggccataag

SEQ ID NO: 1891109 - DNA, 15 bp, Homo sapiens
gaaatggccataagt

SEQ ID NO: 1891110 - DNA, 15 bp, Homo sapiens
aaatggccataagtg

SEQ ID NO: 1891111 - DNA, 15 bp, Homo sapiens
aatggccataagtgt

SEQ ID NO: 1891112 - DNA, 15 bp, Homo sapiens
atggccataagtgtc

SEQ ID NO: 1891113 - DNA, 15 bp, Homo sapiens
tggccataagtgtct

SEQ ID NO: 1891114 - DNA, 15 bp, Homo sapiens
ggccataagtgtctt

SEQ ID NO: 1891115 - DNA, 15 bp, Homo sapiens
gccataagtgtcttt

SEQ ID NO: 1891116 - DNA, 15 bp, Homo sapiens
ccataagtgtctttt

SEQ ID NO: 1891117 - DNA, 15 bp, Homo sapiens
cataagtgtcttttc

SEQ ID NO: 1891118 - DNA, 15 bp, Homo sapiens
ataagtgtcttttcc

SEQ ID NO: 1891119 - DNA, 15 bp, Homo sapiens
taagtgtcttttcca

SEQ ID NO: 1891120 - DNA, 15 bp, Homo sapiens
agtgtcttttccaga

SEQ ID NO: 1891121 - DNA, 15 bp, Homo sapiens
gtgtcttttccagaa

SEQ ID NO: 1891122 - DNA, 15 bp, Homo sapiens
tgtcttttccagaag

SEQ ID NO: 1891123 - DNA, 15 bp, Homo sapiens
gtcttttccagaagt

SEQ ID NO: 1891124 - DNA, 15 bp, Homo sapiens
tcttttccagaagta

SEQ ID NO: 1891125 - DNA, 15 bp, Homo sapiens
cttttccagaagtat

SEQ ID NO: 1891126 - DNA, 15 bp, Homo sapiens
ttttccagaagtatt

SEQ ID NO: 1891127 - DNA, 15 bp, Homo sapiens
tttccagaagtattt

SEQ ID NO: 1891128 - DNA, 15 bp, Homo sapiens
ttccagaagtattta

SEQ ID NO: 1891129 - DNA, 15 bp, Homo sapiens
tccagaagtatttag

SEQ ID NO: 1891130 - DNA, 15 bp, Homo sapiens
ccagaagtatttagc

SEQ ID NO: 1891131 - DNA, 15 bp, Homo sapiens
cagaagtatttagct

SEQ ID NO: 1891132 - DNA, 15 bp, Homo sapiens
agaagtatttagcta

SEQ ID NO: 1891133 - DNA, 15 bp, Homo sapiens
gaagtatttagctaa

SEQ ID NO: 1891134 - DNA, 15 bp, Homo sapiens
aagtatttagctaat

SEQ ID NO: 1891135 - DNA, 15 bp, Homo sapiens
agtatttagctaata

SEQ ID NO: 1891136 - DNA, 15 bp, Homo sapiens
gtatttagctaataa

SEQ ID NO: 1891137 - DNA, 15 bp, Homo sapiens
tatttagctaataag

SEQ ID NO: 1891138 - DNA, 15 bp, Homo sapiens
atttagctaataaga

SEQ ID NO: 1891139 - DNA, 15 bp, Homo sapiens
tttagctaataagag

SEQ ID NO: 1891140 - DNA, 15 bp, Homo sapiens
ttagctaataagagg

SEQ ID NO: 1891141 - DNA, 15 bp, Homo sapiens
tagctaataagaggc

SEQ ID NO: 1891142 - DNA, 15 bp, Homo sapiens
agctaataagaggca

SEQ ID NO: 1891143 - DNA, 15 bp, Homo sapiens
gctaataagaggcag

SEQ ID NO: 1891144 - DNA, 15 bp, Homo sapiens
ctaataagaggcagc

SEQ ID NO: 1891145 - DNA, 15 bp, Homo sapiens
taataagaggcagct

SEQ ID NO: 1891146 - DNA, 15 bp, Homo sapiens
aataagaggcagctg

SEQ ID NO: 1891147 - DNA, 15 bp, Homo sapiens
ataagaggcagctgg

SEQ ID NO: 1891148 - DNA, 15 bp, Homo sapiens
taagaggcagctgga

SEQ ID NO: 1891149 - DNA, 15 bp, Homo sapiens
aagaggcagctggaa

SEQ ID NO: 1891150 - DNA, 15 bp, Homo sapiens
agaggcagctggaat

SEQ ID NO: 1891151 - DNA, 15 bp, Homo sapiens
gaggcagctggaatt

SEQ ID NO: 1891152 - DNA, 15 bp, Homo sapiens
aggcagctggaatta

SEQ ID NO: 1891153 - DNA, 15 bp, Homo sapiens
ggcagctggaattac

SEQ ID NO: 1891154 - DNA, 15 bp, Homo sapiens
gcagctggaattaca

SEQ ID NO: 1891155 - DNA, 15 bp, Homo sapiens
cagctggaattacaa

SEQ ID NO: 1891156 - DNA, 15 bp, Homo sapiens
agctggaattacaac

SEQ ID NO: 1891157 - DNA, 15 bp, Homo sapiens
gctggaattacaacc

SEQ ID NO: 1891158 - DNA, 15 bp, Homo sapiens
ctggaattacaacct

SEQ ID NO: 1891159 - DNA, 15 bp, Homo sapiens
tggaattacaaccta

SEQ ID NO: 1891160 - DNA, 15 bp, Homo sapiens
ggaattacaacctag

SEQ ID NO: 1891161 - DNA, 15 bp, Homo sapiens
gaattacaacctagg

SEQ ID NO: 1891162 - DNA, 15 bp, Homo sapiens
aattacaacctaggt

SEQ ID NO: 1891163 - DNA, 15 bp, Homo sapiens
attacaacctaggtc

SEQ ID NO: 1891164 - DNA, 15 bp, Homo sapiens
ttacaacctaggtct

SEQ ID NO: 1891165 - DNA, 15 bp, Homo sapiens
tacaacctaggtctt

SEQ ID NO: 1891166 - DNA, 15 bp, Homo sapiens
acaacctaggtcttt

SEQ ID NO: 1891167 - DNA, 15 bp, Homo sapiens
caacctaggtctttc

SEQ ID NO: 1891168 - DNA, 15 bp, Homo sapiens
aacctaggtctttca

SEQ ID NO: 1891169 - DNA, 15 bp, Homo sapiens
acctaggtctttcag

SEQ ID NO: 1891170 - DNA, 15 bp, Homo sapiens
cctaggtctttcaga

SEQ ID NO: 1891171 - DNA, 15 bp, Homo sapiens
ctaggtctttcagac

SEQ ID NO: 1891172 - DNA, 15 bp, Homo sapiens
taggtctttcagact

SEQ ID NO: 1891173 - DNA, 15 bp, Homo sapiens
aggtctttcagactt

SEQ ID NO: 1891174 - DNA, 15 bp, Homo sapiens
ggtctttcagacttc

SEQ ID NO: 1891175 - DNA, 15 bp, Homo sapiens
gtctttcagacttca

SEQ ID NO: 1891176 - DNA, 15 bp, Homo sapiens
tctttcagacttcag

SEQ ID NO: 1891177 - DNA, 15 bp, Homo sapiens
ctttcagacttcaga

SEQ ID NO: 1891178 - DNA, 15 bp, Homo sapiens
tttcagacttcagaa

SEQ ID NO: 1891179 - DNA, 15 bp, Homo sapiens
ttcagacttcagaat

SEQ ID NO: 1891180 - DNA, 15 bp, Homo sapiens
tcagacttcagaatc

SEQ ID NO: 1891181 - DNA, 15 bp, Homo sapiens
cagacttcagaatca

SEQ ID NO: 1891182 - DNA, 15 bp, Homo sapiens
agacttcagaatcag

SEQ ID NO: 1891183 - DNA, 15 bp, Homo sapiens
gacttcagaatcagt

SEQ ID NO: 1891184 - DNA, 15 bp, Homo sapiens
acttcagaatcagtg

SEQ ID NO: 1891185 - DNA, 15 bp, Homo sapiens
cttcagaatcagtgt

SEQ ID NO: 1891186 - DNA, 15 bp, Homo sapiens
ttcagaatcagtgtt

SEQ ID NO: 1891187 - DNA, 15 bp, Homo sapiens
tcagaatcagtgttc

SEQ ID NO: 1891188 - DNA, 15 bp, Homo sapiens
cagaatcagtgttct

SEQ ID NO: 1891189 - DNA, 15 bp, Homo sapiens
agaatcagtgttctc

SEQ ID NO: 1891190 - DNA, 15 bp, Homo sapiens
gaatcagtgttctca

SEQ ID NO: 1891191 - DNA, 15 bp, Homo sapiens
aatcagtgttctcaa

SEQ ID NO: 1891192 - DNA, 15 bp, Homo sapiens
atcagtgttctcaac

SEQ ID NO: 1891193 - DNA, 15 bp, Homo sapiens
tcagtgttctcaacc

SEQ ID NO: 1891194 - DNA, 15 bp, Homo sapiens
cagtgttctcaacca

SEQ ID NO: 1891195 - DNA, 15 bp, Homo sapiens
agtgttctcaaccac

SEQ ID NO: 1891196 - DNA, 15 bp, Homo sapiens
gtgttctcaaccact

SEQ ID NO: 1891197 - DNA, 15 bp, Homo sapiens
tgttctcaaccactg

SEQ ID NO: 1891198 - DNA, 15 bp, Homo sapiens
gttctcaaccactgt

SEQ ID NO: 1891199 - DNA, 15 bp, Homo sapiens
ttctcaaccactgta

SEQ ID NO: 1891200 - DNA, 15 bp, Homo sapiens
tctcaaccactgtaa

SEQ ID NO: 1891201 - DNA, 15 bp, Homo sapiens
ctcaaccactgtaag

SEQ ID NO: 1891202 - DNA, 15 bp, Homo sapiens
tcaaccactgtaagt

SEQ ID NO: 1891203 - DNA, 15 bp, Homo sapiens
caaccactgtaagta

SEQ ID NO: 1891204 - DNA, 15 bp, Homo sapiens
aaccactgtaagtaa

SEQ ID NO: 1891205 - DNA, 15 bp, Homo sapiens
accactgtaagtaac

SEQ ID NO: 1891206 - DNA, 15 bp, Homo sapiens
ccactgtaagtaaca

SEQ ID NO: 1891207 - DNA, 15 bp, Homo sapiens
cactgtaagtaacaa

SEQ ID NO: 1891208 - DNA, 15 bp, Homo sapiens
actgtaagtaacaaa

SEQ ID NO: 1891209 - DNA, 15 bp, Homo sapiens
ctgtaagtaacaaat

SEQ ID NO: 1891210 - DNA, 15 bp, Homo sapiens
tgtaagtaacaaata

SEQ ID NO: 1891211 - DNA, 15 bp, Homo sapiens
gtaagtaacaaatat

SEQ ID NO: 1891212 - DNA, 15 bp, Homo sapiens
taagtaacaaatatc

SEQ ID NO: 1891213 - DNA, 15 bp, Homo sapiens
aagtaacaaatatct

SEQ ID NO: 1891214 - DNA, 15 bp, Homo sapiens
agtaacaaatatcta

SEQ ID NO: 1891215 - DNA, 15 bp, Homo sapiens
gtaacaaatatctat

SEQ ID NO: 1891216 - DNA, 15 bp, Homo sapiens
taacaaatatctatt

SEQ ID NO: 1891217 - DNA, 15 bp, Homo sapiens
aacaaatatctattg

SEQ ID NO: 1891218 - DNA, 15 bp, Homo sapiens
caaatatctattgag

SEQ ID NO: 1891219 - DNA, 15 bp, Homo sapiens
aaatatctattgagc

SEQ ID NO: 1891220 - DNA, 15 bp, Homo sapiens
aatatctattgagca

SEQ ID NO: 1891221 - DNA, 15 bp, Homo sapiens
atatctattgagcac

SEQ ID NO: 1891222 - DNA, 15 bp, Homo sapiens
tatctattgagcact

SEQ ID NO: 1891223 - DNA, 15 bp, Homo sapiens
atctattgagcactg

SEQ ID NO: 1891224 - DNA, 15 bp, Homo sapiens
tctattgagcactgt

SEQ ID NO: 1891225 - DNA, 15 bp, Homo sapiens
ctattgagcactgtg

SEQ ID NO: 1891226 - DNA, 15 bp, Homo sapiens
tattgagcactgtgc

SEQ ID NO: 1891227 - DNA, 15 bp, Homo sapiens
attgagcactgtgcc

SEQ ID NO: 1891228 - DNA, 15 bp, Homo sapiens
ttgagcactgtgcca

SEQ ID NO: 1891229 - DNA, 15 bp, Homo sapiens
tgagcactgtgccag

SEQ ID NO: 1891230 - DNA, 15 bp, Homo sapiens
gagcactgtgccagc

SEQ ID NO: 1891231 - DNA, 15 bp, Homo sapiens
agcactgtgccagcc

SEQ ID NO: 1891232 - DNA, 15 bp, Homo sapiens
gcactgtgccagcct

SEQ ID NO: 1891233 - DNA, 15 bp, Homo sapiens
cactgtgccagcctt

SEQ ID NO: 1891234 - DNA, 15 bp, Homo sapiens
actgtgccagccttt

SEQ ID NO: 1891235 - DNA, 15 bp, Homo sapiens
ctgtgccagccttta

SEQ ID NO: 1891236 - DNA, 15 bp, Homo sapiens
tgtgccagcctttaa

SEQ ID NO: 1891237 - DNA, 15 bp, Homo sapiens
gtgccagcctttaag

SEQ ID NO: 1891238 - DNA, 15 bp, Homo sapiens
tgccagcctttaagg

SEQ ID NO: 1891239 - DNA, 15 bp, Homo sapiens
gccagcctttaaggt

SEQ ID NO: 1891240 - DNA, 15 bp, Homo sapiens
ccagcctttaaggtt

SEQ ID NO: 1891241 - DNA, 15 bp, Homo sapiens
cagcctttaaggttc

SEQ ID NO: 1891242 - DNA, 15 bp, Homo sapiens
agcctttaaggttcc

SEQ ID NO: 1891243 - DNA, 15 bp, Homo sapiens
gcctttaaggttcct

SEQ ID NO: 1891244 - DNA, 15 bp, Homo sapiens
cctttaaggttccta

SEQ ID NO: 1891245 - DNA, 15 bp, Homo sapiens
ctttaaggttcctat

SEQ ID NO: 1891246 - DNA, 15 bp, Homo sapiens
tttaaggttcctatg

SEQ ID NO: 1891247 - DNA, 15 bp, Homo sapiens
ttaaggttcctatga

SEQ ID NO: 1891248 - DNA, 15 bp, Homo sapiens
taaggttcctatgac

SEQ ID NO: 1891249 - DNA, 15 bp, Homo sapiens
aaggttcctatgact

SEQ ID NO: 1891250 - DNA, 15 bp, Homo sapiens
aggttcctatgacta

SEQ ID NO: 1891251 - DNA, 15 bp, Homo sapiens
ggttcctatgactaa

SEQ ID NO: 1891252 - DNA, 15 bp, Homo sapiens
gttcctatgactaat

SEQ ID NO: 1891253 - DNA, 15 bp, Homo sapiens
ttcctatgactaata

SEQ ID NO: 1891254 - DNA, 15 bp, Homo sapiens
tcctatgactaatag

SEQ ID NO: 1891255 - DNA, 15 bp, Homo sapiens
cctatgactaatagt

SEQ ID NO: 1891256 - DNA, 15 bp, Homo sapiens
ctatgactaatagta

SEQ ID NO: 1891257 - DNA, 15 bp, Homo sapiens
tatgactaatagtac

SEQ ID NO: 1891258 - DNA, 15 bp, Homo sapiens
atgactaatagtaca

SEQ ID NO: 1891259 - DNA, 15 bp, Homo sapiens
tgactaatagtacat

SEQ ID NO: 1891260 - DNA, 15 bp, Homo sapiens
gactaatagtacatc

SEQ ID NO: 1891261 - DNA, 15 bp, Homo sapiens
actaatagtacatcc

SEQ ID NO: 1891262 - DNA, 15 bp, Homo sapiens
ctaatagtacatcca

SEQ ID NO: 1891263 - DNA, 15 bp, Homo sapiens
taatagtacatccat

SEQ ID NO: 1891264 - DNA, 15 bp, Homo sapiens
aatagtacatccatg

SEQ ID NO: 1891265 - DNA, 15 bp, Homo sapiens
atagtacatccatgt

SEQ ID NO: 1891266 - DNA, 15 bp, Homo sapiens
tagtacatccatgtc

SEQ ID NO: 1891267 - DNA, 15 bp, Homo sapiens
agtacatccatgtcc

SEQ ID NO: 1891268 - DNA, 15 bp, Homo sapiens
gtacatccatgtcct

SEQ ID NO: 1891269 - DNA, 15 bp, Homo sapiens
tacatccatgtcctt

SEQ ID NO: 1891270 - DNA, 15 bp, Homo sapiens
acatccatgtcctta

SEQ ID NO: 1891271 - DNA, 15 bp, Homo sapiens
catccatgtccttaa

SEQ ID NO: 1891272 - DNA, 15 bp, Homo sapiens
atccatgtccttaaa

SEQ ID NO: 1891273 - DNA, 15 bp, Homo sapiens
tccatgtccttaaag

SEQ ID NO: 1891274 - DNA, 15 bp, Homo sapiens
ccatgtccttaaaga

SEQ ID NO: 1891275 - DNA, 15 bp, Homo sapiens
catgtccttaaagag

SEQ ID NO: 1891276 - DNA, 15 bp, Homo sapiens
atgtccttaaagagc

SEQ ID NO: 1891277 - DNA, 15 bp, Homo sapiens
tgtccttaaagagct

SEQ ID NO: 1891278 - DNA, 15 bp, Homo sapiens
gtccttaaagagctt

SEQ ID NO: 1891279 - DNA, 15 bp, Homo sapiens
tccttaaagagcttg

SEQ ID NO: 1891280 - DNA, 15 bp, Homo sapiens
ccttaaagagcttgt

SEQ ID NO: 1891281 - DNA, 15 bp, Homo sapiens
cttaaagagcttgta

SEQ ID NO: 1891282 - DNA, 15 bp, Homo sapiens
ttaaagagcttgtag

SEQ ID NO: 1891283 - DNA, 15 bp, Homo sapiens
taaagagcttgtagt

SEQ ID NO: 1891284 - DNA, 15 bp, Homo sapiens
aaagagcttgtagtt

SEQ ID NO: 1891285 - DNA, 15 bp, Homo sapiens
aagagcttgtagttg

SEQ ID NO: 1891286 - DNA, 15 bp, Homo sapiens
agagcttgtagttgg

SEQ ID NO: 1891287 - DNA, 15 bp, Homo sapiens
gagcttgtagttgga

SEQ ID NO: 1891288 - DNA, 15 bp, Homo sapiens
agcttgtagttggat

SEQ ID NO: 1891289 - DNA, 15 bp, Homo sapiens
gcttgtagttggata

SEQ ID NO: 1891290 - DNA, 15 bp, Homo sapiens
cttgtagttggataa

SEQ ID NO: 1891291 - DNA, 15 bp, Homo sapiens
ttgtagttggataaa

SEQ ID NO: 1891292 - DNA, 15 bp, Homo sapiens
tgtagttggataaag

SEQ ID NO: 1891293 - DNA, 15 bp, Homo sapiens
gtagttggataaaga

SEQ ID NO: 1891294 - DNA, 15 bp, Homo sapiens
tagttggataaagaa

SEQ ID NO: 1891295 - DNA, 15 bp, Homo sapiens
agttggataaagaaa

SEQ ID NO: 1891296 - DNA, 15 bp, Homo sapiens
gttggataaagaaag

SEQ ID NO: 1891297 - DNA, 15 bp, Homo sapiens
ttggataaagaaagc

SEQ ID NO: 1891298 - DNA, 15 bp, Homo sapiens
tggataaagaaagca

SEQ ID NO: 1891299 - DNA, 15 bp, Homo sapiens
ggataaagaaagcag

SEQ ID NO: 1891300 - DNA, 15 bp, Homo sapiens
gataaagaaagcaga

SEQ ID NO: 1891301 - DNA, 15 bp, Homo sapiens
ataaagaaagcagat

SEQ ID NO: 1891302 - DNA, 15 bp, Homo sapiens
taaagaaagcagatt

SEQ ID NO: 1891303 - DNA, 15 bp, Homo sapiens
aaagaaagcagatta

SEQ ID NO: 1891304 - DNA, 15 bp, Homo sapiens
aagaaagcagattaa

SEQ ID NO: 1891305 - DNA, 15 bp, Homo sapiens
agaaagcagattaaa

SEQ ID NO: 1891306 - DNA, 15 bp, Homo sapiens
gaaagcagattaaaa

SEQ ID NO: 1891307 - DNA, 15 bp, Homo sapiens
aaagcagattaaaaa

SEQ ID NO: 1891308 - DNA, 15 bp, Homo sapiens
aagcagattaaaaag

SEQ ID NO: 1891309 - DNA, 15 bp, Homo sapiens
agcagattaaaaaga

SEQ ID NO: 1891310 - DNA, 15 bp, Homo sapiens
gcagattaaaaagat

SEQ ID NO: 1891311 - DNA, 15 bp, Homo sapiens
cagattaaaaagatg

SEQ ID NO: 1891312 - DNA, 15 bp, Homo sapiens
agattaaaaagatga

SEQ ID NO: 1891313 - DNA, 15 bp, Homo sapiens
gattaaaaagatgac

SEQ ID NO: 1891314 - DNA, 15 bp, Homo sapiens
attaaaaagatgact

SEQ ID NO: 1891315 - DNA, 15 bp, Homo sapiens
ttaaaaagatgactg

SEQ ID NO: 1891316 - DNA, 15 bp, Homo sapiens
taaaaagatgactgc

SEQ ID NO: 1891317 - DNA, 15 bp, Homo sapiens
aaaaagatgactgct

SEQ ID NO: 1891318 - DNA, 15 bp, Homo sapiens
aaaagatgactgctg

SEQ ID NO: 1891319 - DNA, 15 bp, Homo sapiens
aaagatgactgctgt

SEQ ID NO: 1891320 - DNA, 15 bp, Homo sapiens
aagatgactgctgtg

SEQ ID NO: 1891321 - DNA, 15 bp, Homo sapiens
agatgactgctgtgt

SEQ ID NO: 1891322 - DNA, 15 bp, Homo sapiens
gatgactgctgtgta

SEQ ID NO: 1891323 - DNA, 15 bp, Homo sapiens
atgactgctgtgtaa

SEQ ID NO: 1891324 - DNA, 15 bp, Homo sapiens
tgactgctgtgtaac

SEQ ID NO: 1891325 - DNA, 15 bp, Homo sapiens
gactgctgtgtaact

SEQ ID NO: 1891326 - DNA, 15 bp, Homo sapiens
actgctgtgtaactg

SEQ ID NO: 1891327 - DNA, 15 bp, Homo sapiens
ctgctgtgtaactga

SEQ ID NO: 1891328 - DNA, 15 bp, Homo sapiens
tgctgtgtaactgat

SEQ ID NO: 1891329 - DNA, 15 bp, Homo sapiens
gctgtgtaactgata

SEQ ID NO: 1891330 - DNA, 15 bp, Homo sapiens
ctgtgtaactgatag

SEQ ID NO: 1891331 - DNA, 15 bp, Homo sapiens
tgtgtaactgatagc

SEQ ID NO: 1891332 - DNA, 15 bp, Homo sapiens
gtgtaactgatagcc

SEQ ID NO: 1891333 - DNA, 15 bp, Homo sapiens
tgtaactgatagcct

SEQ ID NO: 1891334 - DNA, 15 bp, Homo sapiens
gtaactgatagccta

SEQ ID NO: 1891335 - DNA, 15 bp, Homo sapiens
taactgatagcctag

SEQ ID NO: 1891336 - DNA, 15 bp, Homo sapiens
aactgatagcctaga

SEQ ID NO: 1891337 - DNA, 15 bp, Homo sapiens
actgatagcctagag

SEQ ID NO: 1891338 - DNA, 15 bp, Homo sapiens
ctgatagcctagagg

SEQ ID NO: 1891339 - DNA, 15 bp, Homo sapiens
tgatagcctagagga

SEQ ID NO: 1891340 - DNA, 15 bp, Homo sapiens
gatagcctagaggag

SEQ ID NO: 1891341 - DNA, 15 bp, Homo sapiens
atagcctagaggaga

SEQ ID NO: 1891342 - DNA, 15 bp, Homo sapiens
tagcctagaggagat

SEQ ID NO: 1891343 - DNA, 15 bp, Homo sapiens
agcctagaggagata

SEQ ID NO: 1891344 - DNA, 15 bp, Homo sapiens
gcctagaggagataa

SEQ ID NO: 1891345 - DNA, 15 bp, Homo sapiens
cctagaggagataaa

SEQ ID NO: 1891346 - DNA, 15 bp, Homo sapiens
ctagaggagataaag

SEQ ID NO: 1891347 - DNA, 15 bp, Homo sapiens
tagaggagataaagt

SEQ ID NO: 1891348 - DNA, 15 bp, Homo sapiens
agaggagataaagtt

SEQ ID NO: 1891349 - DNA, 15 bp, Homo sapiens
gaggagataaagttt

SEQ ID NO: 1891350 - DNA, 15 bp, Homo sapiens
aggagataaagtttg

SEQ ID NO: 1891351 - DNA, 15 bp, Homo sapiens
ggagataaagtttgc

SEQ ID NO: 1891352 - DNA, 15 bp, Homo sapiens
gagataaagtttgct

SEQ ID NO: 1891353 - DNA, 15 bp, Homo sapiens
agataaagtttgctt

SEQ ID NO: 1891354 - DNA, 15 bp, Homo sapiens
gataaagtttgctta

SEQ ID NO: 1891355 - DNA, 15 bp, Homo sapiens
ataaagtttgcttat

SEQ ID NO: 1891356 - DNA, 15 bp, Homo sapiens
taaagtttgcttatg

SEQ ID NO: 1891357 - DNA, 15 bp, Homo sapiens
aaagtttgcttatgg

SEQ ID NO: 1891358 - DNA, 15 bp, Homo sapiens
aagtttgcttatgga

SEQ ID NO: 1891359 - DNA, 15 bp, Homo sapiens
agtttgcttatggaa

SEQ ID NO: 1891360 - DNA, 15 bp, Homo sapiens
gtttgcttatggaaa

SEQ ID NO: 1891361 - DNA, 15 bp, Homo sapiens
tttgcttatggaaat

SEQ ID NO: 1891362 - DNA, 15 bp, Homo sapiens
ttgcttatggaaatg

SEQ ID NO: 1891363 - DNA, 15 bp, Homo sapiens
tgcttatggaaatgc

SEQ ID NO: 1891364 - DNA, 15 bp, Homo sapiens
gcttatggaaatgca

SEQ ID NO: 1891365 - DNA, 15 bp, Homo sapiens
cttatggaaatgcag

SEQ ID NO: 1891366 - DNA, 15 bp, Homo sapiens
ttatggaaatgcagc

SEQ ID NO: 1891367 - DNA, 15 bp, Homo sapiens
tatggaaatgcagcg

SEQ ID NO: 1891368 - DNA, 15 bp, Homo sapiens
atggaaatgcagcgg

SEQ ID NO: 1891369 - DNA, 15 bp, Homo sapiens
tggaaatgcagcgga

SEQ ID NO: 1891370 - DNA, 15 bp, Homo sapiens
ggaaatgcagcggag

SEQ ID NO: 1891371 - DNA, 15 bp, Homo sapiens
gaaatgcagcggaga

SEQ ID NO: 1891372 - DNA, 15 bp, Homo sapiens
aaatgcagcggagag

SEQ ID NO: 1891373 - DNA, 15 bp, Homo sapiens
aatgcagcggagagg

SEQ ID NO: 1891374 - DNA, 15 bp, Homo sapiens
atgcagcggagaggc

SEQ ID NO: 1891375 - DNA, 15 bp, Homo sapiens
tgcagcggagaggca

SEQ ID NO: 1891376 - DNA, 15 bp, Homo sapiens
gcagcggagaggcac

SEQ ID NO: 1891377 - DNA, 15 bp, Homo sapiens
cagcggagaggcacc

SEQ ID NO: 1891378 - DNA, 15 bp, Homo sapiens
agcggagaggcaccg

SEQ ID NO: 1891379 - DNA, 15 bp, Homo sapiens
gcggagaggcaccga

SEQ ID NO: 1891380 - DNA, 15 bp, Homo sapiens
cggagaggcaccgaa

SEQ ID NO: 1891381 - DNA, 15 bp, Homo sapiens
ggagaggcaccgaac

SEQ ID NO: 1891382 - DNA, 15 bp, Homo sapiens
gagaggcaccgaaca

SEQ ID NO: 1891383 - DNA, 15 bp, Homo sapiens
agaggcaccgaacat

SEQ ID NO: 1891384 - DNA, 15 bp, Homo sapiens
gaggcaccgaacatt

SEQ ID NO: 1891385 - DNA, 15 bp, Homo sapiens
aggcaccgaacattc

SEQ ID NO: 1891386 - DNA, 15 bp, Homo sapiens
ggcaccgaacattca

SEQ ID NO: 1891387 - DNA, 15 bp, Homo sapiens
gcaccgaacattcac

SEQ ID NO: 1891388 - DNA, 15 bp, Homo sapiens
caccgaacattcaca

SEQ ID NO: 1891389 - DNA, 15 bp, Homo sapiens
accgaacattcacaa

SEQ ID NO: 1891390 - DNA, 15 bp, Homo sapiens
ccgaacattcacaag

SEQ ID NO: 1891391 - DNA, 15 bp, Homo sapiens
cgaacattcacaagg

SEQ ID NO: 1891392 - DNA, 15 bp, Homo sapiens
gaacattcacaaggg

SEQ ID NO: 1891393 - DNA, 15 bp, Homo sapiens
aacattcacaagggt

SEQ ID NO: 1891394 - DNA, 15 bp, Homo sapiens
acattcacaagggtc

SEQ ID NO: 1891395 - DNA, 15 bp, Homo sapiens
cattcacaagggtct

SEQ ID NO: 1891396 - DNA, 15 bp, Homo sapiens
attcacaagggtcta

SEQ ID NO: 1891397 - DNA, 15 bp, Homo sapiens
ttcacaagggtctat

SEQ ID NO: 1891398 - DNA, 15 bp, Homo sapiens
tcacaagggtctatg

SEQ ID NO: 1891399 - DNA, 15 bp, Homo sapiens
cacaagggtctatgc

SEQ ID NO: 1891400 - DNA, 15 bp, Homo sapiens
acaagggtctatgct

SEQ ID NO: 1891401 - DNA, 15 bp, Homo sapiens
caagggtctatgcta

SEQ ID NO: 1891402 - DNA, 15 bp, Homo sapiens
aagggtctatgctaa

SEQ ID NO: 1891403 - DNA, 15 bp, Homo sapiens
agggtctatgctaac

SEQ ID NO: 1891404 - DNA, 15 bp, Homo sapiens
gggtctatgctaaca

SEQ ID NO: 1891405 - DNA, 15 bp, Homo sapiens
ggtctatgctaacac

SEQ ID NO: 1891406 - DNA, 15 bp, Homo sapiens
gtctatgctaacact

SEQ ID NO: 1891407 - DNA, 15 bp, Homo sapiens
tctatgctaacactg

SEQ ID NO: 1891408 - DNA, 15 bp, Homo sapiens
ctatgctaacactga

SEQ ID NO: 1891409 - DNA, 15 bp, Homo sapiens
tatgctaacactgac

SEQ ID NO: 1891410 - DNA, 15 bp, Homo sapiens
atgctaacactgact

SEQ ID NO: 1891411 - DNA, 15 bp, Homo sapiens
tgctaacactgactt

SEQ ID NO: 1891412 - DNA, 15 bp, Homo sapiens
gctaacactgacttc

SEQ ID NO: 1891413 - DNA, 15 bp, Homo sapiens
ctaacactgacttcg

SEQ ID NO: 1891414 - DNA, 15 bp, Homo sapiens
taacactgacttcgt

SEQ ID NO: 1891415 - DNA, 15 bp, Homo sapiens
aacactgacttcgtg

SEQ ID NO: 1891416 - DNA, 15 bp, Homo sapiens
acactgacttcgtga

SEQ ID NO: 1891417 - DNA, 15 bp, Homo sapiens
cactgacttcgtgac

SEQ ID NO: 1891418 - DNA, 15 bp, Homo sapiens
actgacttcgtgact

SEQ ID NO: 1891419 - DNA, 15 bp, Homo sapiens
ctgacttcgtgactt

SEQ ID NO: 1891420 - DNA, 15 bp, Homo sapiens
tgacttcgtgacttc

SEQ ID NO: 1891421 - DNA, 15 bp, Homo sapiens
gacttcgtgacttca

SEQ ID NO: 1891422 - DNA, 15 bp, Homo sapiens
acttcgtgacttcat

SEQ ID NO: 1891423 - DNA, 15 bp, Homo sapiens
cttcgtgacttcata

SEQ ID NO: 1891424 - DNA, 15 bp, Homo sapiens
ttcgtgacttcatac

SEQ ID NO: 1891425 - DNA, 15 bp, Homo sapiens
tcgtgacttcataca

SEQ ID NO: 1891426 - DNA, 15 bp, Homo sapiens
cgtgacttcatacac

SEQ ID NO: 1891427 - DNA, 15 bp, Homo sapiens
gtgacttcatacacc

SEQ ID NO: 1891428 - DNA, 15 bp, Homo sapiens
tgacttcatacaccc

SEQ ID NO: 1891429 - DNA, 15 bp, Homo sapiens
gacttcatacaccca

SEQ ID NO: 1891430 - DNA, 15 bp, Homo sapiens
acttcatacacccac

SEQ ID NO: 1891431 - DNA, 15 bp, Homo sapiens
cttcatacacccaca

SEQ ID NO: 1891432 - DNA, 15 bp, Homo sapiens
ttcatacacccacag

SEQ ID NO: 1891433 - DNA, 15 bp, Homo sapiens
tcatacacccacaga

SEQ ID NO: 1891434 - DNA, 15 bp, Homo sapiens
catacacccacagag

SEQ ID NO: 1891435 - DNA, 15 bp, Homo sapiens
atacacccacagaga

SEQ ID NO: 1891436 - DNA, 15 bp, Homo sapiens
tacacccacagagaa

SEQ ID NO: 1891437 - DNA, 15 bp, Homo sapiens
acacccacagagaaa

SEQ ID NO: 1891438 - DNA, 15 bp, Homo sapiens
cacccacagagaaat

SEQ ID NO: 1891439 - DNA, 15 bp, Homo sapiens
acccacagagaaatg

SEQ ID NO: 1891440 - DNA, 15 bp, Homo sapiens
cccacagagaaatgt

SEQ ID NO: 1891441 - DNA, 15 bp, Homo sapiens
ccacagagaaatgtg

SEQ ID NO: 1891442 - DNA, 15 bp, Homo sapiens
cacagagaaatgtgc

SEQ ID NO: 1891443 - DNA, 15 bp, Homo sapiens
acagagaaatgtgcc

SEQ ID NO: 1891444 - DNA, 15 bp, Homo sapiens
cagagaaatgtgccc

SEQ ID NO: 1891445 - DNA, 15 bp, Homo sapiens
agagaaatgtgccca

SEQ ID NO: 1891446 - DNA, 15 bp, Homo sapiens
gagaaatgtgcccat

SEQ ID NO: 1891447 - DNA, 15 bp, Homo sapiens
agaaatgtgcccatg

SEQ ID NO: 1891448 - DNA, 15 bp, Homo sapiens
gaaatgtgcccatga

SEQ ID NO: 1891449 - DNA, 15 bp, Homo sapiens
aaatgtgcccatgaa

SEQ ID NO: 1891450 - DNA, 15 bp, Homo sapiens
aatgtgcccatgaac

SEQ ID NO: 1891451 - DNA, 15 bp, Homo sapiens
atgtgcccatgaaca

SEQ ID NO: 1891452 - DNA, 15 bp, Homo sapiens
tgtgcccatgaacat

SEQ ID NO: 1891453 - DNA, 15 bp, Homo sapiens
gtgcccatgaacatt

SEQ ID NO: 1891454 - DNA, 15 bp, Homo sapiens
tgcccatgaacattt

SEQ ID NO: 1891455 - DNA, 15 bp, Homo sapiens
gcccatgaacatttg

SEQ ID NO: 1891456 - DNA, 15 bp, Homo sapiens
cccatgaacatttga

SEQ ID NO: 1891457 - DNA, 15 bp, Homo sapiens
ccatgaacatttgat

SEQ ID NO: 1891458 - DNA, 15 bp, Homo sapiens
catgaacatttgatt

SEQ ID NO: 1891459 - DNA, 15 bp, Homo sapiens
atgaacatttgattt

SEQ ID NO: 1891460 - DNA, 15 bp, Homo sapiens
tgaacatttgatttg

SEQ ID NO: 1891461 - DNA, 15 bp, Homo sapiens
gaacatttgatttga

SEQ ID NO: 1891462 - DNA, 15 bp, Homo sapiens
aacatttgatttgag

SEQ ID NO: 1891463 - DNA, 15 bp, Homo sapiens
acatttgatttgagg

SEQ ID NO: 1891464 - DNA, 15 bp, Homo sapiens
catttgatttgagga

SEQ ID NO: 1891465 - DNA, 15 bp, Homo sapiens
atttgatttgaggaa

SEQ ID NO: 1891466 - DNA, 15 bp, Homo sapiens
tttgatttgaggaag

SEQ ID NO: 1891467 - DNA, 15 bp, Homo sapiens
ttgatttgaggaagc

SEQ ID NO: 1891468 - DNA, 15 bp, Homo sapiens
tgatttgaggaagct

SEQ ID NO: 1891469 - DNA, 15 bp, Homo sapiens
gatttgaggaagctg

SEQ ID NO: 1891470 - DNA, 15 bp, Homo sapiens
atttgaggaagctga

SEQ ID NO: 1891471 - DNA, 15 bp, Homo sapiens
tttgaggaagctgat

SEQ ID NO: 1891472 - DNA, 15 bp, Homo sapiens
ttgaggaagctgatg

SEQ ID NO: 1891473 - DNA, 15 bp, Homo sapiens
tgaggaagctgatgg

SEQ ID NO: 1891474 - DNA, 15 bp, Homo sapiens
gaggaagctgatggt

SEQ ID NO: 1891475 - DNA, 15 bp, Homo sapiens
aggaagctgatggta

SEQ ID NO: 1891476 - DNA, 15 bp, Homo sapiens
ggaagctgatggtac

SEQ ID NO: 1891477 - DNA, 15 bp, Homo sapiens
gaagctgatggtaca

SEQ ID NO: 1891478 - DNA, 15 bp, Homo sapiens
aagctgatggtacat

SEQ ID NO: 1891479 - DNA, 15 bp, Homo sapiens
agctgatggtacatc

SEQ ID NO: 1891480 - DNA, 15 bp, Homo sapiens
gctgatggtacatcc

SEQ ID NO: 1891481 - DNA, 15 bp, Homo sapiens
ctgatggtacatcct

SEQ ID NO: 1891482 - DNA, 15 bp, Homo sapiens
tgatggtacatccta

SEQ ID NO: 1891483 - DNA, 15 bp, Homo sapiens
gatggtacatcctaa

SEQ ID NO: 1891484 - DNA, 15 bp, Homo sapiens
atggtacatcctaag

SEQ ID NO: 1891485 - DNA, 15 bp, Homo sapiens
tggtacatcctaagc

SEQ ID NO: 1891486 - DNA, 15 bp, Homo sapiens
ggtacatcctaagct

SEQ ID NO: 1891487 - DNA, 15 bp, Homo sapiens
gtacatcctaagcta

SEQ ID NO: 1891488 - DNA, 15 bp, Homo sapiens
tacatcctaagctaa

SEQ ID NO: 1891489 - DNA, 15 bp, Homo sapiens
acatcctaagctaat

SEQ ID NO: 1891490 - DNA, 15 bp, Homo sapiens
catcctaagctaatg

SEQ ID NO: 1891491 - DNA, 15 bp, Homo sapiens
atcctaagctaatgt

SEQ ID NO: 1891492 - DNA, 15 bp, Homo sapiens
tcctaagctaatgtc

SEQ ID NO: 1891493 - DNA, 15 bp, Homo sapiens
cctaagctaatgtct

SEQ ID NO: 1891494 - DNA, 15 bp, Homo sapiens
ctaagctaatgtctt

SEQ ID NO: 1891495 - DNA, 15 bp, Homo sapiens
taagctaatgtcttc

SEQ ID NO: 1891496 - DNA, 15 bp, Homo sapiens
aagctaatgtcttca

SEQ ID NO: 1891497 - DNA, 15 bp, Homo sapiens
agctaatgtcttcaa

SEQ ID NO: 1891498 - DNA, 15 bp, Homo sapiens
gctaatgtcttcaat

SEQ ID NO: 1891499 - DNA, 15 bp, Homo sapiens
ctaatgtcttcaata

SEQ ID NO: 1891500 - DNA, 15 bp, Homo sapiens
taatgtcttcaatat

SEQ ID NO: 1891501 - DNA, 15 bp, Homo sapiens
aatgtcttcaatatt

SEQ ID NO: 1891502 - DNA, 15 bp, Homo sapiens
atgtcttcaatattt

SEQ ID NO: 1891503 - DNA, 15 bp, Homo sapiens
tgtcttcaatatttt

SEQ ID NO: 1891504 - DNA, 15 bp, Homo sapiens
gtcttcaatattttt

SEQ ID NO: 1891505 - DNA, 15 bp, Homo sapiens
tcttcaatattttta

SEQ ID NO: 1891506 - DNA, 15 bp, Homo sapiens
cttcaatatttttac

SEQ ID NO: 1891507 - DNA, 15 bp, Homo sapiens
ttcaatatttttact

SEQ ID NO: 1891508 - DNA, 15 bp, Homo sapiens
tcaatatttttacta

SEQ ID NO: 1891509 - DNA, 15 bp, Homo sapiens
caatatttttactag

SEQ ID NO: 1891510 - DNA, 15 bp, Homo sapiens
aatatttttactagg

SEQ ID NO: 1891511 - DNA, 15 bp, Homo sapiens
atatttttactaggg

SEQ ID NO: 1891512 - DNA, 15 bp, Homo sapiens
tatttttactaggga

SEQ ID NO: 1891513 - DNA, 15 bp, Homo sapiens
atttttactagggaa

SEQ ID NO: 1891514 - DNA, 15 bp, Homo sapiens
tttttactagggaag

SEQ ID NO: 1891515 - DNA, 15 bp, Homo sapiens
ttttactagggaagt

SEQ ID NO: 1891516 - DNA, 15 bp, Homo sapiens
tttactagggaagtt

SEQ ID NO: 1891517 - DNA, 15 bp, Homo sapiens
ttactagggaagttc

SEQ ID NO: 1891518 - DNA, 15 bp, Homo sapiens
tactagggaagttct

SEQ ID NO: 1891519 - DNA, 15 bp, Homo sapiens
actagggaagttctt

SEQ ID NO: 1891520 - DNA, 15 bp, Homo sapiens
ctagggaagttcttt

SEQ ID NO: 1891521 - DNA, 15 bp, Homo sapiens
tagggaagttcttta

SEQ ID NO: 1891522 - DNA, 15 bp, Homo sapiens
agggaagttctttaa

SEQ ID NO: 1891523 - DNA, 15 bp, Homo sapiens
gggaagttctttaaa

SEQ ID NO: 1891524 - DNA, 15 bp, Homo sapiens
ggaagttctttaaat

SEQ ID NO: 1891525 - DNA, 15 bp, Homo sapiens
gaagttctttaaatt

SEQ ID NO: 1891526 - DNA, 15 bp, Homo sapiens
aagttctttaaattc

SEQ ID NO: 1891527 - DNA, 15 bp, Homo sapiens
agttctttaaattcg

SEQ ID NO: 1891528 - DNA, 15 bp, Homo sapiens
gttctttaaattcgt

SEQ ID NO: 1891529 - DNA, 15 bp, Homo sapiens
ttctttaaattcgta

SEQ ID NO: 1891530 - DNA, 15 bp, Homo sapiens
tctttaaattcgtag

SEQ ID NO: 1891531 - DNA, 15 bp, Homo sapiens
ctttaaattcgtagt

SEQ ID NO: 1891532 - DNA, 15 bp, Homo sapiens
tttaaattcgtagtg

SEQ ID NO: 1891533 - DNA, 15 bp, Homo sapiens
ttaaattcgtagtga

SEQ ID NO: 1891534 - DNA, 15 bp, Homo sapiens
taaattcgtagtgac

SEQ ID NO: 1891535 - DNA, 15 bp, Homo sapiens
aaattcgtagtgact

SEQ ID NO: 1891536 - DNA, 15 bp, Homo sapiens
aattcgtagtgactt

SEQ ID NO: 1891537 - DNA, 15 bp, Homo sapiens
attcgtagtgacttc

SEQ ID NO: 1891538 - DNA, 15 bp, Homo sapiens
ttcgtagtgacttca

SEQ ID NO: 1891539 - DNA, 15 bp, Homo sapiens
tcgtagtgacttcag

SEQ ID NO: 1891540 - DNA, 15 bp, Homo sapiens
cgtagtgacttcagt

SEQ ID NO: 1891541 - DNA, 15 bp, Homo sapiens
gtagtgacttcagtg

SEQ ID NO: 1891542 - DNA, 15 bp, Homo sapiens
tagtgacttcagtgt

SEQ ID NO: 1891543 - DNA, 15 bp, Homo sapiens
agtgacttcagtgtc

SEQ ID NO: 1891544 - DNA, 15 bp, Homo sapiens
gtgacttcagtgtct

SEQ ID NO: 1891545 - DNA, 15 bp, Homo sapiens
tgacttcagtgtctg

SEQ ID NO: 1891546 - DNA, 15 bp, Homo sapiens
gacttcagtgtctgc

SEQ ID NO: 1891547 - DNA, 15 bp, Homo sapiens
acttcagtgtctgca

SEQ ID NO: 1891548 - DNA, 15 bp, Homo sapiens
cttcagtgtctgcaa

SEQ ID NO: 1891549 - DNA, 15 bp, Homo sapiens
ttcagtgtctgcaag

SEQ ID NO: 1891550 - DNA, 15 bp, Homo sapiens
tcagtgtctgcaaga

SEQ ID NO: 1891551 - DNA, 15 bp, Homo sapiens
cagtgtctgcaagat

SEQ ID NO: 1891552 - DNA, 15 bp, Homo sapiens
agtgtctgcaagatg

SEQ ID NO: 1891553 - DNA, 15 bp, Homo sapiens
gtgtctgcaagatga

SEQ ID NO: 1891554 - DNA, 15 bp, Homo sapiens
tgtctgcaagatgag

SEQ ID NO: 1891555 - DNA, 15 bp, Homo sapiens
gtctgcaagatgaga

SEQ ID NO: 1891556 - DNA, 15 bp, Homo sapiens
tctgcaagatgagac

SEQ ID NO: 1891557 - DNA, 15 bp, Homo sapiens
ctgcaagatgagact

SEQ ID NO: 1891558 - DNA, 15 bp, Homo sapiens
tgcaagatgagactt

SEQ ID NO: 1891559 - DNA, 15 bp, Homo sapiens
gcaagatgagacttc

SEQ ID NO: 1891560 - DNA, 15 bp, Homo sapiens
caagatgagacttcc

SEQ ID NO: 1891561 - DNA, 15 bp, Homo sapiens
aagatgagacttcca

SEQ ID NO: 1891562 - DNA, 15 bp, Homo sapiens
agatgagacttccaa

SEQ ID NO: 1891563 - DNA, 15 bp, Homo sapiens
gatgagacttccaaa

SEQ ID NO: 1891564 - DNA, 15 bp, Homo sapiens
atgagacttccaaaa

SEQ ID NO: 1891565 - DNA, 15 bp, Homo sapiens
tgagacttccaaaac

SEQ ID NO: 1891566 - DNA, 15 bp, Homo sapiens
gagacttccaaaact

SEQ ID NO: 1891567 - DNA, 15 bp, Homo sapiens
agacttccaaaactc

SEQ ID NO: 1891568 - DNA, 15 bp, Homo sapiens
gacttccaaaactct

SEQ ID NO: 1891569 - DNA, 15 bp, Homo sapiens
acttccaaaactctg

SEQ ID NO: 1891570 - DNA, 15 bp, Homo sapiens
cttccaaaactctgg

SEQ ID NO: 1891571 - DNA, 15 bp, Homo sapiens
ttccaaaactctggc

SEQ ID NO: 1891572 - DNA, 15 bp, Homo sapiens
tccaaaactctggcc

SEQ ID NO: 1891573 - DNA, 15 bp, Homo sapiens
ccaaaactctggcct

SEQ ID NO: 1891574 - DNA, 15 bp, Homo sapiens
caaaactctggcctt

SEQ ID NO: 1891575 - DNA, 15 bp, Homo sapiens
aaaactctggccttt

SEQ ID NO: 1891576 - DNA, 15 bp, Homo sapiens
aaactctggcctttt

SEQ ID NO: 1891577 - DNA, 15 bp, Homo sapiens
aactctggccttttc

SEQ ID NO: 1891578 - DNA, 15 bp, Homo sapiens
actctggccttttca

SEQ ID NO: 1891579 - DNA, 15 bp, Homo sapiens
ctctggccttttcat

SEQ ID NO: 1891580 - DNA, 15 bp, Homo sapiens
tctggccttttcatt

SEQ ID NO: 1891581 - DNA, 15 bp, Homo sapiens
ctggccttttcattt

SEQ ID NO: 1891582 - DNA, 15 bp, Homo sapiens
tggccttttcatttc

SEQ ID NO: 1891583 - DNA, 15 bp, Homo sapiens
ggccttttcatttcc

SEQ ID NO: 1891584 - DNA, 15 bp, Homo sapiens
gccttttcatttcca

SEQ ID NO: 1891585 - DNA, 15 bp, Homo sapiens
ccttttcatttccaa

SEQ ID NO: 1891586 - DNA, 15 bp, Homo sapiens
cttttcatttccaaa

SEQ ID NO: 1891587 - DNA, 15 bp, Homo sapiens
ttttcatttccaaaa

SEQ ID NO: 1891588 - DNA, 15 bp, Homo sapiens
tttcatttccaaaac

SEQ ID NO: 1891589 - DNA, 15 bp, Homo sapiens
ttcatttccaaaacc

SEQ ID NO: 1891590 - DNA, 15 bp, Homo sapiens
tcatttccaaaaccg

SEQ ID NO: 1891591 - DNA, 15 bp, Homo sapiens
catttccaaaaccgc

SEQ ID NO: 1891592 - DNA, 15 bp, Homo sapiens
atttccaaaaccgct

SEQ ID NO: 1891593 - DNA, 15 bp, Homo sapiens
tttccaaaaccgctc

SEQ ID NO: 1891594 - DNA, 15 bp, Homo sapiens
ttccaaaaccgctct

SEQ ID NO: 1891595 - DNA, 15 bp, Homo sapiens
tccaaaaccgctctc

SEQ ID NO: 1891596 - DNA, 15 bp, Homo sapiens
ccaaaaccgctctcc

SEQ ID NO: 1891597 - DNA, 15 bp, Homo sapiens
caaaaccgctctcct

SEQ ID NO: 1891598 - DNA, 15 bp, Homo sapiens
aaaaccgctctcctc

SEQ ID NO: 1891599 - DNA, 15 bp, Homo sapiens
aaaccgctctcctct

SEQ ID NO: 1891600 - DNA, 15 bp, Homo sapiens
aaccgctctcctcta

SEQ ID NO: 1891601 - DNA, 15 bp, Homo sapiens
accgctctcctctag

SEQ ID NO: 1891602 - DNA, 15 bp, Homo sapiens
ccgctctcctctagt

SEQ ID NO: 1891603 - DNA, 15 bp, Homo sapiens
cgctctcctctagtg

SEQ ID NO: 1891604 - DNA, 15 bp, Homo sapiens
gctctcctctagtga

SEQ ID NO: 1891605 - DNA, 15 bp, Homo sapiens
ctctcctctagtgat

SEQ ID NO: 1891606 - DNA, 15 bp, Homo sapiens
tctcctctagtgata

SEQ ID NO: 1891607 - DNA, 15 bp, Homo sapiens
ctcctctagtgatat

SEQ ID NO: 1891608 - DNA, 15 bp, Homo sapiens
tcctctagtgatatt

SEQ ID NO: 1891609 - DNA, 15 bp, Homo sapiens
cctctagtgatattg

SEQ ID NO: 1891610 - DNA, 15 bp, Homo sapiens
ctctagtgatattgt

SEQ ID NO: 1891611 - DNA, 15 bp, Homo sapiens
tctagtgatattgtc

SEQ ID NO: 1891612 - DNA, 15 bp, Homo sapiens
ctagtgatattgtcc

SEQ ID NO: 1891613 - DNA, 15 bp, Homo sapiens
tagtgatattgtcca

SEQ ID NO: 1891614 - DNA, 15 bp, Homo sapiens
agtgatattgtccat

SEQ ID NO: 1891615 - DNA, 15 bp, Homo sapiens
gtgatattgtccatc

SEQ ID NO: 1891616 - DNA, 15 bp, Homo sapiens
tgatattgtccatct

SEQ ID NO: 1891617 - DNA, 15 bp, Homo sapiens
gatattgtccatctt

SEQ ID NO: 1891618 - DNA, 15 bp, Homo sapiens
atattgtccatcttc

SEQ ID NO: 1891619 - DNA, 15 bp, Homo sapiens
tattgtccatcttcc

SEQ ID NO: 1891620 - DNA, 15 bp, Homo sapiens
attgtccatcttcct

SEQ ID NO: 1891621 - DNA, 15 bp, Homo sapiens
ttgtccatcttccta

SEQ ID NO: 1891622 - DNA, 15 bp, Homo sapiens
tgtccatcttcctat

SEQ ID NO: 1891623 - DNA, 15 bp, Homo sapiens
gtccatcttcctatc

SEQ ID NO: 1891624 - DNA, 15 bp, Homo sapiens
tccatcttcctatct

SEQ ID NO: 1891625 - DNA, 15 bp, Homo sapiens
ccatcttcctatctc

SEQ ID NO: 1891626 - DNA, 15 bp, Homo sapiens
catcttcctatctca

SEQ ID NO: 1891627 - DNA, 15 bp, Homo sapiens
atcttcctatctcag

SEQ ID NO: 1891628 - DNA, 15 bp, Homo sapiens
tcttcctatctcagc

SEQ ID NO: 1891629 - DNA, 15 bp, Homo sapiens
cttcctatctcagcc

SEQ ID NO: 1891630 - DNA, 15 bp, Homo sapiens
ttcctatctcagcca

SEQ ID NO: 1891631 - DNA, 15 bp, Homo sapiens
tcctatctcagccac

SEQ ID NO: 1891632 - DNA, 15 bp, Homo sapiens
cctatctcagccact

SEQ ID NO: 1891633 - DNA, 15 bp, Homo sapiens
ctatctcagccactc

SEQ ID NO: 1891634 - DNA, 15 bp, Homo sapiens
tatctcagccactca

SEQ ID NO: 1891635 - DNA, 15 bp, Homo sapiens
atctcagccactcac

SEQ ID NO: 1891636 - DNA, 15 bp, Homo sapiens
tctcagccactcact

SEQ ID NO: 1891637 - DNA, 15 bp, Homo sapiens
ctcagccactcactt

SEQ ID NO: 1891638 - DNA, 15 bp, Homo sapiens
tcagccactcacttc

SEQ ID NO: 1891639 - DNA, 15 bp, Homo sapiens
cagccactcacttcc

SEQ ID NO: 1891640 - DNA, 15 bp, Homo sapiens
agccactcacttcca

SEQ ID NO: 1891641 - DNA, 15 bp, Homo sapiens
gccactcacttccag

SEQ ID NO: 1891642 - DNA, 15 bp, Homo sapiens
ccactcacttccagg

SEQ ID NO: 1891643 - DNA, 15 bp, Homo sapiens
cactcacttccaggg

SEQ ID NO: 1891644 - DNA, 15 bp, Homo sapiens
actcacttccagggt

SEQ ID NO: 1891645 - DNA, 15 bp, Homo sapiens
ctcacttccagggtc

SEQ ID NO: 1891646 - DNA, 15 bp, Homo sapiens
tcacttccagggtca

SEQ ID NO: 1891647 - DNA, 15 bp, Homo sapiens
cacttccagggtcat

SEQ ID NO: 1891648 - DNA, 15 bp, Homo sapiens
acttccagggtcata

SEQ ID NO: 1891649 - DNA, 15 bp, Homo sapiens
cttccagggtcatac

SEQ ID NO: 1891650 - DNA, 15 bp, Homo sapiens
ttccagggtcatacc

SEQ ID NO: 1891651 - DNA, 15 bp, Homo sapiens
tccagggtcatacct

SEQ ID NO: 1891652 - DNA, 15 bp, Homo sapiens
ccagggtcatacctc

SEQ ID NO: 1891653 - DNA, 15 bp, Homo sapiens
cagggtcatacctcc

SEQ ID NO: 1891654 - DNA, 15 bp, Homo sapiens
agggtcatacctcca

SEQ ID NO: 1891655 - DNA, 15 bp, Homo sapiens
gggtcatacctccag

SEQ ID NO: 1891656 - DNA, 15 bp, Homo sapiens
ggtcatacctccagg

SEQ ID NO: 1891657 - DNA, 15 bp, Homo sapiens
gtcatacctccaggc

SEQ ID NO: 1891658 - DNA, 15 bp, Homo sapiens
tcatacctccaggct

SEQ ID NO: 1891659 - DNA, 15 bp, Homo sapiens
catacctccaggctt

SEQ ID NO: 1891660 - DNA, 15 bp, Homo sapiens
atacctccaggcttg

SEQ ID NO: 1891661 - DNA, 15 bp, Homo sapiens
tacctccaggcttgt

SEQ ID NO: 1891662 - DNA, 15 bp, Homo sapiens
acctccaggcttgtc

SEQ ID NO: 1891663 - DNA, 15 bp, Homo sapiens
cctccaggcttgtcc

SEQ ID NO: 1891664 - DNA, 15 bp, Homo sapiens
ctccaggcttgtcct

SEQ ID NO: 1891665 - DNA, 15 bp, Homo sapiens
tccaggcttgtcctc

SEQ ID NO: 1891666 - DNA, 15 bp, Homo sapiens
ccaggcttgtcctcc

SEQ ID NO: 1891667 - DNA, 15 bp, Homo sapiens
caggcttgtcctcca

SEQ ID NO: 1891668 - DNA, 15 bp, Homo sapiens
aggcttgtcctccaa

SEQ ID NO: 1891669 - DNA, 15 bp, Homo sapiens
ggcttgtcctccaaa

SEQ ID NO: 1891670 - DNA, 15 bp, Homo sapiens
gcttgtcctccaaac

SEQ ID NO: 1891671 - DNA, 15 bp, Homo sapiens
cttgtcctccaaacc

SEQ ID NO: 1891672 - DNA, 15 bp, Homo sapiens
ttgtcctccaaacct

SEQ ID NO: 1891673 - DNA, 15 bp, Homo sapiens
tgtcctccaaacctg

SEQ ID NO: 1891674 - DNA, 15 bp, Homo sapiens
gtcctccaaacctgc

SEQ ID NO: 1891675 - DNA, 15 bp, Homo sapiens
tcctccaaacctgca

SEQ ID NO: 1891676 - DNA, 15 bp, Homo sapiens
cctccaaacctgcaa

SEQ ID NO: 1891677 - DNA, 15 bp, Homo sapiens
ctccaaacctgcaaa

SEQ ID NO: 1891678 - DNA, 15 bp, Homo sapiens
tccaaacctgcaaaa

SEQ ID NO: 1891679 - DNA, 15 bp, Homo sapiens
ccaaacctgcaaaac

SEQ ID NO: 1891680 - DNA, 15 bp, Homo sapiens
caaacctgcaaaaca

SEQ ID NO: 1891681 - DNA, 15 bp, Homo sapiens
aaacctgcaaaacac

SEQ ID NO: 1891682 - DNA, 15 bp, Homo sapiens
aacctgcaaaacacc

SEQ ID NO: 1891683 - DNA, 15 bp, Homo sapiens
acctgcaaaacacct

SEQ ID NO: 1891684 - DNA, 15 bp, Homo sapiens
cctgcaaaacacctg

SEQ ID NO: 1891685 - DNA, 15 bp, Homo sapiens
ctgcaaaacacctgt

SEQ ID NO: 1891686 - DNA, 15 bp, Homo sapiens
tgcaaaacacctgta

SEQ ID NO: 1891687 - DNA, 15 bp, Homo sapiens
gcaaaacacctgtaa

SEQ ID NO: 1891688 - DNA, 15 bp, Homo sapiens
caaaacacctgtaat

SEQ ID NO: 1891689 - DNA, 15 bp, Homo sapiens
aaaacacctgtaatc

SEQ ID NO: 1891690 - DNA, 15 bp, Homo sapiens
aaacacctgtaatct

SEQ ID NO: 1891691 - DNA, 15 bp, Homo sapiens
aacacctgtaatcta

SEQ ID NO: 1891692 - DNA, 15 bp, Homo sapiens
acacctgtaatctaa

SEQ ID NO: 1891693 - DNA, 15 bp, Homo sapiens
cacctgtaatctaaa

SEQ ID NO: 1891694 - DNA, 15 bp, Homo sapiens
acctgtaatctaaat

SEQ ID NO: 1891695 - DNA, 15 bp, Homo sapiens
cctgtaatctaaatt

SEQ ID NO: 1891696 - DNA, 15 bp, Homo sapiens
ctgtaatctaaattt

SEQ ID NO: 1891697 - DNA, 15 bp, Homo sapiens
tgtaatctaaatttg

SEQ ID NO: 1891698 - DNA, 15 bp, Homo sapiens
gtaatctaaatttga

SEQ ID NO: 1891699 - DNA, 15 bp, Homo sapiens
taatctaaatttgaa

SEQ ID NO: 1891700 - DNA, 15 bp, Homo sapiens
aatctaaatttgaag

SEQ ID NO: 1891701 - DNA, 15 bp, Homo sapiens
atctaaatttgaagc

SEQ ID NO: 1891702 - DNA, 15 bp, Homo sapiens
tctaaatttgaagca

SEQ ID NO: 1891703 - DNA, 15 bp, Homo sapiens
ctaaatttgaagcat

SEQ ID NO: 1891704 - DNA, 15 bp, Homo sapiens
taaatttgaagcatc

SEQ ID NO: 1891705 - DNA, 15 bp, Homo sapiens
aaatttgaagcatcc

SEQ ID NO: 1891706 - DNA, 15 bp, Homo sapiens
aatttgaagcatccc

SEQ ID NO: 1891707 - DNA, 15 bp, Homo sapiens
atttgaagcatccca

SEQ ID NO: 1891708 - DNA, 15 bp, Homo sapiens
tttgaagcatcccat

SEQ ID NO: 1891709 - DNA, 15 bp, Homo sapiens
ttgaagcatcccatt

SEQ ID NO: 1891710 - DNA, 15 bp, Homo sapiens
tgaagcatcccattt

SEQ ID NO: 1891711 - DNA, 15 bp, Homo sapiens
gaagcatcccatttt

SEQ ID NO: 1891712 - DNA, 15 bp, Homo sapiens
aagcatcccattttc

SEQ ID NO: 1891713 - DNA, 15 bp, Homo sapiens
agcatcccattttct

SEQ ID NO: 1891714 - DNA, 15 bp, Homo sapiens
gcatcccattttctg

SEQ ID NO: 1891715 - DNA, 15 bp, Homo sapiens
catcccattttctga

SEQ ID NO: 1891716 - DNA, 15 bp, Homo sapiens
atcccattttctgac

SEQ ID NO: 1891717 - DNA, 15 bp, Homo sapiens
tcccattttctgacc

SEQ ID NO: 1891718 - DNA, 15 bp, Homo sapiens
cccattttctgacca

SEQ ID NO: 1891719 - DNA, 15 bp, Homo sapiens
ccattttctgaccac

SEQ ID NO: 1891720 - DNA, 15 bp, Homo sapiens
cattttctgaccacc

SEQ ID NO: 1891721 - DNA, 15 bp, Homo sapiens
attttctgaccacca

SEQ ID NO: 1891722 - DNA, 15 bp, Homo sapiens
ttttctgaccaccac

SEQ ID NO: 1891723 - DNA, 15 bp, Homo sapiens
tttctgaccaccact

SEQ ID NO: 1891724 - DNA, 15 bp, Homo sapiens
ttctgaccaccactt

SEQ ID NO: 1891725 - DNA, 15 bp, Homo sapiens
tctgaccaccacttt

SEQ ID NO: 1891726 - DNA, 15 bp, Homo sapiens
ctgaccaccactttc

SEQ ID NO: 1891727 - DNA, 15 bp, Homo sapiens
tgaccaccactttct

SEQ ID NO: 1891728 - DNA, 15 bp, Homo sapiens
gaccaccactttctg

SEQ ID NO: 1891729 - DNA, 15 bp, Homo sapiens
accaccactttctgt

SEQ ID NO: 1891730 - DNA, 15 bp, Homo sapiens
ccaccactttctgta

SEQ ID NO: 1891731 - DNA, 15 bp, Homo sapiens
caccactttctgtat

SEQ ID NO: 1891732 - DNA, 15 bp, Homo sapiens
accactttctgtatc

SEQ ID NO: 1891733 - DNA, 15 bp, Homo sapiens
ccactttctgtatct

SEQ ID NO: 1891734 - DNA, 15 bp, Homo sapiens
cactttctgtatctc

SEQ ID NO: 1891735 - DNA, 15 bp, Homo sapiens
actttctgtatctcc

SEQ ID NO: 1891736 - DNA, 15 bp, Homo sapiens
ctttctgtatctcca

SEQ ID NO: 1891737 - DNA, 15 bp, Homo sapiens
tttctgtatctccag

SEQ ID NO: 1891738 - DNA, 15 bp, Homo sapiens
ttctgtatctccagt

SEQ ID NO: 1891739 - DNA, 15 bp, Homo sapiens
tctgtatctccagtt

SEQ ID NO: 1891740 - DNA, 15 bp, Homo sapiens
ctgtatctccagttc

SEQ ID NO: 1891741 - DNA, 15 bp, Homo sapiens
tgtatctccagttca

SEQ ID NO: 1891742 - DNA, 15 bp, Homo sapiens
gtatctccagttcat

SEQ ID NO: 1891743 - DNA, 15 bp, Homo sapiens
tatctccagttcatt

SEQ ID NO: 1891744 - DNA, 15 bp, Homo sapiens
atctccagttcattt

SEQ ID NO: 1891745 - DNA, 15 bp, Homo sapiens
tctccagttcatttg

SEQ ID NO: 1891746 - DNA, 15 bp, Homo sapiens
ctccagttcatttgc

SEQ ID NO: 1891747 - DNA, 15 bp, Homo sapiens
tccagttcatttgct

SEQ ID NO: 1891748 - DNA, 15 bp, Homo sapiens
ccagttcatttgctc

SEQ ID NO: 1891749 - DNA, 15 bp, Homo sapiens
cagttcatttgctct

SEQ ID NO: 1891750 - DNA, 15 bp, Homo sapiens
agttcatttgctctt

SEQ ID NO: 1891751 - DNA, 15 bp, Homo sapiens
gttcatttgctctta

SEQ ID NO: 1891752 - DNA, 15 bp, Homo sapiens
ttcatttgctcttac

SEQ ID NO: 1891753 - DNA, 15 bp, Homo sapiens
tcatttgctcttaca

SEQ ID NO: 1891754 - DNA, 15 bp, Homo sapiens
catttgctcttacac

SEQ ID NO: 1891755 - DNA, 15 bp, Homo sapiens
atttgctcttacaca

SEQ ID NO: 1891756 - DNA, 15 bp, Homo sapiens
tttgctcttacacat

SEQ ID NO: 1891757 - DNA, 15 bp, Homo sapiens
ttgctcttacacatt

SEQ ID NO: 1891758 - DNA, 15 bp, Homo sapiens
tgctcttacacatta

SEQ ID NO: 1891759 - DNA, 15 bp, Homo sapiens
gctcttacacattac

SEQ ID NO: 1891760 - DNA, 15 bp, Homo sapiens
ctcttacacattacc

SEQ ID NO: 1891761 - DNA, 15 bp, Homo sapiens
tcttacacattacca

SEQ ID NO: 1891762 - DNA, 15 bp, Homo sapiens
cttacacattaccaa

SEQ ID NO: 1891763 - DNA, 15 bp, Homo sapiens
ttacacattaccaaa

SEQ ID NO: 1891764 - DNA, 15 bp, Homo sapiens
tacacattaccaaaa

SEQ ID NO: 1891765 - DNA, 15 bp, Homo sapiens
acacattaccaaaaa

SEQ ID NO: 1891766 - DNA, 15 bp, Homo sapiens
cacattaccaaaaac

SEQ ID NO: 1891767 - DNA, 15 bp, Homo sapiens
acattaccaaaaacc

SEQ ID NO: 1891768 - DNA, 15 bp, Homo sapiens
cattaccaaaaacca

SEQ ID NO: 1891769 - DNA, 15 bp, Homo sapiens
attaccaaaaaccat

SEQ ID NO: 1891770 - DNA, 15 bp, Homo sapiens
ttaccaaaaaccatt

SEQ ID NO: 1891771 - DNA, 15 bp, Homo sapiens
taccaaaaaccattg

SEQ ID NO: 1891772 - DNA, 15 bp, Homo sapiens
accaaaaaccattga

SEQ ID NO: 1891773 - DNA, 15 bp, Homo sapiens
ccaaaaaccattgat

SEQ ID NO: 1891774 - DNA, 15 bp, Homo sapiens
caaaaaccattgatg

SEQ ID NO: 1891775 - DNA, 15 bp, Homo sapiens
aaaaaccattgatgg

SEQ ID NO: 1891776 - DNA, 15 bp, Homo sapiens
aaaaccattgatggc

SEQ ID NO: 1891777 - DNA, 15 bp, Homo sapiens
aaaccattgatggcc

SEQ ID NO: 1891778 - DNA, 15 bp, Homo sapiens
aaccattgatggccc

SEQ ID NO: 1891779 - DNA, 15 bp, Homo sapiens
accattgatggccca

SEQ ID NO: 1891780 - DNA, 15 bp, Homo sapiens
ccattgatggcccaa

SEQ ID NO: 1891781 - DNA, 15 bp, Homo sapiens
cattgatggcccaaa

SEQ ID NO: 1891782 - DNA, 15 bp, Homo sapiens
attgatggcccaaag

SEQ ID NO: 1891783 - DNA, 15 bp, Homo sapiens
ttgatggcccaaaga

SEQ ID NO: 1891784 - DNA, 15 bp, Homo sapiens
tgatggcccaaagag

SEQ ID NO: 1891785 - DNA, 15 bp, Homo sapiens
gatggcccaaagagc

SEQ ID NO: 1891786 - DNA, 15 bp, Homo sapiens
atggcccaaagagcc

SEQ ID NO: 1891787 - DNA, 15 bp, Homo sapiens
tggcccaaagagcca

SEQ ID NO: 1891788 - DNA, 15 bp, Homo sapiens
ggcccaaagagccac

SEQ ID NO: 1891789 - DNA, 15 bp, Homo sapiens
gcccaaagagccaca

SEQ ID NO: 1891790 - DNA, 15 bp, Homo sapiens
cccaaagagccacaa

SEQ ID NO: 1891791 - DNA, 15 bp, Homo sapiens
ccaaagagccacaac

SEQ ID NO: 1891792 - DNA, 15 bp, Homo sapiens
caaagagccacaact

SEQ ID NO: 1891793 - DNA, 15 bp, Homo sapiens
aaagagccacaactc

SEQ ID NO: 1891794 - DNA, 15 bp, Homo sapiens
aagagccacaactca

SEQ ID NO: 1891795 - DNA, 15 bp, Homo sapiens
agagccacaactcat

SEQ ID NO: 1891796 - DNA, 15 bp, Homo sapiens
gagccacaactcatt

SEQ ID NO: 1891797 - DNA, 15 bp, Homo sapiens
agccacaactcattg

SEQ ID NO: 1891798 - DNA, 15 bp, Homo sapiens
gccacaactcattga

SEQ ID NO: 1891799 - DNA, 15 bp, Homo sapiens
ccacaactcattgat

SEQ ID NO: 1891800 - DNA, 15 bp, Homo sapiens
cacaactcattgatc

SEQ ID NO: 1891801 - DNA, 15 bp, Homo sapiens
acaactcattgatca

SEQ ID NO: 1891802 - DNA, 15 bp, Homo sapiens
caactcattgatcat

SEQ ID NO: 1891803 - DNA, 15 bp, Homo sapiens
aactcattgatcata

SEQ ID NO: 1891804 - DNA, 15 bp, Homo sapiens
actcattgatcatac

SEQ ID NO: 1891805 - DNA, 15 bp, Homo sapiens
ctcattgatcatact

SEQ ID NO: 1891806 - DNA, 15 bp, Homo sapiens
tcattgatcatacta

SEQ ID NO: 1891807 - DNA, 15 bp, Homo sapiens
cattgatcatactat

SEQ ID NO: 1891808 - DNA, 15 bp, Homo sapiens
attgatcatactatt

SEQ ID NO: 1891809 - DNA, 15 bp, Homo sapiens
ttgatcatactattc

SEQ ID NO: 1891810 - DNA, 15 bp, Homo sapiens
tgatcatactattct

SEQ ID NO: 1891811 - DNA, 15 bp, Homo sapiens
gatcatactattctt

SEQ ID NO: 1891812 - DNA, 15 bp, Homo sapiens
atcatactattcttt

SEQ ID NO: 1891813 - DNA, 15 bp, Homo sapiens
tcatactattctttt

SEQ ID NO: 1891814 - DNA, 15 bp, Homo sapiens
catactattctttta

SEQ ID NO: 1891815 - DNA, 15 bp, Homo sapiens
atactattcttttat

SEQ ID NO: 1891816 - DNA, 15 bp, Homo sapiens
tactattcttttatt

SEQ ID NO: 1891817 - DNA, 15 bp, Homo sapiens
actattcttttattg

SEQ ID NO: 1891818 - DNA, 15 bp, Homo sapiens
ctattcttttattgt

SEQ ID NO: 1891819 - DNA, 15 bp, Homo sapiens
tattcttttattgtc

SEQ ID NO: 1891820 - DNA, 15 bp, Homo sapiens
attcttttattgtcc

SEQ ID NO: 1891821 - DNA, 15 bp, Homo sapiens
ttcttttattgtccc

SEQ ID NO: 1891822 - DNA, 15 bp, Homo sapiens
tcttttattgtccct

SEQ ID NO: 1891823 - DNA, 15 bp, Homo sapiens
cttttattgtccctt

SEQ ID NO: 1891824 - DNA, 15 bp, Homo sapiens
ttttattgtcccttg

SEQ ID NO: 1891825 - DNA, 15 bp, Homo sapiens
tttattgtcccttgc

SEQ ID NO: 1891826 - DNA, 15 bp, Homo sapiens
ttattgtcccttgcc

SEQ ID NO: 1891827 - DNA, 15 bp, Homo sapiens
tattgtcccttgcct

SEQ ID NO: 1891828 - DNA, 15 bp, Homo sapiens
attgtcccttgcctc

SEQ ID NO: 1891829 - DNA, 15 bp, Homo sapiens
ttgtcccttgcctcc

SEQ ID NO: 1891830 - DNA, 15 bp, Homo sapiens
tgtcccttgcctcct

SEQ ID NO: 1891831 - DNA, 15 bp, Homo sapiens
gtcccttgcctcctt

SEQ ID NO: 1891832 - DNA, 15 bp, Homo sapiens
tcccttgcctcctta

SEQ ID NO: 1891833 - DNA, 15 bp, Homo sapiens
cccttgcctccttat

SEQ ID NO: 1891834 - DNA, 15 bp, Homo sapiens
ccttgcctccttatt

SEQ ID NO: 1891835 - DNA, 15 bp, Homo sapiens
cttgcctccttattt

SEQ ID NO: 1891836 - DNA, 15 bp, Homo sapiens
ttgcctccttatttt

SEQ ID NO: 1891837 - DNA, 15 bp, Homo sapiens
tgcctccttattttt

SEQ ID NO: 1891838 - DNA, 15 bp, Homo sapiens
gcctccttatttttc

SEQ ID NO: 1891839 - DNA, 15 bp, Homo sapiens
cctccttatttttcc

SEQ ID NO: 1891840 - DNA, 15 bp, Homo sapiens
ctccttatttttcct

SEQ ID NO: 1891841 - DNA, 15 bp, Homo sapiens
tccttatttttcctt

SEQ ID NO: 1891842 - DNA, 15 bp, Homo sapiens
ccttatttttccttc

SEQ ID NO: 1891843 - DNA, 15 bp, Homo sapiens
ttatttttccttctc

SEQ ID NO: 1891844 - DNA, 15 bp, Homo sapiens
tatttttccttctct

SEQ ID NO: 1891845 - DNA, 15 bp, Homo sapiens
atttttccttctctc

SEQ ID NO: 1891846 - DNA, 15 bp, Homo sapiens
tttttccttctctct

SEQ ID NO: 1891847 - DNA, 15 bp, Homo sapiens
ttttccttctctctt

SEQ ID NO: 1891848 - DNA, 15 bp, Homo sapiens
tttccttctctctta

SEQ ID NO: 1891849 - DNA, 15 bp, Homo sapiens
ttccttctctcttac

SEQ ID NO: 1891850 - DNA, 15 bp, Homo sapiens
tccttctctcttacc

SEQ ID NO: 1891851 - DNA, 15 bp, Homo sapiens
ccttctctcttaccc

SEQ ID NO: 1891852 - DNA, 15 bp, Homo sapiens
cttctctcttaccca

SEQ ID NO: 1891853 - DNA, 15 bp, Homo sapiens
ttctctcttacccag

SEQ ID NO: 1891854 - DNA, 15 bp, Homo sapiens
tctctcttacccagc

SEQ ID NO: 1891855 - DNA, 15 bp, Homo sapiens
ctctcttacccagct

SEQ ID NO: 1891856 - DNA, 15 bp, Homo sapiens
tctcttacccagctt

SEQ ID NO: 1891857 - DNA, 15 bp, Homo sapiens
ctcttacccagctta

SEQ ID NO: 1891858 - DNA, 15 bp, Homo sapiens
tcttacccagcttaa

SEQ ID NO: 1891859 - DNA, 15 bp, Homo sapiens
cttacccagcttaaa

SEQ ID NO: 1891860 - DNA, 15 bp, Homo sapiens
ttacccagcttaaag

SEQ ID NO: 1891861 - DNA, 15 bp, Homo sapiens
tacccagcttaaagt

SEQ ID NO: 1891862 - DNA, 15 bp, Homo sapiens
acccagcttaaagtg

SEQ ID NO: 1891863 - DNA, 15 bp, Homo sapiens
cccagcttaaagtgc

SEQ ID NO: 1891864 - DNA, 15 bp, Homo sapiens
ccagcttaaagtgca

SEQ ID NO: 1891865 - DNA, 15 bp, Homo sapiens
cagcttaaagtgcat

SEQ ID NO: 1891866 - DNA, 15 bp, Homo sapiens
agcttaaagtgcata

SEQ ID NO: 1891867 - DNA, 15 bp, Homo sapiens
gcttaaagtgcatac

SEQ ID NO: 1891868 - DNA, 15 bp, Homo sapiens
cttaaagtgcatacc

SEQ ID NO: 1891869 - DNA, 15 bp, Homo sapiens
ttaaagtgcataccc

SEQ ID NO: 1891870 - DNA, 15 bp, Homo sapiens
taaagtgcataccca

SEQ ID NO: 1891871 - DNA, 15 bp, Homo sapiens
aaagtgcatacccaa

SEQ ID NO: 1891872 - DNA, 15 bp, Homo sapiens
aagtgcatacccaat

SEQ ID NO: 1891873 - DNA, 15 bp, Homo sapiens
agtgcatacccaatt

SEQ ID NO: 1891874 - DNA, 15 bp, Homo sapiens
gtgcatacccaatta

SEQ ID NO: 1891875 - DNA, 15 bp, Homo sapiens
tgcatacccaattat

SEQ ID NO: 1891876 - DNA, 15 bp, Homo sapiens
gcatacccaattatt

SEQ ID NO: 1891877 - DNA, 15 bp, Homo sapiens
catacccaattattt

SEQ ID NO: 1891878 - DNA, 15 bp, Homo sapiens
atacccaattatttg

SEQ ID NO: 1891879 - DNA, 15 bp, Homo sapiens
tacccaattatttgt

SEQ ID NO: 1891880 - DNA, 15 bp, Homo sapiens
acccaattatttgta

SEQ ID NO: 1891881 - DNA, 15 bp, Homo sapiens
cccaattatttgtat

SEQ ID NO: 1891882 - DNA, 15 bp, Homo sapiens
ccaattatttgtatc

SEQ ID NO: 1891883 - DNA, 15 bp, Homo sapiens
caattatttgtatcc

SEQ ID NO: 1891884 - DNA, 15 bp, Homo sapiens
aattatttgtatccc

SEQ ID NO: 1891885 - DNA, 15 bp, Homo sapiens
attatttgtatccct

SEQ ID NO: 1891886 - DNA, 15 bp, Homo sapiens
ttatttgtatccctc

SEQ ID NO: 1891887 - DNA, 15 bp, Homo sapiens
tatttgtatccctcc

SEQ ID NO: 1891888 - DNA, 15 bp, Homo sapiens
atttgtatccctccc

SEQ ID NO: 1891889 - DNA, 15 bp, Homo sapiens
tttgtatccctccct

SEQ ID NO: 1891890 - DNA, 15 bp, Homo sapiens
ttgtatccctccctt

SEQ ID NO: 1891891 - DNA, 15 bp, Homo sapiens
tgtatccctcccttg

SEQ ID NO: 1891892 - DNA, 15 bp, Homo sapiens
gtatccctcccttgc

SEQ ID NO: 1891893 - DNA, 15 bp, Homo sapiens
tatccctcccttgca

SEQ ID NO: 1891894 - DNA, 15 bp, Homo sapiens
atccctcccttgcat

SEQ ID NO: 1891895 - DNA, 15 bp, Homo sapiens
tccctcccttgcatg

SEQ ID NO: 1891896 - DNA, 15 bp, Homo sapiens
ccctcccttgcatgc

SEQ ID NO: 1891897 - DNA, 15 bp, Homo sapiens
cctcccttgcatgca

SEQ ID NO: 1891898 - DNA, 15 bp, Homo sapiens
ctcccttgcatgcac

SEQ ID NO: 1891899 - DNA, 15 bp, Homo sapiens
tcccttgcatgcact

SEQ ID NO: 1891900 - DNA, 15 bp, Homo sapiens
cccttgcatgcactc

SEQ ID NO: 1891901 - DNA, 15 bp, Homo sapiens
ccttgcatgcactct

SEQ ID NO: 1891902 - DNA, 15 bp, Homo sapiens
cttgcatgcactctc

SEQ ID NO: 1891903 - DNA, 15 bp, Homo sapiens
ttgcatgcactctca

SEQ ID NO: 1891904 - DNA, 15 bp, Homo sapiens
tgcatgcactctcaa

SEQ ID NO: 1891905 - DNA, 15 bp, Homo sapiens
gcatgcactctcaat

SEQ ID NO: 1891906 - DNA, 15 bp, Homo sapiens
catgcactctcaatt

SEQ ID NO: 1891907 - DNA, 15 bp, Homo sapiens
atgcactctcaattc

SEQ ID NO: 1891908 - DNA, 15 bp, Homo sapiens
tgcactctcaattct

SEQ ID NO: 1891909 - DNA, 15 bp, Homo sapiens
gcactctcaattctc

SEQ ID NO: 1891910 - DNA, 15 bp, Homo sapiens
cactctcaattctct

SEQ ID NO: 1891911 - DNA, 15 bp, Homo sapiens
actctcaattctctt

SEQ ID NO: 1891912 - DNA, 15 bp, Homo sapiens
ctctcaattctcttg

SEQ ID NO: 1891913 - DNA, 15 bp, Homo sapiens
tctcaattctcttgc

SEQ ID NO: 1891914 - DNA, 15 bp, Homo sapiens
ctcaattctcttgcc

SEQ ID NO: 1891915 - DNA, 15 bp, Homo sapiens
tcaattctcttgccc

SEQ ID NO: 1891916 - DNA, 15 bp, Homo sapiens
caattctcttgcccc

SEQ ID NO: 1891917 - DNA, 15 bp, Homo sapiens
aattctcttgcccct

SEQ ID NO: 1891918 - DNA, 15 bp, Homo sapiens
attctcttgcccctc

SEQ ID NO: 1891919 - DNA, 15 bp, Homo sapiens
ttctcttgcccctct

SEQ ID NO: 1891920 - DNA, 15 bp, Homo sapiens
tctcttgcccctctt

SEQ ID NO: 1891921 - DNA, 15 bp, Homo sapiens
ctcttgcccctctta

SEQ ID NO: 1891922 - DNA, 15 bp, Homo sapiens
tcttgcccctcttat

SEQ ID NO: 1891923 - DNA, 15 bp, Homo sapiens
cttgcccctcttata

SEQ ID NO: 1891924 - DNA, 15 bp, Homo sapiens
ttgcccctcttatac

SEQ ID NO: 1891925 - DNA, 15 bp, Homo sapiens
tgcccctcttatact

SEQ ID NO: 1891926 - DNA, 15 bp, Homo sapiens
gcccctcttatactt

SEQ ID NO: 1891927 - DNA, 15 bp, Homo sapiens
cccctcttatacttc

SEQ ID NO: 1891928 - DNA, 15 bp, Homo sapiens
ccctcttatacttca

SEQ ID NO: 1891929 - DNA, 15 bp, Homo sapiens
cctcttatacttcat

SEQ ID NO: 1891930 - DNA, 15 bp, Homo sapiens
ctcttatacttcatt

SEQ ID NO: 1891931 - DNA, 15 bp, Homo sapiens
tcttatacttcatta

SEQ ID NO: 1891932 - DNA, 15 bp, Homo sapiens
cttatacttcattac

SEQ ID NO: 1891933 - DNA, 15 bp, Homo sapiens
ttatacttcattaca

SEQ ID NO: 1891934 - DNA, 15 bp, Homo sapiens
tatacttcattacaa

SEQ ID NO: 1891935 - DNA, 15 bp, Homo sapiens
atacttcattacaat

SEQ ID NO: 1891936 - DNA, 15 bp, Homo sapiens
tacttcattacaatc

SEQ ID NO: 1891937 - DNA, 15 bp, Homo sapiens
acttcattacaatca

SEQ ID NO: 1891938 - DNA, 15 bp, Homo sapiens
cttcattacaatcat

SEQ ID NO: 1891939 - DNA, 15 bp, Homo sapiens
ttcattacaatcatt

SEQ ID NO: 1891940 - DNA, 15 bp, Homo sapiens
tcattacaatcattc

SEQ ID NO: 1891941 - DNA, 15 bp, Homo sapiens
cattacaatcattca

SEQ ID NO: 1891942 - DNA, 15 bp, Homo sapiens
attacaatcattcag

SEQ ID NO: 1891943 - DNA, 15 bp, Homo sapiens
ttacaatcattcaga

SEQ ID NO: 1891944 - DNA, 15 bp, Homo sapiens
tacaatcattcagaa

SEQ ID NO: 1891945 - DNA, 15 bp, Homo sapiens
acaatcattcagaaa

SEQ ID NO: 1891946 - DNA, 15 bp, Homo sapiens
caatcattcagaaaa

SEQ ID NO: 1891947 - DNA, 15 bp, Homo sapiens
aatcattcagaaaaa

SEQ ID NO: 1891948 - DNA, 15 bp, Homo sapiens
atcattcagaaaaac

SEQ ID NO: 1891949 - DNA, 15 bp, Homo sapiens
tcattcagaaaaacc

SEQ ID NO: 1891950 - DNA, 15 bp, Homo sapiens
cattcagaaaaacct

SEQ ID NO: 1891951 - DNA, 15 bp, Homo sapiens
attcagaaaaacctc

SEQ ID NO: 1891952 - DNA, 15 bp, Homo sapiens
ttcagaaaaacctca

SEQ ID NO: 1891953 - DNA, 15 bp, Homo sapiens
tcagaaaaacctcaa

SEQ ID NO: 1891954 - DNA, 15 bp, Homo sapiens
cagaaaaacctcaac

SEQ ID NO: 1891955 - DNA, 15 bp, Homo sapiens
agaaaaacctcaacc

SEQ ID NO: 1891956 - DNA, 15 bp, Homo sapiens
gaaaaacctcaaccc

SEQ ID NO: 1891957 - DNA, 15 bp, Homo sapiens
aaaaacctcaaccct

SEQ ID NO: 1891958 - DNA, 15 bp, Homo sapiens
aaaacctcaacccta

SEQ ID NO: 1891959 - DNA, 15 bp, Homo sapiens
aaacctcaaccctag

SEQ ID NO: 1891960 - DNA, 15 bp, Homo sapiens
aacctcaaccctagt

SEQ ID NO: 1891961 - DNA, 15 bp, Homo sapiens
acctcaaccctagtt

SEQ ID NO: 1891962 - DNA, 15 bp, Homo sapiens
cctcaaccctagtta

SEQ ID NO: 1891963 - DNA, 15 bp, Homo sapiens
ctcaaccctagttaa

SEQ ID NO: 1891964 - DNA, 15 bp, Homo sapiens
tcaaccctagttaaa

SEQ ID NO: 1891965 - DNA, 15 bp, Homo sapiens
caaccctagttaaat

SEQ ID NO: 1891966 - DNA, 15 bp, Homo sapiens
aaccctagttaaatt

SEQ ID NO: 1891967 - DNA, 15 bp, Homo sapiens
accctagttaaattc

SEQ ID NO: 1891968 - DNA, 15 bp, Homo sapiens
ccctagttaaattca

SEQ ID NO: 1891969 - DNA, 15 bp, Homo sapiens
cctagttaaattcaa

SEQ ID NO: 1891970 - DNA, 15 bp, Homo sapiens
ctagttaaattcaac

SEQ ID NO: 1891971 - DNA, 15 bp, Homo sapiens
tagttaaattcaact

SEQ ID NO: 1891972 - DNA, 15 bp, Homo sapiens
agttaaattcaactc

SEQ ID NO: 1891973 - DNA, 15 bp, Homo sapiens
gttaaattcaactct

SEQ ID NO: 1891974 - DNA, 15 bp, Homo sapiens
ttaaattcaactctc

SEQ ID NO: 1891975 - DNA, 15 bp, Homo sapiens
taaattcaactctcc

SEQ ID NO: 1891976 - DNA, 15 bp, Homo sapiens
aaattcaactctcca

SEQ ID NO: 1891977 - DNA, 15 bp, Homo sapiens
aattcaactctccac

SEQ ID NO: 1891978 - DNA, 15 bp, Homo sapiens
attcaactctccact

SEQ ID NO: 1891979 - DNA, 15 bp, Homo sapiens
ttcaactctccactt

SEQ ID NO: 1891980 - DNA, 15 bp, Homo sapiens
tcaactctccactta

SEQ ID NO: 1891981 - DNA, 15 bp, Homo sapiens
caactctccacttaa

SEQ ID NO: 1891982 - DNA, 15 bp, Homo sapiens
aactctccacttaat

SEQ ID NO: 1891983 - DNA, 15 bp, Homo sapiens
actctccacttaatc

SEQ ID NO: 1891984 - DNA, 15 bp, Homo sapiens
ctctccacttaatct

SEQ ID NO: 1891985 - DNA, 15 bp, Homo sapiens
tctccacttaatctg

SEQ ID NO: 1891986 - DNA, 15 bp, Homo sapiens
ctccacttaatctgt

SEQ ID NO: 1891987 - DNA, 15 bp, Homo sapiens
tccacttaatctgtg

SEQ ID NO: 1891988 - DNA, 15 bp, Homo sapiens
ccacttaatctgtgc

SEQ ID NO: 1891989 - DNA, 15 bp, Homo sapiens
cacttaatctgtgct

SEQ ID NO: 1891990 - DNA, 15 bp, Homo sapiens
acttaatctgtgctt

SEQ ID NO: 1891991 - DNA, 15 bp, Homo sapiens
cttaatctgtgcttg

SEQ ID NO: 1891992 - DNA, 15 bp, Homo sapiens
ttaatctgtgcttgt

SEQ ID NO: 1891993 - DNA, 15 bp, Homo sapiens
taatctgtgcttgta

SEQ ID NO: 1891994 - DNA, 15 bp, Homo sapiens
aatctgtgcttgtac

SEQ ID NO: 1891995 - DNA, 15 bp, Homo sapiens
atctgtgcttgtacc

SEQ ID NO: 1891996 - DNA, 15 bp, Homo sapiens
tctgtgcttgtaccc

SEQ ID NO: 1891997 - DNA, 15 bp, Homo sapiens
ctgtgcttgtaccct

SEQ ID NO: 1891998 - DNA, 15 bp, Homo sapiens
tgtgcttgtaccctt

SEQ ID NO: 1891999 - DNA, 15 bp, Homo sapiens
gtgcttgtacccttc

SEQ ID NO: 1892000 - DNA, 15 bp, Homo sapiens
tgcttgtacccttca

SEQ ID NO: 1892001 - DNA, 15 bp, Homo sapiens
gcttgtacccttcag

SEQ ID NO: 1892002 - DNA, 15 bp, Homo sapiens
cttgtacccttcagt

SEQ ID NO: 1892003 - DNA, 15 bp, Homo sapiens
ttgtacccttcagtt

SEQ ID NO: 1892004 - DNA, 15 bp, Homo sapiens
tgtacccttcagttt

SEQ ID NO: 1892005 - DNA, 15 bp, Homo sapiens
gtacccttcagttta

SEQ ID NO: 1892006 - DNA, 15 bp, Homo sapiens
tacccttcagtttat

SEQ ID NO: 1892007 - DNA, 15 bp, Homo sapiens
acccttcagtttatt

SEQ ID NO: 1892008 - DNA, 15 bp, Homo sapiens
cccttcagtttatta

SEQ ID NO: 1892009 - DNA, 15 bp, Homo sapiens
ccttcagtttattat

SEQ ID NO: 1892010 - DNA, 15 bp, Homo sapiens
cttcagtttattatg

SEQ ID NO: 1892011 - DNA, 15 bp, Homo sapiens
ttcagtttattatgg

SEQ ID NO: 1892012 - DNA, 15 bp, Homo sapiens
tcagtttattatggc

SEQ ID NO: 1892013 - DNA, 15 bp, Homo sapiens
cagtttattatggct

SEQ ID NO: 1892014 - DNA, 15 bp, Homo sapiens
agtttattatggctg

SEQ ID NO: 1892015 - DNA, 15 bp, Homo sapiens
gtttattatggctgg

SEQ ID NO: 1892016 - DNA, 15 bp, Homo sapiens
tttattatggctgga

SEQ ID NO: 1892017 - DNA, 15 bp, Homo sapiens
ttattatggctggac

SEQ ID NO: 1892018 - DNA, 15 bp, Homo sapiens
tattatggctggaca

SEQ ID NO: 1892019 - DNA, 15 bp, Homo sapiens
attatggctggacac

SEQ ID NO: 1892020 - DNA, 15 bp, Homo sapiens
ttatggctggacaca

SEQ ID NO: 1892021 - DNA, 15 bp, Homo sapiens
tatggctggacacaa

SEQ ID NO: 1892022 - DNA, 15 bp, Homo sapiens
atggctggacacaag

SEQ ID NO: 1892023 - DNA, 15 bp, Homo sapiens
tggctggacacaagc

SEQ ID NO: 1892024 - DNA, 15 bp, Homo sapiens
ggctggacacaagca

SEQ ID NO: 1892025 - DNA, 15 bp, Homo sapiens
gctggacacaagcat

SEQ ID NO: 1892026 - DNA, 15 bp, Homo sapiens
ctggacacaagcata

SEQ ID NO: 1892027 - DNA, 15 bp, Homo sapiens
tggacacaagcatac

SEQ ID NO: 1892028 - DNA, 15 bp, Homo sapiens
ggacacaagcatacg

SEQ ID NO: 1892029 - DNA, 15 bp, Homo sapiens
gacacaagcatacga

SEQ ID NO: 1892030 - DNA, 15 bp, Homo sapiens
acacaagcatacgac

SEQ ID NO: 1892031 - DNA, 15 bp, Homo sapiens
cacaagcatacgaca

SEQ ID NO: 1892032 - DNA, 15 bp, Homo sapiens
acaagcatacgacaa

SEQ ID NO: 1892033 - DNA, 15 bp, Homo sapiens
caagcatacgacaat

SEQ ID NO: 1892034 - DNA, 15 bp, Homo sapiens
aagcatacgacaatg

SEQ ID NO: 1892035 - DNA, 15 bp, Homo sapiens
agcatacgacaatgg

SEQ ID NO: 1892036 - DNA, 15 bp, Homo sapiens
gcatacgacaatgga

SEQ ID NO: 1892037 - DNA, 15 bp, Homo sapiens
catacgacaatggaa

SEQ ID NO: 1892038 - DNA, 15 bp, Homo sapiens
atacgacaatggaag

SEQ ID NO: 1892039 - DNA, 15 bp, Homo sapiens
tacgacaatggaagg

SEQ ID NO: 1892040 - DNA, 15 bp, Homo sapiens
acgacaatggaagga

SEQ ID NO: 1892041 - DNA, 15 bp, Homo sapiens
cgacaatggaaggag

SEQ ID NO: 1892042 - DNA, 15 bp, Homo sapiens
gacaatggaaggagt

SEQ ID NO: 1892043 - DNA, 15 bp, Homo sapiens
acaatggaaggagtc

SEQ ID NO: 1892044 - DNA, 15 bp, Homo sapiens
caatggaaggagtct

SEQ ID NO: 1892045 - DNA, 15 bp, Homo sapiens
aatggaaggagtctc

SEQ ID NO: 1892046 - DNA, 15 bp, Homo sapiens
atggaaggagtctca

SEQ ID NO: 1892047 - DNA, 15 bp, Homo sapiens
tggaaggagtctcac

SEQ ID NO: 1892048 - DNA, 15 bp, Homo sapiens
ggaaggagtctcact

SEQ ID NO: 1892049 - DNA, 15 bp, Homo sapiens
gaaggagtctcactt

SEQ ID NO: 1892050 - DNA, 15 bp, Homo sapiens
aaggagtctcacttt

SEQ ID NO: 1892051 - DNA, 15 bp, Homo sapiens
aggagtctcactttt

SEQ ID NO: 1892052 - DNA, 15 bp, Homo sapiens
ggagtctcacttttt

SEQ ID NO: 1892053 - DNA, 15 bp, Homo sapiens
gagtctcacttttta

SEQ ID NO: 1892054 - DNA, 15 bp, Homo sapiens
agtctcactttttat

SEQ ID NO: 1892055 - DNA, 15 bp, Homo sapiens
gtctcactttttatt

SEQ ID NO: 1892056 - DNA, 15 bp, Homo sapiens
tctcactttttattc

SEQ ID NO: 1892057 - DNA, 15 bp, Homo sapiens
ctcactttttattca

SEQ ID NO: 1892058 - DNA, 15 bp, Homo sapiens
tcactttttattcat

SEQ ID NO: 1892059 - DNA, 15 bp, Homo sapiens
cactttttattcatg

SEQ ID NO: 1892060 - DNA, 15 bp, Homo sapiens
actttttattcatgt

SEQ ID NO: 1892061 - DNA, 15 bp, Homo sapiens
ctttttattcatgtc

SEQ ID NO: 1892062 - DNA, 15 bp, Homo sapiens
tttttattcatgtcc

SEQ ID NO: 1892063 - DNA, 15 bp, Homo sapiens
ttttattcatgtcca

SEQ ID NO: 1892064 - DNA, 15 bp, Homo sapiens
tttattcatgtccat

SEQ ID NO: 1892065 - DNA, 15 bp, Homo sapiens
ttattcatgtccata

SEQ ID NO: 1892066 - DNA, 15 bp, Homo sapiens
tattcatgtccataa

SEQ ID NO: 1892067 - DNA, 15 bp, Homo sapiens
attcatgtccataaa

SEQ ID NO: 1892068 - DNA, 15 bp, Homo sapiens
ttcatgtccataaac

SEQ ID NO: 1892069 - DNA, 15 bp, Homo sapiens
tcatgtccataaacc

SEQ ID NO: 1892070 - DNA, 15 bp, Homo sapiens
catgtccataaacct

SEQ ID NO: 1892071 - DNA, 15 bp, Homo sapiens
atgtccataaacctc

SEQ ID NO: 1892072 - DNA, 15 bp, Homo sapiens
tgtccataaacctca

SEQ ID NO: 1892073 - DNA, 15 bp, Homo sapiens
gtccataaacctcaa

SEQ ID NO: 1892074 - DNA, 15 bp, Homo sapiens
tccataaacctcaag

SEQ ID NO: 1892075 - DNA, 15 bp, Homo sapiens
ccataaacctcaagt

SEQ ID NO: 1892076 - DNA, 15 bp, Homo sapiens
cataaacctcaagtg

SEQ ID NO: 1892077 - DNA, 15 bp, Homo sapiens
ataaacctcaagtgg

SEQ ID NO: 1892078 - DNA, 15 bp, Homo sapiens
taaacctcaagtggg

SEQ ID NO: 1892079 - DNA, 15 bp, Homo sapiens
aaacctcaagtgggc

SEQ ID NO: 1892080 - DNA, 15 bp, Homo sapiens
aacctcaagtgggcc

SEQ ID NO: 1892081 - DNA, 15 bp, Homo sapiens
acctcaagtgggcct

SEQ ID NO: 1892082 - DNA, 15 bp, Homo sapiens
cctcaagtgggccta

SEQ ID NO: 1892083 - DNA, 15 bp, Homo sapiens
ctcaagtgggcctaa

SEQ ID NO: 1892084 - DNA, 15 bp, Homo sapiens
tcaagtgggcctaag

SEQ ID NO: 1892085 - DNA, 15 bp, Homo sapiens
caagtgggcctaagg

SEQ ID NO: 1892086 - DNA, 15 bp, Homo sapiens
aagtgggcctaaggg

SEQ ID NO: 1892087 - DNA, 15 bp, Homo sapiens
agtgggcctaaggga

SEQ ID NO: 1892088 - DNA, 15 bp, Homo sapiens
gtgggcctaagggaa

SEQ ID NO: 1892089 - DNA, 15 bp, Homo sapiens
tgggcctaagggaaa

SEQ ID NO: 1892090 - DNA, 15 bp, Homo sapiens
gggcctaagggaaaa

SEQ ID NO: 1892091 - DNA, 15 bp, Homo sapiens
ggcctaagggaaaat

SEQ ID NO: 1892092 - DNA, 15 bp, Homo sapiens
gcctaagggaaaata

SEQ ID NO: 1892093 - DNA, 15 bp, Homo sapiens
cctaagggaaaatat

SEQ ID NO: 1892094 - DNA, 15 bp, Homo sapiens
ctaagggaaaatata

SEQ ID NO: 1892095 - DNA, 15 bp, Homo sapiens
taagggaaaatatat

SEQ ID NO: 1892096 - DNA, 15 bp, Homo sapiens
aagggaaaatatatt

SEQ ID NO: 1892097 - DNA, 15 bp, Homo sapiens
agggaaaatatatta

SEQ ID NO: 1892098 - DNA, 15 bp, Homo sapiens
gggaaaatatattat

SEQ ID NO: 1892099 - DNA, 15 bp, Homo sapiens
ggaaaatatattatt

SEQ ID NO: 1892100 - DNA, 15 bp, Homo sapiens
gaaaatatattatta

SEQ ID NO: 1892101 - DNA, 15 bp, Homo sapiens
aaaatatattattaa

SEQ ID NO: 1892102 - DNA, 15 bp, Homo sapiens
aaatatattattaat

SEQ ID NO: 1892103 - DNA, 15 bp, Homo sapiens
tatattattaatata

SEQ ID NO: 1892104 - DNA, 15 bp, Homo sapiens
atattattaatatac

SEQ ID NO: 1892105 - DNA, 15 bp, Homo sapiens
tattattaatatact

SEQ ID NO: 1892106 - DNA, 15 bp, Homo sapiens
attattaatatactt

SEQ ID NO: 1892107 - DNA, 15 bp, Homo sapiens
ttattaatatacttt

SEQ ID NO: 1892108 - DNA, 15 bp, Homo sapiens
tattaatatactttc

SEQ ID NO: 1892109 - DNA, 15 bp, Homo sapiens
attaatatactttcc

SEQ ID NO: 1892110 - DNA, 15 bp, Homo sapiens
ttaatatactttcct

SEQ ID NO: 1892111 - DNA, 15 bp, Homo sapiens
taatatactttccta

SEQ ID NO: 1892112 - DNA, 15 bp, Homo sapiens
aatatactttcctag

SEQ ID NO: 1892113 - DNA, 15 bp, Homo sapiens
atatactttcctagt

SEQ ID NO: 1892114 - DNA, 15 bp, Homo sapiens
tatactttcctagtc

SEQ ID NO: 1892115 - DNA, 15 bp, Homo sapiens
atactttcctagtct

SEQ ID NO: 1892116 - DNA, 15 bp, Homo sapiens
tactttcctagtcta

SEQ ID NO: 1892117 - DNA, 15 bp, Homo sapiens
actttcctagtctat

SEQ ID NO: 1892118 - DNA, 15 bp, Homo sapiens
ctttcctagtctatt

SEQ ID NO: 1892119 - DNA, 15 bp, Homo sapiens
tttcctagtctatta

SEQ ID NO: 1892120 - DNA, 15 bp, Homo sapiens
ttcctagtctattac

SEQ ID NO: 1892121 - DNA, 15 bp, Homo sapiens
tcctagtctattacc

SEQ ID NO: 1892122 - DNA, 15 bp, Homo sapiens
cctagtctattacca

SEQ ID NO: 1892123 - DNA, 15 bp, Homo sapiens
ctagtctattaccaa

SEQ ID NO: 1892124 - DNA, 15 bp, Homo sapiens
tagtctattaccaaa

SEQ ID NO: 1892125 - DNA, 15 bp, Homo sapiens
agtctattaccaaat

SEQ ID NO: 1892126 - DNA, 15 bp, Homo sapiens
gtctattaccaaatg

SEQ ID NO: 1892127 - DNA, 15 bp, Homo sapiens
tctattaccaaatgc

SEQ ID NO: 1892128 - DNA, 15 bp, Homo sapiens
ctattaccaaatgca

SEQ ID NO: 1892129 - DNA, 15 bp, Homo sapiens
tattaccaaatgcaa

SEQ ID NO: 1892130 - DNA, 15 bp, Homo sapiens
attaccaaatgcaat

SEQ ID NO: 1892131 - DNA, 15 bp, Homo sapiens
ttaccaaatgcaata

SEQ ID NO: 1892132 - DNA, 15 bp, Homo sapiens
taccaaatgcaatat

SEQ ID NO: 1892133 - DNA, 15 bp, Homo sapiens
accaaatgcaatatt

SEQ ID NO: 1892134 - DNA, 15 bp, Homo sapiens
ccaaatgcaatattc

SEQ ID NO: 1892135 - DNA, 15 bp, Homo sapiens
caaatgcaatattct

SEQ ID NO: 1892136 - DNA, 15 bp, Homo sapiens
aaatgcaatattctt

SEQ ID NO: 1892137 - DNA, 15 bp, Homo sapiens
atgcaatattcttct

SEQ ID NO: 1892138 - DNA, 15 bp, Homo sapiens
tgcaatattcttcta

SEQ ID NO: 1892139 - DNA, 15 bp, Homo sapiens
gcaatattcttctat

SEQ ID NO: 1892140 - DNA, 15 bp, Homo sapiens
caatattcttctatt

SEQ ID NO: 1892141 - DNA, 15 bp, Homo sapiens
aatattcttctattc

SEQ ID NO: 1892142 - DNA, 15 bp, Homo sapiens
atattcttctattca

SEQ ID NO: 1892143 - DNA, 15 bp, Homo sapiens
tattcttctattcat

SEQ ID NO: 1892144 - DNA, 15 bp, Homo sapiens
attcttctattcata

SEQ ID NO: 1892145 - DNA, 15 bp, Homo sapiens
ttcttctattcatat

SEQ ID NO: 1892146 - DNA, 15 bp, Homo sapiens
tcttctattcatatc

SEQ ID NO: 1892147 - DNA, 15 bp, Homo sapiens
cttctattcatatct

SEQ ID NO: 1892148 - DNA, 15 bp, Homo sapiens
ttctattcatatctc

SEQ ID NO: 1892149 - DNA, 15 bp, Homo sapiens
tctattcatatctca

SEQ ID NO: 1892150 - DNA, 15 bp, Homo sapiens
ctattcatatctcat

SEQ ID NO: 1892151 - DNA, 15 bp, Homo sapiens
tattcatatctcatt

SEQ ID NO: 1892152 - DNA, 15 bp, Homo sapiens
attcatatctcatta

SEQ ID NO: 1892153 - DNA, 15 bp, Homo sapiens
ttcatatctcattat

SEQ ID NO: 1892154 - DNA, 15 bp, Homo sapiens
tcatatctcattatt

SEQ ID NO: 1892155 - DNA, 15 bp, Homo sapiens
catatctcattattt

SEQ ID NO: 1892156 - DNA, 15 bp, Homo sapiens
atatctcattatttc

SEQ ID NO: 1892157 - DNA, 15 bp, Homo sapiens
tatctcattatttct

SEQ ID NO: 1892158 - DNA, 15 bp, Homo sapiens
atctcattatttctt

SEQ ID NO: 1892159 - DNA, 15 bp, Homo sapiens
tctcattatttctta

SEQ ID NO: 1892160 - DNA, 15 bp, Homo sapiens
ctcattatttcttac

SEQ ID NO: 1892161 - DNA, 15 bp, Homo sapiens
tcattatttcttacg

SEQ ID NO: 1892162 - DNA, 15 bp, Homo sapiens
cattatttcttacgt

SEQ ID NO: 1892163 - DNA, 15 bp, Homo sapiens
attatttcttacgtc

SEQ ID NO: 1892164 - DNA, 15 bp, Homo sapiens
ttatttcttacgtct

SEQ ID NO: 1892165 - DNA, 15 bp, Homo sapiens
tatttcttacgtctc

SEQ ID NO: 1892166 - DNA, 15 bp, Homo sapiens
atttcttacgtctct

SEQ ID NO: 1892167 - DNA, 15 bp, Homo sapiens
tttcttacgtctctg

SEQ ID NO: 1892168 - DNA, 15 bp, Homo sapiens
ttcttacgtctctgg

SEQ ID NO: 1892169 - DNA, 15 bp, Homo sapiens
tcttacgtctctggt

SEQ ID NO: 1892170 - DNA, 15 bp, Homo sapiens
cttacgtctctggtt

SEQ ID NO: 1892171 - DNA, 15 bp, Homo sapiens
ttacgtctctggttt

SEQ ID NO: 1892172 - DNA, 15 bp, Homo sapiens
tacgtctctggtttc

SEQ ID NO: 1892173 - DNA, 15 bp, Homo sapiens
acgtctctggtttct

SEQ ID NO: 1892174 - DNA, 15 bp, Homo sapiens
cgtctctggtttcta

SEQ ID NO: 1892175 - DNA, 15 bp, Homo sapiens
gtctctggtttctat

SEQ ID NO: 1892176 - DNA, 15 bp, Homo sapiens
tctctggtttctatt

SEQ ID NO: 1892177 - DNA, 15 bp, Homo sapiens
ctctggtttctattc

SEQ ID NO: 1892178 - DNA, 15 bp, Homo sapiens
tctggtttctattcc

SEQ ID NO: 1892179 - DNA, 15 bp, Homo sapiens
ctggtttctattccc

SEQ ID NO: 1892180 - DNA, 15 bp, Homo sapiens
tggtttctattccca

SEQ ID NO: 1892181 - DNA, 15 bp, Homo sapiens
ggtttctattcccat

SEQ ID NO: 1892182 - DNA, 15 bp, Homo sapiens
gtttctattcccata

SEQ ID NO: 1892183 - DNA, 15 bp, Homo sapiens
tttctattcccatat

SEQ ID NO: 1892184 - DNA, 15 bp, Homo sapiens
ttctattcccatatc

SEQ ID NO: 1892185 - DNA, 15 bp, Homo sapiens
tctattcccatatct

SEQ ID NO: 1892186 - DNA, 15 bp, Homo sapiens
ctattcccatatctt

SEQ ID NO: 1892187 - DNA, 15 bp, Homo sapiens
tattcccatatcttc

SEQ ID NO: 1892188 - DNA, 15 bp, Homo sapiens
attcccatatcttca

SEQ ID NO: 1892189 - DNA, 15 bp, Homo sapiens
ttcccatatcttcac

SEQ ID NO: 1892190 - DNA, 15 bp, Homo sapiens
tcccatatcttcact

SEQ ID NO: 1892191 - DNA, 15 bp, Homo sapiens
cccatatcttcactc

SEQ ID NO: 1892192 - DNA, 15 bp, Homo sapiens
ccatatcttcactct

SEQ ID NO: 1892193 - DNA, 15 bp, Homo sapiens
catatcttcactctc

SEQ ID NO: 1892194 - DNA, 15 bp, Homo sapiens
atatcttcactctca

SEQ ID NO: 1892195 - DNA, 15 bp, Homo sapiens
tatcttcactctcag

SEQ ID NO: 1892196 - DNA, 15 bp, Homo sapiens
atcttcactctcagc

SEQ ID NO: 1892197 - DNA, 15 bp, Homo sapiens
tcttcactctcagct

SEQ ID NO: 1892198 - DNA, 15 bp, Homo sapiens
cttcactctcagcta

SEQ ID NO: 1892199 - DNA, 15 bp, Homo sapiens
ttcactctcagctaa

SEQ ID NO: 1892200 - DNA, 15 bp, Homo sapiens
tcactctcagctaat

SEQ ID NO: 1892201 - DNA, 15 bp, Homo sapiens
cactctcagctaatg

SEQ ID NO: 1892202 - DNA, 15 bp, Homo sapiens
actctcagctaatga

SEQ ID NO: 1892203 - DNA, 15 bp, Homo sapiens
ctctcagctaatgac

SEQ ID NO: 1892204 - DNA, 15 bp, Homo sapiens
tctcagctaatgacc

SEQ ID NO: 1892205 - DNA, 15 bp, Homo sapiens
ctcagctaatgacct

SEQ ID NO: 1892206 - DNA, 15 bp, Homo sapiens
tcagctaatgacctt

SEQ ID NO: 1892207 - DNA, 15 bp, Homo sapiens
cagctaatgacctta

SEQ ID NO: 1892208 - DNA, 15 bp, Homo sapiens
agctaatgaccttaa

SEQ ID NO: 1892209 - DNA, 15 bp, Homo sapiens
gctaatgaccttaat

SEQ ID NO: 1892210 - DNA, 15 bp, Homo sapiens
ctaatgaccttaatt

SEQ ID NO: 1892211 - DNA, 15 bp, Homo sapiens
taatgaccttaattc

SEQ ID NO: 1892212 - DNA, 15 bp, Homo sapiens
aatgaccttaattct

SEQ ID NO: 1892213 - DNA, 15 bp, Homo sapiens
atgaccttaattctt

SEQ ID NO: 1892214 - DNA, 15 bp, Homo sapiens
tgaccttaattctta

SEQ ID NO: 1892215 - DNA, 15 bp, Homo sapiens
gaccttaattcttat

SEQ ID NO: 1892216 - DNA, 15 bp, Homo sapiens
accttaattcttatt

SEQ ID NO: 1892217 - DNA, 15 bp, Homo sapiens
ccttaattcttattt

SEQ ID NO: 1892218 - DNA, 15 bp, Homo sapiens
cttaattcttatttt

SEQ ID NO: 1892219 - DNA, 15 bp, Homo sapiens
ttaattcttatttta

SEQ ID NO: 1892220 - DNA, 15 bp, Homo sapiens
taattcttattttac

SEQ ID NO: 1892221 - DNA, 15 bp, Homo sapiens
aattcttattttact

SEQ ID NO: 1892222 - DNA, 15 bp, Homo sapiens
attcttattttactg

SEQ ID NO: 1892223 - DNA, 15 bp, Homo sapiens
ttcttattttactga

SEQ ID NO: 1892224 - DNA, 15 bp, Homo sapiens
tcttattttactgaa

SEQ ID NO: 1892225 - DNA, 15 bp, Homo sapiens
cttattttactgaaa

SEQ ID NO: 1892226 - DNA, 15 bp, Homo sapiens
ttattttactgaaaa

SEQ ID NO: 1892227 - DNA, 15 bp, Homo sapiens
tattttactgaaaaa

SEQ ID NO: 1892228 - DNA, 15 bp, Homo sapiens
attttactgaaaaaa

SEQ ID NO: 1892229 - DNA, 15 bp, Homo sapiens
ttttactgaaaaaaa

SEQ ID NO: 1892230 - DNA, 15 bp, Homo sapiens
tttactgaaaaaaaa

SEQ ID NO: 1892231 - DNA, 15 bp, Homo sapiens
ttactgaaaaaaaat

SEQ ID NO: 1892232 - DNA, 15 bp, Homo sapiens
tactgaaaaaaaata

SEQ ID NO: 1892233 - DNA, 15 bp, Homo sapiens
actgaaaaaaaatag

SEQ ID NO: 1892234 - DNA, 15 bp, Homo sapiens
ctgaaaaaaaataga

SEQ ID NO: 1892235 - DNA, 15 bp, Homo sapiens
tgaaaaaaaatagaa

SEQ ID NO: 1892236 - DNA, 15 bp, Homo sapiens
gaaaaaaaatagaag

SEQ ID NO: 1892237 - DNA, 15 bp, Homo sapiens
aaaaaaaatagaagc

SEQ ID NO: 1892238 - DNA, 15 bp, Homo sapiens
aaaaaaatagaagca

SEQ ID NO: 1892239 - DNA, 15 bp, Homo sapiens
aaaaaatagaagcaa

SEQ ID NO: 1892240 - DNA, 15 bp, Homo sapiens
aaaaatagaagcaac

SEQ ID NO: 1892241 - DNA, 15 bp, Homo sapiens
aaaatagaagcaacc

SEQ ID NO: 1892242 - DNA, 15 bp, Homo sapiens
aaatagaagcaacct

SEQ ID NO: 1892243 - DNA, 15 bp, Homo sapiens
aatagaagcaacctt

SEQ ID NO: 1892244 - DNA, 15 bp, Homo sapiens
atagaagcaacctta

SEQ ID NO: 1892245 - DNA, 15 bp, Homo sapiens
tagaagcaaccttaa

SEQ ID NO: 1892246 - DNA, 15 bp, Homo sapiens
agaagcaaccttaag

SEQ ID NO: 1892247 - DNA, 15 bp, Homo sapiens
gaagcaaccttaaga

SEQ ID NO: 1892248 - DNA, 15 bp, Homo sapiens
aagcaaccttaagag

SEQ ID NO: 1892249 - DNA, 15 bp, Homo sapiens
agcaaccttaagaga

SEQ ID NO: 1892250 - DNA, 15 bp, Homo sapiens
gcaaccttaagagaa

SEQ ID NO: 1892251 - DNA, 15 bp, Homo sapiens
caaccttaagagaac

SEQ ID NO: 1892252 - DNA, 15 bp, Homo sapiens
aaccttaagagaact

SEQ ID NO: 1892253 - DNA, 15 bp, Homo sapiens
accttaagagaactc

SEQ ID NO: 1892254 - DNA, 15 bp, Homo sapiens
ccttaagagaactcc

SEQ ID NO: 1892255 - DNA, 15 bp, Homo sapiens
cttaagagaactcct

SEQ ID NO: 1892256 - DNA, 15 bp, Homo sapiens
ttaagagaactcctt

SEQ ID NO: 1892257 - DNA, 15 bp, Homo sapiens
taagagaactccttc

SEQ ID NO: 1892258 - DNA, 15 bp, Homo sapiens
aagagaactccttca

SEQ ID NO: 1892259 - DNA, 15 bp, Homo sapiens
agagaactccttcaa

SEQ ID NO: 1892260 - DNA, 15 bp, Homo sapiens
gagaactccttcaag

SEQ ID NO: 1892261 - DNA, 15 bp, Homo sapiens
agaactccttcaagc

SEQ ID NO: 1892262 - DNA, 15 bp, Homo sapiens
gaactccttcaagct

SEQ ID NO: 1892263 - DNA, 15 bp, Homo sapiens
aactccttcaagctc

SEQ ID NO: 1892264 - DNA, 15 bp, Homo sapiens
actccttcaagctcc

SEQ ID NO: 1892265 - DNA, 15 bp, Homo sapiens
ctccttcaagctccc

SEQ ID NO: 1892266 - DNA, 15 bp, Homo sapiens
tccttcaagctccca

SEQ ID NO: 1892267 - DNA, 15 bp, Homo sapiens
ccttcaagctcccac

SEQ ID NO: 1892268 - DNA, 15 bp, Homo sapiens
cttcaagctcccacc

SEQ ID NO: 1892269 - DNA, 15 bp, Homo sapiens
ttcaagctcccaccg

SEQ ID NO: 1892270 - DNA, 15 bp, Homo sapiens
tcaagctcccaccgt

SEQ ID NO: 1892271 - DNA, 15 bp, Homo sapiens
caagctcccaccgtc

SEQ ID NO: 1892272 - DNA, 15 bp, Homo sapiens
aagctcccaccgtca

SEQ ID NO: 1892273 - DNA, 15 bp, Homo sapiens
agctcccaccgtcac

SEQ ID NO: 1892274 - DNA, 15 bp, Homo sapiens
gctcccaccgtcaca

SEQ ID NO: 1892275 - DNA, 15 bp, Homo sapiens
ctcccaccgtcacac

SEQ ID NO: 1892276 - DNA, 15 bp, Homo sapiens
tcccaccgtcacact

SEQ ID NO: 1892277 - DNA, 15 bp, Homo sapiens
cccaccgtcacactt

SEQ ID NO: 1892278 - DNA, 15 bp, Homo sapiens
ccaccgtcacactta

SEQ ID NO: 1892279 - DNA, 15 bp, Homo sapiens
caccgtcacacttac

SEQ ID NO: 1892280 - DNA, 15 bp, Homo sapiens
accgtcacacttacc

SEQ ID NO: 1892281 - DNA, 15 bp, Homo sapiens
ccgtcacacttaccc

SEQ ID NO: 1892282 - DNA, 15 bp, Homo sapiens
cgtcacacttaccca

SEQ ID NO: 1892283 - DNA, 15 bp, Homo sapiens
gtcacacttacccat

SEQ ID NO: 1892284 - DNA, 15 bp, Homo sapiens
tcacacttacccatt

SEQ ID NO: 1892285 - DNA, 15 bp, Homo sapiens
cacacttacccattt

SEQ ID NO: 1892286 - DNA, 15 bp, Homo sapiens
acacttacccattta

SEQ ID NO: 1892287 - DNA, 15 bp, Homo sapiens
cacttacccatttac

SEQ ID NO: 1892288 - DNA, 15 bp, Homo sapiens
acttacccatttacc

SEQ ID NO: 1892289 - DNA, 15 bp, Homo sapiens
cttacccatttacca

SEQ ID NO: 1892290 - DNA, 15 bp, Homo sapiens
ttacccatttaccag

SEQ ID NO: 1892291 - DNA, 15 bp, Homo sapiens
tacccatttaccagc

SEQ ID NO: 1892292 - DNA, 15 bp, Homo sapiens
acccatttaccagca

SEQ ID NO: 1892293 - DNA, 15 bp, Homo sapiens
cccatttaccagcat

SEQ ID NO: 1892294 - DNA, 15 bp, Homo sapiens
ccatttaccagcatc

SEQ ID NO: 1892295 - DNA, 15 bp, Homo sapiens
catttaccagcatct

SEQ ID NO: 1892296 - DNA, 15 bp, Homo sapiens
atttaccagcatctg

SEQ ID NO: 1892297 - DNA, 15 bp, Homo sapiens
tttaccagcatctgt

SEQ ID NO: 1892298 - DNA, 15 bp, Homo sapiens
ttaccagcatctgtg

SEQ ID NO: 1892299 - DNA, 15 bp, Homo sapiens
taccagcatctgtgc

SEQ ID NO: 1892300 - DNA, 15 bp, Homo sapiens
accagcatctgtgcc

SEQ ID NO: 1892301 - DNA, 15 bp, Homo sapiens
ccagcatctgtgcct

SEQ ID NO: 1892302 - DNA, 15 bp, Homo sapiens
cagcatctgtgccta

SEQ ID NO: 1892303 - DNA, 15 bp, Homo sapiens
agcatctgtgcctat

SEQ ID NO: 1892304 - DNA, 15 bp, Homo sapiens
gcatctgtgcctata

SEQ ID NO: 1892305 - DNA, 15 bp, Homo sapiens
catctgtgcctataa

SEQ ID NO: 1892306 - DNA, 15 bp, Homo sapiens
atctgtgcctataaa

SEQ ID NO: 1892307 - DNA, 15 bp, Homo sapiens
tctgtgcctataaat

SEQ ID NO: 1892308 - DNA, 15 bp, Homo sapiens
ctgtgcctataaatt

SEQ ID NO: 1892309 - DNA, 15 bp, Homo sapiens
tgtgcctataaattt

SEQ ID NO: 1892310 - DNA, 15 bp, Homo sapiens
gtgcctataaatttc

SEQ ID NO: 1892311 - DNA, 15 bp, Homo sapiens
tgcctataaatttca

SEQ ID NO: 1892312 - DNA, 15 bp, Homo sapiens
gcctataaatttcac

SEQ ID NO: 1892313 - DNA, 15 bp, Homo sapiens
cctataaatttcacc

SEQ ID NO: 1892314 - DNA, 15 bp, Homo sapiens
ctataaatttcacct

SEQ ID NO: 1892315 - DNA, 15 bp, Homo sapiens
tataaatttcacctt

SEQ ID NO: 1892316 - DNA, 15 bp, Homo sapiens
ataaatttcaccttc

SEQ ID NO: 1892317 - DNA, 15 bp, Homo sapiens
taaatttcaccttcc

SEQ ID NO: 1892318 - DNA, 15 bp, Homo sapiens
aaatttcaccttccc

SEQ ID NO: 1892319 - DNA, 15 bp, Homo sapiens
aatttcaccttccct

SEQ ID NO: 1892320 - DNA, 15 bp, Homo sapiens
atttcaccttccctc

SEQ ID NO: 1892321 - DNA, 15 bp, Homo sapiens
tttcaccttccctcc

SEQ ID NO: 1892322 - DNA, 15 bp, Homo sapiens
ttcaccttccctcct

SEQ ID NO: 1892323 - DNA, 15 bp, Homo sapiens
tcaccttccctcctc

SEQ ID NO: 1892324 - DNA, 15 bp, Homo sapiens
caccttccctcctct

SEQ ID NO: 1892325 - DNA, 15 bp, Homo sapiens
accttccctcctctt

SEQ ID NO: 1892326 - DNA, 15 bp, Homo sapiens
ccttccctcctctta

SEQ ID NO: 1892327 - DNA, 15 bp, Homo sapiens
cttccctcctcttac

SEQ ID NO: 1892328 - DNA, 15 bp, Homo sapiens
ttccctcctcttact

SEQ ID NO: 1892329 - DNA, 15 bp, Homo sapiens
tccctcctcttacta

SEQ ID NO: 1892330 - DNA, 15 bp, Homo sapiens
ccctcctcttactat

SEQ ID NO: 1892331 - DNA, 15 bp, Homo sapiens
cctcctcttactata

SEQ ID NO: 1892332 - DNA, 15 bp, Homo sapiens
ctcctcttactatag

SEQ ID NO: 1892333 - DNA, 15 bp, Homo sapiens
tcctcttactataga

SEQ ID NO: 1892334 - DNA, 15 bp, Homo sapiens
cctcttactatagat

SEQ ID NO: 1892335 - DNA, 15 bp, Homo sapiens
ctcttactatagatg

SEQ ID NO: 1892336 - DNA, 15 bp, Homo sapiens
tcttactatagatga

SEQ ID NO: 1892337 - DNA, 15 bp, Homo sapiens
cttactatagatgaa

SEQ ID NO: 1892338 - DNA, 15 bp, Homo sapiens
ttactatagatgaac

SEQ ID NO: 1892339 - DNA, 15 bp, Homo sapiens
tactatagatgaact

SEQ ID NO: 1892340 - DNA, 15 bp, Homo sapiens
actatagatgaactg

SEQ ID NO: 1892341 - DNA, 15 bp, Homo sapiens
ctatagatgaactgt

SEQ ID NO: 1892342 - DNA, 15 bp, Homo sapiens
tatagatgaactgtc

SEQ ID NO: 1892343 - DNA, 15 bp, Homo sapiens
atagatgaactgtca

SEQ ID NO: 1892344 - DNA, 15 bp, Homo sapiens
tagatgaactgtcag

SEQ ID NO: 1892345 - DNA, 15 bp, Homo sapiens
agatgaactgtcagg

SEQ ID NO: 1892346 - DNA, 15 bp, Homo sapiens
gatgaactgtcagga

SEQ ID NO: 1892347 - DNA, 15 bp, Homo sapiens
atgaactgtcaggac

SEQ ID NO: 1892348 - DNA, 15 bp, Homo sapiens
tgaactgtcaggaca

SEQ ID NO: 1892349 - DNA, 15 bp, Homo sapiens
gaactgtcaggacac

SEQ ID NO: 1892350 - DNA, 15 bp, Homo sapiens
aactgtcaggacacg

SEQ ID NO: 1892351 - DNA, 15 bp, Homo sapiens
actgtcaggacacgt

SEQ ID NO: 1892352 - DNA, 15 bp, Homo sapiens
ctgtcaggacacgtg

SEQ ID NO: 1892353 - DNA, 15 bp, Homo sapiens
tgtcaggacacgtgt

SEQ ID NO: 1892354 - DNA, 15 bp, Homo sapiens
gtcaggacacgtgtg

SEQ ID NO: 1892355 - DNA, 15 bp, Homo sapiens
tcaggacacgtgtgg

SEQ ID NO: 1892356 - DNA, 15 bp, Homo sapiens
caggacacgtgtggg

SEQ ID NO: 1892357 - DNA, 15 bp, Homo sapiens
aggacacgtgtggga

SEQ ID NO: 1892358 - DNA, 15 bp, Homo sapiens
ggacacgtgtgggag

SEQ ID NO: 1892359 - DNA, 15 bp, Homo sapiens
gacacgtgtgggaga

SEQ ID NO: 1892360 - DNA, 15 bp, Homo sapiens
acacgtgtgggagag

SEQ ID NO: 1892361 - DNA, 15 bp, Homo sapiens
cacgtgtgggagagc

SEQ ID NO: 1892362 - DNA, 15 bp, Homo sapiens
acgtgtgggagagca

SEQ ID NO: 1892363 - DNA, 15 bp, Homo sapiens
cgtgtgggagagcaa

SEQ ID NO: 1892364 - DNA, 15 bp, Homo sapiens
gtgtgggagagcaac

SEQ ID NO: 1892365 - DNA, 15 bp, Homo sapiens
tgtgggagagcaacc

SEQ ID NO: 1892366 - DNA, 15 bp, Homo sapiens
gtgggagagcaaccc

SEQ ID NO: 1892367 - DNA, 15 bp, Homo sapiens
tgggagagcaacccc

SEQ ID NO: 1892368 - DNA, 15 bp, Homo sapiens
gggagagcaacccct

SEQ ID NO: 1892369 - DNA, 15 bp, Homo sapiens
ggagagcaacccctt

SEQ ID NO: 1892370 - DNA, 15 bp, Homo sapiens
gagagcaaccccttc

SEQ ID NO: 1892371 - DNA, 15 bp, Homo sapiens
agagcaaccccttca

SEQ ID NO: 1892372 - DNA, 15 bp, Homo sapiens
gagcaaccccttcac

SEQ ID NO: 1892373 - DNA, 15 bp, Homo sapiens
agcaaccccttcact

SEQ ID NO: 1892374 - DNA, 15 bp, Homo sapiens
gcaaccccttcactt

SEQ ID NO: 1892375 - DNA, 15 bp, Homo sapiens
caaccccttcacttt

SEQ ID NO: 1892376 - DNA, 15 bp, Homo sapiens
aaccccttcactttg

SEQ ID NO: 1892377 - DNA, 15 bp, Homo sapiens
accccttcactttgc

SEQ ID NO: 1892378 - DNA, 15 bp, Homo sapiens
ccccttcactttgca

SEQ ID NO: 1892379 - DNA, 15 bp, Homo sapiens
cccttcactttgcac

SEQ ID NO: 1892380 - DNA, 15 bp, Homo sapiens
ccttcactttgcact

SEQ ID NO: 1892381 - DNA, 15 bp, Homo sapiens
cttcactttgcactg

SEQ ID NO: 1892382 - DNA, 15 bp, Homo sapiens
ttcactttgcactgg

SEQ ID NO: 1892383 - DNA, 15 bp, Homo sapiens
tcactttgcactgga

SEQ ID NO: 1892384 - DNA, 15 bp, Homo sapiens
cactttgcactggag

SEQ ID NO: 1892385 - DNA, 15 bp, Homo sapiens
actttgcactggagc

SEQ ID NO: 1892386 - DNA, 15 bp, Homo sapiens
ctttgcactggagcc

SEQ ID NO: 1892387 - DNA, 15 bp, Homo sapiens
tttgcactggagccc

SEQ ID NO: 1892388 - DNA, 15 bp, Homo sapiens
ttgcactggagccca

SEQ ID NO: 1892389 - DNA, 15 bp, Homo sapiens
tgcactggagcccat

SEQ ID NO: 1892390 - DNA, 15 bp, Homo sapiens
gcactggagcccatg

SEQ ID NO: 1892391 - DNA, 15 bp, Homo sapiens
cactggagcccatgc

SEQ ID NO: 1892392 - DNA, 15 bp, Homo sapiens
actggagcccatgcc

SEQ ID NO: 1892393 - DNA, 15 bp, Homo sapiens
ctggagcccatgccc

SEQ ID NO: 1892394 - DNA, 15 bp, Homo sapiens
tggagcccatgccca

SEQ ID NO: 1892395 - DNA, 15 bp, Homo sapiens
ggagcccatgcccac

SEQ ID NO: 1892396 - DNA, 15 bp, Homo sapiens
gagcccatgcccacc

SEQ ID NO: 1892397 - DNA, 15 bp, Homo sapiens
agcccatgcccaccc

SEQ ID NO: 1892398 - DNA, 15 bp, Homo sapiens
gcccatgcccaccca

SEQ ID NO: 1892399 - DNA, 15 bp, Homo sapiens
cccatgcccacccaa

SEQ ID NO: 1892400 - DNA, 15 bp, Homo sapiens
ccatgcccacccaag

SEQ ID NO: 1892401 - DNA, 15 bp, Homo sapiens
catgcccacccaaga

SEQ ID NO: 1892402 - DNA, 15 bp, Homo sapiens
atgcccacccaagac

SEQ ID NO: 1892403 - DNA, 15 bp, Homo sapiens
tgcccacccaagaca

SEQ ID NO: 1892404 - DNA, 15 bp, Homo sapiens
gcccacccaagacag

SEQ ID NO: 1892405 - DNA, 15 bp, Homo sapiens
cccacccaagacagt

SEQ ID NO: 1892406 - DNA, 15 bp, Homo sapiens
ccacccaagacagtg

SEQ ID NO: 1892407 - DNA, 15 bp, Homo sapiens
cacccaagacagtgc

SEQ ID NO: 1892408 - DNA, 15 bp, Homo sapiens
acccaagacagtgct

SEQ ID NO: 1892409 - DNA, 15 bp, Homo sapiens
cccaagacagtgctc

SEQ ID NO: 1892410 - DNA, 15 bp, Homo sapiens
ccaagacagtgctcc

SEQ ID NO: 1892411 - DNA, 15 bp, Homo sapiens
caagacagtgctcca

SEQ ID NO: 1892412 - DNA, 15 bp, Homo sapiens
aagacagtgctccaa

SEQ ID NO: 1892413 - DNA, 15 bp, Homo sapiens
agacagtgctccaac

SEQ ID NO: 1892414 - DNA, 15 bp, Homo sapiens
gacagtgctccaaca

SEQ ID NO: 1892415 - DNA, 15 bp, Homo sapiens
acagtgctccaacac

SEQ ID NO: 1892416 - DNA, 15 bp, Homo sapiens
cagtgctccaacact

SEQ ID NO: 1892417 - DNA, 15 bp, Homo sapiens
agtgctccaacactg

SEQ ID NO: 1892418 - DNA, 15 bp, Homo sapiens
gtgctccaacactgt

SEQ ID NO: 1892419 - DNA, 15 bp, Homo sapiens
tgctccaacactgta

SEQ ID NO: 1892420 - DNA, 15 bp, Homo sapiens
gctccaacactgtat

SEQ ID NO: 1892421 - DNA, 15 bp, Homo sapiens
ctccaacactgtatg

SEQ ID NO: 1892422 - DNA, 15 bp, Homo sapiens
tccaacactgtatga

SEQ ID NO: 1892423 - DNA, 15 bp, Homo sapiens
ccaacactgtatgat

SEQ ID NO: 1892424 - DNA, 15 bp, Homo sapiens
caacactgtatgatt

SEQ ID NO: 1892425 - DNA, 15 bp, Homo sapiens
aacactgtatgatta

SEQ ID NO: 1892426 - DNA, 15 bp, Homo sapiens
acactgtatgattaa

SEQ ID NO: 1892427 - DNA, 15 bp, Homo sapiens
cactgtatgattaaa

SEQ ID NO: 1892428 - DNA, 15 bp, Homo sapiens
actgtatgattaaat

SEQ ID NO: 1892429 - DNA, 15 bp, Homo sapiens
ctgtatgattaaatt

SEQ ID NO: 1892430 - DNA, 15 bp, Homo sapiens
tgtatgattaaattt

SEQ ID NO: 1892431 - DNA, 15 bp, Homo sapiens
gtatgattaaatttt

SEQ ID NO: 1892432 - DNA, 15 bp, Homo sapiens
tatgattaaattttt

SEQ ID NO: 1892433 - DNA, 15 bp, Homo sapiens
atgattaaatttttc

SEQ ID NO: 1892434 - DNA, 15 bp, Homo sapiens
tgattaaatttttct

SEQ ID NO: 1892435 - DNA, 15 bp, Homo sapiens
gattaaatttttctt

SEQ ID NO: 1892436 - DNA, 15 bp, Homo sapiens
attaaatttttcttc

SEQ ID NO: 1892437 - DNA, 15 bp, Homo sapiens
ttaaatttttcttct

SEQ ID NO: 1892438 - DNA, 15 bp, Homo sapiens
taaatttttcttctc

SEQ ID NO: 1892439 - DNA, 15 bp, Homo sapiens
aaatttttcttctct

SEQ ID NO: 1892440 - DNA, 15 bp, Homo sapiens
aatttttcttctcta

SEQ ID NO: 1892441 - DNA, 15 bp, Homo sapiens
tttttcttctctatg

SEQ ID NO: 1892442 - DNA, 15 bp, Homo sapiens
ttttcttctctatgg

SEQ ID NO: 1892443 - DNA, 15 bp, Homo sapiens
tttcttctctatgga

SEQ ID NO: 1892444 - DNA, 15 bp, Homo sapiens
ttcttctctatggaa

SEQ ID NO: 1892445 - DNA, 15 bp, Homo sapiens
tcttctctatggaaa

SEQ ID NO: 1892446 - DNA, 15 bp, Homo sapiens
cttctctatggaaac

SEQ ID NO: 1892447 - DNA, 15 bp, Homo sapiens
ttctctatggaaact

SEQ ID NO: 1892448 - DNA, 15 bp, Homo sapiens
tctctatggaaactt

SEQ ID NO: 1892449 - DNA, 15 bp, Homo sapiens
ctctatggaaacttt

SEQ ID NO: 1892450 - DNA, 15 bp, Homo sapiens
tctatggaaacttta

SEQ ID NO: 1892451 - DNA, 15 bp, Homo sapiens
ctatggaaactttac

SEQ ID NO: 1892452 - DNA, 15 bp, Homo sapiens
tatggaaactttacc

SEQ ID NO: 1892453 - DNA, 15 bp, Homo sapiens
atggaaactttacca

SEQ ID NO: 1892454 - DNA, 15 bp, Homo sapiens
tggaaactttaccat

SEQ ID NO: 1892455 - DNA, 15 bp, Homo sapiens
ggaaactttaccatc

SEQ ID NO: 1892456 - DNA, 15 bp, Homo sapiens
gaaactttaccatca

SEQ ID NO: 1892457 - DNA, 15 bp, Homo sapiens
aaactttaccatcag

SEQ ID NO: 1892458 - DNA, 15 bp, Homo sapiens
aactttaccatcagc

SEQ ID NO: 1892459 - DNA, 15 bp, Homo sapiens
actttaccatcagcc

SEQ ID NO: 1892460 - DNA, 15 bp, Homo sapiens
ctttaccatcagcct

SEQ ID NO: 1892461 - DNA, 15 bp, Homo sapiens
tttaccatcagccta

SEQ ID NO: 1892462 - DNA, 15 bp, Homo sapiens
ttaccatcagcctaa

SEQ ID NO: 1892463 - DNA, 15 bp, Homo sapiens
taccatcagcctaaa

SEQ ID NO: 1892464 - DNA, 15 bp, Homo sapiens
accatcagcctaaag

SEQ ID NO: 1892465 - DNA, 15 bp, Homo sapiens
ccatcagcctaaagg

SEQ ID NO: 1892466 - DNA, 15 bp, Homo sapiens
catcagcctaaaggc

SEQ ID NO: 1892467 - DNA, 15 bp, Homo sapiens
atcagcctaaaggca
